(19) United States
(12) Patent Application Publication
(10) Pub. No.: US 2015/0159161 A1
(43) Pub. Date: Jun. 11, 2015

(54) COMPOSITIONS AND METHODS FOR MODULATING PTEN EXPRESSION

(71) Applicants: RaNA Therapeutics, Inc., Cambridge, MA (US); The General Hospital Corporation d/b/a Massachusetts General Hospital, Boston, MA (US)

(72) Inventors: Arthur M. Krieg, Cambridge, MA (US); Romesh Subramanian, Framingham, MA (US); James McSwiggen, Arlington, MA (US); Jeannie T. Lee, Boston, MA (US)

(73) Assignees: RaNA Therapeutics, Inc., Cambridge, MA (US); The General Hospital Corporation d/b/a Massachusetts General Hospital, Boston, MA (US)

(21) Appl. No.: 14/401,227

(22) PCT Filed: May 16, 2013
(86) PCT No.: PCT/US2013/041389

§ 371 Date: Nov. 14, 2014

Related U.S. Application Data
(60) Provisional application No. 61/648,041, filed on May 16, 2012.
(60) Provisional application No. 61/785,885, filed on Mar. 14, 2013.

(51) Int. Cl. C12N 15/113

(52) U.S. Cl. CPC C12N 15/1137; C12N 2310/31; C12N 2310/351; C12N 2310/3231; C12N 2310/321

(57) ABSTRACT

Aspects of the invention provide single stranded oligonucleotides for activating or enhancing expression of PTEN. Further aspects provide compositions and kits comprising single stranded oligonucleotides for activating or enhancing expression of PTEN. Methods for modulating expression of PTEN using the single stranded oligonucleotides are also provided. Further aspects of the invention provide methods for selecting a candidate oligonucleotide for activating or enhancing expression of PTEN.

### CROSS-REFERENCE TO RELATED APPLICATIONS

[0001] This application claims the benefit under 35 U.S.C. §119(e) of U.S. Provisional Application No. 61/785,885, entitled “COMPOSITIONS AND METHODS FOR MODULATING PTEN EXPRESSION”, filed Mar. 14, 2013 and U.S. Provisional Application No. 61/648,041, entitled “COMPOSITIONS AND METHODS FOR MODULATING PTEN EXPRESSION”, filed May 16, 2012, each of which is incorporated herein by reference in its entirety.

### FIELD OF THE INVENTION

[0002] The invention relates to oligonucleotide based compositions, as well as methods of using oligonucleotide based compositions for treating disease.

### BACKGROUND OF THE INVENTION

[0003] Cancer includes a multitude of diseases characterized by uncontrolled growth of cells in an individual, which can ultimately result in morbidity and mortality. In 2008, over 7.6 million people died from cancer worldwide, accounting for approximately 13% of all deaths in the world. Cancer is one of the highest priority public health concerns, with over 12 million cases in the United States alone causing an economic impact of over 225 billion dollars in direct and indirect medical costs.

[0004] Phosphatase and tensin homolog (PTEN) is one of the most common tumor suppressors involved in the development of cancer. PTEN controls cell growth and apoptosis, as well as genomic instability, cell migration, and metabolism. Mutations in the PTEN gene cause inactivation of PTEN protein and/or reduction in levels of PTEN protein, resulting in uncontrolled cell growth that leads to cancer. PTEN mutations occur at high frequency in many cancers, making it an important target for cancer treatment.

### SUMMARY OF THE INVENTION

[0005] Aspects of the invention disclosed herein provide methods and compositions that are useful for upregulating PTEN in cells. In some embodiments, single stranded oligonucleotides are provided that target a PRC2-associated region of a PTEN gene (e.g., human PTEN) and thereby cause upregulation of the gene. In some embodiments, single stranded oligonucleotides are provided that target a PRC2-associated region of the gene encoding PTEN. In some embodiments, these single stranded oligonucleotides activate or enhance expression of PTEN by relieving or preventing PRC2 mediated repression of PTEN. Aspects of the invention disclosed herein, provide methods and compositions that are useful for upregulating certain tumor suppressor genes. In some embodiments, the methods and compositions for upregulating PTEN expression disclosed herein provide alternative approaches for treating cancer, such as prostate or breast cancer.

[0006] Further aspects of the invention provide methods for selecting oligonucleotides for activating or enhancing expression of PTEN. In some embodiments, methods are provided for selecting a set of oligonucleotides that is enriched in candidates (e.g., compared with a random selection of oligonucleotides) for activating or enhancing expression of PTEN. Accordingly, the methods may be used to establish sets of clinical candidates that are enriched in oligonucleotides that activate or enhance expression of PTEN. Such libraries may be utilized, for example, to identify lead oligonucleotides for developing therapeutics to treat PTEN. Furthermore, in some embodiments, oligonucleotide chemistries are provided that are useful for controlling the pharmacokinetics, biodistribution, bioavailability and/or efficacy of the single stranded oligonucleotides for activating expression of PTEN.

[0007] According to some aspects of the invention single stranded oligonucleotides are provided that have a region of complementarity that is complementarty with (e.g., at least 8 consecutive nucleotides of) a PRC2-associated region of a PTEN gene, e.g., a PRC2-associated region of the nucleotide sequence set forth as SEQ ID NO: 1 or 2. In some embodiments, the oligonucleotide has at least one of the following features: a) a sequence that is 5′X-Y-Z, in which X is any nucleotide and in which X is at the 5′ end of the oligonucleotide, Y is a nucleotide sequence of 6 nucleotides in length that is not a human seed sequence of a microRNA, and Z is a nucleotide sequence of 1 to 23 nucleotides in length; b) a sequence that does not comprise three or more consecutive guanosine nucleotides; c) a sequence that has less than a threshold level of sequence identity with every sequence of nucleotides, of equivalent length to the second nucleotide sequence, that are between 50 kilobases upstream of a 5′-end of an off-target gene and 50 kilobases downstream of a 3′-end of the off-target gene; d) a sequence that is complementary to a PRC2-associated region that encodes an RNA that forms a secondary structure comprising at least two single stranded loops; and e) a sequence that has greater than 60% G-C content. In some embodiments, the single stranded oligonucleotide has at least two of features a), b), c), d), and e), each independently selected. In some embodiments, the single stranded oligonucleotide has at least three of features a), b), c), d), and e), each independently selected. In some embodiments, the single stranded oligonucleotide has at least four of features a), b), c), d), and e), each independently selected. In some embodiments, the single stranded oligonucleotide has each of features a), b), c), d), and e). In certain embodiments, the oligonucleotide has the sequence 5′X-Y-Z, in which the oligonucleotide is 8-50 nucleotides in length.

[0008] According to some aspects of the invention, single stranded oligonucleotides are provided that have a sequence X-Y-Z, in which X is any nucleotide, Y is a nucleotide sequence of 6 nucleotides in length that is not a seed sequence of a human microRNA, and Z is a nucleotide sequence of 1 to 23 nucleotides in length, in which the single stranded oligonucleotide is complementary with a PRC2-associated region of a PTEN gene, e.g., a PRC2-associated region of the nucleotide sequence set forth as SEQ ID NO: 1 or 2. In some aspects of the invention, single stranded oligonucleotides are provided that have a sequence 5′-X-Y-Z, in which X is any nucleotide, Y is a nucleotide sequence of 6 nucleotides in length that is not a seed sequence of a human microRNA, and Z is a nucleotide sequence of 1 to 23 nucleotides in length, in which the single stranded oligonucleotide is complementary with at least 8 consecutive nucleotides of a PRC2-associated region of a PTEN gene, e.g., a PRC2-associated region of the nucleotide sequence set forth as SEQ ID NO: 1 or 2. In some embodiments, Y is a sequence selected from Table 1. In some embodiments, the PRC2-associated region is a sequence listed in any one of SEQ ID NOS: 5 to 148.

[0009] In some embodiments, the single stranded oligonucleotide comprises a nucleotide sequence as set forth in any one of SEQ ID NOS: 149 to 89025, or a fragment thereof that is at least 8 nucleotides. In some embodiments, the single stranded oligonucleotide comprises a nucleotide sequence as set forth in any one of SEQ ID NOS: 149 to 89025, in which the 5′ end of the nucleotide sequence provided is the 5′ end of the oligonucleotide. In some embodiments, the region of complementarity (e.g., the at least 8 consecutive nucleotides) is also present within the nucleotide sequence set forth as SEQ ID NO: 3 or 4.

[0010] In some embodiments, the single stranded oligonucleotide comprises a nucleotide sequence as set forth in any one of SEQ ID NOS: 149 to 89025. In some embodiments, the single stranded oligonucleotide comprises a fragment of at least 8 nucleotides of a nucleotide sequence as set forth in any one of SEQ ID NOS: 149 to 89025.

[0011] In some embodiments, the PRC2-associated region is a sequence listed in any one of SEQ ID NOS: 5 to 118. In some embodiments, the single stranded oligonucleotide comprises a nucleotide sequence as set forth in any one of SEQ ID NOS: 149 to 63340, 89008 to 89021, or 89024 to 89025 or a fragment thereof that is at least 8 nucleotides. In some embodiments, the single stranded oligonucleotide comprises a nucleotide sequence as set forth in any one of SEQ ID NOS: 149 to 63340, 89008 to 89021, or 89024 to 89025, wherein the 5′ end of the nucleotide sequence provided in any one of SEQ ID NOS: 149 to 63340, 89008 to 89021, or 89024 to 89025 is the 5′ end of the oligonucleotide. In some embodiments, the at least 8 consecutive nucleotides are also present within the nucleotide sequence set forth as SEQ ID NO: 3.

[0012] In some embodiments, the PRC2-associated region is a sequence listed in any one of SEQ ID NOS: 119 to 148. In some embodiments, the single stranded oligonucleotide comprises a nucleotide sequence as set forth in any one of SEQ ID NOS: 63196 to 89007 or 89020 to 89025 or a fragment thereof that is at least 8 nucleotides. In some embodiments, the single stranded oligonucleotide comprises a nucleotide sequence as set forth in any one of SEQ ID NOS: 63196 to 89007 or 89020 to 89025, wherein the 5′ end of the nucleotide sequence provided in any one of SEQ ID NOS: 63196 to 89007 or 89020 to 89025 is the 5′ end of the oligonucleotide. In some embodiments, the at least 8 consecutive nucleotides are present within the nucleotide sequence set forth as SEQ ID NO: 4.

[0013] In some embodiments, a single stranded oligonucleotide comprises a nucleotide sequence as set forth in Table 4. In some embodiments, the single stranded oligonucleotide comprises a fragment of at least 8 nucleotides of a nucleotide sequence as set forth in Table 4. In some embodiments, a single stranded oligonucleotide consists of a nucleotide sequence as set forth in Table 4.

[0014] In some embodiments, the single stranded oligonucleotide does not comprise three or more consecutive guanosine nucleotides. In some embodiments, the single stranded oligonucleotide does not comprise four or more consecutive guanosine nucleotides.

[0015] In some embodiments, the single stranded oligonucleotide is 8 to 30 nucleotides in length. In some embodiments, the single stranded oligonucleotide is up to 50 nucleotides in length. In some embodiments, the single stranded oligonucleotide is 8 to 10 nucleotides in length and all but 1, 2, or 3 of the nucleotides of the complementary sequence of the PRC2-associated region are cytosine or guanosine nucleotides.

[0016] In some embodiments, the single stranded oligonucleotide is complementary with at least 8 consecutive nucleotides of a PRC2-associated region of a PTEN gene, e.g., a PRC2-associated region of a nucleotide sequence set forth as SEQ ID NO: 1 or 2, in which the nucleotide sequence of the single stranded oligonucleotide comprises one or more of a nucleotide sequence selected from the group consisting of

[0017] (a) (X)Xxxxxx, (X)xXxxxx, (X)xxXxxx, (X)xxxXxx, (X)xxxxXx and (X)xxxxxX,

[0018] (b) (X)XXxxxx, (X)XxXxxx, (X)XxxXxx, (X)XxxxXx, (X)XxxxxX, (X)xXXxxx, (X)xXxXxx, (X)xXxxXx, (X)xXxxxX, (X)xxXXxx, (X)xxXxXx, (X)xxXxxX, (X)xxxXXx, (X)xxxXxX and (X)xxxxXX,

[0019] (c) (X)XXXxxx, (X)xXXXxx, (X)xxXXXx, (X)xxxXXX, (X)XXxXxx, (X)XXxxXx, (X)XXxxxX, (X)xXXxXx, (X)xXXxxX, (X)xxXXxX, (X)XxXXxx, (X)XxxXXx (X)XxxxXX, (X)xXxXXx, (X)xXxxXX, (X)xxXxXX, (X)xXxXxX and (X)XxXxXx, (d) (X)xxXXX, (X)xXxXXX, (X)xXXxXX, (X)xXXXxX, (X)xXXXXx,

[0020] (X)XxxXXXX, (X)XxXxXX, (X)XxXXxX, (X)XxXXx, (X)XXxxXX, (X)XXxXxX, (X)XXxXXx, (X)XXXxxX, (X)XXXxXx, and (X)XXXXxx,

[0021] (e) (X)xXXXXX, (X)XxXXXX, (X)XXxXXX, (X)XXXxXX, (X)XXXXxX and (X)XXXXXx, and

[0022] (f) XXXXXX, XxXXXXX, XXxXXXX, XXXxXXX, XXXXxXX, XXXXXxX and XXXXXXx, wherein “X” denotes a nucleotide analogue, (X) denotes an optional nucleotide analogue, and “x” denotes a DNA or RNA nucleotide unit. In some embodiments, at least one nucleotide of the oligonucleotide is a nucleotide analogue. In some embodiments, the at least one nucleotide analogue results in an increase in Tm of the oligonucleotide in a range of 1 to 5° C. compared with an oligonucleotide that does not have the at least one nucleotide analogue.

[0023] In some embodiments, at least one nucleotide of the oligonucleotide comprises a 2′ O-methyl. In some embodiments, each nucleotide of the oligonucleotide comprises a 2′ O-methyl. In some embodiments, the oligonucleotide comprises at least one ribonucleotide, at least one deoxyribonucleotide, or at least one bridged nucleotide. In some embodiments, the bridged nucleotide is a LNA nucleotide, a cEt nucleotide or a ENA modified nucleotide. In some embodiments, each nucleotide of the oligonucleotide is a LNA nucleotide.

[0024] In some embodiments, the nucleotides of the oligonucleotide comprise alternating deoxyribonucleotides and 2′-fluoro-deoxyribonucleotides. In some embodiments, the nucleotides of the oligonucleotide comprise alternating deoxyribonucleotides and 2′-O-methyl nucleotides. In some embodiments, the nucleotides of the oligonucleotide comprise alternating deoxyribonucleotides and ENA nucleotide analogues. In some embodiments, the nucleotides of the oligonucleotide comprise alternating deoxyribonucleotides and LNA nucleotides. In some embodiments, the 5′ nucleotide of the oligonucleotide is a deoxyribonucleotide. In some embodiments, the nucleotides of the oligonucleotide comprise alternating LNA nucleotides and 2′-O-methyl nucleotides. In some embodiments, the 5′ nucleotide of the oligonucleotide is a LNA nucleotide. In some embodiments, the nucleotides of the oligonucleotide comprise deoxyribonucleotides flanked by at least one LNA nucleotide on each of the 5′ and 3′ ends of the deoxyribonucleotides.

[0025] In some embodiments, the single stranded oligonucleotide comprises modified internucleotide linkages (e.g., phosphorothioate internucleotide linkages or other linkages) between at least two, at least three, at least four, at least five or more nucleotides. In some embodiments, the single stranded oligonucleotide comprises modified internucleotide linkages (e.g., phosphorothioate internucleotide linkages or other linkages) between all nucleotides.

[0026] In some embodiments, the nucleotide at the 3′ position of the oligonucleotide has a 3′ hydroxyl group. In some embodiments, the nucleotide at the 3′ position of the oligonucleotide has a 3′ thiophosphate. In some embodiments, the single stranded oligonucleotide has a biotin moiety or other moiety conjugated to its 5′ or 3′ nucleotide. In some embodiments, the single stranded oligonucleotide has cholesterol, Vitamin A, folate, sigma receptor ligands, aptamers, peptides, such as CPP, hydrophobic molecules, such as lipids, ASGPR or dynamic polyconjugates and variants thereof at its 5′ or 3′ end.

[0027] According to some aspects of the invention compositions are provided that comprise any of the oligonucleotides disclosed herein, and a carrier. In some embodiments, compositions are provided that comprise any of the oligonucleotides in a buffered solution. In some embodiments, the oligonucleotide is conjugated to the carrier. In some embodiments, the carrier is a peptide. In some embodiments, the carrier is a steroid. According to some aspects of the invention pharmaceutical compositions are provided that comprise any of the oligonucleotides disclosed herein, and a pharmaceutically acceptable carrier.

[0028] According to other aspects of the invention, kits are provided that comprise a container housing any of the compositions disclosed herein.

[0029] According to some aspects of the invention, methods of increasing expression of PTEN in a cell are provided. In some embodiments, the methods involve delivering any one or more of the single stranded oligonucleotides disclosed herein into the cell. In some embodiments, delivery of the single stranded oligonucleotide into the cell results in a level of expression of PTEN that is greater (e.g., at least 50% greater) than a level of expression of PTEN in a control cell that does not comprise the single stranded oligonucleotide.

[0030] According to some aspects of the invention, methods of increasing levels of PTEN in a subject are provided. According to some aspects of the invention, methods of treating a condition (e.g., cancer) associated with decreased levels of PTEN in a subject are provided. In some embodiments, the methods involve administering any one or more of the single stranded oligonucleotides disclosed herein to the subject.

### BRIEF DESCRIPTION OF DRAWINGS

[0031] FIG. 1 is a graph depecting the level of PTEN expression in HepG2 cells treated with oligos relative to cells receiving no oligos. The PTEN expression was measured by pRTPCR for oligos named PTEN-41 to PTEN-70 as set forth in Table 4. The oligo concentration was 30 nM and the time of the experiment was 48 hours. The housekeeping gene used for the qRTPCR control was PPIB.

[0032] FIG. 2 is a graph depecting the level of PTEN expression in HepG2 cells treated with oligos relative to cells receiving no oligos. The PTEN expression was measured by pRTPCR for oligos named PTEN-71 to PTEN-100 as set forth in Table 4. The oligo concentration was 30 nM and the time of the experiment was 48 hours. The housekeeping gene used for the qRTPCR control was PPIB.

### BRIEF DESCRIPTION OF TABLES

[0033] Table 1: Hexamers that are not seed sequences of human miRNAs

[0034] Table 2: Oligonucleotide sequences made for testing in the lab. RQ (column 3) and RQ SE (column 4) shows the activity of the oligo relative to a control well (usually carrier alone) and the standard error or the triplicate replicates of the experiment. [oligo] is shown in nanomolar for in vitro experiments and in milligrams per kilogram of body weight for in vivo experiments. The sequence of each oligonucleotide, including any modified nucleotides, is shown in Table 4.

[0035] Table 3: A listing of oligonucleotide modifications

[0036] Table 4: Formatted oligonucleotide sequences made for testing showing nucleotide modifications. The table shows the sequence of the modified nucleotides, where lnaX represents an LNA nucleotide with 3′ phosphorothioate linkage, omeX is a 2′-O-methyl nucleotide, dX is a deoxy nucleotide. An s at the end of a nucleotide code indicates that the nucleotide had a 3′ phosphorothioate linkage. The “-Sup” at the end of the sequence marks the fact that the 3′ end lacks either a phosphate or thiophosphate on the 3′ linkage. The Formatted Sequence column shows the sequence of the oligonucleotide, including modified nucleotides, for the oligonucleotides tested in Table 2.

[0037] Table 5: Cell lines

### DETAILED DESCRIPTION OF CERTAIN EMBODIMENTS OF THE INVENTION

[0038] Aspects of the invention provided herein relate to the discovery of polycomb repressive complex 2 (PRC2)-interacting RNAs. Polycomb repressive complex 2 (PRC2) is a histone methyltransferase and a known epigenetic regulator involved in silencing of genomic regions through methylation of histone H3. Among other functions, PRC2 interacts with long noncoding RNAs (lncRNAs), such as RepA, Xist, and Tsix, to catalyze trimethylation of histone H3-lysine27. PRC2 contains four subunits, Eed, Suz12, RbAp48, and Ezh2. Aspects of the invention relate to the recognition that single stranded oligonucleotides that bind to PRC2-associated regions of RNAs (e.g., lncRNAs) that are expressed from within a genomic region that encompasses or that is in functional proximity to the PTEN gene can induce or enhance expression of PTEN. In some embodiments, this upregulation is believed to result from inhibition of PRC2 mediated repression of PTEN.

[0039] As used herein, the term “PRC2-associated region” refers to a region of a nucleic acid that comprises or encodes a sequence of nucleotides that interact directly or indirectly with a component of PRC2. A PRC2-associated region may be present in a RNA (e.g., a long non-coding RNA (lncRNA)) that that interacts with a PRC2. A PRC2-associated region may be present in a DNA that encodes an RNA that interacts with PRC2. In some cases, the PRC2-associated region is equivalently referred to as a PRC2-interacting region.

[0040] In some embodiments, a PRC2-associated region is a region of an RNA that crosslinks to a component of PRC2 in response to in situ ultraviolet irradiation of a cell that expresses the RNA, or a region of genomic DNA that encodes that RNA region. In some embodiments, a PRC2-associated region is a region of an RNA that immunoprecipitates with an antibody that targets a component of PRC2, or a region of genomic DNA that encodes that RNA region. In some embodiments, a PRC2-associated region is a region of an RNA that immunoprecipitates with an antibody that binds specifically to SUZ12, EED, EZH2 or RBBP4 (which as noted above are components of PRC2), or a region of genomic DNA that encodes that RNA region.

[0041] In some embodiments, a PRC2-associated region is a region of an RNA that is protected from nucleases (e.g., RNases) in an RNA-immunoprecipitation assay that employs an antibody that targets a component of PRC2, or a region of genomic DNA that encodes that protected RNA region. In some embodiments, a PRC2-associated region is a region of an RNA that is protected from nucleases (e.g., RNases) in an RNA-immunoprecipitation assay that employs an antibody that targets SUZ12, EED, EZH2 or RBBP4, or a region of genomic DNA that encodes that protected RNA region.

[0042] In some embodiments, a PRC2-associated region is a region of an RNA within which occur a relatively high frequency of sequence reads in a sequencing reaction of products of an RNA-immunoprecipitation assay that employs an antibody that targets a component of PRC2, or a region of genomic DNA that encodes that RNA region. In some embodiments, a PRC2-associated region is a region of an RNA within which occur a relatively high frequency of sequence reads in a sequencing reaction of products of an RNA-immunoprecipitation assay that employs an antibody that binds specifically to SUZ12, EED, EZH2 or RBBP4, or a region of genomic DNA that encodes that protected RNA region. In such embodiments, the PRC2-associated region may be referred to as a “peak.”

[0043] In some embodiments, a PRC2-associated region comprises a sequence of 40 to 60 nucleotides that interact with PRC2 complex. In some embodiments, a PRC2-associated region comprises a sequence of 40 to 60 nucleotides that encode an RNA that interacts with PRC2. In some embodiments, a PRC2-associated region comprises a sequence of up to 5 kb in length that comprises a sequence (e.g., of 40 to 60 nucleotides) that interacts with PRC2. In some embodiments, a PRC2-associated region comprises a sequence of up to 5 kb in length within which an RNA is encoded that has a sequence (e.g., of 40 to 60 nucleotides) that is known to interact with PRC2. In some embodiments, a PRC2-associated region comprises a sequence of about 4 kb in length that comprise a sequence (e.g., of 40 to 60 nucleotides) that interacts with PRC2. In some embodiments, a PRC2-associated region comprises a sequence of about 4 kb in length within which an RNA is encoded that includes a sequence (e.g., of 40 to 60 nucleotides) that is known to interact with PRC2. In some embodiments, a PRC2-associated region has a sequence as set forth in any one of SEQ ID NOS: 5 to 148.

[0044] In some embodiments, single stranded oligonucleotides are provided that specifically bind to, or are complementary to, a PRC2-associated region in a genomic region that encompasses or that is in proximity to the PTEN gene. In some embodiments, single stranded oligonucleotides are provided that specifically bind to, or are complementary to, a PRC2-associated region that has a sequence as set forth in any one of SEQ ID NOS: 5 to 148. In some embodiments, single stranded oligonucleotides are provided that specifically bind to, or are complementary to, a PRC2-associated region that has a sequence as set forth in any one of SEQ ID NOS: 5 to 148 combined with up to 2 kb, up to 5 kb, or up to 10 kb of flanking sequences from a corresponding genomic region to which these SEQ IDs map (e.g., in a human genome). In some embodiments, single stranded oligonucleotides have a sequence as set forth in any one of SEQ ID NOS: 149 to 89025. In some embodiments, single stranded oligonucleotides have a sequence as set forth in Table 4.

[0045] Without being bound by a theory of invention, these oligonucleotides are able to interfere with the binding of and function of PRC2, by preventing recruitment of PRC2 to a specific chromosomal locus. For example, a single administration of single stranded oligonucleotides designed to specifically bind a PRC2-associated region lncRNA can stably displace not only the lncRNA, but also the PRC2 that binds to the lncRNA, from binding chromatin. After displacement, the full complement of PRC2 is not recovered for up to 24 hours. Further, lncRNA can recruit PRC2 in a cis fashion, repressing gene expression at or near the specific chromosomal locus from which the lncRNA was transcribed.

[0046] Methods of modulating gene expression are provided, in some embodiments, that may be carried out in vitro, ex vivo, or in vivo. It is understood that any reference to uses of compounds throughout the description contemplates use of the compound in preparation of a pharmaceutical composition or medicament for use in the treatment of condition (e.g., cancer) associated with decreased levels or activity of PTEN. Thus, as one nonlimiting example, this aspect of the invention includes use of such single stranded oligonucleotides in the preparation of a medicament for use in the treatment of disease, wherein the treatment involves upregulating expression of PTEN.

[0047] In further aspects of the invention, methods are provided for selecting a candidate oligonucleotide for activating expression of PTEN. The methods generally involve selecting as a candidate oligonucleotide, a single stranded oligonucleotide comprising a nucleotide sequence that is complementary to a PRC2-associated region (e.g., a nucleotide sequence as set forth in any one of SEQ ID NOS: 5 to 148). In some embodiments, sets of oligonucleotides may be selected that are enriched (e.g., compared with a random selection of oligonucleotides) in oligonucleotides that activate expression of PTEN.

### Single Stranded Oligonucleotides for Modulating Expression of PTEN

[0048] In one aspect of the invention, single stranded oligonucleotides complementary to the PRC2-associated regions are provided for modulating expression of PTEN in a cell. In some embodiments, expression of PTEN is upregulated or increased. In some embodiments, single stranded oligonucleotides complementary to these PRC2-associated regions inhibit the interaction of PRC2 with long RNA transcripts such that gene expression is upregulated or increased. In some embodiments, single stranded oligonucleotides complementary to these PRC2-associated regions inhibit the interaction of PRC2 with long RNA transcripts, resulting in reduced methylation of histone H3 and reduced gene inactivation, such that gene expression is upregulated or increased. In some embodiments, this interaction may be disrupted or inhibited due to a change in the structure of the long RNA that prevents or reduces binding to PRC2. The oligonucleotide may be selected using any of the methods disclosed herein for selecting a candidate oligonucleotide for activating expression of PTEN.

[0049] The single stranded oligonucleotide may comprise a region of complementarity that is complementary with a PRC2-associated region of a nucleotide sequence set forth in any one of SEQ ID NOS: 1 to 4. The region of complementarity of the single stranded oligonucleotide may be complementary with at least 6, e.g., at least 7, at least 8, at least 9, at least 10, at least 15 or more consecutive nucleotides of the PRC2-associated region.

[0050] The PRC2-associated region may map to a position in a chromosome between 50 kilobases upstream of a 5′-end of the PTEN gene and 50 kilobases downstream of a 3′-end of the PTEN gene. The PRC2-associated region may map to a position in a chromosome between 25 kilobases upstream of a 5′-end of the PTEN gene and 25 kilobases downstream of a 3′-end of the PTEN gene. The PRC2-associated region may map to a position in a chromosome between 12 kilobases upstream of a 5′-end of the PTEN gene and 12 kilobases downstream of a 3′-end of the PTEN gene. The PRC2-associated region may map to a position in a chromosome between 5 kilobases upstream of a 5′-end of the PTEN gene and 5 kilobases downstream of a 3′-end of the PTEN gene.

[0051] The genomic position of the selected PRC2-associated region relative to the PTEN gene may vary. For example, the PRC2-associated region may be upstream of the 5′ end of the PTEN gene. The PRC2-associated region may be downstream of the 3′ end of the PTEN gene. The PRC2-associated region may be within an intron of the PTEN gene. The PRC2-associated region may be within an exon of the PTEN gene. The PRC2-associated region may traverse an intron-exon junction, a 5′-UTR-exon junction or a 3′-UTR-exon junction of the PTEN gene.

[0052] The single stranded oligonucleotide may comprise a sequence having the formula X-Y-Z, in which X is any nucleotide, Y is a nucleotide sequence of 6 nucleotides in length that is not a human seed sequence of a microRNA, and Z is a nucleotide sequence of varying length. In some embodiments X is the 5′ nucleotide of the oligonucleotide. In some embodiments, when X is anchored at the 5′ end of the oligonucleotide, the oligonucleotide does not have any nucleotides or nucleotide analogs linked 5′ to X. In some embodiments, other compounds such as peptides or sterols may be linked at the 5′ end in this embodiment as long as they are not nucleotides or nucleotide analogs. In some embodiments, the single stranded oligonucleotide has a sequence 5′X-Y-Z and is 8-50 nucleotides in length. Oligonucleotides that have these sequence characteristics are predicted to avoid the miRNA pathway. Therefore, in some embodiments, oligonucleotides having these sequence characteristics are unlikely to have an unintended consequence of functioning in a cell as a miRNA molecule. The Y sequence may be a nucleotide sequence of 6 nucleotides in length set forth in Table 1.

[0053] The single stranded oligonucleotide may have a sequence that does not contain guanosine nucleotide stretches (e.g., 3 or more, 4 or more, 5 or more, 6 or more consecutive guanosine nucleotides). In some embodiments, oligonucleotides having guanosine nucleotide stretches have increased non-specific binding and/or off-target effects, compared with oligonucleotides that do not have guanosine nucleotide stretches.

[0054] The single stranded oligonucleotide may have a sequence that has less than a threshold level of sequence identity with every sequence of nucleotides, of equivalent length, that map to a genomic position encompassing or in proximity to an off-target gene. For example, an oligonucleotide may be designed to ensure that it does not have a sequence that maps to genomic positions encompassing or in proximity with all known genes (e.g., all known protein coding genes) other than PTEN. In a similar embodiment, an oligonucleotide may be designed to ensure that it does not have a sequence that maps to any other known PRC2-associated region, particularly PRC2-associated regions that are functionally related to any other known gene (e.g., any other known protein coding gene). In either case, the oligonucleotide is expected to have a reduced likelihood of having off-target effects. The threshold level of sequence identity may be 50%, 60%, 70%, 80%, 85%, 90%, 95%, 99% or 100% sequence identity.

[0055] The single stranded oligonucleotide may have a sequence that is complementary to a PRC2-associated region that encodes an RNA that forms a secondary structure comprising at least two single stranded loops. In has been discovered that, in some embodiments, oligonucleotides that are complementary to a PRC2-associated region that encodes an RNA that forms a secondary structure comprising one or more single stranded loops (e.g., at least two single stranded loops) have a greater likelihood of being active (e.g., of being capable of activating or enhancing expression of a target gene) than a randomly selected oligonucleotide. In some cases, the secondary structure may comprise a double stranded stem between the at least two single stranded loops. Accordingly, the region of complementarity between the oligonucleotide and the PRC2-associated region may be at a location of the PRC2 associated region that encodes at least a portion of at least one of the loops. In some cases, the region of complementarity between the oligonucleotide and the PRC2-associated region may be at a location of the PRC2-associated region that encodes at least a portion of at least two of the loops. In some cases, the region of complementarity between the oligonucleotide and the PRC2-associated region may be at a location of the PRC2 associated region that encodes at least a portion of the double stranded stem. In some embodiments, a PRC2-associated region (e.g., of an lncRNA) is identified (e.g., using RIP-Seq methodology or information derived therefrom). In some embodiments, the predicted secondary structure RNA (e.g., lncRNA) containing the PRC2-associated region is determined using RNA secondary structure prediction algorithms, e.g., RNAfold, mfold. In some embodiments, oligonucleotides are designed to target a region of the RNA that forms a secondary structure comprising one or more single stranded loop (e.g., at least two single stranded loops) structures which may comprise a double stranded stem between the at least two single stranded loops.

[0056] The single stranded oligonucleotide may have a sequence that is has greater than 30% G-C content, greater than 40% G-C content, greater than 50% G-C content, greater than 60% G-C content, greater than 70% G-C content, or greater than 80% G-C content. The single stranded oligonucleotide may have a sequence that has up to 100% G-C content, up to 95% G-C content, up to 90% G-C content, or up to 80% G-C content. In some embodiments in which the oligonucleotide is 8 to 10 nucleotides in length, all but 1, 2, 3, 4, or 5 of the nucleotides of the complementary sequence of the PRC2-associated region are cytosine or guanosine nucleotides. In some embodiments, the sequence of the PRC2-associated region to which the single stranded oligonucleotide is complementary comprises no more than 3 nucleotides selected from adenine and uracil.

[0057] The single stranded oligonucleotide may be complementary to a chromosome of a different species (e.g., a mouse, rat, rabbit, goat, monkey, etc.) at a position that encompasses or that is in proximity to that species' homolog of PTEN. The single stranded oligonucleotide may be complementary to a human genomic region encompassing or in proximity to the PTEN gene and also be complementary to a mouse genomic region encompassing or in proximity to the mouse homolog of PTEN. For example, the single stranded oligonucleotide may be complementary to a sequence as set forth in SEQ ID NO: 1 or 2, which is a human genomic region encompassing or in proximity to the PTEN gene, and also be complementary to a sequence as set forth in SEQ ID NO: 3 or 4, which is a mouse genomic region encompassing or in proximity to the mouse homolog of the PTEN gene. Oligonucleotides having these characteristics may be tested in vivo or in vitro for efficacy in multiple species (e.g., human and mouse). This approach also facilitates development of clinical candidates for treating human disease by selecting a species in which an appropriate animal exists for the disease.

[0058] In some embodiments, the region of complementarity of the single stranded oligonucleotide is complementary with at least 8 to 15, 8 to 30, 8 to 40, or 10 to 50, or 5 to 50, or 5 to 40 bases, e.g., 5, 6, 7, 8, 9, 10, 11, 12, 13, 14, 15, 16, 17, 18, 19, 20, 21, 22, 23, 24, 25, 26, 27, 28, 29, 30, 31, 32, 33, 34, 35, 36, 37, 38, 39, 40, 41, 42, 43, 44, 45, 46, 47, 48, 49, or 50 consecutive nucleotides of a PRC2-associated region. In some embodiments, the region of complementarity is complementary with at least 8 consecutive nucleotides of a PRC2-associated region. In some embodiments the sequence of the single stranded oligonucleotide is based on an RNA sequence that binds to PRC2, or a portion thereof, said portion having a length of from 5 to 40 contiguous base pairs, or about 8 to 40 bases, or about 5 to 15, or about 5 to 30, or about 5 to 40 bases, or about 5 to 50 bases.

[0059] Complementary, as the term is used in the art, refers to the capacity for precise pairing between two nucleotides. For example, if a nucleotide at a certain position of an oligonucleotide is capable of hydrogen bonding with a nucleotide at the same position of PRC2-associated region, then the single stranded nucleotide and PRC2-associated region are considered to be complementary to each other at that position. The single stranded nucleotide and PRC2-associated region are complementary to each other when a sufficient number of corresponding positions in each molecule are occupied by nucleotides that can hydrogen bond with each other through their bases. Thus, “complementary” is a term which is used to indicate a sufficient degree of complementarity or precise pairing such that stable and specific binding occurs between the single stranded nucleotide and PRC2-associated region. For example, if a base at one position of a single stranded nucleotide is capable of hydrogen bonding with a base at the corresponding position of a PRC2-associated region, then the bases are considered to be complementary to each other at that position. 100% complementarity is not required.

[0060] The single stranded oligonucleotide may be at least 80% complementary to (optionally one of at least 85%, 90%, 91%, 92%, 93%, 94%, 95%, 96%, 97%, 98%, 99% or 100% complementary to) the consecutive nucleotides of a PRC2-associated region. In some embodiments the single stranded oligonucleotide may contain 1, 2 or 3 base mismatches compared to the portion of the consecutive nucleotides of a PRC2-associated region. In some embodiments the single stranded oligonucleotide may have up to 3 mismatches over 15 bases, or up to 2 mismatches over 10 bases.

[0061] It is understood in the art that a complementary nucleotide sequence need not be 100% complementary to that of its target to be specifically hybridizable. In some embodiments, a complementary nucleic acid sequence for purposes of the present disclosure is specifically hybridizable when binding of the sequence to the target molecule (e.g., lncRNA) interferes with the normal function of the target (e.g., lncRNA) to cause a loss of activity (e.g., inhibiting PRC2-associated repression with consequent up-regulation of gene expression) and there is a sufficient degree of complementarity to avoid non-specific binding of the sequence to non-target sequences under conditions in which avoidance of non-specific binding is desired, e.g., under physiological conditions in the case of in vivo assays or therapeutic treatment, and in the case of in vitro assays, under conditions in which the assays are performed under suitable conditions of stringency.

[0062] In some embodiments, the single stranded oligonucleotide is 7, 8, 9, 10, 11, 12, 13, 14, 15, 16, 17, 18, 19, 20, 21, 22, 23, 24, 25, 26, 27, 28, 29, 30, 35, 40, 45, 50 or more nucleotides in length. In a preferred embodiment, the oligonucleotide is 8 to 30 nucleotides in length.

[0063] In some embodiments, the PRC2-associated region occurs on the same DNA strand as a gene sequence (sense). In some embodiments, the PRC2-associated region occurs on the opposite DNA strand as a gene sequence (anti-sense). Oligonucleotides complementary to a PRC2-associated region can bind either sense or anti-sense sequences. Base pairings may include both canonical Watson-Crick base pairing and non-Watson-Crick base pairing (e.g., Wobble base pairing and Hoogsteen base pairing). It is understood that for complementary base pairings, adenosine-type bases (A) are complementary to thymidine-type bases (T) or uracil-type bases (U), that cytosine-type bases (C) are complementary to guanosine-type bases (G), and that universal bases such as 3-nitropyrrole or 5-nitroindole can hybridize to and are considered complementary to any A, C, U, or T. Inosine (I) has also been considered in the art to be a universal base and is considered complementary to any A, C, U or T.

[0064] In some embodiments, any one or more thymidine (T) nucleotides (or modified nucleotide thereof) or uridine (U) nucleotides (or a modified nucleotide thereof) in a sequence provided herein, including a sequence provided in the sequence listing, may be replaced with any other nucleotide suitable for base pairing (e.g., via a Watson-Crick base pair) with an adenosine nucleotide. In some embodiments, any one or more thymidine (T) nucleotides (or modified nucleotide thereof) or uridine (U) nucleotides (or a modified nucleotide thereof) in a sequence provided herein, including a sequence provided in the sequence listing, may be suitably replaced with a different pyrimidine nucleotide or vice versa. In some embodiments, any one or more thymidine (T) nucleotides (or modified nucleotide thereof) in a sequence provided herein, including a sequence provided in the sequence listing, may be suitably replaced with a uridine (U) nucleotide (or a modified nucleotide thereof) or vice versa.

[0065] In some embodiments, GC content of the single stranded oligonucleotide is preferably between about 30-60%. Contiguous runs of three or more Gs or Cs may not be preferable in some embodiments. Accordingly, in some embodiments, the oligonucleotide does not comprise a stretch of three or more guanosine nucleotides.

[0066] In some embodiments, the single stranded oligonucleotide specifically binds to, or is complementary to an RNA that is encoded in a genome (e.g., a human genome) as a single contiguous transcript (e.g., a non-spliced RNA). In some embodiments, the single stranded oligonucleotide specifically binds to, or is complementary to an RNA that is encoded in a genome (e.g., a human genome), in which the distance in the genome between the 5′ end of the coding region of the RNA and the 3′ end of the coding region of the RNA is less than 1 kb, less than 2 kb, less than 3 kb, less than 4 kb, less than 5 kb, less than 7 kb, less than 8 kb, less than 9 kb, less than 10 kb, or less than 20 kb.

[0067] It is to be understood that any oligonucleotide provided herein can be excluded. For example, in some embodiments, an oligonucleotide does not comprise or consist of a sequence as set for in SEQ ID NOs: 89026 to 89028. In some embodiments, a single stranded oligonucleotide is not complementary to SEQ ID NO: 89029. In some embodiments, a single stranded oligonucleotide is not complementary to SEQ ID NO: 89030.

[0068] In some embodiments, it has been found that single stranded oligonucleotides disclosed herein may increase expression of mRNA corresponding to the gene by at least about 50% (i.e. 150% of normal or 1.5 fold), or by about 2 fold to about 5 fold. In some embodiments, expression may be increased by at least about 15 fold, 20 fold, 30 fold, 40 fold, 50 fold or 100 fold, or any range between any of the foregoing numbers. It has also been found that increased mRNA expression has been shown to correlate to increased protein expression.

[0069] In some or any of the embodiments of the oligonucleotides described herein, or processes for designing or synthesizing them, the oligonucleotides will upregulate gene expression and may specifically bind or specifically hybridize or be complementary to the PRC2 binding RNA that is transcribed from the same strand as a protein coding reference gene. The oligonucleotide may bind to a region of the PRC2 binding RNA that originates within or overlaps an intron, exon, intron exon junction, 5′ UTR, 3′ UTR, a translation initiation region, or a translation termination region of a protein coding sense strand of a reference gene (refGene).

[0070] In some or any of the embodiments of oligonucleotides described herein, or processes for designing or synthesizing them, the oligonucleotides will upregulate gene expression and may specifically bind or specifically hybridize or be complementary to a PRC2 binding RNA that transcribed from the opposite strand (the antisense strand) of a protein coding reference gene. The oligonucleotide may bind to a region of the PRC2 binding RNA that originates within or overlaps an intron, exon, intron exon junction, 5′ UTR, 3′ UTR, a translation initiation region, or a translation termination region of a protein coding antisense strand of a reference gene

[0071] The oligonucleotides described herein may be modified, e.g., comprise a modified sugar moiety, a modified internucleoside linkage, a modified nucleotide and/or combinations thereof. In addition, the oligonucleotides can exhibit one or more of the following properties: do not induce substantial cleavage or degradation of the target RNA; do not cause substantially complete cleavage or degradation of the target RNA; do not activate the RNAse H pathway; do not activate RISC; do not recruit any Argonaute family protein; are not cleaved by Dicer; do not mediate alternative splicing; are not immune stimulatory; are nuclease resistant; have improved cell uptake compared to unmodified oligonucleotides; are not toxic to cells or mammals; may have improved endosomal exit; do interfere with interaction of lncRNA with PRC2, preferably the Ezh2 subunit but optionally the Suz12, Eed, RbAp46/48 subunits or accessory factors such as Jarid2; do decrease histone H3 lysine27 methylation and/or do upregulate gene expression.

[0072] Oligonucleotides that are designed to interact with RNA to modulate gene expression are a distinct subset of base sequences from those that are designed to bind a DNA target (e.g., are complementary to the underlying genomic DNA sequence from which the RNA is transcribed).

[0073] Any of the oligonucleotides disclosed herein may be linked to one or more other oligonucleotides disclosed herein by a linker, e.g., a cleavable linker.

### Method for Selecting Candidate Oligonucleotides for Activating Expression of PTEN

[0074] Methods are provided herein for selecting a candidate oligonucleotide for activating or enhancing expression of PTEN. The target selection methods may generally involve steps for selecting single stranded oligonucleotides having any of the structural and functional characteristics disclosed herein. Typically, the methods involve one or more steps aimed at identifying oligonucleotides that target a PRC2-associated region that is functionally related to PTEN, for example a PRC2-associated region of a lncRNA that regulates expression of PTEN by facilitating (e.g., in a cis-regulatory manner) the recruitment of PRC2 to the PTEN gene. Such oligonucleotides are expected to be candidates for activating expression of PTEN because of their ability to hybridize with the PRC2-associated region of a nucleic acid (e.g., a lncRNA). In some embodiments, this hybridization event is understood to disrupt interaction of PRC2 with the nucleic acid (e.g., a lncRNA) and as a result disrupt recruitment of PRC2 and its associated co-repressors (e.g., chromatin remodeling factors) to the PTEN gene locus.

[0075] Methods of selecting a candidate oligonucleotide may involve selecting a PRC2-associated region (e.g., a nucleotide sequence as set forth in any one of SEQ ID NOS: 5 to 148) that maps to a chromosomal position encompassing or in proximity to the PTEN gene (e.g., a chromosomal position having a sequence as set forth in any one of SEQ ID NOS: 1 to 4). The PRC2-associated region may map to the strand of the chromosome comprising the sense strand of the PTEN gene, in which case the candidate oligonucleotide is complementary to the sense strand of the PTEN gene (i.e., is antisense to the PTEN gene). Alternatively, the PRC2-associated region may map to the strand of the first chromosome comprising the antisense strand of the PTEN gene, in which case the oligonucleotide is complementary to the antisense strand (the template strand) of the PTEN gene (i.e., is sense to the PTEN gene).

[0076] Methods for selecting a set of candidate oligonucleotides that is enriched in oligonucleotides that activate expression of PTEN may involve selecting one or more PRC2-associated regions that map to a chromosomal position that encompasses or that is in proximity to the PTEN gene and selecting a set of oligonucleotides, in which each oligonucleotide in the set comprises a nucleotide sequence that is complementary with the one or more PRC2-associated regions. As used herein, the phrase, “a set of oligonucleotides that is enriched in oligonucleotides that activate expression of” refers to a set of oligonucleotides that has a greater number of oligonucleotides that activate expression of a target gene (e.g., PTEN) compared with a random selection of oligonucleotides of the same physicochemical properties (e.g., the same GC content, Tₘ, length etc.) as the enriched set.

[0077] Where the design and/or synthesis of a single stranded oligonucleotide involves design and/or synthesis of a sequence that is complementary to a nucleic acid or PRC2-associated region described by such sequence information, the skilled person is readily able to determine the complementary sequence, e.g., through understanding of Watson Crick base pairing rules which form part of the common general knowledge in the field.

[0078] In some embodiments design and/or synthesis of a single stranded oligonucleotide involves manufacture of an oligonucleotide from starting materials by techniques known to those of skill in the art, where the synthesis may be based on a sequence of a PRC2-associated region, or portion thereof.

[0079] Methods of design and/or synthesis of a single stranded oligonucleotide may involve one or more of the steps of:

[0080] Identifying and/or selecting PRC2-associated region;

[0081] Designing a nucleic acid sequence having a desired degree of sequence identity or complementarity to a PRC2-associated region or a portion thereof;

[0082] Synthesizing a single stranded oligonucleotide to the designed sequence;

[0083] Purifying the synthesized single stranded oligonucleotide; and

[0084] Optionally mixing the synthesized single stranded oligonucleotide with at least one pharmaceutically acceptable diluent, carrier or excipient to form a pharmaceutical composition or medicament.

[0085] Single stranded oligonucleotides so designed and/or synthesized may be useful in method of modulating gene expression as described herein.

[0086] Preferably, single stranded oligonucleotides of the invention are synthesized chemically. Oligonucleotides used to practice this invention can be synthesized in vitro by well-known chemical synthesis techniques.

[0087] Oligonucleotides of the invention can be stabilized against nucleolytic degradation such as by the incorporation of a modification, e.g., a nucleotide modification. For example, nucleic acid sequences of the invention include a phosphorothioate at least the first, second, or third internucleotide linkage at the 5′ or 3′ end of the nucleotide sequence. As another example, the nucleic acid sequence can include a 2′-modified nucleotide, e.g., a 2′-deoxy, 2′-deoxy-2′-fluoro, 2′-O-methyl, 2′-O-methoxyethyl (2′-O-MOE), 2′-O-aminopropyl (2′-O-AP), 2′-O-dimethylaminoethyl (2′-O-DMAOE), 2′-O-dimethylaminopropyl (2′-O-DMAP), 2′-O-dimethylaminoethyloxyethyl (2′-O-DMAEOE), or 2′-O—N-methylacetamido (2′-O-NMA). As another example, the nucleic acid sequence can include at least one 2′-O-methyl-modified nucleotide, and in some embodiments, all of the nucleotides include a 2′-O-methyl modification. In some embodiments, the nucleic acids are “locked,” i.e., comprise nucleic acid analogues in which the ribose ring is “locked” by a methylene bridge connecting the 2′-O atom and the 4′-C atom.

[0088] It is understood that any of the modified chemistries or formats of single stranded oligonucleotides described herein can be combined with each other, and that one, two, three, four, five, or more different types of modifications can be included within the same molecule.

[0089] In some embodiments, the method may further comprise the steps of amplifying the synthesized single stranded oligonucleotide, and/or purifying the single stranded oligonucleotide (or amplified single stranded oligonucleotide), and/or sequencing the single stranded oligonucleotide so obtained.

[0090] As such, the process of preparing a single stranded oligonucleotide may be a process that is for use in the manufacture of a pharmaceutical composition or medicament for use in the treatment of disease, optionally wherein the treatment involves modulating expression of a gene associated with a PRC2-associated region.

[0091] In the methods described above a PRC2-associated region may be, or have been, identified, or obtained, by a method that involves identifying RNA that binds to PRC2.

[0092] Such methods may involve the following steps: providing a sample containing nuclear ribonucleic acids, contacting the sample with an agent that binds specifically to PRC2 or a subunit thereof, allowing complexes to form between the agent and protein in the sample, partitioning the complexes, synthesizing nucleic acid that is complementary to nucleic acid present in the complexes.

[0093] Where the single stranded oligonucleotide is based on a PRC2-associated region, or a portion of such a sequence, it may be based on information about that sequence, e.g., sequence information available in written or electronic form, which may include sequence information contained in publicly available scientific publications or sequence databases.

### Nucleotide Analogues

[0094] In some embodiments, the oligonucleotide may comprise at least one ribonucleotide, at least one deoxyribonucleotide, and/or at least one bridged nucleotide. In some embodiments, the oligonucleotide may comprise a bridged nucleotide, such as a locked nucleic acid (LNA) nucleotide, a constrained ethyl (cEt) nucleotide, or an ethylene bridged nucleic acid (ENA) nucleotide. Examples of such nucleotides are disclosed herein and known in the art. In some embodiments, the oligonucleotide comprises a nucleotide analog disclosed in one of the following United States patent or patent application Publications: U.S. Pat. No. 7,399,845, U.S. Pat. No. 7,741,457, U.S. Pat. No. 8,022,193, U.S. Pat. No. 7,569,686, U.S. Pat. No. 7,335,765, U.S. Pat. No. 7,314,923, U.S. Pat. No. 7,335,765, and U.S. Pat. No. 7,816,333, US 20110009471, the entire contents of each of which are incorporated herein by reference for all purposes. The oligonucleotide may have one or more 2′ O-methyl nucleotides. The oligonucleotide may consist entirely of 2′ O-methyl nucleotides.

[0095] Often the single stranded oligonucleotide has one or more nucleotide analogues. For example, the single stranded oligonucleotide may have at least one nucleotide analogue that results in an increase in Tₘ of the oligonucleotide in a range of 1° C., 2° C., 3° C., 4° C., or 5° C. compared with an oligonucleotide that does not have the at least one nucleotide analogue. The single stranded oligonucleotide may have a plurality of nucleotide analogues that results in a total increase in Tₘ of the oligonucleotide in a range of 2° C., 3° C., 4° C., 5° C., 6° C., 7° C., 8° C., 9° C., 10° C., 15° C., 20° C., 25° C., 30° C., 35° C., 40° C., 45° C. or more compared with an oligonucleotide that does not have the nucleotide analogue.

[0096] The oligonucleotide may be of up to 50 nucleotides in length in which 2 to 10, 2 to 15, 2 to 16, 2 to 17, 2 to 18, 2 to 19, 2 to 20, 2 to 25, 2 to 30, 2 to 40, 2 to 45, or more nucleotides of the oligonucleotide are nucleotide analogues. The oligonucleotide may be of 8 to 30 nucleotides in length in which 2 to 10, 2 to 15, 2 to 16, 2 to 17, 2 to 18, 2 to 19, 2 to 20, 2 to 25, 2 to 30 nucleotides of the oligonucleotide are nucleotide analogues. The oligonucleotide may be of 8 to 15 nucleotides in length in which 2 to 4, 2 to 5, 2 to 6, 2 to 7, 2 to 8, 2 to 9, 2 to 10, 2 to 11, 2 to 12, 2 to 13, 2 to 14 nucleotides of the oligonucleotide are nucleotide analogues. Optionally, the oligonucleotides may have every nucleotide except 1, 2, 3, 4, 5, 6, 7, 8, 9, or 10 nucleotides modified.

[0097] The oligonucleotide may consist entirely of bridged nucleotides (e.g., LNA nucleotides, cEt nucleotides, ENA nucleotides). The oligonucleotide may comprise alternating deoxyribonucleotides and 2′-fluoro-deoxyribonucleotides. The oligonucleotide may comprise alternating deoxyribonucleotides and 2′-O-methyl nucleotides. The oligonucleotide may comprise alternating deoxyribonucleotides and ENA nucleotide analogues. The oligonucleotide may comprise alternating deoxyribonucleotides and LNA nucleotides. The oligonucleotide may comprise alternating LNA nucleotides and 2′-O-methyl nucleotides. The oligonucleotide may have a 5′ nucleotide that is a bridged nucleotide (e.g., a LNA nucleotide, cEt nucleotide, ENA nucleotide). The oligonucleotide may have a 5′ nucleotide that is a deoxyribonucleotide.

[0098] The oligonucleotide may comprise deoxyribonucleotides flanked by at least one bridged nucleotide (e.g., a LNA nucleotide, cEt nucleotide, ENA nucleotide) on each of the 5′ and 3′ ends of the deoxyribonucleotides. The oligonucleotide may comprise deoxyribonucleotides flanked by 1, 2, 3, 4, 5, 6, 7, 8 or more bridged nucleotides (e.g., LNA nucleotides, cEt nucleotides, ENA nucleotides) on each of the 5′ and 3′ ends of the deoxyribonucleotides. The 3′ position of the oligonucleotide may have a 3′ hydroxyl group. The 3′ position of the oligonucleotide may have a 3′ thiophosphate.

[0099] The oligonucleotide may be conjugated with a label. For example, the oligonucleotide may be conjugated with a biotin moiety, cholesterol, Vitamin A, folate, sigma receptor ligands, aptamers, peptides, such as CPP, hydrophobic molecules, such as lipids, ASGPR or dynamic polyconjugates and variants thereof at its 5′ or 3′ end.

[0100] Preferably the single stranded oligonucleotide comprises one or more modifications comprising: a modified sugar moiety, and/or a modified internucleoside linkage, and/or a modified nucleotide and/or combinations thereof. It is not necessary for all positions in a given oligonucleotide to be uniformly modified, and in fact more than one of the modifications described herein may be incorporated in a single oligonucleotide or even at within a single nucleoside within an oligonucleotide.

[0101] In some embodiments, the single stranded oligonucleotides are chimeric oligonucleotides that contain two or more chemically distinct regions, each made up of at least one nucleotide. These oligonucleotides typically contain at least one region of modified nucleotides that confers one or more beneficial properties (such as, for example, increased nuclease resistance, increased uptake into cells, increased binding affinity for the target) and a region that is a substrate for enzymes capable of cleaving RNA:DNA or RNA:RNA hybrids. Chimeric single stranded oligonucleotides of the invention may be formed as composite structures of two or more oligonucleotides, modified oligonucleotides, oligonucleosides and/or oligonucleotide mimetics as described above. Such compounds have also been referred to in the art as hybrids or gapmers. Representative United States patents that teach the preparation of such hybrid structures comprise, but are not limited to, U.S. Pat. Nos. 5,013,830; 5,149,797; 5,220,007; 5,256,775; 5,366,878; 5,403,711; 5,491,133; 5,565,350; 5,623,065; 5,652,355; 5,652,356; and 5,700,922, each of which is herein incorporated by reference.

[0102] In some embodiments, the single stranded oligonucleotide comprises at least one nucleotide modified at the 2′ position of the sugar, most preferably a 2′-O-alkyl, 2′-O-alkyl-O-alkyl or 2′-fluoro-modified nucleotide. In other preferred embodiments, RNA modifications include 2′-fluoro, 2′-amino and 2′ O-methyl modifications on the ribose of pyrimidines, abasic residues or an inverted base at the 3′ end of the RNA. Such modifications are routinely incorporated into oligonucleotides and these oligonucleotides have been shown to have a higher Tm (i.e., higher target binding affinity) than 2′-deoxyoligonucleotides against a given target.

[0103] A number of nucleotide and nucleoside modifications have been shown to make the oligonucleotide into which they are incorporated more resistant to nuclease digestion than the native oligodeoxynucleotide; these modified oligos survive intact for a longer time than unmodified oligonucleotides. Specific examples of modified oligonucleotides include those comprising modified backbones, for example, phosphorothioates, phosphotriesters, methyl phosphonates, short chain alkyl or cycloalkyl intersugar linkages or short chain heteroatomic or heterocyclic intersugar linkages. Most preferred are oligonucleotides with phosphorothioate backbones and those with heteroatom backbones, particularly CH₂—NH—O—CH₂, CH, ˜N(CH₃)˜O˜CH₂ (known as a methylene(methylimino) or MMI backbone, CH₂—O—N(CH₃)—CH₂, CH₂—N(CH₃)—N(CH₃)—CH₂ and O—N(CH₃)— CH₂—CH₂ backbones, wherein the native phosphodiester backbone is represented as O—P—O—CH); amide backbones (see De Mesmaeker et al. Ace. Chem. Res. 1995, 28:366-374); morpholino backbone structures (see Summerton and Weller, U.S. Pat. No. 5,034,506); peptide nucleic acid (PNA) backbone (wherein the phosphodiester backbone of the oligonucleotide is replaced with a polyamide backbone, the nucleotides being bound directly or indirectly to the aza nitrogen atoms of the polyamide backbone, see Nielsen et al., Science 1991, 254, 1497). Phosphorus-containing linkages include, but are not limited to, phosphorothioates, chiral phosphorothioates, phosphorodithioates, phosphotriesters, aminoalkylphosphotriesters, methyl and other alkyl phosphonates comprising 3′alkylene phosphonates and chiral phosphonates, phosphinates, phosphoramidates comprising 3′-amino phosphoramidate and aminoalkylphosphoramidates, thionophosphoramidates, thionoalkylphosphonates, thionoalkylphosphotriesters, and boranophosphates having normal 3′-5′ linkages, 2′-5′ linked analogs of these, and those having inverted polarity wherein the adjacent pairs of nucleoside units are linked 3′-5′ to 5′-3′ or 2′-5′ to 5′-2′; see U.S. Pat. Nos. 3,687,808; 4,469,863; 4,476,301; 5,023,243; 5,177,196; 5,188,897; 5,264,423; 5,276,019; 5,278,302; 5,286,717; 5,321,131; 5,399,676; 5,405,939; 5,453,496; 5,455, 233; 5,466,677; 5,476,925; 5,519,126; 5,536,821; 5,541,306; 5,550,111; 5,563, 253; 5,571,799; 5,587,361; and 5,625,050.

[0104] Morpholino-based oligomeric compounds are described in Dwaine A. Braasch and David R. Corey, Biochemistry, 2002, 41(14), 4503-4510); Genesis, volume 30, issue 3, 2001; Heasman, J., Dev. Biol., 2002, 243, 209-214; Nasevicius et al., Nat. Genet., 2000, 26, 216-220; Lacerra et al., Proc. Natl. Acad. Sci., 2000, 97, 9591-9596; and U.S. Pat. No. 5,034,506, issued Jul. 23, 1991. In some embodiments, the morpholino-based oligomeric compound is a phosphorodiamidate morpholino oligomer (PMO) (e.g., as described in Iverson, Curr. Opin. Mol. Ther., 3:235-238, 2001; and Wang et al., J. Gene Med., 12:354-364, 2010; the disclosures of which are incorporated herein by reference in their entireties).

[0105] Cyclohexenyl nucleic acid oligonucleotide mimetics are described in Wang et al., J. Am. Chem. Soc., 2000, 122, 8595-8602.

[0106] Modified oligonucleotide backbones that do not include a phosphorus atom therein have backbones that are formed by short chain alkyl or cycloalkyl internucleoside linkages, mixed heteroatom and alkyl or cycloalkyl internucleoside linkages, or one or more short chain heteroatomic or heterocyclic internucleoside linkages. These comprise those having morpholino linkages (formed in part from the sugar portion of a nucleoside); siloxane backbones; sulfide, sulfoxide and sulfone backbones; formacetyl and thioformacetyl backbones; methylene formacetyl and thioformacetyl backbones; alkene containing backbones; sulfamate backbones; methyleneimino and methylenehydrazino backbones; sulfonate and sulfonamide backbones; amide backbones; and others having mixed N, O, S and CH2 component parts; see U.S. Pat. Nos. 5,034,506; 5,166,315; 5,185,444; 5,214,134; 5,216,141; 5,235,033; 5,264,562; 5,264,564; 5,405,938; 5,434,257; 5,466,677; 5,470,967; 5,489,677; 5,541,307; 5,561,225; 5,596,086; 5,602,240; 5,610,289; 5,602,240; 5,608,046; 5,610,289; 5,618,704; 5,623,070; 5,663,312; 5,633,360; 5,677,437; and 5,677,439, each of which is herein incorporated by reference.

[0107] Modified oligonucleotides are also known that include oligonucleotides that are based on or constructed from arabinonucleotide or modified arabinonucleotide residues. Arabinonucleosides are stereoisomers of ribonucleosides, differing only in the configuration at the 2′-position of the sugar ring. In some embodiments, a 2′-arabino modification is 2′-F arabino. In some embodiments, the modified oligonucleotide is 2′-fluoro-D-arabinonucleic acid (FANA) (as described in, for example, Lon et al., Biochem., 41:3457-3467, 2002 and Min et al., Bioorg. Med. Chem. Lett., 12:2651-2654, 2002; the disclosures of which are incorporated herein by reference in their entireties). Similar modifications can also be made at other positions on the sugar, particularly the 3′ position of the sugar on a 3′ terminal nucleoside or in 2′-5′ linked oligonucleotides and the 5′ position of 5′ terminal nucleotide.

[0108] PCT Publication No. WO 99/67378 discloses arabinonucleic acids (ANA) oligomers and their analogues for improved sequence specific inhibition of gene expression via association to complementary messenger RNA.

[0109] Other preferred modifications include ethylene-bridged nucleic acids (ENAs) (e.g., International Patent Publication No. WO 2005/042777, Morita et al., Nucleic Acid Res., Suppl 1:241-242, 2001; Surono et al., Hum. Gene Ther., 15:749-757, 2004; Koizumi, Curr. Opin. Mol. Ther., 8:144-149, 2006 and Horie et al., Nucleic Acids Symp. Ser (Oxf), 49:171-172, 2005; the disclosures of which are incorporated herein by reference in their entireties). Preferred ENAs include, but are not limited to, 2′-O,4′-C-ethylene-bridged nucleic acids.

[0110] Examples of LNAs are described in WO/2008/043753 and include compounds of the following general formula.

[chemical structure]

[0111] where X and Y are independently selected among the groups —O—,

[0112] —S—, —N(H)—, N(R)—, —CH₂— or —CH— (if part of a double bond),

[0113] —CH₂—O—, —CH₂—S—, —CH₂—N(H)—, —CH₂—N(R)—, —CH₂—CH₂— or —CH₂—CH— (if part of a double bond),

[0114] —CH═CH—, where R is selected from hydrogen and C₁₋₄-alkyl; Z and Z* are independently selected among an internucleoside linkage, a terminal group or a protecting group; B constitutes a natural or non-natural nucleotide base moiety; and the asymmetric groups may be found in either orientation.

[0115] Preferably, the LNA used in the oligonucleotides described herein comprises at least one LNA unit according any of the formulas

[chemical structure]

[0116] wherein Y is —O—, —S—, —NH—, or N(R^{H}); Z and Z* are independently selected among an internucleoside linkage, a terminal group or a protecting group; B constitutes a natural or non-natural nucleotide base moiety, and RH is selected from hydrogen and C₁₋₄-alkyl.

[0117] In some embodiments, the Locked Nucleic Acid (LNA) used in the oligonucleotides described herein comprises at least one Locked Nucleic Acid (LNA) unit according any of the formulas shown in Scheme 2 of PCT/DK2006/000512.

[0118] In some embodiments, the LNA used in the oligomer of the invention comprises internucleoside linkages selected from —O—P(O)₂—O—, —O—P(O,S)—O—, —O—P(S)₂—O—, —S—P(O)₂—O—, —S—P(O,S)—O—, —S—P(S)₂—O—, —O—P(O)₂—S—, —O—P(O,S)—S—, —S—P(O)₂—S—, —O—PO(R^{H})—O—, O—PO(OCH₃)—O—, —O—PO(NR^{H})—O—, —O—PO(OCH₂CH₂S—R)—O—, —O—PO(BH₃)—O—, —O—PO(NHR^{H})—O—, —O—P(O)₂—NR^{H}—, —NR^{H}—P(O)₂—O—, —NR^{H}—CO—O—, where R^{H} is selected from hydrogen and C₁₋₄-alkyl.

[0119] Specifically preferred LNA units are shown in scheme 2:

[chemical structure]

[0120] The term “thio-LNA” comprises a locked nucleotide in which at least one of X or Y in the general formula above is selected from S or —CH₂—S—. Thio-LNA can be in both beta-D and alpha-L-configuration.

[0121] The term “amino-LNA” comprises a locked nucleotide in which at least one of X or Y in the general formula above is selected from —N(H)—, N(R)—, CH₂—N(H)—, and —CH₂—N(R)— where R is selected from hydrogen and C₁₋₄-alkyl. Amino-LNA can be in both beta-D and alpha-L-configuration.

[0122] The term “oxy-LNA” comprises a locked nucleotide in which at least one of X or Y in the general formula above represents —O— or —CH₂—O—. Oxy-LNA can be in both beta-D and alpha-L-configuration.

[0123] The term “ena-LNA” comprises a locked nucleotide in which Y in the general formula above is —CH₂—O— (where the oxygen atom of —CH₂—O— is attached to the 2′-position relative to the base B).

[0124] LNAs are described in additional detail herein.

[0125] One or more substituted sugar moieties can also be included, e.g., one of the following at the 2′ position: OH, SH, SCH₃, F, OCN, OCH₃OCH₃, OCH₃O(CH₂)n CH₃, O(CH₂)n NH₂ or O(CH₂)n CH₃ where n is from 1 to about 10; C1 to C10 lower alkyl, alkoxyalkoxy, substituted lower alkyl, alkaryl or aralkyl; Cl; Br; CN; CF₃; OCF₃; O-, S-, or N-alkyl; O-, S-, or N-alkenyl; SOCH₃; SO₂CH₃; ONO₂; NO₂; N₃; NH2; heterocycloalkyl; heterocycloalkaryl; amino alkylamino; polyalkylamino; substituted silyl; an RNA cleaving group; a reporter group; an intercalator; a group for improving the pharmacokinetic properties of an oligonucleotide; or a group for improving the pharmacodynamic properties of an oligonucleotide and other substituents having similar properties. A preferred modification includes 2′-methoxyethoxy[2′-O—CH₂CH₂OCH₃, also known as 2′-O-(2-methoxyethyl)] (Martin et al, HeIv. Chim. Acta, 1995, 78, 486). Other preferred modifications include 2′-methoxy (2′-O—CH₃), 2′-propoxy (2′-OCH₂CH₂CH₃) and 2′-fluoro (2′-F). Similar modifications may also be made at other positions on the oligonucleotide, particularly the 3′ position of the sugar on the 3′ terminal nucleotide and the 5′ position of 5′ terminal nucleotide. Oligonucleotides may also have sugar mimetics such as cyclobutyls in place of the pentofuranosyl group.

[0126] Single stranded oligonucleotides can also include, additionally or alternatively, nucleobase (often referred to in the art simply as “base”) modifications or substitutions. As used herein, “unmodified” or “natural” nucleobases include adenine (A), guanine (G), thymine (T), cytosine (C) and uracil (U). Modified nucleobases include nucleobases found only infrequently or transiently in natural nucleic acids, e.g., hypoxanthine, 6-methyladenine, 5-Me pyrimidines, particularly 5-methylcytosine (also referred to as 5-methyl-2′ deoxycytosine and often referred to in the art as 5-Me-C), 5-hydroxymethylcytosine (HMC), glycosyl HMC and gentobiosyl HMC, isocytosine, pseudoisocytosine, as well as synthetic nucleobases, e.g., 2-aminoadenine, 2-(methylamino)adenine, 2-(imidazolylalkyl)adenine, 2-(aminoalklyamino)adenine or other heterosubstituted alkyladenines, 2-thiouracil, 2-thiothymine, 5-bromouracil, 5-hydroxymethyluracil, 5-propynyluracil, 8-azaguanine, 7-deazaguanine, N6 (6-aminohexyl)adenine, 6-aminopurine, 2-aminopurine, 2-chloro-6-aminopurine and 2,6-diaminopurine or other diaminopurines. See, e.g., Kornberg, “DNA Replication,” W. H. Freeman & Co., San Francisco, 1980, pp 75-77; and Gebeyehu, G., et al. Nucl. Acids Res., 15:4513 (1987)). A “universal” base known in the art, e.g., inosine, can also be included. 5-Me-C substitutions have been shown to increase nucleic acid duplex stability by 0.6-1.2° C. (Sanghvi, in Crooke, and Lebleu, eds., Antisense Research and Applications, CRC Press, Boca Raton, 1993, pp. 276-278) and may be used as base substitutions.

[0127] It is not necessary for all positions in a given oligonucleotide to be uniformly modified, and in fact more than one of the modifications described herein may be incorporated in a single oligonucleotide or even at within a single nucleoside within an oligonucleotide.

[0128] In some embodiments, both a sugar and an internucleoside linkage, i.e., the backbone, of the nucleotide units are replaced with novel groups. The base units are maintained for hybridization with an appropriate nucleic acid target compound. One such oligomeric compound, an oligonucleotide mimetic that has been shown to have excellent hybridization properties, is referred to as a peptide nucleic acid (PNA). In PNA compounds, the sugar-backbone of an oligonucleotide is replaced with an amide containing backbone, for example, an aminoethylglycine backbone. The nucleobases are retained and are bound directly or indirectly to aza nitrogen atoms of the amide portion of the backbone. Representative United States patents that teach the preparation of PNA compounds include, but are not limited to, U.S. Pat. Nos. 5,539,082; 5,714,331; and 5,719,262, each of which is herein incorporated by reference. Further teaching of PNA compounds can be found in Nielsen et al, Science, 1991, 254, 1497-1500.

[0129] Single stranded oligonucleotides can also include one or more nucleobase (often referred to in the art simply as “base”) modifications or substitutions. As used herein, “unmodified” or “natural” nucleobases comprise the purine bases adenine (A) and guanine (G), and the pyrimidine bases thymine (T), cytosine (C) and uracil (U). Modified nucleobases comprise other synthetic and natural nucleobases such as 5-methylcytosine (5-me-C), 5-hydroxymethyl cytosine, xanthine, hypoxanthine, 2-aminoadenine, 6-methyl and other alkyl derivatives of adenine and guanine, 2-propyl and other alkyl derivatives of adenine and guanine, 2-thiouracil, 2-thiothymine and 2-thiocytosine, 5-halouracil and cytosine, 5-propynyl uracil and cytosine, 6-azo uracil, cytosine and thymine, 5-uracil (pseudo-uracil), 4-thiouracil, 8-halo, 8-amino, 8-thiol, 8-thioalkyl, 8-hydroxyl and other 8-substituted adenines and guanines, 5-halo particularly 5-bromo, 5-trifluoromethyl and other 5-substituted uracils and cytosines, 7-methylquanine and 7-methyladenine, 8-azaguanine and 8-azaadenine, 7-deazaguanine and 7-deazaadenine and 3-deazaguanine and 3-deazaadenine.

[0130] Further, nucleobases comprise those disclosed in U.S. Pat. No. 3,687,808, those disclosed in “The Concise Encyclopedia of Polymer Science And Engineering”, pages 858-859, Kroschwitz, ed. John Wiley & Sons, 1990; those disclosed by Englisch et al., Angewandle Chemie, International Edition, 1991, 30, page 613, and those disclosed by Sanghvi, Chapter 15, Antisense Research and Applications,” pages 289-302, Crooke, and Lebleu, eds., CRC Press, 1993. Certain of these nucleobases are particularly useful for increasing the binding affinity of the oligomeric compounds of the invention. These include 5-substituted pyrimidines, 6-azapyrimidines and N-2, N-6 and 0-6 substituted purines, comprising 2-aminopropyladenine, 5-propynyluracil and 5-propynylcytosine. 5-methylcytosine substitutions have been shown to increase nucleic acid duplex stability by 0.6-1.2<0>C (Sanghvi, et al., eds, “Antisense Research and Applications,” CRC Press, Boca Raton, 1993, pp. 276-278) and are presently preferred base substitutions, even more particularly when combined with 2′-O-methoxyethyl sugar modifications. Modified nucleobases are described in U.S. Pat. No. 3,687,808, as well as U.S. Pat. Nos. 4,845,205; 5,130,302; 5,134,066; 5,175,273; 5,367,066; 5,432,272; 5,457,187; 5,459,255; 5,484,908; 5,502,177; 5,525,711; 5,552,540; 5,587,469; 5,596,091; 5,614,617; 5,750,692, and 5,681,941, each of which is herein incorporated by reference.

[0131] In some embodiments, the single stranded oligonucleotides are chemically linked to one or more moieties or conjugates that enhance the activity, cellular distribution, or cellular uptake of the oligonucleotide. For example, one or more single stranded oligonucleotides, of the same or different types, can be conjugated to each other; or single stranded oligonucleotides can be conjugated to targeting moieties with enhanced specificity for a cell type or tissue type. Such moieties include, but are not limited to, lipid moieties such as a cholesterol moiety (Letsinger et al., Proc. Natl. Acad. Sci. USA, 1989, 86, 6553-6556), cholic acid (Manoharan et al., Bioorg. Med. Chem. Let., 1994, 4, 1053-1060), a thioether, e.g., hexyl-S-tritylthiol (Manoharan et al, Ann. N. Y. Acad. Sci., 1992, 660, 306-309; Manoharan et al., Bioorg. Med. Chem. Let., 1993, 3, 2765-2770), a thiocholesterol (Oberhauser et al., Nucl. Acids Res., 1992, 20, 533-538), an aliphatic chain, e.g., dodecandiol or undecyl residues (Kabanov et al., FEBS Lett., 1990, 259, 327-330; Svinarchuk et al., Biochimie, 1993, 75, 49-54), a phospholipid, e.g., di-hexadecyl-rac-glycerol or triethylammonium 1,2-di-O-hexadecyl-rac-glycero-3-H-phosphonate (Manoharan et al., Tetrahedron Lett., 1995, 36, 3651-3654; Shea et al., Nucl. Acids Res., 1990, 18, 3777-3783), a polyamine or a polyethylene glycol chain (Mancharan et al., Nucleosides & Nucleotides, 1995, 14, 969-973), or adamantane acetic acid (Manoharan et al., Tetrahedron Lett., 1995, 36, 3651-3654), a palmityl moiety (Mishra et al., Biochim. Biophys. Acta, 1995, 1264, 229-237), or an octadecylamine or hexylamino-carbonyl-t oxycholesterol moiety (Crooke et al., J. Pharmacol. Exp. Ther., 1996, 277, 923-937). See also U.S. Pat. Nos. 4,828,979; 4,948,882; 5,218,105; 5,525,465; 5,541,313; 5,545,730; 5,552,538; 5,578,717, 5,580,731; 5,580,731; 5,591,584; 5,109,124; 5,118,802; 5,138,045; 5,414,077; 5,486,603; 5,512,439; 5,578,718; 5,608,046; 4,587,044; 4,605,735; 4,667,025; 4,762,779; 4,789,737; 4,824,941; 4,835,263; 4,876,335; 4,904,582; 4,958,013; 5,082,830; 5,112,963; 5,214,136; 5,082,830; 5,112,963; 5,214,136; 5,245,022; 5,254,469; 5,258,506; 5,262,536; 5,272,250; 5,292,873; 5,317,098; 5,371,241, 5,391,723; 5,416,203, 5,451,463; 5,510,475; 5,512,667; 5,514,785; 5,565,552; 5,567,810; 5,574,142; 5,585,481; 5,587,371; 5,595,726; 5,597,696; 5,599,923; 5,599,928 and 5,688,941, each of which is herein incorporated by reference.

[0132] These moieties or conjugates can include conjugate groups covalently bound to functional groups such as primary or secondary hydroxyl groups. Conjugate groups of the invention include intercalators, reporter molecules, polyamines, polyamides, polyethylene glycols, polyethers, groups that enhance the pharmacodynamic properties of oligomers, and groups that enhance the pharmacokinetic properties of oligomers. Typical conjugate groups include cholesterols, lipids, phospholipids, biotin, phenazine, folate, phenanthridine, anthraquinone, acridine, fluoresceins, rhodamines, coumarins, and dyes. Groups that enhance the pharmacodynamic properties, in the context of this invention, include groups that improve uptake, enhance resistance to degradation, and/or strengthen sequence-specific hybridization with the target nucleic acid. Groups that enhance the pharmacokinetic properties, in the context of this invention, include groups that improve uptake, distribution, metabolism or excretion of the compounds of the present invention. Representative conjugate groups are disclosed in International Patent Application No. PCT/US92/09196, filed Oct. 23, 1992, and U.S. Pat. No. 6,287,860, which are incorporated herein by reference. Conjugate moieties include, but are not limited to, lipid moieties such as a cholesterol moiety, cholic acid, a thioether, e.g., hexyl-5-tritylthiol, a thiocholesterol, an aliphatic chain, e.g., dodecandiol or undecyl residues, a phospholipid, e.g., di-hexadecyl-rac-glycerol or triethylammonium 1,2-di-O-hexadecyl-rac-glycero-3-H-phosphonate, a polyamine or a polyethylene glycol chain, or adamantane acetic acid, a palmityl moiety, or an octadecylamine or hexylamino-carbonyl-oxy cholesterol moiety. See, e.g., U.S. Pat. Nos. 4,828,979; 4,948,882; 5,218,105; 5,525,465; 5,541,313; 5,545,730; 5,552,538; 5,578,717, 5,580,731; 5,580,731; 5,591,584; 5,109,124; 5,118,802; 5,138,045; 5,414,077; 5,486,603; 5,512,439; 5,578,718; 5,608,046; 4,587,044; 4,605,735; 4,667,025; 4,762,779; 4,789,737; 4,824,941; 4,835,263; 4,876,335; 4,904,582; 4,958,013; 5,082,830; 5,112,963; 5,214,136; 5,082,830; 5,112,963; 5,214,136; 5,245,022; 5,254,469; 5,258,506; 5,262,536; 5,272,250; 5,292,873; 5,317,098; 5,371,241, 5,391,723; 5,416,203, 5,451,463; 5,510,475; 5,512,667; 5,514,785; 5,565,552; 5,567,810; 5,574,142; 5,585,481; 5,587,371; 5,595,726; 5,597,696; 5,599,923; 5,599,928 and 5,688,941.

[0133] In some embodiments, single stranded oligonucleotide modification include modification of the 5′ or 3′ end of the oligonucleotide. In some embodiments, the 3′ end of the oligonucleotide comprises a hydroxyl group or a thiophosphate. It should be appreciated that additional molecules (e.g. a biotin moiety or a fluorophor) can be conjugated to the 5′ or 3′ end of the single stranded oligonucleotide. In some embodiments, the single stranded oligonucleotide comprises a biotin moiety conjugated to the 5′ nucleotide.

[0134] In some embodiments, the single stranded oligonucleotide comprises locked nucleic acids (LNA), ENA modified nucleotides, 2′-O-methyl nucleotides, or 2′-fluoro-deoxyribonucleotides. In some embodiments, the single stranded oligonucleotide comprises alternating deoxyribonucleotides and 2′-fluoro-deoxyribonucleotides. In some embodiments, the single stranded oligonucleotide comprises alternating deoxyribonucleotides and 2′-O-methyl nucleotides. In some embodiments, the single stranded oligonucleotide comprises alternating deoxyribonucleotides and ENA modified nucleotides. In some embodiments, the single stranded oligonucleotide comprises alternating deoxyribonucleotides and locked nucleic acid nucleotides. In some embodiments, the single stranded oligonucleotide comprises alternating locked nucleic acid nucleotides and 2′-O-methyl nucleotides.

[0135] In some embodiments, the 5′ nucleotide of the oligonucleotide is a deoxyribonucleotide. In some embodiments, the 5′ nucleotide of the oligonucleotide is a locked nucleic acid nucleotide. In some embodiments, the nucleotides of the oligonucleotide comprise deoxyribonucleotides flanked by at least one locked nucleic acid nucleotide on each of the 5′ and 3′ ends of the deoxyribonucleotides. In some embodiments, the nucleotide at the 3′ position of the oligonucleotide has a 3′ hydroxyl group or a 3′ thiophosphate.

[0136] In some embodiments, the single stranded oligonucleotide comprises phosphorothioate internucleotide linkages. In some embodiments, the single stranded oligonucleotide comprises phosphorothioate internucleotide linkages between at least two nucleotides. In some embodiments, the single stranded oligonucleotide comprises phosphorothioate internucleotide linkages between all nucleotides.

[0137] It should be appreciated that the single stranded oligonucleotide can have any combination of modifications as described herein.

[0138] The oligonucleotide may comprise a nucleotide sequence having one or more of the following modification patterns.

[0139] (a) (X)Xxxxxx, (X)xXxxxx, (X)xxXxxx, (X)xxxXxx, (X)xxxxXx and (X)xxxxxX,

[0140] (b) (X)XXxxxx, (X)XxXxxx, (X)XxxXxx, (X)XxxxXx, (X)XxxxxX, (X)xXXxxx, (X)xXxXxx, (X)xXxxXx, (X)xXxxxX, (X)xxXXxx, (X)xxXxXx, (X)xxXxxX, (X)xxxXXx, (X)xxxXxX and (X)xxxxXX,

[0141] (c) (X)XXXxxx, (X)xXXXxx, (X)xxXXXx, (X)xxxXXX, (X)XXxXxx, (X)XXxxXx, (X)XXxxxX, (X)xXXxXx, (X)xXXxxX, (X)xxXXxX, (X)XxXXxx, (X)XxxXXx (X)XxxxXX, (X)xXxXXx, (X)xXxxXX, (X)xxXxXX, (X)xXxXxX and (X)XxXxXx,

[0142] (d) (X)xxXXX, (X)xXxXXX, (X)xXXxXX, (X)xXXXxX, (X)xXXXXx, (X)XxxXXXX, (X)XxXxXX, (X)XxXXxX, (X)XxXXx, (X)XXxxXX, (X)XXxXxX, (X)XXxXXx, (X)XXXxxX, (X)XXXxXx, and (X)XXXXxx,

[0143] (e) (X)xXXXXX, (X)XxXXXX, (X)XXxXXX, (X)XXXxXX, (X)XXXXxX and (X)XXXXXx, and

[0144] (f) XXXXXX, XxXXXXX, XXxXXXX, XXXxXXX, XXXXxXX, XXXXXxX and XXXXXXx, in which “X” denotes a nucleotide analogue, (X) denotes an optional nucleotide analogue, and “x” denotes a DNA or RNA nucleotide unit. Each of the above listed patterns may appear one or more times within an oligonucleotide, alone or in combination with any of the other disclosed modification patterns.

### Methods for Modulating Gene Expression

[0145] In one aspect, the invention relates to methods for modulating gene expression in a cell (e.g., a cell for which PTEN levels are reduced) for research purposes (e.g., to study the function of the gene in the cell). In another aspect, the invention relates to methods for modulating gene expression in a cell (e.g., a cell for which PTEN levels are reduced) for gene or epigenetic therapy. The cells can be in vitro, ex vivo, or in vivo (e.g., in a subject who has a disease resulting from reduced expression or activity of PTEN. In some embodiments, methods for modulating gene expression in a cell comprise delivering a single stranded oligonucleotide as described herein. In some embodiments, delivery of the single stranded oligonucleotide to the cell results in a level of expression of gene that is at least 5%, 10%, 20%, 30%, 40%, 50%, 60%, 70%, 80%, 90%, 100%, 200% or more greater than a level of expression of gene in a control cell to which the single stranded oligonucleotide has not been delivered. In certain embodiments, delivery of the single stranded oligonucleotide to the cell results in a level of expression of gene that is at least 50% greater than a level of expression of gene in a control cell to which the single stranded oligonucleotide has not been delivered.

[0146] In another aspect of the invention, methods comprise administering to a subject (e.g. a human) a composition comprising a single stranded oligonucleotide as described herein to increase protein levels in the subject. In some embodiments, the increase in protein levels is at least 5%, 10%, 20%, 30%, 40%, 50%, 60%, 70%, 80%, 90%, 100%, 200%, or more, higher than the amount of a protein in the subject before administering.

[0147] As another example, to increase expression of PTEN in a cell, the methods include introducing into the cell a single stranded oligonucleotide that is sufficiently complementary to a PRC2-associated region (e.g., of a long non-coding RNA) that maps to a genomic position encompassing or in proximity to the PTEN gene.

[0148] In another aspect of the invention provides methods of treating a condition (e.g., cancer) associated with decreased levels of expression of PTEN in a subject, the method comprising administering a single stranded oligonucleotide as described herein. In some embodiments, the condition is cancer. Examples of cancer include but are not limited to leukemias, lymphomas, myelomas, carcinomas, metastatic carcinomas, sarcomas, adenomas, nervous system cancers and genito-urinary cancers. In some embodiments, the cancer is adult and pediatric acute lymphoblastic leukemia, acute myeloid leukemia, adrenocortical carcinoma, AIDS-related cancers, anal cancer, cancer of the appendix, astrocytoma, basal cell carcinoma, bile duct cancer, bladder cancer, bone cancer, osteosarcoma, fibrous histiocytoma, brain cancer, brain stem glioma, cerebellar astrocytoma, malignant glioma, ependymoma, medulloblastoma, supratentorial primitive neuroectodermal tumors, hypothalamic glioma, breast cancer, male breast cancer, bronchial adenomas, Burkitt lymphoma, carcinoid tumor, carcinoma of unknown origin, central nervous system lymphoma, cerebellar astrocytoma, malignant glioma, cervical cancer, childhood cancers, chronic lymphocytic leukemia, chronic myelogenous leukemia, chronic myeloproliferative disorders, colorectal cancer, cutaneous T-cell lymphoma, endometrial cancer, ependymoma, esophageal cancer, Ewing family tumors, extracranial germ cell tumor, extragonadal germ cell tumor, extrahepatic bile duct cancer, intraocular melanoma, retinoblastoma, gallbladder cancer, gastric cancer, gastrointestinal stromal tumor, extracranial germ cell tumor, extragonadal germ cell tumor, ovarian germ cell tumor, gestational trophoblastic tumor, glioma, hairy cell leukemia, head and neck cancer, hepatocellular cancer, Hodgkin lymphoma, non-Hodgkin lymphoma, hypopharyngeal cancer, hypothalamic and visual pathway glioma, intraocular melanoma, islet cell tumors, Kaposi sarcoma, kidney cancer, renal cell cancer, laryngeal cancer, lip and oral cavity cancer, small cell lung cancer, non-small cell lung cancer, primary central nervous system lymphoma, Waldenstrom macroglobulinema, malignant fibrous histiocytoma, medulloblastoma, melanoma, Merkel cell carcinoma, malignant mesothelioma, squamous neck cancer, multiple endocrine neoplasia syndrome, multiple myeloma, mycosis fungoides, myelodysplastic syndromes, myeloproliferative disorders, chronic myeloproliferative disorders, nasal cavity and paranasal sinus cancer, nasopharyngeal cancer, neuroblastoma, oropharyngeal cancer, ovarian cancer, pancreatic cancer, parathyroid cancer, penile cancer, pharyngeal cancer, pheochromocytoma, pineoblastoma and supratentorial primitive neuroectodermal tumors, pituitary cancer, plasma cell neoplasms, pleuropulmonary blastoma, prostate cancer, rectal cancer, rhabdomyosarcoma, salivary gland cancer, soft tissue sarcoma, uterine sarcoma, Sezary syndrome, non-melanoma skin cancer, small intestine cancer, squamous cell carcinoma, squamous neck cancer, supratentorial primitive neuroectodermal tumors, testicular cancer, throat cancer, thymoma and thymic carcinoma, thyroid cancer, transitional cell cancer, trophoblastic tumors, urethral cancer, uterine cancer, uterine sarcoma, vaginal cancer, vulvar cancer, or Wilms tumor. In some embodiments, the cancer is prostate cancer or breast cancer.

[0149] A subject can include a non-human mammal, e.g. mouse, rat, guinea pig, rabbit, cat, dog, goat, cow, or horse. In preferred embodiments, a subject is a human. Single stranded oligonucleotides have been employed as therapeutic moieties in the treatment of disease states in animals, including humans. Single stranded oligonucleotides can be useful therapeutic modalities that can be configured to be useful in treatment regimes for the treatment of cells, tissues and animals, especially humans.

[0150] For therapeutics, an animal, preferably a human, suspected of having cancer, e.g., breast or prostate cancer, is treated by administering single stranded oligonucleotide in accordance with this invention. For example, in one non-limiting embodiment, the methods comprise the step of administering to the animal in need of treatment, a therapeutically effective amount of a single stranded oligonucleotide as described herein.

### Formulation, Delivery, And Dosing

[0151] The oligonucleotides described herein can be formulated for administration to a subject for treating a condition (e.g., cancer) associated with decreased levels of PTEN. It should be understood that the formulations, compositions and methods can be practiced with any of the oligonucleotides disclosed herein.

[0152] The formulations may conveniently be presented in unit dosage form and may be prepared by any methods well known in the art of pharmacy. The amount of active ingredient (e.g., an oligonucleotide or compound of the invention) which can be combined with a carrier material to produce a single dosage form will vary depending upon the host being treated, the particular mode of administration, e.g., intradermal or inhalation. The amount of active ingredient which can be combined with a carrier material to produce a single dosage form will generally be that amount of the compound which produces a therapeutic effect, e.g. tumor regression.

[0153] Pharmaceutical formulations of this invention can be prepared according to any method known to the art for the manufacture of pharmaceuticals. Such formulations can contain sweetening agents, flavoring agents, coloring agents and preserving agents. A formulation can be admixtured with nontoxic pharmaceutically acceptable excipients which are suitable for manufacture. Formulations may comprise one or more diluents, emulsifiers, preservatives, buffers, excipients, etc. and may be provided in such forms as liquids, powders, emulsions, lyophilized powders, sprays, creams, lotions, controlled release formulations, tablets, pills, gels, on patches, in implants, etc.

[0154] A formulated single stranded oligonucleotide composition can assume a variety of states. In some examples, the composition is at least partially crystalline, uniformly crystalline, and/or anhydrous (e.g., less than 80, 50, 30, 20, or 10% water). In another example, the single stranded oligonucleotide is in an aqueous phase, e.g., in a solution that includes water. The aqueous phase or the crystalline compositions can, e.g., be incorporated into a delivery vehicle, e.g., a liposome (particularly for the aqueous phase) or a particle (e.g., a microparticle as can be appropriate for a crystalline composition). Generally, the single stranded oligonucleotide composition is formulated in a manner that is compatible with the intended method of administration.

[0155] In some embodiments, the composition is prepared by at least one of the following methods: spray drying, lyophilization, vacuum drying, evaporation, fluid bed drying, or a combination of these techniques; or sonication with a lipid, freeze-drying, condensation and other self-assembly.

[0156] A single stranded oligonucleotide preparation can be formulated or administered (together or separately) in combination with another agent, e.g., another therapeutic agent or an agent that stabilizes a single stranded oligonucleotide, e.g., a protein that complexes with single stranded oligonucleotide. Still other agents include chelators, e.g., EDTA (e.g., to remove divalent cations such as Mg²⁺), salts, RNAse inhibitors (e.g., a broad specificity RNAse inhibitor such as RNAsin) and so forth.

[0157] In one embodiment, the single stranded oligonucleotide preparation includes another single stranded oligonucleotide, e.g., a second single stranded oligonucleotide that modulates expression of a second gene or a second single stranded oligonucleotide that modulates expression of the first gene. Still other preparation can include at least 3, 5, ten, twenty, fifty, or a hundred or more different single stranded oligonucleotide species. Such single stranded oligonucleotides can mediated gene expression with respect to a similar number of different genes.

[0158] In one embodiment, the single stranded oligonucleotide preparation includes at least a second therapeutic agent (e.g., an agent other than an oligonucleotide). For example, e.g., a single stranded oligonucleotide composition for the treatment of a cancer might further comprise a chemotherapeutic agent.

### Route of Delivery

[0159] A composition that includes a single stranded oligonucleotide can be delivered to a subject by a variety of routes. Exemplary routes include: intravenous, intradermal, topical, rectal, parenteral, anal, intravaginal, intranasal, pulmonary, ocular. The term “therapeutically effective amount” is the amount of oligonucleotide present in the composition that is needed to provide the desired level of PTEN expression in the subject to be treated to give the anticipated physiological response. The term “physiologically effective amount” is that amount delivered to a subject to give the desired palliative or curative effect. The term “pharmaceutically acceptable carrier” means that the carrier can be administered to a subject with no significant adverse toxicological effects to the subject.

[0160] The single stranded oligonucleotide molecules of the invention can be incorporated into pharmaceutical compositions suitable for administration. Such compositions typically include one or more species of single stranded oligonucleotide and a pharmaceutically acceptable carrier. As used herein the language “pharmaceutically acceptable carrier” is intended to include any and all solvents, dispersion media, coatings, antibacterial and antifungal agents, isotonic and absorption delaying agents, and the like, compatible with pharmaceutical administration. The use of such media and agents for pharmaceutically active substances is well known in the art. Except insofar as any conventional media or agent is incompatible with the active compound, use thereof in the compositions is contemplated. Supplementary active compounds can also be incorporated into the compositions.

[0161] The pharmaceutical compositions of the present invention may be administered in a number of ways depending upon whether local or systemic treatment is desired and upon the area to be treated. Administration may be topical (including ophthalmic, vaginal, rectal, intranasal, transdermal), oral or parenteral. Parenteral administration includes intravenous drip, subcutaneous, intraperitoneal or intramuscular injection, or intrathecal or intraventricular administration.

[0162] The route and site of administration may be chosen to enhance targeting. For example, to target muscle cells, intramuscular injection into the muscles of interest would be a logical choice. Lung cells might be targeted by administering the single stranded oligonucleotide in aerosol form. The vascular endothelial cells could be targeted by coating a balloon catheter with the single stranded oligonucleotide and mechanically introducing the oligonucleotide.

[0163] Topical administration refers to the delivery to a subject by contacting the formulation directly to a surface of the subject. The most common form of topical delivery is to the skin, but a composition disclosed herein can also be directly applied to other surfaces of the body, e.g., to the eye, a mucous membrane, to surfaces of a body cavity or to an internal surface. As mentioned above, the most common topical delivery is to the skin. The term encompasses several routes of administration including, but not limited to, topical and transdermal. These modes of administration typically include penetration of the skin's permeability barrier and efficient delivery to the target tissue or stratum. Topical administration can be used as a means to penetrate the epidermis and dermis and ultimately achieve systemic delivery of the composition. Topical administration can also be used as a means to selectively deliver oligonucleotides to the epidermis or dermis of a subject, or to specific strata thereof, or to an underlying tissue.

[0164] Formulations for topical administration may include transdermal patches, ointments, lotions, creams, gels, drops, suppositories, sprays, liquids and powders. Conventional pharmaceutical carriers, aqueous, powder or oily bases, thickeners and the like may be necessary or desirable. Coated condoms, gloves and the like may also be useful.

[0165] Transdermal delivery is a valuable route for the administration of lipid soluble therapeutics. The dermis is more permeable than the epidermis and therefore absorption is much more rapid through abraded, burned or denuded skin. Inflammation and other physiologic conditions that increase blood flow to the skin also enhance transdermal adsorption. Absorption via this route may be enhanced by the use of an oily vehicle (inunction) or through the use of one or more penetration enhancers. Other effective ways to deliver a composition disclosed herein via the transdermal route include hydration of the skin and the use of controlled release topical patches. The transdermal route provides a potentially effective means to deliver a composition disclosed herein for systemic and/or local therapy. In addition, iontophoresis (transfer of ionic solutes through biological membranes under the influence of an electric field), phonophoresis or sonophoresis (use of ultrasound to enhance the absorption of various therapeutic agents across biological membranes, notably the skin and the cornea), and optimization of vehicle characteristics relative to dose position and retention at the site of administration may be useful methods for enhancing the transport of topically applied compositions across skin and mucosal sites.

[0166] Both the oral and nasal membranes offer advantages over other routes of administration. For example, oligonucleotides administered through these membranes may have a rapid onset of action, provide therapeutic plasma levels, avoid first pass effect of hepatic metabolism, and avoid exposure of the oligonucleotides to the hostile gastrointestinal (GI) environment. Additional advantages include easy access to the membrane sites so that the oligonucleotide can be applied, localized and removed easily.

[0167] In oral delivery, compositions can be targeted to a surface of the oral cavity, e.g., to sublingual mucosa which includes the membrane of ventral surface of the tongue and the floor of the mouth or the buccal mucosa which constitutes the lining of the cheek. The sublingual mucosa is relatively permeable thus giving rapid absorption and acceptable bioavailability of many agents. Further, the sublingual mucosa is convenient, acceptable and easily accessible.

[0168] A pharmaceutical composition of single stranded oligonucleotide may also be administered to the buccal cavity of a human being by spraying into the cavity, without inhalation, from a metered dose spray dispenser, a mixed micellar pharmaceutical formulation as described above and a propellant. In one embodiment, the dispenser is first shaken prior to spraying the pharmaceutical formulation and propellant into the buccal cavity.

[0169] Compositions for oral administration include powders or granules, suspensions or solutions in water, syrups, slurries, emulsions, elixirs or non-aqueous media, tablets, capsules, lozenges, or troches. In the case of tablets, carriers that can be used include lactose, sodium citrate and salts of phosphoric acid. Various disintegrants such as starch, and lubricating agents such as magnesium stearate, sodium lauryl sulfate and talc, are commonly used in tablets. For oral administration in capsule form, useful diluents are lactose and high molecular weight polyethylene glycols. When aqueous suspensions are required for oral use, the nucleic acid compositions can be combined with emulsifying and suspending agents. If desired, certain sweetening and/or flavoring agents can be added.

[0170] Parenteral administration includes intravenous drip, subcutaneous, intraperitoneal or intramuscular injection, intrathecal or intraventricular administration. In some embodiments, parental administration involves administration directly to the site of disease (e.g. injection into a tumor).

[0171] Formulations for parenteral administration may include sterile aqueous solutions which may also contain buffers, diluents and other suitable additives. Intraventricular injection may be facilitated by an intraventricular catheter, for example, attached to a reservoir. For intravenous use, the total concentration of solutes should be controlled to render the preparation isotonic.

[0172] Any of the single stranded oligonucleotides described herein can be administered to ocular tissue. For example, the compositions can be applied to the surface of the eye or nearby tissue, e.g., the inside of the eyelid. For ocular administration, ointments or droppable liquids may be delivered by ocular delivery systems known to the art such as applicators or eye droppers. Such compositions can include mucomimetics such as hyaluronic acid, chondroitin sulfate, hydroxypropyl methylcellulose or poly(vinyl alcohol), preservatives such as sorbic acid, EDTA or benzylchronium chloride, and the usual quantities of diluents and/or carriers. The single stranded oligonucleotide can also be administered to the interior of the eye, and can be introduced by a needle or other delivery device which can introduce it to a selected area or structure.

[0173] Pulmonary delivery compositions can be delivered by inhalation by the patient of a dispersion so that the composition, preferably single stranded oligonucleotides, within the dispersion can reach the lung where it can be readily absorbed through the alveolar region directly into blood circulation. Pulmonary delivery can be effective both for systemic delivery and for localized delivery to treat diseases of the lungs.

[0174] Pulmonary delivery can be achieved by different approaches, including the use of nebulized, aerosolized, micellular and dry powder-based formulations. Delivery can be achieved with liquid nebulizers, aerosol-based inhalers, and dry powder dispersion devices. Metered-dose devices are preferred. One of the benefits of using an atomizer or inhaler is that the potential for contamination is minimized because the devices are self-contained. Dry powder dispersion devices, for example, deliver agents that may be readily formulated as dry powders. A single stranded oligonucleotide composition may be stably stored as lyophilized or spray-dried powders by itself or in combination with suitable powder carriers. The delivery of a composition for inhalation can be mediated by a dosing timing element which can include a timer, a dose counter, time measuring device, or a time indicator which when incorporated into the device enables dose tracking, compliance monitoring, and/or dose triggering to a patient during administration of the aerosol medicament.

[0175] The term “powder” means a composition that consists of finely dispersed solid particles that are free flowing and capable of being readily dispersed in an inhalation device and subsequently inhaled by a subject so that the particles reach the lungs to permit penetration into the alveoli. Thus, the powder is said to be “respirable.” Preferably the average particle size is less than about 10 μm in diameter preferably with a relatively uniform spheroidal shape distribution. More preferably the diameter is less than about 7.5 μm and most preferably less than about 5.0 μm. Usually the particle size distribution is between about 0.1 μm and about 5 μm in diameter, particularly about 0.3 μm to about 5 μm.

[0176] The term “dry” means that the composition has a moisture content below about 10% by weight (% w) water, usually below about 5% w and preferably less it than about 3% w. A dry composition can be such that the particles are readily dispersible in an inhalation device to form an aerosol.

[0177] The types of pharmaceutical excipients that are useful as carrier include stabilizers such as human serum albumin (HSA), bulking agents such as carbohydrates, amino acids and polypeptides; pH adjusters or buffers; salts such as sodium chloride; and the like. These carriers may be in a crystalline or amorphous form or may be a mixture of the two.

[0178] Suitable pH adjusters or buffers include organic salts prepared from organic acids and bases, such as sodium citrate, sodium ascorbate, and the like; sodium citrate is preferred. Pulmonary administration of a micellar single stranded oligonucleotide formulation may be achieved through metered dose spray devices with propellants such as tetrafluoroethane, heptafluoroethane, dimethylfluoropropane, tetrafluoropropane, butane, isobutane, dimethyl ether and other non-CFC and CFC propellants.

[0179] Exemplary devices include devices which are introduced into the vasculature, e.g., devices inserted into the lumen of a vascular tissue, or which devices themselves form a part of the vasculature, including stents, catheters, heart valves, and other vascular devices. These devices, e.g., catheters or stents, can be placed in the vasculature of the lung, heart, or leg.

[0180] Other devices include non-vascular devices, e.g., devices implanted in the peritoneum, or in organ or glandular tissue, e.g., artificial organs. The device can release a therapeutic substance in addition to a single stranded oligonucleotide, e.g., a device can release insulin.

[0181] In one embodiment, unit doses or measured doses of a composition that includes single stranded oligonucleotide are dispensed by an implanted device. The device can include a sensor that monitors a parameter within a subject. For example, the device can include pump, e.g., and, optionally, associated electronics.

[0182] Tissue, e.g., cells or organs can be treated with a single stranded oligonucleotide, ex vivo and then administered or implanted in a subject. The tissue can be autologous, allogeneic, or xenogeneic tissue. E.g., tissue can be treated to reduce graft v. host disease. In other embodiments, the tissue is allogeneic and the tissue is treated to treat a disorder characterized by unwanted gene expression in that tissue. E.g., tissue, e.g., hematopoietic cells, e.g., bone marrow hematopoietic cells, can be treated to inhibit unwanted cell proliferation. Introduction of treated tissue, whether autologous or transplant, can be combined with other therapies. In some implementations, the single stranded oligonucleotide treated cells are insulated from other cells, e.g., by a semi-permeable porous barrier that prevents the cells from leaving the implant, but enables molecules from the body to reach the cells and molecules produced by the cells to enter the body. In one embodiment, the porous barrier is formed from alginate.

[0183] In one embodiment, a contraceptive device is coated with or contains a single stranded oligonucleotide. Exemplary devices include condoms, diaphragms, IUD (implantable uterine devices, sponges, vaginal sheaths, and birth control devices.

### Dosage

[0184] In one aspect, the invention features a method of administering a single stranded oligonucleotide (e.g., as a compound or as a component of a composition) to a subject (e.g., a human subject). In one embodiment, the unit dose is between about 10 mg and 25 mg per kg of bodyweight. In one embodiment, the unit dose is between about 1 mg and 100 mg per kg of bodyweight. In one embodiment, the unit dose is between about 0.1 mg and 500 mg per kg of bodyweight. In some embodiments, the unit dose is more than 0.001, 0.005, 0.01, 0.05, 0.1, 0.5, 1, 2, 5, 10, 25, 50 or 100 mg per kg of bodyweight.

[0185] The defined amount can be an amount effective to treat or prevent a disease or disorder, e.g., a disease or disorder associated with the PTEN. The unit dose, for example, can be administered by injection (e.g., intravenous or intramuscular), an inhaled dose, or a topical application.

[0186] In some embodiments, the unit dose is administered daily. In some embodiments, less frequently than once a day, e.g., less than every 2, 4, 8 or 30 days. In another embodiment, the unit dose is not administered with a frequency (e.g., not a regular frequency). For example, the unit dose may be administered a single time. In some embodiments, the unit dose is administered more than once a day, e.g., once an hour, two hours, four hours, eight hours, twelve hours, etc.

[0187] In one embodiment, a subject is administered an initial dose and one or more maintenance doses of a single stranded oligonucleotide. The maintenance dose or doses are generally lower than the initial dose, e.g., one-half less of the initial dose. A maintenance regimen can include treating the subject with a dose or doses ranging from 0.0001 to 100 mg/kg of body weight per day, e.g., 100, 10, 1, 0.1, 0.01, 0.001, or 0.0001 mg per kg of bodyweight per day. The maintenance doses may be administered no more than once every 1, 5, 10, or 30 days. Further, the treatment regimen may last for a period of time which will vary depending upon the nature of the particular disease, its severity and the overall condition of the patient. In some embodiments the dosage may be delivered no more than once per day, e.g., no more than once per 24, 36, 48, or more hours, e.g., no more than once for every 5 or 8 days. Following treatment, the patient can be monitored for changes in his condition and for alleviation of the symptoms of the disease state. The dosage of the oligonucleotide may either be increased in the event the patient does not respond significantly to current dosage levels, or the dose may be decreased if an alleviation of the symptoms of the disease state is observed, if the disease state has been ablated, or if undesired side-effects are observed.

[0188] The effective dose can be administered in a single dose or in two or more doses, as desired or considered appropriate under the specific circumstances. If desired to facilitate repeated or frequent infusions, implantation of a delivery device, e.g., a pump, semi-permanent stent (e.g., intravenous, intraperitoneal, intracisternal or intracapsular), or reservoir may be advisable.

[0189] In some embodiments, the oligonucleotide pharmaceutical composition includes a plurality of single stranded oligonucleotide species. In another embodiment, the single stranded oligonucleotide species has sequences that are non-overlapping and non-adjacent to another species with respect to a naturally occurring target sequence (e.g., a PRC2-associated region). In another embodiment, the plurality of single stranded oligonucleotide species is specific for different PRC2-associated regions. In another embodiment, the single stranded oligonucleotide is allele specific.

[0190] In some cases, a patient is treated with a single stranded oligonucleotide in conjunction with other therapeutic modalities. For example, a patient being treated for cancer may be administered a single stranded oligonucleotide in conjunction with a chemotherapy.

[0191] Following successful treatment, it may be desirable to have the patient undergo maintenance therapy to prevent the recurrence of the disease state, wherein the compound of the invention is administered in maintenance doses, ranging from 0.0001 mg to 100 mg per kg of body weight.

[0192] The concentration of the single stranded oligonucleotide composition is an amount sufficient to be effective in treating or preventing a disorder or to regulate a physiological condition in humans. The concentration or amount of single stranded oligonucleotide administered will depend on the parameters determined for the agent and the method of administration, e.g. nasal, buccal, pulmonary. For example, nasal formulations may tend to require much lower concentrations of some ingredients in order to avoid irritation or burning of the nasal passages. It is sometimes desirable to dilute an oral formulation up to 10-100 times in order to provide a suitable nasal formulation.

[0193] Certain factors may influence the dosage required to effectively treat a subject, including but not limited to the severity of the disease or disorder, previous treatments, the general health and/or age of the subject, and other diseases present. Moreover, treatment of a subject with a therapeutically effective amount of a single stranded oligonucleotide can include a single treatment or, preferably, can include a series of treatments. It will also be appreciated that the effective dosage of a single stranded oligonucleotide used for treatment may increase or decrease over the course of a particular treatment. For example, the subject can be monitored after administering a single stranded oligonucleotide composition. Based on information from the monitoring, an additional amount of the single stranded oligonucleotide composition can be administered.

[0194] Dosing is dependent on severity and responsiveness of the disease condition to be treated, with the course of treatment lasting from several days to several months, or until a cure is effected or a diminution of disease state is achieved. Optimal dosing schedules can be calculated from measurements of PTEN expression levels in the body of the patient. Persons of ordinary skill can easily determine optimum dosages, dosing methodologies and repetition rates. Optimum dosages may vary depending on the relative potency of individual compounds, and can generally be estimated based on EC50s found to be effective in in vitro and in vivo animal models. In some embodiments, the animal models include transgenic animals that express a human PTEN. In another embodiment, the composition for testing includes a single stranded oligonucleotide that is complementary, at least in an internal region, to a sequence that is conserved between PTEN in the animal model and the PTEN in a human.

[0195] In one embodiment, the administration of the single stranded oligonucleotide composition is parenteral, e.g. intravenous (e.g., as a bolus or as a diffusible infusion), intradermal, intraperitoneal, intramuscular, intrathecal, intraventricular, intracranial, subcutaneous, transmucosal, buccal, sublingual, endoscopic, rectal, oral, vaginal, topical, pulmonary, intranasal, urethral or ocular. Administration can be provided by the subject or by another person, e.g., a health care provider. The composition can be provided in measured doses or in a dispenser which delivers a metered dose. Selected modes of delivery are discussed in more detail below.

### Kits

[0196] In certain aspects of the invention, kits are provided, comprising a container housing a composition comprising a single stranded oligonucleotide. In some embodiments, the composition is a pharmaceutical composition comprising a single stranded oligonucleotide and a pharmaceutically acceptable carrier. In some embodiments, the individual components of the pharmaceutical composition may be provided in one container. Alternatively, it may be desirable to provide the components of the pharmaceutical composition separately in two or more containers, e.g., one container for single stranded oligonucleotides, and at least another for a carrier compound. The kit may be packaged in a number of different configurations such as one or more containers in a single box. The different components can be combined, e.g., according to instructions provided with the kit. The components can be combined according to a method described herein, e.g., to prepare and administer a pharmaceutical composition. The kit can also include a delivery device.

[0197] The present invention is further illustrated by the following Examples, which in no way should be construed as further limiting. The entire contents of all of the references (including literature references, issued patents, published patent applications, and co-pending patent applications) cited throughout this application are hereby expressly incorporated by reference.

### EXAMPLES

[0198] The invention is further described in the following examples, which do not limit the scope of the invention described in the claims.

### Materials and Methods:

### Real Time PCR

[0199] RNA was harvested from the cells using Promega SV 96 Total RNA Isolation system or Trizol omitting the DNAse step. In separate pilot experiments, 50 ng of RNA was determined to be sufficient template for the reverse transcriptase reaction. RNA harvested from cells was normalized so that 50 ng of RNA was input to each reverse transcription reaction. For the few samples that were too dilute to reach this limit, the maximum input volume was added. Reverse transcriptase reaction was performed using the Superscript II kit and real time PCR performed on cDNA samples using icycler SYBR green chemistry (Biorad). A baseline level of mRNA expression for each target gene was determined through quantitative PCR as outlined above. Baseline levels were also determined for mRNA of various housekeeping genes which are constitutively expressed. A “control” housekeeping gene with approximately the same level of baseline expression as the target gene was chosen for comparison purposes.

### Cell Culture

[0200] Human hepatocyte Hep3B, human hepatocyte HepG2 cells, mouse hepatoma Hepa1-6 cells, and human renal proximal tubule epithelial cells (RPTEC) were cultured using conditions known in the art (see, e.g. Current Protocols in Cell Biology). Details of the cell lines used in the experiments described herein are provided in Table 5.

TABLE 5
Cell lines

| | | | | | | | Culture |
|---|---|---|---|---|---|---|---|
| Cell line | Source | Species | Gender | Cell Type | Tissue | Status | Conditions |
| HepG2 | ATCC | human | M | hepatocytes | liver | immortalized | Eagle's MEM + |
| | | | | | | | 10% FBS |
| Hepa1- | ATCC | mouse | N/A | hepatocytes | liver | immortalized | DMEM + 10% FBS |
| 6 | | | | | | | |
| Hep3B | ATCC | human | M | hepatocytes | liver | immortalized | Eagle's MEM + |
| | | | | | | | 10% FBS |
| Hepa | ATCC | mouse | N/A | hepatocytes | liver | immortalized | DMEM + 10% FBS |
| 1-6 | | | | | | | |

### Oligonucleotide Design

[0201] Oligonucleotides were designed within PRC2-interacting regions in order to upregulate PTEN. The sequence and structure of each oligonucleotide is shown in Table 2 or 5. The following table provides a description of the nucleotide analogs, modifications and intranucleotide linkages used for certain oligonucleotides tested and described in Table 2 or 5.

TABLE 3
Oligonucleotide Modifications

| Symbol | Feature Description |
|---|---|
| bio | 5′ biotin |
| dAs | DNA w/3′ thiophosphate |
| dCs | DNA w/3′ thiophosphate |
| dGs | DNA w/3′ thiophosphate |
| dTs | DNA w/3′ thiophosphate |
| dG | DNA |
| enaAs | ENA w/3′ thiophosphate |
| enaCs | ENA w/3′ thiophosphate |
| enaGs | ENA w/3′ thiophosphate |
| enaTs | ENA w/3′ thiophosphate |
| fluAs | 2′-fluoro w/3′ thiophosphate |
| fluCs | 2′-fluoro w/3′ thiophosphate |
| fluGs | 2′-fluoro w/3′ thiophosphate |
| fluUs | 2′-fluoro w/3′ thiophosphate |
| lnaAs | LNA w/3′ thiophosphate |
| lnaCs | LNA w/3′ thiophosphate |
| lnaGs | LNA w/3′ thiophosphate |
| lnaTs | LNA w/3′ thiophosphate |
| omeAs | 2′-OMe w/3′ thiophosphate |
| omeCs | 2′-OMe w/3′ thiophosphate |
| omeGs | 2′-OMe w/3′ thiophosphate |
| omeTs | 2′-OMe w/3′ thiophosphate |
| lnaAs-Sup | LNA w/3′ thiophosphate at 3′ terminus |
| lnaCs-Sup | LNA w/3′ thiophosphate at 3′ terminus |
| lnaGs-Sup | LNA w/3′ thiophosphate at 3′ terminus |
| lnaTs-Sup | LNA w/3′ thiophosphate at 3′ terminus |
| lnaA-Sup | LNA w/3′ OH at 3′ terminus |
| lnaC-Sup | LNA w/3′ OH at 3′ terminus |
| lnaG-Sup | LNA w/3′ OH at 3′ terminus |
| lnaT-Sup | LNA w/3′ OH at 3′ terminus |
| omeA-Sup | 2′-OMe w/3′ OH at 3′ terminus |
| omeC-Sup | 2′-OMe w/3′ OH at 3′ terminus |
| omeG-Sup | 2′-OMe w/3′ OH at 3′ terminus |
| omeU-Sup | 2′-OMe w/3′ OH at 3′ terminus |
| dAs-Sup | DNA w/3′ thiophosphate at 3′ terminus |
| dCs-Sup | DNA w/3′ thiophosphate at 3′ terminus |
| dGs-Sup | DNA w/3′ thiophosphate at 3′ terminus |
| dTs-Sup | DNA w/3′ thiophosphate at 3′ terminus |
| dA-Sup | DNA w/3′ OH at 3′ terminus |
| dC-Sup | DNA w/3′ OH at 3′ terminus |
| dG-Sup | DNA w/3′ OH at 3′ terminus |
| dT-Sup | DNA w/3′ OH at 3′ terminus |

In Vitro Transfection of Cells with Oligonucleotides

[0202] Cells were seeded into each well of 24-well plates at a density of 25,000 cells per 500 uL and transfections were performed with Lipofectamine and the single stranded oligonucleotides. Control wells contained Lipofectamine alone. At 48 hours post-transfection, approximately 200 uL of cell culture supernatants were stored at −80 C for ELISA. At 48 hours post-transfection, RNA was harvested from the cells and quantitative PCR was carried out as outlined above. The percent induction of target mRNA expression by each oligonucleotide was determined by normalizing mRNA levels in the presence of the oligonucleotide to the mRNA levels in the presence of control (Lipofectamine alone). This was compared side-by-side with the increase in mRNA expression of the “control” housekeeping gene.

### Results:

### In Vitro Delivery of Single Stranded Oligonucleotides Upregulated PTEN Expression

[0203] Oligonucleotides were designed as candidates for upregulating PTEN expression. Single stranded oligonucleotides were designed to be complementary to a PRC2-interacting region within a sequence as set forth in SEQ ID NO: 1, 2, 3, or 4. Multiple oligonucleotides were tested in at least duplicate. The sequence and structural features of the oligonucleotides are set forth in Table 4. Briefly, cells were transfected in vitro with each of the oligonucleotides as described above. PTEN expression in cells following treatment was evaluated by qRT-PCR. Oligonucleotides that upregulated PTEN expression were identified. Further details are outlined in Table 2 and FIGS. 1 and 2.

### Tables

TABLE 1
Hexamers that are not seed sequences of human miRNAs

AAAAAA, AAAAAG, AAAACA, AAAAGA, AAAAGC, AAAAGG, AAAAUA, AAACAA, AAACAC, AAACAG,
AAACAU, AAACCC, AAACCU, AAACGA, AAACGC, AAACGU, AAACUA, AAACUC, AAACUU, AAAGAU,
AAAGCC, AAAGGA, AAAGGG, AAAGUC, AAAUAC, AAAUAU, AAAUCG, AAAUCU, AAAUGC, AAAUGU,
AAAUUA, AAAUUG, AACAAC, AACAAG, AACAAU, AACACA, AACACG, AACAGA, AACAGC, AACAGG,
AACAUC, AACAUG, AACCAA, AACCAC, AACCAG, AACCAU, AACCCC, AACCCG, AACCGA, AACCGC,
AACCGG, AACCUA, AACCUU, AACGAA, AACGAC, AACGAG, AACGAU, AACGCU, AACGGG, AACGGU,
AACGUA, AACGUC, AACGUG, AACGUU, AACUAU, AACUCA, AACUCC, AACUCG, AACUGA, AACUGC,
AACUGU, AACUUA, AACUUC, AACUUG, AACUUU, AAGAAA, AAGAAG, AAGAAU, AAGACG, AAGAGA,
AAGAGC, AAGAGG, AAGAGU, AAGAUU, AAGCAA, AAGCAC, AAGCAG, AAGCAU, AAGCCA, AAGCCC,
AAGCCG, AAGCCU, AAGCGA, AAGCGG, AAGCGU, AAGCUA, AAGGAA, AAGGAC, AAGGCU, AAGGGC,
AAGGGU, AAGGUU, AAGUAA, AAGUAC, AAGUAU, AAGUCC, AAGUCG, AAGUGA, AAGUGG, AAGUUA,
AAGUUU, AAUAAA, AAUAAC, AAUAAG, AAUAAU, AAUACA, AAUACC, AAUACG, AAUAGA, AAUAGC,
AAUAGG, AAUAGU, AAUAUC, AAUAUU, AAUCAA, AAUCAU, AAUCCA, AAUCCC, AAUCCG, AAUCGA,
AAUCGC, AAUCGU, AAUCUA, AAUCUG, AAUCUU, AAUGAA, AAUGAC, AAUGAG, AAUGAU, AAUGCG,
AAUGCU, AAUGGA, AAUGGU, AAUGUA, AAUGUC, AAUGUG, AAUUAA, AAUUAC, AAUUAG, AAUUCC,
AAUUCG, AAUUGA, AAUUGG, AAUUGU, AAUUUC, AAUUUG, ACAAAA, ACAAAC, ACAAAG, ACAAAU,
ACAACC, ACAACG, ACAACU, ACAAGA, ACAAGC, ACAAGU, ACAAUC, ACAAUG, ACAAUU, ACACAG,
ACACCA, ACACCC, ACACCG, ACACCU, ACACGA, ACACGC, ACACGU, ACACUC, ACACUG, ACACUU,
ACAGAA, ACAGAC, ACAGCC, ACAGCG, ACAGCU, ACAGGG, ACAGUC, ACAGUG, ACAGUU, ACAUAA,
ACAUAC, ACAUCC, ACAUCG, ACAUCU, ACAUGA, ACAUGC, ACAUGU, ACAUUG, ACAUUU, ACCAAA,
ACCAAC, ACCAAG, ACCAAU, ACCACC, ACCACG, ACCAGA, ACCAGU, ACCAUA, ACCAUG, ACCAUU,
ACCCAA, ACCCAC, ACCCCA, ACCCCG, ACCCGA, ACCCGC, ACCCUA, ACCCUC, ACCCUU, ACCGAA,
ACCGAC, ACCGAU, ACCGCA, ACCGCC, ACCGCG, ACCGCU, ACCGGA, ACCGGC, ACCGGU, ACCGUA,
ACCGUC, ACCGUG, ACCGUU, ACCUAA, ACCUAC, ACCUAG, ACCUAU, ACCUCA, ACCUCC, ACCUCG,
ACCUCU, ACCUGA, ACCUGC, ACCUGU, ACCUUA, ACCUUC, ACCUUU, ACGAAA, ACGAAC, ACGAAG,
ACGAAU, ACGACA, ACGACC, ACGACG, ACGACU, ACGAGA, ACGAGC, ACGAGG, ACGAGU, ACGAUA,
ACGAUC, ACGAUG, ACGAUU, ACGCAA, ACGCAG, ACGCAU, ACGCCC, ACGCCG, ACGCCU, ACGCGA,
ACGCGG, ACGCGU, ACGCUA, ACGCUG, ACGCUU, ACGGAA, ACGGAC, ACGGAG, ACGGAU, ACGGCC,
ACGGCG, ACGGCU, ACGGGC, ACGGGG, ACGGGU, ACGGUA, ACGGUC, ACGGUG, ACGGUU, ACGUAA,
ACGUAC, ACGUAU, ACGUCC, ACGUCG, ACGUCU, ACGUGA, ACGUGC, ACGUGG, ACGUGU, ACGUUA,
ACGUUC, ACGUUG, ACGUUU, ACUAAA, ACUAAG, ACUAAU, ACUACA, ACUACC, ACUACG, ACUACU,
ACUAGG, ACUAUC, ACUAUG, ACUAUU, ACUCAU, ACUCCC, ACUCCG, ACUCCU, ACUCGA, ACUCGC,
ACUCGG, ACUCUC, ACUCUU, ACUGAG, ACUGAU, ACUGCC, ACUGCG, ACUGCU, ACUGGG, ACUGGU,
ACUGUC, ACUUAA, ACUUAC, ACUUAU, ACUUCA, ACUUCC, ACUUCG, ACUUCU, ACUUGA, ACUUGC,
ACUUGU, ACUUUA, ACUUUC, ACUUUG, AGAAAA, AGAAAC, AGAAAG, AGAACC, AGAACG, AGAACU,
AGAAGC, AGAAGU, AGAAUA, AGAAUC, AGAAUG, AGAAUU, AGACAA, AGACAC, AGACAU, AGACCA,
AGACCC, AGACCG, AGACCU, AGACGA, AGACGC, AGACGU, AGACUA, AGACUC, AGACUU, AGAGAC,
AGAGAG, AGAGAU, AGAGCC, AGAGCG, AGAGCU, AGAGGC, AGAGGG, AGAGGU, AGAGUA, AGAGUU,
AGAUAC, AGAUAG, AGAUAU, AGAUCC, AGAUCG, AGAUCU, AGAUGA, AGAUGC, AGAUGG, AGAUUA,
AGAUUC, AGAUUG, AGAUUU, AGCAAC, AGCACA, AGCACG, AGCACU, AGCAGA, AGCAUA, AGCAUC,
AGCAUG, AGCCAA, AGCCAU, AGCCCA, AGCCGA, AGCCGC, AGCCGG, AGCCGU, AGCCUA, AGCCUC,
AGCGAA, AGCGAG, AGCGAU, AGCGCA, AGCGCC, AGCGCG, AGCGCU, AGCGGA, AGCGGC, AGCGGU,
AGCGUA, AGCGUC, AGCGUG, AGCGUU, AGCUAA, AGCUAC, AGCUAG, AGCUAU, AGCUCA, AGCUCC,
AGCUCG, AGCUCU, AGCUGA, AGCUGG, AGCUGU, AGCUUC, AGCUUU, AGGAAU, AGGACC, AGGACG,
AGGAGA, AGGAGU, AGGAUA, AGGCAA, AGGCAU, AGGCCG, AGGCGA, AGGCGC, AGGCGG, AGGCUA,
AGGCUC, AGGCUU, AGGGAC, AGGGAU, AGGGGA, AGGGGU, AGGGUA, AGGGUG, AGGUAA,
AGGUAC, AGGUCA, AGGUCC, AGGUCU, AGGUGA, AGGUGC, AGGUGG, AGGUGU, AGGUUC,
AGGUUG, AGUAAA, AGUAAG, AGUAAU, AGUACA, AGUACG, AGUAGC, AGUAGG, AGUAUA, AGUAUC,
AGUAUG, AGUAUU, AGUCAA, AGUCAC, AGUCAG, AGUCAU, AGUCCA, AGUCCG, AGUCCU, AGUCGA,
AGUCGC, AGUCGG, AGUCGU, AGUCUA, AGUCUC, AGUCUG, AGUCUU, AGUGAA, AGUGAC, AGUGCG,
AGUGGG, AGUGUC, AGUUAA, AGUUAC, AGUUAG, AGUUCC, AGUUCG, AGUUGA, AGUUGC,
AGUUGU, AGUUUA, AGUUUC, AGUUUG, AGUUUU, AUAAAC, AUAAAU, AUAACA, AUAACC, AUAACG,
AUAACU, AUAAGA, AUAAGC, AUAAGG, AUAAGU, AUAAUC, AUAAUG, AUAAUU, AUACAC, AUACAG,
AUACAU, AUACCA, AUACCC, AUACCG, AUACGA, AUACGC, AUACGG, AUACGU, AUACUA, AUACUC,
AUACUG, AUACUU, AUAGAA, AUAGAC, AUAGAU, AUAGCA, AUAGCG, AUAGCU, AUAGGA, AUAGGU,
AUAGUA, AUAGUC, AUAGUG, AUAGUU, AUAUAC, AUAUAG, AUAUCC, AUAUCG, AUAUCU, AUAUGA,
AUAUGC, AUAUGG, AUAUGU, AUAUUC, AUAUUG, AUAUUU, AUCAAA, AUCAAC, AUCAAG, AUCAAU,
AUCACA, AUCACC, AUCACG, AUCAGC, AUCAGG, AUCCAA, AUCCAU, AUCCCC, AUCCCG, AUCCGA,
AUCCGC, AUCCGG, AUCCUA, AUCCUC, AUCCUG, AUCGAA, AUCGAC, AUCGAG, AUCGAU, AUCGCA,
AUCGCC, AUCGCG, AUCGCU, AUCGGC, AUCGGG, AUCGGU, AUCGUC, AUCGUG, AUCGUU, AUCUAA,
AUCUAC, AUCUAG, AUCUAU, AUCUCC, AUCUCG, AUCUGU, AUCUUG, AUCUUU, AUGAAA, AUGAAC,
AUGAAG, AUGAAU, AUGACC, AUGACU, AUGAGG, AUGAGU, AUGAUA, AUGAUC, AUGAUU, AUGCAA,
AUGCAG, AUGCCA, AUGCCC, AUGCCG, AUGCGA, AUGCGG, AUGCGU, AUGCUC, AUGCUU, AUGGAC,
AUGGCC, AUGGGA, AUGGGC, AUGGGU, AUGGUC, AUGGUG, AUGUAC, AUGUAU, AUGUCA,
AUGUCC, AUGUCG, AUGUGU, AUGUUA, AUGUUC, AUUAAA, AUUAAC, AUUAAG, AUUAAU, AUUACA,
AUUACC, AUUACG, AUUACU, AUUAGA, AUUAGC, AUUAGG, AUUAGU, AUUAUA, AUUAUC, AUUAUG,
AUUCAC, AUUCCA, AUUCCG, AUUCCU, AUUCGA, AUUCGC, AUUCGG, AUUCGU, AUUCUA, AUUCUC,
AUUCUU, AUUGAA, AUUGAC, AUUGAU, AUUGCC, AUUGCG, AUUGCU, AUUGGA, AUUGGC,
AUUGGG, AUUGGU, AUUGUA, AUUGUC, AUUGUG, AUUGUU, AUUUAA, AUUUAG, AUUUAU,
AUUUCC, AUUUCG, AUUUCU, AUUUGA, AUUUGC, AUUUGU, AUUUUA, AUUUUC, AUUUUG,
AUUUUU, CAAAAG, CAAACA, CAAACC, CAAACG, CAAACU, CAAAGA, CAAAGG, CAAAUA, CAAAUU,
CAACAC, CAACAU, CAACCA, CAACCC, CAACCG, CAACGA, CAACGC, CAACGG, CAACGU, CAACUA,
CAACUC, CAACUG, CAACUU, CAAGAA, CAAGAC, CAAGAU, CAAGCA, CAAGCC, CAAGCG, CAAGCU,
CAAGGA, CAAGGG, CAAGUC, CAAGUG, CAAGUU, CAAUAA, CAAUAC, CAAUAG, CAAUCC, CAAUCG,
CAAUCU, CAAUGA, CAAUGC, CAAUGG, CAAUGU, CAAUUC, CAAUUG, CAAUUU, CACAAU, CACACA,
CACACG, CACACU, CACAGA, CACAGC, CACAGG, CACAUA, CACAUC, CACAUU, CACCAA, CACCAC,
CACCAU, CACCCA, CACCCC, CACCCG, CACCGA, CACCGC, CACCGG, CACCGU, CACCUA, CACCUU,
CACGAA, CACGAC, CACGAG, CACGAU, CACGCA, CACGCC, CACGCU, CACGGA, CACGGC, CACGGG,
CACGGU, CACGUA, CACGUC, CACGUG, CACGUU, CACUAA, CACUAG, CACUAU, CACUCA, CACUCG,
CACUGA, CACUGC, CACUGG, CACUUA, CACUUC, CACUUU, CAGAAA, CAGAAG, CAGAAU, CAGACC,
CAGACG, CAGAGC, CAGAUA, CAGAUC, CAGCCG, CAGCCU, CAGCGA, CAGCGC, CAGCGG, CAGCGU,
CAGCUC, CAGCUU, CAGGAU, CAGGGG, CAGGGU, CAGGUA, CAGGUC, CAGGUU, CAGUAC, CAGUCG,
CAGUUG, CAUAAA, CAUAAC, CAUAAG, CAUAAU, CAUACA, CAUACC, CAUACG, CAUACU, CAUAGA,
CAUAGG, CAUAGU, CAUAUA, CAUAUC, CAUAUG, CAUCAA, CAUCAC, CAUCAG, CAUCAU, CAUCCA,
CAUCCC, CAUCCG, CAUCGA, CAUCGC, CAUCGG, CAUCGU, CAUCUA, CAUCUC, CAUCUG, CAUCUU,
CAUGAA, CAUGAC, CAUGAG, CAUGAU, CAUGCA, CAUGCC, CAUGCG, CAUGCU, CAUGGC, CAUGGG,
CAUGGU, CAUGUA, CAUGUC, CAUGUU, CAUUAA, CAUUAC, CAUUAG, CAUUCA, CAUUCC, CAUUCG,
CAUUCU, CAUUGA, CAUUGG, CAUUUC, CAUUUG, CAUUUU, CCAAAA, CCAAAC, CCAAAG, CCAAAU,
CCAACA, CCAACC, CCAACG, CCAACU, CCAAGA, CCAAGC, CCAAGG, CCAAUC, CCAAUG, CCAAUU,
CCACAA, CCACAC, CCACAG, CCACAU, CCACCA, CCACCC, CCACCG, CCACCU, CCACGA, CCACGC,
CCACGG, CCACGU, CCACUA, CCACUC, CCACUU, CCAGAA, CCAGAC, CCAGAG, CCAGCC, CCAGGU,
CCAGUC, CCAGUU, CCAUAA, CCAUAC, CCAUAG, CCAUAU, CCAUCA, CCAUCC, CCAUCU, CCAUGA,
CCAUGC, CCAUGG, CCAUUC, CCAUUG, CCAUUU, CCCAAC, CCCAAG, CCCAAU, CCCACA, CCCAGA,
CCCAGC, CCCAGU, CCCAUA, CCCAUC, CCCAUG, CCCAUU, CCCCAA, CCCCAG, CCCCAU, CCCCCC,
CCCCCG, CCCCCU, CCCCGA, CCCCGC, CCCCGU, CCCCUA, CCCCUC, CCCGAA, CCCGAC, CCCGAU,
CCCGCA, CCCGCU, CCCGGA, CCCGGC, CCCGUA, CCCGUG, CCCGUU, CCCUAA, CCCUAG, CCCUCA,
CCCUCU, CCCUGC, CCCUUA, CCCUUC, CCCUUU, CCGAAA, CCGAAC, CCGAAU, CCGACA, CCGACC,
CCGACG, CCGACU, CCGAGA, CCGAGG, CCGAGU, CCGAUA, CCGAUC, CCGAUG, CCGAUU, CCGCAA,
CCGCAC, CCGCAG, CCGCAU, CCGCCA, CCGCCC, CCGCCG, CCGCCU, CCGCGA, CCGCGC, CCGCGG,
CCGCGU, CCGCUA, CCGCUC, CCGCUG, CCGCUU, CCGGAA, CCGGAU, CCGGCA, CCGGCC, CCGGCG,
CCGGCU, CCGGGA, CCGGGC, CCGGGG, CCGGGU, CCGGUA, CCGGUC, CCGGUG, CCGUAA, CCGUAG,
CCGUAU, CCGUCA, CCGUCC, CCGUCG, CCGUGA, CCGUGU, CCGUUA, CCGUUC, CCGUUG, CCGUUU,
CCUAAC, CCUAAG, CCUAAU, CCUACA, CCUACC, CCUACG, CCUACU, CCUAGA, CCUAGC, CCUAGG,
CCUAGU, CCUAUA, CCUAUC, CCUAUG, CCUAUU, CCUCAA, CCUCAC, CCUCAG, CCUCAU, CCUCCA,
CCUCCC, CCUCCG, CCUCGA, CCUCGC, CCUCGG, CCUCGU, CCUCUA, CCUCUG, CCUGAC, CCUGAU,
CCUGCA, CCUGGG, CCUGGU, CCUGUU, CCUUAA, CCUUAC, CCUUAG, CCUUAU, CCUUCG, CCUUGA,
CCUUGU, CCUUUA, CCUUUC, CCUUUU, CGAAAA, CGAAAC, CGAAAG, CGAAAU, CGAACA, CGAACC,
CGAACG, CGAACU, CGAAGA, CGAAGC, CGAAGG, CGAAGU, CGAAUA, CGAAUC, CGAAUG, CGAAUU,
CGACAA, CGACAC, CGACAU, CGACCA, CGACCU, CGACGA, CGACGC, CGACGG, CGACGU, CGACUA,
CGACUG, CGACUU, CGAGAA, CGAGAC, CGAGAG, CGAGAU, CGAGCA, CGAGCC, CGAGCG, CGAGCU,
CGAGGC, CGAGGG, CGAGGU, CGAGUA, CGAGUC, CGAGUG, CGAGUU, CGAUAA, CGAUAC, CGAUAG,
CGAUAU, CGAUCA, CGAUCC, CGAUCG, CGAUCU, CGAUGA, CGAUGC, CGAUGG, CGAUGU, CGAUUA,
CGAUUC, CGAUUG, CGAUUU, CGCAAA, CGCAAC, CGCAAG, CGCAAU, CGCACA, CGCACC, CGCACG,
CGCAGA, CGCAGC, CGCAGG, CGCAGU, CGCAUA, CGCAUC, CGCAUG, CGCAUU, CGCCAA, CGCCAC,
CGCCAG, CGCCAU, CGCCCA, CGCCCC, CGCCCG, CGCCGA, CGCCGC, CGCCGG, CGCCGU, CGCCUA,
CGCCUG, CGCCUU, CGCGAA, CGCGAC, CGCGAG, CGCGAU, CGCGCA, CGCGCC, CGCGCG, CGCGCU,
CGCGGA, CGCGGC, CGCGGG, CGCGGU, CGCGUA, CGCGUC, CGCGUG, CGCGUU, CGCUAA, CGCUAC,
CGCUAG, CGCUAU, CGCUCA, CGCUCC, CGCUCG, CGCUCU, CGCUGA, CGCUGC, CGCUGG, CGCUGU,
CGCUUA, CGCUUC, CGCUUG, CGGAAA, CGGAAC, CGGAAG, CGGACA, CGGACC, CGGACG, CGGACU,
CGGAGC, CGGAGG, CGGAGU, CGGAUA, CGGAUU, CGGCAA, CGGCAC, CGGCAG, CGGCCA, CGGCCC,
CGGCCG, CGGCGC, CGGCGG, CGGCGU, CGGCUA, CGGCUC, CGGCUG, CGGCUU, CGGGAA, CGGGAC,
CGGGAG, CGGGAU, CGGGCA, CGGGCC, CGGGCG, CGGGCU, CGGGGU, CGGGUA, CGGGUC, CGGGUG,
CGGUAA, CGGUAC, CGGUAG, CGGUAU, CGGUCA, CGGUCG, CGGUCU, CGGUGA, CGGUGG, CGGUGU,
CGGUUA, CGGUUC, CGGUUG, CGGUUU, CGUAAA, CGUAAC, CGUAAG, CGUAAU, CGUACA, CGUACG,
CGUACU, CGUAGA, CGUAGC, CGUAGG, CGUAGU, CGUAUA, CGUAUC, CGUAUG, CGUAUU, CGUCAA,
CGUCAC, CGUCAG, CGUCAU, CGUCCA, CGUCCC, CGUCCG, CGUCCU, CGUCGA, CGUCGG, CGUCGU,
CGUCUA, CGUCUC, CGUCUG, CGUCUU, CGUGAA, CGUGAC, CGUGAG, CGUGAU, CGUGCC, CGUGCG,
CGUGCU, CGUGGA, CGUGGG, CGUGGU, CGUGUA, CGUGUG, CGUUAA, CGUUAC, CGUUAG,
CGUUAU, CGUUCA, CGUUCC, CGUUCG, CGUUCU, CGUUGA, CGUUGC, CGUUGU, CGUUUA, CGUUUC,
CGUUUU, CUAAAA, CUAAAC, CUAAAU, CUAACA, CUAACC, CUAACG, CUAACU, CUAAGA, CUAAGC,
CUAAGU, CUAAUA, CUAAUC, CUAAUG, CUACAC, CUACAU, CUACCA, CUACCC, CUACCG, CUACCU,
CUACGA, CUACGC, CUACGG, CUACGU, CUACUA, CUACUC, CUACUG, CUAGAA, CUAGAG, CUAGAU,
CUAGCA, CUAGCC, CUAGCG, CUAGCU, CUAGGA, CUAGGG, CUAGGU, CUAGUG, CUAGUU, CUAUAA,
CUAUAG, CUAUAU, CUAUCA, CUAUCC, CUAUCG, CUAUCU, CUAUGA, CUAUGC, CUAUGG, CUAUGU,
CUAUUA, CUAUUG, CUCAAC, CUCAAG, CUCAAU, CUCACC, CUCACG, CUCAGC, CUCAUA, CUCAUC,
CUCAUG, CUCAUU, CUCCAC, CUCCCC, CUCCCG, CUCCGA, CUCCGC, CUCCGG, CUCCUA, CUCCUC,
CUCCUU, CUCGAA, CUCGAC, CUCGAG, CUCGAU, CUCGCA, CUCGCC, CUCGCG, CUCGGG, CUCGGU,
CUCGUA, CUCGUC, CUCGUG, CUCGUU, CUCUAA, CUCUAC, CUCUAU, CUCUCA, CUCUCC, CUCUCU,
CUCUGC, CUCUGU, CUCUUA, CUCUUG, CUGAAG, CUGACC, CUGACG, CUGAGC, CUGAUA, CUGAUC,
CUGCCG, CUGCCU, CUGCGA, CUGCUA, CUGCUU, CUGGAG, CUGGAU, CUGGCG, CUGGGU, CUGUAC,
CUGUCA, CUGUCC, CUGUCG, CUGUGG, CUGUGU, CUGUUA, CUGUUU, CUUAAC, CUUAAG, CUUAAU,
CUUACC, CUUACG, CUUAGA, CUUAGC, CUUAGG, CUUAGU, CUUAUA, CUUAUC, CUUAUG, CUUAUU,
CUUCAG, CUUCAU, CUUCCA, CUUCCC, CUUCCG, CUUCCU, CUUCGA, CUUCGC, CUUCGG, CUUCGU,
CUUCUA, CUUGAC, CUUGAG, CUUGAU, CUUGCA, CUUGCC, CUUGCG, CUUGCU, CUUGGC, CUUGGU,
CUUGUU, CUUUAC, CUUUAG, CUUUAU, CUUUCA, CUUUCG, CUUUCU, CUUUGA, CUUUGC, CUUUGU,
CUUUUA, CUUUUC, CUUUUG, CUUUUU, GAAAAA, GAAAAG, GAAAAU, GAAACC, GAAACG, GAAAGA,
GAAAGC, GAAAGU, GAAAUA, GAAAUC, GAAAUG, GAAAUU, GAACAA, GAACAC, GAACAG, GAACAU,
GAACCA, GAACCC, GAACCG, GAACCU, GAACGA, GAACGC, GAACGG, GAACGU, GAACUA, GAACUG,
GAACUU, GAAGAC, GAAGAG, GAAGCA, GAAGCG, GAAGCU, GAAGUC, GAAUAA, GAAUAC, GAAUAG,
GAAUAU, GAAUCC, GAAUCG, GAAUCU, GAAUGA, GAAUGC, GAAUGU, GAAUUA, GAAUUC, GAAUUU,
GACAAA, GACAAG, GACAAU, GACACC, GACAGA, GACAGG, GACAUA, GACAUG, GACAUU, GACCAA,
GACCAC, GACCAG, GACCCA, GACCCC, GACCCG, GACCGC, GACCGG, GACCGU, GACCUA, GACCUC,
GACCUU, GACGAA, GACGAC, GACGAG, GACGAU, GACGCA, GACGCC, GACGCG, GACGCU, GACGGA,
GACGGC, GACGGG, GACGGU, GACGUA, GACGUC, GACGUG, GACGUU, GACUAA, GACUAC, GACUAG,
GACUAU, GACUCA, GACUCC, GACUCG, GACUGG, GACUGU, GACUUA, GACUUG, GACUUU, GAGAAU,
GAGAGA, GAGAGC, GAGAGG, GAGAUA, GAGAUC, GAGCAA, GAGCAU, GAGCCA, GAGCGA, GAGCGG,
GAGCGU, GAGGGU, GAGGUC, GAGGUG, GAGUAA, GAGUAG, GAGUCC, GAGUUC, GAGUUU,
GAUAAA, GAUAAC, GAUAAG, GAUAAU, GAUACA, GAUACC, GAUACG, GAUACU, GAUAGA, GAUAGC,
GAUAGG, GAUAGU, GAUAUA, GAUCAA, GAUCAC, GAUCAU, GAUCCA, GAUCCC, GAUCCU, GAUCGC,
GAUCGG, GAUCGU, GAUCUA, GAUCUG, GAUCUU, GAUGAA, GAUGAC, GAUGAG, GAUGCA, GAUGCC,
GAUGCG, GAUGCU, GAUGGC, GAUGGG, GAUGGU, GAUGUG, GAUGUU, GAUUAA, GAUUAC,
GAUUAG, GAUUAU, GAUUCA, GAUUCG, GAUUCU, GAUUGA, GAUUGC, GAUUUA, GAUUUC,
GAUUUG, GAUUUU, GCAAAC, GCAAAG, GCAAAU, GCAACA, GCAACC, GCAAGC, GCAAGU, GCAAUA,
GCAAUC, GCAAUG, GCAAUU, GCACAA, GCACAC, GCACAG, GCACCC, GCACCG, GCACCU, GCACGA,
GCACGC, GCACGU, GCACUA, GCACUC, GCACUG, GCACUU, GCAGAU, GCAGCC, GCAGCG, GCAGGC,
GCAGUA, GCAGUC, GCAGUG, GCAGUU, GCAUAA, GCAUAG, GCAUAU, GCAUCG, GCAUCU, GCAUGA,
GCAUGC, GCAUGG, GCAUGU, GCAUUA, GCAUUC, GCAUUG, GCAUUU, GCCAAA, GCCAAC, GCCAAU,
GCCACA, GCCACC, GCCACG, GCCAGA, GCCAGU, GCCAUA, GCCAUC, GCCAUG, GCCAUU, GCCCAA,
GCCCAC, GCCCAG, GCCCCG, GCCCGA, GCCCGG, GCCCGU, GCCGAA, GCCGAC, GCCGAG, GCCGAU,
GCCGCA, GCCGCU, GCCGGA, GCCGGC, GCCGGG, GCCGGU, GCCGUA, GCCGUC, GCCGUG, GCCGUU,
GCCUAA, GCCUAU, GCCUCA, GCCUCC, GCCUCG, GCCUGA, GCCUUA, GCCUUU, GCGAAA, GCGAAC,
GCGAAG, GCGAAU, GCGACC, GCGACG, GCGACU, GCGAGA, GCGAGC, GCGAGG, GCGAGU, GCGAUA,
GCGAUC, GCGAUG, GCGAUU, GCGCAA, GCGCAC, GCGCAG, GCGCAU, GCGCCA, GCGCCC, GCGCCU,
GCGCGA, GCGCGU, GCGCUA, GCGCUC, GCGCUG, GCGCUU, GCGGAA, GCGGAC, GCGGAU, GCGGCA,
GCGGCC, GCGGCU, GCGGGA, GCGGUA, GCGGUC, GCGGUU, GCGUAA, GCGUAC, GCGUAG, GCGUAU,
GCGUCA, GCGUCC, GCGUCG, GCGUCU, GCGUGA, GCGUGC, GCGUGG, GCGUGU, GCGUUA, GCGUUC,
GCGUUG, GCGUUU, GCUAAA, GCUAAC, GCUAAG, GCUAAU, GCUACC, GCUACG, GCUACU, GCUAGA,
GCUAGG, GCUAGU, GCUAUA, GCUAUC, GCUAUU, GCUCAA, GCUCAC, GCUCAG, GCUCAU, GCUCCA,
GCUCCC, GCUCCG, GCUCGA, GCUCGC, GCUCGU, GCUCUA, GCUCUC, GCUCUU, GCUGAA, GCUGAC,
GCUGAU, GCUGCA, GCUGCC, GCUGCG, GCUGCU, GCUGUG, GCUGUU, GCUUAC, GCUUAG, GCUUAU,
GCUUCA, GCUUCG, GCUUGA, GCUUGG, GCUUGU, GCUUUA, GCUUUG, GGAAAG, GGAACA, GGAACC,
GGAACG, GGAACU, GGAAGU, GGAAUA, GGAAUC, GGAAUU, GGACAA, GGACAC, GGACAG, GGACAU,
GGACCG, GGACGA, GGACGC, GGACGU, GGACUA, GGACUC, GGACUU, GGAGAC, GGAGCA, GGAGCG,
GGAGGG, GGAGUA, GGAUAA, GGAUAC, GGAUCA, GGAUCC, GGAUCG, GGAUCU, GGAUGC, GGAUUA,
GGAUUG, GGCAAU, GGCACA, GGCACU, GGCAGA, GGCAUA, GGCAUC, GGCCAC, GGCCAG, GGCCCC,
GGCCGA, GGCCGC, GGCCGU, GGCCUA, GGCCUG, GGCCUU, GGCGAA, GGCGAG, GGCGAU, GGCGCA,
GGCGCU, GGCGGU, GGCGUA, GGCGUC, GGCGUG, GGCGUU, GGCUAA, GGCUAC, GGCUAG, GGCUAU,
GGCUCC, GGCUCG, GGCUGA, GGCUUA, GGCUUC, GGCUUG, GGGAAU, GGGACA, GGGAGA, GGGAGU,
GGGAUA, GGGAUU, GGGCAA, GGGCAC, GGGCAG, GGGCCG, GGGCGG, GGGGCC, GGGGGG,
GGGGGU, GGGGUA, GGGUAC, GGGUAU, GGGUCA, GGGUCC, GGGUCG, GGGUGA, GGGUGC,
GGGUUA, GGGUUG, GGUAAA, GGUAAC, GGUAAG, GGUAAU, GGUACA, GGUACC, GGUACG,
GGUACU, GGUAGC, GGUAGG, GGUAGU, GGUAUA, GGUAUC, GGUAUG, GGUCAA, GGUCAC,
GGUCAG, GGUCAU, GGUCCA, GGUCCG, GGUCCU, GGUCGA, GGUCGC, GGUCGG, GGUCGU, GGUCUC,
GGUCUU, GGUGAA, GGUGAC, GGUGAU, GGUGCA, GGUGCC, GGUGGC, GGUGUA, GGUGUC,
GGUUAA, GGUUAG, GGUUAU, GGUUCA, GGUUCC, GGUUCG, GGUUGC, GGUUUC, GGUUUU,
GUAAAA, GUAAAG, GUAAAU, GUAACC, GUAACG, GUAACU, GUAAGA, GUAAGC, GUAAGG, GUAAGU,
GUAAUA, GUAAUC, GUAAUG, GUAAUU, GUACAA, GUACAC, GUACAG, GUACAU, GUACCA, GUACCC,
GUACCG, GUACCU, GUACGA, GUACGC, GUACGG, GUACGU, GUACUA, GUACUC, GUACUG, GUACUU,
GUAGAA, GUAGAC, GUAGCA, GUAGCC, GUAGCG, GUAGCU, GUAGGA, GUAGGC, GUAGGG,
GUAGGU, GUAGUA, GUAGUC, GUAUAA, GUAUAC, GUAUAG, GUAUAU, GUAUCA, GUAUCG,
GUAUCU, GUAUGA, GUAUGC, GUAUGG, GUAUUA, GUAUUG, GUAUUU, GUCAAA, GUCAAG,
GUCAAU, GUCACA, GUCACC, GUCACG, GUCAGA, GUCAGC, GUCAGG, GUCAUA, GUCAUC, GUCAUG,
GUCCAA, GUCCAC, GUCCAU, GUCCCC, GUCCCU, GUCCGA, GUCCGC, GUCCGG, GUCCGU, GUCCUA,
GUCCUG, GUCCUU, GUCGAA, GUCGAC, GUCGAG, GUCGAU, GUCGCA, GUCGCC, GUCGCG, GUCGCU,
GUCGGA, GUCGGC, GUCGGG, GUCGGU, GUCGUA, GUCGUC, GUCGUU, GUCUAA, GUCUAG, GUCUCA,
GUCUCC, GUCUCG, GUCUGA, GUCUGG, GUCUGU, GUCUUC, GUCUUU, GUGAAA, GUGAAC, GUGAAG,
GUGACC, GUGACG, GUGAGA, GUGAGC, GUGAGU, GUGAUC, GUGAUG, GUGAUU, GUGCAC,
GUGCAU, GUGCCC, GUGCCG, GUGCGA, GUGCGG, GUGCGU, GUGCUA, GUGCUC, GUGCUG,
GUGGAG, GUGGCG, GUGGCU, GUGGGU, GUGGUC, GUGGUG, GUGUAA, GUGUAG, GUGUCG,
GUGUGA, GUGUGC, GUGUGU, GUGUUG, GUGUUU, GUUAAA, GUUAAC, GUUAAG, GUUACA,
GUUACC, GUUACG, GUUACU, GUUAGA, GUUAGC, GUUAGU, GUUAUA, GUUAUC, GUUAUG,
GUUAUU, GUUCAA, GUUCAC, GUUCAG, GUUCCA, GUUCCG, GUUCGA, GUUCGC, GUUCGG, GUUCGU,
GUUCUA, GUUCUG, GUUGAA, GUUGAC, GUUGAG, GUUGAU, GUUGCG, GUUGCU, GUUGGA,
GUUGGC, GUUGGU, GUUGUC, GUUGUG, GUUGUU, GUUUAA, GUUUAC, GUUUAG, GUUUAU,
GUUUCA, GUUUCC, GUUUCU, GUUUGA, GUUUGC, GUUUGG, GUUUGU, GUUUUA, GUUUUC,
GUUUUU, UAAAAA, UAAAAC, UAAAAG, UAAAAU, UAAACA, UAAACC, UAAACG, UAAACU, UAAAGA,
UAAAGG, UAAAGU, UAAAUA, UAAAUC, UAAAUG, UAAAUU, UAACAA, UAACAC, UAACAG, UAACCA,
UAACCC, UAACCG, UAACCU, UAACGA, UAACGC, UAACGG, UAACGU, UAACUA, UAACUG, UAACUU,
UAAGAG, UAAGAU, UAAGCA, UAAGCC, UAAGCG, UAAGCU, UAAGGA, UAAGGC, UAAGGG, UAAGGU,
UAAGUA, UAAGUC, UAAGUG, UAAGUU, UAAUAA, UAAUCA, UAAUCC, UAAUCG, UAAUCU, UAAUGA,
UAAUGG, UAAUGU, UAAUUA, UAAUUC, UAAUUG, UACAAC, UACAAG, UACAAU, UACACC, UACACG,
UACACU, UACAGA, UACAGC, UACAUA, UACAUC, UACAUU, UACCAA, UACCAC, UACCAG, UACCAU,
UACCCC, UACCCG, UACCCU, UACCGA, UACCGC, UACCGG, UACCGU, UACCUA, UACCUG, UACGAA,
UACGAC, UACGAG, UACGAU, UACGCA, UACGCC, UACGCG, UACGCU, UACGGC, UACGGG, UACGGU,
UACGUA, UACGUC, UACGUG, UACGUU, UACUAA, UACUAC, UACUAG, UACUAU, UACUCA, UACUCC,
UACUCG, UACUCU, UACUGA, UACUGC, UACUGG, UACUUA, UACUUG, UACUUU, UAGAAA, UAGAAG,
UAGAAU, UAGACA, UAGACG, UAGAGA, UAGAGC, UAGAGU, UAGAUA, UAGAUC, UAGAUG, UAGCAU,
UAGCCC, UAGCCG, UAGCCU, UAGCGA, UAGCGC, UAGCGU, UAGCUA, UAGCUC, UAGCUG, UAGGAA,
UAGGAU, UAGGCG, UAGGCU, UAGGGU, UAGGUC, UAGGUG, UAGGUU, UAGUAA, UAGUAC,
UAGUAG, UAGUAU, UAGUCA, UAGUCG, UAGUGU, UAGUUA, UAGUUC, UAGUUG, UAGUUU,
UAUAAC, UAUAAG, UAUACU, UAUAGA, UAUAGC, UAUAGG, UAUAGU, UAUAUA, UAUAUC, UAUAUG,
UAUAUU, UAUCAA, UAUCAC, UAUCAU, UAUCCA, UAUCCC, UAUCCG, UAUCCU, UAUCGA, UAUCGC,
UAUCGG, UAUCGU, UAUCUA, UAUCUC, UAUCUG, UAUCUU, UAUGAA, UAUGAC, UAUGAG,
UAUGAU, UAUGCA, UAUGCG, UAUGCU, UAUGGA, UAUGGC, UAUGUC, UAUGUG, UAUGUU,
UAUUAG, UAUUCA, UAUUCC, UAUUCG, UAUUCU, UAUUGA, UAUUGG, UAUUUA, UAUUUC,
UAUUUG, UAUUUU, UCAAAA, UCAAAC, UCAAAG, UCAACC, UCAACU, UCAAGA, UCAAGC, UCAAUA,
UCAAUC, UCAAUG, UCAAUU, UCACCC, UCACCG, UCACCU, UCACGA, UCACGC, UCACGG, UCACGU,
UCACUA, UCACUC, UCACUU, UCAGAA, UCAGAC, UCAGAG, UCAGCG, UCAGCU, UCAGGA, UCAGGC,
UCAGGU, UCAGUC, UCAGUU, UCAUAA, UCAUCA, UCAUCC, UCAUCG, UCAUGC, UCAUGG, UCAUGU,
UCAUUA, UCAUUG, UCCAAA, UCCAAC, UCCAAG, UCCAAU, UCCACA, UCCACC, UCCACG, UCCAGC,
UCCAGG, UCCAUA, UCCAUC, UCCAUU, UCCCAA, UCCCAG, UCCCAU, UCCCCC, UCCCCG, UCCCCU,
UCCCGA, UCCCGC, UCCCGG, UCCCGU, UCCCUA, UCCCUC, UCCGAA, UCCGAC, UCCGAG, UCCGAU,
UCCGCA, UCCGCC, UCCGGA, UCCGGC, UCCGGU, UCCGUA, UCCGUC, UCCGUG, UCCUAA, UCCUCA,
UCCUCG, UCCUCU, UCCUGC, UCCUGU, UCCUUA, UCCUUC, UCCUUU, UCGAAA, UCGAAC, UCGAAG,
UCGAAU, UCGACA, UCGACC, UCGACG, UCGACU, UCGAGA, UCGAGC, UCGAGG, UCGAUA, UCGAUC,
UCGAUG, UCGAUU, UCGCAA, UCGCAC, UCGCAG, UCGCAU, UCGCCA, UCGCCC, UCGCCG, UCGCCU,
UCGCGA, UCGCGC, UCGCGU, UCGCUA, UCGCUC, UCGGAA, UCGGAC, UCGGAG, UCGGAU, UCGGCA,
UCGGCU, UCGGGG, UCGGGU, UCGGUC, UCGGUG, UCGGUU, UCGUAA, UCGUAC, UCGUAG,
UCGUAU, UCGUCA, UCGUCC, UCGUCG, UCGUCU, UCGUGA, UCGUGU, UCGUUA, UCGUUC, UCGUUG,
UCGUUU, UCUAAC, UCUAAG, UCUAAU, UCUACA, UCUACC, UCUACG, UCUACU, UCUAGC, UCUAGG,
UCUAGU, UCUAUA, UCUAUC, UCUAUG, UCUAUU, UCUCAG, UCUCAU, UCUCCG, UCUCGC, UCUCGG,
UCUCGU, UCUCUC, UCUGAA, UCUGAU, UCUGCA, UCUGCG, UCUGCU, UCUGGC, UCUGGU, UCUGUC,
UCUGUG, UCUGUU, UCUUAA, UCUUAC, UCUUAG, UCUUAU, UCUUCA, UCUUCC, UCUUCG, UCUUCU,
UCUUGC, UCUUGG, UCUUGU, UCUUUA, UCUUUC, UCUUUG, UCUUUU, UGAAAA, UGAAAC,
UGAACA, UGAACC, UGAAGG, UGAAUC, UGAAUG, UGACAA, UGACAC, UGACAG, UGACCA, UGACCC,
UGACCG, UGACGA, UGACGC, UGACGG, UGACGU, UGACUA, UGACUC, UGACUU, UGAGAG, UGAGAU,
UGAGCA, UGAGCC, UGAGCU, UGAGGC, UGAGGU, UGAGUA, UGAGUU, UGAUAC, UGAUAG,
UGAUAU, UGAUCA, UGAUCG, UGAUCU, UGAUGA, UGAUGC, UGAUGG, UGAUGU, UGAUUA,
UGAUUC, UGAUUG, UGAUUU, UGCAAC, UGCAAG, UGCACA, UGCACG, UGCAGG, UGCAGU, UGCAUC,
UGCCCA, UGCCCC, UGCCCG, UGCCGA, UGCCGC, UGCCGG, UGCCGU, UGCCUA, UGCCUC, UGCCUG,
UGCCUU, UGCGAA, UGCGAC, UGCGAU, UGCGCC, UGCGCG, UGCGCU, UGCGGC, UGCGGG, UGCGGU,
UGCGUA, UGCGUC, UGCGUG, UGCGUU, UGCUAC, UGCUAU, UGCUCC, UGCUCG, UGCUGC, UGCUGG,
UGCUGU, UGCUUA, UGCUUU, UGGAAC, UGGAAG, UGGAGC, UGGAUC, UGGAUU, UGGCAA,
UGGCAC, UGGCAG, UGGCCG, UGGCCU, UGGCGA, UGGCGC, UGGCGU, UGGCUA, UGGCUC, UGGCUU,
UGGGAA, UGGGCA, UGGGCC, UGGGGC, UGGGUC, UGGUAA, UGGUAG, UGGUAU, UGGUCC,
UGGUCG, UGGUCU, UGGUGA, UGGUGC, UGGUGG, UGGUGU, UGGUUA, UGGUUG, UGUAAA,
UGUAAC, UGUAAG, UGUACC, UGUACG, UGUACU, UGUAGA, UGUAGC, UGUAGU, UGUAUC,
UGUAUU, UGUCAA, UGUCAC, UGUCAG, UGUCAU, UGUCCA, UGUCCC, UGUCCG, UGUCGA, UGUCGC,
UGUCGG, UGUCGU, UGUCUA, UGUCUC, UGUGAC, UGUGAG, UGUGAU, UGUGCA, UGUGGU,
UGUGUA, UGUGUU, UGUUAC, UGUUAG, UGUUAU, UGUUCA, UGUUCC, UGUUCG, UGUUGG,
UGUUGU, UGUUUA, UGUUUC, UGUUUG, UGUUUU, UUAAAA, UUAAAC, UUAAAG, UUAAAU,
UUAACC, UUAACG, UUAACU, UUAAGU, UUAAUA, UUAAUC, UUAAUG, UUAAUU, UUACAA, UUACAC,
UUACAG, UUACAU, UUACCA, UUACCC, UUACCG, UUACCU, UUACGA, UUACGC, UUACGG, UUACGU,
UUACUA, UUACUC, UUACUG, UUACUU, UUAGAA, UUAGAC, UUAGCC, UUAGCG, UUAGCU, UUAGGC,
UUAGGU, UUAGUA, UUAGUC, UUAGUU, UUAUAA, UUAUAC, UUAUAG, UUAUAU, UUAUCC,
UUAUCG, UUAUCU, UUAUGA, UUAUGG, UUAUGU, UUAUUA, UUAUUC, UUAUUG, UUAUUU,
UUCAAC, UUCAAU, UUCACA, UUCACC, UUCACG, UUCACU, UUCAGC, UUCAGG, UUCAGU, UUCAUA,
UUCAUC, UUCAUG, UUCAUU, UUCCAA, UUCCCA, UUCCCG, UUCCGA, UUCCGU, UUCCUU, UUCGAA,
UUCGAC, UUCGAG, UUCGAU, UUCGCA, UUCGCC, UUCGCG, UUCGCU, UUCGGA, UUCGGC, UUCGGG,
UUCGGU, UUCGUA, UUCGUC, UUCGUG, UUCGUU, UUCUAC, UUCUAG, UUCUCA, UUCUCG,
UUCUGG, UUCUUA, UUCUUU, UUGAAA, UUGAAC, UUGAAG, UUGAAU, UUGACC, UUGACG,
UUGACU, UUGAGA, UUGAGC, UUGAGU, UUGAUA, UUGAUC, UUGAUG, UUGAUU, UUGCAA,
UUGCAC, UUGCAG, UUGCAU, UUGCCC, UUGCCG, UUGCGA, UUGCGC, UUGCGG, UUGCGU, UUGCUA,
UUGCUC, UUGCUG, UUGCUU, UUGGAA, UUGGAG, UUGGCC, UUGGCG, UUGGCU, UUGGGC,
UUGGGU, UUGGUA, UUGGUG, UUGUAA, UUGUAC, UUGUCA, UUGUCG, UUGUCU, UUGUGC,
UUGUGG, UUGUUA, UUGUUG, UUGUUU, UUUAAA, UUUAAC, UUUAAG, UUUAAU, UUUACA,
UUUACC, UUUACG, UUUACU, UUUAGA, UUUAGC, UUUAGG, UUUAGU, UUUAUA, UUUAUC,
UUUAUG, UUUAUU, UUUCAU, UUUCCA, UUUCCG, UUUCCU, UUUCGA, UUUCGC, UUUCGG,
UUUCGU, UUUCUA, UUUCUC, UUUCUG, UUUCUU, UUUGAA, UUUGAC, UUUGAG, UUUGAU,
UUUGCC, UUUGCU, UUUGGA, UUUGGC, UUUGGG, UUUGGU, UUUGUA, UUUGUC, UUUGUU,
UUUUAA, UUUUAG, UUUUAU, UUUUCC, UUUUCG, UUUUCU, UUUUGA, UUUUGC, UUUUGG,
UUUUGU, UUUUUA, UUUUUC, UUUUUU

TABLE 2
Oligonucleotide sequences made for testing in the lab.

| | Oligo | | | | | | Time | |
|---|---|---|---|---|---|---|---|---|
| SeqID | Name | Avg RQ | Avg RQ SE | Target | [oligo] | cell line | (hr) | Assay Type |
| 89008 | PTEN-01 | 2.07734157 | 0.07716663 | PTEN | 20 | HepG2 | 48 | qRTPCR |
| | m02 | | | | | | | |
| 89009 | PTEN-02 | 1.26854341 | 0.16243777 | PTEN | 20 | HepG2 | 48 | qRTPCR |
| | m02 | | | | | | | |
| 89010 | PTEN-03 | 1.30714473 | 0.33072241 | PTEN | 20 | HepG2 | 48 | qRTPCR |
| | m02 | | | | | | | |
| 89011 | PTEN-04 | 1.43075199 | 0.23754811 | PTEN | 20 | HepG2 | 48 | qRTPCR |
| | m02 | | | | | | | |
| 1531 | PTEN-05 | 2.48295792 | 0.17894507 | PTEN | 20 | HepG2 | 48 | qRTPCR |
| | m02 | | | | | | | |
| 2270 | PTEN-06 | 1.95904764 | 0.07701882 | PTEN | 20 | HepG2 | 48 | qRTPCR |
| | m02 | | | | | | | |
| 2219 | PTEN-07 | 1.41561727 | 0.20169914 | PTEN | 20 | HepG2 | 48 | qRTPCR |
| | m02 | | | | | | | |
| 3435 | PTEN-08 | 2.38066121 | 0.32688117 | PTEN | 20 | HepG2 | 48 | qRTPCR |
| | m02 | | | | | | | |
| 3385 | PTEN-09 | 1.77863697 | 0.51981065 | PTEN | 20 | HepG2 | 48 | qRTPCR |
| | m02 | | | | | | | |
| 4787 | PTEN-10 | 1.53628756 | 0.04477097 | PTEN | 20 | HepG2 | 48 | qRTPCR |
| | m02 | | | | | | | |
| 4757 | PTEN-11 | 2.00722045 | 0.03907423 | PTEN | 20 | HepG2 | 48 | qRTPCR |
| | m02 | | | | | | | |
| 24934 | PTEN-12 | 2.87341341 | 0.22858809 | PTEN | 20 | HepG2 | 48 | qRTPCR |
| | m02 | | | | | | | |
| 24915 | PTEN-13 | 1.39985102 | 0.27951483 | PTEN | 20 | HepG2 | 48 | qRTPCR |
| | m02 | | | | | | | |
| 39332 | PTEN-14 | 1.13225265 | 0.28233818 | PTEN | 20 | HepG2 | 48 | qRTPCR |
| | m02 | | | | | | | |
| 39286 | PTEN-15 | 2.06522348 | 0.52388625 | PTEN | 20 | HepG2 | 48 | qRTPCR |
| | m02 | | | | | | | |
| 41316 | PTEN-16 | 2.52617646 | 0.34816317 | PTEN | 20 | HepG2 | 48 | qRTPCR |
| | m02 | | | | | | | |
| 41283 | PTEN-17 | 0.90722331 | 0.03658693 | PTEN | 20 | HepG2 | 48 | qRTPCR |
| | m02 | | | | | | | |
| 89012 | PTEN-18 | 1.68961825 | 0.22045151 | PTEN | 20 | HepG2 | 48 | qRTPCR |
| | m02 | | | | | | | |
| 89013 | PTEN-19 | 1.62789613 | 0.12130118 | PTEN | 20 | HepG2 | 48 | qRTPCR |
| | m02 | | | | | | | |
| 89014 | PTEN-20 | 1.22542567 | 0.05148674 | PTEN | 20 | HepG2 | 48 | qRTPCR |
| | m02 | | | | | | | |
| 89015 | PTEN-21 | 2.42492141 | 0.18846349 | PTEN | 20 | HepG2 | 48 | qRTPCR |
| | m02 | | | | | | | |
| 51816 | PTEN-22 | 1.42177642 | 0.32012534 | PTEN | 20 | HepG2 | 48 | qRTPCR |
| | m02 | | | | | | | |
| 61111 | PTEN-23 | 2.79874813 | 0.41016463 | PTEN | 20 | HepG2 | 48 | qRTPCR |
| | m02 | | | | | | | |
| 61047 | PTEN-24 | 1.95805572 | 0.39009138 | PTEN | 20 | HepG2 | 48 | qRTPCR |
| | m02 | | | | | | | |
| 89016 | PTEN-25 | 0.70686318 | 0.0728727 | PTEN | 20 | HepG2 | 48 | qRTPCR |
| | m02 | | | | | | | |
| 89017 | PTEN-26 | 2.02768836 | 0.38003317 | PTEN | 20 | HepG2 | 48 | qRTPCR |
| | m02 | | | | | | | |
| 89018 | PTEN-27 | 4.00051813 | 0.78898907 | PTEN | 20 | HepG2 | 48 | qRTPCR |
| | m02 | | | | | | | |
| 89019 | PTEN-28 | 2.60996786 | 0.27580702 | PTEN | 20 | HepG2 | 48 | qRTPCR |
| | m02 | | | | | | | |
| 74236 | PTEN-29 | 1.66419883 | 0.10743023 | PTEN | 20 | HepG2 | 48 | qRTPCR |
| | m02 | | | | | | | |
| 74236 | PTEN-29 | 0.1455604 | 0.08859417 | PTEN | 20 | HepG2 | 48 | qRTPCR |
| | m08 | | | | | | | |
| 89028 | GAP D H- | 0.85279659 | 0.23907675 | PTEN | 20 | HepG2 | 48 | qRTPCR |
| | 01 m08 | | | | | | | |
| | Ctrl Un | 1.0025582 | 0.08223117 | PTEN | 0 | HepG2 | 48 | qRTPCR |
| 89020 | PTEN-31 | 0.92246603 | 0.01811418 | PTEN | 20 | HepG2 | 48 | qRTPCR |
| | m09 | | | | | | | |
| 76350 | PTEN-32 | 0.59041966 | 0.0553571 | PTEN | 20 | HepG2 | 48 | qRTPCR |
| | m02 | | | | | | | |
| 76389 | PTEN-33 | 0.70839633 | 0.04445999 | PTEN | 20 | HepG2 | 48 | qRTPCR |
| | m08 | | | | | | | |
| 89021 | PTEN-34 | 0.91015271 | 0.0100545 | PTEN | 20 | HepG2 | 48 | qRTPCR |
| | m09 | | | | | | | |
| 89022 | PTEN-35 | 1.67446482 | 0.03672742 | PTEN | 20 | HepG2 | 48 | qRTPCR |
| | m02 | | | | | | | |
| 89023 | PTEN-36 | 0.20413836 | 0.00285569 | PTEN | 20 | HepG2 | 48 | qRTPCR |
| | m08 | | | | | | | |
| 89024 | PTEN-37 | 0.8558968 | 0.11695596 | PTEN | 20 | HepG2 | 48 | qRTPCR |
| | m09 | | | | | | | |
| 80510 | PTEN-38 | 1.27326102 | 0.06420006 | PTEN | 20 | HepG2 | 48 | qRTPCR |
| | m02 | | | | | | | |
| 80568 | PTEN-39 | 1.09455124 | 0.02327048 | PTEN | 20 | HepG2 | 48 | qRTPCR |
| | m08 | | | | | | | |
| 89025 | PTEN-40 | 1.01353301 | 0.06007095 | PTEN | 20 | HepG2 | 48 | qRTPCR |
| | m09 | | | | | | | |
| | Ctrl Lipo | 1.00879958 | 0.02091684 | PTEN | 0 | HepG2 | 48 | qRTPCR |
| | Ctrl Un | 1.00106773 | 0.03209554 | PTEN | 0 | HepG2 | 48 | qRTPCR |
| 89008 | PTEN-01 | 1.16942963 | 0.27074957 | PTEN | 40 | HepG2 | 48 | qRTPCR |
| | m02 | | | | | | | |
| 89009 | PTEN-02 | 0.58364213 | 0.08602143 | PTEN | 40 | HepG2 | 48 | qRTPCR |
| | m02 | | | | | | | |
| 89010 | PTEN-03 | 0.57577003 | 0.1469602 | PTEN | 40 | HepG2 | 48 | qRTPCR |
| | m02 | | | | | | | |
| 89011 | PTEN-04 | 0.74661135 | 0.21933073 | PTEN | 40 | HepG2 | 48 | qRTPCR |
| | m02 | | | | | | | |
| 1531 | PTEN-05 | 1.0956027 | 0.25635873 | PTEN | 40 | HepG2 | 48 | qRTPCR |
| | m02 | | | | | | | |
| 2270 | PTEN-06 | 1.24117945 | 0.06291238 | PTEN | 40 | HepG2 | 48 | qRTPCR |
| | m02 | | | | | | | |
| 2219 | PTEN-07 | 0.99520541 | 0.09748897 | PTEN | 40 | HepG2 | 48 | qRTPCR |
| | m02 | | | | | | | |
| 3435 | PTEN-08 | 1.14301868 | 0.11760352 | PTEN | 40 | HepG2 | 48 | qRTPCR |
| | m02 | | | | | | | |
| 3385 | PTEN-09 | 0.79500619 | 0.0643118 | PTEN | 40 | HepG2 | 48 | qRTPCR |
| | m02 | | | | | | | |
| 4787 | PTEN-10 | 0.91090948 | 0.09807166 | PTEN | 40 | HepG2 | 48 | qRTPCR |
| | m02 | | | | | | | |
| 4757 | PTEN-11 | 1.29538626 | 0.10511705 | PTEN | 40 | HepG2 | 48 | qRTPCR |
| | m02 | | | | | | | |
| 24934 | PTEN-12 | 1.5806376 | 0.1204557 | PTEN | 40 | HepG2 | 48 | qRTPCR |
| | m02 | | | | | | | |
| 24915 | PTEN-13 | 0.89485268 | 0.06086845 | PTEN | 40 | HepG2 | 48 | qRTPCR |
| | m02 | | | | | | | |
| 39332 | PTEN-14 | 0.53139911 | 0.04823343 | PTEN | 40 | HepG2 | 48 | qRTPCR |
| | m02 | | | | | | | |
| 39286 | PTEN-15 | 1.1093499 | 0.16465839 | PTEN | 40 | HepG2 | 48 | qRTPCR |
| | m02 | | | | | | | |
| 41316 | PTEN-16 | 1.66867704 | 0.22298241 | PTEN | 40 | HepG2 | 48 | qRTPCR |
| | m02 | | | | | | | |
| 41283 | PTEN-17 | 0.58678397 | 0.07173485 | PTEN | 40 | HepG2 | 48 | qRTPCR |
| | m02 | | | | | | | |
| 89012 | PTEN-18 | 0.89349839 | 0.10026699 | PTEN | 40 | HepG2 | 48 | qRTPCR |
| | m02 | | | | | | | |
| 89013 | PTEN-19 | 1.11350447 | 0.1080962 | PTEN | 40 | HepG2 | 48 | qRTPCR |
| | m02 | | | | | | | |
| 89014 | PTEN-20 | 0.66291212 | 0.09468355 | PTEN | 40 | HepG2 | 48 | qRTPCR |
| | m02 | | | | | | | |
| 89015 | PTEN-21 | 1.62278391 | 0.5136251 | PTEN | 40 | HepG2 | 48 | qRTPCR |
| | m02 | | | | | | | |
| 51816 | PTEN-22 | 0.84245363 | 0.07213382 | PTEN | 40 | HepG2 | 48 | qRTPCR |
| | m02 | | | | | | | |
| 61111 | PTEN-23 | 1.60469847 | 0.37430621 | PTEN | 40 | HepG2 | 48 | qRTPCR |
| | m02 | | | | | | | |
| 61047 | PTEN-24 | 1.31940485 | 0.50246153 | PTEN | 40 | HepG2 | 48 | qRTPCR |
| | m02 | | | | | | | |
| 89016 | PTEN-25 | 0.49625983 | 0.0643317 | PTEN | 40 | HepG2 | 48 | qRTPCR |
| | m02 | | | | | | | |
| 89017 | PTEN-26 | 2.04149224 | 0.23998972 | PTEN | 40 | HepG2 | 48 | qRTPCR |
| | m02 | | | | | | | |
| 89018 | PTEN-27 | 2.87891201 | 0.42448096 | PTEN | 40 | HepG2 | 48 | qRTPCR |
| | m02 | | | | | | | |
| 89019 | PTEN-28 | 1.3180416 | 0.29901882 | PTEN | 40 | HepG2 | 48 | qRTPCR |
| | m02 | | | | | | | |
| 74236 | PTEN-29 | 0.87647912 | 0.04578777 | PTEN | 40 | HepG2 | 48 | qRTPCR |
| | m02 | | | | | | | |
| 74236 | PTEN-29 | 0.32506054 | 0.08996561 | PTEN | 40 | HepG2 | 48 | qRTPCR |
| | m08 | | | | | | | |
| 89028 | GAP D H- | 0.53336134 | 0.20011246 | PTEN | 50 | HepG2 | 48 | qRTPCR |
| | 01 m08 | | | | | | | |
| | Ctrl Lipo | 0.60524214 | 0.0625741 | PTEN | 0 | HepG2 | 48 | qRTPCR |
| | Ctrl Un | 1.0025582 | 0.08223117 | PTEN | 0 | HepG2 | 48 | qRTPCR |
| 89020 | PTEN-31 | 0.79191976 | 0.02979202 | PTEN | 40 | HepG2 | 48 | qRTPCR |
| | m09 | | | | | | | |
| 76350 | PTEN-32 | 0.54328864 | 0.00958811 | PTEN | 40 | HepG2 | 48 | qRTPCR |
| | m02 | | | | | | | |
| 76389 | PTEN-33 | 0.73927941 | 0.08871459 | PTEN | 40 | HepG2 | 48 | qRTPCR |
| | m08 | | | | | | | |
| 89021 | PTEN-34 | 0.76155003 | 0.01629929 | PTEN | 40 | HepG2 | 48 | qRTPCR |
| | m09 | | | | | | | |
| 89022 | PTEN-35 | 1.52719074 | 0.05398883 | PTEN | 40 | HepG2 | 48 | qRTPCR |
| | m02 | | | | | | | |
| 89023 | PTEN-36 | 0.28703011 | 0.04288889 | PTEN | 40 | HepG2 | 48 | qRTPCR |
| | m08 | | | | | | | |
| 89024 | PTEN-37 | 0.81216946 | 0.03832362 | PTEN | 40 | HepG2 | 48 | qRTPCR |
| | m09 | | | | | | | |
| 80510 | PTEN-38 | 1.17120221 | 0.07105324 | PTEN | 40 | HepG2 | 48 | qRTPCR |
| | m02 | | | | | | | |
| 80568 | PTEN-39 | 0.73651641 | 0.04205119 | PTEN | 40 | HepG2 | 48 | qRTPCR |
| | m08 | | | | | | | |
| 89025 | PTEN-40 | 0.77040957 | 0.09600221 | PTEN | 40 | HepG2 | 48 | qRTPCR |
| | m09 | | | | | | | |
| | Ctrl Lipo | 1.00879958 | 0.02091684 | PTEN | 0 | HepG2 | 48 | qRTPCR |
| | Ctrl Un | 1.00106773 | 0.03209554 | PTEN | 0 | HepG2 | 48 | qRTPCR |
| | Ctrl Un | 1.65645803 | 0.08223117 | PTEN | 20 | HepG2 | | qRTPCR |
| | Ctrl Lipo | 1 | 0.0625741 | PTEN | 20 | HepG2 | | qRTPCR |
| 89028 | GAPDH- | 1.40901721 | 0.23907675 | PTEN | 20 | HepG2 | | qRTPCR |
| | 01 m08 | | | | | | | |
| 89008 | PTEN-01 | 3.43224872 | 0.07716663 | PTEN | 20 | HepG2 | | qRTPCR |
| | m02 | | | | | | | |
| 89009 | PTEN-02 | 2.09592711 | 0.16243777 | PTEN | 20 | HepG2 | | qRTPCR |
| | m02 | | | | | | | |
| 89010 | PTEN-03 | 2.15970541 | 0.33072241 | PTEN | 20 | HepG2 | | qRTPCR |
| | m02 | | | | | | | |
| 89011 | PTEN-04 | 2.3639332 | 0.23754811 | PTEN | 20 | HepG2 | | qRTPCR |
| | m02 | | | | | | | |
| 1531 | PTEN-05 | 4.10242075 | 0.17894507 | PTEN | 20 | HepG2 | | qRTPCR |
| | m02 | | | | | | | |
| 2270 | PTEN-06 | 3.23679979 | 0.07701882 | PTEN | 20 | HepG2 | | qRTPCR |
| | m02 | | | | | | | |
| 2219 | PTEN-07 | 2.33892714 | 0.20169914 | PTEN | 20 | HepG2 | | qRTPCR |
| | m02 | | | | | | | |
| 3435 | PTEN-08 | 3.93340293 | 0.32688117 | PTEN | 20 | HepG2 | | qRTPCR |
| | m02 | | | | | | | |
| 3385 | PTEN-09 | 2.93871964 | 0.51981065 | PTEN | 20 | HepG2 | | qRTPCR |
| | m02 | | | | | | | |
| 4787 | PTEN-10 | 2.53830236 | 0.04477097 | PTEN | 20 | HepG2 | | qRTPCR |
| | m02 | | | | | | | |
| 4757 | PTEN-11 | 3.31639241 | 0.03907423 | PTEN | 20 | HepG2 | | qRTPCR |
| | m02 | | | | | | | |
| 24934 | PTEN-12 | 4.74754352 | 0.22858809 | PTEN | 20 | HepG2 | | qRTPCR |
| | m02 | | | | | | | |
| 24915 | PTEN-13 | 2.31287765 | 0.27951483 | PTEN | 20 | HepG2 | | qRTPCR |
| | m02 | | | | | | | |
| 39332 | PTEN-14 | 1.87074326 | 0.28233818 | PTEN | 20 | HepG2 | | qRTPCR |
| | m02 | | | | | | | |
| 39286 | PTEN-15 | 3.41222685 | 0.52388625 | PTEN | 20 | HepG2 | | qRTPCR |
| | m02 | | | | | | | |
| 41316 | PTEN-16 | 4.17382777 | 0.34816317 | PTEN | 20 | HepG2 | | qRTPCR |
| | m02 | | | | | | | |
| 41283 | PTEN-17 | 1.49894273 | 0.03658693 | PTEN | 20 | HepG2 | | qRTPCR |
| | m02 | | | | | | | |
| 89012 | PTEN-18 | 2.79164014 | 0.22045151 | PTEN | 20 | HepG2 | | qRTPCR |
| | m02 | | | | | | | |
| 89013 | PTEN-19 | 2.68966091 | 0.12130118 | PTEN | 20 | HepG2 | | qRTPCR |
| | m02 | | | | | | | |
| 89014 | PTEN-20 | 2.02468662 | 0.05148674 | PTEN | 20 | HepG2 | | qRTPCR |
| | m02 | | | | | | | |
| 89015 | PTEN-21 | 4.00653101 | 0.18846349 | PTEN | 20 | HepG2 | | qRTPCR |
| | m02 | | | | | | | |
| 51816 | PTEN-22 | 2.34910348 | 0.32012534 | PTEN | 20 | HepG2 | | qRTPCR |
| | m02 | | | | | | | |
| 61111 | PTEN-23 | 4.62417922 | 0.41016463 | PTEN | 20 | HepG2 | | qRTPCR |
| | m02 | | | | | | | |
| 61047 | PTEN-24 | 3.23516092 | 0.39009138 | PTEN | 20 | HepG2 | | qRTPCR |
| | m02 | | | | | | | |
| 89016 | PTEN-25 | 1.16790147 | 0.0728727 | PTEN | 20 | HepG2 | | qRTPCR |
| | m02 | | | | | | | |
| 89017 | PTEN-26 | 3.35021013 | 0.38003317 | PTEN | 20 | HepG2 | | qRTPCR |
| | m02 | | | | | | | |
| 89018 | PTEN-27 | 6.60978121 | 0.78898907 | PTEN | 20 | HepG2 | | qRTPCR |
| | m02 | | | | | | | |
| 89019 | PTEN-28 | 4.31227054 | 0.27580702 | PTEN | 20 | HepG2 | | qRTPCR |
| | m02 | | | | | | | |
| 74236 | PTEN-29 | 2.74964136 | 0.10743023 | PTEN | 20 | HepG2 | | qRTPCR |
| | m02 | | | | | | | |
| 74236 | PTEN-29 | 0.24049945 | 0.08859417 | PTEN | 20 | HepG2 | | qRTPCR |
| | m08 | | | | | | | |
| 89020 | PTEN-31 | 0.91441952 | 0.01811418 | PTEN | 20 | HepG2 | | qRTPCR |
| | m09 | | | | | | | |
| 76350 | PTEN-32 | 0.58526953 | 0.0553571 | PTEN | 20 | HepG2 | | qRTPCR |
| | m02 | | | | | | | |
| 76389 | PTEN-33 | 0.70221711 | 0.04445999 | PTEN | 20 | HepG2 | | qRTPCR |
| | m08 | | | | | | | |
| 89021 | PTEN-34 | 0.90221361 | 0.0100545 | PTEN | 20 | HepG2 | | qRTPCR |
| | m09 | | | | | | | |
| 89022 | PTEN-35 | 1.65985875 | 0.03672742 | PTEN | 20 | HepG2 | | qRTPCR |
| | m02 | | | | | | | |
| 89023 | PTEN-36 | 0.2023577 | 0.00285569 | PTEN | 20 | HepG2 | | qRTPCR |
| | m08 | | | | | | | |
| 89024 | PTEN-37 | 0.84843097 | 0.11695596 | PTEN | 20 | HepG2 | | qRTPCR |
| | m09 | | | | | | | |
| 80510 | PTEN-38 | 1.26215458 | 0.06420006 | PTEN | 20 | HepG2 | | qRTPCR |
| | m02 | | | | | | | |
| 80568 | PTEN-39 | 1.08500366 | 0.02327048 | PTEN | 20 | HepG2 | | qRTPCR |
| | m08 | | | | | | | |
| 89025 | PTEN-40 | 1.00469214 | 0.06007095 | PTEN | 20 | HepG2 | | qRTPCR |
| | m09 | | | | | | | |
| | Ctrl Lipo | 1 | 0.02091684 | PTEN | 20 | HepG2 | | qRTPCR |
| | Ctrl Un | 0.99233559 | 0.03209554 | PTEN | 20 | HepG2 | | qRTPCR |
| | Ctrl Un | 1.65645803 | 0.08223117 | PTEN | 50 | HepG2 | | qRTPCR |
| | Ctrl Lipo | 1 | 0.0625741 | PTEN | 50 | HepG2 | | qRTPCR |
| 89028 | GAPDH- | 0.88123629 | 0.20011246 | PTEN | 50 | HepG2 | | qRTPCR |
| | 01 m08 | | | | | | | |
| 89008 | PTEN-01 | 1.93216822 | 0.27074957 | PTEN | 50 | HepG2 | | qRTPCR |
| | m02 | | | | | | | |
| 89009 | PTEN-02 | 0.96431179 | 0.08602143 | PTEN | 50 | HepG2 | | qRTPCR |
| | m02 | | | | | | | |
| 89010 | PTEN-03 | 0.95130526 | 0.1469602 | PTEN | 50 | HepG2 | | qRTPCR |
| | m02 | | | | | | | |
| 89011 | PTEN-04 | 1.23357463 | 0.21933073 | PTEN | 50 | HepG2 | | qRTPCR |
| | m02 | | | | | | | |
| 1531 | PTEN-05 | 1.81018905 | 0.25635873 | PTEN | 50 | HepG2 | | qRTPCR |
| | m02 | | | | | | | |
| 2270 | PTEN-06 | 2.05071551 | 0.06291238 | PTEN | 50 | HepG2 | | qRTPCR |
| | m02 | | | | | | | |
| 2219 | PTEN-07 | 1.64430951 | 0.09748897 | PTEN | 50 | HepG2 | | qRTPCR |
| | m02 | | | | | | | |
| 3435 | PTEN-08 | 1.88853122 | 0.11760352 | PTEN | 50 | HepG2 | | qRTPCR |
| | m02 | | | | | | | |
| 3385 | PTEN-09 | 1.3135341 | 0.0643118 | PTEN | 50 | HepG2 | | qRTPCR |
| | m02 | | | | | | | |
| 4787 | PTEN-10 | 1.50503314 | 0.09807166 | PTEN | 50 | HepG2 | | qRTPCR |
| | m02 | | | | | | | |
| 4757 | PTEN-11 | 2.14027771 | 0.10511705 | PTEN | 50 | HepG2 | | qRTPCR |
| | m02 | | | | | | | |
| 24934 | PTEN-12 | 2.61157889 | 0.1204557 | PTEN | 50 | HepG2 | | qRTPCR |
| | m02 | | | | | | | |
| 24915 | PTEN-13 | 1.47850359 | 0.06086845 | PTEN | 50 | HepG2 | | qRTPCR |
| | m02 | | | | | | | |
| 39332 | PTEN-14 | 0.87799423 | 0.04823343 | PTEN | 50 | HepG2 | | qRTPCR |
| | m02 | | | | | | | |
| 39286 | PTEN-15 | 1.83290261 | 0.16465839 | PTEN | 50 | HepG2 | | qRTPCR |
| | m02 | | | | | | | |
| 41316 | PTEN-16 | 2.7570404 | 0.22298241 | PTEN | 50 | HepG2 | | qRTPCR |
| | m02 | | | | | | | |
| 41283 | PTEN-17 | 0.96950283 | 0.07173485 | PTEN | 50 | HepG2 | | qRTPCR |
| | m02 | | | | | | | |
| 89012 | PTEN-18 | 1.476266 | 0.10026699 | PTEN | 50 | HepG2 | | qRTPCR |
| | m02 | | | | | | | |
| 89013 | PTEN-19 | 1.83976692 | 0.1080962 | PTEN | 50 | HepG2 | | qRTPCR |
| | m02 | | | | | | | |
| 89014 | PTEN-20 | 1.09528414 | 0.09468355 | PTEN | 50 | HepG2 | | qRTPCR |
| | m02 | | | | | | | |
| 89015 | PTEN-21 | 2.68121434 | 0.5136251 | PTEN | 50 | HepG2 | | qRTPCR |
| | m02 | | | | | | | |
| 51816 | PTEN-22 | 1.39192824 | 0.07213382 | PTEN | 50 | HepG2 | | qRTPCR |
| | m02 | | | | | | | |
| 61111 | PTEN-23 | 2.65133301 | 0.37430621 | PTEN | 50 | HepG2 | | qRTPCR |
| | m02 | | | | | | | |
| 61047 | PTEN-24 | 2.17996196 | 0.50246153 | PTEN | 50 | HepG2 | | qRTPCR |
| | m02 | | | | | | | |
| 89016 | PTEN-25 | 0.81993601 | 0.0643317 | PTEN | 50 | HepG2 | | qRTPCR |
| | m02 | | | | | | | |
| 89017 | PTEN-26 | 3.37301735 | 0.23998972 | PTEN | 50 | HepG2 | | qRTPCR |
| | m02 | | | | | | | |
| 89018 | PTEN-27 | 4.75662849 | 0.42448096 | PTEN | 50 | HepG2 | | qRTPCR |
| | m02 | | | | | | | |
| 89019 | PTEN-28 | 2.17770957 | 0.29901882 | PTEN | 50 | HepG2 | | qRTPCR |
| | m02 | | | | | | | |
| 74236 | PTEN-29 | 1.44814622 | 0.04578777 | PTEN | 50 | HepG2 | | qRTPCR |
| | m02 | | | | | | | |
| 74236 | PTEN-29 | 0.53707519 | 0.08996561 | PTEN | 50 | HepG2 | | qRTPCR |
| | m08 | | | | | | | |
| 89020 | PTEN-31 | 0.78501198 | 0.02979202 | PTEN | 50 | HepG2 | | qRTPCR |
| | m09 | | | | | | | |
| 76350 | PTEN-32 | 0.53854963 | 0.00958811 | PTEN | 50 | HepG2 | | qRTPCR |
| | m02 | | | | | | | |
| 76389 | PTEN-33 | 0.7328308 | 0.08871459 | PTEN | 50 | HepG2 | | qRTPCR |
| | m08 | | | | | | | |
| 89021 | PTEN-34 | 0.75490717 | 0.01629929 | PTEN | 50 | HepG2 | | qRTPCR |
| | m09 | | | | | | | |
| 89022 | PTEN-35 | 1.51386932 | 0.05398883 | PTEN | 50 | HepG2 | | qRTPCR |
| | m02 | | | | | | | |
| 89023 | PTEN-36 | 0.2845264 | 0.04288889 | PTEN | 50 | HepG2 | | qRTPCR |
| | m08 | | | | | | | |
| 89024 | PTEN-37 | 0.80508505 | 0.03832362 | PTEN | 50 | HepG2 | | qRTPCR |
| | m09 | | | | | | | |
| 80510 | PTEN-38 | 1.16098602 | 0.07105324 | PTEN | 50 | HepG2 | | qRTPCR |
| | m02 | | | | | | | |
| 80568 | PTEN-39 | 0.73009191 | 0.04205119 | PTEN | 50 | HepG2 | | qRTPCR |
| | m08 | | | | | | | |
| 89025 | PTEN-40 | 0.76368942 | 0.09600221 | PTEN | 50 | HepG2 | | qRTPCR |
| | m09 | | | | | | | |
| | Ctrl Lipo | 1 | 0.02091684 | PTEN | 50 | HepG2 | | qRTPCR |
| | Ctrl Un | 0.99233559 | 0.03209554 | PTEN | 50 | HepG2 | | qRTPCR |
| | Ctrl Un | 1 | 0.04964277 | PTEN | 20 | HepG2 | | qRTPCR |
| | Ctrl Lipo | 0.60369776 | 0 | PTEN | 20 | HepG2 | | qRTPCR |
| 89028 | GAP D H- | 0.85062053 | 0.1443301 | PTEN | 20 | HepG2 | | qRTPCR |
| | 01 m08 | | | | | | | |
| 89008 | PTEN-01 | 2.07204086 | 0.04658532 | PTEN | 20 | HepG2 | | qRTPCR |
| | m02 | | | | | | | |
| 89009 | PTEN-02 | 1.2653065 | 0.09806331 | PTEN | 20 | HepG2 | | qRTPCR |
| | m02 | | | | | | | |
| 89010 | PTEN-03 | 1.30380932 | 0.19965638 | PTEN | 20 | HepG2 | | qRTPCR |
| | m02 | | | | | | | |
| 89011 | PTEN-04 | 1.42710117 | 0.14340726 | PTEN | 20 | HepG2 | | qRTPCR |
| | m02 | | | | | | | |
| 1531 | PTEN-05 | 2.47662221 | 0.10802874 | PTEN | 20 | HepG2 | | qRTPCR |
| | m02 | | | | | | | |
| 2270 | PTEN-06 | 1.95404878 | 0.04649609 | PTEN | 20 | HepG2 | | qRTPCR |
| | m02 | | | | | | | |
| 2219 | PTEN-07 | 1.41200508 | 0.12176532 | PTEN | 20 | HepG2 | | qRTPCR |
| | m02 | | | | | | | |
| 3435 | PTEN-08 | 2.37458653 | 0.19733743 | PTEN | 20 | HepG2 | | qRTPCR |
| | m02 | | | | | | | |
| 3385 | PTEN-09 | 1.77409846 | 0.31380852 | PTEN | 20 | HepG2 | | qRTPCR |
| | m02 | | | | | | | |
| 4787 | PTEN-10 | 1.53236745 | 0.02702814 | PTEN | 20 | HepG2 | | qRTPCR |
| | m02 | | | | | | | |
| 4757 | PTEN-11 | 2.00209867 | 0.02358903 | PTEN | 20 | HepG2 | | qRTPCR |
| | m02 | | | | | | | |
| 24934 | PTEN-12 | 2.86608139 | 0.13799812 | PTEN | 20 | HepG2 | | qRTPCR |
| | m02 | | | | | | | |
| 24915 | PTEN-13 | 1.39627906 | 0.16874248 | PTEN | 20 | HepG2 | | qRTPCR |
| | m02 | | | | | | | |
| 39332 | PTEN-14 | 1.12936351 | 0.17044692 | PTEN | 20 | HepG2 | | qRTPCR |
| | m02 | | | | | | | |
| 39286 | PTEN-15 | 2.0599537 | 0.31626896 | PTEN | 20 | HepG2 | | qRTPCR |
| | m02 | | | | | | | |
| 41316 | PTEN-16 | 2.51973047 | 0.21018532 | PTEN | 20 | HepG2 | | qRTPCR |
| | m02 | | | | | | | |
| 41283 | PTEN-17 | 0.90490837 | 0.02208745 | PTEN | 20 | HepG2 | | qRTPCR |
| | m02 | | | | | | | |
| 89012 | PTEN-18 | 1.6853069 | 0.13308608 | PTEN | 20 | HepG2 | | qRTPCR |
| | m02 | | | | | | | |
| 89013 | PTEN-19 | 1.62374227 | 0.07322925 | PTEN | 20 | HepG2 | | qRTPCR |
| | m02 | | | | | | | |
| 89014 | PTEN-20 | 1.22229878 | 0.03108243 | PTEN | 20 | HepG2 | | qRTPCR |
| | m02 | | | | | | | |
| 89015 | PTEN-21 | 2.4187338 | 0.11377499 | PTEN | 20 | HepG2 | | qRTPCR |
| | m02 | | | | | | | |
| 51816 | PTEN-22 | 1.41814851 | 0.19325895 | PTEN | 20 | HepG2 | | qRTPCR |
| | m02 | | | | | | | |
| 61111 | PTEN-23 | 2.79160664 | 0.24761547 | PTEN | 20 | HepG2 | | qRTPCR |
| | m02 | | | | | | | |
| 61047 | PTEN-24 | 1.9530594 | 0.23549729 | PTEN | 20 | HepG2 | | qRTPCR |
| | m02 | | | | | | | |
| 89016 | PTEN-25 | 0.7050595 | 0.04399309 | PTEN | 20 | HepG2 | | qRTPCR |
| | m02 | | | | | | | |
| 89017 | PTEN-26 | 2.02251435 | 0.22942517 | PTEN | 20 | HepG2 | | qRTPCR |
| | m02 | | | | | | | |
| 89018 | PTEN-27 | 3.99031011 | 0.47631093 | PTEN | 20 | HepG2 | | qRTPCR |
| | m02 | | | | | | | |
| 89019 | PTEN-28 | 2.60330806 | 0.16650408 | PTEN | 20 | HepG2 | | qRTPCR |
| | m02 | | | | | | | |
| 74236 | PTEN-29 | 1.65995233 | 0.06485539 | PTEN | 20 | HepG2 | | qRTPCR |
| | m02 | | | | | | | |
| 74236 | PTEN-29 | 0.14518898 | 0.0534841 | PTEN | 20 | HepG2 | | qRTPCR |
| | m08 | | | | | | | |
| 89020 | PTEN-31 | 0.92148213 | 0.01825408 | PTEN | 20 | HepG2 | | qRTPCR |
| | m09 | | | | | | | |
| 76350 | PTEN-32 | 0.58978992 | 0.05578465 | PTEN | 20 | HepG2 | | qRTPCR |
| | m02 | | | | | | | |
| 76389 | PTEN-33 | 0.70764076 | 0.04480338 | PTEN | 20 | HepG2 | | qRTPCR |
| | m08 | | | | | | | |
| 89021 | PTEN-34 | 0.90918195 | 0.01013216 | PTEN | 20 | HepG2 | | qRTPCR |
| | m09 | | | | | | | |
| 89022 | PTEN-35 | 1.67267884 | 0.03701109 | PTEN | 20 | HepG2 | | qRTPCR |
| | m02 | | | | | | | |
| 89023 | PTEN-36 | 0.20392063 | 0.00287774 | PTEN | 20 | HepG2 | | qRTPCR |
| | m08 | | | | | | | |
| 89024 | PTEN-37 | 0.85498391 | 0.11785929 | PTEN | 20 | HepG2 | | qRTPCR |
| | m09 | | | | | | | |
| 80510 | PTEN-38 | 1.27190297 | 0.06469592 | PTEN | 20 | HepG2 | | qRTPCR |
| | m02 | | | | | | | |
| 80568 | PTEN-39 | 1.0933838 | 0.02345021 | PTEN | 20 | HepG2 | | qRTPCR |
| | m08 | | | | | | | |
| 89025 | PTEN-40 | 1.01245199 | 0.06053492 | PTEN | 20 | HepG2 | | qRTPCR |
| | m09 | | | | | | | |
| | Ctrl Lipo | 1.00772361 | 0.02107839 | PTEN | 20 | HepG2 | | qRTPCR |
| | Ctrl Un | 1 | 0.03234343 | PTEN | 20 | HepG2 | | qRTPCR |
| | Ctrl Un | 1 | 0.04964277 | PTEN | 20 | HepG2 | | qRTPCR |
| | Ctrl Lipo | 0.60369776 | 0.03777585 | PTEN | 20 | HepG2 | | qRTPCR |
| 89028 | GAPDH- | 0.53200038 | 0.12080745 | PTEN | 20 | HepG2 | | qRTPCR |
| | 01 m08 | | | | | | | |
| 89008 | PTEN-01 | 1.16644562 | 0 | PTEN | 50 | HepG2 | | qRTPCR |
| | m02 | | | | | | | |
| 89009 | PTEN-02 | 0.58215287 | 0.05193094 | PTEN | 50 | HepG2 | | qRTPCR |
| | m02 | | | | | | | |
| 89010 | PTEN-03 | 0.57430085 | 0.08871955 | PTEN | 50 | HepG2 | | qRTPCR |
| | m02 | | | | | | | |
| 89011 | PTEN-04 | 0.74470624 | 0.13240947 | PTEN | 50 | HepG2 | | qRTPCR |
| | m02 | | | | | | | |
| 1531 | PTEN-05 | 1.09280707 | 0.15476319 | PTEN | 50 | HepG2 | | qRTPCR |
| | m02 | | | | | | | |
| 2270 | PTEN-06 | 1.23801236 | 0.03798006 | PTEN | 50 | HepG2 | | qRTPCR |
| | m02 | | | | | | | |
| 2219 | PTEN-07 | 0.99266597 | 0.05885387 | PTEN | 50 | HepG2 | | qRTPCR |
| | m02 | | | | | | | |
| 3435 | PTEN-08 | 1.14010207 | 0.07099698 | PTEN | 50 | HepG2 | | qRTPCR |
| | m02 | | | | | | | |
| 3385 | PTEN-09 | 0.79297759 | 0.03882489 | PTEN | 50 | HepG2 | | qRTPCR |
| | m02 | | | | | | | |
| 4787 | PTEN-10 | 0.90858514 | 0.05920564 | PTEN | 50 | HepG2 | | qRTPCR |
| | m02 | | | | | | | |
| 4757 | PTEN-11 | 1.29208086 | 0.06345893 | PTEN | 50 | HepG2 | | qRTPCR |
| | m02 | | | | | | | |
| 24934 | PTEN-12 | 1.57660432 | 0.07271884 | PTEN | 50 | HepG2 | | qRTPCR |
| | m02 | | | | | | | |
| 24915 | PTEN-13 | 0.89256931 | 0.03674615 | PTEN | 50 | HepG2 | | qRTPCR |
| | m02 | | | | | | | |
| 39332 | PTEN-14 | 0.53004315 | 0.02911841 | PTEN | 50 | HepG2 | | qRTPCR |
| | m02 | | | | | | | |
| 39286 | PTEN-15 | 1.1065192 | 0.0994039 | PTEN | 50 | HepG2 | | qRTPCR |
| | m02 | | | | | | | |
| 41316 | PTEN-16 | 1.66441911 | 0.13461398 | PTEN | 50 | HepG2 | | qRTPCR |
| | m02 | | | | | | | |
| 41283 | PTEN-17 | 0.58528669 | 0.04330617 | PTEN | 50 | HepG2 | | qRTPCR |
| | m02 | | | | | | | |
| 89012 | PTEN-18 | 0.89121847 | 0.06053096 | PTEN | 50 | HepG2 | | qRTPCR |
| | m02 | | | | | | | |
| 89013 | PTEN-19 | 1.11066317 | 0.06525743 | PTEN | 50 | HepG2 | | qRTPCR |
| | m02 | | | | | | | |
| 89014 | PTEN-20 | 0.66122058 | 0.05716025 | PTEN | 50 | HepG2 | | qRTPCR |
| | m02 | | | | | | | |
| 89015 | PTEN-21 | 1.61864309 | 0.31007432 | PTEN | 50 | HepG2 | | qRTPCR |
| | m02 | | | | | | | |
| 51816 | PTEN-22 | 0.84030396 | 0.04354703 | PTEN | 50 | HepG2 | | qRTPCR |
| | m02 | | | | | | | |
| 61111 | PTEN-23 | 1.6006038 | 0.22596782 | PTEN | 50 | HepG2 | | qRTPCR |
| | m02 | | | | | | | |
| 61047 | PTEN-24 | 1.31603815 | 0.3033349 | PTEN | 50 | HepG2 | | qRTPCR |
| | m02 | | | | | | | |
| 89016 | PTEN-25 | 0.49499353 | 0.03883691 | PTEN | 50 | HepG2 | | qRTPCR |
| | m02 | | | | | | | |
| 89017 | PTEN-26 | 2.03628302 | 0.14488126 | PTEN | 50 | HepG2 | | qRTPCR |
| | m02 | | | | | | | |
| 89018 | PTEN-27 | 2.87156596 | 0.25625821 | PTEN | 50 | HepG2 | | qRTPCR |
| | m02 | | | | | | | |
| 89019 | PTEN-28 | 1.31467839 | 0.18051699 | PTEN | 50 | HepG2 | | qRTPCR |
| | m02 | | | | | | | |
| 74236 | PTEN-29 | 0.87424263 | 0.02764197 | PTEN | 50 | HepG2 | | qRTPCR |
| | m02 | | | | | | | |
| 74236 | PTEN-29 | 0.32423109 | 0.05431204 | PTEN | 50 | HepG2 | | qRTPCR |
| | m08 | | | | | | | |
| 89020 | PTEN-31 | 0.7910751 | 0.03002212 | PTEN | 50 | HepG2 | | qRTPCR |
| | m09 | | | | | | | |
| 76350 | PTEN-32 | 0.54270918 | 0.00966216 | PTEN | 50 | HepG2 | | qRTPCR |
| | m02 | | | | | | | |
| 76389 | PTEN-33 | 0.7384909 | 0.08939978 | PTEN | 50 | HepG2 | | qRTPCR |
| | m08 | | | | | | | |
| 89021 | PTEN-34 | 0.76073777 | 0.01642518 | PTEN | 50 | HepG2 | | qRTPCR |
| | m09 | | | | | | | |
| 89022 | PTEN-35 | 1.52556185 | 0.05440582 | PTEN | 50 | HepG2 | | qRTPCR |
| | m02 | | | | | | | |
| 89023 | PTEN-36 | 0.28672397 | 0.04322014 | PTEN | 50 | HepG2 | | qRTPCR |
| | m08 | | | | | | | |
| 89024 | PTEN-37 | 0.81130321 | 0.03861962 | PTEN | 50 | HepG2 | | qRTPCR |
| | m09 | | | | | | | |
| 80510 | PTEN-38 | 1.16995302 | 0.07160203 | PTEN | 50 | HepG2 | | qRTPCR |
| | m02 | | | | | | | |
| 80568 | PTEN-39 | 0.73573085 | 0.04237598 | PTEN | 50 | HepG2 | | qRTPCR |
| | m08 | | | | | | | |
| 89025 | PTEN-40 | 0.76958786 | 0.0967437 | PTEN | 50 | HepG2 | | qRTPCR |
| | m09 | | | | | | | |
| | Ctrl Lipo | 1.00772361 | 0.02107839 | PTEN | 50 | HepG2 | | qRTPCR |
| | Ctrl Un | 1 | 0.03234343 | PTEN | 50 | HepG2 | | qRTPCR |
| 89009 | PTEN-02 | 1.0982509 | 0.1586551 | PTEN | 30 | HepG2 | 24 | qRTPCR |
| | m02 | | | | | | | |
| 89009 | PTEN-02 | 0.99719324 | 0.05132647 | PTEN | 11 | HepG2 | 24 | qRTPCR |
| | m02 | | | | | | | |
| 89009 | PTEN-02 | 0.88589652 | 0.12645115 | PTEN | 3 | HepG2 | 24 | qRTPCR |
| | m02 | | | | | | | |
| 89009 | PTEN-02 | 1.2230848 | 0.06052544 | PTEN | 1 | HepG2 | 24 | qRTPCR |
| | m02 | | | | | | | |
| 2270 | PTEN-06 | 1.62728701 | 0.0451605 | PTEN | 30 | HepG2 | 24 | qRTPCR |
| | m02 | | | | | | | |
| 2270 | PTEN-06 | 1.76720502 | 0.10294151 | PTEN | 11 | HepG2 | 24 | qRTPCR |
| | m02 | | | | | | | |
| 2270 | PTEN-06 | 1.21745384 | 0.06668203 | PTEN | 3 | HepG2 | 24 | qRTPCR |
| | m02 | | | | | | | |
| 2270 | PTEN-06 | 1.40404264 | 0.09823707 | PTEN | 1 | HepG2 | 24 | qRTPCR |
| | m02 | | | | | | | |
| 3435 | PTEN-08 | 1.20540523 | 0.06145149 | PTEN | 30 | HepG2 | 24 | qRTPCR |
| | m02 | | | | | | | |
| 3435 | PTEN-08 | 1.22162236 | 0.12818637 | PTEN | 11 | HepG2 | 24 | qRTPCR |
| | m02 | | | | | | | |
| 3435 | PTEN-08 | 1.07655185 | 0.01829564 | PTEN | 3 | HepG2 | 24 | qRTPCR |
| | m02 | | | | | | | |
| 3435 | PTEN-08 | 1.22200493 | 0.03064369 | PTEN | 1 | HepG2 | 24 | qRTPCR |
| | m02 | | | | | | | |
| 4757 | PTEN-11 | 1.83239021 | 0.23862574 | PTEN | 30 | HepG2 | 24 | qRTPCR |
| | m02 | | | | | | | |
| 4757 | PTEN-11 | 1.45452274 | 0.06069463 | PTEN | 11 | HepG2 | 24 | qRTPCR |
| | m02 | | | | | | | |
| 4757 | PTEN-11 | 1.11924938 | 0.11721998 | PTEN | 3 | HepG2 | 24 | qRTPCR |
| | m02 | | | | | | | |
| 4757 | PTEN-11 | 1.24880457 | 0.06593657 | PTEN | 1 | HepG2 | 24 | qRTPCR |
| | m02 | | | | | | | |
| 24934 | PTEN-12 | 2.23991852 | 0.30124776 | PTEN | 30 | HepG2 | 24 | qRTPCR |
| | m02 | | | | | | | |
| 24934 | PTEN-12 | 1.50154797 | 0.15484213 | PTEN | 10 | HepG2 | 24 | qRTPCR |
| | m02 | | | | | | | |
| 24934 | PTEN-12 | 0.98072498 | 0.0611128 | PTEN | 3 | HepG2 | 24 | qRTPCR |
| | m02 | | | | | | | |
| 24934 | PTEN-12 | 0.81034647 | 0.04567827 | PTEN | 1 | HepG2 | 24 | qRTPCR |
| | m02 | | | | | | | |
| 39332 | PTEN-14 | 0.99514277 | 0.07636867 | PTEN | 30 | HepG2 | 24 | qRTPCR |
| | m02 | | | | | | | |
| 39332 | PTEN-14 | 0.97907289 | 0.01006397 | PTEN | 10 | HepG2 | 24 | qRTPCR |
| | m02 | | | | | | | |
| 39332 | PTEN-14 | 0.84459155 | 0.03335593 | PTEN | 3 | HepG2 | 24 | qRTPCR |
| | m02 | | | | | | | |
| 39332 | PTEN-14 | 0.88820806 | 0.02650809 | PTEN | 1 | HepG2 | 24 | qRTPCR |
| | m02 | | | | | | | |
| 89012 | PTEN-18 | 1.49952932 | 0.03578299 | PTEN | 30 | HepG2 | 24 | qRTPCR |
| | m02 | | | | | | | |
| 89012 | PTEN-18 | 1.34422924 | 0.07018228 | PTEN | 10 | HepG2 | 24 | qRTPCR |
| | m02 | | | | | | | |
| 89012 | PTEN-18 | 1.00497711 | 0.01061478 | PTEN | 3 | HepG2 | 24 | qRTPCR |
| | m02 | | | | | | | |
| 89012 | PTEN-18 | 0.92278419 | 0.03476822 | PTEN | 1 | HepG2 | 24 | qRTPCR |
| | m02 | | | | | | | |
| 89014 | PTEN-20 | 1.51345667 | 0.09728243 | PTEN | 30 | HepG2 | 24 | qRTPCR |
| | m02 | | | | | | | |
| 89014 | PTEN-20 | 1.3863721 | 0.04205612 | PTEN | 10 | HepG2 | 24 | qRTPCR |
| | m02 | | | | | | | |
| 89014 | PTEN-20 | 0.89557657 | 0.01105855 | PTEN | 3 | HepG2 | 24 | qRTPCR |
| | m02 | | | | | | | |
| 89014 | PTEN-20 | 0.86194444 | 0.0364247 | PTEN | 1 | HepG2 | 24 | qRTPCR |
| | m02 | | | | | | | |
| 89015 | PTEN-21 | 1.30538318 | 0.16314638 | PTEN | 30 | HepG2 | 24 | qRTPCR |
| | m02 | | | | | | | |
| 89015 | PTEN-21 | 1.18062371 | 0.09732135 | PTEN | 21 | HepG2 | 24 | qRTPCR |
| | m02 | | | | | | | |
| 89015 | PTEN-21 | 0.97040661 | 0.06963223 | PTEN | 3 | HepG2 | 24 | qRTPCR |
| | m02 | | | | | | | |
| 89015 | PTEN-21 | 1.0278295 | 0.03699383 | PTEN | 1 | HepG2 | 24 | qRTPCR |
| | m02 | | | | | | | |
| 61047 | PTEN-24 | 0.99204407 | 0.17988926 | PTEN | 30 | HepG2 | 24 | qRTPCR |
| | m02 | | | | | | | |
| 61047 | PTEN-24 | 1.1180164 | 0.04440793 | PTEN | 10 | HepG2 | 24 | qRTPCR |
| | m02 | | | | | | | |
| 61047 | PTEN-24 | 0.99799219 | 0.02293249 | PTEN | 3 | HepG2 | 24 | qRTPCR |
| | m02 | | | | | | | |
| 61047 | PTEN-24 | 1.01719516 | 0.08656623 | PTEN | 1 | HepG2 | 24 | qRTPCR |
| | m02 | | | | | | | |
| 89017 | PTEN-26 | 1.5379591 | 0.06571744 | PTEN | 30 | HepG2 | 24 | qRTPCR |
| | m02 | | | | | | | |
| 89017 | PTEN-26 | 1.26911916 | 0.08909136 | PTEN | 26 | HepG2 | 24 | qRTPCR |
| | m02 | | | | | | | |
| 89017 | PTEN-26 | 0.97204718 | 0.04196938 | PTEN | 3 | HepG2 | 24 | qRTPCR |
| | m02 | | | | | | | |
| 89017 | PTEN-26 | 1.06410638 | 0.10576526 | PTEN | 1 | HepG2 | 24 | qRTPCR |
| | m02 | | | | | | | |
| 74236 | PTEN-29 | 0.82482925 | 0.13273844 | PTEN | 30 | HepG2 | 24 | qRTPCR |
| | m02 | | | | | | | |
| 74236 | PTEN-29 | 0.91107691 | 0.01926194 | PTEN | 10 | HepG2 | 24 | qRTPCR |
| | m02 | | | | | | | |
| 74236 | PTEN-29 | 0.98053985 | 0.08594844 | PTEN | 3 | HepG2 | 24 | qRTPCR |
| | m02 | | | | | | | |
| 74236 | PTEN-29 | 0.9651474 | 0.03931144 | PTEN | 1 | HepG2 | 24 | qRTPCR |
| | m02 | | | | | | | |
| 80510 | PTEN-38 | 1.25307314 | 0.07084655 | PTEN | 30 | HepG2 | 24 | qRTPCR |
| | m02 | | | | | | | |
| 80510 | PTEN-38 | 1.28169767 | 0.02097112 | PTEN | 38 | HepG2 | 24 | qRTPCR |
| | m02 | | | | | | | |
| 80510 | PTEN-38 | 1.00537715 | 0.04083891 | PTEN | 3 | HepG2 | 24 | qRTPCR |
| | m02 | | | | | | | |
| 80510 | PTEN-38 | 1.0492189 | 0.0349326 | PTEN | 1 | HepG2 | 24 | qRTPCR |
| | m02 | | | | | | | |
| 89026 | EP0-24 | 0.86760378 | 0.03265872 | PTEN | 30 | HepG2 | 24 | qRTPCR |
| | m02 | | | | | | | |
| 89026 | EP0-24 | 0.81482346 | 0.08728095 | PTEN | 10 | HepG2 | 24 | qRTPCR |
| | m02 | | | | | | | |
| 89026 | EP0-24 | 1.06392969 | 0.05303057 | PTEN | 3 | HepG2 | 24 | qRTPCR |
| | m02 | | | | | | | |
| 89026 | EP0-24 | 0.7805751 | 0.0305135 | PTEN | 1 | HepG2 | 24 | qRTPCR |
| | m02 | | | | | | | |
| 89027 | EP0-26 | 1.33551385 | 0.05349752 | PTEN | 30 | HepG2 | 24 | qRTPCR |
| | m02 | | | | | | | |
| 89027 | EP0-26 | 1.22390414 | 0.03938204 | PTEN | 10 | HepG2 | 24 | qRTPCR |
| | m02 | | | | | | | |
| 89027 | EP0-26 | 1.02694941 | 0.00480371 | PTEN | 3 | HepG2 | 24 | qRTPCR |
| | m02 | | | | | | | |
| 89027 | EP0-26 | 1.01459505 | 0.08741608 | PTEN | 1 | HepG2 | 24 | qRTPCR |
| | m02 | | | | | | | |
| | Ctrl Lipo | 1.00462922 | 0.06037335 | PTEN | 0 | HepG2 | 24 | qRTPCR |
| | Ctrl Un | 0.88071848 | 0.12784742 | PTEN | 0 | HepG2 | 24 | qRTPCR |
| 89009 | PTEN-02 | 1.46477803 | 0.7474237 | PTEN | 30 | HepG2 | 48 | qRTPCR |
| | m02 | | | | | | | |
| 89009 | PTEN-02 | 1.01137021 | 0.16132825 | PTEN | 11 | HepG2 | 48 | qRTPCR |
| | m02 | | | | | | | |
| 89009 | PTEN-02 | 0.81310277 | 0.06880307 | PTEN | 3 | HepG2 | 48 | qRTPCR |
| | m02 | | | | | | | |
| 89009 | PTEN-02 | 0.8486586 | 0.01849678 | PTEN | 1 | HepG2 | 48 | qRTPCR |
| | m02 | | | | | | | |
| 2270 | PTEN-06 | 2.85710097 | 0.35776687 | PTEN | 30 | HepG2 | 48 | qRTPCR |
| | m02 | | | | | | | |
| 2270 | PTEN-06 | 1.18875887 | 0.03783696 | PTEN | 11 | HepG2 | 48 | qRTPCR |
| | m02 | | | | | | | |
| 2270 | PTEN-06 | 0.95449277 | 0.0583779 | PTEN | 3 | HepG2 | 48 | qRTPCR |
| | m02 | | | | | | | |
| 2270 | PTEN-06 | 0.96211099 | 0.04721487 | PTEN | 1 | HepG2 | 48 | qRTPCR |
| | m02 | | | | | | | |
| 3435 | PTEN-08 | 1.88035523 | 0.18243256 | PTEN | 30 | HepG2 | 48 | qRTPCR |
| | m02 | | | | | | | |
| 3435 | PTEN-08 | 1.49020931 | 0.20520954 | PTEN | 11 | HepG2 | 48 | qRTPCR |
| | m02 | | | | | | | |
| 3435 | PTEN-08 | 0.85554216 | 0.00592182 | PTEN | 3 | HepG2 | 48 | qRTPCR |
| | m02 | | | | | | | |
| 3435 | PTEN-08 | 0.96517098 | 0.04200204 | PTEN | 1 | HepG2 | 48 | qRTPCR |
| | m02 | | | | | | | |
| 4757 | PTEN-11 | 3.22705308 | 0.6903216 | PTEN | 30 | HepG2 | 48 | qRTPCR |
| | m02 | | | | | | | |
| 4757 | PTEN-11 | 1.42835425 | 0.02553456 | PTEN | 11 | HepG2 | 48 | qRTPCR |
| | m02 | | | | | | | |
| 4757 | PTEN-11 | 1.04751998 | 0.05158269 | PTEN | 3 | HepG2 | 48 | qRTPCR |
| | m02 | | | | | | | |
| 4757 | PTEN-11 | 0.89693723 | 0.02115135 | PTEN | 1 | HepG2 | 48 | qRTPCR |
| | m02 | | | | | | | |
| 24934 | PTEN-12 | 4.13121569 | 0.35536819 | PTEN | 30 | HepG2 | 48 | qRTPCR |
| | m02 | | | | | | | |
| 24934 | PTEN-12 | 2.07585312 | 0.23260644 | PTEN | 10 | HepG2 | 48 | qRTPCR |
| | m02 | | | | | | | |
| 24934 | PTEN-12 | 0.8531069 | 0.03670898 | PTEN | 3 | HepG2 | 48 | qRTPCR |
| | m02 | | | | | | | |
| 24934 | PTEN-12 | 0.97079745 | 0.04386586 | PTEN | 1 | HepG2 | 48 | qRTPCR |
| | m02 | | | | | | | |
| 39332 | PTEN-14 | 1.08646801 | 0.12188481 | PTEN | 30 | HepG2 | 48 | qRTPCR |
| | m02 | | | | | | | |
| 39332 | PTEN-14 | 0.94777822 | 0.07122232 | PTEN | 10 | HepG2 | 48 | qRTPCR |
| | m02 | | | | | | | |
| 39332 | PTEN-14 | 0.87325546 | 0.01209211 | PTEN | 3 | HepG2 | 48 | qRTPCR |
| | m02 | | | | | | | |
| 39332 | PTEN-14 | 1.02829335 | 0.03677628 | PTEN | 1 | HepG2 | 48 | qRTPCR |
| | m02 | | | | | | | |
| 89012 | PTEN-18 | 1.6596831 | 0.0716892 | PTEN | 30 | HepG2 | 48 | qRTPCR |
| | m02 | | | | | | | |
| 89012 | PTEN-18 | 1.11386544 | 0.0075925 | PTEN | 10 | HepG2 | 48 | qRTPCR |
| | m02 | | | | | | | |
| 89012 | PTEN-18 | 0.82274509 | 0.06384491 | PTEN | 3 | HepG2 | 48 | qRTPCR |
| | m02 | | | | | | | |
| 89012 | PTEN-18 | 0.98683131 | 0.01512816 | PTEN | 1 | HepG2 | 48 | qRTPCR |
| | m02 | | | | | | | |
| 89014 | PTEN-20 | 2.12211892 | 0.09010447 | PTEN | 30 | HepG2 | 48 | qRTPCR |
| | m02 | | | | | | | |
| 89014 | PTEN-20 | 1.30781117 | 0.12046862 | PTEN | 10 | HepG2 | 48 | qRTPCR |
| | m02 | | | | | | | |
| 89014 | PTEN-20 | 0.94736486 | 0.09664968 | PTEN | 3 | HepG2 | 48 | qRTPCR |
| | m02 | | | | | | | |
| 89014 | PTEN-20 | 1.10803154 | 0.14710099 | PTEN | 1 | HepG2 | 48 | qRTPCR |
| | m02 | | | | | | | |
| 89015 | PTEN-21 | 1.61396358 | 0.04820963 | PTEN | 30 | HepG2 | 48 | qRTPCR |
| | m02 | | | | | | | |
| 89015 | PTEN-21 | 1.51129517 | 0.02945828 | PTEN | 21 | HepG2 | 48 | qRTPCR |
| | m02 | | | | | | | |
| 89015 | PTEN-21 | 1.16458905 | 0.0729312 | PTEN | 3 | HepG2 | 48 | qRTPCR |
| | m02 | | | | | | | |
| 89015 | PTEN-21 | 1.1654895 | 0.04826152 | PTEN | 1 | HepG2 | 48 | qRTPCR |
| | m02 | | | | | | | |
| 61047 | PTEN-24 | 1.64326629 | 0.06246528 | PTEN | 30 | HepG2 | 48 | qRTPCR |
| | m02 | | | | | | | |
| 61047 | PTEN-24 | 1.85353816 | 0.09219538 | PTEN | 10 | HepG2 | 48 | qRTPCR |
| | m02 | | | | | | | |
| 61047 | PTEN-24 | 1.23903878 | 0.07674058 | PTEN | 3 | HepG2 | 48 | qRTPCR |
| | m02 | | | | | | | |
| 61047 | PTEN-24 | 1.1174449 | 0.05886819 | PTEN | 1 | HepG2 | 48 | qRTPCR |
| | m02 | | | | | | | |
| 89017 | PTEN-26 | 2.01287105 | 0.141602 | PTEN | 30 | HepG2 | 48 | qRTPCR |
| | m02 | | | | | | | |
| 89017 | PTEN-26 | 1.61056721 | 0.04139243 | PTEN | 26 | HepG2 | 48 | qRTPCR |
| | m02 | | | | | | | |
| 89017 | PTEN-26 | 1.1545886 | 0.02124798 | PTEN | 3 | HepG2 | 48 | qRTPCR |
| | m02 | | | | | | | |
| 89017 | PTEN-26 | 0.95517578 | 0.01388491 | PTEN | 1 | HepG2 | 48 | qRTPCR |
| | m02 | | | | | | | |
| 74236 | PTEN-29 | 1.03846275 | 0.02923373 | PTEN | 30 | HepG2 | 48 | qRTPCR |
| | m02 | | | | | | | |
| 74236 | PTEN-29 | 1.02821907 | 0.04727622 | PTEN | 10 | HepG2 | 48 | qRTPCR |
| | m02 | | | | | | | |
| 74236 | PTEN-29 | 0.9190216 | 0.00144861 | PTEN | 3 | HepG2 | 48 | qRTPCR |
| | m02 | | | | | | | |
| 74236 | PTEN-29 | 0.92302254 | 0.03985553 | PTEN | 1 | HepG2 | 48 | qRTPCR |
| | m02 | | | | | | | |
| 80510 | PTEN-38 | 1.90042475 | 0.08465078 | PTEN | 30 | HepG2 | 48 | qRTPCR |
| | m02 | | | | | | | |
| 80510 | PTEN-38 | 1.36286581 | 0.08694025 | PTEN | 38 | HepG2 | 48 | qRTPCR |
| | m02 | | | | | | | |
| 80510 | PTEN-38 | 0.9684545 | 0.0800668 | PTEN | 3 | HepG2 | 48 | qRTPCR |
| | m02 | | | | | | | |
| 80510 | PTEN-38 | 0.91404889 | 0.0427886 | PTEN | 1 | HepG2 | 48 | qRTPCR |
| | m02 | | | | | | | |
| 89026 | EP0-24 | 0.99305557 | 0.03814135 | PTEN | 30 | HepG2 | 48 | qRTPCR |
| | m02 | | | | | | | |
| 89026 | EP0-24 | 0.77547435 | 0.04235052 | PTEN | 10 | HepG2 | 48 | qRTPCR |
| | m02 | | | | | | | |
| 89026 | EP0-24 | 0.85539995 | 0.07078874 | PTEN | 3 | HepG2 | 48 | qRTPCR |
| | m02 | | | | | | | |
| 89026 | EP0-24 | 0.87696025 | 0.08296927 | PTEN | 1 | HepG2 | 48 | qRTPCR |
| | m02 | | | | | | | |
| 89027 | EP0-26 | 2.01641558 | 0.09576255 | PTEN | 30 | HepG2 | 48 | qRTPCR |
| | m02 | | | | | | | |
| 89027 | EP0-26 | 1.22175384 | 0.04802197 | PTEN | 10 | HepG2 | 48 | qRTPCR |
| | m02 | | | | | | | |
| 89027 | EP0-26 | 1.16564668 | 0.11262306 | PTEN | 3 | HepG2 | 48 | qRTPCR |
| | m02 | | | | | | | |
| 89027 | EP0-26 | 0.82858321 | 0.02271264 | PTEN | 1 | HepG2 | 48 | qRTPCR |
| | m02 | | | | | | | |
| | Ctrl Lipo | 1.05767042 | 0.17116388 | PTEN | 0 | HepG2 | 48 | qRTPCR |
| | Ctrl Un | 0.93915544 | 0.10892164 | PTEN | 0 | HepG2 | 48 | qRTPCR |
| 89009 | PTEN-02 | 0.97666252 | 0.1354761 | PTEN | 30 | HepG2 | 72 | qRTPCR |
| | m02 | | | | | | | |
| 89009 | PTEN-02 | 1.00752547 | 0.16426145 | PTEN | 11 | HepG2 | 72 | qRTPCR |
| | m02 | | | | | | | |
| 89009 | PTEN-02 | 0.81755697 | 0.03379991 | PTEN | 3 | HepG2 | 72 | qRTPCR |
| | m02 | | | | | | | |
| 89009 | PTEN-02 | 1.06992971 | 0.1605443 | PTEN | 1 | HepG2 | 72 | qRTPCR |
| | m02 | | | | | | | |
| 2270 | PTEN-06 | 3.41999891 | 0.16738836 | PTEN | 30 | HepG2 | 72 | qRTPCR |
| | m02 | | | | | | | |
| 2270 | PTEN-06 | 1.25174068 | 0.05649362 | PTEN | 11 | HepG2 | 72 | qRTPCR |
| | m02 | | | | | | | |
| 2270 | PTEN-06 | 1.00347552 | 0.04899899 | PTEN | 3 | HepG2 | 72 | qRTPCR |
| | m02 | | | | | | | |
| 2270 | PTEN-06 | 0.99356033 | 0.02091453 | PTEN | 1 | HepG2 | 72 | qRTPCR |
| | m02 | | | | | | | |
| 3435 | PTEN-08 | 1.65432855 | 0.0909187 | PTEN | 30 | HepG2 | 72 | qRTPCR |
| | m02 | | | | | | | |
| 3435 | PTEN-08 | 1.22845612 | 0.07200488 | PTEN | 11 | HepG2 | 72 | qRTPCR |
| | m02 | | | | | | | |
| 3435 | PTEN-08 | 0.97914285 | 0.05421504 | PTEN | 3 | HepG2 | 72 | qRTPCR |
| | m02 | | | | | | | |
| 3435 | PTEN-08 | 1.06312692 | 0.02153226 | PTEN | 1 | HepG2 | 72 | qRTPCR |
| | m02 | | | | | | | |
| 4757 | PTEN-11 | 3.97514163 | 0.49899891 | PTEN | 30 | HepG2 | 72 | qRTPCR |
| | m02 | | | | | | | |
| 4757 | PTEN-11 | 1.68168717 | 0.09937693 | PTEN | 11 | HepG2 | 72 | qRTPCR |
| | m02 | | | | | | | |
| 4757 | PTEN-11 | 1.18447354 | 0.06462689 | PTEN | 3 | HepG2 | 72 | qRTPCR |
| | m02 | | | | | | | |
| 4757 | PTEN-11 | 1.07739558 | 0.02987555 | PTEN | 1 | HepG2 | 72 | qRTPCR |
| | m02 | | | | | | | |
| 24934 | PTEN-12 | 2.88261149 | 0.40274864 | PTEN | 30 | HepG2 | 72 | qRTPCR |
| | m02 | | | | | | | |
| 24934 | PTEN-12 | 1.70370469 | 0.05618161 | PTEN | 10 | HepG2 | 72 | qRTPCR |
| | m02 | | | | | | | |
| 24934 | PTEN-12 | 1.08174308 | 0.04560774 | PTEN | 3 | HepG2 | 72 | qRTPCR |
| | m02 | | | | | | | |
| 24934 | PTEN-12 | 0.87362133 | 0.04721127 | PTEN | 1 | HepG2 | 72 | qRTPCR |
| | m02 | | | | | | | |
| 39332 | PTEN-14 | 1.14988278 | 0.04895403 | PTEN | 30 | HepG2 | 72 | qRTPCR |
| | m02 | | | | | | | |
| 39332 | PTEN-14 | 1.17750015 | 0.08452395 | PTEN | 10 | HepG2 | 72 | qRTPCR |
| | m02 | | | | | | | |
| 39332 | PTEN-14 | 1.05618608 | 0.06979462 | PTEN | 3 | HepG2 | 72 | qRTPCR |
| | m02 | | | | | | | |
| 39332 | PTEN-14 | 1.06198179 | 0.06585623 | PTEN | 1 | HepG2 | 72 | qRTPCR |
| | m02 | | | | | | | |
| 89012 | PTEN-18 | 1.40960515 | 0.16370331 | PTEN | 30 | HepG2 | 72 | qRTPCR |
| | m02 | | | | | | | |
| 89012 | PTEN-18 | 1.06542063 | 0.03893821 | PTEN | 10 | HepG2 | 72 | qRTPCR |
| | m02 | | | | | | | |
| 89012 | PTEN-18 | 1.02330293 | 0.05629308 | PTEN | 3 | HepG2 | 72 | qRTPCR |
| | m02 | | | | | | | |
| 89012 | PTEN-18 | 1.05102676 | 0.08030083 | PTEN | 1 | HepG2 | 72 | qRTPCR |
| | m02 | | | | | | | |
| 89014 | PTEN-20 | 1.62119779 | 0.31040535 | PTEN | 30 | HepG2 | 72 | qRTPCR |
| | m02 | | | | | | | |
| 89014 | PTEN-20 | 1.35467513 | 0.04732026 | PTEN | 10 | HepG2 | 72 | qRTPCR |
| | m02 | | | | | | | |
| 89014 | PTEN-20 | 1.08378636 | 0.03666093 | PTEN | 3 | HepG2 | 72 | qRTPCR |
| | m02 | | | | | | | |
| 89014 | PTEN-20 | 0.98424969 | 0.01637807 | PTEN | 1 | HepG2 | 72 | qRTPCR |
| | m02 | | | | | | | |
| 89015 | PTEN-21 | 1.46213006 | 0.00991718 | PTEN | 30 | HepG2 | 72 | qRTPCR |
| | m02 | | | | | | | |
| 89015 | PTEN-21 | 1.47920213 | 0.11756689 | PTEN | 21 | HepG2 | 72 | qRTPCR |
| | m02 | | | | | | | |
| 89015 | PTEN-21 | 0.87291673 | 0.01686106 | PTEN | 3 | HepG2 | 72 | qRTPCR |
| | m02 | | | | | | | |
| 89015 | PTEN-21 | 0.93910066 | 0.02767981 | PTEN | 1 | HepG2 | 72 | qRTPCR |
| | m02 | | | | | | | |
| 61047 | PTEN-24 | 1.80684086 | 0.06078274 | PTEN | 30 | HepG2 | 72 | qRTPCR |
| | m02 | | | | | | | |
| 61047 | PTEN-24 | 1.49732935 | 0.02362927 | PTEN | 10 | HepG2 | 72 | qRTPCR |
| | m02 | | | | | | | |
| 61047 | PTEN-24 | 0.86393564 | 0.20666007 | PTEN | 3 | HepG2 | 72 | qRTPCR |
| | m02 | | | | | | | |
| 61047 | PTEN-24 | 1.01127543 | 0.0107217 | PTEN | 1 | HepG2 | 72 | qRTPCR |
| | m02 | | | | | | | |
| 89017 | PTEN-26 | 2.68896605 | 0.15483944 | PTEN | 30 | HepG2 | 72 | qRTPCR |
| | m02 | | | | | | | |
| 89017 | PTEN-26 | 1.93845847 | 0.0784448 | PTEN | 26 | HepG2 | 72 | qRTPCR |
| | m02 | | | | | | | |
| 89017 | PTEN-26 | 1.08283373 | 0.0689543 | PTEN | 3 | HepG2 | 72 | qRTPCR |
| | m02 | | | | | | | |
| 89017 | PTEN-26 | 0.91349945 | 0.03111099 | PTEN | 1 | HepG2 | 72 | qRTPCR |
| | m02 | | | | | | | |
| 74236 | PTEN-29 | 1.49261841 | 0.05640001 | PTEN | 30 | HepG2 | 72 | qRTPCR |
| | m02 | | | | | | | |
| 74236 | PTEN-29 | 1.20535844 | 0.09496339 | PTEN | 10 | HepG2 | 72 | qRTPCR |
| | m02 | | | | | | | |
| 74236 | PTEN-29 | 0.8863063 | 0.03600426 | PTEN | 3 | HepG2 | 72 | qRTPCR |
| | m02 | | | | | | | |
| 74236 | PTEN-29 | 1.30911877 | 0.46191081 | PTEN | 1 | HepG2 | 72 | qRTPCR |
| | m02 | | | | | | | |
| 80510 | PTEN-38 | 4.42807942 | 0.49064121 | PTEN | 30 | HepG2 | 72 | qRTPCR |
| | m02 | | | | | | | |
| 80510 | PTEN-38 | 1.54553765 | 0.03440618 | PTEN | 38 | HepG2 | 72 | qRTPCR |
| | m02 | | | | | | | |
| 80510 | PTEN-38 | 1.03735148 | 0.02902325 | PTEN | 3 | HepG2 | 72 | qRTPCR |
| | m02 | | | | | | | |
| 80510 | PTEN-38 | 2.26315161 | 1.35763416 | PTEN | 1 | HepG2 | 72 | qRTPCR |
| | m02 | | | | | | | |
| 89026 | EP0-24 | 1.67875199 | 0.39539629 | PTEN | 30 | HepG2 | 72 | qRTPCR |
| | m02 | | | | | | | |
| 89026 | EP0-24 | 0.94781399 | 0.03075526 | PTEN | 10 | HepG2 | 72 | qRTPCR |
| | m02 | | | | | | | |
| 89026 | EP0-24 | 0.86477016 | 0.04224438 | PTEN | 3 | HepG2 | 72 | qRTPCR |
| | m02 | | | | | | | |
| 89026 | EP0-24 | 0.93871667 | 0.06867827 | PTEN | 1 | HepG2 | 72 | qRTPCR |
| | m02 | | | | | | | |
| 89027 | EP0-26 | 3.93004559 | 0.17623487 | PTEN | 30 | HepG2 | 72 | qRTPCR |
| | m02 | | | | | | | |
| 89027 | EP0-26 | 3.44769712 | 1.15554929 | PTEN | 10 | HepG2 | 72 | qRTPCR |
| | m02 | | | | | | | |
| 89027 | EP0-26 | 1.05783507 | 0.08519439 | PTEN | 3 | HepG2 | 72 | qRTPCR |
| | m02 | | | | | | | |
| 89027 | EP0-26 | 0.91829613 | 0.06244161 | PTEN | 1 | HepG2 | 72 | qRTPCR |
| | m02 | | | | | | | |
| | Ctrl Lipo | 1.03812723 | 0.13640407 | PTEN | 0 | HepG2 | 72 | qRTPCR |
| | Ctrl Un | 0.93786818 | 0.04603847 | PTEN | 0 | HepG2 | 72 | qRTPCR |
| 89009 | PTEN-02 | 1.00192323 | 0.06384049 | PTEN | 10 | Hepa1-6 | | qRTPCR |
| | m02 | | | | | | | |
| 2270 | PTEN-06 | 0.98616635 | 0.0176667 | PTEN | 10 | Hepa1-6 | | qRTPCR |
| | m02 | | | | | | | |
| 3435 | PTEN-08 | 1.05746468 | 0.05531259 | PTEN | 10 | Hepa1-6 | | qRTPCR |
| | m02 | | | | | | | |
| 4757 | PTEN-11 | 1.01204996 | 0.01092563 | PTEN | 10 | Hepa1-6 | | qRTPCR |
| | m02 | | | | | | | |
| 24934 | PTEN-12 | 1.07632948 | 0.04574082 | PTEN | 10 | Hepa1-6 | | qRTPCR |
| | m02 | | | | | | | |
| 39332 | PTEN-14 | 1.06518352 | 0.02811564 | PTEN | 10 | Hepa1-6 | | qRTPCR |
| | m02 | | | | | | | |
| 89012 | PTEN-18 | 1.01395632 | 0.04020887 | PTEN | 10 | Hepa1-6 | | qRTPCR |
| | m02 | | | | | | | |
| 89014 | PTEN-20 | 1.0950544 | 0.01366641 | PTEN | 10 | Hepa1-6 | | qRTPCR |
| | m02 | | | | | | | |
| 89015 | PTEN-21 | 1.06581741 | 0.04496326 | PTEN | 10 | Hepa1-6 | | qRTPCR |
| | m02 | | | | | | | |
| 61047 | PTEN-24 | 1.12352649 | 0.022694 | PTEN | 10 | Hepa1-6 | | qRTPCR |
| | m02 | | | | | | | |
| 89017 | PTEN-26 | 1.14241583 | 0.0166511 | PTEN | 10 | Hepa1-6 | | qRTPCR |
| | m02 | | | | | | | |
| 74236 | PTEN-29 | 1.05573041 | 0.02490786 | PTEN | 10 | Hepa1-6 | | qRTPCR |
| | m02 | | | | | | | |
| 80510 | PTEN-38 | 1.40021393 | 0.34360751 | PTEN | 10 | Hepa1-6 | | qRTPCR |
| | m02 | | | | | | | |
| 89028 | GAPDH- | 1.22881095 | 0.06666012 | PTEN | 10 | Hepa1-6 | | qRTPCR |
| | 01 m08 | | | | | | | |
| | Ctrl Lipo | 1 | 0.01959829 | PTEN | 10 | Hepa1-6 | | qRTPCR |
| | Ctrl Un | 1.04030087 | 0.04129801 | PTEN | 10 | Hepa1-6 | | qRTPCR |
| 89009 | PTEN-02 | 1.14814831 | 0.03320934 | PTEN | 30 | Hepa1-6 | | qRTPCR |
| | m02 | | | | | | | |
| 2270 | PTEN-06 | 1.10962206 | 0.02297176 | PTEN | 30 | Hepa1-6 | | qRTPCR |
| | m02 | | | | | | | |
| 3435 | PTEN-08 | 1.19030608 | 0.02929796 | PTEN | 30 | Hepa1-6 | | qRTPCR |
| | m02 | | | | | | | |
| 4757 | PTEN-11 | 1.24683225 | 0.02635534 | PTEN | 30 | Hepa1-6 | | qRTPCR |
| | m02 | | | | | | | |
| 24934 | PTEN-12 | 1.09813989 | 0.01545405 | PTEN | 30 | Hepa1-6 | | qRTPCR |
| | m02 | | | | | | | |
| 39332 | PTEN-14 | 1.0326915 | 0.01490324 | PTEN | 30 | Hepa1-6 | | qRTPCR |
| | m02 | | | | | | | |
| 89012 | PTEN-18 | 1.2319987 | 0.03616069 | PTEN | 30 | Hepa1-6 | | qRTPCR |
| | m02 | | | | | | | |
| 89014 | PTEN-20 | 1.40570267 | 0.25549233 | PTEN | 30 | Hepa1-6 | | qRTPCR |
| | m02 | | | | | | | |
| 89015 | PTEN-21 | 1.41997346 | 0.03262106 | PTEN | 30 | Hepa1-6 | | qRTPCR |
| | m02 | | | | | | | |
| 61047 | PTEN-24 | 1.41997346 | 0.03262106 | PTEN | 30 | Hepa1-6 | | qRTPCR |
| | m02 | | | | | | | |
| 89017 | PTEN-26 | 1.24007256 | 0.05638453 | PTEN | 30 | Hepa1-6 | | qRTPCR |
| | m02 | | | | | | | |
| 74236 | PTEN-29 | 1.3398242 | 0.07400006 | PTEN | 30 | Hepa1-6 | | qRTPCR |
| | m02 | | | | | | | |
| 80510 | PTEN-38 | 1.22733667 | 0.03394197 | PTEN | 30 | Hepa1-6 | | qRTPCR |
| | m02 | | | | | | | |
| 89028 | GAPDH- | 1.56542122 | 0.06355372 | PTEN | 30 | Hepa1-6 | | qRTPCR |
| | 01 m08 | | | | | | | |
| | Ctrl Lipo | 1 | 0.01959829 | PTEN | 30 | Hepa1-6 | | qRTPCR |
| | Ctrl Un | 1.04030087 | 0.04129801 | PTEN | 30 | Hepa1-6 | | qRTPCR |
| 89009 | PTEN-02 | 0.92360342 | 0.03349449 | PTEN | 60 | Hep3B | 48 | qRTPCR |
| | m02 | | | | | | | |
| 89009 | PTEN-02 | 1.04834346 | 0.07896624 | PTEN | 30 | Hep3B | 48 | qRTPCR |
| | m02 | | | | | | | |
| 4757 | PTEN-11 | 1.17881248 | 0.05266207 | PTEN | 30 | Hep3B | 48 | qRTPCR |
| | m02 | | | | | | | |
| 24934 | PTEN-12 | 1.13241756 | 0.13049124 | PTEN | 30 | Hep3B | 48 | qRTPCR |
| | m02 | | | | | | | |
| 89014 | PTEN-20 | 0.86968245 | 0.0572627 | PTEN | 30 | Hep3B | 48 | qRTPCR |
| | m02 | | | | | | | |
| 61047 | PTEN-24 | 1.26286894 | 0.15728533 | PTEN | 30 | Hep3B | 48 | qRTPCR |
| | m02 | | | | | | | |
| 74236 | PTEN-29 | 1.01454439 | 0.11885369 | PTEN | 30 | Hep3B | 48 | qRTPCR |
| | m02 | | | | | | | |
| 4757 | PTEN-11 | 1.31376172 | 0.03431848 | PTEN | 60 | Hep3B | 48 | qRTPCR |
| | m02 | | | | | | | |
| 4757 | PTEN-11 | 1.38052137 | 0.10634841 | PTEN | 30 | Hep3B | 48 | qRTPCR |
| | m02 | | | | | | | |
| 24934 | PTEN-12 | 1.71498482 | 0.06435312 | PTEN | 30 | Hep3B | 48 | qRTPCR |
| | m02 | | | | | | | |
| 89014 | PTEN-20 | 1.27136187 | 0.07621645 | PTEN | 30 | Hep3B | 48 | qRTPCR |
| | m02 | | | | | | | |
| 61047 | PTEN-24 | 1.71179619 | 0.17139365 | PTEN | 30 | Hep3B | 48 | qRTPCR |
| | m02 | | | | | | | |
| 74236 | PTEN-29 | 1.39108759 | 0.09886701 | PTEN | 30 | Hep3B | 48 | qRTPCR |
| | m02 | | | | | | | |
| 24934 | PTEN-12 | 1.4911762 | 0.09105287 | PTEN | 60 | Hep3B | 48 | qRTPCR |
| | m02 | | | | | | | |
| 24934 | PTEN-12 | 1.78085377 | 0.02210956 | PTEN | 30 | Hep3B | 48 | qRTPCR |
| | m02 | | | | | | | |
| 89014 | PTEN-20 | 1.04259626 | 0.12867428 | PTEN | 30 | Hep3B | 48 | qRTPCR |
| | m02 | | | | | | | |
| 61047 | PTEN-24 | 1.76614857 | 0.22160492 | PTEN | 30 | Hep3B | 48 | qRTPCR |
| | m02 | | | | | | | |
| 74236 | PTEN-29 | 1.60135694 | 0.16260323 | PTEN | 30 | Hep3B | 48 | qRTPCR |
| | m02 | | | | | | | |
| 89014 | PTEN-20 | 0.99701322 | 0.06922262 | PTEN | 60 | Hep3B | 48 | qRTPCR |
| | m02 | | | | | | | |
| 89014 | PTEN-20 | 1.3725978 | 0.14495239 | PTEN | 30 | Hep3B | 48 | qRTPCR |
| | m02 | | | | | | | |
| 61047 | PTEN-24 | 1.32337927 | 0.0951828 | PTEN | 30 | Hep3B | 48 | qRTPCR |
| | m02 | | | | | | | |
| 74236 | PTEN-29 | 1.30741505 | 0.0593633 | PTEN | 30 | Hep3B | 48 | qRTPCR |
| | m02 | | | | | | | |
| 61047 | PTEN-24 | 1.43597449 | 0.02228448 | PTEN | 60 | Hep3B | 48 | qRTPCR |
| | m02 | | | | | | | |
| 61047 | PTEN-24 | 1.72085864 | 0.06859071 | PTEN | 30 | Hep3B | 48 | qRTPCR |
| | m02 | | | | | | | |
| 74236 | PTEN-29 | 1.45978871 | 0.09850196 | PTEN | 30 | Hep3B | 48 | qRTPCR |
| | m02 | | | | | | | |
| 74236 | PTEN-29 | 1.4349891 | 0.1194869 | PTEN | 60 | Hep3B | 48 | qRTPCR |
| | m02 | | | | | | | |
| 74236 | PTEN-29 | 1.55835987 | 0.04645892 | PTEN | 30 | Hep3B | 48 | qRTPCR |
| | m02 | | | | | | | |
| | Ctrl Lipo | 1.02542727 | 0.10278592 | PTEN | 0 | Hep3B | 48 | qRTPCR |
| | Ctrl Un | 1.01549182 | 0.04571984 | PTEN | 0 | Hep3B | 48 | qRTPCR |
| 89008 | PTEN-01 | 0.97978589 | 0.07413196 | PTEN | 30 | Hep3B | 48 | qRTPCR |
| | m02 | | | | | | | |
| 89009 | PTEN-02 | 1.06663909 | 0.11957983 | PTEN | 30 | Hep3B | 48 | qRTPCR |
| | m02 | | | | | | | |
| 89010 | PTEN-03 | 1.4259353 | 0.12798011 | PTEN | 30 | Hep3B | 48 | qRTPCR |
| | m02 | | | | | | | |
| 89011 | PTEN-04 | 1.35604316 | 0.04210534 | PTEN | 30 | Hep3B | 48 | qRTPCR |
| | m02 | | | | | | | |
| 1531 | PTEN-05 | 1.40591605 | 0.10318003 | PTEN | 30 | Hep3B | 48 | qRTPCR |
| | m02 | | | | | | | |
| 2270 | PTEN-06 | 1.28264515 | 0.10187842 | PTEN | 30 | Hep3B | 48 | qRTPCR |
| | m02 | | | | | | | |
| 2219 | PTEN-07 | 1.19295416 | 0.09040707 | PTEN | 30 | Hep3B | 48 | qRTPCR |
| | m02 | | | | | | | |
| 3435 | PTEN-08 | 1.13031934 | 0.24329104 | PTEN | 30 | Hep3B | 48 | qRTPCR |
| | m02 | | | | | | | |
| 3385 | PTEN-09 | 1.17249987 | 0.31262063 | PTEN | 30 | Hep3B | 48 | qRTPCR |
| | m02 | | | | | | | |
| 4787 | PTEN-10 | 1.30534932 | 0.24048396 | PTEN | 30 | Hep3B | 48 | qRTPCR |
| | m02 | | | | | | | |
| 4757 | PTEN-11 | 1.16030594 | 0.15168937 | PTEN | 30 | Hep3B | 48 | qRTPCR |
| | m02 | | | | | | | |
| 24934 | PTEN-12 | 1.00762685 | 0.17820605 | PTEN | 30 | Hep3B | 48 | qRTPCR |
| | m02 | | | | | | | |
| 24915 | PTEN-13 | 1.05469305 | 0.03726579 | PTEN | 30 | Hep3B | 48 | qRTPCR |
| | m02 | | | | | | | |
| 39332 | PTEN-14 | 1.21390707 | 0.05560444 | PTEN | 30 | Hep3B | 48 | qRTPCR |
| | m02 | | | | | | | |
| 39286 | PTEN-15 | 1.32131413 | 0.08109832 | PTEN | 30 | Hep3B | 48 | qRTPCR |
| | m02 | | | | | | | |
| 41316 | PTEN-16 | 1.06944172 | 0.09841118 | PTEN | 30 | Hep3B | 48 | qRTPCR |
| | m02 | | | | | | | |
| 41283 | PTEN-17 | 1.72152287 | 0.0267616 | PTEN | 30 | Hep3B | 48 | qRTPCR |
| | m02 | | | | | | | |
| 89012 | PTEN-18 | 1.29045757 | 0.12325518 | PTEN | 30 | Hep3B | 48 | qRTPCR |
| | m02 | | | | | | | |
| 89013 | PTEN-19 | 1.08112434 | 0.04754823 | PTEN | 30 | Hep3B | 48 | qRTPCR |
| | m02 | | | | | | | |
| 89014 | PTEN-20 | 1.38134312 | 0.05598906 | PTEN | 30 | Hep3B | 48 | qRTPCR |
| | m02 | | | | | | | |
| 89015 | PTEN-21 | 1.67846148 | 0.13152567 | PTEN | 30 | Hep3B | 48 | qRTPCR |
| | m02 | | | | | | | |
| 51816 | PTEN-22 | 1.50369396 | 0.0657247 | PTEN | 30 | Hep3B | 48 | qRTPCR |
| | m02 | | | | | | | |
| 61111 | PTEN-23 | 1.43381392 | 0.08413907 | PTEN | 30 | Hep3B | 48 | qRTPCR |
| | m02 | | | | | | | |
| 61047 | PTEN-24 | 1.26542716 | 0.04216795 | PTEN | 30 | Hep3B | 48 | qRTPCR |
| | m02 | | | | | | | |
| 89016 | PTEN-25 | 1.44528983 | 0.00607422 | PTEN | 30 | Hep3B | 48 | qRTPCR |
| | m02 | | | | | | | |
| 89017 | PTEN-26 | 1.9061656 | 0.14732026 | PTEN | 30 | Hep3B | 48 | qRTPCR |
| | m02 | | | | | | | |
| 89018 | PTEN-27 | 0.96727622 | 0.07488091 | PTEN | 30 | Hep3B | 48 | qRTPCR |
| | m02 | | | | | | | |
| 89019 | PTEN-28 | 1.26936613 | 0.02232618 | PTEN | 30 | Hep3B | 48 | qRTPCR |
| | m02 | | | | | | | |
| 74236 | PTEN-29 | 1.1752558 | 0.07292346 | PTEN | 30 | Hep3B | 48 | qRTPCR |
| | m02 | | | | | | | |
| 74236 | PTEN-29 | 1.15035798 | 0.02630625 | PTEN | 30 | Hep3B | 48 | qRTPCR |
| | m08 | | | | | | | |
| | Ctrl Un | 1.02306739 | 0.06109769 | PTEN | 0 | Hep3B | 48 | qRTPCR |
| | Ctrl Lipo | 1.0003564 | 0.01898647 | PTEN | 0 | Hep3B | 48 | qRTPCR |
| 89008 | PTEN-01 | 0.92043686 | 0.03752159 | PTEN | 10 | Hep3B | 48 | qRTPCR |
| | m02 | | | | | | | |
| 89009 | PTEN-02 | 1.21754828 | 0.10735102 | PTEN | 10 | Hep3B | 48 | qRTPCR |
| | m02 | | | | | | | |
| 89010 | PTEN-03 | 1.45133911 | 0.06747642 | PTEN | 10 | Hep3B | 48 | qRTPCR |
| | m02 | | | | | | | |
| 89011 | PTEN-04 | 1.28473538 | 0.0779697 | PTEN | 10 | Hep3B | 48 | qRTPCR |
| | m02 | | | | | | | |
| 1531 | PTEN-05 | 1.49921065 | 0.0701304 | PTEN | 10 | Hep3B | 48 | qRTPCR |
| | m02 | | | | | | | |
| 2270 | PTEN-06 | 1.33980352 | 0.09599047 | PTEN | 10 | Hep3B | 48 | qRTPCR |
| | m02 | | | | | | | |
| 2219 | PTEN-07 | 1.16777521 | 0.07720115 | PTEN | 10 | Hep3B | 48 | qRTPCR |
| | m02 | | | | | | | |
| 3435 | PTEN-08 | 1.12689576 | 0.24130018 | PTEN | 10 | Hep3B | 48 | qRTPCR |
| | m02 | | | | | | | |
| 3385 | PTEN-09 | 1.05940742 | 0.25562672 | PTEN | 10 | Hep3B | 48 | qRTPCR |
| | m02 | | | | | | | |
| 4787 | PTEN-10 | 1.22747037 | 0.20038013 | PTEN | 10 | Hep3B | 48 | qRTPCR |
| | m02 | | | | | | | |
| 4757 | PTEN-11 | 1.03856807 | 0.12350597 | PTEN | 10 | Hep3B | 48 | qRTPCR |
| | m02 | | | | | | | |
| 24934 | PTEN-12 | 1.03006371 | 0.19607521 | PTEN | 10 | Hep3B | 48 | qRTPCR |
| | m02 | | | | | | | |
| 24915 | PTEN-13 | 1.27504716 | 0.02479226 | PTEN | 10 | Hep3B | 48 | qRTPCR |
| | m02 | | | | | | | |
| 39332 | PTEN-14 | 1.24085106 | 0.04932634 | PTEN | 10 | Hep3B | 48 | qRTPCR |
| | m02 | | | | | | | |
| 39286 | PTEN-15 | 1.04257666 | 0.029586 | PTEN | 10 | Hep3B | 48 | qRTPCR |
| | m02 | | | | | | | |
| 41316 | PTEN-16 | 1.68241978 | 0.07559047 | PTEN | 10 | Hep3B | 48 | qRTPCR |
| | m02 | | | | | | | |
| 41283 | PTEN-17 | 1.28249736 | 0.0267581 | PTEN | 10 | Hep3B | 48 | qRTPCR |
| | m02 | | | | | | | |
| 89012 | PTEN-18 | 1.07746042 | 0.02797078 | PTEN | 10 | Hep3B | 48 | qRTPCR |
| | m02 | | | | | | | |
| 89013 | PTEN-19 | 1.45541497 | 0.10222415 | PTEN | 10 | Hep3B | 48 | qRTPCR |
| | m02 | | | | | | | |
| 89014 | PTEN-20 | 1.54825801 | 0.07879196 | PTEN | 10 | Hep3B | 48 | qRTPCR |
| | m02 | | | | | | | |
| 89015 | PTEN-21 | 1.67890365 | 0.06594263 | PTEN | 10 | Hep3B | 48 | qRTPCR |
| | m02 | | | | | | | |
| 51816 | PTEN-22 | 1.54053623 | 0.18233703 | PTEN | 10 | Hep3B | 48 | qRTPCR |
| | m02 | | | | | | | |
| 61111 | PTEN-23 | 1.38494224 | 0.03292358 | PTEN | 10 | Hep3B | 48 | qRTPCR |
| | m02 | | | | | | | |
| 61047 | PTEN-24 | 1.29367045 | 0.03064696 | PTEN | 10 | Hep3B | 48 | qRTPCR |
| | m02 | | | | | | | |
| 89016 | PTEN-25 | 1.26920881 | 0.04947473 | PTEN | 10 | Hep3B | 48 | qRTPCR |
| | m02 | | | | | | | |
| 89017 | PTEN-26 | 1.63378684 | 0.06378599 | PTEN | 10 | Hep3B | 48 | qRTPCR |
| | m02 | | | | | | | |
| 89018 | PTEN-27 | 1.06068076 | 0.03216688 | PTEN | 10 | Hep3B | 48 | qRTPCR |
| | m02 | | | | | | | |
| 89019 | PTEN-28 | 1.28451012 | 0.07798072 | PTEN | 10 | Hep3B | 48 | qRTPCR |
| | m02 | | | | | | | |
| 74236 | PTEN-29 | 1.21981924 | 0.03228177 | PTEN | 10 | Hep3B | 48 | qRTPCR |
| | m02 | | | | | | | |
| 74236 | PTEN-29 | 1.23666534 | 0.08419671 | PTEN | 10 | Hep3B | 48 | qRTPCR |
| | m08 | | | | | | | |
| | Ctrl Un | 1.04012555 | 0.05867931 | PTEN | 0 | Hep3B | 48 | qRTPCR |
| | Ctrl Lipo | 1.00223105 | 0.04756608 | PTEN | 0 | Hep3B | 48 | qRTPCR |
| 89008 | PTEN-01 | 1.1137004 | 0.0931079 | PTEN | 10 | Hepa 1- | 48 | qRTPCR |
| | m02 | | | | | 6 | | |
| 89009 | PTEN-02 | 1.0035978 | 0.02812044 | PTEN | 10 | Hepa 1- | 48 | qRTPCR |
| | m02 | | | | | 6 | | |
| 89010 | PTEN-03 | 1.05192516 | 0.0703927 | PTEN | 10 | Hepa 1- | 48 | qRTPCR |
| | m02 | | | | | 6 | | |
| 4787 | PTEN-10 | 1.08530622 | 0.00902527 | PTEN | 10 | Hepa 1- | 48 | qRTPCR |
| | m02 | | | | | 6 | | |
| 4757 | PTEN-11 | 0.9557331 | 0.00283882 | PTEN | 10 | Hepa 1- | 48 | qRTPCR |
| | m02 | | | | | 6 | | |
| 24934 | PTEN-12 | 1.08964401 | 0.04984101 | PTEN | 10 | Hepa 1- | 48 | qRTPCR |
| | m02 | | | | | 6 | | |
| 39286 | PTEN-15 | 0.97259979 | 0.02440388 | PTEN | 10 | Hepa 1- | 48 | qRTPCR |
| | m02 | | | | | 6 | | |
| 41316 | PTEN-16 | 1.0365827 | 0.04750994 | PTEN | 10 | Hepa 1- | 48 | qRTPCR |
| | m02 | | | | | 6 | | |
| 89012 | PTEN-18 | 0.85087168 | 0.0025735 | PTEN | 10 | Hepa 1- | 48 | qRTPCR |
| | m02 | | | | | 6 | | |
| 89014 | PTEN-20 | 0.93102279 | 0.05061869 | PTEN | 10 | Hepa 1- | 48 | qRTPCR |
| | m02 | | | | | 6 | | |
| 89015 | PTEN-21 | 1.16902374 | 0.0429716 | PTEN | 10 | Hepa 1- | 48 | qRTPCR |
| | m02 | | | | | 6 | | |
| 89017 | PTEN-26 | 1.0293176 | 0.0184284 | PTEN | 10 | Hepa 1- | 48 | qRTPCR |
| | m02 | | | | | 6 | | |
| | Ctrl Un | 0.84552636 | 0.01109569 | PTEN | 0 | Hepa 1- | 48 | qRTPCR |
| | | | | | | 6 | | |
| | Ctrl Lipo | 1.01139402 | 0.10962385 | PTEN | 0 | Hepa 1- | 48 | qRTPCR |
| | | | | | | 6 | | |
| 89008 | PTEN-01 | 1.37435346 | 0.02323858 | PTEN | 30 | Hepa 1- | 48 | qRTPCR |
| | m02 | | | | | 6 | | |
| 89009 | PTEN-02 | 1.12987697 | 0.03603001 | PTEN | 30 | Hepa 1- | 48 | qRTPCR |
| | m02 | | | | | 6 | | |
| 89010 | PTEN-03 | 1.28804849 | 0.05734154 | PTEN | 30 | Hepa 1- | 48 | qRTPCR |
| | m02 | | | | | 6 | | |
| 4787 | PTEN-10 | 1.30510831 | 0.08103648 | PTEN | 30 | Hepa 1- | 48 | qRTPCR |
| | m02 | | | | | 6 | | |
| 4757 | PTEN-11 | 1.12166013 | 0.05363097 | PTEN | 30 | Hepa 1- | 48 | qRTPCR |
| | m02 | | | | | 6 | | |
| 24934 | PTEN-12 | 1.33108042 | 0.07811614 | PTEN | 30 | Hepa 1- | 48 | qRTPCR |
| | m02 | | | | | 6 | | |
| 39286 | PTEN-15 | 1.01185682 | 0.00189352 | PTEN | 30 | Hepa 1- | 48 | qRTPCR |
| | m02 | | | | | 6 | | |
| 41316 | PTEN-16 | 1.16866925 | 0.02809223 | PTEN | 30 | Hepa 1- | 48 | qRTPCR |
| | m02 | | | | | 6 | | |
| 89012 | PTEN-18 | 0.89133594 | 0.03029202 | PTEN | 30 | Hepa 1- | 48 | qRTPCR |
| | m02 | | | | | 6 | | |
| 89014 | PTEN-20 | 1.03423232 | 0.0202734 | PTEN | 30 | Hepa 1- | 48 | qRTPCR |
| | m02 | | | | | 6 | | |
| 89015 | PTEN-21 | 1.29714156 | 0.02402855 | PTEN | 30 | Hepa 1- | 48 | qRTPCR |
| | m02 | | | | | 6 | | |
| 89017 | PTEN-26 | 1.15902681 | 0.05021543 | PTEN | 30 | Hepa 1- | 48 | qRTPCR |
| | m02 | | | | | 6 | | |
| | Ctrl Un | 0.84552636 | 0.01109569 | PTEN | 0 | Hepa 1- | 48 | qRTPCR |
| | | | | | | 6 | | |
| | Ctrl Lipo | 1.01139402 | 0.10962385 | PTEN | 0 | Hepa 1- | 48 | qRTPCR |
| | | | | | | 6 | | |
| 89008 | PTEN-01 | 0.86285661 | 0.05510382 | PTEN | 30 | Hep3B | 48 | qRTPCR |
| | m02 | | | | | | | |
| 89009 | PTEN-02 | 0.72230437 | 0.04148145 | PTEN | 30 | Hep3B | 48 | qRTPCR |
| | m02 | | | | | | | |
| 89010 | PTEN-03 | 0.9712617 | 0.05943612 | PTEN | 30 | Hep3B | 48 | qRTPCR |
| | m02 | | | | | | | |
| 89011 | PTEN-04 | 1.63103 | 0.16131455 | PTEN | 30 | Hep3B | 48 | qRTPCR |
| | m02 | | | | | | | |
| 1531 | PTEN-05 | 12.5867884 | 3.69478325 | PTEN | 30 | Hep3B | 48 | qRTPCR |
| | m02 | | | | | | | |
| 2270 | PTEN-06 | 14.7667628 | 3.39064883 | PTEN | 30 | Hep3B | 48 | qRTPCR |
| | m02 | | | | | | | |
| 2219 | PTEN-07 | 1.40708516 | 2.59883266 | PTEN | 30 | Hep3B | 48 | qRTPCR |
| | m02 | | | | | | | |
| 3435 | PTEN-08 | 0.9471562 | 1.60845526 | PTEN | 30 | Hep3B | 48 | qRTPCR |
| | m02 | | | | | | | |
| 3385 | PTEN-09 | 0.81907938 | 1.36136205 | PTEN | 30 | Hep3B | 48 | qRTPCR |
| | m02 | | | | | | | |
| 4787 | PTEN-10 | 0.89187466 | 2.26205371 | PTEN | 30 | Hep3B | 48 | qRTPCR |
| | m02 | | | | | | | |
| 4757 | PTEN-11 | 2.31852915 | 1.96994502 | PTEN | 30 | Hep3B | 48 | qRTPCR |
| | m02 | | | | | | | |
| 24934 | PTEN-12 | 17.3869845 | 13.4332744 | PTEN | 30 | Hep3B | 48 | qRTPCR |
| | m02 | | | | | | | |
| 24915 | PTEN-13 | 0.61071708 | 0.05126922 | PTEN | 30 | Hep3B | 48 | qRTPCR |
| | m02 | | | | | | | |
| 39332 | PTEN-14 | 0.85673537 | 0.18563565 | PTEN | 30 | Hep3B | 48 | qRTPCR |
| | m02 | | | | | | | |
| 39286 | PTEN-15 | 1.27622982 | 0.18613699 | PTEN | 30 | Hep3B | 48 | qRTPCR |
| | m02 | | | | | | | |
| 41316 | PTEN-16 | 3.58483495 | 1.44558974 | PTEN | 30 | Hep3B | 48 | qRTPCR |
| | m02 | | | | | | | |
| 41283 | PTEN-17 | 10.9556451 | 1.18019211 | PTEN | 30 | Hep3B | 48 | qRTPCR |
| | m02 | | | | | | | |
| 89012 | PTEN-18 | 9.36666671 | 6.85482901 | PTEN | 30 | Hep3B | 48 | qRTPCR |
| | m02 | | | | | | | |
| 89013 | PTEN-19 | 0.83633443 | 0.05438837 | PTEN | 30 | Hep3B | 48 | qRTPCR |
| | m02 | | | | | | | |
| 89014 | PTEN-20 | 0.88713052 | 0.0783516 | PTEN | 30 | Hep3B | 48 | qRTPCR |
| | m02 | | | | | | | |
| 89015 | PTEN-21 | 1.40307095 | 0.04531143 | PTEN | 30 | Hep3B | 48 | qRTPCR |
| | m02 | | | | | | | |
| 51816 | PTEN-22 | 3.43364668 | 0.7915353 | PTEN | 30 | Hep3B | 48 | qRTPCR |
| | m02 | | | | | | | |
| 61111 | PTEN-23 | 17.7646203 | 6.94603845 | PTEN | 30 | Hep3B | 48 | qRTPCR |
| | m02 | | | | | | | |
| 61047 | PTEN-24 | 6.28877419 | 1.5223077 | PTEN | 30 | Hep3B | 48 | qRTPCR |
| | m02 | | | | | | | |
| 89016 | PTEN-25 | 1.8032164 | 1.06260753 | PTEN | 30 | Hep3B | 48 | qRTPCR |
| | m02 | | | | | | | |
| 89017 | PTEN-26 | 1.43011915 | 0.10624378 | PTEN | 30 | Hep3B | 48 | qRTPCR |
| | m02 | | | | | | | |
| 89018 | PTEN-27 | 1.58157067 | 0.10623726 | PTEN | 30 | Hep3B | 48 | qRTPCR |
| | m02 | | | | | | | |
| 89019 | PTEN-28 | 2.08807696 | 0.30247562 | PTEN | 30 | Hep3B | 48 | qRTPCR |
| | m02 | | | | | | | |
| 74236 | PTEN-29 | 8.31569114 | 3.41551951 | PTEN | 30 | Hep3B | 48 | qRTPCR |
| | m02 | | | | | | | |
| 74236 | PTEN-29 | 9.18788254 | 3.57067981 | PTEN | 30 | Hep3B | 48 | qRTPCR |
| | m08 | | | | | | | |
| 89024 | PTEN-37 | 0.33231411 | 0.03482309 | PTEN | 30 | Hep3B | 48 | qRTPCR |
| | m09 | | | | | | | |
| 80510 | PTEN-38 | 0.13553843 | 0.1252565 | PTEN | 30 | Hep3B | 48 | qRTPCR |
| | m02 | | | | | | | |
| 80568 | PTEN-39 | 0.53521351 | 0.21978072 | PTEN | 30 | Hep3B | 48 | qRTPCR |
| | m08 | | | | | | | |
| 89025 | PTEN-40 | 0.37926266 | 0.14463753 | PTEN | 30 | Hep3B | 48 | qRTPCR |
| | m09 | | | | | | | |
| | Ctrl Un | 1.14804388 | 0.21533079 | PTEN | 0 | Hep3B | 48 | qRTPCR |
| | Ctrl Lipo | 1.03719306 | 0.19807141 | PTEN | 0 | Hep3B | 48 | qRTPCR |
| 89008 | PTEN-01 | 2.05245662 | 0.20849317 | PTEN | 10 | Hep3B | 48 | qRTPCR |
| | m02 | | | | | | | |
| 89009 | PTEN-02 | 4.6327993 | 0.60451206 | PTEN | 10 | Hep3B | 48 | qRTPCR |
| | m02 | | | | | | | |
| 89010 | PTEN-03 | 5.43854888 | 1.15640189 | PTEN | 10 | Hep3B | 48 | qRTPCR |
| | m02 | | | | | | | |
| 89011 | PTEN-04 | 3.17966472 | 0.47379274 | PTEN | 10 | Hep3B | 48 | qRTPCR |
| | m02 | | | | | | | |
| 1531 | PTEN-05 | 3.5266118 | 1.66486019 | PTEN | 10 | Hep3B | 48 | qRTPCR |
| | m02 | | | | | | | |
| 2270 | PTEN-06 | 1.35115222 | 0.06218687 | PTEN | 10 | Hep3B | 48 | qRTPCR |
| | m02 | | | | | | | |
| 2219 | PTEN-07 | 1.60557273 | 0.24378354 | PTEN | 10 | Hep3B | 48 | qRTPCR |
| | m02 | | | | | | | |
| 3435 | PTEN-08 | 3.10947058 | 0.70732608 | PTEN | 10 | Hep3B | 48 | qRTPCR |
| | m02 | | | | | | | |
| 3385 | PTEN-09 | 3.03871076 | 0.22498395 | PTEN | 10 | Hep3B | 48 | qRTPCR |
| | m02 | | | | | | | |
| 4787 | PTEN-10 | 2.2479158 | 0.37901219 | PTEN | 10 | Hep3B | 48 | qRTPCR |
| | m02 | | | | | | | |
| 4757 | PTEN-11 | 1.21883105 | 0.07976438 | PTEN | 10 | Hep3B | 48 | qRTPCR |
| | m02 | | | | | | | |
| 24934 | PTEN-12 | 1.14115249 | 0.02730918 | PTEN | 10 | Hep3B | 48 | qRTPCR |
| | m02 | | | | | | | |
| 24915 | PTEN-13 | 1.69100252 | 0.99325225 | PTEN | 10 | Hep3B | 48 | qRTPCR |
| | m02 | | | | | | | |
| 39332 | PTEN-14 | 3.36385824 | 1.36800003 | PTEN | 10 | Hep3B | 48 | qRTPCR |
| | m02 | | | | | | | |
| 39286 | PTEN-15 | 2.84179964 | 0.74559864 | PTEN | 10 | Hep3B | 48 | qRTPCR |
| | m02 | | | | | | | |
| 41316 | PTEN-16 | 1.88684418 | 0.03985459 | PTEN | 10 | Hep3B | 48 | qRTPCR |
| | m02 | | | | | | | |
| 41283 | PTEN-17 | 1.01964017 | 0.0972503 | PTEN | 10 | Hep3B | 48 | qRTPCR |
| | m02 | | | | | | | |
| 89012 | PTEN-18 | 0.59801882 | 0.08785774 | PTEN | 10 | Hep3B | 48 | qRTPCR |
| | m02 | | | | | | | |
| 89013 | PTEN-19 | 4.02083263 | 0.66361002 | PTEN | 10 | Hep3B | 48 | qRTPCR |
| | m02 | | | | | | | |
| 89014 | PTEN-20 | 3.9185628 | 0.52870307 | PTEN | 10 | Hep3B | 48 | qRTPCR |
| | m02 | | | | | | | |
| 89015 | PTEN-21 | 4.12632285 | 1.01483873 | PTEN | 10 | Hep3B | 48 | qRTPCR |
| | m02 | | | | | | | |
| 51816 | PTEN-22 | 1.51460652 | 0.21316211 | PTEN | 10 | Hep3B | 48 | qRTPCR |
| | m02 | | | | | | | |
| 61111 | PTEN-23 | 1.30255321 | 0.03915479 | PTEN | 10 | Hep3B | 48 | qRTPCR |
| | m02 | | | | | | | |
| 61047 | PTEN-24 | 0.82458263 | 0.0788691 | PTEN | 10 | Hep3B | 48 | qRTPCR |
| | m02 | | | | | | | |
| 89016 | PTEN-25 | 1.56039569 | 0.31056364 | PTEN | 10 | Hep3B | 48 | qRTPCR |
| | m02 | | | | | | | |
| 89017 | PTEN-26 | 4.76968333 | 0.46855982 | PTEN | 10 | Hep3B | 48 | qRTPCR |
| | m02 | | | | | | | |
| 89018 | PTEN-27 | 2.74961402 | 0.24086949 | PTEN | 10 | Hep3B | 48 | qRTPCR |
| | m02 | | | | | | | |
| 89019 | PTEN-28 | 2.44340558 | 0.19230037 | PTEN | 10 | Hep3B | 48 | qRTPCR |
| | m02 | | | | | | | |
| 74236 | PTEN-29 | 1.27433857 | 0.13289234 | PTEN | 10 | Hep3B | 48 | qRTPCR |
| | m02 | | | | | | | |
| 74236 | PTEN-29 | 0.13776815 | 0.00417678 | PTEN | 10 | Hep3B | 48 | qRTPCR |
| | m08 | | | | | | | |
| 89020 | PTEN-31 | 0.20004166 | 0.39065427 | PTEN | 10 | Hep3B | 48 | qRTPCR |
| | m09 | | | | | | | |
| 76350 | PTEN-32 | 0.1361327 | 0.24521716 | PTEN | 10 | Hep3B | 48 | qRTPCR |
| | m02 | | | | | | | |
| 76389 | PTEN-33 | 0.48342976 | 0.01192756 | PTEN | 10 | Hep3B | 48 | qRTPCR |
| | m08 | | | | | | | |
| 89021 | PTEN-34 | 1.08759613 | 0.10351 | PTEN | 10 | Hep3B | 48 | qRTPCR |
| | m09 | | | | | | | |
| 89022 | PTEN-35 | 0.28097529 | 0.05874989 | PTEN | 10 | Hep3B | 48 | qRTPCR |
| | m02 | | | | | | | |
| 89023 | PTEN-36 | 0.48746008 | 0.10270125 | PTEN | 10 | Hep3B | 48 | qRTPCR |
| | m08 | | | | | | | |
| 89024 | PTEN-37 | 0.46050347 | 0.23685356 | PTEN | 10 | Hep3B | 48 | qRTPCR |
| | m09 | | | | | | | |
| 80510 | PTEN-38 | 0.2342252 | 0.24522214 | PTEN | 10 | Hep3B | 48 | qRTPCR |
| | m02 | | | | | | | |
| 80568 | PTEN-39 | 0.48046262 | 0.06091974 | PTEN | 10 | Hep3B | 48 | qRTPCR |
| | m08 | | | | | | | |
| 89025 | PTEN-40 | 1.27629494 | 0.38069875 | PTEN | 10 | Hep3B | 48 | qRTPCR |
| | m09 | | | | | | | |
| | Ctrl Un | 0.80860729 | 0.15650089 | PTEN | 0 | Hep3B | 48 | qRTPCR |
| | Ctrl Lipo | 1.00514358 | 0.0697499 | PTEN | 0 | Hep3B | 48 | qRTPCR |
| 89008 | PTEN-01 | 0.83191514 | 0.05510382 | PTEN | 30 | Hep3B | | qRTPCR |
| | m02 | | | | | | | |
| 89009 | PTEN-02 | 0.69640301 | 0.04148145 | PTEN | 30 | Hep3B | | qRTPCR |
| | m02 | | | | | | | |
| 89010 | PTEN-03 | 0.9364329 | 0.05943612 | PTEN | 30 | Hep3B | | qRTPCR |
| | m02 | | | | | | | |
| 89011 | PTEN-04 | 1.57254234 | 0.16131455 | PTEN | 30 | Hep3B | | qRTPCR |
| | m02 | | | | | | | |
| 1531 | PTEN-05 | 12.1354345 | 3.69478325 | PTEN | 30 | Hep3B | | qRTPCR |
| | m02 | | | | | | | |
| 2270 | PTEN-06 | 14.2372365 | 3.39064883 | PTEN | 30 | Hep3B | | qRTPCR |
| | m02 | | | | | | | |
| 2219 | PTEN-07 | 4.11965478 | 2.59883266 | PTEN | 30 | Hep3B | | qRTPCR |
| | m02 | | | | | | | |
| 3435 | PTEN-08 | 2.66792238 | 1.60845526 | PTEN | 30 | Hep3B | | qRTPCR |
| | m02 | | | | | | | |
| 3385 | PTEN-09 | 2.2817098 | 1.36136205 | PTEN | 30 | Hep3B | | qRTPCR |
| | m02 | | | | | | | |
| 4787 | PTEN-10 | 3.14656477 | 2.26205371 | PTEN | 30 | Hep3B | | qRTPCR |
| | m02 | | | | | | | |
| 4757 | PTEN-11 | 4.57983826 | 1.96994502 | PTEN | 30 | Hep3B | | qRTPCR |
| | m02 | | | | | | | |
| 24934 | PTEN-12 | 19.458362 | 13.4332744 | PTEN | 30 | Hep3B | | qRTPCR |
| | m02 | | | | | | | |
| 24915 | PTEN-13 | 0.58881717 | 0.05126922 | PTEN | 30 | Hep3B | | qRTPCR |
| | m02 | | | | | | | |
| 39332 | PTEN-14 | 0.82601341 | 0.18563565 | PTEN | 30 | Hep3B | | qRTPCR |
| | m02 | | | | | | | |
| 39286 | PTEN-15 | 1.23046506 | 0.18613699 | PTEN | 30 | Hep3B | | qRTPCR |
| | m02 | | | | | | | |
| 41316 | PTEN-16 | 3.45628514 | 1.44558974 | PTEN | 30 | Hep3B | | qRTPCR |
| | m02 | | | | | | | |
| 41283 | PTEN-17 | 10.562783 | 1.18019211 | PTEN | 30 | Hep3B | | qRTPCR |
| | m02 | | | | | | | |
| 89012 | PTEN-18 | 9.03078425 | 6.85482901 | PTEN | 30 | Hep3B | | qRTPCR |
| | m02 | | | | | | | |
| 89013 | PTEN-19 | 0.80634403 | 0.05438837 | PTEN | 30 | Hep3B | | qRTPCR |
| | m02 | | | | | | | |
| 89014 | PTEN-20 | 0.8553186 | 0.0783516 | PTEN | 30 | Hep3B | | qRTPCR |
| | m02 | | | | | | | |
| 89015 | PTEN-21 | 1.35275775 | 0.04531143 | PTEN | 30 | Hep3B | | qRTPCR |
| | m02 | | | | | | | |
| 51816 | PTEN-22 | 3.31051838 | 0.7915353 | PTEN | 30 | Hep3B | | qRTPCR |
| | m02 | | | | | | | |
| 61111 | PTEN-23 | 17.1275928 | 6.94603845 | PTEN | 30 | Hep3B | | qRTPCR |
| | m02 | | | | | | | |
| 61047 | PTEN-24 | 6.06326291 | 1.5223077 | PTEN | 30 | Hep3B | | qRTPCR |
| | m02 | | | | | | | |
| 89016 | PTEN-25 | 1.73855426 | 1.06260753 | PTEN | 30 | Hep3B | | qRTPCR |
| | m02 | | | | | | | |
| 89017 | PTEN-26 | 1.37883603 | 0.10624378 | PTEN | 30 | Hep3B | | qRTPCR |
| | m02 | | | | | | | |
| 89018 | PTEN-27 | 1.52485659 | 0.10623726 | PTEN | 30 | Hep3B | | qRTPCR |
| | m02 | | | | | | | |
| 89019 | PTEN-28 | 2.0131999 | 0.30247562 | PTEN | 30 | Hep3B | | qRTPCR |
| | m02 | | | | | | | |
| 74236 | PTEN-29 | 8.01749596 | 3.41551951 | PTEN | 30 | Hep3B | | qRTPCR |
| | m02 | | | | | | | |
| 74236 | PTEN-29 | 8.85841116 | 3.57067981 | PTEN | 30 | Hep3B | | qRTPCR |
| | m08 | | | | | | | |
| 89020 | PTEN-31 | 0 | 0 | PTEN | 30 | Hep3B | | qRTPCR |
| | m09 | | | | | | | |
| 76350 | PTEN-32 | 0 | 0 | PTEN | 30 | Hep3B | | qRTPCR |
| | m02 | | | | | | | |
| 76389 | PTEN-33 | 0 | 0 | PTEN | 30 | Hep3B | | qRTPCR |
| | m08 | | | | | | | |
| 89021 | PTEN-34 | 0 | 0 | PTEN | 30 | Hep3B | | qRTPCR |
| | m09 | | | | | | | |
| 89022 | PTEN-35 | 0 | 0 | PTEN | 30 | Hep3B | | qRTPCR |
| | m02 | | | | | | | |
| 89023 | PTEN-36 | 0 | 0 | PTEN | 30 | Hep3B | | qRTPCR |
| | m08 | | | | | | | |
| 89024 | PTEN-37 | 1.22567385 | 0.03482309 | PTEN | 30 | Hep3B | | qRTPCR |
| | m09 | | | | | | | |
| 80510 | PTEN-38 | 1.01471094 | 0.1252565 | PTEN | 30 | Hep3B | | qRTPCR |
| | m02 | | | | | | | |
| 80568 | PTEN-39 | 1.17109414 | 0.21978072 | PTEN | 30 | Hep3B | | qRTPCR |
| | m08 | | | | | | | |
| 89025 | PTEN-40 | 0.90144206 | 0.14463753 | PTEN | 30 | Hep3B | | qRTPCR |
| | m09 | | | | | | | |
| | Ctrl Un | 1.10687578 | 0.21533079 | PTEN | 30 | Hep3B | | qRTPCR |
| | Ctrl Lipo | 1 | 0.19807141 | PTEN | 30 | Hep3B | | qRTPCR |
| 89008 | PTEN-01 | 2.04195366 | 0.20849317 | PTEN | 10 | Hep3B | | qRTPCR |
| | m02 | | | | | | | |
| 89009 | PTEN-02 | 4.60909206 | 0.60451206 | PTEN | 10 | Hep3B | | qRTPCR |
| | m02 | | | | | | | |
| 89010 | PTEN-03 | 5.41071841 | 1.15640189 | PTEN | 10 | Hep3B | | qRTPCR |
| | m02 | | | | | | | |
| 89011 | PTEN-04 | 3.16339355 | 0.47379274 | PTEN | 10 | Hep3B | | qRTPCR |
| | m02 | | | | | | | |
| 1531 | PTEN-05 | 3.50856521 | 1.66486019 | PTEN | 10 | Hep3B | | qRTPCR |
| | m02 | | | | | | | |
| 2270 | PTEN-06 | 1.34423802 | 0.06218687 | PTEN | 10 | Hep3B | | qRTPCR |
| | m02 | | | | | | | |
| 2219 | PTEN-07 | 1.5973566 | 0.24378354 | PTEN | 10 | Hep3B | | qRTPCR |
| | m02 | | | | | | | |
| 3435 | PTEN-08 | 3.09355861 | 0.70732608 | PTEN | 10 | Hep3B | | qRTPCR |
| | m02 | | | | | | | |
| 3385 | PTEN-09 | 3.02316088 | 0.22498395 | PTEN | 10 | Hep3B | | qRTPCR |
| | m02 | | | | | | | |
| 4787 | PTEN-10 | 2.23641263 | 0.37901219 | PTEN | 10 | Hep3B | | qRTPCR |
| | m02 | | | | | | | |
| 4757 | PTEN-11 | 1.21259398 | 0.07976438 | PTEN | 10 | Hep3B | | qRTPCR |
| | m02 | | | | | | | |
| 24934 | PTEN-12 | 1.13531291 | 0.02730918 | PTEN | 10 | Hep3B | | qRTPCR |
| | m02 | | | | | | | |
| 24915 | PTEN-13 | 1.68234922 | 0.99325225 | PTEN | 10 | Hep3B | | qRTPCR |
| | m02 | | | | | | | |
| 39332 | PTEN-14 | 3.3466445 | 1.36800003 | PTEN | 10 | Hep3B | | qRTPCR |
| | m02 | | | | | | | |
| 39286 | PTEN-15 | 2.82725741 | 0.74559864 | PTEN | 10 | Hep3B | | qRTPCR |
| | m02 | | | | | | | |
| 41316 | PTEN-16 | 1.8771887 | 0.03985459 | PTEN | 10 | Hep3B | | qRTPCR |
| | m02 | | | | | | | |
| 41283 | PTEN-17 | 1.01442241 | 0.0972503 | PTEN | 10 | Hep3B | | qRTPCR |
| | m02 | | | | | | | |
| 89012 | PTEN-18 | 0.5949586 | 0.08785774 | PTEN | 10 | Hep3B | | qRTPCR |
| | m02 | | | | | | | |
| 89013 | PTEN-19 | 4.00025698 | 0.66361002 | PTEN | 10 | Hep3B | | qRTPCR |
| | m02 | | | | | | | |
| 89014 | PTEN-20 | 3.89851049 | 0.52870307 | PTEN | 10 | Hep3B | | qRTPCR |
| | m02 | | | | | | | |
| 89015 | PTEN-21 | 4.10520738 | 1.01483873 | PTEN | 10 | Hep3B | | qRTPCR |
| | m02 | | | | | | | |
| 51816 | PTEN-22 | 1.50685588 | 0.21316211 | PTEN | 10 | Hep3B | | qRTPCR |
| | m02 | | | | | | | |
| 61111 | PTEN-23 | 1.29588771 | 0.03915479 | PTEN | 10 | Hep3B | | qRTPCR |
| | m02 | | | | | | | |
| 61047 | PTEN-24 | 0.82036303 | 0.0788691 | PTEN | 10 | Hep3B | | qRTPCR |
| | m02 | | | | | | | |
| 89016 | PTEN-25 | 1.55241073 | 0.31056364 | PTEN | 10 | Hep3B | | qRTPCR |
| | m02 | | | | | | | |
| 89017 | PTEN-26 | 4.74527562 | 0.46855982 | PTEN | 10 | Hep3B | | qRTPCR |
| | m02 | | | | | | | |
| 89018 | PTEN-27 | 2.73554353 | 0.24086949 | PTEN | 10 | Hep3B | | qRTPCR |
| | m02 | | | | | | | |
| 89019 | PTEN-28 | 2.43090204 | 0.19230037 | PTEN | 10 | Hep3B | | qRTPCR |
| | m02 | | | | | | | |
| 74236 | PTEN-29 | 1.26781745 | 0.13289234 | PTEN | 10 | Hep3B | | qRTPCR |
| | m02 | | | | | | | |
| 74236 | PTEN-29 | 0.13706315 | 0.00417678 | PTEN | 10 | Hep3B | | qRTPCR |
| | m08 | | | | | | | |
| 89020 | PTEN-31 | 0.78869629 | 0.39065427 | PTEN | 10 | Hep3B | | qRTPCR |
| | m09 | | | | | | | |
| 76350 | PTEN-32 | 1.51073942 | 0.24521716 | PTEN | 10 | Hep3B | | qRTPCR |
| | m02 | | | | | | | |
| 76389 | PTEN-33 | 1.05861374 | 0.01192756 | PTEN | 10 | Hep3B | | qRTPCR |
| | m08 | | | | | | | |
| 89021 | PTEN-34 | 1.04312863 | 0.10351 | PTEN | 10 | Hep3B | | qRTPCR |
| | m09 | | | | | | | |
| 89022 | PTEN-35 | 0.90159995 | 0.05874989 | PTEN | 10 | Hep3B | | qRTPCR |
| | m02 | | | | | | | |
| 89023 | PTEN-36 | 0.85954822 | 0.10270125 | PTEN | 10 | Hep3B | | qRTPCR |
| | m08 | | | | | | | |
| 89024 | PTEN-37 | 0.80725368 | 0.23685356 | PTEN | 10 | Hep3B | | qRTPCR |
| | m09 | | | | | | | |
| 80510 | PTEN-38 | 1.16628729 | 0.24522214 | PTEN | 10 | Hep3B | | qRTPCR |
| | m02 | | | | | | | |
| 80568 | PTEN-39 | 0.85281606 | 0.06091974 | PTEN | 10 | Hep3B | | qRTPCR |
| | m08 | | | | | | | |
| 89025 | PTEN-40 | 1.27583985 | 0.38069875 | PTEN | 10 | Hep3B | | qRTPCR |
| | m09 | | | | | | | |
| | Ctrl Un | 0.80446944 | 0.15650089 | PTEN | 10 | Hep3B | | qRTPCR |
| | Ctrl Lipo | 1 | 0.0697499 | PTEN | 10 | Hep3B | | qRTPCR |
| 89008 | PTEN-01 | 2.46858917 | 0.03063719 | PTEN | 30 | HepG2 | 48 | qRTPCR |
| | m02 | | | | | | | |
| 89009 | PTEN-02 | 1.65266096 | 0.27154944 | PTEN | 30 | HepG2 | 48 | qRTPCR |
| | m02 | | | | | | | |
| 89010 | PTEN-03 | 1.56078139 | 0.21101366 | PTEN | 30 | HepG2 | 48 | qRTPCR |
| | m02 | | | | | | | |
| 89011 | PTEN-04 | 0.65616195 | 0.18926703 | PTEN | 30 | HepG2 | 48 | qRTPCR |
| | m02 | | | | | | | |
| 1531 | PTEN-05 | 0.48099904 | 0.04632197 | PTEN | 30 | HepG2 | 48 | qRTPCR |
| | m02 | | | | | | | |
| 2270 | PTEN-06 | 0.7909963 | 0.03270627 | PTEN | 30 | HepG2 | 48 | qRTPCR |
| | m02 | | | | | | | |
| 2219 | PTEN-07 | 0.53872046 | 0.14632694 | PTEN | 30 | HepG2 | 48 | qRTPCR |
| | m02 | | | | | | | |
| 3435 | PTEN-08 | 0.41128342 | 0.097757 | PTEN | 30 | HepG2 | 48 | qRTPCR |
| | m02 | | | | | | | |
| 3385 | PTEN-09 | 0.60687582 | 0.17145346 | PTEN | 30 | HepG2 | 48 | qRTPCR |
| | m02 | | | | | | | |
| 4787 | PTEN-10 | 0.57459175 | 0.03798783 | PTEN | 30 | HepG2 | 48 | qRTPCR |
| | m02 | | | | | | | |
| 4757 | PTEN-11 | 0.90944845 | 0.09497654 | PTEN | 30 | HepG2 | 48 | qRTPCR |
| | m02 | | | | | | | |
| 24934 | PTEN-12 | 0.35748511 | 0.02782391 | PTEN | 30 | HepG2 | 48 | qRTPCR |
| | m02 | | | | | | | |
| 24915 | PTEN-13 | 0.80041903 | 0.20317037 | PTEN | 30 | HepG2 | 48 | qRTPCR |
| | m02 | | | | | | | |
| 39332 | PTEN-14 | 0.73925238 | 0.19461962 | PTEN | 30 | HepG2 | 48 | qRTPCR |
| | m02 | | | | | | | |
| 39286 | PTEN-15 | 1.51050395 | 0.12769327 | PTEN | 30 | HepG2 | 48 | qRTPCR |
| | m02 | | | | | | | |
| 41316 | PTEN-16 | 1.05322562 | 0.02781351 | PTEN | 30 | HepG2 | 48 | qRTPCR |
| | m02 | | | | | | | |
| 41283 | PTEN-17 | 1.10492008 | 0.2491756 | PTEN | 30 | HepG2 | 48 | qRTPCR |
| | m02 | | | | | | | |
| 89012 | PTEN-18 | 1.02218885 | 0.10992679 | PTEN | 30 | HepG2 | 48 | qRTPCR |
| | m02 | | | | | | | |
| 89013 | PTEN-19 | 1.32111033 | 0.08784151 | PTEN | 30 | HepG2 | 48 | qRTPCR |
| | m02 | | | | | | | |
| 89014 | PTEN-20 | 0.20726178 | 0.03784299 | PTEN | 30 | HepG2 | 48 | qRTPCR |
| | m02 | | | | | | | |
| 89015 | PTEN-21 | 1.16846444 | 0.18912677 | PTEN | 30 | HepG2 | 48 | qRTPCR |
| | m02 | | | | | | | |
| 51816 | PTEN-22 | 0.93229274 | 0.05224198 | PTEN | 30 | HepG2 | 48 | qRTPCR |
| | m02 | | | | | | | |
| 61111 | PTEN-23 | 1.21504563 | 0.27766444 | PTEN | 30 | HepG2 | 48 | qRTPCR |
| | m02 | | | | | | | |
| 61047 | PTEN-24 | 0.41141525 | 0.05099622 | PTEN | 30 | HepG2 | 48 | qRTPCR |
| | m02 | | | | | | | |
| 89016 | PTEN-25 | 1.18189558 | 0.17039788 | PTEN | 30 | HepG2 | 48 | qRTPCR |
| | m02 | | | | | | | |
| 89017 | PTEN-26 | 0.91690612 | 0.04448978 | PTEN | 30 | HepG2 | 48 | qRTPCR |
| | m02 | | | | | | | |
| 89018 | PTEN-27 | 1.05014538 | 0.11896204 | PTEN | 30 | HepG2 | 48 | qRTPCR |
| | m02 | | | | | | | |
| 89019 | PTEN-28 | 0.23938043 | 0.05714057 | PTEN | 30 | HepG2 | 48 | qRTPCR |
| | m02 | | | | | | | |
| 74236 | PTEN-29 | 0.83974164 | 0.13173022 | PTEN | 30 | HepG2 | 48 | qRTPCR |
| | m02 | | | | | | | |
| 74236 | PTEN-29 | 1.11834626 | 0.1477032 | PTEN | 30 | HepG2 | 48 | qRTPCR |
| | m08 | | | | | | | |
| 89020 | PTEN-31 | 0.47919683 | 0.10224302 | PTEN | 30 | HepG2 | 48 | qRTPCR |
| | m09 | | | | | | | |
| 76350 | PTEN-32 | 0.57689657 | 0.07699519 | PTEN | 30 | HepG2 | 48 | qRTPCR |
| | m02 | | | | | | | |
| 76389 | PTEN-33 | 0.57802595 | 0.22410403 | PTEN | 30 | HepG2 | 48 | qRTPCR |
| | m08 | | | | | | | |
| 89021 | PTEN-34 | 1.14567902 | 0.38024147 | PTEN | 30 | HepG2 | 48 | qRTPCR |
| | m09 | | | | | | | |
| 89022 | PTEN-35 | 0.41306284 | 0.28507158 | PTEN | 30 | HepG2 | 48 | qRTPCR |
| | m02 | | | | | | | |
| 89023 | PTEN-36 | 0.09621871 | 0.05518511 | PTEN | 30 | HepG2 | 48 | qRTPCR |
| | m08 | | | | | | | |
| 89024 | PTEN-37 | 0.57614296 | 0.12911061 | PTEN | 30 | HepG2 | 48 | qRTPCR |
| | m09 | | | | | | | |
| 80510 | PTEN-38 | 0.09621871 | 0.05518511 | PTEN | 30 | HepG2 | 48 | qRTPCR |
| | m02 | | | | | | | |
| 80568 | PTEN-39 | 2.22228207 | 1.70473932 | PTEN | 30 | HepG2 | 48 | qRTPCR |
| | m08 | | | | | | | |
| 89025 | PTEN-40 | 0.0972852 | 0.02874248 | PTEN | 30 | HepG2 | 48 | qRTPCR |
| | m09 | | | | | | | |
| | Ctrl Un | 1.0245258 | 0.16493375 | PTEN | 0 | HepG2 | 48 | qRTPCR |
| | Ctrl Lipo | 0.20387263 | 0.03098558 | PTEN | 0 | HepG2 | 48 | qRTPCR |

TABLE 4
Formatted oligonucleotide sequences made for testing in the lab showing
nucleotide modifications.

| | Base | | |
|---|---|---|---|
| OligoID | Sequence | Formatted Sequence | SeqID |
| PTEN-01 | TCTGGAGCAGA | dTs;InaCs;dTs;InaGs;dGs;InaAs;dGs;InaCs;dAs;InaGs; | 89008 |
| m02 | GATA | dAs;InaGs;dAs;InaTs;dA-Sup | |
| PTEN-02 | TCCAAGTACTT | dTs;InaCs;dCs;InaAs;dAs;InaGs;dTs;InaAs;dCs;InaTs; | 89009 |
| m02 | CCAT | dTs;InaCs;dCs;InaAs;dT-Sup | |
| PTEN-03 | TGATTTCCCTT | dTs;InaGs;dAs;InaTs;dTs;InaTs;dCs;InaCs;dCs;InaTs; | 89010 |
| m02 | AGGA | dTs;InaAs;dGs;InaGs;dA-Sup | |
| PTEN-04 | TATCTAACGAG | dTs;InaAs;dTs;InaCs;dTs;InaAs;dAs;InaCs;dGs;InaAs; | 89011 |
| m02 | ACCT | dGs;InaAs;dCs;InaCs;dT-Sup | |
| PTEN-05 | TGCACGGTTAG | dTs;InaGs;dCs;InaAs;dCs;InaGs;dGs;InaTs;dTs;InaAs; | 1531 |
| m02 | AAAA | dGs;InaAs;dAs;InaAs;dA-Sup | |
| PTEN-06 | TTCTAAGAGAG | dTs;InaTs;dCs;InaTs;dAs;InaAs;dGs;InaAs;dGs;InaAs; | 2270 |
| m02 | TGAC | dGs;InaTs;dGs;InaAs;dC-Sup | |
| PTEN-07 | AGGTCAAGTCT | dAs;InaGs;dGs;InaTs;dCs;InaAs;dAs;InaGs;dTs;InaCs; | 2219 |
| m02 | AAGT | dTs;InaAs;dAs;InaGs;dT-Sup | |
| PTEN-08 | TGACCACTAAC | dTs;InaGs;dAs;InaCs;dCs;InaAs;dCs;InaTs;dAs;InaAs; | 3435 |
| m02 | TTTT | dCs;InaTs;dTs;InaTs;dT-Sup | |
| PTEN-09 | TACACACTGTT | dTs;InaAs;dCs;InaAs;dCs;InaAs;dCs;InaTs;dGs;InaTs; | 3385 |
| m02 | AAAA | dTs;InaAs;dAs;InaAs;dA-Sup | |
| PTEN-10 | TCCAATCACTA | dTs;InaCs;dCs;InaAs;dAs;InaTs;dCs;InaAs;dCs;InaTs; | 4787 |
| m02 | CTTT | dAs;InaCs;dTs;InaTs;dT-Sup | |
| PTEN-11 | CTTTTCACAGG | dCs;InaTs;dTs;InaTs;dTs;InaCs;dAs;InaCs;dAs;InaGs; | 4757 |
| m02 | TTAG | dGs;InaTs;dTs;InaAs;dG-Sup | |
| PTEN-12 | TAAGTTCTTAA | dTs;InaAs;dAs;InaGs;dTs;InaTs;dCs;InaTs;dTs;InaAs; | 24934 |
| m02 | AGCA | dAs;InaAs;dGs;InaCs;dA-Sup | |
| PTEN-13 | GTCACTACACA | dGs;InaTs;dCs;InaAs;dCs;InaTs;dAs;InaCs;dAs;InaCs; | 24915 |
| m02 | CAGG | dAs;InaCs;dAs;InaGs;dG-Sup | |
| PTEN-14 | TTATGTACATC | dTs;InaTs;dAs;InaTs;dGs;InaTs;dAs;InaCs;dAs;InaTs; | 39332 |
| m02 | TTTC | dCs;InaTs;dTs;InaTs;dC-Sup | |
| PTEN-15 | ACAGAATACTA | dAs;InaCs;dAs;InaGs;dAs;InaAs;dTs;InaAs;dCs;InaTs; | 39286 |
| m02 | CTTT | dAs;InaCs;dTs;InaTs;dT-Sup | |
| PTEN-16 | TGATTAGCACA | dTs;InaGs;dAs;InaTs;dTs;InaAs;dGs;InaCs;dAs;InaCs; | 41316 |
| m02 | GACC | dAs;InaGs;dAs;InaCs;dC-Sup | |
| PTEN-17 | TCACCTCCACA | dTs;InaCs;dAs;InaCs;dCs;InaTs;dCs;InaCs;dAs;InaCs; | 41283 |
| m02 | CTTT | dAs;InaCs;dTs;InaTs;dT-Sup | |
| PTEN-18 | TCATTTCTTCT | dTs;InaCs;dAs;InaTs;dTs;InaTs;dCs;InaTs;dTs;InaCs; | 89012 |
| m02 | GTTG | dTs;InaGs;dTs;InaTs;dG-Sup | |
| PTEN-19 | TATGTAGCTTT | dTs;InaAs;dTs;InaGs;dTs;InaAs;dGs;InaCs;dTs;InaTs; | 89013 |
| m02 | GGAA | dTs;InaGs;dGs;InaAs;dA-Sup | |
| PTEN-20 | GATAGGTACAG | dGs;InaAs;dTs;InaAs;dGs;InaGs;dTs;InaAs;dCs;InaAs; | 89014 |
| m02 | CTGT | dGs;InaCs;dTs;InaGs;dT-Sup | |
| PTEN-21 | TAAACAGCAAC | dTs;InaAs;dAs;InaAs;dCs;InaAs;dGs;InaCs;dAs;InaAs; | 89015 |
| m02 | ATAA | dCs;InaAs;dTs;InaAs;dA-Sup | |
| PTEN-22 | TTACCCAAAAG | dTs;InaTs;dAs;InaCs;dCs;InaCs;dAs;InaAs;dAs;InaAs; | 51816 |
| m02 | TGAA | dGs;InaTs;dGs;InaAs;dA-Sup | |
| PTEN-23 | TGGCATTAGAA | dTs;InaGs;dGs;InaCs;dAs;InaTs;dTs;InaAs;dGs;InaAs; | 61111 |
| m02 | AGTA | dAs;InaAs;dGs;InaTs;dA-Sup | |
| PTEN-24 | TGACAGATATA | dTs;InaGs;dAs;InaCs;dAs;InaGs;dAs;InaTs;dAs;InaTs; | 61047 |
| m02 | CTAA | dAs;InaCs;dTs;InaAs;dA-Sup | |
| PTEN-25 | TGAATCGGAAG | dTs;InaGs;dAs;InaAs;dTs;InaCs;dGs;InaGs;dAs;InaAs; | 89016 |
| m02 | GGTT | dGs;InaGs;dGs;InaTs;dT-Sup | |
| PTEN-26 | TAATATGAGCA | dTs;InaAs;dAs;InaTs;dAs;InaTs;dGs;InaAs;dGs;InaCs; | 89017 |
| m02 | GGTG | dAs;InaGs;dGs;InaTs;dG-Sup | |
| PTEN-27 | CTCATCCAATT | dCs;InaTs;dCs;InaAs;dTs;InaCs;dCs;InaAs;dAs;InaTs; | 89018 |
| m02 | CACT | dTs;InaCs;dAs;InaCs;dT-Sup | |
| PTEN-28 | TCAAGGAAGG | dTs;InaCs;dAs;InaAs;dGs;InaGs;dAs;InaAs;dGs;InaGs; | 89019 |
| m02 | ATGGT | dAs;InaTs;dGs;InaGs;dT-Sup | |
| PTEN-29 | TAAATCTTGAG | dTs;InaAs;dAs;InaAs;dTs;InaCs;dTs;InaTs;dGs;InaAs; | 74236 |
| m02 | ACGG | dGs;InaAs;dCs;InaGs;dG-Sup | |
| PTEN-29 | TAAATCTTGAG | InaTs;InaAs;InaAs;dAs;dTs;dCs;dTs;dTs;dGs;dAs;dGs; | 74236 |
| m08 | ACGG | dAs;InaCs;InaGs;InaG-Sup | |
| PTEN-31 | AGCCCTGT | InaAs;InaGs;InaCs;InaCs;InaCs;InaTs;InaGs;InaT-Sup | 89020 |
| m09 | | | |
| PTEN-32 | TCCCACACTGA | dTs;InaCs;dCs;InaCs;dAs;InaCs;dAs;InaCs;dTs;InaGs; | 76350 |
| m02 | CATA | dAs;InaCs;dAs;InaTs;dA-Sup | |
| PTEN-33 | TCATTGCTCCT | InaTs;InaCs;InaAs;dTs;dTs;dGs;dCs;dTs;dCs;dCs;dTs; | 76389 |
| m08 | CCTG | dCs;InaCs;InaTs;InaG-Sup | |
| PTEN-34 | CCAACCAT | InaCs;InaCs;InaAs;InaAs;InaCs;InaCs;InaAs;InaT-Sup | 89021 |
| m09 | | | |
| PTEN-35 | TTGTAGACAGC | dTs;InaTs;dGs;InaTs;dAs;InaGs;dAs;InaCs;dAs;InaGs; | 89022 |
| m02 | ATAT | dCs;InaAs;dTs;InaAs;dT-Sup | |
| PTEN-36 | TTCTTATACAT | InaTs;InaTs;InaCs;dTs;dTs;dAs;dTs;dAs;dCs;dAs;dTs; | 89023 |
| m08 | TCTG | dTs;InaCs;InaTs;InaG-Sup | |
| PTEN-37 | GCCTTTTG | InaGs;InaCs;InaCs;InaTs;InaTs;InaTs;InaTs;InaG-Sup | 89024 |
| m09 | | | |
| PTEN-38 | TAAGTGGTACA | dTs;InaAs;dAs;InaGs;dTs;InaGs;dGs;InaTs;dAs;InaCs; | 80510 |
| m02 | AATT | dAs;InaAs;dAs;InaTs;dT-Sup | |
| PTEN-39 | GAAAAGACTGC | InaGs;InaAs;InaAs;dAs;dAs;dGs;dAs;dCs;dTs;dGs; | 80568 |
| m08 | TATT | dCs;dTs;InaAs;InaTs;InaT-Sup | |
| PTEN-40 | CTGTTCAA | InaCs;InaTs;InaGs;InaTs;InaTs;InaCs;InaAs;InaA-Sup | 89025 |
| m09 | | | |
| PTEN-41 | AGAACGCCTTA | InaAs;omeGs;InaAs;omeAs;InaCs;omeGs;InaCs;omeCs; | 2905 |
| m01 | TAAG | InaTs;omeUs;InaAs;omeUs;InaAs;omeAs;InaG-Sup | |
| PTEN-42 | AAGAACGCCTT | InaAs;omeAs;InaGs;omeAs;InaAs;omeCs;InaGs;omeCs; | 2906 |
| m01 | ATAA | InaCs;omeUs;InaTs;omeAs;InaTs;omeAs;InaA-Sup | |
| PTEN-43 | GTAAGAACGCC | InaGs;omeUs;InaAs;omeAs;InaGs;omeAs;InaAs;omeCs; | 2908 |
| m01 | TTAT | InaGs;omeCs;InaCs;omeUs;InaTs;omeAs;InaT-Sup | |
| PTEN-44 | AGTAAGAACGC | InaAs;omeGs;InaTs;omeAs;InaAs;omeGs;InaAs;omeAs; | 2909 |
| m01 | CTTA | InaCs;omeGs;InaCs;omeCs;InaTs;omeUs;InaA-Sup | |
| PTEN-45 | TAGTAAGAACG | InaTs;omeAs;InaGs;omeUs;InaAs;omeAs;InaGs;omeAs; | 2910 |
| m01 | CCTT | InaAs;omeCs;InaGs;omeCs;InaCs;omeUs;InaT-Sup | |
| PTEN-46 | CTAGTAAGAAC | InaCs;omeUs;InaAs;omeGs;InaTs;omeAs;InaAs;omeGs; | 2911 |
| m01 | GCCT | InaAs;omeAs;InaCs;omeGs;InaCs;omeCs;InaT-Sup | |
| PTEN-47 | TTTGAAGCCCG | InaTs;omeUs;InaTs;omeGs;InaAs;omeAs;InaGs;omeCs; | 3423 |
| m01 | AAGG | InaCs;omeCs;InaGs;omeAs;InaAs;omeGs;InaG-Sup | |
| PTEN-48 | TTTTGAAGCCC | InaTs;omeUs;InaTs;omeUs;InaGs;omeAs;InaAs;omeGs; | 3424 |
| m01 | GAAG | InaCs;omeCs;InaCs;omeGs;InaAs;omeAs;InaG-Sup | |
| PTEN-49 | CTTTTGAAGCC | InaCs;omeUs;InaTs;omeUs;InaTs;omeGs;InaAs;omeAs; | 3425 |
| m01 | CGAA | InaGs;omeCs;InaCs;omeCs;InaGs;omeAs;InaA-Sup | |
| PTEN-50 | TCGATGACCAC | InaTs;omeCs;InaGs;omeAs;InaTs;omeGs;InaAs;omeCs; | 3439 |
| m01 | TAAC | InaCs;omeAs;InaCs;omeUs;InaAs;omeAs;InaC-Sup | |
| PTEN-51 | TTCGATGACCA | InaTs;omeUs;InaCs;omeGs;InaAs;omeUs;InaGs;omeAs; | 3440 |
| m01 | CTAA | InaCs;omeCs;InaAs;omeCs;InaTs;omeAs;InaA-Sup | |
| PTEN-52 | TTTCGATGACC | InaTs;omeUs;InaTs;omeCs;InaGs;omeAs;InaTs;omeGs; | 3441 |
| m01 | ACTA | InaAs;omeCs;InaCs;omeAs;InaCs;omeUs;InaA-Sup | |
| PTEN-53 | TTTTCGATGAC | InaTs;omeUs;InaTs;omeUs;InaCs;omeGs;InaAs;omeUs; | 3442 |
| m01 | CACT | InaGs;omeAs;InaCs;omeCs;InaAs;omeCs;InaT-Sup | |
| PTEN-54 | CTTTTCGATGA | InaCs;omeUs;InaTs;omeUs;InaTs;omeCs;InaGs;omeAs; | 3443 |
| m01 | CCAC | InaTs;omeGs;InaAs;omeCs;InaCs;omeAs;InaC-Sup | |
| PTEN-55 | GCTTTTCGATG | InaGs;omeCs;InaTs;omeUs;InaTs;omeUs;InaCs;omeGs; | 3444 |
| m01 | ACCA | InaAs;omeUs;InaGs;omeAs;InaCs;omeCs;InaA-Sup | |
| PTEN-56 | TGCTTTTCGAT | InaTs;omeGs;InaCs;omeUs;InaTs;omeUs;InaTs;omeCs; | 3445 |
| m01 | GACC | InaGs;omeAs;InaTs;omeGs;InaAs;omeCs;InaC-Sup | |
| PTEN-57 | ATGCTTTTCGA | InaAs;omeUs;InaGs;omeCs;InaTs;omeUs;InaTs;omeUs; | 3446 |
| m01 | TGAC | InaCs;omeGs;InaAs;omeUs;InaGs;omeAs;InaC-Sup | |
| PTEN-58 | AATGCTTTTCG | InaAs;omeAs;InaTs;omeGs;InaCs;omeUs;InaTs;omeUs; | 3447 |
| m01 | ATGA | InaTs;omeCs;InaGs;omeAs;InaTs;omeGs;InaA-Sup | |
| PTEN-59 | TTAATGCTTTT | InaTs;omeUs;InaAs;omeAs;InaTs;omeGs;InaCs;omeUs; | 3449 |
| m01 | CGAT | InaTs;omeUs;InaTs;omeCs;InaGs;omeAs;InaT-Sup | |
| PTEN-60 | ACGCAATATTT | InaAs;omeCs;InaGs;omeCs;InaAs;omeAs;InaTs;omeAs; | 4490 |
| m01 | GATA | InaTs;omeUs;InaTs;omeGs;InaAs;omeUs;InaA-Sup | |
| PTEN-61 | TGACGCAATAT | InaTs;omeGs;InaAs;omeCs;InaGs;omeCs;InaAs;omeAs; | 4492 |
| m01 | TTGA | InaTs;omeAs;InaTs;omeUs;InaTs;omeGs;InaA-Sup | |
| PTEN-62 | TTTGACGCAAT | InaTs;omeUs;InaTs;omeGs;InaAs;omeCs;InaGs;omeCs; | 4494 |
| m01 | ATTT | InaAs;omeAs;InaTs;omeAs;InaTs;omeUs;InaT-Sup | |
| PTEN-63 | ATTTGACGCAA | InaAs;omeUs;InaTs;omeUs;InaGs;omeAs;InaCs;omeGs; | 4495 |
| m01 | TATT | InaCs;omeAs;InaAs;omeUs;InaAs;omeUs;InaT-Sup | |
| PTEN-64 | CATTTGACGCA | InaCs;omeAs;InaTs;omeUs;InaTs;omeGs;InaAs;omeCs; | 4496 |
| m01 | ATAT | InaGs;omeCs;InaAs;omeAs;InaTs;omeAs;InaT-Sup | |
| PTEN-65 | TCAATTTTCCT | InaTs;omeCs;InaAs;omeAs;InaTs;omeUs;InaTs;omeUs; | 4845 |
| m01 | CGGA | InaCs;omeCs;InaTs;omeCs;InaGs;omeGs;InaA-Sup | |
| PTEN-66 | CTCAATTTTCC | InaCs;omeUs;InaCs;omeAs;InaAs;omeUs;InaTs;omeUs; | 4846 |
| m01 | TCGG | InaTs;omeCs;InaCs;omeUs;InaCs;omeGs;InaG-Sup | |
| PTEN-67 | CAACGGTTTCT | InaCs;omeAs;InaAs;omeCs;InaGs;omeGs;InaTs;omeUs; | 6111 |
| m01 | ACAG | InaTs;omeCs;InaTs;omeAs;InaCs;omeAs;InaG-Sup | |
| PTEN-68 | CCAACGGTTTC | InaCs;omeCs;InaAs;omeAs;InaCs;omeGs;InaGs;omeUs; | 6112 |
| m01 | TACA | InaTs;omeUs;InaCs;omeUs;InaAs;omeCs;InaA-Sup | |
| PTEN-69 | CCCAACGGTTT | InaCs;omeCs;InaCs;omeAs;InaAs;omeCs;InaGs;omeGs; | 6113 |
| m01 | CTAC | InaTs;omeUs;InaTs;omeCs;InaTs;omeAs;InaC-Sup | |
| PTEN-70 | TTAACCCAACG | InaTs;omeUs;InaAs;omeAs;InaCs;omeCs;InaCs;omeAs; | 6117 |
| m01 | GTTT | InaAs;omeCs;InaGs;omeGs;InaTs;omeUs;InaT-Sup | |
| PTEN-71 | TTTAACCCAAC | InaTs;omeUs;InaTs;omeAs;InaAs;omeCs;InaCs;omeCs; | 6118 |
| m01 | GGTT | InaAs;omeAs;InaCs;omeGs;InaGs;omeUs;InaT-Sup | |
| PTEN-72 | GTTTAACCCAA | InaGs;omeUs;InaTs;omeUs;InaAs;omeAs;InaCs;omeCs; | 6119 |
| m01 | CGGT | InaCs;omeAs;InaAs;omeCs;InaGs;omeGs;InaT-Sup | |
| PTEN-73 | TTCGCTGCCAT | InaTs;omeUs;InaCs;omeGs;InaCs;omeUs;InaGs;omeCs; | 24440 |
| m01 | ATTC | InaCs;omeAs;InaTs;omeAs;InaTs;omeUs;InaC-Sup | |
| PTEN-74 | ATTCGCTGCCA | InaAs;omeUs;InaTs;omeCs;InaGs;omeCs;InaTs;omeGs; | 24441 |
| m01 | TATT | InaCs;omeCs;InaAs;omeUs;InaAs;omeUs;InaT-Sup | |
| PTEN-75 | AATTCGCTGCC | InaAs;omeAs;InaTs;omeUs;InaCs;omeGs;InaCs;omeUs; | 24442 |
| m01 | ATAT | InaGs;omeCs;InaCs;omeAs;InaTs;omeAs;InaT-Sup | |
| PTEN-76 | GAATTCGCTGC | InaGs;omeAs;InaAs;omeUs;InaTs;omeCs;InaGs;omeCs; | 24443 |
| m01 | CATA | InaTs;omeGs;InaCs;omeCs;InaAs;omeUs;InaA-Sup | |
| PTEN-77 | TGATAGTCTAA | InaTs;omeGs;InaAs;omeUs;InaAs;omeGs;InaTs;omeCs; | 24778 |
| m01 | CCCT | InaTs;omeAs;InaAs;omeCs;InaCs;omeCs;InaT-Sup | |
| PTEN-78 | CCTTCGATTTC | InaCs;omeCs;InaTs;omeUs;InaCs;omeGs;InaAs;omeUs; | 24818 |
| m01 | CATT | InaTs;omeUs;InaCs;omeCs;InaAs;omeUs;InaT-Sup | |
| PTEN-79 | GTCCTTCGATT | InaGs;omeUs;InaCs;omeCs;InaTs;omeUs;InaCs;omeGs; | 24820 |
| m01 | TCCA | InaAs;omeUs;InaTs;omeUs;InaCs;omeCs;InaA-Sup | |
| PTEN-80 | TTCATCAGTAT | InaTs;omeUs;InaCs;omeAs;InaTs;omeCs;InaAs;omeGs; | 33629 |
| m01 | GCGC | InaTs;omeAs;InaTs;omeGs;InaCs;omeGs;InaC-Sup | |
| PTEN-81 | GCTATCGATTT | InaGs;omeCs;InaTs;omeAs;InaTs;omeCs;InaGs;omeAs; | 51896 |
| m01 | CTTG | InaTs;omeUs;InaTs;omeCs;InaTs;omeUs;InaG-Sup | |
| PTEN-82 | TGCTATCGATT | InaTs;omeGs;InaCs;omeUs;InaAs;omeUs;InaCs;omeGs; | 51897 |
| m01 | TCTT | InaAs;omeUs;InaTs;omeUs;InaCs;omeUs;InaT-Sup | |
| PTEN-83 | ATGCTATCGAT | InaAs;omeUs;InaGs;omeCs;InaTs;omeAs;InaTs;omeCs; | 51898 |
| m01 | TTCT | InaGs;omeAs;InaTs;omeUs;InaTs;omeCs;InaT-Sup | |
| PTEN-84 | AATGCTATCGA | InaAs;omeAs;InaTs;omeGs;InaCs;omeUs;InaAs;omeUs; | 51899 |
| m01 | TTTC | InaCs;omeGs;InaAs;omeUs;InaTs;omeUs;InaC-Sup | |
| PTEN-85 | AAATGCTATCG | InaAs;omeAs;InaAs;omeUs;InaGs;omeCs;InaTs;omeAs; | 51900 |
| m01 | ATTT | InaTs;omeCs;InaGs;omeAs;InaTs;omeUs;InaT-Sup | |
| PTEN-86 | GCAAATGCTAT | InaGs;omeCs;InaAs;omeAs;InaAs;omeUs;InaGs;omeCs; | 51902 |
| m01 | CGAT | InaTs;omeAs;InaTs;omeCs;InaGs;omeAs;InaT-Sup | |
| PTEN-87 | TGCAAATGCTA | InaTs;omeGs;InaCs;omeAs;InaAs;omeAs;InaTs;omeGs; | 51903 |
| m01 | TCGA | InaCs;omeUs;InaAs;omeUs;InaCs;omeGs;InaA-Sup | |
| PTEN-88 | CACGCTCTATA | InaCs;omeAs;InaCs;omeGs;InaCs;omeUs;InaCs;omeUs; | 51915 |
| m01 | CTGC | InaAs;omeUs;InaAs;omeCs;InaTs;omeGs;InaC-Sup | |
| PTEN-89 | GCACGCTCTAT | InaGs;omeCs;InaAs;omeCs;InaGs;omeCs;InaTs;omeCs; | 51916 |
| m01 | ACTG | InaTs;omeAs;InaTs;omeAs;InaCs;omeUs;InaG-Sup | |
| PTEN-90 | CTGCACGCTCT | InaCs;omeUs;InaGs;omeCs;InaAs;omeCs;InaGs;omeCs; | 51918 |
| m01 | ATAC | InaTs;omeCs;InaTs;omeAs;InaTs;omeAs;InaC-Sup | |
| PTEN-91 | ATTATCTGCAC | InaAs;omeUs;InaTs;omeAs;InaTs;omeCs;InaTs;omeGs; | 51923 |
| m01 | GCTC | InaCs;omeAs;InaCs;omeGs;InaCs;omeUs;InaC-Sup | |
| PTEN-92 | CATTATCTGCA | InaCs;omeAs;InaTs;omeUs;InaAs;omeUs;InaCs;omeUs; | 51924 |
| m01 | CGCT | InaGs;omeCs;InaAs;omeCs;InaGs;omeCs;InaT-Sup | |
| PTEN-93 | TCATTATCTGC | InaTs;omeCs;InaAs;omeUs;InaTs;omeAs;InaTs;omeCs; | 51925 |
| m01 | ACGC | InaTs;omeGs;InaCs;omeAs;InaCs;omeGs;InaC-Sup | |
| PTEN-94 | CTTGCACCCTA | InaCs;omeUs;InaTs;omeGs;InaCs;omeAs;InaCs;omeCs; | 81225 |
| m01 | GCGC | InaCs;omeUs;InaAs;omeGs;InaCs;omeGs;InaC-Sup | |
| PTEN-95 | CACCCTAGCGC | InaCs;omeAs;InaCs;omeCs;InaCs;omeUs;InaAs;omeGs; | 81229 |
| m01 | ATAC | InaCs;omeGs;InaCs;omeAs;InaTs;omeAs;InaC-Sup | |
| PTEN-96 | CCCTAGCGCAT | InaCs;omeCs;InaCs;omeUs;InaAs;omeGs;InaCs;omeGs; | 81231 |
| m01 | ACTG | InaCs;omeAs;InaTs;omeAs;InaCs;omeUs;InaG-Sup | |
| PTEN-97 | CCTAGCGCATA | InaCs;omeCs;InaTs;omeAs;InaGs;omeCs;InaGs;omeCs; | 81232 |
| m01 | CTGA | InaAs;omeUs;InaAs;omeCs;InaTs;omeGs;InaA-Sup | |
| PTEN-98 | CTAGCGCATAC | InaCs;omeUs;InaAs;omeGs;InaCs;omeGs;InaCs;omeAs; | 81233 |
| m01 | TGAT | InaTs;omeAs;InaCs;omeUs;InaGs;omeAs;InaT-Sup | |
| PTEN-99 | TAGCGCATACT | InaTs;omeAs;InaGs;omeCs;InaGs;omeCs;InaAs;omeUs; | 81234 |
| m01 | GATG | InaAs;omeCs;InaTs;omeGs;InaAs;omeUs;InaG-Sup | |
| PTEN-100 | GCGCATACTGA | InaGs;omeCs;InaGs;omeCs;InaAs;omeUs;InaAs;omeCs; | 81236 |
| m01 | TGAA | InaTs;omeGs;InaAs;omeUs;InaGs;omeAs;InaA-Sup | |
| EPO-24 | TGCACAGGTCC | dTs;InaGs;dCs;InaAs;dCs;InaAs;dGs;InaGs;dTs;InaCs; | 89026 |
| m02 | CGCC | dCs;InaCs;dGs;InaCs;dC-Sup | |
| EPO-26 | TTTCCCGCTGA | dTs;InaTs;dTs;InaCs;dCs;InaCs;dGs;InaCs;dTs;InaGs; | 89027 |
| m02 | AGCA | dAs;InaAs;dGs;InaCs;dA-Sup | |
| GAPDH- | TTGTCATACCA | InaTs;InaTs;InaGs;dTs;dCs;dAs;dTs;dAs;dCs;dCs;dAs; | 89028 |
| 01 m08 | GGAA | dGs;InaGs;InaAs;InaA-Sup | |

### BRIEF DESCRIPTION OF THE SEQUENCE LISTING

| SEQ ID | Chrom | Gene | Chr. Start | Chr. End | Strand |
|---|---|---|---|---|---|
| 1 | chr10 | PTEN | 89611194 | 89740532 | + |
| 2 | chr10 | PTEN | 89611194 | 89740532 | − |
| 3 | chr19 | Pten | 32820066 | 32912650 | + |
| 4 | chr19 | Pten | 32820066 | 32912650 | − |
| 5 | chr10 | PTEN | 89624228 | 89624270 | + |
| 6 | chr10 | PTEN | 89624833 | 89624878 | + |
| 7 | chr10 | PTEN | 89624926 | 89624970 | + |
| 8 | chr10 | PTEN | 89625394 | 89625442 | + |
| 9 | chr10 | PTEN | 89625544 | 89625602 | + |
| 10 | chr10 | PTEN | 89625817 | 89625863 | + |
| 11 | chr10 | PTEN | 89625913 | 89625938 | + |
| 12 | chr10 | PTEN | 89625981 | 89626027 | + |
| 13 | chr10 | PTEN | 89626204 | 89626244 | + |
| 14 | chr10 | PTEN | 89626597 | 89626641 | + |
| 15 | chr10 | PTEN | 89626724 | 89626775 | + |
| 16 | chr10 | PTEN | 89626875 | 89626911 | + |
| 17 | chr10 | PTEN | 89627125 | 89627169 | + |
| 18 | chr10 | PTEN | 89628194 | 89628243 | + |
| 19 | chr10 | PTEN | 89630898 | 89630936 | + |
| 20 | chr10 | PTEN | 89633768 | 89633831 | + |
| 21 | chr10 | PTEN | 89637731 | 89637778 | + |
| 22 | chr10 | PTEN | 89655949 | 89655994 | + |
| 23 | chr10 | PTEN | 89685417 | 89685446 | + |
| 24 | chr10 | PTEN | 89686532 | 89686579 | + |
| 25 | chr10 | PTEN | 89686846 | 89686893 | + |
| 26 | chr10 | PTEN | 89690160 | 89690213 | + |
| 27 | chr10 | PTEN | 89691658 | 89691701 | + |
| 28 | chr10 | PTEN | 89692927 | 89692973 | + |
| 29 | chr10 | PTEN | 89693941 | 89693990 | + |
| 30 | chr10 | PTEN | 89695260 | 89695313 | + |
| 31 | chr10 | PTEN | 89695827 | 89695873 | + |
| 32 | chr10 | PTEN | 89697310 | 89697355 | + |
| 33 | chr10 | PTEN | 89698069 | 89698110 | + |
| 34 | chr10 | PTEN | 89698500 | 89698543 | + |
| 35 | chr10 | PTEN | 89698790 | 89698828 | + |
| 36 | chr10 | PTEN | 89699611 | 89699656 | + |
| 37 | chr10 | PTEN | 89700446 | 89700493 | + |
| 38 | chr10 | PTEN | 89700876 | 89700919 | + |
| 39 | chr10 | PTEN | 89701325 | 89701377 | + |
| 40 | chr10 | PTEN | 89701617 | 89701717 | + |
| 41 | chr10 | PTEN | 89701764 | 89701818 | + |
| 42 | chr10 | PTEN | 89701915 | 89701962 | + |
| 43 | chr10 | PTEN | 89712065 | 89712111 | + |
| 44 | chr10 | PTEN | 89712351 | 89712402 | + |
| 45 | chr10 | PTEN | 89712411 | 89712510 | + |
| 46 | chr10 | PTEN | 89714201 | 89714228 | + |
| 47 | chr10 | PTEN | 89717191 | 89717238 | + |
| 48 | chr10 | PTEN | 89720717 | 89720765 | + |
| 49 | chr10 | PTEN | 89723393 | 89723443 | + |
| 50 | chr10 | PTEN | 89725518 | 89725564 | + |
| 51 | chr10 | PTEN | 89725617 | 89725658 | + |
| 52 | chr10 | PTEN | 89725819 | 89725865 | + |
| 53 | chr10 | PTEN | 89726333 | 89726368 | + |
| 54 | chr10 | PTEN | 89726640 | 89726709 | + |
| 55 | chr10 | PTEN | 89727525 | 89727567 | + |
| 56 | chr10 | PTEN | 89727527 | 89727569 | + |
| 57 | chr10 | PTEN | 89728125 | 89728171 | + |
| 58 | chr10 | PTEN | 89728126 | 89728170 | + |
| 59 | chr10 | PTEN | 89728128 | 89728172 | + |
| 60 | chr10 | PTEN | 89730064 | 89730112 | + |
| 61 | chr10 | PTEN | 89730269 | 89730384 | + |
| 62 | chr10 | PTEN | 89622228 | 89626270 | + |
| 63 | chr10 | PTEN | 89622833 | 89626878 | + |
| 64 | chr10 | PTEN | 89622926 | 89626970 | + |
| 65 | chr10 | PTEN | 89623394 | 89627442 | + |
| 66 | chr10 | PTEN | 89623544 | 89627602 | + |
| 67 | chr10 | PTEN | 89623817 | 89627863 | + |
| 68 | chr10 | PTEN | 89623913 | 89627938 | + |
| 69 | chr10 | PTEN | 89623981 | 89628027 | + |
| 70 | chr10 | PTEN | 89624204 | 89628244 | + |
| 71 | chr10 | PTEN | 89624597 | 89628641 | + |
| 72 | chr10 | PTEN | 89624724 | 89628775 | + |
| 73 | chr10 | PTEN | 89624875 | 89628911 | + |
| 74 | chr10 | PTEN | 89625125 | 89629169 | + |
| 75 | chr10 | PTEN | 89626194 | 89630243 | + |
| 76 | chr10 | PTEN | 89628898 | 89632936 | + |
| 77 | chr10 | PTEN | 89631768 | 89635831 | + |
| 78 | chr10 | PTEN | 89635731 | 89639778 | + |
| 79 | chr10 | PTEN | 89653949 | 89657994 | + |
| 80 | chr10 | PTEN | 89683417 | 89687446 | + |
| 81 | chr10 | PTEN | 89684532 | 89688579 | + |
| 82 | chr10 | PTEN | 89684846 | 89688893 | + |
| 83 | chr10 | PTEN | 89688160 | 89692213 | + |
| 84 | chr10 | PTEN | 89689658 | 89693701 | + |
| 85 | chr10 | PTEN | 89690927 | 89694973 | + |
| 86 | chr10 | PTEN | 89691941 | 89695990 | + |
| 87 | chr10 | PTEN | 89693260 | 89697313 | + |
| 88 | chr10 | PTEN | 89693827 | 89697873 | + |
| 89 | chr10 | PTEN | 89695310 | 89699355 | + |
| 90 | chr10 | PTEN | 89696069 | 89700110 | + |
| 91 | chr10 | PTEN | 89696500 | 89700543 | + |
| 92 | chr10 | PTEN | 89696790 | 89700828 | + |
| 93 | chr10 | PTEN | 89697611 | 89701656 | + |
| 94 | chr10 | PTEN | 89698446 | 89702493 | + |
| 95 | chr10 | PTEN | 89698876 | 89702919 | + |
| 96 | chr10 | PTEN | 89699325 | 89703377 | + |
| 97 | chr10 | PTEN | 89699617 | 89703717 | + |
| 98 | chr10 | PTEN | 89699764 | 89703818 | + |
| 99 | chr10 | PTEN | 89699915 | 89703962 | + |
| 100 | chr10 | PTEN | 89710065 | 89714111 | + |
| 101 | chr10 | PTEN | 89710351 | 89714402 | + |
| 102 | chr10 | PTEN | 89710411 | 89714510 | + |
| 103 | chr10 | PTEN | 89712201 | 89716228 | + |
| 104 | chr10 | PTEN | 89715191 | 89719238 | + |
| 105 | chr10 | PTEN | 89718717 | 89722765 | + |
| 106 | chr10 | PTEN | 89721393 | 89725443 | + |
| 107 | chr10 | PTEN | 89723518 | 89727564 | + |
| 108 | chr10 | PTEN | 89723617 | 89727658 | + |
| 109 | chr10 | PTEN | 89723819 | 89727865 | + |
| 110 | chr10 | PTEN | 89724333 | 89728368 | + |
| 111 | chr10 | PTEN | 89724640 | 89728709 | + |
| 112 | chr10 | PTEN | 89725525 | 89729567 | + |
| 113 | chr10 | PTEN | 89725527 | 89729569 | + |
| 114 | chr10 | PTEN | 89726125 | 89730171 | + |
| 115 | chr10 | PTEN | 89726126 | 89730170 | + |
| 116 | chr10 | PTEN | 89726128 | 89730172 | + |
| 117 | chr10 | PTEN | 89728064 | 89732112 | + |
| 118 | chr10 | PTEN | 89728269 | 89732384 | + |
| 119 | chr10 | PTEN | 89623576 | 89623622 | − |
| 120 | chr10 | PTEN | 89623906 | 89623956 | − |
| 121 | chr10 | PTEN | 89624031 | 89624073 | − |
| 122 | chr10 | PTEN | 89624202 | 89624247 | − |
| 123 | chr10 | PTEN | 89624760 | 89624805 | − |
| 124 | chr10 | PTEN | 89625073 | 89625113 | − |
| 125 | chr10 | PTEN | 89628887 | 89628953 | − |
| 126 | chr10 | PTEN | 89665539 | 89665573 | − |
| 127 | chr10 | PTEN | 89692964 | 89693006 | − |
| 128 | chr10 | PTEN | 89695528 | 89695586 | − |
| 129 | chr10 | PTEN | 89695765 | 89695876 | − |
| 130 | chr10 | PTEN | 89695889 | 89695911 | − |
| 131 | chr10 | PTEN | 89697361 | 89697418 | − |
| 132 | chr10 | PTEN | 89697767 | 89697812 | − |
| 133 | chr10 | PTEN | 89721856 | 89721896 | − |
| 134 | chr10 | PTEN | 89621576 | 89625622 | − |
| 135 | chr10 | PTEN | 89621906 | 89625956 | − |
| 136 | chr10 | PTEN | 89622031 | 89626073 | − |
| 137 | chr10 | PTEN | 89622202 | 89626247 | − |
| 138 | chr10 | PTEN | 89622760 | 89626805 | − |
| 139 | chr10 | PTEN | 89623073 | 89627113 | − |
| 140 | chr10 | PTEN | 89626887 | 89630953 | − |
| 141 | chr10 | PTEN | 89663539 | 89667573 | − |
| 142 | chr10 | PTEN | 89690964 | 89695006 | − |
| 143 | chr10 | PTEN | 89693528 | 89697586 | − |
| 144 | chr10 | PTEN | 89693765 | 89697876 | − |
| 145 | chr10 | PTEN | 89693889 | 89697911 | − |
| 146 | chr10 | PTEN | 89695361 | 89699418 | − |
| 147 | chr10 | PTEN | 89695767 | 89699812 | − |
| 148 | chr10 | PTEN | 89719856 | 89723896 | − |

[0206] Single Strand Oligonucleotides (Antisense Strand of Target Gene)

[0207] SegID range: 149-63340, 89008-89021, 89024-89025

[0208] SeqIDs w/o G Runs:

149-152, 167-258, 272-328, 342-369, 392-716, 731-733, 757-831, 845-861, 882, 896-996, 1021-1068, 1082-1086, 1152-1160, 1182-1187, 1209-1411, 1433-1455, 1469-1622, 1636-1741, 1756-1791, 1805-1811, 1825-1830, 1854-1896, 1911-1948, 1962-1991, 2005-2079, 2094-2135, 2149-2327, 2341-2608, 2622-2940, 2954-3045, 3059-3364, 3378-3504, 3518-3915, 3929-3965, 3979-4068, 4090-4288, 4302-4608, 4622-6150, 6164-6620, 6634-6917, 6931-6967, 6981-6998, 7012-7033, 7047-7120, 7129-8466, 8480-8599, 8617-8623, 8637-9162, 9176-9238, 9247-9269, 9283-9405, 9419-9450, 9464-9570, 9584-10165, 10179-10250, 10264-10379, 10406-10623, 10634-10698, 10712-10755, 10768-10860, 10874-10891, 10906-10943, 10957-11063, 11078-11196, 11216-11225, 11239-11292, 11308-11425, 11439-11868, 11882-11988, 12002-12411, 12425-12757, 12773-13029, 13043-13074, 13088-13360, 13374-13993, 14007-14233, 14248-14808, 14822-14827, 14845-14859, 14873-15023, 15038-15061, 15075-15692, 15705-15740, 15750-15767, 15781-15806, 15819-15899, 15903-16101, 16115-16181, 16195-16955, 16958-17003, 17015-17026, 17041-17063, 17079-17290, 17304-17436, 17450-18001, 18015-18313, 18321-18337, 18353-18382, 18396-18740, 18756-19085, 19099-19145, 19159-19589, 19603-19778, 19799-20104, 20118-20121, 20135-20181, 20196-20318, 20330-20395, 20421-20841, 20855-21064, 21074-21098, 21143-21144, 21160-21222, 21233-21578, 21593-21663, 21677-21720, 21734-21744, 21758-21809, 21823-21890, 21904-21958, 21972-21980, 21994-22379, 22393-22593, 22607-23002, 23016-23455, 23481-23701, 23715-23822, 23836-23921, 23935-24163, 24177-25056, 25070-25116, 25137-25293, 25307-25582, 25596-26249, 26264-26411, 26433-26445, 26459-26460, 26474-27136, 27151-27610, 27625-28779, 28793-29203, 29217-29368, 29382-30064, 30078-30113, 30127-30402, 30416-30685, 30699-30710, 30724-30855, 30869-31127, 31144-31248, 31279-31416, 31430-31865, 31880-32010, 32026-32251, 32265-32325, 32335-32428, 32438-32460, 32474-32734, 32749-33413, 33427-33611, 33625-33679, 33694-34225, 34239-34254, 34268-34276, 34290-34396, 34410-34766, 34782-35056, 35070-36087, 36103-36273, 36287-36765, 36815-36853, 36867-36919, 36929-36958, 36968-36977, 36993-37034, 37050-37571, 37585-37634, 37646-37670, 37678-37836, 37850-37959, 37974-38129, 38143-38244, 38268-38426, 38440-38663, 38677-38764, 38778-38790, 38804-40091, 40106-40494, 40520-40550, 40564-40952, 40966-41402, 41416-41429, 41443-41566, 41580-41745, 41759-42124, 42138-42175, 42188-42232, 42255-42542, 42556-42622, 42637-42745, 42759-42853, 42867-42941, 42956-43012, 43026-43275, 43289-43371, 43385-43764, 43778-43796, 43810-44077, 44091-44206, 44228-44738, 44752-44795, 44802-44833, 44842-45186, 45192-45668, 45682-46341, 46355-46674, 46688-46715, 46729-46739, 46755-46768, 46783-47264, 47278-47981, 47995-47996, 48010-48463, 48477-48944, 48958-48982, 48996-49461, 49475-49502, 49506-49542, 49546-49574, 49588-49829, 49843-49895, 49905-49939, 49950-49972, 49986-50398, 50412-50590, 50604-50692, 50706-50746, 50760-51221, 51237-52185, 52199-52405, 52419-52500, 52514-52650, 52664-52677, 52692-52756, 52770-52921, 52935-52950, 52966-52982, 52997-53120, 53125-53148, 53162-53185, 53199-53229, 53232-53377, 53392-53425, 53439-53457, 53471-53729, 53769-53964, 53978-54153, 54167-54248, 54262-54399, 54413-54533, 54548-54770, 54784-54798, 54813-54908, 54935-54953, 54967-55071, 55085-55100, 55114-55225, 55239-55467, 55474-55518, 55533-55574, 55588-55605, 55607-56229, 56243-56360, 56374-56484, 56499-57256, 57270-57551, 57566-57612, 57626-58496, 58511-58708, 58733-59255, 59269-59294, 59308-59685, 59700-60336, 60350-60871, 60886-61387, 61401-62056, 62070-62092, 62106-62522, 62536-62568, 62595-62697, 62712-62831, 62846-62917, 62931-63209, 63213-63274, 63278-63283, 63293-63340, 89008-89015, 89017-89021, 89024-89025

### SeqIDs w/o miR Seeds:

[0209] 149, 153, 155, 157, 159-165, 170, 173-175, 177-178, 181-187, 189-192, 196-198, 200-201, 203-204, 206-213, 216, 218, 220-221, 225-226, 228, 230-233, 236-242, 244, 246-248, 250-252, 254-256, 258-259, 261, 263-264, 266-267, 271-280, 284-285, 287-289, 292-294, 296-302, 304-306, 309, 312, 318-326, 328-329, 333, 336-337, 343-344, 348, 350, 354-355, 357-358, 360-361, 363-365, 367-369, 371, 373-376, 378, 382-383, 388-389, 391-397, 401, 403-410, 413, 415-420, 422-424, 426-430, 433, 435-436, 440-441, 443, 446-448, 450-455, 457-458, 460-463, 466, 468, 470, 472-473, 476, 478, 482-486, 488-489, 494-502, 504, 506-510, 512-515, 518-522, 525, 527-530, 532, 535-537, 539, 541-542, 544-545, 548-549, 551, 553, 555, 557-562, 564, 569-573, 575, 577, 579, 581, 583, 585-586, 590, 592-595, 597, 599-600, 602, 604-607, 609, 612, 614-618, 620, 623-633, 635-637, 639-642, 644-648, 650, 652-657, 659, 661-667, 675-678, 680-681, 684-687, 689-692, 694-698, 700, 702, 706-710, 712-717, 720, 722, 724, 726-727, 729, 732-733, 736, 740, 742-743, 748, 751-752, 760-770, 772, 774, 776-784, 787-791, 794-797, 801, 804-805, 807, 809-812, 815, 818, 820, 825-831, 833, 835-837, 839, 842, 845, 847-849, 852, 854, 861, 865, 869, 874-876, 878, 881-883, 885-886, 892, 894-898, 901-908, 911-912, 918-925, 927-934, 938-939, 941, 943-944, 946, 948, 952, 954-955, 958-960, 962-966, 968, 971, 977, 980-981, 983-984, 986-991, 993, 996, 998-999, 1001, 1003-1005, 1007, 1015-1016, 1018-1021, 1025-1039, 1042, 1044-1053, 1055, 1057, 1061-1063, 1065-1066, 1068, 1070, 1072, 1076-1084, 1087, 1093, 1096-1101, 1105, 1121, 1124, 1126, 1128, 1131-1133, 1136-1139, 1141, 1143, 1145-1146, 1148, 1150-1159, 1163-1164, 1166, 1171, 1173-1174, 1177, 1179, 1182, 1184-1185, 1191, 1193, 1198-1201, 1204, 1206-1207, 1209-1210, 1212-1213, 1215-1216, 1218-1219, 1222, 1226, 1228-1231, 1234-1240, 1242-1246, 1248, 1251, 1253, 1255, 1257-1268, 1270-1272, 1275-1278, 1280, 1282-1283, 1285-1286, 1288-1289, 1291-1301, 1304-1308, 1311, 1313, 1316-1321, 1323-1324, 1328, 1332-1333, 1335-1337, 1339-1343, 1347-1348, 1350-1353, 1355-1360, 1363-1364, 1366-1369, 1372-1374, 1377-1378, 1380, 1382-1384, 1386, 1389-1390, 1392-1395, 1397, 1399-1401, 1403-1404, 1406-1410, 1412-1415, 1417-1419, 1424-1426, 1429-1432, 1435, 1438, 1441, 1443-1446, 1448-1449, 1451, 1453-1456, 1460-1461, 1463-1470, 1472-1474, 1476, 1478-1483, 1485-1486, 1488-1495, 1497-1498, 1500-1502, 1504-1507, 1513-1519, 1521-1530, 1532, 1534, 1538-1540, 1545-1548, 1550, 1553, 1555-1556, 1558-1560, 1563, 1565-1568, 1570, 1572-1576, 1578-1579, 1581, 1584-1586, 1588-1596, 1598-1600, 1604, 1606-1607, 1609-1610, 1612-1613, 1615-1616, 1618-1621, 1625-1626, 1628-1629, 1633, 1635-1644, 1649-1653, 1655-1656, 1658-1659, 1661-1663, 1665-1666, 1668-1670, 1673, 1677-1678, 1683, 1685-1686, 1688-1691, 1694, 1696, 1698, 1701-1702, 1704-1707, 1709, 1718-1721, 1723-1732, 1734-1737, 1740-1741, 1743, 1745, 1749-1750, 1753, 1759-1762, 1764-1767, 1769-1770, 1772-1773, 1776-1778, 1784, 1791, 1793-1795, 1797, 1800-1802, 1805-1808, 1814, 1816, 1818-1819, 1821, 1824, 1827, 1829-1830, 1832, 1834, 1837-1841, 1843-1844, 1846, 1850, 1852-1855, 1858, 1860-1864, 1866-1871, 1873-1874, 1876-1877, 1879-1881, 1883, 1885-1894, 1898, 1906-1909, 1911-1912, 1914, 1916-1918, 1920, 1924, 1927, 1929-1930, 1933, 1937-1940, 1946, 1949, 1953-1956, 1958-1959, 1961, 1963-1964, 1966, 1971, 1973, 1975-1976, 1978, 1980, 1982-1983, 1985, 1990-1992, 1994-2004, 2011-2019, 2021-2022, 2024, 2026-2029, 2031, 2033-2036, 2038-2045, 2047-2048, 2050-2051, 2058, 2062, 2069, 2073, 2076, 2080, 2087-2089, 2092, 2094, 2097-2099, 2101-2102, 2104-2105, 2107-2110, 2112, 2117-2122, 2125-2127, 2129, 2131, 2141, 2144-2148, 2153-2154, 2157-2161, 2166-2171, 2173, 2176-2185, 2187-2189, 2191-2193, 2195, 2197-2198, 2200-2214, 2216, 2218-2221, 2224-2226, 2229, 2231, 2233, 2235-2240, 2247, 2249-2252, 2256-2260, 2262, 2266-2270, 2272-2276, 2280-2283, 2285, 2287, 2289, 2291-2302, 2304-2305, 2307-2309, 2311-2322, 2324-2329, 2331, 2334-2335, 2337-2338, 2341-2342, 2344-2347, 2349-2352, 2355-2356, 2358, 2361-2362, 2366-2367, 2369-2373, 2375-2377, 2379-2380, 2382-2387, 2389, 2392-2397, 2399-2402, 2404-2410, 2414, 2418-2424, 2426, 2428, 2430-2438, 2440-2441, 2443, 2445-2447, 2449-2453, 2455-2463, 2467-2469, 2473, 2475-2476, 2479, 2481-2482, 2484-2487, 2489-2491, 2493-2494, 2499, 2501, 2505-2506, 2510, 2512-2513, 2515-2516, 2519-2527, 2529, 2532-2541, 2544, 2547-2548, 2551, 2553, 2555-2556, 2558-2559, 2561, 2563, 2565-2568, 2570-2571, 2573, 2575-2576, 2579-2581, 2583-2585, 2587-2601, 2603-2609, 2613-2620, 2622, 2624-2626, 2628-2632, 2635-2640, 2642-2643, 2645, 2649-2650, 2653-2655, 2658-2666, 2669, 2671-2673, 2675, 2678-2681, 2683, 2686, 2691-2697, 2699, 2704, 2707-2708, 2710-2711, 2713-2722, 2725-2732, 2735-2736, 2738, 2743, 2745-2746, 2748, 2750, 2752, 2756, 2759, 2763-2766, 2769-2770, 2773-2777, 2779-2782, 2785-2786, 2788-2793, 2796-2798, 2800, 2802, 2804, 2806, 2809, 2811, 2813-2814, 2817-2832, 2834, 2838, 2842, 2844, 2847, 2849-2859, 2862, 2865, 2867-2868, 2872, 2874-2883, 2885-2887, 2890-2892, 2895-2903, 2905-2906, 2909-2911, 2913-2916, 2918-2920, 2922-2924, 2927-2931, 2934-2937, 2940, 2942, 2946-2954, 2956-2958, 2960-2969, 2973, 2975-2976, 2983, 2985-2987, 2990-2995, 2998-2999, 3002-3004, 3007, 3009-3011, 3013-3017, 3019-3021, 3023-3030, 3032-3033, 3035-3037, 3039, 3041-3043, 3046, 3052-3053, 3055-3058, 3060, 3063-3069, 3071, 3073-3077, 3079, 3081, 3084, 3087-3089, 3091-3092, 3094, 3096-3098, 3101, 3103-3111, 3114, 3116-3117, 3119-3120, 3122-3125, 3129, 3131-3132, 3134-3136, 3138, 3140, 3145-3146, 3148, 3151-3152, 3155-3156, 3162-3163, 3165-3167, 3171-3172, 3174-3178, 3181, 3184, 3188-3190, 3192-3193, 3196-3210, 3212-3214, 3221, 3225-3229, 3231, 3235-3238, 3240-3246, 3249-3253, 3256-3258, 3260-3264, 3271-3273, 3275-3276, 3278-3280, 3282-3284, 3286, 3288, 3294-3298, 3300-3302, 3304-3305, 3308-3311, 3313-3320, 3325-3328, 3330-3332, 3335-3337, 3342-3343, 3345-3346, 3348-3349, 3353, 3355-3358, 3362, 3365, 3368, 3370, 3372, 3376-3378, 3380, 3383-3384, 3387, 3389-3390, 3394, 3396-3397, 3399-3404, 3406-3411, 3415, 3417-3418, 3420, 3423-3426, 3428-3430, 3432-3433, 3435-3444, 3446-3448, 3450-3457, 3461, 3464, 3467-3471, 3473-3481, 3485-3492, 3494-3497, 3499-3503, 3505, 3509-3510, 3512-3513, 3518, 3521-3524, 3529-3531, 3533-3537, 3539, 3541-3545, 3547-3553, 3555-3558, 3560-3561, 3564-3567, 3569-3572, 3575-3577, 3579, 3582-3585, 3589-3597, 3599-3600, 3602-3603, 3605-3608, 3610, 3612-3615, 3617-3621, 3623-3624, 3626-3627, 3629-3633, 3635, 3638-3641, 3644-3649, 3654-3675, 3678-3679, 3682-3683, 3685, 3687-3692, 3694-3698, 3701-3705, 3707, 3709, 3711-3712, 3714-3717, 3719, 3721, 3723, 3728, 3730-3731, 3733-3735, 3737-3740, 3742-3745, 3747, 3749, 3751-3752, 3754-3759, 3763-3764, 3766-3767, 3769, 3772-3780, 3782-3784, 3787, 3789, 3791-3792, 3794, 3798, 3800-3805, 3807-3808, 3815-3818, 3820-3824, 3829, 3831-3833, 3835-3840, 3842, 3845-3850, 3853-3858, 3860, 3862, 3864, 3866, 3868-3870, 3872, 3874-3882, 3885-3887, 3891-3894, 3896-3897, 3899-3900, 3902-3904, 3907-3912, 3917-3919, 3922-3923, 3927, 3929-3930, 3932, 3936, 3938, 3940, 3942-3944, 3946-3951, 3954-3956, 3959, 3962-3965, 3968, 3970-3972, 3975-3977, 3979, 3982-3986, 3988, 3990-3994, 3996-3999, 4002, 4004-4010, 4012-4014, 4016-4018, 4020, 4022-4023, 4027, 4030-4033, 4035-4041, 4043-4044, 4046-4048, 4054-4058, 4060-4064, 4066, 4069-4071, 4074-4076, 4078-4079, 4082, 4084, 4086-4088, 4090-4094, 4096-4099, 4101-4102, 4105-4107, 4110-4111, 4113-4114, 4116-4117, 4119-4122, 4126, 4128-4130, 4132-4133, 4136-4138, 4141-4143, 4147-4150, 4152-4153, 4157, 4159-4161, 4163-4165, 4169, 4171-4172, 4174-4175, 4178-4180, 4182, 4184-4193, 4196, 4200-4204, 4207-4208, 4210-4211, 4214, 4216-4220, 4224-4225, 4227-4228, 4235-4237, 4240-4241, 4243-4247, 4249, 4251, 4254, 4256, 4259-4261, 4263-4267, 4269-4271, 4273-4274, 4276, 4282-4285, 4288, 4291, 4293-4294, 4297-4298, 4301-4304, 4307-4308, 4310-4311, 4315-4321, 4323-4324, 4326, 4328-4330, 4333-4334, 4336-4340, 4342, 4345, 4348-4350, 4352-4353, 4357-4361, 4363-4369, 4371-4372, 4374, 4376, 4378-4380, 4382-4385, 4387, 4390-4396, 4398-4401, 4404-4405, 4407-4410, 4412-4414, 4416, 4418-4419, 4422, 4424-4425, 4427-4433, 4435-4436, 4439, 4441-4444, 4446, 4448-4450, 4453-4455, 4457-4460, 4462, 4464-4465, 4468-4470, 4472-4473, 4475-4487, 4489-4497, 4500-4507, 4511-4516, 4518, 4524-4525, 4527, 4529, 4532, 4534-4538, 4540-4544, 4546-4550, 4552, 4554-4555, 4557-4560, 4562-4563, 4566-4567, 4569-4572, 4574-4576, 4579, 4581, 4583-4589, 4591, 4593-4595, 4597-4599, 4601, 4604, 4610, 4613-4615, 4618, 4621-4623, 4625-4627, 4629-4630, 4632-4636, 4639-4640, 4643, 4645-4650, 4652-4660, 4663-4664, 4666-4674, 4676, 4680, 4683-4684, 4687, 4691-4694, 4696-4699, 4701-4704, 4706-4708, 4712-4714, 4717-4725, 4727, 4729-4731, 4733-4736, 4738, 4742-4749, 4751, 4753, 4755, 4758, 4760-4764, 4766-4771, 4773-4779, 4781, 4783, 4787-4788, 4791-4792, 4794-4795, 4797, 4799, 4801, 4806-4817, 4819, 4822-4827, 4831, 4836, 4838-4839, 4841-4843, 4845-4849, 4853, 4855, 4858, 4862, 4865-4872, 4875-4879, 4881-4882, 4885-4887, 4890-4899, 4902-4903, 4905-4906, 4908-4910, 4912, 4914-4916, 4918-4922, 4924, 4927, 4929-4932, 4934, 4938-4941, 4943-4945, 4948, 4952, 4956-4957, 4959-4962, 4964-4967, 4970-4980, 4982-4990, 4992-5002, 5004-5007, 5010, 5012-5014, 5016, 5018-5019, 5021-5031, 5033, 5035, 5037-5038, 5040-5049, 5051, 5053-5055, 5063, 5065-5066, 5069-5076, 5078-5079, 5081-5086, 5091-5097, 5099-5104, 5107-5108, 5111-5113, 5115, 5117-5118, 5121-5125, 5128-5130, 5133, 5136, 5138-5143, 5145, 5147-5148, 5150, 5152-5157, 5159-5160, 5162-5167, 5172-5173, 5176-5179, 5181-5184, 5186-5191, 5193, 5196-5200, 5203, 5205-5208, 5211-5212, 5216-5217, 5220-5222, 5224-5227, 5229, 5232-5234, 5236-5237, 5239-5240, 5242, 5246-5248, 5251, 5253, 5255-5263, 5266-5267, 5271-5284, 5286, 5288, 5290-5296, 5299-5304, 5306-5314, 5316-5317, 5319, 5321, 5323-5324, 5327, 5329, 5331, 5333-5341, 5344, 5346-5348, 5353, 5356-5360, 5362, 5364-5367, 5370, 5372-5373, 5375-5378, 5381-5389, 5392, 5394-5398, 5400-5402, 5404-5409, 5412-5417, 5419-5421, 5423-5429, 5433-5436, 5438-5442, 5444-5449, 5451-5453, 5456-5457, 5461-5464, 5467, 5471-5472, 5475-5483, 5485, 5487-5488, 5491-5492, 5494-5513, 5515-5519, 5522-5525, 5528, 5532, 5534, 5536, 5538-5540, 5542-5546, 5548-5550, 5553-5555, 5558-5561, 5564-5565, 5567-5574, 5578, 5581-5583, 5585-5586, 5590, 5593-5594, 5596-5598, 5600-5601, 5605-5606, 5608-5610, 5613-5621, 5623-5627, 5629-5630, 5632-5634, 5637-5642, 5644-5652, 5655, 5657-5664, 5666, 5669, 5671, 5673, 5675-5677, 5679, 5682-5683, 5685-5691, 5695-5696, 5698, 5700, 5704, 5706-5707, 5709, 5714, 5717, 5721-5724, 5726-5729, 5732-5734, 5736-5744, 5746, 5749-5763, 5766-5774, 5776-5777, 5779-5783, 5785, 5788, 5790, 5793, 5797-5800, 5802, 5804, 5806-5809, 5811-5813, 5815-5821, 5823-5825, 5828-5829, 5832, 5836-5839, 5841-5843, 5845, 5847-5851, 5854-5855, 5860, 5862-5869, 5871-5872, 5874, 5876-5879, 5883-5887, 5889-5890, 5892-5898, 5900-5902, 5904, 5906-5910, 5912, 5914-5917, 5919-5923, 5925, 5928, 5930-5931, 5933-5937, 5939, 5942, 5944, 5946, 5948-5949, 5951, 5953-5954, 5958-5960, 5962-5965, 5969, 5971-5973, 5975-5980, 5982-5987, 5990-5992, 5994-5999, 6001-6003, 6005-6007, 6009-6010, 6012-6013, 6016-6018, 6021-6022, 6026, 6029-6030, 6032-6037, 6040, 6045-6050, 6055-6062, 6066, 6068, 6071-6073, 6075-6077, 6079-6090, 6092-6102, 6104-6115, 6117-6126, 6128-6129, 6132, 6135-6137, 6139, 6141-6143, 6146, 6150-6151, 6154, 6156-6158, 6160-6161, 6165-6172, 6174-6175, 6178-6182, 6185-6186, 6190-6196, 6198-6202, 6204-6205, 6208-6210, 6214, 6217, 6220-6223, 6225, 6227, 6229, 6231-6233, 6235-6236, 6238-6240, 6243-6244, 6247, 6249-6263, 6265-6268, 6272, 6274, 6277, 6279-6280, 6282-6286, 6288, 6290-6293, 6295-6297, 6299-6300, 6305-6306, 6308-6313, 6320-6322, 6324-6335, 6337, 6339-6343, 6345-6352, 6355, 6359, 6361-6367, 6369, 6371-6375, 6377-6378, 6381-6382, 6384-6386, 6391, 6393-6395, 6397-6401, 6403-6405, 6407-6408, 6410-6411, 6413-6420, 6422-6423, 6425, 6429, 6432-6435, 6437, 6441, 6444, 6446, 6448-6450, 6453-6454, 6457-6458, 6460, 6462, 6467-6468, 6470, 6472, 6476-6484, 6490-6502, 6504-6507, 6511-6512, 6514-6523, 6525, 6528-6529, 6531, 6533-6534, 6536, 6538, 6540, 6543-6544, 6546-6551, 6555-6556, 6558, 6561-6562, 6564-6566, 6568-6570, 6573-6575, 6577, 6579-6580, 6582-6588, 6591, 6594-6598, 6602-6605, 6608-6613, 6616-6617, 6621, 6625, 6627, 6629, 6632, 6634, 6641-6653, 6655-6658, 6660-6661, 6663, 6666-6667, 6669-6670, 6672-6678, 6681-6688, 6691-6693, 6701-6722, 6724-6726, 6728, 6730-6738, 6740-6742, 6744-6746, 6748-6750, 6752-6756, 6758, 6760, 6762-6763, 6765-6770, 6772-6774, 6776-6777, 6779-6781, 6785-6792, 6795-6797, 6801-6802, 6805, 6807, 6812-6814, 6816-6822, 6824-6827, 6830, 6832-6836, 6841, 6843, 6847, 6849-6852, 6854, 6860, 6862, 6864, 6868-6870, 6873, 6875-6876, 6879-6881, 6883, 6885, 6887-6888, 6893-6900, 6902, 6904, 6906, 6908-6913, 6915-6917, 6922-6923, 6926-6931, 6935, 6941-6949, 6951-6952, 6958-6960, 6962, 6965, 6975-6976, 6979, 6981-6986, 6988, 6993-6997, 7004, 7006-7007, 7011-7012, 7014-7016, 7018-7021, 7024-7025, 7029-7034, 7040-7044, 7048, 7050-7052, 7055-7061, 7064-7070, 7072-7075, 7078, 7081, 7089-7090, 7092, 7095-7097, 7100, 7102, 7104-7106, 7108-7109, 7111, 7115-7119, 7125-7130, 7136-7140, 7142-7143, 7147-7148, 7150, 7154, 7158-7159, 7161, 7163, 7165-7167, 7169, 7171-7172, 7174-7175, 7177-7183, 7186, 7189, 7191-7196, 7199, 7201-7209, 7213-7221, 7224, 7227-7230, 7232, 7234, 7237-7240, 7242-7244, 7246, 7248-7249, 7251-7257, 7261-7264, 7266-7272, 7274, 7277-7281, 7283-7286, 7288, 7290-7293, 7296-7297, 7299-7300, 7302, 7305-7309, 7312, 7314, 7319-7322, 7325-7327, 7329-7331, 7333-7334, 7336-7337, 7339, 7345-7347, 7349, 7352-7355, 7358, 7360, 7363-7369, 7371-7373, 7376, 7378-7379, 7381, 7384, 7386, 7389-7405, 7410, 7412, 7414-7415, 7417-7419, 7421-7428, 7430-7431, 7434, 7436-7437, 7440-7441, 7443, 7446-7447, 7450-7452, 7454-7455, 7458-7463, 7465-7466, 7468, 7472-7476, 7478-7482, 7485-7487, 7491-7493, 7498, 7501-7502, 7505-7512, 7514-7519, 7522-7523, 7526-7530, 7532-7533, 7535-7540, 7542-7544, 7547-7548, 7550-7552, 7554-7555, 7557-7558, 7560-7571, 7573, 7575, 7578-7580, 7582-7584, 7586, 7588-7593, 7595, 7597, 7599-7600, 7602, 7604, 7606-7607, 7613, 7615-7621, 7626-7629, 7633, 7636-7643, 7645-7646, 7648-7650, 7652-7653, 7656, 7658-7659, 7661-7662, 7664-7665, 7667, 7669, 7671-7673, 7675-7679, 7681-7683, 7685, 7687, 7690, 7692-7710, 7713-7714, 7717, 7719-7721, 7723-7725, 7729-7731, 7733, 7736-7744, 7746-7747, 7749-7751, 7754-7761, 7764, 7768-7773, 7775-7782, 7784, 7786-7792, 7794, 7799, 7803-7805, 7807, 7809, 7811-7813, 7817, 7819-7829, 7831, 7834-7835, 7837-7838, 7840-7841, 7844-7850, 7852-7861, 7864, 7866-7870, 7872-7873, 7877, 7883-7884, 7886-7887, 7889, 7892-7893, 7895, 7897-7900, 7905, 7907, 7909-7910, 7912-7921, 7923-7924, 7926-7946, 7949, 7951-7952, 7954, 7956-7957, 7960-7961, 7963-7969, 7971-7972, 7974, 7984-7991, 7994-7999, 8001-8007, 8009, 8012, 8015-8016, 8018-8022, 8024, 8029, 8032, 8034-8037, 8039, 8042-8049, 8052, 8054-8057, 8059-8063, 8065-8066, 8068, 8071-8077, 8079-8084, 8086-8087, 8089-8091, 8093, 8095-8097, 8099-8100, 8103, 8105, 8107-8110, 8113-8115, 8120-8125, 8128, 8130-8138, 8140-8141, 8145-8147, 8149, 8151-8152, 8155, 8157, 8159, 8161-8162, 8164-8165, 8167-8169, 8171-8181, 8183-8185, 8188, 8190-8191, 8196-8207, 8210, 8213, 8215-8220, 8223-8230, 8235-8237, 8239-8247, 8250-8261, 8265, 8267-8268, 8270-8273, 8276-8278, 8281-8285, 8289, 8292, 8295-8296, 8298, 8300-8302, 8304-8306, 8308-8310, 8312, 8314-8315, 8317-8320, 8322, 8324, 8327-8332, 8334-8340, 8342-8343, 8345-8353, 8355, 8357-8359, 8362, 8364-8366, 8369-8370, 8372-8373, 8378, 8381-8384, 8388-8391, 8393, 8397-8399, 8401-8403, 8405, 8412, 8415-8417, 8420-8423, 8425-8426, 8429-8430, 8432, 8438-8439, 8441-8442, 8448, 8450-8452, 8454, 8456-8457, 8461, 8463-8464, 8466-8467, 8470, 8472, 8474-8477, 8480-8482, 8484-8487, 8489, 8491-8495, 8498-8503, 8509-8513, 8516-8517, 8519-8524, 8526-8527, 8529, 8532-8534, 8539-8543, 8545-8549, 8552-8554, 8556, 8558-8559, 8563-8571, 8573-8577, 8580, 8582, 8584-8585, 8587, 8589-8593, 8595, 8597, 8599, 8608-8612, 8614-8618, 8623, 8626, 8630-8634, 8637-8641, 8645-8651, 8653-8654, 8656, 8663-8664, 8666-8668, 8671-8672, 8675-8676, 8679, 8683, 8685, 8688, 8690, 8692, 8694-8697, 8703, 8706-8707, 8710-8713, 8715, 8722, 8725, 8728-8732, 8734, 8736-8737, 8740-8743, 8746-8750, 8752, 8757, 8759-8760, 8764, 8766, 8768-8770, 8772-8774, 8776, 8778-8785, 8787-8792, 8795-8797, 8800, 8803-8805, 8807-8809, 8811-8812, 8814-8816, 8818-8820, 8823-8827, 8830, 8833-8834, 8836-8838, 8844, 8847-8848, 8850-8851, 8853-8854, 8857-8867, 8869-8872, 8874, 8876, 8878, 8880-8884, 8886, 8892, 8897-8900, 8904, 8908-8909, 8911, 8913-8915, 8921-8922, 8924-8926, 8929, 8931-8933, 8936, 8939-8941, 8943-8946, 8948-8949, 8952-8954, 8958, 8960, 8962, 8965-8970, 8975, 8978-8981, 8983-8984, 8987, 8989, 8991-8993, 8995-8998, 9000-9006, 9011-9012, 9016-9019, 9022-9025, 9027, 9029, 9031-9037, 9039-9044, 9046-9047, 9051, 9053, 9055-9056, 9058-9061, 9063-9065, 9068-9071, 9074-9077, 9080, 9083-9084, 9086-9088, 9090-9093, 9095-9096, 9098-9099, 9102, 9105-9108, 9110-9111, 9115-9117, 9119, 9127, 9129-9133, 9135-9136, 9138-9140, 9143-9146, 9149-9150, 9157, 9160, 9162, 9164-9165, 9170-9171, 9176, 9178, 9181, 9183-9184, 9187-9188, 9190-9192, 9194-9198, 9203, 9206, 9215-9218, 9220-9221, 9224-9225, 9227, 9231-9233, 9235, 9248-9251, 9258-9261, 9263-9270, 9273-9280, 9282, 9287-9288, 9290-9296, 9299-9302, 9305-9308, 9310, 9312-9315, 9322-9327, 9329-9330, 9332-9333, 9335, 9338-9345, 9347-9352, 9355-9360, 9362-9363, 9367, 9373, 9376, 9380-9385, 9388-9389, 9392-9393, 9400-9401, 9404-9405, 9409-9410, 9412, 9414, 9418-9420, 9422-9423, 9425-9430, 9432-9437, 9439-9445, 9448-9452, 9454, 9456-9460, 9466-9469, 9471, 9473-9481, 9483-9484, 9486, 9489, 9493-9500, 9502-9505, 9507, 9509-9516, 9518-9527, 9530, 9534-9537, 9539, 9541-9546, 9549-9551, 9553-9554, 9557-9558, 9562, 9564-9568, 9570-9571, 9575-9578, 9580-9581, 9586-9587, 9589-9591, 9593-9594, 9596, 9599-9600, 9602-9609, 9611-9613, 9615-9617, 9619, 9623-9624, 9627-9628, 9630-9631, 9633, 9636-9640, 9642, 9644-9646, 9649-9650, 9652, 9654-9656, 9658-9663, 9665-9666, 9668, 9672, 9674, 9676-9678, 9682-9685, 9689-9692, 9696-9698, 9700-9702, 9705-9713, 9715, 9718-9719, 9723-9725, 9728-9729, 9731-9735, 9742-9744, 9746-9747, 9749-9757, 9759-9761, 9763, 9767, 9769, 9773-9778, 9781-9783, 9785-9786, 9788-9789, 9791-9792, 9796, 9799-9802, 9804-9805, 9807-9810, 9813, 9815-9816, 9821-9822, 9824-9826, 9828-9831, 9833-9834, 9836-9837, 9839-9840, 9842-9844, 9846, 9849-9852, 9854, 9857-9858, 9865-9872, 9874-9885, 9888, 9891, 9893-9898, 9900, 9902-9904, 9906, 9909, 9913-9918, 9920, 9924-9928, 9931-9932, 9934-9935, 9941-9953, 9955, 9957, 9961-9962, 9968, 9970-9972, 9974, 9979-9983, 9986, 9988-9990, 9993-9994, 9999, 10001, 10004, 10010-10012, 10015, 10017, 10019, 10021-10023, 10025-10027, 10029-10032, 10034, 10036-10037, 10039, 10041-10043, 10045-10047, 10049-10050, 10052, 10054, 10059, 10062-10065, 10067-10071, 10074, 10077-10078, 10080, 10084, 10086, 10088-10092, 10094-10097, 10099-10100, 10102-10103, 10105, 10107-10109, 10111-10114, 10116, 10119-10120, 10122, 10124-10125, 10129, 10133, 10135-10139, 10142-10143, 10145-10146, 10153-10154, 10159-10160, 10162-10163, 10165, 10168-10169, 10171-10174, 10178, 10180-10185, 10187-10189, 10193-10196, 10199, 10201-10203, 10205-10208, 10210, 10213, 10215-10219, 10221, 10224-10230, 10234, 10236-10241, 10243-10248, 10250, 10253-10254, 10261, 10263-10265, 10269, 10272-10279, 10282-10286, 10289-10291, 10293-10295, 10300, 10302, 10304, 10306, 10308-10309, 10311-10314, 10317-10318, 10320, 10322, 10324, 10326, 10330, 10332, 10342-10344, 10346-10347, 10349-10351, 10356, 10358-10359, 10361-10363, 10365-10370, 10372-10373, 10375-10377, 10379, 10381, 10385-10388, 10390-10392, 10396-10397, 10399, 10401-10404, 10406-10409, 10411-10412, 10414-10415, 10418-10425, 10427, 10430-10431, 10433, 10435-10437, 10442-10443, 10445, 10447-10448, 10452-10455, 10458-10464, 10466, 10468-10472, 10475, 10477-10479, 10482-10486, 10489-10495, 10499, 10502-10503, 10505-10514, 10517-10520, 10523-10537, 10539-10542, 10544-10552, 10554-10555, 10558-10562, 10564-10566, 10568-10569, 10571-10575, 10580-10586, 10588, 10591, 10593-10596, 10599-10610, 10612-10613, 10615, 10618, 10622, 10625-10629, 10632, 10634, 10636-10637, 10639, 10642-10647, 10652-10654, 10656-10659, 10661-10662, 10664, 10667-10673, 10675-10677, 10679-10680, 10683-10687, 10691-10696, 10702-10704, 10707-10708, 10710, 10712-10713, 10715-10722, 10724-10725, 10728-10735, 10737-10740, 10742-10743, 10745, 10748-10755, 10761-10763, 10767-10769, 10771-10773, 10775-10777, 10779, 10783, 10785-10787, 10789, 10791-10793, 10795-10797, 10800, 10803, 10805-10809, 10811, 10813-10820, 10822, 10825-10827, 10829, 10831, 10833, 10835-10836, 10838-10839, 10848-10854, 10857, 10860-10861, 10864-10872, 10874-10890, 10898, 10900, 10902, 10904, 10906-10909, 10911-10924, 10932, 10934, 10936-10937, 10939-10944, 10947-10950, 10952-10958, 10962-10969, 10971-10974, 10976-10978, 10981, 10983-10990, 10992, 10997, 11001-11004, 11006, 11009, 11011, 11013-11015, 11017-11020, 11022, 11024, 11026-11027, 11029, 11032-11035, 11037, 11040-11041, 11043, 11045-11048, 11050, 11052-11053, 11057-11059, 11061, 11063-11064, 11067, 11069, 11072-11074, 11081-11082, 11084-11086, 11089-11091, 11094-11095, 11097-11100, 11104-11105, 11107-11108, 11111-11119, 11121-11122, 11125-11134, 11137-11140, 11142-11144, 11146-11147, 11149-11152, 11155-11157, 11160-11162, 11165, 11168, 11170, 11174-11175, 11177, 11179-11180, 11183-11189, 11193, 11195, 11197, 11200, 11202, 11207-11210, 11212-11217, 11219-11221, 11223-11225, 11229-11234, 11238-11239, 11241-11242, 11244-11248, 11250-11253, 11255-11256, 11258, 11260-11267, 11270-11272, 11274-11278, 11280-11282, 11284-11288, 11291-11292, 11294, 11302, 11305-11306, 11308-11311, 11313-11314, 11317-11318, 11320-11322, 11324-11332, 11334-11335, 11338-11340, 11343, 11345, 11347, 11353-11355, 11359, 11361-11362, 11364, 11367-11369, 11371, 11377-11378, 11380-11381, 11384-11385, 11387-11388, 11391, 11395, 11398, 11400, 11402-11405, 11411-11413, 11417-11418, 11421, 11423-11424, 11427-11428, 11431-11438, 11440-11448, 11450, 11454, 11457, 11459-11460, 11462-11464, 11467-11468, 11472-11475, 11481-11482, 11484, 11486-11489, 11491-11494, 11497, 11499, 11503-11509, 11511-11516, 11518-11519, 11521, 11523-11527, 11530-11531, 11533-11537, 11539-11540, 11542-11544, 11546-11547, 11551-11558, 11560, 11563, 11567, 11570-11577, 11580-11589, 11595, 11597-11599, 11601, 11604-11606, 11608-11613, 11616-11619, 11622-11634, 11636-11638, 11641-11642, 11645, 11648-11650, 11652-11653, 11655, 11657, 11660-11661, 11664-11670, 11672, 11674, 11676-11678, 11680-11683, 11685-11689, 11692-11696, 11698-11703, 11705-11708, 11710-11719, 11722, 11724-11725, 11727-11728, 11731, 11733-11734, 11738-11740, 11743-11752, 11754-11756, 11758-11759, 11761-11764, 11766, 11768-11769, 11771, 11773-11774, 11776, 11779-11780, 11782-11789, 11792-11804, 11806-11808, 11810-11819, 11821, 11827-11828, 11831, 11833-11838, 11841-11846, 11852-11856, 11858-11859, 11862-11865, 11867, 11869, 11874-11875, 11878-11879, 11882, 11884-11885, 11893, 11896, 11899-11901, 11903-11907, 11911, 11913-11915, 11917, 11919-11920, 11924, 11926-11932, 11934, 11936-11937, 11939-11942, 11944-11946, 11948-11949, 11952-11975, 11978-11979, 11981-11982, 11984-11989, 11997-12003, 12005-12007, 12010-12011, 12015, 12017-12020, 12024-12026, 12029-12033, 12040, 12042-12044, 12048, 12050-12051, 12053, 12055-12056, 12058-12059, 12061, 12069-12074, 12076-12078, 12080-12086, 12088-12089, 12092, 12095-12096, 12098-12102, 12106, 12108, 12113-12123, 12125-12127, 12129, 12132-12134, 12137, 12139-12140, 12142, 12145, 12147, 12149-12152, 12154, 12157-12158, 12161-12162, 12165, 12168-12175, 12178-12179, 12181, 12184-12186, 12188, 12190-12197, 12199-12200, 12204-12209, 12211-12212, 12214, 12216-12217, 12220-12221, 12223, 12225, 12227-12236, 12240-12241, 12243-12245, 12247-12251, 12253, 12257-12266, 12268-12269, 12271, 12274-12277, 12279, 12281-12283, 12285-12290, 12292-12295, 12300-12303, 12305-12309, 12311-12315, 12317, 12319-12323, 12325, 12329-12333, 12335, 12337, 12339-12340, 12342-12346, 12348, 12350-12355, 12357-12368, 12371, 12373, 12375-12376, 12378-12385, 12387-12395, 12399, 12403-12413, 12415-12416, 12418, 12420, 12423-12424, 12427, 12430, 12432-12440, 12443-12444, 12446-12449, 12452-12456, 12465, 12467-12473, 12476-12481, 12483-12488, 12490-12492, 12494, 12496-12500, 12502-12503, 12506-12510, 12512-12513, 12515, 12517, 12521-12535, 12539-12541, 12548-12553, 12556, 12558, 12560-12565, 12567, 12569, 12571, 12574-12576, 12578, 12580, 12582-12590, 12592-12593, 12596-12605, 12607-12615, 12619-12622, 12627, 12631-12633, 12635, 12637, 12639, 12642, 12647-12649, 12651-12653, 12656, 12658-12659, 12661, 12663-12666, 12668, 12670-12672, 12675-12678, 12680, 12682-12683, 12687-12693, 12697-12699, 12701-12703, 12705-12706, 12708-12713, 12718-12720, 12723-12724, 12727, 12730, 12732-12737, 12739-12742, 12745-12746, 12751, 12753-12754, 12757, 12763-12768, 12772-12774, 12776-12779, 12781-12782, 12787-12788, 12790-12794, 12796-12797, 12800, 12802, 12804-12807, 12809-12817, 12819-12820, 12822-12824, 12827-12835, 12837, 12840-12843, 12845-12846, 12848, 12850-12851, 12853, 12856-12864, 12866, 12869-12872, 12877, 12880-12881, 12883-12884, 12887, 12889-12890, 12893-12896, 12898-12899, 12901, 12904, 12906-12907, 12909-12911, 12914-12918, 12920, 12922, 12924-12927, 12929, 12931-12936, 12938, 12940, 12944-12945, 12947, 12951, 12954, 12956-12962, 12964-12966, 12968-12970, 12973-12977, 12979, 12981-12987, 12989-12995, 12997, 13001-13008, 13010-13016, 13018, 13020, 13022, 13029-13030, 13035-13037, 13039-13041, 13043-13044, 13046, 13049, 13052-13053, 13055-13056, 13059-13060, 13064-13066, 13069, 13072-13073, 13076-13077, 13081-13090, 13092-13093, 13095, 13097-13099, 13101-13110, 13113-13114, 13116-13118, 13120-13123, 13125, 13127-13132, 13134-13136, 13138, 13141-13142, 13144-13146, 13148-13151, 13153-13156, 13163-13166, 13169-13171, 13173, 13175-13176, 13178-13184, 13187-13188, 13190-13192, 13194, 13198-13213, 13215-13216, 13218-13220, 13222, 13224-13228, 13231, 13233-13234, 13236, 13239-13240, 13242, 13244-13245, 13247, 13249, 13251-13256, 13258-13259, 13261-13264, 13266-13270, 13272-13275, 13277, 13280-13281, 13283-13296, 13298-13301, 13303-13312, 13315-13317, 13319-13320, 13322-13332, 13335, 13337, 13339-13343, 13345-13350, 13352-13356, 13358, 13360, 13363, 13365, 13367, 13369, 13371, 13373-13374, 13376, 13378-13380, 13382-13388, 13390, 13392-13404, 13408-13410, 13412-13417, 13419, 13421-13422, 13424-13427, 13432-13434, 13436-13437, 13439-13441, 13445-13449, 13451-13454, 13458-13460, 13463-13464, 13466-13471, 13473, 13475-13477, 13482-13486, 13491-13497, 13499-13500, 13502-13506, 13508-13509, 13511-13517, 13521-13524, 13532-13535, 13537-13538, 13540-13542, 13544-13545, 13548-13549, 13551-13552, 13554, 13557-13560, 13562-13565, 13567-13570, 13572-13582, 13585, 13587-13591, 13593-13600, 13602-13604, 13607, 13609-13611, 13613-13618, 13620-13622, 13625, 13627-13628, 13631, 13633, 13635, 13637-13647, 13649-13651, 13653-13658, 13662-13663, 13665, 13667, 13670-13674, 13676-13680, 13684-13689, 13691-13692, 13695, 13698-13701, 13703-13705, 13707-13713, 13715, 13717-13720, 13722, 13725-13726, 13730, 13734, 13738-13743, 13746-13748, 13750-13751, 13754-13755, 13758-13767, 13769-13770, 13772-13773, 13775-13779, 13781-13783, 13785-13790, 13792, 13794, 13796-13799, 13801, 13805-13807, 13809-13811, 13814, 13816-13817, 13820-13825, 13827-13828, 13831-13836, 13838, 13842, 13845-13850, 13852-13854, 13857-13861, 13864-13873, 13875, 13877, 13879-13880, 13882-13885, 13887, 13889-13898, 13902-13904, 13906-13907, 13911-13912, 13914-13918, 13920, 13922-13923, 13925-13926, 13929-13932, 13935, 13939-13941, 13944-13953, 13956, 13959-13964, 13969, 13974, 13978-13979, 13982-13984, 13988-13993, 13998-14017, 14019, 14022-14023, 14025, 14027-14037, 14039, 14041-14044, 14046-14053, 14057-14060, 14063-14065, 14067-14076, 14079, 14084, 14087, 14089-14094, 14097-14099, 14101, 14103-14106, 14109-14113, 14116, 14120-14123, 14125, 14127-14128, 14130, 14135, 14137, 14141-14143, 14145-14149, 14152, 14154, 14157-14160, 14163-14164, 14166-14175, 14177-14179, 14181-14184, 14187-14190, 14193-14195, 14199-14201, 14204, 14206-14211, 14213-14216, 14218-14221, 14224, 14226-14227, 14229-14231, 14233, 14241-14245, 14254, 14256-14258, 14260, 14262-14263, 14265-14267, 14271-14274, 14276-14282, 14284-14285, 14287-14291, 14293-14296, 14299-14300, 14303, 14305, 14308-14311, 14315-14319, 14321-14324, 14327-14328, 14330-14338, 14340-14342, 14345-14353, 14355, 14358, 14362-14363, 14365-14367, 14373-14375, 14377-14381, 14389-14390, 14392-14394, 14396-14402, 14404, 14407-14410, 14412-14417, 14419-14422, 14424-14425, 14427-14431, 14434, 14436, 14439-14441, 14444-14447, 14449, 14453-14457, 14459-14463, 14465-14468, 14471, 14475, 14480-14482, 14484-14485, 14487-14493, 14495, 14497, 14501, 14505, 14507-14511, 14515-14535, 14537, 14540, 14543, 14545-14547, 14549-14550, 14552, 14554-14559, 14562, 14565-14566, 14568, 14570-14571, 14573-14579, 14581, 14583-14584, 14586-14588, 14592-14593, 14595-14596, 14599, 14601, 14605-14607, 14611, 14615-14616, 14619-14621, 14623-14626, 14630-14631, 14633-14638, 14643-14645, 14647, 14653-14655, 14658, 14660, 14662, 14664-14666, 14668-14669, 14671, 14673-14675, 14678, 14681-14688, 14690-14696, 14698-14700, 14704-14706, 14708-14713, 14718, 14721-14727, 14729, 14731, 14733-14736, 14738-14744, 14746-14753, 14755-14763, 14765-14769, 14771-14774, 14776-14779, 14781-14783, 14785, 14790, 14792, 14794, 14796-14800, 14802-14803, 14805-14811, 14813, 14815-14817, 14819, 14821-14827, 14829-14830, 14832, 14835-14838, 14840-14841, 14843, 14846-14849, 14852-14856, 14862, 14866, 14868, 14870-14877, 14879-14880, 14882-14888, 14890, 14892-14894, 14896-14899, 14901-14902, 14905, 14908-14909, 14911-14921, 14923, 14925, 14928-14931, 14933-14934, 14937-14939, 14941, 14943-14944, 14946-14961, 14963-14965, 14969, 14971-14972, 14974-14981, 14984-14985, 14987, 14989-14993, 14996-15005, 15007, 15009-15013, 15015-15019, 15022-15023, 15027, 15030, 15032, 15034-15035, 15037-15038, 15041-15043, 15045-15050, 15052-15057, 15059-15064, 15068-15076, 15078-15082, 15084, 15086-15088, 15090-15105, 15107, 15109-15111, 15113-15116, 15118-15120, 15124-15125, 15127-15128, 15130, 15133, 15135, 15137-15139, 15146, 15151-15152, 15154, 15157, 15160-15166, 15168-15169, 15171-15173, 15176-15182, 15185-15191, 15195, 15199-15202, 15205-15206, 15208-15209, 15211-15218, 15221-15222, 15224-15226, 15228-15233, 15235-15241, 15243, 15249-15255, 15257, 15260-15263, 15265-15269, 15272-15274, 15276-15284, 15286, 15288, 15290-15296, 15298, 15301, 15303, 15307, 15309, 15311, 15314, 15316-15318, 15320-15322, 15325, 15328-15338, 15341, 15344-15347, 15349, 15352, 15354, 15357, 15359-15360, 15363, 15365, 15368-15373, 15375-15376, 15378-15383, 15385, 15388-15391, 15393-15394, 15396, 15400-15406, 15408-15410, 15412-15418, 15420, 15426, 15430-15431, 15433, 15437-15441, 15443-15444, 15446-15448, 15450-15458, 15460-15462, 15466-15468, 15471-15475, 15477-15480, 15482-15483, 15485, 15487-15490, 15492, 15494-15503, 15505-15506, 15508-15512, 15514, 15517-15518, 15520, 15522-15524, 15526, 15533-15536, 15538-15541, 15543, 15545-15550, 15554, 15556, 15558-15559, 15562, 15564-15566, 15569-15572, 15574, 15576-15578, 15580-15582, 15584-15587, 15590, 15592-15593, 15595-15596, 15598-15599, 15601, 15603, 15605, 15609-15617, 15621-15622, 15625, 15627-15635, 15638, 15640-15645, 15647, 15649-15652, 15654, 15656-15658, 15660-15661, 15667-15672, 15674-15675, 15677, 15679-15681, 15684-15685, 15687, 15690-15691, 15693-15694, 15696, 15700-15701, 15706, 15710, 15713, 15715-15726, 15728-15731, 15735, 15738, 15745-15747, 15754-15755, 15757, 15763, 15765, 15770, 15772-15777, 15780-15781, 15785-15786, 15793-15797, 15799, 15801-15806, 15810-15816, 15819, 15821, 15824-15826, 15828-15834, 15837, 15840-15850, 15852-15857, 15861, 15863, 15867-15868, 15870-15871, 15873, 15875-15885, 15887-15889, 15892, 15896-15900, 15902, 15904-15907, 15913-15915, 15917-15924, 15926-15935, 15937-15938, 15945-15954, 15956-15967, 15973, 15976-15982, 15984, 15986-15993, 15995, 15998, 16000-16001, 16003, 16008, 16010-16011, 16013-16015, 16018-16021, 16023-16026, 16028-16030, 16032-16045, 16048-16049, 16051-16052, 16054, 16056, 16058-16062, 16064-16071, 16074-16075, 16077, 16079-16081, 16083-16090, 16092-16098, 16101-16102, 16105, 16107, 16109, 16111-16119, 16122, 16124-16127, 16130, 16132, 16134-16135, 16137-16138, 16141, 16143, 16147-16151, 16153-16155, 16157-16160, 16162, 16164-16165, 16167-16169, 16172-16175, 16183-16184, 16186, 16188, 16190-16191, 16196, 16203-16207, 16209-16211, 16215, 16218, 16220-16223, 16229-16231, 16233-16234, 16238-16240, 16242, 16245-16250, 16253-16255, 16258-16259, 16261, 16263-16264, 16266-16268, 16270-16277, 16279, 16281, 16283-16287, 16289-16298, 16300, 16302-16303, 16306-16312, 16316, 16318-16320, 16322-16325, 16327-16328, 16330-16332, 16334, 16336-16338, 16342, 16345, 16347, 16349, 16355-16369, 16372, 16374-16378, 16380-16381, 16383-16384, 16387, 16389-16392, 16394-16396, 16398-16401, 16403, 16405, 16407, 16411, 16413-16414, 16416, 16419, 16421, 16425, 16428-16432, 16435-16438, 16441, 16445-16453, 16455-16458, 16460, 16463, 16472, 16474-16478, 16481, 16484, 16486-16489, 16491, 16493, 16495-16501, 16503, 16505, 16507-16512, 16514, 16518, 16522-16523, 16525-16532, 16534-16535, 16538-16540, 16542-16546, 16548-16552, 16556-16558, 16561, 16564, 16566-16568, 16571, 16573-16581, 16583-16587, 16589, 16591, 16593, 16595-16602, 16604-16609, 16611-16614, 16616, 16619-16626, 16628-16634, 16636, 16638-16640, 16642, 16644, 16647-16650, 16652-16653, 16655, 16657, 16660, 16662-16665, 16667, 16670, 16672-16673, 16675, 16677, 16679, 16681, 16683, 16687-16693, 16695-16697, 16700, 16703-16704, 16707, 16709, 16712-16716, 16718-16720, 16723-16724, 16728-16729, 16731-16733, 16735, 16737-16738, 16746-16750, 16753-16754, 16758, 16760-16762, 16764-16771, 16773-16774, 16776-16784, 16787, 16789-16798, 16800, 16802-16805, 16810-16811, 16813-16817, 16819-16820, 16822-16828, 16830-16835, 16838-16842, 16844-16850, 16853, 16855, 16857, 16859-16867, 16869-16871, 16873-16876, 16878-16883, 16885, 16888-16891, 16894, 16896-16900, 16903-16904, 16906, 16913-16914, 16919, 16921-16927, 16929-16932, 16934-16935, 16937-16941, 16943-16945, 16947-16948, 16950, 16953, 16958, 16960-16962, 16965, 16968, 16974, 16980, 16983-16986, 16989, 16992, 16994-16996, 17000, 17002-17003, 17006-17022, 17025-17027, 17035-17036, 17038, 17041-17046, 17048, 17051, 17053-17054, 17056, 17059-17061, 17067-17068, 17070-17074, 17079-17083, 17086, 17088-17100, 17102, 17104-17107, 17109-17110, 17115, 17120, 17123-17125, 17127-17130, 17132-17141, 17143-17147, 17149, 17151, 17153, 17157-17159, 17165, 17168-17172, 17174-17180, 17183, 17185-17193, 17196-17197, 17199, 17201-17202, 17204, 17206-17207, 17209, 17211, 17213-17215, 17217-17219, 17222, 17224, 17226-17227, 17230, 17236, 17238-17239, 17241-17242, 17244-17249, 17251-17252, 17254-17256, 17258-17263, 17267-17273, 17275, 17277-17281, 17285-17286, 17288-17291, 17295, 17297, 17299-17305, 17310, 17312-17313, 17315-17316, 17318, 17320-17321, 17324, 17326-17327, 17329, 17335-17338, 17340-17341, 17344-17351, 17354-17360, 17362-17364, 17368-17379, 17382-17389, 17391-17394, 17396-17398, 17401-17402, 17404-17405, 17407-17409, 17411-17415, 17420, 17422, 17427-17429, 17431-17433, 17435, 17441-17445, 17447-17449, 17451-17452, 17454-17455, 17457-17462, 17464-17472, 17474-17479, 17481-17482, 17484-17488, 17492, 17497-17501, 17503-17504, 17506-17515, 17518, 17521-17522, 17524-17531, 17534-17535, 17537, 17539, 17541-17542, 17545, 17547-17553, 17557, 17559-17571, 17574-17575, 17577-17581, 17583, 17587-17590, 17592, 17595-17596, 17598-17599, 17603-17604, 17606-17608, 17612, 17614-17615, 17617-17620, 17622-17625, 17629-17632, 17634-17637, 17639-17644, 17646-17647, 17650-17652, 17654, 17659, 17661-17662, 17666-17672, 17677-17681, 17683, 17686-17689, 17691, 17694-17696, 17698-17700, 17703-17705, 17710-17711, 17713, 17719-17721, 17724-17725, 17727, 17729-17737, 17739-17747, 17749-17752, 17755-17757, 17761, 17764, 17766-17769, 17773-17777, 17780-17783, 17787, 17789, 17791-17792, 17794-17800, 17802-17809, 17813, 17815, 17817-17818, 17820, 17822-17826, 17829, 17831, 17833, 17836-17837, 17839-17840, 17842-17843, 17848, 17850-17851, 17853-17855, 17857-17863, 17865, 17867, 17869-17873, 17876, 17878, 17880-17891, 17893-17894, 17897-17901, 17903-17908, 17910-17913, 17915, 17917-17921, 17923-17924, 17928-17932, 17934-17935, 17938, 17941-17942, 17944, 17949-17950, 17952, 17954, 17956-17961, 17963-17970, 17972-17973, 17975-17977, 17979-17981, 17984, 17987-17992, 17994, 17998-18000, 18002, 18005-18006, 18009-18010, 18012-18014, 18017, 18019, 18021-18029, 18033, 18038-18041, 18043, 18045-18048, 18050, 18052, 18054-18056, 18058-18065, 18069-18071, 18073-18077, 18079, 18081, 18083, 18085-18086, 18088-18089, 18091-18093, 18097, 18099-18101, 18103-18112, 18115, 18119-18121, 18123-18126, 18128, 18130, 18132-18134, 18136, 18138-18141, 18144, 18146, 18148, 18150-18151, 18154-18157, 18160-18162, 18166-18169, 18171-18174, 18176-18182, 18184-18185, 18187-18189, 18191-18200, 18202-18208, 18212-18215, 18218, 18222, 18224, 18227-18228, 18230-18231, 18233-18242, 18244-18245, 18248-18251, 18253-18254, 18257-18259, 18261-18262, 18264-18267, 18269-18272, 18274-18279, 18282, 18286, 18289-18291, 18293-18298, 18300-18301, 18303-18304, 18312-18313, 18318, 18321-18323, 18325-18327, 18332-18335, 18337-18338, 18341, 18346-18357, 18360, 18363, 18366-18367, 18370-18372, 18374-18377, 18379-18381, 18386-18388, 18390-18392, 18394-18401, 18403-18406, 18408-18411, 18413-18414, 18416-18419, 18421, 18424-18429, 18433, 18435, 18437-18445, 18447-18449, 18453, 18456-18457, 18460, 18462-18473, 18476-18477, 18480-18490, 18492-18496, 18499-18510, 18513-18515, 18517, 18520, 18522-18535, 18537-18539, 18542, 18544-18548, 18550, 18553, 18555-18557, 18560-18561, 18563-18567, 18571, 18573-18578, 18580-18581, 18584-18585, 18587-18589, 18592-18594, 18598-18599, 18601-18605, 18608, 18610-18615, 18617-18619, 18621-18623, 18625-18626, 18628, 18631, 18633-18634, 18637, 18639-18652, 18654-18658, 18660-18662, 18664-18666, 18668-18670, 18673-18677, 18679-18680, 18683, 18688, 18690, 18694-18697, 18702-18703, 18706-18712, 18717, 18719-18721, 18723, 18726-18727, 18729-18731, 18733, 18735-18736, 18738-18740, 18742, 18747-18748, 18750, 18753, 18756, 18758-18759, 18761-18764, 18766-18769, 18772, 18774-18776, 18780-18783, 18785-18786, 18788, 18790, 18792, 18795-18796, 18799-18801, 18803, 18805-18807, 18809-18810, 18813-18816, 18819-18820, 18822-18823, 18826-18828, 18830, 18834-18836, 18844-18853, 18855, 18858, 18863-18866, 18868, 18872-18874, 18876, 18878, 18880-18881, 18883-18884, 18887-18888, 18890-18894, 18896, 18898-18899, 18902, 18905-18907, 18909-18915, 18918-18919, 18921-18922, 18927-18937, 18939-18941, 18943-18945, 18947, 18949-18951, 18953-18971, 18974, 18978-18985, 18987-18988, 18990, 18992-18995, 18998-19004, 19006, 19009-19013, 19015, 19018-19019, 19021-19031, 19034, 19036, 19038-19045, 19049-19051, 19053-19057, 19059-19062, 19064-19065, 19067, 19069-19071, 19075, 19077-19079, 19081, 19083, 19085, 19087, 19091, 19093-19095, 19097-19102, 19106, 19109-19112, 19114-19126, 19128-19135, 19140-19142, 19144-19145, 19147, 19149, 19154, 19156-19161, 19164-19172, 19174-19176, 19178, 19180-19183, 19185, 19187, 19189, 19192, 19194-19197, 19202, 19204, 19207-19209, 19212-19217, 19221-19223, 19226, 19228-19230, 19232, 19234-19236, 19240-19243, 19246, 19248, 19250-19251, 19253, 19256, 19259-19267, 19270-19272, 19277-19279, 19281-19285, 19287-19288, 19290, 19294-19297, 19302-19306, 19308, 19310-19313, 19315-19318, 19325-19330, 19335, 19337, 19339, 19341, 19346-19347, 19349-19350, 19352, 19354, 19356-19360, 19362, 19365-19366, 19368, 19371-19376, 19378-19384, 19387-19394, 19397-19399, 19402-19404, 19406-19407, 19412, 19416-19417, 19419-19423, 19426-19431, 19434, 19436-19439, 19441, 19443, 19445, 19447-19457, 19459, 19461-19464, 19466-19467, 19469-19472, 19474-19475, 19477-19484, 19487, 19489, 19491-19492, 19494-19499, 19501-19509, 19511, 19514, 19516, 19518-19522, 19525-19527, 19529-19530, 19532-19535, 19537, 19539, 19541-19543, 19546, 19548, 19550, 19553-19557, 19559-19560, 19565, 19567, 19570-19579, 19581-19583, 19585-19592, 19594, 19596-19598, 19601-19607, 19610, 19613-19615, 19618-19626, 19628-19631, 19633-19636, 19638-19639, 19641-19646, 19648-19653, 19655-19656, 19658-19660, 19662-19664, 19667, 19670-19674, 19676, 19678-19680, 19682-19684, 19687, 19689, 19691, 19693, 19695-19699, 19701-19702, 19706, 19708-19709, 19711-19712, 19716-19722, 19726-19728, 19731-19733, 19735-19737, 19739-19741, 19743-19747, 19750-19751, 19754-19761, 19765-19771, 19773, 19776-19781, 19785, 19787, 19790, 19794-19795, 19797, 19799-19800, 19802-19807, 19809-19812, 19815-19816, 19818, 19824, 19827-19836, 19839-19840, 19842-19844, 19846-19864, 19866-19873, 19876-19879, 19881, 19883-19889, 19891, 19894-19899, 19901-19903, 19905-19907, 19911, 19913-19914, 19917-19921, 19923-19926, 19930-19934, 19937, 19939-19940, 19943-19948, 19951-19952, 19954-19955, 19957-19962, 19965-19967, 19972-19979, 19981-19987, 19989-19992, 19994, 19998-20004, 20006-20016, 20019-20022, 20025, 20027, 20032, 20035-20038, 20040-20041, 20043-20047, 20053, 20057-20064, 20067-20072, 20074-20082, 20084-20087, 20090-20095, 20100, 20102-20104, 20106, 20109-20112, 20114, 20116-20117, 20119-20121, 20124-20126, 20128-20131, 20133-20139, 20143, 20146-20150, 20153-20158, 20160-20164, 20166-20167, 20169, 20174, 20176, 20181, 20187-20188, 20190, 20192-20198, 20200, 20205-20206, 20210-20214, 20218, 20220-20223, 20225, 20228-20233, 20236, 20238-20240, 20242, 20245-20259, 20263-20265, 20267, 20269-20271, 20277, 20279, 20282-20284, 20286-20288, 20290-20295, 20297-20298, 20300-20306, 20309, 20313, 20315-20317, 20326-20327, 20333, 20336, 20339, 20341-20342, 20344, 20347, 20349-20350, 20354-20355, 20357-20358, 20367-20369, 20371-20372, 20375-20381, 20383, 20387-20388, 20390-20396, 20398, 20401, 20406-20408, 20413, 20415, 20421, 20424-20431, 20434-20438, 20442, 20444-20445, 20450, 20453-20455, 20457, 20459-20465, 20467-20473, 20476, 20479, 20482-20486, 20488, 20490, 20493-20496, 20500, 20502, 20506, 20508-20509, 20512, 20514-20515, 20522-20524, 20526-20534, 20538, 20540-20544, 20547, 20549-20551, 20553-20555, 20558, 20561, 20563-20567, 20569-20578, 20580, 20583-20585, 20588-20590, 20592, 20595, 20601, 20603-20607, 20610-20623, 20625, 20628, 20630-20633, 20635-20636, 20638-20648, 20650-20655, 20657-20661, 20663-20665, 20667-20686, 20688-20690, 20693-20694, 20696-20700, 20703-20704, 20706-20709, 20711-20712, 20715-20722, 20724-20727, 20729-20730, 20732, 20735, 20738-20742, 20744, 20746-20747, 20750-20752, 20754-20761, 20763-20766, 20768, 20770, 20775, 20777-20784, 20786, 20788, 20790-20793, 20795-20796, 20798-20808, 20810, 20812-20815, 20818-20819, 20822, 20825, 20827-20829, 20831, 20833, 20835-20842, 20844, 20846, 20848-20853, 20855-20859, 20862, 20864-20865, 20870-20875, 20878, 20882-20884, 20892, 20894-20896, 20904-20905, 20908-20909, 20911-20913, 20916-20922, 20926-20928, 20933-20937, 20940, 20942-20944, 20946-20947, 20950, 20952-20954, 20957-20968, 20974-20977, 20981-20989, 20991-20993, 20995, 20999-21000, 21002-21005, 21007-21008, 21010-21014, 21016-21018, 21020-21024, 21026-21028, 21031-21039, 21042-21043, 21045-21048, 21050, 21052-21056, 21059, 21065-21066, 21068, 21071-21074, 21076, 21078-21080, 21082-21087, 21089-21091, 21093, 21097-21101, 21103-21104, 21106, 21111, 21113, 21124, 21126, 21129, 21131, 21133, 21135-21136, 21139, 21141-21142, 21144, 21149, 21152-21154, 21156, 21161-21168, 21171-21172, 21175, 21177-21178, 21181, 21185-21186, 21189, 21192-21199, 21201-21206, 21211, 21213, 21215-21220, 21222-21225, 21227, 21230-21236, 21238-21239, 21241, 21243, 21246-21250, 21252-21262, 21264-21265, 21267, 21269-21270, 21274-21275, 21277-21279, 21282, 21288-21299, 21301-21305, 21308-21309, 21312-21314, 21318, 21320-21322, 21324-21327, 21329-21331, 21333-21334, 21341-21342, 21348, 21351-21352, 21355, 21358-21360, 21362-21364, 21366, 21370-21371, 21373-21375, 21379, 21382-21384, 21386-21388, 21390-21392, 21394-21395, 21397, 21400-21405, 21407-21413, 21415-21416, 21418-21419, 21422, 21424-21427, 21429-21431, 21433-21434, 21436-21443, 21445, 21451-21462, 21464-21467, 21469-21472, 21476, 21478-21479, 21483-21485, 21491-21497, 21499, 21501, 21503-21507, 21510-21512, 21514, 21518-21520, 21522, 21524-21527, 21529-21540, 21544, 21546, 21549-21553, 21555, 21559-21562, 21565-21568, 21570-21578, 21580, 21582, 21585-21586, 21588-21589, 21592-21596, 21598-21602, 21605-21610, 21613, 21617-21618, 21620-21621, 21623, 21626, 21629-21634, 21636, 21638, 21641-21643, 21650, 21656-21660, 21663-21665, 21668-21669, 21672, 21675, 21677-21679, 21681-21683, 21693-21695, 21699-21704, 21706, 21709-21710, 21712-21715, 21717-21719, 21721-21723, 21727-21732, 21734-21737, 21739-21741, 21743-21745, 21749-21751, 21756-21758, 21760, 21762-21764, 21766-21772, 21776, 21778-21780, 21782-21784, 21787-21788, 21790, 21792, 21794-21795, 21799, 21801, 21803-21807, 21809, 21812, 21814, 21817, 21819-21822, 21824-21827, 21829-21832, 21835, 21838-21839, 21841-21846, 21848, 21851-21865, 21873-21879, 21884-21890, 21894-21898, 21902-21903, 21905-21906, 21908-21909, 21914-21915, 21917-21918, 21920, 21922-21923, 21925-21926, 21929-21933, 21936, 21938, 21940-21942, 21944, 21946, 21948-21950, 21952, 21954, 21956, 21965-21969, 21971, 21975-21977, 21982-21991, 21993-21997, 22002, 22004-22005, 22007-22008, 22012-22013, 22015-22020, 22022-22024, 22027, 22030, 22034-22036, 22038-22039, 22042-22045, 22048-22049, 22051-22056, 22058, 22060-22061, 22063-22064, 22070-22071, 22074, 22078-22080, 22082-22085, 22089-22092, 22094-22095, 22097-22103, 22106, 22108-22110, 22112, 22114-22115, 22117-22118, 22120-22122, 22124, 22126-22134, 22136, 22138-22140, 22144-22145, 22147-22152, 22155-22157, 22161, 22165-22166, 22169-22171, 22174, 22176, 22179-22180, 22186, 22191-22196, 22198, 22204-22206, 22209-22210, 22213-22214, 22216-22217, 22219-22224, 22226, 22228-22232, 22234-22235, 22237-22238, 22240-22242, 22248-22250, 22252, 22258-22259, 22261-22263, 22266-22268, 22270, 22273-22278, 22281-22284, 22286-22287, 22290-22293, 22295-22300, 22302, 22306, 22308-22313, 22315, 22317-22318, 22323-22326, 22329-22331, 22334-22336, 22338-22344, 22346, 22348-22353, 22355-22359, 22362-22365, 22368-22371, 22375, 22377, 22379, 22383, 22386, 22388-22389, 22392, 22395-22396, 22398-22411, 22413-22418, 22420, 22422-22423, 22426-22428, 22430-22431, 22433-22434, 22436, 22438-22446, 22448-22449, 22451-22453, 22455-22458, 22460-22461, 22463-22469, 22472-22476, 22478-22480, 22482, 22484-22485, 22488-22490, 22492-22493, 22495, 22497-22500, 22503, 22507-22512, 22516-22519, 22522-22525, 22528-22531, 22533, 22536-22539, 22541-22545, 22547, 22549-22551, 22553-22558, 22561-22566, 22568, 22570-22574, 22576-22577, 22579-22580, 22582-22583, 22586-22591, 22598-22600, 22602-22605, 22609, 22612, 22614, 22616-22618, 22621-22625, 22627-22629, 22633-22638, 22642-22644, 22647-22652, 22655-22659, 22661, 22663, 22665, 22668-22670, 22672-22675, 22677, 22682-22683, 22685, 22687, 22692-22694, 22696-22700, 22702-22708, 22710-22711, 22713-22714, 22716-22720, 22722-22726, 22728-22729, 22732, 22735, 22737, 22739-22744, 22746-22748, 22751, 22754, 22756, 22762-22763, 22769-22771, 22773, 22775-22776, 22778-22782, 22784, 22787-22794, 22796, 22800-22804, 22806-22807, 22809-22810, 22812, 22814-22821, 22824-22826, 22828-22829, 22834-22835, 22837, 22839, 22841-22843, 22845, 22847-22851, 22853-22854, 22856-22863, 22867, 22870-22871, 22880-22884, 22887-22890, 22892-22893, 22895, 22897-22899, 22901-22902, 22904-22910, 22912-22918, 22921, 22925, 22927, 22929, 22931-22933, 22936-22939, 22942-22943, 22945-22948, 22951-22955, 22958-22959, 22961, 22963, 22965-22966, 22969, 22972-22974, 22976-22977, 22979-22982, 22985-22988, 22990-22995, 22997-22999, 23001-23002, 23006, 23008-23009, 23011, 23013, 23016-23021, 23024-23030, 23032-23034, 23036-23045, 23047, 23049-23053, 23059-23062, 23064-23075, 23079-23083, 23087-23097, 23100-23102, 23104-23105, 23107-23109, 23111-23115, 23118-23120, 23122, 23124, 23129, 23131, 23133-23134, 23137-23139, 23141-23144, 23146, 23148-23150, 23152-23154, 23156-23157, 23159, 23161-23164, 23166-23169, 23173-23185, 23187-23191, 23194-23196, 23198, 23200-23205, 23208, 23210, 23213-23214, 23216-23220, 23222-23223, 23225-23226, 23228-23229, 23231-23232, 23235, 23237-23242, 23244-23246, 23248, 23252-23263, 23265-23270, 23272-23277, 23279-23289, 23292, 23294-23295, 23297-23299, 23303-23304, 23306-23313, 23315-23317, 23319-23320, 23324-23326, 23328-23332, 23334-23335, 23337-23339, 23341-23348, 23352, 23354, 23358-23360, 23362-23374, 23376-23377, 23380-23387, 23389, 23391-23393, 23395, 23397-23398, 23400-23401, 23404-23406, 23408-23409, 23414-23422, 23426, 23429-23430, 23432-23435, 23438-23440, 23444, 23446, 23450-23455, 23459, 23461, 23463-23464, 23467, 23471, 23473-23478, 23480-23481, 23483-23488, 23492-23496, 23498-23499, 23506-23508, 23510, 23512-23517, 23519, 23521-23522, 23527-23531, 23533-23534, 23541, 23544-23545, 23549-23551, 23554-23555, 23559-23562, 23564, 23566, 23568, 23571, 23573-23579, 23581-23582, 23584, 23586-23588, 23592-23599, 23601-23602, 23605-23606, 23608-23615, 23618, 23620-23622, 23624, 23626-23627, 23629, 23631, 23633, 23635-23639, 23641, 23643-23646, 23648-23652, 23654-23655, 23659, 23662, 23664-23668, 23670-23674, 23676-23680, 23682, 23684, 23686-23688, 23691, 23693-23694, 23696-23699, 23701, 23704, 23707, 23709-23710, 23713-23718, 23720-23722, 23725-23726, 23728-23729, 23731-23733, 23736-23741, 23744, 23746, 23748-23749, 23751-23753, 23755-23759, 23763, 23765, 23767-23771, 23774-23776, 23778, 23781-23783, 23785-23786, 23788-23793, 23795-23797, 23799-23802, 23806-23814, 23816-23817, 23819-23820, 23824-23833, 23835, 23837-23838, 23840, 23843, 23848-23854, 23856-23861, 23863-23867, 23872, 23874-23875, 23877-23884, 23887-23899, 23901, 23903-23907, 23910-23911, 23915, 23917, 23920-23922, 23924-23926, 23930-23931, 23934-23940, 23943, 23945-23949, 23953-23956, 23959-23961, 23963, 23965-23966, 23968-23974, 23976, 23979-23982, 23985, 23987, 23989-23990, 23992-23999, 24003, 24005, 24007, 24010-24012, 24014, 24016, 24019, 24021-24028, 24030, 24033-24034, 24037-24038, 24040, 24042-24044, 24046-24048, 24051-24053, 24061-24062, 24070-24072, 24074-24075, 24077-24078, 24080, 24082-24083, 24085-24089, 24091, 24093-24096, 24098-24101, 24105-24116, 24118, 24121, 24123, 24125-24131, 24133-24134, 24136-24137, 24141, 24143, 24145-24147, 24149, 24152-24153, 24155, 24157-24160, 24162, 24167, 24170-24171, 24173-24178, 24180-24183, 24185-24191, 24193-24195, 24197-24199, 24201-24202, 24204-24211, 24213, 24219, 24222, 24224-24226, 24228, 24231, 24233-24236, 24238, 24240-24241, 24243-24245, 24248-24251, 24257, 24259-24266, 24268, 24270-24272, 24274-24277, 24279-24286, 24289-24302, 24305, 24307-24311, 24314-24316, 24318-24323, 24326-24330, 24332-24334, 24336-24338, 24340-24341, 24343, 24346, 24348, 24350-24354, 24357, 24359, 24361-24362, 24365-24366, 24368-24371, 24373, 24375, 24378, 24382-24385, 24388-24393, 24395, 24397-24400, 24402-24403, 24406, 24408-24410, 24412-24413, 24415, 24418-24420, 24422-24423, 24425-24427, 24430-24431, 24434-24435, 24438-24439, 24441-24444, 24446-24450, 24452, 24454, 24456, 24458-24462, 24464-24467, 24469-24473, 24475-24478, 24481-24482, 24487-24488, 24490, 24492-24495, 24497-24499, 24502, 24504-24507, 24511-24527, 24529-24533, 24535-24539, 24541-24548, 24550, 24552, 24557, 24559-24565, 24568, 24570-24573, 24577-24579, 24581-24582, 24584-24585, 24588-24589, 24592, 24594-24595, 24599-24600, 24603-24604, 24608-24609, 24611, 24613, 24616-24618, 24620, 24622-24623, 24626, 24628-24633, 24635-24636, 24639-24641, 24644, 24646-24647, 24649-24651, 24653, 24656-24666, 24668, 24670-24673, 24677, 24680-24682, 24684, 24689-24694, 24697-24699, 24701, 24704, 24706, 24708-24712, 24714-24722, 24726, 24732, 24734-24737, 24739, 24741-24744, 24746-24747, 24750-24754, 24756, 24759-24760, 24762-24763, 24766, 24771-24775, 24777-24781, 24783, 24786-24788, 24790-24791, 24793-24794, 24797-24801, 24808-24810, 24812-24821, 24824-24827, 24829-24830, 24832-24841, 24844-24851, 24855, 24857-24860, 24864-24867, 24869-24871, 24873, 24875-24883, 24886, 24888-24894, 24897-24902, 24904, 24907-24909, 24912-24913, 24915, 24917, 24919-24920, 24925, 24928, 24930-24931, 24935-24942, 24944-24946, 24948-24959, 24961, 24963, 24965, 24967-24968, 24971-24974, 24976, 24978-24981, 24983-24989, 24991-24995, 24997, 24999-25001, 25004-25007, 25009-25010, 25012, 25016-25018, 25021, 25023, 25028-25031, 25033-25034, 25036, 25041-25042, 25045-25046, 25048, 25050-25057, 25059, 25063-25071, 25073, 25075-25083, 25085-25094, 25096-25098, 25100-25102, 25105-25107, 25110-25116, 25134, 25136-25141, 25145, 25148, 25150, 25153, 25157-25165, 25167-25168, 25173-25175, 25177-25180, 25184, 25186-25187, 25193, 25196-25198, 25201-25205, 25210, 25214-25215, 25220, 25225-25232, 25235-25240, 25242-25243, 25245, 25247-25249, 25251, 25253-25257, 25259-25273, 25279, 25281-25286, 25289-25294, 25298-25304, 25309, 25311-25313, 25317-25325, 25327-25330, 25333-25334, 25337-25338, 25340, 25343-25345, 25349, 25351, 25353-25354, 25357-25359, 25361-25362, 25365-25366, 25368-25370, 25372-25378, 25380-25384, 25386, 25389, 25391, 25393-25395, 25397, 25400-25401, 25403-25406, 25408-25409, 25413, 25415-25418, 25421-25427, 25431, 25434-25437, 25440-25442, 25444-25449, 25451-25459, 25462-25463, 25465-25474, 25477, 25479, 25481, 25484-25485, 25487-25488, 25490, 25492, 25494, 25496-25497, 25499, 25501, 25503-25504, 25506-25512, 25515, 25518-25519, 25522-25523, 25525, 25527, 25529, 25531-25532, 25535-25536, 25538, 25540-25541, 25543, 25546, 25548-25549, 25551-25552, 25556, 25558-25559, 25561, 25563-25571, 25577, 25579, 25582-25583, 25586, 25589-25593, 25595-25600, 25604-25611, 25614-25618, 25620-25623, 25625, 25627-25628, 25630-25631, 25633, 25635-25637, 25639, 25642, 25644, 25647, 25649, 25651-25652, 25655-25656, 25662-25664, 25667-25668, 25670, 25672, 25674-25677, 25679-25682, 25685-25687, 25689-25693, 25695-25696, 25699, 25701, 25705-25712, 25714-25716, 25718-25723, 25727, 25729-25733, 25736, 25739-25743, 25745-25746, 25749-25753, 25755-25756, 25758-25759, 25761-25762, 25764, 25766, 25768, 25770-25774, 25776-25778, 25780, 25782, 25785, 25787-25788, 25790-25791, 25793, 25796, 25799-25802, 25805-25808, 25811-25815, 25818, 25820, 25822-25823, 25825-25837, 25841-25844, 25846-25848, 25850-25852, 25855, 25858-25859, 25861-25862, 25864-25865, 25867-25868, 25870-25872, 25875-25877, 25879, 25881, 25883-25889, 25892-25895, 25897-25898, 25901-25909, 25911-25912, 25916-25917, 25920-25921, 25923-25925, 25927, 25929, 25931-25934, 25936-25937, 25939, 25941, 25943-25944, 25948, 25950, 25952-25955, 25958, 25960, 25962-25964, 25967-25973, 25975-25982, 25984-25988, 25991-25992, 25994-25996, 25998, 26000, 26002-26003, 26005, 26007-26013, 26015-26021, 26024-26031, 26033, 26037-26039, 26044-26045, 26048-26050, 26052, 26056-26061, 26064-26067, 26069-26070, 26072, 26074, 26078, 26081, 26083, 26086-26087, 26092-26093, 26095-26105, 26108, 26110, 26113-26114, 26116, 26119-26120, 26122-26124, 26126-26140, 26143-26146, 26148, 26150-26154, 26156-26157, 26159, 26163, 26165-26167, 26171-26173, 26175-26176, 26180-26182, 26185, 26187, 26189, 26191, 26193-26197, 26199-26202, 26205-26206, 26208-26210, 26212-26220, 26223-26224, 26226-26227, 26229, 26231-26235, 26238-26241, 26243-26245, 26247-26249, 26258, 26260, 26265, 26269-26271, 26273-26278, 26280-26282, 26284-26286, 26290, 26292-26293, 26295, 26297-26299, 26305-26309, 26313-26314, 26316-26319, 26322-26331, 26333, 26335, 26338-26342, 26346-26350, 26352, 26354-26355, 26360, 26362-26365, 26367-26368, 26373, 26375-26381, 26383-26384, 26386, 26388-26392, 26394, 26396-26397, 26401-26411, 26413, 26415, 26428-26430, 26432-26435, 26437-26442, 26445, 26451, 26453-26454, 26456-26458, 26460, 26464, 26466, 26468-26469, 26472-26482, 26484, 26486, 26488, 26490-26491, 26493-26498, 26500, 26503-26504, 26507-26508, 26511, 26513-26517, 26521, 26523, 26525, 26528-26532, 26534-26535, 26537, 26540-26551, 26553, 26557, 26559-26560, 26562, 26565-26567, 26573-26574, 26576-26578, 26580-26581, 26584, 26586-26587, 26589, 26593, 26595, 26597-26599, 26602-26610, 26613-26618, 26620-26621, 26624-26627, 26629-26631, 26633-26637, 26639-26640, 26644-26653, 26655-26657, 26659-26660, 26664-26665, 26667, 26669-26670, 26672, 26676-26678, 26683, 26685-26687, 26689, 26691, 26693-26694, 26696-26698, 26700, 26702-26703, 26706, 26710-26711, 26715-26717, 26719-26720, 26722, 26724-26729, 26732-26737, 26739, 26741-26742, 26744-26747, 26750-26753, 26755-26756, 26760-26762, 26764, 26766-26771, 26774-26777, 26779-26782, 26784-26787, 26790-26794, 26797-26798, 26801-26803, 26805-26812, 26814-26817, 26819-26820, 26823-26828, 26830-26831, 26833, 26835-26838, 26841-26846, 26849-26852, 26854, 26856, 26858-26871, 26873, 26877, 26879-26883, 26886-26890, 26892, 26897-26898, 26900, 26902, 26905-26906, 26909-26911, 26915, 26918, 26921, 26924, 26926-26929, 26931-26934, 26940-26944, 26946, 26948-26955, 26959, 26962-26964, 26967-26969, 26971-26972, 26974-26975, 26977-26982, 26984, 26986-26987, 26989-26994, 26996, 27002-27007, 27011-27012, 27014, 27016-27020, 27023-27026, 27028-27033, 27038-27039, 27042, 27045, 27047-27050, 27053, 27055-27057, 27059-27065, 27067-27068, 27072-27075, 27079, 27085, 27087, 27091-27105, 27108-27113, 27116-27117, 27121-27122, 27124-27134, 27138, 27140, 27142-27144, 27146, 27149, 27151-27153, 27155-27157, 27159-27160, 27162-27171, 27173-27176, 27178-27179, 27181, 27185-27188, 27196, 27198-27200, 27205-27207, 27209-27214, 27218, 27221, 27223-27224, 27226-27227, 27229, 27231-27233, 27235, 27237-27238, 27244, 27246-27248, 27250, 27252, 27254, 27256-27258, 27260, 27263-27270, 27272, 27276, 27278-27280, 27282-27284, 27287-27295, 27297-27305, 27307-27323, 27325, 27327-27331, 27333, 27335-27336, 27338, 27341-27342, 27344-27349, 27351-27361, 27363, 27365-27367, 27369-27375, 27378, 27380-27382, 27384-27386, 27389-27397, 27399, 27401-27404, 27406-27407, 27409-27410, 27412, 27414, 27416-27419, 27422, 27425-27427, 27430-27431, 27434-27437, 27441, 27445-27448, 27451-27452, 27454-27455, 27457-27459, 27463, 27465-27480, 27482-27483, 27489-27495, 27497-27499, 27501-27502, 27504-27505, 27508, 27510-27512, 27515, 27517-27518, 27520-27523, 27525, 27528-27532, 27534-27536, 27538, 27540-27541, 27543-27546, 27548, 27553, 27556-27557, 27559, 27561-27563, 27566-27568, 27570, 27573-27579, 27581-27582, 27584, 27587-27598, 27601-27603, 27606-27610, 27616-27617, 27621-27623, 27625-27629, 27632-27638, 27641, 27643-27644, 27646-27647, 27649-27663, 27665, 27667-27671, 27673-27677, 27680-27683, 27685-27686, 27688-27696, 27699-27700, 27702-27705, 27707, 27711, 27715, 27717, 27719-27721, 27723-27726, 27728, 27730-27741, 27744-27746, 27750-27751, 27753-27758, 27760, 27762, 27767-27768, 27770, 27772-27774, 27776-27777, 27780-27782, 27785-27786, 27788-27793, 27795-27797, 27799-27803, 27806, 27808, 27810-27811, 27813-27821, 27823, 27825-27828, 27830-27833, 27835-27837, 27839-27844, 27847-27853, 27856-27857, 27859-27860, 27864-27870, 27872-27874, 27877, 27879-27881, 27883, 27886-27887, 27889-27890, 27894-27896, 27898, 27906, 27908-27909, 27911, 27913-27917, 27919-27922, 27926-27927, 27929-27930, 27932-27933, 27935-27938, 27940-27943, 27945, 27947, 27952-27953, 27955-27962, 27964-27965, 27968, 27971-27974, 27977-27984, 27986, 27993-27994, 27996-27998, 28001-28006, 28008-28009, 28012-28014, 28016-28018, 28020-28024, 28026-28027, 28029-28031, 28033, 28036-28037, 28039-28055, 28058-28066, 28069, 28071-28077, 28079, 28081-28083, 28087, 28089-28100, 28102-28103, 28107-28109, 28111, 28113, 28117, 28120-28141, 28144, 28148-28150, 28152-28159, 28161-28170, 28174-28176, 28178-28182, 28184-28185, 28188-28189, 28191, 28193-28197, 28200-28202, 28205-28206, 28209, 28213-28215, 28217-28219, 28223, 28225-28231, 28233-28239, 28241, 28243-28245, 28247-28250, 28252-28253, 28255-28257, 28259, 28262, 28264-28265, 28267-28270, 28274-28275, 28277-28283, 28285-28287, 28289-28293, 28295-28296, 28298-28300, 28303-28312, 28314-28317, 28319-28320, 28323-28329, 28331-28335, 28337, 28339-28342, 28344, 28347-28354, 28357-28358, 28360-28365, 28367-28368, 28371, 28373-28374, 28377-28385, 28387-28389, 28391, 28395, 28397-28400, 28403, 28408, 28410-28411, 28415-28417, 28421, 28424, 28427-28429, 28431-28434, 28437-28441, 28444-28446, 28449-28450, 28453-28461, 28463-28465, 28467-28468, 28470-28471, 28473, 28475-28477, 28482-28491, 28498-28500, 28503, 28505-28506, 28508-28509, 28512-28513, 28517-28519, 28522-28525, 28527-28529, 28532-28535, 28539-28541, 28543-28544, 28546, 28548-28549, 28551-28558, 28561-28564, 28566-28567, 28570-28573, 28578-28585, 28587, 28589, 28594, 28597, 28599, 28601-28603, 28605-28612, 28615, 28618, 28620, 28622-28624, 28626-28627, 28629-28630, 28633-28636, 28638, 28641-28647, 28651, 28653, 28655-28656, 28658, 28660-28666, 28668, 28670, 28674-28675, 28678, 28681-28686, 28689-28691, 28693-28696, 28698-28699, 28701-28702, 28705, 28707-28709, 28712-28718, 28720-28721, 28723, 28725-28726, 28728, 28730-28733, 28735, 28738-28741, 28743-28746, 28748, 28750, 28752, 28754-28757, 28760-28764, 28767, 28769, 28772-28773, 28775-28779, 28783-28787, 28789, 28791, 28793-28795, 28797-28799, 28803, 28805-28810, 28812, 28815-28821, 28827-28836, 28840-28843, 28845, 28847-28849, 28851-28853, 28855-28857, 28860-28866, 28869, 28871-28873, 28875, 28879-28883, 28885-28887, 28895-28899, 28901, 28903-28906, 28908-28909, 28911-28912, 28914-28915, 28917-28920, 28922-28923, 28925-28926, 28929, 28932-28933, 28935, 28938-28941, 28943-28948, 28951-28952, 28954-28956, 28958, 28960-28964, 28966, 28968-28969, 28971-28973, 28975-28982, 28984-28989, 28991-28999, 29001, 29003-29004, 29006-29007, 29009-29010, 29012-29016, 29018, 29021-29030, 29033-29039, 29041-29048, 29056-29057, 29059-29060, 29063, 29065, 29069-29072, 29074-29076, 29078-29083, 29085-29087, 29089-29090, 29093-29101, 29103-29104, 29107, 29109-29110, 29112-29114, 29116-29122, 29124, 29126-29127, 29129-29131, 29133-29137, 29139, 29141-29149, 29151-29152, 29155, 29158, 29160, 29162, 29165-29167, 29170-29173, 29175-29177, 29182-29184, 29187-29198, 29209, 29211, 29213-29215, 29217, 29219-29221, 29224, 29226, 29228-29229, 29232, 29235-29237, 29240, 29242, 29244-29247, 29251-29256, 29258, 29264-29267, 29271-29279, 29281-29284, 29286, 29288-29290, 29292, 29295, 29297-29298, 29304-29306, 29312, 29314-29322, 29324-29331, 29333-29335, 29337, 29339-29353, 29355-29360, 29362, 29365-29369, 29371, 29373, 29376-29377, 29380-29382, 29384, 29386-29393, 29395, 29398-29399, 29401-29405, 29407, 29414, 29416-29424, 29428-29430, 29432, 29434-29435, 29439-29445, 29447-29451, 29453-29458, 29460-29462, 29464-29465, 29468-29470, 29472, 29474-29475, 29479-29483, 29485, 29487-29488, 29490-29494, 29496-29512, 29516-29517, 29520, 29522-29526, 29528-29531, 29534, 29537, 29540-29553, 29555-29559, 29561, 29566, 29568-29569, 29571, 29575, 29579-29580, 29586-29588, 29590-29592, 29594-29603, 29606, 29608-29612, 29614-29616, 29618, 29620-29622, 29624, 29631-29632, 29635, 29637-29641, 29643, 29645-29657, 29659, 29661-29662, 29664, 29666-29670, 29672, 29675-29676, 29678-29679, 29681-29683, 29686, 29688-29690, 29693-29697, 29700, 29702-29703, 29706-29707, 29711, 29715-29720, 29722-29723, 29725-29726, 29729-29730, 29733-29736, 29738-29739, 29743, 29745-29746, 29748, 29751-29752, 29754-29755, 29757-29759, 29761-29762, 29764-29765, 29768, 29770, 29772-29773, 29775-29782, 29784, 29787-29790, 29797, 29800-29801, 29803-29804, 29806-29807, 29809, 29811, 29813-29815, 29818, 29821-29827, 29829-29837, 29839-29843, 29845-29846, 29848-29850, 29852-29855, 29857, 29859, 29861-29866, 29868, 29873-29874, 29876-29886, 29889-29897, 29900, 29902-29903, 29905, 29907-29913, 29915-29919, 29921-29922, 29926, 29928, 29930-29935, 29937-29943, 29946-29948, 29953, 29955-29961, 29963-29965, 29968-29970, 29972-29978, 29981-29982, 29984-29986, 29989, 29994-29999, 30001, 30003-30010, 30012-30013, 30017, 30020-30021, 30023-30025, 30027-30033, 30035-30042, 30051-30056, 30058-30065, 30067, 30070, 30072, 30074-30079, 30081, 30086, 30088-30093, 30095, 30098-30102, 30105-30107, 30111-30112, 30119-30121, 30123-30125, 30128-30129, 30133, 30135, 30139-30140, 30142, 30144-30146, 30148, 30150, 30152-30154, 30156-30158, 30160, 30163-30170, 30172-30173, 30176-30178, 30181-30182, 30185, 30187, 30189-30190, 30192-30195, 30197-30200, 30206-30208, 30210-30211, 30214-30215, 30217-30230, 30232-30238, 30240-30246, 30250-30255, 30260-30261, 30263, 30266-30268, 30270-30273, 30275-30288, 30290-30292, 30296-30303, 30306, 30308-30310, 30312-30313, 30315, 30318-30328, 30330, 30335-30340, 30342-30343, 30347, 30349, 30351-30355, 30357-30358, 30363, 30366-30367, 30371, 30373-30383, 30385-30386, 30388-30389, 30391, 30394-30399, 30402-30403, 30405, 30408, 30410, 30412, 30414, 30416, 30421-30422, 30424-30432, 30434, 30437-30440, 30443, 30446-30447, 30450, 30454-30455, 30457-30459, 30461-30463, 30467-30469, 30471, 30473, 30475-30477, 30479-30480, 30482, 30485, 30487-30488, 30490-30495, 30497-30499, 30501-30504, 30506, 30508-30514, 30516-30518, 30520-30526, 30528, 30530-30531, 30535, 30538, 30541, 30544-30545, 30547, 30549-30550, 30552-30558, 30561, 30563-30564, 30566-30571, 30574, 30577, 30582-30583, 30585-30594, 30596-30597, 30600-30602, 30604-30611, 30613, 30615, 30618-30619, 30621, 30624-30630, 30632-30637, 30639-30640, 30642-30644, 30647-30653, 30655-30656, 30658-30659, 30661, 30663-30665, 30667, 30670, 30672-30675, 30678-30682, 30684-30687, 30689, 30691-30701, 30704-30706, 30708-30710, 30714-30718, 30721, 30723, 30725-30726, 30728-30731, 30734-30738, 30740-30741, 30743-30745, 30747, 30749, 30751-30754, 30756-30763, 30765-30768, 30773, 30775, 30777-30782, 30786, 30788-30789, 30791-30796, 30798-30799, 30801-30803, 30805-30806, 30808, 30810, 30812, 30814, 30816-30817, 30819-30824, 30828-30837, 30841-30843, 30845-30847, 30850, 30852-30853, 30860-30865, 30867-30872, 30875-30876, 30878, 30880-30884, 30886, 30890-30893, 30895-30897, 30899-30905, 30907, 30909, 30911-30913, 30915-30917, 30919, 30922-30923, 30925, 30929-30930, 30935, 30937-30939, 30942-30944, 30947-30950, 30952-30959, 30962, 30964, 30966-30969, 30971-30975, 30978, 30981, 30983, 30985, 30987-30992, 30994-30996, 30998, 31000-31003, 31005-31008, 31010-31011, 31014, 31017, 31019, 31021-31025, 31027, 31029-31031, 31033-31034, 31040, 31042-31044, 31046-31048, 31050-31054, 31057, 31059-31061, 31063-31067, 31069, 31072, 31075-31081, 31084, 31086-31090, 31094-31096, 31098-31100, 31102, 31104-31109, 31111, 31113, 31115-31117, 31119-31122, 31124-31127, 31129, 31139-31140, 31142, 31144-31149, 31151, 31153-31155, 31157, 31160, 31163-31164, 31166-31168, 31170-31176, 31178, 31181, 31183, 31186-31188, 31190-31192, 31194-31198, 31200-31201, 31203, 31205-31208, 31212, 31216-31219, 31221, 31223, 31225-31226, 31228-31229, 31231-31238, 31240-31241, 31244-31246, 31253, 31260-31261, 31264, 31268, 31271, 31273-31279, 31281, 31283-31285, 31287-31293, 31295, 31298-31300, 31303-31305, 31307, 31309, 31312-31315, 31320-31325, 31327-31329, 31331, 31337, 31340-31342, 31344-31348, 31350-31355, 31358, 31360, 31364-31366, 31368, 31370-31371, 31375-31389, 31391, 31394-31398, 31400-31405, 31407, 31409, 31413-31414, 31417, 31420, 31422-31423, 31425, 31427, 31429-31432, 31435, 31437-31438, 31440-31442, 31446-31447, 31450-31451, 31453-31454, 31458-31467, 31469, 31472-31477, 31479-31482, 31485-31491, 31493-31497, 31506-31507, 31509-31510, 31512-31514, 31516-31520, 31523, 31525-31528, 31530-31532, 31534, 31537-31547, 31549, 31551-31555, 31557-31566, 31568-31569, 31574, 31577-31581, 31583-31588, 31591-31594, 31597-31598, 31601-31606, 31608-31609, 31611-31615, 31617-31620, 31622-31629, 31631-31632, 31634-31635, 31637-31646, 31649-31655, 31657-31667, 31669-31671, 31674-31675, 31678-31681, 31683-31684, 31687-31691, 31693-31698, 31701-31703, 31705-31708, 31715-31731, 31733-31735, 31744-31746, 31754-31758, 31765, 31768-31769, 31771, 31774-31775, 31777, 31779-31780, 31782-31794, 31797-31798, 31800, 31802-31804, 31807-31809, 31812-31816, 31818, 31820-31821, 31826, 31829, 31831, 31833-31835, 31838, 31843, 31845-31846, 31848-31850, 31853-31854, 31857-31859, 31861-31866, 31871, 31873, 31876-31882, 31884-31892, 31894-31895, 31897, 31899-31900, 31903, 31906, 31910-31913, 31916-31918, 31921-31924, 31926, 31929, 31932-31934, 31937-31938, 31940-31943, 31945-31948, 31950-31952, 31954, 31956-31957, 31960-31964, 31967-31972, 31974-31976, 31978-31983, 31985, 31987, 31989, 31991-32001, 32003-32005, 32007-32011, 32013-32014, 32017-32021, 32023-32024, 32026-32029, 32033-32035, 32037, 32039-32041, 32044-32045, 32049-32051, 32055, 32058, 32061, 32063, 32065-32067, 32071, 32073-32079, 32083-32087, 32089, 32092-32098, 32100-32104, 32106-32108, 32110-32115, 32117-32122, 32125, 32127, 32129, 32132-32134, 32136-32138, 32141, 32143, 32145, 32147-32161, 32163-32165, 32167-32169, 32171, 32174-32176, 32180-32183, 32186-32187, 32190-32194, 32197-32201, 32205, 32207-32210, 32213-32214, 32216-32218, 32220-32229, 32231-32236, 32239-32242, 32245-32247, 32249-32253, 32255, 32257-32259, 32261, 32263, 32265, 32268-32269, 32273-32279, 32281, 32283-32286, 32291-32298, 32301, 32304-32309, 32312-32316, 32318-32322, 32326-32328, 32330, 32333, 32335, 32337-32338, 32340, 32342, 32345-32346, 32348, 32351-32352, 32355, 32357, 32359-32360, 32362, 32366-32368, 32370-32373, 32376, 32378-32379, 32381, 32383-32384, 32386, 32388-32389, 32391, 32394-32397, 32399-32400, 32403-32405, 32407, 32409-32410, 32412, 32414-32418, 32422, 32426, 32428-32430, 32432-32437, 32439, 32442, 32445-32449, 32451, 32454-32461, 32464, 32466-32469, 32471-32475, 32478-32479, 32482, 32484-32485, 32487-32489, 32491, 32493-32495, 32500, 32507-32514, 32517-32518, 32524, 32526-32529, 32531-32533, 32537-32539, 32541-32544, 32548-32549, 32552-32558, 32560-32568, 32571-32577, 32580-32581, 32583-32585, 32588-32589, 32591-32595, 32597, 32600-32607, 32609-32610, 32612-32614, 32619, 32621, 32623, 32626-32630, 32632, 32634-32637, 32642, 32644, 32646, 32648-32653, 32656, 32658, 32660, 32664, 32666-32671, 32674-32675, 32680, 32682-32683, 32687-32688, 32690-32692, 32694-32695, 32697, 32699-32700, 32702-32708, 32710-32712, 32714, 32716-32718, 32720, 32722, 32726-32728, 32730, 32732, 32736, 32738, 32742-32743, 32745-32749, 32751, 32753-32756, 32758-32759, 32761, 32763-32766, 32775, 32779, 32781-32783, 32786-32789, 32792-32794, 32797-32798, 32801-32803, 32805-32806, 32808, 32811, 32813-32815, 32817-32819, 32822-32823, 32826-32827, 32829-32830, 32832-32836, 32838, 32841-32842, 32845-32847, 32849-32850, 32852, 32854, 32856-32857, 32860-32861, 32866-32870, 32872-32877, 32879-32880, 32882-32883, 32885-32890, 32893, 32895-32896, 32898-32904, 32906, 32908-32909, 32911-32913, 32916-32917, 32924, 32926-32927, 32929-32941, 32945-32951, 32953-32956, 32958, 32961-32962, 32964-32968, 32971-32986, 32988-32995, 32997, 32999-33002, 33006-33008, 33012, 33014, 33016, 33020, 33024, 33027, 33030-33034, 33040, 33042, 33044-33046, 33048, 33051, 33055-33059, 33061-33062, 33064-33066, 33069, 33072-33074, 33076-33078, 33080-33093, 33095, 33097-33100, 33103-33104, 33106, 33108, 33111, 33113-33124, 33126-33134, 33136, 33138-33141, 33143, 33145, 33148-33155, 33157-33159, 33162, 33168-33170, 33172-33173, 33175-33178, 33180, 33182-33186, 33188-33191, 33193, 33196-33198, 33200-33201, 33203, 33207, 33209-33212, 33217, 33220-33222, 33227-33228, 33231-33236, 33238-33248, 33252-33258, 33260, 33262-33275, 33279, 33282-33283, 33285-33288, 33290, 33292, 33294, 33296, 33298-33299, 33301, 33303, 33306-33309, 33311, 33313-33320, 33322, 33324-33328, 33331-33335, 33338-33344, 33346-33353, 33355-33357, 33359-33361, 33364-33367, 33369, 33371-33372, 33375, 33377-33378, 33380, 33384, 33386-33388, 33390, 33392-33400, 33406-33412, 33417, 33420, 33422-33429, 33431, 33434-33438, 33440, 33443, 33445-33446, 33448-33450, 33452-33453, 33455-33458, 33460-33461, 33463-33466, 33468-33469, 33471, 33473-33474, 33477, 33480, 33484, 33486, 33489, 33491-33494, 33497, 33501-33504, 33506-33513, 33515, 33517-33522, 33528-33532, 33534, 33536, 33538, 33540-33542, 33551-33553, 33556-33560, 33562-33563, 33565, 33567, 33570-33575, 33578-33581, 33583-33585, 33587, 33589, 33594, 33596-33605, 33608, 33610, 33612-33620, 33622-33624, 33628-33632, 33635-33636, 33639-33640, 33643-33647, 33649-33655, 33660-33662, 33664-33668, 33672-33675, 33677-33681, 33685-33687, 33689-33691, 33693-33695, 33697-33698, 33701, 33703-33704, 33707-33709, 33711-33718, 33724, 33727, 33733, 33735, 33739-33740, 33742-33745, 33748, 33755-33757, 33760, 33762-33773, 33775-33778, 33780, 33784, 33787-33790, 33792, 33794-33795, 33798-33799, 33801-33803, 33805-33807, 33809, 33812-33814, 33816-33821, 33823-33831, 33833, 33836, 33840-33841, 33843-33844, 33846-33847, 33850, 33852-33862, 33864, 33867-33871, 33873-33878, 33881-33886, 33888-33890, 33894-33902, 33904-33905, 33908-33909, 33911-33919, 33921, 33923, 33925-33926, 33928-33932, 33934, 33937-33942, 33945, 33947-33948, 33950-33951, 33953-33955, 33957-33962, 33964, 33967, 33971, 33974-33976, 33978-33984, 33988-33990, 33992-33993, 33995-33996, 33998-34004, 34007-34009, 34011, 34016, 34020-34023, 34027, 34030-34031, 34033-34036, 34039-34043, 34045-34046, 34048-34049, 34052, 34054-34059, 34061-34064, 34066, 34068, 34072-34073, 34075, 34077-34083, 34085-34086, 34088-34089, 34093, 34095, 34097-34099, 34101-34104, 34107, 34109, 34111-34112, 34114-34118, 34121-34127, 34129, 34131, 34133, 34135-34143, 34145, 34149-34152, 34154-34158, 34160-34162, 34164-34166, 34170, 34172, 34174, 34181, 34183-34187, 34190-34191, 34194-34197, 34199, 34201-34202, 34205-34208, 34211, 34213, 34215, 34218-34219, 34221-34224, 34227, 34230-34231, 34233-34234, 34242, 34244-34246, 34253-34254, 34256, 34258, 34262, 34264-34268, 34271-34272, 34274, 34277, 34279-34282, 34285, 34287, 34289-34299, 34302-34303, 34306, 34308-34313, 34315-34318, 34323, 34327-34328, 34330-34334, 34338-34339, 34341, 34345-34346, 34348-34349, 34352-34356, 34358-34359, 34361-34364, 34367, 34370, 34373-34374, 34376-34380, 34386-34390, 34392-34394, 34396-34397, 34400, 34406, 34408-34414, 34416, 34418-34419, 34421, 34423-34426, 34428, 34430-34436, 34442, 34446, 34448, 34450-34453, 34455, 34458-34459, 34468, 34470-34477, 34479, 34481-34482, 34484-34486, 34488-34490, 34492-34497, 34500-34501, 34503, 34505-34512, 34514-34519, 34522-34527, 34531, 34534-34538, 34540-34548, 34550-34554, 34556, 34559-34560, 34562-34563, 34565-34566, 34568, 34570-34574, 34576-34577, 34579-34580, 34582, 34584-34588, 34590-34598, 34604, 34606, 34608, 34610, 34614, 34617, 34619, 34625-34626, 34628, 34630-34641, 34643-34644, 34646-34647, 34650-34655, 34657-34664, 34666, 34668-34673, 34675-34676, 34680-34683, 34685, 34687-34689, 34691-34695, 34698-34701, 34703-34707, 34710-34712, 34714-34719, 34722, 34726-34727, 34729-34732, 34734-34736, 34738, 34740-34742, 34750, 34752-34758, 34760-34764, 34768, 34776-34777, 34780-34781, 34786-34791, 34793-34803, 34805-34806, 34808-34813, 34816, 34818-34819, 34821-34822, 34824, 34831, 34833, 34835-34839, 34841-34847, 34849-34852, 34854-34859, 34862-34866, 34868-34870, 34872, 34875-34876, 34879, 34881-34883, 34885, 34894-34902, 34904-34905, 34908, 34911-34915, 34917, 34919, 34921-34922, 34924, 34928, 34930-34932, 34935-34947, 34950-34951, 34954-34955, 34959-34964, 34968-34970, 34972, 34974-34976, 34978-34982, 34985-34992, 34994-34995, 34997, 34999-35007, 35010-35013, 35018, 35021-35022, 35025-35035, 35038-35042, 35046-35048, 35052, 35054, 35056-35059, 35061-35068, 35070-35078, 35080-35081, 35083-35089, 35091-35092, 35096-35098, 35101, 35103-35107, 35109, 35111, 35113, 35115-35119, 35122-35124, 35128-35129, 35132-35133, 35135, 35138-35141, 35143-35144, 35146-35147, 35149-35153, 35155, 35157-35158, 35160-35169, 35171-35172, 35174-35177, 35179-35181, 35184, 35187-35192, 35195-35205, 35213-35214, 35217, 35219-35220, 35222-35227, 35230-35237, 35244, 35246, 35248, 35250, 35252-35255, 35257, 35261-35268, 35271-35272, 35277-35279, 35282, 35284-35285, 35288-35290, 35292, 35294-35295, 35297-35299, 35302, 35306-35307, 35312, 35315-35316, 35320, 35322, 35324-35325, 35328, 35330, 35332-35347, 35351, 35353-35354, 35357, 35359, 35361-35362, 35364-35366, 35368-35372, 35377, 35380-35381, 35383, 35385-35392, 35395-35399, 35401, 35404-35405, 35408-35410, 35412-35413, 35415, 35417-35420, 35425-35426, 35429-35435, 35437-35438, 35445-35447, 35449-35452, 35456-35457, 35459, 35461, 35464-35466, 35475, 35477-35481, 35486, 35488-35496, 35498-35499, 35502-35509, 35511, 35513-35524, 35526, 35529, 35531-35533, 35535-35537, 35539-35540, 35544, 35546-35559, 35562-35563, 35565-35567, 35570-35578, 35580, 35582-35583, 35585-35586, 35588, 35591, 35593-35598, 35600-35604, 35610-35613, 35615, 35617-35627, 35629, 35631-35639, 35642, 35644-35648, 35650, 35653, 35655-35660, 35662-35663, 35665, 35668, 35671, 35674-35675, 35678, 35681-35689, 35691-35693, 35695-35697, 35699-35704, 35706-35708, 35710-35741, 35744-35748, 35752-35754, 35756-35757, 35759-35762, 35768, 35770-35781, 35783-35787, 35789-35791, 35793-35796, 35798-35804, 35806, 35808-35811, 35813, 35815, 35817, 35819-35821, 35823-35828, 35831-35833, 35835-35837, 35839-35849, 35851-35852, 35854-35858, 35861-35862, 35864-35865, 35868-35869, 35871, 35873-35879, 35881, 35884-35886, 35888, 35891, 35893, 35895, 35899, 35901, 35903, 35905-35906, 35908-35918, 35920-35921, 35923, 35925-35931, 35935, 35937, 35939, 35941, 35947-35948, 35951, 35953-35954, 35957-35967, 35969, 35971-35974, 35976, 35978-35980, 35983-35987, 35991-35992, 35994, 35998-36001, 36003, 36005, 36007, 36009-36011, 36013-36018, 36020-36021, 36023-36027, 36030-36034, 36037-36038, 36044-36046, 36049-36051, 36053, 36058-36059, 36061-36066, 36069-36071, 36073-36074, 36077, 36079-36087, 36094, 36096-36097, 36099-36101, 36103, 36107, 36111-36112, 36114, 36116-36119, 36122-36124, 36126-36127, 36129-36137, 36140-36141, 36144, 36146, 36150, 36153-36158, 36160-36162, 36164-36169, 36171-36172, 36175, 36177-36179, 36184, 36186-36192, 36195, 36206, 36208-36209, 36212, 36214-36215, 36218-36222, 36226, 36229, 36231-36232, 36234, 36236-36238, 36240-36243, 36245, 36247, 36249-36260, 36262-36267, 36269-36273, 36276-36278, 36280-36281, 36284-36286, 36289, 36291, 36293, 36296, 36299-36300, 36302-36304, 36306-36307, 36311, 36313, 36316, 36318-36322, 36325-36331, 36334-36344, 36346, 36349, 36351-36353, 36355, 36357-36358, 36360-36361, 36363-36367, 36369-36371, 36374, 36376-36378, 36380-36381, 36388-36390, 36394-36395, 36398, 36401-36407, 36409, 36412, 36414-36416, 36419-36420, 36422-36423, 36425-36426, 36430, 36432-36433, 36435-36446, 36449, 36453, 36455-36456, 36458-36459, 36461, 36465, 36468, 36472-36474, 36476-36479, 36482, 36484, 36486-36490, 36492-36495, 36497-36498, 36500, 36502-36504, 36506-36508, 36510, 36515-36519, 36523, 36525, 36527-36528, 36530-36533, 36538, 36543, 36545, 36548-36549, 36551-36553, 36555-36560, 36564-36567, 36569, 36574-36576, 36579-36580, 36584-36589, 36591-36593, 36595, 36600-36605, 36607-36612, 36614-36619, 36622-36624, 36627-36637, 36639-36641, 36643-36645, 36647, 36650-36654, 36656, 36659-36660, 36662-36666, 36668-36669, 36671-36672, 36674-36683, 36686, 36689-36696, 36698-36701, 36704, 36708-36712, 36714, 36717, 36719-36723, 36725, 36727-36731, 36733-36743, 36745-36748, 36750-36753, 36755, 36759, 36763-36764, 36770-36771, 36773, 36776, 36779, 36785, 36788-36791, 36793-36795, 36798-36800, 36802-36803, 36807, 36809-36815, 36818, 36820, 36823-36825, 36830-36839, 36842-36846, 36848-36851, 36853, 36858-36862, 36864, 36866-36867, 36869-36875, 36879-36885, 36887-36888, 36890-36891, 36893-36894, 36896, 36898-36899, 36903-36904, 36906-36907, 36911, 36915, 36917-36921, 36923, 36927-36928, 36934, 36937, 36940, 36942-36943, 36947, 36950, 36953, 36955-36956, 36958-36959, 36961, 36963, 36967-36968, 36970-36971, 36975, 36977, 36984-36986, 36993-36996, 36999-37003, 37005, 37007-37009, 37011-37013, 37016-37017, 37019, 37021-37023, 37025-37029, 37031-37032, 37034, 37036, 37040, 37042-37046, 37049-37050, 37052-37055, 37057, 37059, 37061-37062, 37067, 37070-37074, 37076, 37078-37081, 37083-37092, 37095-37096, 37098-37099, 37102-37104, 37106-37108, 37111-37113, 37116, 37118-37123, 37125-37127, 37129-37130, 37132, 37134-37135, 37137-37144, 37147-37151, 37153-37155, 37157, 37160, 37162, 37166-37168, 37171-37174, 37176, 37180, 37182-37187, 37190-37196, 37198-37202, 37206, 37208-37212, 37214-37219, 37222, 37225-37229, 37232-37237, 37239-37240, 37242-37246, 37250, 37252-37256, 37258-37263, 37265-37269, 37271-37272, 37276-37278, 37282, 37284, 37289-37292, 37294-37297, 37299-37303, 37305-37308, 37310-37311, 37313-37315, 37317, 37319-37322, 37324, 37326, 37329-37331, 37333-37337, 37340, 37342-37344, 37346-37348, 37350-37354, 37356, 37358-37362, 37364, 37367-37369, 37371-37373, 37375, 37379, 37381, 37383, 37385-37399, 37401-37403, 37410-37420, 37424-37431, 37434-37435, 37438-37439, 37441, 37443-37445, 37448, 37450, 37452, 37460, 37466, 37469-37471, 37475, 37477, 37481-37483, 37486-37488, 37490-37495, 37497-37498, 37500-37501, 37503-37508, 37510, 37512, 37514-37515, 37519-37520, 37522, 37524-37526, 37528-37530, 37534, 37536-37539, 37547, 37549-37550, 37552-37554, 37556-37557, 37559-37561, 37563-37567, 37569-37571, 37575, 37578-37588, 37591, 37593-37601, 37603, 37606-37607, 37610-37616, 37618-37623, 37625-37627, 37630-37632, 37634-37635, 37637, 37640-37641, 37647-37648, 37651-37660, 37662-37664, 37666-37670, 37673, 37676, 37680, 37682-37687, 37691-37695, 37698, 37701-37703, 37707-37708, 37710, 37712-37725, 37727-37741, 37743-37746, 37753, 37755-37757, 37760, 37764-37771, 37773, 37775-37778, 37780, 37784, 37788, 37790-37791, 37794-37800, 37804, 37806, 37808, 37810-37812, 37814-37820, 37824-37826, 37828-37829, 37831, 37835, 37841-37846, 37853-37854, 37856-37857, 37862-37863, 37865-37866, 37868-37869, 37874-37879, 37881-37883, 37887-37888, 37890-37891, 37895, 37897-37901, 37903-37908, 37910, 37912-37918, 37920-37921, 37923-37924, 37928, 37930-37935, 37937-37939, 37941-37942, 37944-37945, 37949, 37952, 37955-37960, 37965-37966, 37970-37973, 37975-37976, 37978-37979, 37982-37983, 37985-37989, 37991-38000, 38002-38005, 38008, 38019, 38021, 38023-38024, 38026, 38028-38030, 38032, 38034-38035, 38037, 38039, 38041, 38044, 38047, 38049-38052, 38054-38058, 38060, 38062-38068, 38070-38079, 38081-38084, 38087, 38089-38090, 38092-38099, 38101, 38103, 38105-38106, 38109-38111, 38114, 38117-38130, 38133, 38137-38142, 38144-38147, 38149-38158, 38160-38161, 38163-38164, 38167, 38169-38171, 38173-38175, 38178-38180, 38182, 38184-38186, 38188, 38190, 38192-38194, 38198, 38200-38207, 38210-38212, 38215-38222, 38224-38240, 38242-38244, 38246, 38249, 38253-38255, 38257-38259, 38266, 38268-38270, 38273-38276, 38278-38281, 38283-38284, 38286, 38290-38291, 38293-38301, 38305-38309, 38312-38313, 38315, 38317, 38321-38327, 38329-38331, 38333, 38335-38341, 38343, 38345, 38347, 38349, 38351, 38353-38356, 38360-38361, 38364, 38366, 38368-38373, 38376-38380, 38382, 38385-38390, 38392-38395, 38398, 38400-38402, 38404, 38407-38408, 38411, 38413, 38415, 38418, 38420, 38422, 38426, 38432, 38434-38440, 38445, 38447, 38450, 38453-38456, 38458-38461, 38464, 38466-38474, 38482-38484, 38486-38490, 38493-38495, 38497-38500, 38502-38505, 38507-38521, 38524, 38526, 38528, 38533, 38538-38540, 38542, 38545-38548, 38553-38554, 38556-38566, 38568, 38571-38572, 38576-38579, 38582-38586, 38588, 38592-38599, 38601-38606, 38608, 38611-38613, 38615, 38618-38619, 38621, 38623, 38627, 38629-38630, 38633, 38635, 38637, 38639-38643, 38645-38649, 38652-38654, 38658, 38660-38662, 38666-38667, 38669-38672, 38674, 38677, 38681-38682, 38685-38689, 38691, 38694, 38696-38704, 38707-38709, 38711-38718, 38721-38722, 38724, 38726-38740, 38742-38744, 38747-38748, 38750-38756, 38758-38762, 38764-38765, 38768, 38771, 38773, 38775, 38777-38778, 38780-38783, 38785-38787, 38789-38791, 38793-38797, 38800, 38805-38811, 38817-38818, 38820, 38823, 38827, 38830, 38832-38833, 38835-38837, 38839-38845, 38849-38853, 38855, 38857-38858, 38860-38862, 38865, 38867, 38869-38873, 38875-38876, 38879-38881, 38883, 38888-38892, 38894-38909, 38913, 38915, 38917-38921, 38923, 38925-38929, 38931-38933, 38936-38941, 38943, 38945, 38948-38949, 38952, 38954-38955, 38957, 38961, 38964-38967, 38970, 38973, 38975-38979, 38982, 38985, 38987-38991, 38993-38994, 38996, 39000-39003, 39007, 39010-39011, 39013, 39015-39016, 39022-39032, 39034, 39036-39039, 39043-39045, 39047-39048, 39050-39056, 39058-39059, 39062, 39064, 39066, 39068, 39070-39074, 39076-39078, 39081-39082, 39084, 39086, 39089-39092, 39095, 39097-39100, 39102, 39104-39106, 39108-39112, 39114-39119, 39122, 39126, 39128-39136, 39139, 39141, 39143-39145, 39148-39150, 39153-39158, 39160, 39162-39165, 39167-39175, 39177-39178, 39180-39185, 39188-39191, 39195, 39197-39200, 39202-39203, 39206-39212, 39214, 39216-39218, 39220-39224, 39226-39228, 39230, 39232-39234, 39236-39237, 39241, 39243, 39245-39246, 39248, 39251-39252, 39256, 39258, 39260-39261, 39263-39264, 39267, 39269-39270, 39272, 39274-39275, 39277-39278, 39280-39282, 39284-39289, 39292-39304, 39307-39309, 39311-39314, 39316-39320, 39323-39329, 39331, 39333-39336, 39339-39342, 39345, 39348, 39350, 39352-39355, 39357-39359, 39361-39362, 39366-39372, 39375-39376, 39380-39383, 39386-39409, 39411, 39413-39415, 39417-39421, 39424-39427, 39429, 39431-39432, 39435-39437, 39439, 39441-39445, 39447-39450, 39452-39453, 39456, 39458-39461, 39464-39465, 39467, 39469-39475, 39478-39480, 39483-39487, 39489-39493, 39495, 39497-39499, 39501-39504, 39506, 39509, 39511-39513, 39515-39518, 39521, 39524-39526, 39529-39531, 39533-39535, 39539-39541, 39547, 39550-39556, 39558-39560, 39562, 39564-39569, 39571-39575, 39577, 39579, 39582-39584, 39586-39596, 39598-39603, 39605, 39607-39610, 39612-39617, 39619-39621, 39623-39625, 39629-39637, 39639-39641, 39643, 39645-39646, 39650, 39655, 39657-39658, 39660-39663, 39666-39672, 39674, 39676-39678, 39680, 39682-39683, 39686, 39688-39690, 39692, 39694-39696, 39698-39699, 39702, 39704-39706, 39708, 39710, 39712-39714, 39718-39721, 39723, 39725, 39727-39732, 39734-39735, 39737-39743, 39745, 39749, 39751-39756, 39759, 39761-39762, 39765, 39767-39774, 39776, 39778-39783, 39785-39791, 39793, 39795-39796, 39798, 39800-39803, 39805, 39807-39808, 39811, 39813, 39816-39820, 39825-39826, 39829-39833, 39835, 39837-39841, 39847-39849, 39851-39860, 39864-39866, 39869, 39872-39875, 39878-39881, 39883-39886, 39888-39889, 39893-39897, 39899-39900, 39902, 39904, 39907-39909, 39911-39913, 39915, 39918-39919, 39921, 39923, 39925-39931, 39939, 39943-39944, 39946-39952, 39954, 39958, 39960-39962, 39965, 39967-39970, 39973-39974, 39977-39981, 39983-39996, 40000-40010, 40012-40016, 40019-40021, 40024-40025, 40027-40028, 40032, 40035, 40038-40040, 40045-40051, 40055-40057, 40059-40060, 40062-40064, 40066, 40068-40071, 40074, 40078, 40081, 40083-40086, 40088-40093, 40097, 40099-40100, 40102-40103, 40110, 40115, 40118-40123, 40126-40130, 40132-40134, 40137, 40141, 40143, 40145-40148, 40150-40151, 40153-40157, 40161, 40163-40165, 40168-40170, 40174-40192, 40194, 40197-40199, 40201-40205, 40207-40213, 40215-40217, 40219-40231, 40234-40240, 40242, 40244-40252, 40254, 40256-40259, 40261, 40263, 40265-40275, 40277-40278, 40281, 40285, 40287, 40289-40291, 40293, 40300-40301, 40304, 40306-40309, 40311-40316, 40318, 40322-40327, 40329, 40331, 40338-40340, 40345-40347, 40352-40354, 40356-40362, 40365-40366, 40368-40377, 40379, 40381-40392, 40395-40397, 40399-40407, 40412-40423, 40425, 40427-40429, 40432-40437, 40439-40444, 40447, 40451-40452, 40454-40455, 40457, 40461-40462, 40467-40470, 40472, 40477, 40480-40482, 40484, 40486-40487, 40489-40490, 40494, 40496, 40498-40499, 40503, 40506, 40508, 40510, 40516, 40519, 40522-40523, 40525, 40527, 40530, 40532, 40536, 40538, 40540-40552, 40556-40557, 40561, 40563-40565, 40567-40570, 40573, 40577, 40579, 40581-40582, 40585-40587, 40589, 40593-40595, 40598-40602, 40604-40609, 40613-40615, 40617-40620, 40622, 40625-40630, 40632-40634, 40636-40637, 40639, 40642-40643, 40646, 40649, 40652, 40654, 40656-40657, 40659, 40661, 40665-40671, 40675, 40677, 40679-40683, 40689-40691, 40693, 40695-40709, 40714-40715, 40719-40720, 40722-40724, 40726-40731, 40733-40737, 40739-40742, 40746, 40748-40752, 40754-40756, 40758-40761, 40764, 40769-40772, 40774-40776, 40783-40785, 40788, 40791, 40794-40795, 40797, 40799-40801, 40803-40808, 40811, 40813, 40815-40816, 40818, 40820, 40823, 40825-40831, 40833-40834, 40836-40837, 40839, 40842-40847, 40850-40852, 40854-40856, 40859-40860, 40862, 40864-40873, 40875-40882, 40884-40891, 40893-40894, 40898-40904, 40906-40916, 40918, 40920-40926, 40928-40929, 40933-40935, 40937-40945, 40948-40949, 40951-40953, 40956, 40960-40962, 40964-40967, 40969-40971, 40974-40978, 40980, 40983, 40987, 40989, 40992-40999, 41001-41005, 41008-41009, 41012-41014, 41016-41020, 41022-41038, 41041, 41045-41047, 41049-41054, 41056, 41058-41064, 41068-41069, 41072, 41074-41083, 41085-41086, 41088-41090, 41095-41097, 41099-41104, 41106-41107, 41109-41111, 41115-41118, 41121, 41123-41124, 41126-41129, 41132-41134, 41138, 41143, 41145-41149, 41152-41156, 41162, 41164-41168, 41170-41172, 41176-41189, 41191, 41193-41194, 41196-41200, 41203, 41206, 41208-41210, 41213-41223, 41226-41227, 41230-41236, 41238-41239, 41242-41243, 41245-41252, 41254-41261, 41263-41282, 41284-41286, 41288, 41291-41294, 41297, 41301, 41305, 41307-41312, 41315-41319, 41323-41328, 41330, 41334, 41338, 41340-41342, 41344-41347, 41349, 41351-41352, 41355, 41357-41359, 41361, 41363-41371, 41374, 41376, 41379, 41381-41383, 41385-41386, 41388-41394, 41399, 41401, 41406, 41409, 41412, 41415-41417, 41419-41424, 41426, 41428, 41430, 41436, 41439-41442, 41445-41446, 41448, 41450-41453, 41455-41456, 41458, 41460-41461, 41465, 41467-41468, 41471, 41473-41476, 41479-41480, 41482, 41488, 41490-41503, 41506-41507, 41509, 41511-41512, 41514-41519, 41521, 41524, 41526-41528, 41530-41535, 41538, 41542-41543, 41545, 41547, 41551, 41553-41554, 41557, 41559-41565, 41567, 41570-41575, 41578, 41580-41582, 41588-41591, 41593-41594, 41597-41599, 41602-41609, 41612-41613, 41615-41618, 41621-41622, 41625-41626, 41628-41629, 41633-41638, 41640-41642, 41644, 41646-41647, 41649-41650, 41656, 41658, 41661-41665, 41670-41671, 41675-41681, 41683-41685, 41688, 41692, 41695, 41697, 41699-41701, 41704-41707, 41709-41711, 41715-41717, 41719-41723, 41726, 41728, 41730-41731, 41733-41735, 41739-41740, 41742-41745, 41750-41752, 41754-41758, 41760-41765, 41767, 41771-41772, 41774-41775, 41779-41780, 41783, 41786, 41788-41799, 41801, 41805-41807, 41810-41812, 41814-41816, 41818, 41820, 41822, 41825-41833, 41836-41838, 41841-41842, 41844, 41846-41847, 41849-41852, 41857-41859, 41863, 41866-41867, 41871-41872, 41875-41883, 41885-41889, 41891, 41893-41895, 41897, 41900, 41907-41908, 41910, 41912-41913, 41915-41917, 41919, 41921, 41924-41926, 41928-41935, 41937, 41940-41941, 41943-41944, 41948-41949, 41951-41952, 41954-41957, 41959-41967, 41969-41976, 41978-41980, 41982-41983, 41985-41987, 41991-41996, 41998-42004, 42006-42008, 42015, 42017, 42020, 42025-42026, 42028, 42031-42033, 42036, 42039-42041, 42043-42044, 42046, 42050, 42052, 42054-42056, 42058-42059, 42061, 42063, 42066-42067, 42069-42070, 42073, 42079-42080, 42082, 42090-42091, 42095, 42099, 42101-42103, 42106, 42108, 42110-42112, 42114, 42116-42117, 42120-42122, 42124, 42126, 42133-42136, 42138, 42142-42144, 42151, 42154, 42157-42158, 42160-42164, 42166-42176, 42181-42186, 42188, 42190, 42193-42198, 42201, 42204-42209, 42213-42214, 42218, 42220-42225, 42227-42233, 42238, 42240-42243, 42250-42251, 42254-42255, 42257-42259, 42262, 42266, 42268-42269, 42276-42278, 42280-42283, 42285, 42290-42295, 42299-42301, 42306-42307, 42309-42317, 42322, 42326-42327, 42329, 42333-42336, 42338-42340, 42343-42344, 42346, 42350-42354, 42356, 42358, 42360-42362, 42364-42367, 42371-42384, 42388-42391, 42395, 42397, 42399-42402, 42405-42407, 42412, 42414-42415, 42417-42422, 42424, 42426-42427, 42429-42430, 42432-42433, 42435-42437, 42440, 42442, 42445-42447, 42449-42452, 42454, 42457-42468, 42470-42471, 42474-42475, 42478-42485, 42487-42492, 42495-42496, 42498-42499, 42502-42503, 42505-42506, 42508-42511, 42515-42517, 42520-42523, 42525, 42528-42543, 42546-42547, 42549-42552, 42556-42558, 42560-42574, 42576-42581, 42585-42587, 42590-42591, 42593, 42595, 42598-42602, 42605-42606, 42608, 42611-42614, 42617, 42620, 42622, 42626, 42629, 42631-42637, 42642, 42644-42645, 42647, 42649-42652, 42656, 42658, 42660-42663, 42665-42667, 42669-42670, 42672-42676, 42678-42684, 42686-42687, 42689, 42692-42701, 42703-42709, 42712, 42714, 42717-42722, 42724-42725, 42727-42735, 42740-42741, 42745, 42752, 42754-42756, 42759-42760, 42762-42765, 42769-42771, 42773-42774, 42776-42781, 42783, 42786-42790, 42793-42796, 42798-42803, 42805-42806, 42808-42812, 42814-42815, 42817, 42819-42824, 42827-42838, 42843-42845, 42848, 42851-42853, 42859-42861, 42866, 42868-42870, 42872, 42875, 42880-42881, 42883, 42887-42888, 42890-42891, 42893, 42896, 42898, 42900-42902, 42904, 42906, 42908-42910, 42912, 42915, 42917, 42921-42923, 42930-42932, 42935-42936, 42938-42939, 42941-42942, 42945-42946, 42948, 42950, 42952-42953, 42955-42968, 42972-42974, 42976-42981, 42983-42986, 42988-42993, 42995-43000, 43004, 43007-43008, 43011-43013, 43017-43023, 43026-43027, 43030-43032, 43034, 43036-43037, 43039, 43045-43046, 43052-43055, 43057, 43059-43065, 43068-43071, 43075, 43078, 43082-43083, 43085, 43088-43099, 43101-43102, 43107-43112, 43117-43119, 43122-43123, 43126-43129, 43131-43132, 43135-43141, 43143, 43145, 43148-43153, 43155-43156, 43159, 43161, 43163-43164, 43167-43172, 43178, 43180-43182, 43185-43189, 43191, 43193, 43195, 43197-43199, 43201-43204, 43206-43212, 43216, 43218-43219, 43221-43223, 43226-43231, 43233, 43235-43237, 43239-43242, 43244, 43246-43249, 43251-43252, 43254-43255, 43257, 43260, 43265-43266, 43268-43270, 43272-43280, 43282-43285, 43288, 43290-43292, 43294-43300, 43303-43305, 43307-43311, 43314, 43316-43318, 43320, 43323-43336, 43338, 43341, 43343-43353, 43357, 43359, 43363-43372, 43374, 43376-43377, 43382, 43386-43388, 43391, 43394-43395, 43398-43399, 43402-43407, 43409, 43411-43412, 43414, 43416-43421, 43423, 43428-43430, 43432-43433, 43436, 43438-43439, 43446, 43450-43451, 43453-43454, 43458-43460, 43463, 43465-43467, 43471-43477, 43479-43482, 43484-43485, 43488, 43491-43492, 43495-43496, 43498-43500, 43503-43504, 43506-43512, 43516-43519, 43522, 43533-43535, 43537-43540, 43543, 43547-43548, 43551-43553, 43556, 43558-43560, 43562-43567, 43569, 43572-43576, 43579-43580, 43583-43589, 43591-43594, 43596, 43598-43599, 43605, 43607-43610, 43613-43614, 43617-43618, 43620-43622, 43624-43625, 43627-43628, 43630-43631, 43633-43635, 43639-43640, 43642-43644, 43646-43649, 43651-43653, 43656, 43660-43665, 43667-43680, 43683-43688, 43690-43692, 43694-43695, 43698, 43700-43703, 43705-43717, 43719, 43721, 43725-43753, 43756-43758, 43760-43762, 43768-43770, 43772-43777, 43779-43781, 43784-43786, 43788-43789, 43793-43794, 43796-43798, 43800-43802, 43804, 43806-43808, 43813, 43815-43817, 43819-43820, 43825, 43828-43831, 43836, 43838, 43840-43844, 43848, 43850-43851, 43853-43855, 43862-43866, 43871, 43874, 43876-43878, 43880-43883, 43885, 43889, 43891-43894, 43896-43899, 43902-43904, 43906-43912, 43914-43916, 43919, 43921-43929, 43931-43933, 43935-43939, 43941-43945, 43948-43950, 43952, 43954-43955, 43957-43961, 43964-43967, 43970-43974, 43976-43977, 43980-43991, 43993, 43996, 43998-44010, 44013, 44015-44018, 44021-44024, 44026-44028, 44030, 44032-44033, 44035-44038, 44042-44045, 44048, 44052-44056, 44059-44060, 44062-44067, 44069-44077, 44079, 44081, 44086-44088, 44090-44091, 44093-44094, 44099-44102, 44104-44105, 44108-44111, 44113-44117, 44119-44125, 44127-44129, 44133, 44137, 44141-44142, 44146-44148, 44150-44151, 44155, 44157-44162, 44164-44170, 44173-44179, 44182, 44186, 44189, 44192, 44195, 44198, 44200-44202, 44204, 44208, 44211-44215, 44217-44218, 44220-44222, 44224-44225, 44227-44232, 44234, 44238, 44240, 44243-44244, 44247-44249, 44251, 44253-44259, 44263, 44267, 44269, 44271-44272, 44274, 44278, 44282-44283, 44285-44287, 44290-44293, 44299-44301, 44303, 44305-44306, 44308-44318, 44321-44323, 44326, 44328-44332, 44334, 44336, 44338, 44340-44362, 44364-44365, 44367-44369, 44372, 44374-44376, 44378, 44380-44384, 44386, 44388, 44392-44396, 44398-44399, 44401, 44403-44408, 44410, 44412-44419, 44422-44427, 44429, 44433, 44435-44436, 44438-44439, 44443, 44445, 44449-44452, 44454-44460, 44462, 44464, 44466-44470, 44472, 44474, 44476-44490, 44495-44505, 44507-44515, 44517-44518, 44520-44521, 44524-44527, 44529-44530, 44532-44535, 44538-44544, 44546-44548, 44550-44554, 44557-44560, 44564-44573, 44577, 44579-44581, 44583-44586, 44591-44596, 44599-44600, 44602-44603, 44605, 44607-44616, 44620-44621, 44624-44626, 44630, 44636-44646, 44649, 44651-44653, 44655-44656, 44661-44668, 44670-44672, 44674-44679, 44682-44689, 44691-44692, 44694-44700, 44704-44705, 44708, 44710-44711, 44715-44717, 44719, 44721, 44723-44726, 44728-44738, 44740, 44745-44746, 44751-44754, 44756-44758, 44760-44761, 44766-44767, 44769-44771, 44773-44775, 44781, 44783, 44785-44789, 44791-44793, 44795-44796, 44801-44806, 44809, 44811-44813, 44815-44818, 44823, 44825, 44827, 44832-44834, 44836-44842, 44844-44847, 44851, 44853, 44859-44861, 44863-44865, 44868-44874, 44876-44877, 44879-44881, 44887, 44889, 44894, 44896-44897, 44899-44907, 44909, 44913-44915, 44918-44919, 44921-44934, 44936-44945, 44947-44955, 44959, 44961-44962, 44964-44965, 44968, 44970-44972, 44974, 44976-44978, 44980-44982, 44984, 44986-44988, 44990, 44993-44995, 44999-45000, 45002, 45004, 45007, 45010-45011, 45014-45015, 45018, 45020-45026, 45028-45030, 45032, 45034-45035, 45038, 45040-45046, 45048-45050, 45052, 45054-45057, 45059, 45064, 45066-45067, 45069-45070, 45072-45073, 45075, 45078-45082, 45084-45085, 45087-45089, 45091-45093, 45095, 45098-45102, 45104-45105, 45108-45110, 45112-45114, 45116-45117, 45120-45126, 45131, 45133-45134, 45136-45140, 45142-45144, 45146, 45148-45150, 45153, 45156-45159, 45165-45168, 45170-45171, 45173-45174, 45176-45179, 45181-45182, 45184, 45186-45188, 45191-45195, 45197-45198, 45200-45203, 45210, 45213-45226, 45229-45230, 45232-45236, 45238-45240, 45247, 45256-45263, 45265, 45267-45269, 45272-45274, 45276, 45279-45293, 45295-45298, 45301-45307, 45312, 45314-45316, 45318, 45320, 45323, 45330, 45332-45335, 45337-45338, 45340-45345, 45347-45348, 45351-45354, 45357-45358, 45364-45369, 45371-45372, 45376, 45379, 45381-45382, 45384-45386, 45390, 45396-45397, 45399-45401, 45403-45405, 45407-45412, 45416-45417, 45419, 45421, 45423-45431, 45433-45434, 45437-45440, 45442-45450, 45452, 45454-45455, 45457, 45459-45466, 45470, 45472-45473, 45477, 45480, 45482, 45484-45486, 45489-45491, 45493, 45495-45497, 45501, 45503-45507, 45509-45511, 45513-45518, 45520, 45523, 45525-45531, 45533-45540, 45542, 45544-45549, 45551-45553, 45556-45563, 45566-45569, 45571-45578, 45580, 45582, 45584-45586, 45589-45591, 45593, 45595-45596, 45598-45599, 45602-45603, 45605-45612, 45614, 45616, 45618-45624, 45627-45628, 45630, 45632-45633, 45635, 45639-45640, 45642-45647, 45649-45652, 45655, 45657-45658, 45660, 45662-45663, 45666, 45668, 45673-45674, 45677-45678, 45680-45681, 45684, 45686-45688, 45694-45704, 45706-45711, 45715-45717, 45719, 45721, 45724-45725, 45727-45731, 45734, 45736-45737, 45739-45741, 45743-45745, 45748-45763, 45765-45770, 45772, 45774-45775, 45777-45778, 45780-45781, 45784-45785, 45788-45792, 45794-45796, 45800, 45803, 45805, 45807, 45810-45811, 45813-45818, 45821-45827, 45829-45834, 45836, 45838-45841, 45843-45851, 45853, 45855-45859, 45862, 45864, 45867, 45869-45870, 45874-45878, 45880-45882, 45884-45886, 45890-45893, 45895-45898, 45903-45904, 45906-45908, 45911-45913, 45915-45924, 45926, 45928-45930, 45932, 45935, 45937-45941, 45943-45948, 45950, 45952-45953, 45955, 45957-45958, 45960, 45962, 45964, 45966-45974, 45978, 45980, 45982-45983, 45985-45987, 45989, 45991-45992, 45995, 45998, 46001, 46003, 46005-46013, 46019-46026, 46029, 46032-46036, 46039, 46041-46042, 46046-46048, 46050, 46052, 46054-46057, 46060, 46064-46072, 46077-46079, 46083, 46086-46088, 46090-46094, 46097-46099, 46101-46104, 46106, 46108-46113, 46115-46117, 46120-46121, 46123-46127, 46129-46130, 46134-46141, 46146-46153, 46156-46163, 46165, 46169-46174, 46178, 46180-46186, 46188, 46191-46192, 46194-46195, 46197, 46204-46207, 46209-46218, 46220-46227, 46229-46233, 46237-46240, 46244-46249, 46251-46254, 46259, 46261-46263, 46265-46266, 46269, 46271, 46273, 46275-46276, 46279-46282, 46285-46287, 46291-46292, 46294-46295, 46297-46299, 46301, 46305-46309, 46311-46312, 46314, 46316, 46318, 46320, 46323, 46328-46329, 46333-46334, 46336-46343, 46345, 46347-46356, 46361-46362, 46366-46367, 46369-46371, 46373-46375, 46377-46379, 46381-46383, 46387, 46390-46391, 46393-46395, 46397-46399, 46403, 46405, 46408-46410, 46412-46416, 46421-46423, 46425-46428, 46430-46436, 46438-46441, 46443-46446, 46451, 46453-46454, 46456, 46459-46460, 46462-46467, 46470-46471, 46473-46475, 46477, 46480-46481, 46484-46490, 46492-46496, 46498, 46500-46502, 46504-46505, 46507, 46509-46511, 46514-46515, 46519, 46521-46524, 46526-46530, 46532-46537, 46543-46548, 46550, 46553-46554, 46556-46559, 46561-46564, 46566-46567, 46569-46577, 46579-46581, 46585, 46590, 46592-46593, 46597-46598, 46600-46605, 46608-46609, 46612, 46614-46618, 46620-46628, 46632-46637, 46639-46643, 46645-46647, 46653-46655, 46657, 46659-46660, 46664, 46669-46671, 46673, 46675, 46678-46680, 46683-46686, 46688, 46693, 46695-46696, 46698-46702, 46705-46709, 46711-46712, 46714-46715, 46719, 46721-46723, 46727-46730, 46732-46733, 46736-46740, 46746-46747, 46749, 46751-46752, 46754, 46757-46759, 46765, 46767, 46769, 46771, 46775, 46777, 46779-46780, 46782, 46786-46787, 46789-46792, 46794-46796, 46799-46800, 46802-46804, 46806, 46809, 46811, 46813, 46815, 46817, 46821-46824, 46829-46837, 46842-46847, 46850-46851, 46853-46858, 46860-46862, 46864, 46866, 46868-46882, 46884, 46886, 46894-46896, 46898, 46903, 46905-46908, 46910, 46914-46915, 46917, 46922-46927, 46929, 46932-46938, 46940-46944, 46946-46951, 46954-46955, 46957-46961, 46965-46966, 46968-46969, 46971, 46973-46974, 46976-46978, 46981, 46984-46985, 46989, 46991-46994, 46996-46999, 47001, 47003-47005, 47009-47012, 47014-47024, 47027-47030, 47032-47034, 47037-47039, 47042, 47044, 47046-47052, 47055-47057, 47061, 47063-47067, 47069-47070, 47072-47073, 47075-47080, 47082-47086, 47088-47089, 47091-47092, 47094-47096, 47098-47105, 47107-47112, 47114, 47116-47120, 47122-47124, 47128-47132, 47134, 47136, 47138-47140, 47142-47143, 47145-47149, 47153-47156, 47158, 47161-47171, 47173-47178, 47180, 47182, 47184-47187, 47191-47192, 47195, 47198, 47200-47211, 47213, 47215, 47218, 47220-47221, 47225-47228, 47232-47234, 47238, 47240-47243, 47245-47246, 47248-47253, 47256-47264, 47267, 47269-47270, 47272, 47275, 47277, 47281-47284, 47286, 47288-47294, 47297-47301, 47303-47308, 47310-47312, 47319, 47321, 47326, 47329-47333, 47335-47340, 47343, 47345-47358, 47360-47365, 47369-47376, 47378-47381, 47383, 47385-47389, 47391-47393, 47395, 47398-47399, 47402-47406, 47408, 47411-47412, 47414-47420, 47422-47425, 47428-47432, 47434, 47436-47440, 47442-47443, 47445, 47447-47450, 47452-47453, 47456-47463, 47465-47469, 47474-47475, 47477, 47479, 47484-47487, 47489, 47493-47494, 47496-47498, 47500-47509, 47511-47512, 47514-47519, 47521, 47524-47526, 47528, 47530-47531, 47533-47538, 47540-47541, 47543-47547, 47550, 47552, 47556-47557, 47562, 47566, 47568-47572, 47574-47581, 47583, 47585, 47589-47590, 47592-47595, 47598-47601, 47604-47606, 47609, 47611, 47613-47614, 47617-47621, 47626-47629, 47634, 47636, 47638-47640, 47644, 47646, 47648-47654, 47657, 47659-47663, 47665-47670, 47673-47679, 47682-47683, 47685-47686, 47689-47691, 47696-47697, 47703, 47705-47711, 47714, 47717-47719, 47723-47724, 47728, 47730, 47733, 47736-47737, 47740-47745, 47747-47748, 47751-47756, 47762-47763, 47766-47767, 47774-47780, 47782-47784, 47787, 47789, 47791-47792, 47794, 47796, 47798-47801, 47804-47805, 47807-47808, 47810-47817, 47822-47826, 47828-47833, 47835, 47838-47839, 47841-47843, 47846-47848, 47850-47852, 47854-47855, 47857-47858, 47860-47865, 47867, 47871, 47876, 47879, 47881, 47886, 47888, 47890-47895, 47897-47901, 47903, 47908-47913, 47915-47918, 47920-47926, 47928-47939, 47942, 47946-47970, 47972, 47976, 47978, 47986, 47988, 47991-47992, 47996-47997, 47999, 48002-48004, 48007-48016, 48019, 48021, 48023-48025, 48027, 48029-48032, 48034-48036, 48042, 48045, 48047-48051, 48054-48059, 48061, 48063-48064, 48066, 48068, 48070, 48072, 48074-48078, 48080, 48082-48084, 48086-48094, 48097-48100, 48102-48104, 48106, 48108, 48110-48111, 48113, 48115-48116, 48118-48120, 48122-48126, 48128-48129, 48131, 48133, 48135, 48137-48138, 48140-48141, 48143, 48146, 48148-48150, 48152-48153, 48155, 48157-48158, 48164, 48168-48171, 48177-48178, 48181-48182, 48184, 48186-48188, 48190, 48192-48194, 48198-48200, 48202, 48204-48208, 48210-48211, 48213-48215, 48221-48225, 48227-48228, 48230-48232, 48234, 48237, 48240-48242, 48246-48253, 48256-48262, 48265-48268, 48270, 48272, 48275-48276, 48278-48283, 48286-48289, 48291-48297, 48299-48300, 48302-48303, 48306-48308, 48311, 48315, 48319-48320, 48323-48326, 48328-48338, 48340, 48342-48344, 48347, 48349-48350, 48353, 48355, 48358-48363, 48365-48366, 48368, 48373, 48376-48378, 48380, 48383-48384, 48387-48389, 48391-48400, 48404, 48406-48412, 48414-48425, 48427-48428, 48430, 48433, 48435, 48437-48439, 48441-48448, 48453-48461, 48463-48465, 48468-48469, 48472-48473, 48476-48477, 48479, 48484-48486, 48488-48490, 48492, 48495-48498, 48500-48502, 48504, 48506, 48510-48515, 48518, 48520-48522, 48524-48526, 48528, 48530-48535, 48538-48542, 48544-48545, 48547, 48549-48551, 48554, 48556, 48558-48559, 48562, 48564-48567, 48572-48577, 48580, 48583-48586, 48591, 48593-48595, 48598, 48601-48604, 48606-48607, 48610-48611, 48616-48619, 48621, 48623-48626, 48629, 48631, 48634-48641, 48643-48644, 48646-48647, 48649, 48651, 48654-48659, 48663, 48667, 48669-48673, 48675-48676, 48678-48680, 48682-48684, 48686, 48688, 48692-48699, 48701, 48706-48714, 48716-48722, 48726-48727, 48729, 48732, 48734-48735, 48737-48739, 48741, 48745-48749, 48752, 48754-48757, 48761-48763, 48765-48768, 48771, 48773-48775, 48780, 48782, 48784-48785, 48787-48794, 48796, 48799, 48806, 48808-48823, 48827-48832, 48834, 48836-48843, 48845-48847, 48850-48851, 48856, 48858, 48861-48862, 48865-48866, 48869-48882, 48884-48885, 48888, 48890-48891, 48896-48897, 48899-48900, 48902, 48904, 48906, 48908-48909, 48912-48921, 48923, 48925-48927, 48930-48932, 48936-48938, 48944-48948, 48951-48952, 48954-48955, 48957-48961, 48963, 48965-48967, 48969-48971, 48973-48975, 48978, 48981, 48983, 48990-48992, 48994-48998, 49000-49002, 49004-49005, 49007, 49009-49010, 49013-49018, 49020-49021, 49025, 49032, 49034-49037, 49039, 49042-49048, 49050-49058, 49060, 49062-49064, 49066-49069, 49071, 49073-49078, 49082-49085, 49090-49098, 49100-49108, 49110, 49112-49114, 49116-49118, 49120, 49122-49123, 49125-49131, 49133, 49135-49137, 49139-49144, 49146-49148, 49150-49151, 49153-49156, 49158-49164, 49167-49168, 49170, 49172-49173, 49177-49182, 49184-49185, 49187, 49189-49192, 49196-49197, 49199-49201, 49203-49210, 49212-49213, 49215-49216, 49218, 49220-49222, 49227-49234, 49237-49241, 49243, 49245-49256, 49258, 49260-49261, 49265-49267, 49270, 49272-49274, 49278, 49280-49284, 49286, 49288-49289, 49291, 49293-49295, 49298, 49301-49304, 49307, 49309-49320, 49325-49327, 49330-49341, 49343-49344, 49347-49348, 49350-49351, 49354-49356, 49358, 49362-49367, 49369, 49371, 49376, 49381, 49384-49386, 49391, 49395-49402, 49404, 49406-49407, 49409-49413, 49415-49416, 49418-49428, 49431-49434, 49436, 49438-49441, 49444, 49450, 49452-49455, 49458-49464, 49469, 49471, 49473-49480, 49482, 49484-49485, 49488, 49490-49492, 49495-49496, 49498-49501, 49506-49509, 49511, 49513, 49515, 49517, 49519, 49522, 49525, 49527-49530, 49535, 49538, 49541-49542, 49548-49550, 49552, 49554, 49556-49557, 49564-49567, 49570-49571, 49573-49575, 49579, 49581, 49583, 49585-49592, 49596, 49598-49600, 49602, 49604-49605, 49607, 49610, 49614, 49617, 49619-49626, 49629-49630, 49632, 49634, 49636-49640, 49642-49647, 49649-49660, 49662, 49664-49666, 49671-49675, 49678-49685, 49687, 49689-49690, 49692-49695, 49697-49700, 49702-49704, 49707, 49709-49710, 49712-49713, 49715-49721, 49723-49724, 49726-49727, 49729, 49731-49739, 49741-49742, 49744, 49746-49747, 49749-49751, 49754-49768, 49774, 49776-49777, 49779-49781, 49783, 49785-49790, 49792, 49798, 49801-49805, 49807-49809, 49811, 49813-49819, 49822, 49824-49826, 49828-49829, 49831, 49834-49842, 49844-49847, 49849-49851, 49855-49856, 49861, 49864-49865, 49869-49873, 49875-49879, 49882, 49886-49888, 49890-49895, 49901-49902, 49904, 49906-49908, 49912-49916, 49918-49919, 49921, 49923-49925, 49933, 49936-49938, 49942, 49945-49958, 49960-49964, 49967, 49971-49973, 49976-49978, 49983, 49985-49987, 49991-49992, 49994-49999, 50001-50003, 50005-50014, 50016, 50018, 50026-50030, 50032-50033, 50035-50037, 50042, 50044-50060, 50064-50065, 50067-50074, 50076-50078, 50080-50081, 50083-50085, 50087-50091, 50093-50095, 50098-50099, 50101-50106, 50108, 50113, 50116-50117, 50119-50130, 50132-50138, 50140-50143, 50146, 50149, 50153-50155, 50163-50164, 50166-50168, 50170, 50172-50173, 50175-50180, 50182-50183, 50186-50188, 50190, 50192-50199, 50202-50204, 50206, 50208-50209, 50211-50212, 50215, 50218-50220, 50222-50225, 50228-50232, 50238-50242, 50244-50247, 50249-50251, 50254-50264, 50266, 50268-50271, 50273-50275, 50277-50279, 50281-50283, 50285-50286, 50290-50293, 50295, 50300, 50303-50305, 50307-50316, 50319-50321, 50323, 50325, 50327, 50330-50332, 50334-50335, 50339, 50341, 50343, 50347, 50349-50350, 50355-50370, 50372-50373, 50376-50377, 50382-50393, 50395-50399, 50402, 50405, 50408-50418, 50420-50427, 50429-50436, 50438-50442, 50444-50446, 50448-50451, 50453-50456, 50459-50460, 50462, 50464, 50466-50468, 50470-50473, 50478-50479, 50481, 50484-50490, 50492-50498, 50501-50503, 50505-50507, 50509-50510, 50512-50513, 50515-50517, 50519, 50521, 50523-50527, 50529, 50531-50533, 50535-50536, 50538-50540, 50542-50544, 50546, 50549, 50552, 50555, 50557, 50561-50564, 50568, 50571, 50573-50574, 50576, 50579, 50581-50584, 50587-50588, 50590, 50597-50599, 50602-50605, 50607-50609, 50612-50613, 50615, 50617, 50619-50620, 50622-50624, 50627-50645, 50647, 50649-50651, 50653-50654, 50656-50661, 50663, 50665-50669, 50672-50674, 50677, 50681, 50684, 50686-50690, 50692, 50701-50703, 50705-50706, 50708-50711, 50714-50717, 50721-50729, 50732, 50734-50735, 50739-50748, 50750, 50752-50753, 50755, 50757, 50759-50761, 50763, 50765, 50768-50769, 50772-50773, 50775, 50777-50779, 50781-50787, 50790-50791, 50793-50798, 50800-50803, 50806-50808, 50810-50812, 50814-50817, 50819-50823, 50826, 50829-50834, 50838-50839, 50842-50849, 50851-50856, 50860-50862, 50864-50867, 50871, 50874, 50878-50884, 50887, 50889, 50893-50894, 50896, 50899, 50901-50909, 50912, 50914-50919, 50921, 50923-50930, 50934, 50936-50938, 50940-50941, 50943-50945, 50947-50953, 50955-50965, 50967-50968, 50970, 50972-50975, 50979, 50981-50994, 50996-50997, 50999, 51001, 51003-51004, 51006-51007, 51009-51010, 51013, 51015-51017, 51020, 51022-51025, 51027-51028, 51032, 51035, 51038-51041, 51043-51051, 51053-51055, 51057, 51059, 51062, 51064-51065, 51067, 51072-51073, 51075, 51077-51079, 51081, 51083-51084, 51087-51097, 51099-51102, 51104-51106, 51108-51110, 51115-51118, 51123-51125, 51127-51129, 51131-51136, 51139, 51142, 51145, 51148-51155, 51157-51158, 51160-51162, 51168-51172, 51174-51175, 51179-51180, 51182-51184, 51186, 51189-51204, 51206-51211, 51214-51215, 51217-51218, 51220-51222, 51224-51225, 51229-51231, 51233-51240, 51243-51246, 51248, 51250, 51252, 51254-51255, 51257, 51263-51264, 51266-51267, 51269, 51271-51275, 51277, 51280-51281, 51283-51284, 51288-51293, 51296-51298, 51302, 51304-51307, 51309-51312, 51314-51315, 51317-51321, 51323, 51325-51330, 51332-51333, 51335, 51339-51342, 51344, 51349, 51351-51353, 51358, 51365-51366, 51368, 51370, 51372-51375, 51377-51385, 51387-51392, 51394, 51396, 51403-51413, 51416-51419, 51421, 51423-51424, 51426-51427, 51435, 51437-51439, 51442, 51444-51449, 51452-51468, 51470-51473, 51475-51476, 51478, 51480-51481, 51484-51487, 51489-51495, 51498, 51500, 51503-51513, 51517-51518, 51520-51522, 51524-51526, 51528, 51530, 51532-51535, 51538-51543, 51545-51546, 51553-51555, 51557-51559, 51562-51564, 51566-51570, 51573, 51577-51578, 51581, 51585-51587, 51589, 51591-51599, 51602-51604, 51606-51607, 51609-51611, 51613, 51617-51621, 51624, 51628-51632, 51634-51638, 51640-51643, 51646-51647, 51650-51652, 51654-51655, 51658, 51660-51661, 51664, 51667, 51670-51674, 51677-51684, 51686, 51688, 51693, 51697, 51701, 51703-51705, 51707-51710, 51712-51725, 51727-51729, 51731-51747, 51749-51750, 51752-51762, 51765, 51768, 51770, 51772-51773, 51775, 51777, 51779-51783, 51785-51787, 51789-51792, 51794-51795, 51798-51802, 51804, 51806-51809, 51812-51813, 51815, 51817-51818, 51820-51826, 51830-51834, 51836, 51838-51840, 51842, 51844-51845, 51847-51849, 51852, 51856-51859, 51861, 51863-51870, 51872-51873, 51875, 51877-51878, 51880, 51882-51886, 51889-51898, 51900-51901, 51903, 51907-51909, 51911-51912, 51914, 51916-51918, 51920, 51922-51924, 51926, 51928-51929, 51931, 51933-51935, 51938-51940, 51942-51943, 51945-51949, 51951-51953, 51955-51957, 51959-51961, 51964, 51967-51984, 51986-51989, 51991-51993, 51995-52001, 52004-52005, 52009-52010, 52012, 52015-52016, 52018-52020, 52024-52028, 52031-52034, 52037, 52040, 52042-52043, 52047-52050, 52054, 52056-52058, 52060-52066, 52068-52069, 52071, 52073, 52075-52083, 52085, 52087-52092, 52094, 52096, 52098-52102, 52107-52108, 52110-52115, 52117-52119, 52122-52133, 52136, 52138-52143, 52145-52148, 52150-52151, 52153-52157, 52159-52173, 52175-52185, 52189-52194, 52197-52206, 52208-52209, 52211-52212, 52215, 52217, 52220, 52223-52226, 52229, 52231-52234, 52237-52245, 52249, 52251-52252, 52255-52256, 52258-52261, 52263-52271, 52273-52274, 52277-52280, 52284, 52286-52288, 52290-52292, 52294-52296, 52299, 52302-52306, 52309, 52311, 52313, 52315-52319, 52321-52327, 52329-52331, 52333, 52336-52337, 52340, 52342-52343, 52345, 52348, 52350-52356, 52358-52359, 52362-52363, 52365-52367, 52369, 52371-52372, 52379, 52382, 52386, 52392-52401, 52403, 52405-52408, 52416, 52418, 52421, 52423-52427, 52429, 52431, 52433, 52435-52436, 52438-52439, 52442, 52444-52445, 52447-52452, 52454-52455, 52459, 52462-52468, 52474-52476, 52478-52487, 52489-52495, 52499, 52501, 52506, 52508, 52510, 52512-52515, 52517, 52524-52526, 52532, 52536, 52538, 52540, 52545-52546, 52548-52549, 52555, 52557, 52559, 52561-52562, 52564-52568, 52572-52573, 52578-52581, 52584-52585, 52589-52591, 52594, 52596-52598, 52602-52607, 52609, 52611-52612, 52615-52617, 52619, 52622-52624, 52626, 52629-52630, 52633-52634, 52639-52641, 52643-52644, 52647, 52652, 52655, 52657-52659, 52662-52667, 52669, 52672, 52674, 52676-52677, 52681-52682, 52684-52686, 52692-52693, 52695-52699, 52703-52705, 52707-52708, 52715-52716, 52718-52721, 52723-52726, 52728, 52730-52731, 52733-52735, 52738, 52740-52741, 52743, 52745-52750, 52752-52754, 52759, 52761-52766, 52769-52779, 52782-52784, 52786, 52789-52792, 52797, 52799-52800, 52802-52804, 52806, 52808-52810, 52812-52815, 52818, 52820, 52822-52824, 52831, 52834, 52836, 52838, 52840-52841, 52843, 52845, 52847-52851, 52853-52855, 52858-52861, 52864-52865, 52867, 52869-52871, 52875-52879, 52881-52882, 52884, 52886, 52888-52889, 52893-52894, 52896-52906, 52913, 52915-52918, 52921, 52924, 52929, 52931-52936, 52938-52939, 52941, 52945-52949, 52960-52962, 52964, 52966, 52968-52973, 52976-52978, 52982, 52986-52995, 52997-53000, 53004-53010, 53012-53013, 53016, 53018-53025, 53027-53031, 53033-53035, 53038-53047, 53050, 53053-53058, 53060, 53063-53067, 53070-53071, 53073, 53077-53082, 53085-53086, 53089-53094, 53096, 53098, 53101, 53103-53105, 53107-53109, 53112-53114, 53118, 53120-53122, 53125-53132, 53136, 53138, 53141, 53143, 53146-53148, 53156-53160, 53162, 53164-53165, 53169-53171, 53173-53177, 53179-53184, 53186, 53189, 53191-53194, 53200, 53202-53206, 53208-53209, 53211, 53213-53216, 53218-53219, 53221, 53223, 53227, 53229-53232, 53235, 53237, 53239, 53241-53242, 53244-53248, 53250, 53253, 53258-53260, 53262-53263, 53266-53267, 53271-53274, 53276, 53278-53280, 53282, 53284-53288, 53293-53295, 53300-53302, 53306-53308, 53310, 53315, 53320-53328, 53330-53331, 53334-53335, 53337, 53339, 53341, 53343-53345, 53347-53352, 53354-53363, 53365-53369, 53371-53373, 53376-53377, 53380, 53382, 53387-53389, 53391-53392, 53394-53397, 53400-53401, 53403-53407, 53409-53410, 53412, 53414-53416, 53418-53420, 53423, 53425-53426, 53429-53430, 53432-53433, 53438-53442, 53444-53446, 53448-53449, 53451, 53454-53456, 53462-53470, 53475-53477, 53480, 53482, 53484, 53486, 53490-53492, 53494, 53496, 53498-53504, 53506, 53508, 53511, 53514, 53516, 53518-53527, 53532-53534, 53536, 53538-53540, 53542-53548, 53550, 53552-53555, 53557, 53559, 53562-53568, 53570-53572, 53574, 53576-53578, 53581, 53583-53585, 53587, 53589, 53591, 53593-53594, 53597-53601, 53604-53605, 53607-53612, 53614-53618, 53621, 53623, 53625-53629, 53631, 53636-53640, 53645-53646, 53650-53652, 53654, 53658-53659, 53663-53665, 53668-53670, 53672-53675, 53677, 53681-53685, 53687-53693, 53699-53701, 53704, 53706-53707, 53710-53711, 53713, 53716-53722, 53724-53725, 53727, 53731, 53735, 53737, 53742, 53744, 53748, 53751, 53754, 53756, 53758-53760, 53762, 53764, 53767-53772, 53774, 53779-53786, 53788-53791, 53795-53802, 53806-53808, 53810, 53812-53815, 53818, 53820-53821, 53823-53832, 53835-53847, 53849-53851, 53853-53860, 53862-53864, 53866-53869, 53873, 53875-53876, 53878-53882, 53884-53887, 53889, 53891, 53895-53896, 53898, 53901, 53903, 53905-53906, 53909-53910, 53912-53913, 53915-53917, 53920, 53922-53925, 53927, 53929, 53931, 53936-53938, 53940, 53944-53945, 53947-53948, 53951-53959, 53962-53964, 53969-53970, 53972, 53974, 53976, 53978-53979, 53981-53983, 53985-53988, 53990-53993, 53996, 53998, 54000-54009, 54014-54016, 54019, 54021-54022, 54024-54034, 54038-54055, 54057, 54059-54060, 54063-54066, 54068-54072, 54074-54077, 54079-54087, 54089, 54091, 54094-54098, 54100-54112, 54115, 54118-54119, 54121-54122, 54124, 54126, 54128-54129, 54131-54134, 54136-54141, 54144-54148, 54154, 54157, 54160, 54162-54163, 54165, 54168-54172, 54174-54176, 54179-54180, 54182-54183, 54188-54196, 54198-54201, 54204, 54206-54208, 54211-54214, 54216-54217, 54219-54221, 54223-54225, 54227, 54230-54238, 54240-54244, 54246-54247, 54252-54253, 54255-54258, 54260-54261, 54264-54265, 54267-54269, 54271-54275, 54277-54280, 54283-54284, 54286, 54288, 54291-54298, 54302-54304, 54306-54307, 54309-54313, 54316, 54318-54319, 54322, 54324-54327, 54330-54331, 54338-54344, 54347-54348, 54351, 54353, 54355, 54357-54359, 54361, 54364-54366, 54369, 54371, 54374-54376, 54378-54379, 54388, 54391-54395, 54398-54400, 54404-54411, 54413-54414, 54416, 54418-54424, 54427-54428, 54430-54433, 54435-54436, 54438, 54440-54441, 54443, 54445, 54451, 54454-54456, 54458-54464, 54466-54472, 54475-54483, 54485, 54487, 54489, 54494, 54496-54508, 54510-54513, 54516, 54518-54523, 54525-54531, 54533, 54535, 54545-54548, 54550-54551, 54553-54555, 54559-54560, 54562, 54565-54573, 54577-54579, 54581, 54585-54587, 54589-54593, 54595, 54597, 54599-54600, 54602, 54606, 54608, 54611, 54615-54625, 54627-54628, 54632, 54634, 54636-54639, 54641, 54643, 54645, 54648, 54650-54655, 54657-54658, 54660-54663, 54665, 54667, 54669, 54673, 54675, 54677-54680, 54682, 54685, 54687, 54689-54692, 54696, 54699, 54705, 54707-54709, 54711, 54713-54714, 54718-54723, 54725-54727, 54729, 54736, 54739-54740, 54744-54746, 54748-54753, 54755-54756, 54758-54760, 54762-54764, 54766-54771, 54777, 54779, 54782-54786, 54790, 54792-54796, 54802, 54804-54812, 54814-54817, 54823-54826, 54828, 54830-54832, 54834-54837, 54839-54847, 54849-54853, 54856, 54858, 54860-54861, 54863-54868, 54874-54875, 54879, 54882-54887, 54890-54891, 54894, 54896-54897, 54900-54901, 54905-54906, 54908-54911, 54913-54914, 54916, 54926-54927, 54930-54937, 54940-54941, 54943, 54946-54953, 54955, 54958, 54960-54961, 54963-54967, 54969, 54971-54978, 54980-54982, 54985-54988, 54992-54993, 54997, 54999-55002, 55005-55009, 55011-55013, 55015, 55017-55020, 55022-55029, 55036-55041, 55043-55053, 55055, 55060, 55062, 55065-55066, 55068, 55077, 55082, 55084-55093, 55097, 55100, 55102, 55104-55106, 55108-55109, 55111, 55113-55114, 55116-55120, 55122-55124, 55126, 55128, 55130, 55133, 55135-55136, 55138-55139, 55141-55143, 55145, 55147-55150, 55154-55155, 55157, 55160-55163, 55165, 55168, 55170-55173, 55176, 55178, 55180, 55184, 55187-55189, 55191, 55193, 55195-55197, 55203, 55208-55209, 55211-55212, 55214-55215, 55217-55224, 55226, 55229-55231, 55235-55237, 55239-55243, 55245, 55247, 55249, 55254-55267, 55271-55273, 55276-55284, 55286-55287, 55290-55292, 55295-55296, 55299-55300, 55302, 55304, 55306-55307, 55310, 55312-55316, 55319-55320, 55322-55324, 55330, 55332, 55334-55335, 55337-55341, 55343-55346, 55350-55366, 55369, 55371-55374, 55376, 55378, 55380-55383, 55385, 55387, 55391-55392, 55394-55396, 55398-55400, 55402-55404, 55407-55410, 55412, 55415-55418, 55421-55425, 55427-55436, 55438-55442, 55445-55459, 55463-55465, 55467-55469, 55473, 55476, 55479-55483, 55485, 55488, 55490-55491, 55495-55498, 55501-55503, 55508-55510, 55512-55513, 55515, 55517, 55519, 55526, 55528-55529, 55531-55538, 55540-55541, 55543-55544, 55547-55548, 55550, 55552-55565, 55568-55569, 55575, 55579-55581, 55583-55591, 55593, 55595-55598, 55600-55601, 55603-55612, 55619, 55621-55622, 55629-55630, 55633, 55635, 55637-55639, 55643, 55645-55661, 55663-55665, 55667, 55669, 55672-55673, 55676-55678, 55680-55686, 55688, 55690-55698, 55700-55701, 55703-55705, 55707-55715, 55717, 55719-55723, 55726, 55728-55730, 55732, 55735-55736, 55738-55740, 55742-55749, 55752-55754, 55756, 55758-55768, 55770, 55772, 55776-55779, 55781-55784, 55787-55788, 55794-55798, 55800, 55802, 55804-55808, 55810-55819, 55822-55823, 55825-55831, 55834-55835, 55837-55838, 55841-55843, 55845-55849, 55851, 55853, 55855-55861, 55863-55865, 55867-55869, 55871, 55874-55876, 55879-55882, 55886-55888, 55890-55891, 55894-55900, 55902-55909, 55912, 55916, 55918-55920, 55923-55928, 55930-55938, 55940, 55944, 55946-55948, 55951-55954, 55956-55958, 55961-55967, 55970, 55972, 55974-55976, 55978, 55980-55981, 55983-55985, 55987-55988, 55990-55994, 55996-56000, 56002-56013, 56015-56017, 56022, 56026, 56029-56030, 56036-56037, 56039, 56041-56043, 56045-56053, 56055-56058, 56061-56062, 56065, 56068-56069, 56071, 56073-56076, 56078-56079, 56081, 56088-56092, 56094, 56096-56097, 56099, 56101-56102, 56104-56110, 56112-56117, 56119-56126, 56130-56134, 56136-56137, 56140-56146, 56149-56160, 56162, 56165, 56167-56168, 56170, 56172-56176, 56179, 56183-56187, 56189, 56191-56195, 56199, 56201-56202, 56204-56205, 56207, 56209-56210, 56214-56216, 56219, 56221-56230, 56232-56233, 56235-56236, 56238, 56244, 56249, 56252-56254, 56256, 56259-56260, 56264, 56269-56271, 56274-56279, 56281, 56285, 56287, 56289-56291, 56293, 56295-56296, 56298, 56300-56303, 56307-56308, 56310, 56314, 56316-56321, 56323-56330, 56332, 56334-56337, 56339-56341, 56343-56345, 56347-56354, 56360-56361, 56363, 56365, 56368, 56370-56372, 56379, 56382-56386, 56388-56389, 56391, 56393-56394, 56396, 56398, 56400, 56403, 56405-56410, 56413-56414, 56418-56419, 56422-56426, 56429-56430, 56433-56435, 56437-56440, 56442-56448, 56452-56455, 56457-56458, 56462, 56465-56466, 56468-56470, 56473-56477, 56480, 56483-56485, 56487-56488, 56490-56492, 56498, 56500-56501, 56507-56516, 56520-56524, 56526-56529, 56531, 56533, 56535-56536, 56538-56544, 56546, 56552-56553, 56555-56562, 56565-56566, 56568-56581, 56584-56586, 56588, 56590, 56593-56594, 56596-56598, 56601-56609, 56612, 56614, 56616-56618, 56623-56624, 56627, 56630-56632, 56634-56638, 56640-56641, 56645, 56647-56650, 56652-56657, 56659, 56661, 56665-56666, 56668, 56670, 56673-56678, 56681-56689, 56694-56702, 56704-56708, 56710-56714, 56716, 56718, 56722-56725, 56728-56733, 56736-56737, 56740-56746, 56748-56752, 56756-56757, 56761-56771, 56773-56787, 56790-56793, 56795-56801, 56803, 56805-56806, 56808, 56810-56812, 56815, 56818, 56822, 56825, 56827-56828, 56830-56832, 56835, 56837-56838, 56840-56841, 56843, 56846-56848, 56850-56855, 56859, 56862-56880, 56882-56883, 56885, 56887, 56889-56893, 56896-56897, 56899-56900, 56902-56910, 56912-56915, 56917-56925, 56927-56930, 56933-56934, 56937-56938, 56940-56944, 56946-56951, 56953, 56955, 56957-56965, 56969-56970, 56972, 56975, 56977-56989, 56995, 56998, 57001-57002, 57004, 57006-57010, 57012-57013, 57016-57018, 57021-57023, 57025, 57028, 57030-57032, 57035-57037, 57039-57042, 57044, 57048, 57050, 57053-57054, 57056-57058, 57060-57063, 57066-57068, 57070-57074, 57078, 57081-57089, 57091, 57094, 57099-57101, 57103, 57105-57107, 57109-57111, 57114, 57120, 57122-57123, 57127-57129, 57131-57135, 57139-57146, 57148-57155, 57157, 57159, 57161-57162, 57168, 57170, 57172-57174, 57177-57183, 57189-57193, 57197, 57199-57203, 57206-57211, 57213-57214, 57217, 57219-57224, 57226, 57228-57229, 57232-57235, 57237-57242, 57244, 57246, 57248-57251, 57253-57255, 57259-57267, 57269-57280, 57282, 57284-57285, 57287-57288, 57298, 57305, 57307-57308, 57311-57315, 57317-57318, 57321-57323, 57325, 57327, 57329-57333, 57336, 57339-57342, 57347, 57349, 57352, 57354, 57356-57357, 57359-57360, 57362, 57366-57368, 57373-57380, 57382-57384, 57386, 57389-57390, 57392-57401, 57404-57405, 57408, 57410, 57413-57418, 57420, 57422-57425, 57431-57432, 57436, 57438-57443, 57446-57447, 57450-57451, 57455-57456, 57459-57469, 57472, 57475-57476, 57479-57480, 57484-57488, 57491, 57494-57498, 57500-57504, 57506, 57508, 57510, 57513-57519, 57521-57522, 57524, 57527-57528, 57530, 57532, 57534-57537, 57539, 57541, 57544-57550, 57556-57563, 57568-57569, 57572, 57575-57579, 57581-57583, 57585-57586, 57589-57596, 57598, 57600-57602, 57605-57606, 57608-57609, 57611-57613, 57615, 57618-57619, 57621-57627, 57629-57630, 57632-57633, 57636-57637, 57639-57644, 57646-57647, 57650-57653, 57655-57660, 57662-57664, 57666, 57668, 57670, 57672-57674, 57677-57687, 57690-57694, 57699-57702, 57704-57710, 57712, 57714-57717, 57719, 57721-57722, 57727-57729, 57733-57737, 57742, 57756, 57758, 57760-57761, 57764-57765, 57768-57769, 57771-57774, 57776-57777, 57780, 57783-57789, 57791-57795, 57797-57798, 57803, 57806-57813, 57816-57817, 57819-57821, 57823, 57825-57832, 57834-57847, 57850-57854, 57856, 57858, 57860-57866, 57868, 57873-57874, 57876-57879, 57881-57883, 57886-57887, 57889-57892, 57895-57897, 57899-57907, 57910, 57915-57918, 57920-57927, 57930-57933, 57935-57936, 57941, 57944, 57947-57949, 57955-57957, 57962-57963, 57966, 57969-57975, 57977-57980, 57983-57986, 57991-57992, 57994-57998, 58000-58006, 58009-58018, 58022-58027, 58030-58033, 58035, 58037-58040, 58042-58043, 58045-58048, 58050-58052, 58054, 58056-58057, 58059-58067, 58069-58081, 58084-58096, 58099, 58101, 58104-58109, 58112, 58114-58115, 58118-58120, 58123-58124, 58128-58129, 58132, 58134-58139, 58141-58144, 58147, 58149-58152, 58154-58155, 58158-58161, 58163-58164, 58166-58171, 58175-58180, 58182, 58185, 58187-58199, 58202-58203, 58207-58208, 58210, 58212-58224, 58227-58230, 58233-58243, 58245, 58247-58248, 58250-58257, 58260-58265, 58269, 58279-58285, 58288, 58290-58294, 58296-58297, 58300, 58302-58306, 58312, 58314-58317, 58319, 58322, 58325-58332, 58334, 58336, 58339-58343, 58346, 58348, 58350-58351, 58353, 58356-58358, 58362, 58365, 58368, 58370-58374, 58376-58377, 58380, 58383, 58386-58388, 58392-58395, 58397-58398, 58400, 58402-58422, 58424-58430, 58432, 58435, 58438, 58440, 58447, 58449, 58451, 58453-58457, 58459, 58465, 58467, 58470, 58472, 58475, 58477-58480, 58482, 58484, 58486, 58490-58494, 58496, 58503-58504, 58506, 58509, 58511-58513, 58515, 58517, 58519-58520, 58523, 58526-58527, 58529-58530, 58532-58536, 58539-58544, 58548-58556, 58558, 58560, 58562-58566, 58569-58571, 58573, 58575-58578, 58580, 58582-58584, 58586-58587, 58590-58591, 58595-58599, 58601-58607, 58609, 58611, 58614-58615, 58617-58619, 58622-58623, 58625-58630, 58632-58635, 58639, 58641-58646, 58648, 58650-58651, 58653, 58656-58658, 58660-58663, 58665, 58667-58671, 58673, 58680, 58682-58684, 58686, 58689-58690, 58692-58695, 58697, 58699-58701, 58704-58708, 58713, 58715-58716, 58719, 58726-58727, 58729-58732, 58736, 58742, 58744, 58746-58754, 58756, 58758-58761, 58764-58774, 58776-58778, 58780-58784, 58786-58787, 58789-58795, 58797, 58800-58801, 58805-58807, 58813, 58815-58828, 58830, 58832-58834, 58836-58843, 58845-58851, 58853, 58855, 58857-58858, 58862-58872, 58874, 58876, 58878-58882, 58884-58890, 58893-58896, 58898-58899, 58903-58906, 58910, 58912-58914, 58917, 58921-58930, 58932-58933, 58935-58937, 58939-58941, 58943, 58946, 58948-58952, 58955-58959, 58961-58962, 58965-58971, 58975, 58977-58978, 58980, 58983, 58985, 58989-58990, 58993, 58995-58997, 58999, 59001, 59004-59006, 59008-59009, 59011, 59013-59015, 59019-59023, 59029-59030, 59032-59034, 59036, 59039-59041, 59043-59046, 59050, 59053, 59056, 59060-59061, 59064, 59067, 59071, 59073-59076, 59078-59079, 59081-59082, 59084-59085, 59087-59089, 59091-59097, 59099-59100, 59102, 59104, 59106-59115, 59118, 59125-59127, 59129-59133, 59136-59141, 59143, 59147, 59149-59150, 59153-59155, 59157-59158, 59160-59162, 59164-59165, 59167, 59169-59170, 59173-59175, 59177-59178, 59180-59181, 59185-59186, 59189-59191, 59194-59195, 59198, 59200-59201, 59203, 59205, 59210-59213, 59215, 59217, 59220, 59222-59224, 59226-59230, 59234, 59236, 59239, 59241, 59243-59247, 59249, 59251, 59253-59255, 59260, 59262, 59264, 59266-59267, 59269, 59271-59272, 59275, 59277-59280, 59282, 59284-59287, 59289, 59291, 59293-59294, 59296, 59298-59300, 59302, 59304-59310, 59313-59320, 59323, 59325-59331, 59333, 59336-59338, 59340-59342, 59346-59348, 59350-59353, 59355-59358, 59360-59365, 59367-59369, 59371-59375, 59378-59381, 59383-59385, 59387-59388, 59390, 59392-59397, 59399-59400, 59402-59405, 59407-59411, 59413-59415, 59417-59424, 59426, 59428, 59430, 59433-59434, 59436-59438, 59440-59442, 59444, 59446-59450, 59453, 59456, 59460-59465, 59474, 59476, 59479-59482, 59484-59487, 59491-59502, 59504, 59506, 59510, 59512-59518, 59520-59524, 59526, 59528-59529, 59531-59553, 59556-59558, 59560, 59562-59563, 59565, 59568-59569, 59572-59578, 59580, 59583-59587, 59589-59591, 59594-59597, 59601-59606, 59608-59613, 59617, 59621-59622, 59625-59626, 59628-59629, 59633-59637, 59640-59641, 59643-59645, 59647-59651, 59653-59654, 59656-59657, 59659, 59661-59662, 59664-59675, 59679, 59681-59683, 59685-59686, 59692, 59694-59698, 59702-59706, 59708, 59711-59714, 59716-59719, 59722, 59724-59725, 59727-59736, 59739-59746, 59748, 59751-59752, 59754-59755, 59757, 59760-59764, 59766, 59769, 59771, 59773-59774, 59776-59783, 59785, 59787-59788, 59790-59791, 59793-59795, 59797-59799, 59801-59804, 59806-59809, 59811-59819, 59821-59823, 59825-59832, 59835, 59837, 59839-59841, 59848-59857, 59859-59860, 59862-59866, 59868-59870, 59874-59876, 59878, 59880-59881, 59884-59886, 59888-59895, 59898, 59900, 59903-59904, 59906-59916, 59918-59919, 59921-59922, 59924-59935, 59937-59939, 59941, 59943, 59945, 59947, 59949, 59951-59962, 59964, 59966-59968, 59970, 59974, 59983-59987, 59989, 59991, 59993, 59995-59998, 60000, 60002-60003, 60005-60006, 60014, 60016-60017, 60020-60026, 60028-60030, 60034-60035, 60037-60042, 60044-60045, 60048, 60052-60054, 60056-60058, 60061-60070, 60073, 60076-60077, 60079-60081, 60083, 60085, 60087, 60089-60096, 60098-60101, 60103, 60105-60116, 60119-60125, 60131-60132, 60134-60137, 60139-60140, 60142-60150, 60152-60155, 60157-60158, 60161-60162, 60165-60167, 60169-60170, 60172-60174, 60179-60181, 60183, 60185-60189, 60191, 60193, 60196, 60199, 60201-60202, 60204, 60208-60214, 60216-60219, 60221-60228, 60234-60237, 60241-60247, 60250-60252, 60255, 60259-60265, 60267, 60271-60274, 60276-60277, 60280-60288, 60290, 60292-60294, 60296-60299, 60303, 60306, 60309, 60313-60314, 60317, 60319-60325, 60327-60334, 60337, 60340-60341, 60343-60346, 60348, 60351-60357, 60364-60375, 60377-60382, 60385-60386, 60388, 60390, 60395, 60397, 60399-60401, 60403, 60405-60407, 60410, 60412-60413, 60415, 60417-60420, 60422-60426, 60430-60431, 60433-60437, 60439-60444, 60446-60459, 60462, 60464-60465, 60467, 60470, 60473, 60475-60482, 60484-60486, 60489-60493, 60495-60500, 60502-60503, 60505-60506, 60514-60516, 60518, 60522-60523, 60525-60527, 60529-60530, 60532-60537, 60540-60541, 60544, 60547-60556, 60559, 60561-60564, 60566-60567, 60570-60573, 60575-60577, 60579-60580, 60582-60583, 60585-60587, 60589-60593, 60597-60599, 60601-60604, 60606, 60608-60611, 60613-60614, 60616-60620, 60624-60626, 60628-60629, 60632-60637, 60639, 60641-60642, 60644-60649, 60651, 60654, 60657-60658, 60660-60662, 60666-60668, 60671-60672, 60674-60677, 60679, 60681-60686, 60691-60693, 60695, 60700, 60705-60712, 60717, 60720-60723, 60727-60728, 60730-60734, 60737, 60739-60742, 60744-60747, 60750, 60754, 60756-60760, 60762-60764, 60768-60777, 60780-60784, 60786-60789, 60791, 60793, 60795, 60797, 60799-60800, 60804, 60806, 60808-60810, 60813-60816, 60818-60822, 60824, 60827-60836, 60839, 60841-60847, 60849, 60853-60856, 60858-60860, 60862, 60865-60866, 60868, 60872, 60877-60880, 60882-60888, 60890-60895, 60897-60899, 60903-60908, 60910-60913, 60915-60916, 60918-60919, 60922-60923, 60925-60926, 60928-60929, 60931-60937, 60944, 60946-60947, 60949-60953, 60956, 60958-60964, 60966-60967, 60970-60973, 60975-60976, 60983, 60985, 60987-60988, 60991-60997, 60999-61000, 61002, 61004-61005, 61007-61008, 61012-61017, 61020-61026, 61029-61045, 61047-61048, 61050, 61052, 61056-61057, 61060, 61062, 61064-61068, 61070-61072, 61074-61076, 61078, 61080-61084, 61086-61089, 61097-61102, 61104-61110, 61115-61120, 61122, 61124-61126, 61129-61130, 61132-61133, 61135-61140, 61142-61144, 61148, 61150-61155, 61159, 61163-61164, 61166-61170, 61172, 61174, 61176-61184, 61187, 61191-61198, 61200, 61202-61207, 61209-61210, 61214-61215, 61217-61221, 61223-61224, 61226, 61228-61231, 61234-61236, 61238-61239, 61241, 61244, 61246, 61248, 61250-61252, 61254-61259, 61261, 61264-61265, 61267-61269, 61271-61274, 61276, 61278, 61280-61282, 61285, 61287, 61289, 61291, 61293-61300, 61302-61303, 61305-61307, 61309, 61311-61312, 61314, 61316, 61318, 61320-61322, 61325, 61327-61328, 61330-61337, 61340-61345, 61349-61351, 61355, 61357-61361, 61363-61365, 61368, 61373-61374, 61377, 61382, 61385, 61387-61388, 61390, 61392-61395, 61397-61398, 61400-61403, 61405-61408, 61410, 61413-61416, 61418-61424, 61428, 61432, 61434-61435, 61437-61441, 61443-61444, 61448, 61450-61456, 61458-61462, 61464, 61467-61470, 61472, 61474-61478, 61480-61481, 61483-61484, 61487-61488, 61492, 61494, 61497, 61499-61503, 61505-61511, 61513-61519, 61521, 61523, 61525-61526, 61529, 61531-61532, 61534, 61536, 61540, 61543-61548, 61550-61559, 61561, 61563-61564, 61566-61577, 61579-61580, 61582, 61584, 61586-61587, 61589-61590, 61592-61600, 61602, 61606-61607, 61612-61614, 61616, 61619-61628, 61630-61633, 61637-61640, 61642, 61644, 61647-61652, 61656-61659, 61663-61665, 61667-61669, 61671-61676, 61679, 61682-61684, 61687-61688, 61690-61696, 61698, 61700, 61702-61703, 61705-61707, 61709, 61711-61712, 61714, 61716, 61718, 61720-61734, 61737-61739, 61741-61742, 61744-61752, 61754, 61756-61759, 61761-61763, 61765, 61768-61769, 61773-61776, 61778, 61780, 61782-61787, 61790-61796, 61799-61801, 61805-61806, 61813, 61815-61820, 61822-61823, 61825-61827, 61830-61831, 61834-61842, 61846-61850, 61854, 61856, 61858, 61860-61861, 61864-61866, 61868-61869, 61871-61875, 61877-61883, 61885-61894, 61898, 61901, 61903, 61906, 61908-61909, 61911, 61913, 61915-61916, 61918-61921, 61923, 61925-61926, 61929, 61931, 61934-61935, 61937-61944, 61946, 61950-61953, 61955, 61959-61962, 61965-61967, 61969-61972, 61974-61976, 61979, 61983, 61985, 61987-61989, 61991-61994, 61997-61998, 62001, 62004-62005, 62009-62011, 62013, 62016-62018, 62020, 62026-62027, 62029, 62032, 62034, 62037, 62041-62043, 62046-62047, 62049-62056, 62060-62061, 62066, 62069-62072, 62074-62077, 62079-62081, 62085-62089, 62091-62094, 62098-62102, 62106-62107, 62109, 62111, 62114, 62116-62117, 62119, 62121-62124, 62126, 62128, 62130, 62134, 62136-62138, 62140, 62142, 62144-62145, 62148, 62150-62151, 62154-62156, 62159-62160, 62162-62163, 62165-62168, 62170-62171, 62173-62177, 62181-62182, 62185-62190, 62193-62198, 62202, 62205-62207, 62210, 62213-62222, 62224, 62226, 62230-62231, 62233-62238, 62240-62243, 62245-62247, 62251-62253, 62255, 62257, 62259-62263, 62266-62271, 62277-62281, 62283-62292, 62294-62298, 62302-62303, 62305-62306, 62308-62310, 62313-62314, 62316-62319, 62321, 62323, 62325-62335, 62337-62338, 62340-62349, 62351-62352, 62356-62358, 62362, 62364-62368, 62370, 62372-62373, 62378-62381, 62383-62385, 62388-62396, 62398, 62401-62403, 62405-62406, 62410-62414, 62416-62417, 62419-62421, 62423, 62425-62428, 62430, 62435-62439, 62442-62445, 62447-62448, 62450, 62453-62461, 62464-62478, 62480, 62482-62492, 62495-62500, 62503-62504, 62506-62507, 62509-62510, 62512-62516, 62518-62520, 62522-62523, 62525, 62531-62532, 62534-62535, 62537-62539, 62542, 62544-62548, 62550-62557, 62559-62563, 62565-62568, 62571-62573, 62576, 62578-62579, 62585-62586, 62590, 62592, 62594-62595, 62597-62598, 62603, 62605-62610, 62612-62616, 62621-62623, 62625-62627, 62630-62634, 62636-62638, 62640-62642, 62644-62651, 62654-62656, 62658, 62660-62662, 62664-62665, 62667, 62670-62671, 62674-62675, 62677, 62681-62684, 62686-62689, 62692-62697, 62703-62705, 62708, 62713-62716, 62720, 62723-62726, 62728, 62730, 62732, 62737, 62739-62744, 62747-62756, 62758-62759, 62762-62763, 62767-62770, 62772, 62775, 62777-62778, 62780, 62784, 62786, 62788-62798, 62800, 62802-62804, 62806-62809, 62812-62815, 62817, 62825, 62828-62831, 62835, 62837-62838, 62840, 62844, 62846, 62848-62852, 62860-62864, 62869-62871, 62873, 62877, 62882-62884, 62886-62887, 62893-62894, 62896-62898, 62900-62901, 62903-62905, 62910-62911, 62915, 62917, 62919, 62924-62931, 62933, 62936, 62938-62939, 62942-62959, 62961-62962, 62965, 62967-62979, 62983, 62985-62986, 62988-62989, 62991, 62994-62996, 62999, 63001, 63003, 63005-63007, 63010-63011, 63013, 63016, 63020-63022, 63024-63028, 63030, 63032-63043, 63046-63048, 63051-63054, 63056-63061, 63065, 63067-63068, 63070-63081, 63083-63087, 63090-63091, 63093-63098, 63100-63102, 63104-63108, 63110-63111, 63113-63114, 63116-63117, 63119-63121, 63123-63127, 63131-63134, 63136, 63138-63139, 63142-63148, 63150-63151, 63153-63154, 63156-63163, 63165-63172, 63179, 63181, 63183, 63185-63187, 63189, 63192, 63195, 63201-63202, 63204-63206, 63208-63211, 63215, 63217, 63219-63221, 63224, 63226-63228, 63233, 63236, 63239, 63242-63248, 63250-63253, 63257, 63259, 63261-63265, 63267, 63271-63272, 63274, 63279, 63281-63284, 63286-63291, 63295-63303, 63305, 63309, 63311, 63313-63317, 63321-63327, 63329-63331, 63334-63340, 89008, 89010-89012, 89014-89016, 89018-89019, 89021, 89024-89025

### Single Strand Oligonucleotides (Sense Strand of Target Gene)

[0210] SeqID range: 63196-89007, 89020-89025

### SeqIDs w/o G Runs:

[0211] 63196-63209, 63213-63274, 63278-63283, 63293-63348, 63362-63367, 63381-63425, 63439-63496, 63510-63525, 63540-63573, 63597-63601, 63615-63652, 63666-63694, 63714-63774, 63795-63806, 63820-63909, 63923-63978, 63993-64000, 64014-64017, 64031-64036, 64059-64107, 64122-64130, 64158-64163, 64178-64182, 64196-64219, 64233-64285, 64299-64306, 64321, 64347-64418, 64441-64533, 64567-64569, 64583-64739, 64761-64830, 64844-64866, 64880-64893, 64908-65033, 65047-65055, 65087-65088, 65102-65129, 65143-65214, 65240-65288, 65318-65401, 65415-65418, 65442-65479, 65497-65521, 65541-65555, 65574-65630, 65651-65686, 65700-65871, 65886-66118, 66132-66151, 66165-66227, 66241-66317, 66331-66462, 66476-66634, 66648-66789, 66804-66913, 66927-67116, 67131-67258, 67272-67332, 67358-67364, 67379-67665, 67680-67697, 67711-68077, 68091-68153, 68167-68522, 68536-68752, 68766-68823, 68837-68900, 68914-68988, 69002-69389, 69403-69660, 69674-69955, 69969-70150, 70165-70300, 70314-70586, 70600-70605, 70619-70662, 70676-70768, 70783-70850, 70863-70903, 70918-70966, 70975-71391, 71417-71512, 71527-71664, 71678-71722, 71736-71770, 71784-71791, 71805-71831, 71845-72139, 72153-72223, 72237-72312, 72326-72367, 72382-72420, 72434-72444, 72458-72672, 72681-72696, 72710-72737, 72751-72831, 72845-72910, 72925-72947, 72961-72976, 72990-73027, 73041-73629, 73643-73668, 73682-74201, 74215-74236, 74251-74271, 74286-74329, 74336-74425, 74433-74554, 74568-74785, 74799-75385, 75399-75521, 75537-75608, 75622-75754, 75768-75901, 75916-76064, 76078, 76093-76113, 76127-76629, 76643-76677, 76691-76780, 76794-76958, 76972-77088, 77102-77212, 77226-77420, 77434-77974, 77988-78057, 78073-78415, 78429-78456, 78471-78497, 78512-78589, 78603-78762, 78776-79360, 79374-79407, 79421-79895, 79909-79932, 79946-79960, 79983-80031, 80036-80070, 80084-80118, 80132-80283, 80299-80985, 80999-81129, 81156-81247, 81261-81434, 81448-81573, 81587-81963, 81977-81988, 82002-82008, 82022-82113, 82127-82176, 82191-82210, 82224-82225, 82239-82396, 82410-82853, 82868-83145, 83159-83564, 83579-83712, 83726-83838, 83852-83895, 83909-83976, 83990-84145, 84171-84571, 84580-84604, 84612-84702, 84716-84881, 84896-85069, 85083-85442, 85456-85918, 85932-86147, 86163-86359, 86405-86409, 86423-86429, 86443-86445, 86459-86625, 86639-87229, 87237-87314, 87320-87333, 87335-87394, 87404-87470, 87484-87597, 87611-87969, 87983-88313, 88327-88538, 88560-88659, 88673-88753, 88777-88790, 88804-88879, 88893-89007, 89020-89025

### SeqIDs w/o miR Seeds:

[0212] 63201-63202, 63204-63206, 63208-63211, 63215, 63217, 63219-63221, 63224, 63226-63228, 63233, 63236, 63239, 63242-63248, 63250-63253, 63257, 63259, 63261-63265, 63267, 63271-63272, 63274, 63279, 63281-63284, 63286-63291, 63295-63303, 63305, 63309, 63311, 63313-63317, 63321-63327, 63329-63331, 63334-63348, 63350-63358, 63361-63364, 63366-63374, 63380, 63382, 63384-63388, 63393-63394, 63398, 63400-63403, 63407-63415, 63417-63418, 63420-63424, 63426, 63429-63431, 63433-63434, 63436, 63441, 63443-63444, 63446-63451, 63453-63456, 63459, 63461, 63463, 63466, 63468, 63472, 63475-63477, 63479-63484, 63486, 63488-63490, 63493-63496, 63498-63499, 63501-63504, 63506-63507, 63509-63510, 63513, 63515-63516, 63520, 63525, 63529-63530, 63532-63534, 63539, 63541-63544, 63546-63548, 63550-63554, 63558-63559, 63562-63563, 63565, 63567, 63569-63570, 63572, 63579, 63581, 63589, 63595, 63597-63599, 63601-63604, 63608, 63611, 63613, 63617, 63620-63627, 63629, 63633-63636, 63638-63640, 63642, 63645-63648, 63651-63655, 63657-63661, 63663, 63671-63674, 63676, 63682-63686, 63689-63690, 63692-63693, 63695, 63697-63698, 63704, 63706, 63713-63714, 63717-63720, 63723, 63731, 63735, 63739-63742, 63745-63746, 63748-63751, 63755, 63757-63765, 63767-63771, 63773, 63776-63779, 63782-63783, 63787, 63790, 63792, 63794-63796, 63798-63799, 63801-63802, 63805, 63809-63812, 63814-63815, 63817-63819, 63822-63827, 63829-63830, 63832-63840, 63845-63852, 63854, 63859-63862, 63864, 63866, 63868, 63870, 63872-63873, 63875, 63877-63885, 63887, 63890, 63892-63897, 63899-63906, 63908-63910, 63912-63915, 63917, 63923, 63927-63928, 63930, 63933-63941, 63943-63946, 63948, 63951-63952, 63954-63957, 63960-63967, 63969-63973, 63975-63976, 63978-63979, 63981-63985, 63987-63988, 63994, 63996, 63998, 64006-64007, 64010, 64014-64019, 64021-64022, 64024-64027, 64030-64031, 64034-64038, 64040-64041, 64044-64045, 64052, 64059-64062, 64064-64066, 64074-64076, 64079, 64082-64094, 64096-64101, 64103-64104, 64108-64109, 64113, 64115-64116, 64118, 64121-64123, 64125-64131, 64134-64135, 64137-64138, 64144, 64146-64148, 64150-64152, 64158-64159, 64162, 64164-64165, 64168, 64172, 64174, 64176, 64178-64181, 64185-64186, 64190-64191, 64193, 64195-64198, 64201-64202, 64204-64205, 64209, 64212-64213, 64215-64222, 64225, 64228-64229, 64235, 64237, 64239, 64243, 64245, 64247-64249, 64251-64254, 64256-64264, 64267-64269, 64271, 64274-64276, 64279-64281, 64283, 64285-64287, 64289-64293, 64297, 64299-64304, 64306-64309, 64311-64314, 64316, 64321-64327, 64329, 64335-64338, 64340, 64342, 64348-64350, 64353-64355, 64357-64358, 64360-64367, 64369-64370, 64373, 64376, 64378-64380, 64384-64388, 64390, 64392-64393, 64395, 64397, 64399-64400, 64407-64414, 64418, 64420-64421, 64424-64425, 64427, 64440-64441, 64446, 64449, 64451-64452, 64454, 64457-64461, 64463, 64465-64466, 64469, 64473-64474, 64476-64482, 64484, 64486-64487, 64490-64492, 64495-64497, 64500, 64504-64507, 64509-64510, 64512-64518, 64520-64522, 64524-64530, 64532-64535, 64537-64542, 64544-64545, 64550, 64552, 64555, 64562-64564, 64568, 64571, 64575-64576, 64580, 64582-64587, 64589-64590, 64593-64595, 64598-64609, 64612-64617, 64619-64621, 64624, 64626-64630, 64633-64634, 64636, 64639-64643, 64645-64649, 64651-64652, 64654, 64656-64659, 64661, 64663, 64667, 64669, 64671-64673, 64676-64677, 64679, 64682-64684, 64686-64688, 64690-64694, 64696-64700, 64702-64703, 64705, 64707, 64710-64714, 64716-64717, 64719-64720, 64723-64724, 64728-64731, 64733-64735, 64737, 64739-64746, 64749, 64752-64755, 64758, 64760, 64763, 64765-64769, 64771-64789, 64791-64801, 64805-64812, 64816, 64825, 64828, 64833, 64836-64837, 64841, 64843-64847, 64850, 64853-64854, 64856-64858, 64861, 64869, 64871-64875, 64877, 64880-64882, 64890-64891, 64897-64901, 64907, 64910-64911, 64913-64921, 64923-64924, 64926, 64928-64934, 64936, 64939, 64941-64942, 64945, 64947-64952, 64954, 64956, 64961, 64966, 64972-64975, 64977-64984, 64987-64988, 64992, 64994-64996, 64998, 65003-65009, 65011-65014, 65016, 65018-65022, 65024-65035, 65037, 65039-65041, 65043-65044, 65046-65052, 65055, 65057, 65060, 65063-65064, 65069, 65072, 65075, 65077, 65079-65081, 65085-65086, 65088-65092, 65095, 65098-65099, 65101, 65103, 65105-65107, 65109, 65111-65114, 65116-65118, 65121-65126, 65128-65130, 65134-65137, 65142-65147, 65149, 65151-65153, 65156, 65161-65162, 65164-65165, 65168, 65170, 65173, 65176, 65179, 65181-65184, 65186, 65190, 65192-65197, 65199, 65201-65204, 65206-65210, 65212, 65214, 65216-65217, 65219, 65221, 65223-65225, 65230, 65232-65233, 65235, 65238, 65241-65242, 65244-65247, 65249-65251, 65254, 65256-65258, 65260-65262, 65265-65266, 65268, 65273-65274, 65276-65281, 65287-65289, 65292-65294, 65296-65297, 65304-65307, 65311-65313, 65319-65322, 65324-65325, 65327, 65331, 65333, 65336, 65338-65339, 65341-65343, 65345, 65348-65357, 65359, 65361-65362, 65365-65374, 65376-65378, 65380, 65385-65387, 65391-65392, 65394-65395, 65397-65399, 65410, 65417, 65423-65425, 65427, 65431, 65433, 65436, 65438-65439, 65443-65447, 65450, 65452, 65455, 65457, 65460, 65463, 65466, 65468-65469, 65471, 65473-65479, 65484-65487, 65495, 65498-65501, 65503, 65506-65507, 65509-65511, 65513-65514, 65516, 65518-65519, 65521, 65525-65527, 65529, 65534, 65537, 65541, 65546-65548, 65552-65554, 65556, 65558-65561, 65563, 65571, 65573-65574, 65576-65578, 65583, 65586, 65588-65589, 65591-65592, 65594-65595, 65597, 65599-65608, 65610-65613, 65615-65618, 65621, 65624, 65626-65627, 65631-65632, 65634-65636, 65638, 65641, 65644, 65647-65649, 65651, 65653-65660, 65662-65666, 65668, 65670, 65672, 65674-65675, 65677-65683, 65685-65688, 65694, 65696-65697, 65699-65702, 65704, 65707-65708, 65710-65714, 65717, 65722-65731, 65735-65736, 65738-65745, 65749, 65751-65755, 65758-65762, 65764-65769, 65778, 65780, 65784, 65791, 65794-65796, 65798, 65802-65807, 65809-65810, 65812-65815, 65817-65818, 65824-65826, 65828-65832, 65836, 65838-65839, 65841-65844, 65846-65848, 65850, 65852-65853, 65855, 65858, 65860-65862, 65864-65867, 65869, 65871-65873, 65876-65878, 65880, 65885, 65887, 65889, 65891-65897, 65900-65902, 65905, 65907-65914, 65916-65917, 65919-65921, 65925, 65928-65929, 65931, 65933-65934, 65936-65939, 65946-65947, 65954-65956, 65958-65961, 65963, 65966-65972, 65974-65976, 65980-65982, 65985-65987, 65989-65991, 65993-65996, 65998, 66000, 66002-66005, 66007-66011, 66013-66021, 66024, 66026-66027, 66029, 66031-66034, 66036, 66038-66039, 66042-66044, 66046, 66053, 66055-66060, 66062-66063, 66065-66069, 66072, 66075, 66077-66083, 66085, 66087-66089, 66091, 66093, 66095-66096, 66099-66102, 66104-66107, 66109-66111, 66113, 66115-66116, 66118-66121, 66123-66127, 66130-66132, 66134-66135, 66137-66138, 66140-66146, 66148-66155, 66157-66161, 66163-66164, 66166-66167, 66169-66171, 66174, 66176-66179, 66183, 66186-66193, 66195-66200, 66202, 66204-66208, 66211-66220, 66222-66224, 66226, 66228, 66230-66231, 66233-66238, 66241-66248, 66250, 66252, 66254-66257, 66260-66263, 66267, 66269-66270, 66272-66274, 66277, 66279-66283, 66285-66294, 66296-66312, 66314-66316, 66320-66321, 66330-66332, 66334, 66336-66337, 66339-66340, 66342, 66344-66352, 66355-66359, 66362-66364, 66369-66377, 66379, 66381, 66383-66393, 66395-66396, 66398-66399, 66401-66404, 66406, 66408-66409, 66414-66418, 66421, 66423-66424, 66426, 66428, 66430-66435, 66437-66458, 66463-66466, 66468-66469, 66471-66472, 66476-66477, 66479, 66483-66487, 66489, 66492-66495, 66497-66499, 66501, 66503, 66506-66516, 66518, 66521-66522, 66524, 66526-66535, 66539-66540, 66542-66552, 66557, 66559, 66561, 66563-66569, 66571-66582, 66584-66586, 66589, 66591-66593, 66595, 66597-66610, 66612-66613, 66615, 66618-66619, 66622, 66625-66627, 66629-66630, 66632-66636, 66638-66640, 66646, 66650, 66656-66657, 66659-66661, 66664-66665, 66668-66685, 66687-66694, 66696-66697, 66704-66707, 66709-66710, 66712-66713, 66715, 66717-66721, 66723, 66725-66730, 66735-66737, 66741, 66745-66751, 66754-66756, 66758-66759, 66761-66762, 66764-66774, 66776-66778, 66780-66781, 66783-66788, 66790-66791, 66794, 66796-66797, 66802-66805, 66809-66811, 66813-66814, 66819, 66821, 66823, 66825-66826, 66828, 66830-66834, 66837-66839, 66841, 66843-66846, 66848-66851, 66855, 66857-66859, 66861-66868, 66871-66874, 66876, 66881-66882, 66884-66886, 66889-66892, 66894-66895, 66897, 66899-66900, 66903-66904, 66906-66913, 66915-66919, 66922-66924, 66927, 66929, 66932-66936, 66939, 66941-66943, 66946-66948, 66950, 66953, 66955, 66957, 66959, 66961-66966, 66970-66973, 66975, 66977, 66979, 66982-66988, 66990-66993, 66995-66999, 67001-67004, 67007-67010, 67013, 67015-67023, 67025, 67027-67028, 67030-67034, 67036-67037, 67041-67057, 67059, 67062, 67064-67067, 67069-67071, 67074-67083, 67085-67087, 67090-67093, 67095-67097, 67101-67103, 67105-67108, 67111, 67113-67115, 67117, 67120, 67124-67125, 67127, 67131-67134, 67139-67143, 67146, 67148, 67151, 67154, 67156-67160, 67162, 67164-67166, 67168-67169, 67171-67172, 67174, 67178-67179, 67181-67183, 67187-67190, 67194-67197, 67200-67201, 67203, 67206-67207, 67211-67214, 67216-67221, 67223-67224, 67226-67228, 67230, 67232, 67235-67239, 67241-67251, 67253-67254, 67257-67258, 67260, 67263, 67265-67267, 67269, 67271-67272, 67275-67276, 67279-67281, 67285, 67287-67295, 67297, 67299-67307, 67309-67311, 67313-67314, 67316-67322, 67324-67325, 67327-67330, 67333, 67335-67340, 67343, 67346, 67352, 67355, 67359, 67362-67363, 67365, 67367, 67370-67371, 67378-67379, 67381-67385, 67387-67388, 67391-67392, 67394, 67396-67399, 67401-67409, 67412-67413, 67419-67422, 67425, 67427, 67430-67431, 67433-67444, 67446-67449, 67451, 67453-67455, 67458-67459, 67464, 67466-67467, 67469, 67471-67475, 67478-67482, 67487-67488, 67490-67491, 67494, 67496-67500, 67503-67514, 67516-67520, 67522-67524, 67527, 67534-67535, 67538-67548, 67550, 67552-67553, 67557-67558, 67561, 67563-67567, 67569-67570, 67572, 67574-67575, 67579-67588, 67590, 67593, 67595-67602, 67606, 67608-67611, 67613-67615, 67617, 67619-67626, 67629, 67635, 67638, 67640, 67644, 67647, 67649, 67651, 67653-67658, 67660-67661, 67663, 67665-67667, 67670-67673, 67679-67689, 67695-67701, 67703-67706, 67708-67709, 67711-67712, 67715-67722, 67724, 67726, 67728-67738, 67740, 67743-67744, 67747-67750, 67752-67755, 67757, 67759, 67761, 67764-67770, 67772-67775, 67777-67780, 67782-67784, 67786, 67788-67792, 67794-67796, 67798-67800, 67802-67803, 67805, 67808-67809, 67812-67813, 67815, 67817-67819, 67821, 67826-67833, 67835-67836, 67838, 67840-67844, 67847-67849, 67853-67860, 67862-67863, 67865-67868, 67870, 67872-67873, 67876-67879, 67883-67884, 67887, 67889-67893, 67895, 67897-67899, 67901-67906, 67908-67914, 67921-67925, 67927-67933, 67938-67940, 67942-67944, 67948, 67953-67957, 67960, 67962, 67964-67968, 67971, 67973, 67975, 67977-67983, 67985-67986, 67988-67989, 67991-67995, 67998, 68000, 68002-68010, 68013-68017, 68019-68020, 68022, 68024, 68027-68032, 68035-68038, 68041-68057, 68059, 68061-68063, 68066-68069, 68071-68079, 68081, 68085, 68089, 68093, 68096-68102, 68104, 68107-68110, 68112-68113, 68115-68123, 68125, 68128, 68130, 68132, 68134-68136, 68138-68139, 68141, 68144, 68146-68156, 68158, 68161, 68163, 68165-68168, 68170, 68174-68177, 68179-68180, 68182, 68185-68187, 68189-68191, 68193-68194, 68196-68198, 68200-68201, 68203, 68206-68208, 68210-68211, 68213, 68216-68219, 68221, 68226-68237, 68240-68245, 68247, 68249-68250, 68252-68253, 68256-68258, 68262-68264, 68266, 68268-68269, 68273-68274, 68276-68278, 68280-68281, 68283-68287, 68290, 68292-68293, 68296, 68298-68301, 68303-68307, 68309-68313, 68315-68316, 68319-68324, 68326, 68328, 68330-68333, 68335-68338, 68340-68345, 68349-68358, 68360-68364, 68366-68369, 68371-68373, 68375-68378, 68381-68386, 68388-68394, 68398-68401, 68403-68410, 68414, 68418-68421, 68423-68424, 68427, 68431-68432, 68440-68442, 68444-68445, 68447-68449, 68451-68453, 68456, 68458, 68460, 68462-68463, 68465-68467, 68470-68474, 68477-68487, 68489, 68493-68495, 68497-68501, 68504-68508, 68510-68511, 68514-68517, 68519-68527, 68531, 68533, 68538, 68540-68544, 68546-68550, 68552-68555, 68557, 68559-68564, 68566-68569, 68572-68574, 68576, 68579-68588, 68591, 68595-68596, 68599-68600, 68602, 68606-68608, 68611-68615, 68617-68626, 68628, 68635-68636, 68638-68639, 68641, 68643-68651, 68653-68654, 68656, 68658, 68660-68674, 68677-68683, 68685-68688, 68693, 68695-68696, 68702-68703, 68705-68708, 68711-68712, 68714-68722, 68725-68730, 68734-68739, 68742-68744, 68747-68748, 68752-68762, 68764-68766, 68768-68772, 68774-68775, 68777, 68779-68781, 68783-68785, 68788-68789, 68791-68793, 68796, 68798, 68801-68805, 68808-68809, 68811-68816, 68819-68823, 68827-68831, 68833-68834, 68836, 68838, 68844-68848, 68850-68853, 68857, 68859, 68862-68869, 68871-68877, 68881-68884, 68886, 68890-68891, 68896, 68898-68901, 68903-68906, 68908-68909, 68913-68914, 68916-68917, 68919-68925, 68928, 68930-68931, 68933, 68935-68936, 68938, 68940, 68942-68948, 68951-68956, 68958-68963, 68965-68967, 68971-68975, 68977-68982, 68986-68992, 68995-68996, 68998, 69001-69007, 69010-69011, 69013-69014, 69016, 69018-69020, 69024, 69026, 69028-69032, 69034-69037, 69039-69041, 69043-69044, 69046-69048, 69051, 69053-69056, 69058, 69060-69064, 69069-69070, 69072-69077, 69079, 69084-69089, 69091, 69093-69095, 69099-69101, 69103-69107, 69109, 69111-69117, 69119-69121, 69123-69124, 69126-69127, 69131-69135, 69142-69144, 69147-69149, 69151-69153, 69158, 69160-69167, 69169, 69171, 69173-69175, 69177-69180, 69185-69192, 69194-69197, 69199-69202, 69205, 69209-69212, 69215-69217, 69219-69222, 69226, 69228-69239, 69241, 69243, 69245-69246, 69248-69251, 69253-69258, 69263-69274, 69276-69280, 69282-69289, 69292, 69294-69295, 69297-69299, 69301, 69303-69304, 69307, 69310-69319, 69321-69322, 69324-69331, 69333-69341, 69345-69351, 69353-69358, 69360-69366, 69368-69369, 69371-69380, 69382-69394, 69396, 69398-69400, 69402, 69406, 69409, 69411, 69413-69414, 69416, 69418-69423, 69426, 69428-69429, 69432-69433, 69435-69437, 69439, 69442-69445, 69448-69449, 69451-69455, 69461-69465, 69467-69479, 69481-69483, 69485, 69488-69492, 69494, 69498-69500, 69502-69503, 69505, 69507-69509, 69511, 69513-69515, 69518-69520, 69522-69524, 69526-69528, 69530-69538, 69540-69542, 69544-69552, 69554, 69556-69558, 69560-69562, 69564-69575, 69577, 69579, 69581, 69583-69586, 69588-69596, 69598-69600, 69602-69605, 69607-69614, 69616-69621, 69625-69626, 69629-69632, 69635-69639, 69642, 69644-69645, 69647-69652, 69657-69658, 69660-69668, 69670-69671, 69674, 69677-69681, 69683, 69686, 69689-69693, 69698-69701, 69703-69705, 69707, 69709, 69712-69713, 69715-69722, 69724-69730, 69733, 69735-69736, 69738, 69741-69754, 69756-69761, 69765-69766, 69768, 69771, 69775-69776, 69778-69781, 69784-69788, 69790, 69792, 69795, 69797-69798, 69800, 69802-69803, 69805, 69807-69815, 69817, 69819-69820, 69822-69823, 69825-69828, 69832, 69835, 69837-69838, 69841-69844, 69846-69849, 69851-69853, 69856-69857, 69859-69864, 69866-69868, 69870, 69872, 69877-69878, 69882-69887, 69889, 69891, 69895-69898, 69900, 69902, 69905-69908, 69910-69911, 69914, 69916, 69919, 69925, 69929, 69932, 69934-69950, 69954-69958, 69961-69962, 69965, 69967-69972, 69974-69976, 69978, 69981, 69983-69985, 69987-69992, 69995, 70000-70002, 70005, 70007-70010, 70013-70025, 70027-70032, 70034-70036, 70038-70043, 70045-70046, 70048-70058, 70061, 70064, 70066-70067, 70071-70074, 70078-70079, 70082, 70084-70086, 70088, 70091-70093, 70097, 70100-70103, 70106-70110, 70113-70115, 70118, 70121-70123, 70126, 70128-70129, 70133-70135, 70137, 70139-70140, 70142, 70144, 70147, 70149-70150, 70153-70154, 70158-70159, 70163-70164, 70166, 70168, 70170, 70173, 70175-70178, 70180-70184, 70186-70188, 70190-70191, 70193, 70195, 70197-70201, 70203-70207, 70209-70213, 70216-70225, 70229, 70231-70232, 70234-70239, 70243, 70245, 70248-70250, 70252-70253, 70255-70259, 70261-70272, 70274-70277, 70280-70282, 70284-70285, 70287-70289, 70291-70294, 70297-70299, 70301-70308, 70310-70314, 70316-70321, 70324-70326, 70328-70329, 70331-70334, 70337-70338, 70340-70345, 70348-70352, 70355-70361, 70363, 70365-70379, 70383-70386, 70388-70389, 70392-70393, 70395-70396, 70398-70402, 70405-70414, 70416-70419, 70421-70422, 70424-70426, 70430-70433, 70437-70439, 70441-70450, 70452-70462, 70464-70470, 70475-70482, 70484-70486, 70488, 70490-70493, 70495-70499, 70501-70502, 70504, 70511, 70513-70517, 70521-70522, 70524-70527, 70529-70537, 70539-70540, 70542-70543, 70545, 70547-70548, 70552-70556, 70558-70567, 70569-70571, 70574-70575, 70577, 70579-70582, 70587-70589, 70592-70593, 70595-70599, 70602-70605, 70608-70612, 70614, 70616, 70618, 70620-70626, 70628, 70633-70638, 70640, 70643-70644, 70646-70648, 70650-70652, 70654-70655, 70657-70659, 70662-70665, 70668-70671, 70674-70677, 70679, 70681, 70683-70688, 70690, 70698-70700, 70704, 70706-70707, 70709, 70715, 70717-70721, 70723, 70725-70726, 70728, 70733, 70735-70736, 70738-70740, 70742-70744, 70746-70749, 70751, 70755-70756, 70758-70762, 70764-70773, 70775-70776, 70781-70782, 70784, 70789, 70792, 70794, 70796-70797, 70799-70800, 70802, 70805, 70808-70810, 70812-70814, 70816-70819, 70821, 70823-70829, 70831, 70833-70835, 70839, 70841, 70843, 70846-70847, 70849-70854, 70858, 70861-70869, 70871-70873, 70875-70884, 70886-70892, 70894-70899, 70901-70905, 70908-70909, 70911-70912, 70917-70918, 70920-70925, 70928-70929, 70931, 70935-70937, 70941-70943, 70947-70950, 70952, 70954, 70958-70961, 70966-70967, 70969, 70973-70975, 70977, 70982-70987, 70991-70992, 70994, 71001-71002, 71006, 71008-71009, 71011-71016, 71018-71021, 71023, 71029, 71031, 71033-71036, 71038-71042, 71046-71052, 71055-71056, 71058-71060, 71063-71064, 71066-71072, 71074-71076, 71078, 71080-71084, 71086, 71088, 71091, 71093-71097, 71100, 71103, 71105-71116, 71118-71119, 71121, 71124-71128, 71131, 71133, 71138, 71140-71141, 71145, 71147-71149, 71153-71154, 71156-71160, 71162, 71164, 71166-71174, 71178-71186, 71189-71191, 71193, 71195-71196, 71200-71202, 71205, 71209, 71212-71214, 71218, 71220-71228, 71230-71232, 71234-71237, 71239-71242, 71245-71249, 71251, 71253-71260, 71262-71264, 71266-71269, 71272-71275, 71277-71279, 71281, 71283-71287, 71289, 71292, 71294-71306, 71308, 71310, 71312-71313, 71315-71319, 71321-71327, 71329-71332, 71334-71336, 71340-71344, 71346-71347, 71349-71359, 71361-71363, 71365-71367, 71369-71373, 71375-71376, 71378-71380, 71382-71387, 71389-71392, 71395-71399, 71420-71421, 71423, 71425-71426, 71430-71431, 71433-71436, 71438-71440, 71442-71443, 71445, 71449-71451, 71453-71454, 71456-71457, 71459-71466, 71471-71483, 71485-71490, 71493-71498, 71500-71505, 71507-71513, 71516-71518, 71528, 71530-71533, 71535-71545, 71547-71556, 71559, 71561-71568, 71570-71572, 71574, 71576-71577, 71579-71585, 71587, 71589-71590, 71593-71594, 71596-71601, 71603-71605, 71609-71612, 71614-71619, 71621-71623, 71625-71626, 71628, 71630-71638, 71643, 71645-71646, 71650, 71654, 71656, 71659-71661, 71663-71665, 71667, 71673, 71678-71679, 71682-71685, 71687-71690, 71692-71693, 71696-71698, 71700-71702, 71705-71708, 71710-71715, 71719-71722, 71724-71725, 71727, 71729-71732, 71736, 71738-71740, 71743, 71746-71752, 71756-71757, 71759-71763, 71766-71773, 71775, 71777-71781, 71785-71791, 71793, 71795-71796, 71798-71799, 71801, 71804-71806, 71809-71811, 71814-71815, 71817-71825, 71829, 71831-71834, 71837, 71841-71842, 71845, 71847-71850, 71854, 71856, 71858-71859, 71861, 71865, 71867, 71871-71876, 71879-71882, 71884-71888, 71890, 71893, 71895-71896, 71898-71900, 71904-71906, 71908-71913, 71915-71919, 71924-71925, 71928, 71934-71937, 71940-71943, 71945-71952, 71957-71960, 71962-71976, 71978-71980, 71982, 71984-71985, 71988-71994, 71996, 71998, 72000-72001, 72005-72010, 72012-72022, 72025-72037, 72039-72041, 72043, 72045-72046, 72048-72049, 72052, 72054-72057, 72061-72062, 72065-72074, 72077-72080, 72083-72084, 72087, 72089-72092, 72094, 72097-72101, 72104, 72107-72116, 72118, 72120-72132, 72135, 72138, 72140, 72142-72146, 72151, 72154, 72156-72159, 72161-72162, 72165-72170, 72172-72178, 72180-72182, 72185-72186, 72188-72189, 72191, 72194-72195, 72197, 72199-72203, 72208-72211, 72215, 72220-72222, 72226-72227, 72231, 72233-72234, 72236-72238, 72240-72244, 72246-72247, 72249, 72251-72252, 72254, 72257, 72260-72261, 72264-72265, 72267, 72269-72271, 72273, 72275-72277, 72279-72283, 72285-72286, 72288, 72291, 72294-72296, 72298-72299, 72302-72309, 72313-72321, 72323, 72327-72329, 72331-72332, 72334-72337, 72340-72341, 72343, 72345-72346, 72350-72354, 72356-72358, 72360-72371, 72373, 72375, 72381-72383, 72385, 72389-72393, 72396-72403, 72408-72410, 72415, 72418-72422, 72425-72426, 72428, 72431-72434, 72436, 72439-72443, 72446-72449, 72454, 72459-72463, 72465-72467, 72469-72471, 72476-72479, 72481-72482, 72485-72486, 72488-72493, 72497-72498, 72500-72503, 72505-72508, 72510-72513, 72517, 72522, 72524-72526, 72528, 72532, 72534, 72536-72542, 72544-72545, 72548, 72554, 72557-72561, 72564-72565, 72568-72577, 72579, 72581-72585, 72587, 72589-72593, 72595-72602, 72604, 72607-72617, 72619-72622, 72624-72625, 72628-72630, 72633-72636, 72638-72639, 72641-72643, 72646, 72648-72653, 72657-72660, 72662-72664, 72667-72671, 72674, 72676, 72678-72680, 72682-72689, 72691, 72695, 72697, 72702, 72706, 72708, 72711, 72713-72716, 72718-72721, 72723, 72726, 72728, 72730-72736, 72738, 72740, 72742, 72744, 72746, 72751, 72754-72756, 72758-72760, 72762-72769, 72773-72774, 72778, 72784-72786, 72788-72792, 72794-72795, 72797-72798, 72800-72801, 72804-72805, 72807, 72810, 72812, 72815-72816, 72818, 72822-72824, 72827-72830, 72832-72834, 72836-72837, 72839, 72847, 72853, 72859-72860, 72862, 72866, 72868-72872, 72875-72878, 72880, 72883, 72885, 72887-72898, 72900, 72904, 72906-72908, 72910-72912, 72923-72924, 72929, 72931, 72934-72943, 72946-72948, 72950-72951, 72955, 72961-72962, 72966-72967, 72969, 72971-72974, 72976-72977, 72979, 72981-72984, 72990, 72992-72994, 72997-73001, 73003-73004, 73011, 73014-73015, 73017, 73020-73024, 73026-73027, 73029, 73031-73035, 73037, 73040, 73042-73043, 73045-73051, 73053-73054, 73059-73062, 73064, 73067-73074, 73076-73077, 73081, 73085-73086, 73088-73090, 73092, 73098-73099, 73102-73103, 73106-73109, 73111-73116, 73118-73124, 73126, 73129-73132, 73135-73137, 73139-73147, 73149-73160, 73165, 73167-73169, 73171, 73173, 73175, 73178-73182, 73186-73189, 73191-73196, 73198-73200, 73202-73210, 73214, 73216-73229, 73231-73232, 73235-73236, 73238, 73240-73241, 73243, 73250-73252, 73254, 73257, 73259-73261, 73263-73265, 73268-73272, 73276, 73282-73286, 73288-73289, 73292, 73294, 73297-73301, 73304, 73306-73311, 73313, 73316-73318, 73320, 73324-73325, 73327-73331, 73333-73336, 73338-73341, 73343-73356, 73358, 73362-73363, 73368-73369, 73373-73378, 73380, 73382-73403, 73408-73409, 73411-73413, 73415-73417, 73420-73425, 73428-73432, 73434-73436, 73438-73439, 73441-73442, 73444, 73446-73448, 73451-73454, 73456-73459, 73462-73465, 73467-73484, 73486-73487, 73490-73491, 73493-73495, 73500-73502, 73504, 73506-73508, 73511, 73513-73514, 73516-73517, 73519-73523, 73527-73531, 73533, 73535-73536, 73538-73539, 73542, 73544, 73548-73549, 73551-73552, 73554-73557, 73560-73566, 73568-73570, 73577-73582, 73584-73587, 73589-73590, 73593, 73598, 73600, 73602-73606, 73608-73609, 73611-73613, 73615-73618, 73620-73621, 73624-73627, 73629-73633, 73635, 73637, 73642-73643, 73647-73651, 73653, 73657, 73659, 73661-73662, 73664-73665, 73667, 73669, 73673-73676, 73682, 73684-73685, 73689-73692, 73695-73699, 73701-73702, 73705, 73707-73709, 73713-73716, 73718, 73720-73726, 73730, 73733, 73736-73738, 73740-73744, 73746, 73748-73751, 73753-73756, 73758-73759, 73766, 73768-73771, 73773, 73775-73778, 73780, 73782-73784, 73788-73792, 73794-73797, 73799, 73801, 73803-73805, 73807-73808, 73812-73814, 73816-73823, 73825-73832, 73834-73835, 73837-73838, 73841-73843, 73846-73848, 73850, 73852-73855, 73857-73858, 73860-73866, 73871, 73874-73878, 73881-73884, 73886-73890, 73892, 73894-73900, 73903, 73906-73908, 73910, 73912, 73916-73923, 73925, 73927-73928, 73930-73938, 73940, 73943-73946, 73948-73949, 73952-73961, 73966, 73968-73970, 73973-73975, 73977, 73981-73982, 73985-73989, 73992, 73994-73997, 73999-74000, 74003-74014, 74017, 74022-74026, 74030-74033, 74038-74039, 74041-74048, 74050, 74052-74063, 74065-74068, 74070, 74072-74074, 74076, 74079-74080, 74082-74088, 74090-74094, 74096-74110, 74116-74117, 74119-74122, 74128, 74130-74132, 74134-74135, 74137, 74140, 74143, 74147-74149, 74151-74155, 74157-74160, 74162-74163, 74165-74168, 74171, 74173-74174, 74176-74180, 74182-74187, 74189-74191, 74193-74197, 74201, 74205-74211, 74213-74214, 74216, 74219-74223, 74225-74238, 74240-74241, 74243, 74245-74247, 74250, 74252-74253, 74257-74261, 74263-74264, 74266-74268, 74272, 74278-74279, 74286-74287, 74290-74291, 74293, 74295-74297, 74300-74303, 74305-74308, 74310-74312, 74314-74317, 74319-74320, 74322-74324, 74326-74336, 74341, 74345-74348, 74350-74351, 74355-74362, 74364-74371, 74374-74375, 74377, 74379-74381, 74383-74385, 74387, 74391, 74394-74395, 74398, 74400, 74403-74404, 74407, 74410-74413, 74416-74420, 74423, 74427-74428, 74431-74436, 74438, 74440-74443, 74445-74453, 74456-74458, 74460, 74462, 74464, 74467, 74469-74477, 74479, 74481-74490, 74495, 74497-74499, 74501, 74503, 74506-74509, 74511, 74514-74525, 74529-74533, 74535-74536, 74540-74541, 74544-74546, 74549-74550, 74552, 74554-74555, 74557-74565, 74568, 74570-74573, 74575-74586, 74588, 74590, 74592-74598, 74601, 74605-74606, 74610-74611, 74613-74616, 74618, 74620-74621, 74624-74626, 74628, 74630-74635, 74639-74640, 74645-74654, 74656-74659, 74661-74662, 74664-74668, 74672-74676, 74678-74679, 74681-74688, 74691-74695, 74697-74701, 74703-74710, 74716, 74722, 74725-74726, 74728-74731, 74733-74735, 74737, 74739-74743, 74746, 74748-74750, 74752, 74755-74764, 74766, 74768-74772, 74776-74780, 74783, 74786-74789, 74791-74793, 74795, 74798-74806, 74809, 74811, 74813-74823, 74825-74827, 74830-74831, 74836-74839, 74841, 74843-74846, 74848, 74850-74854, 74856-74859, 74861-74865, 74867-74880, 74883-74884, 74886, 74889-74892, 74895-74897, 74899-74901, 74903-74915, 74917-74919, 74921-74924, 74926, 74928-74933, 74937-74938, 74940-74945, 74947, 74950-74951, 74953-74954, 74957, 74959-74960, 74962, 74965-74967, 74969-74971, 74977, 74979, 74981-74982, 74985-74989, 74991-74999, 75001, 75004, 75007-75018, 75021-75022, 75024-75025, 75027-75028, 75030-75032, 75035-75040, 75042-75047, 75049-75052, 75054, 75056-75067, 75073-75075, 75077-75079, 75081-75089, 75092-75095, 75097-75102, 75104-75111, 75113-75114, 75117-75118, 75122-75125, 75128-75130, 75132, 75134-75136, 75140-75149, 75152-75153, 75155, 75157, 75159, 75162-75163, 75165-75168, 75171, 75174-75176, 75178-75180, 75182-75185, 75187-75188, 75191-75197, 75199-75200, 75202, 75204, 75206, 75208-75214, 75216-75217, 75220-75221, 75223-75225, 75227-75228, 75230, 75233, 75235-75237, 75239, 75241, 75244, 75246-75247, 75249-75251, 75253, 75255, 75258, 75260-75263, 75268-75274, 75277-75282, 75284-75285, 75291-75296, 75298-75299, 75301-75302, 75304-75307, 75309, 75311, 75313-75316, 75319, 75321-75323, 75326, 75328-75331, 75333, 75335-75342, 75346-75348, 75350-75352, 75354, 75356, 75358-75359, 75362, 75365-75368, 75370-75371, 75374-75375, 75377-75388, 75390-75391, 75394, 75396-75400, 75402-75405, 75407-75409, 75411-75427, 75429, 75431, 75434-75436, 75438-75440, 75446-75447, 75451, 75454-75460, 75462-75465, 75467, 75469, 75471, 75475, 75477, 75480-75481, 75483, 75485, 75487, 75489-75491, 75497, 75499, 75502, 75504-75507, 75509, 75511-75514, 75516-75517, 75522, 75524, 75526, 75529-75530, 75537, 75540-75541, 75543, 75545-75546, 75549-75554, 75557-75558, 75561, 75563-75564, 75566-75567, 75572, 75574-75579, 75581-75582, 75585-75586, 75588-75590, 75593-75595, 75600, 75602, 75605-75607, 75611, 75613-75615, 75617, 75621-75625, 75627-75632, 75634-75635, 75638, 75640, 75642-75643, 75645-75646, 75648-75651, 75654, 75656-75658, 75662-75665, 75669-75670, 75673-75679, 75682-75683, 75685, 75688-75690, 75692, 75695, 75698, 75701, 75703, 75705, 75707-75708, 75710, 75712, 75716-75717, 75719-75720, 75722-75723, 75726-75732, 75734, 75736-75738, 75740, 75742-75743, 75749, 75752-75755, 75757-75761, 75764-75765, 75768-75769, 75771-75775, 75777-75786, 75791, 75794-75795, 75797-75801, 75803-75804, 75808-75809, 75812-75813, 75816-75818, 75820, 75822-75823, 75825-75827, 75833-75837, 75839-75851, 75855-75857, 75861-75863, 75865, 75867-75871, 75876-75879, 75881-75884, 75886, 75888, 75891-75893, 75895-75898, 75901-75904, 75906-75909, 75912, 75915-75918, 75920, 75923-75929, 75931-75938, 75941-75942, 75944-75947, 75949-75952, 75954-75959, 75961-75962, 75964-75973, 75975, 75980, 75982-75984, 75987, 75989-75990, 75992-75999, 76002-76003, 76005-76008, 76010, 76012-76013, 76015, 76019-76021, 76024-76034, 76036-76038, 76040-76044, 76046-76047, 76054-76056, 76059-76066, 76069-76071, 76074-76080, 76082-76085, 76091, 76094-76096, 76100-76103, 76105, 76107, 76110-76112, 76117-76119, 76121, 76126-76128, 76130, 76132-76138, 76141-76147, 76151, 76154, 76159-76164, 76166, 76168, 76170-76172, 76176-76177, 76179, 76181, 76183-76188, 76191-76192, 76194, 76196, 76198, 76200-76202, 76204-76207, 76209-76211, 76213-76214, 76216, 76218-76219, 76221-76224, 76226, 76228-76233, 76235, 76237-76244, 76246, 76248, 76252-76254, 76256-76258, 76260, 76263-76264, 76267-76269, 76271-76273, 76276-76282, 76284-76285, 76287, 76289-76293, 76296-76299, 76301-76306, 76309-76315, 76317, 76321-76327, 76334-76336, 76338-76339, 76341-76343, 76345-76347, 76350-76354, 76358-76362, 76364, 76366-76367, 76369, 76371-76374, 76376, 76378-76380, 76382-76385, 76387-76388, 76390-76392, 76394, 76398-76404, 76406-76411, 76413, 76415, 76418-76420, 76422-76426, 76428, 76431-76433, 76435-76444, 76446-76450, 76452-76454, 76456-76467, 76469, 76472-76476, 76478, 76480-76485, 76489-76490, 76492-76496, 76498-76500, 76504, 76508, 76514-76517, 76520, 76522-76523, 76527-76528, 76530-76535, 76537, 76540-76541, 76544-76546, 76549, 76551-76552, 76556-76559, 76561-76562, 76564-76565, 76567-76571, 76575, 76577-76579, 76581, 76589-76592, 76594-76597, 76600-76603, 76605, 76608, 76611-76612, 76615, 76618-76622, 76624, 76626-76633, 76635, 76637-76639, 76643-76651, 76653-76655, 76657, 76661-76662, 76664, 76666, 76668-76670, 76672-76678, 76680, 76683, 76685-76686, 76689, 76692-76693, 76695-76696, 76699-76700, 76702, 76704-76707, 76710, 76712, 76715-76718, 76720, 76724, 76726-76727, 76730-76732, 76734-76735, 76739-76741, 76743, 76745, 76747, 76749, 76751-76753, 76755, 76757, 76761-76762, 76764-76767, 76770, 76773-76775, 76777, 76782, 76784-76785, 76789, 76793-76799, 76801-76803, 76805-76813, 76816-76817, 76819, 76821-76828, 76830-76831, 76833-76835, 76837, 76839, 76841-76844, 76846, 76850-76853, 76855-76857, 76859-76864, 76868, 76870-76872, 76874-76877, 76880, 76884-76888, 76890-76891, 76893, 76895, 76897-76899, 76901-76903, 76905-76908, 76912, 76916, 76918, 76920-76922, 76924-76926, 76929-76930, 76933-76934, 76936-76938, 76940-76941, 76943-76944, 76946-76947, 76949, 76951-76957, 76959-76960, 76962-76964, 76966-76968, 76970-76971, 76974-76976, 76978, 76980-76989, 76991-76996, 76999-77003, 77005, 77007, 77014-77015, 77017-77019, 77022-77023, 77025-77026, 77028-77031, 77034, 77036-77038, 77041, 77045-77049, 77053, 77056-77057, 77061-77069, 77071-77072, 77074-77084, 77087-77092, 77095-77098, 77101-77106, 77108-77112, 77114-77117, 77120, 77122-77126, 77129, 77132-77135, 77137-77142, 77144, 77147, 77149, 77151, 77153-77159, 77161, 77165-77174, 77176-77180, 77182-77183, 77185-77188, 77190-77191, 77194-77198, 77202, 77207-77208, 77210, 77213, 77215-77217, 77220-77221, 77223, 77226, 77229-77230, 77233-77234, 77236, 77239-77240, 77242-77252, 77254, 77257, 77259, 77261-77262, 77266, 77268-77275, 77277-77285, 77287, 77289-77291, 77293-77298, 77302, 77305-77306, 77309, 77311-77313, 77316-77321, 77323-77333, 77335-77339, 77341-77346, 77350-77353, 77356-77358, 77360-77361, 77363, 77365-77366, 77369-77371, 77373-77374, 77377-77381, 77383, 77385, 77389, 77392-77395, 77397-77399, 77401, 77403-77404, 77406, 77408-77418, 77420-77421, 77430, 77433-77437, 77439, 77442-77443, 77445-77447, 77449, 77451, 77456-77458, 77460, 77462, 77466-77468, 77470-77473, 77475, 77477-77478, 77480, 77482, 77484-77486, 77488-77489, 77493-77494, 77496-77503, 77505-77512, 77515-77530, 77533, 77535-77539, 77545-77546, 77548-77550, 77552-77556, 77561-77562, 77564, 77566, 77570, 77572-77574, 77576-77579, 77582-77583, 77586-77587, 77591, 77593, 77595, 77598, 77600-77605, 77607-77611, 77614, 77616-77617, 77619-77624, 77627-77632, 77634-77638, 77640-77643, 77646, 77649, 77653, 77655, 77657-77659, 77663, 77665-77666, 77668, 77670-77671, 77673-77677, 77679-77680, 77682-77683, 77685-77689, 77691-77697, 77699, 77702-77711, 77713-77714, 77718-77719, 77723-77725, 77728, 77735-77736, 77738, 77742-77743, 77745-77748, 77750, 77752-77760, 77762, 77764, 77766-77767, 77770, 77773, 77775, 77778, 77780, 77783-77785, 77787-77788, 77790, 77793-77798, 77800-77802, 77804-77807, 77809-77811, 77813, 77815, 77817-77830, 77832-77834, 77837, 77840, 77843, 77845, 77848-77850, 77852, 77854-77863, 77865-77876, 77878, 77881, 77884-77885, 77887-77888, 77890-77891, 77893-77894, 77896, 77898, 77901-77903, 77906-77908, 77910, 77912-77915, 77917-77918, 77920, 77922-77923, 77925-77929, 77932-77939, 77941, 77943-77944, 77946-77947, 77950-77952, 77954-77965, 77970, 77972, 77974, 77978, 77980-77984, 77988-77992, 77994-77996, 77998-78002, 78005-78008, 78010-78014, 78017-78021, 78023-78036, 78038, 78040-78046, 78049-78052, 78060-78061, 78063, 78073-78074, 78076, 78079, 78081, 78085-78086, 78088-78099, 78101-78105, 78109-78112, 78114-78116, 78118-78119, 78121-78123, 78125-78128, 78130, 78132-78134, 78136-78138, 78140-78145, 78147-78149, 78151-78152, 78154-78158, 78162-78167, 78174-78176, 78182-78194, 78196-78199, 78201-78207, 78210-78215, 78217-78220, 78224, 78226-78232, 78234-78237, 78240-78245, 78252, 78254-78270, 78275, 78278-78285, 78287-78289, 78291, 78293-78295, 78297-78300, 78303-78305, 78307-78312, 78314, 78318-78322, 78324, 78326-78327, 78329-78331, 78333-78334, 78337-78341, 78343-78344, 78347, 78349-78353, 78357, 78361-78363, 78365-78371, 78374-78381, 78385-78386, 78388-78390, 78392, 78394-78395, 78399, 78404-78405, 78407-78408, 78413-78414, 78418, 78422, 78424, 78426, 78428-78432, 78434, 78436-78438, 78440-78444, 78446-78447, 78449-78450, 78452, 78454-78458, 78461-78466, 78469, 78471-78472, 78475-78480, 78484-78485, 78487, 78489-78490, 78495-78497, 78499-78502, 78504-78505, 78511, 78513-78518, 78520-78522, 78524, 78526-78528, 78530-78531, 78534-78538, 78540-78544, 78546-78550, 78552-78559, 78561, 78563, 78566-78567, 78572-78574, 78579-78585, 78589-78591, 78594-78599, 78602-78613, 78615-78617, 78619-78624, 78627, 78629-78631, 78633-78636, 78638-78640, 78642-78645, 78648, 78650, 78652, 78654, 78657-78660, 78662-78666, 78668, 78673-78674, 78676-78677, 78679, 78681-78684, 78686, 78689-78691, 78694-78696, 78698-78700, 78702, 78705, 78707, 78709-78716, 78719, 78721-78722, 78724-78725, 78727, 78729-78731, 78738, 78740-78744, 78746-78747, 78750-78754, 78757, 78760-78762, 78765-78767, 78769, 78772-78776, 78778, 78780, 78782, 78784-78785, 78787, 78789-78792, 78794-78798, 78801-78803, 78805, 78808-78809, 78812-78813, 78816-78818, 78820-78823, 78826, 78828-78831, 78833-78837, 78839-78843, 78845, 78847-78848, 78855-78856, 78858-78860, 78863-78868, 78870, 78872, 78874-78876, 78879, 78881, 78885, 78887, 78889-78890, 78894, 78896-78898, 78900, 78903, 78911-78913, 78915, 78917-78923, 78925-78931, 78933-78935, 78938-78944, 78946-78947, 78950-78951, 78954-78959, 78963-78979, 78981-78985, 78990, 78992-78993, 78996, 78998-79003, 79005-79006, 79008-79012, 79014, 79016-79025, 79027-79029, 79031-79032, 79034, 79036, 79039-79041, 79043, 79045, 79048-79053, 79056, 79058-79062, 79065-79066, 79069, 79071, 79073-79074, 79076, 79078-79080, 79085, 79090, 79092-79093, 79096-79098, 79100-79101, 79104-79113, 79115-79117, 79121-79126, 79129, 79131-79133, 79135-79138, 79140-79144, 79146-79147, 79149, 79152-79167, 79170-79171, 79174, 79177-79178, 79180-79185, 79188-79193, 79195-79198, 79202, 79204, 79206-79207, 79209-79212, 79214-79220, 79222, 79225, 79228-79238, 79241-79243, 79245, 79247-79253, 79255, 79257-79259, 79262-79265, 79267-79269, 79272-79276, 79278-79288, 79291-79293, 79296, 79298, 79300-79301, 79304, 79306-79313, 79321, 79323-79326, 79329-79332, 79334-79346, 79348, 79351, 79353-79358, 79360-79361, 79364, 79366-79368, 79372, 79375-79377, 79379, 79381-79382, 79384, 79387-79392, 79395-79400, 79403-79406, 79408-79414, 79416-79417, 79422-79429, 79431, 79435-79440, 79442-79444, 79448-79450, 79453, 79455-79456, 79458-79459, 79461-79466, 79468-79475, 79477-79479, 79482-79484, 79486, 79489, 79491-79493, 79495-79502, 79505, 79507, 79511-79521, 79524-79527, 79530-79531, 79533-79534, 79536-79537, 79542-79543, 79545-79549, 79552-79556, 79559-79561, 79563, 79565-79569, 79572-79573, 79575, 79578-79585, 79587, 79589-79597, 79599-79601, 79603-79606, 79610-79612, 79616-79620, 79622-79623, 79626, 79628-79630, 79632, 79634-79635, 79637-79638, 79640, 79642-79648, 79650-79652, 79654-79656, 79658-79667, 79671-79672, 79674, 79676, 79679, 79681-79682, 79684-79686, 79688, 79690, 79692, 79694, 79696, 79698, 79700-79702, 79705-79713, 79715, 79718-79722, 79724-79725, 79727-79736, 79738, 79741-79747, 79749, 79751-79752, 79754-79755, 79759, 79761-79763, 79766-79771, 79773-79774, 79778-79779, 79782-79786, 79789, 79793-79795, 79797-79799, 79801-79806, 79808, 79811, 79813, 79815-79818, 79820, 79822-79823, 79827, 79830-79835, 79837-79839, 79845-79846, 79848, 79850-79852, 79854-79855, 79857, 79863-79865, 79868-79874, 79876-79888, 79890-79891, 79894, 79896, 79899, 79901, 79910-79913, 79915-79917, 79919, 79921-79924, 79926-79930, 79933, 79935, 79937, 79943-79952, 79956-79958, 79960-79961, 79963, 79965-79967, 79971-79975, 79977, 79981, 79983, 79985-79987, 79993-79996, 79998-80000, 80004, 80006, 80012-80016, 80018-80025, 80027, 80029, 80031, 80037-80042, 80044-80047, 80051-80054, 80057-80058, 80060-80061, 80066, 80068-80069, 80071-80072, 80074-80077, 80080-80081, 80085, 80087, 80091-80092, 80096-80097, 80099-80102, 80105, 80114-80115, 80118, 80120-80121, 80123-80124, 80127, 80130, 80133-80134, 80137-80144, 80147, 80149-80151, 80153-80154, 80158-80159, 80161-80165, 80167, 80169-80170, 80172, 80175-80181, 80184, 80186-80190, 80192, 80197-80199, 80201-80209, 80216-80220, 80223-80227, 80232-80233, 80235-80237, 80239-80241, 80243-80244, 80246-80250, 80255-80258, 80260-80262, 80265, 80269, 80271-80272, 80276, 80279, 80281, 80283-80286, 80288-80289, 80293, 80295, 80298, 80300, 80302-80306, 80308, 80310-80313, 80315-80324, 80327-80329, 80331, 80339-80340, 80342-80344, 80346, 80351-80355, 80357, 80359, 80362-80363, 80365-80366, 80368-80371, 80375-80378, 80380, 80384-80385, 80387-80389, 80391-80396, 80399-80404, 80406-80407, 80410, 80412-80420, 80422-80427, 80429-80432, 80435-80438, 80440-80441, 80443-80445, 80448-80454, 80456-80457, 80459-80463, 80465-80466, 80473-80474, 80478-80485, 80487-80488, 80490-80491, 80493, 80495-80498, 80500-80510, 80514-80515, 80517-80526, 80529-80531, 80533, 80535-80540, 80542, 80544, 80546-80550, 80552-80556, 80559-80568, 80573-80576, 80578-80583, 80585-80590, 80592-80597, 80599-80602, 80604-80609, 80611, 80613-80626, 80628-80629, 80631-80632, 80634-80636, 80638-80649, 80651-80655, 80662, 80664-80668, 80670-80676, 80681, 80683, 80685-80686, 80688-80689, 80691-80692, 80694-80695, 80697-80698, 80700-80702, 80704-80706, 80708, 80710-80716, 80718, 80721-80724, 80727, 80730-80732, 80734-80735, 80737, 80740-80741, 80743-80745, 80747, 80751-80755, 80758-80762, 80764, 80766-80767, 80770-80771, 80773, 80777-80778, 80780-80781, 80783, 80785-80786, 80789, 80791-80793, 80797-80799, 80801-80806, 80809-80816, 80818, 80824-80830, 80832-80833, 80835, 80838-80839, 80841-80842, 80844, 80847, 80849-80851, 80854-80856, 80858-80861, 80863, 80865-80868, 80870, 80873, 80875-80876, 80878-80891, 80893-80899, 80901-80905, 80910-80911, 80913-80914, 80916-80918, 80920-80923, 80925, 80927-80934, 80936, 80943-80950, 80953, 80955-80957, 80961, 80963-80964, 80966-80967, 80973-80981, 80983-80984, 80987, 80990, 80992, 80998-81002, 81004, 81006-81009, 81012-81013, 81016-81021, 81023-81024, 81027-81029, 81031-81036, 81039, 81041-81043, 81046, 81048, 81052-81054, 81056-81057, 81059-81061, 81063-81068, 81070, 81073, 81075-81078, 81081-81083, 81085-81089, 81091, 81093, 81096-81097, 81099, 81101, 81103, 81105-81107, 81111, 81113-81115, 81117-81118, 81120, 81122-81124, 81127, 81130, 81132, 81134, 81136-81138, 81142-81143, 81146-81147, 81151-81152, 81154, 81156, 81158-81160, 81162, 81164-81165, 81167, 81172-81175, 81177-81180, 81182, 81187-81188, 81190-81192, 81194-81204, 81206-81208, 81210-81215, 81217, 81219, 81221, 81223-81225, 81227, 81229-81236, 81238-81241, 81243-81245, 81247-81250, 81256-81257, 81259-81262, 81264-81266, 81269, 81275-81276, 81278, 81282, 81285-81291, 81295-81296, 81298-81299, 81302, 81309-81315, 81317-81318, 81320, 81322, 81324-81326, 81328-81329, 81331-81332, 81334, 81339-81340, 81342, 81344-81348, 81350-81352, 81354, 81357-81359, 81361-81364, 81366, 81369, 81371-81374, 81376-81382, 81384-81385, 81387-81393, 81395-81400, 81402, 81409-81410, 81413-81416, 81418-81419, 81421, 81423, 81425-81428, 81430-81434, 81436-81439, 81444-81445, 81448, 81451-81454, 81456-81459, 81461, 81465-81466, 81468-81472, 81475-81476, 81478-81486, 81489-81491, 81494-81502, 81504-81507, 81512, 81514, 81517-81519, 81521-81522, 81525-81526, 81530, 81534-81535, 81537-81546, 81548, 81551-81552, 81554-81556, 81558-81562, 81565, 81567-81581, 81583, 81586-81590, 81592-81594, 81598, 81603-81604, 81607-81615, 81618, 81622, 81625-81627, 81630, 81632, 81634-81638, 81640, 81643-81647, 81652-81653, 81655-81664, 81666, 81668-81670, 81672-81674, 81676-81681, 81683, 81687, 81692-81697, 81699, 81701-81702, 81704-81705, 81707, 81709-81718, 81720, 81722-81723, 81725-81727, 81729-81731, 81733-81736, 81738, 81740-81743, 81747-81773, 81775-81776, 81778-81782, 81784-81786, 81788-81792, 81794-81795, 81797-81798, 81801-81813, 81817, 81819-81820, 81825, 81828-81831, 81835-81839, 81843-81844, 81847, 81849, 81853-81854, 81857-81860, 81862-81864, 81866-81867, 81870-81875, 81877, 81879, 81881-81883, 81887-81893, 81899-81900, 81902, 81904-81907, 81910, 81915-81916, 81918-81924, 81926-81927, 81930, 81933, 81936, 81940, 81942, 81945-81946, 81950-81954, 81957-81958, 81960-81961, 81964, 81967, 81969-81970, 81975, 81977-81978, 81980-81981, 81984-81989, 81991-81996, 81999-82002, 82004, 82007-82010, 82012, 82014-82018, 82022, 82024-82033, 82035, 82037-82047, 82049-82053, 82056, 82058-82067, 82069-82072, 82074, 82079-82082, 82084-82091, 82093, 82096-82100, 82102-82103, 82106-82112, 82114-82116, 82119-82121, 82123-82124, 82129, 82132-82135, 82137-82138, 82140-82141, 82143, 82145, 82147-82149, 82151-82153, 82156-82163, 82167-82171, 82175-82176, 82178, 82180, 82182, 82187, 82189, 82192-82194, 82196-82202, 82204-82206, 82208-82215, 82219-82221, 82224-82226, 82229, 82231, 82233, 82238-82245, 82247-82248, 82250-82252, 82256, 82258-82262, 82265-82272, 82274, 82276, 82278, 82280, 82282, 82285-82289, 82293, 82295, 82297, 82300, 82302-82305, 82307-82308, 82311, 82313-82318, 82320-82321, 82323-82327, 82332, 82334-82337, 82342, 82344-82348, 82352-82353, 82355-82356, 82360-82361, 82366-82367, 82369-82373, 82375-82376, 82378-82384, 82386-82387, 82390-82395, 82397-82398, 82400-82406, 82409-82411, 82413-82416, 82418, 82420-82424, 82427, 82431-82434, 82436, 82438-82442, 82444, 82449, 82453-82455, 82457, 82459-82460, 82464-82466, 82468-82473, 82475-82490, 82493, 82496, 82500-82501, 82504, 82506, 82508-82514, 82516, 82519, 82521, 82525-82534, 82536, 82538, 82545, 82547, 82551-82553, 82555, 82557-82559, 82561-82564, 82568-82574, 82577-82579, 82581-82583, 82585-82590, 82592-82597, 82600-82603, 82605-82606, 82610-82611, 82613-82618, 82621-82622, 82624, 82627-82630, 82632-82638, 82641-82642, 82644-82645, 82647, 82649-82654, 82659-82662, 82664, 82667-82672, 82677-82690, 82693, 82697-82699, 82703, 82705, 82708-82709, 82711-82712, 82714-82715, 82717-82718, 82720, 82722-82724, 82726-82727, 82729-82731, 82733-82735, 82738-82739, 82743-82745, 82747-82749, 82752-82756, 82758-82759, 82761-82763, 82765-82766, 82770-82775, 82778, 82781-82785, 82787-82793, 82796, 82802-82805, 82807-82819, 82821-82822, 82824, 82827, 82829, 82832-82842, 82844-82847, 82849-82851, 82855-82857, 82864, 82867, 82871-82873, 82875-82880, 82882, 82885-82887, 82890, 82892, 82894, 82896, 82898-82899, 82901, 82903-82904, 82907, 82913, 82916-82919, 82921-82922, 82924-82925, 82927-82933, 82936, 82938-82940, 82942-82948, 82950, 82952-82958, 82960-82965, 82967, 82971, 82975-82978, 82983-82984, 82987-82988, 82990-82993, 82997, 83000-83001, 83003, 83005, 83007-83013, 83017, 83021-83022, 83024-83025, 83029, 83031, 83035, 83037-83038, 83040, 83043, 83045-83049, 83051-83053, 83056-83057, 83059, 83061, 83063-83065, 83067-83068, 83070-83077, 83081-83083, 83085-83090, 83092-83094, 83098-83099, 83101-83104, 83106, 83108, 83110-83112, 83115-83117, 83119, 83121, 83123-83124, 83127, 83131, 83133, 83135-83143, 83146, 83148-83150, 83152-83154, 83158-83160, 83162, 83165-83166, 83169-83170, 83173, 83175, 83177-83180, 83182-83183, 83185, 83187, 83190-83191, 83198-83199, 83203, 83205-83206, 83212-83216, 83218-83220, 83222, 83224-83226, 83229-83239, 83241-83244, 83247-83249, 83251-83254, 83256, 83258-83263, 83267, 83269-83270, 83272-83278, 83280-83282, 83284-83286, 83288, 83290-83291, 83294-83308, 83310-83313, 83315, 83318, 83320-83323, 83325-83327, 83329-83330, 83333-83334, 83336-83346, 83348-83350, 83354-83355, 83357-83362, 83365-83368, 83370, 83374-83375, 83377, 83379-83380, 83387-83389, 83391-83396, 83398-83400, 83403-83408, 83410, 83412-83421, 83424, 83429-83436, 83438, 83440, 83442-83446, 83448-83451, 83454-83456, 83459-83463, 83467, 83470, 83472-83473, 83477-83482, 83484, 83487, 83490-83491, 83493-83494, 83499, 83502, 83504-83505, 83507, 83509-83511, 83513-83515, 83517-83520, 83524, 83527, 83529, 83533-83536, 83538, 83540-83543, 83545-83546, 83549-83557, 83559, 83561, 83564-83565, 83567-83569, 83572, 83577-83592, 83594-83598, 83600-83602, 83604-83615, 83617-83619, 83621-83624, 83627-83631, 83633-83642, 83645-83646, 83649-83651, 83653, 83655, 83659-83660, 83662, 83664-83667, 83669-83671, 83674, 83677-83678, 83680-83681, 83683-83687, 83690, 83694-83702, 83705-83706, 83708-83715, 83717-83719, 83724, 83727-83730, 83734, 83736-83737, 83740-83749, 83752-83756, 83758-83759, 83761-83764, 83766, 83770-83773, 83777, 83780, 83782, 83784-83787, 83789, 83791, 83795, 83799, 83802, 83805, 83807-83813, 83816, 83819-83820, 83822-83825, 83828-83832, 83834-83836, 83838-83839, 83845-83846, 83848, 83850-83855, 83857-83860, 83862-83864, 83866-83867, 83869-83871, 83873-83877, 83879, 83881-83886, 83889-83891, 83893-83894, 83896, 83900-83902, 83904-83905, 83908-83909, 83912, 83916, 83919, 83925-83926, 83928-83930, 83932, 83934-83942, 83944-83945, 83947-83948, 83951, 83953-83955, 83958, 83960, 83962, 83966, 83972, 83974-83981, 83983, 83985, 83991, 83995-83997, 83999-84000, 84003, 84007-84015, 84020-84025, 84030-84034, 84036, 84038-84049, 84052, 84055, 84058, 84060, 84062-84064, 84067-84072, 84074, 84076-84077, 84079-84093, 84097, 84100-84102, 84104-84105, 84108-84109, 84112-84115, 84117-84118, 84120-84133, 84135-84143, 84145-84149, 84151-84154, 84157, 84160-84167, 84169, 84171, 84176-84178, 84180-84182, 84185-84187, 84191-84197, 84199-84202, 84204, 84206-84208, 84210, 84213-84221, 84223-84224, 84226, 84228-84229, 84231, 84233-84234, 84236, 84241-84242, 84244-84254, 84257-84259, 84261-84262, 84264-84271, 84273, 84278-84281, 84284, 84286-84291, 84294-84298, 84300-84302, 84305-84306, 84308, 84310-84314, 84318-84328, 84330-84331, 84333-84334, 84336-84343, 84345-84346, 84348-84349, 84351-84353, 84356-84360, 84362-84365, 84367, 84371-84374, 84376-84380, 84383-84384, 84386, 84392, 84394, 84404-84405, 84407-84410, 84414-84416, 84419-84420, 84423-84426, 84428-84429, 84432-84436, 84438-84439, 84441-84442, 84444-84446, 84448, 84450-84451, 84453-84454, 84457, 84459, 84462-84468, 84472-84476, 84478-84488, 84490-84492, 84494-84499, 84501-84507, 84509-84515, 84520, 84522-84523, 84526-84527, 84529-84530, 84533-84534, 84538, 84543, 84545-84549, 84551-84555, 84557, 84563-84564, 84566-84571, 84574, 84578-84580, 84582, 84586, 84593, 84598-84600, 84603-84604, 84606-84607, 84613, 84615-84617, 84619-84621, 84624-84625, 84627-84628, 84632, 84635-84636, 84638-84639, 84642, 84644, 84647, 84649-84651, 84653, 84655, 84658, 84662, 84665-84666, 84669, 84681, 84685-84696, 84698, 84700-84706, 84708-84710, 84716-84717, 84720-84725, 84728-84730, 84732-84735, 84738-84743, 84745-84754, 84756-84759, 84762, 84764-84766, 84768-84771, 84774-84779, 84782, 84784, 84787-84789, 84792, 84795, 84797-84801, 84804-84806, 84808-84809, 84812-84822, 84824, 84827-84829, 84831-84832, 84834-84836, 84839, 84841, 84843, 84846-84849, 84852-84856, 84858-84860, 84862-84864, 84868, 84870-84871, 84874, 84876, 84879-84881, 84884-84886, 84896-84898, 84900, 84902, 84904-84905, 84907-84908, 84910-84915, 84917, 84919-84920, 84923-84925, 84927-84939, 84942-84951, 84953-84958, 84960-84975, 84977, 84980-84984, 84986, 84988-84989, 84991, 84994-85004, 85006-85009, 85011, 85013-85017, 85019, 85022-85029, 85032-85033, 85035-85041, 85044-85048, 85050-85061, 85065-85069, 85071, 85073-85075, 85083-85084, 85087-85088, 85090-85102, 85105, 85109-85112, 85114-85115, 85118-85122, 85124, 85126-85129, 85131-85137, 85139, 85141-85143, 85147-85149, 85154, 85160-85161, 85163, 85165-85169, 85171, 85174-85175, 85178-85184, 85186, 85191-85192, 85195-85205, 85207-85211, 85214, 85218-85221, 85223, 85225-85228, 85230-85232, 85235, 85237-85238, 85240-85249, 85251, 85254, 85260, 85262-85264, 85266-85274, 85276-85277, 85279, 85281-85288, 85293-85297, 85299-85306, 85308, 85310-85314, 85316, 85318, 85325-85326, 85328-85330, 85332, 85334, 85337-85339, 85341-85343, 85345, 85348-85353, 85356, 85359, 85361-85362, 85364, 85367-85369, 85371, 85373, 85375-85376, 85378-85383, 85385-85386, 85388-85389, 85394-85395, 85398, 85401-85405, 85407-85409, 85411-85412, 85414-85416, 85419-85422, 85424-85425, 85427-85437, 85440-85450, 85455, 85458, 85460, 85462-85463, 85466-85474, 85476-85478, 85480-85483, 85485-85487, 85489-85496, 85498, 85500-85503, 85506-85511, 85513-85516, 85518-85520, 85522-85527, 85530-85534, 85536-85542, 85544, 85547, 85549-85555, 85557-85558, 85560, 85564, 85566-85571, 85573-85574, 85576-85578, 85581-85589, 85592-85594, 85596-85600, 85602-85604, 85608-85610, 85612-85613, 85616-85620, 85622-85625, 85627-85628, 85632-85634, 85636, 85638, 85641, 85647-85652, 85654-85655, 85657-85661, 85664-85666, 85668, 85670, 85672-85675, 85677-85678, 85682-85685, 85688-85691, 85693-85699, 85702-85703, 85706-85708, 85712, 85714, 85719-85724, 85726, 85728-85730, 85732, 85734, 85736-85737, 85739, 85744-85746, 85748-85752, 85756-85757, 85759-85762, 85765-85770, 85772-85777, 85780-85784, 85786-85787, 85791-85805, 85807-85810, 85812, 85814, 85816, 85818, 85820, 85823-85825, 85830-85834, 85836-85853, 85855, 85857, 85859-85862, 85864, 85866-85875, 85877-85880, 85883, 85885-85886, 85888-85906, 85910-85912, 85915, 85918-85919, 85921-85923, 85925-85928, 85931-85937, 85939-85940, 85942-85944, 85946-85948, 85952, 85954-85956, 85962-85963, 85965-85966, 85968-85972, 85977-85980, 85983, 85986-85987, 85989, 85991-85993, 85995-86002, 86004-86012, 86014-86016, 86018-86020, 86022-86024, 86026-86030, 86034-86035, 86037-86040, 86042-86043, 86045-86054, 86056, 86058-86060, 86062-86064, 86066, 86068, 86070, 86072, 86076-86080, 86082, 86084-86086, 86089, 86091-86092, 86094, 86096, 86099-86101, 86103-86115, 86117-86119, 86123-86125, 86128-86130, 86132, 86134-86135, 86137, 86139-86148, 86150-86153, 86155, 86159, 86161, 86163-86164, 86166-86170, 86176, 86179, 86181-86185, 86187-86194, 86196-86199, 86201-86202, 86204-86207, 86209-86210, 86212-86214, 86218-86223, 86225-86226, 86228-86243, 86245-86247, 86250-86258, 86263-86268, 86270-86271, 86274, 86279-86282, 86284, 86286-86289, 86291-86294, 86296-86300, 86302-86307, 86309, 86311-86319, 86321-86323, 86327, 86330-86341, 86343-86344, 86346, 86348, 86350-86359, 86361, 86364-86366, 86372, 86374-86375, 86378, 86380-86383, 86385, 86391-86394, 86396-86397, 86399-86400, 86403, 86406-86408, 86412-86415, 86419, 86421, 86423, 86427-86428, 86430, 86432, 86434-86440, 86442, 86444, 86447, 86449, 86452, 86454, 86456, 86459-86463, 86465, 86467-86469, 86473, 86476-86478, 86480-86484, 86487, 86490, 86492, 86494, 86500-86501, 86504-86508, 86510-86515, 86517-86520, 86522-86524, 86526, 86531-86533, 86535, 86537-86538, 86540, 86542-86543, 86545-86550, 86552, 86556, 86558-86560, 86563-86580, 86582, 86584, 86587-86597, 86599-86605, 86607-86609, 86611, 86617-86618, 86621-86624, 86627-86628, 86631-86634, 86638-86640, 86642, 86644, 86646-86648, 86650, 86654-86656, 86659-86664, 86668-86669, 86671, 86673-86678, 86681-86683, 86685-86686, 86688-86689, 86691-86692, 86694-86697, 86699-86704, 86706-86709, 86714, 86717, 86720-86721, 86724-86726, 86728, 86733-86734, 86738-86741, 86744-86746, 86748, 86751, 86754-86761, 86770-86772, 86774-86776, 86778-86779, 86781, 86783-86784, 86786, 86788-86791, 86794, 86797, 86800-86801, 86803, 86805-86806, 86808-86813, 86815-86817, 86820-86823, 86826-86827, 86829-86832, 86834-86835, 86837-86839, 86842-86843, 86847-86848, 86852-86853, 86855-86859, 86861-86864, 86866, 86871-86890, 86895, 86897, 86899-86905, 86907-86908, 86910, 86912-86914, 86916-86921, 86924-86925, 86927, 86931-86937, 86939-86940, 86942-86943, 86945-86950, 86952-86953, 86955-86956, 86958-86959, 86961-86970, 86972-86973, 86976-86978, 86980, 86982-86986, 86988-86998, 87000-87001, 87003, 87005-87006, 87010-87016, 87019-87020, 87022, 87024-87029, 87031-87032, 87035, 87037-87039, 87042, 87045, 87047-87053, 87055-87062, 87064-87065, 87067-87068, 87070, 87072, 87075, 87077-87091, 87093-87096, 87099, 87102, 87104, 87106, 87108-87110, 87112, 87114-87117, 87119-87127, 87131-87134, 87136-87142, 87144-87147, 87150-87151, 87153-87154, 87156, 87158-87160, 87162-87168, 87170-87172, 87175-87186, 87189-87195, 87198, 87200-87201, 87203, 87207-87210, 87212-87213, 87215, 87217-87219, 87222, 87224, 87226-87227, 87229-87230, 87232, 87238-87240, 87242, 87246, 87248, 87250, 87252-87253, 87255, 87257-87258, 87260, 87264, 87268, 87270-87273, 87278, 87280-87285, 87287, 87291-87292, 87294-87299, 87301, 87304-87305, 87307, 87310, 87312-87314, 87317, 87320-87330, 87332, 87337, 87340, 87343-87344, 87346-87347, 87349, 87352-87353, 87355-87358, 87364-87366, 87368, 87372-87374, 87376-87377, 87380, 87382, 87386-87390, 87392, 87394-87398, 87400-87402, 87404, 87406, 87410, 87413, 87415, 87418-87419, 87422-87428, 87430-87431, 87434-87435, 87437, 87439, 87441, 87443, 87445, 87447-87449, 87451-87453, 87455, 87462-87467, 87469-87473, 87476-87477, 87480, 87483, 87486-87487, 87489-87504, 87506-87513, 87515, 87518-87522, 87525-87530, 87533-87534, 87536-87537, 87540-87548, 87552-87553, 87555-87557, 87559-87561, 87565-87566, 87568-87572, 87577-87581, 87585, 87589-87595, 87597-87598, 87601-87605, 87607, 87609-87613, 87620, 87622-87623, 87625-87629, 87631-87634, 87638, 87640-87643, 87645-87648, 87653-87662, 87664-87669, 87671-87675, 87677-87678, 87681-87682, 87684-87689, 87692-87697, 87700, 87702, 87705, 87707-87708, 87711, 87714, 87721, 87724-87732, 87734-87741, 87743, 87745, 87749-87752, 87755, 87757-87758, 87760-87763, 87765-87769, 87771, 87774, 87776-87779, 87782, 87785, 87787, 87789, 87792-87796, 87801, 87803, 87805-87807, 87809, 87812-87833, 87836, 87839-87841, 87843-87846, 87848, 87852, 87854, 87857-87858, 87861-87864, 87868-87876, 87878-87880, 87882-87887, 87889, 87891-87896, 87898-87903, 87905, 87907, 87909-87911, 87913-87915, 87919, 87923, 87925-87930, 87932-87941, 87944-87949, 87951-87957, 87959-87963, 87966, 87968, 87970-87972, 87976-87977, 87979-87980, 87983, 87985-87987, 87989-87990, 87994-88001, 88003-88005, 88007, 88009-88021, 88024, 88026-88029, 88031, 88034-88039, 88042, 88045-88046, 88048-88052, 88054-88058, 88060-88061, 88064-88068, 88072-88082, 88084-88089, 88091, 88093-88097, 88099-88100, 88103-88104, 88106, 88109, 88111-88114, 88116-88119, 88122-88125, 88127, 88129-88130, 88132, 88134, 88137-88138, 88141, 88145-88150, 88152-88153, 88155-88158, 88160-88166, 88168-88172, 88174-88178, 88181-88184, 88187-88188, 88190, 88192-88194, 88196, 88198-88199, 88201-88205, 88207-88214, 88218-88219, 88223, 88225-88227, 88229-88237, 88241-88243, 88245, 88247-88250, 88252, 88260-88271, 88273-88274, 88277, 88279-88280, 88282-88284, 88287, 88290-88291, 88293-88294, 88296, 88299, 88301-88304, 88306-88307, 88310-88311, 88315-88320, 88324, 88327-88328, 88330-88331, 88333-88334, 88336-88338, 88340-88342, 88345-88347, 88350-88353, 88356-88363, 88365, 88367-88370, 88372, 88375-88383, 88385-88386, 88388-88389, 88395-88398, 88400, 88403-88407, 88412, 88414-88415, 88423-88428, 88432-88434, 88436-88438, 88443-88446, 88449, 88452, 88455, 88457, 88459-88460, 88462-88464, 88467-88471, 88481-88483, 88485, 88488, 88490-88491, 88494-88499, 88501, 88503, 88509-88510, 88512, 88514-88518, 88520, 88523, 88525-88529, 88532-88534, 88542-88543, 88546-88547, 88550, 88556-88557, 88559-88562, 88564-88566, 88569, 88571, 88574-88577, 88581, 88583-88584, 88586-88588, 88590-88594, 88596, 88598-88610, 88612-88613, 88615-88616, 88623, 88625-88628, 88633-88635, 88638-88639, 88641-88643, 88646-88657, 88661, 88665-88666, 88669-88670, 88672, 88674-88680, 88682, 88684-88686, 88689-88695, 88697-88698, 88700-88708, 88710-88713, 88720, 88722-88723, 88725, 88728-88732, 88738, 88740-88742, 88744-88749, 88751-88753, 88757-88758, 88761, 88764, 88767, 88771, 88778-88781, 88791-88794, 88797, 88801-88802, 88804-88807, 88809, 88811, 88814-88816, 88818, 88820-88826, 88832-88834, 88837, 88839-88843, 88845, 88847-88850, 88852-88855, 88857, 88860-88862, 88864-88865, 88867, 88869-88872, 88874, 88877-88887, 88892-88900, 88902-88905, 88910, 88913, 88915, 88919-88921, 88923-88926, 88928-88930, 88932-88936, 88938-88940, 88942-88943, 88945, 88947, 88950-88953, 88956-88959, 88962, 88964-88965, 88967-88969, 88973-88974, 88976-88979, 88981-88982, 88984-88991, 88994, 89000-89001, 89003-89006, 89021-89025

[0213] The foregoing written specification is considered to be sufficient to enable one skilled in the art to practice the invention. The present invention is not to be limited in scope by examples provided, since the examples are intended as a single illustration of one aspect of the invention and other functionally equivalent embodiments are within the scope of the invention. Various modifications of the invention in addition to those shown and described herein will become apparent to those skilled in the art from the foregoing description and fall within the scope of the appended claims. The advantages and objects of the invention are not necessarily encompassed by each embodiment of the invention.

1. A single stranded oligonucleotide having a sequence 5′-X-Y-Z, wherein X is any nucleotide, Y is a nucleotide sequence of 6 nucleotides in length that is not a seed sequence of a human microRNA, and Z is a nucleotide sequence of 1-23 nucleotides in length, wherein the single stranded oligonucleotide is complementary with at least 8 consecutive nucleotides of a PRC2-associated region of a PTEN gene.

2. The single stranded oligonucleotide of claim 1, wherein the oligonucleotide does not comprise three or more consecutive guanosine nucleotides.

3. The single stranded oligonucleotide of claim 1, wherein the oligonucleotide does not comprise four or more consecutive guanosine nucleotides.

4. The single stranded oligonucleotide of claim 1, wherein the oligonucleotide is 8 to 30 nucleotides in length.

5. The single stranded oligonucleotide of claim 1, wherein the oligonucleotide is 8 to 10 nucleotides in length and all but 1, 2, or 3 of the nucleotides of the complementary sequence of the PRC2-associated region are cytosine or guano sine nucleotides.

6. The single stranded oligonucleotide of claim 1, wherein at least one nucleotide of the oligonucleotide is a nucleotide analogue.

7. The single stranded oligonucleotide of claim 6, wherein the at least one nucleotide analogue results in an increase in Tm of the oligonucleotide in a range of 1 to 5° C. compared with an oligonucleotide that does not have the at least one nucleotide analogue.

8. The single stranded oligonucleotide of claim 1, wherein at least one nucleotide of the oligonucleotide comprises a 2′ O-methyl.

9. The single stranded oligonucleotide of claim 1, wherein each nucleotide of the oligonucleotide comprises a 2′ O-methyl.

10. The single stranded oligonucleotide of claim 1, wherein the oligonucleotide comprises at least one ribonucleotide, at least one deoxyribonucleotide, or at least one bridged nucleotide.

11. The single strand oligonucleotide of claim 10, wherein the bridged nucleotide is a LNA nucleotide, a cEt nucleotide or a ENA modified nucleotide.

12. The single stranded oligonucleotide of claim 1, wherein each nucleotide of the oligonucleotide is a LNA nucleotide.

13. The single stranded oligonucleotide of claim 1, wherein the nucleotides of the oligonucleotide comprise alternating deoxyribonucleotides and 2′-fluoro-deoxyribonucleotides.

14. The single stranded oligonucleotide of claim 1, wherein the nucleotides of the oligonucleotide comprise alternating deoxyribonucleotides and 2′-O-methyl nucleotides.

15. The single stranded oligonucleotide of claim 1, wherein the nucleotides of the oligonucleotide comprise alternating deoxyribonucleotides and ENA nucleotide analogues.

16. The single stranded oligonucleotide of claim 1, wherein the nucleotides of the oligonucleotide comprise alternating deoxyribonucleotides and LNA nucleotides.

17. The single stranded oligonucleotide of claim 13, wherein the 5′ nucleotide of the oligonucleotide is a deoxyribonucleotide.

18. The single stranded oligonucleotide of claim 1, wherein the nucleotides of the oligonucleotide comprise alternating LNA nucleotides and 2′-O-methyl nucleotides.

19. The single stranded oligonucleotide of claim 18, wherein the 5′ nucleotide of the oligonucleotide is a LNA nucleotide.

20. The single stranded oligonucleotide of claim 1, wherein the nucleotides of the oligonucleotide comprise deoxyribonucleotides flanked by at least one LNA nucleotide on each of the 5′ and 3′ ends of the deoxyribonucleotides.

21. The single stranded oligonucleotide of claim 1, further comprising phosphorothioate internucleotide linkages between at least two nucleotides.

22. The single stranded oligonucleotide of claim 21, further comprising phosphorothioate internucleotide linkages between all nucleotides.

23. The single stranded oligonucleotide of claim 1, wherein the nucleotide at the 3′ position of the oligonucleotide has a 3′ hydroxyl group.

24. The single stranded oligonucleotide of claim 1, wherein the nucleotide at the 3′ position of the oligonucleotide has a 3′ thiophosphate.

25. The single stranded oligonucleotide of claim 1, further comprising a biotin moiety conjugated to the 5′ nucleotide.

26. A single stranded oligonucleotide comprising a region of complementarity that is complementary with at least 8 consecutive nucleotides of a PRC2-associated region of a PTEN gene, wherein the oligonucleotide has at least one of:
a) a sequence that is 5′X-Y-Z, wherein X is any nucleotide and wherein X is anchored at the 5′ end of the oligonucleotide, Y is a nucleotide sequence of 6 nucleotides in length that is not a human seed sequence of a microRNA, and Z is a nucleotide sequence of 1 to 23 nucleotides in length;
b) a sequence that does not comprise three or more consecutive guanosine nucleotides;
c) a sequence that has less than a threshold level of sequence identity with every sequence of nucleotides, of equivalent length to the second nucleotide sequence, that are between 50 kilobases upstream of a 5′-end of an off-target gene and 50 kilobases downstream of a 3′-end of the off-target gene;
d) a sequence that is complementary to a PRC2-associated region that encodes an RNA that forms a secondary structure comprising at least two single stranded loops; and/or
e) a sequence that has greater than 60% G-C content.

27. The single stranded oligonucleotide of claim 26, wherein the oligonucleotide has the sequence 5′X-Y-Z and wherein the oligonucleotide is 8-50 nucleotides in length.

28. A composition comprising a single stranded oligonucleotide of claim 1 and a carrier.

29. A composition comprising a single stranded oligonucleotide of claim 1 in a buffered solution.

30. A composition of claim 28, wherein the oligonucleotide is conjugated to the carrier.

31. The composition of claim 30, wherein the carrier is a peptide.

32. The composition of claim 30, wherein the carrier is a steroid.

33. A pharmaceutical composition comprising a composition of claim 28 and a pharmaceutically acceptable carrier.

34. A kit comprising a container housing the composition of claim 28.

35. A method of increasing expression of a PTEN gene in a cell, the method comprising delivering the single stranded oligonucleotide of claim 1 into the cell.

36. The method of claim 35, wherein delivery of the single stranded oligonucleotide into the cell results in a level of expression of a PTEN gene that is at least 50% greater than a level of expression of the PTEN gene in a control cell that does not comprise the single stranded oligonucleotide.

37. A method increasing levels of a PTEN gene in a subject, the method comprising administering the single stranded oligonucleotide of claim 1 to the subject.

38. A method of treating a condition associated with decreased levels of a PTEN gene in a subject, the method comprising administering the single stranded oligonucleotide of claim 1 to the subject.

39. The method of claim 38, wherein the condition is cancer.

The application's sequence listing, which the Patent Office published only in electronic form, follows.

SEQUENCE LISTING (89030 sequences)

SEQ ID NO: 1 - DNA, 129338 bp, Homo sapiens
cagggaattctccgggctccaactgaggatccctcactgagttgctgtgtaatctggggcatgtaaaccctttgcgcctcagtttcttcatttgtaaaatgagattggtaaactagcgggtctatgaagtttttttctagctcttatgcactggatgataaagcagtctgccactctcttgaatggaagaagatgggggtactgtgctgtcatatgattatttttcgaggacattttctttgagcagcaaaagttattaaatagtacaaagagtaaaaaatagatctggtcaagaccattgatctggggaagagagggtattcaggataagatacagcctgtctaccacacatctctactatgtaccatttatggcagatattcccatgtatttctattgtccagcaaacaccaaacagacccttacgcttaaattctggaaattctttagggtgctcatttattttaaaatacaattagaatcgagcttctttcctggttatttaatattctcttgataatagacatatatttttagttttaattctaatggatgaaatcacctttctaccttataaatataataatcattgtaaagaacctttgaaccatataaaaaacaataaataaaaagagaaatttatctcccttggaagccttccctctctatcctgccctcagagagaatgtgttatctcatctcttattcttccagataatttgtatgtatttatgcaaacacatgtatatatatatgtattatcacttttgttttatttcattgaattttaatgaatcttttgggaaatacattagtcctagagtagaatcatgctgtaaaatagatgagtaagcacattaacaaactagaagattaaggagcaaaatagaaaacaactgaaaacattcagttgctaatcaaattgtcagctgataggattcttaaatgacagatattctaggcagaactgacctgagagaaggactacgtaaaatggtctgttttggggggttatttataggggataggactagggtcattgtggaagatggccaccaacaattcctccatgcctctacacgcatgccacccttcccaccaaaaggagatggagtctgtttcccctcccttgaatcttttttcagcttccccagtagctagaactacaggcacatgccaccatgcccagctaattattatttttttgtagagactggggtcttgctatgttgtcctggcctcaggcaattcttccctctcagcctcccaaaatgctgggattataggtatgagccaccatgcctagctaatttggtttttaaatattttattttaaaagaattttttttttgaggcagagtctcgctctgttgcccaggctagagtgcagtggtgcgatttcggctcactgcaacctctacctcccgagttcaagcgattctcctgctccaccctcccaaatagctaggattacaagcatgcgccaccactcccagctaatttttgtatttttattagagatggggtttcaccatattggccagtctggtctcaaacccctgacctcaagtgatccgcctgccttggcctcccaaagtgctgggattacaagtgtgggccatcgtgtgtggcctggaaaaaattctagacttagaaaaaagttgcaaaaatggtatggatttttttttttttttttttttttgacacagggtttcactgtcaccaggctggagtatagtggtgcgatcactgctcactgcaactttgacctcctggggctcaggtgatcttcccacctcagcctcccaagtagctgggactataggcacacaccaccatgcccagctaatttttgtattttttgtagagacatggtttttccattttgcccaggctggtctcaacctcctgagctcaagcaatctacccacctggcctcccaaagtgctaagatgacaggagtgagccaccatgcctggcctggtgtggagtttacgtatacttgttatccagcagccctagtattgataactttttttttttttaaagagatgggggtcttggccaggcacagtggctcacgcctataatcccagcactttgggaggccgaggtgggcggattgcgtgaggctaggagttcaagaccagcctggccaacatggcaaaaccccatctctactaaaaatacaaaaattagctgtgcgtggtggcatgcgcccataatcccagctacttgggaggccaaggtaagagaatcgcttgaaccaggaggtgaaggttgccgtgagccgagattgcaccactgcactccaacctggctgacagagtgagattctgcctcaaaaaaaaaaaaaaaaaaaattccctgctttcaagagacggggtctcactatgttgcccaggttggtctcgaactcctgggttcaagccatcctcccacttcagcctcctaaagtgtcagaattacaggcatgagccactgttcctggccaataacttattaatagccacagaacgattatcaaaaccaggaaattagcacaaggtacgaaccttatatgaaattcacttgtttttgtagtgatgttctttttctgttccaagatttaatccaggttcccttacttgctcttagttgatatgtctccttagtctggggaaaagacttctaacagagctggaagagcagtgagaaaattgctattgaaggttggagaaatggtgttagtagtggcaagatgtttgacaacccttgtggtcagatgtatggtaaaacatagaagacagaaagtgtacctaataaacttgtggatttggcaacattcaggctgaatgttcagagtgacaattggcttcttttagggatgtacgaagatacacaagtgatgtatgatgataacacaagagacagagatgtgttaaaaaaggaactatcccatttttaagcagagtctctttatgccagaaagactctcaaagtaagaaatggcctcaagggcctgcctgtagaattggcctcaagttaaagatcttatcgagacttggtgctaagacctctaaaatatttaagatattgcctctcatctagacaaaaggtcttctaagaatcttaagtgttgtcccacagtagtcacctctacaggtccacagtagagagaggttttttaaatttttaatttaaatttttaatttttttcagagacagagtctcgctatgtttcctaggctggtctcaaactgctggcctcaagcaatcctcccaccttggcctcccaaagtgctaggactacaggcagagaggtttgtttttgaaagaattatagatgttgctttgcgggcaagaagtgaaccccaataagagtcacaaaattttaaagagagttatatggataaaattgcaccagcttggactaaggaagagacagttcaaaatgaaaaaaccttccaagcccccaacttcctacgggcaggaagcaggctgagagagttatttaactgtaaaaggaaggaaggcagtttcttttcttttttttttttggtggtgttagtaacttttattgaagcggcagtgtacagcagcagaggtactgctccttgcagagcaggctaacccacaagcgatgtgcccggcgtagctgctcaaaagcagttctgcgcttatatttatacctacttttttgtttttgtttttgtttttttattatactttaagttctagggtacatgtgcacaatgtgcaggtttgttacatatgtatacatgtgctgtgttggtttgctgtacccattaactggttatttatattaggtatttctcctaatgctatccctcccccatcccccccacgacaggccctggtgtgtgacattccccgccgtgtgtccaagtgttctcattattcaattcccacctatgagtgagaacatgtggtgtctggttttctatccttgtgatagtttgctcagaatgatggtttctaacttcatccatgtccctacaaaggacatgaagctcatccttttttatggctgcatagtattccatggtgtgtacgtgccacattttctaaatccagtctatcattgatggacattttatgttggttccaagtctttgctattgtgaatagtacctcaataaacatacgtgtgcatgtgtttttatagtagcatgatttataatcctttgggtatatacccagtaatgggattgctgggtcaaatggtatttctagttccagatccttgaggaatcgccacactgtcttccacaatggttgaactagtttacagtcccaccaacagtgtaaaagctattctccacatcctctccagcatctgttgtttcctgattttttaattatcaccattctaactggtgtgagatggtatctcattgtggttttgatttgcatttctctgacgaccagcgatgacgagcattttttcatgtgtctgttcactgcataaatgtctataaatgtcttcttttggaaagtgtctgttcatatcctttgcccactttttgatggggctgctttactttttcttgtaaatttgtttaagttctttttagattctggatattagccctttgtcagatgggtagattgtaaaaattttctcccattctgtaggttgtctgttcactctgatggtagtttcttttgctgtgcagaagctctttagtttaattagatcccatttgtctattttggcttttgttgccattgcttttggtgttttagtcatgaagtccttgcccatgcctatgtcctgaatggtattgcctaggttttcttctagggtttttatagtttttatgtctaacatttaagtctttaatccatattgaattaatttttgtataaggtgtaaggaaaggatccagtttcagctttctacatatggctagccagttttcccagcaccatttattaaatagggaatcttttccccatttcttgtttttgtcaggtttgtcaaagatcagatggttgtagatgtgtggtgttatttctgaagcctctgttcaaggaaggcagtttcttatgaaaaaggaaaattgattcagagttcctagtctagaccccagagggtggaactaagagctcttgagaacaacgcattgggaaactattctgagggaggccaacctaggcactaatggagaacttgatcctcagaggaccggtaacagtgcttggctggatttcagaattgctatggactaatgactgctatatgccttccatttccgccattttcaaacaggcgtgtctactgcagttatcctatccctttttcagcattgtatgttgtgtatgtaacttctcttttagttaacaggtctccagatgaagaaaagctgcatctgaaatgcctcatccacatctaggcctagtatagattactagatcctgaagtttaacactgatgctatatagaataatagttttggagaaagggagtgagtgtattctgcatgtcgtgtgtgtgtgtgtgtgcatgtatgtgcatatgtatactgttgtagctggaggatggatcatgatagactatttcccaaattgactggcaacaatttctcatcccagctgctacttccatcaaggagtatctttcccttccttttgaatctgggctgtccttgtgacttgcttggccaagagaatgcagtggaagtgacattctgggacttctgaacccaggatttaagagaccctgtattttctgctgtcttcctcttgggatccaggcactgtataaagaagcctgggttggaccactgaataatgagcaaccacacaaagaaaggaggctcctaaccatttttagctactctagctgaggtcccagacatgtggtaagctatcttggacattccagacccagccaaattcacagctgaataaagcacgtctgaccctagctaatgtcattggggagccgacctgtccagctgtgcccttccccaattgcagaattgtgaggaaataaatggtggtagttgttttgagccactaagttttaagcggcccccatggtatcagttcaggtcagacatgtgctttattctgctgtgagtttggctgggtctggaatgtccaagatggcttcccacatgtctgggacctcagttaaagtagctaaaatggttagggactcctttcttgctgtggttgctcatcattcagtggtccagcccaagcttctttacacagtgcctgggtcccaagaggaagacaacagaaagttttaaggtaatttattatgcagcaatagataattgaaaacaattatccagccaggtgcagtggctcacacctgtaatctcagcactttgggaggtggaggtgggcagatcccttcaggccaggaattcaagaccagcctggccaacatggcgaaaccccgtctctactaaaaaaacaaaaaattagccaggcacagtggtgcatgcctgtcatcccagctactcgggagactgaggcaggagaattgcttaaacacctcgggaggcggaggttgcagtgagctgagattgtgctactgcactccagcctgggcaacagagcgagactgtctcaaaaacaaaacaaaacaattatcaaatgtcagggtatcttcctattgctttacctttactctgtgggctgggaagaagttgtaacaatgtcagccatagaagtcaagttttcaatgcagactaaattccatgacagtgaacactatatgccatagtagtcactgctctgtccatagagcttagaacagtattgccacttaataggctcccaaatatttgttgattgaatcattaaataaatgaattgagataagatcccctaccctcaagaggatggacaaaaaagattctttaaatggagtgtggagtcttaataagggaaaagaagtaaagaaaaagcagataagctctaagtctgccttttttcatggtccagggctatttgtcccatgcattttctctttgaaaaaggtgctgttttttgtgatgccttagaggccagaaggatgttttgaaggggaaaattgtaggagttaggcagagcagggttttggctccttctcaatgtccctctacctagacaaattcgggctattctgcagaggttgcagtgagccatgatcacgtcactgcactccagcctgaggaacagagggagactccgtctcaaaaaaaaaaaaaaaaaaaaaaaaaaaaaaaatttctgcctactctatgaagcacctggtaggtgtcccaatattttctggtatatgggaattacctttttctattattggaaggtctaaaaagcaaacaatgtgctccatatggctagagttagtattaaggggaccaagtagaataattggtagctagtgttagcctggagactaacatagtcaaagctgtcttgtcatgttatgtcttttttatttgtattgctccacggtccaagacaaaatttctgaacgccacttggacacagtgagtacctggtctgctctattgttctcaggagcaaccaactcaacccttatttctctgagaatgatgatttcatacagcacatctctctaccaagatgtgaaagatgacaccatggcatctgaaatagcttcaggagagatttgggacatgggaagcttgtagacaataatggaaaattctcttttagaatatagttacttgtatgacccacagtagcgccttttggagaatgtcttaaaattatctttattgaaagaacaataatgtttgttattaggataaatgaaataaggggaaaacctcagacccttggaacaatgggtttacattcaatccaatgattattatgtttttatattctgtattatttagaaaacagtagttaaacagacagaaatacagaagattgtttaaaaattaaagctattgagttagatccctttttgaaaggtcagcgtatgggagatgagaaaggcactatagagatcagagtgtttacacaaaagacatcttagcagatgacctacaaagagcacatcaagtatttatatcatccacatcaagttgctggtcatttcgcttatcaaagaaaataagaaagaaattttctttcgacattattttggtgtagtaacaatagagttttggaatcagctgttagaagcgataattaaagctagtttaccatgcttactaatcaatctacatagtcaccctgaagctttatataattgtccctttgttacaagcttctacttctccctatggtattctggttctgaatccagacaggtaaagaactaagtatggccgggcgcggtggctcacgcctgtaatcccagcactttgggaggccgtggcgggcagatcacgaggtcaggagatcgagaccatcctgaccaacatggtgaaaccctgtctttactaaactacaaaaaattagcccggcatgatggtgtgcgcctgtagtcccagctactcgggaggctgaggcaggggaattgcttgaacctgggaggcagaggttgcagtgaaccgagatcatgccactgcactccagcctgtgagactccgtctcaaaaaaaaaaaaaaaaaaagaaaaaaaaaaaaagaactgaagtgcttggagaccagtgtattgtaatatctatacagccaagcaggtattttcaactgaactttaaaaaagtactatttttgaaactttctttagtttagatagggccagccatttgggtagaaaggaaaagaaaaacaaaaaattggaaaaggatgcatcagtatttctttcagaaacaacttaacactaggaacagaaggaggattttattcaccaactcctaataaccacctgatgttgctgttgggctggccaaatatctgccaacattgatgatcctttcattcaccactagagagaagtagagggacctgatgtttagagaagcagtaaaacccatttcccattttctttcttcagccggatggaagtacttggaggctggtctcatattctagcactttagtgctggtgatgcagattatctctgctccagagtaactctgtgccatggaatccaagaggattctgtcgcaccaggacaggaatgcacccttgtttcatttgcttccatgaaagcagatttcagagattctcagatgctatgagactaattgtcacttagggtaggctccaggggagggacagagaagggcagtgctaataacagggactctggagacaagatcagcaatctaagaaacaaatgtgagacattttacccctccctaatctactccccttttaaaagttcatcttcattttccctttttctaccacgcagtaattgataattaaacacagctctggtttttaccatgcaatctagtagaacacctagacatcaggaactccttatctttggttatttatacaataatgaaatctgtagttcacgctaggctgtgtggacagtatctgcatctctggaaatcaactggaggcctttctcttactcttttccggttgctttccatttccttttccactgtggtccttgcctttcccaagctgaccagaactatgcacaaaaccagtcttcaataaatatcaacactgaagcttcagcaggttgttaactcctgcacagctatcttaaatgctgtatataagtgcaaagttttatggagcctcagaggtctctaagaacactgtaaatatcccaggtttaattagtagtcccggagttaggtaatggcctgtggctttctgcgctaggtctcttgaggtttctagtcttcagaggttgcctgcaactatgatgtgcacatatacagtactctttctcaaatacagcataaaccctctttagactttgctaggcacttacaattattgaacacacatgcagattgattctcattctctcaaagtttgaaaaacaactcagtgcttcaacctaggtctcgttagatattttttgactcaaattgtcgtctgtagttctacttcctaagggaaatgaaaaaacaataaattcccagactggtgttgatgctcattctctttaagcgggtcgactacttgctttgtagatccttgacgggtggggtgcggggtaggagtgcgatccaactctcagcatttccgaatcagctctctcacggtgacaggtcagcccaatcggggctgtaaacagacttgacaggtttgttctgggctgacggccattgactaggttctcagaccagataagtcacttggctgagtccacagtaggtggggcgcgctcaccagctcaggggtagtgactggacgtttgttgcaacatcggagaatgcacgctctgggctgcagcaggagataccctcaagcacagaaccaaaagggttcaccctaagcggcagggcatcagcgatggagaggcccgagagccctagcgcccagctccttttcccacgtttgggaaggcgcagaataggtcgatgtagagcaaggagtgagtctcaggtctcagtcctttggcttgctcttagggtagcaggcgaggagtggcaccagtttggggactctctccccgcgttctgtaagaatcggcggcagccagcaggcggggaggcgggggcacgtgtttggatgtgggtgcttgtgtaaccagttccccaagcgccagccccgacagcgctccttcgggaggctggtccgagcccctgtttccgccgcggcgcaggaagggttggggttccgctgcctgcaccaggcaagagcaccccgagcaaaggaagaagacgacttgcctccggagctatcactggggagtgggaatttggaaagttccccaactagggacacacgtgacctccttcggaaagtagttccgactgtggcccgtgtatccttccacctccttttgaaccctcctaggtctcctcgccccgcccactcgctgggctgcagcttcctaccgttccgtactttccactcaacccggtaaccccaaacgtgcacggtccggccggggcgcgcggagcctggccccgggcgatccatcctgccgggttttcacggcggccaagggggggcggggctaggtggtctctgagaaccgagcttgactccgacgccgcgaaccgacctggagcccgaggggaaagatgctcgactctcttgggggcaccggagcgggcgcaggagaggcctgcggggtgcgtcccactcacagggatcctctttcagttcatttagataggtgccctttgggcccttgaaattcaacggctatgtgttcacgttcagcacgctcggctgagagctttcatttttagggcaaacgagccgagttaccggggaagcgagaggtggggcgctgcaagggagccggatgaggtgatacacgctggcgacacaatagcaggttgctctttgtgctaagactgacaccatgaggacacagatttgggggaagggggaatctctaggcaaaggctgttacagtcaaatctctgcgaacgattgtgatccgacagcggtgcaaaaggaaagagcgaatgcagtccacgccgcggaaatctaggggtagaggcaaggggggagggtattccccttgcagggaccgtccctgcatttccctctacactgagcagcgtggtcacctggtccttttcacctgtgcacaggtaacctcagactcgagtcagtgacactgctcaacgcacccatctcagctttcatcatcagtcctccacccccgccccacaacagcctaccctgcctccggctgggtttctgggcagaggccgaggcttagctcgttatcctcgcctcgcgttgctgcaaaagccgcagcaagtgcagctgcaggctggcggctgggaaccggcccgagcaagccccaggcagctacactgggcatgctcagtagagcctgcggcttggggactctgcgctcgcacccagagctaccgctctgccccctcctaccgccccctgccctgccctgccctcccctcgcccggcgcggtcccgtccgcctctcgctcgcctcccgcctcccctcggtcttccgaggcgcccgggctcccggcgcggcggcggagggggcgggcaggccggcgggcggtgatgtggcgggactctttatgcgctgcggcaggatacgcgctcggcgctgggacgcgactgcgctcagttctctcctctcggaagctgcagccatgatggaagtttgagagttgagccgctgtgaggcgaggccgggctcaggcgagggagatgagagacggcggcggccgcggcccggagcccctctcagcgcctgtgagcagccgcgggggcagcgccctcggggagccggccggcctgcggcggcggcagcggcggcgtttctcgcctcctcttcgtcttttctaaccgtgcagcctcttcctcggcttctcctgaaagggaaggtggaagccgtgggctcgggcgggagccggctgaggcgcggcggcggcggcggcacctcccgctcctggagcgggggggagaagcggcggcggcggcggccgcggcggctgcagctccagggagggggtctgagtcgcctgtcaccatttccagggctgggaacgccggagagttggtctctccccttctactgcctccaacacggcggcggcggcggctggcacatccagggacccgggccggttttaaacctcccgtgcgccgccgccgcaccccccgtggcccgggctccggaggccgccggcggaggcagccgttcggaggattattcgtcttctccccattccgctgccgccgctgccaggcctctggctgctgaggagaagcaggcccagtcgctgcaaccatccagcagccgccgcagcagccattacccggctgcggtccagagccaagcggcggcagagcgaggggcatcagctaccgccaagtccagagccatttccatcctgcagaagaagccccgccaccagcagcttctgccatctctctcctcctttttcttcagccacaggctcccagacatgacagccatcatcaaagagatcgttagcagaaacaaaaggagatatcaagaggatggattcgacttagacttgacctgtatccatttctgcggctgctcctctttacctttctgtcactctcttagaacgtgggagtagacggatgcgaaaatgtccgtagtttgggtgactataacatttaaccctggtcaggttgctaggtcatatattttgtgtttcctttctgtgtattcaacctagggtgtgtttggctagacggaactcttgcctggttgcaagtgtcaagccaccgattgctttcttaggctatctatatggtctcttcctgagggctattgtccgttaatacagaatacagtacactgttagtggattagcgagctcggtaatccggtctcctaaatgaacaaaaaagtagacgctttttgaggttgagcatatttcgattaaatcttggcttaggccctagatcaagggtttagatcagaataaaatgaaaattagtgttgcacgtacgcatattgcatcagaatcttgcagtgattgttttagtttcctgagttgcattgatagattcttttaaaatatgactgatttgcataactttagaagcagaatcattttcagtatatatggtgcacattgagggcaaaaagtagttttgttaatgtttaaacttaagttacctacaactttgaactgtatgtagaagttttgtagtttgaagtcaatagtgccataatataccttataaggcgttcttactagatctttgttatatttacctttttctctccctatggggtgatgtaggatagtgcttgaaatttgcacttcagtagcatttaatgttcagtgctcttgtcataaacatagaatggatattgagtagtttctgatcccagatggtaatgtgtaggttcaagggtattgtgtgtagcaagtgaagattgcagaaataaaacttcagttcatgcttgaaatttaagtattgttgtgatgccagaattgctgctcaccgtttttaggtttcaggtcctctgacaccttttggtatcgttaattttactgatttgtgtagaatgtcagttgtattttaccagctaatatctagaaatgctggcaagaggggtttactccagctttagattgtaggtatgttagcttttttcatacagtgtattaaatttactgagtcagcttgctgaataagacagaagcccaagaattttaacagtgtgtagctttagttgtctaaaagttaggccttcgggcttcaaaagttagtggtcatcgaaaagcattaatctttgcagtttcaggtacaacacattggttttgattagggatggggatggggccctctttttgcagaatggggaaagtattgacaggaattgagagctattggtaggccagtgtataaggtatgtgaaaacagaattaagttattggtctgaagtgactgaagcatttaggctctatcaaggcctaaaatttggtaatatgagtttggtaatgcgaattgtggcagtggacaatatttagttaaaattatgtaattgcataagtactagcacagtatttttaataaaagttatttcttagcaaatgtcagttgcattttgtctaaaggtagagtgacactacagtgtctatatgtcctgctaaaaattgtggggaatatttttttttaagacagcgtttatatcgggagaggttttattccgttggattatgttagctgcatataaatgtgcacagttaattttgcccaagtttttgttttgaaatgaatgtaaaacttactgaagaagtagcttcccaaaatttagttttctgttaagccaaaaatattattttaaaagagtatttgcaaattttgaagttgacattaattgagaatgttactaaggctaaactggacccgcttgcccagaagataattatggaaaaattcttttgtgacttccaaagcagtctactattagcatgaattactgacagtcatccaaatatataggaacaaaaaattaaatgtttatgtaactttgaaaaaaaagcctttgaagaaaataattgaatgctgtctgggagacagatttctttcagcacttaaagtacataacacactacttttacttttcccacttgattttaaattatcagggttattaagaccttaaaattattttaccaggtttttacatgtgagctgtgacatgactggcattttctttgatttcagcgtatgttggtctctacacatgaaatttgtgtgacttaaaactttctctaaaactgtacttttagttatgatatgcatagaaagcagtatcaaatattgcgtcaaatgactaataacacttaatttctagagttgtggttttattgagccaaaagttgatatgaaaaaaagtcagtaaggaaagtcagtgaagtgcttgcttttttgataattgcactcccaataattttgatattccaacgtacttggtttgcttgttttcacgttaatgttttctgtttattggagtgggaaggcattaaaattgtcattgaagactttgtctttgacatgttgtagtatttatttcagtaactaacctgtgaaaagttaaattcctttatgaaagtagtgattggagtatttttatctgataaagaaagattaataatgaagccatttctccgaggaaaattgaggacaataattcagttttaaaatattatcgcaaaattaaattattctaaaaatttgttagtagggttatatgcttaatattagtctgaaatatagtgctgaatttgagactatagaaaaattaagtgtatttagggtatgtggaaacgttaggcttctgttgtatttttattgtttggtagatttgcctcttttcaaataaatgttcacagggaatacttttaacttgtagagagtacagtgactattgaagttacctaaattacctcaaggtaagtgattactgaaattaatcatgagggttttaaaaagtattctattcacaacatttattttacattgttttgtatctgctaagttatatttcctgaaaaacatgactggaccacctaattgctgtatgataacttacaaacttcatttttcatagtgcttattcaagtgtaaagcacaactgaaaggagtaatgtacagtttatatgaggaaaaaggaattttattgctgccagtgtaaaagtttgcacagcagtatagtcatcaatgcagatttacattgcttataatatactaagtaaatactaaatgattaaagataataaaatatggtgaggtataaccaccttcattttaaacttagttttagaagatagtaaagaaagattcctttattacctttttagaattttatttttaataacatgggaaaggcaactggtgatattttaatttttgtatggaacagtgcatctgctttctcatagccacataaaatacataaacttcttagtgttatgaaatggcttactttttggaagtgaagaagtcttcaattcttattttctaatgttattttgaaatttgcctccatttgctgtttgttcatttggtgatagcgcaacacttaaaaaaatattttaagccgcttctgaagtaatcacttcagtgacttttaatggaggagtatttgttatgggaaattcacttcacaaagttttaacattaattcacttgaagtaaacgtgctatttttaaattttcatctcaatcttttaagtaagacgaaagcttaggaaatcacttttattattgatattgtgtgtgacttcagagtttgtaaagagaattgtagaagtgttgcatgcatatgacaattttctgcttaattgaaatgtgaggcctctgccatactacaaggatttagcttccagaaaatgtaatattaacatagcttaagaaatgtatttttttttttctgtagaaaccgttgggttaaacaaacagttcagaagttttattacatggaacccattagttcttaatcttgttacctttttcttcattttttctgttaaacttgattttcacagtcagcattgaagaattcatcttgtggcctgaattcattaagaaaagatgttaggatttgttctgaagatagtgacttaggaaatttgtgagactggggtcagtcagttctgttttacaattgctttctatttggtagctttgaaattaatttagttgcttatcagagagaataatgttgaggttagactaaccttaaattggtaaggctttgctgagcaaactgataactgtaagtcttttatagggtgcattactgccacatatacgttcttccataggtggttaaaagtatattggtctgtgtttggtgattctctttgtacatattgagtatatgcattcactaatgtaaaataatttgccaagaaaggtgaaattagtatattgtacttgactattcacctttcccttagttttttgaatttttttcattggttgcagaggaagtattagcaatttaattcttttaaaataatttgcactggaataaataagtatcggcaaatataagaagagtaacataatttaagggtgaattaattttatttgggaagttttagttctgtatagttaaggcagattcttcatttgcaacagttgacattgggacatgtgtgaacatcttcaaggtattaggacatcttcaaggcattactttttggcagtgttgagaatttttttttttttttttttttttttgagatggaatctcgctctatcgcccagtctggggtgcagtggcaggatctcggctcactggaacctctgcctcccaggttcaggcgattctcctgcctgaacctcccaagcagctgggattataggtgcatgccaccacgcccagatagtttttgtacttttagtagagatggggttttaccaccttggccaggctggtctcaaactccagacctcaagtgatccgcctgcctcggcctcccaaaatgctgggattacaggcgtgagccactgcgcctggccagtgttgagaatattgagagatggatattgtagctgtacctgccatcaaaagaattttcttgacctccacatagtgtgaaaaagaagactgtttacacattatattttaagtaattatacacataattattatcagtactcaccacttcaaatatgaacagtgaatctaaccagtgtttgatttctctgtgtgtgtatgtgtatacaaagttagcaaaccttttatcttaatatttattaaaaaacgaatttttgtttctttaaagaaaagactaccttagagaatattgttctatagtttttaaatatggtcagatctattttaaattatgttaaaattttgagtattacgtttatctatacttttaagcatatatacattgtttcattttagattttagggaggcagtgtgggctctggagccagactgcttgttttgtaatcctggatcttccatttagtagctggatgactttgagtaggttatttagattttctcaatctattttatctgtaaaatggggatgataatggaacctaccgcatacgtttatcttgaatagtaagtgagataataataagtaatttcatttagcatagtacctgccacattgtaaatacttaaatggtagctactgctctgaaaaactgtaatttcaggttatgtatgtagggaaattatttgtattttcatttatggtgtatgattgtaactgaatttcctcagtttgggccatgttaggattttgtttcaagttataagtgtttttaaaaataagggtattcctttaggaagtctgggtatgacatgtctgtgattttgctggttcatcacaaatgggaaataaatctctgctaactcaaactgttgaccaaagtaaaattaattatgccaatcaaaaactatttgctttaaaatataaaaggcaaaaacttcctattagcataatgaagtagaatttttaaactttgttataatcttaaattttctttagtgttgaagataggtcaacttaactatcatacatttttattcacataaagtaaactctgcctcaaatgtaataaacttaatatgagttatgtaaactttggtcaatagaggtatattttttagcatttccttttgaaaatttcagccttttgagggagtcttgcaactgaatgtcaagttacatttattacaataaaatggacacttaatataatctgtaatgcattaacataatatgggaacttttaaagtattcagtctctgtattattgagtcctatttccacatttggccaggattctcaatatgatttaggcccaagacgtgggaagaaagaagtaaagaactaaaggatttttttcttcatttttttaattgaatatggggaaagatggaataagcttatctgtccagtaaaggccattatgtgtacatagggattattatttttcccccccttgggctgtactgatttcccagatgtaccacagcactcttagtagtgaagcacttgacttctagtgagtggattttttgtgtgtgtgttttatattgcagagtgaatacactctgtctgatactatgtgactttctgattatgtgatttttatgcattttatgtgttttgtaaactagctgtatttttggtccatgtctaggttgtagaattgaattgtgcattttggcatctgagcacagctgagttttctaaatcaatctctctccttgcacctagtttttgctttagatcactacctaagacttactgttgatttaatattagagcacttaagcatagctttgacttttatttcctttgatttttgtagattttcaggctgaagtacaataaggttctctgttctttactagtaattgcaaagattgtattctgtgaattttatttgtttaatacttttgatcttttgaagaggatgtaattatttaaggtattatgaaatgcattgtgatttgaattagatactctttggagatggagttttgctgttgttgcccaggctggagtgcaatggtgtgatctcggctcaccacagcctccgcctcctgggttcaagcaattctcttgccgcagcctcccaagtagctggaattacaggcatgcgccaccacgcccggctaattttatattttttttttcagtagagatggggggtttctccatgttggtcaggctggcctcgaactcttgacctcaggtaatctgcctgtctcagcctgctaaagtgctgagattacaggcatgagccactgcgcccggcctcagatactcttttaattagatgcgtttaaaaatttaacccaccattgctggcatgaatagatgtatttttagagtgattcataaatatcgtatacatgtttaaagttacaaactttttgcttatttcaaaatgcaggattcttttccatttaaaattccctctctttgtgagacttctttttgagtattctggttactctaaactgattggagatgaaattagatagaattgaaaactgtacttttaaaatgaaattttggggatgtcattaagcttgattttttaggttttttttttagtgtgtattataaattattttacactgattgtcagcgataaaatggaatgcctgggattttttaaaatttattttattcatttttataaggtaaaaacagtgttttgctaggcttaatttgaccatgttgtaaaatttattgtataccttgaaagaatcatttatgaaagatactgaattagctaatatatactctgtcttatgtagtttttgattaacaatacactttttaaatcattagctcatttgattttgcaaagaagaacaggtaacctaagaggcagacagaacaggcattacttttatttttctttcttttttattttatttatttatttatttatttattttttgcagcttaggaattgtagctccagtggaatcagtatcttgttaatggctagtgaaagactgagtctgaagaaggatgcaggacttttttggcacttggtgcagtatttttcccattatgttacatgagtggttcttaaacttcagtgtgttagaacaacctgaagggcttattaagctatggattgcttactccaccctcagagtttctgattcagtaggtctggattgggacctgagaatttttatttcttagaagttttcaagtgatgctgatgctggtgctctggggatcacactttgaggaccaccaatgaacattatctcccaccaagcaaacccttaacatgttatactcctttaggttattagaatttatacatgcattatttcatttgacctgtaaactctaagtaactttgcatggaaaatgttatcctgattttatagacgagatagtgagtttagaaaggcagtatggtggaatggagcatagatttggagttggctagacctaaagtccagattaaatctctgctcaaggctgggcgtggtggctcatgcctgtaatcccagtgctttgggaggccagcgttggcagattgcttgagtctggaagttcgagaccagtctgggcaacataggcagaccctgtctctacaaaaaaaaatacaaaaattagtcgggtgttatagtgcgcattggtagtcccagctactgaggaggctgaggtgggatcacctgagactgggactttgaggctgcattgagctgtgattgggacactgtactcctgcctgggtgacagagtgagaccctctctcaaaaataaataaataaatacatccccgctcagccacttatcagttacgtagatacactgcctaaccttagtgaaccctgtttcgacaactccaaaatgggagtaaaaatcctaaacttgtacagtggttttttagttttgttaaaagtacaggtgaggtttttttcagagtattggttgccatctgagagtgatcccctttcacctcctctaggacttttagcattttctggagacattttggtggtcacagctggggtggtagagtgtgctattggctaggggcttgaagccagtgatgctgcttaacatcctatatggcacaagacccctccccatcaacaaagaattatctagcccaaaatgctgtgtaaaatgtctggtatataataagtataatatttgatgaaaatcagtacctttgcccccaggtgtgatatttaagaaggtcaacttactaaatcagtgatggagttagtcctaacatctgggtgttctgactgctgctaggccagtattctttatatgataataagaactttgtccacagaagatatccctaataacaaaaaaggtttatttgaagaggactcatgtgttctttggctgattgtgaaagtgttgctttgaacttctgttagaaaaggttgaagatgttttccgtaagtgtttttaatactgtacgtagtattcagaaggatgtttaattttttttttaattttgctagtagtttttaaagtaatcctttttcctttaattatgtagttgttgaactgttgggagttacttttctcttactattttgttatttaatgtattctttgaccttatgcttttttattctaaagctgcttttattatagtcagatatgatgaagttaaatgtacaatgtaaaattgcaaatttccaacgagctatacaaacttaaatatttctaagtaaagaaaatagggctgactctaaggttctttgatccatgtgttgcattcttttctaggccctaaatttgctatgccagcctgttgaattaaagtgctttatttatctaaattagaaacttgtattaaagtgaagttttagaaaaaaagaaacaaaatcggaatggagttttaggttagcccagagatgggaagatgccaagaaggtagctttagtggattctgaattttttggttttgttttgtttttagggcaggcaaatgtaattacaaaagggttctaggaatagattgctgtgattttttttctgtttgcatgattttacagtttgctttgcctctcacttttgaatgcagaataaaatgtcaaggccttatttttttttaaattcttaagaaatttaagatttgactgttaattccttttgaaatatgggatattttgagataccaattatttaagacaaataggactcattgttacaattcagttgaataaggcttatgatgtttatttcagtatatgaatgaaaactatgtgcttattgtacttaagaaaatttcttttattaaaaacatgactaaagagaattttaaaaatcacccactgtcctacttctctaaaacttaatgttttcatattagcttccagttttgttcatatgcatatactttaaaacctagttcatggtgaacttaagagggtgttctttttaaaaaacaatttccattgcactttgtcgttgccttaattaaatggtgaaatcatcagaaatatttattttcctatacttatacatttattaagcttgtttccatttttttattttgtgattttttaagtggatttaagataacctaaacattagagaggattttcatggttttgattcatgaaatcataatgttatacaaacctaactgaagtgttagagccttgaagatttttcccccgaattacatatagtaactctacttgtatttaatactgaaagcatattttacttatttaagtgagacaaagtaaaatttagctgaatactttagatctatcatttccttttcctgttgtaagaacattacattgtgttgaaattaaagtggatatagaaggtaattagaataaactgccacatcatttttatagtaaagtggtaataacactattgctttctgtttttttaatcagaaggagtatgggcttataatgatgttactgttccctgaagcatattttgaatgatacggtttatatttgcacagttgcccaggtaatcattgtgatattaattgatcaatttgctatttatttgcgttttaaatcagtactagtatttgtgcttaaaaattttgcatatgttttatcagatttaatttttaagtgtcagatactaaaacaaataaccttaactttattaaattataattttttatcatgaggtggtattcatttattcatatagttagaacaaaaaatatttaaaatattgaggtagaaacaaattagtctctttttaattaaaagccagattacttgttagagtaacattttcccaaatgaggtaaaattgttgcgactgttaaacttaaggaaattttgatctaggtgtggtatataccttcttgtggggtgctaatgaaaacagggatggcaaaaatattttgtttgtgagtgtatgcatttatgctttttgacaacctaagaaacactcttacatctgagtatctttcatggactagctgtaggaaatctatataaaatagcttagtatactgaaagtatgacatagttttacatatctagattgtggttgtgattatatataatactataaaatatgctaacgtgctgcttaataatactatttggattttttttaatactgaaaaggtcacacagattgtgattattgtgtagtgtccaagaactaaggcctaccatctgttactcaaatgtatgaaaaagttaagataatttagtgatataagtggttttgacaccactgtttttggaataatctaattatgatttttataaagactaatatcaaattttaaacgtttgcaaaaatgaaacctaatagttatactgttatttatatttttctattacaatacagatactggctgagaactaaagattgtgtaataaacgcctggccttcagtcatttggttttttttttccctcgattgtttggatagttaactggacatcatgttttaacttgagaaattaagttatacaagattttgatattttaaactagttttcctaactggttgagatatataagaatttagtattacaggactcaatcagggaactgatttaataagaatttcttaaaaatttgtttaaatatttttcaagttcttttcttcatcttctacaacttaattcttgtctgtatgcaaatgagcttccccatttaaaattttgctgttgcattttaggccactatagaagttgtttctttaattttcactcacaagaatttggtcttaccaaattgtgtaaatctttaaaattgtgtatttggcttaatattatagaatctgattgatttaatctaccttgtttcatttagtatgttgacattttcttgagaaatttgttatgccaaatgattaacataataatattttaagtttagatatgattttgaatttacattttcaaatgcaactttgtgtctgtggccttttttttttttttttttttacgagaaacatcttgccaattttcagattaatctgtgaggaaagtagattggtttactagactcagtttgtagactttggtgagaactgaattggaggctatgaaaaaaataccttttgggcctttctgaatagacatatatacataaattatatctcttacattaagtgaggcacatatgtaggtgagatttttacctgaatattaaaagtttaaaagtcgttacctattctgtttacttaatagtatttaaagggtgtgagaggtgttatgtgtttctgtcccttgtttttattcctatccctcccatctaactgttggtactcttatcttcccaggtattaaacttgtatgttttaaaagcttatttacttgttgaaatggttaacttaattagttttttctttgaagtttcagcctaaatattttctgtttttttatatgtcctttaaatatgaaaattctacagctaatcataattagtaattgtactttttcccctattacaataactggtttcataataaaatggtatcccttcaataacaagcatttatagtagtttattaaaactaagggtgttatctattcaaaccaagcaatgcagacttactgttgactctgttaatatattttaaaattgcatattactaaaatttaaaatatgattttgactagtattttggtgtatgttattttagatattttgattatgcactacttaagaatgaattgtcaagtatgattataaagttgatataatagttaaccttcagtgggaataggaatcatttaatattgttagatatttgtattattagaacaatctcctatgattcttactaatatagtaatgaatgacagacaatatgttggctttcatatttaaaaattcacatgcatttctagtttatgtttttcttcgactaaaattctgcagcacttaggcaaagctatttttaccagttggaaaaaaagtaagtcatttccaaccaattttcctggcttgtagtatagaataaagagacttgattttattacattaaagccaaatataaaatgatgcaatctagcacacacttgtttggaacttttctcttttaaatattcagattaagaggacgttgaaaggtaaatttttttttttttttgagacggagtctagctctgtcacccaggctggagtgcactggcacgatttcggcttactgcaagctctgcctcccaggttcatgccattctcctgcctcagcctcccgagtagctgggactacaggcgcctaccacggtggcgcccggctaattttttgtatttttagtagagacggggtttcaccgtgttagccaggatggtctcgatctcctgacctcgtgatctgcctgcctcggcctcccaaagtgctgggattacaggtaaattttgattgttattagcaactataaaagttttgcagttggcttattggaaaaagaaaacctccttgccggagacggagacgcatttgtattagaactttgttttctgagtaccttacctatagtaggtttcaaatattggtgaattagttgatggttaggtctgcataattactgcgtatggaaattctggaaccctattttttcaaaatgcagctaatgttgagagaatatgcactaaatattactagatctttgtttttcaagatgctgatatcccttaacatcttctgcactttacctgtttgaatatcttttttgctgtaaaaattagtggccttatgtctttctgcataattatagagtagccaaaacctgttttaggttaatcacctctggcaaaataaatgataaaagcatagcttttgtaagcagaatgatattacagaagttaacttataaatctaagtgtattaaagacacttaggaaatttatgataatgctgggtcagcattacagttttaactttttacagtttttcatatgctttttttgtgattttgctgtagaaaattaacagttggcatttggcttagttcaagtataatgctgttgacaagtatatctgacacgtcattgaactaataatatttttgaaagctgataggtaagttatatctattttgtttcattcgtcattagtgatcggtcttagatgtttttagcgagagcaaaactgtagaggaatgtgtgtctgtgtgtgtatatgtgtgtgtgtgtgtgtgtattttaacagcaggagagttctgaaacaggaaaccagtcttatcatattcatccagagacctaggaagaaggtaattgtttggtatactcgttaaaaccagttggttgggcaacttaaatttttagaggatcacagatgtaggcttgagcagttgtagatagatgatttctttttttttctttcttttttcttttttttttgagatagagtctctctctgtcatccaggctggagtgcggtggcgcgatcttggcttactgcaacctctgcctcccaggttcaggcgtttctcctgtctcagcctcctgagtagctgggattacaggcgcatgctgccatgcccggctaattttttgtattttagtagagacggggtttcaccgtgttccccaggctggtctcgaactcctgagctcaggcaatctacccacctcggcctcccaaagtgctgggattacaggcgtgagccaccgtgtctggcgatagattatttcataattaacacctgctatgaagaaaaattgattaaaatagttgagaagtctagtacactctcagctaatatactaaattatactatggattttagagtattgttaacattatcagtgacttgatatcttcctgaggttctaatttgcttaactttaaataattggggttcagatcaccttgattgttcccttaaagattaaattttgtaaaactgtgtgtaattttcctgtatctggtttggatagctttaaaaatggttcttaagtttaatgagttcaactgggaaaaaagttagttctattttagatgttgtgtcactggaaattatgtttccctgtttgttatatgcacattattacaaagttgtaatcaatgttttcatactgttctctggtctgtttttttcacaaatacactttttatttgtcgccaggtacttatttttaaagctatagaggtaatatttcatcaggtgagggtaactaccatggtttgtttgctatactgtgttagggttattttcgttttttttttcttttataaactatagttgtgaatatgtttatgtagtttacttttggtttattagaatatattgctagagtgggattacaggattaaagagtgtacagtattttagttttttttttttttttacaagttgcagatttgttgccaaatgaacgagtttgtagtattgctaacaaggagaagaattactagcaagtcttgatgttacttttgaagagtgtgatgattgcatttaggaagatatctaaacttctgtttcaaagcaaaaagtatgtgcaaatttcttactcatgacaaattcatataatataaaaacatgaaagttgtgaggtcaggttgtttggagaagtagaaaacttcagtagagtttatagataggcagtcttcctttctggtttggcactgacagcagattaactagaaagtgttagaaggaacctaaaatttatactaaagtcaatttaagttaattaatataccagaattccttcttttacaatttatttataaaaacaccatattgagttgccttgtaatgagacatttaaactaaatttaaataacagaattcatgcaccatctaataacaaccccttatttacaattatagagtcctttgcaattttatagatattttcatgtatcccatttggtccttgaaacaattaatgaagaagttacagcaagtggtattatcattattttacagaagaacaaaacaaaaatatatgtggcccagagattgagtgatttacctgaggttataggctttagattgcatagctggaagtagaaccttgttcttctatattaaatgacaatattcattaagtacttagcacaggatttggtacctagtaaatatttaaatgttcctgtgttattcctgactattccttctttattcttaaaacgccattttttgagcactcttaatatttatagttcaaactttgtacctatgtacctttttctctttagaaaataagatttcaggctgcattaatttgatctgtacaggaatgattatatgttttacatattgggacaaattgctctttttttatataccttaagctctagggtacatgtgcacaacatacagatttgttacatatgtatacatgtgccatgttagtgtgctgcacccattaactcatcacttacattaggtatatctcctaatgctatccctcccccctccccataccccatgacaggccctggtgtgtgatgttccccaccctgtgtccaagtgttctcattgttcagttcccacctatgagtgagaacacgcggtgtttggttttctgtccttgcgatagtttgctcagaatgatggtttctagcttcatccatgtccctaccaaggacatgaagctcatccttttttatggctgcatagtattccatggtgtctatgtgtcacattttcttaatccagtctatcattgatggacatttgggttggttccaagtctttgctattgtgaatagtgctgcagtaaacatacatgtgcatgtgtctttatagcagcatgatttatactcctttgggtatatacccagtaatgggattgctgggtcaaatggtatttctagttctagatcactgaggaattgccacactgacttgaactagtttacagtcccaccaacagtgtaaaagtgttcctgtttctccacatcctctccagcacctgttgtttcctgactttttaatgatcactattctaactggtgtgagatggtatctcattgtggttttgatttgcatttctctgatggccagtgatgatgagcattttttcatgtgtctgttcgctgcataaatgtattcttttgagtagtgtctgttcatatccttcgcccactttttgatggggttgtttgattttttcttggaagtttgtttaagttctttgtagattctggatattagccctttgtcagatgggtagattgtaaaagttttctcccattctctaggttgcctgttcactctcatggtagtttcttttgctgtgcagaagctctttaggacaaattgttcttaaataatgaacagttggcactttttcaactggaaaattcaaggaactgctctttctgctttctgctcaatatgaatcttcaatttagaaatgagagtccatcattaacaattcaacatagcttattaataggaaaaaaaaacctagtaacaaatgtaaaatctttgattaaatgagaaagtcatagaagttcatcagatttgtatttaaagcatgatttcattagaaaagttgataataaggatttaactgtgacataattggaaaatacttgtttaaacttaaaattttgaaaagaaatgtaaatgtgatgtaacttatgaatcagtggttgagtttcttttttgctcacaagaaccctaactgtgtgttacttgaaagcactgatggaaatcagggaaaaagctccagaagttcctacgaaataaaattaaatgataaagtcctggtatctgctaacttgccttccattcctgttatcttttcttcttagtctgacttcattaattctttcaccctggctactggtttagctcagtgttttatgagccaggcagcttcagactttgcttttgatgctctttgttcattacctctaaagctgtattatcactttcattttatcattaatgtttcatgtatatgttatagtttcatattgttactgcaacttttacttagctataatttaaaaaatatctgtgatctgtggaaataattattctatggcagaaaagtagttattgcattttactttataagttgtttaaggataagcatacctatatattaagcactacaaagaaacttttacaatggctttatttttagcaaaccatcatagttaaaataagatttagtgtacatgtcaggaacacagtcttatgaaataaggtttagggagctatttttagttactatatcctacttgaaaattgtagttaaatttctagcatataccctattaatttagatgcaagtacagatttgagataaggtagatacattatttggatgtcaactcggaagttgttcaagaaaagatattttgttatttagatgtaacttggaacatatttctagtgtttcaagtcatgattgtatgcctagaacaggcaataaaaatttacttagctggtaaaacagccacattatttcaaatatagtttagttatattatggattaaattgatttttgtggacagactttagaacttaattgctattaattacattttttctttgggacggtatttgttctttggtgagaaaggattcttgtaacacctaaatcaagactgtccaaacatggcatatgcagtttaccagtcaaaacaaactaatcacttaagatctgtgtattttgttttatttgaattatacctcaattaaaacaaatttagcatgtttacacaaaggtggggggaaactgtctaatatatctgagatctgttggagctggggtgaccatccaacttaggcaagatagctagtaccatgtatgcatttcttttacctttcttattgtatatacagtaatcactgatattatgagaaaaagaactttttaataattcaggagatattttatcgctagtatatattgagtgcttattatgtgccttatatactttggactcatttaatcctcaacacaacaaccctatgtagttcatactagaattattcccatttaaagatggggaaagtgatgtttagagaggctaagtgacttgcccatggccaaagtattagaactgggatttgaacacaggtagcctgattcctaaataaatgaccactaacattaaaaagacataaacatagaggtgtttgttgcaatgttagtcataatacctaaaaattgtgaactagttaaatgtccaatagtagtaaaatggttcattaaccatggtacacccatcaatataatgttatattgtcatttaaaattgtattcccaagtttcgtatcaggaaaatataataaatttttgaaaaatgtaatgggatatattgtatttataatacagtaatcactatgtaaccaacatttttatttccatcaaaaattagttataaagaaatagaaatctaagaagtttaatagatattaccattgaacactagatttgtattagtatcttttatatttatctctctcatttcctatattggccatgtttacttttaaaatagtaaaagtcataagctctattttaaaaataaatgttagtttattaacccaagaataatagctaactataaattcatatttgataaaataaaaagatgacattcatcataagggatacatacctgtgctagcatatggcatttttaaaatcacatgagtaatttgtaatcatcatagaaatattagaaaatacaaataagcaaacacatactgaaaatttagtgttcccaaatctaaaacagagacactgtttttttcttttgggattgtattttagatatgttcttaagttataataaagtaaatacttaaaaggcaaattgatacattaaggatttcaaagagtaaaactttttgttaagctttgatgttctttagaaagtttagattattccacaagtcactgtcgttgaaagaaaagtagttacagtggggtcttatgggataaggcattaccatttgttcagttgagagacagctatcactatgttttaagcattgttcatatattagctcatttaatcctcatagcaaccttatatgataggtacctttattagccccattctgcttaggaagcaacagaaagagtatgtattttgcctaaggttgcacaataagttaagctggggttccaattctagcaagttggttctagagtgtatgttattaaccattatgccgtagtgcctgcaagtagatctctagatgtcagaaatactcatcttcctctggttacctggttgttataaatctttatgcttaatacttatgtcattatatgtaaatttcgtattaaacactcaacttattcagaagaatatcaggtaagtgtaggttaaggctgttttctatcagaaatcattatatgtatatatattcctcagttcttatgttgtttagtttttctaaaatgtcaaattttataatatatggagaagtataaatgtatattagaaagattttgtttatttgtgtaatttgtggcataagaaatatttgcctcaagatttggtgcttgtttaggtagttgctggcattacttttggaaatgtcagtaaattttcatactgtcttggaattttttcaatttttacattttattagtaaatgtaattacaggttagtaaatcacttatttgaacctgtttcctttgaaagttttatatttttatttggaaatagaaaaaccttaatttcctctcgttgggcagtatggtgtcaaaagcttgggctttggagcttcgtatataatctgggttcaaattataacttactagttactaacttgggcaaattacccagtctttttgactctcaatttctttgtctatgaaatgtaatactatttaggattgttaggattaaatgagaatatatttggcatactgtctggtacatgatacttaacaggtactagttgtctacatctttctaacttaggatggatgccgatgtcttgggtaacatctcaaactttatcagtaaggaaggtgagaatctgaagaaaatgaaaccttaaaaagattgaattcctggactccatttaaaggagtaaatagctcacgaacaagacttgctgctctgcaaagtcttccatgttgatcctggtctttgactccttatctgtctgattaaattgaattcgctgccgtggcatccttaaagctggaccttactttgtcagtcctgccttctccatgttgctttgtgtgtaagcttcactggactgtttgctttttgctgattattttatgtatttccatatgtctactttagcctttgcttggaatgttctaactgctcttgtttcttcctctgtttactggtttctgacttaactcttaaggattatctaatatattacctacttggtgaaggtttatctgtgtccccacagaattaatccttccctctttaactcttaagctatcttattttttatctaatcgggtctttggcacaattataggtctgtgtgtctgtcttccctaatagaataggaaagccttgaggacagtagtctttgcttacttagccttatattctcagtgccccttgtgcaaaacgttcaatatatgtttgaatgattatgtgaatgaaggagggggccagctgaatttactttaatgattatgtaacacccatttatgtatagttatagacttgtctgaaatgagttaaatcctttgcaacgtttgctgctatgctttgaatgtctcttacaaaactcatgttgaaatttaattgccattgtaatggtattaagagatggaacctttaagaggtgattagataatggtatctctatccttatgaatggattaatgctgtttgaatggtagtggatgagttatcttgggagtttggcctcctccgtctcacatgcttccttaccttctgccatgtggtaactcaacacaaagatccttgccagatgctgatgccatgctcttggacttcccagtctccagaaccgtgagccaaatacatttctgttcattctaaactacctgttttgtggtattctagtaaagcaacataaaatttactaagaaaactggtaccaagagtgtgattgttgccataacaaatacctgaaaatgttcaaatggcttgggttctggctagagaaggatggaagagtttggatgaacaggctagaaaaagcctgtattgctgagaatagagcattaaggacaattctgatgaggattcagaagaagagagctgtagggaaaatctggaacttcttagagagttgtcatcagttggtagaactataagtggtaaaggtctttctgatgatatctcagaaatgaagaacaagatactggacactggagtaaaggccatccttgttaaatagttgcaaagaacttggcgaaattatgttcatatcctaagactttatggaatgcagaatttaagagtgatgaactaggatatgctgcagaagaaataactcagcagcagagcatttaggttactggatggctacttttaaccacttaaactaagctgggggaagggaatgacttgaagacagaatttataattaaaagagaggcagaatggaaatacttggaaaatttgcagcctggccatagtaaagaatgcaaaaggtatgtttaggagagcaaaccaagggtgtggtccaggaaccatttgctgaagagattaatattcctagaggagacccaagggctatttatcaagacagtggaaaaagaccccagaggcattttggagatctttgaggctgcctgccccatcacaggcccagagctctaggagggcagaatggtttgtggctcaggtggtccttcacaagcttgctgcccagggctacctcagctccccatatttcaacccagtgggccttggctgtcctaggtctggttcagaggggcccaggtgtggcttaggctactgctgagtactcaaatggtaaaccttggcagcgtctatatggtgctaattctgcaggctcacaggatgaaagagctgtgggagacatggctaccaccaccaggatttcaaaggatgatggggatagtctgggagagacttgccacaggcttggagcctctgaagggtggaaatgtgggttggagtcactacagagagtccctactagggcattgcataatggagccatggcagcaggcccaccaccaaagcttcagaactgtagagctacaagtatacagtgccagcctgggagaacttcaggcttgagaccctaacctgtgaaagctgcatgggctaagtacagcaaagccatggaggtggggcttcccagggtctattgggatgaaacgaatgtattttgtaggtgagaaggacatgagttttgaggcccaggggcagaatgctatggtttggttgtttccttcaaaactcatgttgaaacttcattgccatgtggcattattatgaggtggaacctttcagaagtggttacattataagggctttgccttcattaatggattaatgccattattgcaggtgtgggttagttatctctggagtttggccccctttttctctatcatgtgctcatgccctcttttgccatgtgatgccttctaccatgttatgatgcatccagaagactctcaccacatgcagccccttgatcttagacttctcagcttctagaactgtgagtgaaataaacttcttttctttataaattaccccgtctgtggtattgtatagcagcagaaaatagacatcagcctgaagttcccccaggctggcattaaatactaattattaattagtatttatagtgcaaggataaattcaagtttagccctggttagaatgaccacatttcaagggaggggctttgtacttctgtgcatatctgtaaggataaaaatcttaatactattctcactgaaattaatggtttaggttaggtaaggttgttagtgctaataattatttcttttaataaaatattcttagttgcgttgttcaaaaaacatagatgatttgaatttatattttttggccaaaatatatttataattttgagtaggaattccagagtattggtagctataaccactttgggttccctgccattgcttctggtgcctcattttttctgacgtcttccattttcttacatttgtcttctaaggtggagttaagattactcagttaagattatttcactttaggcctctgctgtcttctgcttttttttttaaaatgaatggatataatatcccaatacattttgataattgaacaacagctacatttttaagtgaggctactttcttctaattttttaaatttatttttctcagtttttaaaaaaaatgtcagattggctaagagttggggcagctttcttatgtgagagtagtagatgacagcaaatatttgtgatgttaaaatgataatcctaatagttttcttttagaatctttataataaaaaccctttgaggctgagggtgaatttgtatgttcctaaagtgacaaaaaatgttcttggggcatagtaatttaaatcttagatgcttttattagtataattttttggtagaaatttggcattaaaaaatgcatacagagctttttctacatacagggcaagacagcattttgtcatggcaattagtaaatagataattataaaacatctaattttaagcaatttgttacagaaacgatacaggtacattgtggcaaaaatagaagatacaaaacaagcaaatatgagaaaaaatatacatgccaccacctatatatgacttttagtactttataatcttttgtctatatatgtctatatggatatatacgtattctttttatccaaatggtattacattgtacattctgttttgaaacctgccttttttagtcatttacatctacttttccatctcagtaacttttcatcttgtgtaatgcccggatcacattaaaatgtttccaattagctcaaaaatgtcctttatggctggtttggctaaaacagtatccaggccagcattgcacctatgaaattggctgttaggaatcttgtatctttaaaaatcaagggcagcaacccatcctcccgcttcccccacctcccaccacccccccaccttttttttttcttaaagatactggcttgttgaagagagaatgggtcatgtcctacaaactgtctgaatttgtccagtttgctgtctcatagtgtcatttagcttgttttatcctatgtatttcctgcaaattaaaatttgtatctgaatccttggtggatttgagttgaagatccttaaccatcatagatgatgctgtgtcctttatattgcatgtcagaagttacatgatctttacttgattcatgatgaggagatggccactgaaattggacagtgacagtcttttctgcccattgttcaattatattcgtctctttacattagaaagtattttgggtagtagtattttggtgctgtaagaaagttcattttctcatcaaccactcacctattggtttaacaccatttgttgatctttgagtatatcagtaatttcatcagggtttgcaaaataagactttaaattctattgttttacattattaattgatgttttttgataaggtagaacttgtgaaatgggactatttgtttgtctttaaatacagtctctataggaaagacaaaataaatacttaaatctcactctttaccatttttcaaagtgaagaactattccgttaaccacctcaaaagatgataaataaaaagggtatttttagttgtttcaactttttttttttttttgagatggggtcttactctgttgcccaggctggtgtgctgtggtgcaatcatggtacaccgaagcctcagtctccctgggctcagatgattctcccacctcagcctgggactaaaggtgtacaccaccatggccagccaatttttttgtattttttgtagagatggggttttgccatattgcccagcctagcctcaaactcctgggctgaaggaatccacccatctcagcctcccaaagtgctaggattacagacgtgaccaacaatatccggccttaacttttttcttttgagtgtctttatagactcaaggacttttatttaattcagggtgttagtaccatttaaatgttttctttgatgctcagattatcacagctagtcatttggacctttataccacctcctatgtccatttgatataggccattaatctctataagccttcctccttctcttggaatgaaaaggtatcctaggctcacctgtaccttccctactccagacctggcattaagtctttttccaaggagtttggtaccttttagtttattatgatattagagatgaaaatctgtgttctaggaatgtttattactgctagagtgatgttgcttttaggccatttcagagaaaagacctagaaaacagatttttacaaacatgaattcatactgatatttttagttttttacatgatttcttgattttacaatattatctgctttcttaacttaaaattatgaaccttaaagtcattagcataacttctttgcttatttctacaacataaagaaaatagtcctggtgcggtggctcacactgtaatcccagcactttgggagattgaggcaggtggattgcttgagctcaggagttcaagaccaacctgggcaacatgatgaaaccttgtctttacaaaaaattagctgggcatggtggcatgtgcttgtattcccagctactcaggaggctgaggtgggaggatcacctgagcccaggaggtcaaggctctagtgagccatgatcatgccaccacactccagcctgggtgacaaagtgagaccctgtttcagggggaaaaaaaagataaaatagtttgaggaggctggatgtagtggctcatgcatgtcatcctggcactttgggaggtcaaggtgggaggatggcttgagcccaggagtttgagaccagcctgtgccacatcatgagacctggtctctatttaaaaaaaaaaaaaaaagaaaatagtttgaggatatcaataatgatattactagaatcagtaaaactaccaaaagaagtttaaagtttcttcctagtgtttttttgttcttagaatacttcctaccaagaagtgcagtaaaagtgcagtgtccaaatagcccttgtaacaaaacctttctctttctcctgggtgccaatttgacatttaatcagttttgtttctagcagtgttcaatttattagattataagtcttttttttctttatattattctaagatcaaaaatatataaagatatacacaggagtcctgctgctacctgttcttgctatgcttttccccttttcttccctttctctgtgaagcagccatttttattagtttcttgtttatcactcatgcatgcatatgtttattgaggatgttgacattcaagcaaatatatgggttaacattctttttgtcatccctatacgaaagatatacccagtatactctattgggtgggtttttttccttaaaatattcagtagatctctccagttagcacatagttatcttatagatagaacatatacatataaccttttcttaaactatgctattaaaataatagctttcagtaacttgataattatttttggattgaaaatactactgaaatcaactcaatcatgtgaaagctgcagaaagaaaaagacctagaaaaagggcattggattaggtcaactttgaattttatttggaagataaatgagtccagaagtgagtgggcagagattattggagttggtcttgaaatgaggcgttaggcagattgactgggctggtgtgaaaggtctgtcagaaaatcatgagattagattgaggtacctcaaaaaatgagagctggtatgatgagtgggtaagaatcataaaagcgtagagtgttgatgatttttatagtttataaatggttcttgtgtgtagagttttgtttttatgctagctatagtctgtaacataattcactataatgggcatgctaaatatccatgacagttgacccttgaacaacacagagggtaggggcgcctacccctgtgcagttgaaaattcacatgtaacttttgactccccaaaacttaatatttagcctatacttgactagaagtcttactgatgacataatgttcgttaatacatattttatatatgtgtcagatagcatatttgtataataaagtaagctgcaggaaaaatattaaaatcataaagaagagaaaatatacttactattcattaagtggaagtggatcctcataaaggtcttcatcctcactgccttcactttgagtaggccgaggagtaggagagagaggaaaggtcagacttgctgtctcatgggtggcagaggtagaagaaggtccacatacaagtggtccgacacagctcaaaccggttttgttcattggccaactgtagtttgattgaaagtaataataaatgaagtttctgcctcagttcagtattatcaagtcatagatagcaagggctggaagaaaccttagtagtaatctctttgagtctaattatcatgtagaataggaaattgcggtctagaaaggttaagtgacttgtccaaattacacaactagttagagacatagccagctcttaaatctgacttccagattttcactgtgtcttcttttttctgtaacgtgttgccttttttagccatgaaaaattagaagttgaactcttgtcttttcaggcaggtgtcaattttggggttttgttttgatttttggtttttgacataaagtactttagttctgtgatgtataaaccgtgagtttctgtttttctcatatacctgaatactgtccatgtggaagttaccttttatctttaccagtattaacacataaatggttatacataaatacattgaccaccttttattactccagctatagtggggaaaactttcttttcataactagctaatgttttaaaaagtattcttttagtttgattgctgcatatttcagatatttctttccttaactaaagtactcagatatttatccaaacattattgctatgggatttcctgcagaaagacttgaaggcgtatacaggaacaatattgatgatgtagtaaggtaagaatgctttgattttctatttcaaatattgatgtttatattcatgttgtgttttcatttagaaaagatttctaagccacagaaaaagatactttgtgatgtaaactattattgtagtgctctataatcattttttggcttaccgtacctaatggacttcagggggatacagttcatttgataagaactgaccttatacattacataatcaggtacttatgtgatatcatttcctggactccataaaatgctggtcaccaggtttaatacctggattccattacagtgtgatttttgtcttatttcatagttggggattaggcttaaaatcctagagtggatttattcagttaaatttattcacactaagatgtagatgactaatactgtatatttttatgtagaccaaattttaaggtaccactgtgcatatgtataccaactacctgaagaagtatttggttggtacaagagatatagaaaggaatcgctgggtgtaccaaggctaatcagttttataattttgcataattttctaactgcgattatcatttagtttagaacaatttatttctcaaggcccatgtaaatattatttttaaaatatacagtcttaagaattcatggcatattttatgaaaggaggaattcatgtctgatgtgcaaatagtcttaacatattttctaatttcagagcaaaaatatatatgtatgaataaattaactgtaaattgtcagtaggaaccttaagaattcgtggcgtattttatgaaaggaattcatgtctgatgtgcaaatagtcttaacatatttgctaatttcagagcaaaaatatatgtgtattaataaatcaactgtaaattgtcagtaagaaccttaatggctttaaaagttaaaatttcaggtcaagcattgtggtgtgctcctgtagtcccagctacttgggaggctgaggtgggaggatcacttggcttgaacccccaggtagagggtagaggccagtctgggtaacacagcgagaacccatctcttaaaaaaaaagtttaagttgtggattatttcctttacactctttcattagtatctttcctggagactttcaatttaaatacttggtgcttatgacaattagatgttaaaatggatgggaaagtactttgtaacttataaagcattatgcagatgtagactccttttataatagttgtgtaagtatataagacaacctacattcttcatgagctagccataagttttagcaacttgctttgaaccacggtagatttacaattttctgtagtattgagttgtgttcatttagaattttgtaatatttatattgaaaatcaaatttttgtacctacaaaaactacaaaaaatccccctagtttttatagtttctattaaaattatagctggtacatagggatgccagaaggactgtttaagaagctgaaaatagagaaatgaatttatcttctcatagttaggcagggcacagtagaaggatgcttaacattgcaagctgatgggaacagcaggttgatatagcttgtgataacacttctaaagaaaaagcaatgagccatagaaaaaagaaaaagatacattttgaattaaggaagatggtgaatctgggaagtgagcagtacagtcaccagacgtgtatcctctcctatggtacagaagtgtttattgggtctctttatggcctgcatgatatatcccacaagatgacctacttcacattattttaattctgtattcaactaagcactaattcaacccagccagattagtactcataccaaaaaagagtgaatactctgaatagagggcaggttttctgattatggtgagaatatctttgtggtaaattaatctggtgtgctagtttttacgttggtctcttctcagtgtcgttagtcactgaggctgattgatcatcttttaggttactgataaagttcctgtacagctgattttcagaccttagattgcaataacttcaccaagaaaatacttcattgggaagcattttggtccttccatttgattcataactcttacctttatgcctctgaaggaaaagatttatacattcagcttgtaattagtaatcaagactgaggtttagtctatctagcttcacaatctatctagtttgttttgtctagccatatgatttcttcaaatatgccatttcttaaaaaaaaatgttttatgtatcccgattaatatttagccagtggttcttttagccgatggatcttgtcacctcttatgatactattaatagcatgtcaacatgaagaattatctgctgaatataatagctatgctgtccttgtttccttttgtctcattcttttttgattgggggataattggccaataaagctttgatagcctctattgcccaggcccctcctcttcttttatgagagaaaggatgaacagtgaccagaaataaaggtattgtttttttctatcaactaaaatggaaataaataattcctaagtaatttgcctgttaggattaaagtctccaagagaatggctgtgcctagtacctaagtgattaatttccttgattggttcacattatattgaggatattagtaatcagtagtgattccttttttggttcaaagatgatagtgtcacagtgaaaaatgtttttaaaatttttgtatacttaatttttctgttaacgaaagtattttcagttggatttttgtttgccctctctattagaatgcccaaagaatatttaaaattttccttttctcttatactgcatatttttcctgtgatttttccccaaacggaaaatactctgcagagattagactttgttattgttgtactacatcattgctttgactaaaataaactcagattgcaaataccttcaagcttacattgctcagtatttttttttttttttttttttgagacggagtctcactcttgtcgcccaggctggagtgcagtggtgccatctcagctcactgcaacctctgcctcctgggttcaagcgattctcctgcctcagcctgcggagcagctgggattatagatgcccgcccccacgcccagctgatttttgtatttgtagtagagatggggttttaccttgttggccagtctggtctcaaactcctgacctcgggtgatccatctgtctcggcctctggaattacaggtgtgagccgccacgcctggctaaattgatcagtattatttaactttgagggatatgatttgttatggaatgcgaagttttatacttgaggtactcagagtccttttgagacaaatatttaacttctccttttgaggttaccgcctacgattgggaattaatgtaaaaaataagccaaaagaaagtgagggaaaagtgaaccaagctgtaatttttttactcttttttattgttgttgttattgttgctgttttttactatcttgattgcaacagtttggcttatatatatagcatttggaattgacagtaagaaagccacatctcatagaagctaactattcccaaattgtttttttcttcttttcctcttactactgctgttttcctcctttcttgctgctaagctcttgtcctgacatgctggtaatatgaaacagtgttttattcagataattgattattctgtaatatgtatgttaatcttttttattacactttaagtaatagggtacatatgcacaacttacagattcgttacatatgtatacatgtgccgtgttggtttgctgcacccattaactcgtcatttacattaggtatttctcctaatgttatccctctcccaaccccccaccccaggacaggccccggtgtgtgatgttccccgccctgtgtccaagtgttctcgttgttcagttgccacctgtgagtgagaacatgcggtgtttggttttctgtccttgcgatagtttgctcagaatgatggtttccagcttcatctatgtccctacaaaggacgtgaagctcatccttttttatggctgcatactactccgtggtgtatatgtgccacattttcttaatccagtcagtcattgatggacatttgggttggttctaattctttgctattgtgaatagtgctgcagtaaacatacgtatgcatgtgtctttatagtagcatgatttataatcctttggatatatacccagtaatggaattgctgggtcaaatggtatttctagttctagatccctgaggaattgccacactgtcttccacaatggttgaactagtttacagtcccaccaacagtgtaaaaatgttcctgttcctccacatcctctccagcacctgttgtttcctgactttttaatgatcgccattctaactggtgtgagatggtatctcattgtggttttgatttgcatttctctgatggccagtgatgatgagcattttttcatgtgtctgttggctgcataaatgtctataaatgtcttcttttggaaagtgtctgttcatatcctttgcccactttttgatggggttgtttgatttttttcctgtaaatttgtttaagttctttgtagattctggatattagccatttgtcagatgggtagattgcagaaattttcttccattctataggttgcctgtccactctgatggtagtttcttttgctgtgcagaagctctttagtttaattagatcccatttgactattttggcttttgttgccattgcttttggtgttttagtcatgaagtccttgcccatgcctatgtcctgaatggtattgcctaggtttgcttctagggtttttatggttttaggtctacatttaagtctttaacatttaagtctttaatccatcttgaattaatttttgtataaggtgtaaggaaatgatccaatttcagctttctacatatgactagccagttttcccagcaccatttattaactagggaaccctttccccatttcctgtttttgtcaggtttgtcaaagatcagatggttgtagatgtgtcatgttatttctgagggctctgttctgttccattggtctatatctctgttttggtaccagtaccatgctgttttggttactgtagccttgtagtatagtttgaagtcaggtagtgtgatgcctccagcttttttctttctgcttaggattgtcttggcagtgcgggctcttttttggctccatatgaactttaaagtagttttttccaattctgtgaagaaatttattggtagcttgatggggatggcattgtttctataaattaccttgggcagtgtggccattttcacgatattgattcttcctacccatgagcatggaatgttcttccatttgtttgtgtcatcttttatttcgttgagcagtggtttgtagttcttgaacaggtccttcacatcccttgtaagttggattcctaggtattttattctctttgtagcagttgtgagtgggagttcactcatgatttggctctctgtctgtctgttattggtgtataagaatgcttgtgatttttgcacattgattttgtatcctgagactttgctgaagttgcttatcagctgaaggagattttgggctgagacagtggggctttctaaatatacaatcatgtcatctgcaaacagggacaatttgacttcctcttttcctaattgaataccctttatttctttctcttgcctgattgccctggccagaacttccaacactgtgttgaataggagtggtgagagagggcgtccctgtcttgtgccagttttcaaagggaatgcttccagtttttgcccattcagtatgatactggctgtgggtttgtcataaatagctcttattattttgagatacgttccatcaatacctaatttattgagagtttttagcatgaagggctgttgaattttgtcaaaggccttttctgcatctattgagataatcatgtggttttttgtctttggttctctttatgtgatggattatgtttattgatttgcgtatgttgaaccagccttgcatcacagggatgaagccaacttgatcttggtggataagctttttgatgtgctgctggattcggtttgccaatattttattgaggatttttgcattgatgttcatcaggggtgttggtctaaaattctctttttttgttgtgtctctgccaggctttggtatcgggatggtgctggcctcctaaaatgagttagggaggattccctctttttctatgaattggaatagtttcagaaggaatggtaccagctcgtctttttacctctggtagaattcggctgtgaatctgtctggtcctggacttttttcggttggtaggctattaattattgcctcaatttcagagcctgttactggtctattcagggattcaacttcttcctggtttagtcttgggagggtgtatatgtccaggaatttatccatttcttctagattttctagtttatttgcatagaggtgtttatagtattctctgatggtagtttgtatttctgtgggatcagtggtgatatcccctttatcattttttattgcatctatttgattcttctctcttttcttccttattagtcttgctagcagtctatcaattttgttttttaaaaaaaccagctcctggattcattgattttttttttgaagggttttttgtgtcctatctccttcaattctgctctgatcttagttatttcttgccttctgctagcttttgaatttgtttgctcttgcatctctagttgttttaattgtgatattagggtgttgattttagatctttcctgctttctcttgtgggcatttagtgctataaatttccctgtatacactgctttaaatgtgtcccagagattctggtacgttgtgtctttgttctcattggtttcaaagaacatctttatttctgccttcattttgttatttacccagtagtcattcaggagcaggttgatcagtttccatgtagttgtgcagttttgagtgagtttcttaatcctgagttctaatttgattttactgtggtctgagagacagtttgttgtgatttttattcttttacatttgctgaggagtgagtgctttacttccaactatgtggtcaattttggaataagtgtgatgtggtgctgataagaatgtatattctgttgatttgggatggagagttctgtagatgtctattaggtctgcttggtgcagagctgagttcaaatcctggatatccttgttaaccttctgtctcgttgatctgtctcatattgacagtggggtgttaaaatctcccgatattaactgtgtgggagtctaagtctctttgtaggtcactcaggacttgctttatgaatctaggtgctcctgtattgggtgtatatatatttaggatagttagctcttcttgttgaattgatccctttaccattatgtaatgcccttctttgtctcttttgatctttgttggtttacagtttgttttattagagactaggattgcaacccctgctttttcttgctttccatttgcttggtagatcttcctccatccctttattttgagcctgtgtgtgtgtctgcatgtgagatacatctcctgaatacagcacactgatgggtcttgactctttatccaatttgccagtctttgtcttttaattggggcatttaccccatttacatttaaggttaatattgttatgtgtgaatttgatcctgtcattgtgatgttagctggttattttgcccattagttgatgtagtttcttcctagcatcaatggtctttacaatttggcatgtttttgcagtggctgataccagttgttcctttccatgtttagtgcttccttcaggagctcttgtaaggcaggcctggtagtgacaaaatctctcagcatttgcttgtctgtaaaggtttttatttctccttcccttatgaagcttagtttggctggatatgaaattctgggttgaaaattcttttctttaagaatgtagactattggcccccactctcttctggcttgtagagtttcagcggagagatctgctgttagtctgatgggcttccctttgtgggtaacccgacctttctctctggctgccctttacattttttcctgcatttccaccttggtgaatctaacaattatgtgtcttggggttgctcttctctaggagtatctttgtggtggtctctgtattccctgaatttgaatgttggcgtgccttgctatgttggggaagttctcctggataatatcctgaagagtgttttccagcttggttccattctccccgtcactgtcaagtacaccaatcaaacgtagatttggtcttttcacatagtcccatatttcttggaggctttgttcatttctttttactgttttttctctaaacttctcttcttgcttcatttcattcatttgatctgcaattactgataccctttcttccacttgatcgaatcggctgctgaagcttgtgcatgcgtcatgtagttctcgagccatgattttcagctccatcaggtcatttatggtcttctgtacactgtttattctagttagccatttgtctaatcttttttcaagatttttagcttccttgcgatgggtttgaacatcctcctttagctcggagaagtttgttactactgaccttctgaagcctacttctgtcaactcgtcaaagtcattcttcatccagctttgttccattgctggtgaggagctgtgatcctttggaggagaagaggcactctgggttttagaattttcagcttttctgctctgttttctccccatctttgtggttttatctacctttggtctttgattatggtgacctacagatggggttttggtgtggatgtcctttttgttaatgttgatgctattcctttctgtttgttagttttccttctaacagtcaggtccctcagctgtaggtctgttggagtttgctggaggtccactccagacactgtctggatatcaccagtggaggctgcagaacagcaaatattgcagaacagcaaatattgctgccggagccttcctctggaagcttcgtcttgggggcacccggctgtatgaggtgtcagtcggcccctactgggaggtgtctcccagttaggctacaagggggtcagggacccacttgaggaggcagtctgtccgttctcagagctcaaacactgtgctggtagaactactgctctcttcagagctgtcagagagggatgtttaagtctgaggaagtttctgctgccttttgttcagctatgccctgcctccagaggtggagtctacagaggcaggcaggcctccttgagctgtggtgggctccacccagttggagcttcccaaccactttacctactcaagcctcagcaatgatggacgcccctcccccagccaggctgctgccttgaagttcaatttggaactgctacgctagcagtgagcaaggctctgtgggcgtaggacctgctgagccaggcacgggatataatctcctgttgtgccatttgctaagaccgttggaaaagcgcagtatttgggtggcagtgtcccaattttcccggtatagtgtgtcacagcttcccttggcttggaaagggacatcccccgaccccttgtgcttcctgggtgaggcaatgccccgccctgcttcagctcaccctccgtgggctgcacccactttccaaccagtcccagtgagaagaaccaggtacctcagttggaaatgcagaaatcacctgtcttccgcgtggatcatgctgggagctgcagacaggagctgttcctatttgaccatcttggaatgccacctttttttttttttttttttttttaaggcagtttcttgctctgtcacccaggctggggtgcagaggcatgatcacggctcactgcaacctctgccttctgggctcaagtgatcctcccacctcagcctcccaagttgctgggaccacagccacgcatcaccaggcctggctaatttttgtgttttttgtagagatagggtttcgctgtgtttcccaggctggtctcaaactcctgcgctcaagcgatccgcctgcctcagcctcccaaagtgctgggattacaggcatgagccactgcacccggccaatatgtatgttaatctcatccctcaagctgatactgaagtttttcaatttatgttatttggtgtaaatctaggcagtctttaacaaaattggtgcttcatgtgtttaagaggcataacttaagaattgtttgtttcttataaatcaggagaatggaggtttaatagaggtgaactgtctttctcactgcagaacctttaatatgccactatgcattgtaaatctcccaagagtgagattctagtatgatgcttttcttttccttttctgttctttccctttccctctacctcctttttcttttctttgttggtggcatgagtcctatattataaggaaatgcttttagagtacagtcttctgatatatagtgatttttgaaaaagatttatttattgtcttgttcactgtgagctttttcccccatgtataagcagctgtgtaatagattcaagagcaccccctcgcccctttttttttgagacagagtctcgctcggtcactcaggctggagtacggtggtgctgtgatcatggttcacctcgacttctgggctccagcgatcctcccacctcatcctctcaagtagctgggaccacaggcgtgtgtcaccgtacatggctaatttttctatttttagtagaggcagagtttcgccatgttttccaggctggtctcgaactcctgaactcaagcagtccacctgtctcagcctcccaaagtgctgggattacaggcgtgagcctccactcccagtctcaaatattcttttgaaatatttgaaatatgttgatctctcagtctttcaaccttagttgtatgttgattttcaataaaaaggaagtatttgttgccctaacatcagtattggctattcagtttaaaaaaggagttaaagagatgttatttataggcaggcttcaaaagaggaaagaatgatcagtttcattctctgtttctagcatattctgactccttctctcatattacctcgtttttcccacattttttctttaataaagtgaaattcacataacagctaaccattttaaccacggaaagtgtacattccgtggcatttattaccttcacagtgttacctctacctttatcaagtttcaaaacattttatcaccccaaaagaaagccctgttcttattgggtgcctcttgcttttttttttttttttttttttaaatcttgagacggggtcttggtttgtttcccaggttgtagtgcaatggggcgatctcatctcattgcaacctctgcctcccgagttcaagcaattctcctgcctcagcctcccgtagctgggactacaggcacgcgccacatgcctggctaatttttgtatttttagtagaaacgtggtttcaccatgttggccaggctagccttgaactcctgaccttaggtaatctgcctgccttggcctcccaaagtgctgggattataggcgtgagccaccgttctggccacctcctacttctttcattagtcttaattccttagtggatttgacagtgtttatattatctacaccaatgcatttttttgtatgttaataataggagatatttattgggcatttatttacatacttatttgcatgtgtaactgttgtatagccagtttatgtatataatcttactaaatctctacagtaaatctatccccatttcatagatggtttaaaagaagttaacttccccaagcattacttttagtaagtagtgagactgaaggttgagttctggtctgtcagattccgaagttgtttccttaggaaccatattatcttgtgtacaactcttgggctaatcttgttaatattctttatttgacctcacactgttgattcataccatgtttaaaattgaaatacattacctatatttaaaaattgagacctcacataaaaagctatatttctagctgcttttgaaatttcgaaggatcttccaacacttggctgacattcctgcgtgacaaaaatcagctggagctgtgtaatgtccgacctgtctctgtcaatgaacagattattcattgtcatttctcatctgtttttgagattgtaactttgattctgtataactcatagaattagtagttagacctatatatgttagttattacattatttgtatatgtacagactgctttagacaatattgtagtgttatatgttaattttatcaattaaaatgtgctataggatcattgtagagatcttgtctctaattaacaggattcataaagagaaaacaaaggagagaaacatccagattgaaaagacctacatagtgccaagcacaataaaagaaaccctatactaggcaaattattatgaaatttgttttaggacaccagaaataaagataatatctaaaaactttttagaatcgcctaggagggattaggaatatgaatagcatctaacttgttggcagtagaattgaaggtagaaggtggtaaaacatcaccttgaaagttctgcattcagcctagaattctgtatccagttaaaccatcaatcaagtgtgaaagtagggggaaaaactcaaggactaaaaaaatgtgctcatgaagaacattttttttggacattacccagaagatgtggttcaacaaaacaagggaataaaccaagaaaggaaataaaagagcttcagtaaacagagaatcccactcagaagcaacaaagaagaaagtcccaggatgacagctgtgacacaagctgaaaagttaccagttttgcttggagcaggagattagaacttccgggaaaataatcaaattgatagatggatgttgaaatatttggagaaaaatgtaatggattcttgcaaaactgagcaaattagaaaaaggaaacaattattagcattggtggtttgagttaacccaaaattgtgatgttgctattttaggggaattaagataagtgaaacacgtatggaatactgctagttttgtaagtctcctttaccatggcaggacatctgtagttaataaatctgtaagaagcagtattaagaataatattttaaaatacctaattaaataggaggaaaaagaatccgagtagttgagggtgattgcatctggggagaagcaggaataaaggtttgaagataaatagggccagagatgagtaattttgttactgtgataatatattttatatatatgtgtatgtgtgtgcgtgtgtatatatatatatgagatatatctcatatatatgagatatatatgatatatatatgatatatatgatatatatatataaaacatacagttcagtagcattaacatctagcattcagtacatttacattgttgtgcaattgtcaccactgtccatctctagaactttttcattatcccacactgacataccacacccattaaataataactcctcattgctcctcctgttagtaccaaccattgttctactttcatctctatgtatttgactattctaggtacctcgtataagcggaatcacgtgatatctttttgtaactggcttatttcactaactatcttcgaggttcatccatgttgtagcagttgttagcatttccttccttttaaaaggccgaataatattccattgttatgtatataccatattttgtttatccatttattcatcaatagacacttttggctgttgtgaataatgctgctatgaatatgggtatgtaatacctgtttgagtatctgctttcatttcttttggatatgtacccaaaagtgagattgctggattgaatggtaattctatatttaaatttttgagaaaccaccatactgtttgatatactggctgcccaattttacattaccaccagcaatacactagggttccgaatttgccacatcctcaccatcgtgttgttttgtttatgtttttttttaataatagccatcctaatgggtgtgaagtctcattgtggttttaatttgcattttcctaatgatcagcgatattgaacatttgcacatgcttatttggtcatttgtatatcagctttggagcaatgatgtctcttgaagccttttgcccatttatgaattgagtagtttgggatttttaaattgtgttttagaagttctttgtatactctggctgggcacggtggctcgtgcctttgggaggccgaggcaggtggatcacgaggttaggagttcaagaccagactggctggtatagtgaaaccccatctctactaaaaatacaaaaattagctggtgtggtcgggcgtgatggtgcacacctgtagtcccagctgttggggaggctgaggcaggagacttgcttgaacccggaaggtgggggggttgcagtgagctgagattgtgccactgcactcagcctgggtgacagagcgagactctgtctcaaaaaaaaagaaaaagaagttctttgtattctctgaatattaatcccttattggatatgttatttgcaaatattttctcccataaagaatgggttactttttcactctgttgattgtttcctttgctgtgcaggagctatttagcttgaaaaaatccaacttgtctgttttcttttgttgcctgtacctttggtgtcacattcaagaaataattgccaaattcataccatgaaactttcccccatgttttctcctgaaggtttttatagttttagctctcacatttaggtgtttgatccattttgagttaaattttgtatataatgttatgtaagagtccagcttcacacttttggatgtgaatatctagttttcccagcattatttgttgaaaagagtgtctttttccccattgaatagtcttggcactcttgttgaaaattatttgacaatagatgcaagggtttatttttgggctctctcgactattctgttagactatatgtttgtttttttatgtcaggaccaccctaattttagtactgtagctttatagtaaaatttgaaaccaggaagtatatgtcttgtgtatttatttacttattttttgaaatagcatctggctctgttgcccaggctggagtgcagtggcacaatcttagctcactgcaacctccacatctgaggttcaagcaatcctcccacctcagcctcctgagtagctgggattgtagacacataccaccatgctcagctagtttttgtatttcttgtagagacagggttttgccatattgcccaggtgggtctcgaactcctgagcccaagcagtctgccctcctcagtgtcccaaagtgttgcgattacaggtatgagccaccgtgcatggccccaacttcttatatttcaagatggttttggcccttcagggccctttgtgagttttaggatggattttttttttaacttttaagtttaggggtgcatgtgcaggtttattacataggtaaatttgtgtcaaggtgttctgttgtatagattatttcatcacccaggtattaagcctagtacccattagttatttttcctgagctcgcctcctcccacctggatttttttttttatttctaccagaaacattgttgggattttggtagggattgtattagtctgtagattgcattgaatagtactgacatcttaacaatattaagtctttaaagccatgaacaccagatgtctttccatttatttacgtattctttcttttctttcagcaatgttttgtaattttcagtgtacaagtattttacctccttggttaagttaattcctaagtattttattcattctgatgatcttataaatctgttttcttaatttcctttcctaattgttcattcttagggtatagaaacacaactgattcttcgcacattaaatttgtgccctgcttcttcgcgggtttgtttattctttttttgtgtttgaaatccttgaggttttctgcatataagattatatcatctgcaaatgagataattttacttgttcctttccaatttgagatgatttttattcattttcttaatgctctctcatacattcaatactatgttgaatggaagtggtgaaagcaggcatcctgtcttgtttctgaccttataggaaaagctttcaattctttgccattgactatcatgttagctatgggattttttttttccccccagatagagtctcgctgtgtcgcccaggctggagtgcagtggtgcgatctcggttcactgcaccctcctcctcccgccaggttcaagtgattctcctgcttcagcctcccaagtagctgggattacaggtgtccaccactatgcccagctaattttcgtatttttagtagaaacatggtttcaccatgttggccaagctggtctcgaactcttggcctcaagtgattcacctgcctcggcctcccatagtgctgggattatagtcagccaccatgcctggccactgtgggatttttatatatggccttcattatgttgtggtaatttctttttattcttagtttattgagtgtttttatcataaaatcttgttgaattttttcaaatattttttctgtgctagttgagatgaccatgtgatttgttttcttctttctattaacatgatatattgtttttcatatattgagccatttttgcatcccaggaataaattttacttggtcttcgtgtataatccatttaataagctgtggaattcagtttgttggttctgtgttgaggactttatatcaatgttcctaagggctactggtctatagttttcttttgtagtttctttgactttgctatcagggcaatgctggcctcattgaatgtgttaggaagtgtttcctcatccatttttggcaaaactttgggaaaaaacgatgttctttaaatgtttgatagaattcacagataaaaaaatcacatctagggcttttgtctggaatttttttattgttattattgattcagtcttgttactagttataggtctattcagattttctttttgtgtgtgtgattcagtattagtacattttgtacttctcgttatttctccatttaatctatattatctaatttgttggcatacaattgttcatagtactgtcttctcttttttttaaacttctgtgcagttgatactaatgtccctacttttatttcagattttagtaatttgaatcttctttatcttaatacaggtaaagctgggtcaattgttaaaattttttcaaagaaccagtttttggtttcattgatttttctctgttatttttctattatttatatcctctctaagctttgttatttccttcatcctgctagctttgggtttattagtttgttctttttctagttccttaagatttgaagttggattattgatttgagatcgttttcaattaaatgtgtacaactacaaatttccctcttaggactgcttttgctgttctgtaatttttggcatgttgtgtttttttgttttaatttatttctaagtattttctaagttcccttgtgatttcttctgcgtttaaccgtgtattttttaatttccacagttggtgaattttctactttttcttcagttattgattttattgattttcagtggcatcctgttgtgatagaagatactttatttggttccctgttttttttttaaaacagagtgttgctctgtcacccaggctggagtgcagtggtgcgatcttggctcactgcaacatccacctcctgggttcgagcaattctcctggtctcagcctccccagtaggtaggattacaggcacatgccaccatgcccagctaatttttgtatttttagtagagacagggtttcgccatgttggccaggatgatctcgaactcctgacttcaagtgatccacccgccttggcctcccgaagtgctaggattataggcgttagccaccttgtctggcccagatcctctattttcttgcctatattctgactgggtgtttttgtccattattgagagtagggtatcgaagtgtccagctgttatttcagaactgtctgtttaccttcaattctgtcaattttttgcttcatataattgggtggtctcttattaggcatgtaaatgtttttgattattatatcttcttgctatattgacacttattgatgtgtaatatcttttttgtctcaaccttgttttgatttagtttgtctaatattaatgtagctacctgcactctcatttggttattacttgtatagaatgtctttttacatcccttatttgtgtctttggatctgaaatgagtctcttgtagacagcatatacaatctcttgtagattgtgtttttcttatacattctgtcaaactctgccttttgattgaagagttttatcatttacaattaaagtaattattgataaggatttaactgctgccattttgctgtttattttctatatgccttacagcttttttgtccctcatttcctgccttactggcacttgtgtttagttgatattttgtggtgaagtgttttaatttccttgttatttccttttgtttatattctgctattttctgtgtgtgtgtgtgtgtggttgccattgggggtcacatttaatgccctaaagttataacactgcaatttcaatttataccaatttactttcaatagcatacaaaaattcagctcataagattcagtccctgctcccttccagttattgatgtcataaaattacatttttatgtattgtgtgtctaaaagcgtagactaataattgttttttaatgcagtagtgtcttaatttgtggaaaacaaaaagtggagttgtaaaccaatgttacaataatgctagctttggtaattgctcatgtatttatcatttctcagatctttatttcttaatacagcttcaagttactgtctagtctccttttatttcagcctgaaagactcacttcagcgtttcttgcaggacaggtctggtgataatgaactctctcagattttgttaatctggaaatgtcttaatgtcttcatttttaaggacatttttgctggatatagtattctcagttgacaggtatttgtgtttatttgtttgtttcctttcaggattttaaatatatcatcccactgccttctgtccttcaagagttctgatgagaaatctgctgatattgaggatccctttgtatgttacaagttgcttctctcattccatgttcaggattctcttttttcatagtttgattataatctatctcagtttttcctacttggatctctgagtttttcctacttggagttaattgagcttcttgaatatttatattcatgtctcatcaaatttgggaagtttttgattaatatttcttcacataatcttttttgccccttttctctctttttattctgggattcccagagtgtgtatgtgttggtccacttgatgatggtgttccacaggtgtcttaggctcttgtcttcaattttccttcagttttttttttctgttcctcagacacgtggtattttcagctgttctgccttccaagtttactgattcttctgcctgcccaaattggcttttgaattcctctagtaaatttttatttcagtttttgtacttttcagctccagcatttattttttgatttttttatgttttctctttattgatatttcaattttgttttttgacattatccatatcttcctttagctttttgagcacctttcaacatttgttttaaagtctatgtctagtaagtgtctgccatctgatcttctcaggcacagtttctgttaatttatttttttccttttggcctatacttaatgttttgcttggggtagtttttttttttggtatgctttgtgatttttgttgttgttgtcaaaaactggaatttgaatcttaaagagtggtaactttggaaattagatttttctcttttctctaagatgtgctattttgtttggtttttttatttgttgtagagtatttctatgctgggtgtaatcttaagatcttctcggcctgtgtttttccctgggcatgtgtagtgactttctaaattgccctatgtatgcagttcttttgcagtagtatcctccttaaatgtttggctcctaaaaggcaaaataaataaataaataaataaaaattaaaaattaaaaataaatcaaaggggtgaaatagctctggatctttaaatccctggagcaattttttcagccaatggcagttaaataatgatagtctgcctctgtgtcacattttgatcagaagcagcaattagcaatcagaacacagattcctgatatttggagggcaaggtctttgttgccaaccttgactcttacaaactgtgtgcagggtgctctgggaacatgtgcatggttgcctgctttgagagtgggtgatgggtagccgcgacggcacaaagagctgaaattgactcaaactaactgatttaccattcaagtctttccttagaaactgaaaacctgaatagactccagagttccagaatcacagattctgcttacagtcgtctaggtggggagatgggttcctggtacttctgattctgccatctttctttgactaattttttttttttgttcttgagatggagtcttactctgttgcccgcccaggctggagtacagtagcatgacctcggctcactgcaacctctgcctcccgggttcaggcaattctcctgcctcagcttcccaagtagctggaattacaggcgtgcaccaccatgcctggctaattttttgtatttttagtagagacagggtttcaccatgttggccaggctagtctcgaactcctgacctcaggtgatcaacccgcctcagcctcccaaagtgctaggattacaggtgtgagccactgcacccagctcttagacaaattttttattccaaactttttttattttatcatttgaaaggtatatgtttattattttgtcaaaaataattttaaaacgtattcttgaagcttatttagatctgtttcataggaactgtgaagaaagtaaagaatttaaaaaatgaagacagattttctcaccctgcttatgggtgcttctcgtgctagccttttgcaagtgtcgggaagtgtaacctgcaggaggcatcagggctttgggcctgcatggtctgagtgctgccctgtgagtttcagaaggcgcagcaacctgtatacctgaaagccatctctgctggggcaggtacctagtgtccccacctacctgggtcgtagtcaggccctgggcaagcctgctatgcttttccttccctaatccctcaggggtgggatagagagcacagtggcctcccagggaggtagaagctgctccagactaacaatcagagctgccagttcttaatccccaagaccgccagacttcacaaagacataccgaggtctgtgctgtcagtgccccactactacactcccttaagtagccccacattcttgtgcttgtttcttttttctgctctctttccttgcccaggtaagaggtctgcccataagggatattttgcagcatgtgaagctttttaaaaagttaggcttattgaagtataatttacacacaaagtacaaaaaaaaaaagactgtgttctcaaatctgtgagtcattaatgggtttagatgtttatatattgaaattattggaagtaaggtatgtttatattagaaagatttgtagtctagattatccaagttttgggagtattacctctctgcttttgtttatctacttttttagtctctactttccaagtatctataggcaaattttcccatttccctttggaaagtgctgttttcttgctttttttccgcctttccattgtgtcagacttataaggcaatcagccaactgtgggcatgaaatccttgggaggaaagagaaggaagtgggaggggcagccatggtgaatgtttccctaagttatagtcaagttctttgagagaacataacctcatcccctttttaaactgttgtaatactttcttttaaatagattgtttattctcctgcaagtctcacagttgttcacagtggtaggtaagaaatcataaagttcaaatattaaagggagctcacaaaagagcatggtttcaccagccctcactaaaaacaaaattatgggaaaatgctgtaaaagaaaccagaattcttggttgcaaatgatagaaagtgactctgatttacctaatcagaaaggaatttttaaaaaagtattaggtaggtcatagtttgacaacaagacttggaagataggtggaagctaagggaagcaagacatggccccaaggtttcaacaggagcaatctgcttaggactttgctgcttggacacttggtgtaatagctgctgccactatgcctcgaaactggtgactctgctcattaactcacctcctctggtgatctctaggaataatctctgactctcctgtaccttgtcctcactaggattcggtatccacggcaaaaagatctattaatagttggtatcaggcctgtacatgtgttaagagaaagatgaggaaagaagtatctgcttctaatctcttgaaattatctccaaattgaaatggtattttggttgcctaacagcctgaagatgacaaatatcccctacaaatttctcctattttaccctcttcctaactatatctgtaatttaaagtttcacatattcttttgaaaattgttttcattgtttacccactttttaagaaaagcaaatgggaacatactaccactgtttggcccctttcaaaaattttatatctgaggaatcttccatattgttgtggacatctacctacctgattcttttattaactaccttttatttcattttatgatcatgctatcattaataggcccctatgatgaatatataagttgtttccagttttttttttgtcattgagaacagttcacatatgtatcttgttgtcttttccaagtatatctttaaggcaaattcttagcagtggagttgctaggtccattgcgtctatggtttaaactagtgccttcaaaaatggtattttatatactcactgtttaagagtgcttcttccttctatccccactaactttggcaaactgaatagtttcaaactttaactttttatagcttgttggcaaaaaatggtatcttgttatttgatcgtgtttttttaattgtgaggtttagcgactttttgatgtattggtcttatgtactttctggtgtgtgtgtatgtatatactgaccctattttcaacttatttttcttttagtttgtttgtattttccttaatgattttcaggaaaccaattttattctttcttcagacagttgtctaatgttctgcttctcttgccatttgaattttgtgactacaaaattcagatgaaacaataatagcataaagaacttggtgggttatcttttgttttgcattattgattgtttattaagaaatattctttaaaagtcaccttgcttaaattagcaagtaggaaatgctttcaataaagagaactgtcatgtacccactactccttacttactgaatcatcttcttttggatagagaagataaaagtgaaaagggaatttaagagttcctgcctttttccttgtctttagcattatatagctgtttaatgtgtgggagtctaatttcttttttctttcttgagacaaagtctcactctgttgcccaggctggagtgcagtggcacagtcttggctcactgcaacctctgcctcccaggttcaagcaattctcctgccttagcctcctgagtagctgggactacaggcatgtgccaccatgcccggctaatttttgtatttttagtagatatgggacttcaccatgttggccaggctggtcttgaactcctgacctctagtgatctgcctgctttggcctcccaaagtgctgggattacaggcatgagccactgcacctggcctaatttttttattgttctttttggtgtgaacattctcccctcctccaagccttttgtttttactattttcatgttcctttatatgtgctgctgttttgtttcatctgtaattatctctcatccccttttttggctattataatatatatatgtacgttttgaatctgagctttgaaggtaaattcactgcagctgtgttggttgattttagataatttgtgtatttcctcctttgtcttttttaaactggagtcatttgtagttgtttatacagaattttagtttttaaaaccacaagtctttcattataggttgagttatgaattcatagcctgttatttaaatgaagcttttgaaatctgttttactgatctgtatcatatctaactacgccagtatttccttccttgtctgacgtgaactctaaaattatgtgaacactttctccctgtttcctggcatttccactcaaacttgttcctcattcttagttagaaatatatccagaattgtagtttctttctaatctaatgacagaagcaaattaatcaagcatggcaagaatttattggaaaactgcatgtagttgaaaatatgtttagtatatattttgacagctgtgaagtctctaatttttactgtaccttttctctgttccaattttatgctctattctaaggatgtacccatttctactacctgactagggagcatgtgtattgtatcccagcagattttttttttcatagatagatatcctttagatatctgttatccagtgtaggtagccactagccacatgtagctatcattatgtttaaatgtaaataaaataaaataaatttactgagttgtttttgctagctacatttcttgtgctcagtagctacatgtggcttgtgattactgtattaagacagcacagatacagaacattttcattattgcaaaagttctgttagacagtgctgttctatacagtgtcattctgcctctcattctaaaaagttctaattcctgaagttgatgtactctttctgttgctgtcctctagcttaatcaaaataaatttgagtctttttaaaggtaggttgcattttacatactgatatttctaaatcagaggctatttatattactttttttatattacttttaaaaattagctttattggagtataatttacatgcaataaaatctacccattttaaatgtacggttcattgacttttgagaaatacacacacacacacacacacacacacaccttcttgtaaacacacaccttcttgtaaacacaacaaccaagatttagaacactcgctttatgaaaagtttccctcatgcccatttgtagtcagtccccaaacctggtttcaggcaatctctgatctgctttctatatgctttgcctatactaggattacatataaatacagtcatatagcatgtattcctttttgtgtctggcttctttcttttagtataatatttttgaaatttatccctgttgttactagtatcaataatttgttcttttttattgctgactaatattacattgtatggatatgacatttctttattagtgtggtgggcatttgagttgttttcagtttgggtctgttatgaacaaagctgctgtaagcattcatgtgcaagacttttgtggacatatatttttgtttctgtttattcaatacctttgagtagaattgttgggtcacatgatgtagatcagttgaacagagtagattccagaaaagttcacatacacatttcttgacaaaggtgctgagattattcatgggaaaaggataatcttttaaacaaataatactggaacaatagagaaaacaaagtgaaccttgacttttatgtcttatcatatacaaaaattaatttgaagtggattgttgacctaaatgtaaaagtaaaatttaaaaatataaaacttctagatgaaaacataggagaaaatctctgtgacttttggtttaaagatttcttagacagtacatataaaattaactatataaggaaaaaatggacaaatttgactttatcaacattaaaaatttctgctcattgaaagactcaaaatgaaaaggcaagcagttttggagaaaatatttgcaatacatatatctgaaaaaggacttgaatgtataatatatacataaagatgctcttacaacttcataatgagaaaataaccccataaagagaagggcaggccgggtgcagtggctcatgcctataatgccagcacttttggaggctgaggtgggtgaattgcttgagcccaggagtttgagaccagcctgggcaacatggtgaaacccagtctctacaaaataaaaaaatacaagaaattagctgggcatgatggcatgcacctgtagtcctagctgtttgggaggctgaggtgggaggatagcttgagcctgggaggcggaggctgcagtgagctgtgatcgcaccgctgcacgcttgcctgagcaacacagtgagatcctgtctcaaaacaaacaaacaaaaaaaaaaacaaaaaatggaaacagaaattttacaaaagaagatatatagatggccagtaggcatatgaaaagatgtttaaaatcagtcatcagggaaatgaaaatttaaacgtaatgagatagctcatatttactggaatggctcaaaaagggcttacaggaattggcaaagacatagattaactggaactcttatgcatgttggttagagcacaaaatgatatgatttcttgggagaaatatttggcagtttttaagattatttttgatagccttctgaatttcttagtgagttataggtcagttctgccactgtttctttcttttctttctttctttctttccttccttcccttccttcccttccttgcctgtcttgcctgccttccttgccttgcctgccttgccttcctttcttcctttcttccctttcttttctttcttttctttttttttttaaaggagtctcgttttgttgcccaggctggagtgcagtggcacgatcttggctcactgcaacctccacctcccgggttcaagcaattctccctgcctcagcttccccaatagctgggattacaggcgcgttccaccatacttggctaatttttttaattttggcagaggcagggtttcactgtgttggccaggctagtctcgaacacctgacctcaagtgatctgcccgccttggcctcccagagtactgggattacaggtgtgagccactgcgcctggcctggcactgtttatttcttttccctccagttttatacctatttagagagattagattttcttgagtactaggaatcactatttttgagcagaattattcaaaactgttattattttttctttaacttgaggcaatgtaggagaaagcagtactgtgcaggtgaaagttacaaacaagaacattttaaacaagatagttactttccatgtattggatacgtaacagaattaattctaataaccatcctgaagatggtcaggaggcattagttaagaattgaaatgtttggagcttgcctgtgttgatgggattaaggcagggatgatttatgtgtaaatttatgcgttagtaacagcagtaaccgctgtagttacactagggttctaagagcaaatgttgattaaacatgaatgtagcaggagtgataaggtttggctctgtgtccccacccaaatctcatgtggagttgtgatcctcagtgttggaggaggggcttggtaggaggtgattggatcatgggagtggtttgtaatggttttagcactatcaccctagagctgtctcgcgaaagagttctcctgagatctgcttgtatataagtgtgtagcacctcccctctttgctctctctcttcctcctactcctgccgcggggacgtgcttgctttcccttggccttctgccatgattgtaagtttcctgaggcctctgattaaacctttcttcttctaaaagattacccagtctcaggtagttctttatagcagtgtgagaatggactaatacaaggggaaatatatatggttaccaaatagcgaattagccatgggaaaaagtagcaaataaataattattttactttttcagatgctaatttttcttttcgtttattttaggattggtgggagctgtccaatgtccttaggctgttttccaaatgagataccaaaagctagttctccatcgggtttctcaggctgctagaagcattcattattatggttgtcattacttcgagttctgttgccgctatgcccacagtagtatttgttacataacaggtgcttgataaatatttgctaaatgaatttttggaaaatacaatctgccacacctttcttctacagtttacaatcttctgttgagatcatccgatagattttttttcttagatattgtacttttgaggcctcaaattgctgtcttttgtattttctatgtctgcagagactttccatctttcactcattgtattcattgttttttaacatctttgtacatatttatagtaactgttttaaagtcactgtctgttaattcaaacatctggttcatcttggagtctgattctattgcctgctcttttttctttgtaataggtcatgtttttctgctttgcctgtctagtaaattttaatcgtatgttgaaatgtagggagtttggattgttacttcctttaagggtgctgagtttcattttgtcaggcatttaaattgatagttgatttagtattgtcaggtttggttctctttgttaaagcaggcatttttcagatttgtcttttgtcctagggcatggtttttaacttcaaggttgccctttccaatgtctcagctaagtatctggggtgttccatgaggtctcttccactttgcctaggccagaactccagcttctcccagtattatatttcgttacctctggcgtcatctccgttatgctttcagatcctgcgcatagacagcccagcccccagccaaggacctgagatgaaatccatacaaaattcttagtcccttgctccacaaactccaacagccttagcagtctaatctcttcctgtttacctcagtgaaatctgtgttccacttgagttccatttccttctgtatcagagaagagccaccatgctgaaagcaaggggcactatgtttctttgttcttaaggatggtagcctatctgcaacaactgtagtgtgatataaaaatatataatttatgttgctgacagttacaaatactgcttgcagtactttgtaacataatttttcagattcaagttcatatactctttttttccacatcaccacacacatattttcagacttcctcctcatccttcttcttgccagtagttgtattataattcctgccagtagttacattataattttggttatatcaatattgagtttttatgggattataactagataaatgccattcatagttaagtgatagagtatattgtgacttttttcctgcatgttttattttttctggacttcacagttgtctctcttttttttaaaaaaattagttttcaatgttcttagctttaattcataaactcacccctaattgtataaatctctcaacatgtttaagcacatttggcattatatcaattttatcttttccaggtgccttctaatctgtcccagtctggactaattgttcttcctggcttgctgtatggctgtctactcaagatgtcccttcaccatcattctagggattcccttttcctctcttgtgggttagattcttcagttcttggagactgtcatcttctttcatggtttcccactcttgttttggcggagcacatctttagtaacttcctgacaaagtgtatggtttgagatttcgctgattttaaaatgcccttattatatagtcacacttgatttatagtctgtcttggtatagaattctaggctgagaagagttttccctcaaaatcagaaggttttgcccaattgttttttagctgctagtattgctgttaaaaaggataatgtcattttgattctagattcttttatgaaacctgtttcttctctggcagcttttaggatcttctgtttctttggtattcagaaatttcatgagatatgtgtgcttctattttggtcttattttcatctgttttgccaggtactcatgcaactttccagtttgaaaactcacatccttcacttttgagtatttttcttgagttatgtcttcggtttcttctcagtgttctctgtttctggaactcctaaaatatatttaacatcctgaactcttagtttttgtttagtcttctgattttcatttgtctttttattctgtatattctgttaattcctcggcttcatggtcttctagcccttcttttgcctatcttatggggttgaggattaaacagtttatatacctgaggtgcttaggatatgtctgtcatatagtaagtgcttgtgttagctgtaattgttgtttactttcataactgtcttgagggaaaggtctttggtcttgattctttgacttcttggctgtacatgaccttggacgagttatgtaatctctttgagacctacctccctcttctgtatagtgttaataagctctagctctcagatgtttgtgagggtcgaatggagtatatatgtgaaaatgtttaatacctttgtacagaattaatagttagtacgtggatctttcaaatatcaaaagttttcagtttgatgggaaaatgatgtctgaattttcagggttatttttaagagtacttgattatgactgtcttgtaaatctctatgagctaggtatacttgcactaaatgctaatgctttttaaagaagttatgtcttaatattcagtctcattatgttaggttgaagatagaagattatgaaaatattctctgaaaagctctggttttacttcagattgtataaatctgtgtaatgtaataattatttaagaatgacatgattactactctaaacccatagaaggggtatttgttggattatttattttcacttaaatggtatttgagattaggaaaaagaaaatctgtcttttggtttttcttgatagtattaatgtaatttcaaatgttagctcatttttgttaatggtggctttttgtttgtttgttttgttttaaggtttttggattcaaagcataaaaaccattacaagatatacaatctgtaagtatgttttcttatttgtatgcttgcaaatatcttctaaaacaactattaagtgaaagttatctgcttgttagagtgaggtagagttaaagatacattttaacagaattgtattcctaaaccgattaagtcaagaagtccaagagcattgttagatcatttagaaagtgtagtgatgaggtaaaacattgttggcacagattcatgttacttgatctgctttaaatgacttggcatctagcccatatttgagcccataaccgtgtggtaatttgaagtgtaattcacagtagagcttctgttaaagcactaatagcatcttccatggaggtatacttcagagtgaatataattttgtttatcctgtgtctctagagctattgactgaaaaagctgttagggcattctctaactgtacatcacctaagttatttaaaattgctgaattaggtggcttgtcttgtctaggacagagttttaaggactgcccacctgattgatagagctagttgaccttatctttaactttttgtttttcttttgactttgggagtagagatgtgaaaaggtaaaaaggaaggaaggaagagaaaacttaactctttttgcccatgaagactgtttttccttctcaaaatattgactattttctgatttgtaaaaatcggcacataaaacgtgttattttttacttgacttttatctttcccatgtgatatctataaattatagataggaaaaatttatctgtaatttagtgatctttctagtgtgataaaacgtcagaagtactgagagtggagtggacattgatattgttactctcagtaagttttcactgatttttctcagagtcatgaaggaacaaacgtttgttaagtccttatcacttattagataacacaaaacatgttgggggggtgtgtacagaggtgagtaagatgtagctcccattctcaagtcgcttacattctaatgtaaaaggtagacaaagcattacagaagaagtaactctgctatagaaggttgcaatgaagagaacattggaaacactaattttaccttataaagaaggtttcataaaggaaggcaagtttgagctggggtgaaaaggaccagtaagggttgactttcaagccaaggagaggaggggaagtgatgttacaggccaaaggaatggcattgtaagaagcttgttggcataaaagtgtttagaatatggcagcgaattcattatcatcagattgtggtgtctgtatgttgggggtgggagagaattgtggtggcaataggcaacaagataaaagaaagtaaaaggtgttatggaaacttaatgggtccagcttacaaatgatctatgcatttaggggtctttctcttttcctgataaacctctcctacaaagagccttgttgcggataccatagtgtttctttggaggaaaataaaaactacaaagctttgtattttttgcacaactggattcagaatataagtaataaaaaaggacaagaactttcaaaagctagaagccattaaactgagtcacttcagggttagactatcagaactggggatttagaaagtctcagaatggaaatcgaaggacaccaaagacaaattcggcctttttcaaaattttattctagtttaacatattcaaagaaagggaaggaaattcttttcattcctgtgtgtagtgacttcctgctttaagaacttaggacttcagctgtactatcagtattgtaggccacttaacattattatggttaaagttggcattggagagagcctaggaacctaactgcctgtttgtttttatatttccaaccattggattcccaagttaatgaagtctgtttattagttgagggtagctcttaatgcatatattttaatgccccttccccacatggaatcataagctttcagaactggagagtacctgaaagagatcatttagtccaaccttctcattttacagatggggaatctgaggcctagagaagttaagtgagttgaacaaggtcacacaggtacatatggtagccgaccatccactgtttatgccaatattccctttacgttttgcttttttgcttgttcgttttaacctctccaaattttactgacttcagaagtttctagaactaagttatagcatgttttgagttctaatgtcactttccgatcttctttaccttttttctacctctgtttgtatttctggttctggttaagtgagtctggtaagcagcaggtgttctattttatttcttttatttttaggatagtattacatgtgatatatatgtctttgcaaacatacataatttgaagatcttaaaatatttgcactaggcatacccacatttaatagtatgttaaatcttttatagcaattatgatatacatgggtgaagaagagttcctaatatggcctttctgattaactgtatctgtttatatctgtgttttcttcaggcattcataacattaagcaaattcaggtgtactgttacttaattgaattaatcagtttgttttgtacaagtatattttatttttgttccttgttgtataatctggtaggaatggggaaggggagatagtgaataaagagatgtatacttcttgcctttgaggaatttaagttttcactgtataccaattttttaaaggtatttactatatttcagtgcatattttatttgacatactttatcattttgtggtaaacctttagctttactaattttcatctattaagttttcttttgtaagatggtgatagcttcatcaaagagagtaaagaagagacctgcctacctagctgattctatggcaaatctcacttctctggaagcttttcctgttaatcttattccttcagtttctgcctcttgtttcataaaaactcattctttaaatgcttattcatttctcttgtctcatataaaccaatatgaggtactggtatcttttgagttttagttataaggaagcataaatggttaaatttaaatggctaaaccccatttgccatttgtgtatctttaattttagtttgttgagagacttatcactaccaaaccacaaagaatttaaaagaaactgtcagtaggtataggtggaaggagggcatttatcagagattttaatttaagaagaaagtcttcatccttatcctaccaacccccattccctgagcatatttatcattactagtcccagcatatttgctcccatatttcctatgcttacctgtgaagattttcataactttttccttgctttttactgtcactgttggttctgtgatttatgacagatactgctcttgtaggaatgctggctttgactgaaatttgttactgcttttgtatttaaaactttttttttattataagtagaattatggaacagtagtagaaaaagtttgacttttgtaatcagagatactgagcttgagttctggctctttcatttgtatactgttatttggggcaagttttttaatgctcttaagtcttagctttctcatatataaaatggagataataacagttatcacgtgattgtgaggatgaaacaaaaaaaagtggaaactctttgtaaggtgtgttcatctggttgacacttagtagtcattacttccactttccgtccatatagtcctcttaacagtaatatttgagaggcatttttattaaagcagtcttaaggagtgttcgtcaaaccacatgttctgggatcctgagaaagtaggggaagtttagagaactgaagctgcacaaaactaatgtttattttctgttgtgttgtcctgagaccagcttcttagattgtgtttcctagtcctacatctctgattccttataaaatattccattatgaattcttcactattgacaatttctccccttttatcttaaaagtaccaaagaaagtgtaaaatgtgactgtcttgtcagtcctctttttcctgtttttcatgtcagtgggtatgaaattactagcaaggatgcatatatgtgcatatgtcattactaaatgcattttctttctagaaaaactcaatatactaaattgtactaaaaaggaaaagcttgttttgttttgagtggtagtatgaaagttgttttattttaggtctgaccagttagaaaccaatggattgtagtttatttataattagttaaaccttcatgtgaatttggttttgaattacctttaaggtagagaagaaactatatagatgtttttcagggtttctaaatgtacaatacaggttcacaatcacttatttgaaactcttggggccaagtatgtttccattttcagaaattttagttttcaaaaggtagcacagataaatatacttttacataaacaccccagtggggtgtgggtcagtacctgaaatgaaatgttttactcttcgctctaagtgtattaaatattatgtacaatcttattacttcagatcaggatttgctgtagttgagtttgccataaaacttaagagaaaattttagatgttttgaacttttgggatattgaaattgcaggttaaggagctatggacctttatttgttttaaaatgctaagagtttattttaagtaatttttaaaaaatttgttttgcatagtagttggagttaccagggtactgctaaccacactgatatgtaagatctctttctgagccttttattgtttgtaaacatggcctgttaatcattagaaagccagtacatactaacatatcactgctattaagacaaatattagcatactctagtaatgacaagtcagcattttactattctgtattgattttacttattctttcattactctcatactgtaattaaaacttgcaatctgagagactgttgaaaaaggtgatcgttggcttttcaacagggagtaaggtctggtttaaaaaaaaattagtaagcatttggccaagtagattaacaacattcagtttttctttactgtccttatgcttttactatttttaacatatatctttttgaagaatagtttgagaattatgtatgcttaactatgagatacagatactattgaaactagtcagttgtttataggtacttgtaaaattaaaaatatattccaatagcatgcagatttttcatagaggaaatttgaaagcatggaagcacctgaatttacagtactctgtattagtggcatcacaagtttttaagcaaatgtattagctctaattgcatacacttaatcttttaagctttggttttattattataatatgggggtgataacagtatctacttaatagaattcttgttattacatgaaataattaatgttaaacacagcataatatgtgtcacattataaagattcaggcaatgtttgttagtattagtacttttttttcttcctaagtgcaaaagataactttatatcacttttaaacttttcttttagttgtgctgaaagacattatgacaccgccaaatttaattgcagaggtaggtatgaatgtactgtactatgttgtataacttaaacccgatagactgtatcttactgtcataacaataatgagtcatccagattatcgagtgagatacatatttaagaattatctttaaaaatttcaaaaattttaattttactgttgtgttttaggaaaaagtattgcataaagctattaatattgtcaggaagactaaagtgcagcatagactaagaattaggaaaattcctagactaaaaatagtataaggagagggtttacctactatttgaggcagttggtctaatagtaagcaatcacagggagaaagcagaactacttaactcttctgtgttgaggaatgacataaaaggtaggaaaggatataacaaatgttgataagaggagtctgatggatgagaggagggaactgctttaaatgagtttctacttcagacataagttaattctcagagcccacaaaaactttcacttttatttgtgaaatacaactcagttctcatggcttaacactttaaaccatgagaaaactgaagagttgagaagcttggcagatgctgctgtgatagtcaaaaagaaagtgggtgccatgagctactattgatgtatttgccattgatccctcctgaaaatctagaatggactttcagacaaatggtttgaaaattctaaatcactaatgattgagatttagtataggtttactaagaacgggttttttttgtttttgtttttggtggatttaggctgttgcttactaagcaaagcaggctttagttgaggtttatcttgctttaaacagatatttaacagattttcctggaggtttttgtgtaccactgggaaaatgaagttaggcagatgactaagtgaaagctgtcctgctgactccttataatgatagtcattgtctaccagaagatctctcctgtcacaccaaaggataattgattatatcctgtaccatattatgagtcacctgattggagatataagacatacttctcacatatttagatgacacaggttagtacattgaatatcagccagggtttttaaggatcttaatagagtggaactaaggtagaaactattaagagcaattaatagtgatatatctatagtcctgtttctaaacaagtttttttaaaaacctcaactctgactatagtgaacagagaagtcttggactcttacaattcatgtgagaagacctgaaactttgataacaattatatacattttgtgagtaatttctttggtgtatgccttcacatatctctggtatgtgacctatgctgcagtccattgagcatagattcccagaatgtattctcctgcagaaaatggaggaaaataatacttggcttccctaatgattacatgtgtatacaacactaacatttgcaagaccacctttaaataacacacttagcatttttattttatgaaatgtaatatgtagttctttgcatagtttatcctattagtaatctattctgtctttggaatatgttttgtgatgatgaaataaatactataaatagtattattccttttgcattgagagtcctgacgaaatgtccatgtgacagttcattttgggtttagctctacctctaatatgtgacctatgctaccagtccgtatagcgtaaattcccagaatatatcctcctgaataaaatgggggaaaataatacctggcttccttaatgattatatttaagacttatcaagagactattttctatttaacaattagaaagttaagcaatacattatttttctctggaatccagtgtttcttttaaatacctgttaagtttgtatgcaacatttctaaagttacctacttgttaattaaaaattcaagagtttttttttcttattctgaggttatctttttaccacagttgcacaatatccttttgaagaccataacccaccacagctagaacttatcaaacccttttgtgaagatcttgaccaatggctaagtgaagatgacaatcatgttgcagcaattcactgtaaagctggaaagggacgaactggtgtaatgatatgtgcatatttattacatcggggcaaatttttaaaggcacaagaggccctagatttctatggggaagtaaggaccagagacaaaaaggtaagttattttttgatgtttttcctttcctcttcctggatctgagaatttattggaaaacagattttgggtttctttttttccttcagttttattgaggtgtaattgacaagtaaaaattatatataaatacaatgtataatatgatgttttgatgtatgtgtatatacattgtgaaatgattactacagtcaaactacttaacatattcatcacctcacataattattattctccccccagggtgaaagcatttaagatctacaagctacaattttcaattatacaatgttattattaactatagtcactatgctgtccagtagagcttcagatcttgttcatcttgtgttcctccctccccaccctcagtccctggaaaacaggttttaaagatagttgctaatccttatttcttctaaatttttaaatcagttgctgcctcaatttctatatgagaaatgactgattgatttcatttttctgttcacgctaccattttcatatcatactagcacatgttacccattaactgtattgcagatttggtctcacaaaattcttctaaaataacatttttaaaaagcatattaatcaaaaataagctttatatttctgaagcttgtttgagcatagaatgcctttggataaaataccattacctagtaaagtgtgaacttttataatccataaaaattattcttttataagaatattcataaatgtagttagattaatagaagattctcgattctttgatcagaaaactaaggactatattgaaaaatcagtgacaaatttaattcttatagtacatctgaaagaaaaaagaaaactcttgggagaacttttacagtgatttaattttgctgttgatatatttctttgggtggtaagtatggcaaaacatgttaaaatttaatgcaaagagattttgtacatttttccatctctaagaaggacaaagcctaagcccctccagatagatagaaaaactcatttagagagttctccttcatgttaatctaatttcttcttaattcagctgtaaaacagaaatagaatgatcgtattaatcatttaaagctgtgtaattgcatagattccttgttcctttaccccctcttatatcttgtttcctatcctttgtgactttttttgcattatatataaggatgccgaaatactgtttattgttgatagtttacaaaattgaatcttacattagtgcataattttggtgaatgttgaagattatggtagattgccttacatttctgcatattgtttgcaccttggaatgatagcactggcatgaattatagagctgaggatctaaagatttttactttgatttatcccattatcatctgcagggaaacaattgcttttactgattaaaaatgcaggctgggcacagcggctcacgcctgtaatcccagtactttgggaggccgaggcgggcggatcacaaggtcaagagatcgagaccatcctggccaaccaacatggtgaaacctcatctctactaaaaatacaaaaattagctgggtgtggtggcgcgtgcctgtaatcccagctactcaggatgctgaggcaggagaatcgcttgaacccgggaggtggaggttgcagtgagccgagactgtgccactgcactccagcctggtgatagagggagactccatctcaaaaaaaaaaaaaaatgcagtagcaaaagcgatggtagaaatttaaaacagagttgatgagcagcatatattttggtagtggaaaaaaaggtaaaaaattttttgtaataaaatagaaaaattttgtaatgtggaggcgcagaacactagatttaagccagggggtcttaaattgtgttacattccttttaaagtctgatggaaggtataaatgttctcccctcaaaaaatgtgcatagtgtacataaaattttgcagtttttattacattgaaatatattcttttagacagaatgtaaaagaaccttcatgaaaactatgtcacttttttatgcaaaaaccagtggctactacatgagagcaatgaataaatctaagtggtacaaattaaccaaaattaagctttagttctgttcaatactaaattttaatgaaaagactgctatttaacttttaaaataacaagttgaaactatgctctttgactttgactttgcaacttttatatgatctttgatatccaatcagtgttgactttggtaaaaagtgctgaaaatgctattttacaaaagaaagaagagtaaatggaatctgtagattctattgcctgatgaaagtagacgtgtcaagaaataagaattctccaaggctcttcagataaattcatgtttcatcattttctttgccttcaagttactgagatcatttttggcaagatctgtatcattaatgctgtgttaggaaagaaaagattatgactccacattttactttcaaggttgaagagttaaactgtttaaaaagagtgtatgttatcctgtaaacagcagtatcaggctgtagaatttgtcttctgaaagcagggaacttatatatagcaaagaacttcatagtgctcccatttcttgacaaaacctctcgagaagctcttgattgaaagtcttggctttcatgaatctggcagctttcacaatagtggatttttcatgacaaatcatcttacacagggaattattcaagggttggcacttgaaacagtagaatactttcacaacaagagataagatttctttcaggattgatgacagtcttgcaccctagcgcatactgatgaagagagcagtgggtgaccatgacatggagagcttctgtctttaccagtgccccaatatcagatgtgttgtctggcagtaaggtgtactgtctgcctacagaatactgaggtttcttcaggagaagttttttggtaaagaaactttaccattttgaaagtgttaatgttttctgaagcttccaaaaagattccaaaatgggaatgtttccttgattgtgtcaccatgcttgcatttgatgaaaacttgtagccggctatactgagaaatcatatctgaagaaaggtggtacttccaatctttttgtgacctactttattattgtttttttaatgtcagggttttttttggaatggagaaaagtatttgatagaggtattgcaacagtcttattcttcttcatgctacaagtatatttgactctttctaagatacttgccttcactgttcaactgtgtgactttttgtttgtttagcattacaatcaatatcctagtaggatgatttaatcaatgatttttaattggaacaaatagtttttgtaatggtctaggcttttccaacttaactgtgctctcacatgtggtctctttttctccctctttcctccttcttatacactctcacccacacacatatgcatacataccctgtctgatgtatctgcttcttcagaatagttggctgtgctctgctgatgatgagaacttgccatttaagaaggacttgggatagtccatgtcatcatgttcagggataaaagtaaaacccaagggcatttaaactttattgtattttattttctgtttccagtccaaattaaatccaagagaaggctccataatcaaaaagtaaggacatattttaaatttgccaatgggaagatattctagtcattacagtctggtaatactatcaattctgtttctcttcagaggtgaggggagactatttgatgaaatcgtaagtcctgtagggtgttgtgaaatagggccagaatgaaagatagcaagaatagtgttatgaaaataaaatgcaaagtttataatatcatgtggtaaaatgtaatagtatttacttcatcagtagaactgctctagtagctgtatattctccatccttgcataggttggaatatcccccaagtgaaaagagattgatgggctaatagttaatagaaaatggagatctgtacatacagtgttaagaatgtagatattaaaattgttatatttagctgttacataatattaagactcagagttaagtaatttcactgaaattgattgctttttgtgtcttggagtcaaaataaataactgaaatctactatacttggctcatgcttaattaatatacttagaccatatttcggatgaattattcacagaatctaaaggagtatcctcgtgttcttaccttctttatccctgtgtttatttaaaaaggcaaaaaaaatggagcagatgctgttggttgaccatattttactgaacagtagcatttgtgtttaggttgaaacagcattagaaaactagatacggattaaagtcagtggtaggtttttttttttttttcttccaggaatgtttcttatagatgatcaaacaggcacaggaaggggaagtgttgtgatcaatattatccagttaatattagcattcagaggaaaatttgagtcctctgatacactgttaaatttctttctatactatcaagtccacaaatcctggaactgcaaaagaattttgagactgttcaaaataattaatctctgtataggctcaggctttcctgcaaggttatgaaatgctgataaaattggtcttattttgaaaggctcctcagcttatacctttccttacaaatgcttccttacaaatgctaaagcatttaatgactcctgacttaaagggaatttggacagattgaggttgttggtcttggaaatataatactgcaggcttctgtaaaatacttgaaatgtaattgttttaaaactttcaaagataccacttgtttgcctgttggttagaatactggtgaaataatttttaatcttttatgaataactaatttcatcataagaaaacttagctaagcatggtaaagctgttgttatacaactgtggaattcttcctgaggagtaactatcttataataaatgtagttgattatctaaagtagttttattcttggaatatctcataataggtttattctcttcttgtcagtatttccttgtagattgagcctgtggatttgcatttttgtaattgtgaatcaccattataggagatacatgcattttatctacttttcagtttgtatggggttaactttattagaattatctttaatgttattttgcttatatccttaattttaattatagacaaacattaagaagctggagaaaattatgttctagtgacatttatatagaagaagaatcttttttccccctttcttttttgaagggagatgaggcagtcatattttggtaaagaatttgtagactttgcagaggtctcttcaaaataatctggctcagagtcttgacatatcctcagcagacatggtgcaaattagatggcagagtggtgggtacaagttgaccataaaataacgcattaggttagtaatgcccaaataatactttgggttttcagtgttgcagagaagtcagacaactgatagttattataaagaaaaatgttctgagagtgaggtaaccgcttaagggaaggaagcctccttctgtcttattcactaatttacaagaagataattgtgttacacttccttaggagtcattcatttgtatatttgacacttttgctttatgaacatgtgaagattattcaaaagtaagctgttggtgatttttttcttccaagaaagcatgccacagggcaacttctagggttggttctcatctagtcctgtgctccacactatctgcatctgcacttaagtttcaatattagataactcacatgtttaaactatgaagaaagagttaaaacatcctgagaatgctagtaagtatgtatttttgaaaggacttccaaaatttgagtttaaagaggtaaactccttttacatgacaaagttacttagaaacactactgctgtttccctctcccttgccttctccctgtcccatgcatacccccagctgtgttccagaatgatggcacataaagtaaacattcatatttatttccctttttttgttttttttttttttttttttttttgcttgtttgttttgtttttttgtttgagacagtctcactcaatcacccaggctggagtgcagtggcaacatctcagctcactgcaacctctacctcctgagttcaagcgattctcctgcctcagcctcccgagcagctgggattacaggcgcctgcccccacgcctggctaatttttgtatttttagtagagatggggtttcgccatgttggccagactggtcttgaactcttgacctcaagtgatccgcccacctcggcctcccaaagtgctgagattacaggcatgagtcactgtgcctggcctcttattttttctttggttaaacttttagggaaaaagtttgagctgcttttaattttctttttgtttttaaataaattattaaagtttctctatgttaggaactcttgtgtacatgagttcattgagcttattcttaataaagacaaatcttctagaaataatagttgtatctttaaatgatctcaaggaaaatgtttggtttctctggggaatgaattttcatgacctaatcttaaatcaggttattttttctagcctgtttactaaatttctacatgttataacctaatgaaattttcttacttcctctttatttaaaacaaactataattactgtctttttaaaaatcttccaatgtggcgttcttatttttcttaacatttgaattttcctgggccaaaccatgttactatgatacacattatttaaggctgttatataatacagtaaaattgtagaactttcataccttgaaggatcttagcaattatttaattcaaacccattctaacatagatgataaaacagatttgcagggttgggcacggtggctcatacctatattcccagcactttgggagactcaagcgggaagattgcttgagcccaggagttcaagaccagcttgggcaacatagtgagaggctgtctctacaaaaaaatatttaaaaaatagccgggcatggtgtcacgtgcctgtagttccagctgcttgggaggctgaggtgggaggattgccagagcctgggaggttgaggctgcagtgagccatgatcacaccacagcactctagcctagagcctccctgtgtggcaggctctacacttcagataggcaacagatcgagaccttgtttcacaaaacgaacagatctgcaaagatcaacctgtcctaagtcatataatctctttgtgtaataataaaaaccccatcttctaaccttaaacctggtatttttttctacgaaactatgttctgcagtccaaattatttttctttattattttgaatcctaaagtagaaatagaaacttagaaaaataaaaagcaactcctttatgacatatgaggactttttcagttttaaataagaaaaacccaactcaaagtagcttaaataaaaggagacattttttgacttacataacctaaaagctctggcctggatctaggtgctcaacagatctcaagagtatctctcttattctctctccctcccttaccctcctcctcttttctctcttctgtatatatgttattttcaaacaggctctcacaagtagtggcaagatatagttcctaatagcttcaggtttgcattctacctactttagcaactatgatgagaagagagctacaatttgagcaaaaatttgtagggtgagttctgatttccctggattgaggcacatgcctattattcctgaaccaaatattctgtccagggaatggaattctctggggcatgtatctaaagctgaagtgtagagcctgccacacagggataataatagttttccaaagaaaaatcaaggaggggaaagaatgttggaaagagaaaaaaatatcagttgtctgcttcacatttgttctcaataattagtttcatagaagtgaaatactgtgtaacaccctaaactttagagattcttcgtagacaggaaaaataagaactcaatgaagttgtgacttcattcaaatcacgtagtttatatacatgctattagtaaaacccaggacagctgagtacaagttttacccttatattcacattgaggtccagatcctggttttgaatgagataattacgtgcagtcggactgttttctgatcctaaaaatagagacaataatatctatcttgtaaagttatggtagtgttaaagatatataaaatgttggcaagtaccttaatatacaataactactgctatatgttgtcattgtaataataatcatatttcttcctttgttgaattgctttcctgtagtaatcttattgtgatcatcctgaaacatagatttccgagcttcaagcaaacactattatgttgaaaaatctacattatttctaagtttagcagtgccagtggaaagtttattgaaatagaaaattacttttttaactgaggagtgtagattgtgaattcgtgattcatcttcttaggagatgatcggaatattgataaatattgatgcatagaatatgaacaaaacattacatatcttgtgctgtgatattaaagtagtattctgttctggtagtagtatggcagtattttaggtctgaaagatgtacataatctgtactttgaagtctgttttttaagagattaatcacaagagatttacataaaacaactaaggttaaaaataaatggtggattagagatacatcaggcaaatttcaatttcaaaagcagatgacagaatctcagtatcagggtagcatttaaagcaaaaagcattaaactggatcaaaaatgtcattttacatcaacacagggtacactccaggtaaagacttaacagttatgaacgaatgtgctaaacatcaaaatgtattaagtaaaagctgaaagaaatgaagaataattggtagaaaagcaatgataggaatccttaatgtacttcaaaaggcacgaagtaagaaggtacagtcatgtaccacataatgatgtttgagtcaacacctgacctggtatacgacaatggtcctataaaattataatggagctaaaaagcttctatcacctagtgatgttgaagccgttgcaatgcaatgtatcactcacatgtttgtggtaatgctggtgtaagcaaacttactgtactgtcagttgtataaaagcatagcacagttatgttcagcacataatactttataatgataaacgaatatgttactagtttacgtgtttacagtactattattttagcatgtgcttctgcttattaaaaaatgttaactataaaataatctttaggcagatcctacaggaggtattccagataaaggcattattgtcataggagatggcagctccatggatgttattgccccttaagaccttccagtgggacaagatgtataggtggaagacagtgatattgatgatcctgaccttgtagaggccaaggctaaagtatgtatttattagtttttaacaagagtttaaaaagtaaaaaaaaaaaataaatttaaaaatagaaaaaatcttaataaggatacaaagaaaaaatgtttttgtgtagctgtgtaatatgtttttgttttaagttaaatgttacaaaagagtcagagttaaatttttttatatttataaagtgaaaaagttataaaatgctaaggttaatttactgaagaaagaaaaaatttttaaacagatttagagtagcatgtttataaaatctacagtagtttacagtaatatcctaggccttcacattaactcaccactcacccactgactcacccagagcagcttccaatcctgtaagctccattcgtggtaagtgccctatacaggtgtacaatttttatatcctttataccatttttactgaaccttttctgtcttttagatacacaaataacattgtgttacagttgcctatgatattgaatacagtaacttactgtacaagtttgtagcataggagctgtatcatatagcctgggtgtgtagtgaactataccatctaggcttgtgtaagtatattttatgacacagtgatgaaatcatccagatacagtttctcttaagcaacacataactgtatatatatatatataggtggctttaataataaaataatgaaatatatttctttttttctgtcattgacaaaacaattaccagtcttactaattagatcaactgcaaaacaaaatctcactcaaaaataaaaatatgtaagtcccattccttgattacaattcattagaactggagatttttaaaaatgtttaaatttatatggaaatataaaatcatgttttaaataatttttgattcaatgaggaaatgtaaatttagaactaaagattaataactagagatttataaaggcaaaaatgttaatgaattaggaaacagtaaaccatttgaactaatctaaatactgattgcatgaaaatgccaataaaatcaatacatatttttaaaagccagtcaaggataaaagaaaagagggaaactaaaagtgagacattaagtatgagaaaggagataaaactaaagtgtggaggtgatgttaaaaattatattcaggtctgtgctaatcattttggaaatttcagtgagaagtgggcaattttcagtgaatatatcattgtaaatgctttgaggagagacaaaatctgaatagaccctgcaataatgaaaatgtctaggagccctcaagaaatacctggtttaaattgcatttcaggtggctggttatcacaccttgaagtatcaagtaattatgttatctaaattggaccaggtgttagaaaaatatgtgagacttcacaggtggctgcttatgtagcccttataccttaatctgataaaggtagcatatatttaaaaagagagaaaaccagaaggtacaatttagggaaaattaaatacttctatttggccaaagtaagagtacattcaagggaattgtgagaggtaagagtggaaacagaggttggagctgtatttttatgctgtgattgaattacagtgtgtgataaatattgctcttatttgggtagattaccatttaacattttgaattaattggtaattggattaatcttaacttttaaaaaactaatctgagagtggtataaaggatagattacagaatggataaagggtgataaatcagttggctatggcaaaattgcaggaagaaactgaaataggccacagaaaactgaaactgacattttgagtagtatttcagaatcaagatctggattttggcaactgaatagatgcgtaggaatcaaagatgagtatactaaatgaacttaatctatgatttgtctgtcattttattgtgtaccattagtgtgtatgcatgtatgtatgtgccaggtagttaataggctgactgtgtctcttagctccactctgctgcctgggcctttgccatagtgctggagttccctcacttctcttttctgtaaccctattatattactgctgtctctcagctgtgtttcattcctcaagcagaaagaagatgggaggatcatatagtagttgactagaagctgtggagtttgagtgctgggattatatctagttccattacttatgaagattatatctagttccattacttcacctcatctataaaatggtttaccaatagtacctaccttacatggttttatgagtattaaattatgtatttctaaagacatttagaacaatacaaagaatatagtgtgggctcaataagtgacgatggtgttagttattagaaggccatcgagtgctggagaaaataattgaatatcattgatggaaataaaggaagttttccacgttaaaaagcttcggtttttggaaatgtgtgttttcagtatttctgagattaccaggtagaaattccagccagatgttggaattctgcactggcagttgggaataaagtcatgttaaaggagataagttttggagttattgtgtaaaattggtaaagcactggaatagattggtttgacagaggggaaactctttttgagataggcctatatttagggacaagagaagagacaaccaataagggttgaaagaaaccttgagagagtaagtcctatgacagaagcagggaagtttcagaatgattgcagaaagatcagccaggctcttcctgttctccatcgtggtgcaggatcaaggtgaaaaggataaccccatgcaggaattttgcatctgcaggctccgcttcaacatctgtttaggagaaagtggagacagactgacctgagtaactaaggtcttggaacagcttacaggtcagaaccaggtgttttccaaagctagatatactgttagcgcctttggcaacagaagaaatgaaaagactgttgtctgctgcacagttcgaggggccaaggcagacgaaatcctggagaatgatctaaaggtgcaggagtgtgagttaagaaaaaataacttctcagatactggaaactttggttttgggacccaggaacacattgatctgggtatcagatatgacccaagcattgatgtctacagcctggacttctatgtggtgctggaaaagccaggtttcatcattgcaggtaagaagtgcgggacaggcttcattggtgccaaatagaatcagcaaagaggaggccatgcgctggttccagcagaagtatgatgggatcatccttcctggcaaataaattctcatttctacccaaaagggtaataaaaagttttcagtgaaatgtttaaaaaaaaaataaaaaaaagatcagccagcagccaggatgggattgtgaaaacagcaggaaattagttgttgacaaagcattaatgaccattaagaaatcagcctcggctgggcatggtggctcatccctgtaatcgtaacactttgggaggccaaggcagatttcttgagtccaggagttgagaccagcctaggcaacatggcaaaaccctcgttcctccttaataaataaataaatgaataaataaacaagcaagcaagcagggcttggtgttaggcgcctgtactcctagctactcgggaggctgagggggttgaacctgggaggcaaaggttgcagtgagccaagattgcactactgcactccagcctgggtgacagagtgagaccatggcacccccctccccttcaaaaagaaatcagcctcataatcaatttctctggattaaggagtaagagcgtctcaagatttgctgtttatagagagggaggctaatagtttgagagagatacagaatctagggagagtgtgggtttttggtctttcagttgtttgccagccttggataaagaatgaagattacttgagcatattatttagagacaagtggagagaataaaggcacatgccagataggagataattaataaagcacttgtccaaaatagaaacttgttgaacaggaagagacgtcaagtataaggagattttaagatgggagaagggaattttgagtgtttgtattggatgacctcagggttcccagtaaagcaggagctgaattcatcgaaggtgatgtgttggtcaggatcaagagagaggttgggagaacaaagtgctaaaatcgttgtggtcaagagtttaaaaagtgtataccagaagagttattgagtgataggggtttgaaataggcaaagctgtaggaaagggggctggaaggaatattaggaggaacactaaatatacttctgaggtctacctcctggtctgtgaacataaaggagctgaaagagtaatggctgaagttctttagtttagctaaagttttttagctaaagctagaattgttgaaagttgtatttgaggaaaaaaagttaaggatacagttgaccgttcgataatgtagcccactgttgaccagaagccctacccacaacataaacaggcaataacacatattttgtatgtgtattatatagtatattcttaacaataaagtaaactagagaaaagaacatgtatcaagaaaatcataaggaagagaaaacacatttacagtactgtactgtatttattggtaccatacatttatgttgctgtttacaagatgaagcatctgtctgaaatggccagcagctacagctgtacctatctactgtacatatcaagcaagtcactttattcttataatgtctatgacttctttctttgaaagcgcttccatcatcactgttggcacttcatatgggtctcatggtgttaaggtttacggcattgcactagacacaatgaaaactacacaagagggccgggcacggtggctcacgcctgtaatcccagcactttgggaggccgaggcgggcggatcatgaggtcaggagattgagaccatcctggctaacacagtgaaaccctgtctctattaaaaataaaaaaattagccaggcatggtggcacgtgcctgtaatcccagctaatcgggaggctgaggcaggagaatcgctttttcccagaaggcgtaggttgcagtgagccgagatcgtgccactgcactccagcctggatgatagagggagactctgtcgcaaaaaaaaagaaaagaaaaagaaaagaaaagaaaaacacacaagagccgtgagagagatagcttttgattgcaatacacaatttactggagagatgagctgatcatacagagatgattagtgtcacacagtgttttaaacagattcttgcaaccctggagttcactgcagtagcaacagaagttagctatgagattttaacagtagtatagtatgtactacagttaatattaggtagctatgatttaatgctgcatctttgcatttgtttacatttatcttgactacaagtggtattatgtctggtcttaaggtttgtgtgcatatgttttgatgaattttaactttttataataggtttgtgtatattttatggcagtaaatgataaaacagactaatctacatatattttatgtagtcatgacataaacctaactttttcttaactttttgatatttctagtctatgtgtttcatctgcaggttttttcaaattgttgaaatctctgaaaaattttattgaaaaaaaatccatatatgtaagtggacccacacatttcaaacctgtgttcaagggtcagctgtgtaaataattttcctcaaaattaaagtggaaaaggagagttactactagtagaaagtagaactgtacccttgggcaggggtgtgtgtgtgtagttaaagatcaatttaacttaaaaggtcttggttagagaataaaaactggcccttattagctttaatttacatgaaaaatgaaaaattttaggccaggcacagtggctcaggcctgtaatcccttaactttgggagaccaaggggagtggatcacttgaggtcaggagttcaagacagcctggccaacatgctgactcacccttccctactgaaaatacaaaagttagccaggcgcagtggccatccctacagtgctagctactcgggaggctgaggcaggagaattgcttgaacccgggaggcaaggttgcggtgagctgagatcgcaccactgcactccagactgggtgacagagcgagactccatctcaaaaaaaaaaaaaaaaaaaaaagatttgaaaacagagtattttttaatctgcaagagctttacagccttttattcatatgtataagcttttaaagatgactaaaattttagtgtggactttccactcattggaaatcctatattgcaggtgttaattcaattttagtgagtgtgcatcatggctcagagagataggactagaatgaggaggtcacattggagactctgaaacagatacatgtgagcctcccaactttttaatatttgttaatctagaagtgttgaattttgggtgctgacaaggcagcaggtagataagaattgcaaagttaagaaaatagactgtaatattgatggtaaactaattgattaaattttaaaatgtacttttccatgtttttctttgaattgtcagtaattttgtttcaactggtattcatacatagattattcacccaatgttgacaactagtagatttatatattttttatgttgcctatccttttttgggtaaggattaacagaatgtataatcacctacattataggtacactactaatcacttgctacttgaaaaaacctaaagctttgaaatctttttattattgcacacaaacttatgccaaaaatggagataaagagaaaaatgtcatccactaaaccccaacaaataatgttgacaatgtggtctactcgtagactcgcattgacttaatttttttaaatcttattgcatattttgactagataataaatgcatatggttaaaaaattcacatggttcaaaaaagtacacctcccactcatcttccatgtgatatttcctttctgcttagcaattctgtatttatcttgctaaacatgaatgacagttgtttgctgaaattacattaaatgtgacgtaataaaatcattgtaagtttacattttttaactttaataatttttaatgttttaatgaagagtatgaagagtagtagtactgctcttcaaagtactactactttaccttaccttttactgttttgttaagaaaattaggccgggcgcagtggctcacgcctgtaatcccagcactttgggaggccgagacgggcggatcacgaggtcaggagatcgagaccatcctggctaacacggtgaaaccccgtctctactaaaaatacaaaaattagccgggcatggtggtgcgcgcctgtagtcccagctacacgggaggctgaggcaggagaatggcgtgaacccgggaggcagagcttgcagtgagccgagatcgcaccactgcactccagcctgggcgacagagcgaaactccgtctcaaaaaaaaaaaaaaaaaaaagaaaaaagaaaattatatagaaataaaattccagctattccaaaactgcaccttgaatacaggtacagaattgctaaaaccgtgtaccattttgtagttttagcatgcttttgtgtaactgcatctggtgtttgatcctcatgagagccctgttaaggaagggtacatattattgtcctcattttccttcgaaaacacatcagagtttgtattttgactgtcagcattcaaatacaagtcttttatttataaaattttggtctttatactgtggctaaaaatcttaaatcacttgtcatgatttgaaatggtttataccgattttttttgacatttatacacacatacacatatttttaaattgtctataataaaatcatgctcatctttgaaaaaatattaggagtactacagtggatacctacatacttgctattcagcatacctggttttttgtttgttttttgagacagtcttctctgtggtccaggttggagtgcagtggcacgatctcagctcattgcaacctccgtctcccaggctcaagtgattgtcctgcctcagcctcccaagtagctgggactgcaggtacacatcaccacgcccagctaattttttgtatttttggtagagacggggtttcaccatgttggccaggctggtctccaactcctgacctcaagtgatcagcccacctcggcctcccagagtgctgggattacaggttgtgagccactgcacctggcctgtttttaaattcacataaatatgttttatatttttcattagggagaagaaggttgtgtctacaatttttaagacattggggagatttagatgccagtagtaacttaaaagagaaataattgcaaattctttttcctcttgagtatactttcatttaaggtacagtgttctgtaagttacttttaccgttaaacttcttaatgttgcttattgtttgtcttacatttttaggttggatttttcttaagtcacatgtctaataaaaaaaacccttaaatacctcatttattcgtcttcgttagtgaatgcattgttgtacatattagatttttctctttagataactcagcttcccctattaagtgccacatgtattacaaaattttatttatgttttattgtttaataaactcttgagaactagatacattttaatcatttgtaatacttacattttctaaaacacttcatttttccctggtttcttcaacaaagagatgcatgtagtacaaggatagctttacctgtgttagaagattgtttcacacatttacatcaactgcatagtcctgtttttgttgggccctaatgccagcatcactttttgctactgctgtttctgccttaaaggcaatatgcctctgtctagtttgctgattctgatactctttcccctggaaagtaggtaatcaagtttgtgaggagctgtgtgtttaaggagtccataaatccttgtggggagccctaggtgtatagagcatagctgtagggcagaggcctttgacacttattctggatatgcagtggcctttgcctatggggttcatgggtcagagcgctgttgtgacctttgaataaatgggttgttatgataattgttttaagggaggagagttattctgatatcctttgtattgatattgctcttatttattattgagctggatttaagtattaatcatttaaggtcaaatttctaatgtatatatgttcttaaatggctacgacccagttaccatagcaatttagtgaaataactataatggaacattttttttcaatttggcttctcttttttttctgtccaccagggagtaactattcccagtcagaggcgctatgtgtattattatagctacctgttaaagaatcatctggattatagaccagtggcactgttgtttcacaagatgatgtttgaaactattccaatgttcagtggcggaacttgcagtaagtgcttgaaattctcatccttccatgtattggaacagttttcttaaccatatctagaagtttacataaaaatttagaaagaaatttaccacatttgaaatttatgcaggagactatatttctgaagcatttgaacaaattaattagctttgttgttcaactcattgggctaaagaagccaaaagcaatgggttttaatgtagtcgaagccaaattatatttatgaaagaaatattctgtgttataaccaccaaatacagcccaattctgactagatgatggaagaacctgtcccatcagaggtccagcatgaggtccagcagaggtccaccagaggagttcagcaatttgctgctcttagggcagggatcaattccttaatatcttaggaagactaggtattgacagtaatggtgacaaagcaatgaaaaggaaaggaagaagtgataagacgtggcagcaagctgaagtatgatgagtaaagaataggaatcaaagtatgtggagtgttagagaaaacctggatttagatccagattctagtcctatctctgtcattaatctattgcgtaaccctgagcatatcatctacctctctttgagtttgcttgtcaataaaatgaagagactttgaaatctgagacttcctggataagtactaaatacagattatgtcactgatgtctgcctctatttatttctcccttttaccctaatctctataagtctacctcagtcatcctgatcctattctacttctctgatgttgttgtcagataggtgtgatcatcctcatcagatcttttctgtattcttagagacagataactttatcaaagaccacagatttattagtatagcatgttaaagtcttctaaagagtctcattgatgctcttttcatctcagtacaatttttaaaactgctgaatgcaaggtactgagctgttggaagtgactgacagatgaatgtaacagattcatagagaaggaaaaaggaagaaaaactcatgctcttcctatagtattgatatcagtgtaagagccaagagaaaggtataaagtatcatgcagatattaagggaaagaaaacattcactttagtaatctttcctcattttctagtttcctcttatgtactatgatttaatactgtagtaaagttttaataaaatatgagctatatgtaattaagtgggaggttgtggggctaggcacgaggctcacacgtgtaaccccagcactttgggaggctgaggcaggcggatcgcttgatctcaggagttcgagaccagcctggacaacaaggtgaaaccccatctctactaaaaacacaaaaattagctgggcatagtggcacacacctgtagtcccagcttcttgggaggctgaggcaggagaatcgcttgaatccaggaggcagaggttgcagttagccgagatcatgccactgcactgcagcctggacatcggagcaagactttgtcttagaaataaataaataaatataaaataaaataaatgggaagttgtgtatataaattataaatgctacattcagaaaagcttttgaaggttgtcagacagtttcttaaaggaagttcaccagttctttattgaacattgaagaaaacatacagtttagactggcattaaaactgaaagaagtggccagacgcagtggtagacgcagtggttcacgcctgtaatcccagcactttgggaggtcaaggtggatggatcacctgaggtcaggagtttgagatcaggctggccgacatggtgaaaccctgtctctactaaaaatacaaaaattagccaggcatggtgatgcgtgcctgtagtcccagctacttgggaggctgaggcaggagaattgcttgaagccgaaggtggaggttgcagtgagccgagattgcgtcattgcactccagccagggcggtaagagtgaggctccgtcttaaaaaaaaaataagtaaataaattaaaaactactgaaagaagtattacaggcaatgggaaatagcttgagtggaagtgcagcagaaggaaaaagctggacaagaatgtagtgtcagagaataggtatggaacgtgtgagtgactgttagaggatcttgaatggggataacagacttgatttcataaatactgagatgtcatgataatacttgaggactaaaccatgttttaaggacagttgtatgcaaagttgtaatcgcaagaggaaaaaatagtggaaaagaaaccagtaataaaacttgccttaatgcaggtatgctaagacaatcaaatgggatttcattaattttttatttgccatttatagccaaagattttgtaaaagttttgagcccagtcaggtgaaatagtctcagaaagaaagaaaagtgaatctgagacttggagacattaatgttgatattttggttttaaacgtgttttaaatccggtaaaagtgagcttctcacatgacaatattcagtgggtacttgggagtatgggttcgaatctaggtaggagatatatcgatattttgggcatcatcaggaaagggagagtagttaagcctttcatataaataatggtgtggcgtttgggcatgggaagtcttggaggaaaggaagaaaaggagagggtgaggactgagataagaatggcaacttgggtttaggaagaagaagaggaatcaatgtagagaacagatagtgctgaaaaatacagcatcttctgtagggattggcagctttttcttgatttttgtcttaatatttctaagagatggaaaaagctactatattctagacatttaacagggttaaaaatgttactaaaagatgatcaatgtggttttcattcaagactataacaatatgtatatatccaaggaaatttaattctgacttaaaaaaattgttttgcttgtatagatttagggacacaagtgtaattttgttacatgcatagagtgtatagtttcaagtcagggcttttaggttgtccatcatctgaataatatacattgtacccattaagtaatttctcatcttctactcaccgtttcaagtctccactatttatcattccattctttacattctgattttcatttactaggtgtattagtctgtttttgcattgctttaaagaaatacctgagactgagtattaaacaggtttaacctgttttctttatgaattcttctttaattggctcatggttctgcacgctgtacagaaagcatagcagcatctgcttctggggaggcctcaggaagcctccaatcatggctgaaggcaaaaggggagcatggtgagaatgggagcaagaaagagaaggagtggtggggagaaggtgccacccacttttaaatgccagctcacttaccaccaagaggatggcccaagccattcatgtgggatctgcccccatgattcaagcttcttccaccaggccccacctctagcactggggattacaattcaacctgagatttgggagggaaagatatccaaactatatcactaggtctggatcttgttatttattttttggaacatagtcatatatatccaaggatatatattgtagaagtccacagaaccatactaatattggacttctgcttagttaggtcttatctatctgaaacatgatattcatattgcagagaagattattttctttagtgattgaggaaatctttactacttatacatttttaatataatactataatatttgaagatgcacattttagatgtagtttaattgaaacctggaaatactattaatttgctttttaaagtcctaaaatcaggattatcagattctgaattaatggagtttaaatcaaaaagattacaaggcagtttttcagttttattctggttaattttatcacagctttggaatcctactttgtttatttgcttcttgaagttagatttcccagtgaaatttcagtatcacataaagtcttatgaaatggctcattgcactttgaactttgagtcaaggaagtgaaatttattgatagattgttggtgtaatatttatcctgtttgtggtagcttttttgaataataagtgtcttagaagaccatgttggagtagcctgcatgcttttatcaaacatattaattatgtgatggctgatactgctttagatattacatagaaatagtagtaggtgtttactaaactggaaatttcatttaacttggtttagctttgccttgttctcagtcacattgataaaaatgtaagacttttgtttatcttttagaataatgacaccttttggtgctgagaattttttgttttatatatatatatatatatacgtaatataaatacaaaatatatttaaatatgtataatatttctcatacactttatgtaactttgtgttcctgtttctctattatcttggcatgttttcttcaaatggcacttcttaacctcctaaggttaataaatttctttgtaatggacttttgttttctaattcctcagcgtatgacaaatgaattatactttgtcaaattatttaggtaactttcagtttttgaagtcctgggatcataacattcatcagtctttaatttctgtcattaaggtcattagctataaatgaatttatgagtagatttaaaaaataaaacatacaatccttcccttaacacactttcccaccatttggttcaactgctagtgtaaaagcatgatgaattttgagaagttatattttaccagttactttattttttaccagttatttaaaacagacatgagccaaagccagaatacttgttaatgaaaatgaggtgttttggaggaaaggaaggttgtgctgcagtttttacttgaaatctgttacatttctttacagaaatttcaaatctcttgtttcctgttatgatggtggcattatatacctttaaaatgtgagctataggaaaatgaatgatggttaattttttaataaatatttagacttgtgtttttgaaattttttataacattgttataggttttatcctctttctcttgtgaacatgtagtgatttgtattttgtgatctttgccgcatgctagagacttaagaatactatagcaaatatctgtcttctttacatttaaaaatttttcgtgactactccctgttgatatctgtcttaaaagttacttttgatgtagttcacaaatgtaccagataattatttcatcgtttttaatgcttaaagtttttatttgtattaggatttttagtatgattttaatgttaaagttttgaagttactctgccactagaagtctaattttgggacttactattcatgaaataggaattgacttttatataagtaataggaccttattttgaaggttcaaactggagaaaatcttacattgtttatatttttatttcatttatttcagttgatttgcttgagatcaagattgcagatacagaatccatatttcgtgtatattgctgatattaatcattaaaatcgtttttgacagtttgacagttaaaggcatttcctgtgaaataatactggtatgtatttaaccatgcagatcctcagtttgtggtctgccagctaaaggtgaagatatattcctccaattcaggacccacacgacgggaagacaagttcatgtactttgagttccctcagccgttacctgtgtgtggtgatatcaaagtagagttcttccacaaacagaacaagatgctaaaaaaggtttgtactttactttcattgggagaaatatccaaaataaggacagattaaaagctatattttattttatgacatgtaaggaactataatttgttttctattagatctgcaggtgttttgcttactctggcattggtgagacattataagggtaaataatcctgtttgaaggaaaaggccttatggcattgtaacatgagaggaatttttcttaacaaggatggttaactgagaagaaattagcatgggaccaatattttaaaaattttggtctataggtagaaatgagatctgttctgtggtcttatgtagtgacacaaaccactttttctccattttggcttatgtttctttttctttccttttttttttttttcctttttgttagagacagggtcttgttctattgcccaggctgagtagctaagactacaagcatgtgccaccacacccagctaattttttttatttttatttttgtagggacagggtctcactatgttgcccaggctggtctcaaactcctgggcacaagcagtcctcacgctttggcatcccaaagagttggaattacaggtgtgcgccatcatgcctggccttaacgtttcttaagacttgattattttctatttagcttctgtggatttactgattaattttttaactaggagagaaatcagtatgaagaggaagtaataaagaatgaaaacatggtatttaaatgtgcaggtttagaaagttaatgaagtttgaatttgattgatctgtatttagagaaggcaacgtcttattattttaaaaccaactatccgccctgtgcggtggctcacgcctgtaattccagcactttgggaggctgaggtgggcagatcagctgaggtcaggagttcgagaccagcctggccaacatggttaaaccccatctctactaaaaatacaaaaaaattagccgggtgtggtggcaggcgcctgttttcccagctactcaggaggcttgaggcaggataattgctgaacccgagaggcggaggttgcagtaagccaagaatgcaccattgtactccagcctgggcaacaagagtgaaactccatctcaaaaaaaaagaaaaaaaaaacaacaactatcttcatttaaaatattaaatgtgaatatttaaagtgagactaaggtgcaacatttttagatagtaatgaagaaaaggactaactttgtagtgttgctgccttgttaaacatactagatagcatattgccaatctttaaacattctcaatgataggatttatttactttttctgatttttagcttttcttttgaaagaaaataagaggaagtttcatttactgcaaaattttaaatgctgctttgatgtatcagtagagatataattttcctttatccagaatccaagtagctggaaaaaaaaatcaaaatatgctgaacttttttttttttagccagaaacccatttcctatcgtctgtacaaataaaagttaaatatatctcaataacttagaaaaattattttttgataatccaggaagtattagcaactgttttaaaattaagataactagtaagttttatttagctttcaaaaataggcatctacatcatcatctctgcatacctttaggaatttcctaattcttatttcccttcatctgtactttaacacatgcaaaattgaaggttagattaaatatttatgatttatttgtttatccttgactacataaatttccattttattgattttccctgccttatttaagaatatgctatgattaaaacacaaaaaattttagtataacccatatatatatagaattcacctttttgttatttaaatattattggcttattttcttctaagtaaaatacaattactggctaaaataattgaaataagcaaaaaaaaaattttaaagaccttgtatacaagattactttgccaggtactgttaaaagatgcaatgacatttaagacgtaacatccttaaggatcttattttctgggggataaaaaactttaagataaattagaataaaagatttaaatggcattttaaggtaccaggtaccagataagatgtcacaaggctgtatatcattaattgccaaatgatttatacaggccagatttctttgttggtcaatagaggtttaaagtgatgaacttctgttgtgtttttttattaagaaggtattatcttattagtaagaagtgattttttttaagaacaagcattttataacatcaaaagaaatcagtagtactctttcctaccccctcatatttattctgaaagtattcaagcattatattgtcatgtaagaaactggagcttctcatgtttgtattgctgtagaagtaaacatgtatttgccatgcgtcatcagggaagttgcactcaccgtccaagaacttttgttaaagtaaatcttggaataggtagctcatttgaaatgtagaaaaaattaaatccatatctgaattttgtttatatgtatgtacacgtaaactaaaaacgtatttaaagctagtattagatgagaaaagaggtttttttacttaaaattttaaggcaaaagtagtttatcttagatcttgtgagattgtatttttggtttaaaatttgagaatttgagtgaagaaaaatcatgtgaatgaaaatgcaacagataactcagattgccttataatagtctttgtgtttacctttattcagaatatcaaatgatagtttattttgttgactttttgcaaatgtttaacataggtgacagattttcttttttaaaaaaataaaacatcattaattaaatatgtcatttcatttctttttcttttctttttttttttttttaggacaaaatgtttcacttttgggtaaatacattcttcataccaggaccagaggaaacctcagaaaaagtagaaaatggaagtctatgtgatcaagaaatcgatagcatttgcagtatagagcgtgcagataatgacaaggaatatctagtacttactttaacaaaaaatgatcttgacaaagcaaataaagacaaagccaaccgatacttttctccaaattttaaggtcagttaaattaaacattttgtgggggttgttgacttgtatgtatgtgatgtgtgtttaattctaggagtacagctgatgaagaacttgcttgacaagtttttaacttatgtattatttcgaagcagtgtttacgtagcagtaacatgaaagtttctaataaaatacccaatgtacacagcgtcaaaaaagctgcatttttccttttcctaattcttcgttgtttgctgaaatctggggcaaaggtgcgggagggggctaaatgactgggatatgaagtaggaatgggagaggaaagaaatagatgggaactcagtcatttgggaatgattcatatggaatgtttttactgcttccactcctgtctgccttccaatttattctcaatccctcagagtgatcttaaaaatagacttgattgtgtcacttctgtttacactttataaggaccttgtgtttttttttttaccatgacctacaaggcccagcataatttagcacagggctacctcctacatcagcactagtcaccttctctccttgtttcttgagattcagtcatactggtctttcttcagttcttcaaaatgctaagcttctgcctcttctagtctttccagttattttccttctccctgtaccttttcatctcagccttttcccctgaccttccatagctatcttcatatttccagccttagcttcaatctcatattctctgaagtcctttgattgtcctcccgttattctttttttaaaaatcctatttccttatattgtatcttagaattatttggtttgtttcatttttgcctatgtgtgatatatgtatttctacataggtatatatatctacttatagacaagaattcttcagattaaaaaaatctgatttgtaaacattcccaagtggttgtttaccatttttttcttcccccttcctatttcttattctacctgattttcccctgttcattcaccacactcgtttctttctcttttttactctctcttaatttttcattcaatttttataacatgtaataaatctaactgtagcgtctgagtattaagaatattgctagtaatacttcacctgtaatcccagcactttgggaggctaaggcaggcggatcacttgaggcccaggagtttaagaccagccggccaatatggcgaaaccctatctgcactacaaatacaaaaattagctgggcatggtgtcgcacacctgtaatcccagctacttgggaggctgaggcacaagaattgcttgagcctgtgagatggaggttgcagtgagccgagatcacaccagtgcacgtgcacttcagcctgggcaacagagcaagactctgtcttaaaaaaaaaaaaaaaaaaaaaatatatacacacacacacacacacacacacacacacacacactattactaccaatatacatacatatatgtatgtatgtatgtatgtatattggtagtaatagtaatacttgggcccctgcacgttttaagtgaaaatagatctaatattaaatgtctttagcccttaaattttttttaagtgttcagaagtttccctttaaaaaaatttttaatatataataattgtacatatttatgggatacagagtgatattttcatgtatgcagtgtgtgatgatcaaatcaggataattagcatatggatcacctcaaacatttgtcatttctttgtgttaggaacattcaaaattctgtcttctagctatttgaaaatatacagtaaattattgttgactagttacagttctatagaacactataatttattcctcctgtgtgtaattttttatcttttaaccaacatctccctatcctcccctcccactccctttcccggcctctaataaccacactcttatgagctcaacttttttagcttccatatatgagtgagaacatacggtatttatctttctgtacctgacttattttacttaacatcatgtcctccgggctagacattctctttagaatccacaggtttcctttcttttctctaaatctgcattttgctcagccattaacttttaaaatgtctttttccctttagttttattgttttctattttaatattgcaagatgttttatatttgtgattacaaataaaaactccattattagtaaacaaatacaatgtcatatagtagtaagtgctataaaaaatagacaggatagaaagtaatcttggtttgtatgttttttgttttttagcaaagatgattagagaaggcccaaccaagcagataacatttaagcagaggcctaaatcatataagtgagttatacaaatatctgggaaaagagttaagagtacagatgcaaaagcccttagacaagagaatgagcttggtatatctgaagagtggataagtcattttgactgaaacagagtggacaagaaaaccagtccaagtgtaaagacactagtgtgtgttcagcataggaaggatgtaatctgaattttgtgtttaatattccctgtgttcatgctttcaaaatacagatgagtgaggaaagtagggagaaggggtaataaaggaagctgagagatcagttaagaggtacttgaatagtttagtaaagatgagagaagatgtttgcttcttgttgcccctcactgcttagaatagtggcagtgaagggtaacaagaagctgtcagattaacttaaagagtttactgatgcagtggatgttggttgtaagagaagaattgataatgactcttggataataggggagggaggggctgtcaatataatataatgaagaagggatttgaagtcatttctgatttaaatctcacatccactacctacttttaatagatatgtagcctttaacaagttccctaacctttctgggccttagctacctccccttggaaatggaaatacctaacatgtaaggttgttttgacagttattttcactaggcatgtaaaggcacttgactctctgttatagaccactgtattatgttaatgtccctctccttcctccctttaggtaaagtttttagggctaataaatcccaaatatcaatgttgatcagtagtttgtgtttgtgtagtgttgtttatatcaaaaactacattgaagccgggcacagtggttcacgcctaaaatcgcaacactttgggaggccaaggtgggcctcccaccttgaactaaggagtttgagaccagcctgggcaacatggtgaaatcccatctctacaaaaaatataaaagctagctgggtgtggtggcatgcacctgtagtcctagctacttgggaggctgaggttgatcctgggagtttgagcctgcagtgagctgtgaagatgccactgcactctagtctgggtgacagagcaagaccctgtctcaaaaacacacacacacacacacacacacacaaagaaatacattgatttttcacataggtagtaagagaaacattctttttgaactcagctgtttgtgaattgaattttgtaattcaaatgctatattatgtaaactattgatgactttcaatctgcatttattttgtataattatttagttaatatttgccacttatattccttaaaaaataaaattgaggttgggcgtggtggctcacacttgtaatcccagcactttgggaggctgaggcaggcagattgcctgagctcaggagtttgagatcagcctgggcaacatcatgaaccccatttctactaaaatacaaaaaattatctgggcatggtggtgtacacctgtagccctagctgtttgggaggctaaggcacgagaattgcttgaacccgggaggcagaggttgcagtgagccaagatcatgccactgcactccagcttggcaacagagcaagactcttgtctccagaaataaaaataaataaattgtattaacatcctgatagtttatctgtttagtacctagcaagaaagaaaatgttgaacatcttaagaagagggtcatttaaaaggcctcttaaagatcatgtttgttacagtgcttaaaaattaatatgttcatctgcaaaatggaataaaaaatctgttaaaaatatatttcactaaatagtttaagatgagtcatatttgtgggttttcattttaaattttctttctctaggtgaagctgtacttcacaaaaacagtagaggagccgtcaaatccagaggctagcagttcaacttctgtaacaccagatgttagtgacaatgaacctgatcattatagatattctgacaccactgactctgatccagagaatgaaccttttgatgaagatcagcatacacaaattacaaaagtctgaatttttttttatcaagagggataaaacaccatgaaaataaacttgaataaactgaaaatggacctttttttttttaatggcaataggacattgtgtcagattaccagttataggaacaattctcttttcctgaccaatcttgttttaccctatacatccacagggttttgacacttgttgtccagttgaaaaaaggttgtgtagctgtgtcatgtatatacctttttgtgtcaaaaggacatttaaaattcaattaggattaataaagatggcactttcccgttttattccagttttataaaaagtggagacagactgatgtgtatacgtaggaattttttccttttgtgttctgtcaccaactgaagtggctaaagagctttgtgatatactggttcacatcctacccctttgcacttgtggcaacagataagtttgcagttggctaagagaggtttccgaagggttttgctacattctaatgcatgtattcgggttaggggaatggagggaatgctcagaaaggaaataattttatgctggactctggaccatataccatctccagctatttacacacacctttctttagcatgctacagttattaatctggacattcgaggaattggccgctgtcactgcttgttgtttgcgcatttttttttaaagcatattggtgctagaaaaggcagctaaaggaagtgaatctgtattggggtacaggaatgaaccttctgcaacatcttaagatccacaaatgaagggatataaaaataatgtcataggtaagaaacacagcaacaatgacttaaccatataaatgtggaggctatcaacaaagaatgggcttgaaacattataaaaattgacaatgatttattaaatatgttttctcaattgtaacgacttctccatctcctgtgtaatcaaggccagtgctaaaattcagatgctgttagtacctacatcagtcaacaacttacacttattttactagttttcaatcataatacctgctgtggatgcttcatgtgctgcctgcaagcttcttttttctcattaaatataaaatattttgtaatgctgcacagaaattttcaatttgagattctacagtaagcgttttttttctttgaagatttatgatgcacttattcaatagctgtcagccgttccacccttttgaccttacacattctattacaatgaattttgcagttttgcacattttttaaatgtcattaactgttagggaattttacttgaatactgaatacatataatgtttatattaaaaaggacatttgtgttaaaaaggaaattagagttgcagtaaactttcaatgctgcacacaaaaaaaagacatttgatttttcagtagaaattgtcctacatgtgctttattgatttgctattgaaagaatagggtttttttttttttttttttttttttttttaaatgtgcagtgttgaatcatttcttcatagtgctcccccgagttgggactagggcttcaatttcacttcttaaaaaaaatcatcatatatttgatatgcccagactgcatacgattttaagcggagtacaactactattgtaaagctaatgtgaagatattattaaaaaggtttttttttccagaaatttggtgtcttcaaattataccttcaccttgacatttgaatatccagccattttgtttcttaatggtataaaattccattttcaataacttattggtgctgaaattgttcactagctgtggtctgacctagttaatttacaaatacagattgaataggacctactagagcagcatttatagagtttgatggcaaatagattaggcagaacttcatctaaaatattcttagtaaataatgttgacacgttttccataccttgtcagtttcattcaacaatttttaaatttttaacaaagctcttaggatttacacatttatatttaaacattgatatatagagtattgattgattgctcataagttaaattggtaaagttagagacaactattctaacacctcaccattgaaatttatatgccaccttgtctttcataaaagctgaaaattgttacctaaaatgaaaatcaacttcatgttttgaagatagttataaatattgttctttgttacaatttcgggcaccgcatattaaaacgtaactttattgttccaatatgtaacatggagggccaggtcataaataatgacattataatgggcttttgcactgttattatttttcctttggaatgtgaaggtctgaatgagggttttgattttgaatgtttcaatgtttttgagaagccttgcttacattttatggtgtagtcattggaaatggaaaaatggcattatatatattatatatataaatatatattatacatactctccttactttatttcagttaccatccccatagaatttgacaagaattgctatgactgaaaggttttcgagtcctaattaaaactttatttatggcagtattcataattagcctgaaatgcattctgtaggtaatctctgagtttctggaatattttcttagactttttggatgtgcagcagcttacatgtctgaagttacttgaaggcatcacttttaagaaagcttacagttgggccctgtaccatcccaagtcctttgtagctcctcttgaacatgtttgccatacttttaaaagggtagttgaataaatagcatcaccattctttgctgtggcacaggttataaacttaagtggagtttaccggcagcatcaaatgtttcagctttaaaaaataaaagtagggtacaagtttaatgtttagttctagaaattttgtgcaatatgttcataacgatggctgtggttgccacaaagtgcctcgtttacctttaaatactgttaatgtgtcatgcatgcagatggaaggggtggaactgtgcactaaagtgggggctttaactgtagtatttggcagagttgccttctacctgccagttcaaaagttcaacctgttttcatatagaatatatatactaaaaaatttcagtctgttaaacagccttactctgattcagcctcttcagatactcttgtgctgtgcagcagtggctctgtgtgtaaatgctatgcactgaggatacacaaaaataccaatatgatgtgtacaggataatgcctcatcccaatcagatgtccatttgttattgtgtttgttaacaaccctttatctcttagtgttataaactccacttaaaactgattaaagtctcattcttgtcattgtgtgggtgttttattaaatgagagtttataattcaaattgcttaagtccattgaagttttaattaatgggcagccaaatgtgaatacaaagttttcagtttttttttttcctgctgtccttcaaagcctactgtttaaaaaaaaaaaaaaaaaaaaacatggcctgagagtagagtatctgtctactcatgtttaattaaggaaaaacacttatttttagggctttagtcatcacttcataaattgtataagcacattaaatagcgttctagtcctgaaaaagtccaagattcttagaaaattgtgcatatttttattatgacagatgtttgaagataattccccagaatggatttgatactttagatttcaattttgtggcttttgtctattattctgtactctgccatcagcatatggaaagcttcatttactcatcatgacttgtgccatataaaaattgatatttcggaatagtctaaaggactttttgtacttgaatttaatcatgttgtttctaatattcttaaaagcttgaagactaaagcatatcctttcaacaaagcatagtaaggtaataagaaagtgtagtttgtacaagtgttaaaaaaataaagtagacaatgttacagtgggacttattatttcaagtttacattttctccatgtaattttttaaaaagtaaatgaaaaaatgtgcaataatgtaaaatatgaagtgtatgtgtacacacattttatttttcggtatcttgggtatacgtatggttgaaaactatactggagtctaaaagtattctaatttataagaagacattttggtgatgtttgaaaaatagaaatgtgctagttttgtttttatatcatgtcctttgtacgttgtaatatgagctggcttggttcagtaaatgccatcaccatttccattgagaatttaaaactcaccagtgtttaatatgcaggcttccaaaggcttatgaaaaaaatcaagacccttaaatctagttaatttgctgctaacatgaaactctttggttcttttatttttgccagataattagacacacatctaaagcttagtcttaaatggcttaagtgtagctattgattagtgctgttgctagttcagaaagaaatgtttgtgaatggaaacaagaatattcagtccaaactgttgtaaggacagtacctgaaaaccaggaaacaggataatggaaaaagtcttttaaagatgaaatgttggagccaactttcttatagaattaattgtatgtggctatagaaagcctaatgattgttgcttatttttgagagcatattattcttttatgaccataatcttgctgtttttccatcttccaaaagatcttccttctaatatgtatatcagaatgtgggtagccagtcagacaaattcatattggttggtagctttaaaaagtttgtaatgtgaagacaggaaaggacaaaatagtttgctttggtggtagtactctggttgttaagctaggtattttgagactacttccccatcacaacaacaataaaataatcactcataatcctatcacctggagacatagccatcgttaatatgttagtgactatacaatcatgttttcttctgtatatccatgtatattctttaaaaatgaaatttatactgtacctgatctcaaagctttttagcttagtatatctgtcatgaatttgtaggatgttccattgcatcagaaaacggacagtgatttgattactttctaatgccacagatgcagattacatgtagttattgagaatcctttcgaattcagtggcttaatcatgaatgtctaaatattgttgacattaggatgatacatgtaaattaaagttacatttgtttagcatagacaagcttaacattgtagatgtttctcttcaaaaatcatcttaaacatttgcatttggaattgtgttaaatagaatgtgtgaaacactgtattagtaaacttcatcacctttctacttccttatagtttgaacttttcagtttttgtagttcccaaacagttgctcaatttagagcaaattaatttaacacctgccaaaaaaaggctgctgttggcttatcagttgtctttaaattcaaatgctcatgtgacttttatcacatcaaaaaatatttcattaatgattcacctttagctctgaaaattaccgcgtttagtaattatagtgggcttataaaaacatgcaactctttttgatagttatttgagaattttggtgaaaaatatttagctgagggcagtatagaacttataaaccaatatattgatatttttaaaacatttttacatataagtaaactgccatctttgagcataactacatttaaaaataaagctgcatatttttaaatcaagtgtttaacaagaatttatattttttattttttaaaattaaaaataatttatatttcctctgttgcatgaggattctcatctgtgcttataatggttagagattttatttgtgtggaatgaagtgaggcttgtagtcatggttctagtgtttcagtttgccaagtctgtttactgcagtgaaattcatcaaatgtttcagtgtggttttctgtagcctatcatttactggctatttttttatgtacacctttaggattttctgcctactctatccagttgtccaaatgatatcctacattttacaaatgccctttcagtttctattttctttttccattaaattgccctcatgtcctaatgtgcagtttgtaagtgtgtgtgtgtgtgtctgtgtgtgtgtgaatttgattttcaagagtgctagacttccaatttgagagattaaataatttaattcaggcaaacatttttcattggaatttcacagttcattgtaatgaaaatgttaatcctggatgacctttgacatacagtaatgaatcttggatattaatgaatttgttagtagcatcttgatgtgtgttttaatgagttattttcaaagttgtgcattaaaccaaagttggcatactggaagtgtttatatcaagttccatttggctactgatggacaaaaaatagaaatgccttcctatggagagtatttttcctttaaaaaattaaaaaggttaattattttgactattcggttttaaactttttattcaacaaataccaagtccctgctgtatatatgggtttggaatacattagtgatcaaaacacaccctctatccctgcccttgaagagtttacactccagtagaggaaacagaatttacattaacaattataaattgtgatacatgctgtggaaagtgaggtgcatgtgataatggttatcaaacattatgctccccaaaatttccatcaccttgcagttgaatgaggcctatgtaactagtttattctaatgtaatacagaaagtagtgtgacactccactttctgtaaaggcaatgaaaaaaatttaccatccagtttctctcttcccctactgctgtgattaaggattttgcatgttctagatggtgcagctttgtcagcctgggtcttgagtgatactggagcagaactccctcaaattgttccttctgccacgctaaacttgttagatattagcataaataagaaataaaccatttagactgatactttgggacaattttttatcacagtgtaagttatatcctgactaaaacagtgctttggaaagatcagggaagggtttcttgagctacaaaagggagttaagaatgaagcaaaatgaaatatggcatctttaaatgacatgatgcaataaactctaaattgcaagttattcaatagttactgagcaccagatatgtgtcagacactgttctagatgcttgggatacaagtgggtgaacagcaggaccttgccttcatggagcttacattctagcaagggaaaatagtcaacatactatatgtaaggtaatgcgtgctatagcagaaatgaaaggtaagggagctcaggattgctgggtggagagatttcagtgttgaatggtgtagtccagaacaggcctcactgggaaggtaagatttgaagactgctgactaacagtggcattgggattttccttcattctttcaaccagcgagatgcactcagaaccctctatacaattttattctcactttatacaactctgtacattagttctgagtttttaagatgattgttggcatatctagggagaatttttaggaataccacccaaaatagtcgcaatgttctaaaaccattttgttttctaaattggtttggcaaactctatacaaacagtctgttccttttcattctccaagttgagtttttaaatttaaattatactctttgtgcattttgacaatacttacctcttttcagaagacattaaagttctgttatggccttaaaacatttctgtaaagctgaaaggaaatatcatttatgatttattgatgggaaacagttacaaattttgagttacttgacaaacagaagggatgaaatttatggcctagtgttgtgttttcattcttaacccataagcaaaaatctctggaaaagtaccaatatctagtaaaagaaatattttttcacaaaaagtattttctattttcccctcacctcttacctcgtctcacctcaaagttcaagaagcttaactttgtgatcaaaggaaaatagtataattgaatatttgatactatagaaatttgcaactgtataagggcattattaaccttttgctagtgatcagtttcctatcagggcagccacataaaattaggcatgacactttaaaagaaaatgttgactcttaacttttcctcctctaatgcttaattttaaaatagatttaagcaactttaaagacattttcctgagcaactgcattttgttttcattctgaatttaatgagactctttttttctttaacattttactttgctttagaaaggatttaaggcaggtgaatgtgtttcccagtgtgagaaaaattgtcatgtaaatttagaaaaaagtattgtatatgtcccttgattttggcttaagagttagaatttacttagaatgtttcctgacccaacctcattggaatttgaaagtacattccaatagtattgtgagctgctcctttaaacattggtaagtaggcttcaaacttaattttcaaggaaataagccatgcttttactgtagggtttattaatctgaaatacctgagaatgaaaatagttatatgctcctatctaataatataaacagttaaatgtgacctgtaaatattgtgaaatttagcaaaaatataacctgtaaaaataatctctagtaagctaatattctctcagtaataaaacctagagagctaaagtagcccaattaactgacattagaacagatcgtgatatgtggaagaactattagtgaattatagtcatgtttatacttctcttttcaattataatcatgtccttgagatctcattttccagtccttattacctataaggaagagaaatatatgtaaatttcacaaatgcatacgaaaattaccaaacttcttaagtgttattcggtatttctgcagagatatcattaacaggaaagcccaatattttacatggttatctttaacaatggaagtacagtggttgtttaattaattagctaatacttcatttactgtgtatagtcataattcataagaataatacatatgtcttttaggattattagtactgtatattaaataaatgcttgaaagggaaaataccttttagtgtttggtaaaagagtaggcataaggtaaattttcccttctgttagactcagcagaactattcaatgtgtttagctgtccttggagaagactgagccattgttgctgtaaaaatccaatagggttaaaacaaaaatatcactttgaacatgatttacttggctaggagacacttgaagctttaagcaactcaaatctttctctagaaaattaaacacaattctacctcagaaaacttgaagacattgacaattcataggaattctgtgataagtcagctcacctacctaaagaccaaagtgaaggcgcacagcaagagaggaagctgaagtaaggagagaaaagaaaacagaaggaaaagcatggtaagagcccaaattaactctgactactgggggctgctacaggggatgggaagagaatagcattgttctgagcccacagtgtgtgtcatgctgcagtagtcagttcacaggcttgacccatccttcaatgattttatctcattttatgcacaaagactgaaagggaacttaaatcatccaggtgtctctcacaactagtaaatagagaagtggatttgaacccacagcagtcttatttctaccatattatgcatactacctcttaaacagaatcaagtttacaaagcaaacaaaaaagtctggccaggtttggtgtctcacacctgtaatcacagcactttgggaggctgagacaggaggattgcttgagcccaggagttcaagactagcctgaggaacatagcaagaccttgtctctacaaaaaagttaaaaaattatccaggcatggtggtgcatgcatatagtcccagatacttgggagaccgagctgggaggattgtttgagcctgggaggttgaggctacagtgagccatgatctgtgccttgcactccagcctgggcgacggggtgagacctcatctcttgaaaacaagtctaaaacaactcacaggtaatggagtcatgacaaattttttttttgtttactgacacaagaaaagcaagctaacacaaggcataaatcctgcaaaatgaacagcaaagaagataaatatttaacaattgttcaagctacaaatgagaaaattatgtatcttgcaacattcttgacaggtaagatgataagatgttggtatatatttttatatcaaaacccagaattacagttctttgatttgctagtttggtataaaatccattaaataaacttgtgccttatttttgcttgaactagaatgcccagactgtttaaagtgattggttctcagttaaataggccaaccggccacctaacaagtatttgttgcatgcctgctgtgtcaagttggaatacaatagtggagaagtgagaaaaggccatagattttacattttagagtgggaaaacagattttatacagagagttgagcaagtgtgatggcttgatgtaggaacaaacttggtcacttaggaaagcgtaagaagagaaaggctagagcagagtaagtgatgggagattgatgtaagataaattttggagaagtaggcaggagaacttctggtttcagccaaggtggaataaaaccactaaattctgtcccctactgatgacaaccatcaataaactttttctacactgttttattcaaactcattagtttatcttattctttgaatagatcttttaccccggcctgattttgtgacatcatcgatgagtcatttggaaaatacaggttcactgagttttgtagattttccagtgttgacacatttcattatgcaatgcagaaaaacaaatcacatttaaaaaaatatcacaacacttttttagagctgacaagaatagtctttaaatatttggaagaaggcagatgatgaaagagagtcaaaacttggaaaagcaacctatattagggatgtttcttttcttctattgtcttaacagcttcgccccaagggtgggccccacttgtggagctgcacaaccacggtgacttgagcagctcacactgagataaatcaagctttttggccagaggaaccagaaaaagagtctcctgtgggccagtggccatggagtatgagggtggggggagggttggggaaatcctgaagacaagagagctggaaaagggaatcctctaattctcagtttgaacttctacaagtcctgggctcactcctgagcttgcatgcacaggacagaccaaagaagcatagcaaaggctttgaaaatgaaacagattggaattatcactcataaatgatgagacaaaacttgcagcctgagcctaatcgagtggattgcctgaatcaattgatcaatcaatcatcaatcaaacattttcagaaaattttaacaggacccagagtctatgcaacacagtatccaacattacttaactaggaagaaccggaaaaatgtgacaaattcccagggaaaaagtcaatcaagagatggtaaccacaaaataacccagatgttggaattatcagatgtaaaaacagctattgtaattatgtttcatgagataaagataaacacacttggaatgaatggaaaggcagaagttctcagcaaggacacagaaattataaaaggaaccatgtggaaattttacaactgaaaggtacaatatctgaaataacatactagatgggcaatagaagaatggaaatgacagaagagtcagcaaacttgaagataactttataaatatccaattctaatcatggctttagagtcttaaaggtggatgaagcttcgaaaagtgaaatatatctgattgtaataagcctcagggagcctgaataaaatactaatccaagtgtatctatgtggctcccacagatacatttgaagaagttcctgttgtttgtcaattacattaagtaaaggaattagcattatcacaggtccaaacatggtgattatgagaatttgctgttacagtgttacacagtcttaatacgtcaaaacagcccaaggtgatgtatgcattgacagagttttctggttgggtccattaagtgtatacctgcagtaaaaagcaatttaaaatttagcaaagtcatcactagatcactgacacactcatccttagagacagtacatggtaattgcttcgctcacctgctcatattaacactttgattcagcctaacccttccgattcagcctttgcaacagcactgtttccaaatgtgacgttattacagagatgtcatacaaaaattgacctatcatgtaggcacaatgcatgcttttcaatattacagcagaaaaaaaaatgtgatatttaatgctgctagtgcctaggaatctggtatgagaaaacattaagatgagtttggaggaaaactgagctggtattatgtttggagaaatgacttcctgattcagaaagagaatttcaagactttagaatgcctcccattgttatattagaaccatattacttgtaaaaggtagtataaatttttgtaatggtgataattctgggtttaatagtttaacaagttttgccatttaattcccataatataggaagtacaattatatccatctcatacacaaggagctatggtacagaaaggttcaataacttgttgaatatagcagatctagtaaatggcaaagtcaggatttaaatgtaggtcaatttgattgccaagcctgggccatttactactgtgttatatatgttacttcctataaaaacttaacaagaaggtctttcattttcaaaccgaaatggacagaacactggtgtaagcagtgttctgaagcttttggtctcaggattcctttacactcttaaaacttactgaggatctcaaagggcttttgttattgatatttactacataagaaatgaaaactgagacatcatctgattattaaaaaaacaagctaatcacatgataatataaataacattgtagcgaaaataaccatgtattctaaaacaaaaatgttagtgatgaggtggtgttttgtttttttcatttttctgaatttttttttttttttttttttgagactgagtcttgctctgtcaccaggctggagcagtggtgcaatctcggttcactgcaacctccgcctcccgggttcaagtgattctcctgcctcagcctcccgagtagctgggattacaggtgtgtgccaccatgtccacctaatttttgtagtttttagtagagatgaggtttcaccatattgatcacgctggtctcaaactcctgacaggtgatccacccacctcggcctcccgaagtgctgggattacaggcatgagccaccacccccagcagacatacttcattatacagtgcaaaaaaagtcacattttaaaaatatcaccaccgagctcaccaggatagtctttacatattcggaagctgtcaagttcatggtagcaggtataagattttaaaaatactaattttggcttaaaagcttgaattttatcacttataacccacaggggtcatgggccacactttgaggatcactggtgttagaggtttggttggagagacgcaagtaagagaacatttccctaacatgcccaaacacattccttttcagagtgctgaaggaatttgaaaatgaggtctcagaattaccagcagtaattcctgataaattaagaaaaatgggagagagttcagagacaaagacatgagaaaagattgccataactctccagaaggatggattctgggtaatgaaggccagtatgtttaacactgattcccagaaaaagactttaatatattcagtagcagttagtttaagaacattagaagataattcggtgattaccagatgtcaatgagggctaggtaggtcatttcaaagccttctcaaatttcattttttctttatgatcacctgtcacagtgctttacgtgatgtacatacaaaaatatttgcataactgtataaaacagttgaataataactgtatagcatattgcttatataaactgcacaaatctcatttgaataaaaaccatttataaagtacttgcagtatgcaaaatgtgttgggcaaagggcaggtctgagaggcacacacgaggaaaactaaaacagaacagaagtctaatggtattttcaagtgttataaaatatgtgaagtctgccttgtgagagaaggtagcattggcttgtggaaagagcatagcacaggaaattagaacatctggttgctcatcctggctttaccatcaacttaatgaatgacctggagtaagttacttcacttcgagacctatgctctatatctgcaatattgaaaatgctggataagataatctctaaagccccagaaaaagatggagttgtactctttcactcccaggaacatatactggaacttatgagtagaactttggagagaccaagtttgcctcacaatgagtaatattctagttctgcactgtcgtatagtgacttcagtcactaagctacatgtctctatggagcacttgaaatgtgactggttcaaagtgagatttgctgtaagtataaattacacatcagattttgaaaacttagtataaaaagtagaaggcaaaatatcttgtcaattttttacattgattacatattgataatatttttgatatagtgagttaaattatatatataaattttttttttttttagatggggtttcactctgtcgcccaggctggggtgtggtggtgtgatcttggctcactataacctccaccacccaggctcaagccatcctcccacctcagcctctcaggtagctgggaccacagttgtgcaccaccatacatggctaattttctgcatttttggtagagatagggtttcaccatgttgcccaggctggtctcgaactgctgagctcaagtggtccaccttccttagcctcccagagtgctgggattacaggtatgagccacctcccagtctaaattaatatattttaaaaacatttcacctgatttcttttactttttaagatatatatggctaatggaacacttaaaattacatatatggctcatattatatttctactggacagggtaattctagctaatagagtttccaacaaaataataataacttgaagaggaacctaattttacttttcattttgcattttgaggtacacaagcagagactgggtcatagttc

SEQ ID NO: 2 - DNA, 129338 bp, Homo sapiens
gaactatgacccagtctctgcttgtgtacctcaaaatgcaaaatgaaaagtaaaattaggttcctcttcaagttattattattttgttggaaactctattagctagaattaccctgtccagtagaaatataatatgagccatatatgtaattttaagtgttccattagccatatatatcttaaaaagtaaaagaaatcaggtgaaatgtttttaaaatatattaatttagactgggaggtggctcatacctgtaatcccagcactctgggaggctaaggaaggtggaccacttgagctcagcagttcgagaccagcctgggcaacatggtgaaaccctatctctaccaaaaatgcagaaaattagccatgtatggtggtgcacaactgtggtcccagctacctgagaggctgaggtgggaggatggcttgagcctgggtggtggaggttatagtgagccaagatcacaccaccacaccccagcctgggcgacagagtgaaaccccatctaaaaaaaaaaaaaatttatatatataatttaactcactatatcaaaaatattatcaatatgtaatcaatgtaaaaaattgacaagatattttgccttctactttttatactaagttttcaaaatctgatgtgtaatttatacttacagcaaatctcactttgaaccagtcacatttcaagtgctccatagagacatgtagcttagtgactgaagtcactatacgacagtgcagaactagaatattactcattgtgaggcaaacttggtctctccaaagttctactcataagttccagtatatgttcctgggagtgaaagagtacaactccatctttttctggggctttagagattatcttatccagcattttcaatattgcagatatagagcataggtctcgaagtgaagtaacttactccaggtcattcattaagttgatggtaaagccaggatgagcaaccagatgttctaatttcctgtgctatgctctttccacaagccaatgctaccttctctcacaaggcagacttcacatattttataacacttgaaaataccattagacttctgttctgttttagttttcctcgtgtgtgcctctcagacctgccctttgcccaacacattttgcatactgcaagtactttataaatggtttttattcaaatgagatttgtgcagtttatataagcaatatgctatacagttattattcaactgttttatacagttatgcaaatatttttgtatgtacatcacgtaaagcactgtgacaggtgatcataaagaaaaaatgaaatttgagaaggctttgaaatgacctacctagccctcattgacatctggtaatcaccgaattatcttctaatgttcttaaactaactgctactgaatatattaaagtctttttctgggaatcagtgttaaacatactggccttcattacccagaatccatccttctggagagttatggcaatcttttctcatgtctttgtctctgaactctctcccatttttcttaatttatcaggaattactgctggtaattctgagacctcattttcaaattccttcagcactctgaaaaggaatgtgtttgggcatgttagggaaatgttctcttacttgcgtctctccaaccaaacctctaacaccagtgatcctcaaagtgtggcccatgacccctgtgggttataagtgataaaattcaagcttttaagccaaaattagtatttttaaaatcttatacctgctaccatgaacttgacagcttccgaatatgtaaagactatcctggtgagctcggtggtgatatttttaaaatgtgactttttttgcactgtataatgaagtatgtctgctgggggtggtggctcatgcctgtaatcccagcacttcgggaggccgaggtgggtggatcacctgtcaggagtttgagaccagcgtgatcaatatggtgaaacctcatctctactaaaaactacaaaaattaggtggacatggtggcacacacctgtaatcccagctactcgggaggctgaggcaggagaatcacttgaacccgggaggcggaggttgcagtgaaccgagattgcaccactgctccagcctggtgacagagcaagactcagtctcaaaaaaaaaaaaaaaaaaaaattcagaaaaatgaaaaaaacaaaacaccacctcatcactaacatttttgttttagaatacatggttattttcgctacaatgttatttatattatcatgtgattagcttgtttttttaataatcagatgatgtctcagttttcatttcttatgtagtaaatatcaataacaaaagccctttgagatcctcagtaagttttaagagtgtaaaggaatcctgagaccaaaagcttcagaacactgcttacaccagtgttctgtccatttcggtttgaaaatgaaagaccttcttgttaagtttttataggaagtaacatatataacacagtagtaaatggcccaggcttggcaatcaaattgacctacatttaaatcctgactttgccatttactagatctgctatattcaacaagttattgaacctttctgtaccatagctccttgtgtatgagatggatataattgtacttcctatattatgggaattaaatggcaaaacttgttaaactattaaacccagaattatcaccattacaaaaatttatactaccttttacaagtaatatggttctaatataacaatgggaggcattctaaagtcttgaaattctctttctgaatcaggaagtcatttctccaaacataataccagctcagttttcctccaaactcatcttaatgttttctcataccagattcctaggcactagcagcattaaatatcacatttttttttctgctgtaatattgaaaagcatgcattgtgcctacatgataggtcaatttttgtatgacatctctgtaataacgtcacatttggaaacagtgctgttgcaaaggctgaatcggaagggttaggctgaatcaaagtgttaatatgagcaggtgagcgaagcaattaccatgtactgtctctaaggatgagtgtgtcagtgatctagtgatgactttgctaaattttaaattgctttttactgcaggtatacacttaatggacccaaccagaaaactctgtcaatgcatacatcaccttgggctgttttgacgtattaagactgtgtaacactgtaacagcaaattctcataatcaccatgtttggacctgtgataatgctaattcctttacttaatgtaattgacaaacaacaggaacttcttcaaatgtatctgtgggagccacatagatacacttggattagtattttattcaggctccctgaggcttattacaatcagatatatttcacttttcgaagcttcatccacctttaagactctaaagccatgattagaattggatatttataaagttatcttcaagtttgctgactcttctgtcatttccattcttctattgcccatctagtatgttatttcagatattgtacctttcagttgtaaaatttccacatggttccttttataatttctgtgtccttgctgagaacttctgcctttccattcattccaagtgtgtttatctttatctcatgaaacataattacaatagctgtttttacatctgataattccaacatctgggttattttgtggttaccatctcttgattgactttttccctgggaatttgtcacatttttccggttcttcctagttaagtaatgttggatactgtgttgcatagactctgggtcctgttaaaattttctgaaaatgtttgattgatgattgattgatcaattgattcaggcaatccactcgattaggctcaggctgcaagttttgtctcatcatttatgagtgataattccaatctgtttcattttcaaagcctttgctatgcttctttggtctgtcctgtgcatgcaagctcaggagtgagcccaggacttgtagaagttcaaactgagaattagaggattcccttttccagctctcttgtcttcaggatttccccaaccctccccccaccctcatactccatggccactggcccacaggagactctttttctggttcctctggccaaaaagcttgatttatctcagtgtgagctgctcaagtcaccgtggttgtgcagctccacaagtggggcccacccttggggcgaagctgttaagacaatagaagaaaagaaacatccctaatataggttgcttttccaagttttgactctctttcatcatctgccttcttccaaatatttaaagactattcttgtcagctctaaaaaagtgttgtgatatttttttaaatgtgatttgtttttctgcattgcataatgaaatgtgtcaacactggaaaatctacaaaactcagtgaacctgtattttccaaatgactcatcgatgatgtcacaaaatcaggccggggtaaaagatctattcaaagaataagataaactaatgagtttgaataaaacagtgtagaaaaagtttattgatggttgtcatcagtaggggacagaatttagtggttttattccaccttggctgaaaccagaagttctcctgcctacttctccaaaatttatcttacatcaatctcccatcacttactctgctctagcctttctcttcttacgctttcctaagtgaccaagtttgttcctacatcaagccatcacacttgctcaactctctgtataaaatctgttttcccactctaaaatgtaaaatctatggccttttctcacttctccactattgtattccaacttgacacagcaggcatgcaacaaatacttgttaggtggccggttggcctatttaactgagaaccaatcactttaaacagtctgggcattctagttcaagcaaaaataaggcacaagtttatttaatggattttataccaaactagcaaatcaaagaactgtaattctgggttttgatataaaaatatataccaacatcttatcatcttacctgtcaagaatgttgcaagatacataattttctcatttgtagcttgaacaattgttaaatatttatcttctttgctgttcattttgcaggatttatgccttgtgttagcttgcttttcttgtgtcagtaaacaaaaaaaaaatttgtcatgactccattacctgtgagttgttttagacttgttttcaagagatgaggtctcaccccgtcgcccaggctggagtgcaaggcacagatcatggctcactgtagcctcaacctcccaggctcaaacaatcctcccagctcggtctcccaagtatctgggactatatgcatgcaccaccatgcctggataattttttaacttttttgtagagacaaggtcttgctatgttcctcaggctagtcttgaactcctgggctcaagcaatcctcctgtctcagcctcccaaagtgctgtgattacaggtgtgagacaccaaacctggccagacttttttgtttgctttgtaaacttgattctgtttaagaggtagtatgcataatatggtagaaataagactgctgtgggttcaaatccacttctctatttactagttgtgagagacacctggatgatttaagttccctttcagtctttgtgcataaaatgagataaaatcattgaaggatgggtcaagcctgtgaactgactactgcagcatgacacacactgtgggctcagaacaatgctattctcttcccatcccctgtagcagcccccagtagtcagagttaatttgggctcttaccatgcttttccttctgttttcttttctctccttacttcagcttcctctcttgctgtgcgccttcactttggtctttaggtaggtgagctgacttatcacagaattcctatgaattgtcaatgtcttcaagttttctgaggtagaattgtgtttaattttctagagaaagatttgagttgcttaaagcttcaagtgtctcctagccaagtaaatcatgttcaaagtgatatttttgttttaaccctattggatttttacagcaacaatggctcagtcttctccaaggacagctaaacacattgaatagttctgctgagtctaacagaagggaaaatttaccttatgcctactcttttaccaaacactaaaaggtattttccctttcaagcatttatttaatatacagtactaataatcctaaaagacatatgtattattcttatgaattatgactatacacagtaaatgaagtattagctaattaattaaacaaccactgtacttccattgttaaagataaccatgtaaaatattgggctttcctgttaatgatatctctgcagaaataccgaataacacttaagaagtttggtaattttcgtatgcatttgtgaaatttacatatatttctcttccttataggtaataaggactggaaaatgagatctcaaggacatgattataattgaaaagagaagtataaacatgactataattcactaatagttcttccacatatcacgatctgttctaatgtcagttaattgggctactttagctctctaggttttattactgagagaatattagcttactagagattatttttacaggttatatttttgctaaatttcacaatatttacaggtcacatttaactgtttatattattagataggagcatataactattttcattctcaggtatttcagattaataaaccctacagtaaaagcatggcttatttccttgaaaattaagtttgaagcctacttaccaatgtttaaaggagcagctcacaatactattggaatgtactttcaaattccaatgaggttgggtcaggaaacattctaagtaaattctaactcttaagccaaaatcaagggacatatacaatacttttttctaaatttacatgacaatttttctcacactgggaaacacattcacctgccttaaatcctttctaaagcaaagtaaaatgttaaagaaaaaaagagtctcattaaattcagaatgaaaacaaaatgcagttgctcaggaaaatgtctttaaagttgcttaaatctattttaaaattaagcattagaggaggaaaagttaagagtcaacattttcttttaaagtgtcatgcctaattttatgtggctgccctgataggaaactgatcactagcaaaaggttaataatgcccttatacagttgcaaatttctatagtatcaaatattcaattatactattttcctttgatcacaaagttaagcttcttgaactttgaggtgagacgaggtaagaggtgaggggaaaatagaaaatactttttgtgaaaaaatatttcttttactagatattggtacttttccagagatttttgcttatgggttaagaatgaaaacacaacactaggccataaatttcatcccttctgtttgtcaagtaactcaaaatttgtaactgtttcccatcaataaatcataaatgatatttcctttcagctttacagaaatgttttaaggccataacagaactttaatgtcttctgaaaagaggtaagtattgtcaaaatgcacaaagagtataatttaaatttaaaaactcaacttggagaatgaaaaggaacagactgtttgtatagagtttgccaaaccaatttagaaaacaaaatggttttagaacattgcgactattttgggtggtattcctaaaaattctccctagatatgccaacaatcatcttaaaaactcagaactaatgtacagagttgtataaagtgagaataaaattgtatagagggttctgagtgcatctcgctggttgaaagaatgaaggaaaatcccaatgccactgttagtcagcagtcttcaaatcttaccttcccagtgaggcctgttctggactacaccattcaacactgaaatctctccacccagcaatcctgagctcccttacctttcatttctgctatagcacgcattaccttacatatagtatgttgactattttcccttgctagaatgtaagctccatgaaggcaaggtcctgctgttcacccacttgtatcccaagcatctagaacagtgtctgacacatatctggtgctcagtaactattgaataacttgcaatttagagtttattgcatcatgtcatttaaagatgccatatttcattttgcttcattcttaactcccttttgtagctcaagaaacccttccctgatctttccaaagcactgttttagtcaggatataacttacactgtgataaaaaattgtcccaaagtatcagtctaaatggtttatttcttatttatgctaatatctaacaagtttagcgtggcagaaggaacaatttgagggagttctgctccagtatcactcaagacccaggctgacaaagctgcaccatctagaacatgcaaaatccttaatcacagcagtaggggaagagagaaactggatggtaaatttttttcattgcctttacagaaagtggagtgtcacactactttctgtattacattagaataaactagttacataggcctcattcaactgcaaggtgatggaaattttggggagcataatgtttgataaccattatcacatgcacctcactttccacagcatgtatcacaatttataattgttaatgtaaattctgtttcctctactggagtgtaaactcttcaagggcagggatagagggtgtgttttgatcactaatgtattccaaacccatatatacagcagggacttggtatttgttgaataaaaagtttaaaaccgaatagtcaaaataattaacctttttaattttttaaaggaaaaatactctccataggaaggcatttctattttttgtccatcagtagccaaatggaacttgatataaacacttccagtatgccaactttggtttaatgcacaactttgaaaataactcattaaaacacacatcaagatgctactaacaaattcattaatatccaagattcattactgtatgtcaaaggtcatccaggattaacattttcattacaatgaactgtgaaattccaatgaaaaatgtttgcctgaattaaattatttaatctctcaaattggaagtctagcactcttgaaaatcaaattcacacacacacagacacacacacacacacttacaaactgcacattaggacatgagggcaatttaatggaaaaagaaaatagaaactgaaagggcatttgtaaaatgtaggatatcatttggacaactggatagagtaggcagaaaatcctaaaggtgtacataaaaaaatagccagtaaatgataggctacagaaaaccacactgaaacatttgatgaatttcactgcagtaaacagacttggcaaactgaaacactagaaccatgactacaagcctcacttcattccacacaaataaaatctctaaccattataagcacagatgagaatcctcatgcaacagaggaaatataaattatttttaattttaaaaaataaaaaatataaattcttgttaaacacttgatttaaaaatatgcagctttatttttaaatgtagttatgctcaaagatggcagtttacttatatgtaaaaatgttttaaaaatatcaatatattggtttataagttctatactgccctcagctaaatatttttcaccaaaattctcaaataactatcaaaaagagttgcatgtttttataagcccactataattactaaacgcggtaattttcagagctaaaggtgaatcattaatgaaatattttttgatgtgataaaagtcacatgagcatttgaatttaaagacaactgataagccaacagcagcctttttttggcaggtgttaaattaatttgctctaaattgagcaactgtttgggaactacaaaaactgaaaagttcaaactataaggaagtagaaaggtgatgaagtttactaatacagtgtttcacacattctatttaacacaattccaaatgcaaatgtttaagatgatttttgaagagaaacatctacaatgttaagcttgtctatgctaaacaaatgtaactttaatttacatgtatcatcctaatgtcaacaatatttagacattcatgattaagccactgaattcgaaaggattctcaataactacatgtaatctgcatctgtggcattagaaagtaatcaaatcactgtccgttttctgatgcaatggaacatcctacaaattcatgacagatatactaagctaaaaagctttgagatcaggtacagtataaatttcatttttaaagaatatacatggatatacagaagaaaacatgattgtatagtcactaacatattaacgatggctatgtctccaggtgataggattatgagtgattattttattgttgttgtgatggggaagtagtctcaaaatacctagcttaacaaccagagtactaccaccaaagcaaactattttgtcctttcctgtcttcacattacaaactttttaaagctaccaaccaatatgaatttgtctgactggctacccacattctgatatacatattagaaggaagatcttttggaagatggaaaaacagcaagattatggtcataaaagaataatatgctctcaaaaataagcaacaatcattaggctttctatagccacatacaattaattctataagaaagttggctccaacatttcatctttaaaagactttttccattatcctgtttcctggttttcaggtactgtccttacaacagtttggactgaatattcttgtttccattcacaaacatttctttctgaactagcaacagcactaatcaatagctacacttaagccatttaagactaagctttagatgtgtgtctaattatctggcaaaaataaaagaaccaaagagtttcatgttagcagcaaattaactagatttaagggtcttgatttttttcataagcctttggaagcctgcatattaaacactggtgagttttaaattctcaatggaaatggtgatggcatttactgaaccaagccagctcatattacaacgtacaaaggacatgatataaaaacaaaactagcacatttctatttttcaaacatcaccaaaatgtcttcttataaattagaatacttttagactccagtatagttttcaaccatacgtatacccaagataccgaaaaataaaatgtgtgtacacatacacttcatattttacattattgcacattttttcatttactttttaaaaaattacatggagaaaatgtaaacttgaaataataagtcccactgtaacattgtctactttatttttttaacacttgtacaaactacactttcttattaccttactatgctttgttgaaaggatatgctttagtcttcaagcttttaagaatattagaaacaacatgattaaattcaagtacaaaaagtcctttagactattccgaaatatcaatttttatatggcacaagtcatgatgagtaaatgaagctttccatatgctgatggcagagtacagaataatagacaaaagccacaaaattgaaatctaaagtatcaaatccattctggggaattatcttcaaacatctgtcataataaaaatatgcacaattttctaagaatcttggactttttcaggactagaacgctatttaatgtgcttatacaatttatgaagtgatgactaaagccctaaaaataagtgtttttccttaattaaacatgagtagacagatactctactctcaggccatgtttttttttttttttttttttaaacagtaggctttgaaggacagcaggaaaaaaaaaaactgaaaactttgtattcacatttggctgcccattaattaaaacttcaatggacttaagcaatttgaattataaactctcatttaataaaacacccacacaatgacaagaatgagactttaatcagttttaagtggagtttataacactaagagataaagggttgttaacaaacacaataacaaatggacatctgattgggatgaggcattatcctgtacacatcatattggtatttttgtgtatcctcagtgcatagcatttacacacagagccactgctgcacagcacaagagtatctgaagaggctgaatcagagtaaggctgtttaacagactgaaattttttagtatatatattctatatgaaaacaggttgaacttttgaactggcaggtagaaggcaactctgccaaatactacagttaaagcccccactttagtgcacagttccaccccttccatctgcatgcatgacacattaacagtatttaaaggtaaacgaggcactttgtggcaaccacagccatcgttatgaacatattgcacaaaatttctagaactaaacattaaacttgtaccctacttttattttttaaagctgaaacatttgatgctgccggtaaactccacttaagtttataacctgtgccacagcaaagaatggtgatgctatttattcaactacccttttaaaagtatggcaaacatgttcaagaggagctacaaaggacttgggatggtacagggcccaactgtaagctttcttaaaagtgatgccttcaagtaacttcagacatgtaagctgctgcacatccaaaaagtctaagaaaatattccagaaactcagagattacctacagaatgcatttcaggctaattatgaatactgccataaataaagttttaattaggactcgaaaacctttcagtcatagcaattcttgtcaaattctatggggatggtaactgaaataaagtaaggagagtatgtataatatatatttatatatataatatatataatgccatttttccatttccaatgactacaccataaaatgtaagcaaggcttctcaaaaacattgaaacattcaaaatcaaaaccctcattcagaccttcacattccaaaggaaaaataataacagtgcaaaagcccattataatgtcattatttatgacctggccctccatgttacatattggaacaataaagttacgttttaatatgcggtgcccgaaattgtaacaaagaacaatatttataactatcttcaaaacatgaagttgattttcattttaggtaacaattttcagcttttatgaaagacaaggtggcatataaatttcaatggtgaggtgttagaatagttgtctctaactttaccaatttaacttatgagcaatcaatcaatactctatatatcaatgtttaaatataaatgtgtaaatcctaagagctttgttaaaaatttaaaaattgttgaatgaaactgacaaggtatggaaaacgtgtcaacattatttactaagaatattttagatgaagttctgcctaatctatttgccatcaaactctataaatgctgctctagtaggtcctattcaatctgtatttgtaaattaactaggtcagaccacagctagtgaacaatttcagcaccaataagttattgaaaatggaattttataccattaagaaacaaaatggctggatattcaaatgtcaaggtgaaggtataatttgaagacaccaaatttctggaaaaaaaaacctttttaataatatcttcacattagctttacaatagtagttgtactccgcttaaaatcgtatgcagtctgggcatatcaaatatatgatgattttttttaagaagtgaaattgaagccctagtcccaactcgggggagcactatgaagaaatgattcaacactgcacatttaaaaaaaaaaaaaaaaaaaaaaaaaaaaaccctattctttcaatagcaaatcaataaagcacatgtaggacaatttctactgaaaaatcaaatgtcttttttttgtgtgcagcattgaaagtttactgcaactctaatttcctttttaacacaaatgtcctttttaatataaacattatatgtattcagtattcaagtaaaattccctaacagttaatgacatttaaaaaatgtgcaaaactgcaaaattcattgtaatagaatgtgtaaggtcaaaagggtggaacggctgacagctattgaataagtgcatcataaatcttcaaagaaaaaaaacgcttactgtagaatctcaaattgaaaatttctgtgcagcattacaaaatattttatatttaatgagaaaaaagaagcttgcaggcagcacatgaagcatccacagcaggtattatgattgaaaactagtaaaataagtgtaagttgttgactgatgtaggtactaacagcatctgaattttagcactggccttgattacacaggagatggagaagtcgttacaattgagaaaacatatttaataaatcattgtcaatttttataatgtttcaagcccattctttgttgatagcctccacatttatatggttaagtcattgttgctgtgtttcttacctatgacattatttttatatcccttcatttgtggatcttaagatgttgcagaaggttcattcctgtaccccaatacagattcacttcctttagctgccttttctagcaccaatatgctttaaaaaaaaatgcgcaaacaacaagcagtgacagcggccaattcctcgaatgtccagattaataactgtagcatgctaaagaaaggtgtgtgtaaatagctggagatggtatatggtccagagtccagcataaaattatttcctttctgagcattccctccattcccctaacccgaatacatgcattagaatgtagcaaaacccttcggaaacctctcttagccaactgcaaacttatctgttgccacaagtgcaaaggggtaggatgtgaaccagtatatcacaaagctctttagccacttcagttggtgacagaacacaaaaggaaaaaattcctacgtatacacatcagtctgtctccactttttataaaactggaataaaacgggaaagtgccatctttattaatcctaattgaattttaaatgtccttttgacacaaaaaggtatatacatgacacagctacacaaccttttttcaactggacaacaagtgtcaaaaccctgtggatgtatagggtaaaacaagattggtcaggaaaagagaattgttcctataactggtaatctgacacaatgtcctattgccattaaaaaaaaaaaggtccattttcagtttattcaagtttattttcatggtgttttatccctcttgataaaaaaaaattcagacttttgtaatttgtgtatgctgatcttcatcaaaaggttcattctctggatcagagtcagtggtgtcagaatatctataatgatcaggttcattgtcactaacatctggtgttacagaagttgaactgctagcctctggatttgacggctcctctactgtttttgtgaagtacagcttcacctagagaaagaaaatttaaaatgaaaacccacaaatatgactcatcttaaactatttagtgaaatatatttttaacagattttttattccattttgcagatgaacatattaatttttaagcactgtaacaaacatgatctttaagaggccttttaaatgaccctcttcttaagatgttcaacattttctttcttgctaggtactaaacagataaactatcaggatgttaatacaatttatttatttttatttctggagacaagagtcttgctctgttgccaagctggagtgcagtggcatgatcttggctcactgcaacctctgcctcccgggttcaagcaattctcgtgccttagcctcccaaacagctagggctacaggtgtacaccaccatgcccagataattttttgtattttagtagaaatggggttcatgatgttgcccaggctgatctcaaactcctgagctcaggcaatctgcctgcctcagcctcccaaagtgctgggattacaagtgtgagccaccacgcccaacctcaattttattttttaaggaatataagtggcaaatattaactaaataattatacaaaataaatgcagattgaaagtcatcaatagtttacataatatagcatttgaattacaaaattcaattcacaaacagctgagttcaaaaagaatgtttctcttactacctatgtgaaaaatcaatgtatttctttgtgtgtgtgtgtgtgtgtgtgtgtgtttttgagacagggtcttgctctgtcacccagactagagtgcagtggcatcttcacagctcactgcaggctcaaactcccaggatcaacctcagcctcccaagtagctaggactacaggtgcatgccaccacacccagctagcttttatattttttgtagagatgggatttcaccatgttgcccaggctggtctcaaactccttagttcaaggtgggaggcccaccttggcctcccaaagtgttgcgattttaggcgtgaaccactgtgcccggcttcaatgtagtttttgatataaacaacactacacaaacacaaactactgatcaacattgatatttgggatttattagccctaaaaactttacctaaagggaggaaggagagggacattaacataatacagtggtctataacagagagtcaagtgcctttacatgcctagtgaaaataactgtcaaaacaaccttacatgttaggtatttccatttccaaggggaggtagctaaggcccagaaaggttagggaacttgttaaaggctacatatctattaaaagtaggtagtggatgtgagatttaaatcagaaatgacttcaaatcccttcttcattatattatattgacagcccctccctcccctattatccaagagtcattatcaattcttctcttacaaccaacatccactgcatcagtaaactctttaagttaatctgacagcttcttgttacccttcactgccactattctaagcagtgaggggcaacaagaagcaaacatcttctctcatctttactaaactattcaagtacctcttaactgatctctcagcttcctttattaccccttctccctactttcctcactcatctgtattttgaaagcatgaacacagggaatattaaacacaaaattcagattacatccttcctatgctgaacacacactagtgtctttacacttggactggttttcttgtccactctgtttcagtcaaaatgacttatccactcttcagatataccaagctcattctcttgtctaagggcttttgcatctgtactcttaactcttttcccagatatttgtataactcacttatatgatttaggcctctgcttaaatgttatctgcttggttgggccttctctaatcatctttgctaaaaaacaaaaaacatacaaaccaagattactttctatcctgtctattttttatagcacttactactatatgacattgtatttgtttactaataatggagtttttatttgtaatcacaaatataaaacatcttgcaatattaaaatagaaaacaataaaactaaagggaaaaagacattttaaaagttaatggctgagcaaaatgcagatttagagaaaagaaaggaaacctgtggattctaaagagaatgtctagcccggaggacatgatgttaagtaaaataagtcaggtacagaaagataaataccgtatgttctcactcatatatggaagctaaaaaagttgagctcataagagtgtggttattagaggccgggaaagggagtgggaggggaggatagggagatgttggttaaaagataaaaaattacacacaggaggaataaattatagtgttctatagaactgtaactagtcaacaataatttactgtatattttcaaatagctagaagacagaattttgaatgttcctaacacaaagaaatgacaaatgtttgaggtgatccatatgctaattatcctgatttgatcatcacacactgcatacatgaaaatatcactctgtatcccataaatatgtacaattattatatattaaaaatttttttaaagggaaacttctgaacacttaaaaaaaatttaagggctaaagacatttaatattagatctattttcacttaaaacgtgcaggggcccaagtattactattactaccaatatacatacatacatacatacatatatgtatgtatattggtagtaatagtgtgtgtgtgtgtgtgtgtgtgtgtgtgtgtgtgtatatattttttttttttttttttttttaagacagagtcttgctctgttgcccaggctgaagtgcacgtgcactggtgtgatctcggctcactgcaacctccatctcacaggctcaagcaattcttgtgcctcagcctcccaagtagctgggattacaggtgtgcgacaccatgcccagctaatttttgtatttgtagtgcagatagggtttcgccatattggccggctggtcttaaactcctgggcctcaagtgatccgcctgccttagcctcccaaagtgctgggattacaggtgaagtattactagcaatattcttaatactcagacgctacagttagatttattacatgttataaaaattgaatgaaaaattaagagagagtaaaaaagagaaagaaacgagtgtggtgaatgaacaggggaaaatcaggtagaataagaaataggaagggggaagaaaaaaatggtaaacaaccacttgggaatgtttacaaatcagatttttttaatctgaagaattcttgtctataagtagatatatatacctatgtagaaatacatatatcacacataggcaaaaatgaaacaaaccaaataattctaagatacaatataaggaaataggatttttaaaaaaagaataacgggaggacaatcaaaggacttcagagaatatgagattgaagctaaggctggaaatatgaagatagctatggaaggtcaggggaaaaggctgagatgaaaaggtacagggagaaggaaaataactggaaagactagaagaggcagaagcttagcattttgaagaactgaagaaagaccagtatgactgaatctcaagaaacaaggagagaaggtgactagtgctgatgtaggaggtagccctgtgctaaattatgctgggccttgtaggtcatggtaaaaaaaaaaacacaaggtccttataaagtgtaaacagaagtgacacaatcaagtctatttttaagatcactctgagggattgagaataaattggaaggcagacaggagtggaagcagtaaaaacattccatatgaatcattcccaaatgactgagttcccatctatttctttcctctcccattcctacttcatatcccagtcatttagccccctcccgcacctttgccccagatttcagcaaacaacgaagaattaggaaaaggaaaaatgcagcttttttgacgctgtgtacattgggtattttattagaaactttcatgttactgctacgtaaacactgcttcgaaataatacataagttaaaaacttgtcaagcaagttcttcatcagctgtactcctagaattaaacacacatcacatacatacaagtcaacaacccccacaaaatgtttaatttaactgaccttaaaatttggagaaaagtatcggttggctttgtctttatttgctttgtcaagatcattttttgttaaagtaagtactagatattccttgtcattatctgcacgctctatactgcaaatgctatcgatttcttgatcacatagacttccattttctactttttctgaggtttcctctggtcctggtatgaagaatgtatttacccaaaagtgaaacattttgtcctaaaaaaaaaaaaaaagaaaagaaaaagaaatgaaatgacatatttaattaatgatgttttatttttttaaaaaagaaaatctgtcacctatgttaaacatttgcaaaaagtcaacaaaataaactatcatttgatattctgaataaaggtaaacacaaagactattataaggcaatctgagttatctgttgcattttcattcacatgatttttcttcactcaaattctcaaattttaaaccaaaaatacaatctcacaagatctaagataaactacttttgccttaaaattttaagtaaaaaaacctcttttctcatctaatactagctttaaatacgtttttagtttacgtgtacatacatataaacaaaattcagatatggatttaattttttctacatttcaaatgagctacctattccaagatttactttaacaaaagttcttggacggtgagtgcaacttccctgatgacgcatggcaaatacatgtttacttctacagcaatacaaacatgagaagctccagtttcttacatgacaatataatgcttgaatactttcagaataaatatgagggggtaggaaagagtactactgatttcttttgatgttataaaatgcttgttcttaaaaaaaatcacttcttactaataagataataccttcttaataaaaaaacacaacagaagttcatcactttaaacctctattgaccaacaaagaaatctggcctgtataaatcatttggcaattaatgatatacagccttgtgacatcttatctggtacctggtaccttaaaatgccatttaaatcttttattctaatttatcttaaagttttttatcccccagaaaataagatccttaaggatgttacgtcttaaatgtcattgcatcttttaacagtacctggcaaagtaatcttgtatacaaggtctttaaaattttttttttgcttatttcaattattttagccagtaattgtattttacttagaagaaaataagccaataatatttaaataacaaaaaggtgaattctatatatatatgggttatactaaaattttttgtgttttaatcatagcatattcttaaataaggcagggaaaatcaataaaatggaaatttatgtagtcaaggataaacaaataaatcataaatatttaatctaaccttcaattttgcatgtgttaaagtacagatgaagggaaataagaattaggaaattcctaaaggtatgcagagatgatgatgtagatgcctatttttgaaagctaaataaaacttactagttatcttaattttaaaacagttgctaatacttcctggattatcaaaaaataatttttctaagttattgagatatatttaacttttatttgtacagacgataggaaatgggtttctggctaaaaaaaaaaaagttcagcatattttgatttttttttccagctacttggattctggataaaggaaaattatatctctactgatacatcaaagcagcatttaaaattttgcagtaaatgaaacttcctcttattttctttcaaaagaaaagctaaaaatcagaaaaagtaaataaatcctatcattgagaatgtttaaagattggcaatatgctatctagtatgtttaacaaggcagcaacactacaaagttagtccttttcttcattactatctaaaaatgttgcaccttagtctcactttaaatattcacatttaatattttaaatgaagatagttgttgttttttttttctttttttttgagatggagtttcactcttgttgcccaggctggagtacaatggtgcattcttggcttactgcaacctccgcctctcgggttcagcaattatcctgcctcaagcctcctgagtagctgggaaaacaggcgcctgccaccacacccggctaatttttttgtatttttagtagagatggggtttaaccatgttggccaggctggtctcgaactcctgacctcagctgatctgcccacctcagcctcccaaagtgctggaattacaggcgtgagccaccgcacagggcggatagttggttttaaaataataagacgttgccttctctaaatacagatcaatcaaattcaaacttcattaactttctaaacctgcacatttaaataccatgttttcattctttattacttcctcttcatactgatttctctcctagttaaaaaattaatcagtaaatccacagaagctaaatagaaaataatcaagtcttaagaaacgttaaggccaggcatgatggcgcacacctgtaattccaactctttgggatgccaaagcgtgaggactgcttgtgcccaggagtttgagaccagcctgggcaacatagtgagaccctgtccctacaaaaataaaaataaaaaaaattagctgggtgtggtggcacatgcttgtagtcttagctactcagcctgggcaatagaacaagaccctgtctctaacaaaaaggaaaaaaaaaaaaaaggaaagaaaaagaaacataagccaaaatggagaaaaagtggtttgtgtcactacataagaccacagaacagatctcatttctacctatagaccaaaatttttaaaatattggtcccatgctaatttcttctcagttaaccatccttgttaagaaaaattcctctcatgttacaatgccataaggccttttccttcaaacaggattatttacccttataatgtctcaccaatgccagagtaagcaaaacacctgcagatctaatagaaaacaaattatagttccttacatgtcataaaataaaatatagcttttaatctgtccttattttggatatttctcccaatgaaagtaaagtacaaaccttttttagcatcttgttctgtttgtggaagaactctactttgatatcaccacacacaggtaacggctgagggaactcaaagtacatgaacttgtcttcccgtcgtgtgggtcctgaattggaggaatatatcttcacctttagctggcagaccacaaactgaggatctgcatggttaaatacataccagtattatttcacaggaaatgcctttaactgtcaaactgtcaaaaacgattttaatgattaatatcagcaatatacacgaaatatggattctgtatctgcaatcttgatctcaagcaaatcaactgaaataaatgaaataaaaatataaacaatgtaagattttctccagtttgaaccttcaaaataaggtcctattacttatataaaagtcaattcctatttcatgaatagtaagtcccaaaattagacttctagtggcagagtaacttcaaaactttaacattaaaatcatactaaaaatcctaatacaaataaaaactttaagcattaaaaacgatgaaataattatctggtacatttgtgaactacatcaaaagtaacttttaagacagatatcaacagggagtagtcacgaaaaatttttaaatgtaaagaagacagatatttgctatagtattcttaagtctctagcatgcggcaaagatcacaaaatacaaatcactacatgttcacaagagaaagaggataaaacctataacaatgttataaaaaatttcaaaaacacaagtctaaatatttattaaaaaattaaccatcattcattttcctatagctcacattttaaaggtatataatgccaccatcataacaggaaacaagagatttgaaatttctgtaaagaaatgtaacagatttcaagtaaaaactgcagcacaaccttcctttcctccaaaacacctcattttcattaacaagtattctggctttggctcatgtctgttttaaataactggtaaaaaataaagtaactggtaaaatataacttctcaaaattcatcatgcttttacactagcagttgaaccaaatggtgggaaagtgtgttaagggaaggattgtatgttttattttttaaatctactcataaattcatttatagctaatgaccttaatgacagaaattaaagactgatgaatgttatgatcccaggacttcaaaaactgaaagttacctaaataatttgacaaagtataattcatttgtcatacgctgaggaattagaaaacaaaagtccattacaaagaaatttattaaccttaggaggttaagaagtgccatttgaagaaaacatgccaagataatagagaaacaggaacacaaagttacataaagtgtatgagaaatattatacatatttaaatatattttgtatttatattacgtatatatatatatatatataaaacaaaaaattctcagcaccaaaaggtgtcattattctaaaagataaacaaaagtcttacatttttatcaatgtgactgagaacaaggcaaagctaaaccaagttaaatgaaatttccagtttagtaaacacctactactatttctatgtaatatctaaagcagtatcagccatcacataattaatatgtttgataaaagcatgcaggctactccaacatggtcttctaagacacttattattcaaaaaagctaccacaaacaggataaatattacaccaacaatctatcaataaatttcacttccttgactcaaagttcaaagtgcaatgagccatttcataagactttatgtgatactgaaatttcactgggaaatctaacttcaagaagcaaataaacaaagtaggattccaaagctgtgataaaattaaccagaataaaactgaaaaactgccttgtaatctttttgatttaaactccattaattcagaatctgataatcctgattttaggactttaaaaagcaaattaatagtatttccaggtttcaattaaactacatctaaaatgtgcatcttcaaatattatagtattatattaaaaatgtataagtagtaaagatttcctcaatcactaaagaaaataatcttctctgcaatatgaatatcatgtttcagatagataagacctaactaagcagaagtccaatattagtatggttctgtggacttctacaatatatatccttggatatatatgactatgttccaaaaaataaataacaagatccagacctagtgatatagtttggatatctttccctcccaaatctcaggttgaattgtaatccccagtgctagaggtggggcctggtggaagaagcttgaatcatgggggcagatcccacatgaatggcttgggccatcctcttggtggtaagtgagctggcatttaaaagtgggtggcaccttctccccaccactccttctctttcttgctcccattctcaccatgctccccttttgccttcagccatgattggaggcttcctgaggcctccccagaagcagatgctgctatgctttctgtacagcgtgcagaaccatgagccaattaaagaagaattcataaagaaaacaggttaaacctgtttaatactcagtctcaggtatttctttaaagcaatgcaaaaacagactaatacacctagtaaatgaaaatcagaatgtaaagaatggaatgataaatagtggagacttgaaacggtgagtagaagatgagaaattacttaatgggtacaatgtatattattcagatgatggacaacctaaaagccctgacttgaaactatacactctatgcatgtaacaaaattacacttgtgtccctaaatctatacaagcaaaacaatttttttaagtcagaattaaatttccttggatatatacatattgttatagtcttgaatgaaaaccacattgatcatcttttagtaacatttttaaccctgttaaatgtctagaatatagtagctttttccatctcttagaaatattaagacaaaaatcaagaaaaagctgccaatccctacagaagatgctgtatttttcagcactatctgttctctacattgattcctcttcttcttcctaaacccaagttgccattcttatctcagtcctcaccctctccttttcttcctttcctccaagacttcccatgcccaaacgccacaccattatttatatgaaaggcttaactactctccctttcctgatgatgcccaaaatatcgatatatctcctacctagattcgaacccatactcccaagtacccactgaatattgtcatgtgagaagctcacttttaccggatttaaaacacgtttaaaaccaaaatatcaacattaatgtctccaagtctcagattcacttttctttctttctgagactatttcacctgactgggctcaaaacttttacaaaatctttggctataaatggcaaataaaaaattaatgaaatcccatttgattgtcttagcatacctgcattaaggcaagttttattactggtttcttttccactattttttcctcttgcgattacaactttgcatacaactgtccttaaaacatggtttagtcctcaagtattatcatgacatctcagtatttatgaaatcaagtctgttatccccattcaagatcctctaacagtcactcacacgttccatacctattctctgacactacattcttgtccagctttttccttctgctgcacttccactcaagctatttcccattgcctgtaatacttctttcagtagtttttaatttatttacttattttttttttaagacggagcctcactcttaccgccctggctggagtgcaatgacgcaatctcggctcactgcaacctccaccttcggcttcaagcaattctcctgcctcagcctcccaagtagctgggactacaggcacgcatcaccatgcctggctaatttttgtatttttagtagagacagggtttcaccatgtcggccagcctgatctcaaactcctgacctcaggtgatccatccaccttgacctcccaaagtgctgggattacaggcgtgaaccactgcgtctaccactgcgtctggccacttctttcagttttaatgccagtctaaactgtatgttttcttcaatgttcaataaagaactggtgaacttcctttaagaaactgtctgacaaccttcaaaagcttttctgaatgtagcatttataatttatatacacaacttcccatttattttattttatatttatttatttatttctaagacaaagtcttgctccgatgtccaggctgcagtgcagtggcatgatctcggctaactgcaacctctgcctcctggattcaagcgattctcctgcctcagcctcccaagaagctgggactacaggtgtgtgccactatgcccagctaatttttgtgtttttagtagagatggggtttcaccttgttgtccaggctggtctcgaactcctgagatcaagcgatccgcctgcctcagcctcccaaagtgctggggttacacgtgtgagcctcgtgcctagccccacaacctcccacttaattacatatagctcatattttattaaaactttactacagtattaaatcatagtacataagaggaaactagaaaatgaggaaagattactaaagtgaatgttttctttcccttaatatctgcatgatactttatacctttctcttggctcttacactgatatcaatactataggaagagcatgagtttttcttcctttttccttctctatgaatctgttacattcatctgtcagtcacttccaacagctcagtaccttgcattcagcagttttaaaaattgtactgagatgaaaagagcatcaatgagactctttagaagactttaacatgctatactaataaatctgtggtctttgataaagttatctgtctctaagaatacagaaaagatctgatgaggatgatcacacctatctgacaacaacatcagagaagtagaataggatcaggatgactgaggtagacttatagagattagggtaaaagggagaaataaatagaggcagacatcagtgacataatctgtatttagtacttatccaggaagtctcagatttcaaagtctcttcattttattgacaagcaaactcaaagagaggtagatgatatgctcagggttacgcaatagattaatgacagagataggactagaatctggatctaaatccaggttttctctaacactccacatactttgattcctattctttactcatcatacttcagcttgctgccacgtcttatcacttcttcctttccttttcattgctttgtcaccattactgtcaatacctagtcttcctaagatattaaggaattgatccctgccctaagagcagcaaattgctgaactcctctggtggacctctgctggacctcatgctggacctctgatgggacaggttcttccatcatctagtcagaattgggctgtatttggtggttataacacagaatatttctttcataaatataatttggcttcgactacattaaaacccattgcttttggcttctttagcccaatgagttgaacaacaaagctaattaatttgttcaaatgcttcagaaatatagtctcctgcataaatttcaaatgtggtaaatttctttctaaatttttatgtaaacttctagatatggttaagaaaactgttccaatacatggaaggatgagaatttcaagcacttactgcaagttccgccactgaacattggaatagtttcaaacatcatcttgtgaaacaacagtgccactggtctataatccagatgattctttaacaggtagctataataatacacatagcgcctctgactgggaatagttactccctggtggacagaaaaaaaagagaagccaaattgaaaaaaaatgttccattatagttatttcactaaattgctatggtaactgggtcgtagccatttaagaacatatatacattagaaatttgaccttaaatgattaatacttaaatccagctcaataataaataagagcaatatcaatacaaaggatatcagaataactctcctcccttaaaacaattatcataacaacccatttattcaaaggtcacaacagcgctctgacccatgaaccccataggcaaaggccactgcatatccagaataagtgtcaaaggcctctgccctacagctatgctctatacacctagggctccccacaaggatttatggactccttaaacacacagctcctcacaaacttgattacctactttccaggggaaagagtatcagaatcagcaaactagacagaggcatattgcctttaaggcagaaacagcagtagcaaaaagtgatgctggcattagggcccaacaaaaacaggactatgcagttgatgtaaatgtgtgaaacaatcttctaacacaggtaaagctatccttgtactacatgcatctctttgttgaagaaaccagggaaaaatgaagtgttttagaaaatgtaagtattacaaatgattaaaatgtatctagttctcaagagtttattaaacaataaaacataaataaaattttgtaatacatgtggcacttaataggggaagctgagttatctaaagagaaaaatctaatatgtacaacaatgcattcactaacgaagacgaataaatgaggtatttaagggttttttttattagacatgtgacttaagaaaaatccaacctaaaaatgtaagacaaacaataagcaacattaagaagtttaacggtaaaagtaacttacagaacactgtaccttaaatgaaagtatactcaagaggaaaaagaatttgcaattatttctcttttaagttactactggcatctaaatctccccaatgtcttaaaaattgtagacacaaccttcttctccctaatgaaaaatataaaacatatttatgtgaatttaaaaacaggccaggtgcagtggctcacaacctgtaatcccagcactctgggaggccgaggtgggctgatcacttgaggtcaggagttggagaccagcctggccaacatggtgaaaccccgtctctaccaaaaatacaaaaaattagctgggcgtggtgatgtgtacctgcagtcccagctacttgggaggctgaggcaggacaatcacttgagcctgggagacggaggttgcaatgagctgagatcgtgccactgcactccaacctggaccacagagaagactgtctcaaaaaacaaacaaaaaaccaggtatgctgaatagcaagtatgtaggtatccactgtagtactcctaatattttttcaaagatgagcatgattttattatagacaatttaaaaatatgtgtatgtgtgtataaatgtcaaaaaaaatcggtataaaccatttcaaatcatgacaagtgatttaagatttttagccacagtataaagaccaaaattttataaataaaagacttgtatttgaatgctgacagtcaaaatacaaactctgatgtgttttcgaaggaaaatgaggacaataatatgtacccttccttaacagggctctcatgaggatcaaacaccagatgcagttacacaaaagcatgctaaaactacaaaatggtacacggttttagcaattctgtacctgtattcaaggtgcagttttggaatagctggaattttatttctatataattttcttttttcttttttttttttttttttttgagacggagtttcgctctgtcgcccaggctggagtgcagtggtgcgatctcggctcactgcaagctctgcctcccgggttcacgccattctcctgcctcagcctcccgtgtagctgggactacaggcgcgcaccaccatgcccggctaatttttgtatttttagtagagacggggtttcaccgtgttagccaggatggtctcgatctcctgacctcgtgatccgcccgtctcggcctcccaaagtgctgggattacaggcgtgagccactgcgcccggcctaattttcttaacaaaacagtaaaaggtaaggtaaagtagtagtactttgaagagcagtactactactcttcatactcttcattaaaacattaaaaattattaaagttaaaaaatgtaaacttacaatgattttattacgtcacatttaatgtaatttcagcaaacaactgtcattcatgtttagcaagataaatacagaattgctaagcagaaaggaaatatcacatggaagatgagtgggaggtgtacttttttgaaccatgtgaattttttaaccatatgcatttattatctagtcaaaatatgcaataagatttaaaaaaattaagtcaatgcgagtctacgagtagaccacattgtcaacattatttgttggggtttagtggatgacatttttctctttatctccatttttggcataagtttgtgtgcaataataaaaagatttcaaagctttaggttttttcaagtagcaagtgattagtagtgtacctataatgtaggtgattatacattctgttaatccttacccaaaaaaggataggcaacataaaaaatatataaatctactagttgtcaacattgggtgaataatctatgtatgaataccagttgaaacaaaattactgacaattcaaagaaaaacatggaaaagtacattttaaaatttaatcaattagtttaccatcaatattacagtctattttcttaactttgcaattcttatctacctgctgccttgtcagcacccaaaattcaacacttctagattaacaaatattaaaaagttgggaggctcacatgtatctgtttcagagtctccaatgtgacctcctcattctagtcctatctctctgagccatgatgcacactcactaaaattgaattaacacctgcaatataggatttccaatgagtggaaagtccacactaaaattttagtcatctttaaaagcttatacatatgaataaaaggctgtaaagctcttgcagattaaaaaatactctgttttcaaatcttttttttttttttttttttttgagatggagtctcgctctgtcacccagtctggagtgcagtggtgcgatctcagctcaccgcaaccttgcctcccgggttcaagcaattctcctgcctcagcctcccgagtagctagcactgtagggatggccactgcgcctggctaacttttgtattttcagtagggaagggtgagtcagcatgttggccaggctgtcttgaactcctgacctcaagtgatccactccccttggtctcccaaagttaagggattacaggcctgagccactgtgcctggcctaaaatttttcatttttcatgtaaattaaagctaataagggccagtttttattctctaaccaagaccttttaagttaaattgatctttaactacacacacacacccctgcccaagggtacagttctactttctactagtagtaactctccttttccactttaattttgaggaaaattatttacacagctgacccttgaacacaggtttgaaatgtgtgggtccacttacatatatggattttttttcaataaaatttttcagagatttcaacaatttgaaaaaacctgcagatgaaacacatagactagaaatatcaaaaagttaagaaaaagttaggtttatgtcatgactacataaaatatatgtagattagtctgttttatcatttactgccataaaatatacacaaacctattataaaaagttaaaattcatcaaaacatatgcacacaaaccttaagaccagacataataccacttgtagtcaagataaatgtaaacaaatgcaaagatgcagcattaaatcatagctacctaatattaactgtagtacatactatactactgttaaaatctcatagctaacttctgttgctactgcagtgaactccagggttgcaagaatctgtttaaaacactgtgtgacactaatcatctctgtatgatcagctcatctctccagtaaattgtgtattgcaatcaaaagctatctctctcacggctcttgtgtgtttttcttttcttttctttttcttttctttttttttgcgacagagtctccctctatcatccaggctggagtgcagtggcacgatctcggctcactgcaacctacgccttctgggaaaaagcgattctcctgcctcagcctcccgattagctgggattacaggcacgtgccaccatgcctggctaatttttttatttttaatagagacagggtttcactgtgttagccaggatggtctcaatctcctgacctcatgatccgcccgcctcggcctcccaaagtgctgggattacaggcgtgagccaccgtgcccggccctcttgtgtagttttcattgtgtctagtgcaatgccgtaaaccttaacaccatgagacccatatgaagtgccaacagtgatgatggaagcgctttcaaagaaagaagtcatagacattataagaataaagtgacttgcttgatatgtacagtagataggtacagctgtagctgctggccatttcagacagatgcttcatcttgtaaacagcaacataaatgtatggtaccaataaatacagtacagtactgtaaatgtgttttctcttccttatgattttcttgatacatgttcttttctctagtttactttattgttaagaatatactatataatacacatacaaaatatgtgttattgcctgtttatgttgtgggtagggcttctggtcaacagtgggctacattatcgaacggtcaactgtatccttaactttttttcctcaaatacaactttcaacaattctagctttagctaaaaaactttagctaaactaaagaacttcagccattactctttcagctcctttatgttcacagaccaggaggtagacctcagaagtatatttagtgttcctcctaatattccttccagccccctttcctacagctttgcctatttcaaacccctatcactcaataactcttctggtatacactttttaaactcttgaccacaacgattttagcactttgttctcccaacctctctcttgatcctgaccaacacatcaccttcgatgaattcagctcctgctttactgggaaccctgaggtcatccaatacaaacactcaaaattcccttctcccatcttaaaatctccttatacttgacgtctcttcctgttcaacaagtttctattttggacaagtgctttattaattatctcctatctggcatgtgcctttattctctccacttgtctctaaataatatgctcaagtaatcttcattctttatccaaggctggcaaacaactgaaagaccaaaaacccacactctccctagattctgtatctctctcaaactattagcctccctctctataaacagcaaatcttgagacgctcttactccttaatccagagaaattgattatgaggctgatttctttttgaaggggaggggggtgccatggtctcactctgtcacccaggctggagtgcagtagtgcaatcttggctcactgcaacctttgcctcccaggttcaaccccctcagcctcccgagtagctaggagtacaggcgcctaacaccaagccctgcttgcttgcttgtttatttattcatttatttatttattaaggaggaacgagggttttgccatgttgcctaggctggtctcaactcctggactcaagaaatctgccttggcctcccaaagtgttacgattacagggatgagccaccatgcccagccgaggctgatttcttaatggtcattaatgctttgtcaacaactaatttcctgctgttttcacaatcccatcctggctgctggctgatcttttttttattttttttttaaacatttcactgaaaactttttattacccttttgggtagaaatgagaatttatttgccaggaaggatgatcccatcatacttctgctggaaccagcgcatggcctcctctttgctgattctatttggcaccaatgaagcctgtcccgcacttcttacctgcaatgatgaaacctggcttttccagcaccacatagaagtccaggctgtagacatcaatgcttgggtcatatctgatacccagatcaatgtgttcctgggtcccaaaaccaaagtttccagtatctgagaagttattttttcttaactcacactcctgcacctttagatcattctccaggatttcgtctgccttggcccctcgaactgtgcagcagacaacagtcttttcatttcttctgttgccaaaggcgctaacagtatatctagctttggaaaacacctggttctgacctgtaagctgttccaagaccttagttactcaggtcagtctgtctccactttctcctaaacagatgttgaagcggagcctgcagatgcaaaattcctgcatggggttatccttttcaccttgatcctgcaccacgatggagaacaggaagagcctggctgatctttctgcaatcattctgaaacttccctgcttctgtcataggacttactctctcaaggtttctttcaacccttattggttgtctcttctcttgtccctaaatataggcctatctcaaaaagagtttcccctctgtcaaaccaatctattccagtgctttaccaattttacacaataactccaaaacttatctcctttaacatgactttattcccaactgccagtgcagaattccaacatctggctggaatttctacctggtaatctcagaaatactgaaaacacacatttccaaaaaccgaagctttttaacgtggaaaacttcctttatttccatcaatgatattcaattattttctccagcactcgatggccttctaataactaacaccatcgtcacttattgagcccacactatattctttgtattgttctaaatgtctttagaaatacataatttaatactcataaaaccatgtaaggtaggtactattggtaaaccattttatagatgaggtgaagtaatggaactagatataatcttcataagtaatggaactagatataatcccagcactcaaactccacagcttctagtcaactactatatgatcctcccatcttctttctgcttgaggaatgaaacacagctgagagacagcagtaatataatagggttacagaaaagagaagtgagggaactccagcactatggcaaaggcccaggcagcagagtggagctaagagacacagtcagcctattaactacctggcacatacatacatgcatacacactaatggtacacaataaaatgacagacaaatcatagattaagttcatttagtatactcatctttgattcctacgcatctattcagttgccaaaatccagatcttgattctgaaatactactcaaaatgtcagtttcagttttctgtggcctatttcagtttcttcctgcaattttgccatagccaactgatttatcaccctttatccattctgtaatctatcctttataccactctcagattagttttttaaaagttaagattaatccaattaccaattaattcaaaatgttaaatggtaatctacccaaataagagcaatatttatcacacactgtaattcaatcacagcataaaaatacagctccaacctctgtttccactcttacctctcacaattcccttgaatgtactcttactttggccaaatagaagtatttaattttccctaaattgtaccttctggttttctctctttttaaatatatgctacctttatcagattaaggtataagggctacataagcagccacctgtgaagtctcacatatttttctaacacctggtccaatttagataacataattacttgatacttcaaggtgtgataaccagccacctgaaatgcaatttaaaccaggtatttcttgagggctcctagacattttcattattgcagggtctattcagattttgtctctcctcaaagcatttacaatgatatattcactgaaaattgcccacttctcactgaaatttccaaaatgattagcacagacctgaatataatttttaacatcacctccacactttagttttatctcctttctcatacttaatgtctcacttttagtttccctcttttcttttatccttgactggcttttaaaaatatgtattgattttattggcattttcatgcaatcagtatttagattagttcaaatggtttactgtttcctaattcattaacatttttgcctttataaatctctagttattaatctttagttctaaatttacatttcctcattgaatcaaaaattatttaaaacatgattttatatttccatataaatttaaacatttttaaaaatctccagttctaatgaattgtaatcaaggaatgggacttacatatttttatttttgagtgagattttgttttgcagttgatctaattagtaagactggtaattgttttgtcaatgacagaaaaaaagaaatatatttcattattttattattaaagccacctatatatatatatatacagttatgtgttgcttaagagaaactgtatctggatgatttcatcactgtgtcataaaatatacttacacaagcctagatggtatagttcactacacacccaggctatatgatacagctcctatgctacaaacttgtacagtaagttactgtattcaatatcataggcaactgtaacacaatgttatttgtgtatctaaaagacagaaaaggttcagtaaaaatggtataaaggatataaaaattgtacacctgtatagggcacttaccacgaatggagcttacaggattggaagctgctctgggtgagtcagtgggtgagtggtgagttaatgtgaaggcctaggatattactgtaaactactgtagattttataaacatgctactctaaatctgtttaaaaattttttctttcttcagtaaattaaccttagcattttataactttttcactttataaatataaaaaaatttaactctgactcttttgtaacatttaacttaaaacaaaaacatattacacagctacacaaaaacattttttctttgtatccttattaagattttttctatttttaaatttattttttttttttactttttaaactcttgttaaaaactaataaatacatactttagccttggcctctacaaggtcaggatcatcaatatcactgtcttccacctatacatcttgtcccactggaaggtcttaaggggcaataacatccatggagctgccatctcctatgacaataatgcctttatctggaatacctcctgtaggatctgcctaaagattattttatagttaacattttttaataagcagaagcacatgctaaaataatagtactgtaaacacgtaaactagtaacatattcgtttatcattataaagtattatgtgctgaacataactgtgctatgcttttatacaactgacagtacagtaagtttgcttacaccagcattaccacaaacatgtgagtgatacattgcattgcaacggcttcaacatcactaggtgatagaagctttttagctccattataattttataggaccattgtcgtataccaggtcaggtgttgactcaaacatcattatgtggtacatgactgtaccttcttacttcgtgccttttgaagtacattaaggattcctatcattgcttttctaccaattattcttcatttctttcagcttttacttaatacattttgatgtttagcacattcgttcataactgttaagtctttacctggagtgtaccctgtgttgatgtaaaatgacatttttgatccagtttaatgctttttgctttaaatgctaccctgatactgagattctgtcatctgcttttgaaattgaaatttgcctgatgtatctctaatccaccatttatttttaaccttagttgttttatgtaaatctcttgtgattaatctcttaaaaaacagacttcaaagtacagattatgtacatctttcagacctaaaatactgccatactactaccagaacagaatactactttaatatcacagcacaagatatgtaatgttttgttcatattctatgcatcaatatttatcaatattccgatcatctcctaagaagatgaatcacgaattcacaatctacactcctcagttaaaaaagtaattttctatttcaataaactttccactggcactgctaaacttagaaataatgtagatttttcaacataatagtgtttgcttgaagctcggaaatctatgtttcaggatgatcacaataagattactacaggaaagcaattcaacaaaggaagaaatatgattattattacaatgacaacatatagcagtagttattgtatattaaggtacttgccaacattttatatatctttaacactaccataactttacaagatagatattattgtctctatttttaggatcagaaaacagtccgactgcacgtaattatctcattcaaaaccaggatctggacctcaatgtgaatataagggtaaaacttgtactcagctgtcctgggttttactaatagcatgtatataaactacgtgatttgaatgaagtcacaacttcattgagttcttatttttcctgtctacgaagaatctctaaagtttagggtgttacacagtatttcacttctatgaaactaattattgagaacaaatgtgaagcagacaactgatatttttttctctttccaacattctttcccctccttgatttttctttggaaaactattattatccctgtgtggcaggctctacacttcagctttagatacatgccccagagaattccattccctggacagaatatttggttcaggaataataggcatgtgcctcaatccagggaaatcagaactcaccctacaaatttttgctcaaattgtagctctcttctcatcatagttgctaaagtaggtagaatgcaaacctgaagctattaggaactatatcttgccactacttgtgagagcctgtttgaaaataacatatatacagaagagagaaaagaggaggagggtaagggagggagagagaataagagagatactcttgagatctgttgagcacctagatccaggccagagcttttaggttatgtaagtcaaaaaatgtctccttttatttaagctactttgagttgggtttttcttatttaaaactgaaaaagtcctcatatgtcataaaggagttgctttttatttttctaagtttctatttctactttaggattcaaaataataaagaaaaataatttggactgcagaacatagtttcgtagaaaaaaataccaggtttaaggttagaagatggggtttttattattacacaaagagattatatgacttaggacaggttgatctttgcagatctgttcgttttgtgaaacaaggtctcgatctgttgcctatctgaagtgtagagcctgccacacagggaggctctaggctagagtgctgtggtgtgatcatggctcactgcagcctcaacctcccaggctctggcaatcctcccacctcagcctcccaagcagctggaactacaggcacgtgacaccatgcccggctattttttaaatatttttttgtagagacagcctctcactatgttgcccaagctggtcttgaactcctgggctcaagcaatcttcccgcttgagtctcccaaagtgctgggaatataggtatgagccaccgtgcccaaccctgcaaatctgttttatcatctatgttagaatgggtttgaattaaataattgctaagatccttcaaggtatgaaagttctacaattttactgtattatataacagccttaaataatgtgtatcatagtaacatggtttggcccaggaaaattcaaatgttaagaaaaataagaacgccacattggaagatttttaaaaagacagtaattatagtttgttttaaataaagaggaagtaagaaaatttcattaggttataacatgtagaaatttagtaaacaggctagaaaaaataacctgatttaagattaggtcatgaaaattcattccccagagaaaccaaacattttccttgagatcatttaaagatacaactattatttctagaagatttgtctttattaagaataagctcaatgaactcatgtacacaagagttcctaacatagagaaactttaataatttatttaaaaacaaaaagaaaattaaaagcagctcaaactttttccctaaaagtttaaccaaagaaaaaataagaggccaggcacagtgactcatgcctgtaatctcagcactttgggaggccgaggtgggcggatcacttgaggtcaagagttcaagaccagtctggccaacatggcgaaaccccatctctactaaaaatacaaaaattagccaggcgtgggggcaggcgcctgtaatcccagctgctcgggaggctgaggcaggagaatcgcttgaactcaggaggtagaggttgcagtgagctgagatgttgccactgcactccagcctgggtgattgagtgagactgtctcaaacaaaaaaacaaaacaaacaagcaaaaaaaaaaaaaaaaaaaaaaaacaaaaaaagggaaataaatatgaatgtttactttatgtgccatcattctggaacacagctgggggtatgcatgggacagggagaaggcaagggagagggaaacagcagtagtgtttctaagtaactttgtcatgtaaaaggagtttacctctttaaactcaaattttggaagtcctttcaaaaatacatacttactagcattctcaggatgttttaactctttcttcatagtttaaacatgtgagttatctaatattgaaacttaagtgcagatgcagatagtgtggagcacaggactagatgagaaccaaccctagaagttgccctgtggcatgctttcttggaagaaaaaaatcaccaacagcttacttttgaataatcttcacatgttcataaagcaaaagtgtcaaatatacaaatgaatgactcctaaggaagtgtaacacaattatcttcttgtaaattagtgaataagacagaaggaggcttccttcccttaagcggttacctcactctcagaacatttttctttataataactatcagttgtctgacttctctgcaacactgaaaacccaaagtattatttgggcattactaacctaatgcgttattttatggtcaacttgtacccaccactctgccatctaatttgcaccatgtctgctgaggatatgtcaagactctgagccagattattttgaagagacctctgcaaagtctacaaattctttaccaaaatatgactgcctcatctcccttcaaaaaagaaagggggaaaaaagattcttcttctatataaatgtcactagaacataattttctccagcttcttaatgtttgtctataattaaaattaaggatataagcaaaataacattaaagataattctaataaagttaaccccatacaaactgaaaagtagataaaatgcatgtatctcctataatggtgattcacaattacaaaaatgcaaatccacaggctcaatctacaaggaaatactgacaagaagagaataaacctattatgagatattccaagaataaaactactttagataatcaactacatttattataagatagttactcctcaggaagaattccacagttgtataacaacagctttaccatgcttagctaagttttcttatgatgaaattagttattcataaaagattaaaaattatttcaccagtattctaaccaacaggcaaacaagtggtatctttgaaagttttaaaacaattacatttcaagtattttacagaagcctgcagtattatatttccaagaccaacaacctcaatctgtccaaattccctttaagtcaggagtcattaaatgctttagcatttgtaaggaagcatttgtaaggaaaggtataagctgaggagcctttcaaaataagaccaattttatcagcatttcataaccttgcaggaaagcctgagcctatacagagattaattattttgaacagtctcaaaattcttttgcagttccaggatttgtggacttgatagtatagaaagaaatttaacagtgtatcagaggactcaaattttcctctgaatgctaatattaactggataatattgatcacaacacttccccttcctgtgcctgtttgatcatctataagaaacattcctggaagaaaaaaaaaaaaaaacctaccactgactttaatccgtatctagttttctaatgctgtttcaacctaaacacaaatgctactgttcagtaaaatatggtcaaccaacagcatctgctccattttttttgcctttttaaataaacacagggataaagaaggtaagaacacgaggatactcctttagattctgtgaataattcatccgaaatatggtctaagtatattaattaagcatgagccaagtatagtagatttcagttatttattttgactccaagacacaaaaagcaatcaatttcagtgaaattacttaactctgagtcttaatattatgtaacagctaaatataacaattttaatatctacattcttaacactgtatgtacagatctccattttctattaactattagcccatcaatctcttttcacttgggggatattccaacctatgcaaggatggagaatatacagctactagagcagttctactgatgaagtaaatactattacattttaccacatgatattataaactttgcattttattttcataacactattcttgctatctttcattctggccctatttcacaacaccctacaggacttacgatttcatcaaatagtctcccctcacctctgaagagaaacagaattgatagtattaccagactgtaatgactagaatatcttcccattggcaaatttaaaatatgtccttactttttgattatggagccttctcttggatttaatttggactggaaacagaaaataaaatacaataaagtttaaatgcccttgggttttacttttatccctgaacatgatgacatggactatcccaagtccttcttaaatggcaagttctcatcatcagcagagcacagccaactattctgaagaagcagatacatcagacagggtatgtatgcatatgtgtgtgggtgagagtgtataagaaggaggaaagagggagaaaaagagaccacatgtgagagcacagttaagttggaaaagcctagaccattacaaaaactatttgttccaattaaaaatcattgattaaatcatcctactaggatattgattgtaatgctaaacaaacaaaaagtcacacagttgaacagtgaaggcaagtatcttagaaagagtcaaatatacttgtagcatgaagaagaataagactgttgcaatacctctatcaaatacttttctccattccaaaaaaaaccctgacattaaaaaaacaataataaagtaggtcacaaaaagattggaagtaccacctttcttcagatatgatttctcagtatagccggctacaagttttcatcaaatgcaagcatggtgacacaatcaaggaaacattcccattttggaatctttttggaagcttcagaaaacattaacactttcaaaatggtaaagtttctttaccaaaaaacttctcctgaagaaacctcagtattctgtaggcagacagtacaccttactgccagacaacacatctgatattggggcactggtaaagacagaagctctccatgtcatggtcacccactgctctcttcatcagtatgcgctagggtgcaagactgtcatcaatcctgaaagaaatcttatctcttgttgtgaaagtattctactgtttcaagtgccaacccttgaataattccctgtgtaagatgatttgtcatgaaaaatccactattgtgaaagctgccagattcatgaaagccaagactttcaatcaagagcttctcgagaggttttgtcaagaaatgggagcactatgaagttctttgctatatataagttccctgctttcagaagacaaattctacagcctgatactgctgtttacaggataacatacactctttttaaacagtttaactcttcaaccttgaaagtaaaatgtggagtcataatcttttctttcctaacacagcattaatgatacagatcttgccaaaaatgatctcagtaacttgaaggcaaagaaaatgatgaaacatgaatttatctgaagagccttggagaattcttatttcttgacacgtctactttcatcaggcaatagaatctacagattccatttactcttctttcttttgtaaaatagcattttcagcactttttaccaaagtcaacactgattggatatcaaagatcatataaaagttgcaaagtcaaagtcaaagagcatagtttcaacttgttattttaaaagttaaatagcagtcttttcattaaaatttagtattgaacagaactaaagcttaattttggttaatttgtaccacttagatttattcattgctctcatgtagtagccactggtttttgcataaaaaagtgacatagttttcatgaaggttcttttacattctgtctaaaagaatatatttcaatgtaataaaaactgcaaaattttatgtacactatgcacattttttgaggggagaacatttataccttccatcagactttaaaaggaatgtaacacaatttaagaccccctggcttaaatctagtgttctgcgcctccacattacaaaatttttctattttattacaaaaaattttttacctttttttccactaccaaaatatatgctgctcatcaactctgttttaaatttctaccatcgcttttgctactgcatttttttttttttttgagatggagtctccctctatcaccaggctggagtgcagtggcacagtctcggctcactgcaacctccacctcccgggttcaagcgattctcctgcctcagcatcctgagtagctgggattacaggcacgcgccaccacacccagctaatttttgtatttttagtagagatgaggtttcaccatgttggttggccaggatggtctcgatctcttgaccttgtgatccgcccgcctcggcctcccaaagtactgggattacaggcgtgagccgctgtgcccagcctgcatttttaatcagtaaaagcaattgtttccctgcagatgataatgggataaatcaaagtaaaaatctttagatcctcagctctataattcatgccagtgctatcattccaaggtgcaaacaatatgcagaaatgtaaggcaatctaccataatcttcaacattcaccaaaattatgcactaatgtaagattcaattttgtaaactatcaacaataaacagtatttcggcatccttatatataatgcaaaaaaagtcacaaaggataggaaacaagatataagagggggtaaaggaacaaggaatctatgcaattacacagctttaaatgattaatacgatcattctatttctgttttacagctgaattaagaagaaattagattaacatgaaggagaactctctaaatgagtttttctatctatctggaggggcttaggctttgtccttcttagagatggaaaaatgtacaaaatctctttgcattaaattttaacatgttttgccatacttaccacccaaagaaatatatcaacagcaaaattaaatcactgtaaaagttctcccaagagttttcttttttctttcagatgtactataagaattaaatttgtcactgatttttcaatatagtccttagttttctgatcaaagaatcgagaatcttctattaatctaactacatttatgaatattcttataaaagaataatttttatggattataaaagttcacactttactaggtaatggtattttatccaaaggcattctatgctcaaacaagcttcagaaatataaagcttatttttgattaatatgctttttaaaaatgttattttagaagaattttgtgagaccaaatctgcaatacagttaatgggtaacatgtgctagtatgatatgaaaatggtagcgtgaacagaaaaatgaaatcaatcagtcatttctcatatagaaattgaggcagcaactgatttaaaaatttagaagaaataaggattagcaactatctttaaaacctgttttccagggactgagggtggggagggaggaacacaagatgaacaagatctgaagctctactggacagcatagtgactatagttaataataacattgtataattgaaaattgtagcttgtagatcttaaatgctttcaccctggggggagaataataattatgtgaggtgatgaatatgttaagtagtttgactgtagtaatcatttcacaatgtatatacacatacatcaaaacatcatattatacattgtatttatatataatttttacttgtcaattacacctcaataaaactgaaggaaaaaaagaaacccaaaatctgttttccaataaattctcagatccaggaagaggaaaggaaaaacatcaaaaaataacttacctttttgtctctggtccttacttccccatagaaatctagggcctcttgtgcctttaaaaatttgccccgatgtaataaatatgcacatatcattacaccagttcgtccctttccagctttacagtgaattgctgcaacatgattgtcatcttcacttagccattggtcaagatcttcacaaaagggtttgataagttctagctgtggtgggttatggtcttcaaaaggatattgtgcaactgtggtaaaaagataacctcagaataagaaaaaaaaactcttgaatttttaattaacaagtaggtaactttagaaatgttgcatacaaacttaacaggtatttaaaagaaacactggattccagagaaaaataatgtattgcttaactttctaattgttaaatagaaaatagtctcttgataagtcttaaatataatcattaaggaagccaggtattattttcccccattttattcaggaggatatattctgggaatttacgctatacggactggtagcataggtcacatattagaggtagagctaaacccaaaatgaactgtcacatggacatttcgtcaggactctcaatgcaaaaggaataatactatttatagtatttatttcatcatcacaaaacatattccaaagacagaatagattactaataggataaactatgcaaagaactacatattacatttcataaaataaaaatgctaagtgtgttatttaaaggtggtcttgcaaatgttagtgttgtatacacatgtaatcattagggaagccaagtattattttcctccattttctgcaggagaatacattctgggaatctatgctcaatggactgcagcataggtcacataccagagatatgtgaaggcatacaccaaagaaattactcacaaaatgtatataattgttatcaaagtttcaggtcttctcacatgaattgtaagagtccaagacttctctgttcactatagtcagagttgaggtttttaaaaaaacttgtttagaaacaggactatagatatatcactattaattgctcttaatagtttctaccttagttccactctattaagatccttaaaaaccctggctgatattcaatgtactaacctgtgtcatctaaatatgtgagaagtatgtcttatatctccaatcaggtgactcataatatggtacaggatataatcaattatcctttggtgtgacaggagagatcttctggtagacaatgactatcattataaggagtcagcaggacagctttcacttagtcatctgcctaacttcattttcccagtggtacacaaaaacctccaggaaaatctgttaaatatctgtttaaagcaagataaacctcaactaaagcctgctttgcttagtaagcaacagcctaaatccaccaaaaacaaaaacaaaaaaaacccgttcttagtaaacctatactaaatctcaatcattagtgatttagaattttcaaaccatttgtctgaaagtccattctagattttcaggagggatcaatggcaaatacatcaatagtagctcatggcacccactttctttttgactatcacagcagcatctgccaagcttctcaactcttcagttttctcatggtttaaagtgttaagccatgagaactgagttgtatttcacaaataaaagtgaaagtttttgtgggctctgagaattaacttatgtctgaagtagaaactcatttaaagcagttccctcctctcatccatcagactcctcttatcaacatttgttatatcctttcctaccttttatgtcattcctcaacacagaagagttaagtagttctgctttctccctgtgattgcttactattagaccaactgcctcaaatagtaggtaaaccctctccttatactatttttagtctaggaattttcctaattcttagtctatgctgcactttagtcttcctgacaatattaatagctttatgcaatactttttcctaaaacacaacagtaaaattaaaatttttgaaatttttaaagataattcttaaatatgtatctcactcgataatctggatgactcattattgttatgacagtaagatacagtctatcgggtttaagttatacaacatagtacagtacattcatacctacctctgcaattaaatttggcggtgtcataatgtctttcagcacaactaaaagaaaagtttaaaagtgatataaagttatcttttgcacttaggaagaaaaaaaagtactaatactaacaaacattgcctgaatctttataatgtgacacatattatgctgtgtttaacattaattatttcatgtaataacaagaattctattaagtagatactgttatcacccccatattataataataaaaccaaagcttaaaagattaagtgtatgcaattagagctaatacatttgcttaaaaacttgtgatgccactaatacagagtactgtaaattcaggtgcttccatgctttcaaatttcctctatgaaaaatctgcatgctattggaatatatttttaattttacaagtacctataaacaactgactagtttcaatagtatctgtatctcatagttaagcatacataattctcaaactattcttcaaaaagatatatgttaaaaatagtaaaagcataaggacagtaaagaaaaactgaatgttgttaatctacttggccaaatgcttactaatttttttttaaaccagaccttactccctgttgaaaagccaacgatcacctttttcaacagtctctcagattgcaagttttaattacagtatgagagtaatgaaagaataagtaaaatcaatacagaatagtaaaatgctgacttgtcattactagagtatgctaatatttgtcttaatagcagtgatatgttagtatgtactggctttctaatgattaacaggccatgtttacaaacaataaaaggctcagaaagagatcttacatatcagtgtggttagcagtaccctggtaactccaactactatgcaaaacaaattttttaaaaattacttaaaataaactcttagcattttaaaacaaataaaggtccatagctccttaacctgcaatttcaatatcccaaaagttcaaaacatctaaaattttctcttaagttttatggcaaactcaactacagcaaatcctgatctgaagtaataagattgtacataatatttaatacacttagagcgaagagtaaaacatttcatttcaggtactgacccacaccccactggggtgtttatgtaaaagtatatttatctgtgctaccttttgaaaactaaaatttctgaaaatggaaacatacttggccccaagagtttcaaataagtgattgtgaacctgtattgtacatttagaaaccctgaaaaacatctatatagtttcttctctaccttaaaggtaattcaaaaccaaattcacatgaaggtttaactaattataaataaactacaatccattggtttctaactggtcagacctaaaataaaacaactttcatactaccactcaaaacaaaacaagcttttcctttttagtacaatttagtatattgagtttttctagaaagaaaatgcatttagtaatgacatatgcacatatatgcatccttgctagtaatttcatacccactgacatgaaaaacaggaaaaagaggactgacaagacagtcacattttacactttctttggtacttttaagataaaaggggagaaattgtcaatagtgaagaattcataatggaatattttataaggaatcagagatgtaggactaggaaacacaatctaagaagctggtctcaggacaacacaacagaaaataaacattagttttgtgcagcttcagttctctaaacttcccctactttctcaggatcccagaacatgtggtttgacgaacactccttaagactgctttaataaaaatgcctctcaaatattactgttaagaggactatatggacggaaagtggaagtaatgactactaagtgtcaaccagatgaacacaccttacaaagagtttccacttttttttgtttcatcctcacaatcacgtgataactgttattatctccattttatatatgagaaagctaagacttaagagcattaaaaaacttgccccaaataacagtatacaaatgaaagagccagaactcaagctcagtatctctgattacaaaagtcaaactttttctactactgttccataattctacttataataaaaaaaaagttttaaatacaaaagcagtaacaaatttcagtcaaagccagcattcctacaagagcagtatctgtcataaatcacagaaccaacagtgacagtaaaaagcaaggaaaaagttatgaaaatcttcacaggtaagcataggaaatatgggagcaaatatgctgggactagtaatgataaatatgctcagggaatgggggttggtaggataaggatgaagactttcttcttaaattaaaatctctgataaatgccctccttccacctatacctactgacagtttcttttaaattctttgtggtttggtagtgataagtctctcaacaaactaaaattaaagatacacaaatggcaaatggggtttagccatttaaatttaaccatttatgcttccttataactaaaactcaaaagataccagtacctcatattggtttatatgagacaagagaaatgaataagcatttaaagaatgagtttttatgaaacaagaggcagaaactgaaggaataagattaacaggaaaagcttccagagaagtgagatttgccatagaatcagctaggtaggcaggtctcttctttactctctttgatgaagctatcaccatcttacaaaagaaaacttaatagatgaaaattagtaaagctaaaggtttaccacaaaatgataaagtatgtcaaataaaatatgcactgaaatatagtaaatacctttaaaaaattggtatacagtgaaaacttaaattcctcaaaggcaagaagtatacatctctttattcactatctccccttccccattcctaccagattatacaacaaggaacaaaaataaaatatacttgtacaaaacaaactgattaattcaattaagtaacagtacacctgaatttgcttaatgttatgaatgcctgaagaaaacacagatataaacagatacagttaatcagaaaggccatattaggaactcttcttcacccatgtatatcataattgctataaaagatttaacatactattaaatgtgggtatgcctagtgcaaatattttaagatcttcaaattatgtatgtttgcaaagacatatatatcacatgtaatactatcctaaaaataaaagaaataaaatagaacacctgctgcttaccagactcacttaaccagaaccagaaatacaaacagaggtagaaaaaaggtaaagaagatcggaaagtgacattagaactcaaaacatgctataacttagttctagaaacttctgaagtcagtaaaatttggagaggttaaaacgaacaagcaaaaaagcaaaacgtaaagggaatattggcataaacagtggatggtcggctaccatatgtacctgtgtgaccttgttcaactcacttaacttctctaggcctcagattccccatctgtaaaatgagaaggttggactaaatgatctctttcaggtactctccagttctgaaagcttatgattccatgtggggaaggggcattaaaatatatgcattaagagctaccctcaactaataaacagacttcattaacttgggaatccaatggttggaaatataaaaacaaacaggcagttaggttcctaggctctctccaatgccaactttaaccataataatgttaagtggcctacaatactgatagtacagctgaagtcctaagttcttaaagcaggaagtcactacacacaggaatgaaaagaatttccttccctttctttgaatatgttaaactagaataaaattttgaaaaaggccgaatttgtctttggtgtccttcgatttccattctgagactttctaaatccccagttctgatagtctaaccctgaagtgactcagtttaatggcttctagcttttgaaagttcttgtccttttttattacttatattctgaatccagttgtgcaaaaaatacaaagctttgtagtttttattttcctccaaagaaacactatggtatccgcaacaaggctctttgtaggagaggtttatcaggaaaagagaaagacccctaaatgcatagatcatttgtaagctggacccattaagtttccataacaccttttactttcttttatcttgttgcctattgccaccacaattctctcccacccccaacatacagacaccacaatctgatgataatgaattcgctgccatattctaaacacttttatgccaacaagcttcttacaatgccattcctttggcctgtaacatcacttcccctcctctccttggcttgaaagtcaacccttactggtccttttcaccccagctcaaacttgccttcctttatgaaaccttctttataaggtaaaattagtgtttccaatgttctcttcattgcaaccttctatagcagagttacttcttctgtaatgctttgtctaccttttacattagaatgtaagcgacttgagaatgggagctacatcttactcacctctgtacacacccccccaacatgttttgtgttatctaataagtgataaggacttaacaaacgtttgttccttcatgactctgagaaaaatcagtgaaaacttactgagagtaacaatatcaatgtccactccactctcagtacttctgacgttttatcacactagaaagatcactaaattacagataaatttttcctatctataatttatagatatcacatgggaaagataaaagtcaagtaaaaaataacacgttttatgtgccgatttttacaaatcagaaaatagtcaatattttgagaaggaaaaacagtcttcatgggcaaaaagagttaagttttctcttccttccttcctttttaccttttcacatctctactcccaaagtcaaaagaaaaacaaaaagttaaagataaggtcaactagctctatcaatcaggtgggcagtccttaaaactctgtcctagacaagacaagccacctaattcagcaattttaaataacttaggtgatgtacagttagagaatgccctaacagctttttcagtcaatagctctagagacacaggataaacaaaattatattcactctgaagtatacctccatggaagatgctattagtgctttaacagaagctctactgtgaattacacttcaaattaccacacggttatgggctcaaatatgggctagatgccaagtcatttaaagcagatcaagtaacatgaatctgtgccaacaatgttttacctcatcactacactttctaaatgatctaacaatgctcttggacttcttgacttaatcggtttaggaatacaattctgttaaaatgtatctttaactctacctcactctaacaagcagataactttcacttaatagttgttttagaagatatttgcaagcatacaaataagaaaacatacttacagattgtatatcttgtaatggtttttatgctttgaatccaaaaaccttaaaacaaaacaaacaaacaaaaagccaccattaacaaaaatgagctaacatttgaaattacattaatactatcaagaaaaaccaaaagacagattttctttttcctaatctcaaataccatttaagtgaaaataaataatccaacaaataccccttctatgggtttagagtagtaatcatgtcattcttaaataattattacattacacagatttatacaatctgaagtaaaaccagagcttttcagagaatattttcataatcttctatcttcaacctaacataatgagactgaatattaagacataacttctttaaaaagcattagcatttagtgcaagtatacctagctcatagagatttacaagacagtcataatcaagtactcttaaaaataaccctgaaaattcagacatcattttcccatcaaactgaaaacttttgatatttgaaagatccacgtactaactattaattctgtacaaaggtattaaacattttcacatatatactccattcgaccctcacaaacatctgagagctagagcttattaacactatacagaagagggaggtaggtctcaaagagattacataactcgtccaaggtcatgtacagccaagaagtcaaagaatcaagaccaaagacctttccctcaagacagttatgaaagtaaacaacaattacagctaacacaagcacttactatatgacagacatatcctaagcacctcaggtatataaactgtttaatcctcaaccccataagataggcaaaagaagggctagaagaccatgaagccgaggaattaacagaatatacagaataaaaagacaaatgaaaatcagaagactaaacaaaaactaagagttcaggatgttaaatatattttaggagttccagaaacagagaacactgagaagaaaccgaagacataactcaagaaaaatactcaaaagtgaaggatgtgagttttcaaactggaaagttgcatgagtacctggcaaaacagatgaaaataagaccaaaatagaagcacacatatctcatgaaatttctgaataccaaagaaacagaagatcctaaaagctgccagagaagaaacaggtttcataaaagaatctagaatcaaaatgacattatcctttttaacagcaatactagcagctaaaaaacaattgggcaaaaccttctgattttgagggaaaactcttctcagcctagaattctataccaagacagactataaatcaagtgtgactatataataagggcattttaaaatcagcgaaatctcaaaccatacactttgtcaggaagttactaaagatgtgctccgccaaaacaagagtgggaaaccatgaaagaagatgacagtctccaagaactgaagaatctaacccacaagagaggaaaagggaatccctagaatgatggtgaagggacatcttgagtagacagccatacagcaagccaggaagaacaattagtccagactgggacagattagaaggcacctggaaaagataaaattgatataatgccaaatgtgcttaaacatgttgagagatttatacaattaggggtgagtttatgaattaaagctaagaacattgaaaactaatttttttaaaaaaaagagagacaactgtgaagtccagaaaaaataaaacatgcaggaaaaaagtcacaatatactctatcacttaactatgaatggcatttatctagttataatcccataaaaactcaatattgatataaccaaaattataatgtaactactggcaggaattataatacaactactggcaagaagaaggatgaggaggaagtctgaaaatatgtgtgtggtgatgtggaaaaaaagagtatatgaacttgaatctgaaaaattatgttacaaagtactgcaagcagtatttgtaactgtcagcaacataaattatatatttttatatcacactacagttgttgcagataggctaccatccttaagaacaaagaaacatagtgccccttgctttcagcatggtggctcttctctgatacagaaggaaatggaactcaagtggaacacagatttcactgaggtaaacaggaagagattagactgctaaggctgttggagtttgtggagcaagggactaagaattttgtatggatttcatctcaggtccttggctgggggctgggctgtctatgcgcaggatctgaaagcataacggagatgacgccagaggtaacgaaatataatactgggagaagctggagttctggcctaggcaaagtggaagagacctcatggaacaccccagatacttagctgagacattggaaagggcaaccttgaagttaaaaaccatgccctaggacaaaagacaaatctgaaaaatgcctgctttaacaaagagaaccaaacctgacaatactaaatcaactatcaatttaaatgcctgacaaaatgaaactcagcacccttaaaggaagtaacaatccaaactccctacatttcaacatacgattaaaatttactagacaggcaaagcagaaaaacatgacctattacaaagaaaaaagagcaggcaatagaatcagactccaagatgaaccagatgtttgaattaacagacagtgactttaaaacagttactataaatatgtacaaagatgttaaaaaacaatgaatacaatgagtgaaagatggaaagtctctgcagacatagaaaatacaaaagacagcaatttgaggcctcaaaagtacaatatctaagaaaaaaaatctatcggatgatctcaacagaagattgtaaactgtagaagaaaggtgtggcagattgtattttccaaaaattcatttagcaaatatttatcaagcacctgttatgtaacaaatactactgtgggcatagcggcaacagaactcgaagtaatgacaaccataataatgaatgcttctagcagcctgagaaacccgatggagaactagcttttggtatctcatttggaaaacagcctaaggacattggacagctcccaccaatcctaaaataaacgaaaagaaaaattagcatctgaaaaagtaaaataattatttatttgctactttttcccatggctaattcgctatttggtaaccatatatatttccccttgtattagtccattctcacactgctataaagaactacctgagactgggtaatcttttagaagaagaaaggtttaatcagaggcctcaggaaacttacaatcatggcagaaggccaagggaaagcaagcacgtccccgcggcaggagtaggaggaagagagagagcaaagaggggaggtgctacacacttatatacaagcagatctcaggagaactctttcgcgagacagctctagggtgatagtgctaaaaccattacaaaccactcccatgatccaatcacctcctaccaagcccctcctccaacactgaggatcacaactccacatgagatttgggtggggacacagagccaaaccttatcactcctgctacattcatgtttaatcaacatttgctcttagaaccctagtgtaactacagcggttactgctgttactaacgcataaatttacacataaatcatccctgccttaatcccatcaacacaggcaagctccaaacatttcaattcttaactaatgcctcctgaccatcttcaggatggttattagaattaattctgttacgtatccaatacatggaaagtaactatcttgtttaaaatgttcttgtttgtaactttcacctgcacagtactgctttctcctacattgcctcaagttaaagaaaaaataataacagttttgaataattctgctcaaaaatagtgattcctagtactcaagaaaatctaatctctctaaataggtataaaactggagggaaaagaaataaacagtgccaggccaggcgcagtggctcacacctgtaatcccagtactctgggaggccaaggcgggcagatcacttgaggtcaggtgttcgagactagcctggccaacacagtgaaaccctgcctctgccaaaattaaaaaaattagccaagtatggtggaacgcgcctgtaatcccagctattggggaagctgaggcagggagaattgcttgaacccgggaggtggaggttgcagtgagccaagatcgtgccactgcactccagcctgggcaacaaaacgagactcctttaaaaaaaaaaagaaaagaaagaaaagaaagggaagaaaggaagaaaggaaggcaaggcaggcaaggcaaggaaggcaggcaagacaggcaaggaagggaaggaagggaaggaaggaaagaaagaaagaaagaaaagaaagaaacagtggcagaactgacctataactcactaagaaattcagaaggctatcaaaaataatcttaaaaactgccaaatatttctcccaagaaatcatatcattttgtgctctaaccaacatgcataagagttccagttaatctatgtctttgccaattcctgtaagccctttttgagccattccagtaaatatgagctatctcattacgtttaaattttcatttccctgatgactgattttaaacatcttttcatatgcctactggccatctatatatcttcttttgtaaaatttctgtttccattttttgtttttttttttgtttgtttgttttgagacaggatctcactgtgttgctcaggcaagcgtgcagcggtgcgatcacagctcactgcagcctccgcctcccaggctcaagctatcctcccacctcagcctcccaaacagctaggactacaggtgcatgccatcatgcccagctaatttcttgtatttttttattttgtagagactgggtttcaccatgttgcccaggctggtctcaaactcctgggctcaagcaattcacccacctcagcctccaaaagtgctggcattataggcatgagccactgcacccggcctgcccttctctttatggggttattttctcattatgaagttgtaagagcatctttatgtatatattatacattcaagtcctttttcagatatatgtattgcaaatattttctccaaaactgcttgccttttcattttgagtctttcaatgagcagaaatttttaatgttgataaagtcaaatttgtccattttttccttatatagttaattttatatgtactgtctaagaaatctttaaaccaaaagtcacagagattttctcctatgttttcatctagaagttttatatttttaaattttacttttacatttaggtcaacaatccacttcaaattaatttttgtatatgataagacataaaagtcaaggttcactttgttttctctattgttccagtattatttgtttaaaagattatccttttcccatgaataatctcagcacctttgtcaagaaatgtgtatgtgaacttttctggaatctactctgttcaactgatctacatcatgtgacccaacaattctactcaaaggtattgaataaacagaaacaaaaatatatgtccacaaaagtcttgcacatgaatgcttacagcagctttgttcataacagacccaaactgaaaacaactcaaatgcccaccacactaataaagaaatgtcatatccatacaatgtaatattagtcagcaataaaaaagaacaaattattgatactagtaacaacagggataaatttcaaaaatattatactaaaagaaagaagccagacacaaaaaggaatacatgctatatgactgtatttatatgtaatcctagtataggcaaagcatatagaaagcagatcagagattgcctgaaaccaggtttggggactgactacaaatgggcatgagggaaacttttcataaagcgagtgttctaaatcttggttgttgtgtttacaagaaggtgtgtgtttacaagaaggtgtgtgtgtgtgtgtgtgtgtgtgtgtatttctcaaaagtcaatgaaccgtacatttaaaatgggtagattttattgcatgtaaattatactccaataaagctaatttttaaaagtaatataaaaaaagtaatataaatagcctctgatttagaaatatcagtatgtaaaatgcaacctacctttaaaaagactcaaatttattttgattaagctagaggacagcaacagaaagagtacatcaacttcaggaattagaactttttagaatgagaggcagaatgacactgtatagaacagcactgtctaacagaacttttgcaataatgaaaatgttctgtatctgtgctgtcttaatacagtaatcacaagccacatgtagctactgagcacaagaaatgtagctagcaaaaacaactcagtaaatttattttattttatttacatttaaacataatgatagctacatgtggctagtggctacctacactggataacagatatctaaaggatatctatctatgaaaaaaaaaatctgctgggatacaatacacatgctccctagtcaggtagtagaaatgggtacatccttagaatagagcataaaattggaacagagaaaaggtacagtaaaaattagagacttcacagctgtcaaaatatatactaaacatattttcaactacatgcagttttccaataaattcttgccatgcttgattaatttgcttctgtcattagattagaaagaaactacaattctggatatatttctaactaagaatgaggaacaagtttgagtggaaatgccaggaaacagggagaaagtgttcacataattttagagttcacgtcagacaaggaaggaaatactggcgtagttagatatgatacagatcagtaaaacagatttcaaaagcttcatttaaataacaggctatgaattcataactcaacctataatgaaagacttgtggttttaaaaactaaaattctgtataaacaactacaaatgactccagtttaaaaaagacaaaggaggaaatacacaaattatctaaaatcaaccaacacagctgcagtgaatttaccttcaaagctcagattcaaaacgtacatatatatattataatagccaaaaaaggggatgagagataattacagatgaaacaaaacagcagcacatataaaggaacatgaaaatagtaaaaacaaaaggcttggaggaggggagaatgttcacaccaaaaagaacaataaaaaaattaggccaggtgcagtggctcatgcctgtaatcccagcactttgggaggccaaagcaggcagatcactagaggtcaggagttcaagaccagcctggccaacatggtgaagtcccatatctactaaaaatacaaaaattagccgggcatggtggcacatgcctgtagtcccagctactcaggaggctaaggcaggagaattgcttgaacctgggaggcagaggttgcagtgagccaagactgtgccactgcactccagcctgggcaacagagtgagactttgtctcaagaaagaaaaaagaaattagactcccacacattaaacagctatataatgctaaagacaaggaaaaaggcaggaactcttaaattcccttttcacttttatcttctctatccaaaagaagatgattcagtaagtaaggagtagtgggtacatgacagttctctttattgaaagcatttcctacttgctaatttaagcaaggtgacttttaaagaatatttcttaataaacaatcaataatgcaaaacaaaagataacccaccaagttctttatgctattattgtttcatctgaattttgtagtcacaaaattcaaatggcaagagaagcagaacattagacaactgtctgaagaaagaataaaattggtttcctgaaaatcattaaggaaaatacaaacaaactaaaagaaaaataagttgaaaatagggtcagtatatacatacacacacaccagaaagtacataagaccaatacatcaaaaagtcgctaaacctcacaattaaaaaaacacgatcaaataacaagataccattttttgccaacaagctataaaaagttaaagtttgaaactattcagtttgccaaagttagtggggatagaaggaagaagcactcttaaacagtgagtatataaaataccatttttgaaggcactagtttaaaccatagacgcaatggacctagcaactccactgctaagaatttgccttaaagatatacttggaaaagacaacaagatacatatgtgaactgttctcaatgacaaaaaaaaaactggaaacaacttatatattcatcataggggcctattaatgatagcatgatcataaaatgaaataaaaggtagttaataaaagaatcaggtaggtagatgtccacaacaatatggaagattcctcagatataaaatttttgaaaggggccaaacagtggtagtatgttcccatttgcttttcttaaaaagtgggtaaacaatgaaaacaattttcaaaagaatatgtgaaactttaaattacagatatagttaggaagagggtaaaataggagaaatttgtaggggatatttgtcatcttcaggctgttaggcaaccaaaataccatttcaatttggagataatttcaagagattagaagcagatacttctttcctcatctttctcttaacacatgtacaggcctgataccaactattaatagatctttttgccgtggataccgaatcctagtgaggacaaggtacaggagagtcagagattattcctagagatcaccagaggaggtgagttaatgagcagagtcaccagtttcgaggcatagtggcagcagctattacaccaagtgtccaagcagcaaagtcctaagcagattgctcctgttgaaaccttggggccatgtcttgcttcccttagcttccacctatcttccaagtcttgttgtcaaactatgacctacctaatacttttttaaaaattcctttctgattaggtaaatcagagtcactttctatcatttgcaaccaagaattctggtttcttttacagcattttcccataattttgtttttagtgagggctggtgaaaccatgctcttttgtgagctccctttaatatttgaactttatgatttcttacctaccactgtgaacaactgtgagacttgcaggagaataaacaatctatttaaaagaaagtattacaacagtttaaaaaggggatgaggttatgttctctcaaagaacttgactataacttagggaaacattcaccatggctgcccctcccacttccttctctttcctcccaaggatttcatgcccacagttggctgattgccttataagtctgacacaatggaaaggcggaaaaaaagcaagaaaacagcactttccaaagggaaatgggaaaatttgcctatagatacttggaaagtagagactaaaaaagtagataaacaaaagcagagaggtaatactcccaaaacttggataatctagactacaaatctttctaatataaacataccttacttccaataatttcaatatataaacatctaaacccattaatgactcacagatttgagaacacagtctttttttttttgtactttgtgtgtaaattatacttcaataagcctaactttttaaaaagcttcacatgctgcaaaatatcccttatgggcagacctcttacctgggcaaggaaagagagcagaaaaaagaaacaagcacaagaatgtggggctacttaagggagtgtagtagtggggcactgacagcacagacctcggtatgtctttgtgaagtctggcggtcttggggattaagaactggcagctctgattgttagtctggagcagcttctacctccctgggaggccactgtgctctctatcccacccctgagggattagggaaggaaaagcatagcaggcttgcccagggcctgactacgacccaggtaggtggggacactaggtacctgccccagcagagatggctttcaggtatacaggttgctgcgccttctgaaactcacagggcagcactcagaccatgcaggcccaaagccctgatgcctcctgcaggttacacttcccgacacttgcaaaaggctagcacgagaagcacccataagcagggtgagaaaatctgtcttcattttttaaattctttactttcttcacagttcctatgaaacagatctaaataagcttcaagaatacgttttaaaattatttttgacaaaataataaacatatacctttcaaatgataaaataaaaaaagtttggaataaaaaatttgtctaagagctgggtgcagtggctcacacctgtaatcctagcactttgggaggctgaggcgggttgatcacctgaggtcaggagttcgagactagcctggccaacatggtgaaaccctgtctctactaaaaatacaaaaaattagccaggcatggtggtgcacgcctgtaattccagctacttgggaagctgaggcaggagaattgcctgaacccgggaggcagaggttgcagtgagccgaggtcatgctactgtactccagcctgggcgggcaacagagtaagactccatctcaagaacaaaaaaaaaaaattagtcaaagaaagatggcagaatcagaagtaccaggaacccatctccccacctagacgactgtaagcagaatctgtgattctggaactctggagtctattcaggttttcagtttctaaggaaagacttgaatggtaaatcagttagtttgagtcaatttcagctctttgtgccgtcgcggctacccatcacccactctcaaagcaggcaaccatgcacatgttcccagagcaccctgcacacagtttgtaagagtcaaggttggcaacaaagaccttgccctccaaatatcaggaatctgtgttctgattgctaattgctgcttctgatcaaaatgtgacacagaggcagactatcattatttaactgccattggctgaaaaaattgctccagggatttaaagatccagagctatttcacccctttgatttatttttaatttttaatttttatttatttatttatttattttgccttttaggagccaaacatttaaggaggatactactgcaaaagaactgcatacatagggcaatttagaaagtcactacacatgcccagggaaaaacacaggccgagaagatcttaagattacacccagcatagaaatactctacaacaaataaaaaaaccaaacaaaatagcacatcttagagaaaagagaaaaatctaatttccaaagttaccactctttaagattcaaattccagtttttgacaacaacaacaaaaatcacaaagcataccaaaaaaaaaaactaccccaagcaaaacattaagtataggccaaaaggaaaaaaataaattaacagaaactgtgcctgagaagatcagatggcagacacttactagacatagactttaaaacaaatgttgaaaggtgctcaaaaagctaaaggaagatatggataatgtcaaaaaacaaaattgaaatatcaataaagagaaaacataaaaaaatcaaaaaataaatgctggagctgaaaagtacaaaaactgaaataaaaatttactagaggaattcaaaagccaatttgggcaggcagaagaatcagtaaacttggaaggcagaacagctgaaaataccacgtgtctgaggaacagaaaaaaaaaactgaaggaaaattgaagacaagagcctaagacacctgtggaacaccatcatcaagtggaccaacacatacacactctgggaatcccagaataaaaagagagaaaaggggcaaaaaagattatgtgaagaaatattaatcaaaaacttcccaaatttgatgagacatgaatataaatattcaagaagctcaattaactccaagtaggaaaaactcagagatccaagtaggaaaaactgagatagattataatcaaactatgaaaaaagagaatcctgaacatggaatgagagaagcaacttgtaacatacaaagggatcctcaatatcagcagatttctcatcagaactcttgaaggacagaaggcagtgggatgatatatttaaaatcctgaaaggaaacaaacaaataaacacaaatacctgtcaactgagaatactatatccagcaaaaatgtccttaaaaatgaagacattaagacatttccagattaacaaaatctgagagagttcattatcaccagacctgtcctgcaagaaacgctgaagtgagtctttcaggctgaaataaaaggagactagacagtaacttgaagctgtattaagaaataaagatctgagaaatgataaatacatgagcaattaccaaagctagcattattgtaacattggtttacaactccactttttgttttccacaaattaagacactactgcattaaaaaacaattattagtctacgcttttagacacacaatacataaaaatgtaattttatgacatcaataactggaagggagcagggactgaatcttatgagctgaatttttgtatgctattgaaagtaaattggtataaattgaaattgcagtgttataactttagggcattaaatgtgacccccaatggcaaccacacacacacacacacagaaaatagcagaatataaacaaaaggaaataacaaggaaattaaaacacttcaccacaaaatatcaactaaacacaagtgccagtaaggcaggaaatgagggacaaaaaagctgtaaggcatatagaaaataaacagcaaaatggcagcagttaaatccttatcaataattactttaattgtaaatgataaaactcttcaatcaaaaggcagagtttgacagaatgtataagaaaaacacaatctacaagagattgtatatgctgtctacaagagactcatttcagatccaaagacacaaataagggatgtaaaaagacattctatacaagtaataaccaaatgagagtgcaggtagctacattaatattagacaaactaaatcaaaacaaggttgagacaaaaaagatattacacatcaataagtgtcaatatagcaagaagatataataatcaaaaacatttacatgcctaataagagaccacccaattatatgaagcaaaaaattgacagaattgaaggtaaacagacagttctgaaataacagctggacacttcgataccctactctcaataatggacaaaaacacccagtcagaatataggcaagaaaatagaggatctgggccagacaaggtggctaacgcctataatcctagcacttcgggaggccaaggcgggtggatcacttgaagtcaggagttcgagatcatcctggccaacatggcgaaaccctgtctctactaaaaatacaaaaattagctgggcatggtggcatgtgcctgtaatcctacctactggggaggctgagaccaggagaattgctcgaacccaggaggtggatgttgcagtgagccaagatcgcaccactgcactccagcctgggtgacagagcaacactctgttttaaaaaaaaaacagggaaccaaataaagtatcttctatcacaacaggatgccactgaaaatcaataaaatcaataactgaagaaaaagtagaaaattcaccaactgtggaaattaaaaaatacacggttaaacgcagaagaaatcacaagggaacttagaaaatacttagaaataaattaaaacaaaaaaacacaacatgccaaaaattacagaacagcaaaagcagtcctaagagggaaatttgtagttgtacacatttaattgaaaacgatctcaaatcaataatccaacttcaaatcttaaggaactagaaaaagaacaaactaataaacccaaagctagcaggatgaaggaaataacaaagcttagagaggatataaataatagaaaaataacagagaaaaatcaatgaaaccaaaaactggttctttgaaaaaattttaacaattgacccagctttacctgtattaagataaagaagattcaaattactaaaatctgaaataaaagtagggacattagtatcaactgcacagaagtttaaaaaaaagagaagacagtactatgaacaattgtatgccaacaaattagataatatagattaaatggagaaataacgagaagtacaaaatgtactaatactgaatcacacacacaaaaagaaaatctgaatagacctataactagtaacaagactgaatcaataataacaataaaaaaattccagacaaaagccctagatgtgatttttttatctgtgaattctatcaaacatttaaagaacatcgttttttcccaaagttttgccaaaaatggatgaggaaacacttcctaacacattcaatgaggccagcattgccctgatagcaaagtcaaagaaactacaaaagaaaactatagaccagtagcccttaggaacattgatataaagtcctcaacacagaaccaacaaactgaattccacagcttattaaatggattatacacgaagaccaagtaaaatttattcctgggatgcaaaaatggctcaatatatgaaaaacaatatatcatgttaatagaaagaagaaaacaaatcacatggtcatctcaactagcacagaaaaaatatttgaaaaaattcaacaagattttatgataaaaacactcaataaactaagaataaaaagaaattaccacaacataatgaaggccatatataaaaatcccacagtggccaggcatggtggctgactataatcccagcactatgggaggccgaggcaggtgaatcacttgaggccaagagttcgagaccagcttggccaacatggtgaaaccatgtttctactaaaaatacgaaaattagctgggcatagtggtggacacctgtaatcccagctacttgggaggctgaagcaggagaatcacttgaacctggcgggaggaggagggtgcagtgaaccgagatcgcaccactgcactccagcctgggcgacacagcgagactctatctggggggaaaaaaaaaatcccatagctaacatgatagtcaatggcaaagaattgaaagcttttcctataaggtcagaaacaagacaggatgcctgctttcaccacttccattcaacatagtattgaatgtatgagagagcattaagaaaatgaataaaaatcatctcaaattggaaaggaacaagtaaaattatctcatttgcagatgatataatcttatatgcagaaaacctcaaggatttcaaacacaaaaaaagaataaacaaacccgcgaagaagcagggcacaaatttaatgtgcgaagaatcagttgtgtttctataccctaagaatgaacaattaggaaaggaaattaagaaaacagatttataagatcatcagaatgaataaaatacttaggaattaacttaaccaaggaggtaaaatacttgtacactgaaaattacaaaacattgctgaaagaaaagaaagaatacgtaaataaatggaaagacatctggtgttcatggctttaaagacttaatattgttaagatgtcagtactattcaatgcaatctacagactaatacaatccctaccaaaatcccaacaatgtttctggtagaaataaaaaaaaaaatccaggtgggaggaggcgagctcaggaaaaataactaatgggtactaggcttaatacctgggtgatgaaataatctatacaacagaacaccttgacacaaatttacctatgtaataaacctgcacatgcacccctaaacttaaaagttaaaaaaaaaatccatcctaaaactcacaaagggccctgaagggccaaaaccatcttgaaatataagaagttggggccatgcacggtggctcatacctgtaatcgcaacactttgggacactgaggagggcagactgcttgggctcaggagttcgagacccacctgggcaatatggcaaaaccctgtctctacaagaaatacaaaaactagctgagcatggtggtatgtgtctacaatcccagctactcaggaggctgaggtgggaggattgcttgaacctcagatgtggaggttgcagtgagctaagattgtgccactgcactccagcctgggcaacagagccagatgctatttcaaaaaataagtaaataaatacacaagacatatacttcctggtttcaaattttactataaagctacagtactaaaattagggtggtcctgacataaaaaaacaaacatatagtctaacagaatagtcgagagagcccaaaaataaacccttgcatctattgtcaaataattttcaacaagagtgccaagactattcaatggggaaaaagacactcttttcaacaaataatgctgggaaaactagatattcacatccaaaagtgtgaagctggactcttacataacattatatacaaaatttaactcaaaatggatcaaacacctaaatgtgagagctaaaactataaaaaccttcaggagaaaacatgggggaaagtttcatggtatgaatttggcaattatttcttgaatgtgacaccaaaggtacaggcaacaaaagaaaacagacaagttggattttttcaagctaaatagctcctgcacagcaaaggaaacaatcaacagagtgaaaaagtaacccattctttatgggagaaaatatttgcaaataacatatccaataagggattaatattcagagaatacaaagaacttctttttctttttttttgagacagagtctcgctctgtcacccaggctgagtgcagtggcacaatctcagctcactgcaacccccccaccttccgggttcaagcaagtctcctgcctcagcctccccaacagctgggactacaggtgtgcaccatcacgcccgaccacaccagctaatttttgtatttttagtagagatggggtttcactataccagccagtctggtcttgaactcctaacctcgtgatccacctgcctcggcctcccaaaggcacgagccaccgtgcccagccagagtatacaaagaacttctaaaacacaatttaaaaatcccaaactactcaattcataaatgggcaaaaggcttcaagagacatcattgctccaaagctgatatacaaatgaccaaataagcatgtgcaaatgttcaatatcgctgatcattaggaaaatgcaaattaaaaccacaatgagacttcacacccattaggatggctattattaaaaaaaaacataaacaaaacaacacgatggtgaggatgtggcaaattcggaaccctagtgtattgctggtggtaatgtaaaattgggcagccagtatatcaaacagtatggtggtttctcaaaaatttaaatatagaattaccattcaatccagcaatctcacttttgggtacatatccaaaagaaatgaaagcagatactcaaacaggtattacatacccatattcatagcagcattattcacaacagccaaaagtgtctattgatgaataaatggataaacaaaatatggtatatacataacaatggaatattattcggccttttaaaaggaaggaaatgctaacaactgctacaacatggatgaacctcgaagatagttagtgaaataagccagttacaaaaagatatcacgtgattccgcttatacgaggtacctagaatagtcaaatacatagagatgaaagtagaacaatggttggtactaacaggaggagcaatgaggagttattatttaatgggtgtggtatgtcagtgtgggataatgaaaaagttctagagatggacagtggtgacaattgcacaacaatgtaaatgtactgaatgctagatgttaatgctactgaactgtatgttttatatatatatatcatatatatcatatatatatcatatatatctcatatatatgagatatatctcatatatatatatacacacgcacacacatacacatatatataaaatatattatcacagtaacaaaattactcatctctggccctatttatcttcaaacctttattcctgcttctccccagatgcaatcaccctcaactactcggattctttttcctcctatttaattaggtattttaaaatattattcttaatactgcttcttacagatttattaactacagatgtcctgccatggtaaaggagacttacaaaactagcagtattccatacgtgtttcacttatcttaattcccctaaaatagcaacatcacaattttgggttaactcaaaccaccaatgctaataattgtttcctttttctaatttgctcagttttgcaagaatccattacatttttctccaaatatttcaacatccatctatcaatttgattattttcccggaagttctaatctcctgctccaagcaaaactggtaacttttcagcttgtgtcacagctgtcatcctgggactttcttctttgttgcttctgagtgggattctctgtttactgaagctcttttatttcctttcttggtttattcccttgttttgttgaaccacatcttctgggtaatgtccaaaaaaaatgttcttcatgagcacatttttttagtccttgagtttttccccctactttcacacttgattgatggtttaactggatacagaattctaggctgaatgcagaactttcaaggtgatgttttaccaccttctaccttcaattctactgccaacaagttagatgctattcatattcctaatccctcctaggcgattctaaaaagtttttagatattatctttatttctggtgtcctaaaacaaatttcataataatttgcctagtatagggtttcttttattgtgcttggcactatgtaggtcttttcaatctggatgtttctctcctttgttttctctttatgaatcctgttaattagagacaagatctctacaatgatcctatagcacattttaattgataaaattaacatataacactacaatattgtctaaagcagtctgtacatatacaaataatgtaataactaacatatataggtctaactactaattctatgagttatacagaatcaaagttacaatctcaaaaacagatgagaaatgacaatgaataatctgttcattgacagagacaggtcggacattacacagctccagctgatttttgtcacgcaggaatgtcagccaagtgttggaagatccttcgaaatttcaaaagcagctagaaatatagctttttatgtgaggtctcaatttttaaatataggtaatgtatttcaattttaaacatggtatgaatcaacagtgtgaggtcaaataaagaatattaacaagattagcccaagagttgtacacaagataatatggttcctaaggaaacaacttcggaatctgacagaccagaactcaaccttcagtctcactacttactaaaagtaatgcttggggaagttaacttcttttaaaccatctatgaaatggggatagatttactgtagagatttagtaagattatatacataaactggctatacaacagttacacatgcaaataagtatgtaaataaatgcccaataaatatctcctattattaacatacaaaaaaatgcattggtgtagataatataaacactgtcaaatccactaaggaattaagactaatgaaagaagtaggaggtggccagaacggtggctcacgcctataatcccagcactttgggaggccaaggcaggcagattacctaaggtcaggagttcaaggctagcctggccaacatggtgaaaccacgtttctactaaaaatacaaaaattagccaggcatgtggcgcgtgcctgtagtcccagctacgggaggctgaggcaggagaattgcttgaactcgggaggcagaggttgcaatgagatgagatcgccccattgcactacaacctgggaaacaaaccaagaccccgtctcaagatttaaaaaaaaaaaaaaaaaaaaaagcaagaggcacccaataagaacagggctttcttttggggtgataaaatgttttgaaacttgataaaggtagaggtaacactgtgaaggtaataaatgccacggaatgtacactttccgtggttaaaatggttagctgttatgtgaatttcactttattaaagaaaaaatgtgggaaaaacgaggtaatatgagagaaggagtcagaatatgctagaaacagagaatgaaactgatcattctttcctcttttgaagcctgcctataaataacatctctttaactccttttttaaactgaatagccaatactgatgttagggcaacaaatacttcctttttattgaaaatcaacatacaactaaggttgaaagactgagagatcaacatatttcaaatatttcaaaagaatatttgagactgggagtggaggctcacgcctgtaatcccagcactttgggaggctgagacaggtggactgcttgagttcaggagttcgagaccagcctggaaaacatggcgaaactctgcctctactaaaaatagaaaaattagccatgtacggtgacacacgcctgtggtcccagctacttgagaggatgaggtgggaggatcgctggagcccagaagtcgaggtgaaccatgatcacagcaccaccgtactccagcctgagtgaccgagcgagactctgtctcaaaaaaaaaggggcgagggggtgctcttgaatctattacacagctgcttatacatgggggaaaaagctcacagtgaacaagacaataaataaatctttttcaaaaatcactatatatcagaagactgtactctaaaagcatttccttataatataggactcatgccaccaacaaagaaaagaaaaaggaggtagagggaaagggaaagaacagaaaaggaaaagaaaagcatcatactagaatctcactcttgggagatttacaatgcatagtggcatattaaaggttctgcagtgagaaagacagttcacctctattaaacctccattctcctgatttataagaaacaaacaattcttaagttatgcctcttaaacacatgaagcaccaattttgttaaagactgcctagatttacaccaaataacataaattgaaaaacttcagtatcagcttgagggatgagattaacatacatattggccgggtgcagtggctcatgcctgtaatcccagcactttgggaggctgaggcaggcggatcgcttgagcgcaggagtttgagaccagcctgggaaacacagcgaaaccctatctctacaaaaaacacaaaaattagccaggcctggtgatgcgtggctgtggtcccagcaacttgggaggctgaggtgggaggatcacttgagcccagaaggcagaggttgcagtgagccgtgatcatgcctctgcaccccagcctgggtgacagagcaagaaactgccttaaaaaaaaaaaaaaaaaaaaaaaggtggcattccaagatggtcaaataggaacagctcctgtctgcagctcccagcatgatccacgcggaagacaggtgatttctgcatttccaactgaggtacctggttcttctcactgggactggttggaaagtgggtgcagcccacggagggtgagctgaagcagggcggggcattgcctcacccaggaagcacaaggggtcgggggatgtccctttccaagccaagggaagctgtgacacactataccgggaaaattgggacactgccacccaaatactgcgcttttccaacggtcttagcaaatggcacaacaggagattatatcccgtgcctggctcagcaggtcctacgcccacagagccttgctcactgctagcgtagcagttccaaattgaacttcaaggcagcagcctggctgggggaggggcgtccatcattgctgaggcttgagtaggtaaagtggttgggaagctccaactgggtggagcccaccacagctcaaggaggcctgcctgcctctgtagactccacctctggaggcagggcatagctgaacaaaaggcagcagaaacttcctcagacttaaacatccctctctgacagctctgaagagagcagtagttctaccagcacagtgtttgagctctgagaacggacagactgcctcctcaagtgggtccctgacccccttgtagcctaactgggagacacctcccagtaggggccgactgacacctcatacagccgggtgcccccaagacgaagcttccagaggaaggctccggcagcaatatttgctgttctgcaatatttgctgttctgcagcctccactggtgatatccagacagtgtctggagtggacctccagcaaactccaacagacctacagctgagggacctgactgttagaaggaaaactaacaaacagaaaggaatagcatcaacattaacaaaaaggacatccacaccaaaaccccatctgtaggtcaccataatcaaagaccaaaggtagataaaaccacaaagatggggagaaaacagagcagaaaagctgaaaattctaaaacccagagtgcctcttctcctccaaaggatcacagctcctcaccagcaatggaacaaagctggatgaagaatgactttgacgagttgacagaagtaggcttcagaaggtcagtagtaacaaacttctccgagctaaaggaggatgttcaaacccatcgcaaggaagctaaaaatcttgaaaaaagattagacaaatggctaactagaataaacagtgtacagaagaccataaatgacctgatggagctgaaaatcatggctcgagaactacatgacgcatgcacaagcttcagcagccgattcgatcaagtggaagaaagggtatcagtaattgcagatcaaatgaatgaaatgaagcaagaagagaagtttagagaaaaaacagtaaaaagaaatgaacaaagcctccaagaaatatgggactatgtgaaaagaccaaatctacgtttgattggtgtacttgacagtgacggggagaatggaaccaagctggaaaacactcttcaggatattatccaggagaacttccccaacatagcaaggcacgccaacattcaaattcagggaatacagagaccaccacaaagatactcctagagaagagcaaccccaagacacataattgttagattcaccaaggtggaaatgcaggaaaaaatgtaaagggcagccagagagaaaggtcgggttacccacaaagggaagcccatcagactaacagcagatctctccgctgaaactctacaagccagaagagagtgggggccaatagtctacattcttaaagaaaagaattttcaacccagaatttcatatccagccaaactaagcttcataagggaaggagaaataaaaacctttacagacaagcaaatgctgagagattttgtcactaccaggcctgccttacaagagctcctgaaggaagcactaaacatggaaaggaacaactggtatcagccactgcaaaaacatgccaaattgtaaagaccattgatgctaggaagaaactacatcaactaatgggcaaaataaccagctaacatcacaatgacaggatcaaattcacacataacaatattaaccttaaatgtaaatggggtaaatgccccaattaaaagacaaagactggcaaattggataaagagtcaagacccatcagtgtgctgtattcaggagatgtatctcacatgcagacacacacacaggctcaaaataaagggatggaggaagatctaccaagcaaatggaaagcaagaaaaagcaggggttgcaatcctagtctctaataaaacaaactgtaaaccaacaaagatcaaaagagacaaagaagggcattacataatggtaaagggatcaattcaacaagaagagctaactatcctaaatatatatacacccaatacaggagcacctagattcataaagcaagtcctgagtgacctacaaagagacttagactcccacacagttaatatcgggagattttaacaccccactgtcaatatgagacagatcaacgagacagaaggttaacaaggatatccaggatttgaactcagctctgcaccaagcagacctaatagacatctacagaactctccatcccaaatcaacagaatatacattcttatcagcaccacatcacacttattccaaaattgaccacatagttggaagtaaagcactcactcctcagcaaatgtaaaagaataaaaatcacaacaaactgtctctcagaccacagtaaaatcaaattagaactcaggattaagaaactcactcaaaactgcacaactacatggaaactgatcaacctgctcctgaatgactactgggtaaataacaaaatgaaggcagaaataaagatgttctttgaaaccaatgagaacaaagacacaacgtaccagaatctctgggacacatttaaagcagtgtatacagggaaatttatagcactaaatgcccacaagagaaagcaggaaagatctaaaatcaacaccctaatatcacaattaaaacaactagagatgcaagagcaaacaaattcaaaagctagcagaaggcaagaaataactaagatcagagcagaattgaaggagataggacacaaaaaacccttcaaaaaaaaaatcaatgaatccaggagctggtttttttaaaaaacaaaattgatagactgctagcaagactaataaggaagaaaagagagaagaatcaaatagatgcaataaaaaatgataaaggggatatcaccactgatcccacagaaatacaaactaccatcagagaatactataaacacctctatgcaaataaactagaaaatctagaagaaatggataaattcctggacatatacaccctcccaagactaaaccaggaagaagttgaatccctgaatagaccagtaacaggctctgaaattgaggcaataattaatagcctaccaaccgaaaaaagtccaggaccagacagattcacagccgaattctaccagaggtaaaaagacgagctggtaccattccttctgaaactattccaattcatagaaaaagagggaatcctccctaactcattttaggaggccagcaccatcccgataccaaagcctggcagagacacaacaaaaaaagagaattttagaccaacacccctgatgaacatcaatgcaaaaatcctcaataaaatattggcaaaccgaatccagcagcacatcaaaaagcttatccaccaagatcaagttggcttcatccctgtgatgcaaggctggttcaacatacgcaaatcaataaacataatccatcacataaagagaaccaaagacaaaaaaccacatgattatctcaatagatgcagaaaaggcctttgacaaaattcaacagcccttcatgctaaaaactctcaataaattaggtattgatggaacgtatctcaaaataataagagctatttatgacaaacccacagccagtatcatactgaatgggcaaaaactggaagcattccctttgaaaactggcacaagacagggacgccctctctcaccactcctattcaacacagtgttggaagttctggccagggcaatcaggcaagagaaagaaataaagggtattcaattaggaaaagaggaagtcaaattgtccctgtttgcagatgacatgattgtatatttagaaagccccactgtctcagcccaaaatctccttcagctgataagcaacttcagcaaagtctcaggatacaaaatcaatgtgcaaaaatcacaagcattcttatacaccaataacagacagacagagagccaaatcatgagtgaactcccactcacaactgctacaaagagaataaaatacctaggaatccaacttacaagggatgtgaaggacctgttcaagaactacaaaccactgctcaacgaaataaaagatgacacaaacaaatggaagaacattccatgctcatgggtaggaagaatcaatatcgtgaaaatggccacactgcccaaggtaatttatagaaacaatgccatccccatcaagctaccaataaatttcttcacagaattggaaaaaactactttaaagttcatatggagccaaaaaagagcccgcactgccaagacaatcctaagcagaaagaaaaaagctggaggcatcacactacctgacttcaaactatactacaaggctacagtaaccaaaacagcatggtactggtaccaaaacagagatatagaccaatggaacagaacagagccctcagaaataacatgacacatctacaaccatctgatctttgacaaacctgacaaaaacaggaaatggggaaagggttccctagttaataaatggtgctgggaaaactggctagtcatatgtagaaagctgaaattggatcatttccttacaccttatacaaaaattaattcaagatggattaaagacttaaatgttaaagacttaaatgtagacctaaaaccataaaaaccctagaagcaaacctaggcaataccattcaggacataggcatgggcaaggacttcatgactaaaacaccaaaagcaatggcaacaaaagccaaaatagtcaaatgggatctaattaaactaaagagcttctgcacagcaaaagaaactaccatcagagtggacaggcaacctatagaatggaagaaaatttctgcaatctacccatctgacaaatggctaatatccagaatctacaaagaacttaaacaaatttacaggaaaaaaatcaaacaaccccatcaaaaagtgggcaaaggatatgaacagacactttccaaaagaagacatttatagacatttatgcagccaacagacacatgaaaaaatgctcatcatcactggccatcagagaaatgcaaatcaaaaccacaatgagataccatctcacaccagttagaatggcgatcattaaaaagtcaggaaacaacaggtgctggagaggatgtggaggaacaggaacatttttacactgttggtgggactgtaaactagttcaaccattgtggaagacagtgtggcaattcctcagggatctagaactagaaataccatttgacccagcaattccattactgggtatatatccaaaggattataaatcatgctactataaagacacatgcatacgtatgtttactgcagcactattcacaatagcaaagaattagaaccaacccaaatgtccatcaatgactgactggattaagaaaatgtggcacatatacaccacggagtagtatgcagccataaaaaaggatgagcttcacgtcctttgtagggacatagatgaagctggaaaccatcattctgagcaaactatcgcaaggacagaaaaccaaacaccgcatgttctcactcacaggtggcaactgaacaacgagaacacttggacacagggcggggaacatcacacaccggggcctgtcctggggtggggggttgggagagggataacattaggagaaatacctaatgtaaatgacgagttaatgggtgcagcaaaccaacacggcacatgtatacatatgtaacgaatctgtaagttgtgcatatgtaccctattacttaaagtgtaataaaaaagattaacatacatattacagaataatcaattatctgaataaaacactgtttcatattaccagcatgtcaggacaagagcttagcagcaagaaaggaggaaaacagcagtagtaagaggaaaagaagaaaaaaacaatttgggaatagttagcttctatgagatgtggctttcttactgtcaattccaaatgctatatatataagccaaactgttgcaatcaagatagtaaaaaacagcaacaataacaacaacaataaaaaagagtaaaaaaattacagcttggttcacttttccctcactttcttttggcttattttttacattaattcccaatcgtaggcggtaacctcaaaaggagaagttaaatatttgtctcaaaaggactctgagtacctcaagtataaaacttcgcattccataacaaatcatatccctcaaagttaaataatactgatcaatttagccaggcgtggcggctcacacctgtaattccagaggccgagacagatggatcacccgaggtcaggagtttgagaccagactggccaacaaggtaaaaccccatctctactacaaatacaaaaatcagctgggcgtgggggcgggcatctataatcccagctgctccgcaggctgaggcaggagaatcgcttgaacccaggaggcagaggttgcagtgagctgagatggcaccactgcactccagcctgggcgacaagagtgagactccgtctcaaaaaaaaaaaaaaaaaaaaatactgagcaatgtaagcttgaaggtatttgcaatctgagtttattttagtcaaagcaatgatgtagtacaacaataacaaagtctaatctctgcagagtattttccgtttggggaaaaatcacaggaaaaatatgcagtataagagaaaaggaaaattttaaatattctttgggcattctaatagagagggcaaacaaaaatccaactgaaaatactttcgttaacagaaaaattaagtatacaaaaattttaaaaacatttttcactgtgacactatcatctttgaaccaaaaaaggaatcactactgattactaatatcctcaatataatgtgaaccaatcaaggaaattaatcacttaggtactaggcacagccattctcttggagactttaatcctaacaggcaaattacttaggaattatttatttccattttagttgatagaaaaaaacaatacctttatttctggtcactgttcatcctttctctcataaaagaagaggaggggcctgggcaatagaggctatcaaagctttattggccaattatcccccaatcaaaaaagaatgagacaaaaggaaacaaggacagcatagctattatattcagcagataattcttcatgttgacatgctattaatagtatcataagaggtgacaagatccatcggctaaaagaaccactggctaaatattaatcgggatacataaaacatttttttttaagaaatggcatatttgaagaaatcatatggctagacaaaacaaactagatagattgtgaagctagatagactaaacctcagtcttgattactaattacaagctgaatgtataaatcttttccttcagaggcataaaggtaagagttatgaatcaaatggaaggaccaaaatgcttcccaatgaagtattttcttggtgaagttattgcaatctaaggtctgaaaatcagctgtacaggaactttatcagtaacctaaaagatgatcaatcagcctcagtgactaacgacactgagaagagaccaacgtaaaaactagcacaccagattaatttaccacaaagatattctcaccataatcagaaaacctgccctctattcagagtattcactcttttttggtatgagtactaatctggctgggttgaattagtgcttagttgaatacagaattaaaataatgtgaagtaggtcatcttgtgggatatatcatgcaggccataaagagacccaataaacacttctgtaccataggagaggatacacgtctggtgactgtactgctcacttcccagattcaccatcttccttaattcaaaatgtatctttttcttttttctatggctcattgctttttctttagaagtgttatcacaagctatatcaacctgctgttcccatcagcttgcaatgttaagcatccttctactgtgccctgcctaactatgagaagataaattcatttctctattttcagcttcttaaacagtccttctggcatccctatgtaccagctataattttaatagaaactataaaaactagggggattttttgtagtttttgtaggtacaaaaatttgattttcaatataaatattacaaaattctaaatgaacacaactcaatactacagaaaattgtaaatctaccgtggttcaaagcaagttgctaaaacttatggctagctcatgaagaatgtaggttgtcttatatacttacacaactattataaaaggagtctacatctgcataatgctttataagttacaaagtactttcccatccattttaacatctaattgtcataagcaccaagtatttaaattgaaagtctccaggaaagatactaatgaaagagtgtaaaggaaataatccacaacttaaactttttttttaagagatgggttctcgctgtgttacccagactggcctctaccctctacctgggggttcaagccaagtgatcctcccacctcagcctcccaagtagctgggactacaggagcacaccacaatgcttgacctgaaattttaacttttaaagccattaaggttcttactgacaatttacagttgatttattaatacacatatatttttgctctgaaattagcaaatatgttaagactatttgcacatcagacatgaattcctttcataaaatacgccacgaattcttaaggttcctactgacaatttacagttaatttattcatacatatatatttttgctctgaaattagaaaatatgttaagactatttgcacatcagacatgaattcctcctttcataaaatatgccatgaattcttaagactgtatattttaaaaataatatttacatgggccttgagaaataaattgttctaaactaaatgataatcgcagttagaaaattatgcaaaattataaaactgattagccttggtacacccagcgattcctttctatatctcttgtaccaaccaaatacttcttcaggtagttggtatacatatgcacagtggtaccttaaaatttggtctacataaaaatatacagtattagtcatctacatcttagtgtgaataaatttaactgaataaatccactctaggattttaagcctaatccccaactatgaaataagacaaaaatcacactgtaatggaatccaggtattaaacctggtgaccagcattttatggagtccaggaaatgatatcacataagtacctgattatgtaatgtataaggtcagttcttatcaaatgaactgtatccccctgaagtccattaggtacggtaagccaaaaaatgattatagagcactacaataatagtttacatcacaaagtatctttttctgtggcttagaaatcttttctaaatgaaaacacaacatgaatataaacatcaatatttgaaatagaaaatcaaagcattcttaccttactacatcatcaatattgttcctgtatacgccttcaagtctttctgcaggaaatcccatagcaataatgtttggataaatatctgagtactttagttaaggaaagaaatatctgaaatatgcagcaatcaaactaaaagaatactttttaaaacattagctagttatgaaaagaaagttttccccactatagctggagtaataaaaggtggtcaatgtatttatgtataaccatttatgtgttaatactggtaaagataaaaggtaacttccacatggacagtattcaggtatatgagaaaaacagaaactcacggtttatacatcacagaactaaagtactttatgtcaaaaaccaaaaatcaaaacaaaaccccaaaattgacacctgcctgaaaagacaagagttcaacttctaatttttcatggctaaaaaaggcaacacgttacagaaaaaagaagacacagtgaaaatctggaagtcagatttaagagctggctatgtctctaactagttgtgtaatttggacaagtcacttaacctttctagaccgcaatttcctattctacatgataattagactcaaagagattactactaaggtttcttccagcccttgctatctatgacttgataatactgaactgaggcagaaacttcatttattattactttcaatcaaactacagttggccaatgaacaaaaccggtttgagctgtgtcggaccacttgtatgtggaccttcttctacctctgccacccatgagacagcaagtctgacctttcctctctctcctactcctcggcctactcaaagtgaaggcagtgaggatgaagacctttatgaggatccacttccacttaatgaatagtaagtatattttctcttctttatgattttaatatttttcctgcagcttactttattatacaaatatgctatctgacacatatataaaatatgtattaacgaacattatgtcatcagtaagacttctagtcaagtataggctaaatattaagttttggggagtcaaaagttacatgtgaattttcaactgcacaggggtaggcgcccctaccctctgtgttgttcaagggtcaactgtcatggatatttagcatgcccattatagtgaattatgttacagactatagctagcataaaaacaaaactctacacacaagaaccatttataaactataaaaatcatcaacactctacgcttttatgattcttacccactcatcataccagctctcattttttgaggtacctcaatctaatctcatgattttctgacagacctttcacaccagcccagtcaatctgcctaacgcctcatttcaagaccaactccaataatctctgcccactcacttctggactcatttatcttccaaataaaattcaaagttgacctaatccaatgccctttttctaggtctttttctttctgcagctttcacatgattgagttgatttcagtagtattttcaatccaaaaataattatcaagttactgaaagctattattttaatagcatagtttaagaaaaggttatatgtatatgttctatctataagataactatgtgctaactggagagatctactgaatattttaaggaaaaaaacccacccaatagagtatactgggtatatctttcgtatagggatgacaaaaagaatgttaacccatatatttgcttgaatgtcaacatcctcaataaacatatgcatgcatgagtgataaacaagaaactaataaaaatggctgcttcacagagaaagggaagaaaaggggaaaagcatagcaagaacaggtagcagcaggactcctgtgtatatctttatatatttttgatcttagaataatataaagaaaaaaaagacttataatctaataaattgaacactgctagaaacaaaactgattaaatgtcaaattggcacccaggagaaagagaaaggttttgttacaagggctatttggacactgcacttttactgcacttcttggtaggaagtattctaagaacaaaaaaacactaggaagaaactttaaacttcttttggtagttttactgattctagtaatatcattattgatatcctcaaactattttcttttttttttttttttaaatagagaccaggtctcatgatgtggcacaggctggtctcaaactcctgggctcaagccatcctcccaccttgacctcccaaagtgccaggatgacatgcatgagccactacatccagcctcctcaaactattttatcttttttttccccctgaaacagggtctcactttgtcacccaggctggagtgtggtggcatgatcatggctcactagagccttgacctcctgggctcaggtgatcctcccacctcagcctcctgagtagctgggaatacaagcacatgccaccatgcccagctaattttttgtaaagacaaggtttcatcatgttgcccaggttggtcttgaactcctgagctcaagcaatccacctgcctcaatctcccaaagtgctgggattacagtgtgagccaccgcaccaggactattttctttatgttgtagaaataagcaaagaagttatgctaatgactttaaggttcataattttaagttaagaaagcagataatattgtaaaatcaagaaatcatgtaaaaaactaaaaatatcagtatgaattcatgtttgtaaaaatctgttttctaggtcttttctctgaaatggcctaaaagcaacatcactctagcagtaataaacattcctagaacacagattttcatctctaatatcataataaactaaaaggtaccaaactccttggaaaaagacttaatgccaggtctggagtagggaaggtacaggtgagcctaggataccttttcattccaagagaaggaggaaggcttatagagattaatggcctatatcaaatggacataggaggtggtataaaggtccaaatgactagctgtgataatctgagcatcaaagaaaacatttaaatggtactaacaccctgaattaaataaaagtccttgagtctataaagacactcaaaagaaaaaagttaaggccggatattgttggtcacgtctgtaatcctagcactttgggaggctgagatgggtggattccttcagcccaggagtttgaggctaggctgggcaatatggcaaaaccccatctctacaaaaaatacaaaaaaattggctggccatggtggtgtacacctttagtcccaggctgaggtgggagaatcatctgagcccagggagactgaggcttcggtgtaccatgattgcaccacagcacaccagcctgggcaacagagtaagaccccatctcaaaaaaaaaaaaaaagttgaaacaactaaaaataccctttttatttatcatcttttgaggtggttaacggaatagttcttcactttgaaaaatggtaaagagtgagatttaagtatttattttgtctttcctatagagactgtatttaaagacaaacaaatagtcccatttcacaagttctaccttatcaaaaaacatcaattaataatgtaaaacaatagaatttaaagtcttattttgcaaaccctgatgaaattactgatatactcaaagatcaacaaatggtgttaaaccaataggtgagtggttgatgagaaaatgaactttcttacagcaccaaaatactactacccaaaatactttctaatgtaaagagacgaatataattgaacaatgggcagaaaagactgtcactgtccaatttcagtggccatctcctcatcatgaatcaagtaaagatcatgtaacttctgacatgcaatataaaggacacagcatcatctatgatggttaaggatcttcaactcaaatccaccaaggattcagatacaaattttaatttgcaggaaatacataggataaaacaagctaaatgacactatgagacagcaaactggacaaattcagacagtttgtaggacatgacccattctctcttcaacaagccagtatctttaagaaaaaaaaaaggtgggggggtggtgggaggtgggggaagcgggaggatgggttgctgcccttgatttttaaagatacaagattcctaacagccaatttcataggtgcaatgctggcctggatactgttttagccaaaccagccataaaggacatttttgagctaattggaaacattttaatgtgatccgggcattacacaagatgaaaagttactgagatggaaaagtagatgtaaatgactaaaaaaggcaggtttcaaaacagaatgtacaatgtaataccatttggataaaaagaatacgtatatatccatatagacatatatagacaaaagattataaagtactaaaagtcatatataggtggtggcatgtatattttttctcatatttgcttgttttgtatcttctatttttgccacaatgtacctgtatcgtttctgtaacaaattgcttaaaattagatgttttataattatctatttactaattgccatgacaaaatgctgtcttgccctgtatgtagaaaaagctctgtatgcattttttaatgccaaatttctaccaaaaaattatactaataaaagcatctaagatttaaattactatgccccaagaacattttttgtcactttaggaacatacaaattcaccctcagcctcaaagggtttttattataaagattctaaaagaaaactattaggattatcattttaacatcacaaatatttgctgtcatctactactctcacataagaaagctgccccaactcttagccaatctgacattttttttaaaaactgagaaaaataaatttaaaaaattagaagaaagtagcctcacttaaaaatgtagctgttgttcaattatcaaaatgtattgggatattatatccattcattttaaaaaaaaaagcagaagacagcagaggcctaaagtgaaataatcttaactgagtaatcttaactccaccttagaagacaaatgtaagaaaatggaagacgtcagaaaaaatgaggcaccagaagcaatggcagggaacccaaagtggttatagctaccaatactctggaattcctactcaaaattataaatatattttggccaaaaaatataaattcaaatcatctatgttttttgaacaacgcaactaagaatattttattaaaagaaataattattagcactaacaaccttacctaacctaaaccattaatttcagtgagaatagtattaagatttttatccttacagatatgcacagaagtacaaagcccctcccttgaaatgtggtcattctaaccagggctaaacttgaatttatccttgcactataaatactaattaataattagtatttaatgccagcctgggggaacttcaggctgatgtctattttctgctgctatacaataccacagacggggtaatttataaagaaaagaagtttatttcactcacagttctagaagctgagaagtctaagatcaaggggctgcatgtggtgagagtcttctggatgcatcataacatggtagaaggcatcacatggcaaaagagggcatgagcacatgatagagaaaaagggggccaaactccagagataactaacccacacctgcaataatggcattaatccattaatgaaggcaaagcccttataatgtaaccacttctgaaaggttccacctcataataatgccacatggcaatgaagtttcaacatgagttttgaaggaaacaaccaaaccatagcattctgcccctgggcctcaaaactcatgtccttctcacctacaaaatacattcgtttcatcccaatagaccctgggaagccccacctccatggctttgctgtacttagcccatgcagctttcacaggttagggtctcaagcctgaagttctcccaggctggcactgtatacttgtagctctacagttctgaagctttggtggtgggcctgctgccatggctccattatgcaatgccctagtagggactctctgtagtgactccaacccacatttccacccttcagaggctccaagcctgtggcaagtctctcccagactatccccatcatcctttgaaatcctggtggtggtagccatgtctcccacagctctttcatcctgtgagcctgcagaattagcaccatatagacgctgccaaggtttaccatttgagtactcagcagtagcctaagccacacctgggcccctctgaaccagacctaggacagccaaggcccactgggttgaaatatggggagctgaggtagccctgggcagcaagcttgtgaaggaccacctgagccacaaaccattctgccctcctagagctctgggcctgtgatggggcaggcagcctcaaagatctccaaaatgcctctggggtctttttccactgtcttgataaatagcccttgggtctcctctaggaatattaatctcttcagcaaatggttcctggaccacacccttggtttgctctcctaaacataccttttgcattctttactatggccaggctgcaaattttccaagtatttccattctgcctctcttttaattataaattctgtcttcaagtcattcccttcccccagcttagtttaagtggttaaaagtagccatccagtaacctaaatgctctgctgctgagttatttcttctgcagcatatcctagttcatcactcttaaattctgcattccataaagtcttaggatatgaacataatttcgccaagttctttgcaactatttaacaaggatggcctttactccagtgtccagtatcttgttcttcatttctgagatatcatcagaaagacctttaccacttatagttctaccaactgatgacaactctctaagaagttccagattttccctacagctctcttcttctgaatcctcatcagaattgtccttaatgctctattctcagcaatacaggctttttctagcctgttcatccaaactcttccatccttctctagccagaacccaagccatttgaacattttcaggtatttgttatggcaacaatcacactcttggtaccagttttcttagtaaattttatgttgctttactagaataccacaaaacaggtagtttagaatgaacagaaatgtatttggctcacggttctggagactgggaagtccaagagcatggcatcagcatctggcaaggatctttgtgttgagttaccacatggcagaaggtaaggaagcatgtgagacggaggaggccaaactcccaagataactcatccactaccattcaaacagcattaatccattcataaggatagagataccattatctaatcacctcttaaaggttccatctcttaataccattacaatggcaattaaatttcaacatgagttttgtaagagacattcaaagcatagcagcaaacgttgcaaaggatttaactcatttcagacaagtctataactatacataaatgggtgttacataatcattaaagtaaattcagctggccccctccttcattcacataatcattcaaacatatattgaacgttttgcacaaggggcactgagaatataaggctaagtaagcaaagactactgtcctcaaggctttcctattctattagggaagacagacacacagacctataattgtgccaaagacccgattagataaaaaataagatagcttaagagttaaagagggaaggattaattctgtggggacacagataaaccttcaccaagtaggtaatatattagataatccttaagagttaagtcagaaaccagtaaacagaggaagaaacaagagcagttagaacattccaagcaaaggctaaagtagacatatggaaatacataaaataatcagcaaaaagcaaacagtccagtgaagcttacacacaaagcaacatggagaaggcaggactgacaaagtaaggtccagctttaaggatgccacggcagcgaattcaatttaatcagacagataaggagtcaaagaccaggatcaacatggaagactttgcagagcagcaagtcttgttcgtgagctatttactcctttaaatggagtccaggaattcaatctttttaaggtttcattttcttcagattctcaccttccttactgataaagtttgagatgttacccaagacatcggcatccatcctaagttagaaagatgtagacaactagtacctgttaagtatcatgtaccagacagtatgccaaatatattctcatttaatcctaacaatcctaaatagtattacatttcatagacaaagaaattgagagtcaaaaagactgggtaatttgcccaagttagtaactagtaagttataatttgaacccagattatatacgaagctccaaagcccaagcttttgacaccatactgcccaacgagaggaaattaaggtttttctatttccaaataaaaatataaaactttcaaaggaaacaggttcaaataagtgatttactaacctgtaattacatttactaataaaatgtaaaaattgaaaaaattccaagacagtatgaaaatttactgacatttccaaaagtaatgccagcaactacctaaacaagcaccaaatcttgaggcaaatatttcttatgccacaaattacacaaataaacaaaatctttctaatatacatttatacttctccatatattataaaatttgacattttagaaaaactaaacaacataagaactgaggaatatatatacatataatgatttctgatagaaaacagccttaacctacacttacctgatattcttctgaataagttgagtgtttaatacgaaatttacatataatgacataagtattaagcataaagatttataacaaccaggtaaccagaggaagatgagtatttctgacatctagagatctacttgcaggcactacggcataatggttaataacatacactctagaaccaacttgctagaattggaaccccagcttaacttattgtgcaaccttaggcaaaatacatactctttctgttgcttcctaagcagaatggggctaataaaggtacctatcatataaggttgctatgaggattaaatgagctaatatatgaacaatgcttaaaacatagtgatagctgtctctcaactgaacaaatggtaatgccttatcccataagaccccactgtaactacttttctttcaacgacagtgacttgtggaataatctaaactttctaaagaacatcaaagcttaacaaaaagttttactctttgaaatccttaatgtatcaatttgccttttaagtatttactttattataacttaagaacatatctaaaatacaatcccaaaagaaaaaaacagtgtctctgttttagatttgggaacactaaattttcagtatgtgtttgcttatttgtattttctaatatttctatgatgattacaaattactcatgtgattttaaaaatgccatatgctagcacaggtatgtatcccttatgatgaatgtcatctttttattttatcaaatatgaatttatagttagctattattcttgggttaataaactaacatttatttttaaaatagagcttatgacttttactattttaaaagtaaacatggccaatataggaaatgagagagataaatataaaagatactaatacaaatctagtgttcaatggtaatatctattaaacttcttagatttctatttctttataactaatttttgatggaaataaaaatgttggttacatagtgattactgtattataaatacaatatatcccattacatttttcaaaaatttattatattttcctgatacgaaacttgggaatacaattttaaatgacaatataacattatattgatgggtgtaccatggttaatgaaccattttactactattggacatttaactagttcacaatttttaggtattatgactaacattgcaacaaacacctctatgtttatgtctttttaatgttagtggtcatttatttaggaatcaggctacctgtgttcaaatcccagttctaatactttggccatgggcaagtcacttagcctctctaaacatcactttccccatctttaaatgggaataattctagtatgaactacatagggttgttgtgttgaggattaaatgagtccaaagtatataaggcacataataagcactcaatatatactagcgataaaatatctcctgaattattaaaaagttctttttctcataatatcagtgattactgtatatacaataagaaaggtaaaagaaatgcatacatggtactagctatcttgcctaagttggatggtcaccccagctccaacagatctcagatatattagacagtttccccccacctttgtgtaaacatgctaaatttgttttaattgaggtataattcaaataaaacaaaatacacagatcttaagtgattagtttgttttgactggtaaactgcatatgccatgtttggacagtcttgatttaggtgttacaagaatcctttctcaccaaagaacaaataccgtcccaaagaaaaaatgtaattaatagcaattaagttctaaagtctgtccacaaaaatcaatttaatccataatataactaaactatatttgaaataatgtggctgttttaccagctaagtaaatttttattgcctgttctaggcatacaatcatgacttgaaacactagaaatatgttccaagttacatctaaataacaaaatatcttttcttgaacaacttccgagttgacatccaaataatgtatctaccttatctcaaatctgtacttgcatctaaattaatagggtatatgctagaaatttaactacaattttcaagtaggatatagtaactaaaaatagctccctaaaccttatttcataagactgtgttcctgacatgtacactaaatcttattttaactatgatggtttgctaaaaataaagccattgtaaaagtttctttgtagtgcttaatatataggtatgcttatccttaaacaacttataaagtaaaatgcaataactacttttctgccatagaataattatttccacagatcacagatattttttaaattatagctaagtaaaagttgcagtaacaatatgaaactataacatatacatgaaacattaatgataaaatgaaagtgataatacagctttagaggtaatgaacaaagagcatcaaaagcaaagtctgaagctgcctggctcataaaacactgagctaaaccagtagccagggtgaaagaattaatgaagtcagactaagaagaaaagataacaggaatggaaggcaagttagcagataccaggactttatcatttaattttatttcgtaggaacttctggagctttttccctgatttccatcagtgctttcaagtaacacacagttagggttcttgtgagcaaaaaagaaactcaaccactgattcataagttacatcacatttacatttcttttcaaaattttaagtttaaacaagtattttccaattatgtcacagttaaatccttattatcaacttttctaatgaaatcatgctttaaatacaaatctgatgaacttctatgactttctcatttaatcaaagattttacatttgttactaggtttttttttcctattaataagctatgttgaattgttaatgatggactctcatttctaaattgaagattcatattgagcagaaagcagaaagagcagttccttgaattttccagttgaaaaagtgccaactgttcattatttaagaacaatttgtcctaaagagcttctgcacagcaaaagaaactaccatgagagtgaacaggcaacctagagaatgggagaaaacttttacaatctacccatctgacaaagggctaatatccagaatctacaaagaacttaaacaaacttccaagaaaaaatcaaacaaccccatcaaaaagtgggcgaaggatatgaacagacactactcaaaagaatacatttatgcagcgaacagacacatgaaaaaatgctcatcatcactggccatcagagaaatgcaaatcaaaaccacaatgagataccatctcacaccagttagaatagtgatcattaaaaagtcaggaaacaacaggtgctggagaggatgtggagaaacaggaacacttttacactgttggtgggactgtaaactagttcaagtcagtgtggcaattcctcagtgatctagaactagaaataccatttgacccagcaatcccattactgggtatatacccaaaggagtataaatcatgctgctataaagacacatgcacatgtatgtttactgcagcactattcacaatagcaaagacttggaaccaacccaaatgtccatcaatgatagactggattaagaaaatgtgacacatagacaccatggaatactatgcagccataaaaaaggatgagcttcatgtccttggtagggacatggatgaagctagaaaccatcattctgagcaaactatcgcaaggacagaaaaccaaacaccgcgtgttctcactcataggtgggaactgaacaatgagaacacttggacacagggtggggaacatcacacaccagggcctgtcatggggtatggggaggggggagggatagcattaggagatatacctaatgtaagtgatgagttaatgggtgcagcacactaacatggcacatgtatacatatgtaacaaatctgtatgttgtgcacatgtaccctagagcttaaggtatataaaaaaagagcaatttgtcccaatatgtaaaacatataatcattcctgtacagatcaaattaatgcagcctgaaatcttattttctaaagagaaaaaggtacataggtacaaagtttgaactataaatattaagagtgctcaaaaaatggcgttttaagaataaagaaggaatagtcaggaataacacaggaacatttaaatatttactaggtaccaaatcctgtgctaagtacttaatgaatattgtcatttaatatagaagaacaaggttctacttccagctatgcaatctaaagcctataacctcaggtaaatcactcaatctctgggccacatatatttttgttttgttcttctgtaaaataatgataataccacttgctgtaacttcttcattaattgtttcaaggaccaaatgggatacatgaaaatatctataaaattgcaaaggactctataattgtaaataaggggttgttattagatggtgcatgaattctgttatttaaatttagtttaaatgtctcattacaaggcaactcaatatggtgtttttataaataaattgtaaaagaaggaattctggtatattaattaacttaaattgactttagtataaattttaggttccttctaacactttctagttaatctgctgtcagtgccaaaccagaaaggaagactgcctatctataaactctactgaagttttctacttctccaaacaacctgacctcacaactttcatgtttttatattatatgaatttgtcatgagtaagaaatttgcacatactttttgctttgaaacagaagtttagatatcttcctaaatgcaatcatcacactcttcaaaagtaacatcaagacttgctagtaattcttctccttgttagcaatactacaaactcgttcatttggcaacaaatctgcaacttgtaaaaaaaaaaaaaaaactaaaatactgtacactctttaatcctgtaatcccactctagcaatatattctaataaaccaaaagtaaactacataaacatattcacaactatagtttataaaagaaaaaaaaaacgaaaataaccctaacacagtatagcaaacaaaccatggtagttaccctcacctgatgaaatattacctctatagctttaaaaataagtacctggcgacaaataaaaagtgtatttgtgaaaaaaacagaccagagaacagtatgaaaacattgattacaactttgtaataatgtgcatataacaaacagggaaacataatttccagtgacacaacatctaaaatagaactaacttttttcccagttgaactcattaaacttaagaaccatttttaaagctatccaaaccagatacaggaaaattacacacagttttacaaaatttaatctttaagggaacaatcaaggtgatctgaaccccaattatttaaagttaagcaaattagaacctcaggaagatatcaagtcactgataatgttaacaatactctaaaatccatagtataatttagtatattagctgagagtgtactagacttctcaactattttaatcaatttttcttcatagcaggtgttaattatgaaataatctatcgccagacacggtggctcacgcctgtaatcccagcactttgggaggccgaggtgggtagattgcctgagctcaggagttcgagaccagcctggggaacacggtgaaaccccgtctctactaaaatacaaaaaattagccgggcatggcagcatgcgcctgtaatcccagctactcaggaggctgagacaggagaaacgcctgaacctgggaggcagaggttgcagtaagccaagatcgcgccaccgcactccagcctggatgacagagagagactctatctcaaaaaaaaaagaaaaaagaaagaaaaaaaaagaaatcatctatctacaactgctcaagcctacatctgtgatcctctaaaaatttaagttgcccaaccaactggttttaacgagtataccaaacaattaccttcttcctaggtctctggatgaatatgataagactggtttcctgtttcagaactctcctgctgttaaaatacacacacacacacacacatatacacacacagacacacattcctctacagttttgctctcgctaaaaacatctaagaccgatcactaatgacgaatgaaacaaaatagatataacttacctatcagctttcaaaaatattattagttcaatgacgtgtcagatatacttgtcaacagcattatacttgaactaagccaaatgccaactgttaattttctacagcaaaatcacaaaaaaagcatatgaaaaactgtaaaaagttaaaactgtaatgctgacccagcattatcataaatttcctaagtgtctttaatacacttagatttataagttaacttctgtaatatcattctgcttacaaaagctatgcttttatcatttattttgccagaggtgattaacctaaaacaggttttggctactctataattatgcagaaagacataaggccactaatttttacagcaaaaaagatattcaaacaggtaaagtgcagaagatgttaagggatatcagcatcttgaaaaacaaagatctagtaatatttagtgcatattctctcaacattagctgcattttgaaaaaatagggttccagaatttccatacgcagtaattatgcagacctaaccatcaactaattcaccaatatttgaaacctactataggtaaggtactcagaaaacaaagttctaatacaaatgcgtctccgtctccggcaaggaggttttctttttccaataagccaactgcaaaacttttatagttgctaataacaatcaaaatttacctgtaatcccagcactttgggaggccgaggcaggcagatcacgaggtcaggagatcgagaccatcctggctaacacggtgaaaccccgtctctactaaaaatacaaaaaattagccgggcgccaccgtggtaggcgcctgtagtcccagctactcgggaggctgaggcaggagaatggcatgaacctgggaggcagagcttgcagtaagccgaaatcgtgccagtgcactccagcctgggtgacagagctagactccgtctcaaaaaaaaaaaaaaatttacctttcaacgtcctcttaatctgaatatttaaaagagaaaagttccaaacaagtgtgtgctagattgcatcattttatatttggctttaatgtaataaaatcaagtctctttattctatactacaagccaggaaaattggttggaaatgacttactttttttccaactggtaaaaatagctttgcctaagtgctgcagaattttagtcgaagaaaaacataaactagaaatgcatgtgaatttttaaatatgaaagccaacatattgtctgtcattcattactatattagtaagaatcataggagattgttctaataatacaaatatctaacaatattaaatgattcctattcccactgaaggttaactattatatcaactttataatcatacttgacaattcattcttaagtagtgcataatcaaaatatctaaaataacatacaccaaaatactagtcaaaatcatattttaaattttagtaatatgcaattttaaaatatattaacagagtcaacagtaagtctgcattgcttggtttgaatagataacacccttagttttaataaactactataaatgcttgttattgaagggataccattttattatgaaaccagttattgtaataggggaaaaagtacaattactaattatgattagctgtagaattttcatatttaaaggacatataaaaaaacagaaaatatttaggctgaaacttcaaagaaaaaactaattaagttaaccatttcaacaagtaaataagcttttaaaacatacaagtttaatacctgggaagataagagtaccaacagttagatgggagggataggaataaaaacaagggacagaaacacataacacctctcacaccctttaaatactattaagtaaacagaataggtaacgacttttaaacttttaatattcaggtaaaaatctcacctacatatgtgcctcacttaatgtaagagatataatttatgtatatatgtctattcagaaaggcccaaaaggtatttttttcatagcctccaattcagttctcaccaaagtctacaaactgagtctagtaaaccaatctactttcctcacagattaatctgaaaattggcaagatgtttctcgtaaaaaaaaaaaaaaaaaaaaggccacagacacaaagttgcatttgaaaatgtaaattcaaaatcatatctaaacttaaaatattattatgttaatcatttggcataacaaatttctcaagaaaatgtcaacatactaaatgaaacaaggtagattaaatcaatcagattctataatattaagccaaatacacaattttaaagatttacacaatttggtaagaccaaattcttgtgagtgaaaattaaagaaacaacttctatagtggcctaaaatgcaacagcaaaattttaaatggggaagctcatttgcatacagacaagaattaagttgtagaagatgaagaaaagaacttgaaaaatatttaaacaaatttttaagaaattcttattaaatcagttccctgattgagtcctgtaatactaaattcttatatatctcaaccagttaggaaaactagtttaaaatatcaaaatcttgtataacttaatttctcaagttaaaacatgatgtccagttaactatccaaacaatcgagggaaaaaaaaaaccaaatgactgaaggccaggcgtttattacacaatctttagttctcagccagtatctgtattgtaatagaaaaatataaataacagtataactattaggtttcatttttgcaaacgtttaaaatttgatattagtctttataaaaatcataattagattattccaaaaacagtggtgtcaaaaccacttatatcactaaattatcttaactttttcatacatttgagtaacagatggtaggccttagttcttggacactacacaataatcacaatctgtgtgaccttttcagtattaaaaaaaatccaaatagtattattaagcagcacgttagcatattttatagtattatatataatcacaaccacaatctagatatgtaaaactatgtcatactttcagtatactaagctattttatatagatttcctacagctagtccatgaaagatactcagatgtaagagtgtttcttaggttgtcaaaaagcataaatgcatacactcacaaacaaaatatttttgccatccctgttttcattagcaccccacaagaaggtatataccacacctagatcaaaatttccttaagtttaacagtcgcaacaattttacctcatttgggaaaatgttactctaacaagtaatctggcttttaattaaaaagagactaatttgtttctacctcaatattttaaatattttttgttctaactatatgaataaatgaataccacctcatgataaaaaattataatttaataaagttaaggttatttgttttagtatctgacacttaaaaattaaatctgataaaacatatgcaaaatttttaagcacaaatactagtactgatttaaaacgcaaataaatagcaaattgatcaattaatatcacaatgattacctgggcaactgtgcaaatataaaccgtatcattcaaaatatgcttcagggaacagtaacatcattataagcccatactccttctgattaaaaaaacagaaagcaatagtgttattaccactttactataaaaatgatgtggcagtttattctaattaccttctatatccactttaatttcaacacaatgtaatgttcttacaacaggaaaaggaaatgatagatctaaagtattcagctaaattttactttgtctcacttaaataagtaaaatatgctttcagtattaaatacaagtagagttactatatgtaattcgggggaaaaatcttcaaggctctaacacttcagttaggtttgtataacattatgatttcatgaatcaaaaccatgaaaatcctctctaatgtttaggttatcttaaatccacttaaaaaatcacaaaataaaaaaatggaaacaagcttaataaatgtataagtataggaaaataaatatttctgatgatttcaccatttaattaaggcaacgacaaagtgcaatggaaattgttttttaaaaagaacaccctcttaagttcaccatgaactaggttttaaagtatatgcatatgaacaaaactggaagctaatatgaaaacattaagttttagagaagtaggacagtgggtgatttttaaaattctctttagtcatgtttttaataaaagaaattttcttaagtacaataagcacatagttttcattcatatactgaaataaacatcataagccttattcaactgaattgtaacaatgagtcctatttgtcttaaataattggtatctcaaaatatcccatatttcaaaaggaattaacagtcaaatcttaaatttcttaagaatttaaaaaaaaataaggccttgacattttattctgcattcaaaagtgagaggcaaagcaaactgtaaaatcatgcaaacagaaaaaaaatcacagcaatctattcctagaacccttttgtaattacatttgcctgccctaaaaacaaaacaaaaccaaaaaattcagaatccactaaagctaccttcttggcatcttcccatctctgggctaacctaaaactccattccgattttgtttctttttttctaaaacttcactttaatacaagtttctaatttagataaataaagcactttaattcaacaggctggcatagcaaatttagggcctagaaaagaatgcaacacatggatcaaagaaccttagagtcagccctattttctttacttagaaatatttaagtttgtatagctcgttggaaatttgcaattttacattgtacatttaacttcatcatatctgactataataaaagcagctttagaataaaaaagcataaggtcaaagaatacattaaataacaaaatagtaagagaaaagtaactcccaacagttcaacaactacataattaaaggaaaaaggattactttaaaaactactagcaaaattaaaaaaaaaattaaacatccttctgaatactacgtacagtattaaaaacacttacggaaaacatcttcaaccttttctaacagaagttcaaagcaacactttcacaatcagccaaagaacacatgagtcctcttcaaataaaccttttttgttattagggatatcttctgtggacaaagttcttattatcatataaagaatactggcctagcagcagtcagaacacccagatgttaggactaactccatcactgatttagtaagttgaccttcttaaatatcacacctgggggcaaaggtactgattttcatcaaatattatacttattatataccagacattttacacagcattttgggctagataattctttgttgatggggaggggtcttgtgccatataggatgttaagcagcatcactggcttcaagcccctagccaatagcacactctaccaccccagctgtgaccaccaaaatgtctccagaaaatgctaaaagtcctagaggaggtgaaaggggatcactctcagatggcaaccaatactctgaaaaaaacctcacctgtacttttaacaaaactaaaaaaccactgtacaagtttaggatttttactcccattttggagttgtcgaaacagggttcactaaggttaggcagtgtatctacgtaactgataagtggctgagcggggatgtatttatttatttatttttgagagagggtctcactctgtcacccaggcaggagtacagtgtcccaatcacagctcaatgcagcctcaaagtcccagtctcaggtgatcccacctcagcctcctcagtagctgggactaccaatgcgcactataacacccgactaatttttgtatttttttttgtagagacagggtctgcctatgttgcccagactggtctcgaacttccagactcaagcaatctgccaacgctggcctcccaaagcactgggattacaggcatgagccaccacgcccagccttgagcagagatttaatctggactttaggtctagccaactccaaatctatgctccattccaccatactgcctttctaaactcactatctcgtctataaaatcaggataacattttccatgcaaagttacttagagtttacaggtcaaatgaaataatgcatgtataaattctaataacctaaaggagtataacatgttaagggtttgcttggtgggagataatgttcattggtggtcctcaaagtgtgatccccagagcaccagcatcagcatcacttgaaaacttctaagaaataaaaattctcaggtcccaatccagacctactgaatcagaaactctgagggtggagtaagcaatccatagcttaataagcccttcaggttgttctaacacactgaagtttaagaaccactcatgtaacataatgggaaaaatactgcaccaagtgccaaaaaagtcctgcatccttcttcagactcagtctttcactagccattaacaagatactgattccactggagctacaattcctaagctgcaaaaaataaataaataaataaataaataaaataaaaaagaaagaaaaataaaagtaatgcctgttctgtctgcctcttaggttacctgttcttctttgcaaaatcaaatgagctaatgatttaaaaagtgtattgttaatcaaaaactacataagacagagtatatattagctaattcagtatctttcataaatgattctttcaaggtatacaataaattttacaacatggtcaaattaagcctagcaaaacactgtttttaccttataaaaatgaataaaataaattttaaaaaatcccaggcattccattttatcgctgacaatcagtgtaaaataatttataatacacactaaaaaaaaaacctaaaaaatcaagcttaatgacatccccaaaatttcattttaaaagtacagttttcaattctatctaatttcatctccaatcagtttagagtaaccagaatactcaaaaagaagtctcacaaagagagggaattttaaatggaaaagaatcctgcattttgaaataagcaaaaagtttgtaactttaaacatgtatacgatatttatgaatcactctaaaaatacatctattcatgccagcaatggtgggttaaatttttaaacgcatctaattaaaagagtatctgaggccgggcgcagtggctcatgcctgtaatctcagcactttagcaggctgagacaggcagattacctgaggtcaagagttcgaggccagcctgaccaacatggagaaaccccccatctctactgaaaaaaaaaatataaaattagccgggcgtggtggcgcatgcctgtaattccagctacttgggaggctgcggcaagagaattgcttgaacccaggaggcggaggctgtggtgagccgagatcacaccattgcactccagcctgggcaacaacagcaaaactccatctccaaagagtatctaattcaaatcacaatgcatttcataataccttaaataattacatcctcttcaaaagatcaaaagtattaaacaaataaaattcacagaatacaatctttgcaattactagtaaagaacagagaaccttattgtacttcagcctgaaaatctacaaaaatcaaaggaaataaaagtcaaagctatgcttaagtgctctaatattaaatcaacagtaagtcttaggtagtgatctaaagcaaaaactaggtgcaaggagagagattgatttagaaaactcagctgtgctcagatgccaaaatgcacaattcaattctacaacctagacatggaccaaaaatacagctagtttacaaaacacataaaatgcataaaaatcacataatcagaaagtcacatagtatcagacagagtgtattcactctgcaatataaaacacacacacaaaaaatccactcactagaagtcaagtgcttcactactaagagtgctgtggtacatctgggaaatcagtacagcccaagggggggaaaaataataatccctatgtacacataatggcctttactggacagataagcttattccatctttccccatattcaattaaaaaaatgaagaaaaaaatcctttagttctttacttctttcttcccacgtcttgggcctaaatcatattgagaatcctggccaaatgtggaaataggactcaataatacagagactgaatactttaaaagttcccatattatgttaatgcattacagattatattaagtgtccattttattgtaataaatgtaacttgacattcagttgcaagactccctcaaaaggctgaaattttcaaaaggaaatgctaaaaaatatacctctattgaccaaagtttacataactcatattaagtttattacatttgaggcagagtttactttatgtgaataaaaatgtatgatagttaagttgacctatcttcaacactaaagaaaatttaagattataacaaagtttaaaaattctacttcattatgctaataggaagtttttgccttttatattttaaagcaaatagtttttgattggcataattaattttactttggtcaacagtttgagttagcagagatttatttcccatttgtgatgaaccagcaaaatcacagacatgtcatacccagacttcctaaaggaatacccttatttttaaaaacacttataacttgaaacaaaatcctaacatggcccaaactgaggaaattcagttacaatcatacaccataaatgaaaatacaaataatttccctacatacataacctgaaattacagtttttcagagcagtagctaccatttaagtatttacaatgtggcaggtactatgctaaatgaaattacttattattatctcacttactattcaagataaacgtatgcggtaggttccattatcatccccattttacagataaaatagattgagaaaatctaaataacctactcaaagtcatccagctactaaatggaagatccaggattacaaaacaagcagtctggctccagagcccacactgcctccctaaaatctaaaatgaaacaatgtatatatgcttaaaagtatagataaacgtaatactcaaaattttaacataatttaaaatagatctgaccatatttaaaaactatagaacaatattctctaaggtagtcttttctttaaagaaacaaaaattcgttttttaataaatattaagataaaaggtttgctaactttgtatacacatacacacacagagaaatcaaacactggttagattcactgttcatatttgaagtggtgagtactgataataattatgtgtataattacttaaaatataatgtgtaaacagtcttctttttcacactatgtggaggtcaagaaaattcttttgatggcaggtacagctacaatatccatctctcaatattctcaacactggccaggcgcagtggctcacgcctgtaatcccagcattttgggaggccgaggcaggcggatcacttgaggtctggagtttgagaccagcctggccaaggtggtaaaaccccatctctactaaaagtacaaaaactatctgggcgtggtggcatgcacctataatcccagctgcttgggaggttcaggcaggagaatcgcctgaacctgggaggcagaggttccagtgagccgagatcctgccactgcaccccagactgggcgatagagcgagattccatctcaaaaaaaaaaaaaaaaaaaaaaaaattctcaacactgccaaaaagtaatgccttgaagatgtcctaataccttgaagatgttcacacatgtcccaatgtcaactgttgcaaatgaagaatctgccttaactatacagaactaaaacttcccaaataaaattaattcacccttaaattatgttactcttcttatatttgccgatacttatttattccagtgcaaattattttaaaagaattaaattgctaatacttcctctgcaaccaatgaaaaaaattcaaaaaactaagggaaaggtgaatagtcaagtacaatatactaatttcacctttcttggcaaattattttacattagtgaatgcatatactcaatatgtacaaagagaatcaccaaacacagaccaatatacttttaaccacctatggaagaacgtatatgtggcagtaatgcaccctataaaagacttacagttatcagtttgctcagcaaagccttaccaatttaaggttagtctaacctcaacattattctctctgataagcaactaaattaatttcaaagctaccaaatagaaagcaattgtaaaacagaactgactgaccccagtctcacaaatttcctaagtcactatcttcagaacaaatcctaacatcttttcttaatgaattcaggccacaagatgaattcttcaatgctgactgtgaaaatcaagtttaacagaaaaaatgaagaaaaaggtaacaagattaagaactaatgggttccatgtaataaaacttctgaactgtttgtttaacccaacggtttctacagaaaaaaaaaaatacatttcttaagctatgttaatattacattttctggaagctaaatccttgtagtatggcagaggcctcacatttcaattaagcagaaaattgtcatatgcatgcaacacttctacaattctctttacaaactctgaagtcacacacaatatcaataataaaagtgatttcctaagctttcgtcttacttaaaagattgagatgaaaatttaaaaatagcacgtttacttcaagtgaattaatgttaaaactttgtgaagtgaatttcccataacaaatactcctccattaaaagtcactgaagtgattacttcagaagcggcttaaaatatttttttaagtgttgcgctatcaccaaatgaacaaacagcaaatggaggcaaatttcaaaataacattagaaaataagaattgaagacttcttcacttccaaaaagtaagccatttcataacactaagaagtttatgtattttatgtggctatgagaaagcagatgcactgttccatacaaaaattaaaatatcaccagttgcctttcccatgttattaaaaataaaattctaaaaaggtaataaaggaatctttctttactatcttctaaaactaagtttaaaatgaaggtggttatacctcaccatattttattatctttaatcatttagtatttacttagtatattataagcaatgtaaatctgcattgatgactatactgctgtgcaaacttttacactggcagcaataaaattcctttttcctcatataaactgtacattactcctttcagttgtgctttacacttgaataagcactatgaaaaatgaagtttgtaagttatcatacagcaattaggtggtccagtcatgtttttcaggaaatataacttagcagatacaaaacaatgtaaaataaatgttgtgaatagaatactttttaaaaccctcatgattaatttcagtaatcacttaccttgaggtaatttaggtaacttcaatagtcactgtactctctacaagttaaaagtattccctgtgaacatttatttgaaaagaggcaaatctaccaaacaataaaaatacaacagaagcctaacgtttccacataccctaaatacacttaatttttctatagtctcaaattcagcactatatttcagactaatattaagcatataaccctactaacaaatttttagaataatttaattttgcgataatattttaaaactgaattattgtcctcaattttcctcggagaaatggcttcattattaatctttctttatcagataaaaatactccaatcactactttcataaaggaatttaacttttcacaggttagttactgaaataaatactacaacatgtcaaagacaaagtcttcaatgacaattttaatgccttcccactccaataaacagaaaacattaacgtgaaaacaagcaaaccaagtacgttggaatatcaaaattattgggagtgcaattatcaaaaaagcaagcacttcactgactttccttactgactttttttcatatcaacttttggctcaataaaaccacaactctagaaattaagtgttattagtcatttgacgcaatatttgatactgctttctatgcatatcataactaaaagtacagttttagagaaagttttaagtcacacaaatttcatgtgtagagaccaacatacgctgaaatcaaagaaaatgccagtcatgtcacagctcacatgtaaaaacctggtaaaataattttaaggtcttaataaccctgataatttaaaatcaagtgggaaaagtaaaagtagtgtgttatgtactttaagtgctgaaagaaatctgtctcccagacagcattcaattattttcttcaaaggcttttttttcaaagttacataaacatttaattttttgttcctatatatttggatgactgtcagtaattcatgctaatagtagactgctttggaagtcacaaaagaatttttccataattatcttctgggcaagcgggtccagtttagccttagtaacattctcaattaatgtcaacttcaaaatttgcaaatactcttttaaaataatatttttggcttaacagaaaactaaattttgggaagctacttcttcagtaagttttacattcatttcaaaacaaaaacttgggcaaaattaactgtgcacatttatatgcagctaacataatccaacggaataaaacctctcccgatataaacgctgtcttaaaaaaaaatattccccacaatttttagcaggacatatagacactgtagtgtcactctacctttagacaaaatgcaactgacatttgctaagaaataacttttattaaaaatactgtgctagtacttatgcaattacataattttaactaaatattgtccactgccacaattcgcattaccaaactcatattaccaaattttaggccttgatagagcctaaatgcttcagtcacttcagaccaataacttaattctgttttcacataccttatacactggcctaccaatagctctcaattcctgtcaatactttccccattctgcaaaaagagggccccatccccatccctaatcaaaaccaatgtgttgtacctgaaactgcaaagattaatgcttttcgatgaccactaacttttgaagcccgaaggcctaacttttagacaactaaagctacacactgttaaaattcttgggcttctgtcttattcagcaagctgactcagtaaatttaatacactgtatgaaaaaagctaacatacctacaatctaaagctggagtaaacccctcttgccagcatttctagatattagctggtaaaatacaactgacattctacacaaatcagtaaaattaacgataccaaaaggtgtcagaggacctgaaacctaaaaacggtgagcagcaattctggcatcacaacaatacttaaatttcaagcatgaactgaagttttatttctgcaatcttcacttgctacacacaatacccttgaacctacacattaccatctgggatcagaaactactcaatatccattctatgtttatgacaagagcactgaacattaaatgctactgaagtgcaaatttcaagcactatcctacatcaccccatagggagagaaaaaggtaaatataacaaagatctagtaagaacgccttataaggtatattatggcactattgacttcaaactacaaaacttctacatacagttcaaagttgtaggtaacttaagtttaaacattaacaaaactactttttgccctcaatgtgcaccatatatactgaaaatgattctgcttctaaagttatgcaaatcagtcatattttaaaagaatctatcaatgcaactcaggaaactaaaacaatcactgcaagattctgatgcaatatgcgtacgtgcaacactaattttcattttattctgatctaaacccttgatctagggcctaagccaagatttaatcgaaatatgctcaacctcaaaaagcgtctacttttttgttcatttaggagaccggattaccgagctcgctaatccactaacagtgtactgtattctgtattaacggacaatagccctcaggaagagaccatatagatagcctaagaaagcaatcggtggcttgacacttgcaaccaggcaagagttccgtctagccaaacacaccctaggttgaatacacagaaaggaaacacaaaatatatgacctagcaacctgaccagggttaaatgttatagtcacccaaactacggacattttcgcatccgtctactcccacgttctaagagagtgacagaaaggtaaagaggagcagccgcagaaatggatacaggtcaagtctaagtcgaatccatcctcttgatatctccttttgtttctgctaacgatctctttgatgatggctgtcatgtctgggagcctgtggctgaagaaaaaggaggagagagatggcagaagctgctggtggcggggcttcttctgcaggatggaaatggctctggacttggcggtagctgatgcccctcgctctgccgccgcttggctctggaccgcagccgggtaatggctgctgcggcggctgctggatggttgcagcgactgggcctgcttctcctcagcagccagaggcctggcagcggcggcagcggaatggggagaagacgaataatcctccgaacggctgcctccgccggcggcctccggagcccgggccacggggggtgcggcggcggcgcacgggaggtttaaaaccggcccgggtccctggatgtgccagccgccgccgccgccgtgttggaggcagtagaaggggagagaccaactctccggcgttcccagccctggaaatggtgacaggcgactcagaccccctccctggagctgcagccgccgcggccgccgccgccgccgcttctcccccccgctccaggagcgggaggtgccgccgccgccgccgcgcctcagccggctcccgcccgagcccacggcttccaccttccctttcaggagaagccgaggaagaggctgcacggttagaaaagacgaagaggaggcgagaaacgccgccgctgccgccgccgcaggccggccggctccccgagggcgctgcccccgcggctgctcacaggcgctgagaggggctccgggccgcggccgccgccgtctctcatctccctcgcctgagcccggcctcgcctcacagcggctcaactctcaaacttccatcatggctgcagcttccgagaggagagaactgagcgcagtcgcgtcccagcgccgagcgcgtatcctgccgcagcgcataaagagtcccgccacatcaccgcccgccggcctgcccgccccctccgccgccgcgccgggagcccgggcgcctcggaagaccgaggggaggcgggaggcgagcgagaggcggacgggaccgcgccgggcgaggggagggcagggcagggcagggggcggtaggagggggcagagcggtagctctgggtgcgagcgcagagtccccaagccgcaggctctactgagcatgcccagtgtagctgcctggggcttgctcgggccggttcccagccgccagcctgcagctgcacttgctgcggcttttgcagcaacgcgaggcgaggataacgagctaagcctcggcctctgcccagaaacccagccggaggcagggtaggctgttgtggggcgggggtggaggactgatgatgaaagctgagatgggtgcgttgagcagtgtcactgactcgagtctgaggttacctgtgcacaggtgaaaaggaccaggtgaccacgctgctcagtgtagagggaaatgcagggacggtccctgcaaggggaataccctccccccttgcctctacccctagatttccgcggcgtggactgcattcgctctttccttttgcaccgctgtcggatcacaatcgttcgcagagatttgactgtaacagcctttgcctagagattcccccttcccccaaatctgtgtcctcatggtgtcagtcttagcacaaagagcaacctgctattgtgtcgccagcgtgtatcacctcatccggctcccttgcagcgccccacctctcgcttccccggtaactcggctcgtttgccctaaaaatgaaagctctcagccgagcgtgctgaacgtgaacacatagccgttgaatttcaagggcccaaagggcacctatctaaatgaactgaaagaggatccctgtgagtgggacgcaccccgcaggcctctcctgcgcccgctccggtgcccccaagagagtcgagcatctttcccctcgggctccaggtcggttcgcggcgtcggagtcaagctcggttctcagagaccacctagccccgcccccccttggccgccgtgaaaacccggcaggatggatcgcccggggccaggctccgcgcgccccggccggaccgtgcacgtttggggttaccgggttgagtggaaagtacggaacggtaggaagctgcagcccagcgagtgggcggggcgaggagacctaggagggttcaaaaggaggtggaaggatacacgggccacagtcggaactactttccgaaggaggtcacgtgtgtccctagttggggaactttccaaattcccactccccagtgatagctccggaggcaagtcgtcttcttcctttgctcggggtgctcttgcctggtgcaggcagcggaaccccaacccttcctgcgccgcggcggaaacaggggctcggaccagcctcccgaaggagcgctgtcggggctggcgcttggggaactggttacacaagcacccacatccaaacacgtgcccccgcctccccgcctgctggctgccgccgattcttacagaacgcggggagagagtccccaaactggtgccactcctcgcctgctaccctaagagcaagccaaaggactgagacctgagactcactccttgctctacatcgacctattctgcgccttcccaaacgtgggaaaaggagctgggcgctagggctctcgggcctctccatcgctgatgccctgccgcttagggtgaacccttttggttctgtgcttgagggtatctcctgctgcagcccagagcgtgcattctccgatgttgcaacaaacgtccagtcactacccctgagctggtgagcgcgccccacctactgtggactcagccaagtgacttatctggtctgagaacctagtcaatggccgtcagcccagaacaaacctgtcaagtctgtttacagccccgattgggctgacctgtcaccgtgagagagctgattcggaaatgctgagagttggatcgcactcctaccccgcaccccacccgtcaaggatctacaaagcaagtagtcgacccgcttaaagagaatgagcatcaacaccagtctgggaatttattgttttttcatttcccttaggaagtagaactacagacgacaatttgagtcaaaaaatatctaacgagacctaggttgaagcactgagttgtttttcaaactttgagagaatgagaatcaatctgcatgtgtgttcaataattgtaagtgcctagcaaagtctaaagagggtttatgctgtatttgagaaagagtactgtatatgtgcacatcatagttgcaggcaacctctgaagactagaaacctcaagagacctagcgcagaaagccacaggccattacctaactccgggactactaattaaacctgggatatttacagtgttcttagagacctctgaggctccataaaactttgcacttatatacagcatttaagatagctgtgcaggagttaacaacctgctgaagcttcagtgttgatatttattgaagactggttttgtgcatagttctggtcagcttgggaaaggcaaggaccacagtggaaaaggaaatggaaagcaaccggaaaagagtaagagaaaggcctccagttgatttccagagatgcagatactgtccacacagcctagcgtgaactacagatttcattattgtataaataaccaaagataaggagttcctgatgtctaggtgttctactagattgcatggtaaaaaccagagctgtgtttaattatcaattactgcgtggtagaaaaagggaaaatgaagatgaacttttaaaaggggagtagattagggaggggtaaaatgtctcacatttgtttcttagattgctgatcttgtctccagagtccctgttattagcactgcccttctctgtccctcccctggagcctaccctaagtgacaattagtctcatagcatctgagaatctctgaaatctgctttcatggaagcaaatgaaacaagggtgcattcctgtcctggtgcgacagaatcctcttggattccatggcacagagttactctggagcagagataatctgcatcaccagcactaaagtgctagaatatgagaccagcctccaagtacttccatccggctgaagaaagaaaatgggaaatgggttttactgcttctctaaacatcaggtccctctacttctctctagtggtgaatgaaaggatcatcaatgttggcagatatttggccagcccaacagcaacatcaggtggttattaggagttggtgaataaaatcctccttctgttcctagtgttaagttgtttctgaaagaaatactgatgcatccttttccaattttttgtttttcttttcctttctacccaaatggctggccctatctaaactaaagaaagtttcaaaaatagtacttttttaaagttcagttgaaaatacctgcttggctgtatagatattacaatacactggtctccaagcacttcagttctttttttttttttctttttttttttttttttttgagacggagtctcacaggctggagtgcagtggcatgatctcggttcactgcaacctctgcctcccaggttcaagcaattcccctgcctcagcctcccgagtagctgggactacaggcgcacaccatcatgccgggctaattttttgtagtttagtaaagacagggtttcaccatgttggtcaggatggtctcgatctcctgacctcgtgatctgcccgccacggcctcccaaagtgctgggattacaggcgtgagccaccgcgcccggccatacttagttctttacctgtctggattcagaaccagaataccatagggagaagtagaagcttgtaacaaagggacaattatataaagcttcagggtgactatgtagattgattagtaagcatggtaaactagctttaattatcgcttctaacagctgattccaaaactctattgttactacaccaaaataatgtcgaaagaaaatttctttcttattttctttgataagcgaaatgaccagcaacttgatgtggatgatataaatacttgatgtgctctttgtaggtcatctgctaagatgtcttttgtgtaaacactctgatctctatagtgcctttctcatctcccatacgctgacctttcaaaaagggatctaactcaatagctttaatttttaaacaatcttctgtatttctgtctgtttaactactgttttctaaataatacagaatataaaaacataataatcattggattgaatgtaaacccattgttccaagggtctgaggttttccccttatttcatttatcctaataacaaacattattgttctttcaataaagataattttaagacattctccaaaaggcgctactgtgggtcatacaagtaactatattctaaaagagaattttccattattgtctacaagcttcccatgtcccaaatctctcctgaagctatttcagatgccatggtgtcatctttcacatcttggtagagagatgtgctgtatgaaatcatcattctcagagaaataagggttgagttggttgctcctgagaacaatagagcagaccaggtactcactgtgtccaagtggcgttcagaaattttgtcttggaccgtggagcaatacaaataaaaaagacataacatgacaagacagctttgactatgttagtctccaggctaacactagctaccaattattctacttggtccccttaatactaactctagccatatggagcacattgtttgctttttagaccttccaataatagaaaaaggtaattcccatataccagaaaatattgggacacctaccaggtgcttcatagagtaggcagaaattttttttttttttttttttttttttttttttgagacggagtctccctctgttcctcaggctggagtgcagtgacgtgatcatggctcactgcaacctctgcagaatagcccgaatttgtctaggtagagggacattgagaaggagccaaaaccctgctctgcctaactcctacaattttccccttcaaaacatccttctggcctctaaggcatcacaaaaaacagcacctttttcaaagagaaaatgcatgggacaaatagccctggaccatgaaaaaaggcagacttagagcttatctgctttttctttacttcttttcccttattaagactccacactccatttaaagaatcttttttgtccatcctcttgagggtaggggatcttatctcaattcatttatttaatgattcaatcaacaaatatttgggagcctattaagtggcaatactgttctaagctctatggacagagcagtgactactatggcatatagtgttcactgtcatggaatttagtctgcattgaaaacttgacttctatggctgacattgttacaacttcttcccagcccacagagtaaaggtaaagcaataggaagataccctgacatttgataattgttttgttttgtttttgagacagtctcgctctgttgcccaggctggagtgcagtagcacaatctcagctcactgcaacctccgcctcccgaggtgtttaagcaattctcctgcctcagtctcccgagtagctgggatgacaggcatgcaccactgtgcctggctaattttttgtttttttagtagagacggggtttcgccatgttggccaggctggtcttgaattcctggcctgaagggatctgcccacctccacctcccaaagtgctgagattacaggtgtgagccactgcacctggctggataattgttttcaattatctattgctgcataataaattaccttaaaactttctgttgtcttcctcttgggacccaggcactgtgtaaagaagcttgggctggaccactgaatgatgagcaaccacagcaagaaaggagtccctaaccattttagctactttaactgaggtcccagacatgtgggaagccatcttggacattccagacccagccaaactcacagcagaataaagcacatgtctgacctgaactgataccatgggggccgcttaaaacttagtggctcaaaacaactaccaccatttatttcctcacaattctgcaattggggaagggcacagctggacaggtcggctccccaatgacattagctagggtcagacgtgctttattcagctgtgaatttggctgggtctggaatgtccaagatagcttaccacatgtctgggacctcagctagagtagctaaaaatggttaggagcctcctttctttgtgtggttgctcattattcagtggtccaacccaggcttctttatacagtgcctggatcccaagaggaagacagcagaaaatacagggtctcttaaatcctgggttcagaagtcccagaatgtcacttccactgcattctcttggccaagcaagtcacaaggacagcccagattcaaaaggaagggaaagatactccttgatggaagtagcagctgggatgagaaattgttgccagtcaatttgggaaatagtctatcatgatccatcctccagctacaacagtatacatatgcacatacatgcacacacacacacacacgacatgcagaatacactcactccctttctccaaaactattattctatatagcatcagtgttaaacttcaggatctagtaatctatactaggcctagatgtggatgaggcatttcagatgcagcttttcttcatctggagacctgttaactaaaagagaagttacatacacaacatacaatgctgaaaaagggataggataactgcagtagacacgcctgtttgaaaatggcggaaatggaaggcatatagcagtcattagtccatagcaattctgaaatccagccaagcactgttaccggtcctctgaggatcaagttctccattagtgcctaggttggcctccctcagaatagtttcccaatgcgttgttctcaagagctcttagttccaccctctggggtctagactaggaactctgaatcaattttcctttttcataagaaactgccttccttgaacagaggcttcagaaataacaccacacatctacaaccatctgatctttgacaaacctgacaaaaacaagaaatggggaaaagattccctatttaataaatggtgctgggaaaactggctagccatatgtagaaagctgaaactggatcctttccttacaccttatacaaaaattaattcaatatggattaaagacttaaatgttagacataaaaactataaaaaccctagaagaaaacctaggcaataccattcaggacataggcatgggcaaggacttcatgactaaaacaccaaaagcaatggcaacaaaagccaaaatagacaaatgggatctaattaaactaaagagcttctgcacagcaaaagaaactaccatcagagtgaacagacaacctacagaatgggagaaaatttttacaatctacccatctgacaaagggctaatatccagaatctaaaaagaacttaaacaaatttacaagaaaaagtaaagcagccccatcaaaaagtgggcaaaggatatgaacagacactttccaaaagaagacatttatagacatttatgcagtgaacagacacatgaaaaaatgctcgtcatcgctggtcgtcagagaaatgcaaatcaaaaccacaatgagataccatctcacaccagttagaatggtgataattaaaaaatcaggaaacaacagatgctggagaggatgtggagaatagcttttacactgttggtgggactgtaaactagttcaaccattgtggaagacagtgtggcgattcctcaaggatctggaactagaaataccatttgacccagcaatcccattactgggtatatacccaaaggattataaatcatgctactataaaaacacatgcacacgtatgtttattgaggtactattcacaatagcaaagacttggaaccaacataaaatgtccatcaatgatagactggatttagaaaatgtggcacgtacacaccatggaatactatgcagccataaaaaaggatgagcttcatgtcctttgtagggacatggatgaagttagaaaccatcattctgagcaaactatcacaaggatagaaaaccagacaccacatgttctcactcataggtgggaattgaataatgagaacacttggacacacggcggggaatgtcacacaccagggcctgtcgtgggggggatgggggagggatagcattaggagaaatacctaatataaataaccagttaatgggtacagcaaaccaacacagcacatgtatacatatgtaacaaacctgcacattgtgcacatgtaccctagaacttaaagtataataaaaaaacaaaaacaaaaacaaaaaagtaggtataaatataagcgcagaactgcttttgagcagctacgccgggcacatcgcttgtgggttagcctgctctgcaaggagcagtacctctgctgctgtacactgccgcttcaataaaagttactaacaccaccaaaaaaaaaaaagaaaagaaactgccttccttccttttacagttaaataactctctcagcctgcttcctgcccgtaggaagttgggggcttggaaggttttttcattttgaactgtctcttccttagtccaagctggtgcaattttatccatataactctctttaaaattttgtgactcttattggggttcacttcttgcccgcaaagcaacatctataattctttcaaaaacaaacctctctgcctgtagtcctagcactttgggaggccaaggtgggaggattgcttgaggccagcagtttgagaccagcctaggaaacatagcgagactctgtctctgaaaaaaattaaaaatttaaattaaaaatttaaaaaacctctctctactgtggacctgtagaggtgactactgtgggacaacacttaagattcttagaagaccttttgtctagatgagaggcaatatcttaaatattttagaggtcttagcaccaagtctcgataagatctttaacttgaggccaattctacaggcaggcccttgaggccatttcttactttgagagtctttctggcataaagagactctgcttaaaaatgggatagttccttttttaacacatctctgtctcttgtgttatcatcatacatcacttgtgtatcttcgtacatccctaaaagaagccaattgtcactctgaacattcagcctgaatgttgccaaatccacaagtttattaggtacactttctgtcttctatgttttaccatacatctgaccacaagggttgtcaaacatcttgccactactaacaccatttctccaaccttcaatagcaattttctcactgctcttccagctctgttagaagtcttttccccagactaaggagacatatcaactaagagcaagtaagggaacctggattaaatcttggaacagaaaaagaacatcactacaaaaacaagtgaatttcatataaggttcgtaccttgtgctaatttcctggttttgataatcgttctgtggctattaataagttattggccaggaacagtggctcatgcctgtaattctgacactttaggaggctgaagtgggaggatggcttgaacccaggagttcgagaccaacctgggcaacatagtgagaccccgtctcttgaaagcagggaattttttttttttttttttttgaggcagaatctcactctgtcagccaggttggagtgcagtggtgcaatctcggctcacggcaaccttcacctcctggttcaagcgattctcttaccttggcctcccaagtagctgggattatgggcgcatgccaccacgcacagctaatttttgtatttttagtagagatggggttttgccatgttggccaggctggtcttgaactcctagcctcacgcaatccgcccacctcggcctcccaaagtgctgggattataggcgtgagccactgtgcctggccaagacccccatctctttaaaaaaaaaaaaagttatcaatactagggctgctggataacaagtatacgtaaactccacaccaggccaggcatggtggctcactcctgtcatcttagcactttgggaggccaggtgggtagattgcttgagctcaggaggttgagaccagcctgggcaaaatggaaaaaccatgtctctacaaaaaatacaaaaattagctgggcatggtggtgtgtgcctatagtcccagctacttgggaggctgaggtgggaagatcacctgagccccaggaggtcaaagttgcagtgagcagtgatcgcaccactatactccagcctggtgacagtgaaaccctgtgtcaaaaaaaaaaaaaaaaaaaaaaatccataccatttttgcaacttttttctaagtctagaattttttccaggccacacacgatggcccacacttgtaatcccagcactttgggaggccaaggcaggcggatcacttgaggtcaggggtttgagaccagactggccaatatggtgaaaccccatctctaataaaaatacaaaaattagctgggagtggtggcgcatgcttgtaatcctagctatttgggagggtggagcaggagaatcgcttgaactcgggaggtagaggttgcagtgagccgaaatcgcaccactgcactctagcctgggcaacagagcgagactctgcctcaaaaaaaaaattcttttaaaataaaatatttaaaaaccaaattagctaggcatggtggctcatacctataatcccagcattttgggaggctgagagggaagaattgcctgaggccaggacaacatagcaagaccccagtctctacaaaaaaataataattagctgggcatggtggcatgtgcctgtagttctagctactggggaagctgaaaaaagattcaagggaggggaaacagactccatctccttttggtgggaagggtggcatgcgtgtagaggcatggaggaattgttggtggccatcttccacaatgaccctagtcctatcccctataaataaccccccaaaacagaccattttacgtagtccttctctcaggtcagttctgcctagaatatctgtcatttaagaatcctatcagctgacaatttgattagcaactgaatgttttcagttgttttctattttgctccttaatcttctagtttgttaatgtgcttactcatctattttacagcatgattctactctaggactaatgtatttcccaaaagattcattaaaattcaatgaaataaaacaaaagtgataatacatatatatatacatgtgtttgcataaatacatacaaattatctggaagaataagagatgagataacacattctctctgagggcaggatagagagggaaggcttccaagggagataaatttctctttttatttattgttttttatatggttcaaaggttctttacaatgattattatatttataaggtagaaaggtgatttcatccattagaattaaaactaaaaatatatgtctattatcaagagaatattaaataaccaggaaagaagctcgattctaattgtattttaaaataaatgagcaccctaaagaatttccagaatttaagcgtaagggtctgtttggtgtttgctggacaatagaaatacatgggaatatctgccataaatggtacatagtagagatgtgtggtagacaggctgtatcttatcctgaataccctctcttccccagatcaatggtcttgaccagatctattttttactctttgtactatttaataacttttgctgctcaaagaaaatgtcctcgaaaaataatcatatgacagcacagtacccccatcttcttccattcaagagagtggcagactgctttatcatccagtgcataagagctagaaaaaaacttcatagacccgctagtttaccaatctcattttacaaatgaagaaactgaggcgcaaagggtttacatgccccagattacacagcaactcagtgagggatcctcagttggagcccggagaattccctg

SEQ ID NO: 3 - DNA, 92584 bp, Mus musculus
cctttaatcccagcacttgggaggcagaggcaggcagatttctgagttcgaggccagcctggtctacaaagtgagttccaggacagccagggctatacagagaaaccctgtctcgaaaaaccaaaaaaaaaaaaaaaagaaaaaagaaaaaaaaaaaaagaaagcaaatcaggacactacctaagaaaagaagaacctatttccttctttccacacagtcaagattccaaacagatgatgagaaagtcctctgcttcctagcctatgccttggctctgttcccctcccccacctcccagcaggtataatatctaaactgtgtcagaagaccgtgactacggtatgatggtgttagacgacatccgctcagcgctgcttgcttcaggaccaaggtttaggtgacaccacagagcccatagtcttcctgcactttccctagttgtgagaaggatgggaaaagtgagaagaataagctcgtttttattctgtgattctgcgagccagatttaaccataagttactaaaacttgagatatttccatggtgacaaatggatataactgactcttttttatcctggtttataatcttctatcacaggagaacatcacgttttgctattttatatatatcacacacacacacacatacatacacacacatatatattttatttttatgtgtatagatattttgcctgcatgcatgtctatataccatatgtatgcccaatgcccaaggtagccagaataaggtgttggatccctagaatcagagttgaagatagttgtgagttatcatgtaggtgctaaagacccaggaagagtagcatatattcttaaccactcaacaacaacaacaacttcttcttcttcttcttcctcttcttcctcttcttcctcttcctcttcctcttcttcttctcttctcctccttcttctcttctcctcctctttcttctctcttcctcctcctcctcctccttcttctctcctcctcctccttcttctctcctcctcctcctccttctctcttcctcctcctccttcttctcccctttcctcttcttcctctctctctctctgtctctctttctttttttgatagaatttcatgtatcccaggccagcctagaactcactacatagccacagatgactttgaacttctgatttttctgccttcatttcccaagagctaggattacaggtatgagtcaccacacagagctatgttctgctatgtgtactaatgcatattttattttttaatttttaaaaacatttttaaaatcatttttaattatgtgcctgtgggggcccaagaggctctgtttttgttggagctggagttgtaggcagcttgagctaccctgagtgccttcagggaccctaagtcaagtcatgcactctttttgttttgttttgttttgttttgagacagggtttctctgtgtagccctggttgtcctggaactcactctatagaccaggttggcctcgaactgagaaatctgtctgcctttgcctcccaagtgctgggattaaaggcatgtgccaccactgcccagctatttgttcctttaaatgtgtcttctatattaaggaggaaagatggcccgatagttcacttatgctgtgctccaaagctcaaatgctttaaggttcttctctgttctttgtaatctgcaaagcaaacagatgtctggagtattctgcagtcttggagaactagggtcaagatttcttggcttaatttatatcaagccaaggatgctgtcaaaggagatcgatattgtagcaaaaaatgtttttttttttttttttggtttgcaaatttgtggatatagttgaaaagaacagtacatttctaaagtaacataaaataaatgtatatcaattttttcaaaattagtataatgccttttgtttttgttttgttttttgttttttgagacagggtttctctgtgtagccctggctgtcctggaactcactctgtacttgaattcagaaatctgcctgcctctgcctcccatataatgccttttataagacaagagagtttgatcgagacagaaagtttagctggaatgtgctgacccatacctgtaatcccagtacaaatgaaagaggaccatgaaaccaaggtcagcctgggcaacacagcaagaccctgtctcagaaggaaaatgaatagatttagaaattttaatctgtcaaattaaattataggaaaagatgctcagttaatagctaagttgaccagttaatactcaatattgtaaaatgcacaggacttgaaatgcagacaatcttgtatcttacaatcaacaagacctcaagaatacattaatttttgtttgtttgtttgtttttgtttttgttttggagacagggtctctctgtatagccctggctgtcctgtaatgtttttttttttaagatttatttatttattaatatgtaagtacactgtagctgtcttcagacacaccagaagagcacatcagatctcattacaaatggttgtgagccactatgtggttgctgggaattgaactcaggacttctggaagagcactcttaacaactgagccatctctccagccctccattaatgttaatacaaaaaaaagttgttaattctgttaatacaattaggtggcgaagaccctcaacagagaactgtctttttactgtatttagaaaaggcagaatttccaagttgaatttgacaacattaggcctttctatagtgttctttctgagattgttagcagtcacaaaaaacctcagttactatgggacttctgtaaaggtacaaacttactttatggattctgacacattgttttaataaaagacaggacagccgggcgtggtggcgcacgcctttaatcccagcactcgggagcagaggcaggcagatttctgagttcgaggccagcctggtctacaaagtgagttccaggacagccaggactacacagagaaaccctgtctcaaaaaacaaatgaacaaacaaacaaacaaacaaacaaacaaacgacaagacaaaaagaaccacccgaactggaaaagggctacagctcttttcaggtgttatttagtgtaaccatggaacacaatagtggtctatgactaggttccaaggtcaagttaagtaaaattaaagataccagcatttgggaggcagaggcaggtgtatctctgagtctacatagtaagttccagggcagccagggctacacagagaaatcctgtctcaaaaaacaaaaacaaaaacaaacacaaaaaacaaacaaacaaacaaacaatattctcttgatgacaggaaaatcaaagggcaccaaacaacagcatatgataaagagaaaaatgtaggcatgagtaggtgagaaagaaagggggtcgggtggggggcaggacatcacataggaaagtggaggtatagaagaaaaagtagaccaatgaaaggtctaacagcaatttcttctagccttctcttgcaaattttcttcatgtgtgtactcatttttgttgcttgtttttgagacaaagcctcattatgcaggcctggctctgttctagaactcactcaggtagacctagctggcctgggactcaaagatgcacttgcctctgccccactgagagggagattaaaggtgccactatgtactgatgtttgtacacaatagaagagaagaattgtaaagaatcaaaatggaaaaaaaaaaatacaaaaaacccaaaagatctgtttctggggaagaggaatggcgagccactggaaacttttacccacatgcatgtaatacttaaataaaagccttagtattgtattgtgagatttgggtttggggggtgggactaaaaagataacagacataaatattcatgaaaaaggggggtaggggaaacaggccgctaccatcctaccccagcaaggcaggcctgctgtaagctgagctcaaactgggctgcctgagactgttgagttctttggagcatcgctggcagcagcttactgactcctcagcaggtggcagcgttccctttgttctttggtgaagtttggcgttttcttcctaagacttcctttgcaagtcccttccttttcttctcttcagcccccactgaatgcatgagccgtcttcatacattggaaaaaatacttttcccaaggatcgtagggactgtgggcaattcacatttgcaggtttgactcctttttcttttttctttttctttttcttttttttttttttttggtttttcgagacgggggtttctctgtatatctctggctgtcctgaaactcactctgtagaccaggctggtctcgaactctgaaatccgcctgcctgcctctgcctcccgagtgctggggttaaaggcgtgcgccaccactgccctgctctagcatgtttgattcttttttttttttttgttttgtttttttttgttttttttgttttttttttgttttttgagacagggtttctctgtatagccctggctgtcctggaactcactttgtagaccaggctggcctcgaactcagaaatccgcctgcctctgcctcccgagtgctgggattaaaggcgtgcgccaccactgcccggcgcatgtttgattcttaagggcctcatccttaaaagtaacttcaggcttaacttgttagataacacacgtcacatctcaccccatgttctgtgtcctctaggactggaatgccatgaaaagccatcgctaattaaatttccccatgttaacctgctcaggtttatttaaaagctggggttttgcgccccccccccccccttttaattaaattggtatttggagctggctggtggtggcgcactcctttaatcccagcactctggaggcagaggcaggtggatttctgagttcgaggccagcctggtctacagagtgagttccaggacagccagggctatacagagaaaccctgtctcgaaaaacaaaaacaaaaacaaaaacaaaaacaaaacaacaaccaaaaaaaccccaaccaaacaaaaattggtatttggaaacgtcccacactcactcgtaaggatctgtcattgactcttgtgtaataggggcacgttataccactggtcctagtttctttgcttgtacaatgcagttgatggatgaggggatccttgcaatttctttttcatcttccatctttatatcacagagctgtctgtcaccatgtaggatggaaagagtctgtggtgctgtaaaaatacaattatttctagagggaaagaaaaatttttgaacagaacattgttaagtaatacaaagagtgaaaaacctagttgaagcagttgatagagaagagatgatatttggagtaagacagagcttgtacagcatccctgtagcatacagcatccctgtagcacacatccctgtagcacacagcatccctgtagcacacagcatccctgtagcacacaagcatccctgtagcgcacatccctgtagcacacagcatccctgtagcacacagcatccctgtagcacacagcatccctgtagcacacaagcatccctgtagcacacatccctgtagcacacagcatccctgtagcacacagcatctttcccaaatatcatttatggtagttactgcacagacctttctcaagtgctagagatttcttagtgatctcatttatttaaaatgaaattagaggggctggagagatagctcagcagttaagagcactgactgctcttccaaaggtcctgagtttaaatcccagcaaccacatgatggttcacaaccatcagtatagctaccgtgtactcgtcatatacatggtggctcacaaccattcgtaaagagatctgacaccctcttctggtgtgtgtctgaagacagctacaaggtacttagatataataataaataaatctttaaaaaaatgaaattagagtcaatcttcctccctggttaattaatattctttttataataaacataattctattaggatatatatgcatatatgtatacatatatgtatatacatatatgtgtgtagttatacgtatatatacgtatatatgtgtacatatacacacacacatatatacacacacatatatattatttattttgcggtagctattcctggttttcaactcaactatatctggaatgaactacaatcaagaattggagggcatgccaggcagtggtggcccacgcctttaatcccagcactcgggaggcagaggcaggtggattttgggttcgaggccagcctggtctacagagtgagttccaggacagccagggctacacagagaaaccctgtcccgaaaaaccaaaccaaaccaaaccaaaccaaaccaaaccaaaccaaaccaaaccaaaaaccaaaaaaaaaaatataaataaataaataaaataagaaaattggagagcacacctatgatccagatcttgaggctgggagacacaagtttctgacccatatcttgacatggagatcttgaggtatagtggtcattaaaagcttagacccagttcttccagaggtcctgagttcaattcccagcaaccacatggtggctcacaaccctctgtaatggaatctgatgccctcttctggtctgaagagagcaatggtgtactcatatacctaaaataaataaatctaaaaaaaaaaaaaaaagcttagttccaggccaggtagcaaatgcctttaactccaggagactgaggcaaggagatctctgggttcaaggtcagcctgggacaagttaagtggggaaaagaattgctccgccatacccttccctgagaactgtgggaaaacaatgatggtcgcttcaagtcactgggttttactgtgatttgttgtgaagcaataggtaattgagttagttatcaaagcaccagcacggctaacttgtcttggtgtgctgtgaagaggttgcgacagcccaaggattcaagtttccaaagctgactcatcattatgaatgtggacccagttggccagtcattgctctatgcataaggcttaatggaaggagcgcctaacagtcacaagcgtttgttgaatgaatgaatgaatcattataagaatggcaataaggaccccatcagcaggaggttaatttaagcagatttggtctgttttcttttccaaaaaggtactccttcctccaaagtagttgataatctagaagtactgtccgtcttgatttcatatcaatgacactcctaaacctagacacacattatttttcttttattagaagtattaaaacagcaaactatgttcttttgggctagaactggagttaagactgaagtagaagatccagcagtcaaagtgaacagaactaaaattgcttcgtgtgtttccccgggtgacaatttctgcgtaccacagacagcagaggtctggtccgctccaggacaccccgttcactctcgacttgtctgaggctgatgatttcatacagaatagctcttgagacaggaaaggtgacagagtgacatttgcaaaagctttgggagaggtttaggctatgagaagcttatagacaggcttttttttttttaaaaaagatttatttatatttattatatgtaagtacactgtagctatcttcagacagctccagaagagggcgttagatctagttacagatggttgtgagccaccatgtggttgctgggatttgaactcaggaccttcggtagagcaatcagtgctcttaactgctgagccatctcaccagcccctagacaggcatttgaaattttctcttggaatacaggaattgcaggactcacagaggtgccttctggagaaagcatgagcaagtggtgtttgaaagagcaatagtggggtggtaagatggctccatgggtaaaggtgtgtgccatcaaacctgacaacctgtattggatccccagaagctacggggtgaaagcagaggacagactcttgcaagttgccccctgctgtgcacaaatgtgccaggacctgtgcacatgcgccctcatgcgcttgcataaacaacagatagatgtaaattaaaaataaaaagtagaaggagaaatcacagaataaataagaagaaagctttcagagctgtagaagaacagggcagtttaaattcaaagccaaatgtgctagctaatccattatatatctagaaaatgcttttttttgataaaaatagagaagcttgcttaaaaattaaagcgctagactgagctctcttgttgaggggtcagagatgtggggaaggagaaaggcactacagcagcagcgtgctcacacacgagatgcttttgcacagagcctacaacaacacatcaactatttatattacctacatccccttcttggtgtcccacttatcaagggaaagaattttctttggacatctttagcatgtagtaacaatagagttctggaatcagctgttggaaactatcattaaagctggtttatcatactccctaattattctatatagtcagtctccctagagctttacataattctcccttcgttataagcttctgtttctcccttgagtgttttaaatccagacaggtgaggaaatgaagcacttggaaaccagtgtattgtaatatctgtacagccaagcatataaatatatacattttcatatatatatatatatatatatatatatatatatatatatatatataaaattgctatatggactttttcccttttgccctactcacatcctttgagtggaataaagatgtgaaaaactccaaaaaattttaaaaggctgcacagaaacatatttgctgcgaaaggaagtaggggtgtatttagaaactcccaacaaggcctgatgctgtcagcgtggccagctgatgtcagaggggcccacacacctgccaacaccgcgtgtctgttccttcagccctgcagagcagccgagcgaagcagctagctggctttcggctttcttgcctcacttggtggtgcttgtgggctggggtcagcgctgggatgcgcctccttgtgctctatggagtgatgctctggaaacagaaacgggtccttttttttcctccagccaggcatcaggaagcttagggatgaatgtctttctttttctttagaggaagatttccgagcttcttagacgctccgagtaatgtcacgcaagatgcctccagggaagaggcaaaagagggtgatgctagtaacagggactctggggacaggaacgaatgtgggccatttccccttttcaacccacttctcttgatgtaacttcatccttatttttccccacagcagtagtagacactctgctgagcaccacttaggtttttgctgtgcatctcagctaacactttgacattggggattctgtgtaaactagatctccatcttagattaggctgtgtgaaccgaatttatttacatcgttagaaaccaaatagaggcctctcggctattgttctcagattgctctcattggtcatccctgccctccctctactgaccagaaccttgccccaaaacagcctgtaataaacatcaacgctggcttagcttgggctgctatctctggcggagagatctttaaaggatgtatctaaatgcaatgtttgagtagcttcagagagctctaatagaactgtaaatatccccggtttaattagcagtcctgcagttcggtaatggcccatagctctctgagccgagcctcttgaggtttctagacttcagaggctgcctgcaactatgctgtgtggacctatgaaattttccttctcctgtactctaaacccccagctagcctttcctagacacctactcgcaattattgcaaatccataactgactactatcctccggatttctaaaatgatccagtgtttcagcttaggtctcaactcagagatactttagggctcagattggcatcctgagaattaagtcccctgggaaaagaacaataaggaagaaaactctacctacattggagttgatgtcattttttttttccctccaagctcaaggtgatcgcttgctttgtggctggttggtgggggaggaggggctgtacgctagttatcagcatttctgaaccagctctctcaaccgcgacaggtcagccaatcccggcagtaagcttttacttgacaggtttgttctgggctgacagccattgactaggtgctcagataagtcacttggctgagtctacggtaggtggggcgcgctcaccagttcaggggcagtgactggaagtttgttgcaacatcggtaagcctaaccagccagcagcaacaggagatacccttttgccccgcgagtacagatctagaaagggttcacctcattaagcgaaggagatgcgtcaatcccccccacccccgccccgcgcctccccctagggcccggcctcttctcccacggttgggaacgcgcggtgtgggcagatccagaacaggagtctcgtgtcccggccttctggctagctctatgggttacaagcgaaagggaggaacagcttggggactctccgcgtcagcgtgcacaaaccggcggcggccagcagagaggggtggcgggggcacgtgcttggatgtggctgcttgtgtaaccagctccccaggcgctcggccccgacagcgctcctgcggacggctcgtggatgctattctctgctccgatccggcaagagaggggtccagcagaccacacgggagaaggaggcgggggcgatcacctaatagagcagaggggaccaagctcctgccccaggagcacacagataggggaatgggaatttggaaagttccccaactaggaccacacgtgacctcctcctgaaagtagttccgaccgcggctcatgtatccttccacctcgcctttgagccctcccaggcctgctcgccccgcccactcgctggctgcagcttccgaacgtcccatactccacacccgggctcagtaaccgggtcctcgaacatgcaaggtccgacagggtcagaacctggccatcgcgatccaattctgccgggttttcatagcggccacgaagtggggattgggggtgggggcttagctctttgaagactgagcttggctgtgatccggtagacccaccgctgcggggagctgcgggtctcatcaccgggcggtggaggggtgtgtgtgaggtgcactctattcacggagacccactttgtccaaccaggggtgtcctttgggccctggaaactcaggggagatgtgaatgtacacgccccgtatgcacaatcatcatgcttggctgggagcgttcatctttcgggcaaatgaacccagctgcctgggaagcaagaggcggggcagggaaccggagcccgatgaggtgacccacgcgggagacacaataggggttgttctttgtgcaaagactgacaccttgaggacaccgtgagggggagaggtgtgttatctaggtaaagactgtcgccgacaaatcctagcgaagcactgcaatctgaccacagcgcagggcagggaatgaaagccgttccgaagaaacgcagggacagacgcaggaaggataatcctgcccctgaggctcccggagcaccgaccaaggcggtcagctagtgcgatccacctgtgagcggtcagcgattgtgctcagcgcaccctcactcggccccagcctgttgtacctttgccgggtctctctgcgctgaggccaaagccggcgtagctccgggagcgagccgcggacacactgggcatgctccgcggcgttccccgcccctgtcccttccgacgccccgccccgccccgccccgtccccggctcagcgcccgcctcccgcccgcctcccgcctcccctccggctttccgaggcgccctgctctcccggcggggcggcggagggggcgggctggccggcgcacggtgatgtggcgggactctttgtgcactgcggcaggatacgcgcttgggcgtcgggacgcggctgcgctcagctctctcctctcggaagctgcagccatgatggaagtttgagagttgagccgctgtgaggccaggcccggcgcaggcgagggagatgagagacggcggcggccacggcccagagcccctctcagcgcctgtgagcagccgcgggggcagcgccctcggggagccggccgggcggcggcggcggcagcggcggcgggcctcgcctcctcgtcgtctgttctaaccgggcagcttctgagcagcttcggagagagacggtggaagaagccgtgggctcgagcgggagccggcgcaggctcggcggctgcacctcccgctcctggagcgggggggagaagcggcggcggcggccgcggctccggggagggggtcggagtcgcctgtcaccattgccagggctgggaacgccggagagttgctctctccccttctcctgcctccaacacggcggcggcggcggcggcacgtccagggacccgggccggtgttaagcctcccgtccgccgccgccgcaccccccctggcccgggctccggaggccgccggaggaggcagccgctgcgaggattatccgtcttctccccattccgctgcctcggctgccaggcctctggctgctgaggagaagcaggcccagtctctgcaaccatccagcagccgccgcagcagccattacccggctgcggtccagggccaagcggcagcagagcgaggggcatcagcgaccgccaagtccagagccatttccatcctgcagaagaagcctcgccaccagcagcttctgccatctctctcctcctttttcttcagccacaggctcccagacatgacagccatcatcaaagagatcgttagcagaaacaaaaggagatatcaagaggatggattcgacttagacttgacctgtatccatttctgcggctgttcctctttgcttttctgtcactctgataacgtgggagtagacggatgcgaaaaatttctgtagttggggtgactataacgtttaattctgggcgcatttctagatcgtgcatattgtgtctcttccagtgtattcaacctagggagtgttcggctagacggaactcatgcctccttgcaagtgtcaaggcacggattgttttcttgtcgagctctgtggtctcttcttaaaatctattgtccggtaatacagagtactgtacactggattagcgagctcgtcaatccagccttctaaatgaactaaaaaaaaaaaaaaaaatagacgctttgggttgtgcatatttcgattagatcgtgacttgggccctagatctagggtgtagatgagattaaaatgaaagtccgtgctgcacgtaggcatgttgcctcagaatcttgcagtgattgtttttagtttcctgggttgcattggaagatttttctgaaatgtgacttgtggactgatttgcataactttataagcatagtcatcgtcagcatggacggtgcacatttgagggtagaagtagttttgtgtgtttaaaccgacgtaattacaaatttggagcctgcatttggaagttttgtagtttaaaatcaatagtgccagaatatatatcattggagcttttaatagaactttgttaaattagactttctttcctgatgagatgtgggataggatatgaaatttgcatttcagtggtatgttccattcatttgacctcgccacacttgatagaatggagatcgaatagtttttgatcccagatgatgatgtctgtgagtccagggatgcttgctgtgtgtggcaaatgactgcagaggttaaactcagttctcacatgaaatttaagtagtagcgtgaattcgctgctcatattttttgtttcaggtgctctgactcgttggcttatcagtgggttttagcctgatttgtgcagaacgtcaagtataatttagcccgctaatatccagacaaactggcaggaatggatcactggctccagattgtaggtatgctagctctctgcatgcagtaatttactgagtcagcttgttgaataagacagaaacccaagaattttaacgttgtatagttctgattgtctaaaagttaggcctttgtacttcaaaagttcgtggtttaaagcatttatctttgcagtttcaggtatggtgctggttatgatcaggggtaggaaagagagccctcctcttttgcagagtgggaagtgttgacagaaattgagagctttggggaggccagtgtgcaaggtgtgcgaaaacacaagttgcaggtctgaagtgactgagcctttaaatgattgggccttttggtacaacccaaaattttgttatgtgacttgtagcattgaacagtatttagttaaaattatgtaattttataattggtggtaaggtattctttgtaaaaattattttttagttaatattagtagacattttcttaaggtggaagggcagcagcaacttgtctatacatgtcctgctaatagatcactatggagaactttgtttattaattaatttattattttttttgaagaaatattttcatttggaagaggtttgatggattacattagtggcatataaaatgcatagctaattttgattgagttttttgttctgacatgaagatgaaactctcactgaagagctggcttcacacaggctaattttctttcgagctaaaaatacagtttgaaaggaatctttaatttccgagtttgcgttaattgagaagctttactcaggatgaacttgaccaaaagataattggtgagcattctgagttgtcacttgcttcaaggcagtttactgttggtgtgaattaatgttaataatctcgatctagaaggaattagtcaggtatctatttaattaaaaaaaaaaaaacattcaaagaaaagtctagaatgcctggtaggcagacttcttgtagagtccaaagtacacttctgctttgccttcctttccccaaaggacttcaagattattttgtaaattttttttttttgtctgagcagtgacgtgattgcagttccttatttgatttcatactgcatgggcttctgcacgtgcagtttatgtggctgaagaaatccaaagctctccctttagttatggtatgcgtagaaagcagcatcaaatactgcatcaaatgactaataacaaactcttaatttctagagctgtggtttgatggagccaaatgttgatgtgagaacgagtcaggaggggaaaaagtcagcgagccttgctcttctgagaggtgtgcgccccttagttctgagaagctagggagagggcttgcttggttcctcatcagggttttctgtgtttggggcagggattaaaatggtcattgaagatttgtgctggtcagtgttggcaatgaggttggccaagttaaatttcattatgaaagtagtaagttgaatattttcatttgctgaaggcacaattgaattactgtaggaatgtgttggttggaaattattattttttttttaatatataaaactctgaagtctttttttttttaaagatttatttatttttatttatacaagcacgctgtagctctcttcagatacaaaagaagagggcatcagaccccattacagatggttgtgagccaccatgtggttgctgggaattgaactcaggacctctggaagagcagtcggtgtgctcttacccgctgagccatctctccagcccaggaaatttttcttaccgtctggaaagtaggctgaatgtgagacagcaagagttaatgatgttaaagcacagagaaggttcaggtttctggtacagcttttttgtttggtatatttacttttcagatactgaccacaggaatattagtaccttgcagagagaatagtgattattgatattagctcttttgttaaaggcaagtgattgttgcaggtaattatggtttttctttataagtgactctacaaacttcatcttgcctttttcatagtcatttgtgtctttcctgaaaaatacaactagtatagtaagttgcaaatttcatttttcctaaaacttaagaggagtaaagtgcatcaaaaggagtaattttcagttatgtgtaattcaatataaggaaaagaaattttattactgtcaattttagaagtttacacagcaatagagatgtagactgagattccttataacgtattaaataaagattaaatgtttcaagttaaatatgatgaatataatctggttatttctagacatagatttagaaagtggagattcatggcctttaaaaatctttattttagtaacaggagaaaggcagatagtgtattttcatttttttgtgtggaacattatgtctaatttatcataattatataaaatatatacctaagtattatgaaatagcttacctcctggaaatgaattcagttcttatttttaaatgttacaacatgagttgttggtttttttttttttttttttttttttttttctgttcatttgtttatagagtgacagtattttttttttttttttcccgagacagggtttctctgtgtagccctggctgtcctggtactcactctgtagaccaggctggccttaactcagaaatccacctgcctctgcctcccgagtgctgggattaaaagcttgcgtcaccaccgcccggcaagtgacagcattttaagccacttctaaaatagtcactttaatgacttgattagaaaattgttcatgtaggaaaatagaaagtttgaacattcactttagtaaatattcagttttcaatactttatgtctcagtaagctccaaatgtaggcagtgtttttctattgataacttatgtaaattcagagttgacagggataagtttagagtcctgagtatgtaggtcaggttttcatttctgtaggcctattccatttagaagtattctgttctatgaggcagtgttagttattagtacagcttaaaaagtttacttgctcgcattttttgtttttccatgataaactactggctcataaaacagaagtttggctgcacagagctggtggctcgcgttttgttcccctttcttctccctgtagataaaaaagttgattttcagaaccagcgttggagagttggttttgtgatccactcttttgaaaagttacaggacttgttccaaagatcatgatttaggtatgacactttgtgtggttttatcagaagtgatttctgtaaatattcagggtttttttgtagttgatttgtatgtggtagttttgaagttcatgcagttgctgagctattagtgatgttgaatacagattaaatagctttatgttagtatttgctgatttttttttttataggtcttgctgctgttgcttaaaagtgtctaattgtgggatgatggttctcaggtcctgaagctattggcagagatgaaattaggatcctggctttgatgtcttaccttcccattctgtattctctgctatggtttcagaagggacgatatagcagtttcagcttctaaaataatttatactggaacaaaaagcctgtttcttggaggaaggttactatcagagtaaacaactaattttgcctgggaagttttaattacatttagaatagtcaggtatactcttctattgcaacggacatttgtggacatctttggagtactaagacttaacacttgtttgtggtgttaactttggagagatgcaaactgcagttgcacccactaatgacctgtatgtgcgtggtgtggaaaagcttgcaaatctgctgttttgtgtaattagtcaaacagttataatcagaaagccaacgcttaatacgaacagtgactttaacgtaaatatttgaatttttctatgtgtaggcatgcatgtgagtatcaagttaacaaacttactagtctggaaaatggattttctccttaaagaacagactactttggaagccattttaaaccataattgagtcttttaaattacattgaaatacggctggtcttatctatactctgaagttataattatttatcttagttttaggtagacagggtccctgtcttggctctgtcacagagctgggtaactatgctatttaatttctcttagtcttactttacctgaaataaaggaaggataatgatacccaccacaaaagtttatctaataccagcaaggcagaggaaggaggctattgctaattcctaggcagtagccttcagtactacatagtgaatttgaggtccactatagttctatactgtgagttccaagccggctaaggctccatagcgagaccatgtctgaacaagcaacaatcaaatcacatagttaatccccctacagggtttctctgtgtagctctggctgtcctgggactcactctgtagaccaggctgacctcgaactcagaaatccgcctgcctctgcctcccgagtgctgggattaaaggcgtgtatcaccactgtctggatgttttcaacttttaagggaacatgaaaacttccttagttttcacataataactttaagaactatctgttgtaagattaaattttcttagtattcaatatagatgaatataaatagcatgacatttataatatgtgtgcttatatgatacgatacatagcatatatgatctatgatacagttatggtatgcttgtccttaggaggcagagcctcaccatgtagccctggcttgtctggaacttgtggccatgcttggtcagtatcacagttctttttcacaaagagtattcctcaccactaagaagtaggacttcgaatatgtaactcagttatataaactctcaggaaaggtacattagcatttcctttctgctcttccagctcacatacatacagcagacaatacagtctgcagtgagctactataggaatttaaagttactgttaaaccttgccctcagtttcacagtgagccaggattttcagtataactacaactttgaaatgggaagaaagagctagagagatttttttccttcccatactgcatttttaaaaattactcatttatttggggttggggatgggaggaatggaacagggcatacgtttggaggttagagaacagctttcgggagttgattctctcattcctctctttgacactgggaatggcagtcaggttgttagggtagcaggaagtgccttttagccagctgagccatcctagaagctcacatgcttttttcttatctaggggagggaagaacggagtaagcttaaggctcacctacctgcacgtgacagggactagtttttccttcctgtgcttgtggtttcctgggaatggagcgccttaatttccagggctgtttcttatttattttgaaatgcagagtggatgctgctgtaattattcatgactgcgctcttgtaatttttatttattttttgctgagctttccctgagtattttagctgttttttttttttgtagcagattataaaattgagttgcatatctttatatctgaacctatctcactgtctgaacgagtttctatctttctcttctgtctgtgtacctgtactataagcacataggtgttatatcactagaggaccagtgactttcattgcatggtaacactcatgtaggttttcaggctgaagtagaataatttcctccctccctccctccctccctccctttttcttccttcctagtgatgcagacctcatttgtatgtttgttcttgaccctaggagtaggatgcagttactcaaggtgtatggaagggtatgaattctgctttgaaacagcttatcttttaaggagatatatttctaaaagtgaattgtaaaaatcaatatttgtttaacaacgctagaagcaaatttttgctttgaaacaaaatgcagattttttccaataaattttttctctttaatgagactttaaaaaaaaaaaaggttggtttattagtgtatatgagtacattgtagctgtctacagacacaccagaagggggcatccaatcccattacagatggttgtgagccaccgtatggtttctgggaactgaactcaggacctctggaagagcagtcagtgctcttaaccactgagccatctctctagcctgagacttgttttttgaatgttttatgtttctctcaactaaatagaattaaaatttttcttttatgttgagaatgaagtttggggagatattattaaagttgtccttaggactctgtattacattatctcctatcaaacaaaccttaatgtactatattctctgtgtatgtgtgtgtttatagtttataggctagcaatcaacattggtgtctcctctgttgctctgtgccttgtttattgagacagggtctctcattgaacctggagcttgccaatttggcaagactgtcttctgtctgtgccctccagtgctgggatcacaggtgtacacaccatacatggttgtacacaccacacatagctgtacatactatacatgggtgcgtaccaccatacatggttttgacattggtgctagggctctgacctcagatctttgtgcgtgcatagtaaagtactttatccactgagccattccctcagctcccatgctatatactcattgagttaatagtatttacaggtgcattatatcaatagacataagtcctaaataccctaatgtaagaaatatgttgatttgttttgtagacaaggcccagtgaattagaaaggcagcctgctagaatgcaaagaacatagcctggcattagccaggccctggaattagattcctgccctagttcccatctttctaatgaggggtaaagctgtgacttgtaggtgtttctttttgttgatctgaacttttggtaatgtctagaaacattttggtgaacatggtcatacctgaggtgacagaaggcctacttgcacttagtgggttgaggctactgggctcttagacatttgcagaacctgggatctgtttaatgttaggggaagtgtttgatatgtagatatagtacctttgccaaggtcaactgttgctgggtggtaaaaactgggcccacataggttttctgactattgtggggcctttctctctctctccccccccccctctcttttctttcttcctttcttccttccttccttccttcctttcttccttccttccttccttccttccttcctttctttctttctttctttctttctttctttctttctttctttctttctttctttctttctttctttctttctttctttctttctttctagacatggtttctctgtaaagacctggctgtcctggacctcactttgtagaccaggctggcctcgaactcagaaatccgcctgcctctgcctcctgagtgctgggattaaaggcgtgtgccaccaccgcccagcggggcttatgtttcttctaacaactttgtccactaaagatatctctaataagaaaaagatttatttgacaaggtctcatgtcttttagcattttgtgggagtttgaacctctgctgaaatgctgtctttgtcgctgttctgaagagtatgacagggaatgcaaggtggatgtgcagtcaggtgttttgctccttgaagctgaagcaggaggattatttttatgtttgaggacagcttgggcaacctcatactacaccttgagttctagggccaggtcagactgtctcaaaggccaggttcgcgctcacccccactcagtgtttgaacagttttctttgtaattgtttagggagttactttgctgctagtgtctttaatgttactgttgtttaactgcttctttagtcttagatttttttttttttttttactctaaacctttgtttcttcagatggggtgaagttaaatgtgctcatgtgaagaaggggcaggtttctgacaaagaataagaaaaatcatgaaatttttccagatgaagagaatgggttggcctgactgaagttcccgggtgctggtcacctgcttttctgagccttacattggttgttagcctggttactggaaattaccgtgatgctcctgaattgggcatgcgagtttgcattagtccaaagatgcacagaaactaaagcagtaaaaaggacagagaatttcttggtttatttttagggatcacaagcataattataagtgttctaggaatagattagttgctatgttggtttctttttcctgtttaattttacaatttcatttgctgctcactttacaacagaataaaatgtccaaggccttaatttttaatttcttaggaaacttaagtactgatttagagttttggttcttgaagttgagggcagtgtttaggtatgtatactgataaatgttttgaaaccgacatgacttgtcatgatagcttcatattcaccaagaaaagcaaatagtatccattgctactaaatactatccattgctaaattgaatagattaacagtgattaagtctgaattaagagctcatttgcttactaaagaaaattccttttataaagagattactaagagaaaaattttgttgtttgctcatttgttttttcatttcttcaaaacttcaagttgttttctaattcttggtgaactcaaagaggtatcttttttgaataatttatatagtgcttcataattgaaattatcaaaaatacatatttacctataaattaagatttctccatttttttctcttactatttttttatatagtggacttaaagtttcaaatagggacaatttttatgattgagattttacacaaatcacaatcaacaagaacaaaaaaaacaattgaaatattagagctttgaaatgccttcatctgaaattacttctaggccatctattgcacatttaatacttaatgtttatattacttatgtgagatagcacacacacatataatgttatatgttacatataatatatattaaatatttgggacaactttccagtttcctagaccatgctgccctcgaactcattataaacatcccatttttcctgcttctcaagggctatggttataggtttatattagaattccaggctccaaatacttttgatatattaatttcatttattttggagtattttgctgatttgaaattgaaatggaatagaaataatttgaacaattttcatactaaagtgggcatagctttgttgctgtacctttgaatccataattattggcttgccatgatgttacagttgcagtttgaataatgtggtttatatttgtatagttggcttgtatttgttgtactatcaattaatcaatgtgcactgataactagtactagcttttggtgaaaaatctgcatttaacagtttgtcagattttatttttaagtcagatactaaaagagaatctttttttcatagatttttattatttaaatgcattttatatatatcaaacataataatactgagtattttaggaatcaaataatacataaaaatttgttcaatttttatattcatatctaaaagagaatctttaaccatatcagctaaccattaattctttatcaataaattatattaatattttttgtataaacaatttaaaacaaagtgatagaaacatcgttttttattttataaacaaagttactactaggtgtgctctgtggcctgtgaccttagcaccctggagctgtccccaaggaaaccagaagtgcagttactcttggccacattgtaaggtgaagcttagtctagaccaaaagagacagaaccaagacagaaaaacaaattacctgcttattattaagtacgattctttcccaaataaagtgaaacttaagcttgaaattttcatctaggcataaggttgctatcttgggttctaataaaaattagtggtggcaaaaatcttttgttactgttttcttgttgctgcctggggactgaagacccagtcttcagtagctttggtggtctggtttgtagggcatttgatgaaagaacagtattggaaaactgtgaagcactttctcctgcattgtgtccggattgtggtcatgattgcgtgagtttgaaaatatgagaaggtccttagaaagatgtttgtttgttattactgcaaaggtcataggttgtggttgtgccgtgtccagatacccaggcctgccatctgttcctcagatgtaggaaaaagttaaggtaatttagtggtagtaagtggttttgacacctttgtttttggaatcatctaattataagttttaagacctaagattaagttttaggcctttgtaaaaatgaaacttacacagtatgctatcatttgtgcaaaaccactaagggcctgcttcagagctgaagatggctgctccgagcccaactctttactgaagtgtctgcatgcttcagcacaggagtgtcacgtgtcacgtgtcatgctttcacctgacgtactaaattacacaaaatgttggggttttttaaactaggttttctaacacgttatgtaagaattgataatacagaactcagtgagggcactgacttagtaagcagttttaaacatttcttttaagtatttttttcaagccctgtgctttttttctctcctacaacttaattcttaattttcatctgcgtttgaaggagcttcctcaggtaaaccttttctcttgcattatacttgcatgaaaatgatgttagctatgctgtatttaaaatctttaaaatgcctctatatggcttaatataatctgatgagttttgtattatagttggagtttttgatgtgccaagtggttattgtaaaaataatgtctgaagtttaaatatttgaatttgtatttttttttaaagatttatttattgtatttatatgagtacactgtcactgtcttcagacacaccagaagaggacattgaatcccattagagatggttgtgagccaccatgtggttgctgggatttgaactcaggacctctggaacaacagtcagtgctcttaaccactgagccatgtctccagcccgaatttgtattttcaaacccaacttcgggcctggggtctatagtttttgagtgcaagcttcttgtcaggttaatgtctgggaggaagaaggttttgtcagtaaagtttctgaacttttgactagaataactgactttctgtgatgaagactaaactacaggccatgactgcacaggagtcagggcgtacatagatgatcctcagattttgggcagcttttacccaaacattgagtttagaaactgttctccattcggctcacttcgtatttggatagcatggagtattaaaggagttctcattattgtcatttttattgcttccatttaactggtatttttgtcttttgtgtattgagctctctttctgtctcccccctctctgttagggcctcactgtgtaggtctagttggcctgaacctcacaagactcccactgcctttgcctccttgggttacaggagggtgccacctcacttcagccaaacaaaccttgtatgtttcagcactttatttatcagttgaaaatactgactttcttctttttttaaattttagcctttttttctatggctttaaaatatattctttgaacataaggatgataaattacaaaggtgctttctcccacagagccagtaattattttcttataaaaattgtacccctccaatcaatttctttaaaaagtagtttatttaaatgtgcaccaaagactcatttcttttttttccaaatatttttgtattttatatgtaagattgttctgtctgcatgtatgcctgcatcaagtccagtggttgtgagccaccatctgggtgttgggaattgaactcaggatctctgggagagcagccagtgttcttaactgctgagctatgttcccagcccctaaagacttgttcttactttccatctatcaatacagttaaaatgttaatagaaaagtttcatattctaaagtgaattttaactagcatattttaaaatacaatttcacagttcagggaataattttataattcaaagttgattataatgatttaaatgttttcagtgggaataggaatccttttacaatattaaaacaaggcaattataaaatcatcaatatgactctactctagtaatgagtgacagtatatatgtcttcatgatttaaaatctacataattacttccggttcattttatttttcttcagtccaaaacagtccataggggcaaatttatttataccacttgcaatagaaacgaagccatttcatttgatttctatgttagtaatacagggtaaagaaacattttatttcatgtattacatcaaagtcatatgtaaagtgaactaattcagcccacagatttggagtttttctgttttaaatagtctcaaagtctgctttgaagggtaaaattttgactgttaaaagcaactaaaaattttgcaattttggctaaattgaaggagactggtccatcggcaggcaggacatactgcgtgaggaccctgagtctcttcattctcagtgctgaacttgctaaggcattgcaggtgaatgttttgggtttttttttatttttgcaagatgcagctactactaagttaattggcactaaatatgacaggggctttgttctcaagttactggtccatccttcaggcacataggaatatctctcctgtcgtaagttagagactttaatatcttttgaatgattataaagtagctaaaacttagtgttttgtttctaagcagcctgttgcaggagtaacttagaaatctaatatcaaatatgaagattagagcattagagagatatctcttatagctttatgttagtgttgaatcaattacagctttagtttttatagtcttgtgtgtaccattatgatttttctgtagacagtttggagtttgtgtttgccttagttctcataaagttgttaatatgcctgatacatgttgggcttctgcacttttgtgcatattttgtcattagtggtcaatcttagatggcttttttagtggcaagaaaaccaaagagatgccgggctggtggcgcacgcctttgatcccagcatttgggagctagaggcaggcgaatttctgaggccagcctggtctacaaagtgagttctaggacagccagggctacacagagaaaccctgtctcgaaaaaccaaaaaaaaaaaaaagaaaaccaaagagtgttatgcataaaagtgtgtatgtgtgtgtgaaccaaagagacagcgttgtgtgtggatgtgtgcgcacacttgaatgtagtgtaaatgcagtagagctttgaaacaggaaaccagtcttttcatattttccagagacctaggaagaagctaattgttctatataaactcattagaaattaaaagttttagaggctcacatatgtaggcttttgagcagttgcaggtacattatttcataattaacttctaggaagaaaaactgggtgggaaactagtagggatgactagtaagcaagccatcggtaaatatgcccaataaaccttactttggatttcggagttgctgactttaaaaggaacttaataaactaagtaaaccttatttgaaattcagaatacttttttcattgaaaaattgaaagttttattgaaagtttttcattgaatttattcatatccagatataaataagattggaatcacttttaaagagattctaaaacttaaggattcagtggaaaaaaatgtgctggggatacccagggacttccagatgtaaggcagagtgctctaccattgagctatgaaaccattcctttctttctttacttttttttttaaagagatttatttattttatgtatatcagtataccattgctctcttcagacacaccagaagaggtcatcagatcacattacagatggttgtgagccaccatgtggttgctgggaattgaactcaggacctctggaagaacaagcagccagcgctcttaaccgctgagccatctctccagccctctttctttacttttgagtcaagttttccttcactgacccaggctagtcttaaaccctggaggcccagaacttgtgatcctccagtctcaccctaccaaatagctaagcattatatagccctgcaccaccatgccaggttgattctgtttcaaagggtgttactggcacttgggtgtggtgcctgtaatcccagtatttagggaagacaggaggaacaagaggagttaaactttcctgctggcaagttgcagaccagttcaggctaagacacccctcttcccacaaaaagaaagtttgtcactggaaattaagttagttaatgtatatgcttacattctcatgtatgttgttattgcatagccattgtcagtgtttgatacggttttcttttcacaaagagttttttttttttttttggtttttcgagacagggtttctctgtgtctggcctagtatttgtttttgtttgtttgtttttttttttttttactttatttattatatgtaactacactgtagctgtcttcagacactccagaagagggagtcggatctctttacggatggttgtgagccaccatgtagttgctgggatttgaactcggaactttgaacctttggaagagcagttgggtgctcttacccactgagccatttcaccagcccttatttatttatttatttatttatttatttatttattttttgagacagggtttctctgtgtagccctggctgtcctggaactcactcggtagaccaggctggcctcgaactcagaaatccgcctgcctctgcctcccaagtgctgggattaaaggcgtgcgccaacacacccagcttgccctttctttcttaagcattttctttgtaatatgttacatgcatgttagggctttcagtgtcccttgttgaaagcactccagtaatggtaaatgtaggttgttcttgatgtctgctgacttgacaggccatgacgaggcttttccccttcaggctttcccttgttcttgactatgaccccatttatgcatatatgcctgagtaaattgaactacttgacaggcatccctaaacctgtgtctgttttatgtaaatcctgtcctttctgtgtgtctttatgagttgcattgggctcttgttcctggatagatttctgtctctttcctgcagttctctgcttggactgttctagccacttaagtatatcttttctaatataaatcttattttttatgtgtatgagtgttatgcctgcaaacatgtctctttcccgtatgcgtgtctggtcttcactttgatatgggtacagggaaccaaaccggatgctctttctgcaagagcagcaagtatgtttaactgctgggtcatctctccaaacactcctgtgttttcttctgtcaccagaaggcgtgtgtgagtgctacccaacataatactcacttggtgatgcttatacatacttccacggatccctctgaaaacatcttcatttaaaaaatacagtagtacttttagtgccatggtaggtctgtgtgcctgtctttcttgaggacggtaaccactgcccggccctacagactttttaatttgtctcatttattcttgcataatattatttagcctgtccctctatattattcctataagttaacattttttttctcaaaggctttgagagttggtgttaaagattcttggccattacagatgatgctctgcctttgtagtacctatggccaaagccttctcatgacttggagatcaattactgagttatatgtagaaggcaaatgtatccagaatatgtaggcggaggtcttaagtggttgttttaaaggaggtaacttggtatagttgatgtgaaaatcttgtaggtagttatgagatggaaccccagaacaaatgagagctagaaagatggataaaattcatggaagtgtagatttttagttaatcggaaataaattctcccagaatatagagatgggtttttatgttaactggttttgaattgaaactaaggacatgctaaggactaattacactgatgagaagaaagcatgtaggcttgagcctcagtcgcgtattctgacatcacagctgtcagggatgaggttatcactgcccgccgagtcactgtgggcagtaggaacttatagaagtctaaggatagtgagtggctgactgtccaggctatagctcaaggagcagacaagtacatttgacgaccttttataatcacagctagcgtgggaaaagctaatgttttcaaatgcatgcatatttgtgtcattgtatattctaggtatttccttaacttaataatttagatatttatccaaatattattgctatgggatttcctgcagaaagacttgaaggtgtatacaggaacaatattgatgatgtagtaaggtaagcattcttgattttctatttcttatattaataaattattttgatgtgttttatttagaaaagatcccgaaaacacagaccagtatttgcattttgatgtgttttggtaaaactctgaaagttttaacctaaagcacctgacagctctcactcggctggatgcgtcactggatgagaactggctagttatatagtcgtgtttgtttatgtcatgaagatttttttttttgtattccataatatgtctcttaccaggttattctctggcttgtattacagtacaaggttttgactttgtatttgggttaggccttgcttaagtaggtttgtttagttattcaccctgcggtatgagtgaccgatgtgttttatgtagcacttatacctgtagcagtgtttgatacaatgattttggagagacttgctggacattcattcaaaagagtaaatgaagagtatcataattttacaaaatttccaagtgtgattgttgcttagttcagaaaagtgtttctcaaggcccacttaaaaaatttagtttcagaataaaaatgcaattgtatgagtaaatgaacattaaatttttgttgcaaactatcatagtttttaacaattcattaatactgagtcttgctgtatttgctatgctggttctgaagtactttaatgaatttaaaagttaaaattctggattatttcctttttactcataagtgagcatctttcctggtgcttttaactatgtgtgattatgcagatttaaataggtgggagagtgctttgtaacttagagtgtcatgcagatgtaggatgcttttgtggtactgcatgactttatgtctttagatgagctagtagtcagtttcctaagtggctaatttttactgttttaaattgtgcttgtttggataatttattataatattgtttatgttttgttcaggtttaaatttcaccatctataaaagtctaccaaaactaacaccaaaccccttactgctttgtagtttccattaaaccttaggttatcctgttagaggtaactgtttaaaagcctttaacaatagggaaatacatttgccttcttataattaggtagaacacagtggaaggatacttagcatggcaggcccacaggaacacagctcgataggaacacagtgatgatgcagagaaaatgaaatacgccacagaaaaaaagtaagagaggaaattttttcattgaaagttgcagagtatggttaagtggcagtttggccagataattattttctgctttgatgcagaattgtttatgtctttcatgttatgcctcataagatacactatttcacatcaattttatattcagccaaggaccaatttaaccaaaccaaattcagctgtattgaaaaggggagcaagttctttctttaagtggaggggatcttttctggccatgtaatgttcttttgactaatctggcatgctaattttatattgatttctcttaagtatgaattagtaagtgagggtgattagattatctttaaggttacaattccagtttctagacctttacccctggttattagaccttatactacagtaacttagccaaaaatatgttgtgttgaaaaattagtttggtcctgagtcttctggtttcatgattcctatacttttgcttgcaaattaagagaattgcacattcatttttataattagtaactaagacggaaattaattctatctagctttatctatctagtttttttatttagccttaggtgttctctctcttttaaagaaatctatctgtattatttagcttgttcttttagcttcttactttaatgtttttataaaactgttctgtgtttggtttttgttgtttgtttgttaagataaatgaccattaaggcctggataacttctgtttatcagttccccacccacttttatagtaaagtatgaatagtgactagaaaggaagataggccttttcctacaaactaaagtgactaaaaataacttttttgtgatttgtttgtttgtttgctttttttttttttttttttgagatagggtctgaattaagtaagtagccttggctagcctggaagtccttatgtagaactgtcttgttttgaactcataggcatttgcctctctgtctccgcctcggaggactgggatcaaagccaacaccattacattagcccctacaaataatgaattacaatgccttttaggattgccttctccaaagaacacttgtgtctaatatctaaataactgattacttcagtttgttcacactatattggtgatgttagttttaatcaatagtgagtgcttccttttgctttaaagttgataacatctcagtacaagtatttttgttttcatatcaccagatagcccagaagaagcaggtgatgtaagagggggttcgtttgcctcattgtttgagaaggctttctggctgtggagggtgaggagggagggcagaggccctccatccctccatccatggcttcctgagtttggggcagagttcatggtggaaggagtggaggcagtaactcctcatggctgtgaaaggaagcaggaaccagagaaacctgcagataatttgccctgactgactgatttctgtcagccagatttcacttccaaaggctccacaaccgggctgggaggaggatttcagattgaaactataacatgtttgctttcttattaataaactttttttttgcagttaatttttctttgctttgtctagtagggtatccaaaagatattttaaactatttttcttttatctaattccatatttttcttatatttcccccaaacaagaaatatataaaacttaaatctttgctattgtactatagcgttacctggagtgaggtaaacttaaattgcaaatattttcatgcttaaattgtcctatgcagaaaggtttggaagatatagtgtgctatgataagtaaaatttcatagctgagatctacaaaatttgagaaaaatatttagcttcttcatttgagatctgggattcatgtaaaaaatggaaatggaggaacactgggcttggaatttgctttctaattacagatgatttgctttttttaatctaaggagtgagctgacagggcaggcagggcaggagggactgcggaggctcccacagtagttgttgtcgttcctcttaactgcttccttctttttttttttcctcattttttgcaatgaagagggggtgatgcaccaccagcacttggcttgatttgtgcttttccagtgtcctttaggctggtgggaaagctctgtggctttaaatctaagcagtcgtgaacagactggggcatagtgtgtctaaggagcttgtcttgtaatctcttctgcccaatgactcaggaaaatgtagatgtaacagaggcaaactactttttacacaaaatgtttagtacagtgccaccaggtagacctttccccacctttatgttttctcttggtttccttttataatttgctaactctcatcttcctagacagtgtttcatggagctcaatttggaaaatgttgaaaatgaaaaagttatgtgtacagaattgttctaagtttgatatgttttgaggtggaggcatgctatatgacccaggctgacttatgtatagtccatgctggtttctaattcatgatttttacactcctgcctatgggtgtccatcaagcccagtttgtctatagcttttataaggaaatgattagagctcagtcttgtgacataatgatttaacaaaaagctattactgttttgtaaacccatgtataacctgttacaggttcaagagtcttattgtttcttgactgctggcatatatattttctttctgaagaaactttgcaaatgttcaattcttttttttttttttttttttttttttggtttttttgagacagggtttctctgtgtagctttgtttgtactggaactcactctgtagaccaggccggccttgaactcagaaatccgcctgcctctgcctcccaagtgctgggattaaaggcgtgcaccaactctgcacagccctattcattacttaatggccctctgaataatgttttcaagtcttatttttaattgatagtcaataatgatgctagaataacaaatagttctttctcattgaaaatcaagaaaaaaaaatgttgagcggtggtggtgcacgcctttaatcccagcacttgggaggcagaggcaggcggatttctgagttcaaggctggcctggtctacagagtgagttccaggacagccagggctacacagaaaaaccctgtcttggaaaacaaaaaaaaaaaaaaggaaataattaataataataataataaacaggaaagattacttctgtttttccattctaacatttttttgcccctttcctcattttgccttcctcttttccattttaaaaaaattagtgagttaacataatagtcactgttttaaactgtaatttgagtgacatttaatattttcacagtatagccagaggtaatgcagtcaccaccgataccaaattccagaacctttttatcactcctgaaagctcctggctgcccttcccttctgctggctgtctttcctgcacatggggagatttagtgtgttggacaataataatgttatgggcacaaactagctttgctatttaatagcggatactgttttctgtacatttatttatttactatttatatctgttaactattgtataacgagcttgcatataccatcttactaagtttgtagacggaatctaatccctatttcacttttataagtgccttaaaagaaattagaatcttcagttgccacagcttagaagtagcaagaagctggaagttgagtccgtgtctgtgagattccaaagttgattttttttcttttttgtttgttactgtatttaaggcaaggtctcactgtgtagctaaggccagtcttgaactcaaggtcctcctggttccatattctcagagtgctctgtgtataatcttatggtgatctggccagcaaaaattcaatttttaaaaagttttttaaccaggggagggatgcagtctggagtttgaactcagtcattactaggtacttcaccactgggcattacttaaagctgcttcccttaatatcttttttctgtacatcaaaggacaaaatctagaaacacttggacaaatcgagactatacttaaaaatcatgaagcctcgtgcaaaaccctgtatttctagcttatttttaaaagctgaaagagctgtcaaaactgaattcaacattcctgtgtgatggatcaagtatggttgtgtaatgctctctggcattaaattgttaccatttctccattaaggactgtttcttagtgaggtttccattgctggaaatgtgcctggcccaaggaatggcactattaggaggtgtggtcttgttgagggatgtgtgtgtgtcattttggggttaggctttgagaccctctcataactgcctgaggacagtctgctcctggtgtcctttggatgaagatatagaatcctggacaccaccatgcttcttgctgtgataactttcattatattgaaagttgttatattttaataatactgttaatgttttaccttgcctagtttattcaacttcattgataagtgtgtatatggaaaatgtacatacagtttgtcgctgtccaaagtttcaggcagccatatggaaggcgtgtgtatagtgtaaggtttcagctgaggatacattacattccttgttaaaccttagtgctgcagatgttctctcacttccacttgaagggctgtctatagcatttcttttaagttttcgtaacttttgtttctctgggaatatttcaatttatttctcattttttgaaggacagttttgctggatattttttatttctaggaccttaaatgttatattcttacttcctgttctgagggggaaaaatctgctgataccaacgctcctttgtgacatgttccttctctctgtatttgagactgtgggtctttctcaggagagggtcttgcataatacaggctagcctggagtccttgtatatatgcaaggatgtactaactgacttttgatcctcctgcttccacttgactagtgctctgatttcaggagtgcaccaccatcaaaggtttatgtagagatggggacagatttctcagagctctgtttgtgttatccaatgagatatgcccccagcctgtctttgtcttgtgatggtttgattgcgatctgtcttagtaagtctctgagtttttgtgaattgtggttcattgagccagaagttctttatattcttttatcaaatttgagaagttttgactgtacttctgtatataattatttttctggaactttaaagatccctaaggtagtccagttgctgttgtctcacaggttggttaatctctttacgtttcttcagtaagttgctttctgtattttgatatttatcctcctaccctagttcctgggtgtggaatgtggtttactccaggaaagaagattgactttctcactcttggtagccaatagctccttagccggggatgggactttggtcatcacttttctttgcttggcttgtgctttcacaggtcttgtgtatgctgttagggttgctgtgagttcatatgtgcatctggcctgttgtgtctagcaagcgctgtctccttgaagtcacctatcattcttgctcttacagccttcctgccctcttccacatagatgcctgagccttgaaaggaagggtatgatgcagaataccatttgctctgaacattttgaagtctttctttgcaggttgtatgtactaattgccatcaacagaagcttctctgatgagggttgagctgtgcactgtctgtggtttatttagcagtagtcattagcaatcattctattgctgtgtccacttacccgaggaatattggtaggttttccctaggctccatgcccatctagctacaggcttttggcctcattttgacaatgttagatgtggcttccatcttatagaacagacctaaatctaatcaaaaggtggttggttattcctataaacatttttattccacttgactgtacttttcagccatggctaggattacaagtatgaactactgtattgttctatttaaatttttattaagagttttttcatatatcttgatgatattctttcccattcttcaactcctcccaggtcttttcccacctcccattccgacaaatgtcatgttctttttttctttccttctcaagaagaaaaaaaagaaaatcaacaaaacccaataagacaaaaagtgacaaaacaaaacagaaaagcacaaaaaccatggagtccattctatgttggccaactactcctgtgcatgagcgctgattggagcgtagttgatatgttggagaaaactgatcttctgtttctcagtaggaatcaactgcaaatcgtttcttggttagaggcagggctttgtgtctgcttcagatttagtgctgagattttgtttggtttgacttgagcagatcttgcacatgctgaaacaatctgtgagtttgtgtgacacccttgttgtgtctggaagatgctgtttgcttagactcatttactacctctagctcttcccatctttcttccctttcctcggagtagatccctgaaccttgaggggaggggttcaataaatgcatcccatttagtactgagtgttccaaagcctctccatttgtacgctgtgttgatgtatatgcttaatttcatgtgggggttactgctttagatcattcagtttccagataaaaaacacaaacttttaaaaattatttataagccttaatgagcactaaagctgggctggtatctaccttctaggctattagtatctacttccttattggtagccctgagttataacttgccatatttcatctgggccactcttaactccaattggccagccttcatgaccgagttttcatgaatcacttaaccccactgtggcttctcctctctctattgtttcctgatcttctgcctcagaccccaagcctgggaacccaaaccccacctaactctcttcagcctagctataagctgtaggcatcttcattcaccaatcaaggatagctttcagggttatagagcattatttgatgtatgtgaggatcaccttggcccagaggtaaccagggccaatatttagcattacaatatataacaacagaccaaaccttaacggttttaaattaaggtgtaaggtttatacagcaaaggctggtaaatgtgaaattcacttgtaggtctaaatcttttagtacagaattcagcattgctatacatagcaacagaccaaacctcaacacactcttcagttgtgggtctctgtgttaatcaccatctactgcaaaaagaattttctctgatgagtgacacactcatctatagggagagcagtatgttaggaatatttctgtttctttaatagaataatagtagtagtaggttttcccctaggctcatgacttgtctagccttaaattcttagcctcactagcagtggcaggcatgggttctattttaaggaatgggtcttaaattcagtttttaaaaagtggttgtttgttcccataacatttatgccaatattggatcaatatatatgcccgcgagcatgcaggtctttgttgtgggtcacagagtttgtagctgggttatattgatgactacttttatcttccagtcgtgtgcaaaagtaccttccagcaccacgagtgctagtcagtagtgctgaatctctagttggctgtcagctcaatctctctgtgctcgatgacacaagtaagcagtatcttaagcaacaggactaccatctggttgtggaggaaaacagtagccttggcagtagccatgatgttgggattgcaagtatgtgctatcgcactttgttctttttttcaagacagggtttctctgtataccccttgcttcctggaactcactctgtagaccagaaatccacctgcctctgcctccgaagtgctaggattaaaggcgtgtggcaccactgcctggcctgtgctttgttctttatgtgggttctgggaccctaaacttagactaaggtgccttcctagtcctggaattttcctttttaaaatttttttatttgtttttgtatgttggggtgtgtgtgtgctatgccatgccacacttttagaggtcagaggacaacttataattctttccttttactgcatggttcagtttggtggcagttatcttttttttatcttctcagctacccatcttgttaataactcagaagctgcactttcctgcctcagccttccgaatgctggcggacaagtgtgtaccactacacctagctctttgtttctctttcactttattgatacttctgttcatcatttttcttgatcttacccgtgtcttttttttctttttttgagacagggtttctctgtgtagccctggctgtcctggaactcactctgtagatcaggctggccttgaactcagaaatccgcctgcttctgcctcccaagtactgggattaaaggcgtgcgccaccacgcctggcatacccctgtctttcattagctttctgagtatcattaagaccacacaaatctttgcctagtaaatttgctttctggtttttctgagagacagtttgttgactttttaacttattcgatttttgagtatccacacatcttattttggggtgtgagtatgcacacttgtgtatgcatgtatgtttttgtcttggtcttgtaaatgtgtgtgtatgtgtgtgtgtgtgtgtgtgtgtgtgtgtgcatgtggtgtgtgtgtgtgtgtgtgtgtgcatgtgcgcttgtgtgtgtgtgtgcatgtgtgtgtgtgtgcatgtgtgtgtgtgtgtgtatgtgtgtgtgtgtgtgtgtgcatgtgtgtgtgtgtgtatggggggaggtagctaaaaacaatctggatcttgtagggtcgaagatcctctctcttttcttgatggcccagctttcccttgttttctgtattgggtatctactatgctatacctatgcaaagattaccatgctaaactcatgcaaacttaagatctttggggctggagcagtggccgagtgtttggggacactggctgttctcacaactgcctgccaatctagtctgagggtacccgatagcctcttctaaactcgggtggcaggcactacatgctagtggcatgcaagtggtgcacagacatacattcaggcaaaatactaaatacacaaaatcataataaattaaagatcttttaggcttgggctttttttctaggtatagggaatgacttcctaaattttttttgtatgtgtaattaatctcagttgttattatctttaaatgttgggttctttgaaagatccaaaggaaggaaaaagaagtgggcagggcgagtagatttaaaatcccttgatgtcttcagttggtgggcgacagcttcctccatctacgtatgcgtgttcaaaagcagcaattagtgaccagcacacagatttaaaatattggaacgtacggcatttattattaactttggcttttgaaagttgtttgtaagtctctatagaggtatatcaatgactgtatgagaagtccttgttgtataagagctaaaatcagggctgtggagatggctcccttagtaaagttcttgctattctgagttcccattgttctttttttttttttaatagaagaaaaggtttattttactcacagttccatataacagttcattatcaaaagtaatgaggacaggaactgaaacagggcaggaacctggaggcaggagccaatgcagagagcatgaaggggcactcctgactggcttgctcagcatgctttcttttcttttctcttcttttcttttcttttcttttcttttcttttcttttcttttcttttaatattttttattattacgtattttcctcaattacatttagaatgctatctcaaaaatcccccataccctccccccaccaccacttccctacccacccattcccatttttttggccctggcgttcccctgtactggggcatataaagtttgcgtgtccaatgggcctctctttccagtgatggctgactaggccatcttttgatacatatgcagctagagtcaagagctccagggtactggttagttcataatgttgcacctacagggttgcagatccctttagctccttggatactttctctggctcctccattgggggccctgtgctccatccagtagctgactgtgagcatccacttctgtgtttgctaggccccggcctagtctcactgagttcccattcttagaactcatacaaaagccagcttgctcagcatgtttctgcgacctctgtgacaggaagcaggcagagaagactatcctgggggcttgctggccagttagcttagccaaaataactagctccgtgttcagtgagggaaccgttctcaaaaacagactagttgcaaagtcatagagaaatacctgttgttcccatgacacacacacacacacacacacacacacacacacctaaaattgtttaagttaaccttcattttctgtcagagctgactcactgaaagtgtcagcgtttgcctagattccctgggaaaggttccgcaagtgcagtcggtggtcagggctggcttctggggctgcttctctgtcctcttgaactactttggtttctttgtttctgttttgtggggttttttaagatttgtttttgttgttttgttgtggatttttggtaatactttctagcatttgaaatacatgtttatataaaataaatttaaaattcactattgtggcttatctagatttatttcctaagaaatctttcatgctcatacatcagcctcagtttatctcagtgagacagacacacagacacagcacagttggaaaggaggctcaacagggataggagggtgagagtggtgaggcgatgtgagacagacacacagacacaccacagttggaaaggaggctcaacagggataggagggtgagagtggtgagggcgatgtgagacagacacacagacacaccacagttggaaaggaggctcaacagggataggagggtgagagtggtgagggcgatgtgcagtcagttccttcaaggaagatgcagttctaggaggtgtcttaggtcgtgcagggttagggagcattgcctctcactgctgtctaatattttagcctctactatctaaatacatctctgtaggcaagtttgcccatttctctttggaatgtgctgtttcacttgtctttcctcacttgtctttctatgtgtcagactgagagaacagtgggggaagtgcggaatgtgtccctaagtaatcagttctctttgagacagttatccccccaccccttcaaatgatggaatgatgtactgtacccattaaagggctgctttcttctgttagacttgctgttgctcacatgctagctaagaaatcagaatgttcaactgttaaggggcacacagataggatttccctaagcctaaggtaaacacacggtaggaaagactcttgaaagaattatgagtttttagttgcaaatgacataaaatgtctttaccagaaaggaataatgctctggaggaagttcccattgtggaaagcagaagtttaggaaacgtggtgtaggggctacagtctgcttagacaccaatgcatggtcctacatcctggttgctgtctgtgaattcccaggtcttccagtgagatctttgaagaatctactgttctcttgtaccttgctgcccactctgtaggagtgagtgtctcacaacaagggaaagagaaaagaaatacctgcctctgatctcagtgtttgctaactggttgacataagggtggcacaatttccttatgaaatttttatacttcatccccctttcagaaatttgtagctgtgtttacatataagaagccgtggtctttgtttgtttgtttgggtgttcttggactttctagcttccaaagcttcggacagttaacttctgtggggcattgtgtgcatacgtggtgtttactttgtgttgactttcttttcaactgagttttcttttaaattgtttaaactgctttgattccttttgtagacacagctttataatgctttataagtcctttctttatgcctttataatatagcctttataaatcccttctgtgcccttagattcagataaatgttgactaaagaaattgatgggttatattttgctcagaataactgattgctaactctgctttattgttgtatataattactatattttctattgctagctcttaaataatcaagaagcagctttgcttaaattatcaagtagaaaagatttaacttatgaggaattgttaatatatctcctactactgactcggcatttttcttttggacagagaatagagaagtgaaaggtttagggctccctgcctttttcctgtttccagcattatacaccagtcaagcgtatggaattctagtttctttttgttctgttgctccactccaacctttagttgatactgtttttgtgttccttcttatacaccactttgtgctgttctgatttcatctctgagcactccttctgccattgtgatgaccgtgttttaaaatggagctttgtgagctctctgcagctaagtgttttttcctgaataatttgttcattacaaaagagaattctagagaatcctaccaagtccatagcattgttactgtgattgctgttttgagatggtgtccaactctaatcccagctgacttcaaactcagttctatagacctggctgtgtttacatgtgtgcggtggtaacatgcatggcacatgtcacttagtgggcttgacctttctttctctctctttctttctttctttctttctttctttctttctttctttctttctttctttctttctttctttctttctttctttgaatcatcaaagtatgacttcatgttttgtcttttaaaaaattacatttccctctgtgtttaaacaaatgagcctagtttatagttccccatggattacagttaaatcctctctgtagtcttcttttagattgggttgtagattcctaggctgctgctgaggcgaagcatttgcaatgctttacagtccagtatggtatctcactatgccagcatttccttccttgtctgatgtcagctctagaattacatgaacactttccctctgtttcctgacatttccagagttgtagtttccttctaaaaattatttataaaagagaactaaccaaccatttcaagatttttttttttaaagaaaaacctcagaagttaaaagaaccagattcctaatattttgctctatttttcttgtaattttataatgtattccgaggatgtgcccactttggtaacctgactgtgacacaaatgtattgtgtcatactgcttggttttctttctttaattgaaaataaaaaatagatattttttcatacaatattctgattatggtttctcctatcccaactcctcctagtttccctcccttctcccatacagatttacaccctttctgtctctcattagaaaacaggtgtctaaaaactaatagagtgaaataaagtaagcaaacaaactggaataggacaaaacaaacaaacaagaaaaacacaagacccacgtaggctcagagacacgtgtttgcacacatagaactcttataaaatcacaactggaaaccgtactatgtgtccaggagatctatgttctcggttttaatttacacgcacacacacacacacacacacacacaccctgctctgtaaatctcacagtgattgagcacatttggtgctcatcagtttctcgtactcctgggtcttcctgaccgacctaactctgacctaattgccttctgtgtgtgcagcctgaggtaccccttgcgatccttggggtcctcacttcttttacaggttgggctccctggttcccagaaccgattatgatttttcactctcaacatcttttacaactgagatagtgtatgggaaacaaatgacttgttgtagaacagtgcctttattgtattatatactcacccacgatttatagtctgtcttgtatagcattctaggctggaagtaaattttctgaaaaatcaaactttgtataattgtttttaggaagctagtgttaatggcagtgcgtttgtcgttttgtcttatgctgtctactttccatgccaactttagggtctggtgttctctttggcacttagaaataacgtagatatatatggctccatttgcggctcccctagaccccctttttaaagtcaattttattagctatttatgtcttcatcttgggaactcatgttggacctggagatgtaaactgacagaatgttttgctgaggctctaggtttaattgccagcactgcataaacccaggttggtgatacagacctgtagtcccagcaccccagaaatggagggaggagggtcaggaattcagggccagcccgggctacatgaaactattttctccttttgtctcattattaattcttcaccattataccttgctgagtcttctgtttcaggcctgaaggttaaacaaatttacatacataaagtacttaaataatacctggcatgtaataggtgctttggtacctgtgatcactgtgtggtttcacagctggttggaaggagtggcccctgctctgactcttcatttactagcttcacaccttggacaagcttcataatctcttgaggtttacttccttttcctgtaaaatgtaaattccatctctgcgatgttggtcagggacaagagaaagtatacatgtatacatgtgaaaaatgcttacagaactacattgctattgtacttttcagattgtgggtttttttttttttccctgctaggaagattacattttaagcttttttttttttttcatggaagtctgtgagctgggtacacttgaactgctaatatcgttttgtcaagacgtgattgtaatttattagactgaagacatagatatgaaaacagtttttgataaagtcagctctacttcagaatgtataaatctgtgtaatgtaataactattaatgaatgaggggatatgtatttgtgttattaatagtatgtgagataagggtaaataaatctgttttagtcctgtgcagcattaatgtaatttgaaatattagctcatttttgttaatggtgttttttttgtttgttttgttttaaggtttttggattcaaagcataaaaaccattacaagatatacaatctgtaagtatgctttttttatttgtctctgttaaaataactaaataaaagttatttctttgttgaagataaaaatatatttagatatttttatatttgaggaactggattcctgaaaacagttgcagtctgatagagagagttgttgggtctcgaagcgtggtgatgaggtgcagcagcttggcacagcctccggttacttgatctgcttttacagacttggcacctcgcccatccttgagcccataatcatgtgataatttgaaatgtaatccacagcggagctgctgttagtattaacgatggcttctaaggagacagactccagggtggatggacagacttttgtttcctctgtgcttgttgatcaatatactgaaacagctatttgaatattttctgtgtataacctagtaagttatgcagcattgtttagttatctagtataggatttgagggattgctcattaaaacttattggcctatctttaaaccttcactttcttttgacttttggagtagtgacatgaaaacaggaaaggaagacaaatcattaaacaccctttgtctttcaaaaccatttttattttccccaaatactgagcatttttaaaaatttaaaagataaattaccatgtttctattatgtcctttaattttctatgtctatgatttatataacaggagaatgttatgcaatggtagaataccaattagtaattaaccattttctgtagactttatcaaatataactacaagtgttttctgttctgcttcgagtggctatttgaattgctacccagaaggatggagaattttctatgtcttgttatagtgctagatgttacttttattttttcagtctttaatgatatttctgttttgataagacttcaaagtattcatgtgcaatagttaccaatattatttctcttcgcttttgctgacttcagatcagaaaggtgcagccatggtgaaacatgcagatagagtgctcatatggctagttccagccctctagtagcctatagcttgatgtgaaagtaggagggagcaggagagaagtgtggacaaagtaactggccccacaggaggcctctgtaaaagaccagatgtgtgggctgtgattaacttctgataccttctttcttctatccctgcttgttatatacttgtaagactaagaggagtttctgttttatttcttttaattttaagattatttctttgcaaacataaatttaaagatcttgaaatatttccatggcttttctactaatgaaaatcaataggagttatctattagacctgggaggatgagccaaggcaagtcagaagattgatagtataatggtatttgaaatatggcagataactcattttgggcaggtggtggtgtatgctggcttaggtggggttgtgctaataaaaggtggataggagaaccacaagactgtttctgaacagctgcattcagaaggtgactgaaaaaggacaagaactgttgaaagctggaattgatgaaatgaatcatttcagactcacactgtcaggtttggggatttagagaggtcccaatagggaagtagaaagacattagaagacacatttctgcctgagctgaaatcttatgcctgtttaacatatctaaagcacagggaggaaattcttttcattcctgcctatagtgacttcctgcccctagaatttagggattaggtttatgctgtctcctttgttgtatttcagtatagttagaggtggcattgggtggacctaggaacttgatttgagtttccaagcatttgattcccaatttaatgaaccatctctttattagttgagagcagcctttagtgcatatgaacttattcccttgtcatttggaactgaggctttcagaatggcaaaggatctgaagggtccttttagcagtgccttcttatcttatagacagggcattaggcctaggaagttaaatgaggtagccaaagacaggtaggtgcataataacagactacccactgtttgcaccagaatcccttttgtttgctggttagctcttcgttttatttacttcaaaagtttttaaacatatacaaaattgagtgttttaatttgagtaccccctctcccctgcctactgtgtatctgattttaggcaagtgagactagccacaacagatgtttttgttttatttctttttgtcttaggataggaattacaggtagtatgtattttttttttcttggaaatgtagatgtttgaaggtcctaaagtatttttcactggacatctgtatagttagtagtttgtgagaccttttatagcagcagtgttgcacatgaatgaagaactatcagcctaagctttctgataatctagcttatctattattattaatcagttattttgaaaaagggcaacattaattaatcagttttatatgagtgtttttaaaatttctttgttgctccctgttcagagaatacaagattttaagtttttattatattttagtgaatatttgctgtacttggcaaacatttaactgtgttatttttctgttaagatttcctttgtaaaacactgtagagtgaagaagagagctccctaccatgtagttctatggcaaggcctagttgtctgcaagtttgcctttctggtttcactcctcctcttaatttctgttgccaccttgggaaacctcattttccttgttttttttttttttcatttctcttttcatataagccaatttaagataaggacaaaaatatcgtttgagttttaattacaaagaaaaatttaaatccaaattgttatttgctatcttctattttagtatgtggagtgacttactgctaatatgccataagaaatttaaaagaaactccgctgtgaattttggctatataccagagattctaactaaggtggaaggtttcttcttgaccctgtgaccctttctttctcttgagcactgtttcacaggcagccctagcatgtcctcccaaagcccctccgcttgcctataaggagctgcatgctcccctccccccccaagtcaattgttaggtctgtcttcagtgacaaatactgctcatgtttgtgctgtaaaatttgtcactgctttttcatttaagacttgaatgtttctgttatgttgaatgaaactgtaatagaagttgttggatttagttgagcaaggatactaagcttgagttcctgtctcacggtgacttcatgttgttattaggaaagcttttaagggcctttctaaatcttagcttttccatatatacatatgcctcacatatacaatggggatgtaaactgttacatgattgtgagggtgaaaacatggatgtcagctgtaaggtgcccatatcctgtagacttcagttgttactgtgttcctttcaccttaactgatgatacatgacaaccagtttgtaatggtgatcttaagcagtgcttattaaaccaaacttttcagagtgtttgttccatctttctctggggtgggaccctcccttcccctcctctccccttccctgcatcacctccgcaggcaattgggatccctgaccctagaccagaaagtgtggcaaactgaaaaatctgacttgtaggacactaacaaccggcttcttagggtatgtgcctagcttcctcttgtttcctgattgtatccttaattcttgactgtcttccactgtgggctcttcaccacacagcacctctcagaagagcagaacctggcttccctgtgtggagttctaacacttggaggtggagggagaagggaattcagagccagtcttgggtatatgagatcctgactcaaggaaaaccaaagaggaagggaggaaagagaatatagaatatgtgatcttttgtatatgtgtcagttttcttcttcctatctcatttttaggtaagcagacatttagcagagtatttagcaaggatgcatacgtcatctaataaattttctcttttcaaaaacagtacatcaggtaatacactaaaagaaaaacacatgtgtgtgtccgtgtctgtgtgtgtgtgtgtgtgtgtgtgtgtgtgtgaatacagaagttaattcccctcaggtctgctccattgggctgtagtttatggataatttgttcaatctttgtgtgaactgggttttgaaatacagttgagttgtacaaattccagatgcccagtgcaggcccacagctatttatttggaagtcttggatcagttttattttggtacatagaaaatttcagttttcaaaaaactaaaaaactaaataaaacaagaaaatccatatcttttgtgttactctagtatccactgtggtagactagtcggtactcagcaggtatgttggttgaacaacctcagattgggtcctgttcgagttgagattacctatttataactttggagtttgagatttgggctaaggaataatggaactttgttttaaaacactaacttttatttttcagtaatttctttttgtttgtttgtttgttttttttgagacagggtcttgtatcccaggctggcctaggactcactagatagcaaaggctaatcttaaagatataatctttcccagtaactcttctgaagtgctaggattacagcctgtggtaacactcctagcttatttgaataatgcttaagtgtctgatttccttagtagttggagtcaccaggatgcttctgaccccactaatatgtaggatacccttcatagtatcactgattagtgttattattgaaaagctaagtgtttgtcttaatgtgtcagtattttactatcagtgggttttagttattttattgtgatctggtattaaattttgtactctgagagattattggaaatgagatttgtatataaaagagtaaaggtctggcttacaatttttagtaagcattgtgttaataattaaattagtatcattcagttgtcttttacatttcctttgttctttttctttatttttaacatgtatgttttaagtaatggtttaagattgtatgtgatcatctgtcaggtaaagataatagtaagagtagctatttattcataggtatttgtgaaataaaaaatacattctaaagccatgtatagtctttatccaagaaattacagggtcagtgcagttgaatttacagtgttgcatgttgatgtcacaaattctgtgaacaaatatatgcacacaaattgcatgcatgcgtttaacttttattaaagctttggtctccttaattataagaatgataatagtacctacttcagaattcttgaagttaacggaaatagtgactgtaaaaacacttagcgcagtgtttttacatgatagaaaaggtggtatgatagaaagggtggataaatattgctaatattgatactcttccttccagtgtgaaaggtaactttatgccacatttaaactttcttgtagatgtgctgagagacattatgacaccgccaaatttaactgcagaggtatgtataaacataaccacagcatactgtataactaaagaccaatagacttgtcttttactgcctggtgataattatcaagattagtgagataaaaatcttaagaatggcctttgacaattaaaaaaagtgtatttaatgttagagttgttctttaagacctatctattgtcaggaaaactaaatcacagaatacttggagaggtcccaagactaaactaggattggaggtgcttattgacggtgtgggacagctagcgctgctggaaacaatcacaagaagagagcagaaccattttaacttttctacatcgaagaatggcataaagttaggaaaagatgtagcattggtctgtctgtctgtctgtctgcctgtctgtcttctcagaatcatgaagcactaaggagtaagtaagaacagtttctggggaccgacagacctaggctactgctcattaggaaacatgccatggttgaaggtcacttagctttaaatgtacattttaacagactcttgaatgttcttgtgtgccactggggaaatgaggtcgggagcacagttagacagatggttaagtaaaagctggcctgcagcctcttggtgaatgtagtttgccattgtttaccacagagctttcctgtcatggaaaggagtaaatggatggattgttcttgtaccattttacgatggcttgctttaggataagtcagagtttttacatattagataatatggcagataatcagaacagtaatatcaccaggattttttgttttaattttaagacaagggtctcagggtctcagtgtcccagagtgaccctgaactcaatgtttagctgagggtgactttgaacttgtgatcccaattctcctgcttttactcctcaagtattaggattacagacttgcaccacatcctcagttgtgtgtttactcaaggcagggatgagcccagagctgagcatcctaagcaagcactctgcgaactgagctacatcccagagttcataccaggatttaaggatctcaataggatagaatcaaaacagatactagtaagataaaaaccagtagtgatagaacggaagtcttgcttctagataatagcatcttgccttcaaaaacttaactctgactatagagaacaaagacatcttagattcttaattcatgtgaaaaaaatctgaaacttaatttgctataaactttacttcagttgtatgtttttctgtgagtgattaatctcatgtatatggaaatataatgtttgtgagaccattttaaaaacaagtcactgggtaattttattatgggataggaaaagtcagtcttttccatagttgactctattagtaattatactttcttcggagcatgtctggcaatgctgtagtaatatctgctattggtcctgatagaagttactacttgacaagaggcctgggtgacgtgcatttggattcagttgtactgataggctatgacgtgttcccttcatgcacagattcatcctccctggagtgaagagcacaatgcttgtttccatgtctaatgaatgcatttaagaattaataaaagactttctttaaaatctaggtttaattagtaataaattaaaatttcctgaaagttaggcttcttttaagaaccagtaagtttatatataacattttgaaagttaacctatgtttttaaataaaaaatttaaaattttcttacactgggattatctttttgcaacagttgcacagtatccttttgaagaccataacccaccacagctagaacttatcaaacccttctgtgaagatcttgaccaatggctaagtgaagatgacaatcatgttgcagcaattcactgtaaagctggaaagggacggactggtgtaatgatttgtgcatatttattgcatcggggcaaatttttaaaggcacaagaggccctagatttttatggggaagtaaggaccagagacaaaaaggtaagctgtttactttttccttcctccctctttgtggaccaagaatttattgggaaacaggttttctccctcttgctttattgaggtataaccaacaaagtcttaatctacttacagtgtgatgctttgagaactgttatattgtggttgtatccacttagtgtatccctcatccctggtatccccaccctcttccttagctgtactgagaacatccaagacctacctggagtaggtgctaggcacacagtatggattttgatgacaacttgaatgccattacctagtaaagcaaggtatttaatttgatggtaaataaaacattttctgatgggggtattcactagtatagttaactaatcaaagattcattggttattcagaaaactaaagactgttgaattagtggcatgttttgtctatggtacaattgaaaacaaaagcaaattcttggactgctttttcagaggactcgtttagttagtgtaacaccaagattctttgcatgtttttctttctccaagcacagcacctatagtacttcagatgaattgaaagctcagggtagcagtgaaagtgccccaacataaggtcataaactcacttaacctttgagttggtttgcagtcttttttgtagacattgtaagtgacaacatcagtttgcaatgccaagggttggacatggctgctctggggagtaagacatttgaaacttgattctagtattaaatttggacttgtgccccacccccgcttctcttctgcctcctctcccttctgtctttctcctcctctactccattcttcccccttctcctttttttgagccctgattttatctggatcaactttgggccatgcccatcacactaaggtctgtggctgcagcggtcctgggccctgtacttctctttcacctgctttttaaaaaccctgtcgttataactcttttgagtttgtacaagaatatcaagactgtttgttcattggtgggagttcacaaaattacatctttaatgcagtaaaaaagtcatgtgttagaaaatcagatttaagctagagactcctcaactctgactcccgatgaagtgttcagatgttctgttattcgatgtatgtggtatatacataaccataaattgttgttggtagcttccatttgccttcagacaaaatataaaggaacttctaacaaattatgtctcatttctcccatttaaaaaatcagtaccccttacctgagaacagtaggtatctaaatgggttgattctgttcaatagtgaaatttatgataaacaagttttaaaaacaagttgaaagcttgccattgtttgactcttacatcatccttgctctcagtgttatttttattcttgtttagtgaaaataaattatgaaaactcttatttcacctatgagagaaatatggaacataatatgtttttgaccaattaaagtaggctgtgtcagataaaatctctaagactagatacgatcatctattagtttctttgccttcaagatcattatctctgtggggcaggaaaagattatggaccattttaattttcaggttaaagcattaaactgcttgacagcacagcgttgtctggcttctagatatcagtggacctgtgtgcagtgaagagctttctaggtccttctgtctgttgacaaagcctcttgagattctcttgcttgaaggtcttggctctctcttgtgaatttgggtctttcacagcagtaggtttttcatgacaaatcatcagcaggggaacttttcacaactgtagaagagagtctcctaggattaatgtgatcttgctacccagtgcagcagtgagggccagggcagagatatcatccacttttaccagtgcagggaaaccagaggagctgcagggaaagctgctagagtgtggaggactcttagggccagcgatgtgctcagccatttttatttaacttttttacattaagacttttcagttctttgagactgtaataaattatatcatgagtatgtatgtatgtgtagtacaacctgtggatatgtttttagggcttaccatttggataacaaattggcatgctctcttagcatttcttagttaccagtagatctttgtctagggttgaggcttggtcagctttctcccattctggcatgtcttttgttctccttgctcagctcatgtttggtagtcatgttgatgagactttatgggtgtagcttctgacattgccagtagacaatctcacagcaaactcccagatcctctacctcttacagtctctaagccttcgtctacaatggtccctgagctgtaggtgcagttattgtgttgtagatggctcagttggaactgagttccacaactctgtgttttgaactgttgtggttttctgcaatgttttccttatgctacaaagagaaatttccttgatgagggataagcactatgcttatctattggtataaatttagagcatagttatggactatatatattatttagtaaattagtggttgtaggttctctgtcaagaagcatgacttccctagcccaaggtagttggctaggtttccaataccaggcagtttctctgtctttaaggggatttaaaatttttatttgtttatctgtccatccatctgtccatctgtctgaaatctatctatccgtccacccatttaggtgaggcctgagagacagagtcaaggaaatgtcaccatctttaaaaaaaaaaattaagaaggaccctttctttaaaagaccttaaattatttgctgattatttattcatttgtttttattgccatgcataattttgatggaaactttgaactgattacactaagagcttaattactagtaagtggtactcctgatacttctatggcctgtcttgtattttgagagagcaatgtttgctttggagaaatggatgagaatatttgaagtcctgcgactctctcagccatttcctgccaggaatctcagctacttgacatttttttctgtttctgtttgtttgtttattgttgttttgatgttttcatttttctctctttctctcattccccttttgtaatggtaaggattgagcctagggccttgtacatggacacatattctaccagtaagctatatccctcagcccttgtttgactcattcatcatgttaaactacatgaccttttgttttgctttgtttctgtttgtttgctagttcagacaaggattttcacttgagacaaataatggttgtgaaatggtttaggcttctctaagctctgctgtcaatctccattctttttccttcacttcttcagaattgccagcgtgtgtatagagtgataagatgctggggtggtctgtttccttatgttcaagggtaagagcaagacttgggcacttgaactttcctgtaaatttctctgtttccaggccagggtaaatgcaggaatccaggttagacgcaggagtcaagttaggtgcaggagacccatgtcagaaactgaggtcttgacacactagtcattacagcctggtggcaacagttctgtttccctctagaagggaggggagggtgtttgtggaagtgacaagaagtcttgggaaatgttacaaggtagggggtatttgtgagtgaaatgtgaagcctctagtgtcatttggtaaaatgtaataataatacttgtgtcctccatagaacttttcttggcactctccatctcttgaccatttcttccatgtgaaaatgatagactaatggacatagaagatgcagggctgtgcacattgttagagctgtagctggtgcatttgatgtttagccattgcattatactaagactccttaagtaatttagcatcttacagccacatcagtaggatctactgtacctgttgcatagttaatatacctagacaagtgttttggataagtttatacacggacctaaagcagaatccttatgtgtatcctacctttattctttcgattatttaaaaaacaagaaagaacttatgaacagatactgttgaccaagctgtgttttactaatggttgcttttgcattttaagctacaatagtattagaaacctacatccagataaaagctttcagatatccctactccaggaatgcttctttacagatgacatcaaggcccagaaaagtgaactgtagtgatcagaattcgtgacggtgtcaatcagttcatgacagcatttacagtaaaaacaagtcccttggtgtgttgttaaatttctttgtatattatcaagcttacagattctgaactgcaaaaggttccatatttattgctgatggttttgaaaggcttctcagttttatgcttttctttacaaatcgtagtgtttaataaccctccaggttaaaatcttggagtgtttaacctccagtctaagtttaaaatctccagagagagattgctagttttgtaactataatgctgtgcatttccttaaaatttttacaatttaattttctcaaagcttttaaatgtaaagaaaaataaaatcatggcatttataggaagagaatggaactagaagtcattactttaagtaaaacaaatctgatcagaaaaacgtgttttctctcatgggaagaacctagcttggaggtatgcataccctttgggggagggagatctgaagggaagatggtgaaaggaagagtggaacctgctccacacagaaatgcagaagaggaactgtttagggagggaggtgactcagaaggaagtacaacggtacctctatgaggaaatgtcatagtgaaatgcgctagtaacaaagaaaaataataaaacaaaccttaaaaggcaccgggccttgggctggtagagtggctgtggaatgatggatgtgttttagcttgctgagtataggaaagctgctttagtacagctgaggaagtcttcctagaagaatcttagagaattgatgactcagtgtggcagtgtagacacacagtggacttgcagacttgtagactagctaggagtccctgtggctacgttcgtgctgcttgttgtgtttgctgtttctggatttatactttgtgattgtaaatgtgaacttctggagattaatacttaaatctgctttgtagttaatcatattagaattgtctgtattattttgtttatatttgtaattttaactatggagggaccataagaagctgaagaaatttgtgttctggtacagaatcctcatcttctttcttttatgttaaaggaggaggcaattggcctgttgtgaaaaaattgtagactttgcctaaaatgtgtgtttttttttttttggcttttacttatagtactttctttctcagagtcctgtagttaggtcttgatatgatgcaggttggatttgcaagctgaccataaaatgtagcattgtgttcttaatgctggaacaatacttcaggttttgaatattgcaatgaagttcaacagttgctacttcctataaagaaaaaatatctcaagggcgaagtaactgctcaagggaacaaagacccatacccttattcagtcaaagaagtgtgttgcccactttactgggaattatttacttgtatagttgatattttcctttgtgaaaaggtggcaaattatccaaatccaaagtcactgagggtgaatcccgactgactgcacatgcgcgcgcgcgcacacacacacacacacacacacacacacacacaccccgcgccagcccctcctgctgtaaattaccttctggggttggtttccacgtgtgccttgctgtttgcaaatgcacttagggttcagtgctgcaatacatggtttgcgggatgtaaactatgaggagagtgtaagaaagaccttttcagaatggcaatgagcgcaggttttggagtaactttccaaacttgagggaagacactgccactaaccatacgtagtgtctgttctccctggcctccagcagtggcaaggaaagtaaccttaatgcttagttctcttattaaacttaggggagggattgaaacgtttcagtttgccttttctttgcttacaagttggttattaggtaggtgtgtgtgttttgactacgtgagtgtgtgtgagagagaatgtgtgtgtgtgattagtttactacctcagtttgtcaactttactaaaataacaatgccaagcttaattttaagagatttcattattttctgtgagaagtgaacttttataacctactatcaaggttatccccctacccctgttttacttattaaatcccctcatcataaaattttcttgcttagtccttatttttaaatcaaacaagttgtggttgctgttgctaaaacaaaaaactcagtataattttcttgtaatgtcaattatcatgtgttctcttctgatgcatactgtttgggctattatctactatctagcagtccactgattcataaagctgtgcagttttaggctttgaaagatttaagcagttacttaatacaaacccatttgcaaagaccacactgccctgattcatagtctttctttgtcatactcaacacctggcttcctaattttgttccttggattctctctgctgtactaagctctacttaattttttccttttctttttgattcctaaaatagaaaccaacaccaaaaaaaaaaaaaaaaagagagagagagagagagaaaaattgctgttttgaatgtgtgagtttttcagttttaggtaagagaaacccaagtaggagaaggagacagagaagacacaagggagatgtttattgactaatagaacctaaaaggtcaggtctggatctaaatgctcaataagtgtcaggaacctctcctttctacactcttcccttttctttcttggctatgtttattcagaaaggatctttgcaagtaataccaagctatggtcccgtagctttaggcttacactcttgactaactgcagtggtaaaagaacacccatttgactagaggttcctagaataggttctgatttccctggcttaaagggtgtgtctttttatttttttatttttttgtaagatttgtttatgtatatgagtatactgtcactgtcttcaaacacaccagaagagggcatcagaccccattacagatggttataagacaccatgtggttgctgggaattgagctcttaaccactgagccatttctccagcccacatctacctcttttttgaaacaaatacttttgctagtgagtggaatcctcttacaaattcatatatctgaattgaagaataggcccaacaccccaaaccacaaaactgtcattatagcttctaaagaaaatccaggtgaggaaagagtgttggccagaaatgatctgtgtcacttttgtcacagagattctgtaagttaccatagaactcgaagcattatgtattccaaacttcagaggttcttcataaaggggaaaaactgaattaagagaagttatggcttcattcagatcgcatagcattcctgttttcaggtcacctgagtcagattcatttaggtcctgtactgcatttgagcaagataaacatgtatagtcctacttgtttcttattaaagtagaggcagcagggctggcctcagtgtgcgtgggacccagcagttggcaggtagagttaggaggatcaagagtcaaagccaccatcagatcctgcagtgtgtttgaggccagctctcccctggggggaaattgaggttgtaatggttggctgtggtgtcacagaggcctataatctccactgttggagcctgaagcaatagaatacctattttgagaccattctggggtacataatgagaccctgtcttaaaacataagatatgtgataatatataccttgtaattttatgggaataatagaaatatgttttgaatattagaaaatatctacaataactactattgtcatagtattagtaaccacattcttttgtttattgaattactgccttgtttattgtggtcattcagaatgtaggtttttcctcttcaagcaaatactttttaggttgaaacttttatttatgagtttagacttggaaaatattttccagtttattaagaaagtttgctcaaatagaaaattacttctttaaggactctaagttgtgaatttaccttctagaagatcatctagaatctgaatgcatagaggatgaacatacattatatatacatatatatatacacacacacactgtgttgttccgtgctaatcccgtatagtagtcttatgacagtagtatagatctcaaagatgtatgtcctccatataagtctgtttttcaaagagccagccaggcatggtggaacacaccttaaatcccgagcacttgggaagtatgagtttcaagacacaaagaaactcttatcttgaaaaccaaaaagagaaaaagtaattagcatcaagtagccaaggcttataaaagaagaattaatgaaaaatacactaggaaaatgtaaaattccaaggcaggcttttcttatcggaatagcattataataaaaaccataaaactgatcaaagatgtcattttacactcacacaggagacacttcatacggacactgagctgttacgaacgtctgtgccaaaaggagtcaactttgttaagcaaatgctagagaaggaaaataaaaagctagactcggaggaggcgcaaagtaaatatgtgcacactgaagacagtgatagagtcggcacctgagtgctttgcagtgcccacttgcttaggttaataactcaccagattaactacaaatcccacaagcttggaaagtagagccctgttacctgtcttgacagttgagtggaactatagtttgaagtttaattcaggtcattatggaaatttaaagccattttcttcaataatttttgagccatttgaagaaagatacattgattattcaccagtagaaaatgaaacaaaaatataaaggagtgaactgaggaaatgctgaactatttgggctagcaaatcgaacattgactacaagaaagagaactggtgttttttttaatagtgtttagggttaaatctgggtttttgtaactgtctcaaagatgaataatgtagcacatgtttgtgtttagctaggcagttaagtcctaggggtgtacgatgctctggcctcgccttgctgcctaggccttagtatggtgcaagcttccctctgtatcaccactgcctgtgagctctgtgagctctattcacacaactgctgttgatctgagaattgtttacttacatatcaacccagcttttttcaaaaggatgagcatataaatgcttgtgataataggtgtccttcccatcacttgagaatctgtttattgctgtacacaagtgtgaaatgtgtaccaaaagctagagagcaggagaaatgccatctgaacattatcagctactatatttttttgtttattttaacttcttttatataactgaatttgctggtttatcctcatgtaaattctattaaggaggtttgtattattgtattaatttttttaaagaagcaaattggaagtttatattttctcagaattcaaatataagctttgactatttagtatgtgatttttcactctagccaaagtcttaaattgccaatcatgatttcaagtggtttatatccatttttgtttgtttgtttttgtttttgagacggggtctctctttgtagccctgttggcttggaatgcacagagatccaccagcttctttcttcctcctgaattctggaattaaagttgtatactgccacttatccattttgatacacatatggagcagagaaacagagaaagacagagagaggggaagagggtggggtcagagttcatatacctgtatttgctagacatcgtattccttctatacttcttagcttgtatgctgtcttcttccccagcagaagggtgtctgtgtctagagtccttatcacagtagaagttgagaggccatcagtaaactaaagagcattgtaatacctttttcttattaacataaaatacctattttctgcaattctgtttgttgagactgggcctcacataggtcaagctggccttaaacttacgattttggttgtacccaagtaccgagattacaagagggtactgccatgccaaaactgctgtttactttaaactgttagattaaatgcttattatttgccttatattgacttttttactgttatattgtgaatagaaaaatattaactcattagtgaatgaattgttacacatatggtatgtatgtctttgtgtgtgtgtgtctatatgtatatatgtatgtgtctgtatgttccttggatgtccatcctctggtgccatctatcttgttcagacagggtctctaattggtctggaattcaccaagtaggctaggccagcctgtgaatcccaagaatctgcctgtctctgctcccccatgccgaagttttaggcatatatatggttacgtggtaccttaaaaaatgtatataggcatgggctaggttggctgaagtgatagctggtttaaagcactgttgttcttgcagaggacccaggttaactcccagtacccacacaatggcttacaaacatctgtaactccagtttcatggcatgccttctggtttctgtgggcaccaggtatacatatggcaaaacactcacaaaatatttcaagaactaagaaaaaaacatatgcatgggttttgggtcatacatgcgattgattgattgattgactggtttccggctggcctggaactatataaaccctgggctggttcggaacagtcctctgcttcatcccctttagtggtaggattacaggtgtgggacaccattcctggttagggtccccttttaaatgtcatatgaattatgtcttttaaatatttgtaatattttctaagccattttatgcttccctaatgtctgcaaggagtggatatagcacaaggataccgataccccttactgcctctgttaacaagttgtattgaatatgtttatcattcagctgcatactctctcttttccttttttttttggactctaaggtcagaatctcatttttcctgcacagaggcaacacgtttctctagtgtactgattctgatatgattttgcttagaaagtatgtaaacaggtttgtgaagacttgcctagtaaacccatctttgagaggagacttgggtatgtgtagctgcagtacagagaccattgactgtctgtttgaatacacagtggcctttgcttattgggttcatagatcagagcattatttaatatttgaataaatgaggtatttaataactacattttaagaatattcttttgttattgctcttatttattctaatactgagttagatttgattgttagccacttaaaggagaaactttgggataacccagttatagcaattttgtataataactttaatgaaactttccttttgaatttgacttctctttttcttttgtctccctcctccctctgccccctgggcctatcagggagtcacaattcccagtcagaggcgctatgtatattattatagctacctgctaaaaaatcacctggattacagacccgtggcactgctgtttcacaagatgatgtttgaaactattccaatgttcagtggcggaacttgcagtaagtgctctaaattcttagctgtctgtgtgtcggaaaactttttaaaaccatatctaaatgtatatgtaaatgtttagaaatacatttaccaggttaaaaggagtatatttctgaagttggaattaattagttcagttgttcaactcactgggttaagaaagctaacccaatgaattttggtgttctttttttgtttgtttgtttttatgtttttcgagacagggtttctctgtatcgccctggctgtcctggaactcactttgtagaccaggctgtccctgaactcagaaatctgcctgcctctgcctcccaagtgctgggattaaaggtgtgagccaccacacctggcaattttggtgttcttcaagtcaattatatttatgggagaaatattctatgttataaccaccagatgcagtctctgttctgacaaaataaccgagagactcttgacagatcagtgtgagaatctgagagacactcttgacagatcagtgtgagaatggcctctggctacaaccaggtcctcatcagagggaaacatgttcactgtcagagacagaaagagaggagcccttcaaatatagagaataaaagggtgtgtgaattgggatgtgtggagaaaacctaagtgtagctttgaagtcaagctctcagcctgtggcttggacttgtcatctcctcactgagtttgcttgttagtaaaataaagaaatcttggtaagtatgacgtcatgacatcagtgtgtgcttgtagtaatttctcttaccttagtgacacctgggagtggtcagtcatgttttacacttaagatattttatttgtattttcaatataacgtcatagtatcagatgtcacttattagaatcccttgatattattttatggatgtttgcagtttgtcagtgattttagtttttcgcctccatgaaatacttcattaaattaacttgttctttctaaaataatttttatgtagagaatcagtttcttcgtcagataggtgtgattgcccatgagtatggcaactttgttaagggcccctaatttatttatatagcttgttggaaagttctaaggaacttccatactgattaagtatattagtataattttaaaagtgtgagtacaaggcacaatggactattgaaagcaattgacctaggaacttcactaggttcattgagaaggaaaggggataggaactcatgttcttcctatagtttaggcatcaatatagagctgtaaaggcggtatggaggcaatacggaaaagctctgctcaggaatctcactaggtactgactttttgtcagctctactttgcttattgattaaactgctgttgggcttttagtcggacaacattatgtttgcatctctacgcttaaaaaatattgactactaaattctttttaatctttaaaaatttctagttacttatttatgtgctgggatttaacactatatgttgaagttatattaaaataaagctcatgagattcatatgtataaattataactgccatgttcacaaaaggttttggaaacaatttcatgaagaaagtcggtcactggagaacacatgcagtttggattggcattgagtgtgaaggaaatattacaggcagtagaaataaggtgaccgaaacacagcagaagaactggacgagaaatagaagatgtgattggctgtcacaggatcttgaatgggatgtaatagacttggactattggtgtcacgataattctaggaacttcagctgtgttttaaggacaggcccatgttgtatagacagttgtgatgtaggaggggtagtacagccagctctgtgacttggcagatgttgctagagcgatggaatgtactttgtttggattttctttagttgttcatacccagagtgcatttgagatttggagatataaatattatcactttgcttttaagttattttaaatctgatgagatcaaggtacttgtgaggatctgcagtggggctgcagctctgtcttggtggtgtagtgtttttctcaagctagagtgcaggattgccttcagtctccagcccgaggaggaggaggcatgagtgaaacagacagaactagtgataaaaggtttagtgtcttctgcagagggaccaggaagtgtttgccaagcgtttgtcttattaccttactttttctacgtgaagagaagttgctgtataataaaaatgatcagtttgcttttgtgtcaggatgcactctcatccttgtttttgtcaagtccagatcctgtcatttcttcagaacatagttaattaacatagcatatatttcagatgtgcatctcagaagtcaagaggactgtactaatattagaatattgatgttagaacttccatccctcctgctgggcgtggtggcacacacctttaatcccagcacttgggagacagaggcaggcggatttctgagttcgaggccagtctggtctacaaagtgagttccaggacagccagagctatacagagaaatcctgtctcgaaagaccaccaaaaacaaaaacaaaaaagaaacaaacacacaaacaaaaaaaacaatttccaactcaatgggaaactcatggtctataggaggtcgttttgtctcagtggtcttagaaaaagctgctgttttttcattactgtacactacagctggggacattgtcaaggaaagatgccatgacaaggcaattcttataaaagagttaattgggacttgcttacactttcagaggatttgtccattatcaacctatcaggaagcatggtggcacacaggcagatacgctgagagttctacatccagaggctggcagcctctacctcctgagtgccagcacttttaaaagcacgggctaccatcacccagctatacatgttttttatttttttaaacatattatttttattaattccttgagaatttcagataagcattcagtgtatcttgatgtaactcatttcctacttctcccaacagccttgtctagttccaggacagccagggctaactaaacaaagaaactctgtcttaaaatgccaaaaccaacaaacaaaaacttgtgaactggaggtcaaaagaaagatgatcagtattgtatatttctatattataaaggcttaggtttacatcgtttattaaaatattcttgtaaagttgcctctatgcagttcacaaaagtcccaggaaattgttaaagttattttatgcttaaagtagtttgtgatgtgtcttttgcatgttaatgtaaagctttaattgttaatatgctgctagagtctagtcttagaacttactgtttgtgaagtagcaattgattatcatatctgtaatagaactttacttaaggattcagattgaagaagtccttacatgggttggttatgtttttacatattttatttctactgatttgttttagataagcagtcaatatgaagagttatcattttgtgtatatttctgtttattttatcattaaagtagtttttgataagttgaagacatttcttgtgaaatgatcctatatgtatttaaccacacagatcctcagtttgtggtctgccagctaaaggtgaagatatattcctccaattcaggacccacgcggcgggaggacaagttcatgtactttgagttccctcagccattgcctgtgtgtggtgatatcaaagtagagttcttccacaaacagaacaagatgctcaaaaaggtttgcaattcagttctattgtgtagaaatagccattcctcaatgagtaaccacagaccttttgcttaaagcctttggttaggaaattattctgtaaggagagactatttctctgccatctaccaaactgattactcttttgttagattggcagactcttcatttctgtggcattgatgagacatgtaagcagactcacctgccccgacccttagtttgttggcttttttggtttgttctatgttcttatgttgcacaagccatgttttacccatttgggtttatgtttcttgagagtagactattttatattttgtttccccaggttactgagtatttagtcagtactgagtatttagtcagtactgagtatttagtcagtattacttagttgaaagaagtggttgtgaagaagtaatagtaattaaaaaaaaaaaaaaaaacataccaaaaaacaaaagggtggaaacagctaagcatatcctctgtccagggttgctggggcttgagatacacttgggaggaggagagagctcaggtgcagtgtccttggtgtgaacatttatccttggtggctttagtacccttagttgaatgtgaacattaaaatgagtcttaaggtgtagaagttttagctggatcagaagaagataccagttttgtgcagaatcaattcccgtgaagcacatagagcagtacatagtccggaagggggttttataaaaagcagtaaaaggagagcttacttactataaaaccttgcaatgtcagatcaatttatcaggagagataatttcttttttctaggatctacatagctaaagaagaaaaaaaatcacaaagttaaccaaattaatgtttttatcatggacctctcatgaaacaaaaaagctaaatataaatatctttgagttactggtttttttgtttattttctgagaccacaataaatgtgagcaaacatttcaaaaattaggtatttggaaggctttagtttttttccctcttacttcatttgtttgtttgtttgtttgtttgtttgagagacatggtctctctgtctagctctagctgtctcgaacttgttttgtagacaaggctagtctcaaactcagagatcgattgcctctgcatcctaaatgctgggattaaaggcctgtgccatccctgcccgctatctcttacatcttgtaagactctgattcacataagagtgtgtgtgtgctcacacttgtgtgtgtgcgtgcgctcacacatgcatatgtttttctttccttgtttgtttgaagacagattcttactctgtagctcaagctggtctggaactcactaagtagctcaggttggcttcatataaaacagtctttttgctttaaattcccaagacaggagccgcctctcttggctttatattgcttgtaaaaagagataattacctcactgtctccttgtagttttagagatgtgctgtttcttactccagatctctgaagattggatatttataatatatttgtatattttagattactttccataaatttccatttatcataggttttccttactaattatatgcctgttctgatttaaataaaaacagttttagaaaatcagtgcacatcagtgagctacatttgcaagtttaaataatattaccgtgttttcttctaagtaaaatatgattgccaactgaacaactttgttaaaataattgagatcaataaggtttgaaaagggctggaaacacgactcagcagttaggagggagcgctggatgttctggaggacacaggcttggtcctcagcacccatctgttgtcttacagttgtctgtaataccagacctgggggggaatctgagtcctacctcgggcctccatggacactggacagatacaggggccagaaatgtagttgccatagggatcaacttactagggcttctgttgaagtagcaacacctgatctttgtttatatttacatatgcataaactcagaatatttttaaaatccagtattagaataagaagtagttttcttaggattttaagataaaagtaagataccagattttacatgattatattttttatttgaaattttagaaaagataacttagtgaataagaatattccacaaggtgtttgccttcacttaagaatatcaaataatatatggtttatatgttgactatttgtggtacatttttaaataagtgaaatacatcttccatttcttttctgtttaggacaaaatgtttcacttttgggtaaatacgttcttcataccaggaccagaggaaacctcagaaaaagtggaaaatggaagtctttgtgatcaggaaatcgatagcatttgcagtatagagcgtgcagataatgacaaggagtatcttgtactcaccctaacaaaaaacgatcttgacaaagcaaacaaagacaaggccaaccgatacttctctccaaattttaaggtcagttaaaaccatttgggggtgggagggtgtgttttattctgattgtgaagctaagagctagacattgttctagtattgttcaatatgtaacattcccgagtggttgcgtagcctttccttttctgtttattactccacttgctctccttatttcttctcctcccccctccccatcttgagtctttcctctttcctttttcctttttaaattcttttttcattccattgtatttgtttcattcacatgtaacaaactcaaccatagattattatattattattataacataataatactcctaatatttaaaatagaaaatgaccttcacacatgttaagtgaacatagacctaatattcagtgcctttggatctcaagtatgttttaagtttcctttagaatcttcaacttttcattttttccttttctctaaatttacatttctatcaaccacctgcttcctgatttttattttagataggatcttggtatataggctcaggctggccttgaactggcatgtctctgcctcagcctcacctggcaaccatttgcttttaaaatgtatttctctctagttttactgttttaatatttttctggcaatgtgcctcaatgcttgtctaacatgagaaatgccttgagttgaacaccaagtcctacaaaacaaccagtaaaaaaataaagcataaaatagttcgtgtagataaaagctgttttcattgtcactgtaaggtaagtcctatgaagcatgcagctggcaaagaaagtctggtcaagtggatggtctgtaaagagggttgtctgcgtgaaatgggtgcatttaattatgcaaattgtatgcgacctacagaacagttatgtgggggaaggaggaagagtagaaatgagaatctgaggcatgaatgagcttggtatattcagtggctgaagtcatttccactgagtcacaggaacccagtcttgatgtagcagtgtggagtgctgaacacagagaaggtataatctgagctttttaaccttccagttcacttcctaaattgagactggctcagaaactagggagaggagaggccgtggggctgtagtggcaaggagcagtggtaaattactaactttgaagggggatttttaaagcaaatgttggttataagaaaaacttataatgacttgcataatgggaaaagagcaaagatatgatttaaacctggtctctgccaattgttcactagagattgtcctttagcatgtggcctagacttcagggtttttgtttcttaccttttaaaatggaaataacctaagaactgcagccatgcatgtaaaggctactgatcaatcctcacagcacagagtgctctgttagcttgcaccattctctcgtcagatgactgttgtagagctagttgaccttattaatcagtattgtgtagtgtcactaatgtaaacatagagttgtctcagagattgcaagagaaatgtttttgaaacataagcacttgtaaattgaattttgtgatttagtgagttcattgccttcagtttgcacttttatagaattatacagtgcttatggctgatgtattttaaaaatagctttcaactcatcattgtgtcttttgagagcacagtagtcaatcttcaggtcatctgaaaagcagtgcccttcagaattcattttgttatagtactttcaagtaaatctgcaaaacagaatgtctttgctaatacagaactcattctaattgttcattttcatcttaaactttctttctctaggtgaaactatactttacaaaaacagtagaggagccatcaaatccagaggctagcagttcaacttctgtgactccagatgttagtgacaatgaacctgatcattatagatattctgacaccactgactctgatccagagaatgaaccttttgatgaagatcagcattcacaaattacaaaagtctgattttttttttcttatcaagagggataaaataccatgaaaaaaaaaaaacttgaataaactgaaatggaccttttttttttttttttttttttaaatggcaataggacattgtgtcagattgcagttataggaacaattctcttctcctgaccaatcttgttttaccctatacatccacagggttttgacacttgttgtccagttaaaaaaaggttgtgtagctgtgtcatgtatatacctttttgtgtcaaaaggacatttaaaattcaattaggataaataaaagatggcactttcccattttattccagttttataaaaagtggagacaggctgatgtgtatacgcaggagtttttcctttattttctgtcaccagctgaagtggctgaagagctctgattcccgggttcacgtcctacccctttgcacttgtggcaacagataagtttgcagttggctaaggaagtttctgcagggttttgttagattctaatgcatgcacttgggttgggaatggagggaatgctcagaaaggaatgtttctacctgggctctggaccatacaccatctccagctccttagatgcacctttctttagcatgctccacttactaatctggacatccgagagattggctgctgtcctgctgtttgtttgtgcattttaaagagcatattggtgctagacaaggcagctagagtgagtatatttgtagtggggtacaggaatgaaccatctacagcatcttaagaatccacaaaggaagggatataaaaaaagtggtcatagatagataaaagacacagcagcaatgacttaaccatacaaatgtggaggctttcaacaaaggatgggctggaaacagaaaatttgacaatgatttattcagtatgctttctcagttgtaatgactgctccatctcctatgtaatcaaggccagtgctaagagtcagatgctattagtccctacatcagtcaacaccttacctttatttttattaattttcaatcatatacctactgtggatgcttcatgtgctggctgccagtttgtttttctccttaaatattttataattcttcacaggaaatttcaacttgagattcaacagtaagcaggttttgttttttttttttcctagagattgatgatgcgcgtcctcagtccagtggctgtcagacgttcagcccctttgaccttacacattctattacaatgagttttgcagttttgcacattttttttaaatgtcattaactgttagggaattttacttgaatactgaatacatataatgtgtatattaaaaaagtcattgtttgtgttaaaaaagaaattagagttgcagtaaatttacagcactgcacgaataataaggcattgaagtttttcagtagaaattgtcctacagatgctttatcgacttgctattggaagaatagatcttcttaaatgtgcagtgttgagtcacttcgttatagtggtagagttgggattagggcttcaattttacttcttaaatatcattctatgtttgatatgcccagactgcatacaatttaaagcaagagtacaactactatcgtaatggtaatgtgaagatgctattacaaaggatctcctcccaacccctcgggaatttggtgtctttcaaattatatcttgaccttgacatttgaatatccagccattattagatttcttaatggtgtgaagtcccattttcaataacttattggtgctgaaattgttcactagctgtggtctgacctagttaatttacaagtacagattgcataggacccactagagaagcatttatagtttgatggtaagtagattaggcagaacgccatctaaaatattcttagaaaataatgttgatgtattttccatacctcatcagtttcactcaaccaataaagtttttaaaattgtaacaaagctcttaggatttacacatttatatttaaacattgatacatgaatattgactgactgttgataaagtcagagacaacttttcctgagatctcaccatggaaatctgtacacccccttgtctttcctaaaagctgaaagtggctgactaaaatgcaaagcagctgttgatgttttgaagatagtgataaacactgttctttgttagttttgggcacagcatgctaaactataacttgtattgttccaatatgtaacacagagggccaggtcatgaataatgacattacaatgggctgttgcactgttaatatttttcctttggaatgtgaaggtctgaatgagggttttgattttgaatgtttcagtgtttttgagaagccttgcttacattttatggtgtagtcattggaaatggaaaaatggcattatatatatattatatatatataaatatatatattatacatactctccttactttatttcagttaccatccccatagaatttgacaagaattgctatgactgaaagggttttgagtcctaattcaaactttctttatgacagtattcacgattagcctgaagtgcattctgtaggtgatctctcccgtgtttctggaatgctttcttagactcttggatgtgcagcagcttatgtgtctgaaatgacttgaaggcatcacctttaagaaggcttacagttgggccccgtacatcccaagtcctctgtaattcctcttggacatttttgccataattgtaaaagggtagttgaattaaatagcgtcaccattctttgctgtggcacaggttataaacttaagtggagtttaccggcagcatcaaatgtttcagctttaaaaataaaagtaggttacaagttacatgtttagttttagaaaatttgtgcaatatgttcataacgatggctgtggttgccacaaagtgcctcgtttacctttaaatactgttaatgtgtcgtgcatgcagacggaaggggtggatctgtgcactaaacggggggcttttactctagtattcggcagagttgccttctacctgccagctcaaaagttcgatctgttttcatatagaatatatatactaaaaccatccagtctgtaaaacagccttaccccgattcagcctcttcagatactcttgtgctgtgcagcagtggctctgtgtgtaaatgctatgcactgaggatacacaaatatgacgtgtacaggataatgcctcataccaatcagatgtccatttgttactgtgtttgttaacaaccctttatctcttagtgttataaactccacttaaaactgattaaagtctcattcttgtcattgtgtgggtgttttattaaatgagagtatttataattcaaattgcttaaatccattaaaatgttcagtaatgggcagccacatatgattacaaagttcctgtgcatttttctatttttccccctccttgctatccttccaagcaaagcatctttctgtcatcttggtagacacatacctgtctactcatggttaagaagagcactttaagccttagtcatcacttaataagttattccaggcacagtaaaaagttcaaggttcttggaaaacggtgcttatttctcttcttataagccagatgtctgaagatagccctaaccccaagaacgggcttgatgtctcaggtctgttctgtggctttctgttttttttaacactgcagttggccatcagcacatgggaggtttcatcgggacttgtccagagtagtaggctcaaatatactatctcctttctaatattcttaaaggctaaggagtcctttcaatataacagtaagataacttgtgatgttttagaagtaagcagaccattaatgtcaatgtggagtcttaatgttacatgaagttgatagtttctctgtgacccatttaaaaatacaaaccgagtagcatgcaattatgtaaagaaatatgaagattatatgtagtcacacattttctttagaattcttagtttggtgaaaacttgaatataaaggtattttgatttatatgacattttgatgatatttgaaaaaaaggaatttcctgacattttgcttttagatcatgtcccccattgtgctgtaatttaagccaacttggttcagtgaatgccatcaccatttccattgagaatttaaaactcaccagtgtttaacatgcaggcttctgagggctcccggagaatcagaccttaagcccagttgatttacttctaacgtgaaacttcgagttcctgtatactttgctagataatttgtggtacatctaaagcttagtcttaagtggcttgtgtgtggattttattcaacattcttgttgctagggtagagagaaatgttgctgagtagaaacaagagtacccagttcaatgtggtacagagagcagtccctaaaatctgtacacagtgtaatggaccactttaggagtcaagaggctgatttttcctatgaaattacattgcaacaggaagccttctagtatagttccttttactgttagaatatgtttttatgcatacgctatagctgctttcccatcttccaacaacaggtatcaggatgtaagcaagctttaaacagtgtgaagatggcaggatagtgtcatcggtaacagtcctctgactctaaatgtagttgctctgtaacactttgtgaatataacatcacaattctcatgtccttggggggggggggcatacccagtattagtatgttttagtgactaagcaatcatttttctgtttactcatgtacattttctctttaaaactaaaacctgtactgtgtatgtctccaaagccttttagcttagtttttaggaaatgaacactgaatggatcactttttagtgtagcaggtatgggatatgtgcattatagagagaccttgtcagctctctgggcctatttgaatgtttattgttggtgtgaggatggtaggggaatcagtaaatacaagttacgttggtttagcagagcaagctcagtgtgggtatttctctttgaagcgtggtgcgtgacgcactgtgagtagagaatttggtcaccctttgagtcctcttgcattttgcaaacttgctcagcaaatgcgtacctaccttgccccctaggtaaaagcaggaactactactgatttatctgtcactcagctgtctttatatgtgtgcttctgtgacttgtatcacacaagaatcttaaagatttcacaaattgttaccttttagctctgaatgttgagtattctggtgggctaacaacaagacaaactcttgacagtcatttgagaattttcatgaaacatttagctgaaaacattttataatttatgaaaaaaatgtgttaccttaaacttttacatatgtgggagacattaactgccatatttgagcatactgaattttaaatttaaaataaagctgcatatttttaaatgaaatgtttaacaaggattcatattttttgttttttaagattaaaaataatttatgtcttctcatgtggaacctcatctgtcacaatggttagattatacagaatggagcaaggcttgtagtggtttagcttacagtaaaattcttaatgtttagatgtgtttacttactggctgttatgtatacttttgagattttccacctgttctgtgtagttttctaaatgatactcctacttaaaaacagcattttagtatctattttctgtctccattaaatggtcctcattttctattgagtttggaagtgtgcacattgtgtgtgtgtgtgtgtgtgtgtgtgtgcacacgtgtgcgcgcccgtgcgtgtgtctatttgtggagtttgtatgggagaattagttttgaaagtgctagaatagagatgaaatttggttcaagtaaaattttcccactgggattttacagtttattgtaataaaatgttaattttggatgaccttgaatattaatgaatttgttagcctcttgatgtgtgcattaatgagatatatcaaagttgtatattaaaccaaagttggagttgtggaagtgtttttatgaagttccgtttggctaccaatggacataagactagaaataccttcctgtggagaatatttttcctttaaacaattaaaaaggttcattatttttgatgatttgcttcttagctttttattcatccgagaatcaatccctgctatgtgtaacaggtatttggactatattacttagtgaaagaggaacatcctgatcttactgttgaaaagtttatacttcaccagagtaaactacgtaaaagctgtggggtgtgctaggaagtatgagacctcatggctcccttgcatgtccatcctcagagtttagattctgtttactagagcattactagagtgaaatagccatgaaagtgcagagaaacttccaagtaaaggcagtgagagatccctgtaccctcctgtctttttccttccctagtgcagtgtcctgaagtgtgtcctagtgtgtgtcatggctctgccagcccaggtcttgaggtaacacctgcagtggagctcctgagggtcttcctctaccccctttcaacacaagcaagaaacaataatattttgggttgctattctaaccaatatgctttgaaaaacttagctttcttgagcagcaaagggaattaataataaaacccaacatatttagattagtttgtccaattaacaggatgcaagatgtccaaatgtttttttttttgatgagtagttattgcggtacgtcaggcattgtgaacgctcggcatgcacttgggtgaacagcagtttcctgtctgtgaagtttgcattctagcaagaaaaatagagcaaagataaatgtgtcagctcacctcaagcagagtgacttcagtgttggataggttatttgagagtggcttcagcaggtgtggggggtttcagtagactggtgcaatttgtacccagaaacttccacaaaactttactcagacttggagtttgaaaatgtttagtatatctaaggagaatttatagtaacctcatcttaagtagccatgaccattctgttgtctaaattggtttggtaaagcctgtttaaacaattggttcctctttattctcagagttaactttttagtgttctctgtgtatgtttcaaaaacactaagtcatttttcagaagttaaaggctctattttgaccttaaatagttttgtaatgttgaagagtcatgccatttatgatttgttgttggacagtgagttataaatgttgagttactcaggatatgggtgtgatttatgacctggtgctctatgtattagttcctaacccataaccaaacatcctgaaaaataccattatctaagtatcagaagcagcatttccacacaaagataaaaatccccacctctcctgcttcatctcaaagattgaagtcaaagtgtttaataatctgctacaatggacacttgaaacattttattcattacatcattaacattttagtagtggcagggtccactcctcagatcaggcccaggactaaggggtgaggtcttttatttatttgtttatttctgtgtatacacgttcacatgtgtgggagcatgtatggcacgtgtatgtatatgtgggtggagtcagagcttaatgttagttgccttcctccatggctattgaggaagccatctcttcctaaaatcttcctaaatctcttcctaaacttggtgcttggtgattcatctgcaattacagttggatgtacagcccagcatgtagtgttgggatcataacactagtcctcatagttgcaaagcaagtactttgctcagtgagccatctccccagtccctagggaggaaatcttgaaagaaaatgttgactttttttttttaattcttgattttaaaataggtttaaaagaatttgatagtcatctatagatagaccatgaatctgagcaaggagaggtatataggaagatttggaagggaggaaggcaaggggagaaattatgtaattaaattacattatcgggctggtgagatggctcagaggttaagagcaccgactgctcttcggaaggtcctgagttcaaatcccagcaaccacatggtggctcacaaccatccgtaatgagatatgatgccctcttctggtgtgtctgaagacagctacagtacttacatataacaataaataaattaaaaaattacattgtctcaaaaaataagaaaataactaaaaattttaattttacttaatgttttcctgtgaatattattgataagaaacctttttgtgtggctgcctttaacagaggagccacaagctatattcttgttacttattacgtttgtgtgtttttgtatatgcaaatgtttgccatgatactccatgtaggttaagaggacaacttgtcaggagtcttttttctccttccactatgtaggtcccagaagttaaacttaggttgtcaggcttggtgctcatctcctgagccttctcatctgcccataccaggtattctttagcaagtacttcagtaagtacagccattgtaagtcacaagagcaattagacttcttcatggtagaaataattagctgatggaaagattatattttaggattataaatgttcttggggggggtttgtttttgtttgggagtttttggtttgttttgagacagggtacttaggctggcattatactcacgatatagttctggctgacctgcagcacatgatcctttggcttcagtctcccaggtaagaatactggaattacagatgtgttgccaacacctctggttattagtgatgtgtgtgtgtgtgtgtgtgtgtgtgtatacacacacagtgaatgttttactcttttggtaaaaatggaggtctgaggtaaaagtttcctatgtcagctgtccatagggaagacttaaaagactttgcttcaaaagattgagggctggtgagatggctcagcagttaagagcaccaactactcttccaaaggtcctgagttcaaatcccagcaaccacatggcggctcacaaccatctgtaacaaaatctgatgctctcttctggagtgtctgaagtacagctacagtgtacttacatataataaaaaagtaagattaaaacaacatcaggatgaacatgattttctcaggtataaaatggtggctaagaggtacttggaagtctcaagcaacttgactgaatctccaaaaacttaagtaagtcaggttctttacctggaaggcaaaacagcagcacagggaggaaaaaaaaaatcaaagtactgaagcagaagtaagaagagaatgtgacgcaggaaagaagtgaggagagcccagactacacaagagggaggccagagccacagcggagttgtagcctggtggttctgagtctgccctgggtgaaaagcatatttcactttcctttagggagaggtgatttcattcctgaaaccttaaaaacaaagtatccaacttcacagctaggtagtaaggaattggatttgaacccagcatagtctgtggtttcttccatagtatgacacagtctctctctgtttttttgttttttgtttttttttttttttggtttttggattttcgagacagggcttctctgtgtagccctggctctcctggaactcactctgtagaccaggctggcctcgaactcagaaattcacctgtctctgcctcacaagtgctgggattaaaggcgtgcgcaaccacgcccggctggcactgtctcttagagtcaaatgcgaaacagttgaaaattgaagctctgaaataaattgtatcatggagtcactggatattcttcatttgttagaaatagtaaaaagaacaaaccagtgttaggtcttgccaaaaaaaaaaaaaaaaaaaaaatggacatcaaaaataattgcttaggtactggggaggtggctcagcagttaagagtcctggctactcttgcagagggctcagatttggttcccaacaccccaatggcagctcacaacctatggaactcaagtttcaaggaatccaacgaatgccctcttctggcctccatgagattgcatgcttatagtgtttcacatacagtgcgggcaaaatactcatgcacataaagataaatctttaaaaaaaagccatttaattcaagccataagagtcttgacagggtacattggtaagttatgggtatataatggtgtgtatcaggagacagaattggagctctgacttgctaatgcggtgtgaaatccattaaataaatgtcctttgtttttgtttgagctggaatattcagattggtggatggtgctcagttaacttccactcagcaagtctgttatgtgcctccagttagaatcaccctagtgtagaagctagagaagcttgtagaccatgccgcgggaacagcaagtgcaacagtttgatgtgggaacaaagctaggacaccatgaaaggaaggcagagcagatcgtaggataaaatggtggaaggtgaattttggagaaatactcagaggagctcatggactgatcaaagcataataaaaccactgaatcattccgcacagatagcaactaagaatctctgcaccaaccaagggtttgtgtgactctcctagtcccacactcccctctccggccatgctaactgccgttaggtgtgtttgggggtggggtggggtgggcggggcatctttctaacttattccatgctgaaagggagaacagagaggggcagccatcagagtgtctctcaagagggtcaataaggagctttgataaacttaactgatgatcctgaacataaggcaaccattggtgactatgcatcctcggagctagctccgtgagcggcatagagtctttaacacactgttagtactattttaattcctattgaaaaagtagtccagaaaattgttggagaagctgagtgtggcagctcgtgtcttcaatcctagcccctgggagacagaaacaggaaggtctcagttcaaggccagcctggtctatatagtaatttccaggtttgtcagaactatgtagagagatctgtcggagaaaaagaaaatgccgtgggtgattatgccccatttagagaaagatcacaagaaccttagtaggctttgtcatcagtaagatgctattttctttgccaccactgtccattgcaagatgtatatggtggagcaaactggtagtctggcttgggtttgtctcaaacccaagcctttaattagtttaaatttagaagttggccttttggtttcttccatcacagcctcatggggggttaagaaaccaagttaatgaagaaaattccttaacccgatgagtaatattaagacttacttagtaagacagaatgtaaatcgtgcagctgactggaccatgtgccaaaaccctgtggaaagagggggtcagagaaaaccgtcttctctacatctagactgagtgaagttttgcttgagagatctgagtctaactgcaactggctgttactccttaggcctcggagccctgcctaagaagtggatgcctgggaactcctccagacttgtccaagtaattttcccattggcactgcccacctagggaaaggggccaaaaacagataagaaagatggcaagcttcaggcttctttcccacactcctgacctgagacaaaggcctaagggcctggtgggctttttcttctgacaatagacccccttgctggtaggctgttctgacaagttcaaggctgaggccacatatgggcacattagcctctctccttgcttttgttcaatctgaccaggcctaaattagcagaggaagactattcaaaggccctcaaaactcccagccctccataagaaactggacttcagtgtccccagtcctcctctaactttcagaggttctttctctgtgtctcttaccatgtgtttcctcgcccctagtaaaaaccttgcatcagccattaaagaaaatctccccatgaaacatgaaaagtaactgtagggttaaacaggcataggtcttgttccttcatcttagtttttcaacggagctgggacccacatatagcctggtacagcaggggtgttatgattagctaaaatgggaatcctgttctctggctgggggttgggggcaaaaaaaaaactgatacaagagccagagagcatagtggggctagaggtgggtcactggggaaaatacagactaactagaaaggaaatctttacttccaatttagggacttccatgtacccgacacttatccccaagggggatgggtatagagacagagcccagggaacacgcccaaagtgtcaaacatgaaagtgaaagtgatggagttcccactcagaggtgagacacaactcacaatctgagtttaccagttgatttcattcatccacctatccatccatccaatgcttttctgaaaattataacaggacctttgctgtacacagtacgccatccaatgtttcctaactgggaaggactgggaaaatgagagcaacaaggaaaaagacaatcaagcgatgccaactgcagatttcccagatggaaatgcttagactaagtcaaatgacagacaaaaacagctattgtaatgattgtgttataatcatattgtaaaatgattagaaatatacaactaaatggaaagatggtctcagcaaacaaaattacgttatttctaaaagatatggcatctgaaagaagaaaagaacatacaaaatggacaattcaagagaggctatgaagagcctagccagtagatgaagagaacttggtaactatccatcttaagagcagcttgagaatcaattgtcttacttactcactttacatcctgctcactgcccactcccagttagcccctcccacaatacttacctcatcccctgtcctcttctcctctgagtgggtggggaccccctgggtatctccccaccctggcacaccaagtccctgagaggctaggctcttcctctcccactgaggccagacaaagcaactcagctagcagaacatatcgcacccacgcacaggcaacagctattgggaccctctcccttagccccacctcaacctcactccagttgtccaggacccacgtgaagatcaagctgctacatatgtgcgggaattgcttgataatcttaaagggggggctgtagctttgaaaagcaaaaatgtatctgagtgtaattagctacagagtacttaatgaaacgctaaccttagtacttttatgtgcttgccacagacacttatgaagaagctcctcctgcttgtcagctgccttgagtaaggaattagcatcatcataagccctgccttggtgatggtaaaaatttcctgtaacgatgctgtatagccttaaagcaataaagcatgctcaatgctccatctacagtttcctggttggatccattcagttgttgtctacctgcagtggaaggaatttggaaacctagcgactcaccactagatcatggtcaaaattcatctccggaattggtacccaatggtagttttgcttgctggctatggttaactctttgatgtagccttggcagtcagacctttaaaaaaaaatgtcatacagaagctaaccggtcatgtagatataatgtatgcttttcaatagaaaatataggagaaaaaaggacagtgttgcactggttgactaagaaaacattaagacatgtttgggggaaaactgagcaataattgtgtttggagaaatggcttcctaatttaggagtagagagtttcaagaccttagagtaactctcattggtatattagaaccatataactttcaaagtctttcttgcttttttaactttttaaatgtattttttccagcatatatgtctgtgtattacatgatgatgccagatatccacaaagcccagacagttgtgagctgtgttggtcctttggaagagcagcctttactcttaacccactaagccatctttctagccccccaaaatgtatgttttataaatggtattcttttaatgactgtgctaacatttgcttggaatattccaacggttgcatttaattcttataaaataagaagtatgttctatttctatctatattatacatgtggatcagaagaataggaagggttaataatctgttgagtgttgcagacctggttcctaggatctaaacccaagaattatagtttcaattttgctgaagccacagtctgccttttgtagtgctgttgggatatgttagaatctttcctacgtgaagtctaatgggagaacattacattgcatttggggtatacccctgaagagaccctttcctgtctgtcccttgcttcttggccattgtgaacattcctcctccatcatgtattctcaccatgatgcatgtaaactaaaatatagtttaactccttttaagttgattactatctcaagtcttttgtcacagtgatgggatgccaaataatgcaagagggccatttgatggccaagcctcggttaattgtgtatgtgttaattcctaaagaaagtagactttacttccttaacaaagtagacttcttttaagagcataggcttcaagctagaatgggtagaattgtgttgtcacttgtggctctgaaaccaagttctcggcactcctttgcactgttgtaatgtctaaaagcctttaaaaaaaacctttgttactgatactaaacatatttgaaactaaaacaggtaggtgtgtgtgtgtgagtgtgtgtgtgtgtgtgtgtgtgtgtgtgtgtgtgtgtgtgcacataaatatatatccaggcttcaggctggtctaggactcactatgttgcctagactgacctaaagccataatccttctccctgtcttggtttgcaagagcttggattactggcaaacactgtccagctagttcccgaaaaggtagttgcaatatggaatcagaaaaccatgatgaactttttgtgctactcccttttcttgctctataaatagatcagtgctcatgttcatttttgttacttcatgcattaattattcgggagaaaatggtttagtgagcaatacggattttggcaccattctctagaggaatagaaccaacaggatatatagttgtattatgaaaatggattcagtagactggttgagagactatgggatgggttcaggctagagaggctgagagcccaactcagtctaggaagctgggtgtctccagccgtccccatctggtgctgatagcctagcagattcctggagagtccctggtcttgaatccatgaggaatcctaaagaagctggagtctggtggaagcagaagatgtagcaagcagcagcagaaagagcacggagccatgcaggtaggcaccatttgggtagatgccatggagataggtgccatgcatctaaggtcatgcagataagcagacggtcttaacctctgctctctataacctgaaggtgccgcccactcaaggaggctcctttttccttcagttaattctttctggaaatgctcccaaagaccttcccagagcttgtcttttgttgattcctgatcccagtcagttgacaatcaaggttaactatcacactaagttttgtacatctccccagtaactatacatttttatacattatacatgcatgtatgcatatgcacacatgtgtgtatatatacatatatctcacacctgttaatatcactactgagaaaaggctttacatattgagacactctcaagttcataacggcagatccgagattctgaaatactatgaaaagctctgttactgccaacggatgtcagctgtcttctgaaaagggtctcagggtggttcaggaattgtggccaggctttgaagatgaacaatagtattagagatttgattaggggaaacaaacacagacatatttatctcaaaggcccaggcaaatgctttctcagagcgctgaggaacttgaaaatggactctcagaatcatgcacagcagagtctgctgaattatgggcaataggagagagttcgggcaccaagaaatgaaaaaagcatgccttttctctctagagagatggattctggatagcgaagacaggtatatttaacataaattttaaaaaaaggtttaatatgtttgttagcaggcagttttttaaaactctagagaataactcagtgagagctagctggccacaaaggccatcttaaagtcacctcaaatccgtatttttcctttatgatcacatatacagcatgctacgtgacagatggacattattgcaatacttatataagacagttgaaaataatttttatgtaacacactgggtataatcagttctcttttggttaagaatccctactgcaatccctgccatatacaaaatgctggtagacaaagaacatggctaagagacaagaacagaaatctaagccttttctttgagagtagagaaactcaaacacacccttgcatcataagacatgagaagtcttcctggtgagaaaactagtactgtgttacatgaggaggacatgtatgttctatgtctgatggaccagtgcaggaactatgtttactgcttgtcttgtgctccatctcgtagcctctccttccagatcagatcatgtttcatggataatctctttcttctcttgtttataacacttaattctcttttggatcattttctggtgggagtctaccaatatttctagttttaatctttttactaaaagaaaaaaaaagatcctttctgttgaattgtatttagatatgactgttattttttttttaaaactaaagacatcaacatttgcttttgcctctgctttctcacagcttgttcactctttttgttgttgttgtttttttcctgtttgcaacatttagtcatgtgtgtacattccaggtggctctatccttgcagctgaacattacaaaataaaacatatagctgggcatcttcttaatctttctagacattaattgaaaaagtcagaaatagatatttctagcatactaattttctcgttcctgaagacaagttttctatcttctcccctattaaatggtcagtggcccaacactatgcctatggacagcagtgatggtatcacaaagaacctttccagctagcatctagcaaccagtgtgtgggctctccgatgctttgttacaatagaagatcgtctcgttcatttctctacaaatgaggaaagaatacaagaaatagcagaacacaaaagaaatggctcagaggttaaaagtattttgccacacttccagtatctgagtttgctttcccacagatgtcaggtagctcatctgacaacctctactggcctctgtaggtgcccacacatatagcatacatccacacattcataaataaaaataaagcttgaaaatcaagaatacatgtaagaaaagaaattttattttctttctttttcttttcttttccttgaaacataattgtattaggattcttcagataaatggtccccccacaggatagatacagactagatgatatacatatagttatagatacagttatagatatatctccctcctctcacccccaaatcttctagaggtttgggagaccaccaggtagactggcaaaccataaaaggaaagctgatagcataagttctattttaaagacagaccatcatcccagcttggaacgggcagtatgacttctccattattaaaaacaaaaccaagggccaggtatggtgacatacgcctttaatcccagcacttgggaagcaaaggcaggtggatctccatgagttcaagaacagcctggtctacatagtgacagagctatgtagaaggatcctcacaaacaaacaaacaaacaaacaaaaataaaaaagcaaaaccaaccaaccaaaaccaaaccacaaataaataacaataaaaacaaaaccaagcaaacaaaaattcaaaagctaatacagaactctttctctttggggatgtaatatgtacccacacacatattgcttttgtgtttgtattgtttttgtaagacagactttcactatgtagcccaggctgtcctcataccctgcctc

SEQ ID NO: 4 - DNA, 92584 bp, Mus musculus
gaggcagggtatgaggacagcctgggctacatagtgaaagtctgtcttacaaaaacaatacaaacacaaaagcaatatgtgtgtgggtacatattacatccccaaagagaaagagttctgtattagcttttgaatttttgtttgcttggttttgtttttattgttatttatttgtggtttggttttggttggttggttttgcttttttatttttgtttgtttgtttgtttgtttgtgaggatccttctacatagctctgtcactatgtagaccaggctgttcttgaactcatggagatccacctgcctttgcttcccaagtgctgggattaaaggcgtatgtcaccatacctggcccttggttttgtttttaataatggagaagtcatactgcccgttccaagctgggatgatggtctgtctttaaaatagaacttatgctatcagctttccttttatggtttgccagtctacctggtggtctcccaaacctctagaagatttgggggtgagaggagggagatatatctataactgtatctataactatatgtatatcatctagtctgtatctatcctgtggggggaccatttatctgaagaatcctaatacaattatgtttcaaggaaaagaaaagaaaaagaaagaaaataaaatttcttttcttacatgtattcttgattttcaagctttatttttatttatgaatgtgtggatgtatgctatatgtgtgggcacctacagaggccagtagaggttgtcagatgagctacctgacatctgtgggaaagcaaactcagatactggaagtgtggcaaaatacttttaacctctgagccatttcttttgtgttctgctatttcttgtattctttcctcatttgtagagaaatgaacgagacgatcttctattgtaacaaagcatcggagagcccacacactggttgctagatgctagctggaaaggttctttgtgataccatcactgctgtccataggcatagtgttgggccactgaccatttaataggggagaagatagaaaacttgtcttcaggaacgagaaaattagtatgctagaaatatctatttctgactttttcaattaatgtctagaaagattaagaagatgcccagctatatgttttattttgtaatgttcagctgcaaggatagagccacctggaatgtacacacatgactaaatgttgcaaacaggaaaaaaacaacaacaacaaaaagagtgaacaagctgtgagaaagcagaggcaaaagcaaatgttgatgtctttagttttaaaaaaaaaataacagtcatatctaaatacaattcaacagaaaggatctttttttttcttttagtaaaaagattaaaactagaaatattggtagactcccaccagaaaatgatccaaaagagaattaagtgttataaacaagagaagaaagagattatccatgaaacatgatctgatctggaaggagaggctacgagatggagcacaagacaagcagtaaacatagttcctgcactggtccatcagacatagaacatacatgtcctcctcatgtaacacagtactagttttctcaccaggaagacttctcatgtcttatgatgcaagggtgtgtttgagtttctctactctcaaagaaaaggcttagatttctgttcttgtctcttagccatgttctttgtctaccagcattttgtatatggcagggattgcagtagggattcttaaccaaaagagaactgattatacccagtgtgttacataaaaattattttcaactgtcttatataagtattgcaataatgtccatctgtcacgtagcatgctgtatatgtgatcataaaggaaaaatacggatttgaggtgactttaagatggcctttgtggccagctagctctcactgagttattctctagagttttaaaaaactgcctgctaacaaacatattaaacctttttttaaaatttatgttaaatatacctgtcttcgctatccagaatccatctctctagagagaaaaggcatgcttttttcatttcttggtgcccgaactctctcctattgcccataattcagcagactctgctgtgcatgattctgagagtccattttcaagttcctcagcgctctgagaaagcatttgcctgggcctttgagataaatatgtctgtgtttgtttcccctaatcaaatctctaatactattgttcatcttcaaagcctggccacaattcctgaaccaccctgagacccttttcagaagacagctgacatccgttggcagtaacagagcttttcatagtatttcagaatctcggatctgccgttatgaacttgagagtgtctcaatatgtaaagccttttctcagtagtgatattaacaggtgtgagatatatgtatatatacacacatgtgtgcatatgcatacatgcatgtataatgtataaaaatgtatagttactggggagatgtacaaaacttagtgtgatagttaaccttgattgtcaactgactgggatcaggaatcaacaaaagacaagctctgggaaggtctttgggagcatttccagaaagaattaactgaaggaaaaaggagcctccttgagtgggcggcaccttcaggttatagagagcagaggttaagaccgtctgcttatctgcatgaccttagatgcatggcacctatctccatggcatctacccaaatggtgcctacctgcatggctccgtgctctttctgctgctgcttgctacatcttctgcttccaccagactccagcttctttaggattcctcatggattcaagaccagggactctccaggaatctgctaggctatcagcaccagatggggacggctggagacacccagcttcctagactgagttgggctctcagcctctctagcctgaacccatcccatagtctctcaaccagtctactgaatccattttcataatacaactatatatcctgttggttctattcctctagagaatggtgccaaaatccgtattgctcactaaaccattttctcccgaataattaatgcatgaagtaacaaaaatgaacatgagcactgatctatttatagagcaagaaaagggagtagcacaaaaagttcatcatggttttctgattccatattgcaactaccttttcgggaactagctggacagtgtttgccagtaatccaagctcttgcaaaccaagacagggagaaggattatggctttaggtcagtctaggcaacatagtgagtcctagaccagcctgaagcctggatatatatttatgtgcacacacacacacacacacacacacacacacacacacacactcacacacacacacctacctgttttagtttcaaatatgtttagtatcagtaacaaaggttttttttaaaggcttttagacattacaacagtgcaaaggagtgccgagaacttggtttcagagccacaagtgacaacacaattctacccattctagcttgaagcctatgctcttaaaagaagtctactttgttaaggaagtaaagtctactttctttaggaattaacacatacacaattaaccgaggcttggccatcaaatggccctcttgcattatttggcatcccatcactgtgacaaaagacttgagatagtaatcaacttaaaaggagttaaactatattttagtttacatgcatcatggtgagaatacatgatggaggaggaatgttcacaatggccaagaagcaagggacagacaggaaagggtctcttcaggggtataccccaaatgcaatgtaatgttctcccattagacttcacgtaggaaagattctaacatatcccaacagcactacaaaaggcagactgtggcttcagcaaaattgaaactataattcttgggtttagatcctaggaaccaggtctgcaacactcaacagattattaacccttcctattcttctgatccacatgtataatatagatagaaatagaacatacttcttattttataagaattaaatgcaaccgttggaatattccaagcaaatgttagcacagtcattaaaagaataccatttataaaacatacattttggggggctagaaagatggcttagtgggttaagagtaaaggctgctcttccaaaggaccaacacagctcacaactgtctgggctttgtggatatctggcatcatcatgtaatacacagacatatatgctggaaaaaatacatttaaaaagttaaaaaagcaagaaagactttgaaagttatatggttctaatataccaatgagagttactctaaggtcttgaaactctctactcctaaattaggaagccatttctccaaacacaattattgctcagttttcccccaaacatgtcttaatgttttcttagtcaaccagtgcaacactgtccttttttctcctatattttctattgaaaagcatacattatatctacatgaccggttagcttctgtatgacatttttttttaaaggtctgactgccaaggctacatcaaagagttaaccatagccagcaagcaaaactaccattgggtaccaattccggagatgaattttgaccatgatctagtggtgagtcgctaggtttccaaattccttccactgcaggtagacaacaactgaatggatccaaccaggaaactgtagatggagcattgagcatgctttattgctttaaggctatacagcatcgttacaggaaatttttaccatcaccaaggcagggcttatgatgatgctaattccttactcaaggcagctgacaagcaggaggagcttcttcataagtgtctgtggcaagcacataaaagtactaaggttagcgtttcattaagtactctgtagctaattacactcagatacatttttgcttttcaaagctacagccccccctttaagattatcaagcaattcccgcacatatgtagcagcttgatcttcacgtgggtcctggacaactggagtgaggttgaggtggggctaagggagagggtcccaatagctgttgcctgtgcgtgggtgcgatatgttctgctagctgagttgctttgtctggcctcagtgggagaggaagagcctagcctctcagggacttggtgtgccagggtggggagatacccagggggtccccacccactcagaggagaagaggacaggggatgaggtaagtattgtgggaggggctaactgggagtgggcagtgagcaggatgtaaagtgagtaagtaagacaattgattctcaagctgctcttaagatggatagttaccaagttctcttcatctactggctaggctcttcatagcctctcttgaattgtccattttgtatgttcttttcttctttcagatgccatatcttttagaaataacgtaattttgtttgctgagaccatctttccatttagttgtatatttctaatcattttacaatatgattataacacaatcattacaatagctgtttttgtctgtcatttgacttagtctaagcatttccatctgggaaatctgcagttggcatcgcttgattgtctttttccttgttgctctcattttcccagtccttcccagttaggaaacattggatggcgtactgtgtacagcaaaggtcctgttataattttcagaaaagcattggatggatggataggtggatgaatgaaatcaactggtaaactcagattgtgagttgtgtctcacctctgagtgggaactccatcactttcactttcatgtttgacactttgggcgtgttccctgggctctgtctctatacccatcccccttggggataagtgtcgggtacatggaagtccctaaattggaagtaaagatttcctttctagttagtctgtattttccccagtgacccacctctagccccactatgctctctggctcttgtatcagttttttttttgcccccaacccccagccagagaacaggattcccattttagctaatcataacacccctgctgtaccaggctatatgtgggtcccagctccgttgaaaaactaagatgaaggaacaagacctatgcctgtttaaccctacagttacttttcatgtttcatggggagattttctttaatggctgatgcaaggtttttactaggggcgaggaaacacatggtaagagacacagagaaagaacctctgaaagttagaggaggactggggacactgaagtccagtttcttatggagggctgggagttttgagggcctttgaatagtcttcctctgctaatttaggcctggtcagattgaacaaaagcaaggagagaggctaatgtgcccatatgtggcctcagccttgaacttgtcagaacagcctaccagcaagggggtctattgtcagaagaaaaagcccaccaggcccttaggcctttgtctcaggtcaggagtgtgggaaagaagcctgaagcttgccatctttcttatctgtttttggcccctttccctaggtgggcagtgccaatgggaaaattacttggacaagtctggaggagttcccaggcatccacttcttaggcagggctccgaggcctaaggagtaacagccagttgcagttagactcagatctctcaagcaaaacttcactcagtctagatgtagagaagacggttttctctgaccccctctttccacagggttttggcacatggtccagtcagctgcacgatttacattctgtcttactaagtaagtcttaatattactcatcgggttaaggaattttcttcattaacttggtttcttaaccccccatgaggctgtgatggaagaaaccaaaaggccaacttctaaatttaaactaattaaaggcttgggtttgagacaaacccaagccagactaccagtttgctccaccatatacatcttgcaatggacagtggtggcaaagaaaatagcatcttactgatgacaaagcctactaaggttcttgtgatctttctctaaatggggcataatcacccacggcattttctttttctccgacagatctctctacatagttctgacaaacctggaaattactatatagaccaggctggccttgaactgagaccttcctgtttctgtctcccaggggctaggattgaagacacgagctgccacactcagcttctccaacaattttctggactactttttcaataggaattaaaatagtactaacagtgtgttaaagactctatgccgctcacggagctagctccgaggatgcatagtcaccaatggttgccttatgttcaggatcatcagttaagtttatcaaagctccttattgaccctcttgagagacactctgatggctgcccctctctgttctccctttcagcatggaataagttagaaagatgccccgcccaccccaccccacccccaaacacacctaacggcagttagcatggccggagaggggagtgtgggactaggagagtcacacaaacccttggttggtgcagagattcttagttgctatctgtgcggaatgattcagtggttttattatgctttgatcagtccatgagctcctctgagtatttctccaaaattcaccttccaccattttatcctacgatctgctctgccttcctttcatggtgtcctagctttgttcccacatcaaactgttgcacttgctgttcccgcggcatggtctacaagcttctctagcttctacactagggtgattctaactggaggcacataacagacttgctgagtggaagttaactgagcaccatccaccaatctgaatattccagctcaaacaaaaacaaaggacatttatttaatggatttcacaccgcattagcaagtcagagctccaattctgtctcctgatacacaccattatatacccataacttaccaatgtaccctgtcaagactcttatggcttgaattaaatggcttttttttaaagatttatctttatgtgcatgagtattttgcccgcactgtatgtgaaacactataagcatgcaatctcatggaggccagaagagggcattcgttggattccttgaaacttgagttccataggttgtgagctgccattggggtgttgggaaccaaatctgagccctctgcaagagtagccaggactcttaactgctgagccacctccccagtacctaagcaattatttttgatgtccattttttttttttttttttttttggcaagacctaacactggtttgttctttttactatttctaacaaatgaagaatatccagtgactccatgatacaatttatttcagagcttcaattttcaactgtttcgcatttgactctaagagacagtgccagccgggcgtggttgcgcacgcctttaatcccagcacttgtgaggcagagacaggtgaatttctgagttcgaggccagcctggtctacagagtgagttccaggagagccagggctacacagagaagccctgtctcgaaaatccaaaaaccaaaaaaaaaaaaaaacaaaaaacaaaaaaacagagagagactgtgtcatactatggaagaaaccacagactatgctgggttcaaatccaattccttactacctagctgtgaagttggatactttgtttttaaggtttcaggaatgaaatcacctctccctaaaggaaagtgaaatatgcttttcacccagggcagactcagaaccaccaggctacaactccgctgtggctctggcctccctcttgtgtagtctgggctctcctcacttctttcctgcgtcacattctcttcttacttctgcttcagtactttgattttttttttcctccctgtgctgctgttttgccttccaggtaaagaacctgacttacttaagtttttggagattcagtcaagttgcttgagacttccaagtacctcttagccaccattttatacctgagaaaatcatgttcatcctgatgttgttttaatcttacttttttattatatgtaagtacactgtagctgtacttcagacactccagaagagagcatcagattttgttacagatggttgtgagccgccatgtggttgctgggatttgaactcaggacctttggaagagtagttggtgctcttaactgctgagccatctcaccagccctcaatcttttgaagcaaagtcttttaagtcttccctatggacagctgacataggaaacttttacctcagacctccatttttaccaaaagagtaaaacattcactgtgtgtgtatacacacacacacacacacacacacacatcactaataaccagaggtgttggcaacacatctgtaattccagtattcttacctgggagactgaagccaaaggatcatgtgctgcaggtcagccagaactatatcgtgagtataatgccagcctaagtaccctgtctcaaaacaaaccaaaaactcccaaacaaaaacaaaccccccccaagaacatttataatcctaaaatataatctttccatcagctaattatttctaccatgaagaagtctaattgctcttgtgacttacaatggctgtacttactgaagtacttgctaaagaatacctggtatgggcagatgagaaggctcaggagatgagcaccaagcctgacaacctaagtttaacttctgggacctacatagtggaaggagaaaaaagactcctgacaagttgtcctcttaacctacatggagtatcatggcaaacatttgcatatacaaaaacacacaaacgtaataagtaacaagaatatagcttgtggctcctctgttaaaggcagccacacaaaaaggtttcttatcaataatattcacaggaaaacattaagtaaaattaaaatttttagttattttcttattttttgagacaatgtaattttttaatttatttattgttatatgtaagtactgtagctgtcttcagacacaccagaagagggcatcatatctcattacggatggttgtgagccaccatgtggttgctgggatttgaactcaggaccttccgaagagcagtcggtgctcttaacctctgagccatctcaccagcccgataatgtaatttaattacataatttctccccttgccttcctcccttccaaatcttcctatatacctctccttgctcagattcatggtctatctatagatgactatcaaattcttttaaacctattttaaaatcaagaattaaaaaaaaaaagtcaacattttctttcaagatttcctccctagggactggggagatggctcactgagcaaagtacttgctttgcaactatgaggactagtgttatgatcccaacactacatgctgggctgtacatccaactgtaattgcagatgaatcaccaagcaccaagtttaggaagagatttaggaagattttaggaagagatggcttcctcaatagccatggaggaaggcaactaacattaagctctgactccacccacatatacatacacgtgccatacatgctcccacacatgtgaacgtgtatacacagaaataaacaaataaataaaagacctcaccccttagtcctgggcctgatctgaggagtggaccctgccactactaaaatgttaatgatgtaatgaataaaatgtttcaagtgtccattgtagcagattattaaacactttgacttcaatctttgagatgaagcaggagaggtggggatttttatctttgtgtggaaatgctgcttctgatacttagataatggtatttttcaggatgtttggttatgggttaggaactaatacatagagcaccaggtcataaatcacacccatatcctgagtaactcaacatttataactcactgtccaacaacaaatcataaatggcatgactcttcaacattacaaaactatttaaggtcaaaatagagcctttaacttctgaaaaatgacttagtgtttttgaaacatacacagagaacactaaaaagttaactctgagaataaagaggaaccaattgtttaaacaggctttaccaaaccaatttagacaacagaatggtcatggctacttaagatgaggttactataaattctccttagatatactaaacattttcaaactccaagtctgagtaaagttttgtggaagtttctgggtacaaattgcaccagtctactgaaaccccccacacctgctgaagccactctcaaataacctatccaacactgaagtcactctgcttgaggtgagctgacacatttatctttgctctatttttcttgctagaatgcaaacttcacagacaggaaactgctgttcacccaagtgcatgccgagcgttcacaatgcctgacgtaccgcaataactactcatcaaaaaaaaaaacatttggacatcttgcatcctgttaattggacaaactaatctaaatatgttgggttttattattaattccctttgctgctcaagaaagctaagtttttcaaagcatattggttagaatagcaacccaaaatattattgtttcttgcttgtgttgaaagggggtagaggaagaccctcaggagctccactgcaggtgttacctcaagacctgggctggcagagccatgacacacactaggacacacttcaggacactgcactagggaaggaaaaagacaggagggtacagggatctctcactgcctttacttggaagtttctctgcactttcatggctatttcactctagtaatgctctagtaaacagaatctaaactctgaggatggacatgcaagggagccatgaggtctcatacttcctagcacaccccacagcttttacgtagtttactctggtgaagtataaacttttcaacagtaagatcaggatgttcctctttcactaagtaatatagtccaaatacctgttacacatagcagggattgattctcggatgaataaaaagctaagaagcaaatcatcaaaaataatgaacctttttaattgtttaaaggaaaaatattctccacaggaaggtatttctagtcttatgtccattggtagccaaacggaacttcataaaaacacttccacaactccaactttggtttaatatacaactttgatatatctcattaatgcacacatcaagaggctaacaaattcattaatattcaaggtcatccaaaattaacattttattacaataaactgtaaaatcccagtgggaaaattttacttgaaccaaatttcatctctattctagcactttcaaaactaattctcccatacaaactccacaaatagacacacgcacgggcgcgcacacgtgtgcacacacacacacacacacacacacacaatgtgcacacttccaaactcaatagaaaatgaggaccatttaatggagacagaaaatagatactaaaatgctgtttttaagtaggagtatcatttagaaaactacacagaacaggtggaaaatctcaaaagtatacataacagccagtaagtaaacacatctaaacattaagaattttactgtaagctaaaccactacaagccttgctccattctgtataatctaaccattgtgacagatgaggttccacatgagaagacataaattatttttaatcttaaaaaacaaaaaatatgaatccttgttaaacatttcatttaaaaatatgcagctttattttaaatttaaaattcagtatgctcaaatatggcagttaatgtctcccacatatgtaaaagtttaaggtaacacatttttttcataaattataaaatgttttcagctaaatgtttcatgaaaattctcaaatgactgtcaagagtttgtcttgttgttagcccaccagaatactcaacattcagagctaaaaggtaacaatttgtgaaatctttaagattcttgtgtgatacaagtcacagaagcacacatataaagacagctgagtgacagataaatcagtagtagttcctgcttttacctagggggcaaggtaggtacgcatttgctgagcaagtttgcaaaatgcaagaggactcaaagggtgaccaaattctctactcacagtgcgtcacgcaccacgcttcaaagagaaatacccacactgagcttgctctgctaaaccaacgtaacttgtatttactgattcccctaccatcctcacaccaacaataaacattcaaataggcccagagagctgacaaggtctctctataatgcacatatcccatacctgctacactaaaaagtgatccattcagtgttcatttcctaaaaactaagctaaaaggctttggagacatacacagtacaggttttagttttaaagagaaaatgtacatgagtaaacagaaaaatgattgcttagtcactaaaacatactaatactgggtatgccccccccccccaaggacatgagaattgtgatgttatattcacaaagtgttacagagcaactacatttagagtcagaggactgttaccgatgacactatcctgccatcttcacactgtttaaagcttgcttacatcctgatacctgttgttggaagatgggaaagcagctatagcgtatgcataaaaacatattctaacagtaaaaggaactatactagaaggcttcctgttgcaatgtaatttcataggaaaaatcagcctcttgactcctaaagtggtccattacactgtgtacagattttagggactgctctctgtaccacattgaactgggtactcttgtttctactcagcaacatttctctctaccctagcaacaagaatgttgaataaaatccacacacaagccacttaagactaagctttagatgtaccacaaattatctagcaaagtatacaggaactcgaagtttcacgttagaagtaaatcaactgggcttaaggtctgattctccgggagccctcagaagcctgcatgttaaacactggtgagttttaaattctcaatggaaatggtgatggcattcactgaaccaagttggcttaaattacagcacaatgggggacatgatctaaaagcaaaatgtcaggaaattcctttttttcaaatatcatcaaaatgtcatataaatcaaaatacctttatattcaagttttcaccaaactaagaattctaaagaaaatgtgtgactacatataatcttcatatttctttacataattgcatgctactcggtttgtatttttaaatgggtcacagagaaactatcaacttcatgtaacattaagactccacattgacattaatggtctgcttacttctaaaacatcacaagttatcttactgttatattgaaaggactccttagcctttaagaatattagaaaggagatagtatatttgagcctactactctggacaagtcccgatgaaacctcccatgtgctgatggccaactgcagtgttaaaaaaaacagaaagccacagaacagacctgagacatcaagcccgttcttggggttagggctatcttcagacatctggcttataagaagagaaataagcaccgttttccaagaaccttgaactttttactgtgcctggaataacttattaagtgatgactaaggcttaaagtgctcttcttaaccatgagtagacaggtatgtgtctaccaagatgacagaaagatgctttgcttggaaggatagcaaggagggggaaaaatagaaaaatgcacaggaactttgtaatcatatgtggctgcccattactgaacattttaatggatttaagcaatttgaattataaatactctcatttaataaaacacccacacaatgacaagaatgagactttaatcagttttaagtggagtttataacactaagagataaagggttgttaacaaacacagtaacaaatggacatctgattggtatgaggcattatcctgtacacgtcatatttgtgtatcctcagtgcatagcatttacacacagagccactgctgcacagcacaagagtatctgaagaggctgaatcggggtaaggctgttttacagactggatggttttagtatatatattctatatgaaaacagatcgaacttttgagctggcaggtagaaggcaactctgccgaatactagagtaaaagccccccgtttagtgcacagatccaccccttccgtctgcatgcacgacacattaacagtatttaaaggtaaacgaggcactttgtggcaaccacagccatcgttatgaacatattgcacaaattttctaaaactaaacatgtaacttgtaacctacttttatttttaaagctgaaacatttgatgctgccggtaaactccacttaagtttataacctgtgccacagcaaagaatggtgacgctatttaattcaactacccttttacaattatggcaaaaatgtccaagaggaattacagaggacttgggatgtacggggcccaactgtaagccttcttaaaggtgatgccttcaagtcatttcagacacataagctgctgcacatccaagagtctaagaaagcattccagaaacacgggagagatcacctacagaatgcacttcaggctaatcgtgaatactgtcataaagaaagtttgaattaggactcaaaaccctttcagtcatagcaattcttgtcaaattctatggggatggtaactgaaataaagtaaggagagtatgtataatatatatatttatatatatataatatatatataatgccatttttccatttccaatgactacaccataaaatgtaagcaaggcttctcaaaaacactgaaacattcaaaatcaaaaccctcattcagaccttcacattccaaaggaaaaatattaacagtgcaacagcccattgtaatgtcattattcatgacctggccctctgtgttacatattggaacaatacaagttatagtttagcatgctgtgcccaaaactaacaaagaacagtgtttatcactatcttcaaaacatcaacagctgctttgcattttagtcagccactttcagcttttaggaaagacaagggggtgtacagatttccatggtgagatctcaggaaaagttgtctctgactttatcaacagtcagtcaatattcatgtatcaatgtttaaatataaatgtgtaaatcctaagagctttgttacaattttaaaaactttattggttgagtgaaactgatgaggtatggaaaatacatcaacattattttctaagaatattttagatggcgttctgcctaatctacttaccatcaaactataaatgcttctctagtgggtcctatgcaatctgtacttgtaaattaactaggtcagaccacagctagtgaacaatttcagcaccaataagttattgaaaatgggacttcacaccattaagaaatctaataatggctggatattcaaatgtcaaggtcaagatataatttgaaagacaccaaattcccgaggggttgggaggagatcctttgtaatagcatcttcacattaccattacgatagtagttgtactcttgctttaaattgtatgcagtctgggcatatcaaacatagaatgatatttaagaagtaaaattgaagccctaatcccaactctaccactataacgaagtgactcaacactgcacatttaagaagatctattcttccaatagcaagtcgataaagcatctgtaggacaatttctactgaaaaacttcaatgccttattattcgtgcagtgctgtaaatttactgcaactctaatttcttttttaacacaaacaatgacttttttaatatacacattatatgtattcagtattcaagtaaaattccctaacagttaatgacatttaaaaaaaatgtgcaaaactgcaaaactcattgtaatagaatgtgtaaggtcaaaggggctgaacgtctgacagccactggactgaggacgcgcatcatcaatctctaggaaaaaaaaaaaacaaaacctgcttactgttgaatctcaagttgaaatttcctgtgaagaattataaaatatttaaggagaaaaacaaactggcagccagcacatgaagcatccacagtaggtatatgattgaaaattaataaaaataaaggtaaggtgttgactgatgtagggactaatagcatctgactcttagcactggccttgattacataggagatggagcagtcattacaactgagaaagcatactgaataaatcattgtcaaattttctgtttccagcccatcctttgttgaaagcctccacatttgtatggttaagtcattgctgctgtgtcttttatctatctatgaccactttttttatatcccttcctttgtggattcttaagatgctgtagatggttcattcctgtaccccactacaaatatactcactctagctgccttgtctagcaccaatatgctctttaaaatgcacaaacaaacagcaggacagcagccaatctctcggatgtccagattagtaagtggagcatgctaaagaaaggtgcatctaaggagctggagatggtgtatggtccagagcccaggtagaaacattcctttctgagcattccctccattcccaacccaagtgcatgcattagaatctaacaaaaccctgcagaaacttccttagccaactgcaaacttatctgttgccacaagtgcaaaggggtaggacgtgaacccgggaatcagagctcttcagccacttcagctggtgacagaaaataaaggaaaaactcctgcgtatacacatcagcctgtctccactttttataaaactggaataaaatgggaaagtgccatcttttatttatcctaattgaattttaaatgtccttttgacacaaaaaggtatatacatgacacagctacacaacctttttttaactggacaacaagtgtcaaaaccctgtggatgtatagggtaaaacaagattggtcaggagaagagaattgttcctataactgcaatctgacacaatgtcctattgccatttaaaaaaaaaaaaaaaaaaaaaaggtccatttcagtttattcaagttttttttttttcatggtattttatccctcttgataagaaaaaaaaaatcagacttttgtaatttgtgaatgctgatcttcatcaaaaggttcattctctggatcagagtcagtggtgtcagaatatctataatgatcaggttcattgtcactaacatctggagtcacagaagttgaactgctagcctctggatttgatggctcctctactgtttttgtaaagtatagtttcacctagagaaagaaagtttaagatgaaaatgaacaattagaatgagttctgtattagcaaagacattctgttttgcagatttacttgaaagtactataacaaaatgaattctgaagggcactgcttttcagatgacctgaagattgactactgtgctctcaaaagacacaatgatgagttgaaagctatttttaaaatacatcagccataagcactgtataattctataaaagtgcaaactgaaggcaatgaactcactaaatcacaaaattcaatttacaagtgcttatgtttcaaaaacatttctcttgcaatctctgagacaactctatgtttacattagtgacactacacaatactgattaataaggtcaactagctctacaacagtcatctgacgagagaatggtgcaagctaacagagcactctgtgctgtgaggattgatcagtagcctttacatgcatggctgcagttcttaggttatttccattttaaaaggtaagaaacaaaaaccctgaagtctaggccacatgctaaaggacaatctctagtgaacaattggcagagaccaggtttaaatcatatctttgctcttttcccattatgcaagtcattataagtttttcttataaccaacatttgctttaaaaatcccccttcaaagttagtaatttaccactgctccttgccactacagccccacggcctctcctctccctagtttctgagccagtctcaatttaggaagtgaactggaaggttaaaaagctcagattataccttctctgtgttcagcactccacactgctacatcaagactgggttcctgtgactcagtggaaatgacttcagccactgaatataccaagctcattcatgcctcagattctcatttctactcttcctccttcccccacataactgttctgtaggtcgcatacaatttgcataattaaatgcacccatttcacgcagacaaccctctttacagaccatccacttgaccagactttctttgccagctgcatgcttcataggacttaccttacagtgacaatgaaaacagcttttatctacacgaactattttatgctttatttttttactggttgttttgtaggacttggtgttcaactcaaggcatttctcatgttagacaagcattgaggcacattgccagaaaaatattaaaacagtaaaactagagagaaatacattttaaaagcaaatggttgccaggtgaggctgaggcagagacatgccagttcaaggccagcctgagcctatataccaagatcctatctaaaataaaaatcaggaagcaggtggttgatagaaatgtaaatttagagaaaaggaaaaaatgaaaagttgaagattctaaaggaaacttaaaacatacttgagatccaaaggcactgaatattaggtctatgttcacttaacatgtgtgaaggtcattttctattttaaatattaggagtattattatgttataataataatataataatctatggttgagtttgttacatgtgaatgaaacaaatacaatggaatgaaaaaagaatttaaaaaggaaaaaggaaagaggaaagactcaagatggggaggggggaggagaagaaataaggagagcaagtggagtaataaacagaaaaggaaaggctacgcaaccactcgggaatgttacatattgaacaatactagaacaatgtctagctcttagcttcacaatcagaataaaacacaccctcccacccccaaatggttttaactgaccttaaaatttggagagaagtatcggttggccttgtctttgtttgctttgtcaagatcgttttttgttagggtgagtacaagatactccttgtcattatctgcacgctctatactgcaaatgctatcgatttcctgatcacaaagacttccattttccactttttctgaggtttcctctggtcctggtatgaagaacgtatttacccaaaagtgaaacattttgtcctaaacagaaaagaaatggaagatgtatttcacttatttaaaaatgtaccacaaatagtcaacatataaaccatatattatttgatattcttaagtgaaggcaaacaccttgtggaatattcttattcactaagttatcttttctaaaatttcaaataaaaaatataatcatgtaaaatctggtatcttacttttatcttaaaatcctaagaaaactacttcttattctaatactggattttaaaaatattctgagtttatgcatatgtaaatataaacaaagatcaggtgttgctacttcaacagaagccctagtaagttgatccctatggcaactacatttctggcccctgtatctgtccagtgtccatggaggcccgaggtaggactcagattcccccccaggtctggtattacagacaactgtaagacaacagatgggtgctgaggaccaagcctgtgtcctccagaacatccagcgctccctcctaactgctgagtcgtgtttccagcccttttcaaaccttattgatctcaattattttaacaaagttgttcagttggcaatcatattttacttagaagaaaacacggtaatattatttaaacttgcaaatgtagctcactgatgtgcactgattttctaaaactgtttttatttaaatcagaacaggcatataattagtaaggaaaacctatgataaatggaaatttatggaaagtaatctaaaatatacaaatatattataaatatccaatcttcagagatctggagtaagaaacagcacatctctaaaactacaaggagacagtgaggtaattatctctttttacaagcaatataaagccaagagaggcggctcctgtcttgggaatttaaagcaaaaagactgttttatatgaagccaacctgagctacttagtgagttccagaccagcttgagctacagagtaagaatctgtcttcaaacaaacaaggaaagaaaaacatatgcatgtgtgagcgcacgcacacacacaagtgtgagcacacacacactcttatgtgaatcagagtcttacaagatgtaagagatagcgggcagggatggcacaggcctttaatcccagcatttaggatgcagaggcaatcgatctctgagtttgagactagccttgtctacaaaacaagttcgagacagctagagctagacagagagaccatgtctctcaaacaaacaaacaaacaaacaaacaaatgaagtaagagggaaaaaaactaaagccttccaaatacctaatttttgaaatgtttgctcacatttattgtggtctcagaaaataaacaaaaaaaccagtaactcaaagatatttatatttagcttttttgtttcatgagaggtccatgataaaaacattaatttggttaactttgtgattttttttcttctttagctatgtagatcctagaaaaaagaaattatctctcctgataaattgatctgacattgcaaggttttatagtaagtaagctctccttttactgctttttataaaacccccttccggactatgtactgctctatgtgcttcacgggaattgattctgcacaaaactggtatcttcttctgatccagctaaaacttctacaccttaagactcattttaatgttcacattcaactaagggtactaaagccaccaaggataaatgttcacaccaaggacactgcacctgagctctctcctcctcccaagtgtatctcaagccccagcaaccctggacagaggatatgcttagctgtttccacccttttgttttttggtatgtttttttttttttttttaattactattacttcttcacaaccacttctttcaactaagtaatactgactaaatactcagtactgactaaatactcagtactgactaaatactcagtaacctggggaaacaaaatataaaatagtctactctcaagaaacataaacccaaatgggtaaaacatggcttgtgcaacataagaacatagaacaaaccaaaaaagccaacaaactaagggtcggggcaggtgagtctgcttacatgtctcatcaatgccacagaaatgaagagtctgccaatctaacaaaagagtaatcagtttggtagatggcagagaaatagtctctccttacagaataatttcctaaccaaaggctttaagcaaaaggtctgtggttactcattgaggaatggctatttctacacaatagaactgaattgcaaacctttttgagcatcttgttctgtttgtggaagaactctactttgatatcaccacacacaggcaatggctgagggaactcaaagtacatgaacttgtcctcccgccgcgtgggtcctgaattggaggaatatatcttcacctttagctggcagaccacaaactgaggatctgtgtggttaaatacatataggatcatttcacaagaaatgtcttcaacttatcaaaaactactttaatgataaaataaacagaaatatacacaaaatgataactcttcatattgactgcttatctaaaacaaatcagtagaaataaaatatgtaaaaacataaccaacccatgtaaggacttcttcaatctgaatccttaagtaaagttctattacagatatgataatcaattgctacttcacaaacagtaagttctaagactagactctagcagcatattaacaattaaagctttacattaacatgcaaaagacacatcacaaactactttaagcataaaataactttaacaatttcctgggacttttgtgaactgcatagaggcaactttacaagaatattttaataaacgatgtaaacctaagcctttataatatagaaatatacaatactgatcatctttcttttgacctccagttcacaagtttttgtttgttggttttggcattttaagacagagtttctttgtttagttagccctggctgtcctggaactagacaaggctgttgggagaagtaggaaatgagttacatcaagatacactgaatgcttatctgaaattctcaaggaattaataaaaataatatgtttaaaaaaataaaaaacatgtatagctgggtgatggtagcccgtgcttttaaaagtgctggcactcaggaggtagaggctgccagcctctggatgtagaactctcagcgtatctgcctgtgtgccaccatgcttcctgataggttgataatggacaaatcctctgaaagtgtaagcaagtcccaattaactcttttataagaattgccttgtcatggcatctttccttgacaatgtccccagctgtagtgtacagtaatgaaaaaacagcagctttttctaagaccactgagacaaaacgacctcctatagaccatgagtttcccattgagttggaaattgttttttttgtttgtgtgtttgtttcttttttgtttttgtttttggtggtctttcgagacaggatttctctgtatagctctggctgtcctggaactcactttgtagaccagactggcctcgaactcagaaatccgcctgcctctgtctcccaagtgctgggattaaaggtgtgtgccaccacgcccagcaggagggatggaagttctaacatcaatattctaatattagtacagtcctcttgacttctgagatgcacatctgaaatatatgctatgttaattaactatgttctgaagaaatgacaggatctggacttgacaaaaacaaggatgagagtgcatcctgacacaaaagcaaactgatcatttttattatacagcaacttctcttcacgtagaaaaagtaaggtaataagacaaacgcttggcaaacacttcctggtccctctgcagaagacactaaaccttttatcactagttctgtctgtttcactcatgcctcctcctcctcgggctggagactgaaggcaatcctgcactctagcttgagaaaaacactacaccaccaagacagagctgcagccccactgcagatcctcacaagtaccttgatctcatcagatttaaaataacttaaaagcaaagtgataatatttatatctccaaatctcaaatgcactctgggtatgaacaactaaagaaaatccaaacaaagtacattccatcgctctagcaacatctgccaagtcacagagctggctgtactacccctcctacatcacaactgtctatacaacatgggcctgtccttaaaacacagctgaagttcctagaattatcgtgacaccaatagtccaagtctattacatcccattcaagatcctgtgacagccaatcacatcttctatttctcgtccagttcttctgctgtgtttcggtcaccttatttctactgcctgtaatatttccttcacactcaatgccaatccaaactgcatgtgttctccagtgaccgactttcttcatgaaattgtttccaaaaccttttgtgaacatggcagttataatttatacatatgaatctcatgagctttattttaatataacttcaacatatagtgttaaatcccagcacataaataagtaactagaaatttttaaagattaaaaagaatttagtagtcaatattttttaagcgtagagatgcaaacataatgttgtccgactaaaagcccaacagcagtttaatcaataagcaaagtagagctgacaaaaagtcagtacctagtgagattcctgagcagagcttttccgtattgcctccataccgcctttacagctctatattgatgcctaaactataggaagaacatgagttcctatcccctttccttctcaatgaacctagtgaagttcctaggtcaattgctttcaatagtccattgtgccttgtactcacacttttaaaattatactaatatacttaatcagtatggaagttccttagaactttccaacaagctatataaataaattaggggcccttaacaaagttgccatactcatgggcaatcacacctatctgacgaagaaactgattctctacataaaaattattttagaaagaacaagttaatttaatgaagtatttcatggaggcgaaaaactaaaatcactgacaaactgcaaacatccataaaataatatcaagggattctaataagtgacatctgatactatgacgttatattgaaaatacaaataaaatatcttaagtgtaaaacatgactgaccactcccaggtgtcactaaggtaagagaaattactacaagcacacactgatgtcatgacgtcatacttaccaagatttctttattttactaacaagcaaactcagtgaggagatgacaagtccaagccacaggctgagagcttgacttcaaagctacacttaggttttctccacacatcccaattcacacacccttttattctctatatttgaagggctcctctctttctgtctctgacagtgaacatgtttccctctgatgaggacctggttgtagccagaggccattctcacactgatctgtcaagagtgtctctcagattctcacactgatctgtcaagagtctctcggttattttgtcagaacagagactgcatctggtggttataacatagaatatttctcccataaatataattgacttgaagaacaccaaaattgccaggtgtggtggctcacacctttaatcccagcacttgggaggcagaggcaggcagatttctgagttcagggacagcctggtctacaaagtgagttccaggacagccagggcgatacagagaaaccctgtctcgaaaaacataaaaacaaacaaacaaaaaaagaacaccaaaattcattgggttagctttcttaacccagtgagttgaacaactgaactaattaattccaacttcagaaatatactccttttaacctggtaaatgtatttctaaacatttacatatacatttagatatggttttaaaaagttttccgacacacagacagctaagaatttagagcacttactgcaagttccgccactgaacattggaatagtttcaaacatcatcttgtgaaacagcagtgccacgggtctgtaatccaggtgattttttagcaggtagctataataatatacatagcgcctctgactgggaattgtgactccctgataggcccagggggcagagggaggagggagacaaaagaaaaagagaagtcaaattcaaaaggaaagtttcattaaagttattatacaaaattgctataactgggttatcccaaagtttctcctttaagtggctaacaatcaaatctaactcagtattagaataaataagagcaataacaaaagaatattcttaaaatgtagttattaaatacctcatttattcaaatattaaataatgctctgatctatgaacccaataagcaaaggccactgtgtattcaaacagacagtcaatggtctctgtactgcagctacacatacccaagtctcctctcaaagatgggtttactaggcaagtcttcacaaacctgtttacatactttctaagcaaaatcatatcagaatcagtacactagagaaacgtgttgcctctgtgcaggaaaaatgagattctgaccttagagtccaaaaaaaaaaggaaaagagagagtatgcagctgaatgataaacatattcaatacaacttgttaacagaggcagtaaggggtatcggtatccttgtgctatatccactccttgcagacattagggaagcataaaatggcttagaaaatattacaaatatttaaaagacataattcatatgacatttaaaaggggaccctaaccaggaatggtgtcccacacctgtaatcctaccactaaaggggatgaagcagaggactgttccgaaccagcccagggtttatatagttccaggccagccggaaaccagtcaatcaatcaatcaatcgcatgtatgacccaaaacccatgcatatgtttttttcttagttcttgaaatattttgtgagtgttttgccatatgtatacctggtgcccacagaaaccagaaggcatgccatgaaactggagttacagatgtttgtaagccattgtgtgggtactgggagttaacctgggtcctctgcaagaacaacagtgctttaaaccagctatcacttcagccaacctagcccatgcctatatacattttttaaggtaccacgtaaccatatatatgcctaaaacttcggcatgggggagcagagacaggcagattcttgggattcacaggctggcctagcctacttggtgaattccagaccaattagagaccctgtctgaacaagatagatggcaccagaggatggacatccaaggaacatacagacacatacatatatacatatagacacacacacacaaagacatacataccatatgtgtaacaattcattcactaatgagttaatatttttctattcacaatataacagtaaaaaagtcaatataaggcaaataataagcatttaatctaacagtttaaagtaaacagcagttttggcatggcagtaccctcttgtaatctcggtacttgggtacaaccaaaatcgtaagtttaaggccagcttgacctatgtgaggcccagtctcaacaaacagaattgcagaaaataggtattttatgttaataagaaaaaggtattacaatgctctttagtttactgatggcctctcaacttctactgtgataaggactctagacacagacacccttctgctggggaagaagacagcatacaagctaagaagtatagaaggaatacgatgtctagcaaatacaggtatatgaactctgaccccaccctcttcccctctctctgtctttctctgtttctctgctccatatgtgtatcaaaatggataagtggcagtatacaactttaattccagaattcaggaggaagaaagaagctggtggatctctgtgcattccaagccaacagggctacaaagagagaccccgtctcaaaaacaaaaacaaacaaacaaaaatggatataaaccacttgaaatcatgattggcaatttaagactttggctagagtgaaaaatcacatactaaatagtcaaagcttatatttgaattctgagaaaatataaacttccaatttgcttctttaaaaaaattaatacaataatacaaacctccttaatagaatttacatgaggataaaccagcaaattcagttatataaaagaagttaaaataaacaaaaaaatatagtagctgataatgttcagatggcatttctcctgctctctagcttttggtacacatttcacacttgtgtacagcaataaacagattctcaagtgatgggaaggacacctattatcacaagcatttatatgctcatccttttgaaaaaagctgggttgatatgtaagtaaacaattctcagatcaacagcagttgtgtgaatagagctcacagagctcacaggcagtggtgatacagagggaagcttgcaccatactaaggcctaggcagcaaggcgaggccagagcatcgtacacccctaggacttaactgcctagctaaacacaaacatgtgctacattattcatctttgagacagttacaaaaacccagatttaaccctaaacactattaaaaaaaacaccagttctctttcttgtagtcaatgttcgatttgctagcccaaatagttcagcatttcctcagttcactcctttatatttttgtttcattttctactggtgaataatcaatgtatctttcttcaaatggctcaaaaattattgaagaaaatggctttaaatttccataatgacctgaattaaacttcaaactatagttccactcaactgtcaagacaggtaacagggctctactttccaagcttgtgggatttgtagttaatctggtgagttattaacctaagcaagtgggcactgcaaagcactcaggtgccgactctatcactgtcttcagtgtgcacatatttactttgcgcctcctccgagtctagctttttattttccttctctagcatttgcttaacaaagttgactccttttggcacagacgttcgtaacagctcagtgtccgtatgaagtgtctcctgtgtgagtgtaaaatgacatctttgatcagttttatggtttttattataatgctattccgataagaaaagcctgccttggaattttacattttcctagtgtatttttcattaattcttcttttataagccttggctacttgatgctaattactttttctctttttggttttcaagataagagtttctttgtgtcttgaaactcatacttcccaagtgctcgggatttaaggtgtgttccaccatgcctggctggctctttgaaaaacagacttatatggaggacatacatctttgagatctatactactgtcataagactactatacgggattagcacggaacaacacagtgtgtgtgtgtatatatatatgtatatataatgtatgttcatcctctatgcattcagattctagatgatcttctagaaggtaaattcacaacttagagtccttaaagaagtaattttctatttgagcaaactttcttaataaactggaaaatattttccaagtctaaactcataaataaaagtttcaacctaaaaagtatttgcttgaagaggaaaaacctacattctgaatgaccacaataaacaaggcagtaattcaataaacaaaagaatgtggttactaatactatgacaatagtagttattgtagatattttctaatattcaaaacatatttctattattcccataaaattacaaggtatatattatcacatatcttatgttttaagacagggtctcattatgtaccccagaatggtctcaaaataggtattctattgcttcaggctccaacagtggagattataggcctctgtgacaccacagccaaccattacaacctcaatttccccccaggggagagctggcctcaaacacactgcaggatctgatggtggctttgactcttgatcctcctaactctacctgccaactgctgggtcccacgcacactgaggccagccctgctgcctctactttaataagaaacaagtaggactatacatgtttatcttgctcaaatgcagtacaggacctaaatgaatctgactcaggtgacctgaaaacaggaatgctatgcgatctgaatgaagccataacttctcttaattcagtttttcccctttatgaagaacctctgaagtttggaatacataatgcttcgagttctatggtaacttacagaatctctgtgacaaaagtgacacagatcatttctggccaacactctttcctcacctggattttctttagaagctataatgacagttttgtggtttggggtgttgggcctattcttcaattcagatatatgaatttgtaagaggattccactcactagcaaaagtatttgtttcaaaaaagaggtagatgtgggctggagaaatggctcagtggttaagagctcaattcccagcaaccacatggtgtcttataaccatctgtaatggggtctgatgccctcttctggtgtgtttgaagacagtgacagtatactcatatacataaacaaatcttacaaaaaaataaaaaaataaaaagacacaccctttaagccagggaaatcagaacctattctaggaacctctagtcaaatgggtgttcttttaccactgcagttagtcaagagtgtaagcctaaagctacgggaccatagcttggtattacttgcaaagatcctttctgaataaacatagccaagaaagaaaagggaagagtgtagaaaggagaggttcctgacacttattgagcatttagatccagacctgaccttttaggttctattagtcaataaacatctcccttgtgtcttctctgtctccttctcctacttgggtttctcttacctaaaactgaaaaactcacacattcaaaacagcaatttttctctctctctctctctctttttttttttttttttggtgttggtttctattttaggaatcaaaaagaaaaggaaaaaattaagtagagcttagtacagcagagagaatccaaggaacaaaattaggaagccaggtgttgagtatgacaaagaaagactatgaatcagggcagtgtggtctttgcaaatgggtttgtattaagtaactgcttaaatctttcaaagcctaaaactgcacagctttatgaatcagtggactgctagatagtagataatagcccaaacagtatgcatcagaagagaacacatgataattgacattacaagaaaattatactgagttttttgttttagcaacagcaaccacaacttgtttgatttaaaaataaggactaagcaagaaaattttatgatgaggggatttaataagtaaaacaggggtagggggataaccttgatagtaggttataaaagttcacttctcacagaaaataatgaaatctcttaaaattaagcttggcattgttattttagtaaagttgacaaactgaggtagtaaactaatcacacacacacattctctctcacacacactcacgtagtcaaaacacacacacctacctaataaccaacttgtaagcaaagaaaaggcaaactgaaacgtttcaatccctcccctaagtttaataagagaactaagcattaaggttactttccttgccactgctggaggccagggagaacagacactacgtatggttagtggcagtgtcttccctcaagtttggaaagttactccaaaacctgcgctcattgccattctgaaaaggtctttcttacactctcctcatagtttacatcccgcaaaccatgtattgcagcactgaaccctaagtgcatttgcaaacagcaaggcacacgtggaaaccaaccccagaaggtaatttacagcaggaggggctggcgcggggtgtgtgtgtgtgtgtgtgtgtgtgtgtgtgtgtgcgcgcgcgcgcatgtgcagtcagtcgggattcaccctcagtgactttggatttggataatttgccaccttttcacaaaggaaaatatcaactatacaagtaaataattcccagtaaagtgggcaacacacttctttgactgaataagggtatgggtctttgttcccttgagcagttacttcgcccttgagatattttttctttataggaagtagcaactgttgaacttcattgcaatattcaaaacctgaagtattgttccagcattaagaacacaatgctacattttatggtcagcttgcaaatccaacctgcatcatatcaagacctaactacaggactctgagaaagaaagtactataagtaaaagccaaaaaaaaaaaaacacacattttaggcaaagtctacaattttttcacaacaggccaattgcctcctcctttaacataaaagaaagaagatgaggattctgtaccagaacacaaatttcttcagcttcttatggtccctccatagttaaaattacaaatataaacaaaataatacagacaattctaatatgattaactacaaagcagatttaagtattaatctccagaagttcacatttacaatcacaaagtataaatccagaaacagcaaacacaacaagcagcacgaacgtagccacagggactcctagctagtctacaagtctgcaagtccactgtgtgtctacactgccacactgagtcatcaattctctaagattcttctaggaagacttcctcagctgtactaaagcagctttcctatactcagcaagctaaaacacatccatcattccacagccactctaccagcccaaggcccggtgccttttaaggtttgttttattatttttctttgttactagcgcatttcactatgacatttcctcatagaggtaccgttgtacttccttctgagtcacctccctccctaaacagttcctcttctgcatttctgtgtggagcaggttccactcttcctttcaccatcttcccttcagatctccctcccccaaagggtatgcatacctccaagctaggttcttcccatgagagaaaacacgtttttctgatcagatttgttttacttaaagtaatgacttctagttccattctcttcctataaatgccatgattttatttttctttacatttaaaagctttgagaaaattaaattgtaaaaattttaaggaaatgcacagcattatagttacaaaactagcaatctctctctggagattttaaacttagactggaggttaaacactccaagattttaacctggagggttattaaacactacgatttgtaaagaaaagcataaaactgagaagcctttcaaaaccatcagcaataaatatggaaccttttgcagttcagaatctgtaagcttgataatatacaaagaaatttaacaacacaccaagggacttgtttttactgtaaatgctgtcatgaactgattgacaccgtcacgaattctgatcactacagttcacttttctgggccttgatgtcatctgtaaagaagcattcctggagtagggatatctgaaagcttttatctggatgtaggtttctaatactattgtagcttaaaatgcaaaagcaaccattagtaaaacacagcttggtcaacagtatctgttcataagttctttcttgttttttaaataatcgaaagaataaaggtaggatacacataaggattctgctttaggtccgtgtataaacttatccaaaacacttgtctaggtatattaactatgcaacaggtacagtagatcctactgatgtggctgtaagatgctaaattacttaaggagtcttagtataatgcaatggctaaacatcaaatgcaccagctacagctctaacaatgtgcacagccctgcatcttctatgtccattagtctatcattttcacatggaagaaatggtcaagagatggagagtgccaagaaaagttctatggaggacacaagtattattattacattttaccaaatgacactagaggcttcacatttcactcacaaataccccctaccttgtaacatttcccaagacttcttgtcacttccacaaacaccctcccctcccttctagagggaaacagaactgttgccaccaggctgtaatgactagtgtgtcaagacctcagtttctgacatgggtctcctgcacctaacttgactcctgcgtctaacctggattcctgcatttaccctggcctggaaacagagaaatttacaggaaagttcaagtgcccaagtcttgctcttacccttgaacataaggaaacagaccaccccagcatcttatcactctatacacacgctggcaattctgaagaagtgaaggaaaaagaatggagattgacagcagagcttagagaagcctaaaccatttcacaaccattatttgtctcaagtgaaaatccttgtctgaactagcaaacaaacagaaacaaagcaaaacaaaaggtcatgtagtttaacatgatgaatgagtcaaacaagggctgagggatatagcttactggtagaatatgtgtccatgtacaaggccctaggctcaatccttaccattacaaaaggggaatgagagaaagagagaaaaatgaaaacatcaaaacaacaataaacaaacaaacagaaacagaaaaaaatgtcaagtagctgagattcctggcaggaaatggctgagagagtcgcaggacttcaaatattctcatccatttctccaaagcaaacattgctctctcaaaatacaagacaggccatagaagtatcaggagtaccacttactagtaattaagctcttagtgtaatcagttcaaagtttccatcaaaattatgcatggcaataaaaacaaatgaataaataatcagcaaataatttaaggtcttttaaagaaagggtccttcttaatttttttttttaaagatggtgacatttccttgactctgtctctcaggcctcacctaaatgggtggacggatagatagatttcagacagatggacagatggatggacagataaacaaataaaaattttaaatccccttaaagacagagaaactgcctggtattggaaacctagccaactaccttgggctagggaagtcatgcttcttgacagagaacctacaaccactaatttactaaataatatatatagtccataactatgctctaaatttataccaatagataagcatagtgcttatccctcatcaaggaaatttctctttgtagcataaggaaaacattgcagaaaaccacaacagttcaaaacacagagttgtggaactcagttccaactgagccatctacaacacaataactgcacctacagctcagggaccattgtagacgaaggcttagagactgtaagaggtagaggatctgggagtttgctgtgagattgtctactggcaatgtcagaagctacacccataaagtctcatcaacatgactaccaaacatgagctgagcaaggagaacaaaagacatgccagaatgggagaaagctgaccaagcctcaaccctagacaaagatctactggtaactaagaaatgctaagagagcatgccaatttgttatccaaatggtaagccctaaaaacatatccacaggttgtactacacatacatacatactcatgatataatttattacagtctcaaagaactgaaaagtcttaatgtaaaaaagttaaataaaaatggctgagcacatcgctggccctaagagtcctccacactctagcagctttccctgcagctcctctggtttccctgcactggtaaaagtggatgatatctctgccctggccctcactgctgcactgggtagcaagatcacattaatcctaggagactctcttctacagttgtgaaaagttcccctgctgatgatttgtcatgaaaaacctactgctgtgaaagacccaaattcacaagagagagccaagaccttcaagcaagagaatctcaagaggctttgtcaacagacagaaggacctagaaagctcttcactgcacacaggtccactgatatctagaagccagacaacgctgtgctgtcaagcagtttaatgctttaacctgaaaattaaaatggtccataatcttttcctgccccacagagataatgatcttgaaggcaaagaaactaatagatgatcgtatctagtcttagagattttatctgacacagcctactttaattggtcaaaaacatattatgttccatatttctctcataggtgaaataagagttttcataatttattttcactaaacaagaataaaaataacactgagagcaaggatgatgtaagagtcaaacaatggcaagctttcaacttgtttttaaaacttgtttatcataaatttcactattgaacagaatcaacccatttagatacctactgttctcaggtaaggggtactgattttttaaatgggagaaatgagacataatttgttagaagttcctttatattttgtctgaaggcaaatggaagctaccaacaacaatttatggttatgtatataccacatacatcgaataacagaacatctgaacacttcatcgggagtcagagttgaggagtctctagcttaaatctgattttctaacacatgacttttttactgcattaaagatgtaattttgtgaactcccaccaatgaacaaacagtcttgatattcttgtacaaactcaaaagagttataacgacagggtttttaaaaagcaggtgaaagagaagtacagggcccaggaccgctgcagccacagaccttagtgtgatgggcatggcccaaagttgatccagataaaatcagggctcaaaaaaaggagaagggggaagaatggagtagaggaggagaaagacagaagggagaggaggcagaagagaagcgggggtggggcacaagtccaaatttaatactagaatcaagtttcaaatgtcttactccccagagcagccatgtccaacccttggcattgcaaactgatgttgtcacttacaatgtctacaaaaaagactgcaaaccaactcaaaggttaagtgagtttatgaccttatgttggggcactttcactgctaccctgagctttcaattcatctgaagtactataggtgctgtgcttggagaaagaaaaacatgcaaagaatcttggtgttacactaactaaacgagtcctctgaaaaagcagtccaagaatttgcttttgttttcaattgtaccatagacaaaacatgccactaattcaacagtctttagttttctgaataaccaatgaatctttgattagttaactatactagtgaatacccccatcagaaaatgttttatttaccatcaaattaaataccttgctttactaggtaatggcattcaagttgtcatcaaaatccatactgtgtgcctagcacctactccaggtaggtcttggatgttctcagtacagctaaggaagagggtggggataccagggatgagggatacactaagtggatacaaccacaatataacagttctcaaagcatcacactgtaagtagattaagactttgttggttatacctcaataaagcaagagggagaaaacctgtttcccaataaattcttggtccacaaagagggaggaaggaaaaagtaaacagcttacctttttgtctctggtccttacttccccataaaaatctagggcctcttgtgcctttaaaaatttgccccgatgcaataaatatgcacaaatcattacaccagtccgtccctttccagctttacagtgaattgctgcaacatgattgtcatcttcacttagccattggtcaagatcttcacagaagggtttgataagttctagctgtggtgggttatggtcttcaaaaggatactgtgcaactgttgcaaaaagataatcccagtgtaagaaaattttaaattttttatttaaaaacataggttaactttcaaaatgttatatataaacttactggttcttaaaagaagcctaactttcaggaaattttaatttattactaattaaacctagattttaaagaaagtcttttattaattcttaaatgcattcattagacatggaaacaagcattgtgctcttcactccagggaggatgaatctgtgcatgaagggaacacgtcatagcctatcagtacaactgaatccaaatgcacgtcacccaggcctcttgtcaagtagtaacttctatcaggaccaatagcagatattactacagcattgccagacatgctccgaagaaagtataattactaatagagtcaactatggaaaagactgacttttcctatcccataataaaattacccagtgacttgtttttaaaatggtctcacaaacattatatttccatatacatgagattaatcactcacagaaaaacatacaactgaagtaaagtttatagcaaattaagtttcagatttttttcacatgaattaagaatctaagatgtctttgttctctatagtcagagttaagtttttgaaggcaagatgctattatctagaagcaagacttccgttctatcactactggtttttatcttactagtatctgttttgattctatcctattgagatccttaaatcctggtatgaactctgggatgtagctcagttcgcagagtgcttgcttaggatgctcagctctgggctcatccctgccttgagtaaacacacaactgaggatgtggtgcaagtctgtaatcctaatacttgaggagtaaaagcaggagaattgggatcacaagttcaaagtcaccctcagctaaacattgagttcagggtcactctgggacactgagaccctgagacccttgtcttaaaattaaaacaaaaaatcctggtgatattactgttctgattatctgccatattatctaatatgtaaaaactctgacttatcctaaagcaagccatcgtaaaatggtacaagaacaatccatccatttactcctttccatgacaggaaagctctgtggtaaacaatggcaaactacattcaccaagaggctgcaggccagcttttacttaaccatctgtctaactgtgctcccgacctcatttccccagtggcacacaagaacattcaagagtctgttaaaatgtacatttaaagctaagtgaccttcaaccatggcatgtttcctaatgagcagtagcctaggtctgtcggtccccagaaactgttcttacttactccttagtgcttcatgattctgagaagacagacaggcagacagacagacagacagaccaatgctacatcttttcctaactttatgccattcttcgatgtagaaaagttaaaatggttctgctctcttcttgtgattgtttccagcagcgctagctgtcccacaccgtcaataagcacctccaatcctagtttagtcttgggacctctccaagtattctgtgatttagttttcctgacaatagataggtcttaaagaacaactctaacattaaatacactttttttaattgtcaaaggccattcttaagatttttatctcactaatcttgataattatcaccaggcagtaaaagacaagtctattggtctttagttatacagtatgctgtggttatgtttatacatacctctgcagttaaatttggcggtgtcataatgtctctcagcacatctacaagaaagtttaaatgtggcataaagttacctttcacactggaaggaagagtatcaatattagcaatatttatccaccctttctatcataccaccttttctatcatgtaaaaacactgcgctaagtgtttttacagtcactatttccgttaacttcaagaattctgaagtaggtactattatcattcttataattaaggagaccaaagctttaataaaagttaaacgcatgcatgcaatttgtgtgcatatatttgttcacagaatttgtgacatcaacatgcaacactgtaaattcaactgcactgaccctgtaatttcttggataaagactatacatggctttagaatgtattttttatttcacaaatacctatgaataaatagctactcttactattatctttacctgacagatgatcacatacaatcttaaaccattacttaaaacatacatgttaaaaataaagaaaaagaacaaaggaaatgtaaaagacaactgaatgatactaatttaattattaacacaatgcttactaaaaattgtaagccagacctttactcttttatatacaaatctcatttccaataatctctcagagtacaaaatttaataccagatcacaataaaataactaaaacccactgatagtaaaatactgacacattaagacaaacacttagcttttcaataataacactaatcagtgatactatgaagggtatcctacatattagtggggtcagaagcatcctggtgactccaactactaaggaaatcagacacttaagcattattcaaataagctaggagtgttaccacaggctgtaatcctagcacttcagaagagttactgggaaagattatatctttaagattagcctttgctatctagtgagtcctaggccagcctgggatacaagaccctgtctcaaaaaaaacaaacaaacaaacaaaaagaaattactgaaaaataaaagttagtgttttaaaacaaagttccattattccttagcccaaatctcaaactccaaagttataaataggtaatctcaactcgaacaggacccaatctgaggttgttcaaccaacatacctgctgagtaccgactagtctaccacagtggatactagagtaacacaaaagatatggattttcttgttttatttagttttttagttttttgaaaactgaaattttctatgtaccaaaataaaactgatccaagacttccaaataaatagctgtgggcctgcactgggcatctggaatttgtacaactcaactgtatttcaaaacccagttcacacaaagattgaacaaattatccataaactacagcccaatggagcagacctgaggggaattaacttctgtattcacacacacacacacacacacacacacacacagacacggacacacacatgtgtttttcttttagtgtattacctgatgtactgtttttgaaaagagaaaatttattagatgacgtatgcatccttgctaaatactctgctaaatgtctgcttacctaaaaatgagataggaagaagaaaactgacacatatacaaaagatcacatattctatattctctttcctcccttcctctttggttttccttgagtcaggatctcatatacccaagactggctctgaattcccttctccctccacctccaagtgttagaactccacacagggaagccaggttctgctcttctgagaggtgctgtgtggtgaagagcccacagtggaagacagtcaagaattaaggatacaatcaggaaacaagaggaagctaggcacataccctaagaagccggttgttagtgtcctacaagtcagatttttcagtttgccacactttctggtctagggtcagggatcccaattgcctgcggaggtgatgcagggaaggggagaggaggggaagggagggtcccaccccagagaaagatggaacaaacactctgaaaagtttggtttaataagcactgcttaagatcaccattacaaactggttgtcatgtatcatcagttaaggtgaaaggaacacagtaacaactgaagtctacaggatatgggcaccttacagctgacatccatgttttcaccctcacaatcatgtaacagtttacatccccattgtatatgtgaggcatatgtatatatggaaaagctaagatttagaaaggcccttaaaagctttcctaataacaacatgaagtcaccgtgagacaggaactcaagcttagtatccttgctcaactaaatccaacaacttctattacagtttcattcaacataacagaaacattcaagtcttaaatgaaaaagcagtgacaaattttacagcacaaacatgagcagtatttgtcactgaagacagacctaacaattgacttggggggggaggggagcatgcagctccttataggcaagcggaggggctttgggaggacatgctagggctgcctgtgaaacagtgctcaagagaaagaaagggtcacagggtcaagaagaaaccttccaccttagttagaatctctggtatatagccaaaattcacagcggagtttcttttaaatttcttatggcatattagcagtaagtcactccacatactaaaatagaagatagcaaataacaatttggatttaaatttttctttgtaattaaaactcaaacgatatttttgtccttatcttaaattggcttatatgaaaagagaaatgaaaaaaaaaaaaaacaaggaaaatgaggtttcccaaggtggcaacagaaattaagaggaggagtgaaaccagaaaggcaaacttgcagacaactaggccttgccatagaactacatggtagggagctctcttcttcactctacagtgttttacaaaggaaatcttaacagaaaaataacacagttaaatgtttgccaagtacagcaaatattcactaaaatataataaaaacttaaaatcttgtattctctgaacagggagcaacaaagaaattttaaaaacactcatataaaactgattaattaatgttgccctttttcaaaataactgattaataataatagataagctagattatcagaaagcttaggctgatagttcttcattcatgtgcaacactgctgctataaaaggtctcacaaactactaactatacagatgtccagtgaaaaatactttaggaccttcaaacatctacatttccaagaaaaaaaaaatacatactacctgtaattcctatcctaagacaaaaagaaataaaacaaaaacatctgttgtggctagtctcacttgcctaaaatcagatacacagtaggcaggggagagggggtactcaaattaaaacactcaattttgtatatgtttaaaaacttttgaagtaaataaaacgaagagctaaccagcaaacaaaagggattctggtgcaaacagtgggtagtctgttattatgcacctacctgtctttggctacctcatttaacttcctaggcctaatgccctgtctataagataagaaggcactgctaaaaggacccttcagatcctttgccattctgaaagcctcagttccaaatgacaagggaataagttcatatgcactaaaggctgctctcaactaataaagagatggttcattaaattgggaatcaaatgcttggaaactcaaatcaagttcctaggtccacccaatgccacctctaactatactgaaatacaacaaaggagacagcataaacctaatccctaaattctaggggcaggaagtcactataggcaggaatgaaaagaatttcctccctgtgctttagatatgttaaacaggcataagatttcagctcaggcagaaatgtgtcttctaatgtctttctacttccctattgggacctctctaaatccccaaacctgacagtgtgagtctgaaatgattcatttcatcaattccagctttcaacagttcttgtcctttttcagtcaccttctgaatgcagctgttcagaaacagtcttgtggttctcctatccaccttttattagcacaaccccacctaagccagcatacaccaccacctgcccaaaatgagttatctgccatatttcaaataccattatactatcaatcttctgacttgccttggctcatcctcccaggtctaatagataactcctattgattttcattagtagaaaagccatggaaatatttcaagatctttaaatttatgtttgcaaagaaataatcttaaaattaaaagaaataaaacagaaactcctcttagtcttacaagtatataacaagcagggatagaagaaagaaggtatcagaagttaatcacagcccacacatctggtcttttacagaggcctcctgtggggccagttactttgtccacacttctctcctgctccctcctactttcacatcaagctataggctactagagggctggaactagccatatgagcactctatctgcatgtttcaccatggctgcacctttctgatctgaagtcagcaaaagcgaagagaaataatattggtaactattgcacatgaatactttgaagtcttatcaaaacagaaatatcattaaagactgaaaaaataaaagtaacatctagcactataacaagacatagaaaattctccatccttctgggtagcaattcaaatagccactcgaagcagaacagaaaacacttgtagttatatttgataaagtctacagaaaatggttaattactaattggtattctaccattgcataacattctcctgttatataaatcatagacatagaaaattaaaggacataatagaaacatggtaatttatcttttaaatttttaaaaatgctcagtatttggggaaaataaaaatggttttgaaagacaaagggtgtttaatgatttgtcttcctttcctgttttcatgtcactactccaaaagtcaaaagaaagtgaaggtttaaagataggccaataagttttaatgagcaatccctcaaatcctatactagataactaaacaatgctgcataacttactaggttatacacagaaaatattcaaatagctgtttcagtatattgatcaacaagcacagaggaaacaaaagtctgtccatccaccctggagtctgtctccttagaagccatcgttaatactaacagcagctccgctgtggattacatttcaaattatcacatgattatgggctcaaggatgggcgaggtgccaagtctgtaaaagcagatcaagtaaccggaggctgtgccaagctgctgcacctcatcaccacgcttcgagacccaacaactctctctatcagactgcaactgttttcaggaatccagttcctcaaatataaaaatatctaaatatatttttatcttcaacaaagaaataacttttatttagttattttaacagagacaaataaaaaaagcatacttacagattgtatatcttgtaatggtttttatgctttgaatccaaaaaccttaaaacaaaacaaacaaaaaaaacaccattaacaaaaatgagctaatatttcaaattacattaatgctgcacaggactaaaacagatttatttacccttatctcacatactattaataacacaaatacatatcccctcattcattaatagttattacattacacagatttatacattctgaagtagagctgactttatcaaaaactgttttcatatctatgtcttcagtctaataaattacaatcacgtcttgacaaaacgatattagcagttcaagtgtacccagctcacagacttccatgaaaaaaaaaaaaaagcttaaaatgtaatcttcctagcagggaaaaaaaaaaaaacccacaatctgaaaagtacaatagcaatgtagttctgtaagcatttttcacatgtatacatgtatactttctcttgtccctgaccaacatcgcagagatggaatttacattttacaggaaaaggaagtaaacctcaagagattatgaagcttgtccaaggtgtgaagctagtaaatgaagagtcagagcaggggccactccttccaaccagctgtgaaaccacacagtgatcacaggtaccaaagcacctattacatgccaggtattatttaagtactttatgtatgtaaatttgtttaaccttcaggcctgaaacagaagactcagcaaggtataatggtgaagaattaataatgagacaaaaggagaaaatagtttcatgtagcccgggctggccctgaattcctgaccctcctccctccatttctggggtgctgggactacaggtctgtatcaccaacctgggtttatgcagtgctggcaattaaacctagagcctcagcaaaacattctgtcagtttacatctccaggtccaacatgagttcccaagatgaagacataaatagctaataaaattgactttaaaaagggggtctaggggagccgcaaatggagccatatatatctacgttatttctaagtgccaaagagaacaccagaccctaaagttggcatggaaagtagacagcataagacaaaacgacaaacgcactgccattaacactagcttcctaaaaacaattatacaaagtttgatttttcagaaaatttacttccagcctagaatgctatacaagacagactataaatcgtgggtgagtatataatacaataaaggcactgttctacaacaagtcatttgtttcccatacactatctcagttgtaaaagatgttgagagtgaaaaatcataatcggttctgggaaccagggagcccaacctgtaaaagaagtgaggaccccaaggatcgcaaggggtacctcaggctgcacacacagaaggcaattaggtcagagttaggtcggtcaggaagacccaggagtacgagaaactgatgagcaccaaatgtgctcaatcactgtgagatttacagagcagggtgtgtgtgtgtgtgtgtgtgtgtgtgcgtgtaaattaaaaccgagaacatagatctcctggacacatagtacggtttccagttgtgattttataagagttctatgtgtgcaaacacgtgtctctgagcctacgtgggtcttgtgtttttcttgtttgtttgttttgtcctattccagtttgtttgcttactttatttcactctattagtttttagacacctgttttctaatgagagacagaaagggtgtaaatctgtatgggagaagggagggaaactaggaggagttgggataggagaaaccataatcagaatattgtatgaaaaaatatctattttttattttcaattaaagaaagaaaaccaagcagtatgacacaatacatttgtgtcacagtcaggttaccaaagtgggcacatcctcggaatacattataaaattacaagaaaaatagagcaaaatattaggaatctggttcttttaacttctgaggtttttctttaaaaaaaaaaatcttgaaatggttggttagttctcttttataaataatttttagaaggaaactacaactctggaaatgtcaggaaacagagggaaagtgttcatgtaattctagagctgacatcagacaaggaaggaaatgctggcatagtgagataccatactggactgtaaagcattgcaaatgcttcgcctcagcagcagcctaggaatctacaacccaatctaaaagaagactacagagaggatttaactgtaatccatggggaactataaactaggctcatttgtttaaacacagagggaaatgtaattttttaaaagacaaaacatgaagtcatactttgatgattcaaagaaagaaagaaagaaagaaagaaagaaagaaagaaagaaagaaagaaagaaagaaagaaagaaagaaagaaagagagagaaagaaaggtcaagcccactaagtgacatgtgccatgcatgttaccaccgcacacatgtaaacacagccaggtctatagaactgagtttgaagtcagctgggattagagttggacaccatctcaaaacagcaatcacagtaacaatgctatggacttggtaggattctctagaattctcttttgtaatgaacaaattattcaggaaaaaacacttagctgcagagagctcacaaagctccattttaaaacacggtcatcacaatggcagaaggagtgctcagagatgaaatcagaacagcacaaagtggtgtataagaaggaacacaaaaacagtatcaactaaaggttggagtggagcaacagaacaaaaagaaactagaattccatacgcttgactggtgtataatgctggaaacaggaaaaaggcagggagccctaaacctttcacttctctattctctgtccaaaagaaaaatgccgagtcagtagtaggagatatattaacaattcctcataagttaaatcttttctacttgataatttaagcaaagctgcttcttgattatttaagagctagcaatagaaaatatagtaattatatacaacaataaagcagagttagcaatcagttattctgagcaaaatataacccatcaatttctttagtcaacatttatctgaatctaagggcacagaagggatttataaaggctatattataaaggcataaagaaaggacttataaagcattataaagctgtgtctacaaaaggaatcaaagcagtttaaacaatttaaaagaaaactcagttgaaaagaaagtcaacacaaagtaaacaccacgtatgcacacaatgccccacagaagttaactgtccgaagctttggaagctagaaagtccaagaacacccaaacaaacaaacaaagaccacggcttcttatatgtaaacacagctacaaatttctgaaagggggatgaagtataaaaatttcataaggaaattgtgccacccttatgtcaaccagttagcaaacactgagatcagaggcaggtatttcttttctctttcccttgttgtgagacactcactcctacagagtgggcagcaaggtacaagagaacagtagattcttcaaagatctcactggaagacctgggaattcacagacagcaaccaggatgtaggaccatgcattggtgtctaagcagactgtagcccctacaccacgtttcctaaacttctgctttccacaatgggaacttcctccagagcattattcctttctggtaaagacattttatgtcatttgcaactaaaaactcataattctttcaagagtctttcctaccgtgtgtttaccttaggcttagggaaatcctatctgtgtgccccttaacagttgaacattctgatttcttagctagcatgtgagcaacagcaagtctaacagaagaaagcagccctttaatgggtacagtacatcattccatcatttgaaggggtggggggataactgtctcaaagagaactgattacttagggacacattccgcacttcccccactgttctctcagtctgacacatagaaagacaagtgaggaaagacaagtgaaacagcacattccaaagagaaatgggcaaacttgcctacagagatgtatttagatagtagaggctaaaatattagacagcagtgagaggcaatgctccctaaccctgcacgacctaagacacctcctagaactgcatcttccttgaaggaactgactgcacatcgccctcaccactctcaccctcctatccctgttgagcctcctttccaactgtggtgtgtctgtgtgtctgtctcacatcgccctcaccactctcaccctcctatccctgttgagcctcctttccaactgtggtgtgtctgtgtgtctgtctcacatcgcctcaccactctcaccctcctatccctgttgagcctcctttccaactgtgctgtgtctgtgtgtctgtctcactgagataaactgaggctgatgtatgagcatgaaagatttcttaggaaataaatctagataagccacaatagtgaattttaaatttattttatataaacatgtatttcaaatgctagaaagtattaccaaaaatccacaacaaaacaacaaaaacaaatcttaaaaaaccccacaaaacagaaacaaagaaaccaaagtagttcaagaggacagagaagcagccccagaagccagccctgaccaccgactgcacttgcggaacctttcccagggaatctaggcaaacgctgacactttcagtgagtcagctctgacagaaaatgaaggttaacttaaacaattttaggtgtgtgtgtgtgtgtgtgtgtgtgtgtgtgtgtcatgggaacaacaggtatttctctatgactttgcaactagtctgtttttgagaacggttccctcactgaacacggagctagttattttggctaagctaactggccagcaagcccccaggatagtcttctctgcctgcttcctgtcacagaggtcgcagaaacatgctgagcaagctggcttttgtatgagttctaagaatgggaactcagtgagactaggccggggcctagcaaacacagaagtggatgctcacagtcagctactggatggagcacagggcccccaatggaggagccagagaaagtatccaaggagctaaagggatctgcaaccctgtaggtgcaacattatgaactaaccagtaccctggagctcttgactctagctgcatatgtatcaaaagatggcctagtcagccatcactggaaagagaggcccattggacacgcaaactttatatgccccagtacaggggaacgccagggccaaaaaaatgggaatgggtgggtagggaagtggtggtggggggagggtatgggggatttttgagatagcattctaaatgtaattgaggaaaatacgtaataataaaaaatattaaaagaaaagaaaagaaaagaaaagaaaagaaaagaaaagaaaagaagagaaaagaaaagaaagcatgctgagcaagccagtcaggagtgccccttcatgctctctgcattggctcctgcctccaggttcctgccctgtttcagttcctgtcctcattacttttgataatgaactgttatatggaactgtgagtaaaataaaccttttcttctattaaaaaaaaaaaaagaacaatgggaactcagaatagcaagaactttactaagggagccatctccacagccctgattttagctcttatacaacaaggacttctcatacagtcattgatatacctctatagagacttacaaacaactttcaaaagccaaagttaataataaatgccgtacgttccaatattttaaatctgtgtgctggtcactaattgctgcttttgaacacgcatacgtagatggaggaagctgtcgcccaccaactgaagacatcaagggattttaaatctactcgccctgcccacttctttttccttcctttggatctttcaaagaacccaacatttaaagataataacaactgagattaattacacatacaaaaaaaatttaggaagtcattccctatacctagaaaaaaagcccaagcctaaaagatctttaatttattatgattttgtgtatttagtattttgcctgaatgtatgtctgtgcaccacttgcatgccactagcatgtagtgcctgccacccgagtttagaagaggctatcgggtaccctcagactagattggcaggcagttgtgagaacagccagtgtccccaaacactcggccactgctccagccccaaagatcttaagtttgcatgagtttagcatggtaatctttgcataggtatagcatagtagatacccaatacagaaaacaagggaaagctgggccatcaagaaaagagagaggatcttcgaccctacaagatccagattgtttttagctacctccccccatacacacacacacacatgcacacacacacacacacacatacacacacacacacacatgcacacacacacacatgcacacacacacacaagcgcacatgcacacacacacacacacacacaccacatgcacacacacacacacacacacacacacacatacacacacatttacaagaccaagacaaaaacatacatgcatacacaagtgtgcatactcacaccccaaaataagatgtgtggatactcaaaaatcgaataagttaaaaagtcaacaaactgtctctcagaaaaaccagaaagcaaatttactaggcaaagatttgtgtggtcttaatgatactcagaaagctaatgaaagacaggggtatgccaggcgtggtggcgcacgcctttaatcccagtacttgggaggcagaagcaggcggatttctgagttcaaggccagcctgatctacagagtgagttccaggacagccagggctacacagagaaaccctgtctcaaaaaaagaaaaaaaagacacgggtaagatcaagaaaaatgatgaacagaagtatcaataaagtgaaagagaaacaaagagctaggtgtagtggtacacacttgtccgccagcattcggaaggctgaggcaggaaagtgcagcttctgagttattaacaagatgggtagctgagaagataaaaaaaagataactgccaccaaactgaaccatgcagtaaaaggaaagaattataagttgtcctctgacctctaaaagtgtggcatggcatagcacacacacaccccaacatacaaaaacaaataaaaaaattttaaaaaggaaaattccaggactaggaaggcaccttagtctaagtttagggtcccagaacccacataaagaacaaagcacaggccaggcagtggtgccacacgcctttaatcctagcacttcggaggcagaggcaggtggatttctggtctacagagtgagttccaggaagcaaggggtatacagagaaaccctgtcttgaaaaaaagaacaaagtgcgatagcacatacttgcaatcccaacatcatggctactgccaaggctactgttttcctccacaaccagatggtagtcctgttgcttaagatactgcttacttgtgtcatcgagcacagagagattgagctgacagccaactagagattcagcactactgactagcactcgtggtgctggaaggtacttttgcacacgactggaagataaaagtagtcatcaatataacccagctacaaactctgtgacccacaacaaagacctgcatgctcgcgggcatatatattgatccaatattggcataaatgttatgggaacaaacaaccactttttaaaaactgaatttaagacccattccttaaaatagaacccatgcctgccactgctagtgaggctaagaatttaaggctagacaagtcatgagcctaggggaaaacctactactactattattctattaaagaaacagaaatattcctaacatactgctctccctatagatgagtgtgtcactcatcagagaaaattctttttgcagtagatggtgattaacacagagacccacaactgaagagtgtgttgaggtttggtctgttgctatgtatagcaatgctgaattctgtactaaaagatttagacctacaagtgaatttcacatttaccagcctttgctgtataaaccttacaccttaatttaaaaccgttaaggtttggtctgttgttatatattgtaatgctaaatattggccctggttacctctgggccaaggtgatcctcacatacatcaaataatgctctataaccctgaaagctatccttgattggtgaatgaagatgcctacagcttatagctaggctgaagagagttaggtggggtttgggttcccaggcttggggtctgaggcagaagatcaggaaacaatagagagaggagaagccacagtggggttaagtgattcatgaaaactcggtcatgaaggctggccaattggagttaagagtggcccagatgaaatatggcaagttataactcagggctaccaataaggaagtagatactaatagcctagaaggtagataccagcccagctttagtgctcattaaggcttataaataatttttaaaagtttgtgttttttatctggaaactgaatgatctaaagcagtaacccccacatgaaattaagcatatacatcaacacagcgtacaaatggagaggctttggaacactcagtactaaatgggatgcatttattgaacccctcccctcaaggttcagggatctactccgaggaaagggaagaaagatgggaagagctagaggtagtaaatgagtctaagcaaacagcatcttccagacacaacaagggtgtcacacaaactcacagattgtttcagcatgtgcaagatctgctcaagtcaaaccaaacaaaatctcagcactaaatctgaagcagacacaaagccctgcctctaaccaagaaacgatttgcagttgattcctactgagaaacagaagatcagttttctccaacatatcaactacgctccaatcagcgctcatgcacaggagtagttggccaacatagaatggactccatggtttttgtgcttttctgttttgttttgtcactttttgtcttattgggttttgttgattttcttttttttcttcttgagaaggaaagaaaaaaagaacatgacatttgtcggaatgggaggtgggaaaagacctgggaggagttgaagaatgggaaagaatatcatcaagatatatgaaaaaactcttaataaaaatttaaatagaacaatacagtagttcatacttgtaatcctagccatggctgaaaagtacagtcaagtggaataaaaatgtttataggaataaccaaccaccttttgattagatttaggtctgttctataagatggaagccacatctaacattgtcaaaatgaggccaaaagcctgtagctagatgggcatggagcctagggaaaacctaccaatattcctcgggtaagtggacacagcaatagaatgattgctaatgactactgctaaataaaccacagacagtgcacagctcaaccctcatcagagaagcttctgttgatggcaattagtacatacaacctgcaaagaaagacttcaaaatgttcagagcaaatggtattctgcatcatacccttcctttcaaggctcaggcatctatgtggaagagggcaggaaggctgtaagagcaagaatgataggtgacttcaaggagacagcgcttgctagacacaacaggccagatgcacatatgaactcacagcaaccctaacagcatacacaagacctgtgaaagcacaagccaagcaaagaaaagtgatgaccaaagtcccatccccggctaaggagctattggctaccaagagtgagaaagtcaatcttctttcctggagtaaaccacattccacacccaggaactagggtaggaggataaatatcaaaatacagaaagcaacttactgaagaaacgtaaagagattaaccaacctgtgagacaacagcaactggactaccttagggatctttaaagttccagaaaaataattatatacagaagtacagtcaaaacttctcaaatttgataaaagaatataaagaacttctggctcaatgaaccacaattcacaaaaactcagagacttactaagacagatcgcaatcaaaccatcacaagacaaagacaggctgggggcatatctcattggataacacaaacagagctctgagaaatctgtccccatctctacataaacctttgatggtggtgcactcctgaaatcagagcactagtcaagtggaagcaggaggatcaaaagtcagttagtacatccttgcatatatacaaggactccaggctagcctgtattatgcaagaccctctcctgagaaagacccacagtctcaaatacagagagaaggaacatgtcacaaaggagcgttggtatcagcagatttttccccctcagaacaggaagtaagaatataacatttaaggtcctagaaataaaaaatatccagcaaaactgtccttcaaaaaatgagaaataaattgaaatattcccagagaaacaaaagttacgaaaacttaaaagaaatgctatagacagcccttcaagtggaagtgagagaacatctgcagcactaaggtttaacaaggaatgtaatgtatcctcagctgaaaccttacactatacacacgccttccatatggctgcctgaaactttggacagcgacaaactgtatgtacattttccatatacacacttatcaatgaagttgaataaactaggcaaggtaaaacattaacagtattattaaaatataacaactttcaatataatgaaagttatcacagcaagaagcatggtggtgtccaggattctatatcttcatccaaaggacaccaggagcagactgtcctcaggcagttatgagagggtctcaaagcctaaccccaaaatgacacacacacatccctcaacaagaccacacctcctaatagtgccattccttgggccaggcacatttccagcaatggaaacctcactaagaaacagtccttaatggagaaatggtaacaatttaatgccagagagcattacacaaccatacttgatccatcacacaggaatgttgaattcagttttgacagctctttcagcttttaaaaataagctagaaatacagggttttgcacgaggcttcatgatttttaagtatagtctcgatttgtccaagtgtttctagattttgtcctttgatgtacagaaaaaagatattaagggaagcagctttaagtaatgcccagtggtgaagtacctagtaatgactgagttcaaactccagactgcatccctcccctggttaaaaaactttttaaaaattgaatttttgctggccagatcaccataagattatacacagagcactctgagaatatggaaccaggaggaccttgagttcaagactggccttagctacacagtgagaccttgccttaaatacagtaacaaacaaaaaagaaaaaaaatcaactttggaatctcacagacacggactcaacttccagcttcttgctacttctaagctgtggcaactgaagattctaatttcttttaaggcacttataaaagtgaaatagggattagattccgtctacaaacttagtaagatggtatatgcaagctcgttatacaatagttaacagatataaatagtaaataaataaatgtacagaaaacagtatccgctattaaatagcaaagctagtttgtgcccataacattattattgtccaacacactaaatctccccatgtgcaggaaagacagccagcagaagggaagggcagccaggagctttcaggagtgataaaaaggttctggaatttggtatcggtggtgactgcattacctctggctatactgtgaaaatattaaatgtcactcaaattacagtttaaaacagtgactattatgttaactcactaatttttttaaaatggaaaagaggaaggcaaaatgaggaaaggggcaaaaaaatgttagaatggaaaaacagaagtaatctttcctgtttattattattattattaattatttccttttttttttttttgttttccaagacagggtttttctgtgtagccctggctgtcctggaactcactctgtagaccaggccagccttgaactcagaaatccgcctgcctctgcctcccaagtgctgggattaaaggcgtgcaccaccaccgctcaacatttttttttcttgattttcaatgagaaagaactatttgttattctagcatcattattgactatcaattaaaaataagacttgaaaacattattcagagggccattaagtaatgaatagggctgtgcagagttggtgcacgcctttaatcccagcacttgggaggcagaggcaggcggatttctgagttcaaggccggcctggtctacagagtgagttccagtacaaacaaagctacacagagaaaccctgtctcaaaaaaaccaaaaaaaaaaaaaaaaaaaaaaaaaagaattgaacatttgcaaagtttcttcagaaagaaaatatatatgccagcagtcaagaaacaataagactcttgaacctgtaacaggttatacatgggtttacaaaacagtaatagctttttgttaaatcattatgtcacaagactgagctctaatcatttccttataaaagctatagacaaactgggcttgatggacacccataggcaggagtgtaaaaatcatgaattagaaaccagcatggactatacataagtcagcctgggtcatatagcatgcctccacctcaaaacatatcaaacttagaacaattctgtacacataactttttcattttcaacattttccaaattgagctccatgaaacactgtctaggaagatgagagttagcaaattataaaaggaaaccaagagaaaacataaaggtggggaaaggtctacctggtggcactgtactaaacattttgtgtaaaaagtagtttgcctctgttacatctacattttcctgagtcattgggcagaagagattacaagacaagctccttagacacactatgccccagtctgttcacgactgcttagatttaaagccacagagctttcccaccagcctaaaggacactggaaaagcacaaatcaagccaagtgctggtggtgcatcaccccctcttcattgcaaaaaatgaggaaaaaaaaaaagaaggaagcagttaagaggaacgacaacaactactgtgggagcctccgcagtccctcctgccctgcctgccctgtcagctcactccttagattaaaaaaagcaaatcatctgtaattagaaagcaaattccaagcccagtgttcctccatttccattttttacatgaatcccagatctcaaatgaagaagctaaatatttttctcaaattttgtagatctcagctatgaaattttacttatcatagcacactatatcttccaaacctttctgcataggacaatttaagcatgaaaatatttgcaatttaagtttacctcactccaggtaacgctatagtacaatagcaaagatttaagttttatatatttcttgtttgggggaaatataagaaaaatatggaattagataaaagaaaaatagtttaaaatatcttttggataccctactagacaaagcaaagaaaaattaactgcaaaaaaaaagtttattaataagaaagcaaacatgttatagtttcaatctgaaatcctcctcccagcccggttgtggagcctttggaagtgaaatctggctgacagaaatcagtcagtcagggcaaattatctgcaggtttctctggttcctgcttcctttcacagccatgaggagttactgcctccactccttccaccatgaactctgccccaaactcaggaagccatggatggagggatggagggcctctgccctccctcctcaccctccacagccagaaagccttctcaaacaatgaggcaaacgaaccccctcttacatcacctgcttcttctgggctatctggtgatatgaaaacaaaaatacttgtactgagatgttatcaactttaaagcaaaaggaagcactcactattgattaaaactaacatcaccaatatagtgtgaacaaactgaagtaatcagttatttagatattagacacaagtgttctttggagaaggcaatcctaaaaggcattgtaattcattatttgtaggggctaatgtaatggtgttggctttgatcccagtcctccgaggcggagacagagaggcaaatgcctatgagttcaaaacaagacagttctacataaggacttccaggctagccaaggctacttacttaattcagaccctatctcaaaaaaaaaaaaaaaaaaagcaaacaaacaaacaaatcacaaaaaagttatttttagtcactttagtttgtaggaaaaggcctatcttcctttctagtcactattcatactttactataaaagtgggtggggaactgataaacagaagttatccaggccttaatggtcatttatcttaacaaacaaacaacaaaaaccaaacacagaacagttttataaaaacattaaagtaagaagctaaaagaacaagctaaataatacagatagatttctttaaaagagagagaacacctaaggctaaataaaaaaactagatagataaagctagatagaattaatttccgtcttagttactaattataaaaatgaatgtgcaattctcttaatttgcaagcaaaagtataggaatcatgaaaccagaagactcaggaccaaactaatttttcaacacaacatatttttggctaagttactgtagtataaggtctaataaccaggggtaaaggtctagaaactggaattgtaaccttaaagataatctaatcaccctcacttactaattcatacttaagagaaatcaatataaaattagcatgccagattagtcaaaagaacattacatggccagaaaagatcccctccacttaaagaaagaacttgctccccttttcaatacagctgaatttggtttggttaaattggtccttggctgaatataaaattgatgtgaaatagtgtatcttatgaggcataacatgaaagacataaacaattctgcatcaaagcagaaaataattatctggccaaactgccacttaaccatactctgcaactttcaatgaaaaaatttcctctcttactttttttctgtggcgtatttcattttctctgcatcatcactgtgttcctatcgagctgtgttcctgtgggcctgccatgctaagtatccttccactgtgttctacctaattataagaaggcaaatgtatttccctattgttaaaggcttttaaacagttacctctaacaggataacctaaggtttaatggaaactacaaagcagtaaggggtttggtgttagttttggtagacttttatagatggtgaaatttaaacctgaacaaaacataaacaatattataataaattatccaaacaagcacaatttaaaacagtaaaaattagccacttaggaaactgactactagctcatctaaagacataaagtcatgcagtaccacaaaagcatcctacatctgcatgacactctaagttacaaagcactctcccacctatttaaatctgcataatcacacatagttaaaagcaccaggaaagatgctcacttatgagtaaaaaggaaataatccagaattttaacttttaaattcattaaagtacttcagaaccagcatagcaaatacagcaagactcagtattaatgaattgttaaaaactatgatagtttgcaacaaaaatttaatgttcatttactcatacaattgcatttttattctgaaactaaattttttaagtgggccttgagaaacacttttctgaactaagcaacaatcacacttggaaattttgtaaaattatgatactcttcatttactcttttgaatgaatgtccagcaagtctctccaaaatcattgtatcaaacactgctacaggtataagtgctacataaaacacatcggtcactcataccgcagggtgaataactaaacaaacctacttaagcaaggcctaacccaaatacaaagtcaaaaccttgtactgtaatacaagccagagaataacctggtaagagacatattatggaatacaaaaaaaaaaatcttcatgacataaacaaacacgactatataactagccagttctcatccagtgacgcatccagccgagtgagagctgtcaggtgctttaggttaaaactttcagagttttaccaaaacacatcaaaatgcaaatactggtctgtgttttcgggatcttttctaaataaaacacatcaaaataatttattaatataagaaatagaaaatcaagaatgcttaccttactacatcatcaatattgttcctgtatacaccttcaagtctttctgcaggaaatcccatagcaataatatttggataaatatctaaattattaagttaaggaaatacctagaatatacaatgacacaaatatgcatgcatttgaaaacattagcttttcccacgctagctgtgattataaaaggtcgtcaaatgtacttgtctgctccttgagctatagcctggacagtcagccactcactatccttagacttctataagttcctactgcccacagtgactcggcgggcagtgataacctcatccctgacagctgtgatgtcagaatacgcgactgaggctcaagcctacatgctttcttctcatcagtgtaattagtccttagcatgtccttagtttcaattcaaaaccagttaacataaaaacccatctctatattctgggagaatttatttccgattaactaaaaatctacacttccatgaattttatccatctttctagctctcatttgttctggggttccatctcataactacctacaagattttcacatcaactataccaagttacctcctttaaaacaaccacttaagacctccgcctacatattctggatacatttgccttctacatataactcagtaattgatctccaagtcatgagaaggctttggccataggtactacaaaggcagagcatcatctgtaatggccaagaatctttaacaccaactctcaaagcctttgagaaaaaaaatgttaacttataggaataatatagagggacaggctaaataatattatgcaagaataaatgagacaaattaaaaagtctgtagggccgggcagtggttaccgtcctcaagaaagacaggcacacagacctaccatggcactaaaagtactactgtattttttaaatgaagatgttttcagagggatccgtggaagtatgtataagcatcaccaagtgagtattatgttgggtagcactcacacacgccttctggtgacagaagaaaacacaggagtgtttggagagatgacccagcagttaaacatacttgctgctcttgcagaaagagcatccggtttggttccctgtacccatatcaaagtgaagaccagacacgcatacgggaaagagacatgtttgcaggcataacactcatacacataaaaaataagatttatattagaaaagatatacttaagtggctagaacagtccaagcagagaactgcaggaaagagacagaaatctatccaggaacaagagcccaatgcaactcataaagacacacagaaaggacaggatttacataaaacagacacaggtttagggatgcctgtcaagtagttcaatttactcaggcatatatgcataaatggggtcatagtcaagaacaagggaaagcctgaaggggaaaagcctcgtcatggcctgtcaagtcagcagacatcaagaacaacctacatttaccattactggagtgctttcaacaagggacactgaaagccctaacatgcatgtaacatattacaaagaaaatgcttaagaaagaaagggcaagctgggtgtgttggcgcacgcctttaatcccagcacttgggaggcagaggcaggcggatttctgagttcgaggccagcctggtctaccgagtgagttccaggacagccagggctacacagagaaaccctgtctcaaaaaataaataaataaataaataaataaataaataaataagggctggtgaaatggctcagtgggtaagagcacccaactgctcttccaaaggttcaaagttccgagttcaaatcccagcaactacatggtggctcacaaccatccgtaaagagatccgactccctcttctggagtgtctgaagacagctacagtgtagttacatataataaataaagtaaaaaaaaaaaaaaacaaacaaacaaaaacaaatactaggccagacacagagaaaccctgtctcgaaaaaccaaaaaaaaaaaaaaaactctttgtgaaaagaaaaccgtatcaaacactgacaatggctatgcaataacaacatacatgagaatgtaagcatatacattaactaacttaatttccagtgacaaactttctttttgtgggaagaggggtgtcttagcctgaactggtctgcaacttgccagcaggaaagtttaactcctcttgttcctcctgtcttccctaaatactgggattacaggcaccacacccaagtgccagtaacaccctttgaaacagaatcaacctggcatggtggtgcagggctatataatgcttagctatttggtagggtgagactggaggatcacaagttctgggcctccagggtttaagactagcctgggtcagtgaaggaaaacttgactcaaaagtaaagaaagagggctggagagatggctcagcggttaagagcgctggctgcttgttcttccagaggtcctgagttcaattcccagcaaccacatggtggctcacaaccatctgtaatgtgatctgatgacctcttctggtgtgtctgaagagagcaatggtatactgatatacataaaataaataaatctctttaaaaaaaaaagtaaagaaagaaaggaatggtttcatagctcaatggtagagcactctgccttacatctggaagtccctgggtatccccagcacatttttttccactgaatccttaagttttagaatctctttaaaagtgattccaatcttatttatatctggatatgaataaattcaatgaaaaactttcaataaaactttcaatttttcaatgaaaaaagtattctgaatttcaaataaggtttacttagtttattaagttccttttaaagtcagcaactccgaaatccaaagtaaggtttattgggcatatttaccgatggcttgcttactagtcatccctactagtttcccacccagtttttcttcctagaagttaattatgaaataatgtacctgcaactgctcaaaagcctacatatgtgagcctctaaaacttttaatttctaatgagtttatatagaacaattagcttcttcctaggtctctggaaaatatgaaaagactggtttcctgtttcaaagctctactgcatttacactacattcaagtgtgcgcacacatccacacacaacgctgtctctttggttcacacacacatacacacttttatgcataacactctttggttttcttttttttttttttggtttttcgagacagggtttctctgtgtagccctggctgtcctagaactcactttgtagaccaggctggcctcagaaattcgcctgcctctagctcccaaatgctgggatcaaaggcgtgcgccaccagcccggcatctctttggttttcttgccactaaaaaagccatctaagattgaccactaatgacaaaatatgcacaaaagtgcagaagcccaacatgtatcaggcatattaacaactttatgagaactaaggcaaacacaaactccaaactgtctacagaaaaatcataatggtacacacaagactataaaaactaaagctgtaattgattcaacactaacataaagctataagagatatctctctaatgctctaatcttcatatttgatattagatttctaagttactcctgcaacaggctgcttagaaacaaaacactaagttttagctactttataatcattcaaaagatattaaagtctctaacttacgacaggagagatattcctatgtgcctgaaggatggaccagtaacttgagaacaaagcccctgtcatatttagtgccaattaacttagtagtagctgcatcttgcaaaaataaaaaaaaacccaaaacattcacctgcaatgccttagcaagttcagcactgagaatgaagagactcagggtcctcacgcagtatgtcctgcctgccgatggaccagtctccttcaatttagccaaaattgcaaaatttttagttgcttttaacagtcaaaattttacccttcaaagcagactttgagactatttaaaacagaaaaactccaaatctgtgggctgaattagttcactttacatatgactttgatgtaatacatgaaataaaatgtttctttaccctgtattactaacatagaaatcaaatgaaatggcttcgtttctattgcaagtggtataaataaatttgcccctatggactgttttggactgaagaaaaataaaatgaaccggaagtaattatgtagattttaaatcatgaagacatatatactgtcactcattactagagtagagtcatattgatgattttataattgccttgttttaatattgtaaaaggattcctattcccactgaaaacatttaaatcattataatcaactttgaattataaaattattccctgaactgtgaaattgtattttaaaatatgctagttaaaattcactttagaatatgaaacttttctattaacattttaactgtattgatagatggaaagtaagaacaagtctttaggggctgggaacatagctcagcagttaagaacactggctgctctcccagagatcctgagttcaattcccaacacccagatggtggctcacaaccactggacttgatgcaggcatacatgcagacagaacaatcttacatataaaatacaaaaatatttggaaaaaaaagaaatgagtctttggtgcacatttaaataaactactttttaaagaaattgattggaggggtacaatttttataagaaaataattactggctctgtgggagaaagcacctttgtaatttatcatccttatgttcaaagaatatattttaaagccatagaaaaaaaggctaaaatttaaaaaaagaagaaagtcagtattttcaactgataaataaagtgctgaaacatacaaggtttgtttggctgaagtgaggtggcaccctcctgtaacccaaggaggcaaaggcagtgggagtcttgtgaggttcaggccaactagacctacacagtgaggccctaacagagaggggggagacagaaagagagctcaatacacaaaagacaaaaataccagttaaatggaagcaataaaaatgacaataatgagaactcctttaatactccatgctatccaaatacgaagtgagccgaatggagaacagtttctaaactcaatgtttgggtaaaagctgcccaaaatctgaggatcatctatgtacgccctgactcctgtgcagtcatggcctgtagtttagtcttcatcacagaaagtcagttattctagtcaaaagttcagaaactttactgacaaaaccttcttcctcccagacattaacctgacaagaagcttgcactcaaaaactatagaccccaggcccgaagttgggtttgaaaatacaaattcgggctggagacatggctcagtggttaagagcactgactgttgttccagaggtcctgagttcaaatcccagcaaccacatggtggctcacaaccatctctaatgggattcaatgtcctcttctggtgtgtctgaagacagtgacagtgtactcatataaatacaataaataaatctttaaaaaaaaatacaaattcaaatatttaaacttcagacattatttttacaataaccacttggcacatcaaaaactccaactataatacaaaactcatcagattatattaagccatatagaggcattttaaagattttaaatacagcatagctaacatcattttcatgcaagtataatgcaagagaaaaggtttacctgaggaagctccttcaaacgcagatgaaaattaagaattaagttgtaggagagaaaaaaagcacagggcttgaaaaaaatacttaaaagaaatgtttaaaactgcttactaagtcagtgccctcactgagttctgtattatcaattcttacataacgtgttagaaaacctagtttaaaaaaccccaacattttgtgtaatttagtacgtcaggtgaaagcatgacacgtgacacgtgacactcctgtgctgaagcatgcagacacttcagtaaagagttgggctcggagcagccatcttcagctctgaagcaggcccttagtggttttgcacaaatgatagcatactgtgtaagtttcatttttacaaaggcctaaaacttaatcttaggtcttaaaacttataattagatgattccaaaaacaaaggtgtcaaaaccacttactaccactaaattaccttaactttttcctacatctgaggaacagatggcaggcctgggtatctggacacggcacaaccacaacctatgacctttgcagtaataacaaacaaacatctttctaaggaccttctcatattttcaaactcacgcaatcatgaccacaatccggacacaatgcaggagaaagtgcttcacagttttccaatactgttctttcatcaaatgccctacaaaccagaccaccaaagctactgaagactgggtcttcagtccccaggcagcaacaagaaaacagtaacaaaagatttttgccaccactaatttttattagaacccaagatagcaaccttatgcctagatgaaaatttcaagcttaagtttcactttatttgggaaagaatcgtacttaataataagcaggtaatttgtttttctgtcttggttctgtctcttttggtctagactaagcttcaccttacaatgtggccaagagtaactgcacttctggtttccttggggacagctccagggtgctaaggtcacaggccacagagcacacctagtagtaactttgtttataaaataaaaaacgatgtttctatcactttgttttaaattgtttatacaaaaaatattaatataatttattgataaagaattaatggttagctgatatggttaaagattctcttttagatatgaatataaaaattgaacaaatttttatgtattatttgattcctaaaatactcagtattattatgtttgatatatataaaatgcatttaaataataaaaatctatgaaaaaaagattctcttttagtatctgacttaaaaataaaatctgacaaactgttaaatgcagatttttcaccaaaagctagtactagttatcagtgcacattgattaattgatagtacaacaaatacaagccaactatacaaatataaaccacattattcaaactgcaactgtaacatcatggcaagccaataattatggattcaaaggtacagcaacaaagctatgcccactttagtatgaaaattgttcaaattatttctattccatttcaatttcaaatcagcaaaatactccaaaataaatgaaattaatatatcaaaagtatttggagcctggaattctaatataaacctataaccatagcccttgagaagcaggaaaaatgggatgtttataatgagttcgagggcagcatggtctaggaaactggaaagttgtcccaaatatttaatatatattatatgtaacatataacattatatgtgtgtgtgctatctcacataagtaatataaacattaagtattaaatgtgcaatagatggcctagaagtaatttcagatgaaggcatttcaaagctctaatatttcaattgttttttttgttcttgttgattgtgatttgtgtaaaatctcaatcataaaaattgtccctatttgaaactttaagtccactatataaaaaaatagtaagagaaaaaaatggagaaatcttaatttataggtaaatatgtatttttgataatttcaattatgaagcactatataaattattcaaaaaagatacctctttgagttcaccaagaattagaaaacaacttgaagttttgaagaaatgaaaaaacaaatgagcaaacaacaaaatttttctcttagtaatctctttataaaaggaattttctttagtaagcaaatgagctcttaattcagacttaatcactgttaatctattcaatttagcaatggatagtatttagtagcaatggatactatttgcttttcttggtgaatatgaagctatcatgacaagtcatgtcggtttcaaaacatttatcagtatacatacctaaacactgccctcaacttcaagaaccaaaactctaaatcagtacttaagtttcctaagaaattaaaaattaaggccttggacattttattctgttgtaaagtgagcagcaaatgaaattgtaaaattaaacaggaaaaagaaaccaacatagcaactaatctattcctagaacacttataattatgcttgtgatccctaaaaataaaccaagaaattctctgtcctttttactgctttagtttctgtgcatctttggactaatgcaaactcgcatgcccaattcaggagcatcacggtaatttccagtaaccaggctaacaaccaatgtaaggctcagaaaagcaggtgaccagcacccgggaacttcagtcaggccaacccattctcttcatctggaaaaatttcatgatttttcttattctttgtcagaaacctgccccttcttcacatgagcacatttaacttcaccccatctgaagaaacaaaggtttagagtaaaaaaaaaaaaaaaaatctaagactaaagaagcagttaaacaacagtaacattaaagacactagcagcaaagtaactccctaaacaattacaaagaaaactgttcaaacactgagtgggggtgagcgcgaacctggcctttgagacagtctgacctggccctagaactcaaggtgtagtatgaggttgcccaagctgtcctcaaacataaaaataatcctcctgcttcagcttcaaggagcaaaacacctgactgcacatccaccttgcattccctgtcatactcttcagaacagcgacaaagacagcatttcagcagaggttcaaactcccacaaaatgctaaaagacatgagaccttgtcaaataaatctttttcttattagagatatctttagtggacaaagttgttagaagaaacataagccccgctgggcggtggtggcacacgcctttaatcccagcactcaggaggcagaggcaggcggatttctgagttcgaggccagcctggtctacaaagtgaggtccaggacagccaggtctttacagagaaaccatgtctagaaagaaagaaagaaagaaagaaagaaagaaagaaagaaagaaagaaagaaagaaagaaagaaagaaagaaagaaagaaagaaagaaaggaaggaaggaaggaaggaaggaaggaagaaaggaaggaaggaaggaaggaagaaaggaagaaagaaaagagagggggggggggagagagagagaaaggccccacaatagtcagaaaacctatgtgggcccagtttttaccacccagcaacagttgaccttggcaaaggtactatatctacatatcaaacacttcccctaacattaaacagatcccaggttctgcaaatgtctaagagcccagtagcctcaacccactaagtgcaagtaggccttctgtcacctcaggtatgaccatgttcaccaaaatgtttctagacattaccaaaagttcagatcaacaaaaagaaacacctacaagtcacagctttacccctcattagaaagatgggaactagggcaggaatctaattccagggcctggctaatgccaggctatgttctttgcattctagcaggctgcctttctaattcactgggccttgtctacaaaacaaatcaacatatttcttacattagggtatttaggacttatgtctattgatataatgcacctgtaaatactattaactcaatgagtatatagcatgggagctgagggaatggctcagtggataaagtactttactatgcacgcacaaagatctgaggtcagagccctagcaccaatgtcaaaaccatgtatggtggtacgcacccatgtatagtatgtacagctatgtgtggtgtgtacaaccatgtatggtgtgtacacctgtgatcccagcactggagggcacagacagaagacagtcttgccaaattggcaagctccaggttcaatgagagaccctgtctcaataaacaaggcacagagcaacagaggagacaccaatgttgattgctagcctataaactataaacacacacatacacagagaatatagtacattaaggtttgtttgataggagataatgtaatacagagtcctaaggacaactttaataatatctccccaaacttcattctcaacataaaagaaaaattttaattctatttagttgagagaaacataaaacattcaaaaaacaagtctcaggctagagagatggctcagtggttaagagcactgactgctcttccagaggtcctgagttcagttcccagaaaccatacggtggctcacaaccatctgtaatgggattggatgcccccttctggtgtgtctgtagacagctacaatgtactcatatacactaataaaccaaccttttttttttttaaagtctcattaaagagaaaaaatttattggaaaaaatctgcattttgtttcaaagcaaaaatttgcttctagcgttgttaaacaaatattgatttttacaattcacttttagaaatatatctccttaaaagataagctgtttcaaagcagaattcatacccttccatacaccttgagtaactgcatcctactcctagggtcaagaacaaacatacaaatgaggtctgcatcactaggaaggaagaaaaagggagggagggagggagggagggaggaaattattctacttcagcctgaaaacctacatgagtgttaccatgcaatgaaagtcactggtcctctagtgatataacacctatgtgcttatagtacaggtacacagacagaagagaaagatagaaactcgttcagacagtgagataggttcagatataaagatatgcaactcaattttataatctgctacaaaaaaaaaaaacagctaaaatactcagggaaagctcagcaaaaaataaataaaaattacaagagcgcagtcatgaataattacagcagcatccactctgcatttcaaaataaataagaaacagccctggaaattaaggcgctccattcccaggaaaccacaagcacaggaaggaaaaactagtccctgtcacgtgcaggtaggtgagccttaagcttactccgttcttccctcccctagataagaaaaaagcatgtgagcttctaggatggctcagctggctaaaaggcacttcctgctaccctaacaacctgactgccattcccagtgtcaaagagaggaatgagagaatcaactcccgaaagctgttctctaacctccaaacgtatgccctgttccattcctcccatccccaaccccaaataaatgagtaatttttaaaaatgcagtatgggaaggaaaaaaatctctctagctctttcttcccatttcaaagttgtagttatactgaaaatcctggctcactgtgaaactgagggcaaggtttaacagtaactttaaattcctatagtagctcactgcagactgtattgtctgctgtatgtatgtgagctggaagagcagaaaggaaatgctaatgtacctttcctgagagtttatataactgagttacatattcgaagtcctacttcttagtggtgaggaatactctttgtgaaaaagaactgtgatactgaccaagcatggccacaagttccagacaagccagggctacatggtgaggctctgcctcctaaggacaagcataccataactgtatcatagatcatatatgctatgtatcgtatcatataagcacacatattataaatgtcatgctatttatattcatctatattgaatactaagaaaatttaatcttacaacagatagttcttaaagttattatgtgaaaactaaggaagttttcatgttcccttaaaagttgaaaacatccagacagtggtgatacacgcctttaatcccagcactcgggaggcagaggcaggcggatttctgagttcgaggtcagcctggtctacagagtgagtcccaggacagccagagctacacagagaaaccctgtagggggattaactatgtgatttgattgttgcttgttcagacatggtctcgctatggagccttagccggcttggaactcacagtatagaactatagtggacctcaaattcactatgtagtactgaaggctactgcctaggaattagcaatagcctccttcctctgccttgctggtattagataaacttttgtggtgggtatcattatccttcctttatttcaggtaaagtaagactaagagaaattaaatagcatagttacccagctctgtgacagagccaagacagggaccctgtctacctaaaactaagataaataattataacttcagagtatagataagaccagccgtatttcaatgtaatttaaaagactcaattatggtttaaaatggcttccaaagtagtctgttctttaaggagaaaatccattttccagactagtaagtttgttaacttgatactcacatgcatgcctacacatagaaaaattcaaatatttacgttaaagtcactgttcgtattaagcgttggctttctgattataactgtttgactaattacacaaaacagcagatttgcaagcttttccacaccacgcacatacaggtcattagtgggtgcaactgcagtttgcatctctccaaagttaacaccacaaacaagtgttaagtcttagtactccaaagatgtccacaaatgtccgttgcaatagaagagtatacctgactattctaaatgtaattaaaacttcccaggcaaaattagttgtttactctgatagtaaccttcctccaagaaacaggctttttgttccagtataaattattttagaagctgaaactgctatatcgtcccttctgaaaccatagcagagaatacagaatgggaaggtaagacatcaaagccaggatcctaatttcatctctgccaatagcttcaggacctgagaaccatcatcccacaattagacacttttaagcaacagcagcaagacctataaaaaaaaaaatcagcaaatactaacataaagctatttaatctgtattcaacatcactaatagctcagcaactgcatgaacttcaaaactaccacatacaaatcaactacaaaaaaaccctgaatatttacagaaatcacttctgataaaaccacacaaagtgtcatacctaaatcatgatctttggaacaagtcctgtaacttttcaaaagagtggatcacaaaaccaactctccaacgctggttctgaaaatcaacttttttatctacagggagaagaaaggggaacaaaacgcgagccaccagctctgtgcagccaaacttctgttttatgagccagtagtttatcatggaaaaacaaaaaatgcgagcaagtaaactttttaagctgtactaataactaacactgcctcatagaacagaatacttctaaatggaataggcctacagaaatgaaaacctgacctacatactcaggactctaaacttatccctgtcaactctgaatttacataagttatcaatagaaaaacactgcctacatttggagcttactgagacataaagtattgaaaactgaatatttactaaagtgaatgttcaaactttctattttcctacatgaacaattttctaatcaagtcattaaagtgactattttagaagtggcttaaaatgctgtcacttgccgggcggtggtgacgcaagcttttaatcccagcactcgggaggcagaggcaggtggatttctgagttaaggccagcctggtctacagagtgagtaccaggacagccagggctacacagagaaaccctgtctcgggaaaaaaaaaaaaaaaatactgtcactctataaacaaatgaacagaaaaaaaaaaaaaaaaaaaaaaaaaaaaaccaacaactcatgttgtaacatttaaaaataagaactgaattcatttccaggaggtaagctatttcataatacttaggtatatattttatataattatgataaattagacataatgttccacacaaaaaaatgaaaatacactatctgcctttctcctgttactaaaataaagatttttaaaggccatgaatctccactttctaaatctatgtctagaaataaccagattatattcatcatatttaacttgaaacatttaatctttatttaatacgttataaggaatctcagtctacatctctattgctgtgtaaacttctaaaattgacagtaataaaatttcttttccttatattgaattacacataactgaaaattactccttttgatgcactttactcctcttaagttttaggaaaaatgaaatttgcaacttactatactagttgtatttttcaggaaagacacaaatgactatgaaaaaggcaagatgaagtttgtagagtcacttataaagaaaaaccataattacctgcaacaatcacttgcctttaacaaaagagctaatatcaataatcactattctctctgcaaggtactaatattcctgtggtcagtatctgaaaagtaaatataccaaacaaaaaagctgtaccagaaacctgaaccttctctgtgctttaacatcattaactcttgctgtctcacattcagcctactttccagacggtaagaaaaatttcctgggctggagagatggctcagcgggtaagagcacaccgactgctcttccagaggtcctgagttcaattcccagcaaccacatggtggctcacaaccatctgtaatggggtctgatgccctcttcttttgtatctgaagagagctacagcgtgcttgtataaataaaaataaataaatctttaaaaaaaaaaagacttcagagttttatatattaaaaaaaaaataataatttccaaccaacacattcctacagtaattcaattgtgccttcagcaaatgaaaatattcaacttactactttcataatgaaatttaacttggccaacctcattgccaacactgaccagcacaaatcttcaatgaccattttaatccctgccccaaacacagaaaaccctgatgaggaaccaagcaagccctctccctagcttctcagaactaaggggcgcacacctctcagaagagcaaggctcgctgactttttcccctcctgactcgttctcacatcaacatttggctccatcaaaccacagctctagaaattaagagtttgttattagtcatttgatgcagtatttgatgctgctttctacgcataccataactaaagggagagctttggatttcttcagccacataaactgcacgtgcagaagcccatgcagtatgaaatcaaataaggaactgcaatcacgtcactgctcagacaaaaaaaaaaaatttacaaaataatcttgaagtcctttggggaaaggaaggcaaagcagaagtgtactttggactctacaagaagtctgcctaccaggcattctagacttttctttgaatgtttttttttttttaattaaatagatacctgactaattccttctagatcgagattattaacattaattcacaccaacagtaaactgccttgaagcaagtgacaactcagaatgctcaccaattatcttttggtcaagttcatcctgagtaaagcttctcaattaacgcaaactcggaaattaaagattcctttcaaactgtatttttagctcgaaagaaaattagcctgtgtgaagccagctcttcagtgagagtttcatcttcatgtcagaacaaaaaactcaatcaaaattagctatgcattttatatgccactaatgtaatccatcaaacctcttccaaatgaaaatatttcttcaaaaaaaataataaattaattaataaacaaagttctccatagtgatctattagcaggacatgtatagacaagttgctgctgcccttccaccttaagaaaatgtctactaatattaactaaaaaataatttttacaaagaataccttaccaccaattataaaattacataattttaactaaatactgttcaatgctacaagtcacataacaaaattttgggttgtaccaaaaggcccaatcatttaaaggctcagtcacttcagacctgcaacttgtgttttcgcacaccttgcacactggcctccccaaagctctcaatttctgtcaacacttcccactctgcaaaagaggagggctctctttcctacccctgatcataaccagcaccatacctgaaactgcaaagataaatgctttaaaccacgaacttttgaagtacaaaggcctaacttttagacaatcagaactatacaacgttaaaattcttgggtttctgtcttattcaacaagctgactcagtaaattactgcatgcagagagctagcatacctacaatctggagccagtgatccattcctgccagtttgtctggatattagcgggctaaattatacttgacgttctgcacaaatcaggctaaaacccactgataagccaacgagtcagagcacctgaaacaaaaaatatgagcagcgaattcacgctactacttaaatttcatgtgagaactgagtttaacctctgcagtcatttgccacacacagcaagcatccctggactcacagacatcatcatctgggatcaaaaactattcgatctccattctatcaagtgtggcgaggtcaaatgaatggaacataccactgaaatgcaaatttcatatcctatcccacatctcatcaggaaagaaagtctaatttaacaaagttctattaaaagctccaatgatatatattctggcactattgattttaaactacaaaacttccaaatgcaggctccaaatttgtaattacgtcggtttaaacacacaaaactacttctaccctcaaatgtgcaccgtccatgctgacgatgactatgcttataaagttatgcaaatcagtccacaagtcacatttcagaaaaatcttccaatgcaacccaggaaactaaaaacaatcactgcaagattctgaggcaacatgcctacgtgcagcacggactttcattttaatctcatctacaccctagatctagggcccaagtcacgatctaatcgaaatatgcacaacccaaagcgtctatttttttttttttttttagttcatttagaaggctggattgacgagctcgctaatccagtgtacagtactctgtattaccggacaatagattttaagaagagaccacagagctcgacaagaaaacaatccgtgccttgacacttgcaaggaggcatgagttccgtctagccgaacactccctaggttgaatacactggaagagacacaatatgcacgatctagaaatgcgcccagaattaaacgttatagtcaccccaactacagaaatttttcgcatccgtctactcccacgttatcagagtgacagaaaagcaaagaggaacagccgcagaaatggatacaggtcaagtctaagtcgaatccatcctcttgatatctccttttgtttctgctaacgatctctttgatgatggctgtcatgtctgggagcctgtggctgaagaaaaaggaggagagagatggcagaagctgctggtggcgaggcttcttctgcaggatggaaatggctctggacttggcggtcgctgatgcccctcgctctgctgccgcttggccctggaccgcagccgggtaatggctgctgcggcggctgctggatggttgcagagactgggcctgcttctcctcagcagccagaggcctggcagccgaggcagcggaatggggagaagacggataatcctcgcagcggctgcctcctccggcggcctccggagcccgggccagggggggtgcggcggcggcggacgggaggcttaacaccggcccgggtccctggacgtgccgccgccgccgccgccgtgttggaggcaggagaaggggagagagcaactctccggcgttcccagccctggcaatggtgacaggcgactccgaccccctccccggagccgcggccgccgccgccgcttctcccccccgctccaggagcgggaggtgcagccgccgagcctgcgccggctcccgctcgagcccacggcttcttccaccgtctctctccgaagctgctcagaagctgcccggttagaacagacgacgaggaggcgaggcccgccgccgctgccgccgccgccgcccggccggctccccgagggcgctgcccccgcggctgctcacaggcgctgagaggggctctgggccgtggccgccgccgtctctcatctccctcgcctgcgccgggcctggcctcacagcggctcaactctcaaacttccatcatggctgcagcttccgagaggagagagctgagcgcagccgcgtcccgacgcccaagcgcgtatcctgccgcagtgcacaaagagtcccgccacatcaccgtgcgccggccagcccgccccctccgccgccccgccgggagagcagggcgcctcggaaagccggaggggaggcgggaggcgggcgggaggcgggcgctgagccggggacggggcggggcggggcggggcgtcggaagggacaggggcggggaacgccgcggagcatgcccagtgtgtccgcggctcgctcccggagctacgccggctttggcctcagcgcagagagacccggcaaaggtacaacaggctggggccgagtgagggtgcgctgagcacaatcgctgaccgctcacaggtggatcgcactagctgaccgccttggtcggtgctccgggagcctcaggggcaggattatccttcctgcgtctgtccctgcgtttcttcggaacggctttcattccctgccctgcgctgtggtcagattgcagtgcttcgctaggatttgtcggcgacagtctttacctagataacacacctctccccctcacggtgtcctcaaggtgtcagtctttgcacaaagaacaacccctattgtgtctcccgcgtgggtcacctcatcgggctccggttccctgccccgcctcttgcttcccaggcagctgggttcatttgcccgaaagatgaacgctcccagccaagcatgatgattgtgcatacggggcgtgtacattcacatctcccctgagtttccagggcccaaaggacacccctggttggacaaagtgggtctccgtgaatagagtgcacctcacacacacccctccaccgcccggtgatgagacccgcagctccccgcagcggtgggtctaccggatcacagccaagctcagtcttcaaagagctaagcccccacccccaatccccacttcgtggccgctatgaaaacccggcagaattggatcgcgatggccaggttctgaccctgtcggaccttgcatgttcgaggacccggttactgagcccgggtgtggagtatgggacgttcggaagctgcagccagcgagtgggcggggcgagcaggcctgggagggctcaaaggcgaggtggaaggatacatgagccgcggtcggaactactttcaggaggaggtcacgtgtggtcctagttggggaactttccaaattcccattcccctatctgtgtgctcctggggcaggagcttggtcccctctgctctattaggtgatcgcccccgcctccttctcccgtgtggtctgctggacccctctcttgccggatcggagcagagaatagcatccacgagccgtccgcaggagcgctgtcggggccgagcgcctggggagctggttacacaagcagccacatccaagcacgtgcccccgccacccctctctgctggccgccgccggtttgtgcacgctgacgcggagagtccccaagctgttcctccctttcgcttgtaacccatagagctagccagaaggccgggacacgagactcctgttctggatctgcccacaccgcgcgttcccaaccgtgggagaagaggccgggccctagggggaggcgcggggcgggggtgggggggattgacgcatctccttcgcttaatgaggtgaaccctttctagatctgtactcgcggggcaaaagggtatctcctgttgctgctggctggttaggcttaccgatgttgcaacaaacttccagtcactgcccctgaactggtgagcgcgccccacctaccgtagactcagccaagtgacttatctgagcacctagtcaatggctgtcagcccagaacaaacctgtcaagtaaaagcttactgccgggattggctgacctgtcgcggttgagagagctggttcagaaatgctgataactagcgtacagcccctcctcccccaccaaccagccacaaagcaagcgatcaccttgagcttggagggaaaaaaaaaatgacatcaactccaatgtaggtagagttttcttccttattgttcttttcccaggggacttaattctcaggatgccaatctgagccctaaagtatctctgagttgagacctaagctgaaacactggatcattttagaaatccggaggatagtagtcagttatggatttgcaataattgcgagtaggtgtctaggaaaggctagctgggggtttagagtacaggagaaggaaaatttcataggtccacacagcatagttgcaggcagcctctgaagtctagaaacctcaagaggctcggctcagagagctatgggccattaccgaactgcaggactgctaattaaaccggggatatttacagttctattagagctctctgaagctactcaaacattgcatttagatacatcctttaaagatctctccgccagagatagcagcccaagctaagccagcgttgatgtttattacaggctgttttggggcaaggttctggtcagtagagggagggcagggatgaccaatgagagcaatctgagaacaatagccgagaggcctctatttggtttctaacgatgtaaataaattcggttcacacagcctaatctaagatggagatctagtttacacagaatccccaatgtcaaagtgttagctgagatgcacagcaaaaacctaagtggtgctcagcagagtgtctactactgctgtggggaaaaataaggatgaagttacatcaagagaagtgggttgaaaaggggaaatggcccacattcgttcctgtccccagagtccctgttactagcatcaccctcttttgcctcttccctggaggcatcttgcgtgacattactcggagcgtctaagaagctcggaaatcttcctctaaagaaaaagaaagacattcatccctaagcttcctgatgcctggctggaggaaaaaaaaggacccgtttctgtttccagagcatcactccatagagcacaaggaggcgcatcccagcgctgaccccagcccacaagcaccaccaagtgaggcaagaaagccgaaagccagctagctgcttcgctcggctgctctgcagggctgaaggaacagacacgcggtgttggcaggtgtgtgggcccctctgacatcagctggccacgctgacagcatcaggccttgttgggagtttctaaatacacccctacttcctttcgcagcaaatatgtttctgtgcagccttttaaaattttttggagtttttcacatctttattccactcaaaggatgtgagtagggcaaaagggaaaaagtccatatagcaattttatatatatatatatatatatatatatatatatatatatatatatatgaaaatgtatatatttatatgcttggctgtacagatattacaatacactggtttccaagtgcttcatttcctcacctgtctggatttaaaacactcaagggagaaacagaagcttataacgaagggagaattatgtaaagctctagggagactgactatatagaataattagggagtatgataaaccagctttaatgatagtttccaacagctgattccagaactctattgttactacatgctaaagatgtccaaagaaaattctttcccttgataagtgggacaccaagaaggggatgtaggtaatataaatagttgatgtgttgttgtaggctctgtgcaaaagcatctcgtgtgtgagcacgctgctgctgtagtgcctttctccttccccacatctctgacccctcaacaagagagctcagtctagcgctttaatttttaagcaagcttctctatttttatcaaaaaaaagcattttctagatatataatggattagctagcacatttggctttgaatttaaactgccctgttcttctacagctctgaaagctttcttcttatttattctgtgatttctccttctactttttatttttaatttacatctatctgttgtttatgcaagcgcatgagggcgcatgtgcacaggtcctggcacatttgtgcacagcagggggcaacttgcaagagtctgtcctctgctttcaccccgtagcttctggggatccaatacaggttgtcaggtttgatggcacacacctttacccatggagccatcttaccaccccactattgctctttcaaacaccacttgctcatgctttctccagaaggcacctctgtgagtcctgcaattcctgtattccaagagaaaatttcaaatgcctgtctaggggctggtgagatggctcagcagttaagagcactgattgctctaccgaaggtcctgagttcaaatcccagcaaccacatggtggctcacaaccatctgtaactagatctaacgccctcttctggagctgtctgaagatagctacagtgtacttacatataataaatataaataaatcttttttaaaaaaaaaaaagcctgtctataagcttctcatagcctaaacctctcccaaagcttttgcaaatgtcactctgtcacctttcctgtctcaagagctattctgtatgaaatcatcagcctcagacaagtcgagagtgaacggggtgtcctggagcggaccagacctctgctgtctgtggtacgcagaaattgtcacccggggaaacacacgaagcaattttagttctgttcactttgactgctggatcttctacttcagtcttaactccagttctagcccaaaagaacatagtttgctgttttaatacttctaataaaagaaaaataatgtgtgtctaggtttaggagtgtcattgatatgaaatcaagacggacagtacttctagattatcaactactttggaggaaggagtacctttttggaaaagaaaacagaccaaatctgcttaaattaacctcctgctgatggggtccttattgccattcttataatgattcattcattcattcaacaaacgcttgtgactgttaggcgctccttccattaagccttatgcatagagcaatgactggccaactgggtccacattcataatgatgagtcagctttggaaacttgaatccttgggctgtcgcaacctcttcacagcacaccaagacaagttagccgtgctggtgctttgataactaactcaattacctattgcttcacaacaaatcacagtaaaacccagtgacttgaagcgaccatcattgttttcccacagttctcagggaagggtatggcggagcaattcttttccccacttaacttgtcccaggctgaccttgaacccagagatctccttgcctcagtctcctggagttaaaggcatttgctacctggcctggaactaagcttttttttttttttttagatttatttattttaggtatatgagtacaccattgctctcttcagaccagaagagggcatcagattccattacagagggttgtgagccaccatgtggttgctgggaattgaactcaggacctctggaagaactgggtctaagcttttaatgaccactatacctcaagatctccatgtcaagatatgggtcagaaacttgtgtctcccagcctcaagatctggatcataggtgtgctctccaattttcttattttatttatttatttatatttttttttttggtttttggtttggtttggtttggtttggtttggtttggtttggtttggtttggtttttcgggacagggtttctctgtgtagccctggctgtcctggaactcactctgtagaccaggctggcctcgaacccaaaatccacctgcctctgcctcccgagtgctgggattaaaggcgtgggccaccactgcctggcatgccctccaattcttgattgtagttcattccagatatagttgagttgaaaaccaggaatagctaccgcaaaataaataatatatatgtgtgtgtatatatgtgtgtgtgtatatgtacacatatatacgtatatatacgtataactacacacatatatgtatatacatatatgtatacatatatgcatatatatcctaatagaattatgtttattataaaaagaatattaattaaccagggaggaagattgactctaatttcatttttttaaagatttatttattattatatctaagtaccttgtagctgtcttcagacacacaccagaagagggtgtcagatctctttacgaatggttgtgagccaccatgtatatgacgagtacacggtagctatactgatggttgtgaaccatcatgtggttgctgggatttaaactcaggacctttggaagagcagtcagtgctcttaactgctgagctatctctccagcccctctaatttcattttaaataaatgagatcactaagaaatctctagcacttgagaaaggtctgtgcagtaactaccataaatgatatttgggaaagatgctgtgtgctacagggatgctgtgtgctacagggatgtgtgctacagggatgcttgtgtgctacagggatgctgtgtgctacagggatgctgtgtgctacagggatgctgtgtgctacagggatgtgcgctacagggatgcttgtgtgctacagggatgctgtgtgctacagggatgctgtgtgctacagggatgtgtgctacagggatgctgtatgctacagggatgctgtacaagctctgtcttactccaaatatcatctcttctctatcaactgcttcaactaggtttttcactctttgtattacttaacaatgttctgttcaaaaatttttctttccctctagaaataattgtatttttacagcaccacagactctttccatcctacatggtgacagacagctctgtgatataaagatggaagatgaaaaagaaattgcaaggatcccctcatccatcaactgcattgtacaagcaaagaaactaggaccagtggtataacgtgcccctattacacaagagtcaatgacagatccttacgagtgagtgtgggacgtttccaaataccaatttttgtttggttggggtttttttggttgttgttttgtttttgtttttgtttttgtttttgtttttcgagacagggtttctctgtatagccctggctgtcctggaactcactctgtagaccaggctggcctcgaactcagaaatccacctgcctctgcctccagagtgctgggattaaaggagtgcgccaccaccagccagctccaaataccaatttaattaaaaggggggggggggggcgcaaaaccccagcttttaaataaacctgagcaggttaacatggggaaatttaattagcgatggcttttcatggcattccagtcctagaggacacagaacatggggtgagatgtgacgtgtgttatctaacaagttaagcctgaagttacttttaaggatgaggcccttaagaatcaaacatgcgccgggcagtggtggcgcacgcctttaatcccagcactcgggaggcagaggcaggcggatttctgagttcgaggccagcctggtctacaaagtgagttccaggacagccagggctatacagagaaaccctgtctcaaaaaacaaaaaaaaaacaaaaaaaacaaaaaaaaacaaaacaaaaaaaaaaaaaagaatcaaacatgctagagcagggcagtggtggcgcacgcctttaaccccagcactcgggaggcagaggcaggcaggcggatttcagagttcgagaccagcctggtctacagagtgagtttcaggacagccagagatatacagagaaacccccgtctcgaaaaaccaaaaaaaaaaaaaaaagaaaaagaaaaagaaaaaagaaaaaggagtcaaacctgcaaatgtgaattgcccacagtccctacgatccttgggaaaagtattttttccaatgtatgaagacggctcatgcattcagtgggggctgaagagaagaaaaggaagggacttgcaaaggaagtcttaggaagaaaacgccaaacttcaccaaagaacaaagggaacgctgccacctgctgaggagtcagtaagctgctgccagcgatgctccaaagaactcaacagtctcaggcagcccagtttgagctcagcttacagcaggcctgccttgctggggtaggatggtagcggcctgtttcccctacccccctttttcatgaatatttatgtctgttatctttttagtcccaccccccaaacccaaatctcacaatacaatactaaggcttttatttaagtattacatgcatgtgggtaaaagtttccagtggctcgccattcctcttccccagaaacagatcttttgggttttttgtatttttttttttccattttgattctttacaattcttctcttctattgtgtacaaacatcagtacatagtggcacctttaatctccctctcagtggggcagaggcaagtgcatctttgagtcccaggccagctaggtctacctgagtgagttctagaacagagccaggcctgcataatgaggctttgtctcaaaaacaagcaacaaaaatgagtacacacatgaagaaaatttgcaagagaaggctagaagaaattgctgttagacctttcattggtctactttttcttctatacctccactttcctatgtgatgtcctgccccccacccgaccccctttctttctcacctactcatgcctacatttttctctttatcatatgctgttgtttggtgccctttgattttcctgtcatcaagagaatattgtttgtttgtttgtttgttttttgtgtttgtttttgtttttgttttttgagacaggatttctctgtgtagccctggctgccctggaacttactatgtagactcagagatacacctgcctctgcctcccaaatgctggtatctttaattttacttaacttgaccttggaacctagtcatagaccactattgtgttccatggttacactaaataacacctgaaaagagctgtagcccttttccagttcgggtggttctttttgtcttgtcgtttgtttgtttgtttgtttgtttgtttgttcatttgttttttgagacagggtttctctgtgtagtcctggctgtcctggaactcactttgtagaccaggctggcctcgaactcagaaatctgcctgcctctgctcccgagtgctgggattaaaggcgtgcgccaccacgcccggctgtcctgtcttttattaaaacaatgtgtcagaatccataaagtaagtttgtacctttacagaagtcccatagtaactgaggttttttgtgactgctaacaatctcagaaagaacactatagaaaggcctaatgttgtcaaattcaacttggaaattctgccttttctaaatacagtaaaaagacagttctctgttgagggtcttcgccacctaattgtattaacagaattaacaacttttttttgtattaacattaatggagggctggagagatggctcagttgttaagagtgctcttccagaagtcctgagttcaattcccagcaaccacatagtggctcacaaccatttgtaatgagatctgatgtgctcttctggtgtgtctgaagacagctacagtgtacttacatattaataaataaataaatcttaaaaaaaaaaacattacaggacagccagggctatacagagagaccctgtctccaaaacaaaaacaaaaacaaacaaacaaacaaaaattaatgtattcttgaggtcttgttgattgtaagatacaagattgtctgcatttcaagtcctgtgcattttacaatattgagtattaactggtcaacttagctattaactgagcatcttttcctataatttaatttgacagattaaaatttctaaatctattcattttccttctgagacagggtcttgctgtgttgcccaggctgaccttggtttcatggtcctctttcatttgtactgggattacaggtatgggtcagcacattccagctaaactttctgtctcgatcaaactctcttgtcttataaaaggcattatatgggaggcagaggcaggcagatttctgaattcaagtacagagtgagttccaggacagccagggctacacagagaaaccctgtctcaaaaaacaaaaaacaaaacaaaaacaaaaggcattatactaattttgaaaaaattgatatacatttattttatgttactttagaaatgtactgttcttttcaactatatccacaaatttgcaaaccaaaaaaaaaaaaaaaaacattttttgctacaatatcgatctcctttgacagcatccttggcttgatataaattaagccaagaaatcttgaccctagttctccaagactgcagaatactccagacatctgtttgctttgcagattacaaagaacagagaagaaccttaaagcatttgagctttggagcacagcataagtgaactatcgggccatctttcctccttaatatagaagacacatttaaaggaacaaatagctgggcagtggtggcacatgcctttaatcccagcacttgggaggcaaaggcagacagatttctcagttcgaggccaacctggtctatagagtgagttccaggacaaccagggctacacagagaaaccctgtctcaaaacaaaacaaaacaaaacaaaaagagtgcatgacttgacttagggtccctgaaggcactcagggtagctcaagctgcctacaactccagctccaacaaaaacagagcctcttgggcccccacaggcacataattaaaaatgattttaaaaatgtttttaaaaattaaaaaataaaatatgcattagtacacatagcagaacatagctctgtgtggtgactcatacctgtaatcctagctcttgggaaatgaaggcagaaaaatcagaagttcaaagtcatctgtggctatgtagtgagttctaggctggcctgggatacatgaaattctatcaaaaaaagaaagagagacagagagagagagaggaagaagaggaaaggggagaagaaggaggaggaggaagagagaaggaggaggaggaggagagaagaaggaggaggaggagagaagaaggaggaggaggaggaggaagagagaagaaagaggaggagaagagaagaaggaggagaagagaagaagaagaggaagaggaagaggaagaagaggaagaagaggaagaagaagaagaagaagttgttgttgttgttgagtggttaagaatatatgctactcttcctgggtctttagcacctacatgataactcacaactatcttcaactctgattctagggatccaacaccttattctggctaccttgggcattgggcatacatatggtatatagacatgcatgcaggcaaaatatctatacacataaaaataaaatatatatgtgtgtgtatgtatgtgtgtgtgtgtgtgatatatataaaatagcaaaacgtgatgttctcctgtgatagaagattataaaccaggataaaaaagagtcagttatatccatttgtcaccatggaaatatctcaagttttagtaacttatggttaaatctggctcgcagaatcacagaataaaaacgagcttattcttctcacttttcccatccttctcacaactagggaaagtgcaggaagactatgggctctgtggtgtcacctaaaccttggtcctgaagcaagcagcgctgagcggatgtcgtctaacaccatcataccgtagtcacggtcttctgacacagtttagatattatacctgctgggaggtgggggaggggaacagagccaaggcataggctaggaagcagaggactttctcatcatctgtttggaatcttgactgtgtggaaagaaggaaataggttcttcttttcttaggtagtgtcctgatttgctttctttttttttttttcttttttcttttttttttttttttggtttttcgagacagggtttctctgtatagccctggctgtcctggaactcactttgtagaccaggctggcctcgaactcagaaatctgcctgcctctgcctcccaagtgctgggattaaagg

SEQ ID NO: 5 - DNA, 42 bp, Homo sapiens
gacagccatcatcaaagagatcgttagcagaaacaaaaggag

SEQ ID NO: 6 - DNA, 45 bp, Homo sapiens
tttagaagcagaatcattttcagtatatatggtgcacattgaggg

SEQ ID NO: 7 - DNA, 44 bp, Homo sapiens
aactgtatgtagaagttttgtagtttgaagtcaatagtgccata

SEQ ID NO: 8 - DNA, 48 bp, Homo sapiens
ttttttcatacagtgtattaaatttactgagtcagcttgctgaataag

SEQ ID NO: 9 - DNA, 58 bp, Homo sapiens
gtttcaggtacaacacattggttttgattagggatggggatggggccctctttttgca

SEQ ID NO: 10 - DNA, 46 bp, Homo sapiens
taataaaagttatttcttagcaaatgtcagttgcattttgtctaaa

SEQ ID NO: 11 - DNA, 25 bp, Homo sapiens
tatttttttttaagacagcgtttat

SEQ ID NO: 12 - DNA, 46 bp, Homo sapiens
aaatgtgcacagttaattttgcccaagtttttgttttgaaatgaat

SEQ ID NO: 13 - DNA, 40 bp, Homo sapiens
agcagtctactattagcatgaattactgacagtcatccaa

SEQ ID NO: 14 - DNA, 44 bp, Homo sapiens
taatttctagagttgtggttttattgagccaaaagttgatatga

SEQ ID NO: 15 - DNA, 51 bp, Homo sapiens
ggtttgcttgttttcacgttaatgttttctgtttattggagtgggaaggca

SEQ ID NO: 16 - DNA, 36 bp, Homo sapiens
agtatttttatctgataaagaaagattaataatgaa

SEQ ID NO: 17 - DNA, 44 bp, Homo sapiens
tttcaaataaatgttcacagggaatacttttaacttgtagagag

SEQ ID NO: 18 - DNA, 49 bp, Homo sapiens
ccgttgggttaaacaaacagttcagaagttttattacatggaacccatt

SEQ ID NO: 19 - DNA, 38 bp, Homo sapiens
tgttttgtaaactagctgtatttttggtccatgtctag

SEQ ID NO: 20 - DNA, 63 bp, Homo sapiens
aaagtaatcctttttcctttaattatgtagttgttgaactgttgggagttacttttctcttac

SEQ ID NO: 21 - DNA, 47 bp, Homo sapiens
tattacattaaagccaaatataaaatgatgcaatctagcacacactt

SEQ ID NO: 22 - DNA, 45 bp, Homo sapiens
ctgaaggaaaagatttatacattcagcttgtaattagtaatcaag

SEQ ID NO: 23 - DNA, 29 bp, Homo sapiens
taacagaattgtattcctaaaccgattaa

SEQ ID NO: 24 - DNA, 47 bp, Homo sapiens
aatatggcagcgaattcattatcatcagattgtggtgtctgtatgtt

SEQ ID NO: 25 - DNA, 47 bp, Homo sapiens
aagccattaaactgagtcacttcagggttagactatcagaactgggg

SEQ ID NO: 26 - DNA, 53 bp, Homo sapiens
ttttacttattctttcattactctcatactgtaattaaaacttgcaatctgag

SEQ ID NO: 27 - DNA, 43 bp, Homo sapiens
atttaacagattttcctggaggtttttgtgtaccactgggaaa

SEQ ID NO: 28 - DNA, 46 bp, Homo sapiens
tatttattacatcggggcaaatttttaaaggcacaagaggccctag

SEQ ID NO: 29 - DNA, 49 bp, Homo sapiens
tttgtacatttttccatctctaagaaggacaaagcctaagcccctccag

SEQ ID NO: 30 - DNA, 53 bp, Homo sapiens
ttttacaaaagaaagaagagtaaatggaatctgtagattctattgcctgatga

SEQ ID NO: 31 - DNA, 46 bp, Homo sapiens
gaccatgacatggagagcttctgtctttaccagtgccccaatatca

SEQ ID NO: 32 - DNA, 45 bp, Homo sapiens
agcatttgtgtttaggttgaaacagcattagaaaactagatacgg

SEQ ID NO: 33 - DNA, 41 bp, Homo sapiens
tggatttgcatttttgtaattgtgaatcaccattataggag

SEQ ID NO: 34 - DNA, 43 bp, Homo sapiens
gacaactgatagttattataaagaaaaatgttctgagagtgag

SEQ ID NO: 35 - DNA, 38 bp, Homo sapiens
tttcaatattagataactcacatgtttaaactatgaag

SEQ ID NO: 36 - DNA, 45 bp, Homo sapiens
tcttaaatcaggttattttttctagcctgtttactaaatttctac

SEQ ID NO: 37 - DNA, 47 bp, Homo sapiens
atgaggactttttcagttttaaataagaaaaacccaactcaaagtag

SEQ ID NO: 38 - DNA, 43 bp, Homo sapiens
cacacagggataataatagttttccaaagaaaaatcaaggagg

SEQ ID NO: 39 - DNA, 52 bp, Homo sapiens
gtaataataatcatatttcttcctttgttgaattgctttcctgtagtaatct

SEQ ID NO: 40 - DNA, 100 bp, Homo sapiens
atattaaagtagtattctgttctggtagtagtatggcagtattttaggtctgaaagatgtacataatctgtactttgaagtctgttttttaagagattaa

SEQ ID NO: 41 - DNA, 54 bp, Homo sapiens
attagagatacatcaggcaaatttcaatttcaaaagcagatgacagaatctcag

SEQ ID NO: 42 - DNA, 47 bp, Homo sapiens
tgaacgaatgtgctaaacatcaaaatgtattaagtaaaagctgaaag

SEQ ID NO: 43 - DNA, 46 bp, Homo sapiens
accatatctagaagtttacataaaaatttagaaagaaatttaccac

SEQ ID NO: 44 - DNA, 51 bp, Homo sapiens
agaggagttcagcaatttgctgctcttagggcagggatcaattccttaata

SEQ ID NO: 45 - DNA, 99 bp, Homo sapiens
gactaggtattgacagtaatggtgacaaagcaatgaaaaggaaaggaagaagtgataagacgtggcagcaagctgaagtatgatgagtaaagaatagga

SEQ ID NO: 46 - DNA, 27 bp, Homo sapiens
accatgttttaaggacagttgtatgca

SEQ ID NO: 47 - DNA, 47 bp, Homo sapiens
atatctgtcttaaaagttacttttgatgtagttcacaaatgtaccag

SEQ ID NO: 48 - DNA, 48 bp, Homo sapiens
tagaaaatggaagtctatgtgatcaagaaatcgatagcatttgcagta

SEQ ID NO: 49 - DNA, 50 bp, Homo sapiens
attccctgtgttcatgctttcaaaatacagatgagtgaggaaagtaggga

SEQ ID NO: 50 - DNA, 46 bp, Homo sapiens
ccagttttataaaaagtggagacagactgatgtgtatacgtaggaa

SEQ ID NO: 51 - DNA, 41 bp, Homo sapiens
atactggttcacatcctacccctttgcacttgtggcaacag

SEQ ID NO: 52 - DNA, 46 bp, Homo sapiens
agcatgctacagttattaatctggacattcgaggaattggccgctg

SEQ ID NO: 53 - DNA, 35 bp, Homo sapiens
tgagattctacagtaagcgttttttttctttgaag

SEQ ID NO: 54 - DNA, 69 bp, Homo sapiens
tgctattgaaagaatagggtttttttttttttttttttttttttttttaaatgtgcagtgttgaatcat

SEQ ID NO: 55 - DNA, 42 bp, Homo sapiens
agggttttgattttgaatgtttcaatgtttttgagaagcctt

SEQ ID NO: 56 - DNA, 42 bp, Homo sapiens
ggttttgattttgaatgtttcaatgtttttgagaagccttgc

SEQ ID NO: 57 - DNA, 46 bp, Homo sapiens
agtgcctcgtttacctttaaatactgttaatgtgtcatgcatgcag

SEQ ID NO: 58 - DNA, 44 bp, Homo sapiens
gtgcctcgtttacctttaaatactgttaatgtgtcatgcatgca

SEQ ID NO: 59 - DNA, 44 bp, Homo sapiens
gcctcgtttacctttaaatactgttaatgtgtcatgcatgcaga

SEQ ID NO: 60 - DNA, 48 bp, Homo sapiens
ccatcacaacaacaataaaataatcactcataatcctatcacctggag

SEQ ID NO: 61 - DNA, 115 bp, Homo sapiens
aaaacggacagtgatttgattactttctaatgccacagatgcagattacatgtagttattgagaatcctttcgaattcagtggcttaatcatgaatgtctaaatattgttgacat

SEQ ID NO: 62 - DNA, 4042 bp, Homo sapiens
gccccgggcgatccatcctgccgggttttcacggcggccaagggggggcggggctaggtggtctctgagaaccgagcttgactccgacgccgcgaaccgacctggagcccgaggggaaagatgctcgactctcttgggggcaccggagcgggcgcaggagaggcctgcggggtgcgtcccactcacagggatcctctttcagttcatttagataggtgccctttgggcccttgaaattcaacggctatgtgttcacgttcagcacgctcggctgagagctttcatttttagggcaaacgagccgagttaccggggaagcgagaggtggggcgctgcaagggagccggatgaggtgatacacgctggcgacacaatagcaggttgctctttgtgctaagactgacaccatgaggacacagatttgggggaagggggaatctctaggcaaaggctgttacagtcaaatctctgcgaacgattgtgatccgacagcggtgcaaaaggaaagagcgaatgcagtccacgccgcggaaatctaggggtagaggcaaggggggagggtattccccttgcagggaccgtccctgcatttccctctacactgagcagcgtggtcacctggtccttttcacctgtgcacaggtaacctcagactcgagtcagtgacactgctcaacgcacccatctcagctttcatcatcagtcctccacccccgccccacaacagcctaccctgcctccggctgggtttctgggcagaggccgaggcttagctcgttatcctcgcctcgcgttgctgcaaaagccgcagcaagtgcagctgcaggctggcggctgggaaccggcccgagcaagccccaggcagctacactgggcatgctcagtagagcctgcggcttggggactctgcgctcgcacccagagctaccgctctgccccctcctaccgccccctgccctgccctgccctcccctcgcccggcgcggtcccgtccgcctctcgctcgcctcccgcctcccctcggtcttccgaggcgcccgggctcccggcgcggcggcggagggggcgggcaggccggcgggcggtgatgtggcgggactctttatgcgctgcggcaggatacgcgctcggcgctgggacgcgactgcgctcagttctctcctctcggaagctgcagccatgatggaagtttgagagttgagccgctgtgaggcgaggccgggctcaggcgagggagatgagagacggcggcggccgcggcccggagcccctctcagcgcctgtgagcagccgcgggggcagcgccctcggggagccggccggcctgcggcggcggcagcggcggcgtttctcgcctcctcttcgtcttttctaaccgtgcagcctcttcctcggcttctcctgaaagggaaggtggaagccgtgggctcgggcgggagccggctgaggcgcggcggcggcggcggcacctcccgctcctggagcgggggggagaagcggcggcggcggcggccgcggcggctgcagctccagggagggggtctgagtcgcctgtcaccatttccagggctgggaacgccggagagttggtctctccccttctactgcctccaacacggcggcggcggcggctggcacatccagggacccgggccggttttaaacctcccgtgcgccgccgccgcaccccccgtggcccgggctccggaggccgccggcggaggcagccgttcggaggattattcgtcttctccccattccgctgccgccgctgccaggcctctggctgctgaggagaagcaggcccagtcgctgcaaccatccagcagccgccgcagcagccattacccggctgcggtccagagccaagcggcggcagagcgaggggcatcagctaccgccaagtccagagccatttccatcctgcagaagaagccccgccaccagcagcttctgccatctctctcctcctttttcttcagccacaggctcccagacatgacagccatcatcaaagagatcgttagcagaaacaaaaggagatatcaagaggatggattcgacttagacttgacctgtatccatttctgcggctgctcctctttacctttctgtcactctcttagaacgtgggagtagacggatgcgaaaatgtccgtagtttgggtgactataacatttaaccctggtcaggttgctaggtcatatattttgtgtttcctttctgtgtattcaacctagggtgtgtttggctagacggaactcttgcctggttgcaagtgtcaagccaccgattgctttcttaggctatctatatggtctcttcctgagggctattgtccgttaatacagaatacagtacactgttagtggattagcgagctcggtaatccggtctcctaaatgaacaaaaaagtagacgctttttgaggttgagcatatttcgattaaatcttggcttaggccctagatcaagggtttagatcagaataaaatgaaaattagtgttgcacgtacgcatattgcatcagaatcttgcagtgattgttttagtttcctgagttgcattgatagattcttttaaaatatgactgatttgcataactttagaagcagaatcattttcagtatatatggtgcacattgagggcaaaaagtagttttgttaatgtttaaacttaagttacctacaactttgaactgtatgtagaagttttgtagtttgaagtcaatagtgccataatataccttataaggcgttcttactagatctttgttatatttacctttttctctccctatggggtgatgtaggatagtgcttgaaatttgcacttcagtagcatttaatgttcagtgctcttgtcataaacatagaatggatattgagtagtttctgatcccagatggtaatgtgtaggttcaagggtattgtgtgtagcaagtgaagattgcagaaataaaacttcagttcatgcttgaaatttaagtattgttgtgatgccagaattgctgctcaccgtttttaggtttcaggtcctctgacaccttttggtatcgttaattttactgatttgtgtagaatgtcagttgtattttaccagctaatatctagaaatgctggcaagaggggtttactccagctttagattgtaggtatgttagcttttttcatacagtgtattaaatttactgagtcagcttgctgaataagacagaagcccaagaattttaacagtgtgtagctttagttgtctaaaagttaggccttcgggcttcaaaagttagtggtcatcgaaaagcattaatctttgcagtttcaggtacaacacattggttttgattagggatggggatggggccctctttttgcagaatggggaaagtattgacaggaattgagagctattggtaggccagtgtataaggtatgtgaaaacagaattaagttattggtctgaagtgactgaagcatttaggctctatcaaggcctaaaatttggtaatatgagtttggtaatgcgaattgtggcagtggacaatatttagttaaaattatgtaattgcataagtactagcacagtatttttaataaaagttatttcttagcaaatgtcagttgcattttgtctaaaggtagagtgacactacagtgtctatatgtcctgctaaaaattgtggggaatatttttttttaagacagcgtttatatcgggagaggttttattccgttggattatgttagctgcatataaatgtgcacagttaattttgcccaagtttttgttttgaaatgaatgtaaaacttactgaagaagtagcttcccaaaatttagttttctgttaagccaaaaatattattttaaaagagtatttgcaaattttgaagttgacattaattgagaatgttactaaggctaaactggacccgcttgcccagaagataattatggaaaaattcttttgtgacttccaaagcagtctactattagcatgaattactgacagtcatccaaatatataggaacaaaaaattaaatgt

SEQ ID NO: 63 - DNA, 4045 bp, Homo sapiens
gcagcgtggtcacctggtccttttcacctgtgcacaggtaacctcagactcgagtcagtgacactgctcaacgcacccatctcagctttcatcatcagtcctccacccccgccccacaacagcctaccctgcctccggctgggtttctgggcagaggccgaggcttagctcgttatcctcgcctcgcgttgctgcaaaagccgcagcaagtgcagctgcaggctggcggctgggaaccggcccgagcaagccccaggcagctacactgggcatgctcagtagagcctgcggcttggggactctgcgctcgcacccagagctaccgctctgccccctcctaccgccccctgccctgccctgccctcccctcgcccggcgcggtcccgtccgcctctcgctcgcctcccgcctcccctcggtcttccgaggcgcccgggctcccggcgcggcggcggagggggcgggcaggccggcgggcggtgatgtggcgggactctttatgcgctgcggcaggatacgcgctcggcgctgggacgcgactgcgctcagttctctcctctcggaagctgcagccatgatggaagtttgagagttgagccgctgtgaggcgaggccgggctcaggcgagggagatgagagacggcggcggccgcggcccggagcccctctcagcgcctgtgagcagccgcgggggcagcgccctcggggagccggccggcctgcggcggcggcagcggcggcgtttctcgcctcctcttcgtcttttctaaccgtgcagcctcttcctcggcttctcctgaaagggaaggtggaagccgtgggctcgggcgggagccggctgaggcgcggcggcggcggcggcacctcccgctcctggagcgggggggagaagcggcggcggcggcggccgcggcggctgcagctccagggagggggtctgagtcgcctgtcaccatttccagggctgggaacgccggagagttggtctctccccttctactgcctccaacacggcggcggcggcggctggcacatccagggacccgggccggttttaaacctcccgtgcgccgccgccgcaccccccgtggcccgggctccggaggccgccggcggaggcagccgttcggaggattattcgtcttctccccattccgctgccgccgctgccaggcctctggctgctgaggagaagcaggcccagtcgctgcaaccatccagcagccgccgcagcagccattacccggctgcggtccagagccaagcggcggcagagcgaggggcatcagctaccgccaagtccagagccatttccatcctgcagaagaagccccgccaccagcagcttctgccatctctctcctcctttttcttcagccacaggctcccagacatgacagccatcatcaaagagatcgttagcagaaacaaaaggagatatcaagaggatggattcgacttagacttgacctgtatccatttctgcggctgctcctctttacctttctgtcactctcttagaacgtgggagtagacggatgcgaaaatgtccgtagtttgggtgactataacatttaaccctggtcaggttgctaggtcatatattttgtgtttcctttctgtgtattcaacctagggtgtgtttggctagacggaactcttgcctggttgcaagtgtcaagccaccgattgctttcttaggctatctatatggtctcttcctgagggctattgtccgttaatacagaatacagtacactgttagtggattagcgagctcggtaatccggtctcctaaatgaacaaaaaagtagacgctttttgaggttgagcatatttcgattaaatcttggcttaggccctagatcaagggtttagatcagaataaaatgaaaattagtgttgcacgtacgcatattgcatcagaatcttgcagtgattgttttagtttcctgagttgcattgatagattcttttaaaatatgactgatttgcataactttagaagcagaatcattttcagtatatatggtgcacattgagggcaaaaagtagttttgttaatgtttaaacttaagttacctacaactttgaactgtatgtagaagttttgtagtttgaagtcaatagtgccataatataccttataaggcgttcttactagatctttgttatatttacctttttctctccctatggggtgatgtaggatagtgcttgaaatttgcacttcagtagcatttaatgttcagtgctcttgtcataaacatagaatggatattgagtagtttctgatcccagatggtaatgtgtaggttcaagggtattgtgtgtagcaagtgaagattgcagaaataaaacttcagttcatgcttgaaatttaagtattgttgtgatgccagaattgctgctcaccgtttttaggtttcaggtcctctgacaccttttggtatcgttaattttactgatttgtgtagaatgtcagttgtattttaccagctaatatctagaaatgctggcaagaggggtttactccagctttagattgtaggtatgttagcttttttcatacagtgtattaaatttactgagtcagcttgctgaataagacagaagcccaagaattttaacagtgtgtagctttagttgtctaaaagttaggccttcgggcttcaaaagttagtggtcatcgaaaagcattaatctttgcagtttcaggtacaacacattggttttgattagggatggggatggggccctctttttgcagaatggggaaagtattgacaggaattgagagctattggtaggccagtgtataaggtatgtgaaaacagaattaagttattggtctgaagtgactgaagcatttaggctctatcaaggcctaaaatttggtaatatgagtttggtaatgcgaattgtggcagtggacaatatttagttaaaattatgtaattgcataagtactagcacagtatttttaataaaagttatttcttagcaaatgtcagttgcattttgtctaaaggtagagtgacactacagtgtctatatgtcctgctaaaaattgtggggaatatttttttttaagacagcgtttatatcgggagaggttttattccgttggattatgttagctgcatataaatgtgcacagttaattttgcccaagtttttgttttgaaatgaatgtaaaacttactgaagaagtagcttcccaaaatttagttttctgttaagccaaaaatattattttaaaagagtatttgcaaattttgaagttgacattaattgagaatgttactaaggctaaactggacccgcttgcccagaagataattatggaaaaattcttttgtgacttccaaagcagtctactattagcatgaattactgacagtcatccaaatatataggaacaaaaaattaaatgtttatgtaactttgaaaaaaaagcctttgaagaaaataattgaatgctgtctgggagacagatttctttcagcacttaaagtacataacacactacttttacttttcccacttgattttaaattatcagggttattaagaccttaaaattattttaccaggtttttacatgtgagctgtgacatgactggcattttctttgatttcagcgtatgttggtctctacacatgaaatttgtgtgacttaaaactttctctaaaactgtacttttagttatgatatgcatagaaagcagtatcaaatattgcgtcaaatgactaataacacttaatttctagagttgtggttttattgagccaaaagttgatatgaaaaaaagtcagtaaggaaagtcagtgaagtgcttgcttttttgataattgcactcccaataattttgatattccaacgtacttggtttgcttgttttcacgttaatgttttctgtttattggagtgggaaggcattaaaattgtcattgaagactttgtctttgacatgttgtagtatttatttcagtaactaacctgtgaaaagttaaattcctttatgaaagtagtgattggagt

SEQ ID NO: 64 - DNA, 4044 bp, Homo sapiens
atcagtcctccacccccgccccacaacagcctaccctgcctccggctgggtttctgggcagaggccgaggcttagctcgttatcctcgcctcgcgttgctgcaaaagccgcagcaagtgcagctgcaggctggcggctgggaaccggcccgagcaagccccaggcagctacactgggcatgctcagtagagcctgcggcttggggactctgcgctcgcacccagagctaccgctctgccccctcctaccgccccctgccctgccctgccctcccctcgcccggcgcggtcccgtccgcctctcgctcgcctcccgcctcccctcggtcttccgaggcgcccgggctcccggcgcggcggcggagggggcgggcaggccggcgggcggtgatgtggcgggactctttatgcgctgcggcaggatacgcgctcggcgctgggacgcgactgcgctcagttctctcctctcggaagctgcagccatgatggaagtttgagagttgagccgctgtgaggcgaggccgggctcaggcgagggagatgagagacggcggcggccgcggcccggagcccctctcagcgcctgtgagcagccgcgggggcagcgccctcggggagccggccggcctgcggcggcggcagcggcggcgtttctcgcctcctcttcgtcttttctaaccgtgcagcctcttcctcggcttctcctgaaagggaaggtggaagccgtgggctcgggcgggagccggctgaggcgcggcggcggcggcggcacctcccgctcctggagcgggggggagaagcggcggcggcggcggccgcggcggctgcagctccagggagggggtctgagtcgcctgtcaccatttccagggctgggaacgccggagagttggtctctccccttctactgcctccaacacggcggcggcggcggctggcacatccagggacccgggccggttttaaacctcccgtgcgccgccgccgcaccccccgtggcccgggctccggaggccgccggcggaggcagccgttcggaggattattcgtcttctccccattccgctgccgccgctgccaggcctctggctgctgaggagaagcaggcccagtcgctgcaaccatccagcagccgccgcagcagccattacccggctgcggtccagagccaagcggcggcagagcgaggggcatcagctaccgccaagtccagagccatttccatcctgcagaagaagccccgccaccagcagcttctgccatctctctcctcctttttcttcagccacaggctcccagacatgacagccatcatcaaagagatcgttagcagaaacaaaaggagatatcaagaggatggattcgacttagacttgacctgtatccatttctgcggctgctcctctttacctttctgtcactctcttagaacgtgggagtagacggatgcgaaaatgtccgtagtttgggtgactataacatttaaccctggtcaggttgctaggtcatatattttgtgtttcctttctgtgtattcaacctagggtgtgtttggctagacggaactcttgcctggttgcaagtgtcaagccaccgattgctttcttaggctatctatatggtctcttcctgagggctattgtccgttaatacagaatacagtacactgttagtggattagcgagctcggtaatccggtctcctaaatgaacaaaaaagtagacgctttttgaggttgagcatatttcgattaaatcttggcttaggccctagatcaagggtttagatcagaataaaatgaaaattagtgttgcacgtacgcatattgcatcagaatcttgcagtgattgttttagtttcctgagttgcattgatagattcttttaaaatatgactgatttgcataactttagaagcagaatcattttcagtatatatggtgcacattgagggcaaaaagtagttttgttaatgtttaaacttaagttacctacaactttgaactgtatgtagaagttttgtagtttgaagtcaatagtgccataatataccttataaggcgttcttactagatctttgttatatttacctttttctctccctatggggtgatgtaggatagtgcttgaaatttgcacttcagtagcatttaatgttcagtgctcttgtcataaacatagaatggatattgagtagtttctgatcccagatggtaatgtgtaggttcaagggtattgtgtgtagcaagtgaagattgcagaaataaaacttcagttcatgcttgaaatttaagtattgttgtgatgccagaattgctgctcaccgtttttaggtttcaggtcctctgacaccttttggtatcgttaattttactgatttgtgtagaatgtcagttgtattttaccagctaatatctagaaatgctggcaagaggggtttactccagctttagattgtaggtatgttagcttttttcatacagtgtattaaatttactgagtcagcttgctgaataagacagaagcccaagaattttaacagtgtgtagctttagttgtctaaaagttaggccttcgggcttcaaaagttagtggtcatcgaaaagcattaatctttgcagtttcaggtacaacacattggttttgattagggatggggatggggccctctttttgcagaatggggaaagtattgacaggaattgagagctattggtaggccagtgtataaggtatgtgaaaacagaattaagttattggtctgaagtgactgaagcatttaggctctatcaaggcctaaaatttggtaatatgagtttggtaatgcgaattgtggcagtggacaatatttagttaaaattatgtaattgcataagtactagcacagtatttttaataaaagttatttcttagcaaatgtcagttgcattttgtctaaaggtagagtgacactacagtgtctatatgtcctgctaaaaattgtggggaatatttttttttaagacagcgtttatatcgggagaggttttattccgttggattatgttagctgcatataaatgtgcacagttaattttgcccaagtttttgttttgaaatgaatgtaaaacttactgaagaagtagcttcccaaaatttagttttctgttaagccaaaaatattattttaaaagagtatttgcaaattttgaagttgacattaattgagaatgttactaaggctaaactggacccgcttgcccagaagataattatggaaaaattcttttgtgacttccaaagcagtctactattagcatgaattactgacagtcatccaaatatataggaacaaaaaattaaatgtttatgtaactttgaaaaaaaagcctttgaagaaaataattgaatgctgtctgggagacagatttctttcagcacttaaagtacataacacactacttttacttttcccacttgattttaaattatcagggttattaagaccttaaaattattttaccaggtttttacatgtgagctgtgacatgactggcattttctttgatttcagcgtatgttggtctctacacatgaaatttgtgtgacttaaaactttctctaaaactgtacttttagttatgatatgcatagaaagcagtatcaaatattgcgtcaaatgactaataacacttaatttctagagttgtggttttattgagccaaaagttgatatgaaaaaaagtcagtaaggaaagtcagtgaagtgcttgcttttttgataattgcactcccaataattttgatattccaacgtacttggtttgcttgttttcacgttaatgttttctgtttattggagtgggaaggcattaaaattgtcattgaagactttgtctttgacatgttgtagtatttatttcagtaactaacctgtgaaaagttaaattcctttatgaaagtagtgattggagtatttttatctgataaagaaagattaataatgaagccatttctccgaggaaaattgaggacaataattcagttttaaaatattatcgcaaaat

SEQ ID NO: 65 - DNA, 4048 bp, Homo sapiens
ggaagctgcagccatgatggaagtttgagagttgagccgctgtgaggcgaggccgggctcaggcgagggagatgagagacggcggcggccgcggcccggagcccctctcagcgcctgtgagcagccgcgggggcagcgccctcggggagccggccggcctgcggcggcggcagcggcggcgtttctcgcctcctcttcgtcttttctaaccgtgcagcctcttcctcggcttctcctgaaagggaaggtggaagccgtgggctcgggcgggagccggctgaggcgcggcggcggcggcggcacctcccgctcctggagcgggggggagaagcggcggcggcggcggccgcggcggctgcagctccagggagggggtctgagtcgcctgtcaccatttccagggctgggaacgccggagagttggtctctccccttctactgcctccaacacggcggcggcggcggctggcacatccagggacccgggccggttttaaacctcccgtgcgccgccgccgcaccccccgtggcccgggctccggaggccgccggcggaggcagccgttcggaggattattcgtcttctccccattccgctgccgccgctgccaggcctctggctgctgaggagaagcaggcccagtcgctgcaaccatccagcagccgccgcagcagccattacccggctgcggtccagagccaagcggcggcagagcgaggggcatcagctaccgccaagtccagagccatttccatcctgcagaagaagccccgccaccagcagcttctgccatctctctcctcctttttcttcagccacaggctcccagacatgacagccatcatcaaagagatcgttagcagaaacaaaaggagatatcaagaggatggattcgacttagacttgacctgtatccatttctgcggctgctcctctttacctttctgtcactctcttagaacgtgggagtagacggatgcgaaaatgtccgtagtttgggtgactataacatttaaccctggtcaggttgctaggtcatatattttgtgtttcctttctgtgtattcaacctagggtgtgtttggctagacggaactcttgcctggttgcaagtgtcaagccaccgattgctttcttaggctatctatatggtctcttcctgagggctattgtccgttaatacagaatacagtacactgttagtggattagcgagctcggtaatccggtctcctaaatgaacaaaaaagtagacgctttttgaggttgagcatatttcgattaaatcttggcttaggccctagatcaagggtttagatcagaataaaatgaaaattagtgttgcacgtacgcatattgcatcagaatcttgcagtgattgttttagtttcctgagttgcattgatagattcttttaaaatatgactgatttgcataactttagaagcagaatcattttcagtatatatggtgcacattgagggcaaaaagtagttttgttaatgtttaaacttaagttacctacaactttgaactgtatgtagaagttttgtagtttgaagtcaatagtgccataatataccttataaggcgttcttactagatctttgttatatttacctttttctctccctatggggtgatgtaggatagtgcttgaaatttgcacttcagtagcatttaatgttcagtgctcttgtcataaacatagaatggatattgagtagtttctgatcccagatggtaatgtgtaggttcaagggtattgtgtgtagcaagtgaagattgcagaaataaaacttcagttcatgcttgaaatttaagtattgttgtgatgccagaattgctgctcaccgtttttaggtttcaggtcctctgacaccttttggtatcgttaattttactgatttgtgtagaatgtcagttgtattttaccagctaatatctagaaatgctggcaagaggggtttactccagctttagattgtaggtatgttagcttttttcatacagtgtattaaatttactgagtcagcttgctgaataagacagaagcccaagaattttaacagtgtgtagctttagttgtctaaaagttaggccttcgggcttcaaaagttagtggtcatcgaaaagcattaatctttgcagtttcaggtacaacacattggttttgattagggatggggatggggccctctttttgcagaatggggaaagtattgacaggaattgagagctattggtaggccagtgtataaggtatgtgaaaacagaattaagttattggtctgaagtgactgaagcatttaggctctatcaaggcctaaaatttggtaatatgagtttggtaatgcgaattgtggcagtggacaatatttagttaaaattatgtaattgcataagtactagcacagtatttttaataaaagttatttcttagcaaatgtcagttgcattttgtctaaaggtagagtgacactacagtgtctatatgtcctgctaaaaattgtggggaatatttttttttaagacagcgtttatatcgggagaggttttattccgttggattatgttagctgcatataaatgtgcacagttaattttgcccaagtttttgttttgaaatgaatgtaaaacttactgaagaagtagcttcccaaaatttagttttctgttaagccaaaaatattattttaaaagagtatttgcaaattttgaagttgacattaattgagaatgttactaaggctaaactggacccgcttgcccagaagataattatggaaaaattcttttgtgacttccaaagcagtctactattagcatgaattactgacagtcatccaaatatataggaacaaaaaattaaatgtttatgtaactttgaaaaaaaagcctttgaagaaaataattgaatgctgtctgggagacagatttctttcagcacttaaagtacataacacactacttttacttttcccacttgattttaaattatcagggttattaagaccttaaaattattttaccaggtttttacatgtgagctgtgacatgactggcattttctttgatttcagcgtatgttggtctctacacatgaaatttgtgtgacttaaaactttctctaaaactgtacttttagttatgatatgcatagaaagcagtatcaaatattgcgtcaaatgactaataacacttaatttctagagttgtggttttattgagccaaaagttgatatgaaaaaaagtcagtaaggaaagtcagtgaagtgcttgcttttttgataattgcactcccaataattttgatattccaacgtacttggtttgcttgttttcacgttaatgttttctgtttattggagtgggaaggcattaaaattgtcattgaagactttgtctttgacatgttgtagtatttatttcagtaactaacctgtgaaaagttaaattcctttatgaaagtagtgattggagtatttttatctgataaagaaagattaataatgaagccatttctccgaggaaaattgaggacaataattcagttttaaaatattatcgcaaaattaaattattctaaaaatttgttagtagggttatatgcttaatattagtctgaaatatagtgctgaatttgagactatagaaaaattaagtgtatttagggtatgtggaaacgttaggcttctgttgtatttttattgtttggtagatttgcctcttttcaaataaatgttcacagggaatacttttaacttgtagagagtacagtgactattgaagttacctaaattacctcaaggtaagtgattactgaaattaatcatgagggttttaaaaagtattctattcacaacatttattttacattgttttgtatctgctaagttatatttcctgaaaaacatgactggaccacctaattgctgtatgataacttacaaacttcatttttcatagtgcttattcaagtgtaaagcacaactgaaaggagtaatgtacagtttatatgaggaaaaaggaattttattgctgccag

SEQ ID NO: 66 - DNA, 4058 bp, Homo sapiens
cggccggcctgcggcggcggcagcggcggcgtttctcgcctcctcttcgtcttttctaaccgtgcagcctcttcctcggcttctcctgaaagggaaggtggaagccgtgggctcgggcgggagccggctgaggcgcggcggcggcggcggcacctcccgctcctggagcgggggggagaagcggcggcggcggcggccgcggcggctgcagctccagggagggggtctgagtcgcctgtcaccatttccagggctgggaacgccggagagttggtctctccccttctactgcctccaacacggcggcggcggcggctggcacatccagggacccgggccggttttaaacctcccgtgcgccgccgccgcaccccccgtggcccgggctccggaggccgccggcggaggcagccgttcggaggattattcgtcttctccccattccgctgccgccgctgccaggcctctggctgctgaggagaagcaggcccagtcgctgcaaccatccagcagccgccgcagcagccattacccggctgcggtccagagccaagcggcggcagagcgaggggcatcagctaccgccaagtccagagccatttccatcctgcagaagaagccccgccaccagcagcttctgccatctctctcctcctttttcttcagccacaggctcccagacatgacagccatcatcaaagagatcgttagcagaaacaaaaggagatatcaagaggatggattcgacttagacttgacctgtatccatttctgcggctgctcctctttacctttctgtcactctcttagaacgtgggagtagacggatgcgaaaatgtccgtagtttgggtgactataacatttaaccctggtcaggttgctaggtcatatattttgtgtttcctttctgtgtattcaacctagggtgtgtttggctagacggaactcttgcctggttgcaagtgtcaagccaccgattgctttcttaggctatctatatggtctcttcctgagggctattgtccgttaatacagaatacagtacactgttagtggattagcgagctcggtaatccggtctcctaaatgaacaaaaaagtagacgctttttgaggttgagcatatttcgattaaatcttggcttaggccctagatcaagggtttagatcagaataaaatgaaaattagtgttgcacgtacgcatattgcatcagaatcttgcagtgattgttttagtttcctgagttgcattgatagattcttttaaaatatgactgatttgcataactttagaagcagaatcattttcagtatatatggtgcacattgagggcaaaaagtagttttgttaatgtttaaacttaagttacctacaactttgaactgtatgtagaagttttgtagtttgaagtcaatagtgccataatataccttataaggcgttcttactagatctttgttatatttacctttttctctccctatggggtgatgtaggatagtgcttgaaatttgcacttcagtagcatttaatgttcagtgctcttgtcataaacatagaatggatattgagtagtttctgatcccagatggtaatgtgtaggttcaagggtattgtgtgtagcaagtgaagattgcagaaataaaacttcagttcatgcttgaaatttaagtattgttgtgatgccagaattgctgctcaccgtttttaggtttcaggtcctctgacaccttttggtatcgttaattttactgatttgtgtagaatgtcagttgtattttaccagctaatatctagaaatgctggcaagaggggtttactccagctttagattgtaggtatgttagcttttttcatacagtgtattaaatttactgagtcagcttgctgaataagacagaagcccaagaattttaacagtgtgtagctttagttgtctaaaagttaggccttcgggcttcaaaagttagtggtcatcgaaaagcattaatctttgcagtttcaggtacaacacattggttttgattagggatggggatggggccctctttttgcagaatggggaaagtattgacaggaattgagagctattggtaggccagtgtataaggtatgtgaaaacagaattaagttattggtctgaagtgactgaagcatttaggctctatcaaggcctaaaatttggtaatatgagtttggtaatgcgaattgtggcagtggacaatatttagttaaaattatgtaattgcataagtactagcacagtatttttaataaaagttatttcttagcaaatgtcagttgcattttgtctaaaggtagagtgacactacagtgtctatatgtcctgctaaaaattgtggggaatatttttttttaagacagcgtttatatcgggagaggttttattccgttggattatgttagctgcatataaatgtgcacagttaattttgcccaagtttttgttttgaaatgaatgtaaaacttactgaagaagtagcttcccaaaatttagttttctgttaagccaaaaatattattttaaaagagtatttgcaaattttgaagttgacattaattgagaatgttactaaggctaaactggacccgcttgcccagaagataattatggaaaaattcttttgtgacttccaaagcagtctactattagcatgaattactgacagtcatccaaatatataggaacaaaaaattaaatgtttatgtaactttgaaaaaaaagcctttgaagaaaataattgaatgctgtctgggagacagatttctttcagcacttaaagtacataacacactacttttacttttcccacttgattttaaattatcagggttattaagaccttaaaattattttaccaggtttttacatgtgagctgtgacatgactggcattttctttgatttcagcgtatgttggtctctacacatgaaatttgtgtgacttaaaactttctctaaaactgtacttttagttatgatatgcatagaaagcagtatcaaatattgcgtcaaatgactaataacacttaatttctagagttgtggttttattgagccaaaagttgatatgaaaaaaagtcagtaaggaaagtcagtgaagtgcttgcttttttgataattgcactcccaataattttgatattccaacgtacttggtttgcttgttttcacgttaatgttttctgtttattggagtgggaaggcattaaaattgtcattgaagactttgtctttgacatgttgtagtatttatttcagtaactaacctgtgaaaagttaaattcctttatgaaagtagtgattggagtatttttatctgataaagaaagattaataatgaagccatttctccgaggaaaattgaggacaataattcagttttaaaatattatcgcaaaattaaattattctaaaaatttgttagtagggttatatgcttaatattagtctgaaatatagtgctgaatttgagactatagaaaaattaagtgtatttagggtatgtggaaacgttaggcttctgttgtatttttattgtttggtagatttgcctcttttcaaataaatgttcacagggaatacttttaacttgtagagagtacagtgactattgaagttacctaaattacctcaaggtaagtgattactgaaattaatcatgagggttttaaaaagtattctattcacaacatttattttacattgttttgtatctgctaagttatatttcctgaaaaacatgactggaccacctaattgctgtatgataacttacaaacttcatttttcatagtgcttattcaagtgtaaagcacaactgaaaggagtaatgtacagtttatatgaggaaaaaggaattttattgctgccagtgtaaaagtttgcacagcagtatagtcatcaatgcagatttacattgcttataatatactaagtaaatactaaatgattaaagataataaaatatggtgaggtataaccaccttcattttaaacttagttttagaagatagtaaagaaagattcctttat

SEQ ID NO: 67 - DNA, 4046 bp, Homo sapiens
gtctctccccttctactgcctccaacacggcggcggcggcggctggcacatccagggacccgggccggttttaaacctcccgtgcgccgccgccgcaccccccgtggcccgggctccggaggccgccggcggaggcagccgttcggaggattattcgtcttctccccattccgctgccgccgctgccaggcctctggctgctgaggagaagcaggcccagtcgctgcaaccatccagcagccgccgcagcagccattacccggctgcggtccagagccaagcggcggcagagcgaggggcatcagctaccgccaagtccagagccatttccatcctgcagaagaagccccgccaccagcagcttctgccatctctctcctcctttttcttcagccacaggctcccagacatgacagccatcatcaaagagatcgttagcagaaacaaaaggagatatcaagaggatggattcgacttagacttgacctgtatccatttctgcggctgctcctctttacctttctgtcactctcttagaacgtgggagtagacggatgcgaaaatgtccgtagtttgggtgactataacatttaaccctggtcaggttgctaggtcatatattttgtgtttcctttctgtgtattcaacctagggtgtgtttggctagacggaactcttgcctggttgcaagtgtcaagccaccgattgctttcttaggctatctatatggtctcttcctgagggctattgtccgttaatacagaatacagtacactgttagtggattagcgagctcggtaatccggtctcctaaatgaacaaaaaagtagacgctttttgaggttgagcatatttcgattaaatcttggcttaggccctagatcaagggtttagatcagaataaaatgaaaattagtgttgcacgtacgcatattgcatcagaatcttgcagtgattgttttagtttcctgagttgcattgatagattcttttaaaatatgactgatttgcataactttagaagcagaatcattttcagtatatatggtgcacattgagggcaaaaagtagttttgttaatgtttaaacttaagttacctacaactttgaactgtatgtagaagttttgtagtttgaagtcaatagtgccataatataccttataaggcgttcttactagatctttgttatatttacctttttctctccctatggggtgatgtaggatagtgcttgaaatttgcacttcagtagcatttaatgttcagtgctcttgtcataaacatagaatggatattgagtagtttctgatcccagatggtaatgtgtaggttcaagggtattgtgtgtagcaagtgaagattgcagaaataaaacttcagttcatgcttgaaatttaagtattgttgtgatgccagaattgctgctcaccgtttttaggtttcaggtcctctgacaccttttggtatcgttaattttactgatttgtgtagaatgtcagttgtattttaccagctaatatctagaaatgctggcaagaggggtttactccagctttagattgtaggtatgttagcttttttcatacagtgtattaaatttactgagtcagcttgctgaataagacagaagcccaagaattttaacagtgtgtagctttagttgtctaaaagttaggccttcgggcttcaaaagttagtggtcatcgaaaagcattaatctttgcagtttcaggtacaacacattggttttgattagggatggggatggggccctctttttgcagaatggggaaagtattgacaggaattgagagctattggtaggccagtgtataaggtatgtgaaaacagaattaagttattggtctgaagtgactgaagcatttaggctctatcaaggcctaaaatttggtaatatgagtttggtaatgcgaattgtggcagtggacaatatttagttaaaattatgtaattgcataagtactagcacagtatttttaataaaagttatttcttagcaaatgtcagttgcattttgtctaaaggtagagtgacactacagtgtctatatgtcctgctaaaaattgtggggaatatttttttttaagacagcgtttatatcgggagaggttttattccgttggattatgttagctgcatataaatgtgcacagttaattttgcccaagtttttgttttgaaatgaatgtaaaacttactgaagaagtagcttcccaaaatttagttttctgttaagccaaaaatattattttaaaagagtatttgcaaattttgaagttgacattaattgagaatgttactaaggctaaactggacccgcttgcccagaagataattatggaaaaattcttttgtgacttccaaagcagtctactattagcatgaattactgacagtcatccaaatatataggaacaaaaaattaaatgtttatgtaactttgaaaaaaaagcctttgaagaaaataattgaatgctgtctgggagacagatttctttcagcacttaaagtacataacacactacttttacttttcccacttgattttaaattatcagggttattaagaccttaaaattattttaccaggtttttacatgtgagctgtgacatgactggcattttctttgatttcagcgtatgttggtctctacacatgaaatttgtgtgacttaaaactttctctaaaactgtacttttagttatgatatgcatagaaagcagtatcaaatattgcgtcaaatgactaataacacttaatttctagagttgtggttttattgagccaaaagttgatatgaaaaaaagtcagtaaggaaagtcagtgaagtgcttgcttttttgataattgcactcccaataattttgatattccaacgtacttggtttgcttgttttcacgttaatgttttctgtttattggagtgggaaggcattaaaattgtcattgaagactttgtctttgacatgttgtagtatttatttcagtaactaacctgtgaaaagttaaattcctttatgaaagtagtgattggagtatttttatctgataaagaaagattaataatgaagccatttctccgaggaaaattgaggacaataattcagttttaaaatattatcgcaaaattaaattattctaaaaatttgttagtagggttatatgcttaatattagtctgaaatatagtgctgaatttgagactatagaaaaattaagtgtatttagggtatgtggaaacgttaggcttctgttgtatttttattgtttggtagatttgcctcttttcaaataaatgttcacagggaatacttttaacttgtagagagtacagtgactattgaagttacctaaattacctcaaggtaagtgattactgaaattaatcatgagggttttaaaaagtattctattcacaacatttattttacattgttttgtatctgctaagttatatttcctgaaaaacatgactggaccacctaattgctgtatgataacttacaaacttcatttttcatagtgcttattcaagtgtaaagcacaactgaaaggagtaatgtacagtttatatgaggaaaaaggaattttattgctgccagtgtaaaagtttgcacagcagtatagtcatcaatgcagatttacattgcttataatatactaagtaaatactaaatgattaaagataataaaatatggtgaggtataaccaccttcattttaaacttagttttagaagatagtaaagaaagattcctttattacctttttagaattttatttttaataacatgggaaaggcaactggtgatattttaatttttgtatggaacagtgcatctgctttctcatagccacataaaatacataaacttcttagtgttatgaaatggcttactttttggaagtgaagaagtcttcaattcttattttctaatgttattttgaaatttgcctccatttgctgtttgttcatttggtgatagcgcaacacttaaaaaaatattttaagccgcttctgaa

SEQ ID NO: 68 - DNA, 4025 bp, Homo sapiens
accccccgtggcccgggctccggaggccgccggcggaggcagccgttcggaggattattcgtcttctccccattccgctgccgccgctgccaggcctctggctgctgaggagaagcaggcccagtcgctgcaaccatccagcagccgccgcagcagccattacccggctgcggtccagagccaagcggcggcagagcgaggggcatcagctaccgccaagtccagagccatttccatcctgcagaagaagccccgccaccagcagcttctgccatctctctcctcctttttcttcagccacaggctcccagacatgacagccatcatcaaagagatcgttagcagaaacaaaaggagatatcaagaggatggattcgacttagacttgacctgtatccatttctgcggctgctcctctttacctttctgtcactctcttagaacgtgggagtagacggatgcgaaaatgtccgtagtttgggtgactataacatttaaccctggtcaggttgctaggtcatatattttgtgtttcctttctgtgtattcaacctagggtgtgtttggctagacggaactcttgcctggttgcaagtgtcaagccaccgattgctttcttaggctatctatatggtctcttcctgagggctattgtccgttaatacagaatacagtacactgttagtggattagcgagctcggtaatccggtctcctaaatgaacaaaaaagtagacgctttttgaggttgagcatatttcgattaaatcttggcttaggccctagatcaagggtttagatcagaataaaatgaaaattagtgttgcacgtacgcatattgcatcagaatcttgcagtgattgttttagtttcctgagttgcattgatagattcttttaaaatatgactgatttgcataactttagaagcagaatcattttcagtatatatggtgcacattgagggcaaaaagtagttttgttaatgtttaaacttaagttacctacaactttgaactgtatgtagaagttttgtagtttgaagtcaatagtgccataatataccttataaggcgttcttactagatctttgttatatttacctttttctctccctatggggtgatgtaggatagtgcttgaaatttgcacttcagtagcatttaatgttcagtgctcttgtcataaacatagaatggatattgagtagtttctgatcccagatggtaatgtgtaggttcaagggtattgtgtgtagcaagtgaagattgcagaaataaaacttcagttcatgcttgaaatttaagtattgttgtgatgccagaattgctgctcaccgtttttaggtttcaggtcctctgacaccttttggtatcgttaattttactgatttgtgtagaatgtcagttgtattttaccagctaatatctagaaatgctggcaagaggggtttactccagctttagattgtaggtatgttagcttttttcatacagtgtattaaatttactgagtcagcttgctgaataagacagaagcccaagaattttaacagtgtgtagctttagttgtctaaaagttaggccttcgggcttcaaaagttagtggtcatcgaaaagcattaatctttgcagtttcaggtacaacacattggttttgattagggatggggatggggccctctttttgcagaatggggaaagtattgacaggaattgagagctattggtaggccagtgtataaggtatgtgaaaacagaattaagttattggtctgaagtgactgaagcatttaggctctatcaaggcctaaaatttggtaatatgagtttggtaatgcgaattgtggcagtggacaatatttagttaaaattatgtaattgcataagtactagcacagtatttttaataaaagttatttcttagcaaatgtcagttgcattttgtctaaaggtagagtgacactacagtgtctatatgtcctgctaaaaattgtggggaatatttttttttaagacagcgtttatatcgggagaggttttattccgttggattatgttagctgcatataaatgtgcacagttaattttgcccaagtttttgttttgaaatgaatgtaaaacttactgaagaagtagcttcccaaaatttagttttctgttaagccaaaaatattattttaaaagagtatttgcaaattttgaagttgacattaattgagaatgttactaaggctaaactggacccgcttgcccagaagataattatggaaaaattcttttgtgacttccaaagcagtctactattagcatgaattactgacagtcatccaaatatataggaacaaaaaattaaatgtttatgtaactttgaaaaaaaagcctttgaagaaaataattgaatgctgtctgggagacagatttctttcagcacttaaagtacataacacactacttttacttttcccacttgattttaaattatcagggttattaagaccttaaaattattttaccaggtttttacatgtgagctgtgacatgactggcattttctttgatttcagcgtatgttggtctctacacatgaaatttgtgtgacttaaaactttctctaaaactgtacttttagttatgatatgcatagaaagcagtatcaaatattgcgtcaaatgactaataacacttaatttctagagttgtggttttattgagccaaaagttgatatgaaaaaaagtcagtaaggaaagtcagtgaagtgcttgcttttttgataattgcactcccaataattttgatattccaacgtacttggtttgcttgttttcacgttaatgttttctgtttattggagtgggaaggcattaaaattgtcattgaagactttgtctttgacatgttgtagtatttatttcagtaactaacctgtgaaaagttaaattcctttatgaaagtagtgattggagtatttttatctgataaagaaagattaataatgaagccatttctccgaggaaaattgaggacaataattcagttttaaaatattatcgcaaaattaaattattctaaaaatttgttagtagggttatatgcttaatattagtctgaaatatagtgctgaatttgagactatagaaaaattaagtgtatttagggtatgtggaaacgttaggcttctgttgtatttttattgtttggtagatttgcctcttttcaaataaatgttcacagggaatacttttaacttgtagagagtacagtgactattgaagttacctaaattacctcaaggtaagtgattactgaaattaatcatgagggttttaaaaagtattctattcacaacatttattttacattgttttgtatctgctaagttatatttcctgaaaaacatgactggaccacctaattgctgtatgataacttacaaacttcatttttcatagtgcttattcaagtgtaaagcacaactgaaaggagtaatgtacagtttatatgaggaaaaaggaattttattgctgccagtgtaaaagtttgcacagcagtatagtcatcaatgcagatttacattgcttataatatactaagtaaatactaaatgattaaagataataaaatatggtgaggtataaccaccttcattttaaacttagttttagaagatagtaaagaaagattcctttattacctttttagaattttatttttaataacatgggaaaggcaactggtgatattttaatttttgtatggaacagtgcatctgctttctcatagccacataaaatacataaacttcttagtgttatgaaatggcttactttttggaagtgaagaagtcttcaattcttattttctaatgttattttgaaatttgcctccatttgctgtttgttcatttggtgatagcgcaacacttaaaaaaatattttaagccgcttctgaagtaatcacttcagtgacttttaatggaggagtatttgttatgggaaattcacttcacaaagttttaacattaatt

SEQ ID NO: 69 - DNA, 4046 bp, Homo sapiens
cccattccgctgccgccgctgccaggcctctggctgctgaggagaagcaggcccagtcgctgcaaccatccagcagccgccgcagcagccattacccggctgcggtccagagccaagcggcggcagagcgaggggcatcagctaccgccaagtccagagccatttccatcctgcagaagaagccccgccaccagcagcttctgccatctctctcctcctttttcttcagccacaggctcccagacatgacagccatcatcaaagagatcgttagcagaaacaaaaggagatatcaagaggatggattcgacttagacttgacctgtatccatttctgcggctgctcctctttacctttctgtcactctcttagaacgtgggagtagacggatgcgaaaatgtccgtagtttgggtgactataacatttaaccctggtcaggttgctaggtcatatattttgtgtttcctttctgtgtattcaacctagggtgtgtttggctagacggaactcttgcctggttgcaagtgtcaagccaccgattgctttcttaggctatctatatggtctcttcctgagggctattgtccgttaatacagaatacagtacactgttagtggattagcgagctcggtaatccggtctcctaaatgaacaaaaaagtagacgctttttgaggttgagcatatttcgattaaatcttggcttaggccctagatcaagggtttagatcagaataaaatgaaaattagtgttgcacgtacgcatattgcatcagaatcttgcagtgattgttttagtttcctgagttgcattgatagattcttttaaaatatgactgatttgcataactttagaagcagaatcattttcagtatatatggtgcacattgagggcaaaaagtagttttgttaatgtttaaacttaagttacctacaactttgaactgtatgtagaagttttgtagtttgaagtcaatagtgccataatataccttataaggcgttcttactagatctttgttatatttacctttttctctccctatggggtgatgtaggatagtgcttgaaatttgcacttcagtagcatttaatgttcagtgctcttgtcataaacatagaatggatattgagtagtttctgatcccagatggtaatgtgtaggttcaagggtattgtgtgtagcaagtgaagattgcagaaataaaacttcagttcatgcttgaaatttaagtattgttgtgatgccagaattgctgctcaccgtttttaggtttcaggtcctctgacaccttttggtatcgttaattttactgatttgtgtagaatgtcagttgtattttaccagctaatatctagaaatgctggcaagaggggtttactccagctttagattgtaggtatgttagcttttttcatacagtgtattaaatttactgagtcagcttgctgaataagacagaagcccaagaattttaacagtgtgtagctttagttgtctaaaagttaggccttcgggcttcaaaagttagtggtcatcgaaaagcattaatctttgcagtttcaggtacaacacattggttttgattagggatggggatggggccctctttttgcagaatggggaaagtattgacaggaattgagagctattggtaggccagtgtataaggtatgtgaaaacagaattaagttattggtctgaagtgactgaagcatttaggctctatcaaggcctaaaatttggtaatatgagtttggtaatgcgaattgtggcagtggacaatatttagttaaaattatgtaattgcataagtactagcacagtatttttaataaaagttatttcttagcaaatgtcagttgcattttgtctaaaggtagagtgacactacagtgtctatatgtcctgctaaaaattgtggggaatatttttttttaagacagcgtttatatcgggagaggttttattccgttggattatgttagctgcatataaatgtgcacagttaattttgcccaagtttttgttttgaaatgaatgtaaaacttactgaagaagtagcttcccaaaatttagttttctgttaagccaaaaatattattttaaaagagtatttgcaaattttgaagttgacattaattgagaatgttactaaggctaaactggacccgcttgcccagaagataattatggaaaaattcttttgtgacttccaaagcagtctactattagcatgaattactgacagtcatccaaatatataggaacaaaaaattaaatgtttatgtaactttgaaaaaaaagcctttgaagaaaataattgaatgctgtctgggagacagatttctttcagcacttaaagtacataacacactacttttacttttcccacttgattttaaattatcagggttattaagaccttaaaattattttaccaggtttttacatgtgagctgtgacatgactggcattttctttgatttcagcgtatgttggtctctacacatgaaatttgtgtgacttaaaactttctctaaaactgtacttttagttatgatatgcatagaaagcagtatcaaatattgcgtcaaatgactaataacacttaatttctagagttgtggttttattgagccaaaagttgatatgaaaaaaagtcagtaaggaaagtcagtgaagtgcttgcttttttgataattgcactcccaataattttgatattccaacgtacttggtttgcttgttttcacgttaatgttttctgtttattggagtgggaaggcattaaaattgtcattgaagactttgtctttgacatgttgtagtatttatttcagtaactaacctgtgaaaagttaaattcctttatgaaagtagtgattggagtatttttatctgataaagaaagattaataatgaagccatttctccgaggaaaattgaggacaataattcagttttaaaatattatcgcaaaattaaattattctaaaaatttgttagtagggttatatgcttaatattagtctgaaatatagtgctgaatttgagactatagaaaaattaagtgtatttagggtatgtggaaacgttaggcttctgttgtatttttattgtttggtagatttgcctcttttcaaataaatgttcacagggaatacttttaacttgtagagagtacagtgactattgaagttacctaaattacctcaaggtaagtgattactgaaattaatcatgagggttttaaaaagtattctattcacaacatttattttacattgttttgtatctgctaagttatatttcctgaaaaacatgactggaccacctaattgctgtatgataacttacaaacttcatttttcatagtgcttattcaagtgtaaagcacaactgaaaggagtaatgtacagtttatatgaggaaaaaggaattttattgctgccagtgtaaaagtttgcacagcagtatagtcatcaatgcagatttacattgcttataatatactaagtaaatactaaatgattaaagataataaaatatggtgaggtataaccaccttcattttaaacttagttttagaagatagtaaagaaagattcctttattacctttttagaattttatttttaataacatgggaaaggcaactggtgatattttaatttttgtatggaacagtgcatctgctttctcatagccacataaaatacataaacttcttagtgttatgaaatggcttactttttggaagtgaagaagtcttcaattcttattttctaatgttattttgaaatttgcctccatttgctgtttgttcatttggtgatagcgcaacacttaaaaaaatattttaagccgcttctgaagtaatcacttcagtgacttttaatggaggagtatttgttatgggaaattcacttcacaaagttttaacattaattcacttgaagtaaacgtgctatttttaaattttcatctcaatcttttaagtaagacgaaagcttaggaaatcacttttattattgatatt

SEQ ID NO: 70 - DNA, 4040 bp, Homo sapiens
cttcagccacaggctcccagacatgacagccatcatcaaagagatcgttagcagaaacaaaaggagatatcaagaggatggattcgacttagacttgacctgtatccatttctgcggctgctcctctttacctttctgtcactctcttagaacgtgggagtagacggatgcgaaaatgtccgtagtttgggtgactataacatttaaccctggtcaggttgctaggtcatatattttgtgtttcctttctgtgtattcaacctagggtgtgtttggctagacggaactcttgcctggttgcaagtgtcaagccaccgattgctttcttaggctatctatatggtctcttcctgagggctattgtccgttaatacagaatacagtacactgttagtggattagcgagctcggtaatccggtctcctaaatgaacaaaaaagtagacgctttttgaggttgagcatatttcgattaaatcttggcttaggccctagatcaagggtttagatcagaataaaatgaaaattagtgttgcacgtacgcatattgcatcagaatcttgcagtgattgttttagtttcctgagttgcattgatagattcttttaaaatatgactgatttgcataactttagaagcagaatcattttcagtatatatggtgcacattgagggcaaaaagtagttttgttaatgtttaaacttaagttacctacaactttgaactgtatgtagaagttttgtagtttgaagtcaatagtgccataatataccttataaggcgttcttactagatctttgttatatttacctttttctctccctatggggtgatgtaggatagtgcttgaaatttgcacttcagtagcatttaatgttcagtgctcttgtcataaacatagaatggatattgagtagtttctgatcccagatggtaatgtgtaggttcaagggtattgtgtgtagcaagtgaagattgcagaaataaaacttcagttcatgcttgaaatttaagtattgttgtgatgccagaattgctgctcaccgtttttaggtttcaggtcctctgacaccttttggtatcgttaattttactgatttgtgtagaatgtcagttgtattttaccagctaatatctagaaatgctggcaagaggggtttactccagctttagattgtaggtatgttagcttttttcatacagtgtattaaatttactgagtcagcttgctgaataagacagaagcccaagaattttaacagtgtgtagctttagttgtctaaaagttaggccttcgggcttcaaaagttagtggtcatcgaaaagcattaatctttgcagtttcaggtacaacacattggttttgattagggatggggatggggccctctttttgcagaatggggaaagtattgacaggaattgagagctattggtaggccagtgtataaggtatgtgaaaacagaattaagttattggtctgaagtgactgaagcatttaggctctatcaaggcctaaaatttggtaatatgagtttggtaatgcgaattgtggcagtggacaatatttagttaaaattatgtaattgcataagtactagcacagtatttttaataaaagttatttcttagcaaatgtcagttgcattttgtctaaaggtagagtgacactacagtgtctatatgtcctgctaaaaattgtggggaatatttttttttaagacagcgtttatatcgggagaggttttattccgttggattatgttagctgcatataaatgtgcacagttaattttgcccaagtttttgttttgaaatgaatgtaaaacttactgaagaagtagcttcccaaaatttagttttctgttaagccaaaaatattattttaaaagagtatttgcaaattttgaagttgacattaattgagaatgttactaaggctaaactggacccgcttgcccagaagataattatggaaaaattcttttgtgacttccaaagcagtctactattagcatgaattactgacagtcatccaaatatataggaacaaaaaattaaatgtttatgtaactttgaaaaaaaagcctttgaagaaaataattgaatgctgtctgggagacagatttctttcagcacttaaagtacataacacactacttttacttttcccacttgattttaaattatcagggttattaagaccttaaaattattttaccaggtttttacatgtgagctgtgacatgactggcattttctttgatttcagcgtatgttggtctctacacatgaaatttgtgtgacttaaaactttctctaaaactgtacttttagttatgatatgcatagaaagcagtatcaaatattgcgtcaaatgactaataacacttaatttctagagttgtggttttattgagccaaaagttgatatgaaaaaaagtcagtaaggaaagtcagtgaagtgcttgcttttttgataattgcactcccaataattttgatattccaacgtacttggtttgcttgttttcacgttaatgttttctgtttattggagtgggaaggcattaaaattgtcattgaagactttgtctttgacatgttgtagtatttatttcagtaactaacctgtgaaaagttaaattcctttatgaaagtagtgattggagtatttttatctgataaagaaagattaataatgaagccatttctccgaggaaaattgaggacaataattcagttttaaaatattatcgcaaaattaaattattctaaaaatttgttagtagggttatatgcttaatattagtctgaaatatagtgctgaatttgagactatagaaaaattaagtgtatttagggtatgtggaaacgttaggcttctgttgtatttttattgtttggtagatttgcctcttttcaaataaatgttcacagggaatacttttaacttgtagagagtacagtgactattgaagttacctaaattacctcaaggtaagtgattactgaaattaatcatgagggttttaaaaagtattctattcacaacatttattttacattgttttgtatctgctaagttatatttcctgaaaaacatgactggaccacctaattgctgtatgataacttacaaacttcatttttcatagtgcttattcaagtgtaaagcacaactgaaaggagtaatgtacagtttatatgaggaaaaaggaattttattgctgccagtgtaaaagtttgcacagcagtatagtcatcaatgcagatttacattgcttataatatactaagtaaatactaaatgattaaagataataaaatatggtgaggtataaccaccttcattttaaacttagttttagaagatagtaaagaaagattcctttattacctttttagaattttatttttaataacatgggaaaggcaactggtgatattttaatttttgtatggaacagtgcatctgctttctcatagccacataaaatacataaacttcttagtgttatgaaatggcttactttttggaagtgaagaagtcttcaattcttattttctaatgttattttgaaatttgcctccatttgctgtttgttcatttggtgatagcgcaacacttaaaaaaatattttaagccgcttctgaagtaatcacttcagtgacttttaatggaggagtatttgttatgggaaattcacttcacaaagttttaacattaattcacttgaagtaaacgtgctatttttaaattttcatctcaatcttttaagtaagacgaaagcttaggaaatcacttttattattgatattgtgtgtgacttcagagtttgtaaagagaattgtagaagtgttgcatgcatatgacaattttctgcttaattgaaatgtgaggcctctgccatactacaaggatttagcttccagaaaatgtaatattaacatagcttaagaaatgtatttttttttttctgtagaaaccgttgggttaaacaaacagttcagaagttttattacatggaacccatta

SEQ ID NO: 71 - DNA, 4044 bp, Homo sapiens
gtggattagcgagctcggtaatccggtctcctaaatgaacaaaaaagtagacgctttttgaggttgagcatatttcgattaaatcttggcttaggccctagatcaagggtttagatcagaataaaatgaaaattagtgttgcacgtacgcatattgcatcagaatcttgcagtgattgttttagtttcctgagttgcattgatagattcttttaaaatatgactgatttgcataactttagaagcagaatcattttcagtatatatggtgcacattgagggcaaaaagtagttttgttaatgtttaaacttaagttacctacaactttgaactgtatgtagaagttttgtagtttgaagtcaatagtgccataatataccttataaggcgttcttactagatctttgttatatttacctttttctctccctatggggtgatgtaggatagtgcttgaaatttgcacttcagtagcatttaatgttcagtgctcttgtcataaacatagaatggatattgagtagtttctgatcccagatggtaatgtgtaggttcaagggtattgtgtgtagcaagtgaagattgcagaaataaaacttcagttcatgcttgaaatttaagtattgttgtgatgccagaattgctgctcaccgtttttaggtttcaggtcctctgacaccttttggtatcgttaattttactgatttgtgtagaatgtcagttgtattttaccagctaatatctagaaatgctggcaagaggggtttactccagctttagattgtaggtatgttagcttttttcatacagtgtattaaatttactgagtcagcttgctgaataagacagaagcccaagaattttaacagtgtgtagctttagttgtctaaaagttaggccttcgggcttcaaaagttagtggtcatcgaaaagcattaatctttgcagtttcaggtacaacacattggttttgattagggatggggatggggccctctttttgcagaatggggaaagtattgacaggaattgagagctattggtaggccagtgtataaggtatgtgaaaacagaattaagttattggtctgaagtgactgaagcatttaggctctatcaaggcctaaaatttggtaatatgagtttggtaatgcgaattgtggcagtggacaatatttagttaaaattatgtaattgcataagtactagcacagtatttttaataaaagttatttcttagcaaatgtcagttgcattttgtctaaaggtagagtgacactacagtgtctatatgtcctgctaaaaattgtggggaatatttttttttaagacagcgtttatatcgggagaggttttattccgttggattatgttagctgcatataaatgtgcacagttaattttgcccaagtttttgttttgaaatgaatgtaaaacttactgaagaagtagcttcccaaaatttagttttctgttaagccaaaaatattattttaaaagagtatttgcaaattttgaagttgacattaattgagaatgttactaaggctaaactggacccgcttgcccagaagataattatggaaaaattcttttgtgacttccaaagcagtctactattagcatgaattactgacagtcatccaaatatataggaacaaaaaattaaatgtttatgtaactttgaaaaaaaagcctttgaagaaaataattgaatgctgtctgggagacagatttctttcagcacttaaagtacataacacactacttttacttttcccacttgattttaaattatcagggttattaagaccttaaaattattttaccaggtttttacatgtgagctgtgacatgactggcattttctttgatttcagcgtatgttggtctctacacatgaaatttgtgtgacttaaaactttctctaaaactgtacttttagttatgatatgcatagaaagcagtatcaaatattgcgtcaaatgactaataacacttaatttctagagttgtggttttattgagccaaaagttgatatgaaaaaaagtcagtaaggaaagtcagtgaagtgcttgcttttttgataattgcactcccaataattttgatattccaacgtacttggtttgcttgttttcacgttaatgttttctgtttattggagtgggaaggcattaaaattgtcattgaagactttgtctttgacatgttgtagtatttatttcagtaactaacctgtgaaaagttaaattcctttatgaaagtagtgattggagtatttttatctgataaagaaagattaataatgaagccatttctccgaggaaaattgaggacaataattcagttttaaaatattatcgcaaaattaaattattctaaaaatttgttagtagggttatatgcttaatattagtctgaaatatagtgctgaatttgagactatagaaaaattaagtgtatttagggtatgtggaaacgttaggcttctgttgtatttttattgtttggtagatttgcctcttttcaaataaatgttcacagggaatacttttaacttgtagagagtacagtgactattgaagttacctaaattacctcaaggtaagtgattactgaaattaatcatgagggttttaaaaagtattctattcacaacatttattttacattgttttgtatctgctaagttatatttcctgaaaaacatgactggaccacctaattgctgtatgataacttacaaacttcatttttcatagtgcttattcaagtgtaaagcacaactgaaaggagtaatgtacagtttatatgaggaaaaaggaattttattgctgccagtgtaaaagtttgcacagcagtatagtcatcaatgcagatttacattgcttataatatactaagtaaatactaaatgattaaagataataaaatatggtgaggtataaccaccttcattttaaacttagttttagaagatagtaaagaaagattcctttattacctttttagaattttatttttaataacatgggaaaggcaactggtgatattttaatttttgtatggaacagtgcatctgctttctcatagccacataaaatacataaacttcttagtgttatgaaatggcttactttttggaagtgaagaagtcttcaattcttattttctaatgttattttgaaatttgcctccatttgctgtttgttcatttggtgatagcgcaacacttaaaaaaatattttaagccgcttctgaagtaatcacttcagtgacttttaatggaggagtatttgttatgggaaattcacttcacaaagttttaacattaattcacttgaagtaaacgtgctatttttaaattttcatctcaatcttttaagtaagacgaaagcttaggaaatcacttttattattgatattgtgtgtgacttcagagtttgtaaagagaattgtagaagtgttgcatgcatatgacaattttctgcttaattgaaatgtgaggcctctgccatactacaaggatttagcttccagaaaatgtaatattaacatagcttaagaaatgtatttttttttttctgtagaaaccgttgggttaaacaaacagttcagaagttttattacatggaacccattagttcttaatcttgttacctttttcttcattttttctgttaaacttgattttcacagtcagcattgaagaattcatcttgtggcctgaattcattaagaaaagatgttaggatttgttctgaagatagtgacttaggaaatttgtgagactggggtcagtcagttctgttttacaattgctttctatttggtagctttgaaattaatttagttgcttatcagagagaataatgttgaggttagactaaccttaaattggtaaggctttgctgagcaaactgataactgtaagtcttttatagggtgcattactgccacatatacgttcttccataggtggttaaaagtatattggtctgtgtttggtgattctctttgtacatattgagtatatgcat

SEQ ID NO: 72 - DNA, 4051 bp, Homo sapiens
gaaaattagtgttgcacgtacgcatattgcatcagaatcttgcagtgattgttttagtttcctgagttgcattgatagattcttttaaaatatgactgatttgcataactttagaagcagaatcattttcagtatatatggtgcacattgagggcaaaaagtagttttgttaatgtttaaacttaagttacctacaactttgaactgtatgtagaagttttgtagtttgaagtcaatagtgccataatataccttataaggcgttcttactagatctttgttatatttacctttttctctccctatggggtgatgtaggatagtgcttgaaatttgcacttcagtagcatttaatgttcagtgctcttgtcataaacatagaatggatattgagtagtttctgatcccagatggtaatgtgtaggttcaagggtattgtgtgtagcaagtgaagattgcagaaataaaacttcagttcatgcttgaaatttaagtattgttgtgatgccagaattgctgctcaccgtttttaggtttcaggtcctctgacaccttttggtatcgttaattttactgatttgtgtagaatgtcagttgtattttaccagctaatatctagaaatgctggcaagaggggtttactccagctttagattgtaggtatgttagcttttttcatacagtgtattaaatttactgagtcagcttgctgaataagacagaagcccaagaattttaacagtgtgtagctttagttgtctaaaagttaggccttcgggcttcaaaagttagtggtcatcgaaaagcattaatctttgcagtttcaggtacaacacattggttttgattagggatggggatggggccctctttttgcagaatggggaaagtattgacaggaattgagagctattggtaggccagtgtataaggtatgtgaaaacagaattaagttattggtctgaagtgactgaagcatttaggctctatcaaggcctaaaatttggtaatatgagtttggtaatgcgaattgtggcagtggacaatatttagttaaaattatgtaattgcataagtactagcacagtatttttaataaaagttatttcttagcaaatgtcagttgcattttgtctaaaggtagagtgacactacagtgtctatatgtcctgctaaaaattgtggggaatatttttttttaagacagcgtttatatcgggagaggttttattccgttggattatgttagctgcatataaatgtgcacagttaattttgcccaagtttttgttttgaaatgaatgtaaaacttactgaagaagtagcttcccaaaatttagttttctgttaagccaaaaatattattttaaaagagtatttgcaaattttgaagttgacattaattgagaatgttactaaggctaaactggacccgcttgcccagaagataattatggaaaaattcttttgtgacttccaaagcagtctactattagcatgaattactgacagtcatccaaatatataggaacaaaaaattaaatgtttatgtaactttgaaaaaaaagcctttgaagaaaataattgaatgctgtctgggagacagatttctttcagcacttaaagtacataacacactacttttacttttcccacttgattttaaattatcagggttattaagaccttaaaattattttaccaggtttttacatgtgagctgtgacatgactggcattttctttgatttcagcgtatgttggtctctacacatgaaatttgtgtgacttaaaactttctctaaaactgtacttttagttatgatatgcatagaaagcagtatcaaatattgcgtcaaatgactaataacacttaatttctagagttgtggttttattgagccaaaagttgatatgaaaaaaagtcagtaaggaaagtcagtgaagtgcttgcttttttgataattgcactcccaataattttgatattccaacgtacttggtttgcttgttttcacgttaatgttttctgtttattggagtgggaaggcattaaaattgtcattgaagactttgtctttgacatgttgtagtatttatttcagtaactaacctgtgaaaagttaaattcctttatgaaagtagtgattggagtatttttatctgataaagaaagattaataatgaagccatttctccgaggaaaattgaggacaataattcagttttaaaatattatcgcaaaattaaattattctaaaaatttgttagtagggttatatgcttaatattagtctgaaatatagtgctgaatttgagactatagaaaaattaagtgtatttagggtatgtggaaacgttaggcttctgttgtatttttattgtttggtagatttgcctcttttcaaataaatgttcacagggaatacttttaacttgtagagagtacagtgactattgaagttacctaaattacctcaaggtaagtgattactgaaattaatcatgagggttttaaaaagtattctattcacaacatttattttacattgttttgtatctgctaagttatatttcctgaaaaacatgactggaccacctaattgctgtatgataacttacaaacttcatttttcatagtgcttattcaagtgtaaagcacaactgaaaggagtaatgtacagtttatatgaggaaaaaggaattttattgctgccagtgtaaaagtttgcacagcagtatagtcatcaatgcagatttacattgcttataatatactaagtaaatactaaatgattaaagataataaaatatggtgaggtataaccaccttcattttaaacttagttttagaagatagtaaagaaagattcctttattacctttttagaattttatttttaataacatgggaaaggcaactggtgatattttaatttttgtatggaacagtgcatctgctttctcatagccacataaaatacataaacttcttagtgttatgaaatggcttactttttggaagtgaagaagtcttcaattcttattttctaatgttattttgaaatttgcctccatttgctgtttgttcatttggtgatagcgcaacacttaaaaaaatattttaagccgcttctgaagtaatcacttcagtgacttttaatggaggagtatttgttatgggaaattcacttcacaaagttttaacattaattcacttgaagtaaacgtgctatttttaaattttcatctcaatcttttaagtaagacgaaagcttaggaaatcacttttattattgatattgtgtgtgacttcagagtttgtaaagagaattgtagaagtgttgcatgcatatgacaattttctgcttaattgaaatgtgaggcctctgccatactacaaggatttagcttccagaaaatgtaatattaacatagcttaagaaatgtatttttttttttctgtagaaaccgttgggttaaacaaacagttcagaagttttattacatggaacccattagttcttaatcttgttacctttttcttcattttttctgttaaacttgattttcacagtcagcattgaagaattcatcttgtggcctgaattcattaagaaaagatgttaggatttgttctgaagatagtgacttaggaaatttgtgagactggggtcagtcagttctgttttacaattgctttctatttggtagctttgaaattaatttagttgcttatcagagagaataatgttgaggttagactaaccttaaattggtaaggctttgctgagcaaactgataactgtaagtcttttatagggtgcattactgccacatatacgttcttccataggtggttaaaagtatattggtctgtgtttggtgattctctttgtacatattgagtatatgcattcactaatgtaaaataatttgccaagaaaggtgaaattagtatattgtacttgactattcacctttcccttagttttttgaatttttttcattggttgcagaggaagtattagcaatttaattcttttaaaata

SEQ ID NO: 73 - DNA, 4036 bp, Homo sapiens
gggcaaaaagtagttttgttaatgtttaaacttaagttacctacaactttgaactgtatgtagaagttttgtagtttgaagtcaatagtgccataatataccttataaggcgttcttactagatctttgttatatttacctttttctctccctatggggtgatgtaggatagtgcttgaaatttgcacttcagtagcatttaatgttcagtgctcttgtcataaacatagaatggatattgagtagtttctgatcccagatggtaatgtgtaggttcaagggtattgtgtgtagcaagtgaagattgcagaaataaaacttcagttcatgcttgaaatttaagtattgttgtgatgccagaattgctgctcaccgtttttaggtttcaggtcctctgacaccttttggtatcgttaattttactgatttgtgtagaatgtcagttgtattttaccagctaatatctagaaatgctggcaagaggggtttactccagctttagattgtaggtatgttagcttttttcatacagtgtattaaatttactgagtcagcttgctgaataagacagaagcccaagaattttaacagtgtgtagctttagttgtctaaaagttaggccttcgggcttcaaaagttagtggtcatcgaaaagcattaatctttgcagtttcaggtacaacacattggttttgattagggatggggatggggccctctttttgcagaatggggaaagtattgacaggaattgagagctattggtaggccagtgtataaggtatgtgaaaacagaattaagttattggtctgaagtgactgaagcatttaggctctatcaaggcctaaaatttggtaatatgagtttggtaatgcgaattgtggcagtggacaatatttagttaaaattatgtaattgcataagtactagcacagtatttttaataaaagttatttcttagcaaatgtcagttgcattttgtctaaaggtagagtgacactacagtgtctatatgtcctgctaaaaattgtggggaatatttttttttaagacagcgtttatatcgggagaggttttattccgttggattatgttagctgcatataaatgtgcacagttaattttgcccaagtttttgttttgaaatgaatgtaaaacttactgaagaagtagcttcccaaaatttagttttctgttaagccaaaaatattattttaaaagagtatttgcaaattttgaagttgacattaattgagaatgttactaaggctaaactggacccgcttgcccagaagataattatggaaaaattcttttgtgacttccaaagcagtctactattagcatgaattactgacagtcatccaaatatataggaacaaaaaattaaatgtttatgtaactttgaaaaaaaagcctttgaagaaaataattgaatgctgtctgggagacagatttctttcagcacttaaagtacataacacactacttttacttttcccacttgattttaaattatcagggttattaagaccttaaaattattttaccaggtttttacatgtgagctgtgacatgactggcattttctttgatttcagcgtatgttggtctctacacatgaaatttgtgtgacttaaaactttctctaaaactgtacttttagttatgatatgcatagaaagcagtatcaaatattgcgtcaaatgactaataacacttaatttctagagttgtggttttattgagccaaaagttgatatgaaaaaaagtcagtaaggaaagtcagtgaagtgcttgcttttttgataattgcactcccaataattttgatattccaacgtacttggtttgcttgttttcacgttaatgttttctgtttattggagtgggaaggcattaaaattgtcattgaagactttgtctttgacatgttgtagtatttatttcagtaactaacctgtgaaaagttaaattcctttatgaaagtagtgattggagtatttttatctgataaagaaagattaataatgaagccatttctccgaggaaaattgaggacaataattcagttttaaaatattatcgcaaaattaaattattctaaaaatttgttagtagggttatatgcttaatattagtctgaaatatagtgctgaatttgagactatagaaaaattaagtgtatttagggtatgtggaaacgttaggcttctgttgtatttttattgtttggtagatttgcctcttttcaaataaatgttcacagggaatacttttaacttgtagagagtacagtgactattgaagttacctaaattacctcaaggtaagtgattactgaaattaatcatgagggttttaaaaagtattctattcacaacatttattttacattgttttgtatctgctaagttatatttcctgaaaaacatgactggaccacctaattgctgtatgataacttacaaacttcatttttcatagtgcttattcaagtgtaaagcacaactgaaaggagtaatgtacagtttatatgaggaaaaaggaattttattgctgccagtgtaaaagtttgcacagcagtatagtcatcaatgcagatttacattgcttataatatactaagtaaatactaaatgattaaagataataaaatatggtgaggtataaccaccttcattttaaacttagttttagaagatagtaaagaaagattcctttattacctttttagaattttatttttaataacatgggaaaggcaactggtgatattttaatttttgtatggaacagtgcatctgctttctcatagccacataaaatacataaacttcttagtgttatgaaatggcttactttttggaagtgaagaagtcttcaattcttattttctaatgttattttgaaatttgcctccatttgctgtttgttcatttggtgatagcgcaacacttaaaaaaatattttaagccgcttctgaagtaatcacttcagtgacttttaatggaggagtatttgttatgggaaattcacttcacaaagttttaacattaattcacttgaagtaaacgtgctatttttaaattttcatctcaatcttttaagtaagacgaaagcttaggaaatcacttttattattgatattgtgtgtgacttcagagtttgtaaagagaattgtagaagtgttgcatgcatatgacaattttctgcttaattgaaatgtgaggcctctgccatactacaaggatttagcttccagaaaatgtaatattaacatagcttaagaaatgtatttttttttttctgtagaaaccgttgggttaaacaaacagttcagaagttttattacatggaacccattagttcttaatcttgttacctttttcttcattttttctgttaaacttgattttcacagtcagcattgaagaattcatcttgtggcctgaattcattaagaaaagatgttaggatttgttctgaagatagtgacttaggaaatttgtgagactggggtcagtcagttctgttttacaattgctttctatttggtagctttgaaattaatttagttgcttatcagagagaataatgttgaggttagactaaccttaaattggtaaggctttgctgagcaaactgataactgtaagtcttttatagggtgcattactgccacatatacgttcttccataggtggttaaaagtatattggtctgtgtttggtgattctctttgtacatattgagtatatgcattcactaatgtaaaataatttgccaagaaaggtgaaattagtatattgtacttgactattcacctttcccttagttttttgaatttttttcattggttgcagaggaagtattagcaatttaattcttttaaaataatttgcactggaataaataagtatcggcaaatataagaagagtaacataatttaagggtgaattaattttatttgggaagttttagttctgtatagttaaggcagattcttcatttgcaacagttgacattgggac

SEQ ID NO: 74 - DNA, 4044 bp, Homo sapiens
tgatcccagatggtaatgtgtaggttcaagggtattgtgtgtagcaagtgaagattgcagaaataaaacttcagttcatgcttgaaatttaagtattgttgtgatgccagaattgctgctcaccgtttttaggtttcaggtcctctgacaccttttggtatcgttaattttactgatttgtgtagaatgtcagttgtattttaccagctaatatctagaaatgctggcaagaggggtttactccagctttagattgtaggtatgttagcttttttcatacagtgtattaaatttactgagtcagcttgctgaataagacagaagcccaagaattttaacagtgtgtagctttagttgtctaaaagttaggccttcgggcttcaaaagttagtggtcatcgaaaagcattaatctttgcagtttcaggtacaacacattggttttgattagggatggggatggggccctctttttgcagaatggggaaagtattgacaggaattgagagctattggtaggccagtgtataaggtatgtgaaaacagaattaagttattggtctgaagtgactgaagcatttaggctctatcaaggcctaaaatttggtaatatgagtttggtaatgcgaattgtggcagtggacaatatttagttaaaattatgtaattgcataagtactagcacagtatttttaataaaagttatttcttagcaaatgtcagttgcattttgtctaaaggtagagtgacactacagtgtctatatgtcctgctaaaaattgtggggaatatttttttttaagacagcgtttatatcgggagaggttttattccgttggattatgttagctgcatataaatgtgcacagttaattttgcccaagtttttgttttgaaatgaatgtaaaacttactgaagaagtagcttcccaaaatttagttttctgttaagccaaaaatattattttaaaagagtatttgcaaattttgaagttgacattaattgagaatgttactaaggctaaactggacccgcttgcccagaagataattatggaaaaattcttttgtgacttccaaagcagtctactattagcatgaattactgacagtcatccaaatatataggaacaaaaaattaaatgtttatgtaactttgaaaaaaaagcctttgaagaaaataattgaatgctgtctgggagacagatttctttcagcacttaaagtacataacacactacttttacttttcccacttgattttaaattatcagggttattaagaccttaaaattattttaccaggtttttacatgtgagctgtgacatgactggcattttctttgatttcagcgtatgttggtctctacacatgaaatttgtgtgacttaaaactttctctaaaactgtacttttagttatgatatgcatagaaagcagtatcaaatattgcgtcaaatgactaataacacttaatttctagagttgtggttttattgagccaaaagttgatatgaaaaaaagtcagtaaggaaagtcagtgaagtgcttgcttttttgataattgcactcccaataattttgatattccaacgtacttggtttgcttgttttcacgttaatgttttctgtttattggagtgggaaggcattaaaattgtcattgaagactttgtctttgacatgttgtagtatttatttcagtaactaacctgtgaaaagttaaattcctttatgaaagtagtgattggagtatttttatctgataaagaaagattaataatgaagccatttctccgaggaaaattgaggacaataattcagttttaaaatattatcgcaaaattaaattattctaaaaatttgttagtagggttatatgcttaatattagtctgaaatatagtgctgaatttgagactatagaaaaattaagtgtatttagggtatgtggaaacgttaggcttctgttgtatttttattgtttggtagatttgcctcttttcaaataaatgttcacagggaatacttttaacttgtagagagtacagtgactattgaagttacctaaattacctcaaggtaagtgattactgaaattaatcatgagggttttaaaaagtattctattcacaacatttattttacattgttttgtatctgctaagttatatttcctgaaaaacatgactggaccacctaattgctgtatgataacttacaaacttcatttttcatagtgcttattcaagtgtaaagcacaactgaaaggagtaatgtacagtttatatgaggaaaaaggaattttattgctgccagtgtaaaagtttgcacagcagtatagtcatcaatgcagatttacattgcttataatatactaagtaaatactaaatgattaaagataataaaatatggtgaggtataaccaccttcattttaaacttagttttagaagatagtaaagaaagattcctttattacctttttagaattttatttttaataacatgggaaaggcaactggtgatattttaatttttgtatggaacagtgcatctgctttctcatagccacataaaatacataaacttcttagtgttatgaaatggcttactttttggaagtgaagaagtcttcaattcttattttctaatgttattttgaaatttgcctccatttgctgtttgttcatttggtgatagcgcaacacttaaaaaaatattttaagccgcttctgaagtaatcacttcagtgacttttaatggaggagtatttgttatgggaaattcacttcacaaagttttaacattaattcacttgaagtaaacgtgctatttttaaattttcatctcaatcttttaagtaagacgaaagcttaggaaatcacttttattattgatattgtgtgtgacttcagagtttgtaaagagaattgtagaagtgttgcatgcatatgacaattttctgcttaattgaaatgtgaggcctctgccatactacaaggatttagcttccagaaaatgtaatattaacatagcttaagaaatgtatttttttttttctgtagaaaccgttgggttaaacaaacagttcagaagttttattacatggaacccattagttcttaatcttgttacctttttcttcattttttctgttaaacttgattttcacagtcagcattgaagaattcatcttgtggcctgaattcattaagaaaagatgttaggatttgttctgaagatagtgacttaggaaatttgtgagactggggtcagtcagttctgttttacaattgctttctatttggtagctttgaaattaatttagttgcttatcagagagaataatgttgaggttagactaaccttaaattggtaaggctttgctgagcaaactgataactgtaagtcttttatagggtgcattactgccacatatacgttcttccataggtggttaaaagtatattggtctgtgtttggtgattctctttgtacatattgagtatatgcattcactaatgtaaaataatttgccaagaaaggtgaaattagtatattgtacttgactattcacctttcccttagttttttgaatttttttcattggttgcagaggaagtattagcaatttaattcttttaaaataatttgcactggaataaataagtatcggcaaatataagaagagtaacataatttaagggtgaattaattttatttgggaagttttagttctgtatagttaaggcagattcttcatttgcaacagttgacattgggacatgtgtgaacatcttcaaggtattaggacatcttcaaggcattactttttggcagtgttgagaatttttttttttttttttttttttttgagatggaatctcgctctatcgcccagtctggggtgcagtggcaggatctcggctcactggaacctctgcctcccaggttcaggcgattctcctgcctgaacctcccaagcagctgggattataggtgcatgccaccacgcccagatagtttttgtacttttagtagag

SEQ ID NO: 75 - DNA, 4049 bp, Homo sapiens
tgacttccaaagcagtctactattagcatgaattactgacagtcatccaaatatataggaacaaaaaattaaatgtttatgtaactttgaaaaaaaagcctttgaagaaaataattgaatgctgtctgggagacagatttctttcagcacttaaagtacataacacactacttttacttttcccacttgattttaaattatcagggttattaagaccttaaaattattttaccaggtttttacatgtgagctgtgacatgactggcattttctttgatttcagcgtatgttggtctctacacatgaaatttgtgtgacttaaaactttctctaaaactgtacttttagttatgatatgcatagaaagcagtatcaaatattgcgtcaaatgactaataacacttaatttctagagttgtggttttattgagccaaaagttgatatgaaaaaaagtcagtaaggaaagtcagtgaagtgcttgcttttttgataattgcactcccaataattttgatattccaacgtacttggtttgcttgttttcacgttaatgttttctgtttattggagtgggaaggcattaaaattgtcattgaagactttgtctttgacatgttgtagtatttatttcagtaactaacctgtgaaaagttaaattcctttatgaaagtagtgattggagtatttttatctgataaagaaagattaataatgaagccatttctccgaggaaaattgaggacaataattcagttttaaaatattatcgcaaaattaaattattctaaaaatttgttagtagggttatatgcttaatattagtctgaaatatagtgctgaatttgagactatagaaaaattaagtgtatttagggtatgtggaaacgttaggcttctgttgtatttttattgtttggtagatttgcctcttttcaaataaatgttcacagggaatacttttaacttgtagagagtacagtgactattgaagttacctaaattacctcaaggtaagtgattactgaaattaatcatgagggttttaaaaagtattctattcacaacatttattttacattgttttgtatctgctaagttatatttcctgaaaaacatgactggaccacctaattgctgtatgataacttacaaacttcatttttcatagtgcttattcaagtgtaaagcacaactgaaaggagtaatgtacagtttatatgaggaaaaaggaattttattgctgccagtgtaaaagtttgcacagcagtatagtcatcaatgcagatttacattgcttataatatactaagtaaatactaaatgattaaagataataaaatatggtgaggtataaccaccttcattttaaacttagttttagaagatagtaaagaaagattcctttattacctttttagaattttatttttaataacatgggaaaggcaactggtgatattttaatttttgtatggaacagtgcatctgctttctcatagccacataaaatacataaacttcttagtgttatgaaatggcttactttttggaagtgaagaagtcttcaattcttattttctaatgttattttgaaatttgcctccatttgctgtttgttcatttggtgatagcgcaacacttaaaaaaatattttaagccgcttctgaagtaatcacttcagtgacttttaatggaggagtatttgttatgggaaattcacttcacaaagttttaacattaattcacttgaagtaaacgtgctatttttaaattttcatctcaatcttttaagtaagacgaaagcttaggaaatcacttttattattgatattgtgtgtgacttcagagtttgtaaagagaattgtagaagtgttgcatgcatatgacaattttctgcttaattgaaatgtgaggcctctgccatactacaaggatttagcttccagaaaatgtaatattaacatagcttaagaaatgtatttttttttttctgtagaaaccgttgggttaaacaaacagttcagaagttttattacatggaacccattagttcttaatcttgttacctttttcttcattttttctgttaaacttgattttcacagtcagcattgaagaattcatcttgtggcctgaattcattaagaaaagatgttaggatttgttctgaagatagtgacttaggaaatttgtgagactggggtcagtcagttctgttttacaattgctttctatttggtagctttgaaattaatttagttgcttatcagagagaataatgttgaggttagactaaccttaaattggtaaggctttgctgagcaaactgataactgtaagtcttttatagggtgcattactgccacatatacgttcttccataggtggttaaaagtatattggtctgtgtttggtgattctctttgtacatattgagtatatgcattcactaatgtaaaataatttgccaagaaaggtgaaattagtatattgtacttgactattcacctttcccttagttttttgaatttttttcattggttgcagaggaagtattagcaatttaattcttttaaaataatttgcactggaataaataagtatcggcaaatataagaagagtaacataatttaagggtgaattaattttatttgggaagttttagttctgtatagttaaggcagattcttcatttgcaacagttgacattgggacatgtgtgaacatcttcaaggtattaggacatcttcaaggcattactttttggcagtgttgagaatttttttttttttttttttttttttgagatggaatctcgctctatcgcccagtctggggtgcagtggcaggatctcggctcactggaacctctgcctcccaggttcaggcgattctcctgcctgaacctcccaagcagctgggattataggtgcatgccaccacgcccagatagtttttgtacttttagtagagatggggttttaccaccttggccaggctggtctcaaactccagacctcaagtgatccgcctgcctcggcctcccaaaatgctgggattacaggcgtgagccactgcgcctggccagtgttgagaatattgagagatggatattgtagctgtacctgccatcaaaagaattttcttgacctccacatagtgtgaaaaagaagactgtttacacattatattttaagtaattatacacataattattatcagtactcaccacttcaaatatgaacagtgaatctaaccagtgtttgatttctctgtgtgtgtatgtgtatacaaagttagcaaaccttttatcttaatatttattaaaaaacgaatttttgtttctttaaagaaaagactaccttagagaatattgttctatagtttttaaatatggtcagatctattttaaattatgttaaaattttgagtattacgtttatctatacttttaagcatatatacattgtttcattttagattttagggaggcagtgtgggctctggagccagactgcttgttttgtaatcctggatcttccatttagtagctggatgactttgagtaggttatttagattttctcaatctattttatctgtaaaatggggatgataatggaacctaccgcatacgtttatcttgaatagtaagtgagataataataagtaatttcatttagcatagtacctgccacattgtaaatacttaaatggtagctactgctctgaaaaactgtaatttcaggttatgtatgtagggaaattatttgtattttcatttatggtgtatgattgtaactgaatttcctcagtttgggccatgttaggattttgtttcaagttataagtgtttttaaaaataagggtattcctttaggaagtctgggtatgacatgtctgtgattttgctggttcatcacaaatgggaaataaatctctgctaactcaaactgttgaccaaagtaaaattaattatgccaatcaaaaactatttgctttaaaatataaaaggcaaaaacttcctattagcataatgaagtagaat

SEQ ID NO: 76 - DNA, 4038 bp, Homo sapiens
ttgacattgggacatgtgtgaacatcttcaaggtattaggacatcttcaaggcattactttttggcagtgttgagaatttttttttttttttttttttttttgagatggaatctcgctctatcgcccagtctggggtgcagtggcaggatctcggctcactggaacctctgcctcccaggttcaggcgattctcctgcctgaacctcccaagcagctgggattataggtgcatgccaccacgcccagatagtttttgtacttttagtagagatggggttttaccaccttggccaggctggtctcaaactccagacctcaagtgatccgcctgcctcggcctcccaaaatgctgggattacaggcgtgagccactgcgcctggccagtgttgagaatattgagagatggatattgtagctgtacctgccatcaaaagaattttcttgacctccacatagtgtgaaaaagaagactgtttacacattatattttaagtaattatacacataattattatcagtactcaccacttcaaatatgaacagtgaatctaaccagtgtttgatttctctgtgtgtgtatgtgtatacaaagttagcaaaccttttatcttaatatttattaaaaaacgaatttttgtttctttaaagaaaagactaccttagagaatattgttctatagtttttaaatatggtcagatctattttaaattatgttaaaattttgagtattacgtttatctatacttttaagcatatatacattgtttcattttagattttagggaggcagtgtgggctctggagccagactgcttgttttgtaatcctggatcttccatttagtagctggatgactttgagtaggttatttagattttctcaatctattttatctgtaaaatggggatgataatggaacctaccgcatacgtttatcttgaatagtaagtgagataataataagtaatttcatttagcatagtacctgccacattgtaaatacttaaatggtagctactgctctgaaaaactgtaatttcaggttatgtatgtagggaaattatttgtattttcatttatggtgtatgattgtaactgaatttcctcagtttgggccatgttaggattttgtttcaagttataagtgtttttaaaaataagggtattcctttaggaagtctgggtatgacatgtctgtgattttgctggttcatcacaaatgggaaataaatctctgctaactcaaactgttgaccaaagtaaaattaattatgccaatcaaaaactatttgctttaaaatataaaaggcaaaaacttcctattagcataatgaagtagaatttttaaactttgttataatcttaaattttctttagtgttgaagataggtcaacttaactatcatacatttttattcacataaagtaaactctgcctcaaatgtaataaacttaatatgagttatgtaaactttggtcaatagaggtatattttttagcatttccttttgaaaatttcagccttttgagggagtcttgcaactgaatgtcaagttacatttattacaataaaatggacacttaatataatctgtaatgcattaacataatatgggaacttttaaagtattcagtctctgtattattgagtcctatttccacatttggccaggattctcaatatgatttaggcccaagacgtgggaagaaagaagtaaagaactaaaggatttttttcttcatttttttaattgaatatggggaaagatggaataagcttatctgtccagtaaaggccattatgtgtacatagggattattatttttcccccccttgggctgtactgatttcccagatgtaccacagcactcttagtagtgaagcacttgacttctagtgagtggattttttgtgtgtgtgttttatattgcagagtgaatacactctgtctgatactatgtgactttctgattatgtgatttttatgcattttatgtgttttgtaaactagctgtatttttggtccatgtctaggttgtagaattgaattgtgcattttggcatctgagcacagctgagttttctaaatcaatctctctccttgcacctagtttttgctttagatcactacctaagacttactgttgatttaatattagagcacttaagcatagctttgacttttatttcctttgatttttgtagattttcaggctgaagtacaataaggttctctgttctttactagtaattgcaaagattgtattctgtgaattttatttgtttaatacttttgatcttttgaagaggatgtaattatttaaggtattatgaaatgcattgtgatttgaattagatactctttggagatggagttttgctgttgttgcccaggctggagtgcaatggtgtgatctcggctcaccacagcctccgcctcctgggttcaagcaattctcttgccgcagcctcccaagtagctggaattacaggcatgcgccaccacgcccggctaattttatattttttttttcagtagagatggggggtttctccatgttggtcaggctggcctcgaactcttgacctcaggtaatctgcctgtctcagcctgctaaagtgctgagattacaggcatgagccactgcgcccggcctcagatactcttttaattagatgcgtttaaaaatttaacccaccattgctggcatgaatagatgtatttttagagtgattcataaatatcgtatacatgtttaaagttacaaactttttgcttatttcaaaatgcaggattcttttccatttaaaattccctctctttgtgagacttctttttgagtattctggttactctaaactgattggagatgaaattagatagaattgaaaactgtacttttaaaatgaaattttggggatgtcattaagcttgattttttaggttttttttttagtgtgtattataaattattttacactgattgtcagcgataaaatggaatgcctgggattttttaaaatttattttattcatttttataaggtaaaaacagtgttttgctaggcttaatttgaccatgttgtaaaatttattgtataccttgaaagaatcatttatgaaagatactgaattagctaatatatactctgtcttatgtagtttttgattaacaatacactttttaaatcattagctcatttgattttgcaaagaagaacaggtaacctaagaggcagacagaacaggcattacttttatttttctttcttttttattttatttatttatttatttatttattttttgcagcttaggaattgtagctccagtggaatcagtatcttgttaatggctagtgaaagactgagtctgaagaaggatgcaggacttttttggcacttggtgcagtatttttcccattatgttacatgagtggttcttaaacttcagtgtgttagaacaacctgaagggcttattaagctatggattgcttactccaccctcagagtttctgattcagtaggtctggattgggacctgagaatttttatttcttagaagttttcaagtgatgctgatgctggtgctctggggatcacactttgaggaccaccaatgaacattatctcccaccaagcaaacccttaacatgttatactcctttaggttattagaatttatacatgcattatttcatttgacctgtaaactctaagtaactttgcatggaaaatgttatcctgattttatagacgagatagtgagtttagaaaggcagtatggtggaatggagcatagatttggagttggctagacctaaagtccagattaaatctctgctcaaggctgggcgtggtggctcatgcctgtaatcccagtgctttgggaggccagcgttggcagattgcttgagtctggaagttcgagaccagtctgggcaacataggcagaccctgtctctacaaaaaaaaatacaaaaattagtcgggtgttatagtgcgcattggtagtcccagctactgaggaggc

SEQ ID NO: 77 - DNA, 4063 bp, Homo sapiens
ggagatgaaattagatagaattgaaaactgtacttttaaaatgaaattttggggatgtcattaagcttgattttttaggttttttttttagtgtgtattataaattattttacactgattgtcagcgataaaatggaatgcctgggattttttaaaatttattttattcatttttataaggtaaaaacagtgttttgctaggcttaatttgaccatgttgtaaaatttattgtataccttgaaagaatcatttatgaaagatactgaattagctaatatatactctgtcttatgtagtttttgattaacaatacactttttaaatcattagctcatttgattttgcaaagaagaacaggtaacctaagaggcagacagaacaggcattacttttatttttctttcttttttattttatttatttatttatttatttattttttgcagcttaggaattgtagctccagtggaatcagtatcttgttaatggctagtgaaagactgagtctgaagaaggatgcaggacttttttggcacttggtgcagtatttttcccattatgttacatgagtggttcttaaacttcagtgtgttagaacaacctgaagggcttattaagctatggattgcttactccaccctcagagtttctgattcagtaggtctggattgggacctgagaatttttatttcttagaagttttcaagtgatgctgatgctggtgctctggggatcacactttgaggaccaccaatgaacattatctcccaccaagcaaacccttaacatgttatactcctttaggttattagaatttatacatgcattatttcatttgacctgtaaactctaagtaactttgcatggaaaatgttatcctgattttatagacgagatagtgagtttagaaaggcagtatggtggaatggagcatagatttggagttggctagacctaaagtccagattaaatctctgctcaaggctgggcgtggtggctcatgcctgtaatcccagtgctttgggaggccagcgttggcagattgcttgagtctggaagttcgagaccagtctgggcaacataggcagaccctgtctctacaaaaaaaaatacaaaaattagtcgggtgttatagtgcgcattggtagtcccagctactgaggaggctgaggtgggatcacctgagactgggactttgaggctgcattgagctgtgattgggacactgtactcctgcctgggtgacagagtgagaccctctctcaaaaataaataaataaatacatccccgctcagccacttatcagttacgtagatacactgcctaaccttagtgaaccctgtttcgacaactccaaaatgggagtaaaaatcctaaacttgtacagtggttttttagttttgttaaaagtacaggtgaggtttttttcagagtattggttgccatctgagagtgatcccctttcacctcctctaggacttttagcattttctggagacattttggtggtcacagctggggtggtagagtgtgctattggctaggggcttgaagccagtgatgctgcttaacatcctatatggcacaagacccctccccatcaacaaagaattatctagcccaaaatgctgtgtaaaatgtctggtatataataagtataatatttgatgaaaatcagtacctttgcccccaggtgtgatatttaagaaggtcaacttactaaatcagtgatggagttagtcctaacatctgggtgttctgactgctgctaggccagtattctttatatgataataagaactttgtccacagaagatatccctaataacaaaaaaggtttatttgaagaggactcatgtgttctttggctgattgtgaaagtgttgctttgaacttctgttagaaaaggttgaagatgttttccgtaagtgtttttaatactgtacgtagtattcagaaggatgtttaattttttttttaattttgctagtagtttttaaagtaatcctttttcctttaattatgtagttgttgaactgttgggagttacttttctcttactattttgttatttaatgtattctttgaccttatgcttttttattctaaagctgcttttattatagtcagatatgatgaagttaaatgtacaatgtaaaattgcaaatttccaacgagctatacaaacttaaatatttctaagtaaagaaaatagggctgactctaaggttctttgatccatgtgttgcattcttttctaggccctaaatttgctatgccagcctgttgaattaaagtgctttatttatctaaattagaaacttgtattaaagtgaagttttagaaaaaaagaaacaaaatcggaatggagttttaggttagcccagagatgggaagatgccaagaaggtagctttagtggattctgaattttttggttttgttttgtttttagggcaggcaaatgtaattacaaaagggttctaggaatagattgctgtgattttttttctgtttgcatgattttacagtttgctttgcctctcacttttgaatgcagaataaaatgtcaaggccttatttttttttaaattcttaagaaatttaagatttgactgttaattccttttgaaatatgggatattttgagataccaattatttaagacaaataggactcattgttacaattcagttgaataaggcttatgatgtttatttcagtatatgaatgaaaactatgtgcttattgtacttaagaaaatttcttttattaaaaacatgactaaagagaattttaaaaatcacccactgtcctacttctctaaaacttaatgttttcatattagcttccagttttgttcatatgcatatactttaaaacctagttcatggtgaacttaagagggtgttctttttaaaaaacaatttccattgcactttgtcgttgccttaattaaatggtgaaatcatcagaaatatttattttcctatacttatacatttattaagcttgtttccatttttttattttgtgattttttaagtggatttaagataacctaaacattagagaggattttcatggttttgattcatgaaatcataatgttatacaaacctaactgaagtgttagagccttgaagatttttcccccgaattacatatagtaactctacttgtatttaatactgaaagcatattttacttatttaagtgagacaaagtaaaatttagctgaatactttagatctatcatttccttttcctgttgtaagaacattacattgtgttgaaattaaagtggatatagaaggtaattagaataaactgccacatcatttttatagtaaagtggtaataacactattgctttctgtttttttaatcagaaggagtatgggcttataatgatgttactgttccctgaagcatattttgaatgatacggtttatatttgcacagttgcccaggtaatcattgtgatattaattgatcaatttgctatttatttgcgttttaaatcagtactagtatttgtgcttaaaaattttgcatatgttttatcagatttaatttttaagtgtcagatactaaaacaaataaccttaactttattaaattataattttttatcatgaggtggtattcatttattcatatagttagaacaaaaaatatttaaaatattgaggtagaaacaaattagtctctttttaattaaaagccagattacttgttagagtaacattttcccaaatgaggtaaaattgttgcgactgttaaacttaaggaaattttgatctaggtgtggtatataccttcttgtggggtgctaatgaaaacagggatggcaaaaatattttgtttgtgagtgtatgcatttatgctttttgacaacctaagaaacactcttacatctgagtatctttcatggactagctgtaggaaatctatataaaatagcttagtatactgaaagtatgacatagttttacatatctagattgtggttgtgattatatataatactataaaatatgctaacgtgctgcttaata

SEQ ID NO: 78 - DNA, 4047 bp, Homo sapiens
aatagcttagtatactgaaagtatgacatagttttacatatctagattgtggttgtgattatatataatactataaaatatgctaacgtgctgcttaataatactatttggattttttttaatactgaaaaggtcacacagattgtgattattgtgtagtgtccaagaactaaggcctaccatctgttactcaaatgtatgaaaaagttaagataatttagtgatataagtggttttgacaccactgtttttggaataatctaattatgatttttataaagactaatatcaaattttaaacgtttgcaaaaatgaaacctaatagttatactgttatttatatttttctattacaatacagatactggctgagaactaaagattgtgtaataaacgcctggccttcagtcatttggttttttttttccctcgattgtttggatagttaactggacatcatgttttaacttgagaaattaagttatacaagattttgatattttaaactagttttcctaactggttgagatatataagaatttagtattacaggactcaatcagggaactgatttaataagaatttcttaaaaatttgtttaaatatttttcaagttcttttcttcatcttctacaacttaattcttgtctgtatgcaaatgagcttccccatttaaaattttgctgttgcattttaggccactatagaagttgtttctttaattttcactcacaagaatttggtcttaccaaattgtgtaaatctttaaaattgtgtatttggcttaatattatagaatctgattgatttaatctaccttgtttcatttagtatgttgacattttcttgagaaatttgttatgccaaatgattaacataataatattttaagtttagatatgattttgaatttacattttcaaatgcaactttgtgtctgtggccttttttttttttttttttttacgagaaacatcttgccaattttcagattaatctgtgaggaaagtagattggtttactagactcagtttgtagactttggtgagaactgaattggaggctatgaaaaaaataccttttgggcctttctgaatagacatatatacataaattatatctcttacattaagtgaggcacatatgtaggtgagatttttacctgaatattaaaagtttaaaagtcgttacctattctgtttacttaatagtatttaaagggtgtgagaggtgttatgtgtttctgtcccttgtttttattcctatccctcccatctaactgttggtactcttatcttcccaggtattaaacttgtatgttttaaaagcttatttacttgttgaaatggttaacttaattagttttttctttgaagtttcagcctaaatattttctgtttttttatatgtcctttaaatatgaaaattctacagctaatcataattagtaattgtactttttcccctattacaataactggtttcataataaaatggtatcccttcaataacaagcatttatagtagtttattaaaactaagggtgttatctattcaaaccaagcaatgcagacttactgttgactctgttaatatattttaaaattgcatattactaaaatttaaaatatgattttgactagtattttggtgtatgttattttagatattttgattatgcactacttaagaatgaattgtcaagtatgattataaagttgatataatagttaaccttcagtgggaataggaatcatttaatattgttagatatttgtattattagaacaatctcctatgattcttactaatatagtaatgaatgacagacaatatgttggctttcatatttaaaaattcacatgcatttctagtttatgtttttcttcgactaaaattctgcagcacttaggcaaagctatttttaccagttggaaaaaaagtaagtcatttccaaccaattttcctggcttgtagtatagaataaagagacttgattttattacattaaagccaaatataaaatgatgcaatctagcacacacttgtttggaacttttctcttttaaatattcagattaagaggacgttgaaaggtaaatttttttttttttttgagacggagtctagctctgtcacccaggctggagtgcactggcacgatttcggcttactgcaagctctgcctcccaggttcatgccattctcctgcctcagcctcccgagtagctgggactacaggcgcctaccacggtggcgcccggctaattttttgtatttttagtagagacggggtttcaccgtgttagccaggatggtctcgatctcctgacctcgtgatctgcctgcctcggcctcccaaagtgctgggattacaggtaaattttgattgttattagcaactataaaagttttgcagttggcttattggaaaaagaaaacctccttgccggagacggagacgcatttgtattagaactttgttttctgagtaccttacctatagtaggtttcaaatattggtgaattagttgatggttaggtctgcataattactgcgtatggaaattctggaaccctattttttcaaaatgcagctaatgttgagagaatatgcactaaatattactagatctttgtttttcaagatgctgatatcccttaacatcttctgcactttacctgtttgaatatcttttttgctgtaaaaattagtggccttatgtctttctgcataattatagagtagccaaaacctgttttaggttaatcacctctggcaaaataaatgataaaagcatagcttttgtaagcagaatgatattacagaagttaacttataaatctaagtgtattaaagacacttaggaaatttatgataatgctgggtcagcattacagttttaactttttacagtttttcatatgctttttttgtgattttgctgtagaaaattaacagttggcatttggcttagttcaagtataatgctgttgacaagtatatctgacacgtcattgaactaataatatttttgaaagctgataggtaagttatatctattttgtttcattcgtcattagtgatcggtcttagatgtttttagcgagagcaaaactgtagaggaatgtgtgtctgtgtgtgtatatgtgtgtgtgtgtgtgtgtattttaacagcaggagagttctgaaacaggaaaccagtcttatcatattcatccagagacctaggaagaaggtaattgtttggtatactcgttaaaaccagttggttgggcaacttaaatttttagaggatcacagatgtaggcttgagcagttgtagatagatgatttctttttttttctttcttttttcttttttttttgagatagagtctctctctgtcatccaggctggagtgcggtggcgcgatcttggcttactgcaacctctgcctcccaggttcaggcgtttctcctgtctcagcctcctgagtagctgggattacaggcgcatgctgccatgcccggctaattttttgtattttagtagagacggggtttcaccgtgttccccaggctggtctcgaactcctgagctcaggcaatctacccacctcggcctcccaaagtgctgggattacaggcgtgagccaccgtgtctggcgatagattatttcataattaacacctgctatgaagaaaaattgattaaaatagttgagaagtctagtacactctcagctaatatactaaattatactatggattttagagtattgttaacattatcagtgacttgatatcttcctgaggttctaatttgcttaactttaaataattggggttcagatcaccttgattgttcccttaaagattaaattttgtaaaactgtgtgtaattttcctgtatctggtttggatagctttaaaaatggttcttaagtttaatgagttcaactgggaaaaaagttagttctattttagatgttgtgtcactggaaattatgtttccctgtttgttatatgcacattattacaaagttgtaatcaatgttttcata

SEQ ID NO: 79 - DNA, 4045 bp, Homo sapiens
agaaaaagatactttgtgatgtaaactattattgtagtgctctataatcattttttggcttaccgtacctaatggacttcagggggatacagttcatttgataagaactgaccttatacattacataatcaggtacttatgtgatatcatttcctggactccataaaatgctggtcaccaggtttaatacctggattccattacagtgtgatttttgtcttatttcatagttggggattaggcttaaaatcctagagtggatttattcagttaaatttattcacactaagatgtagatgactaatactgtatatttttatgtagaccaaattttaaggtaccactgtgcatatgtataccaactacctgaagaagtatttggttggtacaagagatatagaaaggaatcgctgggtgtaccaaggctaatcagttttataattttgcataattttctaactgcgattatcatttagtttagaacaatttatttctcaaggcccatgtaaatattatttttaaaatatacagtcttaagaattcatggcatattttatgaaaggaggaattcatgtctgatgtgcaaatagtcttaacatattttctaatttcagagcaaaaatatatatgtatgaataaattaactgtaaattgtcagtaggaaccttaagaattcgtggcgtattttatgaaaggaattcatgtctgatgtgcaaatagtcttaacatatttgctaatttcagagcaaaaatatatgtgtattaataaatcaactgtaaattgtcagtaagaaccttaatggctttaaaagttaaaatttcaggtcaagcattgtggtgtgctcctgtagtcccagctacttgggaggctgaggtgggaggatcacttggcttgaacccccaggtagagggtagaggccagtctgggtaacacagcgagaacccatctcttaaaaaaaaagtttaagttgtggattatttcctttacactctttcattagtatctttcctggagactttcaatttaaatacttggtgcttatgacaattagatgttaaaatggatgggaaagtactttgtaacttataaagcattatgcagatgtagactccttttataatagttgtgtaagtatataagacaacctacattcttcatgagctagccataagttttagcaacttgctttgaaccacggtagatttacaattttctgtagtattgagttgtgttcatttagaattttgtaatatttatattgaaaatcaaatttttgtacctacaaaaactacaaaaaatccccctagtttttatagtttctattaaaattatagctggtacatagggatgccagaaggactgtttaagaagctgaaaatagagaaatgaatttatcttctcatagttaggcagggcacagtagaaggatgcttaacattgcaagctgatgggaacagcaggttgatatagcttgtgataacacttctaaagaaaaagcaatgagccatagaaaaaagaaaaagatacattttgaattaaggaagatggtgaatctgggaagtgagcagtacagtcaccagacgtgtatcctctcctatggtacagaagtgtttattgggtctctttatggcctgcatgatatatcccacaagatgacctacttcacattattttaattctgtattcaactaagcactaattcaacccagccagattagtactcataccaaaaaagagtgaatactctgaatagagggcaggttttctgattatggtgagaatatctttgtggtaaattaatctggtgtgctagtttttacgttggtctcttctcagtgtcgttagtcactgaggctgattgatcatcttttaggttactgataaagttcctgtacagctgattttcagaccttagattgcaataacttcaccaagaaaatacttcattgggaagcattttggtccttccatttgattcataactcttacctttatgcctctgaaggaaaagatttatacattcagcttgtaattagtaatcaagactgaggtttagtctatctagcttcacaatctatctagtttgttttgtctagccatatgatttcttcaaatatgccatttcttaaaaaaaaatgttttatgtatcccgattaatatttagccagtggttcttttagccgatggatcttgtcacctcttatgatactattaatagcatgtcaacatgaagaattatctgctgaatataatagctatgctgtccttgtttccttttgtctcattcttttttgattgggggataattggccaataaagctttgatagcctctattgcccaggcccctcctcttcttttatgagagaaaggatgaacagtgaccagaaataaaggtattgtttttttctatcaactaaaatggaaataaataattcctaagtaatttgcctgttaggattaaagtctccaagagaatggctgtgcctagtacctaagtgattaatttccttgattggttcacattatattgaggatattagtaatcagtagtgattccttttttggttcaaagatgatagtgtcacagtgaaaaatgtttttaaaatttttgtatacttaatttttctgttaacgaaagtattttcagttggatttttgtttgccctctctattagaatgcccaaagaatatttaaaattttccttttctcttatactgcatatttttcctgtgatttttccccaaacggaaaatactctgcagagattagactttgttattgttgtactacatcattgctttgactaaaataaactcagattgcaaataccttcaagcttacattgctcagtatttttttttttttttttttttgagacggagtctcactcttgtcgcccaggctggagtgcagtggtgccatctcagctcactgcaacctctgcctcctgggttcaagcgattctcctgcctcagcctgcggagcagctgggattatagatgcccgcccccacgcccagctgatttttgtatttgtagtagagatggggttttaccttgttggccagtctggtctcaaactcctgacctcgggtgatccatctgtctcggcctctggaattacaggtgtgagccgccacgcctggctaaattgatcagtattatttaactttgagggatatgatttgttatggaatgcgaagttttatacttgaggtactcagagtccttttgagacaaatatttaacttctccttttgaggttaccgcctacgattgggaattaatgtaaaaaataagccaaaagaaagtgagggaaaagtgaaccaagctgtaatttttttactcttttttattgttgttgttattgttgctgttttttactatcttgattgcaacagtttggcttatatatatagcatttggaattgacagtaagaaagccacatctcatagaagctaactattcccaaattgtttttttcttcttttcctcttactactgctgttttcctcctttcttgctgctaagctcttgtcctgacatgctggtaatatgaaacagtgttttattcagataattgattattctgtaatatgtatgttaatcttttttattacactttaagtaatagggtacatatgcacaacttacagattcgttacatatgtatacatgtgccgtgttggtttgctgcacccattaactcgtcatttacattaggtatttctcctaatgttatccctctcccaaccccccaccccaggacaggccccggtgtgtgatgttccccgccctgtgtccaagtgttctcgttgttcagttgccacctgtgagtgagaacatgcggtgtttggttttctgtccttgcgatagtttgctcagaatgatggtttccagcttcatctatgtccctacaaaggacgtgaagctcatccttttttatggctgcatactactccgtggtgtatatgtgccacattttcttaatccagtcagtcattgatggacatttgggttggttctaattctttgctattgt

SEQ ID NO: 80 - DNA, 4029 bp, Homo sapiens
catattttcagacttcctcctcatccttcttcttgccagtagttgtattataattcctgccagtagttacattataattttggttatatcaatattgagtttttatgggattataactagataaatgccattcatagttaagtgatagagtatattgtgacttttttcctgcatgttttattttttctggacttcacagttgtctctcttttttttaaaaaaattagttttcaatgttcttagctttaattcataaactcacccctaattgtataaatctctcaacatgtttaagcacatttggcattatatcaattttatcttttccaggtgccttctaatctgtcccagtctggactaattgttcttcctggcttgctgtatggctgtctactcaagatgtcccttcaccatcattctagggattcccttttcctctcttgtgggttagattcttcagttcttggagactgtcatcttctttcatggtttcccactcttgttttggcggagcacatctttagtaacttcctgacaaagtgtatggtttgagatttcgctgattttaaaatgcccttattatatagtcacacttgatttatagtctgtcttggtatagaattctaggctgagaagagttttccctcaaaatcagaaggttttgcccaattgttttttagctgctagtattgctgttaaaaaggataatgtcattttgattctagattcttttatgaaacctgtttcttctctggcagcttttaggatcttctgtttctttggtattcagaaatttcatgagatatgtgtgcttctattttggtcttattttcatctgttttgccaggtactcatgcaactttccagtttgaaaactcacatccttcacttttgagtatttttcttgagttatgtcttcggtttcttctcagtgttctctgtttctggaactcctaaaatatatttaacatcctgaactcttagtttttgtttagtcttctgattttcatttgtctttttattctgtatattctgttaattcctcggcttcatggtcttctagcccttcttttgcctatcttatggggttgaggattaaacagtttatatacctgaggtgcttaggatatgtctgtcatatagtaagtgcttgtgttagctgtaattgttgtttactttcataactgtcttgagggaaaggtctttggtcttgattctttgacttcttggctgtacatgaccttggacgagttatgtaatctctttgagacctacctccctcttctgtatagtgttaataagctctagctctcagatgtttgtgagggtcgaatggagtatatatgtgaaaatgtttaatacctttgtacagaattaatagttagtacgtggatctttcaaatatcaaaagttttcagtttgatgggaaaatgatgtctgaattttcagggttatttttaagagtacttgattatgactgtcttgtaaatctctatgagctaggtatacttgcactaaatgctaatgctttttaaagaagttatgtcttaatattcagtctcattatgttaggttgaagatagaagattatgaaaatattctctgaaaagctctggttttacttcagattgtataaatctgtgtaatgtaataattatttaagaatgacatgattactactctaaacccatagaaggggtatttgttggattatttattttcacttaaatggtatttgagattaggaaaaagaaaatctgtcttttggtttttcttgatagtattaatgtaatttcaaatgttagctcatttttgttaatggtggctttttgtttgtttgttttgttttaaggtttttggattcaaagcataaaaaccattacaagatatacaatctgtaagtatgttttcttatttgtatgcttgcaaatatcttctaaaacaactattaagtgaaagttatctgcttgttagagtgaggtagagttaaagatacattttaacagaattgtattcctaaaccgattaagtcaagaagtccaagagcattgttagatcatttagaaagtgtagtgatgaggtaaaacattgttggcacagattcatgttacttgatctgctttaaatgacttggcatctagcccatatttgagcccataaccgtgtggtaatttgaagtgtaattcacagtagagcttctgttaaagcactaatagcatcttccatggaggtatacttcagagtgaatataattttgtttatcctgtgtctctagagctattgactgaaaaagctgttagggcattctctaactgtacatcacctaagttatttaaaattgctgaattaggtggcttgtcttgtctaggacagagttttaaggactgcccacctgattgatagagctagttgaccttatctttaactttttgtttttcttttgactttgggagtagagatgtgaaaaggtaaaaaggaaggaaggaagagaaaacttaactctttttgcccatgaagactgtttttccttctcaaaatattgactattttctgatttgtaaaaatcggcacataaaacgtgttattttttacttgacttttatctttcccatgtgatatctataaattatagataggaaaaatttatctgtaatttagtgatctttctagtgtgataaaacgtcagaagtactgagagtggagtggacattgatattgttactctcagtaagttttcactgatttttctcagagtcatgaaggaacaaacgtttgttaagtccttatcacttattagataacacaaaacatgttgggggggtgtgtacagaggtgagtaagatgtagctcccattctcaagtcgcttacattctaatgtaaaaggtagacaaagcattacagaagaagtaactctgctatagaaggttgcaatgaagagaacattggaaacactaattttaccttataaagaaggtttcataaaggaaggcaagtttgagctggggtgaaaaggaccagtaagggttgactttcaagccaaggagaggaggggaagtgatgttacaggccaaaggaatggcattgtaagaagcttgttggcataaaagtgtttagaatatggcagcgaattcattatcatcagattgtggtgtctgtatgttgggggtgggagagaattgtggtggcaataggcaacaagataaaagaaagtaaaaggtgttatggaaacttaatgggtccagcttacaaatgatctatgcatttaggggtctttctcttttcctgataaacctctcctacaaagagccttgttgcggataccatagtgtttctttggaggaaaataaaaactacaaagctttgtattttttgcacaactggattcagaatataagtaataaaaaaggacaagaactttcaaaagctagaagccattaaactgagtcacttcagggttagactatcagaactggggatttagaaagtctcagaatggaaatcgaaggacaccaaagacaaattcggcctttttcaaaattttattctagtttaacatattcaaagaaagggaaggaaattcttttcattcctgtgtgtagtgacttcctgctttaagaacttaggacttcagctgtactatcagtattgtaggccacttaacattattatggttaaagttggcattggagagagcctaggaacctaactgcctgtttgtttttatatttccaaccattggattcccaagttaatgaagtctgtttattagttgagggtagctcttaatgcatatattttaatgccccttccccacatggaatcataagctttcagaactggagagtacctgaaagagatcatttagtccaaccttctcattttacagatggggaatctgaggcctagagaagttaagtgagttgaacaaggtcacacaggtacatatggtagccgaccatccactgtttatgccaatattccctttacgttttgcttttttgcttgttcgttttaacctctccaaattt

SEQ ID NO: 81 - DNA, 4047 bp, Homo sapiens
aggtgcttaggatatgtctgtcatatagtaagtgcttgtgttagctgtaattgttgtttactttcataactgtcttgagggaaaggtctttggtcttgattctttgacttcttggctgtacatgaccttggacgagttatgtaatctctttgagacctacctccctcttctgtatagtgttaataagctctagctctcagatgtttgtgagggtcgaatggagtatatatgtgaaaatgtttaatacctttgtacagaattaatagttagtacgtggatctttcaaatatcaaaagttttcagtttgatgggaaaatgatgtctgaattttcagggttatttttaagagtacttgattatgactgtcttgtaaatctctatgagctaggtatacttgcactaaatgctaatgctttttaaagaagttatgtcttaatattcagtctcattatgttaggttgaagatagaagattatgaaaatattctctgaaaagctctggttttacttcagattgtataaatctgtgtaatgtaataattatttaagaatgacatgattactactctaaacccatagaaggggtatttgttggattatttattttcacttaaatggtatttgagattaggaaaaagaaaatctgtcttttggtttttcttgatagtattaatgtaatttcaaatgttagctcatttttgttaatggtggctttttgtttgtttgttttgttttaaggtttttggattcaaagcataaaaaccattacaagatatacaatctgtaagtatgttttcttatttgtatgcttgcaaatatcttctaaaacaactattaagtgaaagttatctgcttgttagagtgaggtagagttaaagatacattttaacagaattgtattcctaaaccgattaagtcaagaagtccaagagcattgttagatcatttagaaagtgtagtgatgaggtaaaacattgttggcacagattcatgttacttgatctgctttaaatgacttggcatctagcccatatttgagcccataaccgtgtggtaatttgaagtgtaattcacagtagagcttctgttaaagcactaatagcatcttccatggaggtatacttcagagtgaatataattttgtttatcctgtgtctctagagctattgactgaaaaagctgttagggcattctctaactgtacatcacctaagttatttaaaattgctgaattaggtggcttgtcttgtctaggacagagttttaaggactgcccacctgattgatagagctagttgaccttatctttaactttttgtttttcttttgactttgggagtagagatgtgaaaaggtaaaaaggaaggaaggaagagaaaacttaactctttttgcccatgaagactgtttttccttctcaaaatattgactattttctgatttgtaaaaatcggcacataaaacgtgttattttttacttgacttttatctttcccatgtgatatctataaattatagataggaaaaatttatctgtaatttagtgatctttctagtgtgataaaacgtcagaagtactgagagtggagtggacattgatattgttactctcagtaagttttcactgatttttctcagagtcatgaaggaacaaacgtttgttaagtccttatcacttattagataacacaaaacatgttgggggggtgtgtacagaggtgagtaagatgtagctcccattctcaagtcgcttacattctaatgtaaaaggtagacaaagcattacagaagaagtaactctgctatagaaggttgcaatgaagagaacattggaaacactaattttaccttataaagaaggtttcataaaggaaggcaagtttgagctggggtgaaaaggaccagtaagggttgactttcaagccaaggagaggaggggaagtgatgttacaggccaaaggaatggcattgtaagaagcttgttggcataaaagtgtttagaatatggcagcgaattcattatcatcagattgtggtgtctgtatgttgggggtgggagagaattgtggtggcaataggcaacaagataaaagaaagtaaaaggtgttatggaaacttaatgggtccagcttacaaatgatctatgcatttaggggtctttctcttttcctgataaacctctcctacaaagagccttgttgcggataccatagtgtttctttggaggaaaataaaaactacaaagctttgtattttttgcacaactggattcagaatataagtaataaaaaaggacaagaactttcaaaagctagaagccattaaactgagtcacttcagggttagactatcagaactggggatttagaaagtctcagaatggaaatcgaaggacaccaaagacaaattcggcctttttcaaaattttattctagtttaacatattcaaagaaagggaaggaaattcttttcattcctgtgtgtagtgacttcctgctttaagaacttaggacttcagctgtactatcagtattgtaggccacttaacattattatggttaaagttggcattggagagagcctaggaacctaactgcctgtttgtttttatatttccaaccattggattcccaagttaatgaagtctgtttattagttgagggtagctcttaatgcatatattttaatgccccttccccacatggaatcataagctttcagaactggagagtacctgaaagagatcatttagtccaaccttctcattttacagatggggaatctgaggcctagagaagttaagtgagttgaacaaggtcacacaggtacatatggtagccgaccatccactgtttatgccaatattccctttacgttttgcttttttgcttgttcgttttaacctctccaaattttactgacttcagaagtttctagaactaagttatagcatgttttgagttctaatgtcactttccgatcttctttaccttttttctacctctgtttgtatttctggttctggttaagtgagtctggtaagcagcaggtgttctattttatttcttttatttttaggatagtattacatgtgatatatatgtctttgcaaacatacataatttgaagatcttaaaatatttgcactaggcatacccacatttaatagtatgttaaatcttttatagcaattatgatatacatgggtgaagaagagttcctaatatggcctttctgattaactgtatctgtttatatctgtgttttcttcaggcattcataacattaagcaaattcaggtgtactgttacttaattgaattaatcagtttgttttgtacaagtatattttatttttgttccttgttgtataatctggtaggaatggggaaggggagatagtgaataaagagatgtatacttcttgcctttgaggaatttaagttttcactgtataccaattttttaaaggtatttactatatttcagtgcatattttatttgacatactttatcattttgtggtaaacctttagctttactaattttcatctattaagttttcttttgtaagatggtgatagcttcatcaaagagagtaaagaagagacctgcctacctagctgattctatggcaaatctcacttctctggaagcttttcctgttaatcttattccttcagtttctgcctcttgtttcataaaaactcattctttaaatgcttattcatttctcttgtctcatataaaccaatatgaggtactggtatcttttgagttttagttataaggaagcataaatggttaaatttaaatggctaaaccccatttgccatttgtgtatctttaattttagtttgttgagagacttatcactaccaaaccacaaagaatttaaaagaaactgtcagtaggtataggtggaaggagggcatttatcagagattttaatttaagaagaaagtcttcatccttatcctaccaacccccattccctgagcatatttatcattactagtcccagcatatttgctcccatatttcctatg

SEQ ID NO: 82 - DNA, 4047 bp, Homo sapiens
aatgatgtctgaattttcagggttatttttaagagtacttgattatgactgtcttgtaaatctctatgagctaggtatacttgcactaaatgctaatgctttttaaagaagttatgtcttaatattcagtctcattatgttaggttgaagatagaagattatgaaaatattctctgaaaagctctggttttacttcagattgtataaatctgtgtaatgtaataattatttaagaatgacatgattactactctaaacccatagaaggggtatttgttggattatttattttcacttaaatggtatttgagattaggaaaaagaaaatctgtcttttggtttttcttgatagtattaatgtaatttcaaatgttagctcatttttgttaatggtggctttttgtttgtttgttttgttttaaggtttttggattcaaagcataaaaaccattacaagatatacaatctgtaagtatgttttcttatttgtatgcttgcaaatatcttctaaaacaactattaagtgaaagttatctgcttgttagagtgaggtagagttaaagatacattttaacagaattgtattcctaaaccgattaagtcaagaagtccaagagcattgttagatcatttagaaagtgtagtgatgaggtaaaacattgttggcacagattcatgttacttgatctgctttaaatgacttggcatctagcccatatttgagcccataaccgtgtggtaatttgaagtgtaattcacagtagagcttctgttaaagcactaatagcatcttccatggaggtatacttcagagtgaatataattttgtttatcctgtgtctctagagctattgactgaaaaagctgttagggcattctctaactgtacatcacctaagttatttaaaattgctgaattaggtggcttgtcttgtctaggacagagttttaaggactgcccacctgattgatagagctagttgaccttatctttaactttttgtttttcttttgactttgggagtagagatgtgaaaaggtaaaaaggaaggaaggaagagaaaacttaactctttttgcccatgaagactgtttttccttctcaaaatattgactattttctgatttgtaaaaatcggcacataaaacgtgttattttttacttgacttttatctttcccatgtgatatctataaattatagataggaaaaatttatctgtaatttagtgatctttctagtgtgataaaacgtcagaagtactgagagtggagtggacattgatattgttactctcagtaagttttcactgatttttctcagagtcatgaaggaacaaacgtttgttaagtccttatcacttattagataacacaaaacatgttgggggggtgtgtacagaggtgagtaagatgtagctcccattctcaagtcgcttacattctaatgtaaaaggtagacaaagcattacagaagaagtaactctgctatagaaggttgcaatgaagagaacattggaaacactaattttaccttataaagaaggtttcataaaggaaggcaagtttgagctggggtgaaaaggaccagtaagggttgactttcaagccaaggagaggaggggaagtgatgttacaggccaaaggaatggcattgtaagaagcttgttggcataaaagtgtttagaatatggcagcgaattcattatcatcagattgtggtgtctgtatgttgggggtgggagagaattgtggtggcaataggcaacaagataaaagaaagtaaaaggtgttatggaaacttaatgggtccagcttacaaatgatctatgcatttaggggtctttctcttttcctgataaacctctcctacaaagagccttgttgcggataccatagtgtttctttggaggaaaataaaaactacaaagctttgtattttttgcacaactggattcagaatataagtaataaaaaaggacaagaactttcaaaagctagaagccattaaactgagtcacttcagggttagactatcagaactggggatttagaaagtctcagaatggaaatcgaaggacaccaaagacaaattcggcctttttcaaaattttattctagtttaacatattcaaagaaagggaaggaaattcttttcattcctgtgtgtagtgacttcctgctttaagaacttaggacttcagctgtactatcagtattgtaggccacttaacattattatggttaaagttggcattggagagagcctaggaacctaactgcctgtttgtttttatatttccaaccattggattcccaagttaatgaagtctgtttattagttgagggtagctcttaatgcatatattttaatgccccttccccacatggaatcataagctttcagaactggagagtacctgaaagagatcatttagtccaaccttctcattttacagatggggaatctgaggcctagagaagttaagtgagttgaacaaggtcacacaggtacatatggtagccgaccatccactgtttatgccaatattccctttacgttttgcttttttgcttgttcgttttaacctctccaaattttactgacttcagaagtttctagaactaagttatagcatgttttgagttctaatgtcactttccgatcttctttaccttttttctacctctgtttgtatttctggttctggttaagtgagtctggtaagcagcaggtgttctattttatttcttttatttttaggatagtattacatgtgatatatatgtctttgcaaacatacataatttgaagatcttaaaatatttgcactaggcatacccacatttaatagtatgttaaatcttttatagcaattatgatatacatgggtgaagaagagttcctaatatggcctttctgattaactgtatctgtttatatctgtgttttcttcaggcattcataacattaagcaaattcaggtgtactgttacttaattgaattaatcagtttgttttgtacaagtatattttatttttgttccttgttgtataatctggtaggaatggggaaggggagatagtgaataaagagatgtatacttcttgcctttgaggaatttaagttttcactgtataccaattttttaaaggtatttactatatttcagtgcatattttatttgacatactttatcattttgtggtaaacctttagctttactaattttcatctattaagttttcttttgtaagatggtgatagcttcatcaaagagagtaaagaagagacctgcctacctagctgattctatggcaaatctcacttctctggaagcttttcctgttaatcttattccttcagtttctgcctcttgtttcataaaaactcattctttaaatgcttattcatttctcttgtctcatataaaccaatatgaggtactggtatcttttgagttttagttataaggaagcataaatggttaaatttaaatggctaaaccccatttgccatttgtgtatctttaattttagtttgttgagagacttatcactaccaaaccacaaagaatttaaaagaaactgtcagtaggtataggtggaaggagggcatttatcagagattttaatttaagaagaaagtcttcatccttatcctaccaacccccattccctgagcatatttatcattactagtcccagcatatttgctcccatatttcctatgcttacctgtgaagattttcataactttttccttgctttttactgtcactgttggttctgtgatttatgacagatactgctcttgtaggaatgctggctttgactgaaatttgttactgcttttgtatttaaaactttttttttattataagtagaattatggaacagtagtagaaaaagtttgacttttgtaatcagagatactgagcttgagttctggctctttcatttgtatactgttatttggggcaagttttttaatgctcttaagtcttagctttctcatatataaaatggagataataacagttatca

SEQ ID NO: 83 - DNA, 4053 bp, Homo sapiens
tatggcaaatctcacttctctggaagcttttcctgttaatcttattccttcagtttctgcctcttgtttcataaaaactcattctttaaatgcttattcatttctcttgtctcatataaaccaatatgaggtactggtatcttttgagttttagttataaggaagcataaatggttaaatttaaatggctaaaccccatttgccatttgtgtatctttaattttagtttgttgagagacttatcactaccaaaccacaaagaatttaaaagaaactgtcagtaggtataggtggaaggagggcatttatcagagattttaatttaagaagaaagtcttcatccttatcctaccaacccccattccctgagcatatttatcattactagtcccagcatatttgctcccatatttcctatgcttacctgtgaagattttcataactttttccttgctttttactgtcactgttggttctgtgatttatgacagatactgctcttgtaggaatgctggctttgactgaaatttgttactgcttttgtatttaaaactttttttttattataagtagaattatggaacagtagtagaaaaagtttgacttttgtaatcagagatactgagcttgagttctggctctttcatttgtatactgttatttggggcaagttttttaatgctcttaagtcttagctttctcatatataaaatggagataataacagttatcacgtgattgtgaggatgaaacaaaaaaaagtggaaactctttgtaaggtgtgttcatctggttgacacttagtagtcattacttccactttccgtccatatagtcctcttaacagtaatatttgagaggcatttttattaaagcagtcttaaggagtgttcgtcaaaccacatgttctgggatcctgagaaagtaggggaagtttagagaactgaagctgcacaaaactaatgtttattttctgttgtgttgtcctgagaccagcttcttagattgtgtttcctagtcctacatctctgattccttataaaatattccattatgaattcttcactattgacaatttctccccttttatcttaaaagtaccaaagaaagtgtaaaatgtgactgtcttgtcagtcctctttttcctgtttttcatgtcagtgggtatgaaattactagcaaggatgcatatatgtgcatatgtcattactaaatgcattttctttctagaaaaactcaatatactaaattgtactaaaaaggaaaagcttgttttgttttgagtggtagtatgaaagttgttttattttaggtctgaccagttagaaaccaatggattgtagtttatttataattagttaaaccttcatgtgaatttggttttgaattacctttaaggtagagaagaaactatatagatgtttttcagggtttctaaatgtacaatacaggttcacaatcacttatttgaaactcttggggccaagtatgtttccattttcagaaattttagttttcaaaaggtagcacagataaatatacttttacataaacaccccagtggggtgtgggtcagtacctgaaatgaaatgttttactcttcgctctaagtgtattaaatattatgtacaatcttattacttcagatcaggatttgctgtagttgagtttgccataaaacttaagagaaaattttagatgttttgaacttttgggatattgaaattgcaggttaaggagctatggacctttatttgttttaaaatgctaagagtttattttaagtaatttttaaaaaatttgttttgcatagtagttggagttaccagggtactgctaaccacactgatatgtaagatctctttctgagccttttattgtttgtaaacatggcctgttaatcattagaaagccagtacatactaacatatcactgctattaagacaaatattagcatactctagtaatgacaagtcagcattttactattctgtattgattttacttattctttcattactctcatactgtaattaaaacttgcaatctgagagactgttgaaaaaggtgatcgttggcttttcaacagggagtaaggtctggtttaaaaaaaaattagtaagcatttggccaagtagattaacaacattcagtttttctttactgtccttatgcttttactatttttaacatatatctttttgaagaatagtttgagaattatgtatgcttaactatgagatacagatactattgaaactagtcagttgtttataggtacttgtaaaattaaaaatatattccaatagcatgcagatttttcatagaggaaatttgaaagcatggaagcacctgaatttacagtactctgtattagtggcatcacaagtttttaagcaaatgtattagctctaattgcatacacttaatcttttaagctttggttttattattataatatgggggtgataacagtatctacttaatagaattcttgttattacatgaaataattaatgttaaacacagcataatatgtgtcacattataaagattcaggcaatgtttgttagtattagtacttttttttcttcctaagtgcaaaagataactttatatcacttttaaacttttcttttagttgtgctgaaagacattatgacaccgccaaatttaattgcagaggtaggtatgaatgtactgtactatgttgtataacttaaacccgatagactgtatcttactgtcataacaataatgagtcatccagattatcgagtgagatacatatttaagaattatctttaaaaatttcaaaaattttaattttactgttgtgttttaggaaaaagtattgcataaagctattaatattgtcaggaagactaaagtgcagcatagactaagaattaggaaaattcctagactaaaaatagtataaggagagggtttacctactatttgaggcagttggtctaatagtaagcaatcacagggagaaagcagaactacttaactcttctgtgttgaggaatgacataaaaggtaggaaaggatataacaaatgttgataagaggagtctgatggatgagaggagggaactgctttaaatgagtttctacttcagacataagttaattctcagagcccacaaaaactttcacttttatttgtgaaatacaactcagttctcatggcttaacactttaaaccatgagaaaactgaagagttgagaagcttggcagatgctgctgtgatagtcaaaaagaaagtgggtgccatgagctactattgatgtatttgccattgatccctcctgaaaatctagaatggactttcagacaaatggtttgaaaattctaaatcactaatgattgagatttagtataggtttactaagaacgggttttttttgtttttgtttttggtggatttaggctgttgcttactaagcaaagcaggctttagttgaggtttatcttgctttaaacagatatttaacagattttcctggaggtttttgtgtaccactgggaaaatgaagttaggcagatgactaagtgaaagctgtcctgctgactccttataatgatagtcattgtctaccagaagatctctcctgtcacaccaaaggataattgattatatcctgtaccatattatgagtcacctgattggagatataagacatacttctcacatatttagatgacacaggttagtacattgaatatcagccagggtttttaaggatcttaatagagtggaactaaggtagaaactattaagagcaattaatagtgatatatctatagtcctgtttctaaacaagtttttttaaaaacctcaactctgactatagtgaacagagaagtcttggactcttacaattcatgtgagaagacctgaaactttgataacaattatatacattttgtgagtaatttctttggtgtatgccttcacatatctctggtatgtgacctatgctgcagtccattgagcatagattcccagaatgtattctcctgcagaaaatggaggaaaata

SEQ ID NO: 84 - DNA, 4043 bp, Homo sapiens
tttcagaaattttagttttcaaaaggtagcacagataaatatacttttacataaacaccccagtggggtgtgggtcagtacctgaaatgaaatgttttactcttcgctctaagtgtattaaatattatgtacaatcttattacttcagatcaggatttgctgtagttgagtttgccataaaacttaagagaaaattttagatgttttgaacttttgggatattgaaattgcaggttaaggagctatggacctttatttgttttaaaatgctaagagtttattttaagtaatttttaaaaaatttgttttgcatagtagttggagttaccagggtactgctaaccacactgatatgtaagatctctttctgagccttttattgtttgtaaacatggcctgttaatcattagaaagccagtacatactaacatatcactgctattaagacaaatattagcatactctagtaatgacaagtcagcattttactattctgtattgattttacttattctttcattactctcatactgtaattaaaacttgcaatctgagagactgttgaaaaaggtgatcgttggcttttcaacagggagtaaggtctggtttaaaaaaaaattagtaagcatttggccaagtagattaacaacattcagtttttctttactgtccttatgcttttactatttttaacatatatctttttgaagaatagtttgagaattatgtatgcttaactatgagatacagatactattgaaactagtcagttgtttataggtacttgtaaaattaaaaatatattccaatagcatgcagatttttcatagaggaaatttgaaagcatggaagcacctgaatttacagtactctgtattagtggcatcacaagtttttaagcaaatgtattagctctaattgcatacacttaatcttttaagctttggttttattattataatatgggggtgataacagtatctacttaatagaattcttgttattacatgaaataattaatgttaaacacagcataatatgtgtcacattataaagattcaggcaatgtttgttagtattagtacttttttttcttcctaagtgcaaaagataactttatatcacttttaaacttttcttttagttgtgctgaaagacattatgacaccgccaaatttaattgcagaggtaggtatgaatgtactgtactatgttgtataacttaaacccgatagactgtatcttactgtcataacaataatgagtcatccagattatcgagtgagatacatatttaagaattatctttaaaaatttcaaaaattttaattttactgttgtgttttaggaaaaagtattgcataaagctattaatattgtcaggaagactaaagtgcagcatagactaagaattaggaaaattcctagactaaaaatagtataaggagagggtttacctactatttgaggcagttggtctaatagtaagcaatcacagggagaaagcagaactacttaactcttctgtgttgaggaatgacataaaaggtaggaaaggatataacaaatgttgataagaggagtctgatggatgagaggagggaactgctttaaatgagtttctacttcagacataagttaattctcagagcccacaaaaactttcacttttatttgtgaaatacaactcagttctcatggcttaacactttaaaccatgagaaaactgaagagttgagaagcttggcagatgctgctgtgatagtcaaaaagaaagtgggtgccatgagctactattgatgtatttgccattgatccctcctgaaaatctagaatggactttcagacaaatggtttgaaaattctaaatcactaatgattgagatttagtataggtttactaagaacgggttttttttgtttttgtttttggtggatttaggctgttgcttactaagcaaagcaggctttagttgaggtttatcttgctttaaacagatatttaacagattttcctggaggtttttgtgtaccactgggaaaatgaagttaggcagatgactaagtgaaagctgtcctgctgactccttataatgatagtcattgtctaccagaagatctctcctgtcacaccaaaggataattgattatatcctgtaccatattatgagtcacctgattggagatataagacatacttctcacatatttagatgacacaggttagtacattgaatatcagccagggtttttaaggatcttaatagagtggaactaaggtagaaactattaagagcaattaatagtgatatatctatagtcctgtttctaaacaagtttttttaaaaacctcaactctgactatagtgaacagagaagtcttggactcttacaattcatgtgagaagacctgaaactttgataacaattatatacattttgtgagtaatttctttggtgtatgccttcacatatctctggtatgtgacctatgctgcagtccattgagcatagattcccagaatgtattctcctgcagaaaatggaggaaaataatacttggcttccctaatgattacatgtgtatacaacactaacatttgcaagaccacctttaaataacacacttagcatttttattttatgaaatgtaatatgtagttctttgcatagtttatcctattagtaatctattctgtctttggaatatgttttgtgatgatgaaataaatactataaatagtattattccttttgcattgagagtcctgacgaaatgtccatgtgacagttcattttgggtttagctctacctctaatatgtgacctatgctaccagtccgtatagcgtaaattcccagaatatatcctcctgaataaaatgggggaaaataatacctggcttccttaatgattatatttaagacttatcaagagactattttctatttaacaattagaaagttaagcaatacattatttttctctggaatccagtgtttcttttaaatacctgttaagtttgtatgcaacatttctaaagttacctacttgttaattaaaaattcaagagtttttttttcttattctgaggttatctttttaccacagttgcacaatatccttttgaagaccataacccaccacagctagaacttatcaaacccttttgtgaagatcttgaccaatggctaagtgaagatgacaatcatgttgcagcaattcactgtaaagctggaaagggacgaactggtgtaatgatatgtgcatatttattacatcggggcaaatttttaaaggcacaagaggccctagatttctatggggaagtaaggaccagagacaaaaaggtaagttattttttgatgtttttcctttcctcttcctggatctgagaatttattggaaaacagattttgggtttctttttttccttcagttttattgaggtgtaattgacaagtaaaaattatatataaatacaatgtataatatgatgttttgatgtatgtgtatatacattgtgaaatgattactacagtcaaactacttaacatattcatcacctcacataattattattctccccccagggtgaaagcatttaagatctacaagctacaattttcaattatacaatgttattattaactatagtcactatgctgtccagtagagcttcagatcttgttcatcttgtgttcctccctccccaccctcagtccctggaaaacaggttttaaagatagttgctaatccttatttcttctaaatttttaaatcagttgctgcctcaatttctatatgagaaatgactgattgatttcatttttctgttcacgctaccattttcatatcatactagcacatgttacccattaactgtattgcagatttggtctcacaaaattcttctaaaataacatttttaaaaagcatattaatcaaaaataagctttatatttctgaagcttgtttgagcatagaatgcctttggataaaataccattacctagtaaagtgtgaacttttataatccataa

SEQ ID NO: 85 - DNA, 4046 bp, Homo sapiens
ccagattatcgagtgagatacatatttaagaattatctttaaaaatttcaaaaattttaattttactgttgtgttttaggaaaaagtattgcataaagctattaatattgtcaggaagactaaagtgcagcatagactaagaattaggaaaattcctagactaaaaatagtataaggagagggtttacctactatttgaggcagttggtctaatagtaagcaatcacagggagaaagcagaactacttaactcttctgtgttgaggaatgacataaaaggtaggaaaggatataacaaatgttgataagaggagtctgatggatgagaggagggaactgctttaaatgagtttctacttcagacataagttaattctcagagcccacaaaaactttcacttttatttgtgaaatacaactcagttctcatggcttaacactttaaaccatgagaaaactgaagagttgagaagcttggcagatgctgctgtgatagtcaaaaagaaagtgggtgccatgagctactattgatgtatttgccattgatccctcctgaaaatctagaatggactttcagacaaatggtttgaaaattctaaatcactaatgattgagatttagtataggtttactaagaacgggttttttttgtttttgtttttggtggatttaggctgttgcttactaagcaaagcaggctttagttgaggtttatcttgctttaaacagatatttaacagattttcctggaggtttttgtgtaccactgggaaaatgaagttaggcagatgactaagtgaaagctgtcctgctgactccttataatgatagtcattgtctaccagaagatctctcctgtcacaccaaaggataattgattatatcctgtaccatattatgagtcacctgattggagatataagacatacttctcacatatttagatgacacaggttagtacattgaatatcagccagggtttttaaggatcttaatagagtggaactaaggtagaaactattaagagcaattaatagtgatatatctatagtcctgtttctaaacaagtttttttaaaaacctcaactctgactatagtgaacagagaagtcttggactcttacaattcatgtgagaagacctgaaactttgataacaattatatacattttgtgagtaatttctttggtgtatgccttcacatatctctggtatgtgacctatgctgcagtccattgagcatagattcccagaatgtattctcctgcagaaaatggaggaaaataatacttggcttccctaatgattacatgtgtatacaacactaacatttgcaagaccacctttaaataacacacttagcatttttattttatgaaatgtaatatgtagttctttgcatagtttatcctattagtaatctattctgtctttggaatatgttttgtgatgatgaaataaatactataaatagtattattccttttgcattgagagtcctgacgaaatgtccatgtgacagttcattttgggtttagctctacctctaatatgtgacctatgctaccagtccgtatagcgtaaattcccagaatatatcctcctgaataaaatgggggaaaataatacctggcttccttaatgattatatttaagacttatcaagagactattttctatttaacaattagaaagttaagcaatacattatttttctctggaatccagtgtttcttttaaatacctgttaagtttgtatgcaacatttctaaagttacctacttgttaattaaaaattcaagagtttttttttcttattctgaggttatctttttaccacagttgcacaatatccttttgaagaccataacccaccacagctagaacttatcaaacccttttgtgaagatcttgaccaatggctaagtgaagatgacaatcatgttgcagcaattcactgtaaagctggaaagggacgaactggtgtaatgatatgtgcatatttattacatcggggcaaatttttaaaggcacaagaggccctagatttctatggggaagtaaggaccagagacaaaaaggtaagttattttttgatgtttttcctttcctcttcctggatctgagaatttattggaaaacagattttgggtttctttttttccttcagttttattgaggtgtaattgacaagtaaaaattatatataaatacaatgtataatatgatgttttgatgtatgtgtatatacattgtgaaatgattactacagtcaaactacttaacatattcatcacctcacataattattattctccccccagggtgaaagcatttaagatctacaagctacaattttcaattatacaatgttattattaactatagtcactatgctgtccagtagagcttcagatcttgttcatcttgtgttcctccctccccaccctcagtccctggaaaacaggttttaaagatagttgctaatccttatttcttctaaatttttaaatcagttgctgcctcaatttctatatgagaaatgactgattgatttcatttttctgttcacgctaccattttcatatcatactagcacatgttacccattaactgtattgcagatttggtctcacaaaattcttctaaaataacatttttaaaaagcatattaatcaaaaataagctttatatttctgaagcttgtttgagcatagaatgcctttggataaaataccattacctagtaaagtgtgaacttttataatccataaaaattattcttttataagaatattcataaatgtagttagattaatagaagattctcgattctttgatcagaaaactaaggactatattgaaaaatcagtgacaaatttaattcttatagtacatctgaaagaaaaaagaaaactcttgggagaacttttacagtgatttaattttgctgttgatatatttctttgggtggtaagtatggcaaaacatgttaaaatttaatgcaaagagattttgtacatttttccatctctaagaaggacaaagcctaagcccctccagatagatagaaaaactcatttagagagttctccttcatgttaatctaatttcttcttaattcagctgtaaaacagaaatagaatgatcgtattaatcatttaaagctgtgtaattgcatagattccttgttcctttaccccctcttatatcttgtttcctatcctttgtgactttttttgcattatatataaggatgccgaaatactgtttattgttgatagtttacaaaattgaatcttacattagtgcataattttggtgaatgttgaagattatggtagattgccttacatttctgcatattgtttgcaccttggaatgatagcactggcatgaattatagagctgaggatctaaagatttttactttgatttatcccattatcatctgcagggaaacaattgcttttactgattaaaaatgcaggctgggcacagcggctcacgcctgtaatcccagtactttgggaggccgaggcgggcggatcacaaggtcaagagatcgagaccatcctggccaaccaacatggtgaaacctcatctctactaaaaatacaaaaattagctgggtgtggtggcgcgtgcctgtaatcccagctactcaggatgctgaggcaggagaatcgcttgaacccgggaggtggaggttgcagtgagccgagactgtgccactgcactccagcctggtgatagagggagactccatctcaaaaaaaaaaaaaaatgcagtagcaaaagcgatggtagaaatttaaaacagagttgatgagcagcatatattttggtagtggaaaaaaaggtaaaaaattttttgtaataaaatagaaaaattttgtaatgtggaggcgcagaacactagatttaagccagggggtcttaaattgtgttacattccttttaaagtctgatggaaggtataaatgttctcccctcaaaaaatgtgcatagtgtacataaaattttgcagtttttattacattgaa

SEQ ID NO: 86 - DNA, 4049 bp, Homo sapiens
aaactattaagagcaattaatagtgatatatctatagtcctgtttctaaacaagtttttttaaaaacctcaactctgactatagtgaacagagaagtcttggactcttacaattcatgtgagaagacctgaaactttgataacaattatatacattttgtgagtaatttctttggtgtatgccttcacatatctctggtatgtgacctatgctgcagtccattgagcatagattcccagaatgtattctcctgcagaaaatggaggaaaataatacttggcttccctaatgattacatgtgtatacaacactaacatttgcaagaccacctttaaataacacacttagcatttttattttatgaaatgtaatatgtagttctttgcatagtttatcctattagtaatctattctgtctttggaatatgttttgtgatgatgaaataaatactataaatagtattattccttttgcattgagagtcctgacgaaatgtccatgtgacagttcattttgggtttagctctacctctaatatgtgacctatgctaccagtccgtatagcgtaaattcccagaatatatcctcctgaataaaatgggggaaaataatacctggcttccttaatgattatatttaagacttatcaagagactattttctatttaacaattagaaagttaagcaatacattatttttctctggaatccagtgtttcttttaaatacctgttaagtttgtatgcaacatttctaaagttacctacttgttaattaaaaattcaagagtttttttttcttattctgaggttatctttttaccacagttgcacaatatccttttgaagaccataacccaccacagctagaacttatcaaacccttttgtgaagatcttgaccaatggctaagtgaagatgacaatcatgttgcagcaattcactgtaaagctggaaagggacgaactggtgtaatgatatgtgcatatttattacatcggggcaaatttttaaaggcacaagaggccctagatttctatggggaagtaaggaccagagacaaaaaggtaagttattttttgatgtttttcctttcctcttcctggatctgagaatttattggaaaacagattttgggtttctttttttccttcagttttattgaggtgtaattgacaagtaaaaattatatataaatacaatgtataatatgatgttttgatgtatgtgtatatacattgtgaaatgattactacagtcaaactacttaacatattcatcacctcacataattattattctccccccagggtgaaagcatttaagatctacaagctacaattttcaattatacaatgttattattaactatagtcactatgctgtccagtagagcttcagatcttgttcatcttgtgttcctccctccccaccctcagtccctggaaaacaggttttaaagatagttgctaatccttatttcttctaaatttttaaatcagttgctgcctcaatttctatatgagaaatgactgattgatttcatttttctgttcacgctaccattttcatatcatactagcacatgttacccattaactgtattgcagatttggtctcacaaaattcttctaaaataacatttttaaaaagcatattaatcaaaaataagctttatatttctgaagcttgtttgagcatagaatgcctttggataaaataccattacctagtaaagtgtgaacttttataatccataaaaattattcttttataagaatattcataaatgtagttagattaatagaagattctcgattctttgatcagaaaactaaggactatattgaaaaatcagtgacaaatttaattcttatagtacatctgaaagaaaaaagaaaactcttgggagaacttttacagtgatttaattttgctgttgatatatttctttgggtggtaagtatggcaaaacatgttaaaatttaatgcaaagagattttgtacatttttccatctctaagaaggacaaagcctaagcccctccagatagatagaaaaactcatttagagagttctccttcatgttaatctaatttcttcttaattcagctgtaaaacagaaatagaatgatcgtattaatcatttaaagctgtgtaattgcatagattccttgttcctttaccccctcttatatcttgtttcctatcctttgtgactttttttgcattatatataaggatgccgaaatactgtttattgttgatagtttacaaaattgaatcttacattagtgcataattttggtgaatgttgaagattatggtagattgccttacatttctgcatattgtttgcaccttggaatgatagcactggcatgaattatagagctgaggatctaaagatttttactttgatttatcccattatcatctgcagggaaacaattgcttttactgattaaaaatgcaggctgggcacagcggctcacgcctgtaatcccagtactttgggaggccgaggcgggcggatcacaaggtcaagagatcgagaccatcctggccaaccaacatggtgaaacctcatctctactaaaaatacaaaaattagctgggtgtggtggcgcgtgcctgtaatcccagctactcaggatgctgaggcaggagaatcgcttgaacccgggaggtggaggttgcagtgagccgagactgtgccactgcactccagcctggtgatagagggagactccatctcaaaaaaaaaaaaaaatgcagtagcaaaagcgatggtagaaatttaaaacagagttgatgagcagcatatattttggtagtggaaaaaaaggtaaaaaattttttgtaataaaatagaaaaattttgtaatgtggaggcgcagaacactagatttaagccagggggtcttaaattgtgttacattccttttaaagtctgatggaaggtataaatgttctcccctcaaaaaatgtgcatagtgtacataaaattttgcagtttttattacattgaaatatattcttttagacagaatgtaaaagaaccttcatgaaaactatgtcacttttttatgcaaaaaccagtggctactacatgagagcaatgaataaatctaagtggtacaaattaaccaaaattaagctttagttctgttcaatactaaattttaatgaaaagactgctatttaacttttaaaataacaagttgaaactatgctctttgactttgactttgcaacttttatatgatctttgatatccaatcagtgttgactttggtaaaaagtgctgaaaatgctattttacaaaagaaagaagagtaaatggaatctgtagattctattgcctgatgaaagtagacgtgtcaagaaataagaattctccaaggctcttcagataaattcatgtttcatcattttctttgccttcaagttactgagatcatttttggcaagatctgtatcattaatgctgtgttaggaaagaaaagattatgactccacattttactttcaaggttgaagagttaaactgtttaaaaagagtgtatgttatcctgtaaacagcagtatcaggctgtagaatttgtcttctgaaagcagggaacttatatatagcaaagaacttcatagtgctcccatttcttgacaaaacctctcgagaagctcttgattgaaagtcttggctttcatgaatctggcagctttcacaatagtggatttttcatgacaaatcatcttacacagggaattattcaagggttggcacttgaaacagtagaatactttcacaacaagagataagatttctttcaggattgatgacagtcttgcaccctagcgcatactgatgaagagagcagtgggtgaccatgacatggagagcttctgtctttaccagtgccccaatatcagatgtgttgtctggcagtaaggtgtactgtctgcctacagaatactgaggtttcttcaggagaagttttttggtaaagaaactttaccattttgaaagtgttaatgttttctgaagc

SEQ ID NO: 87 - DNA, 4053 bp, Homo sapiens
atttaagatctacaagctacaattttcaattatacaatgttattattaactatagtcactatgctgtccagtagagcttcagatcttgttcatcttgtgttcctccctccccaccctcagtccctggaaaacaggttttaaagatagttgctaatccttatttcttctaaatttttaaatcagttgctgcctcaatttctatatgagaaatgactgattgatttcatttttctgttcacgctaccattttcatatcatactagcacatgttacccattaactgtattgcagatttggtctcacaaaattcttctaaaataacatttttaaaaagcatattaatcaaaaataagctttatatttctgaagcttgtttgagcatagaatgcctttggataaaataccattacctagtaaagtgtgaacttttataatccataaaaattattcttttataagaatattcataaatgtagttagattaatagaagattctcgattctttgatcagaaaactaaggactatattgaaaaatcagtgacaaatttaattcttatagtacatctgaaagaaaaaagaaaactcttgggagaacttttacagtgatttaattttgctgttgatatatttctttgggtggtaagtatggcaaaacatgttaaaatttaatgcaaagagattttgtacatttttccatctctaagaaggacaaagcctaagcccctccagatagatagaaaaactcatttagagagttctccttcatgttaatctaatttcttcttaattcagctgtaaaacagaaatagaatgatcgtattaatcatttaaagctgtgtaattgcatagattccttgttcctttaccccctcttatatcttgtttcctatcctttgtgactttttttgcattatatataaggatgccgaaatactgtttattgttgatagtttacaaaattgaatcttacattagtgcataattttggtgaatgttgaagattatggtagattgccttacatttctgcatattgtttgcaccttggaatgatagcactggcatgaattatagagctgaggatctaaagatttttactttgatttatcccattatcatctgcagggaaacaattgcttttactgattaaaaatgcaggctgggcacagcggctcacgcctgtaatcccagtactttgggaggccgaggcgggcggatcacaaggtcaagagatcgagaccatcctggccaaccaacatggtgaaacctcatctctactaaaaatacaaaaattagctgggtgtggtggcgcgtgcctgtaatcccagctactcaggatgctgaggcaggagaatcgcttgaacccgggaggtggaggttgcagtgagccgagactgtgccactgcactccagcctggtgatagagggagactccatctcaaaaaaaaaaaaaaatgcagtagcaaaagcgatggtagaaatttaaaacagagttgatgagcagcatatattttggtagtggaaaaaaaggtaaaaaattttttgtaataaaatagaaaaattttgtaatgtggaggcgcagaacactagatttaagccagggggtcttaaattgtgttacattccttttaaagtctgatggaaggtataaatgttctcccctcaaaaaatgtgcatagtgtacataaaattttgcagtttttattacattgaaatatattcttttagacagaatgtaaaagaaccttcatgaaaactatgtcacttttttatgcaaaaaccagtggctactacatgagagcaatgaataaatctaagtggtacaaattaaccaaaattaagctttagttctgttcaatactaaattttaatgaaaagactgctatttaacttttaaaataacaagttgaaactatgctctttgactttgactttgcaacttttatatgatctttgatatccaatcagtgttgactttggtaaaaagtgctgaaaatgctattttacaaaagaaagaagagtaaatggaatctgtagattctattgcctgatgaaagtagacgtgtcaagaaataagaattctccaaggctcttcagataaattcatgtttcatcattttctttgccttcaagttactgagatcatttttggcaagatctgtatcattaatgctgtgttaggaaagaaaagattatgactccacattttactttcaaggttgaagagttaaactgtttaaaaagagtgtatgttatcctgtaaacagcagtatcaggctgtagaatttgtcttctgaaagcagggaacttatatatagcaaagaacttcatagtgctcccatttcttgacaaaacctctcgagaagctcttgattgaaagtcttggctttcatgaatctggcagctttcacaatagtggatttttcatgacaaatcatcttacacagggaattattcaagggttggcacttgaaacagtagaatactttcacaacaagagataagatttctttcaggattgatgacagtcttgcaccctagcgcatactgatgaagagagcagtgggtgaccatgacatggagagcttctgtctttaccagtgccccaatatcagatgtgttgtctggcagtaaggtgtactgtctgcctacagaatactgaggtttcttcaggagaagttttttggtaaagaaactttaccattttgaaagtgttaatgttttctgaagcttccaaaaagattccaaaatgggaatgtttccttgattgtgtcaccatgcttgcatttgatgaaaacttgtagccggctatactgagaaatcatatctgaagaaaggtggtacttccaatctttttgtgacctactttattattgtttttttaatgtcagggttttttttggaatggagaaaagtatttgatagaggtattgcaacagtcttattcttcttcatgctacaagtatatttgactctttctaagatacttgccttcactgttcaactgtgtgactttttgtttgtttagcattacaatcaatatcctagtaggatgatttaatcaatgatttttaattggaacaaatagtttttgtaatggtctaggcttttccaacttaactgtgctctcacatgtggtctctttttctccctctttcctccttcttatacactctcacccacacacatatgcatacataccctgtctgatgtatctgcttcttcagaatagttggctgtgctctgctgatgatgagaacttgccatttaagaaggacttgggatagtccatgtcatcatgttcagggataaaagtaaaacccaagggcatttaaactttattgtattttattttctgtttccagtccaaattaaatccaagagaaggctccataatcaaaaagtaaggacatattttaaatttgccaatgggaagatattctagtcattacagtctggtaatactatcaattctgtttctcttcagaggtgaggggagactatttgatgaaatcgtaagtcctgtagggtgttgtgaaatagggccagaatgaaagatagcaagaatagtgttatgaaaataaaatgcaaagtttataatatcatgtggtaaaatgtaatagtatttacttcatcagtagaactgctctagtagctgtatattctccatccttgcataggttggaatatcccccaagtgaaaagagattgatgggctaatagttaatagaaaatggagatctgtacatacagtgttaagaatgtagatattaaaattgttatatttagctgttacataatattaagactcagagttaagtaatttcactgaaattgattgctttttgtgtcttggagtcaaaataaataactgaaatctactatacttggctcatgcttaattaatatacttagaccatatttcggatgaattattcacagaatctaaaggagtatcctcgtgttcttaccttctttatccctgtgtttatttaaaaaggcaaaaaaaatggagcagatgctgttggttgaccatattttactgaacagtagc

SEQ ID NO: 88 - DNA, 4046 bp, Homo sapiens
gaaagaaaaaagaaaactcttgggagaacttttacagtgatttaattttgctgttgatatatttctttgggtggtaagtatggcaaaacatgttaaaatttaatgcaaagagattttgtacatttttccatctctaagaaggacaaagcctaagcccctccagatagatagaaaaactcatttagagagttctccttcatgttaatctaatttcttcttaattcagctgtaaaacagaaatagaatgatcgtattaatcatttaaagctgtgtaattgcatagattccttgttcctttaccccctcttatatcttgtttcctatcctttgtgactttttttgcattatatataaggatgccgaaatactgtttattgttgatagtttacaaaattgaatcttacattagtgcataattttggtgaatgttgaagattatggtagattgccttacatttctgcatattgtttgcaccttggaatgatagcactggcatgaattatagagctgaggatctaaagatttttactttgatttatcccattatcatctgcagggaaacaattgcttttactgattaaaaatgcaggctgggcacagcggctcacgcctgtaatcccagtactttgggaggccgaggcgggcggatcacaaggtcaagagatcgagaccatcctggccaaccaacatggtgaaacctcatctctactaaaaatacaaaaattagctgggtgtggtggcgcgtgcctgtaatcccagctactcaggatgctgaggcaggagaatcgcttgaacccgggaggtggaggttgcagtgagccgagactgtgccactgcactccagcctggtgatagagggagactccatctcaaaaaaaaaaaaaaatgcagtagcaaaagcgatggtagaaatttaaaacagagttgatgagcagcatatattttggtagtggaaaaaaaggtaaaaaattttttgtaataaaatagaaaaattttgtaatgtggaggcgcagaacactagatttaagccagggggtcttaaattgtgttacattccttttaaagtctgatggaaggtataaatgttctcccctcaaaaaatgtgcatagtgtacataaaattttgcagtttttattacattgaaatatattcttttagacagaatgtaaaagaaccttcatgaaaactatgtcacttttttatgcaaaaaccagtggctactacatgagagcaatgaataaatctaagtggtacaaattaaccaaaattaagctttagttctgttcaatactaaattttaatgaaaagactgctatttaacttttaaaataacaagttgaaactatgctctttgactttgactttgcaacttttatatgatctttgatatccaatcagtgttgactttggtaaaaagtgctgaaaatgctattttacaaaagaaagaagagtaaatggaatctgtagattctattgcctgatgaaagtagacgtgtcaagaaataagaattctccaaggctcttcagataaattcatgtttcatcattttctttgccttcaagttactgagatcatttttggcaagatctgtatcattaatgctgtgttaggaaagaaaagattatgactccacattttactttcaaggttgaagagttaaactgtttaaaaagagtgtatgttatcctgtaaacagcagtatcaggctgtagaatttgtcttctgaaagcagggaacttatatatagcaaagaacttcatagtgctcccatttcttgacaaaacctctcgagaagctcttgattgaaagtcttggctttcatgaatctggcagctttcacaatagtggatttttcatgacaaatcatcttacacagggaattattcaagggttggcacttgaaacagtagaatactttcacaacaagagataagatttctttcaggattgatgacagtcttgcaccctagcgcatactgatgaagagagcagtgggtgaccatgacatggagagcttctgtctttaccagtgccccaatatcagatgtgttgtctggcagtaaggtgtactgtctgcctacagaatactgaggtttcttcaggagaagttttttggtaaagaaactttaccattttgaaagtgttaatgttttctgaagcttccaaaaagattccaaaatgggaatgtttccttgattgtgtcaccatgcttgcatttgatgaaaacttgtagccggctatactgagaaatcatatctgaagaaaggtggtacttccaatctttttgtgacctactttattattgtttttttaatgtcagggttttttttggaatggagaaaagtatttgatagaggtattgcaacagtcttattcttcttcatgctacaagtatatttgactctttctaagatacttgccttcactgttcaactgtgtgactttttgtttgtttagcattacaatcaatatcctagtaggatgatttaatcaatgatttttaattggaacaaatagtttttgtaatggtctaggcttttccaacttaactgtgctctcacatgtggtctctttttctccctctttcctccttcttatacactctcacccacacacatatgcatacataccctgtctgatgtatctgcttcttcagaatagttggctgtgctctgctgatgatgagaacttgccatttaagaaggacttgggatagtccatgtcatcatgttcagggataaaagtaaaacccaagggcatttaaactttattgtattttattttctgtttccagtccaaattaaatccaagagaaggctccataatcaaaaagtaaggacatattttaaatttgccaatgggaagatattctagtcattacagtctggtaatactatcaattctgtttctcttcagaggtgaggggagactatttgatgaaatcgtaagtcctgtagggtgttgtgaaatagggccagaatgaaagatagcaagaatagtgttatgaaaataaaatgcaaagtttataatatcatgtggtaaaatgtaatagtatttacttcatcagtagaactgctctagtagctgtatattctccatccttgcataggttggaatatcccccaagtgaaaagagattgatgggctaatagttaatagaaaatggagatctgtacatacagtgttaagaatgtagatattaaaattgttatatttagctgttacataatattaagactcagagttaagtaatttcactgaaattgattgctttttgtgtcttggagtcaaaataaataactgaaatctactatacttggctcatgcttaattaatatacttagaccatatttcggatgaattattcacagaatctaaaggagtatcctcgtgttcttaccttctttatccctgtgtttatttaaaaaggcaaaaaaaatggagcagatgctgttggttgaccatattttactgaacagtagcatttgtgtttaggttgaaacagcattagaaaactagatacggattaaagtcagtggtaggtttttttttttttttcttccaggaatgtttcttatagatgatcaaacaggcacaggaaggggaagtgttgtgatcaatattatccagttaatattagcattcagaggaaaatttgagtcctctgatacactgttaaatttctttctatactatcaagtccacaaatcctggaactgcaaaagaattttgagactgttcaaaataattaatctctgtataggctcaggctttcctgcaaggttatgaaatgctgataaaattggtcttattttgaaaggctcctcagcttatacctttccttacaaatgcttccttacaaatgctaaagcatttaatgactcctgacttaaagggaatttggacagattgaggttgttggtcttggaaatataatactgcaggcttctgtaaaatacttgaaatgtaattgttttaaaactttcaaagataccacttgtttgcctgttggttagaatactggtgaaataatttttaatctt

SEQ ID NO: 89 - DNA, 4045 bp, Homo sapiens
tgaaagtagacgtgtcaagaaataagaattctccaaggctcttcagataaattcatgtttcatcattttctttgccttcaagttactgagatcatttttggcaagatctgtatcattaatgctgtgttaggaaagaaaagattatgactccacattttactttcaaggttgaagagttaaactgtttaaaaagagtgtatgttatcctgtaaacagcagtatcaggctgtagaatttgtcttctgaaagcagggaacttatatatagcaaagaacttcatagtgctcccatttcttgacaaaacctctcgagaagctcttgattgaaagtcttggctttcatgaatctggcagctttcacaatagtggatttttcatgacaaatcatcttacacagggaattattcaagggttggcacttgaaacagtagaatactttcacaacaagagataagatttctttcaggattgatgacagtcttgcaccctagcgcatactgatgaagagagcagtgggtgaccatgacatggagagcttctgtctttaccagtgccccaatatcagatgtgttgtctggcagtaaggtgtactgtctgcctacagaatactgaggtttcttcaggagaagttttttggtaaagaaactttaccattttgaaagtgttaatgttttctgaagcttccaaaaagattccaaaatgggaatgtttccttgattgtgtcaccatgcttgcatttgatgaaaacttgtagccggctatactgagaaatcatatctgaagaaaggtggtacttccaatctttttgtgacctactttattattgtttttttaatgtcagggttttttttggaatggagaaaagtatttgatagaggtattgcaacagtcttattcttcttcatgctacaagtatatttgactctttctaagatacttgccttcactgttcaactgtgtgactttttgtttgtttagcattacaatcaatatcctagtaggatgatttaatcaatgatttttaattggaacaaatagtttttgtaatggtctaggcttttccaacttaactgtgctctcacatgtggtctctttttctccctctttcctccttcttatacactctcacccacacacatatgcatacataccctgtctgatgtatctgcttcttcagaatagttggctgtgctctgctgatgatgagaacttgccatttaagaaggacttgggatagtccatgtcatcatgttcagggataaaagtaaaacccaagggcatttaaactttattgtattttattttctgtttccagtccaaattaaatccaagagaaggctccataatcaaaaagtaaggacatattttaaatttgccaatgggaagatattctagtcattacagtctggtaatactatcaattctgtttctcttcagaggtgaggggagactatttgatgaaatcgtaagtcctgtagggtgttgtgaaatagggccagaatgaaagatagcaagaatagtgttatgaaaataaaatgcaaagtttataatatcatgtggtaaaatgtaatagtatttacttcatcagtagaactgctctagtagctgtatattctccatccttgcataggttggaatatcccccaagtgaaaagagattgatgggctaatagttaatagaaaatggagatctgtacatacagtgttaagaatgtagatattaaaattgttatatttagctgttacataatattaagactcagagttaagtaatttcactgaaattgattgctttttgtgtcttggagtcaaaataaataactgaaatctactatacttggctcatgcttaattaatatacttagaccatatttcggatgaattattcacagaatctaaaggagtatcctcgtgttcttaccttctttatccctgtgtttatttaaaaaggcaaaaaaaatggagcagatgctgttggttgaccatattttactgaacagtagcatttgtgtttaggttgaaacagcattagaaaactagatacggattaaagtcagtggtaggtttttttttttttttcttccaggaatgtttcttatagatgatcaaacaggcacaggaaggggaagtgttgtgatcaatattatccagttaatattagcattcagaggaaaatttgagtcctctgatacactgttaaatttctttctatactatcaagtccacaaatcctggaactgcaaaagaattttgagactgttcaaaataattaatctctgtataggctcaggctttcctgcaaggttatgaaatgctgataaaattggtcttattttgaaaggctcctcagcttatacctttccttacaaatgcttccttacaaatgctaaagcatttaatgactcctgacttaaagggaatttggacagattgaggttgttggtcttggaaatataatactgcaggcttctgtaaaatacttgaaatgtaattgttttaaaactttcaaagataccacttgtttgcctgttggttagaatactggtgaaataatttttaatcttttatgaataactaatttcatcataagaaaacttagctaagcatggtaaagctgttgttatacaactgtggaattcttcctgaggagtaactatcttataataaatgtagttgattatctaaagtagttttattcttggaatatctcataataggtttattctcttcttgtcagtatttccttgtagattgagcctgtggatttgcatttttgtaattgtgaatcaccattataggagatacatgcattttatctacttttcagtttgtatggggttaactttattagaattatctttaatgttattttgcttatatccttaattttaattatagacaaacattaagaagctggagaaaattatgttctagtgacatttatatagaagaagaatcttttttccccctttcttttttgaagggagatgaggcagtcatattttggtaaagaatttgtagactttgcagaggtctcttcaaaataatctggctcagagtcttgacatatcctcagcagacatggtgcaaattagatggcagagtggtgggtacaagttgaccataaaataacgcattaggttagtaatgcccaaataatactttgggttttcagtgttgcagagaagtcagacaactgatagttattataaagaaaaatgttctgagagtgaggtaaccgcttaagggaaggaagcctccttctgtcttattcactaatttacaagaagataattgtgttacacttccttaggagtcattcatttgtatatttgacacttttgctttatgaacatgtgaagattattcaaaagtaagctgttggtgatttttttcttccaagaaagcatgccacagggcaacttctagggttggttctcatctagtcctgtgctccacactatctgcatctgcacttaagtttcaatattagataactcacatgtttaaactatgaagaaagagttaaaacatcctgagaatgctagtaagtatgtatttttgaaaggacttccaaaatttgagtttaaagaggtaaactccttttacatgacaaagttacttagaaacactactgctgtttccctctcccttgccttctccctgtcccatgcatacccccagctgtgttccagaatgatggcacataaagtaaacattcatatttatttccctttttttgttttttttttttttttttttttttgcttgtttgttttgtttttttgtttgagacagtctcactcaatcacccaggctggagtgcagtggcaacatctcagctcactgcaacctctacctcctgagttcaagcgattctcctgcctcagcctcccgagcagctgggattacaggcgcctgcccccacgcctggctaatttttgtatttttagtagagatggggtttcgccatgttggccagactggtcttgaactcttgacctcaagtgatccgcccacctcggcctcccaaagtgctgagatta

SEQ ID NO: 90 - DNA, 4041 bp, Homo sapiens
atactgagaaatcatatctgaagaaaggtggtacttccaatctttttgtgacctactttattattgtttttttaatgtcagggttttttttggaatggagaaaagtatttgatagaggtattgcaacagtcttattcttcttcatgctacaagtatatttgactctttctaagatacttgccttcactgttcaactgtgtgactttttgtttgtttagcattacaatcaatatcctagtaggatgatttaatcaatgatttttaattggaacaaatagtttttgtaatggtctaggcttttccaacttaactgtgctctcacatgtggtctctttttctccctctttcctccttcttatacactctcacccacacacatatgcatacataccctgtctgatgtatctgcttcttcagaatagttggctgtgctctgctgatgatgagaacttgccatttaagaaggacttgggatagtccatgtcatcatgttcagggataaaagtaaaacccaagggcatttaaactttattgtattttattttctgtttccagtccaaattaaatccaagagaaggctccataatcaaaaagtaaggacatattttaaatttgccaatgggaagatattctagtcattacagtctggtaatactatcaattctgtttctcttcagaggtgaggggagactatttgatgaaatcgtaagtcctgtagggtgttgtgaaatagggccagaatgaaagatagcaagaatagtgttatgaaaataaaatgcaaagtttataatatcatgtggtaaaatgtaatagtatttacttcatcagtagaactgctctagtagctgtatattctccatccttgcataggttggaatatcccccaagtgaaaagagattgatgggctaatagttaatagaaaatggagatctgtacatacagtgttaagaatgtagatattaaaattgttatatttagctgttacataatattaagactcagagttaagtaatttcactgaaattgattgctttttgtgtcttggagtcaaaataaataactgaaatctactatacttggctcatgcttaattaatatacttagaccatatttcggatgaattattcacagaatctaaaggagtatcctcgtgttcttaccttctttatccctgtgtttatttaaaaaggcaaaaaaaatggagcagatgctgttggttgaccatattttactgaacagtagcatttgtgtttaggttgaaacagcattagaaaactagatacggattaaagtcagtggtaggtttttttttttttttcttccaggaatgtttcttatagatgatcaaacaggcacaggaaggggaagtgttgtgatcaatattatccagttaatattagcattcagaggaaaatttgagtcctctgatacactgttaaatttctttctatactatcaagtccacaaatcctggaactgcaaaagaattttgagactgttcaaaataattaatctctgtataggctcaggctttcctgcaaggttatgaaatgctgataaaattggtcttattttgaaaggctcctcagcttatacctttccttacaaatgcttccttacaaatgctaaagcatttaatgactcctgacttaaagggaatttggacagattgaggttgttggtcttggaaatataatactgcaggcttctgtaaaatacttgaaatgtaattgttttaaaactttcaaagataccacttgtttgcctgttggttagaatactggtgaaataatttttaatcttttatgaataactaatttcatcataagaaaacttagctaagcatggtaaagctgttgttatacaactgtggaattcttcctgaggagtaactatcttataataaatgtagttgattatctaaagtagttttattcttggaatatctcataataggtttattctcttcttgtcagtatttccttgtagattgagcctgtggatttgcatttttgtaattgtgaatcaccattataggagatacatgcattttatctacttttcagtttgtatggggttaactttattagaattatctttaatgttattttgcttatatccttaattttaattatagacaaacattaagaagctggagaaaattatgttctagtgacatttatatagaagaagaatcttttttccccctttcttttttgaagggagatgaggcagtcatattttggtaaagaatttgtagactttgcagaggtctcttcaaaataatctggctcagagtcttgacatatcctcagcagacatggtgcaaattagatggcagagtggtgggtacaagttgaccataaaataacgcattaggttagtaatgcccaaataatactttgggttttcagtgttgcagagaagtcagacaactgatagttattataaagaaaaatgttctgagagtgaggtaaccgcttaagggaaggaagcctccttctgtcttattcactaatttacaagaagataattgtgttacacttccttaggagtcattcatttgtatatttgacacttttgctttatgaacatgtgaagattattcaaaagtaagctgttggtgatttttttcttccaagaaagcatgccacagggcaacttctagggttggttctcatctagtcctgtgctccacactatctgcatctgcacttaagtttcaatattagataactcacatgtttaaactatgaagaaagagttaaaacatcctgagaatgctagtaagtatgtatttttgaaaggacttccaaaatttgagtttaaagaggtaaactccttttacatgacaaagttacttagaaacactactgctgtttccctctcccttgccttctccctgtcccatgcatacccccagctgtgttccagaatgatggcacataaagtaaacattcatatttatttccctttttttgttttttttttttttttttttttttgcttgtttgttttgtttttttgtttgagacagtctcactcaatcacccaggctggagtgcagtggcaacatctcagctcactgcaacctctacctcctgagttcaagcgattctcctgcctcagcctcccgagcagctgggattacaggcgcctgcccccacgcctggctaatttttgtatttttagtagagatggggtttcgccatgttggccagactggtcttgaactcttgacctcaagtgatccgcccacctcggcctcccaaagtgctgagattacaggcatgagtcactgtgcctggcctcttattttttctttggttaaacttttagggaaaaagtttgagctgcttttaattttctttttgtttttaaataaattattaaagtttctctatgttaggaactcttgtgtacatgagttcattgagcttattcttaataaagacaaatcttctagaaataatagttgtatctttaaatgatctcaaggaaaatgtttggtttctctggggaatgaattttcatgacctaatcttaaatcaggttattttttctagcctgtttactaaatttctacatgttataacctaatgaaattttcttacttcctctttatttaaaacaaactataattactgtctttttaaaaatcttccaatgtggcgttcttatttttcttaacatttgaattttcctgggccaaaccatgttactatgatacacattatttaaggctgttatataatacagtaaaattgtagaactttcataccttgaaggatcttagcaattatttaattcaaacccattctaacatagatgataaaacagatttgcagggttgggcacggtggctcatacctatattcccagcactttgggagactcaagcgggaagattgcttgagcccaggagttcaagaccagcttgggcaacatagtgagaggctgtctctacaaaaaaatatttaaaaaatagccgggcatggtgtcacgtgcctgtagttccagctgcttgggaggctgaggtg

SEQ ID NO: 91 - DNA, 4043 bp, Homo sapiens
ctctgctgatgatgagaacttgccatttaagaaggacttgggatagtccatgtcatcatgttcagggataaaagtaaaacccaagggcatttaaactttattgtattttattttctgtttccagtccaaattaaatccaagagaaggctccataatcaaaaagtaaggacatattttaaatttgccaatgggaagatattctagtcattacagtctggtaatactatcaattctgtttctcttcagaggtgaggggagactatttgatgaaatcgtaagtcctgtagggtgttgtgaaatagggccagaatgaaagatagcaagaatagtgttatgaaaataaaatgcaaagtttataatatcatgtggtaaaatgtaatagtatttacttcatcagtagaactgctctagtagctgtatattctccatccttgcataggttggaatatcccccaagtgaaaagagattgatgggctaatagttaatagaaaatggagatctgtacatacagtgttaagaatgtagatattaaaattgttatatttagctgttacataatattaagactcagagttaagtaatttcactgaaattgattgctttttgtgtcttggagtcaaaataaataactgaaatctactatacttggctcatgcttaattaatatacttagaccatatttcggatgaattattcacagaatctaaaggagtatcctcgtgttcttaccttctttatccctgtgtttatttaaaaaggcaaaaaaaatggagcagatgctgttggttgaccatattttactgaacagtagcatttgtgtttaggttgaaacagcattagaaaactagatacggattaaagtcagtggtaggtttttttttttttttcttccaggaatgtttcttatagatgatcaaacaggcacaggaaggggaagtgttgtgatcaatattatccagttaatattagcattcagaggaaaatttgagtcctctgatacactgttaaatttctttctatactatcaagtccacaaatcctggaactgcaaaagaattttgagactgttcaaaataattaatctctgtataggctcaggctttcctgcaaggttatgaaatgctgataaaattggtcttattttgaaaggctcctcagcttatacctttccttacaaatgcttccttacaaatgctaaagcatttaatgactcctgacttaaagggaatttggacagattgaggttgttggtcttggaaatataatactgcaggcttctgtaaaatacttgaaatgtaattgttttaaaactttcaaagataccacttgtttgcctgttggttagaatactggtgaaataatttttaatcttttatgaataactaatttcatcataagaaaacttagctaagcatggtaaagctgttgttatacaactgtggaattcttcctgaggagtaactatcttataataaatgtagttgattatctaaagtagttttattcttggaatatctcataataggtttattctcttcttgtcagtatttccttgtagattgagcctgtggatttgcatttttgtaattgtgaatcaccattataggagatacatgcattttatctacttttcagtttgtatggggttaactttattagaattatctttaatgttattttgcttatatccttaattttaattatagacaaacattaagaagctggagaaaattatgttctagtgacatttatatagaagaagaatcttttttccccctttcttttttgaagggagatgaggcagtcatattttggtaaagaatttgtagactttgcagaggtctcttcaaaataatctggctcagagtcttgacatatcctcagcagacatggtgcaaattagatggcagagtggtgggtacaagttgaccataaaataacgcattaggttagtaatgcccaaataatactttgggttttcagtgttgcagagaagtcagacaactgatagttattataaagaaaaatgttctgagagtgaggtaaccgcttaagggaaggaagcctccttctgtcttattcactaatttacaagaagataattgtgttacacttccttaggagtcattcatttgtatatttgacacttttgctttatgaacatgtgaagattattcaaaagtaagctgttggtgatttttttcttccaagaaagcatgccacagggcaacttctagggttggttctcatctagtcctgtgctccacactatctgcatctgcacttaagtttcaatattagataactcacatgtttaaactatgaagaaagagttaaaacatcctgagaatgctagtaagtatgtatttttgaaaggacttccaaaatttgagtttaaagaggtaaactccttttacatgacaaagttacttagaaacactactgctgtttccctctcccttgccttctccctgtcccatgcatacccccagctgtgttccagaatgatggcacataaagtaaacattcatatttatttccctttttttgttttttttttttttttttttttttgcttgtttgttttgtttttttgtttgagacagtctcactcaatcacccaggctggagtgcagtggcaacatctcagctcactgcaacctctacctcctgagttcaagcgattctcctgcctcagcctcccgagcagctgggattacaggcgcctgcccccacgcctggctaatttttgtatttttagtagagatggggtttcgccatgttggccagactggtcttgaactcttgacctcaagtgatccgcccacctcggcctcccaaagtgctgagattacaggcatgagtcactgtgcctggcctcttattttttctttggttaaacttttagggaaaaagtttgagctgcttttaattttctttttgtttttaaataaattattaaagtttctctatgttaggaactcttgtgtacatgagttcattgagcttattcttaataaagacaaatcttctagaaataatagttgtatctttaaatgatctcaaggaaaatgtttggtttctctggggaatgaattttcatgacctaatcttaaatcaggttattttttctagcctgtttactaaatttctacatgttataacctaatgaaattttcttacttcctctttatttaaaacaaactataattactgtctttttaaaaatcttccaatgtggcgttcttatttttcttaacatttgaattttcctgggccaaaccatgttactatgatacacattatttaaggctgttatataatacagtaaaattgtagaactttcataccttgaaggatcttagcaattatttaattcaaacccattctaacatagatgataaaacagatttgcagggttgggcacggtggctcatacctatattcccagcactttgggagactcaagcgggaagattgcttgagcccaggagttcaagaccagcttgggcaacatagtgagaggctgtctctacaaaaaaatatttaaaaaatagccgggcatggtgtcacgtgcctgtagttccagctgcttgggaggctgaggtgggaggattgccagagcctgggaggttgaggctgcagtgagccatgatcacaccacagcactctagcctagagcctccctgtgtggcaggctctacacttcagataggcaacagatcgagaccttgtttcacaaaacgaacagatctgcaaagatcaacctgtcctaagtcatataatctctttgtgtaataataaaaaccccatcttctaaccttaaacctggtatttttttctacgaaactatgttctgcagtccaaattatttttctttattattttgaatcctaaagtagaaatagaaacttagaaaaataaaaagcaactcctttatgacatatgaggactttttcagttttaaataagaaaaacccaactcaaagtagcttaaataaaaggagacattttttgacttacataacctaaaagctctggc

SEQ ID NO: 92 - DNA, 4038 bp, Homo sapiens
gttgtgaaatagggccagaatgaaagatagcaagaatagtgttatgaaaataaaatgcaaagtttataatatcatgtggtaaaatgtaatagtatttacttcatcagtagaactgctctagtagctgtatattctccatccttgcataggttggaatatcccccaagtgaaaagagattgatgggctaatagttaatagaaaatggagatctgtacatacagtgttaagaatgtagatattaaaattgttatatttagctgttacataatattaagactcagagttaagtaatttcactgaaattgattgctttttgtgtcttggagtcaaaataaataactgaaatctactatacttggctcatgcttaattaatatacttagaccatatttcggatgaattattcacagaatctaaaggagtatcctcgtgttcttaccttctttatccctgtgtttatttaaaaaggcaaaaaaaatggagcagatgctgttggttgaccatattttactgaacagtagcatttgtgtttaggttgaaacagcattagaaaactagatacggattaaagtcagtggtaggtttttttttttttttcttccaggaatgtttcttatagatgatcaaacaggcacaggaaggggaagtgttgtgatcaatattatccagttaatattagcattcagaggaaaatttgagtcctctgatacactgttaaatttctttctatactatcaagtccacaaatcctggaactgcaaaagaattttgagactgttcaaaataattaatctctgtataggctcaggctttcctgcaaggttatgaaatgctgataaaattggtcttattttgaaaggctcctcagcttatacctttccttacaaatgcttccttacaaatgctaaagcatttaatgactcctgacttaaagggaatttggacagattgaggttgttggtcttggaaatataatactgcaggcttctgtaaaatacttgaaatgtaattgttttaaaactttcaaagataccacttgtttgcctgttggttagaatactggtgaaataatttttaatcttttatgaataactaatttcatcataagaaaacttagctaagcatggtaaagctgttgttatacaactgtggaattcttcctgaggagtaactatcttataataaatgtagttgattatctaaagtagttttattcttggaatatctcataataggtttattctcttcttgtcagtatttccttgtagattgagcctgtggatttgcatttttgtaattgtgaatcaccattataggagatacatgcattttatctacttttcagtttgtatggggttaactttattagaattatctttaatgttattttgcttatatccttaattttaattatagacaaacattaagaagctggagaaaattatgttctagtgacatttatatagaagaagaatcttttttccccctttcttttttgaagggagatgaggcagtcatattttggtaaagaatttgtagactttgcagaggtctcttcaaaataatctggctcagagtcttgacatatcctcagcagacatggtgcaaattagatggcagagtggtgggtacaagttgaccataaaataacgcattaggttagtaatgcccaaataatactttgggttttcagtgttgcagagaagtcagacaactgatagttattataaagaaaaatgttctgagagtgaggtaaccgcttaagggaaggaagcctccttctgtcttattcactaatttacaagaagataattgtgttacacttccttaggagtcattcatttgtatatttgacacttttgctttatgaacatgtgaagattattcaaaagtaagctgttggtgatttttttcttccaagaaagcatgccacagggcaacttctagggttggttctcatctagtcctgtgctccacactatctgcatctgcacttaagtttcaatattagataactcacatgtttaaactatgaagaaagagttaaaacatcctgagaatgctagtaagtatgtatttttgaaaggacttccaaaatttgagtttaaagaggtaaactccttttacatgacaaagttacttagaaacactactgctgtttccctctcccttgccttctccctgtcccatgcatacccccagctgtgttccagaatgatggcacataaagtaaacattcatatttatttccctttttttgttttttttttttttttttttttttgcttgtttgttttgtttttttgtttgagacagtctcactcaatcacccaggctggagtgcagtggcaacatctcagctcactgcaacctctacctcctgagttcaagcgattctcctgcctcagcctcccgagcagctgggattacaggcgcctgcccccacgcctggctaatttttgtatttttagtagagatggggtttcgccatgttggccagactggtcttgaactcttgacctcaagtgatccgcccacctcggcctcccaaagtgctgagattacaggcatgagtcactgtgcctggcctcttattttttctttggttaaacttttagggaaaaagtttgagctgcttttaattttctttttgtttttaaataaattattaaagtttctctatgttaggaactcttgtgtacatgagttcattgagcttattcttaataaagacaaatcttctagaaataatagttgtatctttaaatgatctcaaggaaaatgtttggtttctctggggaatgaattttcatgacctaatcttaaatcaggttattttttctagcctgtttactaaatttctacatgttataacctaatgaaattttcttacttcctctttatttaaaacaaactataattactgtctttttaaaaatcttccaatgtggcgttcttatttttcttaacatttgaattttcctgggccaaaccatgttactatgatacacattatttaaggctgttatataatacagtaaaattgtagaactttcataccttgaaggatcttagcaattatttaattcaaacccattctaacatagatgataaaacagatttgcagggttgggcacggtggctcatacctatattcccagcactttgggagactcaagcgggaagattgcttgagcccaggagttcaagaccagcttgggcaacatagtgagaggctgtctctacaaaaaaatatttaaaaaatagccgggcatggtgtcacgtgcctgtagttccagctgcttgggaggctgaggtgggaggattgccagagcctgggaggttgaggctgcagtgagccatgatcacaccacagcactctagcctagagcctccctgtgtggcaggctctacacttcagataggcaacagatcgagaccttgtttcacaaaacgaacagatctgcaaagatcaacctgtcctaagtcatataatctctttgtgtaataataaaaaccccatcttctaaccttaaacctggtatttttttctacgaaactatgttctgcagtccaaattatttttctttattattttgaatcctaaagtagaaatagaaacttagaaaaataaaaagcaactcctttatgacatatgaggactttttcagttttaaataagaaaaacccaactcaaagtagcttaaataaaaggagacattttttgacttacataacctaaaagctctggcctggatctaggtgctcaacagatctcaagagtatctctcttattctctctccctcccttaccctcctcctcttttctctcttctgtatatatgttattttcaaacaggctctcacaagtagtggcaagatatagttcctaatagcttcaggtttgcattctacctactttagcaactatgatgagaagagagctacaatttgagcaaaaatttgtagggtgagttctgatttccctggattgaggcacatgcctattattcctgaaccaaatattctgtccaggg

SEQ ID NO: 93 - DNA, 4045 bp, Homo sapiens
ggttatgaaatgctgataaaattggtcttattttgaaaggctcctcagcttatacctttccttacaaatgcttccttacaaatgctaaagcatttaatgactcctgacttaaagggaatttggacagattgaggttgttggtcttggaaatataatactgcaggcttctgtaaaatacttgaaatgtaattgttttaaaactttcaaagataccacttgtttgcctgttggttagaatactggtgaaataatttttaatcttttatgaataactaatttcatcataagaaaacttagctaagcatggtaaagctgttgttatacaactgtggaattcttcctgaggagtaactatcttataataaatgtagttgattatctaaagtagttttattcttggaatatctcataataggtttattctcttcttgtcagtatttccttgtagattgagcctgtggatttgcatttttgtaattgtgaatcaccattataggagatacatgcattttatctacttttcagtttgtatggggttaactttattagaattatctttaatgttattttgcttatatccttaattttaattatagacaaacattaagaagctggagaaaattatgttctagtgacatttatatagaagaagaatcttttttccccctttcttttttgaagggagatgaggcagtcatattttggtaaagaatttgtagactttgcagaggtctcttcaaaataatctggctcagagtcttgacatatcctcagcagacatggtgcaaattagatggcagagtggtgggtacaagttgaccataaaataacgcattaggttagtaatgcccaaataatactttgggttttcagtgttgcagagaagtcagacaactgatagttattataaagaaaaatgttctgagagtgaggtaaccgcttaagggaaggaagcctccttctgtcttattcactaatttacaagaagataattgtgttacacttccttaggagtcattcatttgtatatttgacacttttgctttatgaacatgtgaagattattcaaaagtaagctgttggtgatttttttcttccaagaaagcatgccacagggcaacttctagggttggttctcatctagtcctgtgctccacactatctgcatctgcacttaagtttcaatattagataactcacatgtttaaactatgaagaaagagttaaaacatcctgagaatgctagtaagtatgtatttttgaaaggacttccaaaatttgagtttaaagaggtaaactccttttacatgacaaagttacttagaaacactactgctgtttccctctcccttgccttctccctgtcccatgcatacccccagctgtgttccagaatgatggcacataaagtaaacattcatatttatttccctttttttgttttttttttttttttttttttttgcttgtttgttttgtttttttgtttgagacagtctcactcaatcacccaggctggagtgcagtggcaacatctcagctcactgcaacctctacctcctgagttcaagcgattctcctgcctcagcctcccgagcagctgggattacaggcgcctgcccccacgcctggctaatttttgtatttttagtagagatggggtttcgccatgttggccagactggtcttgaactcttgacctcaagtgatccgcccacctcggcctcccaaagtgctgagattacaggcatgagtcactgtgcctggcctcttattttttctttggttaaacttttagggaaaaagtttgagctgcttttaattttctttttgtttttaaataaattattaaagtttctctatgttaggaactcttgtgtacatgagttcattgagcttattcttaataaagacaaatcttctagaaataatagttgtatctttaaatgatctcaaggaaaatgtttggtttctctggggaatgaattttcatgacctaatcttaaatcaggttattttttctagcctgtttactaaatttctacatgttataacctaatgaaattttcttacttcctctttatttaaaacaaactataattactgtctttttaaaaatcttccaatgtggcgttcttatttttcttaacatttgaattttcctgggccaaaccatgttactatgatacacattatttaaggctgttatataatacagtaaaattgtagaactttcataccttgaaggatcttagcaattatttaattcaaacccattctaacatagatgataaaacagatttgcagggttgggcacggtggctcatacctatattcccagcactttgggagactcaagcgggaagattgcttgagcccaggagttcaagaccagcttgggcaacatagtgagaggctgtctctacaaaaaaatatttaaaaaatagccgggcatggtgtcacgtgcctgtagttccagctgcttgggaggctgaggtgggaggattgccagagcctgggaggttgaggctgcagtgagccatgatcacaccacagcactctagcctagagcctccctgtgtggcaggctctacacttcagataggcaacagatcgagaccttgtttcacaaaacgaacagatctgcaaagatcaacctgtcctaagtcatataatctctttgtgtaataataaaaaccccatcttctaaccttaaacctggtatttttttctacgaaactatgttctgcagtccaaattatttttctttattattttgaatcctaaagtagaaatagaaacttagaaaaataaaaagcaactcctttatgacatatgaggactttttcagttttaaataagaaaaacccaactcaaagtagcttaaataaaaggagacattttttgacttacataacctaaaagctctggcctggatctaggtgctcaacagatctcaagagtatctctcttattctctctccctcccttaccctcctcctcttttctctcttctgtatatatgttattttcaaacaggctctcacaagtagtggcaagatatagttcctaatagcttcaggtttgcattctacctactttagcaactatgatgagaagagagctacaatttgagcaaaaatttgtagggtgagttctgatttccctggattgaggcacatgcctattattcctgaaccaaatattctgtccagggaatggaattctctggggcatgtatctaaagctgaagtgtagagcctgccacacagggataataatagttttccaaagaaaaatcaaggaggggaaagaatgttggaaagagaaaaaaatatcagttgtctgcttcacatttgttctcaataattagtttcatagaagtgaaatactgtgtaacaccctaaactttagagattcttcgtagacaggaaaaataagaactcaatgaagttgtgacttcattcaaatcacgtagtttatatacatgctattagtaaaacccaggacagctgagtacaagttttacccttatattcacattgaggtccagatcctggttttgaatgagataattacgtgcagtcggactgttttctgatcctaaaaatagagacaataatatctatcttgtaaagttatggtagtgttaaagatatataaaatgttggcaagtaccttaatatacaataactactgctatatgttgtcattgtaataataatcatatttcttcctttgttgaattgctttcctgtagtaatcttattgtgatcatcctgaaacatagatttccgagcttcaagcaaacactattatgttgaaaaatctacattatttctaagtttagcagtgccagtggaaagtttattgaaatagaaaattacttttttaactgaggagtgtagattgtgaattcgtgattcatcttcttaggagatgatcggaatattgataaatattgatgcatagaatatgaacaaaacattacatatcttgtgctgtgatattaaagtagtattctgttctggtagtagtatggcag

SEQ ID NO: 94 - DNA, 4047 bp, Homo sapiens
taggttagtaatgcccaaataatactttgggttttcagtgttgcagagaagtcagacaactgatagttattataaagaaaaatgttctgagagtgaggtaaccgcttaagggaaggaagcctccttctgtcttattcactaatttacaagaagataattgtgttacacttccttaggagtcattcatttgtatatttgacacttttgctttatgaacatgtgaagattattcaaaagtaagctgttggtgatttttttcttccaagaaagcatgccacagggcaacttctagggttggttctcatctagtcctgtgctccacactatctgcatctgcacttaagtttcaatattagataactcacatgtttaaactatgaagaaagagttaaaacatcctgagaatgctagtaagtatgtatttttgaaaggacttccaaaatttgagtttaaagaggtaaactccttttacatgacaaagttacttagaaacactactgctgtttccctctcccttgccttctccctgtcccatgcatacccccagctgtgttccagaatgatggcacataaagtaaacattcatatttatttccctttttttgttttttttttttttttttttttttgcttgtttgttttgtttttttgtttgagacagtctcactcaatcacccaggctggagtgcagtggcaacatctcagctcactgcaacctctacctcctgagttcaagcgattctcctgcctcagcctcccgagcagctgggattacaggcgcctgcccccacgcctggctaatttttgtatttttagtagagatggggtttcgccatgttggccagactggtcttgaactcttgacctcaagtgatccgcccacctcggcctcccaaagtgctgagattacaggcatgagtcactgtgcctggcctcttattttttctttggttaaacttttagggaaaaagtttgagctgcttttaattttctttttgtttttaaataaattattaaagtttctctatgttaggaactcttgtgtacatgagttcattgagcttattcttaataaagacaaatcttctagaaataatagttgtatctttaaatgatctcaaggaaaatgtttggtttctctggggaatgaattttcatgacctaatcttaaatcaggttattttttctagcctgtttactaaatttctacatgttataacctaatgaaattttcttacttcctctttatttaaaacaaactataattactgtctttttaaaaatcttccaatgtggcgttcttatttttcttaacatttgaattttcctgggccaaaccatgttactatgatacacattatttaaggctgttatataatacagtaaaattgtagaactttcataccttgaaggatcttagcaattatttaattcaaacccattctaacatagatgataaaacagatttgcagggttgggcacggtggctcatacctatattcccagcactttgggagactcaagcgggaagattgcttgagcccaggagttcaagaccagcttgggcaacatagtgagaggctgtctctacaaaaaaatatttaaaaaatagccgggcatggtgtcacgtgcctgtagttccagctgcttgggaggctgaggtgggaggattgccagagcctgggaggttgaggctgcagtgagccatgatcacaccacagcactctagcctagagcctccctgtgtggcaggctctacacttcagataggcaacagatcgagaccttgtttcacaaaacgaacagatctgcaaagatcaacctgtcctaagtcatataatctctttgtgtaataataaaaaccccatcttctaaccttaaacctggtatttttttctacgaaactatgttctgcagtccaaattatttttctttattattttgaatcctaaagtagaaatagaaacttagaaaaataaaaagcaactcctttatgacatatgaggactttttcagttttaaataagaaaaacccaactcaaagtagcttaaataaaaggagacattttttgacttacataacctaaaagctctggcctggatctaggtgctcaacagatctcaagagtatctctcttattctctctccctcccttaccctcctcctcttttctctcttctgtatatatgttattttcaaacaggctctcacaagtagtggcaagatatagttcctaatagcttcaggtttgcattctacctactttagcaactatgatgagaagagagctacaatttgagcaaaaatttgtagggtgagttctgatttccctggattgaggcacatgcctattattcctgaaccaaatattctgtccagggaatggaattctctggggcatgtatctaaagctgaagtgtagagcctgccacacagggataataatagttttccaaagaaaaatcaaggaggggaaagaatgttggaaagagaaaaaaatatcagttgtctgcttcacatttgttctcaataattagtttcatagaagtgaaatactgtgtaacaccctaaactttagagattcttcgtagacaggaaaaataagaactcaatgaagttgtgacttcattcaaatcacgtagtttatatacatgctattagtaaaacccaggacagctgagtacaagttttacccttatattcacattgaggtccagatcctggttttgaatgagataattacgtgcagtcggactgttttctgatcctaaaaatagagacaataatatctatcttgtaaagttatggtagtgttaaagatatataaaatgttggcaagtaccttaatatacaataactactgctatatgttgtcattgtaataataatcatatttcttcctttgttgaattgctttcctgtagtaatcttattgtgatcatcctgaaacatagatttccgagcttcaagcaaacactattatgttgaaaaatctacattatttctaagtttagcagtgccagtggaaagtttattgaaatagaaaattacttttttaactgaggagtgtagattgtgaattcgtgattcatcttcttaggagatgatcggaatattgataaatattgatgcatagaatatgaacaaaacattacatatcttgtgctgtgatattaaagtagtattctgttctggtagtagtatggcagtattttaggtctgaaagatgtacataatctgtactttgaagtctgttttttaagagattaatcacaagagatttacataaaacaactaaggttaaaaataaatggtggattagagatacatcaggcaaatttcaatttcaaaagcagatgacagaatctcagtatcagggtagcatttaaagcaaaaagcattaaactggatcaaaaatgtcattttacatcaacacagggtacactccaggtaaagacttaacagttatgaacgaatgtgctaaacatcaaaatgtattaagtaaaagctgaaagaaatgaagaataattggtagaaaagcaatgataggaatccttaatgtacttcaaaaggcacgaagtaagaaggtacagtcatgtaccacataatgatgtttgagtcaacacctgacctggtatacgacaatggtcctataaaattataatggagctaaaaagcttctatcacctagtgatgttgaagccgttgcaatgcaatgtatcactcacatgtttgtggtaatgctggtgtaagcaaacttactgtactgtcagttgtataaaagcatagcacagttatgttcagcacataatactttataatgataaacgaatatgttactagtttacgtgtttacagtactattattttagcatgtgcttctgcttattaaaaaatgttaactataaaataatctttaggcagatcctacaggaggtattccagataaaggcattattgtcataggagatggcagctccatggatgttattgccccttaagaccttccagtgggacaagatgtataggtggaagacagtgatatt

SEQ ID NO: 95 - DNA, 4043 bp, Homo sapiens
ggacttccaaaatttgagtttaaagaggtaaactccttttacatgacaaagttacttagaaacactactgctgtttccctctcccttgccttctccctgtcccatgcatacccccagctgtgttccagaatgatggcacataaagtaaacattcatatttatttccctttttttgttttttttttttttttttttttttgcttgtttgttttgtttttttgtttgagacagtctcactcaatcacccaggctggagtgcagtggcaacatctcagctcactgcaacctctacctcctgagttcaagcgattctcctgcctcagcctcccgagcagctgggattacaggcgcctgcccccacgcctggctaatttttgtatttttagtagagatggggtttcgccatgttggccagactggtcttgaactcttgacctcaagtgatccgcccacctcggcctcccaaagtgctgagattacaggcatgagtcactgtgcctggcctcttattttttctttggttaaacttttagggaaaaagtttgagctgcttttaattttctttttgtttttaaataaattattaaagtttctctatgttaggaactcttgtgtacatgagttcattgagcttattcttaataaagacaaatcttctagaaataatagttgtatctttaaatgatctcaaggaaaatgtttggtttctctggggaatgaattttcatgacctaatcttaaatcaggttattttttctagcctgtttactaaatttctacatgttataacctaatgaaattttcttacttcctctttatttaaaacaaactataattactgtctttttaaaaatcttccaatgtggcgttcttatttttcttaacatttgaattttcctgggccaaaccatgttactatgatacacattatttaaggctgttatataatacagtaaaattgtagaactttcataccttgaaggatcttagcaattatttaattcaaacccattctaacatagatgataaaacagatttgcagggttgggcacggtggctcatacctatattcccagcactttgggagactcaagcgggaagattgcttgagcccaggagttcaagaccagcttgggcaacatagtgagaggctgtctctacaaaaaaatatttaaaaaatagccgggcatggtgtcacgtgcctgtagttccagctgcttgggaggctgaggtgggaggattgccagagcctgggaggttgaggctgcagtgagccatgatcacaccacagcactctagcctagagcctccctgtgtggcaggctctacacttcagataggcaacagatcgagaccttgtttcacaaaacgaacagatctgcaaagatcaacctgtcctaagtcatataatctctttgtgtaataataaaaaccccatcttctaaccttaaacctggtatttttttctacgaaactatgttctgcagtccaaattatttttctttattattttgaatcctaaagtagaaatagaaacttagaaaaataaaaagcaactcctttatgacatatgaggactttttcagttttaaataagaaaaacccaactcaaagtagcttaaataaaaggagacattttttgacttacataacctaaaagctctggcctggatctaggtgctcaacagatctcaagagtatctctcttattctctctccctcccttaccctcctcctcttttctctcttctgtatatatgttattttcaaacaggctctcacaagtagtggcaagatatagttcctaatagcttcaggtttgcattctacctactttagcaactatgatgagaagagagctacaatttgagcaaaaatttgtagggtgagttctgatttccctggattgaggcacatgcctattattcctgaaccaaatattctgtccagggaatggaattctctggggcatgtatctaaagctgaagtgtagagcctgccacacagggataataatagttttccaaagaaaaatcaaggaggggaaagaatgttggaaagagaaaaaaatatcagttgtctgcttcacatttgttctcaataattagtttcatagaagtgaaatactgtgtaacaccctaaactttagagattcttcgtagacaggaaaaataagaactcaatgaagttgtgacttcattcaaatcacgtagtttatatacatgctattagtaaaacccaggacagctgagtacaagttttacccttatattcacattgaggtccagatcctggttttgaatgagataattacgtgcagtcggactgttttctgatcctaaaaatagagacaataatatctatcttgtaaagttatggtagtgttaaagatatataaaatgttggcaagtaccttaatatacaataactactgctatatgttgtcattgtaataataatcatatttcttcctttgttgaattgctttcctgtagtaatcttattgtgatcatcctgaaacatagatttccgagcttcaagcaaacactattatgttgaaaaatctacattatttctaagtttagcagtgccagtggaaagtttattgaaatagaaaattacttttttaactgaggagtgtagattgtgaattcgtgattcatcttcttaggagatgatcggaatattgataaatattgatgcatagaatatgaacaaaacattacatatcttgtgctgtgatattaaagtagtattctgttctggtagtagtatggcagtattttaggtctgaaagatgtacataatctgtactttgaagtctgttttttaagagattaatcacaagagatttacataaaacaactaaggttaaaaataaatggtggattagagatacatcaggcaaatttcaatttcaaaagcagatgacagaatctcagtatcagggtagcatttaaagcaaaaagcattaaactggatcaaaaatgtcattttacatcaacacagggtacactccaggtaaagacttaacagttatgaacgaatgtgctaaacatcaaaatgtattaagtaaaagctgaaagaaatgaagaataattggtagaaaagcaatgataggaatccttaatgtacttcaaaaggcacgaagtaagaaggtacagtcatgtaccacataatgatgtttgagtcaacacctgacctggtatacgacaatggtcctataaaattataatggagctaaaaagcttctatcacctagtgatgttgaagccgttgcaatgcaatgtatcactcacatgtttgtggtaatgctggtgtaagcaaacttactgtactgtcagttgtataaaagcatagcacagttatgttcagcacataatactttataatgataaacgaatatgttactagtttacgtgtttacagtactattattttagcatgtgcttctgcttattaaaaaatgttaactataaaataatctttaggcagatcctacaggaggtattccagataaaggcattattgtcataggagatggcagctccatggatgttattgccccttaagaccttccagtgggacaagatgtataggtggaagacagtgatattgatgatcctgaccttgtagaggccaaggctaaagtatgtatttattagtttttaacaagagtttaaaaagtaaaaaaaaaaaataaatttaaaaatagaaaaaatcttaataaggatacaaagaaaaaatgtttttgtgtagctgtgtaatatgtttttgttttaagttaaatgttacaaaagagtcagagttaaatttttttatatttataaagtgaaaaagttataaaatgctaaggttaatttactgaagaaagaaaaaatttttaaacagatttagagtagcatgtttataaaatctacagtagtttacagtaatatcctaggccttcacattaactcaccactcacccactgactcacccagagcagcttccaatcctgtaagctccattcgtggtaagtgccctatacaggtgtacaatt

SEQ ID NO: 96 - DNA, 4052 bp, Homo sapiens
ccacctcggcctcccaaagtgctgagattacaggcatgagtcactgtgcctggcctcttattttttctttggttaaacttttagggaaaaagtttgagctgcttttaattttctttttgtttttaaataaattattaaagtttctctatgttaggaactcttgtgtacatgagttcattgagcttattcttaataaagacaaatcttctagaaataatagttgtatctttaaatgatctcaaggaaaatgtttggtttctctggggaatgaattttcatgacctaatcttaaatcaggttattttttctagcctgtttactaaatttctacatgttataacctaatgaaattttcttacttcctctttatttaaaacaaactataattactgtctttttaaaaatcttccaatgtggcgttcttatttttcttaacatttgaattttcctgggccaaaccatgttactatgatacacattatttaaggctgttatataatacagtaaaattgtagaactttcataccttgaaggatcttagcaattatttaattcaaacccattctaacatagatgataaaacagatttgcagggttgggcacggtggctcatacctatattcccagcactttgggagactcaagcgggaagattgcttgagcccaggagttcaagaccagcttgggcaacatagtgagaggctgtctctacaaaaaaatatttaaaaaatagccgggcatggtgtcacgtgcctgtagttccagctgcttgggaggctgaggtgggaggattgccagagcctgggaggttgaggctgcagtgagccatgatcacaccacagcactctagcctagagcctccctgtgtggcaggctctacacttcagataggcaacagatcgagaccttgtttcacaaaacgaacagatctgcaaagatcaacctgtcctaagtcatataatctctttgtgtaataataaaaaccccatcttctaaccttaaacctggtatttttttctacgaaactatgttctgcagtccaaattatttttctttattattttgaatcctaaagtagaaatagaaacttagaaaaataaaaagcaactcctttatgacatatgaggactttttcagttttaaataagaaaaacccaactcaaagtagcttaaataaaaggagacattttttgacttacataacctaaaagctctggcctggatctaggtgctcaacagatctcaagagtatctctcttattctctctccctcccttaccctcctcctcttttctctcttctgtatatatgttattttcaaacaggctctcacaagtagtggcaagatatagttcctaatagcttcaggtttgcattctacctactttagcaactatgatgagaagagagctacaatttgagcaaaaatttgtagggtgagttctgatttccctggattgaggcacatgcctattattcctgaaccaaatattctgtccagggaatggaattctctggggcatgtatctaaagctgaagtgtagagcctgccacacagggataataatagttttccaaagaaaaatcaaggaggggaaagaatgttggaaagagaaaaaaatatcagttgtctgcttcacatttgttctcaataattagtttcatagaagtgaaatactgtgtaacaccctaaactttagagattcttcgtagacaggaaaaataagaactcaatgaagttgtgacttcattcaaatcacgtagtttatatacatgctattagtaaaacccaggacagctgagtacaagttttacccttatattcacattgaggtccagatcctggttttgaatgagataattacgtgcagtcggactgttttctgatcctaaaaatagagacaataatatctatcttgtaaagttatggtagtgttaaagatatataaaatgttggcaagtaccttaatatacaataactactgctatatgttgtcattgtaataataatcatatttcttcctttgttgaattgctttcctgtagtaatcttattgtgatcatcctgaaacatagatttccgagcttcaagcaaacactattatgttgaaaaatctacattatttctaagtttagcagtgccagtggaaagtttattgaaatagaaaattacttttttaactgaggagtgtagattgtgaattcgtgattcatcttcttaggagatgatcggaatattgataaatattgatgcatagaatatgaacaaaacattacatatcttgtgctgtgatattaaagtagtattctgttctggtagtagtatggcagtattttaggtctgaaagatgtacataatctgtactttgaagtctgttttttaagagattaatcacaagagatttacataaaacaactaaggttaaaaataaatggtggattagagatacatcaggcaaatttcaatttcaaaagcagatgacagaatctcagtatcagggtagcatttaaagcaaaaagcattaaactggatcaaaaatgtcattttacatcaacacagggtacactccaggtaaagacttaacagttatgaacgaatgtgctaaacatcaaaatgtattaagtaaaagctgaaagaaatgaagaataattggtagaaaagcaatgataggaatccttaatgtacttcaaaaggcacgaagtaagaaggtacagtcatgtaccacataatgatgtttgagtcaacacctgacctggtatacgacaatggtcctataaaattataatggagctaaaaagcttctatcacctagtgatgttgaagccgttgcaatgcaatgtatcactcacatgtttgtggtaatgctggtgtaagcaaacttactgtactgtcagttgtataaaagcatagcacagttatgttcagcacataatactttataatgataaacgaatatgttactagtttacgtgtttacagtactattattttagcatgtgcttctgcttattaaaaaatgttaactataaaataatctttaggcagatcctacaggaggtattccagataaaggcattattgtcataggagatggcagctccatggatgttattgccccttaagaccttccagtgggacaagatgtataggtggaagacagtgatattgatgatcctgaccttgtagaggccaaggctaaagtatgtatttattagtttttaacaagagtttaaaaagtaaaaaaaaaaaataaatttaaaaatagaaaaaatcttaataaggatacaaagaaaaaatgtttttgtgtagctgtgtaatatgtttttgttttaagttaaatgttacaaaagagtcagagttaaatttttttatatttataaagtgaaaaagttataaaatgctaaggttaatttactgaagaaagaaaaaatttttaaacagatttagagtagcatgtttataaaatctacagtagtttacagtaatatcctaggccttcacattaactcaccactcacccactgactcacccagagcagcttccaatcctgtaagctccattcgtggtaagtgccctatacaggtgtacaatttttatatcctttataccatttttactgaaccttttctgtcttttagatacacaaataacattgtgttacagttgcctatgatattgaatacagtaacttactgtacaagtttgtagcataggagctgtatcatatagcctgggtgtgtagtgaactataccatctaggcttgtgtaagtatattttatgacacagtgatgaaatcatccagatacagtttctcttaagcaacacataactgtatatatatatatataggtggctttaataataaaataatgaaatatatttctttttttctgtcattgacaaaacaattaccagtcttactaattagatcaactgcaaaacaaaatctcactcaaaaataaaaatatgtaagtcccattccttgattacaattcattagaactggagatttttaaaaatgtttaaatttatatggaaatataaaatca

SEQ ID NO: 97 - DNA, 4100 bp, Homo sapiens
atcaggttattttttctagcctgtttactaaatttctacatgttataacctaatgaaattttcttacttcctctttatttaaaacaaactataattactgtctttttaaaaatcttccaatgtggcgttcttatttttcttaacatttgaattttcctgggccaaaccatgttactatgatacacattatttaaggctgttatataatacagtaaaattgtagaactttcataccttgaaggatcttagcaattatttaattcaaacccattctaacatagatgataaaacagatttgcagggttgggcacggtggctcatacctatattcccagcactttgggagactcaagcgggaagattgcttgagcccaggagttcaagaccagcttgggcaacatagtgagaggctgtctctacaaaaaaatatttaaaaaatagccgggcatggtgtcacgtgcctgtagttccagctgcttgggaggctgaggtgggaggattgccagagcctgggaggttgaggctgcagtgagccatgatcacaccacagcactctagcctagagcctccctgtgtggcaggctctacacttcagataggcaacagatcgagaccttgtttcacaaaacgaacagatctgcaaagatcaacctgtcctaagtcatataatctctttgtgtaataataaaaaccccatcttctaaccttaaacctggtatttttttctacgaaactatgttctgcagtccaaattatttttctttattattttgaatcctaaagtagaaatagaaacttagaaaaataaaaagcaactcctttatgacatatgaggactttttcagttttaaataagaaaaacccaactcaaagtagcttaaataaaaggagacattttttgacttacataacctaaaagctctggcctggatctaggtgctcaacagatctcaagagtatctctcttattctctctccctcccttaccctcctcctcttttctctcttctgtatatatgttattttcaaacaggctctcacaagtagtggcaagatatagttcctaatagcttcaggtttgcattctacctactttagcaactatgatgagaagagagctacaatttgagcaaaaatttgtagggtgagttctgatttccctggattgaggcacatgcctattattcctgaaccaaatattctgtccagggaatggaattctctggggcatgtatctaaagctgaagtgtagagcctgccacacagggataataatagttttccaaagaaaaatcaaggaggggaaagaatgttggaaagagaaaaaaatatcagttgtctgcttcacatttgttctcaataattagtttcatagaagtgaaatactgtgtaacaccctaaactttagagattcttcgtagacaggaaaaataagaactcaatgaagttgtgacttcattcaaatcacgtagtttatatacatgctattagtaaaacccaggacagctgagtacaagttttacccttatattcacattgaggtccagatcctggttttgaatgagataattacgtgcagtcggactgttttctgatcctaaaaatagagacaataatatctatcttgtaaagttatggtagtgttaaagatatataaaatgttggcaagtaccttaatatacaataactactgctatatgttgtcattgtaataataatcatatttcttcctttgttgaattgctttcctgtagtaatcttattgtgatcatcctgaaacatagatttccgagcttcaagcaaacactattatgttgaaaaatctacattatttctaagtttagcagtgccagtggaaagtttattgaaatagaaaattacttttttaactgaggagtgtagattgtgaattcgtgattcatcttcttaggagatgatcggaatattgataaatattgatgcatagaatatgaacaaaacattacatatcttgtgctgtgatattaaagtagtattctgttctggtagtagtatggcagtattttaggtctgaaagatgtacataatctgtactttgaagtctgttttttaagagattaatcacaagagatttacataaaacaactaaggttaaaaataaatggtggattagagatacatcaggcaaatttcaatttcaaaagcagatgacagaatctcagtatcagggtagcatttaaagcaaaaagcattaaactggatcaaaaatgtcattttacatcaacacagggtacactccaggtaaagacttaacagttatgaacgaatgtgctaaacatcaaaatgtattaagtaaaagctgaaagaaatgaagaataattggtagaaaagcaatgataggaatccttaatgtacttcaaaaggcacgaagtaagaaggtacagtcatgtaccacataatgatgtttgagtcaacacctgacctggtatacgacaatggtcctataaaattataatggagctaaaaagcttctatcacctagtgatgttgaagccgttgcaatgcaatgtatcactcacatgtttgtggtaatgctggtgtaagcaaacttactgtactgtcagttgtataaaagcatagcacagttatgttcagcacataatactttataatgataaacgaatatgttactagtttacgtgtttacagtactattattttagcatgtgcttctgcttattaaaaaatgttaactataaaataatctttaggcagatcctacaggaggtattccagataaaggcattattgtcataggagatggcagctccatggatgttattgccccttaagaccttccagtgggacaagatgtataggtggaagacagtgatattgatgatcctgaccttgtagaggccaaggctaaagtatgtatttattagtttttaacaagagtttaaaaagtaaaaaaaaaaaataaatttaaaaatagaaaaaatcttaataaggatacaaagaaaaaatgtttttgtgtagctgtgtaatatgtttttgttttaagttaaatgttacaaaagagtcagagttaaatttttttatatttataaagtgaaaaagttataaaatgctaaggttaatttactgaagaaagaaaaaatttttaaacagatttagagtagcatgtttataaaatctacagtagtttacagtaatatcctaggccttcacattaactcaccactcacccactgactcacccagagcagcttccaatcctgtaagctccattcgtggtaagtgccctatacaggtgtacaatttttatatcctttataccatttttactgaaccttttctgtcttttagatacacaaataacattgtgttacagttgcctatgatattgaatacagtaacttactgtacaagtttgtagcataggagctgtatcatatagcctgggtgtgtagtgaactataccatctaggcttgtgtaagtatattttatgacacagtgatgaaatcatccagatacagtttctcttaagcaacacataactgtatatatatatatataggtggctttaataataaaataatgaaatatatttctttttttctgtcattgacaaaacaattaccagtcttactaattagatcaactgcaaaacaaaatctcactcaaaaataaaaatatgtaagtcccattccttgattacaattcattagaactggagatttttaaaaatgtttaaatttatatggaaatataaaatcatgttttaaataatttttgattcaatgaggaaatgtaaatttagaactaaagattaataactagagatttataaaggcaaaaatgttaatgaattaggaaacagtaaaccatttgaactaatctaaatactgattgcatgaaaatgccaataaaatcaatacatatttttaaaagccagtcaaggataaaagaaaagagggaaactaaaagtgagacattaagtatgagaaaggagataaaactaaagtgtggaggtgatgttaaaaattatattcaggtctgtgctaatcattttggaaatttcagtgagaagtgggcaattttcagtgaatatatcatt

SEQ ID NO: 98 - DNA, 4054 bp, Homo sapiens
tgaattttcctgggccaaaccatgttactatgatacacattatttaaggctgttatataatacagtaaaattgtagaactttcataccttgaaggatcttagcaattatttaattcaaacccattctaacatagatgataaaacagatttgcagggttgggcacggtggctcatacctatattcccagcactttgggagactcaagcgggaagattgcttgagcccaggagttcaagaccagcttgggcaacatagtgagaggctgtctctacaaaaaaatatttaaaaaatagccgggcatggtgtcacgtgcctgtagttccagctgcttgggaggctgaggtgggaggattgccagagcctgggaggttgaggctgcagtgagccatgatcacaccacagcactctagcctagagcctccctgtgtggcaggctctacacttcagataggcaacagatcgagaccttgtttcacaaaacgaacagatctgcaaagatcaacctgtcctaagtcatataatctctttgtgtaataataaaaaccccatcttctaaccttaaacctggtatttttttctacgaaactatgttctgcagtccaaattatttttctttattattttgaatcctaaagtagaaatagaaacttagaaaaataaaaagcaactcctttatgacatatgaggactttttcagttttaaataagaaaaacccaactcaaagtagcttaaataaaaggagacattttttgacttacataacctaaaagctctggcctggatctaggtgctcaacagatctcaagagtatctctcttattctctctccctcccttaccctcctcctcttttctctcttctgtatatatgttattttcaaacaggctctcacaagtagtggcaagatatagttcctaatagcttcaggtttgcattctacctactttagcaactatgatgagaagagagctacaatttgagcaaaaatttgtagggtgagttctgatttccctggattgaggcacatgcctattattcctgaaccaaatattctgtccagggaatggaattctctggggcatgtatctaaagctgaagtgtagagcctgccacacagggataataatagttttccaaagaaaaatcaaggaggggaaagaatgttggaaagagaaaaaaatatcagttgtctgcttcacatttgttctcaataattagtttcatagaagtgaaatactgtgtaacaccctaaactttagagattcttcgtagacaggaaaaataagaactcaatgaagttgtgacttcattcaaatcacgtagtttatatacatgctattagtaaaacccaggacagctgagtacaagttttacccttatattcacattgaggtccagatcctggttttgaatgagataattacgtgcagtcggactgttttctgatcctaaaaatagagacaataatatctatcttgtaaagttatggtagtgttaaagatatataaaatgttggcaagtaccttaatatacaataactactgctatatgttgtcattgtaataataatcatatttcttcctttgttgaattgctttcctgtagtaatcttattgtgatcatcctgaaacatagatttccgagcttcaagcaaacactattatgttgaaaaatctacattatttctaagtttagcagtgccagtggaaagtttattgaaatagaaaattacttttttaactgaggagtgtagattgtgaattcgtgattcatcttcttaggagatgatcggaatattgataaatattgatgcatagaatatgaacaaaacattacatatcttgtgctgtgatattaaagtagtattctgttctggtagtagtatggcagtattttaggtctgaaagatgtacataatctgtactttgaagtctgttttttaagagattaatcacaagagatttacataaaacaactaaggttaaaaataaatggtggattagagatacatcaggcaaatttcaatttcaaaagcagatgacagaatctcagtatcagggtagcatttaaagcaaaaagcattaaactggatcaaaaatgtcattttacatcaacacagggtacactccaggtaaagacttaacagttatgaacgaatgtgctaaacatcaaaatgtattaagtaaaagctgaaagaaatgaagaataattggtagaaaagcaatgataggaatccttaatgtacttcaaaaggcacgaagtaagaaggtacagtcatgtaccacataatgatgtttgagtcaacacctgacctggtatacgacaatggtcctataaaattataatggagctaaaaagcttctatcacctagtgatgttgaagccgttgcaatgcaatgtatcactcacatgtttgtggtaatgctggtgtaagcaaacttactgtactgtcagttgtataaaagcatagcacagttatgttcagcacataatactttataatgataaacgaatatgttactagtttacgtgtttacagtactattattttagcatgtgcttctgcttattaaaaaatgttaactataaaataatctttaggcagatcctacaggaggtattccagataaaggcattattgtcataggagatggcagctccatggatgttattgccccttaagaccttccagtgggacaagatgtataggtggaagacagtgatattgatgatcctgaccttgtagaggccaaggctaaagtatgtatttattagtttttaacaagagtttaaaaagtaaaaaaaaaaaataaatttaaaaatagaaaaaatcttaataaggatacaaagaaaaaatgtttttgtgtagctgtgtaatatgtttttgttttaagttaaatgttacaaaagagtcagagttaaatttttttatatttataaagtgaaaaagttataaaatgctaaggttaatttactgaagaaagaaaaaatttttaaacagatttagagtagcatgtttataaaatctacagtagtttacagtaatatcctaggccttcacattaactcaccactcacccactgactcacccagagcagcttccaatcctgtaagctccattcgtggtaagtgccctatacaggtgtacaatttttatatcctttataccatttttactgaaccttttctgtcttttagatacacaaataacattgtgttacagttgcctatgatattgaatacagtaacttactgtacaagtttgtagcataggagctgtatcatatagcctgggtgtgtagtgaactataccatctaggcttgtgtaagtatattttatgacacagtgatgaaatcatccagatacagtttctcttaagcaacacataactgtatatatatatatataggtggctttaataataaaataatgaaatatatttctttttttctgtcattgacaaaacaattaccagtcttactaattagatcaactgcaaaacaaaatctcactcaaaaataaaaatatgtaagtcccattccttgattacaattcattagaactggagatttttaaaaatgtttaaatttatatggaaatataaaatcatgttttaaataatttttgattcaatgaggaaatgtaaatttagaactaaagattaataactagagatttataaaggcaaaaatgttaatgaattaggaaacagtaaaccatttgaactaatctaaatactgattgcatgaaaatgccaataaaatcaatacatatttttaaaagccagtcaaggataaaagaaaagagggaaactaaaagtgagacattaagtatgagaaaggagataaaactaaagtgtggaggtgatgttaaaaattatattcaggtctgtgctaatcattttggaaatttcagtgagaagtgggcaattttcagtgaatatatcattgtaaatgctttgaggagagacaaaatctgaatagaccctgcaataatgaaaatgtctaggagccctcaagaaatacctggtttaaattgcatttcaggtgg

SEQ ID NO: 99 - DNA, 4047 bp, Homo sapiens
cagggttgggcacggtggctcatacctatattcccagcactttgggagactcaagcgggaagattgcttgagcccaggagttcaagaccagcttgggcaacatagtgagaggctgtctctacaaaaaaatatttaaaaaatagccgggcatggtgtcacgtgcctgtagttccagctgcttgggaggctgaggtgggaggattgccagagcctgggaggttgaggctgcagtgagccatgatcacaccacagcactctagcctagagcctccctgtgtggcaggctctacacttcagataggcaacagatcgagaccttgtttcacaaaacgaacagatctgcaaagatcaacctgtcctaagtcatataatctctttgtgtaataataaaaaccccatcttctaaccttaaacctggtatttttttctacgaaactatgttctgcagtccaaattatttttctttattattttgaatcctaaagtagaaatagaaacttagaaaaataaaaagcaactcctttatgacatatgaggactttttcagttttaaataagaaaaacccaactcaaagtagcttaaataaaaggagacattttttgacttacataacctaaaagctctggcctggatctaggtgctcaacagatctcaagagtatctctcttattctctctccctcccttaccctcctcctcttttctctcttctgtatatatgttattttcaaacaggctctcacaagtagtggcaagatatagttcctaatagcttcaggtttgcattctacctactttagcaactatgatgagaagagagctacaatttgagcaaaaatttgtagggtgagttctgatttccctggattgaggcacatgcctattattcctgaaccaaatattctgtccagggaatggaattctctggggcatgtatctaaagctgaagtgtagagcctgccacacagggataataatagttttccaaagaaaaatcaaggaggggaaagaatgttggaaagagaaaaaaatatcagttgtctgcttcacatttgttctcaataattagtttcatagaagtgaaatactgtgtaacaccctaaactttagagattcttcgtagacaggaaaaataagaactcaatgaagttgtgacttcattcaaatcacgtagtttatatacatgctattagtaaaacccaggacagctgagtacaagttttacccttatattcacattgaggtccagatcctggttttgaatgagataattacgtgcagtcggactgttttctgatcctaaaaatagagacaataatatctatcttgtaaagttatggtagtgttaaagatatataaaatgttggcaagtaccttaatatacaataactactgctatatgttgtcattgtaataataatcatatttcttcctttgttgaattgctttcctgtagtaatcttattgtgatcatcctgaaacatagatttccgagcttcaagcaaacactattatgttgaaaaatctacattatttctaagtttagcagtgccagtggaaagtttattgaaatagaaaattacttttttaactgaggagtgtagattgtgaattcgtgattcatcttcttaggagatgatcggaatattgataaatattgatgcatagaatatgaacaaaacattacatatcttgtgctgtgatattaaagtagtattctgttctggtagtagtatggcagtattttaggtctgaaagatgtacataatctgtactttgaagtctgttttttaagagattaatcacaagagatttacataaaacaactaaggttaaaaataaatggtggattagagatacatcaggcaaatttcaatttcaaaagcagatgacagaatctcagtatcagggtagcatttaaagcaaaaagcattaaactggatcaaaaatgtcattttacatcaacacagggtacactccaggtaaagacttaacagttatgaacgaatgtgctaaacatcaaaatgtattaagtaaaagctgaaagaaatgaagaataattggtagaaaagcaatgataggaatccttaatgtacttcaaaaggcacgaagtaagaaggtacagtcatgtaccacataatgatgtttgagtcaacacctgacctggtatacgacaatggtcctataaaattataatggagctaaaaagcttctatcacctagtgatgttgaagccgttgcaatgcaatgtatcactcacatgtttgtggtaatgctggtgtaagcaaacttactgtactgtcagttgtataaaagcatagcacagttatgttcagcacataatactttataatgataaacgaatatgttactagtttacgtgtttacagtactattattttagcatgtgcttctgcttattaaaaaatgttaactataaaataatctttaggcagatcctacaggaggtattccagataaaggcattattgtcataggagatggcagctccatggatgttattgccccttaagaccttccagtgggacaagatgtataggtggaagacagtgatattgatgatcctgaccttgtagaggccaaggctaaagtatgtatttattagtttttaacaagagtttaaaaagtaaaaaaaaaaaataaatttaaaaatagaaaaaatcttaataaggatacaaagaaaaaatgtttttgtgtagctgtgtaatatgtttttgttttaagttaaatgttacaaaagagtcagagttaaatttttttatatttataaagtgaaaaagttataaaatgctaaggttaatttactgaagaaagaaaaaatttttaaacagatttagagtagcatgtttataaaatctacagtagtttacagtaatatcctaggccttcacattaactcaccactcacccactgactcacccagagcagcttccaatcctgtaagctccattcgtggtaagtgccctatacaggtgtacaatttttatatcctttataccatttttactgaaccttttctgtcttttagatacacaaataacattgtgttacagttgcctatgatattgaatacagtaacttactgtacaagtttgtagcataggagctgtatcatatagcctgggtgtgtagtgaactataccatctaggcttgtgtaagtatattttatgacacagtgatgaaatcatccagatacagtttctcttaagcaacacataactgtatatatatatatataggtggctttaataataaaataatgaaatatatttctttttttctgtcattgacaaaacaattaccagtcttactaattagatcaactgcaaaacaaaatctcactcaaaaataaaaatatgtaagtcccattccttgattacaattcattagaactggagatttttaaaaatgtttaaatttatatggaaatataaaatcatgttttaaataatttttgattcaatgaggaaatgtaaatttagaactaaagattaataactagagatttataaaggcaaaaatgttaatgaattaggaaacagtaaaccatttgaactaatctaaatactgattgcatgaaaatgccaataaaatcaatacatatttttaaaagccagtcaaggataaaagaaaagagggaaactaaaagtgagacattaagtatgagaaaggagataaaactaaagtgtggaggtgatgttaaaaattatattcaggtctgtgctaatcattttggaaatttcagtgagaagtgggcaattttcagtgaatatatcattgtaaatgctttgaggagagacaaaatctgaatagaccctgcaataatgaaaatgtctaggagccctcaagaaatacctggtttaaattgcatttcaggtggctggttatcacaccttgaagtatcaagtaattatgttatctaaattggaccaggtgttagaaaaatatgtgagacttcacaggtggctgcttatgtagcccttataccttaatctgataaaggtagcatatatttaaaaagaga

SEQ ID NO: 100 - DNA, 4046 bp, Homo sapiens
tccagctattccaaaactgcaccttgaatacaggtacagaattgctaaaaccgtgtaccattttgtagttttagcatgcttttgtgtaactgcatctggtgtttgatcctcatgagagccctgttaaggaagggtacatattattgtcctcattttccttcgaaaacacatcagagtttgtattttgactgtcagcattcaaatacaagtcttttatttataaaattttggtctttatactgtggctaaaaatcttaaatcacttgtcatgatttgaaatggtttataccgattttttttgacatttatacacacatacacatatttttaaattgtctataataaaatcatgctcatctttgaaaaaatattaggagtactacagtggatacctacatacttgctattcagcatacctggttttttgtttgttttttgagacagtcttctctgtggtccaggttggagtgcagtggcacgatctcagctcattgcaacctccgtctcccaggctcaagtgattgtcctgcctcagcctcccaagtagctgggactgcaggtacacatcaccacgcccagctaattttttgtatttttggtagagacggggtttcaccatgttggccaggctggtctccaactcctgacctcaagtgatcagcccacctcggcctcccagagtgctgggattacaggttgtgagccactgcacctggcctgtttttaaattcacataaatatgttttatatttttcattagggagaagaaggttgtgtctacaatttttaagacattggggagatttagatgccagtagtaacttaaaagagaaataattgcaaattctttttcctcttgagtatactttcatttaaggtacagtgttctgtaagttacttttaccgttaaacttcttaatgttgcttattgtttgtcttacatttttaggttggatttttcttaagtcacatgtctaataaaaaaaacccttaaatacctcatttattcgtcttcgttagtgaatgcattgttgtacatattagatttttctctttagataactcagcttcccctattaagtgccacatgtattacaaaattttatttatgttttattgtttaataaactcttgagaactagatacattttaatcatttgtaatacttacattttctaaaacacttcatttttccctggtttcttcaacaaagagatgcatgtagtacaaggatagctttacctgtgttagaagattgtttcacacatttacatcaactgcatagtcctgtttttgttgggccctaatgccagcatcactttttgctactgctgtttctgccttaaaggcaatatgcctctgtctagtttgctgattctgatactctttcccctggaaagtaggtaatcaagtttgtgaggagctgtgtgtttaaggagtccataaatccttgtggggagccctaggtgtatagagcatagctgtagggcagaggcctttgacacttattctggatatgcagtggcctttgcctatggggttcatgggtcagagcgctgttgtgacctttgaataaatgggttgttatgataattgttttaagggaggagagttattctgatatcctttgtattgatattgctcttatttattattgagctggatttaagtattaatcatttaaggtcaaatttctaatgtatatatgttcttaaatggctacgacccagttaccatagcaatttagtgaaataactataatggaacattttttttcaatttggcttctcttttttttctgtccaccagggagtaactattcccagtcagaggcgctatgtgtattattatagctacctgttaaagaatcatctggattatagaccagtggcactgttgtttcacaagatgatgtttgaaactattccaatgttcagtggcggaacttgcagtaagtgcttgaaattctcatccttccatgtattggaacagttttcttaaccatatctagaagtttacataaaaatttagaaagaaatttaccacatttgaaatttatgcaggagactatatttctgaagcatttgaacaaattaattagctttgttgttcaactcattgggctaaagaagccaaaagcaatgggttttaatgtagtcgaagccaaattatatttatgaaagaaatattctgtgttataaccaccaaatacagcccaattctgactagatgatggaagaacctgtcccatcagaggtccagcatgaggtccagcagaggtccaccagaggagttcagcaatttgctgctcttagggcagggatcaattccttaatatcttaggaagactaggtattgacagtaatggtgacaaagcaatgaaaaggaaaggaagaagtgataagacgtggcagcaagctgaagtatgatgagtaaagaataggaatcaaagtatgtggagtgttagagaaaacctggatttagatccagattctagtcctatctctgtcattaatctattgcgtaaccctgagcatatcatctacctctctttgagtttgcttgtcaataaaatgaagagactttgaaatctgagacttcctggataagtactaaatacagattatgtcactgatgtctgcctctatttatttctcccttttaccctaatctctataagtctacctcagtcatcctgatcctattctacttctctgatgttgttgtcagataggtgtgatcatcctcatcagatcttttctgtattcttagagacagataactttatcaaagaccacagatttattagtatagcatgttaaagtcttctaaagagtctcattgatgctcttttcatctcagtacaatttttaaaactgctgaatgcaaggtactgagctgttggaagtgactgacagatgaatgtaacagattcatagagaaggaaaaaggaagaaaaactcatgctcttcctatagtattgatatcagtgtaagagccaagagaaaggtataaagtatcatgcagatattaagggaaagaaaacattcactttagtaatctttcctcattttctagtttcctcttatgtactatgatttaatactgtagtaaagttttaataaaatatgagctatatgtaattaagtgggaggttgtggggctaggcacgaggctcacacgtgtaaccccagcactttgggaggctgaggcaggcggatcgcttgatctcaggagttcgagaccagcctggacaacaaggtgaaaccccatctctactaaaaacacaaaaattagctgggcatagtggcacacacctgtagtcccagcttcttgggaggctgaggcaggagaatcgcttgaatccaggaggcagaggttgcagttagccgagatcatgccactgcactgcagcctggacatcggagcaagactttgtcttagaaataaataaataaatataaaataaaataaatgggaagttgtgtatataaattataaatgctacattcagaaaagcttttgaaggttgtcagacagtttcttaaaggaagttcaccagttctttattgaacattgaagaaaacatacagtttagactggcattaaaactgaaagaagtggccagacgcagtggtagacgcagtggttcacgcctgtaatcccagcactttgggaggtcaaggtggatggatcacctgaggtcaggagtttgagatcaggctggccgacatggtgaaaccctgtctctactaaaaatacaaaaattagccaggcatggtgatgcgtgcctgtagtcccagctacttgggaggctgaggcaggagaattgcttgaagccgaaggtggaggttgcagtgagccgagattgcgtcattgcactccagccagggcggtaagagtgaggctccgtcttaaaaaaaaaataagtaaataaattaaaaactactgaaagaagtattacaggcaatgggaaatagcttgagtggaagtgcagcagaaggaaaaagctggacaagaatgtagtgtcagagaataggtatgga

SEQ ID NO: 101 - DNA, 4051 bp, Homo sapiens
taccgattttttttgacatttatacacacatacacatatttttaaattgtctataataaaatcatgctcatctttgaaaaaatattaggagtactacagtggatacctacatacttgctattcagcatacctggttttttgtttgttttttgagacagtcttctctgtggtccaggttggagtgcagtggcacgatctcagctcattgcaacctccgtctcccaggctcaagtgattgtcctgcctcagcctcccaagtagctgggactgcaggtacacatcaccacgcccagctaattttttgtatttttggtagagacggggtttcaccatgttggccaggctggtctccaactcctgacctcaagtgatcagcccacctcggcctcccagagtgctgggattacaggttgtgagccactgcacctggcctgtttttaaattcacataaatatgttttatatttttcattagggagaagaaggttgtgtctacaatttttaagacattggggagatttagatgccagtagtaacttaaaagagaaataattgcaaattctttttcctcttgagtatactttcatttaaggtacagtgttctgtaagttacttttaccgttaaacttcttaatgttgcttattgtttgtcttacatttttaggttggatttttcttaagtcacatgtctaataaaaaaaacccttaaatacctcatttattcgtcttcgttagtgaatgcattgttgtacatattagatttttctctttagataactcagcttcccctattaagtgccacatgtattacaaaattttatttatgttttattgtttaataaactcttgagaactagatacattttaatcatttgtaatacttacattttctaaaacacttcatttttccctggtttcttcaacaaagagatgcatgtagtacaaggatagctttacctgtgttagaagattgtttcacacatttacatcaactgcatagtcctgtttttgttgggccctaatgccagcatcactttttgctactgctgtttctgccttaaaggcaatatgcctctgtctagtttgctgattctgatactctttcccctggaaagtaggtaatcaagtttgtgaggagctgtgtgtttaaggagtccataaatccttgtggggagccctaggtgtatagagcatagctgtagggcagaggcctttgacacttattctggatatgcagtggcctttgcctatggggttcatgggtcagagcgctgttgtgacctttgaataaatgggttgttatgataattgttttaagggaggagagttattctgatatcctttgtattgatattgctcttatttattattgagctggatttaagtattaatcatttaaggtcaaatttctaatgtatatatgttcttaaatggctacgacccagttaccatagcaatttagtgaaataactataatggaacattttttttcaatttggcttctcttttttttctgtccaccagggagtaactattcccagtcagaggcgctatgtgtattattatagctacctgttaaagaatcatctggattatagaccagtggcactgttgtttcacaagatgatgtttgaaactattccaatgttcagtggcggaacttgcagtaagtgcttgaaattctcatccttccatgtattggaacagttttcttaaccatatctagaagtttacataaaaatttagaaagaaatttaccacatttgaaatttatgcaggagactatatttctgaagcatttgaacaaattaattagctttgttgttcaactcattgggctaaagaagccaaaagcaatgggttttaatgtagtcgaagccaaattatatttatgaaagaaatattctgtgttataaccaccaaatacagcccaattctgactagatgatggaagaacctgtcccatcagaggtccagcatgaggtccagcagaggtccaccagaggagttcagcaatttgctgctcttagggcagggatcaattccttaatatcttaggaagactaggtattgacagtaatggtgacaaagcaatgaaaaggaaaggaagaagtgataagacgtggcagcaagctgaagtatgatgagtaaagaataggaatcaaagtatgtggagtgttagagaaaacctggatttagatccagattctagtcctatctctgtcattaatctattgcgtaaccctgagcatatcatctacctctctttgagtttgcttgtcaataaaatgaagagactttgaaatctgagacttcctggataagtactaaatacagattatgtcactgatgtctgcctctatttatttctcccttttaccctaatctctataagtctacctcagtcatcctgatcctattctacttctctgatgttgttgtcagataggtgtgatcatcctcatcagatcttttctgtattcttagagacagataactttatcaaagaccacagatttattagtatagcatgttaaagtcttctaaagagtctcattgatgctcttttcatctcagtacaatttttaaaactgctgaatgcaaggtactgagctgttggaagtgactgacagatgaatgtaacagattcatagagaaggaaaaaggaagaaaaactcatgctcttcctatagtattgatatcagtgtaagagccaagagaaaggtataaagtatcatgcagatattaagggaaagaaaacattcactttagtaatctttcctcattttctagtttcctcttatgtactatgatttaatactgtagtaaagttttaataaaatatgagctatatgtaattaagtgggaggttgtggggctaggcacgaggctcacacgtgtaaccccagcactttgggaggctgaggcaggcggatcgcttgatctcaggagttcgagaccagcctggacaacaaggtgaaaccccatctctactaaaaacacaaaaattagctgggcatagtggcacacacctgtagtcccagcttcttgggaggctgaggcaggagaatcgcttgaatccaggaggcagaggttgcagttagccgagatcatgccactgcactgcagcctggacatcggagcaagactttgtcttagaaataaataaataaatataaaataaaataaatgggaagttgtgtatataaattataaatgctacattcagaaaagcttttgaaggttgtcagacagtttcttaaaggaagttcaccagttctttattgaacattgaagaaaacatacagtttagactggcattaaaactgaaagaagtggccagacgcagtggtagacgcagtggttcacgcctgtaatcccagcactttgggaggtcaaggtggatggatcacctgaggtcaggagtttgagatcaggctggccgacatggtgaaaccctgtctctactaaaaatacaaaaattagccaggcatggtgatgcgtgcctgtagtcccagctacttgggaggctgaggcaggagaattgcttgaagccgaaggtggaggttgcagtgagccgagattgcgtcattgcactccagccagggcggtaagagtgaggctccgtcttaaaaaaaaaataagtaaataaattaaaaactactgaaagaagtattacaggcaatgggaaatagcttgagtggaagtgcagcagaaggaaaaagctggacaagaatgtagtgtcagagaataggtatggaacgtgtgagtgactgttagaggatcttgaatggggataacagacttgatttcataaatactgagatgtcatgataatacttgaggactaaaccatgttttaaggacagttgtatgcaaagttgtaatcgcaagaggaaaaaatagtggaaaagaaaccagtaataaaacttgccttaatgcaggtatgctaagacaatcaaatgggatttcattaattttttatttgccatttatagccaaagattttgtaaaagttttgagcccagtcaggtgaaatagtctcagaaaga

SEQ ID NO: 102 - DNA, 4099 bp, Homo sapiens
atcatgctcatctttgaaaaaatattaggagtactacagtggatacctacatacttgctattcagcatacctggttttttgtttgttttttgagacagtcttctctgtggtccaggttggagtgcagtggcacgatctcagctcattgcaacctccgtctcccaggctcaagtgattgtcctgcctcagcctcccaagtagctgggactgcaggtacacatcaccacgcccagctaattttttgtatttttggtagagacggggtttcaccatgttggccaggctggtctccaactcctgacctcaagtgatcagcccacctcggcctcccagagtgctgggattacaggttgtgagccactgcacctggcctgtttttaaattcacataaatatgttttatatttttcattagggagaagaaggttgtgtctacaatttttaagacattggggagatttagatgccagtagtaacttaaaagagaaataattgcaaattctttttcctcttgagtatactttcatttaaggtacagtgttctgtaagttacttttaccgttaaacttcttaatgttgcttattgtttgtcttacatttttaggttggatttttcttaagtcacatgtctaataaaaaaaacccttaaatacctcatttattcgtcttcgttagtgaatgcattgttgtacatattagatttttctctttagataactcagcttcccctattaagtgccacatgtattacaaaattttatttatgttttattgtttaataaactcttgagaactagatacattttaatcatttgtaatacttacattttctaaaacacttcatttttccctggtttcttcaacaaagagatgcatgtagtacaaggatagctttacctgtgttagaagattgtttcacacatttacatcaactgcatagtcctgtttttgttgggccctaatgccagcatcactttttgctactgctgtttctgccttaaaggcaatatgcctctgtctagtttgctgattctgatactctttcccctggaaagtaggtaatcaagtttgtgaggagctgtgtgtttaaggagtccataaatccttgtggggagccctaggtgtatagagcatagctgtagggcagaggcctttgacacttattctggatatgcagtggcctttgcctatggggttcatgggtcagagcgctgttgtgacctttgaataaatgggttgttatgataattgttttaagggaggagagttattctgatatcctttgtattgatattgctcttatttattattgagctggatttaagtattaatcatttaaggtcaaatttctaatgtatatatgttcttaaatggctacgacccagttaccatagcaatttagtgaaataactataatggaacattttttttcaatttggcttctcttttttttctgtccaccagggagtaactattcccagtcagaggcgctatgtgtattattatagctacctgttaaagaatcatctggattatagaccagtggcactgttgtttcacaagatgatgtttgaaactattccaatgttcagtggcggaacttgcagtaagtgcttgaaattctcatccttccatgtattggaacagttttcttaaccatatctagaagtttacataaaaatttagaaagaaatttaccacatttgaaatttatgcaggagactatatttctgaagcatttgaacaaattaattagctttgttgttcaactcattgggctaaagaagccaaaagcaatgggttttaatgtagtcgaagccaaattatatttatgaaagaaatattctgtgttataaccaccaaatacagcccaattctgactagatgatggaagaacctgtcccatcagaggtccagcatgaggtccagcagaggtccaccagaggagttcagcaatttgctgctcttagggcagggatcaattccttaatatcttaggaagactaggtattgacagtaatggtgacaaagcaatgaaaaggaaaggaagaagtgataagacgtggcagcaagctgaagtatgatgagtaaagaataggaatcaaagtatgtggagtgttagagaaaacctggatttagatccagattctagtcctatctctgtcattaatctattgcgtaaccctgagcatatcatctacctctctttgagtttgcttgtcaataaaatgaagagactttgaaatctgagacttcctggataagtactaaatacagattatgtcactgatgtctgcctctatttatttctcccttttaccctaatctctataagtctacctcagtcatcctgatcctattctacttctctgatgttgttgtcagataggtgtgatcatcctcatcagatcttttctgtattcttagagacagataactttatcaaagaccacagatttattagtatagcatgttaaagtcttctaaagagtctcattgatgctcttttcatctcagtacaatttttaaaactgctgaatgcaaggtactgagctgttggaagtgactgacagatgaatgtaacagattcatagagaaggaaaaaggaagaaaaactcatgctcttcctatagtattgatatcagtgtaagagccaagagaaaggtataaagtatcatgcagatattaagggaaagaaaacattcactttagtaatctttcctcattttctagtttcctcttatgtactatgatttaatactgtagtaaagttttaataaaatatgagctatatgtaattaagtgggaggttgtggggctaggcacgaggctcacacgtgtaaccccagcactttgggaggctgaggcaggcggatcgcttgatctcaggagttcgagaccagcctggacaacaaggtgaaaccccatctctactaaaaacacaaaaattagctgggcatagtggcacacacctgtagtcccagcttcttgggaggctgaggcaggagaatcgcttgaatccaggaggcagaggttgcagttagccgagatcatgccactgcactgcagcctggacatcggagcaagactttgtcttagaaataaataaataaatataaaataaaataaatgggaagttgtgtatataaattataaatgctacattcagaaaagcttttgaaggttgtcagacagtttcttaaaggaagttcaccagttctttattgaacattgaagaaaacatacagtttagactggcattaaaactgaaagaagtggccagacgcagtggtagacgcagtggttcacgcctgtaatcccagcactttgggaggtcaaggtggatggatcacctgaggtcaggagtttgagatcaggctggccgacatggtgaaaccctgtctctactaaaaatacaaaaattagccaggcatggtgatgcgtgcctgtagtcccagctacttgggaggctgaggcaggagaattgcttgaagccgaaggtggaggttgcagtgagccgagattgcgtcattgcactccagccagggcggtaagagtgaggctccgtcttaaaaaaaaaataagtaaataaattaaaaactactgaaagaagtattacaggcaatgggaaatagcttgagtggaagtgcagcagaaggaaaaagctggacaagaatgtagtgtcagagaataggtatggaacgtgtgagtgactgttagaggatcttgaatggggataacagacttgatttcataaatactgagatgtcatgataatacttgaggactaaaccatgttttaaggacagttgtatgcaaagttgtaatcgcaagaggaaaaaatagtggaaaagaaaccagtaataaaacttgccttaatgcaggtatgctaagacaatcaaatgggatttcattaattttttatttgccatttatagccaaagattttgtaaaagttttgagcccagtcaggtgaaatagtctcagaaagaaagaaaagtgaatctgagacttggagacattaatgttgatattttggttttaaacgtgttttaaatccggtaaaagtgagcttctcacatgacaatattcagtgggta

SEQ ID NO: 103 - DNA, 4027 bp, Homo sapiens
aagcaatgggttttaatgtagtcgaagccaaattatatttatgaaagaaatattctgtgttataaccaccaaatacagcccaattctgactagatgatggaagaacctgtcccatcagaggtccagcatgaggtccagcagaggtccaccagaggagttcagcaatttgctgctcttagggcagggatcaattccttaatatcttaggaagactaggtattgacagtaatggtgacaaagcaatgaaaaggaaaggaagaagtgataagacgtggcagcaagctgaagtatgatgagtaaagaataggaatcaaagtatgtggagtgttagagaaaacctggatttagatccagattctagtcctatctctgtcattaatctattgcgtaaccctgagcatatcatctacctctctttgagtttgcttgtcaataaaatgaagagactttgaaatctgagacttcctggataagtactaaatacagattatgtcactgatgtctgcctctatttatttctcccttttaccctaatctctataagtctacctcagtcatcctgatcctattctacttctctgatgttgttgtcagataggtgtgatcatcctcatcagatcttttctgtattcttagagacagataactttatcaaagaccacagatttattagtatagcatgttaaagtcttctaaagagtctcattgatgctcttttcatctcagtacaatttttaaaactgctgaatgcaaggtactgagctgttggaagtgactgacagatgaatgtaacagattcatagagaaggaaaaaggaagaaaaactcatgctcttcctatagtattgatatcagtgtaagagccaagagaaaggtataaagtatcatgcagatattaagggaaagaaaacattcactttagtaatctttcctcattttctagtttcctcttatgtactatgatttaatactgtagtaaagttttaataaaatatgagctatatgtaattaagtgggaggttgtggggctaggcacgaggctcacacgtgtaaccccagcactttgggaggctgaggcaggcggatcgcttgatctcaggagttcgagaccagcctggacaacaaggtgaaaccccatctctactaaaaacacaaaaattagctgggcatagtggcacacacctgtagtcccagcttcttgggaggctgaggcaggagaatcgcttgaatccaggaggcagaggttgcagttagccgagatcatgccactgcactgcagcctggacatcggagcaagactttgtcttagaaataaataaataaatataaaataaaataaatgggaagttgtgtatataaattataaatgctacattcagaaaagcttttgaaggttgtcagacagtttcttaaaggaagttcaccagttctttattgaacattgaagaaaacatacagtttagactggcattaaaactgaaagaagtggccagacgcagtggtagacgcagtggttcacgcctgtaatcccagcactttgggaggtcaaggtggatggatcacctgaggtcaggagtttgagatcaggctggccgacatggtgaaaccctgtctctactaaaaatacaaaaattagccaggcatggtgatgcgtgcctgtagtcccagctacttgggaggctgaggcaggagaattgcttgaagccgaaggtggaggttgcagtgagccgagattgcgtcattgcactccagccagggcggtaagagtgaggctccgtcttaaaaaaaaaataagtaaataaattaaaaactactgaaagaagtattacaggcaatgggaaatagcttgagtggaagtgcagcagaaggaaaaagctggacaagaatgtagtgtcagagaataggtatggaacgtgtgagtgactgttagaggatcttgaatggggataacagacttgatttcataaatactgagatgtcatgataatacttgaggactaaaccatgttttaaggacagttgtatgcaaagttgtaatcgcaagaggaaaaaatagtggaaaagaaaccagtaataaaacttgccttaatgcaggtatgctaagacaatcaaatgggatttcattaattttttatttgccatttatagccaaagattttgtaaaagttttgagcccagtcaggtgaaatagtctcagaaagaaagaaaagtgaatctgagacttggagacattaatgttgatattttggttttaaacgtgttttaaatccggtaaaagtgagcttctcacatgacaatattcagtgggtacttgggagtatgggttcgaatctaggtaggagatatatcgatattttgggcatcatcaggaaagggagagtagttaagcctttcatataaataatggtgtggcgtttgggcatgggaagtcttggaggaaaggaagaaaaggagagggtgaggactgagataagaatggcaacttgggtttaggaagaagaagaggaatcaatgtagagaacagatagtgctgaaaaatacagcatcttctgtagggattggcagctttttcttgatttttgtcttaatatttctaagagatggaaaaagctactatattctagacatttaacagggttaaaaatgttactaaaagatgatcaatgtggttttcattcaagactataacaatatgtatatatccaaggaaatttaattctgacttaaaaaaattgttttgcttgtatagatttagggacacaagtgtaattttgttacatgcatagagtgtatagtttcaagtcagggcttttaggttgtccatcatctgaataatatacattgtacccattaagtaatttctcatcttctactcaccgtttcaagtctccactatttatcattccattctttacattctgattttcatttactaggtgtattagtctgtttttgcattgctttaaagaaatacctgagactgagtattaaacaggtttaacctgttttctttatgaattcttctttaattggctcatggttctgcacgctgtacagaaagcatagcagcatctgcttctggggaggcctcaggaagcctccaatcatggctgaaggcaaaaggggagcatggtgagaatgggagcaagaaagagaaggagtggtggggagaaggtgccacccacttttaaatgccagctcacttaccaccaagaggatggcccaagccattcatgtgggatctgcccccatgattcaagcttcttccaccaggccccacctctagcactggggattacaattcaacctgagatttgggagggaaagatatccaaactatatcactaggtctggatcttgttatttattttttggaacatagtcatatatatccaaggatatatattgtagaagtccacagaaccatactaatattggacttctgcttagttaggtcttatctatctgaaacatgatattcatattgcagagaagattattttctttagtgattgaggaaatctttactacttatacatttttaatataatactataatatttgaagatgcacattttagatgtagtttaattgaaacctggaaatactattaatttgctttttaaagtcctaaaatcaggattatcagattctgaattaatggagtttaaatcaaaaagattacaaggcagtttttcagttttattctggttaattttatcacagctttggaatcctactttgtttatttgcttcttgaagttagatttcccagtgaaatttcagtatcacataaagtcttatgaaatggctcattgcactttgaactttgagtcaaggaagtgaaatttattgatagattgttggtgtaatatttatcctgtttgtggtagcttttttgaataataagtgtcttagaagaccatgttggagtagcctgcatgcttttatcaaacatattaattatgtgatggctgatactgctttagatattacatagaaatagtagtaggtgtttactaaactgg

SEQ ID NO: 104 - DNA, 4047 bp, Homo sapiens
acaggtttaacctgttttctttatgaattcttctttaattggctcatggttctgcacgctgtacagaaagcatagcagcatctgcttctggggaggcctcaggaagcctccaatcatggctgaaggcaaaaggggagcatggtgagaatgggagcaagaaagagaaggagtggtggggagaaggtgccacccacttttaaatgccagctcacttaccaccaagaggatggcccaagccattcatgtgggatctgcccccatgattcaagcttcttccaccaggccccacctctagcactggggattacaattcaacctgagatttgggagggaaagatatccaaactatatcactaggtctggatcttgttatttattttttggaacatagtcatatatatccaaggatatatattgtagaagtccacagaaccatactaatattggacttctgcttagttaggtcttatctatctgaaacatgatattcatattgcagagaagattattttctttagtgattgaggaaatctttactacttatacatttttaatataatactataatatttgaagatgcacattttagatgtagtttaattgaaacctggaaatactattaatttgctttttaaagtcctaaaatcaggattatcagattctgaattaatggagtttaaatcaaaaagattacaaggcagtttttcagttttattctggttaattttatcacagctttggaatcctactttgtttatttgcttcttgaagttagatttcccagtgaaatttcagtatcacataaagtcttatgaaatggctcattgcactttgaactttgagtcaaggaagtgaaatttattgatagattgttggtgtaatatttatcctgtttgtggtagcttttttgaataataagtgtcttagaagaccatgttggagtagcctgcatgcttttatcaaacatattaattatgtgatggctgatactgctttagatattacatagaaatagtagtaggtgtttactaaactggaaatttcatttaacttggtttagctttgccttgttctcagtcacattgataaaaatgtaagacttttgtttatcttttagaataatgacaccttttggtgctgagaattttttgttttatatatatatatatatatacgtaatataaatacaaaatatatttaaatatgtataatatttctcatacactttatgtaactttgtgttcctgtttctctattatcttggcatgttttcttcaaatggcacttcttaacctcctaaggttaataaatttctttgtaatggacttttgttttctaattcctcagcgtatgacaaatgaattatactttgtcaaattatttaggtaactttcagtttttgaagtcctgggatcataacattcatcagtctttaatttctgtcattaaggtcattagctataaatgaatttatgagtagatttaaaaaataaaacatacaatccttcccttaacacactttcccaccatttggttcaactgctagtgtaaaagcatgatgaattttgagaagttatattttaccagttactttattttttaccagttatttaaaacagacatgagccaaagccagaatacttgttaatgaaaatgaggtgttttggaggaaaggaaggttgtgctgcagtttttacttgaaatctgttacatttctttacagaaatttcaaatctcttgtttcctgttatgatggtggcattatatacctttaaaatgtgagctataggaaaatgaatgatggttaattttttaataaatatttagacttgtgtttttgaaattttttataacattgttataggttttatcctctttctcttgtgaacatgtagtgatttgtattttgtgatctttgccgcatgctagagacttaagaatactatagcaaatatctgtcttctttacatttaaaaatttttcgtgactactccctgttgatatctgtcttaaaagttacttttgatgtagttcacaaatgtaccagataattatttcatcgtttttaatgcttaaagtttttatttgtattaggatttttagtatgattttaatgttaaagttttgaagttactctgccactagaagtctaattttgggacttactattcatgaaataggaattgacttttatataagtaataggaccttattttgaaggttcaaactggagaaaatcttacattgtttatatttttatttcatttatttcagttgatttgcttgagatcaagattgcagatacagaatccatatttcgtgtatattgctgatattaatcattaaaatcgtttttgacagtttgacagttaaaggcatttcctgtgaaataatactggtatgtatttaaccatgcagatcctcagtttgtggtctgccagctaaaggtgaagatatattcctccaattcaggacccacacgacgggaagacaagttcatgtactttgagttccctcagccgttacctgtgtgtggtgatatcaaagtagagttcttccacaaacagaacaagatgctaaaaaaggtttgtactttactttcattgggagaaatatccaaaataaggacagattaaaagctatattttattttatgacatgtaaggaactataatttgttttctattagatctgcaggtgttttgcttactctggcattggtgagacattataagggtaaataatcctgtttgaaggaaaaggccttatggcattgtaacatgagaggaatttttcttaacaaggatggttaactgagaagaaattagcatgggaccaatattttaaaaattttggtctataggtagaaatgagatctgttctgtggtcttatgtagtgacacaaaccactttttctccattttggcttatgtttctttttctttccttttttttttttttcctttttgttagagacagggtcttgttctattgcccaggctgagtagctaagactacaagcatgtgccaccacacccagctaattttttttatttttatttttgtagggacagggtctcactatgttgcccaggctggtctcaaactcctgggcacaagcagtcctcacgctttggcatcccaaagagttggaattacaggtgtgcgccatcatgcctggccttaacgtttcttaagacttgattattttctatttagcttctgtggatttactgattaattttttaactaggagagaaatcagtatgaagaggaagtaataaagaatgaaaacatggtatttaaatgtgcaggtttagaaagttaatgaagtttgaatttgattgatctgtatttagagaaggcaacgtcttattattttaaaaccaactatccgccctgtgcggtggctcacgcctgtaattccagcactttgggaggctgaggtgggcagatcagctgaggtcaggagttcgagaccagcctggccaacatggttaaaccccatctctactaaaaatacaaaaaaattagccgggtgtggtggcaggcgcctgttttcccagctactcaggaggcttgaggcaggataattgctgaacccgagaggcggaggttgcagtaagccaagaatgcaccattgtactccagcctgggcaacaagagtgaaactccatctcaaaaaaaaagaaaaaaaaaacaacaactatcttcatttaaaatattaaatgtgaatatttaaagtgagactaaggtgcaacatttttagatagtaatgaagaaaaggactaactttgtagtgttgctgccttgttaaacatactagatagcatattgccaatctttaaacattctcaatgataggatttatttactttttctgatttttagcttttcttttgaaagaaaataagaggaagtttcatttactgcaaaattttaaatgctgctttgatgtatcagtagagatataattttcctttatccagaatccaagtagctggaaaaaaaaatcaaaatatgctgaacttttttttttttagccag

SEQ ID NO: 105 - DNA, 4048 bp, Homo sapiens
aaaattagccgggtgtggtggcaggcgcctgttttcccagctactcaggaggcttgaggcaggataattgctgaacccgagaggcggaggttgcagtaagccaagaatgcaccattgtactccagcctgggcaacaagagtgaaactccatctcaaaaaaaaagaaaaaaaaaacaacaactatcttcatttaaaatattaaatgtgaatatttaaagtgagactaaggtgcaacatttttagatagtaatgaagaaaaggactaactttgtagtgttgctgccttgttaaacatactagatagcatattgccaatctttaaacattctcaatgataggatttatttactttttctgatttttagcttttcttttgaaagaaaataagaggaagtttcatttactgcaaaattttaaatgctgctttgatgtatcagtagagatataattttcctttatccagaatccaagtagctggaaaaaaaaatcaaaatatgctgaacttttttttttttagccagaaacccatttcctatcgtctgtacaaataaaagttaaatatatctcaataacttagaaaaattattttttgataatccaggaagtattagcaactgttttaaaattaagataactagtaagttttatttagctttcaaaaataggcatctacatcatcatctctgcatacctttaggaatttcctaattcttatttcccttcatctgtactttaacacatgcaaaattgaaggttagattaaatatttatgatttatttgtttatccttgactacataaatttccattttattgattttccctgccttatttaagaatatgctatgattaaaacacaaaaaattttagtataacccatatatatatagaattcacctttttgttatttaaatattattggcttattttcttctaagtaaaatacaattactggctaaaataattgaaataagcaaaaaaaaaattttaaagaccttgtatacaagattactttgccaggtactgttaaaagatgcaatgacatttaagacgtaacatccttaaggatcttattttctgggggataaaaaactttaagataaattagaataaaagatttaaatggcattttaaggtaccaggtaccagataagatgtcacaaggctgtatatcattaattgccaaatgatttatacaggccagatttctttgttggtcaatagaggtttaaagtgatgaacttctgttgtgtttttttattaagaaggtattatcttattagtaagaagtgattttttttaagaacaagcattttataacatcaaaagaaatcagtagtactctttcctaccccctcatatttattctgaaagtattcaagcattatattgtcatgtaagaaactggagcttctcatgtttgtattgctgtagaagtaaacatgtatttgccatgcgtcatcagggaagttgcactcaccgtccaagaacttttgttaaagtaaatcttggaataggtagctcatttgaaatgtagaaaaaattaaatccatatctgaattttgtttatatgtatgtacacgtaaactaaaaacgtatttaaagctagtattagatgagaaaagaggtttttttacttaaaattttaaggcaaaagtagtttatcttagatcttgtgagattgtatttttggtttaaaatttgagaatttgagtgaagaaaaatcatgtgaatgaaaatgcaacagataactcagattgccttataatagtctttgtgtttacctttattcagaatatcaaatgatagtttattttgttgactttttgcaaatgtttaacataggtgacagattttcttttttaaaaaaataaaacatcattaattaaatatgtcatttcatttctttttcttttctttttttttttttttaggacaaaatgtttcacttttgggtaaatacattcttcataccaggaccagaggaaacctcagaaaaagtagaaaatggaagtctatgtgatcaagaaatcgatagcatttgcagtatagagcgtgcagataatgacaaggaatatctagtacttactttaacaaaaaatgatcttgacaaagcaaataaagacaaagccaaccgatacttttctccaaattttaaggtcagttaaattaaacattttgtgggggttgttgacttgtatgtatgtgatgtgtgtttaattctaggagtacagctgatgaagaacttgcttgacaagtttttaacttatgtattatttcgaagcagtgtttacgtagcagtaacatgaaagtttctaataaaatacccaatgtacacagcgtcaaaaaagctgcatttttccttttcctaattcttcgttgtttgctgaaatctggggcaaaggtgcgggagggggctaaatgactgggatatgaagtaggaatgggagaggaaagaaatagatgggaactcagtcatttgggaatgattcatatggaatgtttttactgcttccactcctgtctgccttccaatttattctcaatccctcagagtgatcttaaaaatagacttgattgtgtcacttctgtttacactttataaggaccttgtgtttttttttttaccatgacctacaaggcccagcataatttagcacagggctacctcctacatcagcactagtcaccttctctccttgtttcttgagattcagtcatactggtctttcttcagttcttcaaaatgctaagcttctgcctcttctagtctttccagttattttccttctccctgtaccttttcatctcagccttttcccctgaccttccatagctatcttcatatttccagccttagcttcaatctcatattctctgaagtcctttgattgtcctcccgttattctttttttaaaaatcctatttccttatattgtatcttagaattatttggtttgtttcatttttgcctatgtgtgatatatgtatttctacataggtatatatatctacttatagacaagaattcttcagattaaaaaaatctgatttgtaaacattcccaagtggttgtttaccatttttttcttcccccttcctatttcttattctacctgattttcccctgttcattcaccacactcgtttctttctcttttttactctctcttaatttttcattcaatttttataacatgtaataaatctaactgtagcgtctgagtattaagaatattgctagtaatacttcacctgtaatcccagcactttgggaggctaaggcaggcggatcacttgaggcccaggagtttaagaccagccggccaatatggcgaaaccctatctgcactacaaatacaaaaattagctgggcatggtgtcgcacacctgtaatcccagctacttgggaggctgaggcacaagaattgcttgagcctgtgagatggaggttgcagtgagccgagatcacaccagtgcacgtgcacttcagcctgggcaacagagcaagactctgtcttaaaaaaaaaaaaaaaaaaaaaatatatacacacacacacacacacacacacacacacacacactattactaccaatatacatacatatatgtatgtatgtatgtatgtatattggtagtaatagtaatacttgggcccctgcacgttttaagtgaaaatagatctaatattaaatgtctttagcccttaaattttttttaagtgttcagaagtttccctttaaaaaaatttttaatatataataattgtacatatttatgggatacagagtgatattttcatgtatgcagtgtgtgatgatcaaatcaggataattagcatatggatcacctcaaacatttgtcatttctttgtgttaggaacattcaaaattctgtcttctagctatttgaaaatatacagtaaattattgttgactagttacagttctatagaacactataatttattcctcctgtgtgtaattttttatcttttaaccaacatctccctatcctcccctcccactccctttcccggcctctaata

SEQ ID NO: 106 - DNA, 4050 bp, Homo sapiens
cagcactagtcaccttctctccttgtttcttgagattcagtcatactggtctttcttcagttcttcaaaatgctaagcttctgcctcttctagtctttccagttattttccttctccctgtaccttttcatctcagccttttcccctgaccttccatagctatcttcatatttccagccttagcttcaatctcatattctctgaagtcctttgattgtcctcccgttattctttttttaaaaatcctatttccttatattgtatcttagaattatttggtttgtttcatttttgcctatgtgtgatatatgtatttctacataggtatatatatctacttatagacaagaattcttcagattaaaaaaatctgatttgtaaacattcccaagtggttgtttaccatttttttcttcccccttcctatttcttattctacctgattttcccctgttcattcaccacactcgtttctttctcttttttactctctcttaatttttcattcaatttttataacatgtaataaatctaactgtagcgtctgagtattaagaatattgctagtaatacttcacctgtaatcccagcactttgggaggctaaggcaggcggatcacttgaggcccaggagtttaagaccagccggccaatatggcgaaaccctatctgcactacaaatacaaaaattagctgggcatggtgtcgcacacctgtaatcccagctacttgggaggctgaggcacaagaattgcttgagcctgtgagatggaggttgcagtgagccgagatcacaccagtgcacgtgcacttcagcctgggcaacagagcaagactctgtcttaaaaaaaaaaaaaaaaaaaaaatatatacacacacacacacacacacacacacacacacacactattactaccaatatacatacatatatgtatgtatgtatgtatgtatattggtagtaatagtaatacttgggcccctgcacgttttaagtgaaaatagatctaatattaaatgtctttagcccttaaattttttttaagtgttcagaagtttccctttaaaaaaatttttaatatataataattgtacatatttatgggatacagagtgatattttcatgtatgcagtgtgtgatgatcaaatcaggataattagcatatggatcacctcaaacatttgtcatttctttgtgttaggaacattcaaaattctgtcttctagctatttgaaaatatacagtaaattattgttgactagttacagttctatagaacactataatttattcctcctgtgtgtaattttttatcttttaaccaacatctccctatcctcccctcccactccctttcccggcctctaataaccacactcttatgagctcaacttttttagcttccatatatgagtgagaacatacggtatttatctttctgtacctgacttattttacttaacatcatgtcctccgggctagacattctctttagaatccacaggtttcctttcttttctctaaatctgcattttgctcagccattaacttttaaaatgtctttttccctttagttttattgttttctattttaatattgcaagatgttttatatttgtgattacaaataaaaactccattattagtaaacaaatacaatgtcatatagtagtaagtgctataaaaaatagacaggatagaaagtaatcttggtttgtatgttttttgttttttagcaaagatgattagagaaggcccaaccaagcagataacatttaagcagaggcctaaatcatataagtgagttatacaaatatctgggaaaagagttaagagtacagatgcaaaagcccttagacaagagaatgagcttggtatatctgaagagtggataagtcattttgactgaaacagagtggacaagaaaaccagtccaagtgtaaagacactagtgtgtgttcagcataggaaggatgtaatctgaattttgtgtttaatattccctgtgttcatgctttcaaaatacagatgagtgaggaaagtagggagaaggggtaataaaggaagctgagagatcagttaagaggtacttgaatagtttagtaaagatgagagaagatgtttgcttcttgttgcccctcactgcttagaatagtggcagtgaagggtaacaagaagctgtcagattaacttaaagagtttactgatgcagtggatgttggttgtaagagaagaattgataatgactcttggataataggggagggaggggctgtcaatataatataatgaagaagggatttgaagtcatttctgatttaaatctcacatccactacctacttttaatagatatgtagcctttaacaagttccctaacctttctgggccttagctacctccccttggaaatggaaatacctaacatgtaaggttgttttgacagttattttcactaggcatgtaaaggcacttgactctctgttatagaccactgtattatgttaatgtccctctccttcctccctttaggtaaagtttttagggctaataaatcccaaatatcaatgttgatcagtagtttgtgtttgtgtagtgttgtttatatcaaaaactacattgaagccgggcacagtggttcacgcctaaaatcgcaacactttgggaggccaaggtgggcctcccaccttgaactaaggagtttgagaccagcctgggcaacatggtgaaatcccatctctacaaaaaatataaaagctagctgggtgtggtggcatgcacctgtagtcctagctacttgggaggctgaggttgatcctgggagtttgagcctgcagtgagctgtgaagatgccactgcactctagtctgggtgacagagcaagaccctgtctcaaaaacacacacacacacacacacacacacaaagaaatacattgatttttcacataggtagtaagagaaacattctttttgaactcagctgtttgtgaattgaattttgtaattcaaatgctatattatgtaaactattgatgactttcaatctgcatttattttgtataattatttagttaatatttgccacttatattccttaaaaaataaaattgaggttgggcgtggtggctcacacttgtaatcccagcactttgggaggctgaggcaggcagattgcctgagctcaggagtttgagatcagcctgggcaacatcatgaaccccatttctactaaaatacaaaaaattatctgggcatggtggtgtacacctgtagccctagctgtttgggaggctaaggcacgagaattgcttgaacccgggaggcagaggttgcagtgagccaagatcatgccactgcactccagcttggcaacagagcaagactcttgtctccagaaataaaaataaataaattgtattaacatcctgatagtttatctgtttagtacctagcaagaaagaaaatgttgaacatcttaagaagagggtcatttaaaaggcctcttaaagatcatgtttgttacagtgcttaaaaattaatatgttcatctgcaaaatggaataaaaaatctgttaaaaatatatttcactaaatagtttaagatgagtcatatttgtgggttttcattttaaattttctttctctaggtgaagctgtacttcacaaaaacagtagaggagccgtcaaatccagaggctagcagttcaacttctgtaacaccagatgttagtgacaatgaacctgatcattatagatattctgacaccactgactctgatccagagaatgaaccttttgatgaagatcagcatacacaaattacaaaagtctgaatttttttttatcaagagggataaaacaccatgaaaataaacttgaataaactgaaaatggacctttttttttttaatggcaataggacattgtgtcagattaccagttataggaacaattctcttttcctgaccaatcttgttttaccctatacatccacagggttttgacacttgttgtccagttgaaaaaaggttgtgtagctgtgtcatg

SEQ ID NO: 107 - DNA, 4046 bp, Homo sapiens
tgcttcttgttgcccctcactgcttagaatagtggcagtgaagggtaacaagaagctgtcagattaacttaaagagtttactgatgcagtggatgttggttgtaagagaagaattgataatgactcttggataataggggagggaggggctgtcaatataatataatgaagaagggatttgaagtcatttctgatttaaatctcacatccactacctacttttaatagatatgtagcctttaacaagttccctaacctttctgggccttagctacctccccttggaaatggaaatacctaacatgtaaggttgttttgacagttattttcactaggcatgtaaaggcacttgactctctgttatagaccactgtattatgttaatgtccctctccttcctccctttaggtaaagtttttagggctaataaatcccaaatatcaatgttgatcagtagtttgtgtttgtgtagtgttgtttatatcaaaaactacattgaagccgggcacagtggttcacgcctaaaatcgcaacactttgggaggccaaggtgggcctcccaccttgaactaaggagtttgagaccagcctgggcaacatggtgaaatcccatctctacaaaaaatataaaagctagctgggtgtggtggcatgcacctgtagtcctagctacttgggaggctgaggttgatcctgggagtttgagcctgcagtgagctgtgaagatgccactgcactctagtctgggtgacagagcaagaccctgtctcaaaaacacacacacacacacacacacacacaaagaaatacattgatttttcacataggtagtaagagaaacattctttttgaactcagctgtttgtgaattgaattttgtaattcaaatgctatattatgtaaactattgatgactttcaatctgcatttattttgtataattatttagttaatatttgccacttatattccttaaaaaataaaattgaggttgggcgtggtggctcacacttgtaatcccagcactttgggaggctgaggcaggcagattgcctgagctcaggagtttgagatcagcctgggcaacatcatgaaccccatttctactaaaatacaaaaaattatctgggcatggtggtgtacacctgtagccctagctgtttgggaggctaaggcacgagaattgcttgaacccgggaggcagaggttgcagtgagccaagatcatgccactgcactccagcttggcaacagagcaagactcttgtctccagaaataaaaataaataaattgtattaacatcctgatagtttatctgtttagtacctagcaagaaagaaaatgttgaacatcttaagaagagggtcatttaaaaggcctcttaaagatcatgtttgttacagtgcttaaaaattaatatgttcatctgcaaaatggaataaaaaatctgttaaaaatatatttcactaaatagtttaagatgagtcatatttgtgggttttcattttaaattttctttctctaggtgaagctgtacttcacaaaaacagtagaggagccgtcaaatccagaggctagcagttcaacttctgtaacaccagatgttagtgacaatgaacctgatcattatagatattctgacaccactgactctgatccagagaatgaaccttttgatgaagatcagcatacacaaattacaaaagtctgaatttttttttatcaagagggataaaacaccatgaaaataaacttgaataaactgaaaatggacctttttttttttaatggcaataggacattgtgtcagattaccagttataggaacaattctcttttcctgaccaatcttgttttaccctatacatccacagggttttgacacttgttgtccagttgaaaaaaggttgtgtagctgtgtcatgtatatacctttttgtgtcaaaaggacatttaaaattcaattaggattaataaagatggcactttcccgttttattccagttttataaaaagtggagacagactgatgtgtatacgtaggaattttttccttttgtgttctgtcaccaactgaagtggctaaagagctttgtgatatactggttcacatcctacccctttgcacttgtggcaacagataagtttgcagttggctaagagaggtttccgaagggttttgctacattctaatgcatgtattcgggttaggggaatggagggaatgctcagaaaggaaataattttatgctggactctggaccatataccatctccagctatttacacacacctttctttagcatgctacagttattaatctggacattcgaggaattggccgctgtcactgcttgttgtttgcgcatttttttttaaagcatattggtgctagaaaaggcagctaaaggaagtgaatctgtattggggtacaggaatgaaccttctgcaacatcttaagatccacaaatgaagggatataaaaataatgtcataggtaagaaacacagcaacaatgacttaaccatataaatgtggaggctatcaacaaagaatgggcttgaaacattataaaaattgacaatgatttattaaatatgttttctcaattgtaacgacttctccatctcctgtgtaatcaaggccagtgctaaaattcagatgctgttagtacctacatcagtcaacaacttacacttattttactagttttcaatcataatacctgctgtggatgcttcatgtgctgcctgcaagcttcttttttctcattaaatataaaatattttgtaatgctgcacagaaattttcaatttgagattctacagtaagcgttttttttctttgaagatttatgatgcacttattcaatagctgtcagccgttccacccttttgaccttacacattctattacaatgaattttgcagttttgcacattttttaaatgtcattaactgttagggaattttacttgaatactgaatacatataatgtttatattaaaaaggacatttgtgttaaaaaggaaattagagttgcagtaaactttcaatgctgcacacaaaaaaaagacatttgatttttcagtagaaattgtcctacatgtgctttattgatttgctattgaaagaatagggtttttttttttttttttttttttttttttaaatgtgcagtgttgaatcatttcttcatagtgctcccccgagttgggactagggcttcaatttcacttcttaaaaaaaatcatcatatatttgatatgcccagactgcatacgattttaagcggagtacaactactattgtaaagctaatgtgaagatattattaaaaaggtttttttttccagaaatttggtgtcttcaaattataccttcaccttgacatttgaatatccagccattttgtttcttaatggtataaaattccattttcaataacttattggtgctgaaattgttcactagctgtggtctgacctagttaatttacaaatacagattgaataggacctactagagcagcatttatagagtttgatggcaaatagattaggcagaacttcatctaaaatattcttagtaaataatgttgacacgttttccataccttgtcagtttcattcaacaatttttaaatttttaacaaagctcttaggatttacacatttatatttaaacattgatatatagagtattgattgattgctcataagttaaattggtaaagttagagacaactattctaacacctcaccattgaaatttatatgccaccttgtctttcataaaagctgaaaattgttacctaaaatgaaaatcaacttcatgttttgaagatagttataaatattgttctttgttacaatttcgggcaccgcatattaaaacgtaactttattgttccaatatgtaacatggagggccaggtcataaataatgacattataatgggcttttgcactgttattatttttcctttggaatgtgaaggtctgaatgagggttttgattttgaatgtttcaatgtttttgagaagc

SEQ ID NO: 108 - DNA, 4041 bp, Homo sapiens
ttgtaagagaagaattgataatgactcttggataataggggagggaggggctgtcaatataatataatgaagaagggatttgaagtcatttctgatttaaatctcacatccactacctacttttaatagatatgtagcctttaacaagttccctaacctttctgggccttagctacctccccttggaaatggaaatacctaacatgtaaggttgttttgacagttattttcactaggcatgtaaaggcacttgactctctgttatagaccactgtattatgttaatgtccctctccttcctccctttaggtaaagtttttagggctaataaatcccaaatatcaatgttgatcagtagtttgtgtttgtgtagtgttgtttatatcaaaaactacattgaagccgggcacagtggttcacgcctaaaatcgcaacactttgggaggccaaggtgggcctcccaccttgaactaaggagtttgagaccagcctgggcaacatggtgaaatcccatctctacaaaaaatataaaagctagctgggtgtggtggcatgcacctgtagtcctagctacttgggaggctgaggttgatcctgggagtttgagcctgcagtgagctgtgaagatgccactgcactctagtctgggtgacagagcaagaccctgtctcaaaaacacacacacacacacacacacacacaaagaaatacattgatttttcacataggtagtaagagaaacattctttttgaactcagctgtttgtgaattgaattttgtaattcaaatgctatattatgtaaactattgatgactttcaatctgcatttattttgtataattatttagttaatatttgccacttatattccttaaaaaataaaattgaggttgggcgtggtggctcacacttgtaatcccagcactttgggaggctgaggcaggcagattgcctgagctcaggagtttgagatcagcctgggcaacatcatgaaccccatttctactaaaatacaaaaaattatctgggcatggtggtgtacacctgtagccctagctgtttgggaggctaaggcacgagaattgcttgaacccgggaggcagaggttgcagtgagccaagatcatgccactgcactccagcttggcaacagagcaagactcttgtctccagaaataaaaataaataaattgtattaacatcctgatagtttatctgtttagtacctagcaagaaagaaaatgttgaacatcttaagaagagggtcatttaaaaggcctcttaaagatcatgtttgttacagtgcttaaaaattaatatgttcatctgcaaaatggaataaaaaatctgttaaaaatatatttcactaaatagtttaagatgagtcatatttgtgggttttcattttaaattttctttctctaggtgaagctgtacttcacaaaaacagtagaggagccgtcaaatccagaggctagcagttcaacttctgtaacaccagatgttagtgacaatgaacctgatcattatagatattctgacaccactgactctgatccagagaatgaaccttttgatgaagatcagcatacacaaattacaaaagtctgaatttttttttatcaagagggataaaacaccatgaaaataaacttgaataaactgaaaatggacctttttttttttaatggcaataggacattgtgtcagattaccagttataggaacaattctcttttcctgaccaatcttgttttaccctatacatccacagggttttgacacttgttgtccagttgaaaaaaggttgtgtagctgtgtcatgtatatacctttttgtgtcaaaaggacatttaaaattcaattaggattaataaagatggcactttcccgttttattccagttttataaaaagtggagacagactgatgtgtatacgtaggaattttttccttttgtgttctgtcaccaactgaagtggctaaagagctttgtgatatactggttcacatcctacccctttgcacttgtggcaacagataagtttgcagttggctaagagaggtttccgaagggttttgctacattctaatgcatgtattcgggttaggggaatggagggaatgctcagaaaggaaataattttatgctggactctggaccatataccatctccagctatttacacacacctttctttagcatgctacagttattaatctggacattcgaggaattggccgctgtcactgcttgttgtttgcgcatttttttttaaagcatattggtgctagaaaaggcagctaaaggaagtgaatctgtattggggtacaggaatgaaccttctgcaacatcttaagatccacaaatgaagggatataaaaataatgtcataggtaagaaacacagcaacaatgacttaaccatataaatgtggaggctatcaacaaagaatgggcttgaaacattataaaaattgacaatgatttattaaatatgttttctcaattgtaacgacttctccatctcctgtgtaatcaaggccagtgctaaaattcagatgctgttagtacctacatcagtcaacaacttacacttattttactagttttcaatcataatacctgctgtggatgcttcatgtgctgcctgcaagcttcttttttctcattaaatataaaatattttgtaatgctgcacagaaattttcaatttgagattctacagtaagcgttttttttctttgaagatttatgatgcacttattcaatagctgtcagccgttccacccttttgaccttacacattctattacaatgaattttgcagttttgcacattttttaaatgtcattaactgttagggaattttacttgaatactgaatacatataatgtttatattaaaaaggacatttgtgttaaaaaggaaattagagttgcagtaaactttcaatgctgcacacaaaaaaaagacatttgatttttcagtagaaattgtcctacatgtgctttattgatttgctattgaaagaatagggtttttttttttttttttttttttttttttaaatgtgcagtgttgaatcatttcttcatagtgctcccccgagttgggactagggcttcaatttcacttcttaaaaaaaatcatcatatatttgatatgcccagactgcatacgattttaagcggagtacaactactattgtaaagctaatgtgaagatattattaaaaaggtttttttttccagaaatttggtgtcttcaaattataccttcaccttgacatttgaatatccagccattttgtttcttaatggtataaaattccattttcaataacttattggtgctgaaattgttcactagctgtggtctgacctagttaatttacaaatacagattgaataggacctactagagcagcatttatagagtttgatggcaaatagattaggcagaacttcatctaaaatattcttagtaaataatgttgacacgttttccataccttgtcagtttcattcaacaatttttaaatttttaacaaagctcttaggatttacacatttatatttaaacattgatatatagagtattgattgattgctcataagttaaattggtaaagttagagacaactattctaacacctcaccattgaaatttatatgccaccttgtctttcataaaagctgaaaattgttacctaaaatgaaaatcaacttcatgttttgaagatagttataaatattgttctttgttacaatttcgggcaccgcatattaaaacgtaactttattgttccaatatgtaacatggagggccaggtcataaataatgacattataatgggcttttgcactgttattatttttcctttggaatgtgaaggtctgaatgagggttttgattttgaatgtttcaatgtttttgagaagccttgcttacattttatggtgtagtcattggaaatggaaaaatggcattatatatattatatatataaatatatattatacatactctccttact

SEQ ID NO: 109 - DNA, 4046 bp, Homo sapiens
catgtaaggttgttttgacagttattttcactaggcatgtaaaggcacttgactctctgttatagaccactgtattatgttaatgtccctctccttcctccctttaggtaaagtttttagggctaataaatcccaaatatcaatgttgatcagtagtttgtgtttgtgtagtgttgtttatatcaaaaactacattgaagccgggcacagtggttcacgcctaaaatcgcaacactttgggaggccaaggtgggcctcccaccttgaactaaggagtttgagaccagcctgggcaacatggtgaaatcccatctctacaaaaaatataaaagctagctgggtgtggtggcatgcacctgtagtcctagctacttgggaggctgaggttgatcctgggagtttgagcctgcagtgagctgtgaagatgccactgcactctagtctgggtgacagagcaagaccctgtctcaaaaacacacacacacacacacacacacacaaagaaatacattgatttttcacataggtagtaagagaaacattctttttgaactcagctgtttgtgaattgaattttgtaattcaaatgctatattatgtaaactattgatgactttcaatctgcatttattttgtataattatttagttaatatttgccacttatattccttaaaaaataaaattgaggttgggcgtggtggctcacacttgtaatcccagcactttgggaggctgaggcaggcagattgcctgagctcaggagtttgagatcagcctgggcaacatcatgaaccccatttctactaaaatacaaaaaattatctgggcatggtggtgtacacctgtagccctagctgtttgggaggctaaggcacgagaattgcttgaacccgggaggcagaggttgcagtgagccaagatcatgccactgcactccagcttggcaacagagcaagactcttgtctccagaaataaaaataaataaattgtattaacatcctgatagtttatctgtttagtacctagcaagaaagaaaatgttgaacatcttaagaagagggtcatttaaaaggcctcttaaagatcatgtttgttacagtgcttaaaaattaatatgttcatctgcaaaatggaataaaaaatctgttaaaaatatatttcactaaatagtttaagatgagtcatatttgtgggttttcattttaaattttctttctctaggtgaagctgtacttcacaaaaacagtagaggagccgtcaaatccagaggctagcagttcaacttctgtaacaccagatgttagtgacaatgaacctgatcattatagatattctgacaccactgactctgatccagagaatgaaccttttgatgaagatcagcatacacaaattacaaaagtctgaatttttttttatcaagagggataaaacaccatgaaaataaacttgaataaactgaaaatggacctttttttttttaatggcaataggacattgtgtcagattaccagttataggaacaattctcttttcctgaccaatcttgttttaccctatacatccacagggttttgacacttgttgtccagttgaaaaaaggttgtgtagctgtgtcatgtatatacctttttgtgtcaaaaggacatttaaaattcaattaggattaataaagatggcactttcccgttttattccagttttataaaaagtggagacagactgatgtgtatacgtaggaattttttccttttgtgttctgtcaccaactgaagtggctaaagagctttgtgatatactggttcacatcctacccctttgcacttgtggcaacagataagtttgcagttggctaagagaggtttccgaagggttttgctacattctaatgcatgtattcgggttaggggaatggagggaatgctcagaaaggaaataattttatgctggactctggaccatataccatctccagctatttacacacacctttctttagcatgctacagttattaatctggacattcgaggaattggccgctgtcactgcttgttgtttgcgcatttttttttaaagcatattggtgctagaaaaggcagctaaaggaagtgaatctgtattggggtacaggaatgaaccttctgcaacatcttaagatccacaaatgaagggatataaaaataatgtcataggtaagaaacacagcaacaatgacttaaccatataaatgtggaggctatcaacaaagaatgggcttgaaacattataaaaattgacaatgatttattaaatatgttttctcaattgtaacgacttctccatctcctgtgtaatcaaggccagtgctaaaattcagatgctgttagtacctacatcagtcaacaacttacacttattttactagttttcaatcataatacctgctgtggatgcttcatgtgctgcctgcaagcttcttttttctcattaaatataaaatattttgtaatgctgcacagaaattttcaatttgagattctacagtaagcgttttttttctttgaagatttatgatgcacttattcaatagctgtcagccgttccacccttttgaccttacacattctattacaatgaattttgcagttttgcacattttttaaatgtcattaactgttagggaattttacttgaatactgaatacatataatgtttatattaaaaaggacatttgtgttaaaaaggaaattagagttgcagtaaactttcaatgctgcacacaaaaaaaagacatttgatttttcagtagaaattgtcctacatgtgctttattgatttgctattgaaagaatagggtttttttttttttttttttttttttttttaaatgtgcagtgttgaatcatttcttcatagtgctcccccgagttgggactagggcttcaatttcacttcttaaaaaaaatcatcatatatttgatatgcccagactgcatacgattttaagcggagtacaactactattgtaaagctaatgtgaagatattattaaaaaggtttttttttccagaaatttggtgtcttcaaattataccttcaccttgacatttgaatatccagccattttgtttcttaatggtataaaattccattttcaataacttattggtgctgaaattgttcactagctgtggtctgacctagttaatttacaaatacagattgaataggacctactagagcagcatttatagagtttgatggcaaatagattaggcagaacttcatctaaaatattcttagtaaataatgttgacacgttttccataccttgtcagtttcattcaacaatttttaaatttttaacaaagctcttaggatttacacatttatatttaaacattgatatatagagtattgattgattgctcataagttaaattggtaaagttagagacaactattctaacacctcaccattgaaatttatatgccaccttgtctttcataaaagctgaaaattgttacctaaaatgaaaatcaacttcatgttttgaagatagttataaatattgttctttgttacaatttcgggcaccgcatattaaaacgtaactttattgttccaatatgtaacatggagggccaggtcataaataatgacattataatgggcttttgcactgttattatttttcctttggaatgtgaaggtctgaatgagggttttgattttgaatgtttcaatgtttttgagaagccttgcttacattttatggtgtagtcattggaaatggaaaaatggcattatatatattatatatataaatatatattatacatactctccttactttatttcagttaccatccccatagaatttgacaagaattgctatgactgaaaggttttcgagtcctaattaaaactttatttatggcagtattcataattagcctgaaatgcattctgtaggtaatctctgagtttctggaatattttcttagactttttggatgtgcagcagcttacatgtctgaagttacttgaaggcatcactt

SEQ ID NO: 110 - DNA, 4035 bp, Homo sapiens
tttttcacataggtagtaagagaaacattctttttgaactcagctgtttgtgaattgaattttgtaattcaaatgctatattatgtaaactattgatgactttcaatctgcatttattttgtataattatttagttaatatttgccacttatattccttaaaaaataaaattgaggttgggcgtggtggctcacacttgtaatcccagcactttgggaggctgaggcaggcagattgcctgagctcaggagtttgagatcagcctgggcaacatcatgaaccccatttctactaaaatacaaaaaattatctgggcatggtggtgtacacctgtagccctagctgtttgggaggctaaggcacgagaattgcttgaacccgggaggcagaggttgcagtgagccaagatcatgccactgcactccagcttggcaacagagcaagactcttgtctccagaaataaaaataaataaattgtattaacatcctgatagtttatctgtttagtacctagcaagaaagaaaatgttgaacatcttaagaagagggtcatttaaaaggcctcttaaagatcatgtttgttacagtgcttaaaaattaatatgttcatctgcaaaatggaataaaaaatctgttaaaaatatatttcactaaatagtttaagatgagtcatatttgtgggttttcattttaaattttctttctctaggtgaagctgtacttcacaaaaacagtagaggagccgtcaaatccagaggctagcagttcaacttctgtaacaccagatgttagtgacaatgaacctgatcattatagatattctgacaccactgactctgatccagagaatgaaccttttgatgaagatcagcatacacaaattacaaaagtctgaatttttttttatcaagagggataaaacaccatgaaaataaacttgaataaactgaaaatggacctttttttttttaatggcaataggacattgtgtcagattaccagttataggaacaattctcttttcctgaccaatcttgttttaccctatacatccacagggttttgacacttgttgtccagttgaaaaaaggttgtgtagctgtgtcatgtatatacctttttgtgtcaaaaggacatttaaaattcaattaggattaataaagatggcactttcccgttttattccagttttataaaaagtggagacagactgatgtgtatacgtaggaattttttccttttgtgttctgtcaccaactgaagtggctaaagagctttgtgatatactggttcacatcctacccctttgcacttgtggcaacagataagtttgcagttggctaagagaggtttccgaagggttttgctacattctaatgcatgtattcgggttaggggaatggagggaatgctcagaaaggaaataattttatgctggactctggaccatataccatctccagctatttacacacacctttctttagcatgctacagttattaatctggacattcgaggaattggccgctgtcactgcttgttgtttgcgcatttttttttaaagcatattggtgctagaaaaggcagctaaaggaagtgaatctgtattggggtacaggaatgaaccttctgcaacatcttaagatccacaaatgaagggatataaaaataatgtcataggtaagaaacacagcaacaatgacttaaccatataaatgtggaggctatcaacaaagaatgggcttgaaacattataaaaattgacaatgatttattaaatatgttttctcaattgtaacgacttctccatctcctgtgtaatcaaggccagtgctaaaattcagatgctgttagtacctacatcagtcaacaacttacacttattttactagttttcaatcataatacctgctgtggatgcttcatgtgctgcctgcaagcttcttttttctcattaaatataaaatattttgtaatgctgcacagaaattttcaatttgagattctacagtaagcgttttttttctttgaagatttatgatgcacttattcaatagctgtcagccgttccacccttttgaccttacacattctattacaatgaattttgcagttttgcacattttttaaatgtcattaactgttagggaattttacttgaatactgaatacatataatgtttatattaaaaaggacatttgtgttaaaaaggaaattagagttgcagtaaactttcaatgctgcacacaaaaaaaagacatttgatttttcagtagaaattgtcctacatgtgctttattgatttgctattgaaagaatagggtttttttttttttttttttttttttttttaaatgtgcagtgttgaatcatttcttcatagtgctcccccgagttgggactagggcttcaatttcacttcttaaaaaaaatcatcatatatttgatatgcccagactgcatacgattttaagcggagtacaactactattgtaaagctaatgtgaagatattattaaaaaggtttttttttccagaaatttggtgtcttcaaattataccttcaccttgacatttgaatatccagccattttgtttcttaatggtataaaattccattttcaataacttattggtgctgaaattgttcactagctgtggtctgacctagttaatttacaaatacagattgaataggacctactagagcagcatttatagagtttgatggcaaatagattaggcagaacttcatctaaaatattcttagtaaataatgttgacacgttttccataccttgtcagtttcattcaacaatttttaaatttttaacaaagctcttaggatttacacatttatatttaaacattgatatatagagtattgattgattgctcataagttaaattggtaaagttagagacaactattctaacacctcaccattgaaatttatatgccaccttgtctttcataaaagctgaaaattgttacctaaaatgaaaatcaacttcatgttttgaagatagttataaatattgttctttgttacaatttcgggcaccgcatattaaaacgtaactttattgttccaatatgtaacatggagggccaggtcataaataatgacattataatgggcttttgcactgttattatttttcctttggaatgtgaaggtctgaatgagggttttgattttgaatgtttcaatgtttttgagaagccttgcttacattttatggtgtagtcattggaaatggaaaaatggcattatatatattatatatataaatatatattatacatactctccttactttatttcagttaccatccccatagaatttgacaagaattgctatgactgaaaggttttcgagtcctaattaaaactttatttatggcagtattcataattagcctgaaatgcattctgtaggtaatctctgagtttctggaatattttcttagactttttggatgtgcagcagcttacatgtctgaagttacttgaaggcatcacttttaagaaagcttacagttgggccctgtaccatcccaagtcctttgtagctcctcttgaacatgtttgccatacttttaaaagggtagttgaataaatagcatcaccattctttgctgtggcacaggttataaacttaagtggagtttaccggcagcatcaaatgtttcagctttaaaaaataaaagtagggtacaagtttaatgtttagttctagaaattttgtgcaatatgttcataacgatggctgtggttgccacaaagtgcctcgtttacctttaaatactgttaatgtgtcatgcatgcagatggaaggggtggaactgtgcactaaagtgggggctttaactgtagtatttggcagagttgccttctacctgccagttcaaaagttcaacctgttttcatatagaatatatatactaaaaaatttcagtctgttaaacagccttactctgattcagcctcttcagatactcttgtgctgtgcagcagtggctctgtg

SEQ ID NO: 111 - DNA, 4069 bp, Homo sapiens
tatctgggcatggtggtgtacacctgtagccctagctgtttgggaggctaaggcacgagaattgcttgaacccgggaggcagaggttgcagtgagccaagatcatgccactgcactccagcttggcaacagagcaagactcttgtctccagaaataaaaataaataaattgtattaacatcctgatagtttatctgtttagtacctagcaagaaagaaaatgttgaacatcttaagaagagggtcatttaaaaggcctcttaaagatcatgtttgttacagtgcttaaaaattaatatgttcatctgcaaaatggaataaaaaatctgttaaaaatatatttcactaaatagtttaagatgagtcatatttgtgggttttcattttaaattttctttctctaggtgaagctgtacttcacaaaaacagtagaggagccgtcaaatccagaggctagcagttcaacttctgtaacaccagatgttagtgacaatgaacctgatcattatagatattctgacaccactgactctgatccagagaatgaaccttttgatgaagatcagcatacacaaattacaaaagtctgaatttttttttatcaagagggataaaacaccatgaaaataaacttgaataaactgaaaatggacctttttttttttaatggcaataggacattgtgtcagattaccagttataggaacaattctcttttcctgaccaatcttgttttaccctatacatccacagggttttgacacttgttgtccagttgaaaaaaggttgtgtagctgtgtcatgtatatacctttttgtgtcaaaaggacatttaaaattcaattaggattaataaagatggcactttcccgttttattccagttttataaaaagtggagacagactgatgtgtatacgtaggaattttttccttttgtgttctgtcaccaactgaagtggctaaagagctttgtgatatactggttcacatcctacccctttgcacttgtggcaacagataagtttgcagttggctaagagaggtttccgaagggttttgctacattctaatgcatgtattcgggttaggggaatggagggaatgctcagaaaggaaataattttatgctggactctggaccatataccatctccagctatttacacacacctttctttagcatgctacagttattaatctggacattcgaggaattggccgctgtcactgcttgttgtttgcgcatttttttttaaagcatattggtgctagaaaaggcagctaaaggaagtgaatctgtattggggtacaggaatgaaccttctgcaacatcttaagatccacaaatgaagggatataaaaataatgtcataggtaagaaacacagcaacaatgacttaaccatataaatgtggaggctatcaacaaagaatgggcttgaaacattataaaaattgacaatgatttattaaatatgttttctcaattgtaacgacttctccatctcctgtgtaatcaaggccagtgctaaaattcagatgctgttagtacctacatcagtcaacaacttacacttattttactagttttcaatcataatacctgctgtggatgcttcatgtgctgcctgcaagcttcttttttctcattaaatataaaatattttgtaatgctgcacagaaattttcaatttgagattctacagtaagcgttttttttctttgaagatttatgatgcacttattcaatagctgtcagccgttccacccttttgaccttacacattctattacaatgaattttgcagttttgcacattttttaaatgtcattaactgttagggaattttacttgaatactgaatacatataatgtttatattaaaaaggacatttgtgttaaaaaggaaattagagttgcagtaaactttcaatgctgcacacaaaaaaaagacatttgatttttcagtagaaattgtcctacatgtgctttattgatttgctattgaaagaatagggtttttttttttttttttttttttttttttaaatgtgcagtgttgaatcatttcttcatagtgctcccccgagttgggactagggcttcaatttcacttcttaaaaaaaatcatcatatatttgatatgcccagactgcatacgattttaagcggagtacaactactattgtaaagctaatgtgaagatattattaaaaaggtttttttttccagaaatttggtgtcttcaaattataccttcaccttgacatttgaatatccagccattttgtttcttaatggtataaaattccattttcaataacttattggtgctgaaattgttcactagctgtggtctgacctagttaatttacaaatacagattgaataggacctactagagcagcatttatagagtttgatggcaaatagattaggcagaacttcatctaaaatattcttagtaaataatgttgacacgttttccataccttgtcagtttcattcaacaatttttaaatttttaacaaagctcttaggatttacacatttatatttaaacattgatatatagagtattgattgattgctcataagttaaattggtaaagttagagacaactattctaacacctcaccattgaaatttatatgccaccttgtctttcataaaagctgaaaattgttacctaaaatgaaaatcaacttcatgttttgaagatagttataaatattgttctttgttacaatttcgggcaccgcatattaaaacgtaactttattgttccaatatgtaacatggagggccaggtcataaataatgacattataatgggcttttgcactgttattatttttcctttggaatgtgaaggtctgaatgagggttttgattttgaatgtttcaatgtttttgagaagccttgcttacattttatggtgtagtcattggaaatggaaaaatggcattatatatattatatatataaatatatattatacatactctccttactttatttcagttaccatccccatagaatttgacaagaattgctatgactgaaaggttttcgagtcctaattaaaactttatttatggcagtattcataattagcctgaaatgcattctgtaggtaatctctgagtttctggaatattttcttagactttttggatgtgcagcagcttacatgtctgaagttacttgaaggcatcacttttaagaaagcttacagttgggccctgtaccatcccaagtcctttgtagctcctcttgaacatgtttgccatacttttaaaagggtagttgaataaatagcatcaccattctttgctgtggcacaggttataaacttaagtggagtttaccggcagcatcaaatgtttcagctttaaaaaataaaagtagggtacaagtttaatgtttagttctagaaattttgtgcaatatgttcataacgatggctgtggttgccacaaagtgcctcgtttacctttaaatactgttaatgtgtcatgcatgcagatggaaggggtggaactgtgcactaaagtgggggctttaactgtagtatttggcagagttgccttctacctgccagttcaaaagttcaacctgttttcatatagaatatatatactaaaaaatttcagtctgttaaacagccttactctgattcagcctcttcagatactcttgtgctgtgcagcagtggctctgtgtgtaaatgctatgcactgaggatacacaaaaataccaatatgatgtgtacaggataatgcctcatcccaatcagatgtccatttgttattgtgtttgttaacaaccctttatctcttagtgttataaactccacttaaaactgattaaagtctcattcttgtcattgtgtgggtgttttattaaatgagagtttataattcaaattgcttaagtccattgaagttttaattaatgggcagccaaatgtgaatacaaagttttcagtttttttttttcctgctgtccttcaaagcctactgtttaaaaaaaaaaaaaaaaaaaaacatggcctgagagtaga

SEQ ID NO: 112 - DNA, 4042 bp, Homo sapiens
tataaaaagtggagacagactgatgtgtatacgtaggaattttttccttttgtgttctgtcaccaactgaagtggctaaagagctttgtgatatactggttcacatcctacccctttgcacttgtggcaacagataagtttgcagttggctaagagaggtttccgaagggttttgctacattctaatgcatgtattcgggttaggggaatggagggaatgctcagaaaggaaataattttatgctggactctggaccatataccatctccagctatttacacacacctttctttagcatgctacagttattaatctggacattcgaggaattggccgctgtcactgcttgttgtttgcgcatttttttttaaagcatattggtgctagaaaaggcagctaaaggaagtgaatctgtattggggtacaggaatgaaccttctgcaacatcttaagatccacaaatgaagggatataaaaataatgtcataggtaagaaacacagcaacaatgacttaaccatataaatgtggaggctatcaacaaagaatgggcttgaaacattataaaaattgacaatgatttattaaatatgttttctcaattgtaacgacttctccatctcctgtgtaatcaaggccagtgctaaaattcagatgctgttagtacctacatcagtcaacaacttacacttattttactagttttcaatcataatacctgctgtggatgcttcatgtgctgcctgcaagcttcttttttctcattaaatataaaatattttgtaatgctgcacagaaattttcaatttgagattctacagtaagcgttttttttctttgaagatttatgatgcacttattcaatagctgtcagccgttccacccttttgaccttacacattctattacaatgaattttgcagttttgcacattttttaaatgtcattaactgttagggaattttacttgaatactgaatacatataatgtttatattaaaaaggacatttgtgttaaaaaggaaattagagttgcagtaaactttcaatgctgcacacaaaaaaaagacatttgatttttcagtagaaattgtcctacatgtgctttattgatttgctattgaaagaatagggtttttttttttttttttttttttttttttaaatgtgcagtgttgaatcatttcttcatagtgctcccccgagttgggactagggcttcaatttcacttcttaaaaaaaatcatcatatatttgatatgcccagactgcatacgattttaagcggagtacaactactattgtaaagctaatgtgaagatattattaaaaaggtttttttttccagaaatttggtgtcttcaaattataccttcaccttgacatttgaatatccagccattttgtttcttaatggtataaaattccattttcaataacttattggtgctgaaattgttcactagctgtggtctgacctagttaatttacaaatacagattgaataggacctactagagcagcatttatagagtttgatggcaaatagattaggcagaacttcatctaaaatattcttagtaaataatgttgacacgttttccataccttgtcagtttcattcaacaatttttaaatttttaacaaagctcttaggatttacacatttatatttaaacattgatatatagagtattgattgattgctcataagttaaattggtaaagttagagacaactattctaacacctcaccattgaaatttatatgccaccttgtctttcataaaagctgaaaattgttacctaaaatgaaaatcaacttcatgttttgaagatagttataaatattgttctttgttacaatttcgggcaccgcatattaaaacgtaactttattgttccaatatgtaacatggagggccaggtcataaataatgacattataatgggcttttgcactgttattatttttcctttggaatgtgaaggtctgaatgagggttttgattttgaatgtttcaatgtttttgagaagccttgcttacattttatggtgtagtcattggaaatggaaaaatggcattatatatattatatatataaatatatattatacatactctccttactttatttcagttaccatccccatagaatttgacaagaattgctatgactgaaaggttttcgagtcctaattaaaactttatttatggcagtattcataattagcctgaaatgcattctgtaggtaatctctgagtttctggaatattttcttagactttttggatgtgcagcagcttacatgtctgaagttacttgaaggcatcacttttaagaaagcttacagttgggccctgtaccatcccaagtcctttgtagctcctcttgaacatgtttgccatacttttaaaagggtagttgaataaatagcatcaccattctttgctgtggcacaggttataaacttaagtggagtttaccggcagcatcaaatgtttcagctttaaaaaataaaagtagggtacaagtttaatgtttagttctagaaattttgtgcaatatgttcataacgatggctgtggttgccacaaagtgcctcgtttacctttaaatactgttaatgtgtcatgcatgcagatggaaggggtggaactgtgcactaaagtgggggctttaactgtagtatttggcagagttgccttctacctgccagttcaaaagttcaacctgttttcatatagaatatatatactaaaaaatttcagtctgttaaacagccttactctgattcagcctcttcagatactcttgtgctgtgcagcagtggctctgtgtgtaaatgctatgcactgaggatacacaaaaataccaatatgatgtgtacaggataatgcctcatcccaatcagatgtccatttgttattgtgtttgttaacaaccctttatctcttagtgttataaactccacttaaaactgattaaagtctcattcttgtcattgtgtgggtgttttattaaatgagagtttataattcaaattgcttaagtccattgaagttttaattaatgggcagccaaatgtgaatacaaagttttcagtttttttttttcctgctgtccttcaaagcctactgtttaaaaaaaaaaaaaaaaaaaaacatggcctgagagtagagtatctgtctactcatgtttaattaaggaaaaacacttatttttagggctttagtcatcacttcataaattgtataagcacattaaatagcgttctagtcctgaaaaagtccaagattcttagaaaattgtgcatatttttattatgacagatgtttgaagataattccccagaatggatttgatactttagatttcaattttgtggcttttgtctattattctgtactctgccatcagcatatggaaagcttcatttactcatcatgacttgtgccatataaaaattgatatttcggaatagtctaaaggactttttgtacttgaatttaatcatgttgtttctaatattcttaaaagcttgaagactaaagcatatcctttcaacaaagcatagtaaggtaataagaaagtgtagtttgtacaagtgttaaaaaaataaagtagacaatgttacagtgggacttattatttcaagtttacattttctccatgtaattttttaaaaagtaaatgaaaaaatgtgcaataatgtaaaatatgaagtgtatgtgtacacacattttatttttcggtatcttgggtatacgtatggttgaaaactatactggagtctaaaagtattctaatttataagaagacattttggtgatgtttgaaaaatagaaatgtgctagttttgtttttatatcatgtcctttgtacgttgtaatatgagctggcttggttcagtaaatgccatcaccatttccattgagaatttaaaactcaccagtgtttaatatgcaggcttccaaaggcttatgaaaaaaatcaagacccttaaatctagttaatttgctgctaacatgaaactctt

SEQ ID NO: 113 - DNA, 4042 bp, Homo sapiens
taaaaagtggagacagactgatgtgtatacgtaggaattttttccttttgtgttctgtcaccaactgaagtggctaaagagctttgtgatatactggttcacatcctacccctttgcacttgtggcaacagataagtttgcagttggctaagagaggtttccgaagggttttgctacattctaatgcatgtattcgggttaggggaatggagggaatgctcagaaaggaaataattttatgctggactctggaccatataccatctccagctatttacacacacctttctttagcatgctacagttattaatctggacattcgaggaattggccgctgtcactgcttgttgtttgcgcatttttttttaaagcatattggtgctagaaaaggcagctaaaggaagtgaatctgtattggggtacaggaatgaaccttctgcaacatcttaagatccacaaatgaagggatataaaaataatgtcataggtaagaaacacagcaacaatgacttaaccatataaatgtggaggctatcaacaaagaatgggcttgaaacattataaaaattgacaatgatttattaaatatgttttctcaattgtaacgacttctccatctcctgtgtaatcaaggccagtgctaaaattcagatgctgttagtacctacatcagtcaacaacttacacttattttactagttttcaatcataatacctgctgtggatgcttcatgtgctgcctgcaagcttcttttttctcattaaatataaaatattttgtaatgctgcacagaaattttcaatttgagattctacagtaagcgttttttttctttgaagatttatgatgcacttattcaatagctgtcagccgttccacccttttgaccttacacattctattacaatgaattttgcagttttgcacattttttaaatgtcattaactgttagggaattttacttgaatactgaatacatataatgtttatattaaaaaggacatttgtgttaaaaaggaaattagagttgcagtaaactttcaatgctgcacacaaaaaaaagacatttgatttttcagtagaaattgtcctacatgtgctttattgatttgctattgaaagaatagggtttttttttttttttttttttttttttttaaatgtgcagtgttgaatcatttcttcatagtgctcccccgagttgggactagggcttcaatttcacttcttaaaaaaaatcatcatatatttgatatgcccagactgcatacgattttaagcggagtacaactactattgtaaagctaatgtgaagatattattaaaaaggtttttttttccagaaatttggtgtcttcaaattataccttcaccttgacatttgaatatccagccattttgtttcttaatggtataaaattccattttcaataacttattggtgctgaaattgttcactagctgtggtctgacctagttaatttacaaatacagattgaataggacctactagagcagcatttatagagtttgatggcaaatagattaggcagaacttcatctaaaatattcttagtaaataatgttgacacgttttccataccttgtcagtttcattcaacaatttttaaatttttaacaaagctcttaggatttacacatttatatttaaacattgatatatagagtattgattgattgctcataagttaaattggtaaagttagagacaactattctaacacctcaccattgaaatttatatgccaccttgtctttcataaaagctgaaaattgttacctaaaatgaaaatcaacttcatgttttgaagatagttataaatattgttctttgttacaatttcgggcaccgcatattaaaacgtaactttattgttccaatatgtaacatggagggccaggtcataaataatgacattataatgggcttttgcactgttattatttttcctttggaatgtgaaggtctgaatgagggttttgattttgaatgtttcaatgtttttgagaagccttgcttacattttatggtgtagtcattggaaatggaaaaatggcattatatatattatatatataaatatatattatacatactctccttactttatttcagttaccatccccatagaatttgacaagaattgctatgactgaaaggttttcgagtcctaattaaaactttatttatggcagtattcataattagcctgaaatgcattctgtaggtaatctctgagtttctggaatattttcttagactttttggatgtgcagcagcttacatgtctgaagttacttgaaggcatcacttttaagaaagcttacagttgggccctgtaccatcccaagtcctttgtagctcctcttgaacatgtttgccatacttttaaaagggtagttgaataaatagcatcaccattctttgctgtggcacaggttataaacttaagtggagtttaccggcagcatcaaatgtttcagctttaaaaaataaaagtagggtacaagtttaatgtttagttctagaaattttgtgcaatatgttcataacgatggctgtggttgccacaaagtgcctcgtttacctttaaatactgttaatgtgtcatgcatgcagatggaaggggtggaactgtgcactaaagtgggggctttaactgtagtatttggcagagttgccttctacctgccagttcaaaagttcaacctgttttcatatagaatatatatactaaaaaatttcagtctgttaaacagccttactctgattcagcctcttcagatactcttgtgctgtgcagcagtggctctgtgtgtaaatgctatgcactgaggatacacaaaaataccaatatgatgtgtacaggataatgcctcatcccaatcagatgtccatttgttattgtgtttgttaacaaccctttatctcttagtgttataaactccacttaaaactgattaaagtctcattcttgtcattgtgtgggtgttttattaaatgagagtttataattcaaattgcttaagtccattgaagttttaattaatgggcagccaaatgtgaatacaaagttttcagtttttttttttcctgctgtccttcaaagcctactgtttaaaaaaaaaaaaaaaaaaaaacatggcctgagagtagagtatctgtctactcatgtttaattaaggaaaaacacttatttttagggctttagtcatcacttcataaattgtataagcacattaaatagcgttctagtcctgaaaaagtccaagattcttagaaaattgtgcatatttttattatgacagatgtttgaagataattccccagaatggatttgatactttagatttcaattttgtggcttttgtctattattctgtactctgccatcagcatatggaaagcttcatttactcatcatgacttgtgccatataaaaattgatatttcggaatagtctaaaggactttttgtacttgaatttaatcatgttgtttctaatattcttaaaagcttgaagactaaagcatatcctttcaacaaagcatagtaaggtaataagaaagtgtagtttgtacaagtgttaaaaaaataaagtagacaatgttacagtgggacttattatttcaagtttacattttctccatgtaattttttaaaaagtaaatgaaaaaatgtgcaataatgtaaaatatgaagtgtatgtgtacacacattttatttttcggtatcttgggtatacgtatggttgaaaactatactggagtctaaaagtattctaatttataagaagacattttggtgatgtttgaaaaatagaaatgtgctagttttgtttttatatcatgtcctttgtacgttgtaatatgagctggcttggttcagtaaatgccatcaccatttccattgagaatttaaaactcaccagtgtttaatatgcaggcttccaaaggcttatgaaaaaaatcaagacccttaaatctagttaatttgctgctaacatgaaactctttg

SEQ ID NO: 114 - DNA, 4046 bp, Homo sapiens
aattgtaacgacttctccatctcctgtgtaatcaaggccagtgctaaaattcagatgctgttagtacctacatcagtcaacaacttacacttattttactagttttcaatcataatacctgctgtggatgcttcatgtgctgcctgcaagcttcttttttctcattaaatataaaatattttgtaatgctgcacagaaattttcaatttgagattctacagtaagcgttttttttctttgaagatttatgatgcacttattcaatagctgtcagccgttccacccttttgaccttacacattctattacaatgaattttgcagttttgcacattttttaaatgtcattaactgttagggaattttacttgaatactgaatacatataatgtttatattaaaaaggacatttgtgttaaaaaggaaattagagttgcagtaaactttcaatgctgcacacaaaaaaaagacatttgatttttcagtagaaattgtcctacatgtgctttattgatttgctattgaaagaatagggtttttttttttttttttttttttttttttaaatgtgcagtgttgaatcatttcttcatagtgctcccccgagttgggactagggcttcaatttcacttcttaaaaaaaatcatcatatatttgatatgcccagactgcatacgattttaagcggagtacaactactattgtaaagctaatgtgaagatattattaaaaaggtttttttttccagaaatttggtgtcttcaaattataccttcaccttgacatttgaatatccagccattttgtttcttaatggtataaaattccattttcaataacttattggtgctgaaattgttcactagctgtggtctgacctagttaatttacaaatacagattgaataggacctactagagcagcatttatagagtttgatggcaaatagattaggcagaacttcatctaaaatattcttagtaaataatgttgacacgttttccataccttgtcagtttcattcaacaatttttaaatttttaacaaagctcttaggatttacacatttatatttaaacattgatatatagagtattgattgattgctcataagttaaattggtaaagttagagacaactattctaacacctcaccattgaaatttatatgccaccttgtctttcataaaagctgaaaattgttacctaaaatgaaaatcaacttcatgttttgaagatagttataaatattgttctttgttacaatttcgggcaccgcatattaaaacgtaactttattgttccaatatgtaacatggagggccaggtcataaataatgacattataatgggcttttgcactgttattatttttcctttggaatgtgaaggtctgaatgagggttttgattttgaatgtttcaatgtttttgagaagccttgcttacattttatggtgtagtcattggaaatggaaaaatggcattatatatattatatatataaatatatattatacatactctccttactttatttcagttaccatccccatagaatttgacaagaattgctatgactgaaaggttttcgagtcctaattaaaactttatttatggcagtattcataattagcctgaaatgcattctgtaggtaatctctgagtttctggaatattttcttagactttttggatgtgcagcagcttacatgtctgaagttacttgaaggcatcacttttaagaaagcttacagttgggccctgtaccatcccaagtcctttgtagctcctcttgaacatgtttgccatacttttaaaagggtagttgaataaatagcatcaccattctttgctgtggcacaggttataaacttaagtggagtttaccggcagcatcaaatgtttcagctttaaaaaataaaagtagggtacaagtttaatgtttagttctagaaattttgtgcaatatgttcataacgatggctgtggttgccacaaagtgcctcgtttacctttaaatactgttaatgtgtcatgcatgcagatggaaggggtggaactgtgcactaaagtgggggctttaactgtagtatttggcagagttgccttctacctgccagttcaaaagttcaacctgttttcatatagaatatatatactaaaaaatttcagtctgttaaacagccttactctgattcagcctcttcagatactcttgtgctgtgcagcagtggctctgtgtgtaaatgctatgcactgaggatacacaaaaataccaatatgatgtgtacaggataatgcctcatcccaatcagatgtccatttgttattgtgtttgttaacaaccctttatctcttagtgttataaactccacttaaaactgattaaagtctcattcttgtcattgtgtgggtgttttattaaatgagagtttataattcaaattgcttaagtccattgaagttttaattaatgggcagccaaatgtgaatacaaagttttcagtttttttttttcctgctgtccttcaaagcctactgtttaaaaaaaaaaaaaaaaaaaaacatggcctgagagtagagtatctgtctactcatgtttaattaaggaaaaacacttatttttagggctttagtcatcacttcataaattgtataagcacattaaatagcgttctagtcctgaaaaagtccaagattcttagaaaattgtgcatatttttattatgacagatgtttgaagataattccccagaatggatttgatactttagatttcaattttgtggcttttgtctattattctgtactctgccatcagcatatggaaagcttcatttactcatcatgacttgtgccatataaaaattgatatttcggaatagtctaaaggactttttgtacttgaatttaatcatgttgtttctaatattcttaaaagcttgaagactaaagcatatcctttcaacaaagcatagtaaggtaataagaaagtgtagtttgtacaagtgttaaaaaaataaagtagacaatgttacagtgggacttattatttcaagtttacattttctccatgtaattttttaaaaagtaaatgaaaaaatgtgcaataatgtaaaatatgaagtgtatgtgtacacacattttatttttcggtatcttgggtatacgtatggttgaaaactatactggagtctaaaagtattctaatttataagaagacattttggtgatgtttgaaaaatagaaatgtgctagttttgtttttatatcatgtcctttgtacgttgtaatatgagctggcttggttcagtaaatgccatcaccatttccattgagaatttaaaactcaccagtgtttaatatgcaggcttccaaaggcttatgaaaaaaatcaagacccttaaatctagttaatttgctgctaacatgaaactctttggttcttttatttttgccagataattagacacacatctaaagcttagtcttaaatggcttaagtgtagctattgattagtgctgttgctagttcagaaagaaatgtttgtgaatggaaacaagaatattcagtccaaactgttgtaaggacagtacctgaaaaccaggaaacaggataatggaaaaagtcttttaaagatgaaatgttggagccaactttcttatagaattaattgtatgtggctatagaaagcctaatgattgttgcttatttttgagagcatattattcttttatgaccataatcttgctgtttttccatcttccaaaagatcttccttctaatatgtatatcagaatgtgggtagccagtcagacaaattcatattggttggtagctttaaaaagtttgtaatgtgaagacaggaaaggacaaaatagtttgctttggtggtagtactctggttgttaagctaggtattttgagactacttccccatcacaacaacaataaaataatcactcataatcctatcacctggagacatagccatcgttaatatgttagtgactatacaatcatgttttcttctgtatatccat

SEQ ID NO: 115 - DNA, 4044 bp, Homo sapiens
attgtaacgacttctccatctcctgtgtaatcaaggccagtgctaaaattcagatgctgttagtacctacatcagtcaacaacttacacttattttactagttttcaatcataatacctgctgtggatgcttcatgtgctgcctgcaagcttcttttttctcattaaatataaaatattttgtaatgctgcacagaaattttcaatttgagattctacagtaagcgttttttttctttgaagatttatgatgcacttattcaatagctgtcagccgttccacccttttgaccttacacattctattacaatgaattttgcagttttgcacattttttaaatgtcattaactgttagggaattttacttgaatactgaatacatataatgtttatattaaaaaggacatttgtgttaaaaaggaaattagagttgcagtaaactttcaatgctgcacacaaaaaaaagacatttgatttttcagtagaaattgtcctacatgtgctttattgatttgctattgaaagaatagggtttttttttttttttttttttttttttttaaatgtgcagtgttgaatcatttcttcatagtgctcccccgagttgggactagggcttcaatttcacttcttaaaaaaaatcatcatatatttgatatgcccagactgcatacgattttaagcggagtacaactactattgtaaagctaatgtgaagatattattaaaaaggtttttttttccagaaatttggtgtcttcaaattataccttcaccttgacatttgaatatccagccattttgtttcttaatggtataaaattccattttcaataacttattggtgctgaaattgttcactagctgtggtctgacctagttaatttacaaatacagattgaataggacctactagagcagcatttatagagtttgatggcaaatagattaggcagaacttcatctaaaatattcttagtaaataatgttgacacgttttccataccttgtcagtttcattcaacaatttttaaatttttaacaaagctcttaggatttacacatttatatttaaacattgatatatagagtattgattgattgctcataagttaaattggtaaagttagagacaactattctaacacctcaccattgaaatttatatgccaccttgtctttcataaaagctgaaaattgttacctaaaatgaaaatcaacttcatgttttgaagatagttataaatattgttctttgttacaatttcgggcaccgcatattaaaacgtaactttattgttccaatatgtaacatggagggccaggtcataaataatgacattataatgggcttttgcactgttattatttttcctttggaatgtgaaggtctgaatgagggttttgattttgaatgtttcaatgtttttgagaagccttgcttacattttatggtgtagtcattggaaatggaaaaatggcattatatatattatatatataaatatatattatacatactctccttactttatttcagttaccatccccatagaatttgacaagaattgctatgactgaaaggttttcgagtcctaattaaaactttatttatggcagtattcataattagcctgaaatgcattctgtaggtaatctctgagtttctggaatattttcttagactttttggatgtgcagcagcttacatgtctgaagttacttgaaggcatcacttttaagaaagcttacagttgggccctgtaccatcccaagtcctttgtagctcctcttgaacatgtttgccatacttttaaaagggtagttgaataaatagcatcaccattctttgctgtggcacaggttataaacttaagtggagtttaccggcagcatcaaatgtttcagctttaaaaaataaaagtagggtacaagtttaatgtttagttctagaaattttgtgcaatatgttcataacgatggctgtggttgccacaaagtgcctcgtttacctttaaatactgttaatgtgtcatgcatgcagatggaaggggtggaactgtgcactaaagtgggggctttaactgtagtatttggcagagttgccttctacctgccagttcaaaagttcaacctgttttcatatagaatatatatactaaaaaatttcagtctgttaaacagccttactctgattcagcctcttcagatactcttgtgctgtgcagcagtggctctgtgtgtaaatgctatgcactgaggatacacaaaaataccaatatgatgtgtacaggataatgcctcatcccaatcagatgtccatttgttattgtgtttgttaacaaccctttatctcttagtgttataaactccacttaaaactgattaaagtctcattcttgtcattgtgtgggtgttttattaaatgagagtttataattcaaattgcttaagtccattgaagttttaattaatgggcagccaaatgtgaatacaaagttttcagtttttttttttcctgctgtccttcaaagcctactgtttaaaaaaaaaaaaaaaaaaaaacatggcctgagagtagagtatctgtctactcatgtttaattaaggaaaaacacttatttttagggctttagtcatcacttcataaattgtataagcacattaaatagcgttctagtcctgaaaaagtccaagattcttagaaaattgtgcatatttttattatgacagatgtttgaagataattccccagaatggatttgatactttagatttcaattttgtggcttttgtctattattctgtactctgccatcagcatatggaaagcttcatttactcatcatgacttgtgccatataaaaattgatatttcggaatagtctaaaggactttttgtacttgaatttaatcatgttgtttctaatattcttaaaagcttgaagactaaagcatatcctttcaacaaagcatagtaaggtaataagaaagtgtagtttgtacaagtgttaaaaaaataaagtagacaatgttacagtgggacttattatttcaagtttacattttctccatgtaattttttaaaaagtaaatgaaaaaatgtgcaataatgtaaaatatgaagtgtatgtgtacacacattttatttttcggtatcttgggtatacgtatggttgaaaactatactggagtctaaaagtattctaatttataagaagacattttggtgatgtttgaaaaatagaaatgtgctagttttgtttttatatcatgtcctttgtacgttgtaatatgagctggcttggttcagtaaatgccatcaccatttccattgagaatttaaaactcaccagtgtttaatatgcaggcttccaaaggcttatgaaaaaaatcaagacccttaaatctagttaatttgctgctaacatgaaactctttggttcttttatttttgccagataattagacacacatctaaagcttagtcttaaatggcttaagtgtagctattgattagtgctgttgctagttcagaaagaaatgtttgtgaatggaaacaagaatattcagtccaaactgttgtaaggacagtacctgaaaaccaggaaacaggataatggaaaaagtcttttaaagatgaaatgttggagccaactttcttatagaattaattgtatgtggctatagaaagcctaatgattgttgcttatttttgagagcatattattcttttatgaccataatcttgctgtttttccatcttccaaaagatcttccttctaatatgtatatcagaatgtgggtagccagtcagacaaattcatattggttggtagctttaaaaagtttgtaatgtgaagacaggaaaggacaaaatagtttgctttggtggtagtactctggttgttaagctaggtattttgagactacttccccatcacaacaacaataaaataatcactcataatcctatcacctggagacatagccatcgttaatatgttagtgactatacaatcatgttttcttctgtatatcca

SEQ ID NO: 116 - DNA, 4044 bp, Homo sapiens
tgtaacgacttctccatctcctgtgtaatcaaggccagtgctaaaattcagatgctgttagtacctacatcagtcaacaacttacacttattttactagttttcaatcataatacctgctgtggatgcttcatgtgctgcctgcaagcttcttttttctcattaaatataaaatattttgtaatgctgcacagaaattttcaatttgagattctacagtaagcgttttttttctttgaagatttatgatgcacttattcaatagctgtcagccgttccacccttttgaccttacacattctattacaatgaattttgcagttttgcacattttttaaatgtcattaactgttagggaattttacttgaatactgaatacatataatgtttatattaaaaaggacatttgtgttaaaaaggaaattagagttgcagtaaactttcaatgctgcacacaaaaaaaagacatttgatttttcagtagaaattgtcctacatgtgctttattgatttgctattgaaagaatagggtttttttttttttttttttttttttttttaaatgtgcagtgttgaatcatttcttcatagtgctcccccgagttgggactagggcttcaatttcacttcttaaaaaaaatcatcatatatttgatatgcccagactgcatacgattttaagcggagtacaactactattgtaaagctaatgtgaagatattattaaaaaggtttttttttccagaaatttggtgtcttcaaattataccttcaccttgacatttgaatatccagccattttgtttcttaatggtataaaattccattttcaataacttattggtgctgaaattgttcactagctgtggtctgacctagttaatttacaaatacagattgaataggacctactagagcagcatttatagagtttgatggcaaatagattaggcagaacttcatctaaaatattcttagtaaataatgttgacacgttttccataccttgtcagtttcattcaacaatttttaaatttttaacaaagctcttaggatttacacatttatatttaaacattgatatatagagtattgattgattgctcataagttaaattggtaaagttagagacaactattctaacacctcaccattgaaatttatatgccaccttgtctttcataaaagctgaaaattgttacctaaaatgaaaatcaacttcatgttttgaagatagttataaatattgttctttgttacaatttcgggcaccgcatattaaaacgtaactttattgttccaatatgtaacatggagggccaggtcataaataatgacattataatgggcttttgcactgttattatttttcctttggaatgtgaaggtctgaatgagggttttgattttgaatgtttcaatgtttttgagaagccttgcttacattttatggtgtagtcattggaaatggaaaaatggcattatatatattatatatataaatatatattatacatactctccttactttatttcagttaccatccccatagaatttgacaagaattgctatgactgaaaggttttcgagtcctaattaaaactttatttatggcagtattcataattagcctgaaatgcattctgtaggtaatctctgagtttctggaatattttcttagactttttggatgtgcagcagcttacatgtctgaagttacttgaaggcatcacttttaagaaagcttacagttgggccctgtaccatcccaagtcctttgtagctcctcttgaacatgtttgccatacttttaaaagggtagttgaataaatagcatcaccattctttgctgtggcacaggttataaacttaagtggagtttaccggcagcatcaaatgtttcagctttaaaaaataaaagtagggtacaagtttaatgtttagttctagaaattttgtgcaatatgttcataacgatggctgtggttgccacaaagtgcctcgtttacctttaaatactgttaatgtgtcatgcatgcagatggaaggggtggaactgtgcactaaagtgggggctttaactgtagtatttggcagagttgccttctacctgccagttcaaaagttcaacctgttttcatatagaatatatatactaaaaaatttcagtctgttaaacagccttactctgattcagcctcttcagatactcttgtgctgtgcagcagtggctctgtgtgtaaatgctatgcactgaggatacacaaaaataccaatatgatgtgtacaggataatgcctcatcccaatcagatgtccatttgttattgtgtttgttaacaaccctttatctcttagtgttataaactccacttaaaactgattaaagtctcattcttgtcattgtgtgggtgttttattaaatgagagtttataattcaaattgcttaagtccattgaagttttaattaatgggcagccaaatgtgaatacaaagttttcagtttttttttttcctgctgtccttcaaagcctactgtttaaaaaaaaaaaaaaaaaaaaacatggcctgagagtagagtatctgtctactcatgtttaattaaggaaaaacacttatttttagggctttagtcatcacttcataaattgtataagcacattaaatagcgttctagtcctgaaaaagtccaagattcttagaaaattgtgcatatttttattatgacagatgtttgaagataattccccagaatggatttgatactttagatttcaattttgtggcttttgtctattattctgtactctgccatcagcatatggaaagcttcatttactcatcatgacttgtgccatataaaaattgatatttcggaatagtctaaaggactttttgtacttgaatttaatcatgttgtttctaatattcttaaaagcttgaagactaaagcatatcctttcaacaaagcatagtaaggtaataagaaagtgtagtttgtacaagtgttaaaaaaataaagtagacaatgttacagtgggacttattatttcaagtttacattttctccatgtaattttttaaaaagtaaatgaaaaaatgtgcaataatgtaaaatatgaagtgtatgtgtacacacattttatttttcggtatcttgggtatacgtatggttgaaaactatactggagtctaaaagtattctaatttataagaagacattttggtgatgtttgaaaaatagaaatgtgctagttttgtttttatatcatgtcctttgtacgttgtaatatgagctggcttggttcagtaaatgccatcaccatttccattgagaatttaaaactcaccagtgtttaatatgcaggcttccaaaggcttatgaaaaaaatcaagacccttaaatctagttaatttgctgctaacatgaaactctttggttcttttatttttgccagataattagacacacatctaaagcttagtcttaaatggcttaagtgtagctattgattagtgctgttgctagttcagaaagaaatgtttgtgaatggaaacaagaatattcagtccaaactgttgtaaggacagtacctgaaaaccaggaaacaggataatggaaaaagtcttttaaagatgaaatgttggagccaactttcttatagaattaattgtatgtggctatagaaagcctaatgattgttgcttatttttgagagcatattattcttttatgaccataatcttgctgtttttccatcttccaaaagatcttccttctaatatgtatatcagaatgtgggtagccagtcagacaaattcatattggttggtagctttaaaaagtttgtaatgtgaagacaggaaaggacaaaatagtttgctttggtggtagtactctggttgttaagctaggtattttgagactacttccccatcacaacaacaataaaataatcactcataatcctatcacctggagacatagccatcgttaatatgttagtgactatacaatcatgttttcttctgtatatccatg

SEQ ID NO: 117 - DNA, 4048 bp, Homo sapiens
taatgtttagttctagaaattttgtgcaatatgttcataacgatggctgtggttgccacaaagtgcctcgtttacctttaaatactgttaatgtgtcatgcatgcagatggaaggggtggaactgtgcactaaagtgggggctttaactgtagtatttggcagagttgccttctacctgccagttcaaaagttcaacctgttttcatatagaatatatatactaaaaaatttcagtctgttaaacagccttactctgattcagcctcttcagatactcttgtgctgtgcagcagtggctctgtgtgtaaatgctatgcactgaggatacacaaaaataccaatatgatgtgtacaggataatgcctcatcccaatcagatgtccatttgttattgtgtttgttaacaaccctttatctcttagtgttataaactccacttaaaactgattaaagtctcattcttgtcattgtgtgggtgttttattaaatgagagtttataattcaaattgcttaagtccattgaagttttaattaatgggcagccaaatgtgaatacaaagttttcagtttttttttttcctgctgtccttcaaagcctactgtttaaaaaaaaaaaaaaaaaaaaacatggcctgagagtagagtatctgtctactcatgtttaattaaggaaaaacacttatttttagggctttagtcatcacttcataaattgtataagcacattaaatagcgttctagtcctgaaaaagtccaagattcttagaaaattgtgcatatttttattatgacagatgtttgaagataattccccagaatggatttgatactttagatttcaattttgtggcttttgtctattattctgtactctgccatcagcatatggaaagcttcatttactcatcatgacttgtgccatataaaaattgatatttcggaatagtctaaaggactttttgtacttgaatttaatcatgttgtttctaatattcttaaaagcttgaagactaaagcatatcctttcaacaaagcatagtaaggtaataagaaagtgtagtttgtacaagtgttaaaaaaataaagtagacaatgttacagtgggacttattatttcaagtttacattttctccatgtaattttttaaaaagtaaatgaaaaaatgtgcaataatgtaaaatatgaagtgtatgtgtacacacattttatttttcggtatcttgggtatacgtatggttgaaaactatactggagtctaaaagtattctaatttataagaagacattttggtgatgtttgaaaaatagaaatgtgctagttttgtttttatatcatgtcctttgtacgttgtaatatgagctggcttggttcagtaaatgccatcaccatttccattgagaatttaaaactcaccagtgtttaatatgcaggcttccaaaggcttatgaaaaaaatcaagacccttaaatctagttaatttgctgctaacatgaaactctttggttcttttatttttgccagataattagacacacatctaaagcttagtcttaaatggcttaagtgtagctattgattagtgctgttgctagttcagaaagaaatgtttgtgaatggaaacaagaatattcagtccaaactgttgtaaggacagtacctgaaaaccaggaaacaggataatggaaaaagtcttttaaagatgaaatgttggagccaactttcttatagaattaattgtatgtggctatagaaagcctaatgattgttgcttatttttgagagcatattattcttttatgaccataatcttgctgtttttccatcttccaaaagatcttccttctaatatgtatatcagaatgtgggtagccagtcagacaaattcatattggttggtagctttaaaaagtttgtaatgtgaagacaggaaaggacaaaatagtttgctttggtggtagtactctggttgttaagctaggtattttgagactacttccccatcacaacaacaataaaataatcactcataatcctatcacctggagacatagccatcgttaatatgttagtgactatacaatcatgttttcttctgtatatccatgtatattctttaaaaatgaaatttatactgtacctgatctcaaagctttttagcttagtatatctgtcatgaatttgtaggatgttccattgcatcagaaaacggacagtgatttgattactttctaatgccacagatgcagattacatgtagttattgagaatcctttcgaattcagtggcttaatcatgaatgtctaaatattgttgacattaggatgatacatgtaaattaaagttacatttgtttagcatagacaagcttaacattgtagatgtttctcttcaaaaatcatcttaaacatttgcatttggaattgtgttaaatagaatgtgtgaaacactgtattagtaaacttcatcacctttctacttccttatagtttgaacttttcagtttttgtagttcccaaacagttgctcaatttagagcaaattaatttaacacctgccaaaaaaaggctgctgttggcttatcagttgtctttaaattcaaatgctcatgtgacttttatcacatcaaaaaatatttcattaatgattcacctttagctctgaaaattaccgcgtttagtaattatagtgggcttataaaaacatgcaactctttttgatagttatttgagaattttggtgaaaaatatttagctgagggcagtatagaacttataaaccaatatattgatatttttaaaacatttttacatataagtaaactgccatctttgagcataactacatttaaaaataaagctgcatatttttaaatcaagtgtttaacaagaatttatattttttattttttaaaattaaaaataatttatatttcctctgttgcatgaggattctcatctgtgcttataatggttagagattttatttgtgtggaatgaagtgaggcttgtagtcatggttctagtgtttcagtttgccaagtctgtttactgcagtgaaattcatcaaatgtttcagtgtggttttctgtagcctatcatttactggctatttttttatgtacacctttaggattttctgcctactctatccagttgtccaaatgatatcctacattttacaaatgccctttcagtttctattttctttttccattaaattgccctcatgtcctaatgtgcagtttgtaagtgtgtgtgtgtgtgtctgtgtgtgtgtgaatttgattttcaagagtgctagacttccaatttgagagattaaataatttaattcaggcaaacatttttcattggaatttcacagttcattgtaatgaaaatgttaatcctggatgacctttgacatacagtaatgaatcttggatattaatgaatttgttagtagcatcttgatgtgtgttttaatgagttattttcaaagttgtgcattaaaccaaagttggcatactggaagtgtttatatcaagttccatttggctactgatggacaaaaaatagaaatgccttcctatggagagtatttttcctttaaaaaattaaaaaggttaattattttgactattcggttttaaactttttattcaacaaataccaagtccctgctgtatatatgggtttggaatacattagtgatcaaaacacaccctctatccctgcccttgaagagtttacactccagtagaggaaacagaatttacattaacaattataaattgtgatacatgctgtggaaagtgaggtgcatgtgataatggttatcaaacattatgctccccaaaatttccatcaccttgcagttgaatgaggcctatgtaactagtttattctaatgtaatacagaaagtagtgtgacactccactttctgtaaaggcaatgaaaaaaatttaccatccagtttctctcttcccctactgctgtgattaaggattttgcatgttctagatggtgcagctttgtcagcctgggtcttgagtgatactggagc

SEQ ID NO: 118 - DNA, 4115 bp, Homo sapiens
atatagaatatatatactaaaaaatttcagtctgttaaacagccttactctgattcagcctcttcagatactcttgtgctgtgcagcagtggctctgtgtgtaaatgctatgcactgaggatacacaaaaataccaatatgatgtgtacaggataatgcctcatcccaatcagatgtccatttgttattgtgtttgttaacaaccctttatctcttagtgttataaactccacttaaaactgattaaagtctcattcttgtcattgtgtgggtgttttattaaatgagagtttataattcaaattgcttaagtccattgaagttttaattaatgggcagccaaatgtgaatacaaagttttcagtttttttttttcctgctgtccttcaaagcctactgtttaaaaaaaaaaaaaaaaaaaaacatggcctgagagtagagtatctgtctactcatgtttaattaaggaaaaacacttatttttagggctttagtcatcacttcataaattgtataagcacattaaatagcgttctagtcctgaaaaagtccaagattcttagaaaattgtgcatatttttattatgacagatgtttgaagataattccccagaatggatttgatactttagatttcaattttgtggcttttgtctattattctgtactctgccatcagcatatggaaagcttcatttactcatcatgacttgtgccatataaaaattgatatttcggaatagtctaaaggactttttgtacttgaatttaatcatgttgtttctaatattcttaaaagcttgaagactaaagcatatcctttcaacaaagcatagtaaggtaataagaaagtgtagtttgtacaagtgttaaaaaaataaagtagacaatgttacagtgggacttattatttcaagtttacattttctccatgtaattttttaaaaagtaaatgaaaaaatgtgcaataatgtaaaatatgaagtgtatgtgtacacacattttatttttcggtatcttgggtatacgtatggttgaaaactatactggagtctaaaagtattctaatttataagaagacattttggtgatgtttgaaaaatagaaatgtgctagttttgtttttatatcatgtcctttgtacgttgtaatatgagctggcttggttcagtaaatgccatcaccatttccattgagaatttaaaactcaccagtgtttaatatgcaggcttccaaaggcttatgaaaaaaatcaagacccttaaatctagttaatttgctgctaacatgaaactctttggttcttttatttttgccagataattagacacacatctaaagcttagtcttaaatggcttaagtgtagctattgattagtgctgttgctagttcagaaagaaatgtttgtgaatggaaacaagaatattcagtccaaactgttgtaaggacagtacctgaaaaccaggaaacaggataatggaaaaagtcttttaaagatgaaatgttggagccaactttcttatagaattaattgtatgtggctatagaaagcctaatgattgttgcttatttttgagagcatattattcttttatgaccataatcttgctgtttttccatcttccaaaagatcttccttctaatatgtatatcagaatgtgggtagccagtcagacaaattcatattggttggtagctttaaaaagtttgtaatgtgaagacaggaaaggacaaaatagtttgctttggtggtagtactctggttgttaagctaggtattttgagactacttccccatcacaacaacaataaaataatcactcataatcctatcacctggagacatagccatcgttaatatgttagtgactatacaatcatgttttcttctgtatatccatgtatattctttaaaaatgaaatttatactgtacctgatctcaaagctttttagcttagtatatctgtcatgaatttgtaggatgttccattgcatcagaaaacggacagtgatttgattactttctaatgccacagatgcagattacatgtagttattgagaatcctttcgaattcagtggcttaatcatgaatgtctaaatattgttgacattaggatgatacatgtaaattaaagttacatttgtttagcatagacaagcttaacattgtagatgtttctcttcaaaaatcatcttaaacatttgcatttggaattgtgttaaatagaatgtgtgaaacactgtattagtaaacttcatcacctttctacttccttatagtttgaacttttcagtttttgtagttcccaaacagttgctcaatttagagcaaattaatttaacacctgccaaaaaaaggctgctgttggcttatcagttgtctttaaattcaaatgctcatgtgacttttatcacatcaaaaaatatttcattaatgattcacctttagctctgaaaattaccgcgtttagtaattatagtgggcttataaaaacatgcaactctttttgatagttatttgagaattttggtgaaaaatatttagctgagggcagtatagaacttataaaccaatatattgatatttttaaaacatttttacatataagtaaactgccatctttgagcataactacatttaaaaataaagctgcatatttttaaatcaagtgtttaacaagaatttatattttttattttttaaaattaaaaataatttatatttcctctgttgcatgaggattctcatctgtgcttataatggttagagattttatttgtgtggaatgaagtgaggcttgtagtcatggttctagtgtttcagtttgccaagtctgtttactgcagtgaaattcatcaaatgtttcagtgtggttttctgtagcctatcatttactggctatttttttatgtacacctttaggattttctgcctactctatccagttgtccaaatgatatcctacattttacaaatgccctttcagtttctattttctttttccattaaattgccctcatgtcctaatgtgcagtttgtaagtgtgtgtgtgtgtgtctgtgtgtgtgtgaatttgattttcaagagtgctagacttccaatttgagagattaaataatttaattcaggcaaacatttttcattggaatttcacagttcattgtaatgaaaatgttaatcctggatgacctttgacatacagtaatgaatcttggatattaatgaatttgttagtagcatcttgatgtgtgttttaatgagttattttcaaagttgtgcattaaaccaaagttggcatactggaagtgtttatatcaagttccatttggctactgatggacaaaaaatagaaatgccttcctatggagagtatttttcctttaaaaaattaaaaaggttaattattttgactattcggttttaaactttttattcaacaaataccaagtccctgctgtatatatgggtttggaatacattagtgatcaaaacacaccctctatccctgcccttgaagagtttacactccagtagaggaaacagaatttacattaacaattataaattgtgatacatgctgtggaaagtgaggtgcatgtgataatggttatcaaacattatgctccccaaaatttccatcaccttgcagttgaatgaggcctatgtaactagtttattctaatgtaatacagaaagtagtgtgacactccactttctgtaaaggcaatgaaaaaaatttaccatccagtttctctcttcccctactgctgtgattaaggattttgcatgttctagatggtgcagctttgtcagcctgggtcttgagtgatactggagcagaactccctcaaattgttccttctgccacgctaaacttgttagatattagcataaataagaaataaaccatttagactgatactttgggacaattttttatcacagtgtaagttatatcctgactaaaacagtgctttggaaagatcagggaagggtttcttgagctacaaaagggagttaagaatgaagcaaaatgaaatatggcatctttaaatgacatgatgcaataaactctaaattgcaagttattcaatagttactgagcaccag

SEQ ID NO: 119 - DNA, 46 bp, Homo sapiens
cgaggaagaggctgcacggttagaaaagacgaagaggaggcgagaa

SEQ ID NO: 120 - DNA, 50 bp, Homo sapiens
gctgcctccgccggcggcctccggagcccgggccacggggggtgcggcgg

SEQ ID NO: 121 - DNA, 42 bp, Homo sapiens
atggctgctgcggcggctgctggatggttgcagcgactgggc

SEQ ID NO: 122 - DNA, 45 bp, Homo sapiens
ctctttgatgatggctgtcatgtctgggagcctgtggctgaagaa

SEQ ID NO: 123 - DNA, 45 bp, Homo sapiens
aatctatcaatgcaactcaggaaactaaaacaatcactgcaagat

SEQ ID NO: 124 - DNA, 40 bp, Homo sapiens
tatccattctatgtttatgacaagagcactgaacattaaa

SEQ ID NO: 125 - DNA, 66 bp, Homo sapiens
atgccttgaagatgtcctaataccttgaagatgttcacacatgtcccaatgtcaactgttgcaaat

SEQ ID NO: 126 - DNA, 34 bp, Homo sapiens
caaatccactaaggaattaagactaatgaaagaa

SEQ ID NO: 127 - DNA, 42 bp, Homo sapiens
ttttgtctctggtccttacttccccatagaaatctagggcct

SEQ ID NO: 128 - DNA, 58 bp, Homo sapiens
agttctttgctatatataagttccctgctttcagaagacaaattctacagcctgatac

SEQ ID NO: 129 - DNA, 111 bp, Homo sapiens
atctgatattggggcactggtaaagacagaagctctccatgtcatggtcacccactgctctcttcatcagtatgcgctagggtgcaagactgtcatcaatcctgaaagaaa

SEQ ID NO: 130 - DNA, 22 bp, Homo sapiens
gtaggcagacagtacaccttac

SEQ ID NO: 131 - DNA, 57 bp, Homo sapiens
ttgatcatctataagaaacattcctggaagaaaaaaaaaaaaaaacctaccactgac

SEQ ID NO: 132 - DNA, 45 bp, Homo sapiens
gttttaaaacaattacatttcaagtattttacagaagcctgcagt

SEQ ID NO: 133 - DNA, 40 bp, Homo sapiens
aaaaattaagagagagtaaaaaagagaaagaaacgagtgt

SEQ ID NO: 134 - DNA, 4046 bp, Homo sapiens
tgtcaatactttccccattctgcaaaaagagggccccatccccatccctaatcaaaaccaatgtgttgtacctgaaactgcaaagattaatgcttttcgatgaccactaacttttgaagcccgaaggcctaacttttagacaactaaagctacacactgttaaaattcttgggcttctgtcttattcagcaagctgactcagtaaatttaatacactgtatgaaaaaagctaacatacctacaatctaaagctggagtaaacccctcttgccagcatttctagatattagctggtaaaatacaactgacattctacacaaatcagtaaaattaacgataccaaaaggtgtcagaggacctgaaacctaaaaacggtgagcagcaattctggcatcacaacaatacttaaatttcaagcatgaactgaagttttatttctgcaatcttcacttgctacacacaatacccttgaacctacacattaccatctgggatcagaaactactcaatatccattctatgtttatgacaagagcactgaacattaaatgctactgaagtgcaaatttcaagcactatcctacatcaccccatagggagagaaaaaggtaaatataacaaagatctagtaagaacgccttataaggtatattatggcactattgacttcaaactacaaaacttctacatacagttcaaagttgtaggtaacttaagtttaaacattaacaaaactactttttgccctcaatgtgcaccatatatactgaaaatgattctgcttctaaagttatgcaaatcagtcatattttaaaagaatctatcaatgcaactcaggaaactaaaacaatcactgcaagattctgatgcaatatgcgtacgtgcaacactaattttcattttattctgatctaaacccttgatctagggcctaagccaagatttaatcgaaatatgctcaacctcaaaaagcgtctacttttttgttcatttaggagaccggattaccgagctcgctaatccactaacagtgtactgtattctgtattaacggacaatagccctcaggaagagaccatatagatagcctaagaaagcaatcggtggcttgacacttgcaaccaggcaagagttccgtctagccaaacacaccctaggttgaatacacagaaaggaaacacaaaatatatgacctagcaacctgaccagggttaaatgttatagtcacccaaactacggacattttcgcatccgtctactcccacgttctaagagagtgacagaaaggtaaagaggagcagccgcagaaatggatacaggtcaagtctaagtcgaatccatcctcttgatatctccttttgtttctgctaacgatctctttgatgatggctgtcatgtctgggagcctgtggctgaagaaaaaggaggagagagatggcagaagctgctggtggcggggcttcttctgcaggatggaaatggctctggacttggcggtagctgatgcccctcgctctgccgccgcttggctctggaccgcagccgggtaatggctgctgcggcggctgctggatggttgcagcgactgggcctgcttctcctcagcagccagaggcctggcagcggcggcagcggaatggggagaagacgaataatcctccgaacggctgcctccgccggcggcctccggagcccgggccacggggggtgcggcggcggcgcacgggaggtttaaaaccggcccgggtccctggatgtgccagccgccgccgccgccgtgttggaggcagtagaaggggagagaccaactctccggcgttcccagccctggaaatggtgacaggcgactcagaccccctccctggagctgcagccgccgcggccgccgccgccgccgcttctcccccccgctccaggagcgggaggtgccgccgccgccgccgcgcctcagccggctcccgcccgagcccacggcttccaccttccctttcaggagaagccgaggaagaggctgcacggttagaaaagacgaagaggaggcgagaaacgccgccgctgccgccgccgcaggccggccggctccccgagggcgctgcccccgcggctgctcacaggcgctgagaggggctccgggccgcggccgccgccgtctctcatctccctcgcctgagcccggcctcgcctcacagcggctcaactctcaaacttccatcatggctgcagcttccgagaggagagaactgagcgcagtcgcgtcccagcgccgagcgcgtatcctgccgcagcgcataaagagtcccgccacatcaccgcccgccggcctgcccgccccctccgccgccgcgccgggagcccgggcgcctcggaagaccgaggggaggcgggaggcgagcgagaggcggacgggaccgcgccgggcgaggggagggcagggcagggcagggggcggtaggagggggcagagcggtagctctgggtgcgagcgcagagtccccaagccgcaggctctactgagcatgcccagtgtagctgcctggggcttgctcgggccggttcccagccgccagcctgcagctgcacttgctgcggcttttgcagcaacgcgaggcgaggataacgagctaagcctcggcctctgcccagaaacccagccggaggcagggtaggctgttgtggggcgggggtggaggactgatgatgaaagctgagatgggtgcgttgagcagtgtcactgactcgagtctgaggttacctgtgcacaggtgaaaaggaccaggtgaccacgctgctcagtgtagagggaaatgcagggacggtccctgcaaggggaataccctccccccttgcctctacccctagatttccgcggcgtggactgcattcgctctttccttttgcaccgctgtcggatcacaatcgttcgcagagatttgactgtaacagcctttgcctagagattcccccttcccccaaatctgtgtcctcatggtgtcagtcttagcacaaagagcaacctgctattgtgtcgccagcgtgtatcacctcatccggctcccttgcagcgccccacctctcgcttccccggtaactcggctcgtttgccctaaaaatgaaagctctcagccgagcgtgctgaacgtgaacacatagccgttgaatttcaagggcccaaagggcacctatctaaatgaactgaaagaggatccctgtgagtgggacgcaccccgcaggcctctcctgcgcccgctccggtgcccccaagagagtcgagcatctttcccctcgggctccaggtcggttcgcggcgtcggagtcaagctcggttctcagagaccacctagccccgcccccccttggccgccgtgaaaacccggcaggatggatcgcccggggccaggctccgcgcgccccggccggaccgtgcacgtttggggttaccgggttgagtggaaagtacggaacggtaggaagctgcagcccagcgagtgggcggggcgaggagacctaggagggttcaaaaggaggtggaaggatacacgggccacagtcggaactactttccgaaggaggtcacgtgtgtccctagttggggaactttccaaattcccactccccagtgatagctccggaggcaagtcgtcttcttcctttgctcggggtgctcttgcctggtgcaggcagcggaaccccaacccttcctgcgccgcggcggaaacaggggctcggaccagcctcccgaaggagcgctgtcggggctggcgcttggggaactggttacacaagcacccacatccaaacacgtgcccccgcctccccgcctgctggctgccgccgattcttacagaacgcggggagagagtccccaaactggtgccactcctcgcctgctaccctaagagcaagccaaaggactgagacctgagactcactccttgctctacatcgacctattctgcgccttcccaaacgtgggaaaaggagctgggcgctagggctctcgggcctctccatcgctgatgccctgccgcttagggtgaacccttttg

SEQ ID NO: 135 - DNA, 4050 bp, Homo sapiens
aataaaacctctcccgatataaacgctgtcttaaaaaaaaatattccccacaatttttagcaggacatatagacactgtagtgtcactctacctttagacaaaatgcaactgacatttgctaagaaataacttttattaaaaatactgtgctagtacttatgcaattacataattttaactaaatattgtccactgccacaattcgcattaccaaactcatattaccaaattttaggccttgatagagcctaaatgcttcagtcacttcagaccaataacttaattctgttttcacataccttatacactggcctaccaatagctctcaattcctgtcaatactttccccattctgcaaaaagagggccccatccccatccctaatcaaaaccaatgtgttgtacctgaaactgcaaagattaatgcttttcgatgaccactaacttttgaagcccgaaggcctaacttttagacaactaaagctacacactgttaaaattcttgggcttctgtcttattcagcaagctgactcagtaaatttaatacactgtatgaaaaaagctaacatacctacaatctaaagctggagtaaacccctcttgccagcatttctagatattagctggtaaaatacaactgacattctacacaaatcagtaaaattaacgataccaaaaggtgtcagaggacctgaaacctaaaaacggtgagcagcaattctggcatcacaacaatacttaaatttcaagcatgaactgaagttttatttctgcaatcttcacttgctacacacaatacccttgaacctacacattaccatctgggatcagaaactactcaatatccattctatgtttatgacaagagcactgaacattaaatgctactgaagtgcaaatttcaagcactatcctacatcaccccatagggagagaaaaaggtaaatataacaaagatctagtaagaacgccttataaggtatattatggcactattgacttcaaactacaaaacttctacatacagttcaaagttgtaggtaacttaagtttaaacattaacaaaactactttttgccctcaatgtgcaccatatatactgaaaatgattctgcttctaaagttatgcaaatcagtcatattttaaaagaatctatcaatgcaactcaggaaactaaaacaatcactgcaagattctgatgcaatatgcgtacgtgcaacactaattttcattttattctgatctaaacccttgatctagggcctaagccaagatttaatcgaaatatgctcaacctcaaaaagcgtctacttttttgttcatttaggagaccggattaccgagctcgctaatccactaacagtgtactgtattctgtattaacggacaatagccctcaggaagagaccatatagatagcctaagaaagcaatcggtggcttgacacttgcaaccaggcaagagttccgtctagccaaacacaccctaggttgaatacacagaaaggaaacacaaaatatatgacctagcaacctgaccagggttaaatgttatagtcacccaaactacggacattttcgcatccgtctactcccacgttctaagagagtgacagaaaggtaaagaggagcagccgcagaaatggatacaggtcaagtctaagtcgaatccatcctcttgatatctccttttgtttctgctaacgatctctttgatgatggctgtcatgtctgggagcctgtggctgaagaaaaaggaggagagagatggcagaagctgctggtggcggggcttcttctgcaggatggaaatggctctggacttggcggtagctgatgcccctcgctctgccgccgcttggctctggaccgcagccgggtaatggctgctgcggcggctgctggatggttgcagcgactgggcctgcttctcctcagcagccagaggcctggcagcggcggcagcggaatggggagaagacgaataatcctccgaacggctgcctccgccggcggcctccggagcccgggccacggggggtgcggcggcggcgcacgggaggtttaaaaccggcccgggtccctggatgtgccagccgccgccgccgccgtgttggaggcagtagaaggggagagaccaactctccggcgttcccagccctggaaatggtgacaggcgactcagaccccctccctggagctgcagccgccgcggccgccgccgccgccgcttctcccccccgctccaggagcgggaggtgccgccgccgccgccgcgcctcagccggctcccgcccgagcccacggcttccaccttccctttcaggagaagccgaggaagaggctgcacggttagaaaagacgaagaggaggcgagaaacgccgccgctgccgccgccgcaggccggccggctccccgagggcgctgcccccgcggctgctcacaggcgctgagaggggctccgggccgcggccgccgccgtctctcatctccctcgcctgagcccggcctcgcctcacagcggctcaactctcaaacttccatcatggctgcagcttccgagaggagagaactgagcgcagtcgcgtcccagcgccgagcgcgtatcctgccgcagcgcataaagagtcccgccacatcaccgcccgccggcctgcccgccccctccgccgccgcgccgggagcccgggcgcctcggaagaccgaggggaggcgggaggcgagcgagaggcggacgggaccgcgccgggcgaggggagggcagggcagggcagggggcggtaggagggggcagagcggtagctctgggtgcgagcgcagagtccccaagccgcaggctctactgagcatgcccagtgtagctgcctggggcttgctcgggccggttcccagccgccagcctgcagctgcacttgctgcggcttttgcagcaacgcgaggcgaggataacgagctaagcctcggcctctgcccagaaacccagccggaggcagggtaggctgttgtggggcgggggtggaggactgatgatgaaagctgagatgggtgcgttgagcagtgtcactgactcgagtctgaggttacctgtgcacaggtgaaaaggaccaggtgaccacgctgctcagtgtagagggaaatgcagggacggtccctgcaaggggaataccctccccccttgcctctacccctagatttccgcggcgtggactgcattcgctctttccttttgcaccgctgtcggatcacaatcgttcgcagagatttgactgtaacagcctttgcctagagattcccccttcccccaaatctgtgtcctcatggtgtcagtcttagcacaaagagcaacctgctattgtgtcgccagcgtgtatcacctcatccggctcccttgcagcgccccacctctcgcttccccggtaactcggctcgtttgccctaaaaatgaaagctctcagccgagcgtgctgaacgtgaacacatagccgttgaatttcaagggcccaaagggcacctatctaaatgaactgaaagaggatccctgtgagtgggacgcaccccgcaggcctctcctgcgcccgctccggtgcccccaagagagtcgagcatctttcccctcgggctccaggtcggttcgcggcgtcggagtcaagctcggttctcagagaccacctagccccgcccccccttggccgccgtgaaaacccggcaggatggatcgcccggggccaggctccgcgcgccccggccggaccgtgcacgtttggggttaccgggttgagtggaaagtacggaacggtaggaagctgcagcccagcgagtgggcggggcgaggagacctaggagggttcaaaaggaggtggaaggatacacgggccacagtcggaactactttccgaaggaggtcacgtgtgtccctagttggggaactttccaaattcccactccccagtgatagctccggaggcaagtcgtcttcttcctttgctcggggtgctcttgcctggtgcaggcagcggaaccccaacccttcctgcgccgcggcggaaac

SEQ ID NO: 136 - DNA, 4042 bp, Homo sapiens
aacagaaaactaaattttgggaagctacttcttcagtaagttttacattcatttcaaaacaaaaacttgggcaaaattaactgtgcacatttatatgcagctaacataatccaacggaataaaacctctcccgatataaacgctgtcttaaaaaaaaatattccccacaatttttagcaggacatatagacactgtagtgtcactctacctttagacaaaatgcaactgacatttgctaagaaataacttttattaaaaatactgtgctagtacttatgcaattacataattttaactaaatattgtccactgccacaattcgcattaccaaactcatattaccaaattttaggccttgatagagcctaaatgcttcagtcacttcagaccaataacttaattctgttttcacataccttatacactggcctaccaatagctctcaattcctgtcaatactttccccattctgcaaaaagagggccccatccccatccctaatcaaaaccaatgtgttgtacctgaaactgcaaagattaatgcttttcgatgaccactaacttttgaagcccgaaggcctaacttttagacaactaaagctacacactgttaaaattcttgggcttctgtcttattcagcaagctgactcagtaaatttaatacactgtatgaaaaaagctaacatacctacaatctaaagctggagtaaacccctcttgccagcatttctagatattagctggtaaaatacaactgacattctacacaaatcagtaaaattaacgataccaaaaggtgtcagaggacctgaaacctaaaaacggtgagcagcaattctggcatcacaacaatacttaaatttcaagcatgaactgaagttttatttctgcaatcttcacttgctacacacaatacccttgaacctacacattaccatctgggatcagaaactactcaatatccattctatgtttatgacaagagcactgaacattaaatgctactgaagtgcaaatttcaagcactatcctacatcaccccatagggagagaaaaaggtaaatataacaaagatctagtaagaacgccttataaggtatattatggcactattgacttcaaactacaaaacttctacatacagttcaaagttgtaggtaacttaagtttaaacattaacaaaactactttttgccctcaatgtgcaccatatatactgaaaatgattctgcttctaaagttatgcaaatcagtcatattttaaaagaatctatcaatgcaactcaggaaactaaaacaatcactgcaagattctgatgcaatatgcgtacgtgcaacactaattttcattttattctgatctaaacccttgatctagggcctaagccaagatttaatcgaaatatgctcaacctcaaaaagcgtctacttttttgttcatttaggagaccggattaccgagctcgctaatccactaacagtgtactgtattctgtattaacggacaatagccctcaggaagagaccatatagatagcctaagaaagcaatcggtggcttgacacttgcaaccaggcaagagttccgtctagccaaacacaccctaggttgaatacacagaaaggaaacacaaaatatatgacctagcaacctgaccagggttaaatgttatagtcacccaaactacggacattttcgcatccgtctactcccacgttctaagagagtgacagaaaggtaaagaggagcagccgcagaaatggatacaggtcaagtctaagtcgaatccatcctcttgatatctccttttgtttctgctaacgatctctttgatgatggctgtcatgtctgggagcctgtggctgaagaaaaaggaggagagagatggcagaagctgctggtggcggggcttcttctgcaggatggaaatggctctggacttggcggtagctgatgcccctcgctctgccgccgcttggctctggaccgcagccgggtaatggctgctgcggcggctgctggatggttgcagcgactgggcctgcttctcctcagcagccagaggcctggcagcggcggcagcggaatggggagaagacgaataatcctccgaacggctgcctccgccggcggcctccggagcccgggccacggggggtgcggcggcggcgcacgggaggtttaaaaccggcccgggtccctggatgtgccagccgccgccgccgccgtgttggaggcagtagaaggggagagaccaactctccggcgttcccagccctggaaatggtgacaggcgactcagaccccctccctggagctgcagccgccgcggccgccgccgccgccgcttctcccccccgctccaggagcgggaggtgccgccgccgccgccgcgcctcagccggctcccgcccgagcccacggcttccaccttccctttcaggagaagccgaggaagaggctgcacggttagaaaagacgaagaggaggcgagaaacgccgccgctgccgccgccgcaggccggccggctccccgagggcgctgcccccgcggctgctcacaggcgctgagaggggctccgggccgcggccgccgccgtctctcatctccctcgcctgagcccggcctcgcctcacagcggctcaactctcaaacttccatcatggctgcagcttccgagaggagagaactgagcgcagtcgcgtcccagcgccgagcgcgtatcctgccgcagcgcataaagagtcccgccacatcaccgcccgccggcctgcccgccccctccgccgccgcgccgggagcccgggcgcctcggaagaccgaggggaggcgggaggcgagcgagaggcggacgggaccgcgccgggcgaggggagggcagggcagggcagggggcggtaggagggggcagagcggtagctctgggtgcgagcgcagagtccccaagccgcaggctctactgagcatgcccagtgtagctgcctggggcttgctcgggccggttcccagccgccagcctgcagctgcacttgctgcggcttttgcagcaacgcgaggcgaggataacgagctaagcctcggcctctgcccagaaacccagccggaggcagggtaggctgttgtggggcgggggtggaggactgatgatgaaagctgagatgggtgcgttgagcagtgtcactgactcgagtctgaggttacctgtgcacaggtgaaaaggaccaggtgaccacgctgctcagtgtagagggaaatgcagggacggtccctgcaaggggaataccctccccccttgcctctacccctagatttccgcggcgtggactgcattcgctctttccttttgcaccgctgtcggatcacaatcgttcgcagagatttgactgtaacagcctttgcctagagattcccccttcccccaaatctgtgtcctcatggtgtcagtcttagcacaaagagcaacctgctattgtgtcgccagcgtgtatcacctcatccggctcccttgcagcgccccacctctcgcttccccggtaactcggctcgtttgccctaaaaatgaaagctctcagccgagcgtgctgaacgtgaacacatagccgttgaatttcaagggcccaaagggcacctatctaaatgaactgaaagaggatccctgtgagtgggacgcaccccgcaggcctctcctgcgcccgctccggtgcccccaagagagtcgagcatctttcccctcgggctccaggtcggttcgcggcgtcggagtcaagctcggttctcagagaccacctagccccgcccccccttggccgccgtgaaaacccggcaggatggatcgcccggggccaggctccgcgcgccccggccggaccgtgcacgtttggggttaccgggttgagtggaaagtacggaacggtaggaagctgcagcccagcgagtgggcggggcgaggagacctaggagggttcaaaaggaggtggaaggatacacgggccacagtcggaactactttccgaaggaggtcacgtgtgtccctagttggg

SEQ ID NO: 137 - DNA, 4045 bp, Homo sapiens
tatttggatgactgtcagtaattcatgctaatagtagactgctttggaagtcacaaaagaatttttccataattatcttctgggcaagcgggtccagtttagccttagtaacattctcaattaatgtcaacttcaaaatttgcaaatactcttttaaaataatatttttggcttaacagaaaactaaattttgggaagctacttcttcagtaagttttacattcatttcaaaacaaaaacttgggcaaaattaactgtgcacatttatatgcagctaacataatccaacggaataaaacctctcccgatataaacgctgtcttaaaaaaaaatattccccacaatttttagcaggacatatagacactgtagtgtcactctacctttagacaaaatgcaactgacatttgctaagaaataacttttattaaaaatactgtgctagtacttatgcaattacataattttaactaaatattgtccactgccacaattcgcattaccaaactcatattaccaaattttaggccttgatagagcctaaatgcttcagtcacttcagaccaataacttaattctgttttcacataccttatacactggcctaccaatagctctcaattcctgtcaatactttccccattctgcaaaaagagggccccatccccatccctaatcaaaaccaatgtgttgtacctgaaactgcaaagattaatgcttttcgatgaccactaacttttgaagcccgaaggcctaacttttagacaactaaagctacacactgttaaaattcttgggcttctgtcttattcagcaagctgactcagtaaatttaatacactgtatgaaaaaagctaacatacctacaatctaaagctggagtaaacccctcttgccagcatttctagatattagctggtaaaatacaactgacattctacacaaatcagtaaaattaacgataccaaaaggtgtcagaggacctgaaacctaaaaacggtgagcagcaattctggcatcacaacaatacttaaatttcaagcatgaactgaagttttatttctgcaatcttcacttgctacacacaatacccttgaacctacacattaccatctgggatcagaaactactcaatatccattctatgtttatgacaagagcactgaacattaaatgctactgaagtgcaaatttcaagcactatcctacatcaccccatagggagagaaaaaggtaaatataacaaagatctagtaagaacgccttataaggtatattatggcactattgacttcaaactacaaaacttctacatacagttcaaagttgtaggtaacttaagtttaaacattaacaaaactactttttgccctcaatgtgcaccatatatactgaaaatgattctgcttctaaagttatgcaaatcagtcatattttaaaagaatctatcaatgcaactcaggaaactaaaacaatcactgcaagattctgatgcaatatgcgtacgtgcaacactaattttcattttattctgatctaaacccttgatctagggcctaagccaagatttaatcgaaatatgctcaacctcaaaaagcgtctacttttttgttcatttaggagaccggattaccgagctcgctaatccactaacagtgtactgtattctgtattaacggacaatagccctcaggaagagaccatatagatagcctaagaaagcaatcggtggcttgacacttgcaaccaggcaagagttccgtctagccaaacacaccctaggttgaatacacagaaaggaaacacaaaatatatgacctagcaacctgaccagggttaaatgttatagtcacccaaactacggacattttcgcatccgtctactcccacgttctaagagagtgacagaaaggtaaagaggagcagccgcagaaatggatacaggtcaagtctaagtcgaatccatcctcttgatatctccttttgtttctgctaacgatctctttgatgatggctgtcatgtctgggagcctgtggctgaagaaaaaggaggagagagatggcagaagctgctggtggcggggcttcttctgcaggatggaaatggctctggacttggcggtagctgatgcccctcgctctgccgccgcttggctctggaccgcagccgggtaatggctgctgcggcggctgctggatggttgcagcgactgggcctgcttctcctcagcagccagaggcctggcagcggcggcagcggaatggggagaagacgaataatcctccgaacggctgcctccgccggcggcctccggagcccgggccacggggggtgcggcggcggcgcacgggaggtttaaaaccggcccgggtccctggatgtgccagccgccgccgccgccgtgttggaggcagtagaaggggagagaccaactctccggcgttcccagccctggaaatggtgacaggcgactcagaccccctccctggagctgcagccgccgcggccgccgccgccgccgcttctcccccccgctccaggagcgggaggtgccgccgccgccgccgcgcctcagccggctcccgcccgagcccacggcttccaccttccctttcaggagaagccgaggaagaggctgcacggttagaaaagacgaagaggaggcgagaaacgccgccgctgccgccgccgcaggccggccggctccccgagggcgctgcccccgcggctgctcacaggcgctgagaggggctccgggccgcggccgccgccgtctctcatctccctcgcctgagcccggcctcgcctcacagcggctcaactctcaaacttccatcatggctgcagcttccgagaggagagaactgagcgcagtcgcgtcccagcgccgagcgcgtatcctgccgcagcgcataaagagtcccgccacatcaccgcccgccggcctgcccgccccctccgccgccgcgccgggagcccgggcgcctcggaagaccgaggggaggcgggaggcgagcgagaggcggacgggaccgcgccgggcgaggggagggcagggcagggcagggggcggtaggagggggcagagcggtagctctgggtgcgagcgcagagtccccaagccgcaggctctactgagcatgcccagtgtagctgcctggggcttgctcgggccggttcccagccgccagcctgcagctgcacttgctgcggcttttgcagcaacgcgaggcgaggataacgagctaagcctcggcctctgcccagaaacccagccggaggcagggtaggctgttgtggggcgggggtggaggactgatgatgaaagctgagatgggtgcgttgagcagtgtcactgactcgagtctgaggttacctgtgcacaggtgaaaaggaccaggtgaccacgctgctcagtgtagagggaaatgcagggacggtccctgcaaggggaataccctccccccttgcctctacccctagatttccgcggcgtggactgcattcgctctttccttttgcaccgctgtcggatcacaatcgttcgcagagatttgactgtaacagcctttgcctagagattcccccttcccccaaatctgtgtcctcatggtgtcagtcttagcacaaagagcaacctgctattgtgtcgccagcgtgtatcacctcatccggctcccttgcagcgccccacctctcgcttccccggtaactcggctcgtttgccctaaaaatgaaagctctcagccgagcgtgctgaacgtgaacacatagccgttgaatttcaagggcccaaagggcacctatctaaatgaactgaaagaggatccctgtgagtgggacgcaccccgcaggcctctcctgcgcccgctccggtgcccccaagagagtcgagcatctttcccctcgggctccaggtcggttcgcggcgtcggagtcaagctcggttctcagagaccacctagccccgcccccccttggccgccgtgaaaacccggcaggatggatcgcccggggccaggctccgcgcgccccggccggacc

SEQ ID NO: 138 - DNA, 4045 bp, Homo sapiens
caaagacaaagtcttcaatgacaattttaatgccttcccactccaataaacagaaaacattaacgtgaaaacaagcaaaccaagtacgttggaatatcaaaattattgggagtgcaattatcaaaaaagcaagcacttcactgactttccttactgactttttttcatatcaacttttggctcaataaaaccacaactctagaaattaagtgttattagtcatttgacgcaatatttgatactgctttctatgcatatcataactaaaagtacagttttagagaaagttttaagtcacacaaatttcatgtgtagagaccaacatacgctgaaatcaaagaaaatgccagtcatgtcacagctcacatgtaaaaacctggtaaaataattttaaggtcttaataaccctgataatttaaaatcaagtgggaaaagtaaaagtagtgtgttatgtactttaagtgctgaaagaaatctgtctcccagacagcattcaattattttcttcaaaggcttttttttcaaagttacataaacatttaattttttgttcctatatatttggatgactgtcagtaattcatgctaatagtagactgctttggaagtcacaaaagaatttttccataattatcttctgggcaagcgggtccagtttagccttagtaacattctcaattaatgtcaacttcaaaatttgcaaatactcttttaaaataatatttttggcttaacagaaaactaaattttgggaagctacttcttcagtaagttttacattcatttcaaaacaaaaacttgggcaaaattaactgtgcacatttatatgcagctaacataatccaacggaataaaacctctcccgatataaacgctgtcttaaaaaaaaatattccccacaatttttagcaggacatatagacactgtagtgtcactctacctttagacaaaatgcaactgacatttgctaagaaataacttttattaaaaatactgtgctagtacttatgcaattacataattttaactaaatattgtccactgccacaattcgcattaccaaactcatattaccaaattttaggccttgatagagcctaaatgcttcagtcacttcagaccaataacttaattctgttttcacataccttatacactggcctaccaatagctctcaattcctgtcaatactttccccattctgcaaaaagagggccccatccccatccctaatcaaaaccaatgtgttgtacctgaaactgcaaagattaatgcttttcgatgaccactaacttttgaagcccgaaggcctaacttttagacaactaaagctacacactgttaaaattcttgggcttctgtcttattcagcaagctgactcagtaaatttaatacactgtatgaaaaaagctaacatacctacaatctaaagctggagtaaacccctcttgccagcatttctagatattagctggtaaaatacaactgacattctacacaaatcagtaaaattaacgataccaaaaggtgtcagaggacctgaaacctaaaaacggtgagcagcaattctggcatcacaacaatacttaaatttcaagcatgaactgaagttttatttctgcaatcttcacttgctacacacaatacccttgaacctacacattaccatctgggatcagaaactactcaatatccattctatgtttatgacaagagcactgaacattaaatgctactgaagtgcaaatttcaagcactatcctacatcaccccatagggagagaaaaaggtaaatataacaaagatctagtaagaacgccttataaggtatattatggcactattgacttcaaactacaaaacttctacatacagttcaaagttgtaggtaacttaagtttaaacattaacaaaactactttttgccctcaatgtgcaccatatatactgaaaatgattctgcttctaaagttatgcaaatcagtcatattttaaaagaatctatcaatgcaactcaggaaactaaaacaatcactgcaagattctgatgcaatatgcgtacgtgcaacactaattttcattttattctgatctaaacccttgatctagggcctaagccaagatttaatcgaaatatgctcaacctcaaaaagcgtctacttttttgttcatttaggagaccggattaccgagctcgctaatccactaacagtgtactgtattctgtattaacggacaatagccctcaggaagagaccatatagatagcctaagaaagcaatcggtggcttgacacttgcaaccaggcaagagttccgtctagccaaacacaccctaggttgaatacacagaaaggaaacacaaaatatatgacctagcaacctgaccagggttaaatgttatagtcacccaaactacggacattttcgcatccgtctactcccacgttctaagagagtgacagaaaggtaaagaggagcagccgcagaaatggatacaggtcaagtctaagtcgaatccatcctcttgatatctccttttgtttctgctaacgatctctttgatgatggctgtcatgtctgggagcctgtggctgaagaaaaaggaggagagagatggcagaagctgctggtggcggggcttcttctgcaggatggaaatggctctggacttggcggtagctgatgcccctcgctctgccgccgcttggctctggaccgcagccgggtaatggctgctgcggcggctgctggatggttgcagcgactgggcctgcttctcctcagcagccagaggcctggcagcggcggcagcggaatggggagaagacgaataatcctccgaacggctgcctccgccggcggcctccggagcccgggccacggggggtgcggcggcggcgcacgggaggtttaaaaccggcccgggtccctggatgtgccagccgccgccgccgccgtgttggaggcagtagaaggggagagaccaactctccggcgttcccagccctggaaatggtgacaggcgactcagaccccctccctggagctgcagccgccgcggccgccgccgccgccgcttctcccccccgctccaggagcgggaggtgccgccgccgccgccgcgcctcagccggctcccgcccgagcccacggcttccaccttccctttcaggagaagccgaggaagaggctgcacggttagaaaagacgaagaggaggcgagaaacgccgccgctgccgccgccgcaggccggccggctccccgagggcgctgcccccgcggctgctcacaggcgctgagaggggctccgggccgcggccgccgccgtctctcatctccctcgcctgagcccggcctcgcctcacagcggctcaactctcaaacttccatcatggctgcagcttccgagaggagagaactgagcgcagtcgcgtcccagcgccgagcgcgtatcctgccgcagcgcataaagagtcccgccacatcaccgcccgccggcctgcccgccccctccgccgccgcgccgggagcccgggcgcctcggaagaccgaggggaggcgggaggcgagcgagaggcggacgggaccgcgccgggcgaggggagggcagggcagggcagggggcggtaggagggggcagagcggtagctctgggtgcgagcgcagagtccccaagccgcaggctctactgagcatgcccagtgtagctgcctggggcttgctcgggccggttcccagccgccagcctgcagctgcacttgctgcggcttttgcagcaacgcgaggcgaggataacgagctaagcctcggcctctgcccagaaacccagccggaggcagggtaggctgttgtggggcgggggtggaggactgatgatgaaagctgagatgggtgcgttgagcagtgtcactgactcgagtctgaggttacctgtgcacaggtgaaaaggaccaggtgaccacgctgctcagtgtagagggaaatgcagggacggtccctgcaaggggaataccctccccccttgcctctacccctagatt

SEQ ID NO: 139 - DNA, 4040 bp, Homo sapiens
accaaacaataaaaatacaacagaagcctaacgtttccacataccctaaatacacttaatttttctatagtctcaaattcagcactatatttcagactaatattaagcatataaccctactaacaaatttttagaataatttaattttgcgataatattttaaaactgaattattgtcctcaattttcctcggagaaatggcttcattattaatctttctttatcagataaaaatactccaatcactactttcataaaggaatttaacttttcacaggttagttactgaaataaatactacaacatgtcaaagacaaagtcttcaatgacaattttaatgccttcccactccaataaacagaaaacattaacgtgaaaacaagcaaaccaagtacgttggaatatcaaaattattgggagtgcaattatcaaaaaagcaagcacttcactgactttccttactgactttttttcatatcaacttttggctcaataaaaccacaactctagaaattaagtgttattagtcatttgacgcaatatttgatactgctttctatgcatatcataactaaaagtacagttttagagaaagttttaagtcacacaaatttcatgtgtagagaccaacatacgctgaaatcaaagaaaatgccagtcatgtcacagctcacatgtaaaaacctggtaaaataattttaaggtcttaataaccctgataatttaaaatcaagtgggaaaagtaaaagtagtgtgttatgtactttaagtgctgaaagaaatctgtctcccagacagcattcaattattttcttcaaaggcttttttttcaaagttacataaacatttaattttttgttcctatatatttggatgactgtcagtaattcatgctaatagtagactgctttggaagtcacaaaagaatttttccataattatcttctgggcaagcgggtccagtttagccttagtaacattctcaattaatgtcaacttcaaaatttgcaaatactcttttaaaataatatttttggcttaacagaaaactaaattttgggaagctacttcttcagtaagttttacattcatttcaaaacaaaaacttgggcaaaattaactgtgcacatttatatgcagctaacataatccaacggaataaaacctctcccgatataaacgctgtcttaaaaaaaaatattccccacaatttttagcaggacatatagacactgtagtgtcactctacctttagacaaaatgcaactgacatttgctaagaaataacttttattaaaaatactgtgctagtacttatgcaattacataattttaactaaatattgtccactgccacaattcgcattaccaaactcatattaccaaattttaggccttgatagagcctaaatgcttcagtcacttcagaccaataacttaattctgttttcacataccttatacactggcctaccaatagctctcaattcctgtcaatactttccccattctgcaaaaagagggccccatccccatccctaatcaaaaccaatgtgttgtacctgaaactgcaaagattaatgcttttcgatgaccactaacttttgaagcccgaaggcctaacttttagacaactaaagctacacactgttaaaattcttgggcttctgtcttattcagcaagctgactcagtaaatttaatacactgtatgaaaaaagctaacatacctacaatctaaagctggagtaaacccctcttgccagcatttctagatattagctggtaaaatacaactgacattctacacaaatcagtaaaattaacgataccaaaaggtgtcagaggacctgaaacctaaaaacggtgagcagcaattctggcatcacaacaatacttaaatttcaagcatgaactgaagttttatttctgcaatcttcacttgctacacacaatacccttgaacctacacattaccatctgggatcagaaactactcaatatccattctatgtttatgacaagagcactgaacattaaatgctactgaagtgcaaatttcaagcactatcctacatcaccccatagggagagaaaaaggtaaatataacaaagatctagtaagaacgccttataaggtatattatggcactattgacttcaaactacaaaacttctacatacagttcaaagttgtaggtaacttaagtttaaacattaacaaaactactttttgccctcaatgtgcaccatatatactgaaaatgattctgcttctaaagttatgcaaatcagtcatattttaaaagaatctatcaatgcaactcaggaaactaaaacaatcactgcaagattctgatgcaatatgcgtacgtgcaacactaattttcattttattctgatctaaacccttgatctagggcctaagccaagatttaatcgaaatatgctcaacctcaaaaagcgtctacttttttgttcatttaggagaccggattaccgagctcgctaatccactaacagtgtactgtattctgtattaacggacaatagccctcaggaagagaccatatagatagcctaagaaagcaatcggtggcttgacacttgcaaccaggcaagagttccgtctagccaaacacaccctaggttgaatacacagaaaggaaacacaaaatatatgacctagcaacctgaccagggttaaatgttatagtcacccaaactacggacattttcgcatccgtctactcccacgttctaagagagtgacagaaaggtaaagaggagcagccgcagaaatggatacaggtcaagtctaagtcgaatccatcctcttgatatctccttttgtttctgctaacgatctctttgatgatggctgtcatgtctgggagcctgtggctgaagaaaaaggaggagagagatggcagaagctgctggtggcggggcttcttctgcaggatggaaatggctctggacttggcggtagctgatgcccctcgctctgccgccgcttggctctggaccgcagccgggtaatggctgctgcggcggctgctggatggttgcagcgactgggcctgcttctcctcagcagccagaggcctggcagcggcggcagcggaatggggagaagacgaataatcctccgaacggctgcctccgccggcggcctccggagcccgggccacggggggtgcggcggcggcgcacgggaggtttaaaaccggcccgggtccctggatgtgccagccgccgccgccgccgtgttggaggcagtagaaggggagagaccaactctccggcgttcccagccctggaaatggtgacaggcgactcagaccccctccctggagctgcagccgccgcggccgccgccgccgccgcttctcccccccgctccaggagcgggaggtgccgccgccgccgccgcgcctcagccggctcccgcccgagcccacggcttccaccttccctttcaggagaagccgaggaagaggctgcacggttagaaaagacgaagaggaggcgagaaacgccgccgctgccgccgccgcaggccggccggctccccgagggcgctgcccccgcggctgctcacaggcgctgagaggggctccgggccgcggccgccgccgtctctcatctccctcgcctgagcccggcctcgcctcacagcggctcaactctcaaacttccatcatggctgcagcttccgagaggagagaactgagcgcagtcgcgtcccagcgccgagcgcgtatcctgccgcagcgcataaagagtcccgccacatcaccgcccgccggcctgcccgccccctccgccgccgcgccgggagcccgggcgcctcggaagaccgaggggaggcgggaggcgagcgagaggcggacgggaccgcgccgggcgaggggagggcagggcagggcagggggcggtaggagggggcagagcggtagctctgggtgcgagcgcagagtccccaagccgcaggctctactgagcatgcccagtgtagctgcctggggcttgctcggg

SEQ ID NO: 140 - DNA, 4066 bp, Homo sapiens
caattcaattctacaacctagacatggaccaaaaatacagctagtttacaaaacacataaaatgcataaaaatcacataatcagaaagtcacatagtatcagacagagtgtattcactctgcaatataaaacacacacacaaaaaatccactcactagaagtcaagtgcttcactactaagagtgctgtggtacatctgggaaatcagtacagcccaagggggggaaaaataataatccctatgtacacataatggcctttactggacagataagcttattccatctttccccatattcaattaaaaaaatgaagaaaaaaatcctttagttctttacttctttcttcccacgtcttgggcctaaatcatattgagaatcctggccaaatgtggaaataggactcaataatacagagactgaatactttaaaagttcccatattatgttaatgcattacagattatattaagtgtccattttattgtaataaatgtaacttgacattcagttgcaagactccctcaaaaggctgaaattttcaaaaggaaatgctaaaaaatatacctctattgaccaaagtttacataactcatattaagtttattacatttgaggcagagtttactttatgtgaataaaaatgtatgatagttaagttgacctatcttcaacactaaagaaaatttaagattataacaaagtttaaaaattctacttcattatgctaataggaagtttttgccttttatattttaaagcaaatagtttttgattggcataattaattttactttggtcaacagtttgagttagcagagatttatttcccatttgtgatgaaccagcaaaatcacagacatgtcatacccagacttcctaaaggaatacccttatttttaaaaacacttataacttgaaacaaaatcctaacatggcccaaactgaggaaattcagttacaatcatacaccataaatgaaaatacaaataatttccctacatacataacctgaaattacagtttttcagagcagtagctaccatttaagtatttacaatgtggcaggtactatgctaaatgaaattacttattattatctcacttactattcaagataaacgtatgcggtaggttccattatcatccccattttacagataaaatagattgagaaaatctaaataacctactcaaagtcatccagctactaaatggaagatccaggattacaaaacaagcagtctggctccagagcccacactgcctccctaaaatctaaaatgaaacaatgtatatatgcttaaaagtatagataaacgtaatactcaaaattttaacataatttaaaatagatctgaccatatttaaaaactatagaacaatattctctaaggtagtcttttctttaaagaaacaaaaattcgttttttaataaatattaagataaaaggtttgctaactttgtatacacatacacacacagagaaatcaaacactggttagattcactgttcatatttgaagtggtgagtactgataataattatgtgtataattacttaaaatataatgtgtaaacagtcttctttttcacactatgtggaggtcaagaaaattcttttgatggcaggtacagctacaatatccatctctcaatattctcaacactggccaggcgcagtggctcacgcctgtaatcccagcattttgggaggccgaggcaggcggatcacttgaggtctggagtttgagaccagcctggccaaggtggtaaaaccccatctctactaaaagtacaaaaactatctgggcgtggtggcatgcacctataatcccagctgcttgggaggttcaggcaggagaatcgcctgaacctgggaggcagaggttccagtgagccgagatcctgccactgcaccccagactgggcgatagagcgagattccatctcaaaaaaaaaaaaaaaaaaaaaaaaattctcaacactgccaaaaagtaatgccttgaagatgtcctaataccttgaagatgttcacacatgtcccaatgtcaactgttgcaaatgaagaatctgccttaactatacagaactaaaacttcccaaataaaattaattcacccttaaattatgttactcttcttatatttgccgatacttatttattccagtgcaaattattttaaaagaattaaattgctaatacttcctctgcaaccaatgaaaaaaattcaaaaaactaagggaaaggtgaatagtcaagtacaatatactaatttcacctttcttggcaaattattttacattagtgaatgcatatactcaatatgtacaaagagaatcaccaaacacagaccaatatacttttaaccacctatggaagaacgtatatgtggcagtaatgcaccctataaaagacttacagttatcagtttgctcagcaaagccttaccaatttaaggttagtctaacctcaacattattctctctgataagcaactaaattaatttcaaagctaccaaatagaaagcaattgtaaaacagaactgactgaccccagtctcacaaatttcctaagtcactatcttcagaacaaatcctaacatcttttcttaatgaattcaggccacaagatgaattcttcaatgctgactgtgaaaatcaagtttaacagaaaaaatgaagaaaaaggtaacaagattaagaactaatgggttccatgtaataaaacttctgaactgtttgtttaacccaacggtttctacagaaaaaaaaaaatacatttcttaagctatgttaatattacattttctggaagctaaatccttgtagtatggcagaggcctcacatttcaattaagcagaaaattgtcatatgcatgcaacacttctacaattctctttacaaactctgaagtcacacacaatatcaataataaaagtgatttcctaagctttcgtcttacttaaaagattgagatgaaaatttaaaaatagcacgtttacttcaagtgaattaatgttaaaactttgtgaagtgaatttcccataacaaatactcctccattaaaagtcactgaagtgattacttcagaagcggcttaaaatatttttttaagtgttgcgctatcaccaaatgaacaaacagcaaatggaggcaaatttcaaaataacattagaaaataagaattgaagacttcttcacttccaaaaagtaagccatttcataacactaagaagtttatgtattttatgtggctatgagaaagcagatgcactgttccatacaaaaattaaaatatcaccagttgcctttcccatgttattaaaaataaaattctaaaaaggtaataaaggaatctttctttactatcttctaaaactaagtttaaaatgaaggtggttatacctcaccatattttattatctttaatcatttagtatttacttagtatattataagcaatgtaaatctgcattgatgactatactgctgtgcaaacttttacactggcagcaataaaattcctttttcctcatataaactgtacattactcctttcagttgtgctttacacttgaataagcactatgaaaaatgaagtttgtaagttatcatacagcaattaggtggtccagtcatgtttttcaggaaatataacttagcagatacaaaacaatgtaaaataaatgttgtgaatagaatactttttaaaaccctcatgattaatttcagtaatcacttaccttgaggtaatttaggtaacttcaatagtcactgtactctctacaagttaaaagtattccctgtgaacatttatttgaaaagaggcaaatctaccaaacaataaaaatacaacagaagcctaacgtttccacataccctaaatacacttaatttttctatagtctcaaattcagcactatatttcagactaatattaagcatataaccctactaacaaatttttagaataatttaattttgcgataatattttaaaactgaattattgtcctcaattttcctcggagaaatggcttcattattaatctttctttatca

SEQ ID NO: 141 - DNA, 4034 bp, Homo sapiens
tatcacgtgattccgcttatacgaggtacctagaatagtcaaatacatagagatgaaagtagaacaatggttggtactaacaggaggagcaatgaggagttattatttaatgggtgtggtatgtcagtgtgggataatgaaaaagttctagagatggacagtggtgacaattgcacaacaatgtaaatgtactgaatgctagatgttaatgctactgaactgtatgttttatatatatatatcatatatatcatatatatatcatatatatctcatatatatgagatatatctcatatatatatatacacacgcacacacatacacatatatataaaatatattatcacagtaacaaaattactcatctctggccctatttatcttcaaacctttattcctgcttctccccagatgcaatcaccctcaactactcggattctttttcctcctatttaattaggtattttaaaatattattcttaatactgcttcttacagatttattaactacagatgtcctgccatggtaaaggagacttacaaaactagcagtattccatacgtgtttcacttatcttaattcccctaaaatagcaacatcacaattttgggttaactcaaaccaccaatgctaataattgtttcctttttctaatttgctcagttttgcaagaatccattacatttttctccaaatatttcaacatccatctatcaatttgattattttcccggaagttctaatctcctgctccaagcaaaactggtaacttttcagcttgtgtcacagctgtcatcctgggactttcttctttgttgcttctgagtgggattctctgtttactgaagctcttttatttcctttcttggtttattcccttgttttgttgaaccacatcttctgggtaatgtccaaaaaaaatgttcttcatgagcacatttttttagtccttgagtttttccccctactttcacacttgattgatggtttaactggatacagaattctaggctgaatgcagaactttcaaggtgatgttttaccaccttctaccttcaattctactgccaacaagttagatgctattcatattcctaatccctcctaggcgattctaaaaagtttttagatattatctttatttctggtgtcctaaaacaaatttcataataatttgcctagtatagggtttcttttattgtgcttggcactatgtaggtcttttcaatctggatgtttctctcctttgttttctctttatgaatcctgttaattagagacaagatctctacaatgatcctatagcacattttaattgataaaattaacatataacactacaatattgtctaaagcagtctgtacatatacaaataatgtaataactaacatatataggtctaactactaattctatgagttatacagaatcaaagttacaatctcaaaaacagatgagaaatgacaatgaataatctgttcattgacagagacaggtcggacattacacagctccagctgatttttgtcacgcaggaatgtcagccaagtgttggaagatccttcgaaatttcaaaagcagctagaaatatagctttttatgtgaggtctcaatttttaaatataggtaatgtatttcaattttaaacatggtatgaatcaacagtgtgaggtcaaataaagaatattaacaagattagcccaagagttgtacacaagataatatggttcctaaggaaacaacttcggaatctgacagaccagaactcaaccttcagtctcactacttactaaaagtaatgcttggggaagttaacttcttttaaaccatctatgaaatggggatagatttactgtagagatttagtaagattatatacataaactggctatacaacagttacacatgcaaataagtatgtaaataaatgcccaataaatatctcctattattaacatacaaaaaaatgcattggtgtagataatataaacactgtcaaatccactaaggaattaagactaatgaaagaagtaggaggtggccagaacggtggctcacgcctataatcccagcactttgggaggccaaggcaggcagattacctaaggtcaggagttcaaggctagcctggccaacatggtgaaaccacgtttctactaaaaatacaaaaattagccaggcatgtggcgcgtgcctgtagtcccagctacgggaggctgaggcaggagaattgcttgaactcgggaggcagaggttgcaatgagatgagatcgccccattgcactacaacctgggaaacaaaccaagaccccgtctcaagatttaaaaaaaaaaaaaaaaaaaaaagcaagaggcacccaataagaacagggctttcttttggggtgataaaatgttttgaaacttgataaaggtagaggtaacactgtgaaggtaataaatgccacggaatgtacactttccgtggttaaaatggttagctgttatgtgaatttcactttattaaagaaaaaatgtgggaaaaacgaggtaatatgagagaaggagtcagaatatgctagaaacagagaatgaaactgatcattctttcctcttttgaagcctgcctataaataacatctctttaactccttttttaaactgaatagccaatactgatgttagggcaacaaatacttcctttttattgaaaatcaacatacaactaaggttgaaagactgagagatcaacatatttcaaatatttcaaaagaatatttgagactgggagtggaggctcacgcctgtaatcccagcactttgggaggctgagacaggtggactgcttgagttcaggagttcgagaccagcctggaaaacatggcgaaactctgcctctactaaaaatagaaaaattagccatgtacggtgacacacgcctgtggtcccagctacttgagaggatgaggtgggaggatcgctggagcccagaagtcgaggtgaaccatgatcacagcaccaccgtactccagcctgagtgaccgagcgagactctgtctcaaaaaaaaaggggcgagggggtgctcttgaatctattacacagctgcttatacatgggggaaaaagctcacagtgaacaagacaataaataaatctttttcaaaaatcactatatatcagaagactgtactctaaaagcatttccttataatataggactcatgccaccaacaaagaaaagaaaaaggaggtagagggaaagggaaagaacagaaaaggaaaagaaaagcatcatactagaatctcactcttgggagatttacaatgcatagtggcatattaaaggttctgcagtgagaaagacagttcacctctattaaacctccattctcctgatttataagaaacaaacaattcttaagttatgcctcttaaacacatgaagcaccaattttgttaaagactgcctagatttacaccaaataacataaattgaaaaacttcagtatcagcttgagggatgagattaacatacatattggccgggtgcagtggctcatgcctgtaatcccagcactttgggaggctgaggcaggcggatcgcttgagcgcaggagtttgagaccagcctgggaaacacagcgaaaccctatctctacaaaaaacacaaaaattagccaggcctggtgatgcgtggctgtggtcccagcaacttgggaggctgaggtgggaggatcacttgagcccagaaggcagaggttgcagtgagccgtgatcatgcctctgcaccccagcctgggtgacagagcaagaaactgccttaaaaaaaaaaaaaaaaaaaaaaaggtggcattccaagatggtcaaataggaacagctcctgtctgcagctcccagcatgatccacgcggaagacaggtgatttctgcatttccaactgaggtacctggttcttctcactgggactggttggaaagtgggtgcagcccacggagggtgagctgaagcagggcggggcattgcctcacccaggaagcacaaggggtcgggg

SEQ ID NO: 142 - DNA, 4042 bp, Homo sapiens
aggttcttttacattctgtctaaaagaatatatttcaatgtaataaaaactgcaaaattttatgtacactatgcacattttttgaggggagaacatttataccttccatcagactttaaaaggaatgtaacacaatttaagaccccctggcttaaatctagtgttctgcgcctccacattacaaaatttttctattttattacaaaaaattttttacctttttttccactaccaaaatatatgctgctcatcaactctgttttaaatttctaccatcgcttttgctactgcatttttttttttttttgagatggagtctccctctatcaccaggctggagtgcagtggcacagtctcggctcactgcaacctccacctcccgggttcaagcgattctcctgcctcagcatcctgagtagctgggattacaggcacgcgccaccacacccagctaatttttgtatttttagtagagatgaggtttcaccatgttggttggccaggatggtctcgatctcttgaccttgtgatccgcccgcctcggcctcccaaagtactgggattacaggcgtgagccgctgtgcccagcctgcatttttaatcagtaaaagcaattgtttccctgcagatgataatgggataaatcaaagtaaaaatctttagatcctcagctctataattcatgccagtgctatcattccaaggtgcaaacaatatgcagaaatgtaaggcaatctaccataatcttcaacattcaccaaaattatgcactaatgtaagattcaattttgtaaactatcaacaataaacagtatttcggcatccttatatataatgcaaaaaaagtcacaaaggataggaaacaagatataagagggggtaaaggaacaaggaatctatgcaattacacagctttaaatgattaatacgatcattctatttctgttttacagctgaattaagaagaaattagattaacatgaaggagaactctctaaatgagtttttctatctatctggaggggcttaggctttgtccttcttagagatggaaaaatgtacaaaatctctttgcattaaattttaacatgttttgccatacttaccacccaaagaaatatatcaacagcaaaattaaatcactgtaaaagttctcccaagagttttcttttttctttcagatgtactataagaattaaatttgtcactgatttttcaatatagtccttagttttctgatcaaagaatcgagaatcttctattaatctaactacatttatgaatattcttataaaagaataatttttatggattataaaagttcacactttactaggtaatggtattttatccaaaggcattctatgctcaaacaagcttcagaaatataaagcttatttttgattaatatgctttttaaaaatgttattttagaagaattttgtgagaccaaatctgcaatacagttaatgggtaacatgtgctagtatgatatgaaaatggtagcgtgaacagaaaaatgaaatcaatcagtcatttctcatatagaaattgaggcagcaactgatttaaaaatttagaagaaataaggattagcaactatctttaaaacctgttttccagggactgagggtggggagggaggaacacaagatgaacaagatctgaagctctactggacagcatagtgactatagttaataataacattgtataattgaaaattgtagcttgtagatcttaaatgctttcaccctggggggagaataataattatgtgaggtgatgaatatgttaagtagtttgactgtagtaatcatttcacaatgtatatacacatacatcaaaacatcatattatacattgtatttatatataatttttacttgtcaattacacctcaataaaactgaaggaaaaaaagaaacccaaaatctgttttccaataaattctcagatccaggaagaggaaaggaaaaacatcaaaaaataacttacctttttgtctctggtccttacttccccatagaaatctagggcctcttgtgcctttaaaaatttgccccgatgtaataaatatgcacatatcattacaccagttcgtccctttccagctttacagtgaattgctgcaacatgattgtcatcttcacttagccattggtcaagatcttcacaaaagggtttgataagttctagctgtggtgggttatggtcttcaaaaggatattgtgcaactgtggtaaaaagataacctcagaataagaaaaaaaaactcttgaatttttaattaacaagtaggtaactttagaaatgttgcatacaaacttaacaggtatttaaaagaaacactggattccagagaaaaataatgtattgcttaactttctaattgttaaatagaaaatagtctcttgataagtcttaaatataatcattaaggaagccaggtattattttcccccattttattcaggaggatatattctgggaatttacgctatacggactggtagcataggtcacatattagaggtagagctaaacccaaaatgaactgtcacatggacatttcgtcaggactctcaatgcaaaaggaataatactatttatagtatttatttcatcatcacaaaacatattccaaagacagaatagattactaataggataaactatgcaaagaactacatattacatttcataaaataaaaatgctaagtgtgttatttaaaggtggtcttgcaaatgttagtgttgtatacacatgtaatcattagggaagccaagtattattttcctccattttctgcaggagaatacattctgggaatctatgctcaatggactgcagcataggtcacataccagagatatgtgaaggcatacaccaaagaaattactcacaaaatgtatataattgttatcaaagtttcaggtcttctcacatgaattgtaagagtccaagacttctctgttcactatagtcagagttgaggtttttaaaaaaacttgtttagaaacaggactatagatatatcactattaattgctcttaatagtttctaccttagttccactctattaagatccttaaaaaccctggctgatattcaatgtactaacctgtgtcatctaaatatgtgagaagtatgtcttatatctccaatcaggtgactcataatatggtacaggatataatcaattatcctttggtgtgacaggagagatcttctggtagacaatgactatcattataaggagtcagcaggacagctttcacttagtcatctgcctaacttcattttcccagtggtacacaaaaacctccaggaaaatctgttaaatatctgtttaaagcaagataaacctcaactaaagcctgctttgcttagtaagcaacagcctaaatccaccaaaaacaaaaacaaaaaaaacccgttcttagtaaacctatactaaatctcaatcattagtgatttagaattttcaaaccatttgtctgaaagtccattctagattttcaggagggatcaatggcaaatacatcaatagtagctcatggcacccactttctttttgactatcacagcagcatctgccaagcttctcaactcttcagttttctcatggtttaaagtgttaagccatgagaactgagttgtatttcacaaataaaagtgaaagtttttgtgggctctgagaattaacttatgtctgaagtagaaactcatttaaagcagttccctcctctcatccatcagactcctcttatcaacatttgttatatcctttcctaccttttatgtcattcctcaacacagaagagttaagtagttctgctttctccctgtgattgcttactattagaccaactgcctcaaatagtaggtaaaccctctccttatactatttttagtctaggaattttcctaattcttagtctatgctgcactttagtcttcctgacaatattaatagctttatgcaatactttttcctaaaacacaacagtaaaattaaaatttttgaaatttttaaa

SEQ ID NO: 143 - DNA, 4058 bp, Homo sapiens
gagattaattattttgaacagtctcaaaattcttttgcagttccaggatttgtggacttgatagtatagaaagaaatttaacagtgtatcagaggactcaaattttcctctgaatgctaatattaactggataatattgatcacaacacttccccttcctgtgcctgtttgatcatctataagaaacattcctggaagaaaaaaaaaaaaaaacctaccactgactttaatccgtatctagttttctaatgctgtttcaacctaaacacaaatgctactgttcagtaaaatatggtcaaccaacagcatctgctccattttttttgcctttttaaataaacacagggataaagaaggtaagaacacgaggatactcctttagattctgtgaataattcatccgaaatatggtctaagtatattaattaagcatgagccaagtatagtagatttcagttatttattttgactccaagacacaaaaagcaatcaatttcagtgaaattacttaactctgagtcttaatattatgtaacagctaaatataacaattttaatatctacattcttaacactgtatgtacagatctccattttctattaactattagcccatcaatctcttttcacttgggggatattccaacctatgcaaggatggagaatatacagctactagagcagttctactgatgaagtaaatactattacattttaccacatgatattataaactttgcattttattttcataacactattcttgctatctttcattctggccctatttcacaacaccctacaggacttacgatttcatcaaatagtctcccctcacctctgaagagaaacagaattgatagtattaccagactgtaatgactagaatatcttcccattggcaaatttaaaatatgtccttactttttgattatggagccttctcttggatttaatttggactggaaacagaaaataaaatacaataaagtttaaatgcccttgggttttacttttatccctgaacatgatgacatggactatcccaagtccttcttaaatggcaagttctcatcatcagcagagcacagccaactattctgaagaagcagatacatcagacagggtatgtatgcatatgtgtgtgggtgagagtgtataagaaggaggaaagagggagaaaaagagaccacatgtgagagcacagttaagttggaaaagcctagaccattacaaaaactatttgttccaattaaaaatcattgattaaatcatcctactaggatattgattgtaatgctaaacaaacaaaaagtcacacagttgaacagtgaaggcaagtatcttagaaagagtcaaatatacttgtagcatgaagaagaataagactgttgcaatacctctatcaaatacttttctccattccaaaaaaaaccctgacattaaaaaaacaataataaagtaggtcacaaaaagattggaagtaccacctttcttcagatatgatttctcagtatagccggctacaagttttcatcaaatgcaagcatggtgacacaatcaaggaaacattcccattttggaatctttttggaagcttcagaaaacattaacactttcaaaatggtaaagtttctttaccaaaaaacttctcctgaagaaacctcagtattctgtaggcagacagtacaccttactgccagacaacacatctgatattggggcactggtaaagacagaagctctccatgtcatggtcacccactgctctcttcatcagtatgcgctagggtgcaagactgtcatcaatcctgaaagaaatcttatctcttgttgtgaaagtattctactgtttcaagtgccaacccttgaataattccctgtgtaagatgatttgtcatgaaaaatccactattgtgaaagctgccagattcatgaaagccaagactttcaatcaagagcttctcgagaggttttgtcaagaaatgggagcactatgaagttctttgctatatataagttccctgctttcagaagacaaattctacagcctgatactgctgtttacaggataacatacactctttttaaacagtttaactcttcaaccttgaaagtaaaatgtggagtcataatcttttctttcctaacacagcattaatgatacagatcttgccaaaaatgatctcagtaacttgaaggcaaagaaaatgatgaaacatgaatttatctgaagagccttggagaattcttatttcttgacacgtctactttcatcaggcaatagaatctacagattccatttactcttctttcttttgtaaaatagcattttcagcactttttaccaaagtcaacactgattggatatcaaagatcatataaaagttgcaaagtcaaagtcaaagagcatagtttcaacttgttattttaaaagttaaatagcagtcttttcattaaaatttagtattgaacagaactaaagcttaattttggttaatttgtaccacttagatttattcattgctctcatgtagtagccactggtttttgcataaaaaagtgacatagttttcatgaaggttcttttacattctgtctaaaagaatatatttcaatgtaataaaaactgcaaaattttatgtacactatgcacattttttgaggggagaacatttataccttccatcagactttaaaaggaatgtaacacaatttaagaccccctggcttaaatctagtgttctgcgcctccacattacaaaatttttctattttattacaaaaaattttttacctttttttccactaccaaaatatatgctgctcatcaactctgttttaaatttctaccatcgcttttgctactgcatttttttttttttttgagatggagtctccctctatcaccaggctggagtgcagtggcacagtctcggctcactgcaacctccacctcccgggttcaagcgattctcctgcctcagcatcctgagtagctgggattacaggcacgcgccaccacacccagctaatttttgtatttttagtagagatgaggtttcaccatgttggttggccaggatggtctcgatctcttgaccttgtgatccgcccgcctcggcctcccaaagtactgggattacaggcgtgagccgctgtgcccagcctgcatttttaatcagtaaaagcaattgtttccctgcagatgataatgggataaatcaaagtaaaaatctttagatcctcagctctataattcatgccagtgctatcattccaaggtgcaaacaatatgcagaaatgtaaggcaatctaccataatcttcaacattcaccaaaattatgcactaatgtaagattcaattttgtaaactatcaacaataaacagtatttcggcatccttatatataatgcaaaaaaagtcacaaaggataggaaacaagatataagagggggtaaaggaacaaggaatctatgcaattacacagctttaaatgattaatacgatcattctatttctgttttacagctgaattaagaagaaattagattaacatgaaggagaactctctaaatgagtttttctatctatctggaggggcttaggctttgtccttcttagagatggaaaaatgtacaaaatctctttgcattaaattttaacatgttttgccatacttaccacccaaagaaatatatcaacagcaaaattaaatcactgtaaaagttctcccaagagttttcttttttctttcagatgtactataagaattaaatttgtcactgatttttcaatatagtccttagttttctgatcaaagaatcgagaatcttctattaatctaactacatttatgaatattcttataaaagaataatttttatggattataaaagttcacactttactaggtaatggtattttatccaaaggcattctatgctcaaacaagcttcagaaatataaagcttatttttgattaatatgctttttaaaaatgttattttagaagaattttgtgagaccaaatctgcaatacagttaatgggtaac

SEQ ID NO: 144 - DNA, 4111 bp, Homo sapiens
taaaagattaaaaattatttcaccagtattctaaccaacaggcaaacaagtggtatctttgaaagttttaaaacaattacatttcaagtattttacagaagcctgcagtattatatttccaagaccaacaacctcaatctgtccaaattccctttaagtcaggagtcattaaatgctttagcatttgtaaggaagcatttgtaaggaaaggtataagctgaggagcctttcaaaataagaccaattttatcagcatttcataaccttgcaggaaagcctgagcctatacagagattaattattttgaacagtctcaaaattcttttgcagttccaggatttgtggacttgatagtatagaaagaaatttaacagtgtatcagaggactcaaattttcctctgaatgctaatattaactggataatattgatcacaacacttccccttcctgtgcctgtttgatcatctataagaaacattcctggaagaaaaaaaaaaaaaaacctaccactgactttaatccgtatctagttttctaatgctgtttcaacctaaacacaaatgctactgttcagtaaaatatggtcaaccaacagcatctgctccattttttttgcctttttaaataaacacagggataaagaaggtaagaacacgaggatactcctttagattctgtgaataattcatccgaaatatggtctaagtatattaattaagcatgagccaagtatagtagatttcagttatttattttgactccaagacacaaaaagcaatcaatttcagtgaaattacttaactctgagtcttaatattatgtaacagctaaatataacaattttaatatctacattcttaacactgtatgtacagatctccattttctattaactattagcccatcaatctcttttcacttgggggatattccaacctatgcaaggatggagaatatacagctactagagcagttctactgatgaagtaaatactattacattttaccacatgatattataaactttgcattttattttcataacactattcttgctatctttcattctggccctatttcacaacaccctacaggacttacgatttcatcaaatagtctcccctcacctctgaagagaaacagaattgatagtattaccagactgtaatgactagaatatcttcccattggcaaatttaaaatatgtccttactttttgattatggagccttctcttggatttaatttggactggaaacagaaaataaaatacaataaagtttaaatgcccttgggttttacttttatccctgaacatgatgacatggactatcccaagtccttcttaaatggcaagttctcatcatcagcagagcacagccaactattctgaagaagcagatacatcagacagggtatgtatgcatatgtgtgtgggtgagagtgtataagaaggaggaaagagggagaaaaagagaccacatgtgagagcacagttaagttggaaaagcctagaccattacaaaaactatttgttccaattaaaaatcattgattaaatcatcctactaggatattgattgtaatgctaaacaaacaaaaagtcacacagttgaacagtgaaggcaagtatcttagaaagagtcaaatatacttgtagcatgaagaagaataagactgttgcaatacctctatcaaatacttttctccattccaaaaaaaaccctgacattaaaaaaacaataataaagtaggtcacaaaaagattggaagtaccacctttcttcagatatgatttctcagtatagccggctacaagttttcatcaaatgcaagcatggtgacacaatcaaggaaacattcccattttggaatctttttggaagcttcagaaaacattaacactttcaaaatggtaaagtttctttaccaaaaaacttctcctgaagaaacctcagtattctgtaggcagacagtacaccttactgccagacaacacatctgatattggggcactggtaaagacagaagctctccatgtcatggtcacccactgctctcttcatcagtatgcgctagggtgcaagactgtcatcaatcctgaaagaaatcttatctcttgttgtgaaagtattctactgtttcaagtgccaacccttgaataattccctgtgtaagatgatttgtcatgaaaaatccactattgtgaaagctgccagattcatgaaagccaagactttcaatcaagagcttctcgagaggttttgtcaagaaatgggagcactatgaagttctttgctatatataagttccctgctttcagaagacaaattctacagcctgatactgctgtttacaggataacatacactctttttaaacagtttaactcttcaaccttgaaagtaaaatgtggagtcataatcttttctttcctaacacagcattaatgatacagatcttgccaaaaatgatctcagtaacttgaaggcaaagaaaatgatgaaacatgaatttatctgaagagccttggagaattcttatttcttgacacgtctactttcatcaggcaatagaatctacagattccatttactcttctttcttttgtaaaatagcattttcagcactttttaccaaagtcaacactgattggatatcaaagatcatataaaagttgcaaagtcaaagtcaaagagcatagtttcaacttgttattttaaaagttaaatagcagtcttttcattaaaatttagtattgaacagaactaaagcttaattttggttaatttgtaccacttagatttattcattgctctcatgtagtagccactggtttttgcataaaaaagtgacatagttttcatgaaggttcttttacattctgtctaaaagaatatatttcaatgtaataaaaactgcaaaattttatgtacactatgcacattttttgaggggagaacatttataccttccatcagactttaaaaggaatgtaacacaatttaagaccccctggcttaaatctagtgttctgcgcctccacattacaaaatttttctattttattacaaaaaattttttacctttttttccactaccaaaatatatgctgctcatcaactctgttttaaatttctaccatcgcttttgctactgcatttttttttttttttgagatggagtctccctctatcaccaggctggagtgcagtggcacagtctcggctcactgcaacctccacctcccgggttcaagcgattctcctgcctcagcatcctgagtagctgggattacaggcacgcgccaccacacccagctaatttttgtatttttagtagagatgaggtttcaccatgttggttggccaggatggtctcgatctcttgaccttgtgatccgcccgcctcggcctcccaaagtactgggattacaggcgtgagccgctgtgcccagcctgcatttttaatcagtaaaagcaattgtttccctgcagatgataatgggataaatcaaagtaaaaatctttagatcctcagctctataattcatgccagtgctatcattccaaggtgcaaacaatatgcagaaatgtaaggcaatctaccataatcttcaacattcaccaaaattatgcactaatgtaagattcaattttgtaaactatcaacaataaacagtatttcggcatccttatatataatgcaaaaaaagtcacaaaggataggaaacaagatataagagggggtaaaggaacaaggaatctatgcaattacacagctttaaatgattaatacgatcattctatttctgttttacagctgaattaagaagaaattagattaacatgaaggagaactctctaaatgagtttttctatctatctggaggggcttaggctttgtccttcttagagatggaaaaatgtacaaaatctctttgcattaaattttaacatgttttgccatacttaccacccaaagaaatatatcaacagcaaaattaaatcactgtaaaagttctcccaagagttttcttttttctttcagatgtactataagaattaaatttgtcactgatttttcaatatagtccttagttttctgatc

SEQ ID NO: 145 - DNA, 4022 bp, Homo sapiens
tagctaagttttcttatgatgaaattagttattcataaaagattaaaaattatttcaccagtattctaaccaacaggcaaacaagtggtatctttgaaagttttaaaacaattacatttcaagtattttacagaagcctgcagtattatatttccaagaccaacaacctcaatctgtccaaattccctttaagtcaggagtcattaaatgctttagcatttgtaaggaagcatttgtaaggaaaggtataagctgaggagcctttcaaaataagaccaattttatcagcatttcataaccttgcaggaaagcctgagcctatacagagattaattattttgaacagtctcaaaattcttttgcagttccaggatttgtggacttgatagtatagaaagaaatttaacagtgtatcagaggactcaaattttcctctgaatgctaatattaactggataatattgatcacaacacttccccttcctgtgcctgtttgatcatctataagaaacattcctggaagaaaaaaaaaaaaaaacctaccactgactttaatccgtatctagttttctaatgctgtttcaacctaaacacaaatgctactgttcagtaaaatatggtcaaccaacagcatctgctccattttttttgcctttttaaataaacacagggataaagaaggtaagaacacgaggatactcctttagattctgtgaataattcatccgaaatatggtctaagtatattaattaagcatgagccaagtatagtagatttcagttatttattttgactccaagacacaaaaagcaatcaatttcagtgaaattacttaactctgagtcttaatattatgtaacagctaaatataacaattttaatatctacattcttaacactgtatgtacagatctccattttctattaactattagcccatcaatctcttttcacttgggggatattccaacctatgcaaggatggagaatatacagctactagagcagttctactgatgaagtaaatactattacattttaccacatgatattataaactttgcattttattttcataacactattcttgctatctttcattctggccctatttcacaacaccctacaggacttacgatttcatcaaatagtctcccctcacctctgaagagaaacagaattgatagtattaccagactgtaatgactagaatatcttcccattggcaaatttaaaatatgtccttactttttgattatggagccttctcttggatttaatttggactggaaacagaaaataaaatacaataaagtttaaatgcccttgggttttacttttatccctgaacatgatgacatggactatcccaagtccttcttaaatggcaagttctcatcatcagcagagcacagccaactattctgaagaagcagatacatcagacagggtatgtatgcatatgtgtgtgggtgagagtgtataagaaggaggaaagagggagaaaaagagaccacatgtgagagcacagttaagttggaaaagcctagaccattacaaaaactatttgttccaattaaaaatcattgattaaatcatcctactaggatattgattgtaatgctaaacaaacaaaaagtcacacagttgaacagtgaaggcaagtatcttagaaagagtcaaatatacttgtagcatgaagaagaataagactgttgcaatacctctatcaaatacttttctccattccaaaaaaaaccctgacattaaaaaaacaataataaagtaggtcacaaaaagattggaagtaccacctttcttcagatatgatttctcagtatagccggctacaagttttcatcaaatgcaagcatggtgacacaatcaaggaaacattcccattttggaatctttttggaagcttcagaaaacattaacactttcaaaatggtaaagtttctttaccaaaaaacttctcctgaagaaacctcagtattctgtaggcagacagtacaccttactgccagacaacacatctgatattggggcactggtaaagacagaagctctccatgtcatggtcacccactgctctcttcatcagtatgcgctagggtgcaagactgtcatcaatcctgaaagaaatcttatctcttgttgtgaaagtattctactgtttcaagtgccaacccttgaataattccctgtgtaagatgatttgtcatgaaaaatccactattgtgaaagctgccagattcatgaaagccaagactttcaatcaagagcttctcgagaggttttgtcaagaaatgggagcactatgaagttctttgctatatataagttccctgctttcagaagacaaattctacagcctgatactgctgtttacaggataacatacactctttttaaacagtttaactcttcaaccttgaaagtaaaatgtggagtcataatcttttctttcctaacacagcattaatgatacagatcttgccaaaaatgatctcagtaacttgaaggcaaagaaaatgatgaaacatgaatttatctgaagagccttggagaattcttatttcttgacacgtctactttcatcaggcaatagaatctacagattccatttactcttctttcttttgtaaaatagcattttcagcactttttaccaaagtcaacactgattggatatcaaagatcatataaaagttgcaaagtcaaagtcaaagagcatagtttcaacttgttattttaaaagttaaatagcagtcttttcattaaaatttagtattgaacagaactaaagcttaattttggttaatttgtaccacttagatttattcattgctctcatgtagtagccactggtttttgcataaaaaagtgacatagttttcatgaaggttcttttacattctgtctaaaagaatatatttcaatgtaataaaaactgcaaaattttatgtacactatgcacattttttgaggggagaacatttataccttccatcagactttaaaaggaatgtaacacaatttaagaccccctggcttaaatctagtgttctgcgcctccacattacaaaatttttctattttattacaaaaaattttttacctttttttccactaccaaaatatatgctgctcatcaactctgttttaaatttctaccatcgcttttgctactgcatttttttttttttttgagatggagtctccctctatcaccaggctggagtgcagtggcacagtctcggctcactgcaacctccacctcccgggttcaagcgattctcctgcctcagcatcctgagtagctgggattacaggcacgcgccaccacacccagctaatttttgtatttttagtagagatgaggtttcaccatgttggttggccaggatggtctcgatctcttgaccttgtgatccgcccgcctcggcctcccaaagtactgggattacaggcgtgagccgctgtgcccagcctgcatttttaatcagtaaaagcaattgtttccctgcagatgataatgggataaatcaaagtaaaaatctttagatcctcagctctataattcatgccagtgctatcattccaaggtgcaaacaatatgcagaaatgtaaggcaatctaccataatcttcaacattcaccaaaattatgcactaatgtaagattcaattttgtaaactatcaacaataaacagtatttcggcatccttatatataatgcaaaaaaagtcacaaaggataggaaacaagatataagagggggtaaaggaacaaggaatctatgcaattacacagctttaaatgattaatacgatcattctatttctgttttacagctgaattaagaagaaattagattaacatgaaggagaactctctaaatgagtttttctatctatctggaggggcttaggctttgtccttcttagagatggaaaaatgtacaaaatctctttgcattaaattttaacatgttttgccatacttaccacccaaagaa

SEQ ID NO: 146 - DNA, 4057 bp, Homo sapiens
actttttccctaaaagtttaaccaaagaaaaaataagaggccaggcacagtgactcatgcctgtaatctcagcactttgggaggccgaggtgggcggatcacttgaggtcaagagttcaagaccagtctggccaacatggcgaaaccccatctctactaaaaatacaaaaattagccaggcgtgggggcaggcgcctgtaatcccagctgctcgggaggctgaggcaggagaatcgcttgaactcaggaggtagaggttgcagtgagctgagatgttgccactgcactccagcctgggtgattgagtgagactgtctcaaacaaaaaaacaaaacaaacaagcaaaaaaaaaaaaaaaaaaaaaaaacaaaaaaagggaaataaatatgaatgtttactttatgtgccatcattctggaacacagctgggggtatgcatgggacagggagaaggcaagggagagggaaacagcagtagtgtttctaagtaactttgtcatgtaaaaggagtttacctctttaaactcaaattttggaagtcctttcaaaaatacatacttactagcattctcaggatgttttaactctttcttcatagtttaaacatgtgagttatctaatattgaaacttaagtgcagatgcagatagtgtggagcacaggactagatgagaaccaaccctagaagttgccctgtggcatgctttcttggaagaaaaaaatcaccaacagcttacttttgaataatcttcacatgttcataaagcaaaagtgtcaaatatacaaatgaatgactcctaaggaagtgtaacacaattatcttcttgtaaattagtgaataagacagaaggaggcttccttcccttaagcggttacctcactctcagaacatttttctttataataactatcagttgtctgacttctctgcaacactgaaaacccaaagtattatttgggcattactaacctaatgcgttattttatggtcaacttgtacccaccactctgccatctaatttgcaccatgtctgctgaggatatgtcaagactctgagccagattattttgaagagacctctgcaaagtctacaaattctttaccaaaatatgactgcctcatctcccttcaaaaaagaaagggggaaaaaagattcttcttctatataaatgtcactagaacataattttctccagcttcttaatgtttgtctataattaaaattaaggatataagcaaaataacattaaagataattctaataaagttaaccccatacaaactgaaaagtagataaaatgcatgtatctcctataatggtgattcacaattacaaaaatgcaaatccacaggctcaatctacaaggaaatactgacaagaagagaataaacctattatgagatattccaagaataaaactactttagataatcaactacatttattataagatagttactcctcaggaagaattccacagttgtataacaacagctttaccatgcttagctaagttttcttatgatgaaattagttattcataaaagattaaaaattatttcaccagtattctaaccaacaggcaaacaagtggtatctttgaaagttttaaaacaattacatttcaagtattttacagaagcctgcagtattatatttccaagaccaacaacctcaatctgtccaaattccctttaagtcaggagtcattaaatgctttagcatttgtaaggaagcatttgtaaggaaaggtataagctgaggagcctttcaaaataagaccaattttatcagcatttcataaccttgcaggaaagcctgagcctatacagagattaattattttgaacagtctcaaaattcttttgcagttccaggatttgtggacttgatagtatagaaagaaatttaacagtgtatcagaggactcaaattttcctctgaatgctaatattaactggataatattgatcacaacacttccccttcctgtgcctgtttgatcatctataagaaacattcctggaagaaaaaaaaaaaaaaacctaccactgactttaatccgtatctagttttctaatgctgtttcaacctaaacacaaatgctactgttcagtaaaatatggtcaaccaacagcatctgctccattttttttgcctttttaaataaacacagggataaagaaggtaagaacacgaggatactcctttagattctgtgaataattcatccgaaatatggtctaagtatattaattaagcatgagccaagtatagtagatttcagttatttattttgactccaagacacaaaaagcaatcaatttcagtgaaattacttaactctgagtcttaatattatgtaacagctaaatataacaattttaatatctacattcttaacactgtatgtacagatctccattttctattaactattagcccatcaatctcttttcacttgggggatattccaacctatgcaaggatggagaatatacagctactagagcagttctactgatgaagtaaatactattacattttaccacatgatattataaactttgcattttattttcataacactattcttgctatctttcattctggccctatttcacaacaccctacaggacttacgatttcatcaaatagtctcccctcacctctgaagagaaacagaattgatagtattaccagactgtaatgactagaatatcttcccattggcaaatttaaaatatgtccttactttttgattatggagccttctcttggatttaatttggactggaaacagaaaataaaatacaataaagtttaaatgcccttgggttttacttttatccctgaacatgatgacatggactatcccaagtccttcttaaatggcaagttctcatcatcagcagagcacagccaactattctgaagaagcagatacatcagacagggtatgtatgcatatgtgtgtgggtgagagtgtataagaaggaggaaagagggagaaaaagagaccacatgtgagagcacagttaagttggaaaagcctagaccattacaaaaactatttgttccaattaaaaatcattgattaaatcatcctactaggatattgattgtaatgctaaacaaacaaaaagtcacacagttgaacagtgaaggcaagtatcttagaaagagtcaaatatacttgtagcatgaagaagaataagactgttgcaatacctctatcaaatacttttctccattccaaaaaaaaccctgacattaaaaaaacaataataaagtaggtcacaaaaagattggaagtaccacctttcttcagatatgatttctcagtatagccggctacaagttttcatcaaatgcaagcatggtgacacaatcaaggaaacattcccattttggaatctttttggaagcttcagaaaacattaacactttcaaaatggtaaagtttctttaccaaaaaacttctcctgaagaaacctcagtattctgtaggcagacagtacaccttactgccagacaacacatctgatattggggcactggtaaagacagaagctctccatgtcatggtcacccactgctctcttcatcagtatgcgctagggtgcaagactgtcatcaatcctgaaagaaatcttatctcttgttgtgaaagtattctactgtttcaagtgccaacccttgaataattccctgtgtaagatgatttgtcatgaaaaatccactattgtgaaagctgccagattcatgaaagccaagactttcaatcaagagcttctcgagaggttttgtcaagaaatgggagcactatgaagttctttgctatatataagttccctgctttcagaagacaaattctacagcctgatactgctgtttacaggataacatacactctttttaaacagtttaactcttcaaccttgaaagtaaaatgtggagtcataatcttttctttcctaacacagcattaatgatacagatcttgccaaaaatgatctcagtaacttgaaggcaaagaaaatgatgaaacatgaa

SEQ ID NO: 147 - DNA, 4045 bp, Homo sapiens
cttaaataatgtgtatcatagtaacatggtttggcccaggaaaattcaaatgttaagaaaaataagaacgccacattggaagatttttaaaaagacagtaattatagtttgttttaaataaagaggaagtaagaaaatttcattaggttataacatgtagaaatttagtaaacaggctagaaaaaataacctgatttaagattaggtcatgaaaattcattccccagagaaaccaaacattttccttgagatcatttaaagatacaactattatttctagaagatttgtctttattaagaataagctcaatgaactcatgtacacaagagttcctaacatagagaaactttaataatttatttaaaaacaaaaagaaaattaaaagcagctcaaactttttccctaaaagtttaaccaaagaaaaaataagaggccaggcacagtgactcatgcctgtaatctcagcactttgggaggccgaggtgggcggatcacttgaggtcaagagttcaagaccagtctggccaacatggcgaaaccccatctctactaaaaatacaaaaattagccaggcgtgggggcaggcgcctgtaatcccagctgctcgggaggctgaggcaggagaatcgcttgaactcaggaggtagaggttgcagtgagctgagatgttgccactgcactccagcctgggtgattgagtgagactgtctcaaacaaaaaaacaaaacaaacaagcaaaaaaaaaaaaaaaaaaaaaaaacaaaaaaagggaaataaatatgaatgtttactttatgtgccatcattctggaacacagctgggggtatgcatgggacagggagaaggcaagggagagggaaacagcagtagtgtttctaagtaactttgtcatgtaaaaggagtttacctctttaaactcaaattttggaagtcctttcaaaaatacatacttactagcattctcaggatgttttaactctttcttcatagtttaaacatgtgagttatctaatattgaaacttaagtgcagatgcagatagtgtggagcacaggactagatgagaaccaaccctagaagttgccctgtggcatgctttcttggaagaaaaaaatcaccaacagcttacttttgaataatcttcacatgttcataaagcaaaagtgtcaaatatacaaatgaatgactcctaaggaagtgtaacacaattatcttcttgtaaattagtgaataagacagaaggaggcttccttcccttaagcggttacctcactctcagaacatttttctttataataactatcagttgtctgacttctctgcaacactgaaaacccaaagtattatttgggcattactaacctaatgcgttattttatggtcaacttgtacccaccactctgccatctaatttgcaccatgtctgctgaggatatgtcaagactctgagccagattattttgaagagacctctgcaaagtctacaaattctttaccaaaatatgactgcctcatctcccttcaaaaaagaaagggggaaaaaagattcttcttctatataaatgtcactagaacataattttctccagcttcttaatgtttgtctataattaaaattaaggatataagcaaaataacattaaagataattctaataaagttaaccccatacaaactgaaaagtagataaaatgcatgtatctcctataatggtgattcacaattacaaaaatgcaaatccacaggctcaatctacaaggaaatactgacaagaagagaataaacctattatgagatattccaagaataaaactactttagataatcaactacatttattataagatagttactcctcaggaagaattccacagttgtataacaacagctttaccatgcttagctaagttttcttatgatgaaattagttattcataaaagattaaaaattatttcaccagtattctaaccaacaggcaaacaagtggtatctttgaaagttttaaaacaattacatttcaagtattttacagaagcctgcagtattatatttccaagaccaacaacctcaatctgtccaaattccctttaagtcaggagtcattaaatgctttagcatttgtaaggaagcatttgtaaggaaaggtataagctgaggagcctttcaaaataagaccaattttatcagcatttcataaccttgcaggaaagcctgagcctatacagagattaattattttgaacagtctcaaaattcttttgcagttccaggatttgtggacttgatagtatagaaagaaatttaacagtgtatcagaggactcaaattttcctctgaatgctaatattaactggataatattgatcacaacacttccccttcctgtgcctgtttgatcatctataagaaacattcctggaagaaaaaaaaaaaaaaacctaccactgactttaatccgtatctagttttctaatgctgtttcaacctaaacacaaatgctactgttcagtaaaatatggtcaaccaacagcatctgctccattttttttgcctttttaaataaacacagggataaagaaggtaagaacacgaggatactcctttagattctgtgaataattcatccgaaatatggtctaagtatattaattaagcatgagccaagtatagtagatttcagttatttattttgactccaagacacaaaaagcaatcaatttcagtgaaattacttaactctgagtcttaatattatgtaacagctaaatataacaattttaatatctacattcttaacactgtatgtacagatctccattttctattaactattagcccatcaatctcttttcacttgggggatattccaacctatgcaaggatggagaatatacagctactagagcagttctactgatgaagtaaatactattacattttaccacatgatattataaactttgcattttattttcataacactattcttgctatctttcattctggccctatttcacaacaccctacaggacttacgatttcatcaaatagtctcccctcacctctgaagagaaacagaattgatagtattaccagactgtaatgactagaatatcttcccattggcaaatttaaaatatgtccttactttttgattatggagccttctcttggatttaatttggactggaaacagaaaataaaatacaataaagtttaaatgcccttgggttttacttttatccctgaacatgatgacatggactatcccaagtccttcttaaatggcaagttctcatcatcagcagagcacagccaactattctgaagaagcagatacatcagacagggtatgtatgcatatgtgtgtgggtgagagtgtataagaaggaggaaagagggagaaaaagagaccacatgtgagagcacagttaagttggaaaagcctagaccattacaaaaactatttgttccaattaaaaatcattgattaaatcatcctactaggatattgattgtaatgctaaacaaacaaaaagtcacacagttgaacagtgaaggcaagtatcttagaaagagtcaaatatacttgtagcatgaagaagaataagactgttgcaatacctctatcaaatacttttctccattccaaaaaaaaccctgacattaaaaaaacaataataaagtaggtcacaaaaagattggaagtaccacctttcttcagatatgatttctcagtatagccggctacaagttttcatcaaatgcaagcatggtgacacaatcaaggaaacattcccattttggaatctttttggaagcttcagaaaacattaacactttcaaaatggtaaagtttctttaccaaaaaacttctcctgaagaaacctcagtattctgtaggcagacagtacaccttactgccagacaacacatctgatattggggcactggtaaagacagaagctctccatgtcatggtcacccactgctctcttcatcagtatgcgctagggtgcaagactgtcatcaatcctgaaaga

SEQ ID NO: 148 - DNA, 4040 bp, Homo sapiens
taatacagtggtctataacagagagtcaagtgcctttacatgcctagtgaaaataactgtcaaaacaaccttacatgttaggtatttccatttccaaggggaggtagctaaggcccagaaaggttagggaacttgttaaaggctacatatctattaaaagtaggtagtggatgtgagatttaaatcagaaatgacttcaaatcccttcttcattatattatattgacagcccctccctcccctattatccaagagtcattatcaattcttctcttacaaccaacatccactgcatcagtaaactctttaagttaatctgacagcttcttgttacccttcactgccactattctaagcagtgaggggcaacaagaagcaaacatcttctctcatctttactaaactattcaagtacctcttaactgatctctcagcttcctttattaccccttctccctactttcctcactcatctgtattttgaaagcatgaacacagggaatattaaacacaaaattcagattacatccttcctatgctgaacacacactagtgtctttacacttggactggttttcttgtccactctgtttcagtcaaaatgacttatccactcttcagatataccaagctcattctcttgtctaagggcttttgcatctgtactcttaactcttttcccagatatttgtataactcacttatatgatttaggcctctgcttaaatgttatctgcttggttgggccttctctaatcatctttgctaaaaaacaaaaaacatacaaaccaagattactttctatcctgtctattttttatagcacttactactatatgacattgtatttgtttactaataatggagtttttatttgtaatcacaaatataaaacatcttgcaatattaaaatagaaaacaataaaactaaagggaaaaagacattttaaaagttaatggctgagcaaaatgcagatttagagaaaagaaaggaaacctgtggattctaaagagaatgtctagcccggaggacatgatgttaagtaaaataagtcaggtacagaaagataaataccgtatgttctcactcatatatggaagctaaaaaagttgagctcataagagtgtggttattagaggccgggaaagggagtgggaggggaggatagggagatgttggttaaaagataaaaaattacacacaggaggaataaattatagtgttctatagaactgtaactagtcaacaataatttactgtatattttcaaatagctagaagacagaattttgaatgttcctaacacaaagaaatgacaaatgtttgaggtgatccatatgctaattatcctgatttgatcatcacacactgcatacatgaaaatatcactctgtatcccataaatatgtacaattattatatattaaaaatttttttaaagggaaacttctgaacacttaaaaaaaatttaagggctaaagacatttaatattagatctattttcacttaaaacgtgcaggggcccaagtattactattactaccaatatacatacatacatacatacatatatgtatgtatattggtagtaatagtgtgtgtgtgtgtgtgtgtgtgtgtgtgtgtgtgtatatattttttttttttttttttttttaagacagagtcttgctctgttgcccaggctgaagtgcacgtgcactggtgtgatctcggctcactgcaacctccatctcacaggctcaagcaattcttgtgcctcagcctcccaagtagctgggattacaggtgtgcgacaccatgcccagctaatttttgtatttgtagtgcagatagggtttcgccatattggccggctggtcttaaactcctgggcctcaagtgatccgcctgccttagcctcccaaagtgctgggattacaggtgaagtattactagcaatattcttaatactcagacgctacagttagatttattacatgttataaaaattgaatgaaaaattaagagagagtaaaaaagagaaagaaacgagtgtggtgaatgaacaggggaaaatcaggtagaataagaaataggaagggggaagaaaaaaatggtaaacaaccacttgggaatgtttacaaatcagatttttttaatctgaagaattcttgtctataagtagatatatatacctatgtagaaatacatatatcacacataggcaaaaatgaaacaaaccaaataattctaagatacaatataaggaaataggatttttaaaaaaagaataacgggaggacaatcaaaggacttcagagaatatgagattgaagctaaggctggaaatatgaagatagctatggaaggtcaggggaaaaggctgagatgaaaaggtacagggagaaggaaaataactggaaagactagaagaggcagaagcttagcattttgaagaactgaagaaagaccagtatgactgaatctcaagaaacaaggagagaaggtgactagtgctgatgtaggaggtagccctgtgctaaattatgctgggccttgtaggtcatggtaaaaaaaaaaacacaaggtccttataaagtgtaaacagaagtgacacaatcaagtctatttttaagatcactctgagggattgagaataaattggaaggcagacaggagtggaagcagtaaaaacattccatatgaatcattcccaaatgactgagttcccatctatttctttcctctcccattcctacttcatatcccagtcatttagccccctcccgcacctttgccccagatttcagcaaacaacgaagaattaggaaaaggaaaaatgcagcttttttgacgctgtgtacattgggtattttattagaaactttcatgttactgctacgtaaacactgcttcgaaataatacataagttaaaaacttgtcaagcaagttcttcatcagctgtactcctagaattaaacacacatcacatacatacaagtcaacaacccccacaaaatgtttaatttaactgaccttaaaatttggagaaaagtatcggttggctttgtctttatttgctttgtcaagatcattttttgttaaagtaagtactagatattccttgtcattatctgcacgctctatactgcaaatgctatcgatttcttgatcacatagacttccattttctactttttctgaggtttcctctggtcctggtatgaagaatgtatttacccaaaagtgaaacattttgtcctaaaaaaaaaaaaaaagaaaagaaaaagaaatgaaatgacatatttaattaatgatgttttatttttttaaaaaagaaaatctgtcacctatgttaaacatttgcaaaaagtcaacaaaataaactatcatttgatattctgaataaaggtaaacacaaagactattataaggcaatctgagttatctgttgcattttcattcacatgatttttcttcactcaaattctcaaattttaaaccaaaaatacaatctcacaagatctaagataaactacttttgccttaaaattttaagtaaaaaaacctcttttctcatctaatactagctttaaatacgtttttagtttacgtgtacatacatataaacaaaattcagatatggatttaattttttctacatttcaaatgagctacctattccaagatttactttaacaaaagttcttggacggtgagtgcaacttccctgatgacgcatggcaaatacatgtttacttctacagcaatacaaacatgagaagctccagtttcttacatgacaatataatgcttgaatactttcagaataaatatgagggggtaggaaagagtactactgatttcttttgatgttataaaatgcttgttcttaaaaaaaatcacttcttactaataagataataccttcttaataaaaaaacacaacagaagttcatcactttaaacctctattgaccaacaaagaaatctggcctgtataaatcatttggcaattaatgatatacagccttgtgacatcttatctggtacct

SEQ ID NO: 149 - DNA, 15 bp, Homo sapiens
caggctccgcgcgcc

SEQ ID NO: 150 - DNA, 15 bp, Homo sapiens
ccaggctccgcgcgc

SEQ ID NO: 151 - DNA, 15 bp, Homo sapiens
gccaggctccgcgcg

SEQ ID NO: 152 - DNA, 15 bp, Homo sapiens
ggccaggctccgcgc

SEQ ID NO: 153 - DNA, 15 bp, Homo sapiens
gggccaggctccgcg

SEQ ID NO: 154 - DNA, 15 bp, Homo sapiens
ggggccaggctccgc

SEQ ID NO: 155 - DNA, 15 bp, Homo sapiens
cggggccaggctccg

SEQ ID NO: 156 - DNA, 15 bp, Homo sapiens
ccggggccaggctcc

SEQ ID NO: 157 - DNA, 15 bp, Homo sapiens
cccggggccaggctc

SEQ ID NO: 158 - DNA, 15 bp, Homo sapiens
gcccggggccaggct

SEQ ID NO: 159 - DNA, 15 bp, Homo sapiens
cgcccggggccaggc

SEQ ID NO: 160 - DNA, 15 bp, Homo sapiens
tcgcccggggccagg

SEQ ID NO: 161 - DNA, 15 bp, Homo sapiens
atcgcccggggccag

SEQ ID NO: 162 - DNA, 15 bp, Homo sapiens
gatcgcccggggcca

SEQ ID NO: 163 - DNA, 15 bp, Homo sapiens
ggatcgcccggggcc

SEQ ID NO: 164 - DNA, 15 bp, Homo sapiens
tggatcgcccggggc

SEQ ID NO: 165 - DNA, 15 bp, Homo sapiens
atggatcgcccgggg

SEQ ID NO: 166 - DNA, 15 bp, Homo sapiens
gatggatcgcccggg

SEQ ID NO: 167 - DNA, 15 bp, Homo sapiens
ggatggatcgcccgg

SEQ ID NO: 168 - DNA, 15 bp, Homo sapiens
aggatggatcgcccg

SEQ ID NO: 169 - DNA, 15 bp, Homo sapiens
caggatggatcgccc

SEQ ID NO: 170 - DNA, 15 bp, Homo sapiens
gcaggatggatcgcc

SEQ ID NO: 171 - DNA, 15 bp, Homo sapiens
ggcaggatggatcgc

SEQ ID NO: 172 - DNA, 15 bp, Homo sapiens
cggcaggatggatcg

SEQ ID NO: 173 - DNA, 15 bp, Homo sapiens
ccggcaggatggatc

SEQ ID NO: 174 - DNA, 15 bp, Homo sapiens
cccggcaggatggat

SEQ ID NO: 175 - DNA, 15 bp, Homo sapiens
acccggcaggatgga

SEQ ID NO: 176 - DNA, 15 bp, Homo sapiens
aacccggcaggatgg

SEQ ID NO: 177 - DNA, 15 bp, Homo sapiens
aaacccggcaggatg

SEQ ID NO: 178 - DNA, 15 bp, Homo sapiens
aaaacccggcaggat

SEQ ID NO: 179 - DNA, 15 bp, Homo sapiens
gaaaacccggcagga

SEQ ID NO: 180 - DNA, 15 bp, Homo sapiens
tgaaaacccggcagg

SEQ ID NO: 181 - DNA, 15 bp, Homo sapiens
gtgaaaacccggcag

SEQ ID NO: 182 - DNA, 15 bp, Homo sapiens
cgtgaaaacccggca

SEQ ID NO: 183 - DNA, 15 bp, Homo sapiens
ccgtgaaaacccggc

SEQ ID NO: 184 - DNA, 15 bp, Homo sapiens
gccgtgaaaacccgg

SEQ ID NO: 185 - DNA, 15 bp, Homo sapiens
cgccgtgaaaacccg

SEQ ID NO: 186 - DNA, 15 bp, Homo sapiens
ccgccgtgaaaaccc

SEQ ID NO: 187 - DNA, 15 bp, Homo sapiens
gccgccgtgaaaacc

SEQ ID NO: 188 - DNA, 15 bp, Homo sapiens
ggccgccgtgaaaac

SEQ ID NO: 189 - DNA, 15 bp, Homo sapiens
tggccgccgtgaaaa

SEQ ID NO: 190 - DNA, 15 bp, Homo sapiens
ttggccgccgtgaaa

SEQ ID NO: 191 - DNA, 15 bp, Homo sapiens
cttggccgccgtgaa

SEQ ID NO: 192 - DNA, 15 bp, Homo sapiens
ccttggccgccgtga

SEQ ID NO: 193 - DNA, 15 bp, Homo sapiens
cccttggccgccgtg

SEQ ID NO: 194 - DNA, 15 bp, Homo sapiens
ccccttggccgccgt

SEQ ID NO: 195 - DNA, 15 bp, Homo sapiens
cccccttggccgccg

SEQ ID NO: 196 - DNA, 15 bp, Homo sapiens
ccccccttggccgcc

SEQ ID NO: 197 - DNA, 15 bp, Homo sapiens
cccccccttggccgc

SEQ ID NO: 198 - DNA, 15 bp, Homo sapiens
gcccccccttggccg

SEQ ID NO: 199 - DNA, 15 bp, Homo sapiens
cgcccccccttggcc

SEQ ID NO: 200 - DNA, 15 bp, Homo sapiens
ccgcccccccttggc

SEQ ID NO: 201 - DNA, 15 bp, Homo sapiens
cccgcccccccttgg

SEQ ID NO: 202 - DNA, 15 bp, Homo sapiens
ccccgcccccccttg

SEQ ID NO: 203 - DNA, 15 bp, Homo sapiens
gccccgccccccctt

SEQ ID NO: 204 - DNA, 15 bp, Homo sapiens
agccccgccccccct

SEQ ID NO: 205 - DNA, 15 bp, Homo sapiens
tagccccgccccccc

SEQ ID NO: 206 - DNA, 15 bp, Homo sapiens
ctagccccgcccccc

SEQ ID NO: 207 - DNA, 15 bp, Homo sapiens
cctagccccgccccc

SEQ ID NO: 208 - DNA, 15 bp, Homo sapiens
acctagccccgcccc

SEQ ID NO: 209 - DNA, 15 bp, Homo sapiens
cacctagccccgccc

SEQ ID NO: 210 - DNA, 15 bp, Homo sapiens
ccacctagccccgcc

SEQ ID NO: 211 - DNA, 15 bp, Homo sapiens
accacctagccccgc

SEQ ID NO: 212 - DNA, 15 bp, Homo sapiens
gaccacctagccccg

SEQ ID NO: 213 - DNA, 15 bp, Homo sapiens
agaccacctagcccc

SEQ ID NO: 214 - DNA, 15 bp, Homo sapiens
gagaccacctagccc

SEQ ID NO: 215 - DNA, 15 bp, Homo sapiens
agagaccacctagcc

SEQ ID NO: 216 - DNA, 15 bp, Homo sapiens
cagagaccacctagc

SEQ ID NO: 217 - DNA, 15 bp, Homo sapiens
tcagagaccacctag

SEQ ID NO: 218 - DNA, 15 bp, Homo sapiens
ctcagagaccaccta

SEQ ID NO: 219 - DNA, 15 bp, Homo sapiens
tctcagagaccacct

SEQ ID NO: 220 - DNA, 15 bp, Homo sapiens
ttctcagagaccacc

SEQ ID NO: 221 - DNA, 15 bp, Homo sapiens
gttctcagagaccac

SEQ ID NO: 222 - DNA, 15 bp, Homo sapiens
ggttctcagagacca

SEQ ID NO: 223 - DNA, 15 bp, Homo sapiens
cggttctcagagacc

SEQ ID NO: 224 - DNA, 15 bp, Homo sapiens
tcggttctcagagac

SEQ ID NO: 225 - DNA, 15 bp, Homo sapiens
ctcggttctcagaga

SEQ ID NO: 226 - DNA, 15 bp, Homo sapiens
gctcggttctcagag

SEQ ID NO: 227 - DNA, 15 bp, Homo sapiens
agctcggttctcaga

SEQ ID NO: 228 - DNA, 15 bp, Homo sapiens
aagctcggttctcag

SEQ ID NO: 229 - DNA, 15 bp, Homo sapiens
caagctcggttctca

SEQ ID NO: 230 - DNA, 15 bp, Homo sapiens
tcaagctcggttctc

SEQ ID NO: 231 - DNA, 15 bp, Homo sapiens
gtcaagctcggttct

SEQ ID NO: 232 - DNA, 15 bp, Homo sapiens
agtcaagctcggttc

SEQ ID NO: 233 - DNA, 15 bp, Homo sapiens
gagtcaagctcggtt

SEQ ID NO: 234 - DNA, 15 bp, Homo sapiens
ggagtcaagctcggt

SEQ ID NO: 235 - DNA, 15 bp, Homo sapiens
cggagtcaagctcgg

SEQ ID NO: 236 - DNA, 15 bp, Homo sapiens
tcggagtcaagctcg

SEQ ID NO: 237 - DNA, 15 bp, Homo sapiens
gtcggagtcaagctc

SEQ ID NO: 238 - DNA, 15 bp, Homo sapiens
cgtcggagtcaagct

SEQ ID NO: 239 - DNA, 15 bp, Homo sapiens
gcgtcggagtcaagc

SEQ ID NO: 240 - DNA, 15 bp, Homo sapiens
ggcgtcggagtcaag

SEQ ID NO: 241 - DNA, 15 bp, Homo sapiens
cggcgtcggagtcaa

SEQ ID NO: 242 - DNA, 15 bp, Homo sapiens
gcggcgtcggagtca

SEQ ID NO: 243 - DNA, 15 bp, Homo sapiens
cgcggcgtcggagtc

SEQ ID NO: 244 - DNA, 15 bp, Homo sapiens
tcgcggcgtcggagt

SEQ ID NO: 245 - DNA, 15 bp, Homo sapiens
ttcgcggcgtcggag

SEQ ID NO: 246 - DNA, 15 bp, Homo sapiens
gttcgcggcgtcgga

SEQ ID NO: 247 - DNA, 15 bp, Homo sapiens
ggttcgcggcgtcgg

SEQ ID NO: 248 - DNA, 15 bp, Homo sapiens
cggttcgcggcgtcg

SEQ ID NO: 249 - DNA, 15 bp, Homo sapiens
tcggttcgcggcgtc

SEQ ID NO: 250 - DNA, 15 bp, Homo sapiens
gtcggttcgcggcgt

SEQ ID NO: 251 - DNA, 15 bp, Homo sapiens
ggtcggttcgcggcg

SEQ ID NO: 252 - DNA, 15 bp, Homo sapiens
aggtcggttcgcggc

SEQ ID NO: 253 - DNA, 15 bp, Homo sapiens
caggtcggttcgcgg

SEQ ID NO: 254 - DNA, 15 bp, Homo sapiens
ccaggtcggttcgcg

SEQ ID NO: 255 - DNA, 15 bp, Homo sapiens
tccaggtcggttcgc

SEQ ID NO: 256 - DNA, 15 bp, Homo sapiens
ctccaggtcggttcg

SEQ ID NO: 257 - DNA, 15 bp, Homo sapiens
gctccaggtcggttc

SEQ ID NO: 258 - DNA, 15 bp, Homo sapiens
ggctccaggtcggtt

SEQ ID NO: 259 - DNA, 15 bp, Homo sapiens
gggctccaggtcggt

SEQ ID NO: 260 - DNA, 15 bp, Homo sapiens
cgggctccaggtcgg

SEQ ID NO: 261 - DNA, 15 bp, Homo sapiens
tcgggctccaggtcg

SEQ ID NO: 262 - DNA, 15 bp, Homo sapiens
ctcgggctccaggtc

SEQ ID NO: 263 - DNA, 15 bp, Homo sapiens
cctcgggctccaggt

SEQ ID NO: 264 - DNA, 15 bp, Homo sapiens
ccctcgggctccagg

SEQ ID NO: 265 - DNA, 15 bp, Homo sapiens
cccctcgggctccag

SEQ ID NO: 266 - DNA, 15 bp, Homo sapiens
tcccctcgggctcca

SEQ ID NO: 267 - DNA, 15 bp, Homo sapiens
ttcccctcgggctcc

SEQ ID NO: 268 - DNA, 15 bp, Homo sapiens
tttcccctcgggctc

SEQ ID NO: 269 - DNA, 15 bp, Homo sapiens
ctttcccctcgggct

SEQ ID NO: 270 - DNA, 15 bp, Homo sapiens
tctttcccctcgggc

SEQ ID NO: 271 - DNA, 15 bp, Homo sapiens
atctttcccctcggg

SEQ ID NO: 272 - DNA, 15 bp, Homo sapiens
catctttcccctcgg

SEQ ID NO: 273 - DNA, 15 bp, Homo sapiens
gcatctttcccctcg

SEQ ID NO: 274 - DNA, 15 bp, Homo sapiens
agcatctttcccctc

SEQ ID NO: 275 - DNA, 15 bp, Homo sapiens
gagcatctttcccct

SEQ ID NO: 276 - DNA, 15 bp, Homo sapiens
cgagcatctttcccc

SEQ ID NO: 277 - DNA, 15 bp, Homo sapiens
tcgagcatctttccc

SEQ ID NO: 278 - DNA, 15 bp, Homo sapiens
gtcgagcatctttcc

SEQ ID NO: 279 - DNA, 15 bp, Homo sapiens
agtcgagcatctttc

SEQ ID NO: 280 - DNA, 15 bp, Homo sapiens
gagtcgagcatcttt

SEQ ID NO: 281 - DNA, 15 bp, Homo sapiens
agagtcgagcatctt

SEQ ID NO: 282 - DNA, 15 bp, Homo sapiens
gagagtcgagcatct

SEQ ID NO: 283 - DNA, 15 bp, Homo sapiens
agagagtcgagcatc

SEQ ID NO: 284 - DNA, 15 bp, Homo sapiens
aagagagtcgagcat

SEQ ID NO: 285 - DNA, 15 bp, Homo sapiens
caagagagtcgagca

SEQ ID NO: 286 - DNA, 15 bp, Homo sapiens
ccaagagagtcgagc

SEQ ID NO: 287 - DNA, 15 bp, Homo sapiens
cccaagagagtcgag

SEQ ID NO: 288 - DNA, 15 bp, Homo sapiens
ccccaagagagtcga

SEQ ID NO: 289 - DNA, 15 bp, Homo sapiens
cccccaagagagtcg

SEQ ID NO: 290 - DNA, 15 bp, Homo sapiens
gcccccaagagagtc

SEQ ID NO: 291 - DNA, 15 bp, Homo sapiens
tgcccccaagagagt

SEQ ID NO: 292 - DNA, 15 bp, Homo sapiens
gtgcccccaagagag

SEQ ID NO: 293 - DNA, 15 bp, Homo sapiens
ggtgcccccaagaga

SEQ ID NO: 294 - DNA, 15 bp, Homo sapiens
cggtgcccccaagag

SEQ ID NO: 295 - DNA, 15 bp, Homo sapiens
ccggtgcccccaaga

SEQ ID NO: 296 - DNA, 15 bp, Homo sapiens
tccggtgcccccaag

SEQ ID NO: 297 - DNA, 15 bp, Homo sapiens
ctccggtgcccccaa

SEQ ID NO: 298 - DNA, 15 bp, Homo sapiens
gctccggtgccccca

SEQ ID NO: 299 - DNA, 15 bp, Homo sapiens
cgctccggtgccccc

SEQ ID NO: 300 - DNA, 15 bp, Homo sapiens
ccgctccggtgcccc

SEQ ID NO: 301 - DNA, 15 bp, Homo sapiens
cccgctccggtgccc

SEQ ID NO: 302 - DNA, 15 bp, Homo sapiens
gcccgctccggtgcc

SEQ ID NO: 303 - DNA, 15 bp, Homo sapiens
cgcccgctccggtgc

SEQ ID NO: 304 - DNA, 15 bp, Homo sapiens
gcgcccgctccggtg

SEQ ID NO: 305 - DNA, 15 bp, Homo sapiens
tgcgcccgctccggt

SEQ ID NO: 306 - DNA, 15 bp, Homo sapiens
ctgcgcccgctccgg

SEQ ID NO: 307 - DNA, 15 bp, Homo sapiens
cctgcgcccgctccg

SEQ ID NO: 308 - DNA, 15 bp, Homo sapiens
tcctgcgcccgctcc

SEQ ID NO: 309 - DNA, 15 bp, Homo sapiens
ctcctgcgcccgctc

SEQ ID NO: 310 - DNA, 15 bp, Homo sapiens
tctcctgcgcccgct

SEQ ID NO: 311 - DNA, 15 bp, Homo sapiens
ctctcctgcgcccgc

SEQ ID NO: 312 - DNA, 15 bp, Homo sapiens
cctctcctgcgcccg

SEQ ID NO: 313 - DNA, 15 bp, Homo sapiens
gcctctcctgcgccc

SEQ ID NO: 314 - DNA, 15 bp, Homo sapiens
ggcctctcctgcgcc

SEQ ID NO: 315 - DNA, 15 bp, Homo sapiens
aggcctctcctgcgc

SEQ ID NO: 316 - DNA, 15 bp, Homo sapiens
caggcctctcctgcg

SEQ ID NO: 317 - DNA, 15 bp, Homo sapiens
gcaggcctctcctgc

SEQ ID NO: 318 - DNA, 15 bp, Homo sapiens
cgcaggcctctcctg

SEQ ID NO: 319 - DNA, 15 bp, Homo sapiens
ccgcaggcctctcct

SEQ ID NO: 320 - DNA, 15 bp, Homo sapiens
cccgcaggcctctcc

SEQ ID NO: 321 - DNA, 15 bp, Homo sapiens
ccccgcaggcctctc

SEQ ID NO: 322 - DNA, 15 bp, Homo sapiens
accccgcaggcctct

SEQ ID NO: 323 - DNA, 15 bp, Homo sapiens
caccccgcaggcctc

SEQ ID NO: 324 - DNA, 15 bp, Homo sapiens
gcaccccgcaggcct

SEQ ID NO: 325 - DNA, 15 bp, Homo sapiens
cgcaccccgcaggcc

SEQ ID NO: 326 - DNA, 15 bp, Homo sapiens
acgcaccccgcaggc

SEQ ID NO: 327 - DNA, 15 bp, Homo sapiens
gacgcaccccgcagg

SEQ ID NO: 328 - DNA, 15 bp, Homo sapiens
ggacgcaccccgcag

SEQ ID NO: 329 - DNA, 15 bp, Homo sapiens
gggacgcaccccgca

SEQ ID NO: 330 - DNA, 15 bp, Homo sapiens
tgggacgcaccccgc

SEQ ID NO: 331 - DNA, 15 bp, Homo sapiens
gtgggacgcaccccg

SEQ ID NO: 332 - DNA, 15 bp, Homo sapiens
agtgggacgcacccc

SEQ ID NO: 333 - DNA, 15 bp, Homo sapiens
gagtgggacgcaccc

SEQ ID NO: 334 - DNA, 15 bp, Homo sapiens
tgagtgggacgcacc

SEQ ID NO: 335 - DNA, 15 bp, Homo sapiens
gtgagtgggacgcac

SEQ ID NO: 336 - DNA, 15 bp, Homo sapiens
tgtgagtgggacgca

SEQ ID NO: 337 - DNA, 15 bp, Homo sapiens
ctgtgagtgggacgc

SEQ ID NO: 338 - DNA, 15 bp, Homo sapiens
cctgtgagtgggacg

SEQ ID NO: 339 - DNA, 15 bp, Homo sapiens
ccctgtgagtgggac

SEQ ID NO: 340 - DNA, 15 bp, Homo sapiens
tccctgtgagtggga

SEQ ID NO: 341 - DNA, 15 bp, Homo sapiens
atccctgtgagtggg

SEQ ID NO: 342 - DNA, 15 bp, Homo sapiens
gatccctgtgagtgg

SEQ ID NO: 343 - DNA, 15 bp, Homo sapiens
ggatccctgtgagtg

SEQ ID NO: 344 - DNA, 15 bp, Homo sapiens
aggatccctgtgagt

SEQ ID NO: 345 - DNA, 15 bp, Homo sapiens
gaggatccctgtgag

SEQ ID NO: 346 - DNA, 15 bp, Homo sapiens
agaggatccctgtga

SEQ ID NO: 347 - DNA, 15 bp, Homo sapiens
aagaggatccctgtg

SEQ ID NO: 348 - DNA, 15 bp, Homo sapiens
aaagaggatccctgt

SEQ ID NO: 349 - DNA, 15 bp, Homo sapiens
gaaagaggatccctg

SEQ ID NO: 350 - DNA, 15 bp, Homo sapiens
tgaaagaggatccct

SEQ ID NO: 351 - DNA, 15 bp, Homo sapiens
ctgaaagaggatccc

SEQ ID NO: 352 - DNA, 15 bp, Homo sapiens
actgaaagaggatcc

SEQ ID NO: 353 - DNA, 15 bp, Homo sapiens
aactgaaagaggatc

SEQ ID NO: 354 - DNA, 15 bp, Homo sapiens
gaactgaaagaggat

SEQ ID NO: 355 - DNA, 15 bp, Homo sapiens
tgaactgaaagagga

SEQ ID NO: 356 - DNA, 15 bp, Homo sapiens
atgaactgaaagagg

SEQ ID NO: 357 - DNA, 15 bp, Homo sapiens
aatgaactgaaagag

SEQ ID NO: 358 - DNA, 15 bp, Homo sapiens
aaatgaactgaaaga

SEQ ID NO: 359 - DNA, 15 bp, Homo sapiens
taaatgaactgaaag

SEQ ID NO: 360 - DNA, 15 bp, Homo sapiens
ctaaatgaactgaaa

SEQ ID NO: 361 - DNA, 15 bp, Homo sapiens
tctaaatgaactgaa

SEQ ID NO: 362 - DNA, 15 bp, Homo sapiens
atctaaatgaactga

SEQ ID NO: 363 - DNA, 15 bp, Homo sapiens
tatctaaatgaactg

SEQ ID NO: 364 - DNA, 15 bp, Homo sapiens
ctatctaaatgaact

SEQ ID NO: 365 - DNA, 15 bp, Homo sapiens
cctatctaaatgaac

SEQ ID NO: 366 - DNA, 15 bp, Homo sapiens
acctatctaaatgaa

SEQ ID NO: 367 - DNA, 15 bp, Homo sapiens
cacctatctaaatga

SEQ ID NO: 368 - DNA, 15 bp, Homo sapiens
gcacctatctaaatg

SEQ ID NO: 369 - DNA, 15 bp, Homo sapiens
ggcacctatctaaat

SEQ ID NO: 370 - DNA, 15 bp, Homo sapiens
gggcacctatctaaa

SEQ ID NO: 371 - DNA, 15 bp, Homo sapiens
agggcacctatctaa

SEQ ID NO: 372 - DNA, 15 bp, Homo sapiens
aagggcacctatcta

SEQ ID NO: 373 - DNA, 15 bp, Homo sapiens
aaagggcacctatct

SEQ ID NO: 374 - DNA, 15 bp, Homo sapiens
caaagggcacctatc

SEQ ID NO: 375 - DNA, 15 bp, Homo sapiens
ccaaagggcacctat

SEQ ID NO: 376 - DNA, 15 bp, Homo sapiens
cccaaagggcaccta

SEQ ID NO: 377 - DNA, 15 bp, Homo sapiens
gcccaaagggcacct

SEQ ID NO: 378 - DNA, 15 bp, Homo sapiens
ggcccaaagggcacc

SEQ ID NO: 379 - DNA, 15 bp, Homo sapiens
gggcccaaagggcac

SEQ ID NO: 380 - DNA, 15 bp, Homo sapiens
agggcccaaagggca

SEQ ID NO: 381 - DNA, 15 bp, Homo sapiens
aagggcccaaagggc

SEQ ID NO: 382 - DNA, 15 bp, Homo sapiens
caagggcccaaaggg

SEQ ID NO: 383 - DNA, 15 bp, Homo sapiens
tcaagggcccaaagg

SEQ ID NO: 384 - DNA, 15 bp, Homo sapiens
ttcaagggcccaaag

SEQ ID NO: 385 - DNA, 15 bp, Homo sapiens
tttcaagggcccaaa

SEQ ID NO: 386 - DNA, 15 bp, Homo sapiens
atttcaagggcccaa

SEQ ID NO: 387 - DNA, 15 bp, Homo sapiens
aatttcaagggccca

SEQ ID NO: 388 - DNA, 15 bp, Homo sapiens
gaatttcaagggccc

SEQ ID NO: 389 - DNA, 15 bp, Homo sapiens
tgaatttcaagggcc

SEQ ID NO: 390 - DNA, 15 bp, Homo sapiens
ttgaatttcaagggc

SEQ ID NO: 391 - DNA, 15 bp, Homo sapiens
gttgaatttcaaggg

SEQ ID NO: 392 - DNA, 15 bp, Homo sapiens
cgttgaatttcaagg

SEQ ID NO: 393 - DNA, 15 bp, Homo sapiens
ccgttgaatttcaag

SEQ ID NO: 394 - DNA, 15 bp, Homo sapiens
gccgttgaatttcaa

SEQ ID NO: 395 - DNA, 15 bp, Homo sapiens
agccgttgaatttca

SEQ ID NO: 396 - DNA, 15 bp, Homo sapiens
tagccgttgaatttc

SEQ ID NO: 397 - DNA, 15 bp, Homo sapiens
atagccgttgaattt

SEQ ID NO: 398 - DNA, 15 bp, Homo sapiens
catagccgttgaatt

SEQ ID NO: 399 - DNA, 15 bp, Homo sapiens
acatagccgttgaat

SEQ ID NO: 400 - DNA, 15 bp, Homo sapiens
cacatagccgttgaa

SEQ ID NO: 401 - DNA, 15 bp, Homo sapiens
acacatagccgttga

SEQ ID NO: 402 - DNA, 15 bp, Homo sapiens
aacacatagccgttg

SEQ ID NO: 403 - DNA, 15 bp, Homo sapiens
gaacacatagccgtt

SEQ ID NO: 404 - DNA, 15 bp, Homo sapiens
tgaacacatagccgt

SEQ ID NO: 405 - DNA, 15 bp, Homo sapiens
gtgaacacatagccg

SEQ ID NO: 406 - DNA, 15 bp, Homo sapiens
cgtgaacacatagcc

SEQ ID NO: 407 - DNA, 15 bp, Homo sapiens
acgtgaacacatagc

SEQ ID NO: 408 - DNA, 15 bp, Homo sapiens
aacgtgaacacatag

SEQ ID NO: 409 - DNA, 15 bp, Homo sapiens
gaacgtgaacacata

SEQ ID NO: 410 - DNA, 15 bp, Homo sapiens
tgaacgtgaacacat

SEQ ID NO: 411 - DNA, 15 bp, Homo sapiens
ctgaacgtgaacaca

SEQ ID NO: 412 - DNA, 15 bp, Homo sapiens
gctgaacgtgaacac

SEQ ID NO: 413 - DNA, 15 bp, Homo sapiens
tgctgaacgtgaaca

SEQ ID NO: 414 - DNA, 15 bp, Homo sapiens
gtgctgaacgtgaac

SEQ ID NO: 415 - DNA, 15 bp, Homo sapiens
cgtgctgaacgtgaa

SEQ ID NO: 416 - DNA, 15 bp, Homo sapiens
gcgtgctgaacgtga

SEQ ID NO: 417 - DNA, 15 bp, Homo sapiens
agcgtgctgaacgtg

SEQ ID NO: 418 - DNA, 15 bp, Homo sapiens
gagcgtgctgaacgt

SEQ ID NO: 419 - DNA, 15 bp, Homo sapiens
cgagcgtgctgaacg

SEQ ID NO: 420 - DNA, 15 bp, Homo sapiens
ccgagcgtgctgaac

SEQ ID NO: 421 - DNA, 15 bp, Homo sapiens
gccgagcgtgctgaa

SEQ ID NO: 422 - DNA, 15 bp, Homo sapiens
agccgagcgtgctga

SEQ ID NO: 423 - DNA, 15 bp, Homo sapiens
cagccgagcgtgctg

SEQ ID NO: 424 - DNA, 15 bp, Homo sapiens
tcagccgagcgtgct

SEQ ID NO: 425 - DNA, 15 bp, Homo sapiens
ctcagccgagcgtgc

SEQ ID NO: 426 - DNA, 15 bp, Homo sapiens
tctcagccgagcgtg

SEQ ID NO: 427 - DNA, 15 bp, Homo sapiens
ctctcagccgagcgt

SEQ ID NO: 428 - DNA, 15 bp, Homo sapiens
gctctcagccgagcg

SEQ ID NO: 429 - DNA, 15 bp, Homo sapiens
agctctcagccgagc

SEQ ID NO: 430 - DNA, 15 bp, Homo sapiens
aagctctcagccgag

SEQ ID NO: 431 - DNA, 15 bp, Homo sapiens
aaagctctcagccga

SEQ ID NO: 432 - DNA, 15 bp, Homo sapiens
gaaagctctcagccg

SEQ ID NO: 433 - DNA, 15 bp, Homo sapiens
tgaaagctctcagcc

SEQ ID NO: 434 - DNA, 15 bp, Homo sapiens
atgaaagctctcagc

SEQ ID NO: 435 - DNA, 15 bp, Homo sapiens
aatgaaagctctcag

SEQ ID NO: 436 - DNA, 15 bp, Homo sapiens
aaatgaaagctctca

SEQ ID NO: 437 - DNA, 15 bp, Homo sapiens
aaaatgaaagctctc

SEQ ID NO: 438 - DNA, 15 bp, Homo sapiens
aaaaatgaaagctct

SEQ ID NO: 439 - DNA, 15 bp, Homo sapiens
taaaaatgaaagctc

SEQ ID NO: 440 - DNA, 15 bp, Homo sapiens
ctaaaaatgaaagct

SEQ ID NO: 441 - DNA, 15 bp, Homo sapiens
cctaaaaatgaaagc

SEQ ID NO: 442 - DNA, 15 bp, Homo sapiens
ccctaaaaatgaaag

SEQ ID NO: 443 - DNA, 15 bp, Homo sapiens
gccctaaaaatgaaa

SEQ ID NO: 444 - DNA, 15 bp, Homo sapiens
tgccctaaaaatgaa

SEQ ID NO: 445 - DNA, 15 bp, Homo sapiens
ttgccctaaaaatga

SEQ ID NO: 446 - DNA, 15 bp, Homo sapiens
tttgccctaaaaatg

SEQ ID NO: 447 - DNA, 15 bp, Homo sapiens
gtttgccctaaaaat

SEQ ID NO: 448 - DNA, 15 bp, Homo sapiens
cgtttgccctaaaaa

SEQ ID NO: 449 - DNA, 15 bp, Homo sapiens
tcgtttgccctaaaa

SEQ ID NO: 450 - DNA, 15 bp, Homo sapiens
ctcgtttgccctaaa

SEQ ID NO: 451 - DNA, 15 bp, Homo sapiens
gctcgtttgccctaa

SEQ ID NO: 452 - DNA, 15 bp, Homo sapiens
ggctcgtttgcccta

SEQ ID NO: 453 - DNA, 15 bp, Homo sapiens
cggctcgtttgccct

SEQ ID NO: 454 - DNA, 15 bp, Homo sapiens
tcggctcgtttgccc

SEQ ID NO: 455 - DNA, 15 bp, Homo sapiens
ctcggctcgtttgcc

SEQ ID NO: 456 - DNA, 15 bp, Homo sapiens
actcggctcgtttgc

SEQ ID NO: 457 - DNA, 15 bp, Homo sapiens
aactcggctcgtttg

SEQ ID NO: 458 - DNA, 15 bp, Homo sapiens
taactcggctcgttt

SEQ ID NO: 459 - DNA, 15 bp, Homo sapiens
gtaactcggctcgtt

SEQ ID NO: 460 - DNA, 15 bp, Homo sapiens
ggtaactcggctcgt

SEQ ID NO: 461 - DNA, 15 bp, Homo sapiens
cggtaactcggctcg

SEQ ID NO: 462 - DNA, 15 bp, Homo sapiens
ccggtaactcggctc

SEQ ID NO: 463 - DNA, 15 bp, Homo sapiens
cccggtaactcggct

SEQ ID NO: 464 - DNA, 15 bp, Homo sapiens
ccccggtaactcggc

SEQ ID NO: 465 - DNA, 15 bp, Homo sapiens
tccccggtaactcgg

SEQ ID NO: 466 - DNA, 15 bp, Homo sapiens
ttccccggtaactcg

SEQ ID NO: 467 - DNA, 15 bp, Homo sapiens
cttccccggtaactc

SEQ ID NO: 468 - DNA, 15 bp, Homo sapiens
gcttccccggtaact

SEQ ID NO: 469 - DNA, 15 bp, Homo sapiens
cgcttccccggtaac

SEQ ID NO: 470 - DNA, 15 bp, Homo sapiens
tcgcttccccggtaa

SEQ ID NO: 471 - DNA, 15 bp, Homo sapiens
ctcgcttccccggta

SEQ ID NO: 472 - DNA, 15 bp, Homo sapiens
tctcgcttccccggt

SEQ ID NO: 473 - DNA, 15 bp, Homo sapiens
ctctcgcttccccgg

SEQ ID NO: 474 - DNA, 15 bp, Homo sapiens
cctctcgcttccccg

SEQ ID NO: 475 - DNA, 15 bp, Homo sapiens
acctctcgcttcccc

SEQ ID NO: 476 - DNA, 15 bp, Homo sapiens
cacctctcgcttccc

SEQ ID NO: 477 - DNA, 15 bp, Homo sapiens
ccacctctcgcttcc

SEQ ID NO: 478 - DNA, 15 bp, Homo sapiens
cccacctctcgcttc

SEQ ID NO: 479 - DNA, 15 bp, Homo sapiens
ccccacctctcgctt

SEQ ID NO: 480 - DNA, 15 bp, Homo sapiens
gccccacctctcgct

SEQ ID NO: 481 - DNA, 15 bp, Homo sapiens
cgccccacctctcgc

SEQ ID NO: 482 - DNA, 15 bp, Homo sapiens
gcgccccacctctcg

SEQ ID NO: 483 - DNA, 15 bp, Homo sapiens
agcgccccacctctc

SEQ ID NO: 484 - DNA, 15 bp, Homo sapiens
cagcgccccacctct

SEQ ID NO: 485 - DNA, 15 bp, Homo sapiens
gcagcgccccacctc

SEQ ID NO: 486 - DNA, 15 bp, Homo sapiens
tgcagcgccccacct

SEQ ID NO: 487 - DNA, 15 bp, Homo sapiens
ttgcagcgccccacc

SEQ ID NO: 488 - DNA, 15 bp, Homo sapiens
cttgcagcgccccac

SEQ ID NO: 489 - DNA, 15 bp, Homo sapiens
ccttgcagcgcccca

SEQ ID NO: 490 - DNA, 15 bp, Homo sapiens
cccttgcagcgcccc

SEQ ID NO: 491 - DNA, 15 bp, Homo sapiens
tcccttgcagcgccc

SEQ ID NO: 492 - DNA, 15 bp, Homo sapiens
ctcccttgcagcgcc

SEQ ID NO: 493 - DNA, 15 bp, Homo sapiens
gctcccttgcagcgc

SEQ ID NO: 494 - DNA, 15 bp, Homo sapiens
ggctcccttgcagcg

SEQ ID NO: 495 - DNA, 15 bp, Homo sapiens
cggctcccttgcagc

SEQ ID NO: 496 - DNA, 15 bp, Homo sapiens
ccggctcccttgcag

SEQ ID NO: 497 - DNA, 15 bp, Homo sapiens
tccggctcccttgca

SEQ ID NO: 498 - DNA, 15 bp, Homo sapiens
atccggctcccttgc

SEQ ID NO: 499 - DNA, 15 bp, Homo sapiens
catccggctcccttg

SEQ ID NO: 500 - DNA, 15 bp, Homo sapiens
tcatccggctccctt

SEQ ID NO: 501 - DNA, 15 bp, Homo sapiens
ctcatccggctccct

SEQ ID NO: 502 - DNA, 15 bp, Homo sapiens
cctcatccggctccc

SEQ ID NO: 503 - DNA, 15 bp, Homo sapiens
acctcatccggctcc

SEQ ID NO: 504 - DNA, 15 bp, Homo sapiens
cacctcatccggctc

SEQ ID NO: 505 - DNA, 15 bp, Homo sapiens
tcacctcatccggct

SEQ ID NO: 506 - DNA, 15 bp, Homo sapiens
atcacctcatccggc

SEQ ID NO: 507 - DNA, 15 bp, Homo sapiens
tatcacctcatccgg

SEQ ID NO: 508 - DNA, 15 bp, Homo sapiens
gtatcacctcatccg

SEQ ID NO: 509 - DNA, 15 bp, Homo sapiens
tgtatcacctcatcc

SEQ ID NO: 510 - DNA, 15 bp, Homo sapiens
gtgtatcacctcatc

SEQ ID NO: 511 - DNA, 15 bp, Homo sapiens
cgtgtatcacctcat

SEQ ID NO: 512 - DNA, 15 bp, Homo sapiens
gcgtgtatcacctca

SEQ ID NO: 513 - DNA, 15 bp, Homo sapiens
agcgtgtatcacctc

SEQ ID NO: 514 - DNA, 15 bp, Homo sapiens
cagcgtgtatcacct

SEQ ID NO: 515 - DNA, 15 bp, Homo sapiens
ccagcgtgtatcacc

SEQ ID NO: 516 - DNA, 15 bp, Homo sapiens
gccagcgtgtatcac

SEQ ID NO: 517 - DNA, 15 bp, Homo sapiens
cgccagcgtgtatca

SEQ ID NO: 518 - DNA, 15 bp, Homo sapiens
tcgccagcgtgtatc

SEQ ID NO: 519 - DNA, 15 bp, Homo sapiens
gtcgccagcgtgtat

SEQ ID NO: 520 - DNA, 15 bp, Homo sapiens
tgtcgccagcgtgta

SEQ ID NO: 521 - DNA, 15 bp, Homo sapiens
gtgtcgccagcgtgt

SEQ ID NO: 522 - DNA, 15 bp, Homo sapiens
tgtgtcgccagcgtg

SEQ ID NO: 523 - DNA, 15 bp, Homo sapiens
ttgtgtcgccagcgt

SEQ ID NO: 524 - DNA, 15 bp, Homo sapiens
attgtgtcgccagcg

SEQ ID NO: 525 - DNA, 15 bp, Homo sapiens
tattgtgtcgccagc

SEQ ID NO: 526 - DNA, 15 bp, Homo sapiens
ctattgtgtcgccag

SEQ ID NO: 527 - DNA, 15 bp, Homo sapiens
gctattgtgtcgcca

SEQ ID NO: 528 - DNA, 15 bp, Homo sapiens
tgctattgtgtcgcc

SEQ ID NO: 529 - DNA, 15 bp, Homo sapiens
ctgctattgtgtcgc

SEQ ID NO: 530 - DNA, 15 bp, Homo sapiens
cctgctattgtgtcg

SEQ ID NO: 531 - DNA, 15 bp, Homo sapiens
acctgctattgtgtc

SEQ ID NO: 532 - DNA, 15 bp, Homo sapiens
aacctgctattgtgt

SEQ ID NO: 533 - DNA, 15 bp, Homo sapiens
caacctgctattgtg

SEQ ID NO: 534 - DNA, 15 bp, Homo sapiens
gcaacctgctattgt

SEQ ID NO: 535 - DNA, 15 bp, Homo sapiens
agcaacctgctattg

SEQ ID NO: 536 - DNA, 15 bp, Homo sapiens
gagcaacctgctatt

SEQ ID NO: 537 - DNA, 15 bp, Homo sapiens
agagcaacctgctat

SEQ ID NO: 538 - DNA, 15 bp, Homo sapiens
aagagcaacctgcta

SEQ ID NO: 539 - DNA, 15 bp, Homo sapiens
aaagagcaacctgct

SEQ ID NO: 540 - DNA, 15 bp, Homo sapiens
caaagagcaacctgc

SEQ ID NO: 541 - DNA, 15 bp, Homo sapiens
acaaagagcaacctg

SEQ ID NO: 542 - DNA, 15 bp, Homo sapiens
cacaaagagcaacct

SEQ ID NO: 543 - DNA, 15 bp, Homo sapiens
gcacaaagagcaacc

SEQ ID NO: 544 - DNA, 15 bp, Homo sapiens
agcacaaagagcaac

SEQ ID NO: 545 - DNA, 15 bp, Homo sapiens
tagcacaaagagcaa

SEQ ID NO: 546 - DNA, 15 bp, Homo sapiens
ttagcacaaagagca

SEQ ID NO: 547 - DNA, 15 bp, Homo sapiens
cttagcacaaagagc

SEQ ID NO: 548 - DNA, 15 bp, Homo sapiens
tcttagcacaaagag

SEQ ID NO: 549 - DNA, 15 bp, Homo sapiens
gtcttagcacaaaga

SEQ ID NO: 550 - DNA, 15 bp, Homo sapiens
agtcttagcacaaag

SEQ ID NO: 551 - DNA, 15 bp, Homo sapiens
cagtcttagcacaaa

SEQ ID NO: 552 - DNA, 15 bp, Homo sapiens
tcagtcttagcacaa

SEQ ID NO: 553 - DNA, 15 bp, Homo sapiens
gtcagtcttagcaca

SEQ ID NO: 554 - DNA, 15 bp, Homo sapiens
tgtcagtcttagcac

SEQ ID NO: 555 - DNA, 15 bp, Homo sapiens
gtgtcagtcttagca

SEQ ID NO: 556 - DNA, 15 bp, Homo sapiens
ggtgtcagtcttagc

SEQ ID NO: 557 - DNA, 15 bp, Homo sapiens
tggtgtcagtcttag

SEQ ID NO: 558 - DNA, 15 bp, Homo sapiens
atggtgtcagtctta

SEQ ID NO: 559 - DNA, 15 bp, Homo sapiens
catggtgtcagtctt

SEQ ID NO: 560 - DNA, 15 bp, Homo sapiens
tcatggtgtcagtct

SEQ ID NO: 561 - DNA, 15 bp, Homo sapiens
ctcatggtgtcagtc

SEQ ID NO: 562 - DNA, 15 bp, Homo sapiens
cctcatggtgtcagt

SEQ ID NO: 563 - DNA, 15 bp, Homo sapiens
tcctcatggtgtcag

SEQ ID NO: 564 - DNA, 15 bp, Homo sapiens
gtcctcatggtgtca

SEQ ID NO: 565 - DNA, 15 bp, Homo sapiens
tgtcctcatggtgtc

SEQ ID NO: 566 - DNA, 15 bp, Homo sapiens
gtgtcctcatggtgt

SEQ ID NO: 567 - DNA, 15 bp, Homo sapiens
tgtgtcctcatggtg

SEQ ID NO: 568 - DNA, 15 bp, Homo sapiens
ctgtgtcctcatggt

SEQ ID NO: 569 - DNA, 15 bp, Homo sapiens
tctgtgtcctcatgg

SEQ ID NO: 570 - DNA, 15 bp, Homo sapiens
atctgtgtcctcatg

SEQ ID NO: 571 - DNA, 15 bp, Homo sapiens
aatctgtgtcctcat

SEQ ID NO: 572 - DNA, 15 bp, Homo sapiens
aaatctgtgtcctca

SEQ ID NO: 573 - DNA, 15 bp, Homo sapiens
caaatctgtgtcctc

SEQ ID NO: 574 - DNA, 15 bp, Homo sapiens
ccaaatctgtgtcct

SEQ ID NO: 575 - DNA, 15 bp, Homo sapiens
cccaaatctgtgtcc

SEQ ID NO: 576 - DNA, 15 bp, Homo sapiens
ccccaaatctgtgtc

SEQ ID NO: 577 - DNA, 15 bp, Homo sapiens
cccccaaatctgtgt

SEQ ID NO: 578 - DNA, 15 bp, Homo sapiens
tcccccaaatctgtg

SEQ ID NO: 579 - DNA, 15 bp, Homo sapiens
ttcccccaaatctgt

SEQ ID NO: 580 - DNA, 15 bp, Homo sapiens
cttcccccaaatctg

SEQ ID NO: 581 - DNA, 15 bp, Homo sapiens
ccttcccccaaatct

SEQ ID NO: 582 - DNA, 15 bp, Homo sapiens
cccttcccccaaatc

SEQ ID NO: 583 - DNA, 15 bp, Homo sapiens
ccccttcccccaaat

SEQ ID NO: 584 - DNA, 15 bp, Homo sapiens
cccccttcccccaaa

SEQ ID NO: 585 - DNA, 15 bp, Homo sapiens
tcccccttcccccaa

SEQ ID NO: 586 - DNA, 15 bp, Homo sapiens
ttcccccttccccca

SEQ ID NO: 587 - DNA, 15 bp, Homo sapiens
attcccccttccccc

SEQ ID NO: 588 - DNA, 15 bp, Homo sapiens
gattcccccttcccc

SEQ ID NO: 589 - DNA, 15 bp, Homo sapiens
agattcccccttccc

SEQ ID NO: 590 - DNA, 15 bp, Homo sapiens
gagattcccccttcc

SEQ ID NO: 591 - DNA, 15 bp, Homo sapiens
agagattcccccttc

SEQ ID NO: 592 - DNA, 15 bp, Homo sapiens
tagagattccccctt

SEQ ID NO: 593 - DNA, 15 bp, Homo sapiens
ctagagattccccct

SEQ ID NO: 594 - DNA, 15 bp, Homo sapiens
cctagagattccccc

SEQ ID NO: 595 - DNA, 15 bp, Homo sapiens
gcctagagattcccc

SEQ ID NO: 596 - DNA, 15 bp, Homo sapiens
tgcctagagattccc

SEQ ID NO: 597 - DNA, 15 bp, Homo sapiens
ttgcctagagattcc

SEQ ID NO: 598 - DNA, 15 bp, Homo sapiens
tttgcctagagattc

SEQ ID NO: 599 - DNA, 15 bp, Homo sapiens
ctttgcctagagatt

SEQ ID NO: 600 - DNA, 15 bp, Homo sapiens
cctttgcctagagat

SEQ ID NO: 601 - DNA, 15 bp, Homo sapiens
gcctttgcctagaga

SEQ ID NO: 602 - DNA, 15 bp, Homo sapiens
agcctttgcctagag

SEQ ID NO: 603 - DNA, 15 bp, Homo sapiens
cagcctttgcctaga

SEQ ID NO: 604 - DNA, 15 bp, Homo sapiens
acagcctttgcctag

SEQ ID NO: 605 - DNA, 15 bp, Homo sapiens
aacagcctttgccta

SEQ ID NO: 606 - DNA, 15 bp, Homo sapiens
taacagcctttgcct

SEQ ID NO: 607 - DNA, 15 bp, Homo sapiens
gtaacagcctttgcc

SEQ ID NO: 608 - DNA, 15 bp, Homo sapiens
tgtaacagcctttgc

SEQ ID NO: 609 - DNA, 15 bp, Homo sapiens
ctgtaacagcctttg

SEQ ID NO: 610 - DNA, 15 bp, Homo sapiens
actgtaacagccttt

SEQ ID NO: 611 - DNA, 15 bp, Homo sapiens
gactgtaacagcctt

SEQ ID NO: 612 - DNA, 15 bp, Homo sapiens
tgactgtaacagcct

SEQ ID NO: 613 - DNA, 15 bp, Homo sapiens
ttgactgtaacagcc

SEQ ID NO: 614 - DNA, 15 bp, Homo sapiens
tttgactgtaacagc

SEQ ID NO: 615 - DNA, 15 bp, Homo sapiens
atttgactgtaacag

SEQ ID NO: 616 - DNA, 15 bp, Homo sapiens
gatttgactgtaaca

SEQ ID NO: 617 - DNA, 15 bp, Homo sapiens
agatttgactgtaac

SEQ ID NO: 618 - DNA, 15 bp, Homo sapiens
gagatttgactgtaa

SEQ ID NO: 619 - DNA, 15 bp, Homo sapiens
agagatttgactgta

SEQ ID NO: 620 - DNA, 15 bp, Homo sapiens
cagagatttgactgt

SEQ ID NO: 621 - DNA, 15 bp, Homo sapiens
gcagagatttgactg

SEQ ID NO: 622 - DNA, 15 bp, Homo sapiens
cgcagagatttgact

SEQ ID NO: 623 - DNA, 15 bp, Homo sapiens
tcgcagagatttgac

SEQ ID NO: 624 - DNA, 15 bp, Homo sapiens
ttcgcagagatttga

SEQ ID NO: 625 - DNA, 15 bp, Homo sapiens
gttcgcagagatttg

SEQ ID NO: 626 - DNA, 15 bp, Homo sapiens
cgttcgcagagattt

SEQ ID NO: 627 - DNA, 15 bp, Homo sapiens
tcgttcgcagagatt

SEQ ID NO: 628 - DNA, 15 bp, Homo sapiens
atcgttcgcagagat

SEQ ID NO: 629 - DNA, 15 bp, Homo sapiens
aatcgttcgcagaga

SEQ ID NO: 630 - DNA, 15 bp, Homo sapiens
caatcgttcgcagag

SEQ ID NO: 631 - DNA, 15 bp, Homo sapiens
acaatcgttcgcaga

SEQ ID NO: 632 - DNA, 15 bp, Homo sapiens
cacaatcgttcgcag

SEQ ID NO: 633 - DNA, 15 bp, Homo sapiens
tcacaatcgttcgca

SEQ ID NO: 634 - DNA, 15 bp, Homo sapiens
atcacaatcgttcgc

SEQ ID NO: 635 - DNA, 15 bp, Homo sapiens
gatcacaatcgttcg

SEQ ID NO: 636 - DNA, 15 bp, Homo sapiens
ggatcacaatcgttc

SEQ ID NO: 637 - DNA, 15 bp, Homo sapiens
cggatcacaatcgtt

SEQ ID NO: 638 - DNA, 15 bp, Homo sapiens
tcggatcacaatcgt

SEQ ID NO: 639 - DNA, 15 bp, Homo sapiens
gtcggatcacaatcg

SEQ ID NO: 640 - DNA, 15 bp, Homo sapiens
tgtcggatcacaatc

SEQ ID NO: 641 - DNA, 15 bp, Homo sapiens
ctgtcggatcacaat

SEQ ID NO: 642 - DNA, 15 bp, Homo sapiens
gctgtcggatcacaa

SEQ ID NO: 643 - DNA, 15 bp, Homo sapiens
cgctgtcggatcaca

SEQ ID NO: 644 - DNA, 15 bp, Homo sapiens
ccgctgtcggatcac

SEQ ID NO: 645 - DNA, 15 bp, Homo sapiens
accgctgtcggatca

SEQ ID NO: 646 - DNA, 15 bp, Homo sapiens
caccgctgtcggatc

SEQ ID NO: 647 - DNA, 15 bp, Homo sapiens
gcaccgctgtcggat

SEQ ID NO: 648 - DNA, 15 bp, Homo sapiens
tgcaccgctgtcgga

SEQ ID NO: 649 - DNA, 15 bp, Homo sapiens
ttgcaccgctgtcgg

SEQ ID NO: 650 - DNA, 15 bp, Homo sapiens
tttgcaccgctgtcg

SEQ ID NO: 651 - DNA, 15 bp, Homo sapiens
ttttgcaccgctgtc

SEQ ID NO: 652 - DNA, 15 bp, Homo sapiens
cttttgcaccgctgt

SEQ ID NO: 653 - DNA, 15 bp, Homo sapiens
ccttttgcaccgctg

SEQ ID NO: 654 - DNA, 15 bp, Homo sapiens
tccttttgcaccgct

SEQ ID NO: 655 - DNA, 15 bp, Homo sapiens
ttccttttgcaccgc

SEQ ID NO: 656 - DNA, 15 bp, Homo sapiens
tttccttttgcaccg

SEQ ID NO: 657 - DNA, 15 bp, Homo sapiens
ctttccttttgcacc

SEQ ID NO: 658 - DNA, 15 bp, Homo sapiens
tctttccttttgcac

SEQ ID NO: 659 - DNA, 15 bp, Homo sapiens
ctctttccttttgca

SEQ ID NO: 660 - DNA, 15 bp, Homo sapiens
gctctttccttttgc

SEQ ID NO: 661 - DNA, 15 bp, Homo sapiens
cgctctttccttttg

SEQ ID NO: 662 - DNA, 15 bp, Homo sapiens
tcgctctttcctttt

SEQ ID NO: 663 - DNA, 15 bp, Homo sapiens
ttcgctctttccttt

SEQ ID NO: 664 - DNA, 15 bp, Homo sapiens
attcgctctttcctt

SEQ ID NO: 665 - DNA, 15 bp, Homo sapiens
cattcgctctttcct

SEQ ID NO: 666 - DNA, 15 bp, Homo sapiens
gcattcgctctttcc

SEQ ID NO: 667 - DNA, 15 bp, Homo sapiens
tgcattcgctctttc

SEQ ID NO: 668 - DNA, 15 bp, Homo sapiens
ctgcattcgctcttt

SEQ ID NO: 669 - DNA, 15 bp, Homo sapiens
actgcattcgctctt

SEQ ID NO: 670 - DNA, 15 bp, Homo sapiens
gactgcattcgctct

SEQ ID NO: 671 - DNA, 15 bp, Homo sapiens
ggactgcattcgctc

SEQ ID NO: 672 - DNA, 15 bp, Homo sapiens
tggactgcattcgct

SEQ ID NO: 673 - DNA, 15 bp, Homo sapiens
gtggactgcattcgc

SEQ ID NO: 674 - DNA, 15 bp, Homo sapiens
cgtggactgcattcg

SEQ ID NO: 675 - DNA, 15 bp, Homo sapiens
gcgtggactgcattc

SEQ ID NO: 676 - DNA, 15 bp, Homo sapiens
ggcgtggactgcatt

SEQ ID NO: 677 - DNA, 15 bp, Homo sapiens
cggcgtggactgcat

SEQ ID NO: 678 - DNA, 15 bp, Homo sapiens
gcggcgtggactgca

SEQ ID NO: 679 - DNA, 15 bp, Homo sapiens
cgcggcgtggactgc

SEQ ID NO: 680 - DNA, 15 bp, Homo sapiens
ccgcggcgtggactg

SEQ ID NO: 681 - DNA, 15 bp, Homo sapiens
tccgcggcgtggact

SEQ ID NO: 682 - DNA, 15 bp, Homo sapiens
ttccgcggcgtggac

SEQ ID NO: 683 - DNA, 15 bp, Homo sapiens
tttccgcggcgtgga

SEQ ID NO: 684 - DNA, 15 bp, Homo sapiens
atttccgcggcgtgg

SEQ ID NO: 685 - DNA, 15 bp, Homo sapiens
gatttccgcggcgtg

SEQ ID NO: 686 - DNA, 15 bp, Homo sapiens
agatttccgcggcgt

SEQ ID NO: 687 - DNA, 15 bp, Homo sapiens
tagatttccgcggcg

SEQ ID NO: 688 - DNA, 15 bp, Homo sapiens
ctagatttccgcggc

SEQ ID NO: 689 - DNA, 15 bp, Homo sapiens
cctagatttccgcgg

SEQ ID NO: 690 - DNA, 15 bp, Homo sapiens
ccctagatttccgcg

SEQ ID NO: 691 - DNA, 15 bp, Homo sapiens
cccctagatttccgc

SEQ ID NO: 692 - DNA, 15 bp, Homo sapiens
acccctagatttccg

SEQ ID NO: 693 - DNA, 15 bp, Homo sapiens
tacccctagatttcc

SEQ ID NO: 694 - DNA, 15 bp, Homo sapiens
ctacccctagatttc

SEQ ID NO: 695 - DNA, 15 bp, Homo sapiens
tctacccctagattt

SEQ ID NO: 696 - DNA, 15 bp, Homo sapiens
ctctacccctagatt

SEQ ID NO: 697 - DNA, 15 bp, Homo sapiens
cctctacccctagat

SEQ ID NO: 698 - DNA, 15 bp, Homo sapiens
gcctctacccctaga

SEQ ID NO: 699 - DNA, 15 bp, Homo sapiens
tgcctctacccctag

SEQ ID NO: 700 - DNA, 15 bp, Homo sapiens
ttgcctctaccccta

SEQ ID NO: 701 - DNA, 15 bp, Homo sapiens
cttgcctctacccct

SEQ ID NO: 702 - DNA, 15 bp, Homo sapiens
ccttgcctctacccc

SEQ ID NO: 703 - DNA, 15 bp, Homo sapiens
cccttgcctctaccc

SEQ ID NO: 704 - DNA, 15 bp, Homo sapiens
ccccttgcctctacc

SEQ ID NO: 705 - DNA, 15 bp, Homo sapiens
cccccttgcctctac

SEQ ID NO: 706 - DNA, 15 bp, Homo sapiens
ccccccttgcctcta

SEQ ID NO: 707 - DNA, 15 bp, Homo sapiens
tccccccttgcctct

SEQ ID NO: 708 - DNA, 15 bp, Homo sapiens
ctccccccttgcctc

SEQ ID NO: 709 - DNA, 15 bp, Homo sapiens
cctccccccttgcct

SEQ ID NO: 710 - DNA, 15 bp, Homo sapiens
ccctccccccttgcc

SEQ ID NO: 711 - DNA, 15 bp, Homo sapiens
accctccccccttgc

SEQ ID NO: 712 - DNA, 15 bp, Homo sapiens
taccctccccccttg

SEQ ID NO: 713 - DNA, 15 bp, Homo sapiens
ataccctcccccctt

SEQ ID NO: 714 - DNA, 15 bp, Homo sapiens
aataccctcccccct

SEQ ID NO: 715 - DNA, 15 bp, Homo sapiens
gaataccctcccccc

SEQ ID NO: 716 - DNA, 15 bp, Homo sapiens
ggaataccctccccc

SEQ ID NO: 717 - DNA, 15 bp, Homo sapiens
gggaataccctcccc

SEQ ID NO: 718 - DNA, 15 bp, Homo sapiens
ggggaataccctccc

SEQ ID NO: 719 - DNA, 15 bp, Homo sapiens
aggggaataccctcc

SEQ ID NO: 720 - DNA, 15 bp, Homo sapiens
aaggggaataccctc

SEQ ID NO: 721 - DNA, 15 bp, Homo sapiens
caaggggaataccct

SEQ ID NO: 722 - DNA, 15 bp, Homo sapiens
gcaaggggaataccc

SEQ ID NO: 723 - DNA, 15 bp, Homo sapiens
tgcaaggggaatacc

SEQ ID NO: 724 - DNA, 15 bp, Homo sapiens
ctgcaaggggaatac

SEQ ID NO: 725 - DNA, 15 bp, Homo sapiens
cctgcaaggggaata

SEQ ID NO: 726 - DNA, 15 bp, Homo sapiens
ccctgcaaggggaat

SEQ ID NO: 727 - DNA, 15 bp, Homo sapiens
tccctgcaaggggaa

SEQ ID NO: 728 - DNA, 15 bp, Homo sapiens
gtccctgcaagggga

SEQ ID NO: 729 - DNA, 15 bp, Homo sapiens
ggtccctgcaagggg

SEQ ID NO: 730 - DNA, 15 bp, Homo sapiens
cggtccctgcaaggg

SEQ ID NO: 731 - DNA, 15 bp, Homo sapiens
acggtccctgcaagg

SEQ ID NO: 732 - DNA, 15 bp, Homo sapiens
gacggtccctgcaag

SEQ ID NO: 733 - DNA, 15 bp, Homo sapiens
ggacggtccctgcaa

SEQ ID NO: 734 - DNA, 15 bp, Homo sapiens
gggacggtccctgca

SEQ ID NO: 735 - DNA, 15 bp, Homo sapiens
agggacggtccctgc

SEQ ID NO: 736 - DNA, 15 bp, Homo sapiens
cagggacggtccctg

SEQ ID NO: 737 - DNA, 15 bp, Homo sapiens
gcagggacggtccct

SEQ ID NO: 738 - DNA, 15 bp, Homo sapiens
tgcagggacggtccc

SEQ ID NO: 739 - DNA, 15 bp, Homo sapiens
atgcagggacggtcc

SEQ ID NO: 740 - DNA, 15 bp, Homo sapiens
aatgcagggacggtc

SEQ ID NO: 741 - DNA, 15 bp, Homo sapiens
aaatgcagggacggt

SEQ ID NO: 742 - DNA, 15 bp, Homo sapiens
gaaatgcagggacgg

SEQ ID NO: 743 - DNA, 15 bp, Homo sapiens
ggaaatgcagggacg

SEQ ID NO: 744 - DNA, 15 bp, Homo sapiens
gggaaatgcagggac

SEQ ID NO: 745 - DNA, 15 bp, Homo sapiens
agggaaatgcaggga

SEQ ID NO: 746 - DNA, 15 bp, Homo sapiens
gagggaaatgcaggg

SEQ ID NO: 747 - DNA, 15 bp, Homo sapiens
agagggaaatgcagg

SEQ ID NO: 748 - DNA, 15 bp, Homo sapiens
tagagggaaatgcag

SEQ ID NO: 749 - DNA, 15 bp, Homo sapiens
gtagagggaaatgca

SEQ ID NO: 750 - DNA, 15 bp, Homo sapiens
tgtagagggaaatgc

SEQ ID NO: 751 - DNA, 15 bp, Homo sapiens
gtgtagagggaaatg

SEQ ID NO: 752 - DNA, 15 bp, Homo sapiens
agtgtagagggaaat

SEQ ID NO: 753 - DNA, 15 bp, Homo sapiens
cagtgtagagggaaa

SEQ ID NO: 754 - DNA, 15 bp, Homo sapiens
tcagtgtagagggaa

SEQ ID NO: 755 - DNA, 15 bp, Homo sapiens
ctcagtgtagaggga

SEQ ID NO: 756 - DNA, 15 bp, Homo sapiens
gctcagtgtagaggg

SEQ ID NO: 757 - DNA, 15 bp, Homo sapiens
tgctcagtgtagagg

SEQ ID NO: 758 - DNA, 15 bp, Homo sapiens
ctgctcagtgtagag

SEQ ID NO: 759 - DNA, 15 bp, Homo sapiens
gctgctcagtgtaga

SEQ ID NO: 760 - DNA, 15 bp, Homo sapiens
cgctgctcagtgtag

SEQ ID NO: 761 - DNA, 15 bp, Homo sapiens
acgctgctcagtgta

SEQ ID NO: 762 - DNA, 15 bp, Homo sapiens
cacgctgctcagtgt

SEQ ID NO: 763 - DNA, 15 bp, Homo sapiens
ccacgctgctcagtg

SEQ ID NO: 764 - DNA, 15 bp, Homo sapiens
accacgctgctcagt

SEQ ID NO: 765 - DNA, 15 bp, Homo sapiens
gaccacgctgctcag

SEQ ID NO: 766 - DNA, 15 bp, Homo sapiens
tgaccacgctgctca

SEQ ID NO: 767 - DNA, 15 bp, Homo sapiens
gtgaccacgctgctc

SEQ ID NO: 768 - DNA, 15 bp, Homo sapiens
ggtgaccacgctgct

SEQ ID NO: 769 - DNA, 15 bp, Homo sapiens
aggtgaccacgctgc

SEQ ID NO: 770 - DNA, 15 bp, Homo sapiens
caggtgaccacgctg

SEQ ID NO: 771 - DNA, 15 bp, Homo sapiens
ccaggtgaccacgct

SEQ ID NO: 772 - DNA, 15 bp, Homo sapiens
accaggtgaccacgc

SEQ ID NO: 773 - DNA, 15 bp, Homo sapiens
gaccaggtgaccacg

SEQ ID NO: 774 - DNA, 15 bp, Homo sapiens
ggaccaggtgaccac

SEQ ID NO: 775 - DNA, 15 bp, Homo sapiens
aggaccaggtgacca

SEQ ID NO: 776 - DNA, 15 bp, Homo sapiens
aaggaccaggtgacc

SEQ ID NO: 777 - DNA, 15 bp, Homo sapiens
aaaggaccaggtgac

SEQ ID NO: 778 - DNA, 15 bp, Homo sapiens
aaaaggaccaggtga

SEQ ID NO: 779 - DNA, 15 bp, Homo sapiens
gaaaaggaccaggtg

SEQ ID NO: 780 - DNA, 15 bp, Homo sapiens
tgaaaaggaccaggt

SEQ ID NO: 781 - DNA, 15 bp, Homo sapiens
gtgaaaaggaccagg

SEQ ID NO: 782 - DNA, 15 bp, Homo sapiens
ggtgaaaaggaccag

SEQ ID NO: 783 - DNA, 15 bp, Homo sapiens
aggtgaaaaggacca

SEQ ID NO: 784 - DNA, 15 bp, Homo sapiens
caggtgaaaaggacc

SEQ ID NO: 785 - DNA, 15 bp, Homo sapiens
acaggtgaaaaggac

SEQ ID NO: 786 - DNA, 15 bp, Homo sapiens
cacaggtgaaaagga

SEQ ID NO: 787 - DNA, 15 bp, Homo sapiens
gcacaggtgaaaagg

SEQ ID NO: 788 - DNA, 15 bp, Homo sapiens
tgcacaggtgaaaag

SEQ ID NO: 789 - DNA, 15 bp, Homo sapiens
gtgcacaggtgaaaa

SEQ ID NO: 790 - DNA, 15 bp, Homo sapiens
tgtgcacaggtgaaa

SEQ ID NO: 791 - DNA, 15 bp, Homo sapiens
ctgtgcacaggtgaa

SEQ ID NO: 792 - DNA, 15 bp, Homo sapiens
cctgtgcacaggtga

SEQ ID NO: 793 - DNA, 15 bp, Homo sapiens
acctgtgcacaggtg

SEQ ID NO: 794 - DNA, 15 bp, Homo sapiens
tacctgtgcacaggt

SEQ ID NO: 795 - DNA, 15 bp, Homo sapiens
ttacctgtgcacagg

SEQ ID NO: 796 - DNA, 15 bp, Homo sapiens
gttacctgtgcacag

SEQ ID NO: 797 - DNA, 15 bp, Homo sapiens
ggttacctgtgcaca

SEQ ID NO: 798 - DNA, 15 bp, Homo sapiens
aggttacctgtgcac

SEQ ID NO: 799 - DNA, 15 bp, Homo sapiens
gaggttacctgtgca

SEQ ID NO: 800 - DNA, 15 bp, Homo sapiens
tgaggttacctgtgc

SEQ ID NO: 801 - DNA, 15 bp, Homo sapiens
ctgaggttacctgtg

SEQ ID NO: 802 - DNA, 15 bp, Homo sapiens
tctgaggttacctgt

SEQ ID NO: 803 - DNA, 15 bp, Homo sapiens
gtctgaggttacctg

SEQ ID NO: 804 - DNA, 15 bp, Homo sapiens
agtctgaggttacct

SEQ ID NO: 805 - DNA, 15 bp, Homo sapiens
gagtctgaggttacc

SEQ ID NO: 806 - DNA, 15 bp, Homo sapiens
cgagtctgaggttac

SEQ ID NO: 807 - DNA, 15 bp, Homo sapiens
tcgagtctgaggtta

SEQ ID NO: 808 - DNA, 15 bp, Homo sapiens
ctcgagtctgaggtt

SEQ ID NO: 809 - DNA, 15 bp, Homo sapiens
actcgagtctgaggt

SEQ ID NO: 810 - DNA, 15 bp, Homo sapiens
gactcgagtctgagg

SEQ ID NO: 811 - DNA, 15 bp, Homo sapiens
tgactcgagtctgag

SEQ ID NO: 812 - DNA, 15 bp, Homo sapiens
ctgactcgagtctga

SEQ ID NO: 813 - DNA, 15 bp, Homo sapiens
actgactcgagtctg

SEQ ID NO: 814 - DNA, 15 bp, Homo sapiens
cactgactcgagtct

SEQ ID NO: 815 - DNA, 15 bp, Homo sapiens
tcactgactcgagtc

SEQ ID NO: 816 - DNA, 15 bp, Homo sapiens
gtcactgactcgagt

SEQ ID NO: 817 - DNA, 15 bp, Homo sapiens
tgtcactgactcgag

SEQ ID NO: 818 - DNA, 15 bp, Homo sapiens
gtgtcactgactcga

SEQ ID NO: 819 - DNA, 15 bp, Homo sapiens
agtgtcactgactcg

SEQ ID NO: 820 - DNA, 15 bp, Homo sapiens
cagtgtcactgactc

SEQ ID NO: 821 - DNA, 15 bp, Homo sapiens
gcagtgtcactgact

SEQ ID NO: 822 - DNA, 15 bp, Homo sapiens
agcagtgtcactgac

SEQ ID NO: 823 - DNA, 15 bp, Homo sapiens
gagcagtgtcactga

SEQ ID NO: 824 - DNA, 15 bp, Homo sapiens
tgagcagtgtcactg

SEQ ID NO: 825 - DNA, 15 bp, Homo sapiens
ttgagcagtgtcact

SEQ ID NO: 826 - DNA, 15 bp, Homo sapiens
gttgagcagtgtcac

SEQ ID NO: 827 - DNA, 15 bp, Homo sapiens
cgttgagcagtgtca

SEQ ID NO: 828 - DNA, 15 bp, Homo sapiens
gcgttgagcagtgtc

SEQ ID NO: 829 - DNA, 15 bp, Homo sapiens
tgcgttgagcagtgt

SEQ ID NO: 830 - DNA, 15 bp, Homo sapiens
gtgcgttgagcagtg

SEQ ID NO: 831 - DNA, 15 bp, Homo sapiens
ggtgcgttgagcagt

SEQ ID NO: 832 - DNA, 15 bp, Homo sapiens
gggtgcgttgagcag

SEQ ID NO: 833 - DNA, 15 bp, Homo sapiens
tgggtgcgttgagca

SEQ ID NO: 834 - DNA, 15 bp, Homo sapiens
atgggtgcgttgagc

SEQ ID NO: 835 - DNA, 15 bp, Homo sapiens
gatgggtgcgttgag

SEQ ID NO: 836 - DNA, 15 bp, Homo sapiens
agatgggtgcgttga

SEQ ID NO: 837 - DNA, 15 bp, Homo sapiens
gagatgggtgcgttg

SEQ ID NO: 838 - DNA, 15 bp, Homo sapiens
tgagatgggtgcgtt

SEQ ID NO: 839 - DNA, 15 bp, Homo sapiens
ctgagatgggtgcgt

SEQ ID NO: 840 - DNA, 15 bp, Homo sapiens
gctgagatgggtgcg

SEQ ID NO: 841 - DNA, 15 bp, Homo sapiens
agctgagatgggtgc

SEQ ID NO: 842 - DNA, 15 bp, Homo sapiens
aagctgagatgggtg

SEQ ID NO: 843 - DNA, 15 bp, Homo sapiens
aaagctgagatgggt

SEQ ID NO: 844 - DNA, 15 bp, Homo sapiens
gaaagctgagatggg

SEQ ID NO: 845 - DNA, 15 bp, Homo sapiens
tgaaagctgagatgg

SEQ ID NO: 846 - DNA, 15 bp, Homo sapiens
atgaaagctgagatg

SEQ ID NO: 847 - DNA, 15 bp, Homo sapiens
gatgaaagctgagat

SEQ ID NO: 848 - DNA, 15 bp, Homo sapiens
tgatgaaagctgaga

SEQ ID NO: 849 - DNA, 15 bp, Homo sapiens
atgatgaaagctgag

SEQ ID NO: 850 - DNA, 15 bp, Homo sapiens
gatgatgaaagctga

SEQ ID NO: 851 - DNA, 15 bp, Homo sapiens
tgatgatgaaagctg

SEQ ID NO: 852 - DNA, 15 bp, Homo sapiens
ctgatgatgaaagct

SEQ ID NO: 853 - DNA, 15 bp, Homo sapiens
actgatgatgaaagc

SEQ ID NO: 854 - DNA, 15 bp, Homo sapiens
gactgatgatgaaag

SEQ ID NO: 855 - DNA, 15 bp, Homo sapiens
ggactgatgatgaaa

SEQ ID NO: 856 - DNA, 15 bp, Homo sapiens
aggactgatgatgaa

SEQ ID NO: 857 - DNA, 15 bp, Homo sapiens
gaggactgatgatga

SEQ ID NO: 858 - DNA, 15 bp, Homo sapiens
ggaggactgatgatg

SEQ ID NO: 859 - DNA, 15 bp, Homo sapiens
tggaggactgatgat

SEQ ID NO: 860 - DNA, 15 bp, Homo sapiens
gtggaggactgatga

SEQ ID NO: 861 - DNA, 15 bp, Homo sapiens
ggtggaggactgatg

SEQ ID NO: 862 - DNA, 15 bp, Homo sapiens
gggtggaggactgat

SEQ ID NO: 863 - DNA, 15 bp, Homo sapiens
ggggtggaggactga

SEQ ID NO: 864 - DNA, 15 bp, Homo sapiens
gggggtggaggactg

SEQ ID NO: 865 - DNA, 15 bp, Homo sapiens
cgggggtggaggact

SEQ ID NO: 866 - DNA, 15 bp, Homo sapiens
gcgggggtggaggac

SEQ ID NO: 867 - DNA, 15 bp, Homo sapiens
ggcgggggtggagga

SEQ ID NO: 868 - DNA, 15 bp, Homo sapiens
gggcgggggtggagg

SEQ ID NO: 869 - DNA, 15 bp, Homo sapiens
ggggcgggggtggag

SEQ ID NO: 870 - DNA, 15 bp, Homo sapiens
tggggcgggggtgga

SEQ ID NO: 871 - DNA, 15 bp, Homo sapiens
gtggggcgggggtgg

SEQ ID NO: 872 - DNA, 15 bp, Homo sapiens
tgtggggcgggggtg

SEQ ID NO: 873 - DNA, 15 bp, Homo sapiens
ttgtggggcgggggt

SEQ ID NO: 874 - DNA, 15 bp, Homo sapiens
gttgtggggcggggg

SEQ ID NO: 875 - DNA, 15 bp, Homo sapiens
tgttgtggggcgggg

SEQ ID NO: 876 - DNA, 15 bp, Homo sapiens
ctgttgtggggcggg

SEQ ID NO: 877 - DNA, 15 bp, Homo sapiens
gctgttgtggggcgg

SEQ ID NO: 878 - DNA, 15 bp, Homo sapiens
ggctgttgtggggcg

SEQ ID NO: 879 - DNA, 15 bp, Homo sapiens
aggctgttgtggggc

SEQ ID NO: 880 - DNA, 15 bp, Homo sapiens
taggctgttgtgggg

SEQ ID NO: 881 - DNA, 15 bp, Homo sapiens
gtaggctgttgtggg

SEQ ID NO: 882 - DNA, 15 bp, Homo sapiens
ggtaggctgttgtgg

SEQ ID NO: 883 - DNA, 15 bp, Homo sapiens
gggtaggctgttgtg

SEQ ID NO: 884 - DNA, 15 bp, Homo sapiens
agggtaggctgttgt

SEQ ID NO: 885 - DNA, 15 bp, Homo sapiens
cagggtaggctgttg

SEQ ID NO: 886 - DNA, 15 bp, Homo sapiens
gcagggtaggctgtt

SEQ ID NO: 887 - DNA, 15 bp, Homo sapiens
ggcagggtaggctgt

SEQ ID NO: 888 - DNA, 15 bp, Homo sapiens
aggcagggtaggctg

SEQ ID NO: 889 - DNA, 15 bp, Homo sapiens
gaggcagggtaggct

SEQ ID NO: 890 - DNA, 15 bp, Homo sapiens
ggaggcagggtaggc

SEQ ID NO: 891 - DNA, 15 bp, Homo sapiens
cggaggcagggtagg

SEQ ID NO: 892 - DNA, 15 bp, Homo sapiens
ccggaggcagggtag

SEQ ID NO: 893 - DNA, 15 bp, Homo sapiens
gccggaggcagggta

SEQ ID NO: 894 - DNA, 15 bp, Homo sapiens
agccggaggcagggt

SEQ ID NO: 895 - DNA, 15 bp, Homo sapiens
cagccggaggcaggg

SEQ ID NO: 896 - DNA, 15 bp, Homo sapiens
ccagccggaggcagg

SEQ ID NO: 897 - DNA, 15 bp, Homo sapiens
cccagccggaggcag

SEQ ID NO: 898 - DNA, 15 bp, Homo sapiens
acccagccggaggca

SEQ ID NO: 899 - DNA, 15 bp, Homo sapiens
aacccagccggaggc

SEQ ID NO: 900 - DNA, 15 bp, Homo sapiens
aaacccagccggagg

SEQ ID NO: 901 - DNA, 15 bp, Homo sapiens
gaaacccagccggag

SEQ ID NO: 902 - DNA, 15 bp, Homo sapiens
agaaacccagccgga

SEQ ID NO: 903 - DNA, 15 bp, Homo sapiens
cagaaacccagccgg

SEQ ID NO: 904 - DNA, 15 bp, Homo sapiens
ccagaaacccagccg

SEQ ID NO: 905 - DNA, 15 bp, Homo sapiens
cccagaaacccagcc

SEQ ID NO: 906 - DNA, 15 bp, Homo sapiens
gcccagaaacccagc

SEQ ID NO: 907 - DNA, 15 bp, Homo sapiens
tgcccagaaacccag

SEQ ID NO: 908 - DNA, 15 bp, Homo sapiens
ctgcccagaaaccca

SEQ ID NO: 909 - DNA, 15 bp, Homo sapiens
tctgcccagaaaccc

SEQ ID NO: 910 - DNA, 15 bp, Homo sapiens
ctctgcccagaaacc

SEQ ID NO: 911 - DNA, 15 bp, Homo sapiens
cctctgcccagaaac

SEQ ID NO: 912 - DNA, 15 bp, Homo sapiens
gcctctgcccagaaa

SEQ ID NO: 913 - DNA, 15 bp, Homo sapiens
ggcctctgcccagaa

SEQ ID NO: 914 - DNA, 15 bp, Homo sapiens
cggcctctgcccaga

SEQ ID NO: 915 - DNA, 15 bp, Homo sapiens
tcggcctctgcccag

SEQ ID NO: 916 - DNA, 15 bp, Homo sapiens
ctcggcctctgccca

SEQ ID NO: 917 - DNA, 15 bp, Homo sapiens
cctcggcctctgccc

SEQ ID NO: 918 - DNA, 15 bp, Homo sapiens
gcctcggcctctgcc

SEQ ID NO: 919 - DNA, 15 bp, Homo sapiens
agcctcggcctctgc

SEQ ID NO: 920 - DNA, 15 bp, Homo sapiens
aagcctcggcctctg

SEQ ID NO: 921 - DNA, 15 bp, Homo sapiens
taagcctcggcctct

SEQ ID NO: 922 - DNA, 15 bp, Homo sapiens
ctaagcctcggcctc

SEQ ID NO: 923 - DNA, 15 bp, Homo sapiens
gctaagcctcggcct

SEQ ID NO: 924 - DNA, 15 bp, Homo sapiens
agctaagcctcggcc

SEQ ID NO: 925 - DNA, 15 bp, Homo sapiens
gagctaagcctcggc

SEQ ID NO: 926 - DNA, 15 bp, Homo sapiens
cgagctaagcctcgg

SEQ ID NO: 927 - DNA, 15 bp, Homo sapiens
acgagctaagcctcg

SEQ ID NO: 928 - DNA, 15 bp, Homo sapiens
aacgagctaagcctc

SEQ ID NO: 929 - DNA, 15 bp, Homo sapiens
taacgagctaagcct

SEQ ID NO: 930 - DNA, 15 bp, Homo sapiens
ataacgagctaagcc

SEQ ID NO: 931 - DNA, 15 bp, Homo sapiens
gataacgagctaagc

SEQ ID NO: 932 - DNA, 15 bp, Homo sapiens
ggataacgagctaag

SEQ ID NO: 933 - DNA, 15 bp, Homo sapiens
aggataacgagctaa

SEQ ID NO: 934 - DNA, 15 bp, Homo sapiens
gaggataacgagcta

SEQ ID NO: 935 - DNA, 15 bp, Homo sapiens
cgaggataacgagct

SEQ ID NO: 936 - DNA, 15 bp, Homo sapiens
gcgaggataacgagc

SEQ ID NO: 937 - DNA, 15 bp, Homo sapiens
ggcgaggataacgag

SEQ ID NO: 938 - DNA, 15 bp, Homo sapiens
aggcgaggataacga

SEQ ID NO: 939 - DNA, 15 bp, Homo sapiens
gaggcgaggataacg

SEQ ID NO: 940 - DNA, 15 bp, Homo sapiens
cgaggcgaggataac

SEQ ID NO: 941 - DNA, 15 bp, Homo sapiens
gcgaggcgaggataa

SEQ ID NO: 942 - DNA, 15 bp, Homo sapiens
cgcgaggcgaggata

SEQ ID NO: 943 - DNA, 15 bp, Homo sapiens
acgcgaggcgaggat

SEQ ID NO: 944 - DNA, 15 bp, Homo sapiens
aacgcgaggcgagga

SEQ ID NO: 945 - DNA, 15 bp, Homo sapiens
caacgcgaggcgagg

SEQ ID NO: 946 - DNA, 15 bp, Homo sapiens
gcaacgcgaggcgag

SEQ ID NO: 947 - DNA, 15 bp, Homo sapiens
agcaacgcgaggcga

SEQ ID NO: 948 - DNA, 15 bp, Homo sapiens
cagcaacgcgaggcg

SEQ ID NO: 949 - DNA, 15 bp, Homo sapiens
gcagcaacgcgaggc

SEQ ID NO: 950 - DNA, 15 bp, Homo sapiens
tgcagcaacgcgagg

SEQ ID NO: 951 - DNA, 15 bp, Homo sapiens
ttgcagcaacgcgag

SEQ ID NO: 952 - DNA, 15 bp, Homo sapiens
tttgcagcaacgcga

SEQ ID NO: 953 - DNA, 15 bp, Homo sapiens
ttttgcagcaacgcg

SEQ ID NO: 954 - DNA, 15 bp, Homo sapiens
cttttgcagcaacgc

SEQ ID NO: 955 - DNA, 15 bp, Homo sapiens
gcttttgcagcaacg

SEQ ID NO: 956 - DNA, 15 bp, Homo sapiens
ggcttttgcagcaac

SEQ ID NO: 957 - DNA, 15 bp, Homo sapiens
cggcttttgcagcaa

SEQ ID NO: 958 - DNA, 15 bp, Homo sapiens
gcggcttttgcagca

SEQ ID NO: 959 - DNA, 15 bp, Homo sapiens
tgcggcttttgcagc

SEQ ID NO: 960 - DNA, 15 bp, Homo sapiens
ctgcggcttttgcag

SEQ ID NO: 961 - DNA, 15 bp, Homo sapiens
gctgcggcttttgca

SEQ ID NO: 962 - DNA, 15 bp, Homo sapiens
tgctgcggcttttgc

SEQ ID NO: 963 - DNA, 15 bp, Homo sapiens
ttgctgcggcttttg

SEQ ID NO: 964 - DNA, 15 bp, Homo sapiens
cttgctgcggctttt

SEQ ID NO: 965 - DNA, 15 bp, Homo sapiens
acttgctgcggcttt

SEQ ID NO: 966 - DNA, 15 bp, Homo sapiens
cacttgctgcggctt

SEQ ID NO: 967 - DNA, 15 bp, Homo sapiens
gcacttgctgcggct

SEQ ID NO: 968 - DNA, 15 bp, Homo sapiens
tgcacttgctgcggc

SEQ ID NO: 969 - DNA, 15 bp, Homo sapiens
ctgcacttgctgcgg

SEQ ID NO: 970 - DNA, 15 bp, Homo sapiens
gctgcacttgctgcg

SEQ ID NO: 971 - DNA, 15 bp, Homo sapiens
agctgcacttgctgc

SEQ ID NO: 972 - DNA, 15 bp, Homo sapiens
cagctgcacttgctg

SEQ ID NO: 973 - DNA, 15 bp, Homo sapiens
gcagctgcacttgct

SEQ ID NO: 974 - DNA, 15 bp, Homo sapiens
tgcagctgcacttgc

SEQ ID NO: 975 - DNA, 15 bp, Homo sapiens
ctgcagctgcacttg

SEQ ID NO: 976 - DNA, 15 bp, Homo sapiens
cctgcagctgcactt

SEQ ID NO: 977 - DNA, 15 bp, Homo sapiens
gcctgcagctgcact

SEQ ID NO: 978 - DNA, 15 bp, Homo sapiens
agcctgcagctgcac

SEQ ID NO: 979 - DNA, 15 bp, Homo sapiens
cagcctgcagctgca

SEQ ID NO: 980 - DNA, 15 bp, Homo sapiens
ccagcctgcagctgc

SEQ ID NO: 981 - DNA, 15 bp, Homo sapiens
gccagcctgcagctg

SEQ ID NO: 982 - DNA, 15 bp, Homo sapiens
cgccagcctgcagct

SEQ ID NO: 983 - DNA, 15 bp, Homo sapiens
ccgccagcctgcagc

SEQ ID NO: 984 - DNA, 15 bp, Homo sapiens
gccgccagcctgcag

SEQ ID NO: 985 - DNA, 15 bp, Homo sapiens
agccgccagcctgca

SEQ ID NO: 986 - DNA, 15 bp, Homo sapiens
cagccgccagcctgc

SEQ ID NO: 987 - DNA, 15 bp, Homo sapiens
ccagccgccagcctg

SEQ ID NO: 988 - DNA, 15 bp, Homo sapiens
cccagccgccagcct

SEQ ID NO: 989 - DNA, 15 bp, Homo sapiens
tcccagccgccagcc

SEQ ID NO: 990 - DNA, 15 bp, Homo sapiens
ttcccagccgccagc

SEQ ID NO: 991 - DNA, 15 bp, Homo sapiens
gttcccagccgccag

SEQ ID NO: 992 - DNA, 15 bp, Homo sapiens
ggttcccagccgcca

SEQ ID NO: 993 - DNA, 15 bp, Homo sapiens
cggttcccagccgcc

SEQ ID NO: 994 - DNA, 15 bp, Homo sapiens
ccggttcccagccgc

SEQ ID NO: 995 - DNA, 15 bp, Homo sapiens
gccggttcccagccg

SEQ ID NO: 996 - DNA, 15 bp, Homo sapiens
ggccggttcccagcc

SEQ ID NO: 997 - DNA, 15 bp, Homo sapiens
gggccggttcccagc

SEQ ID NO: 998 - DNA, 15 bp, Homo sapiens
cgggccggttcccag

SEQ ID NO: 999 - DNA, 15 bp, Homo sapiens
tcgggccggttccca

SEQ ID NO: 1000 - DNA, 15 bp, Homo sapiens
ctcgggccggttccc

SEQ ID NO: 1001 - DNA, 15 bp, Homo sapiens
gctcgggccggttcc

SEQ ID NO: 1002 - DNA, 15 bp, Homo sapiens
tgctcgggccggttc

SEQ ID NO: 1003 - DNA, 15 bp, Homo sapiens
ttgctcgggccggtt

SEQ ID NO: 1004 - DNA, 15 bp, Homo sapiens
cttgctcgggccggt

SEQ ID NO: 1005 - DNA, 15 bp, Homo sapiens
gcttgctcgggccgg

SEQ ID NO: 1006 - DNA, 15 bp, Homo sapiens
ggcttgctcgggccg

SEQ ID NO: 1007 - DNA, 15 bp, Homo sapiens
gggcttgctcgggcc

SEQ ID NO: 1008 - DNA, 15 bp, Homo sapiens
ggggcttgctcgggc

SEQ ID NO: 1009 - DNA, 15 bp, Homo sapiens
tggggcttgctcggg

SEQ ID NO: 1010 - DNA, 15 bp, Homo sapiens
ctggggcttgctcgg

SEQ ID NO: 1011 - DNA, 15 bp, Homo sapiens
cctggggcttgctcg

SEQ ID NO: 1012 - DNA, 15 bp, Homo sapiens
gcctggggcttgctc

SEQ ID NO: 1013 - DNA, 15 bp, Homo sapiens
tgcctggggcttgct

SEQ ID NO: 1014 - DNA, 15 bp, Homo sapiens
ctgcctggggcttgc

SEQ ID NO: 1015 - DNA, 15 bp, Homo sapiens
gctgcctggggcttg

SEQ ID NO: 1016 - DNA, 15 bp, Homo sapiens
agctgcctggggctt

SEQ ID NO: 1017 - DNA, 15 bp, Homo sapiens
tagctgcctggggct

SEQ ID NO: 1018 - DNA, 15 bp, Homo sapiens
gtagctgcctggggc

SEQ ID NO: 1019 - DNA, 15 bp, Homo sapiens
tgtagctgcctgggg

SEQ ID NO: 1020 - DNA, 15 bp, Homo sapiens
gtgtagctgcctggg

SEQ ID NO: 1021 - DNA, 15 bp, Homo sapiens
agtgtagctgcctgg

SEQ ID NO: 1022 - DNA, 15 bp, Homo sapiens
cagtgtagctgcctg

SEQ ID NO: 1023 - DNA, 15 bp, Homo sapiens
ccagtgtagctgcct

SEQ ID NO: 1024 - DNA, 15 bp, Homo sapiens
cccagtgtagctgcc

SEQ ID NO: 1025 - DNA, 15 bp, Homo sapiens
gcccagtgtagctgc

SEQ ID NO: 1026 - DNA, 15 bp, Homo sapiens
tgcccagtgtagctg

SEQ ID NO: 1027 - DNA, 15 bp, Homo sapiens
atgcccagtgtagct

SEQ ID NO: 1028 - DNA, 15 bp, Homo sapiens
catgcccagtgtagc

SEQ ID NO: 1029 - DNA, 15 bp, Homo sapiens
gcatgcccagtgtag

SEQ ID NO: 1030 - DNA, 15 bp, Homo sapiens
agcatgcccagtgta

SEQ ID NO: 1031 - DNA, 15 bp, Homo sapiens
gagcatgcccagtgt

SEQ ID NO: 1032 - DNA, 15 bp, Homo sapiens
tgagcatgcccagtg

SEQ ID NO: 1033 - DNA, 15 bp, Homo sapiens
ctgagcatgcccagt

SEQ ID NO: 1034 - DNA, 15 bp, Homo sapiens
actgagcatgcccag

SEQ ID NO: 1035 - DNA, 15 bp, Homo sapiens
tactgagcatgccca

SEQ ID NO: 1036 - DNA, 15 bp, Homo sapiens
ctactgagcatgccc

SEQ ID NO: 1037 - DNA, 15 bp, Homo sapiens
tctactgagcatgcc

SEQ ID NO: 1038 - DNA, 15 bp, Homo sapiens
ctctactgagcatgc

SEQ ID NO: 1039 - DNA, 15 bp, Homo sapiens
gctctactgagcatg

SEQ ID NO: 1040 - DNA, 15 bp, Homo sapiens
ggctctactgagcat

SEQ ID NO: 1041 - DNA, 15 bp, Homo sapiens
aggctctactgagca

SEQ ID NO: 1042 - DNA, 15 bp, Homo sapiens
caggctctactgagc

SEQ ID NO: 1043 - DNA, 15 bp, Homo sapiens
gcaggctctactgag

SEQ ID NO: 1044 - DNA, 15 bp, Homo sapiens
cgcaggctctactga

SEQ ID NO: 1045 - DNA, 15 bp, Homo sapiens
ccgcaggctctactg

SEQ ID NO: 1046 - DNA, 15 bp, Homo sapiens
gccgcaggctctact

SEQ ID NO: 1047 - DNA, 15 bp, Homo sapiens
agccgcaggctctac

SEQ ID NO: 1048 - DNA, 15 bp, Homo sapiens
aagccgcaggctcta

SEQ ID NO: 1049 - DNA, 15 bp, Homo sapiens
caagccgcaggctct

SEQ ID NO: 1050 - DNA, 15 bp, Homo sapiens
ccaagccgcaggctc

SEQ ID NO: 1051 - DNA, 15 bp, Homo sapiens
cccaagccgcaggct

SEQ ID NO: 1052 - DNA, 15 bp, Homo sapiens
ccccaagccgcaggc

SEQ ID NO: 1053 - DNA, 15 bp, Homo sapiens
tccccaagccgcagg

SEQ ID NO: 1054 - DNA, 15 bp, Homo sapiens
gtccccaagccgcag

SEQ ID NO: 1055 - DNA, 15 bp, Homo sapiens
agtccccaagccgca

SEQ ID NO: 1056 - DNA, 15 bp, Homo sapiens
gagtccccaagccgc

SEQ ID NO: 1057 - DNA, 15 bp, Homo sapiens
agagtccccaagccg

SEQ ID NO: 1058 - DNA, 15 bp, Homo sapiens
cagagtccccaagcc

SEQ ID NO: 1059 - DNA, 15 bp, Homo sapiens
gcagagtccccaagc

SEQ ID NO: 1060 - DNA, 15 bp, Homo sapiens
cgcagagtccccaag

SEQ ID NO: 1061 - DNA, 15 bp, Homo sapiens
gcgcagagtccccaa

SEQ ID NO: 1062 - DNA, 15 bp, Homo sapiens
agcgcagagtcccca

SEQ ID NO: 1063 - DNA, 15 bp, Homo sapiens
gagcgcagagtcccc

SEQ ID NO: 1064 - DNA, 15 bp, Homo sapiens
cgagcgcagagtccc

SEQ ID NO: 1065 - DNA, 15 bp, Homo sapiens
gcgagcgcagagtcc

SEQ ID NO: 1066 - DNA, 15 bp, Homo sapiens
tgcgagcgcagagtc

SEQ ID NO: 1067 - DNA, 15 bp, Homo sapiens
gtgcgagcgcagagt

SEQ ID NO: 1068 - DNA, 15 bp, Homo sapiens
ggtgcgagcgcagag

SEQ ID NO: 1069 - DNA, 15 bp, Homo sapiens
gggtgcgagcgcaga

SEQ ID NO: 1070 - DNA, 15 bp, Homo sapiens
tgggtgcgagcgcag

SEQ ID NO: 1071 - DNA, 15 bp, Homo sapiens
ctgggtgcgagcgca

SEQ ID NO: 1072 - DNA, 15 bp, Homo sapiens
tctgggtgcgagcgc

SEQ ID NO: 1073 - DNA, 15 bp, Homo sapiens
ctctgggtgcgagcg

SEQ ID NO: 1074 - DNA, 15 bp, Homo sapiens
gctctgggtgcgagc

SEQ ID NO: 1075 - DNA, 15 bp, Homo sapiens
agctctgggtgcgag

SEQ ID NO: 1076 - DNA, 15 bp, Homo sapiens
tagctctgggtgcga

SEQ ID NO: 1077 - DNA, 15 bp, Homo sapiens
gtagctctgggtgcg

SEQ ID NO: 1078 - DNA, 15 bp, Homo sapiens
ggtagctctgggtgc

SEQ ID NO: 1079 - DNA, 15 bp, Homo sapiens
cggtagctctgggtg

SEQ ID NO: 1080 - DNA, 15 bp, Homo sapiens
gcggtagctctgggt

SEQ ID NO: 1081 - DNA, 15 bp, Homo sapiens
agcggtagctctggg

SEQ ID NO: 1082 - DNA, 15 bp, Homo sapiens
gagcggtagctctgg

SEQ ID NO: 1083 - DNA, 15 bp, Homo sapiens
agagcggtagctctg

SEQ ID NO: 1084 - DNA, 15 bp, Homo sapiens
cagagcggtagctct

SEQ ID NO: 1085 - DNA, 15 bp, Homo sapiens
gcagagcggtagctc

SEQ ID NO: 1086 - DNA, 15 bp, Homo sapiens
ggcagagcggtagct

SEQ ID NO: 1087 - DNA, 15 bp, Homo sapiens
gggcagagcggtagc

SEQ ID NO: 1088 - DNA, 15 bp, Homo sapiens
ggggcagagcggtag

SEQ ID NO: 1089 - DNA, 15 bp, Homo sapiens
gggggcagagcggta

SEQ ID NO: 1090 - DNA, 15 bp, Homo sapiens
agggggcagagcggt

SEQ ID NO: 1091 - DNA, 15 bp, Homo sapiens
gagggggcagagcgg

SEQ ID NO: 1092 - DNA, 15 bp, Homo sapiens
ggagggggcagagcg

SEQ ID NO: 1093 - DNA, 15 bp, Homo sapiens
aggagggggcagagc

SEQ ID NO: 1094 - DNA, 15 bp, Homo sapiens
taggagggggcagag

SEQ ID NO: 1095 - DNA, 15 bp, Homo sapiens
gtaggagggggcaga

SEQ ID NO: 1096 - DNA, 15 bp, Homo sapiens
ggtaggagggggcag

SEQ ID NO: 1097 - DNA, 15 bp, Homo sapiens
cggtaggagggggca

SEQ ID NO: 1098 - DNA, 15 bp, Homo sapiens
gcggtaggagggggc

SEQ ID NO: 1099 - DNA, 15 bp, Homo sapiens
ggcggtaggaggggg

SEQ ID NO: 1100 - DNA, 15 bp, Homo sapiens
gggcggtaggagggg

SEQ ID NO: 1101 - DNA, 15 bp, Homo sapiens
ggggcggtaggaggg

SEQ ID NO: 1102 - DNA, 15 bp, Homo sapiens
gggggcggtaggagg

SEQ ID NO: 1103 - DNA, 15 bp, Homo sapiens
agggggcggtaggag

SEQ ID NO: 1104 - DNA, 15 bp, Homo sapiens
cagggggcggtagga

SEQ ID NO: 1105 - DNA, 15 bp, Homo sapiens
gcagggggcggtagg

SEQ ID NO: 1106 - DNA, 15 bp, Homo sapiens
ggcagggggcggtag

SEQ ID NO: 1107 - DNA, 15 bp, Homo sapiens
gggcagggggcggta

SEQ ID NO: 1108 - DNA, 15 bp, Homo sapiens
agggcagggggcggt

SEQ ID NO: 1109 - DNA, 15 bp, Homo sapiens
cagggcagggggcgg

SEQ ID NO: 1110 - DNA, 15 bp, Homo sapiens
gcagggcagggggcg

SEQ ID NO: 1111 - DNA, 15 bp, Homo sapiens
ggcagggcagggggc

SEQ ID NO: 1112 - DNA, 15 bp, Homo sapiens
gggcagggcaggggg

SEQ ID NO: 1113 - DNA, 15 bp, Homo sapiens
agggcagggcagggg

SEQ ID NO: 1114 - DNA, 15 bp, Homo sapiens
cagggcagggcaggg

SEQ ID NO: 1115 - DNA, 15 bp, Homo sapiens
gcagggcagggcagg

SEQ ID NO: 1116 - DNA, 15 bp, Homo sapiens
ggcagggcagggcag

SEQ ID NO: 1117 - DNA, 15 bp, Homo sapiens
gggcagggcagggca

SEQ ID NO: 1118 - DNA, 15 bp, Homo sapiens
agggcagggcagggc

SEQ ID NO: 1119 - DNA, 15 bp, Homo sapiens
gagggcagggcaggg

SEQ ID NO: 1120 - DNA, 15 bp, Homo sapiens
ggagggcagggcagg

SEQ ID NO: 1121 - DNA, 15 bp, Homo sapiens
gggagggcagggcag

SEQ ID NO: 1122 - DNA, 15 bp, Homo sapiens
ggggagggcagggca

SEQ ID NO: 1123 - DNA, 15 bp, Homo sapiens
aggggagggcagggc

SEQ ID NO: 1124 - DNA, 15 bp, Homo sapiens
gaggggagggcaggg

SEQ ID NO: 1125 - DNA, 15 bp, Homo sapiens
cgaggggagggcagg

SEQ ID NO: 1126 - DNA, 15 bp, Homo sapiens
gcgaggggagggcag

SEQ ID NO: 1127 - DNA, 15 bp, Homo sapiens
ggcgaggggagggca

SEQ ID NO: 1128 - DNA, 15 bp, Homo sapiens
gggcgaggggagggc

SEQ ID NO: 1129 - DNA, 15 bp, Homo sapiens
cgggcgaggggaggg

SEQ ID NO: 1130 - DNA, 15 bp, Homo sapiens
ccgggcgaggggagg

SEQ ID NO: 1131 - DNA, 15 bp, Homo sapiens
gccgggcgaggggag

SEQ ID NO: 1132 - DNA, 15 bp, Homo sapiens
cgccgggcgagggga

SEQ ID NO: 1133 - DNA, 15 bp, Homo sapiens
gcgccgggcgagggg

SEQ ID NO: 1134 - DNA, 15 bp, Homo sapiens
cgcgccgggcgaggg

SEQ ID NO: 1135 - DNA, 15 bp, Homo sapiens
ccgcgccgggcgagg

SEQ ID NO: 1136 - DNA, 15 bp, Homo sapiens
accgcgccgggcgag

SEQ ID NO: 1137 - DNA, 15 bp, Homo sapiens
gaccgcgccgggcga

SEQ ID NO: 1138 - DNA, 15 bp, Homo sapiens
ggaccgcgccgggcg

SEQ ID NO: 1139 - DNA, 15 bp, Homo sapiens
gggaccgcgccgggc

SEQ ID NO: 1140 - DNA, 15 bp, Homo sapiens
cgggaccgcgccggg

SEQ ID NO: 1141 - DNA, 15 bp, Homo sapiens
acgggaccgcgccgg

SEQ ID NO: 1142 - DNA, 15 bp, Homo sapiens
gacgggaccgcgccg

SEQ ID NO: 1143 - DNA, 15 bp, Homo sapiens
ggacgggaccgcgcc

SEQ ID NO: 1144 - DNA, 15 bp, Homo sapiens
cggacgggaccgcgc

SEQ ID NO: 1145 - DNA, 15 bp, Homo sapiens
gcggacgggaccgcg

SEQ ID NO: 1146 - DNA, 15 bp, Homo sapiens
ggcggacgggaccgc

SEQ ID NO: 1147 - DNA, 15 bp, Homo sapiens
aggcggacgggaccg

SEQ ID NO: 1148 - DNA, 15 bp, Homo sapiens
gaggcggacgggacc

SEQ ID NO: 1149 - DNA, 15 bp, Homo sapiens
agaggcggacgggac

SEQ ID NO: 1150 - DNA, 15 bp, Homo sapiens
gagaggcggacggga

SEQ ID NO: 1151 - DNA, 15 bp, Homo sapiens
cgagaggcggacggg

SEQ ID NO: 1152 - DNA, 15 bp, Homo sapiens
gcgagaggcggacgg

SEQ ID NO: 1153 - DNA, 15 bp, Homo sapiens
agcgagaggcggacg

SEQ ID NO: 1154 - DNA, 15 bp, Homo sapiens
gagcgagaggcggac

SEQ ID NO: 1155 - DNA, 15 bp, Homo sapiens
cgagcgagaggcgga

SEQ ID NO: 1156 - DNA, 15 bp, Homo sapiens
gcgagcgagaggcgg

SEQ ID NO: 1157 - DNA, 15 bp, Homo sapiens
ggcgagcgagaggcg

SEQ ID NO: 1158 - DNA, 15 bp, Homo sapiens
aggcgagcgagaggc

SEQ ID NO: 1159 - DNA, 15 bp, Homo sapiens
gaggcgagcgagagg

SEQ ID NO: 1160 - DNA, 15 bp, Homo sapiens
ggaggcgagcgagag

SEQ ID NO: 1161 - DNA, 15 bp, Homo sapiens
gggaggcgagcgaga

SEQ ID NO: 1162 - DNA, 15 bp, Homo sapiens
cgggaggcgagcgag

SEQ ID NO: 1163 - DNA, 15 bp, Homo sapiens
gcgggaggcgagcga

SEQ ID NO: 1164 - DNA, 15 bp, Homo sapiens
ggcgggaggcgagcg

SEQ ID NO: 1165 - DNA, 15 bp, Homo sapiens
aggcgggaggcgagc

SEQ ID NO: 1166 - DNA, 15 bp, Homo sapiens
gaggcgggaggcgag

SEQ ID NO: 1167 - DNA, 15 bp, Homo sapiens
ggaggcgggaggcga

SEQ ID NO: 1168 - DNA, 15 bp, Homo sapiens
gggaggcgggaggcg

SEQ ID NO: 1169 - DNA, 15 bp, Homo sapiens
ggggaggcgggaggc

SEQ ID NO: 1170 - DNA, 15 bp, Homo sapiens
aggggaggcgggagg

SEQ ID NO: 1171 - DNA, 15 bp, Homo sapiens
gaggggaggcgggag

SEQ ID NO: 1172 - DNA, 15 bp, Homo sapiens
cgaggggaggcggga

SEQ ID NO: 1173 - DNA, 15 bp, Homo sapiens
ccgaggggaggcggg

SEQ ID NO: 1174 - DNA, 15 bp, Homo sapiens
accgaggggaggcgg

SEQ ID NO: 1175 - DNA, 15 bp, Homo sapiens
gaccgaggggaggcg

SEQ ID NO: 1176 - DNA, 15 bp, Homo sapiens
agaccgaggggaggc

SEQ ID NO: 1177 - DNA, 15 bp, Homo sapiens
aagaccgaggggagg

SEQ ID NO: 1178 - DNA, 15 bp, Homo sapiens
gaagaccgaggggag

SEQ ID NO: 1179 - DNA, 15 bp, Homo sapiens
ggaagaccgagggga

SEQ ID NO: 1180 - DNA, 15 bp, Homo sapiens
cggaagaccgagggg

SEQ ID NO: 1181 - DNA, 15 bp, Homo sapiens
tcggaagaccgaggg

SEQ ID NO: 1182 - DNA, 15 bp, Homo sapiens
ctcggaagaccgagg

SEQ ID NO: 1183 - DNA, 15 bp, Homo sapiens
cctcggaagaccgag

SEQ ID NO: 1184 - DNA, 15 bp, Homo sapiens
gcctcggaagaccga

SEQ ID NO: 1185 - DNA, 15 bp, Homo sapiens
cgcctcggaagaccg

SEQ ID NO: 1186 - DNA, 15 bp, Homo sapiens
gcgcctcggaagacc

SEQ ID NO: 1187 - DNA, 15 bp, Homo sapiens
ggcgcctcggaagac

SEQ ID NO: 1188 - DNA, 15 bp, Homo sapiens
gggcgcctcggaaga

SEQ ID NO: 1189 - DNA, 15 bp, Homo sapiens
cgggcgcctcggaag

SEQ ID NO: 1190 - DNA, 15 bp, Homo sapiens
ccgggcgcctcggaa

SEQ ID NO: 1191 - DNA, 15 bp, Homo sapiens
cccgggcgcctcgga

SEQ ID NO: 1192 - DNA, 15 bp, Homo sapiens
gcccgggcgcctcgg

SEQ ID NO: 1193 - DNA, 15 bp, Homo sapiens
agcccgggcgcctcg

SEQ ID NO: 1194 - DNA, 15 bp, Homo sapiens
gagcccgggcgcctc

SEQ ID NO: 1195 - DNA, 15 bp, Homo sapiens
ggagcccgggcgcct

SEQ ID NO: 1196 - DNA, 15 bp, Homo sapiens
gggagcccgggcgcc

SEQ ID NO: 1197 - DNA, 15 bp, Homo sapiens
cgggagcccgggcgc

SEQ ID NO: 1198 - DNA, 15 bp, Homo sapiens
ccgggagcccgggcg

SEQ ID NO: 1199 - DNA, 15 bp, Homo sapiens
gccgggagcccgggc

SEQ ID NO: 1200 - DNA, 15 bp, Homo sapiens
cgccgggagcccggg

SEQ ID NO: 1201 - DNA, 15 bp, Homo sapiens
gcgccgggagcccgg

SEQ ID NO: 1202 - DNA, 15 bp, Homo sapiens
cgcgccgggagcccg

SEQ ID NO: 1203 - DNA, 15 bp, Homo sapiens
ccgcgccgggagccc

SEQ ID NO: 1204 - DNA, 15 bp, Homo sapiens
gccgcgccgggagcc

SEQ ID NO: 1205 - DNA, 15 bp, Homo sapiens
cgccgcgccgggagc

SEQ ID NO: 1206 - DNA, 15 bp, Homo sapiens
ccgccgcgccgggag

SEQ ID NO: 1207 - DNA, 15 bp, Homo sapiens
gccgccgcgccggga

SEQ ID NO: 1208 - DNA, 15 bp, Homo sapiens
cgccgccgcgccggg

SEQ ID NO: 1209 - DNA, 15 bp, Homo sapiens
ccgccgccgcgccgg

SEQ ID NO: 1210 - DNA, 15 bp, Homo sapiens
tccgccgccgcgccg

SEQ ID NO: 1211 - DNA, 15 bp, Homo sapiens
ctccgccgccgcgcc

SEQ ID NO: 1212 - DNA, 15 bp, Homo sapiens
cctccgccgccgcgc

SEQ ID NO: 1213 - DNA, 15 bp, Homo sapiens
ccctccgccgccgcg

SEQ ID NO: 1214 - DNA, 15 bp, Homo sapiens
cccctccgccgccgc

SEQ ID NO: 1215 - DNA, 15 bp, Homo sapiens
ccccctccgccgccg

SEQ ID NO: 1216 - DNA, 15 bp, Homo sapiens
gccccctccgccgcc

SEQ ID NO: 1217 - DNA, 15 bp, Homo sapiens
cgccccctccgccgc

SEQ ID NO: 1218 - DNA, 15 bp, Homo sapiens
ccgccccctccgccg

SEQ ID NO: 1219 - DNA, 15 bp, Homo sapiens
cccgccccctccgcc

SEQ ID NO: 1220 - DNA, 15 bp, Homo sapiens
gcccgccccctccgc

SEQ ID NO: 1221 - DNA, 15 bp, Homo sapiens
tgcccgccccctccg

SEQ ID NO: 1222 - DNA, 15 bp, Homo sapiens
ctgcccgccccctcc

SEQ ID NO: 1223 - DNA, 15 bp, Homo sapiens
cctgcccgccccctc

SEQ ID NO: 1224 - DNA, 15 bp, Homo sapiens
gcctgcccgccccct

SEQ ID NO: 1225 - DNA, 15 bp, Homo sapiens
ggcctgcccgccccc

SEQ ID NO: 1226 - DNA, 15 bp, Homo sapiens
cggcctgcccgcccc

SEQ ID NO: 1227 - DNA, 15 bp, Homo sapiens
ccggcctgcccgccc

SEQ ID NO: 1228 - DNA, 15 bp, Homo sapiens
gccggcctgcccgcc

SEQ ID NO: 1229 - DNA, 15 bp, Homo sapiens
cgccggcctgcccgc

SEQ ID NO: 1230 - DNA, 15 bp, Homo sapiens
ccgccggcctgcccg

SEQ ID NO: 1231 - DNA, 15 bp, Homo sapiens
cccgccggcctgccc

SEQ ID NO: 1232 - DNA, 15 bp, Homo sapiens
gcccgccggcctgcc

SEQ ID NO: 1233 - DNA, 15 bp, Homo sapiens
cgcccgccggcctgc

SEQ ID NO: 1234 - DNA, 15 bp, Homo sapiens
ccgcccgccggcctg

SEQ ID NO: 1235 - DNA, 15 bp, Homo sapiens
accgcccgccggcct

SEQ ID NO: 1236 - DNA, 15 bp, Homo sapiens
caccgcccgccggcc

SEQ ID NO: 1237 - DNA, 15 bp, Homo sapiens
tcaccgcccgccggc

SEQ ID NO: 1238 - DNA, 15 bp, Homo sapiens
atcaccgcccgccgg

SEQ ID NO: 1239 - DNA, 15 bp, Homo sapiens
catcaccgcccgccg

SEQ ID NO: 1240 - DNA, 15 bp, Homo sapiens
acatcaccgcccgcc

SEQ ID NO: 1241 - DNA, 15 bp, Homo sapiens
cacatcaccgcccgc

SEQ ID NO: 1242 - DNA, 15 bp, Homo sapiens
ccacatcaccgcccg

SEQ ID NO: 1243 - DNA, 15 bp, Homo sapiens
gccacatcaccgccc

SEQ ID NO: 1244 - DNA, 15 bp, Homo sapiens
cgccacatcaccgcc

SEQ ID NO: 1245 - DNA, 15 bp, Homo sapiens
ccgccacatcaccgc

SEQ ID NO: 1246 - DNA, 15 bp, Homo sapiens
cccgccacatcaccg

SEQ ID NO: 1247 - DNA, 15 bp, Homo sapiens
tcccgccacatcacc

SEQ ID NO: 1248 - DNA, 15 bp, Homo sapiens
gtcccgccacatcac

SEQ ID NO: 1249 - DNA, 15 bp, Homo sapiens
agtcccgccacatca

SEQ ID NO: 1250 - DNA, 15 bp, Homo sapiens
gagtcccgccacatc

SEQ ID NO: 1251 - DNA, 15 bp, Homo sapiens
agagtcccgccacat

SEQ ID NO: 1252 - DNA, 15 bp, Homo sapiens
aagagtcccgccaca

SEQ ID NO: 1253 - DNA, 15 bp, Homo sapiens
aaagagtcccgccac

SEQ ID NO: 1254 - DNA, 15 bp, Homo sapiens
taaagagtcccgcca

SEQ ID NO: 1255 - DNA, 15 bp, Homo sapiens
ataaagagtcccgcc

SEQ ID NO: 1256 - DNA, 15 bp, Homo sapiens
cataaagagtcccgc

SEQ ID NO: 1257 - DNA, 15 bp, Homo sapiens
gcataaagagtcccg

SEQ ID NO: 1258 - DNA, 15 bp, Homo sapiens
cgcataaagagtccc

SEQ ID NO: 1259 - DNA, 15 bp, Homo sapiens
gcgcataaagagtcc

SEQ ID NO: 1260 - DNA, 15 bp, Homo sapiens
agcgcataaagagtc

SEQ ID NO: 1261 - DNA, 15 bp, Homo sapiens
cagcgcataaagagt

SEQ ID NO: 1262 - DNA, 15 bp, Homo sapiens
gcagcgcataaagag

SEQ ID NO: 1263 - DNA, 15 bp, Homo sapiens
cgcagcgcataaaga

SEQ ID NO: 1264 - DNA, 15 bp, Homo sapiens
ccgcagcgcataaag

SEQ ID NO: 1265 - DNA, 15 bp, Homo sapiens
gccgcagcgcataaa

SEQ ID NO: 1266 - DNA, 15 bp, Homo sapiens
tgccgcagcgcataa

SEQ ID NO: 1267 - DNA, 15 bp, Homo sapiens
ctgccgcagcgcata

SEQ ID NO: 1268 - DNA, 15 bp, Homo sapiens
cctgccgcagcgcat

SEQ ID NO: 1269 - DNA, 15 bp, Homo sapiens
tcctgccgcagcgca

SEQ ID NO: 1270 - DNA, 15 bp, Homo sapiens
atcctgccgcagcgc

SEQ ID NO: 1271 - DNA, 15 bp, Homo sapiens
tatcctgccgcagcg

SEQ ID NO: 1272 - DNA, 15 bp, Homo sapiens
gtatcctgccgcagc

SEQ ID NO: 1273 - DNA, 15 bp, Homo sapiens
cgtatcctgccgcag

SEQ ID NO: 1274 - DNA, 15 bp, Homo sapiens
gcgtatcctgccgca

SEQ ID NO: 1275 - DNA, 15 bp, Homo sapiens
cgcgtatcctgccgc

SEQ ID NO: 1276 - DNA, 15 bp, Homo sapiens
gcgcgtatcctgccg

SEQ ID NO: 1277 - DNA, 15 bp, Homo sapiens
agcgcgtatcctgcc

SEQ ID NO: 1278 - DNA, 15 bp, Homo sapiens
gagcgcgtatcctgc

SEQ ID NO: 1279 - DNA, 15 bp, Homo sapiens
cgagcgcgtatcctg

SEQ ID NO: 1280 - DNA, 15 bp, Homo sapiens
ccgagcgcgtatcct

SEQ ID NO: 1281 - DNA, 15 bp, Homo sapiens
gccgagcgcgtatcc

SEQ ID NO: 1282 - DNA, 15 bp, Homo sapiens
cgccgagcgcgtatc

SEQ ID NO: 1283 - DNA, 15 bp, Homo sapiens
gcgccgagcgcgtat

SEQ ID NO: 1284 - DNA, 15 bp, Homo sapiens
agcgccgagcgcgta

SEQ ID NO: 1285 - DNA, 15 bp, Homo sapiens
cagcgccgagcgcgt

SEQ ID NO: 1286 - DNA, 15 bp, Homo sapiens
ccagcgccgagcgcg

SEQ ID NO: 1287 - DNA, 15 bp, Homo sapiens
cccagcgccgagcgc

SEQ ID NO: 1288 - DNA, 15 bp, Homo sapiens
tcccagcgccgagcg

SEQ ID NO: 1289 - DNA, 15 bp, Homo sapiens
gtcccagcgccgagc

SEQ ID NO: 1290 - DNA, 15 bp, Homo sapiens
cgtcccagcgccgag

SEQ ID NO: 1291 - DNA, 15 bp, Homo sapiens
gcgtcccagcgccga

SEQ ID NO: 1292 - DNA, 15 bp, Homo sapiens
cgcgtcccagcgccg

SEQ ID NO: 1293 - DNA, 15 bp, Homo sapiens
tcgcgtcccagcgcc

SEQ ID NO: 1294 - DNA, 15 bp, Homo sapiens
gtcgcgtcccagcgc

SEQ ID NO: 1295 - DNA, 15 bp, Homo sapiens
agtcgcgtcccagcg

SEQ ID NO: 1296 - DNA, 15 bp, Homo sapiens
cagtcgcgtcccagc

SEQ ID NO: 1297 - DNA, 15 bp, Homo sapiens
gcagtcgcgtcccag

SEQ ID NO: 1298 - DNA, 15 bp, Homo sapiens
cgcagtcgcgtccca

SEQ ID NO: 1299 - DNA, 15 bp, Homo sapiens
gcgcagtcgcgtccc

SEQ ID NO: 1300 - DNA, 15 bp, Homo sapiens
agcgcagtcgcgtcc

SEQ ID NO: 1301 - DNA, 15 bp, Homo sapiens
gagcgcagtcgcgtc

SEQ ID NO: 1302 - DNA, 15 bp, Homo sapiens
tgagcgcagtcgcgt

SEQ ID NO: 1303 - DNA, 15 bp, Homo sapiens
ctgagcgcagtcgcg

SEQ ID NO: 1304 - DNA, 15 bp, Homo sapiens
actgagcgcagtcgc

SEQ ID NO: 1305 - DNA, 15 bp, Homo sapiens
aactgagcgcagtcg

SEQ ID NO: 1306 - DNA, 15 bp, Homo sapiens
gaactgagcgcagtc

SEQ ID NO: 1307 - DNA, 15 bp, Homo sapiens
agaactgagcgcagt

SEQ ID NO: 1308 - DNA, 15 bp, Homo sapiens
gagaactgagcgcag

SEQ ID NO: 1309 - DNA, 15 bp, Homo sapiens
agagaactgagcgca

SEQ ID NO: 1310 - DNA, 15 bp, Homo sapiens
gagagaactgagcgc

SEQ ID NO: 1311 - DNA, 15 bp, Homo sapiens
ggagagaactgagcg

SEQ ID NO: 1312 - DNA, 15 bp, Homo sapiens
aggagagaactgagc

SEQ ID NO: 1313 - DNA, 15 bp, Homo sapiens
gaggagagaactgag

SEQ ID NO: 1314 - DNA, 15 bp, Homo sapiens
agaggagagaactga

SEQ ID NO: 1315 - DNA, 15 bp, Homo sapiens
gagaggagagaactg

SEQ ID NO: 1316 - DNA, 15 bp, Homo sapiens
cgagaggagagaact

SEQ ID NO: 1317 - DNA, 15 bp, Homo sapiens
ccgagaggagagaac

SEQ ID NO: 1318 - DNA, 15 bp, Homo sapiens
tccgagaggagagaa

SEQ ID NO: 1319 - DNA, 15 bp, Homo sapiens
ttccgagaggagaga

SEQ ID NO: 1320 - DNA, 15 bp, Homo sapiens
cttccgagaggagag

SEQ ID NO: 1321 - DNA, 15 bp, Homo sapiens
gcttccgagaggaga

SEQ ID NO: 1322 - DNA, 15 bp, Homo sapiens
agcttccgagaggag

SEQ ID NO: 1323 - DNA, 15 bp, Homo sapiens
cagcttccgagagga

SEQ ID NO: 1324 - DNA, 15 bp, Homo sapiens
gcagcttccgagagg

SEQ ID NO: 1325 - DNA, 15 bp, Homo sapiens
tgcagcttccgagag

SEQ ID NO: 1326 - DNA, 15 bp, Homo sapiens
ctgcagcttccgaga

SEQ ID NO: 1327 - DNA, 15 bp, Homo sapiens
gctgcagcttccgag

SEQ ID NO: 1328 - DNA, 15 bp, Homo sapiens
ggctgcagcttccga

SEQ ID NO: 1329 - DNA, 15 bp, Homo sapiens
tggctgcagcttccg

SEQ ID NO: 1330 - DNA, 15 bp, Homo sapiens
atggctgcagcttcc

SEQ ID NO: 1331 - DNA, 15 bp, Homo sapiens
catggctgcagcttc

SEQ ID NO: 1332 - DNA, 15 bp, Homo sapiens
tcatggctgcagctt

SEQ ID NO: 1333 - DNA, 15 bp, Homo sapiens
atcatggctgcagct

SEQ ID NO: 1334 - DNA, 15 bp, Homo sapiens
catcatggctgcagc

SEQ ID NO: 1335 - DNA, 15 bp, Homo sapiens
ccatcatggctgcag

SEQ ID NO: 1336 - DNA, 15 bp, Homo sapiens
tccatcatggctgca

SEQ ID NO: 1337 - DNA, 15 bp, Homo sapiens
ttccatcatggctgc

SEQ ID NO: 1338 - DNA, 15 bp, Homo sapiens
cttccatcatggctg

SEQ ID NO: 1339 - DNA, 15 bp, Homo sapiens
acttccatcatggct

SEQ ID NO: 1340 - DNA, 15 bp, Homo sapiens
aacttccatcatggc

SEQ ID NO: 1341 - DNA, 15 bp, Homo sapiens
aaacttccatcatgg

SEQ ID NO: 1342 - DNA, 15 bp, Homo sapiens
caaacttccatcatg

SEQ ID NO: 1343 - DNA, 15 bp, Homo sapiens
tcaaacttccatcat

SEQ ID NO: 1344 - DNA, 15 bp, Homo sapiens
ctcaaacttccatca

SEQ ID NO: 1345 - DNA, 15 bp, Homo sapiens
tctcaaacttccatc

SEQ ID NO: 1346 - DNA, 15 bp, Homo sapiens
ctctcaaacttccat

SEQ ID NO: 1347 - DNA, 15 bp, Homo sapiens
actctcaaacttcca

SEQ ID NO: 1348 - DNA, 15 bp, Homo sapiens
aactctcaaacttcc

SEQ ID NO: 1349 - DNA, 15 bp, Homo sapiens
caactctcaaacttc

SEQ ID NO: 1350 - DNA, 15 bp, Homo sapiens
tcaactctcaaactt

SEQ ID NO: 1351 - DNA, 15 bp, Homo sapiens
ctcaactctcaaact

SEQ ID NO: 1352 - DNA, 15 bp, Homo sapiens
gctcaactctcaaac

SEQ ID NO: 1353 - DNA, 15 bp, Homo sapiens
ggctcaactctcaaa

SEQ ID NO: 1354 - DNA, 15 bp, Homo sapiens
cggctcaactctcaa

SEQ ID NO: 1355 - DNA, 15 bp, Homo sapiens
gcggctcaactctca

SEQ ID NO: 1356 - DNA, 15 bp, Homo sapiens
agcggctcaactctc

SEQ ID NO: 1357 - DNA, 15 bp, Homo sapiens
cagcggctcaactct

SEQ ID NO: 1358 - DNA, 15 bp, Homo sapiens
acagcggctcaactc

SEQ ID NO: 1359 - DNA, 15 bp, Homo sapiens
cacagcggctcaact

SEQ ID NO: 1360 - DNA, 15 bp, Homo sapiens
tcacagcggctcaac

SEQ ID NO: 1361 - DNA, 15 bp, Homo sapiens
ctcacagcggctcaa

SEQ ID NO: 1362 - DNA, 15 bp, Homo sapiens
cctcacagcggctca

SEQ ID NO: 1363 - DNA, 15 bp, Homo sapiens
gcctcacagcggctc

SEQ ID NO: 1364 - DNA, 15 bp, Homo sapiens
cgcctcacagcggct

SEQ ID NO: 1365 - DNA, 15 bp, Homo sapiens
tcgcctcacagcggc

SEQ ID NO: 1366 - DNA, 15 bp, Homo sapiens
ctcgcctcacagcgg

SEQ ID NO: 1367 - DNA, 15 bp, Homo sapiens
cctcgcctcacagcg

SEQ ID NO: 1368 - DNA, 15 bp, Homo sapiens
gcctcgcctcacagc

SEQ ID NO: 1369 - DNA, 15 bp, Homo sapiens
ggcctcgcctcacag

SEQ ID NO: 1370 - DNA, 15 bp, Homo sapiens
cggcctcgcctcaca

SEQ ID NO: 1371 - DNA, 15 bp, Homo sapiens
ccggcctcgcctcac

SEQ ID NO: 1372 - DNA, 15 bp, Homo sapiens
cccggcctcgcctca

SEQ ID NO: 1373 - DNA, 15 bp, Homo sapiens
gcccggcctcgcctc

SEQ ID NO: 1374 - DNA, 15 bp, Homo sapiens
agcccggcctcgcct

SEQ ID NO: 1375 - DNA, 15 bp, Homo sapiens
gagcccggcctcgcc

SEQ ID NO: 1376 - DNA, 15 bp, Homo sapiens
tgagcccggcctcgc

SEQ ID NO: 1377 - DNA, 15 bp, Homo sapiens
ctgagcccggcctcg

SEQ ID NO: 1378 - DNA, 15 bp, Homo sapiens
cctgagcccggcctc

SEQ ID NO: 1379 - DNA, 15 bp, Homo sapiens
gcctgagcccggcct

SEQ ID NO: 1380 - DNA, 15 bp, Homo sapiens
cgcctgagcccggcc

SEQ ID NO: 1381 - DNA, 15 bp, Homo sapiens
tcgcctgagcccggc

SEQ ID NO: 1382 - DNA, 15 bp, Homo sapiens
ctcgcctgagcccgg

SEQ ID NO: 1383 - DNA, 15 bp, Homo sapiens
cctcgcctgagcccg

SEQ ID NO: 1384 - DNA, 15 bp, Homo sapiens
ccctcgcctgagccc

SEQ ID NO: 1385 - DNA, 15 bp, Homo sapiens
tccctcgcctgagcc

SEQ ID NO: 1386 - DNA, 15 bp, Homo sapiens
ctccctcgcctgagc

SEQ ID NO: 1387 - DNA, 15 bp, Homo sapiens
tctccctcgcctgag

SEQ ID NO: 1388 - DNA, 15 bp, Homo sapiens
atctccctcgcctga

SEQ ID NO: 1389 - DNA, 15 bp, Homo sapiens
catctccctcgcctg

SEQ ID NO: 1390 - DNA, 15 bp, Homo sapiens
tcatctccctcgcct

SEQ ID NO: 1391 - DNA, 15 bp, Homo sapiens
ctcatctccctcgcc

SEQ ID NO: 1392 - DNA, 15 bp, Homo sapiens
tctcatctccctcgc

SEQ ID NO: 1393 - DNA, 15 bp, Homo sapiens
ctctcatctccctcg

SEQ ID NO: 1394 - DNA, 15 bp, Homo sapiens
tctctcatctccctc

SEQ ID NO: 1395 - DNA, 15 bp, Homo sapiens
gtctctcatctccct

SEQ ID NO: 1396 - DNA, 15 bp, Homo sapiens
cgtctctcatctccc

SEQ ID NO: 1397 - DNA, 15 bp, Homo sapiens
ccgtctctcatctcc

SEQ ID NO: 1398 - DNA, 15 bp, Homo sapiens
gccgtctctcatctc

SEQ ID NO: 1399 - DNA, 15 bp, Homo sapiens
cgccgtctctcatct

SEQ ID NO: 1400 - DNA, 15 bp, Homo sapiens
ccgccgtctctcatc

SEQ ID NO: 1401 - DNA, 15 bp, Homo sapiens
gccgccgtctctcat

SEQ ID NO: 1402 - DNA, 15 bp, Homo sapiens
cgccgccgtctctca

SEQ ID NO: 1403 - DNA, 15 bp, Homo sapiens
ccgccgccgtctctc

SEQ ID NO: 1404 - DNA, 15 bp, Homo sapiens
gccgccgccgtctct

SEQ ID NO: 1405 - DNA, 15 bp, Homo sapiens
ggccgccgccgtctc

SEQ ID NO: 1406 - DNA, 15 bp, Homo sapiens
cggccgccgccgtct

SEQ ID NO: 1407 - DNA, 15 bp, Homo sapiens
gcggccgccgccgtc

SEQ ID NO: 1408 - DNA, 15 bp, Homo sapiens
cgcggccgccgccgt

SEQ ID NO: 1409 - DNA, 15 bp, Homo sapiens
ccgcggccgccgccg

SEQ ID NO: 1410 - DNA, 15 bp, Homo sapiens
gccgcggccgccgcc

SEQ ID NO: 1411 - DNA, 15 bp, Homo sapiens
ggccgcggccgccgc

SEQ ID NO: 1412 - DNA, 15 bp, Homo sapiens
gggccgcggccgccg

SEQ ID NO: 1413 - DNA, 15 bp, Homo sapiens
cgggccgcggccgcc

SEQ ID NO: 1414 - DNA, 15 bp, Homo sapiens
ccgggccgcggccgc

SEQ ID NO: 1415 - DNA, 15 bp, Homo sapiens
tccgggccgcggccg

SEQ ID NO: 1416 - DNA, 15 bp, Homo sapiens
ctccgggccgcggcc

SEQ ID NO: 1417 - DNA, 15 bp, Homo sapiens
gctccgggccgcggc

SEQ ID NO: 1418 - DNA, 15 bp, Homo sapiens
ggctccgggccgcgg

SEQ ID NO: 1419 - DNA, 15 bp, Homo sapiens
gggctccgggccgcg

SEQ ID NO: 1420 - DNA, 15 bp, Homo sapiens
ggggctccgggccgc

SEQ ID NO: 1421 - DNA, 15 bp, Homo sapiens
aggggctccgggccg

SEQ ID NO: 1422 - DNA, 15 bp, Homo sapiens
gaggggctccgggcc

SEQ ID NO: 1423 - DNA, 15 bp, Homo sapiens
agaggggctccgggc

SEQ ID NO: 1424 - DNA, 15 bp, Homo sapiens
gagaggggctccggg

SEQ ID NO: 1425 - DNA, 15 bp, Homo sapiens
tgagaggggctccgg

SEQ ID NO: 1426 - DNA, 15 bp, Homo sapiens
ctgagaggggctccg

SEQ ID NO: 1427 - DNA, 15 bp, Homo sapiens
gctgagaggggctcc

SEQ ID NO: 1428 - DNA, 15 bp, Homo sapiens
cgctgagaggggctc

SEQ ID NO: 1429 - DNA, 15 bp, Homo sapiens
gcgctgagaggggct

SEQ ID NO: 1430 - DNA, 15 bp, Homo sapiens
ggcgctgagaggggc

SEQ ID NO: 1431 - DNA, 15 bp, Homo sapiens
aggcgctgagagggg

SEQ ID NO: 1432 - DNA, 15 bp, Homo sapiens
caggcgctgagaggg

SEQ ID NO: 1433 - DNA, 15 bp, Homo sapiens
acaggcgctgagagg

SEQ ID NO: 1434 - DNA, 15 bp, Homo sapiens
cacaggcgctgagag

SEQ ID NO: 1435 - DNA, 15 bp, Homo sapiens
tcacaggcgctgaga

SEQ ID NO: 1436 - DNA, 15 bp, Homo sapiens
ctcacaggcgctgag

SEQ ID NO: 1437 - DNA, 15 bp, Homo sapiens
gctcacaggcgctga

SEQ ID NO: 1438 - DNA, 15 bp, Homo sapiens
tgctcacaggcgctg

SEQ ID NO: 1439 - DNA, 15 bp, Homo sapiens
ctgctcacaggcgct

SEQ ID NO: 1440 - DNA, 15 bp, Homo sapiens
gctgctcacaggcgc

SEQ ID NO: 1441 - DNA, 15 bp, Homo sapiens
ggctgctcacaggcg

SEQ ID NO: 1442 - DNA, 15 bp, Homo sapiens
cggctgctcacaggc

SEQ ID NO: 1443 - DNA, 15 bp, Homo sapiens
gcggctgctcacagg

SEQ ID NO: 1444 - DNA, 15 bp, Homo sapiens
cgcggctgctcacag

SEQ ID NO: 1445 - DNA, 15 bp, Homo sapiens
ccgcggctgctcaca

SEQ ID NO: 1446 - DNA, 15 bp, Homo sapiens
cccgcggctgctcac

SEQ ID NO: 1447 - DNA, 15 bp, Homo sapiens
ccccgcggctgctca

SEQ ID NO: 1448 - DNA, 15 bp, Homo sapiens
cccccgcggctgctc

SEQ ID NO: 1449 - DNA, 15 bp, Homo sapiens
gcccccgcggctgct

SEQ ID NO: 1450 - DNA, 15 bp, Homo sapiens
tgcccccgcggctgc

SEQ ID NO: 1451 - DNA, 15 bp, Homo sapiens
ctgcccccgcggctg

SEQ ID NO: 1452 - DNA, 15 bp, Homo sapiens
gctgcccccgcggct

SEQ ID NO: 1453 - DNA, 15 bp, Homo sapiens
cgctgcccccgcggc

SEQ ID NO: 1454 - DNA, 15 bp, Homo sapiens
gcgctgcccccgcgg

SEQ ID NO: 1455 - DNA, 15 bp, Homo sapiens
ggcgctgcccccgcg

SEQ ID NO: 1456 - DNA, 15 bp, Homo sapiens
gggcgctgcccccgc

SEQ ID NO: 1457 - DNA, 15 bp, Homo sapiens
agggcgctgcccccg

SEQ ID NO: 1458 - DNA, 15 bp, Homo sapiens
gagggcgctgccccc

SEQ ID NO: 1459 - DNA, 15 bp, Homo sapiens
cgagggcgctgcccc

SEQ ID NO: 1460 - DNA, 15 bp, Homo sapiens
ccgagggcgctgccc

SEQ ID NO: 1461 - DNA, 15 bp, Homo sapiens
cccgagggcgctgcc

SEQ ID NO: 1462 - DNA, 15 bp, Homo sapiens
ccccgagggcgctgc

SEQ ID NO: 1463 - DNA, 15 bp, Homo sapiens
tccccgagggcgctg

SEQ ID NO: 1464 - DNA, 15 bp, Homo sapiens
ctccccgagggcgct

SEQ ID NO: 1465 - DNA, 15 bp, Homo sapiens
gctccccgagggcgc

SEQ ID NO: 1466 - DNA, 15 bp, Homo sapiens
ggctccccgagggcg

SEQ ID NO: 1467 - DNA, 15 bp, Homo sapiens
cggctccccgagggc

SEQ ID NO: 1468 - DNA, 15 bp, Homo sapiens
ccggctccccgaggg

SEQ ID NO: 1469 - DNA, 15 bp, Homo sapiens
gccggctccccgagg

SEQ ID NO: 1470 - DNA, 15 bp, Homo sapiens
ggccggctccccgag

SEQ ID NO: 1471 - DNA, 15 bp, Homo sapiens
cggccggctccccga

SEQ ID NO: 1472 - DNA, 15 bp, Homo sapiens
ccggccggctccccg

SEQ ID NO: 1473 - DNA, 15 bp, Homo sapiens
gccggccggctcccc

SEQ ID NO: 1474 - DNA, 15 bp, Homo sapiens
ggccggccggctccc

SEQ ID NO: 1475 - DNA, 15 bp, Homo sapiens
aggccggccggctcc

SEQ ID NO: 1476 - DNA, 15 bp, Homo sapiens
caggccggccggctc

SEQ ID NO: 1477 - DNA, 15 bp, Homo sapiens
gcaggccggccggct

SEQ ID NO: 1478 - DNA, 15 bp, Homo sapiens
cgcaggccggccggc

SEQ ID NO: 1479 - DNA, 15 bp, Homo sapiens
ccgcaggccggccgg

SEQ ID NO: 1480 - DNA, 15 bp, Homo sapiens
gccgcaggccggccg

SEQ ID NO: 1481 - DNA, 15 bp, Homo sapiens
cgccgcaggccggcc

SEQ ID NO: 1482 - DNA, 15 bp, Homo sapiens
ccgccgcaggccggc

SEQ ID NO: 1483 - DNA, 15 bp, Homo sapiens
gccgccgcaggccgg

SEQ ID NO: 1484 - DNA, 15 bp, Homo sapiens
cgccgccgcaggccg

SEQ ID NO: 1485 - DNA, 15 bp, Homo sapiens
ccgccgccgcaggcc

SEQ ID NO: 1486 - DNA, 15 bp, Homo sapiens
gccgccgccgcaggc

SEQ ID NO: 1487 - DNA, 15 bp, Homo sapiens
tgccgccgccgcagg

SEQ ID NO: 1488 - DNA, 15 bp, Homo sapiens
ctgccgccgccgcag

SEQ ID NO: 1489 - DNA, 15 bp, Homo sapiens
gctgccgccgccgca

SEQ ID NO: 1490 - DNA, 15 bp, Homo sapiens
cgctgccgccgccgc

SEQ ID NO: 1491 - DNA, 15 bp, Homo sapiens
ccgctgccgccgccg

SEQ ID NO: 1492 - DNA, 15 bp, Homo sapiens
gccgctgccgccgcc

SEQ ID NO: 1493 - DNA, 15 bp, Homo sapiens
cgccgctgccgccgc

SEQ ID NO: 1494 - DNA, 15 bp, Homo sapiens
ccgccgctgccgccg

SEQ ID NO: 1495 - DNA, 15 bp, Homo sapiens
gccgccgctgccgcc

SEQ ID NO: 1496 - DNA, 15 bp, Homo sapiens
cgccgccgctgccgc

SEQ ID NO: 1497 - DNA, 15 bp, Homo sapiens
acgccgccgctgccg

SEQ ID NO: 1498 - DNA, 15 bp, Homo sapiens
aacgccgccgctgcc

SEQ ID NO: 1499 - DNA, 15 bp, Homo sapiens
aaacgccgccgctgc

SEQ ID NO: 1500 - DNA, 15 bp, Homo sapiens
gaaacgccgccgctg

SEQ ID NO: 1501 - DNA, 15 bp, Homo sapiens
agaaacgccgccgct

SEQ ID NO: 1502 - DNA, 15 bp, Homo sapiens
gagaaacgccgccgc

SEQ ID NO: 1503 - DNA, 15 bp, Homo sapiens
cgagaaacgccgccg

SEQ ID NO: 1504 - DNA, 15 bp, Homo sapiens
gcgagaaacgccgcc

SEQ ID NO: 1505 - DNA, 15 bp, Homo sapiens
ggcgagaaacgccgc

SEQ ID NO: 1506 - DNA, 15 bp, Homo sapiens
aggcgagaaacgccg

SEQ ID NO: 1507 - DNA, 15 bp, Homo sapiens
gaggcgagaaacgcc

SEQ ID NO: 1508 - DNA, 15 bp, Homo sapiens
ggaggcgagaaacgc

SEQ ID NO: 1509 - DNA, 15 bp, Homo sapiens
aggaggcgagaaacg

SEQ ID NO: 1510 - DNA, 15 bp, Homo sapiens
gaggaggcgagaaac

SEQ ID NO: 1511 - DNA, 15 bp, Homo sapiens
agaggaggcgagaaa

SEQ ID NO: 1512 - DNA, 15 bp, Homo sapiens
aagaggaggcgagaa

SEQ ID NO: 1513 - DNA, 15 bp, Homo sapiens
gaagaggaggcgaga

SEQ ID NO: 1514 - DNA, 15 bp, Homo sapiens
cgaagaggaggcgag

SEQ ID NO: 1515 - DNA, 15 bp, Homo sapiens
acgaagaggaggcga

SEQ ID NO: 1516 - DNA, 15 bp, Homo sapiens
gacgaagaggaggcg

SEQ ID NO: 1517 - DNA, 15 bp, Homo sapiens
agacgaagaggaggc

SEQ ID NO: 1518 - DNA, 15 bp, Homo sapiens
aagacgaagaggagg

SEQ ID NO: 1519 - DNA, 15 bp, Homo sapiens
aaagacgaagaggag

SEQ ID NO: 1520 - DNA, 15 bp, Homo sapiens
aaaagacgaagagga

SEQ ID NO: 1521 - DNA, 15 bp, Homo sapiens
gaaaagacgaagagg

SEQ ID NO: 1522 - DNA, 15 bp, Homo sapiens
agaaaagacgaagag

SEQ ID NO: 1523 - DNA, 15 bp, Homo sapiens
tagaaaagacgaaga

SEQ ID NO: 1524 - DNA, 15 bp, Homo sapiens
ttagaaaagacgaag

SEQ ID NO: 1525 - DNA, 15 bp, Homo sapiens
gttagaaaagacgaa

SEQ ID NO: 1526 - DNA, 15 bp, Homo sapiens
ggttagaaaagacga

SEQ ID NO: 1527 - DNA, 15 bp, Homo sapiens
cggttagaaaagacg

SEQ ID NO: 1528 - DNA, 15 bp, Homo sapiens
acggttagaaaagac

SEQ ID NO: 1529 - DNA, 15 bp, Homo sapiens
cacggttagaaaaga

SEQ ID NO: 1530 - DNA, 15 bp, Homo sapiens
gcacggttagaaaag

SEQ ID NO: 1531 - DNA, 15 bp, Homo sapiens
tgcacggttagaaaa

SEQ ID NO: 1532 - DNA, 15 bp, Homo sapiens
ctgcacggttagaaa

SEQ ID NO: 1533 - DNA, 15 bp, Homo sapiens
gctgcacggttagaa

SEQ ID NO: 1534 - DNA, 15 bp, Homo sapiens
ggctgcacggttaga

SEQ ID NO: 1535 - DNA, 15 bp, Homo sapiens
aggctgcacggttag

SEQ ID NO: 1536 - DNA, 15 bp, Homo sapiens
gaggctgcacggtta

SEQ ID NO: 1537 - DNA, 15 bp, Homo sapiens
agaggctgcacggtt

SEQ ID NO: 1538 - DNA, 15 bp, Homo sapiens
aagaggctgcacggt

SEQ ID NO: 1539 - DNA, 15 bp, Homo sapiens
gaagaggctgcacgg

SEQ ID NO: 1540 - DNA, 15 bp, Homo sapiens
ggaagaggctgcacg

SEQ ID NO: 1541 - DNA, 15 bp, Homo sapiens
aggaagaggctgcac

SEQ ID NO: 1542 - DNA, 15 bp, Homo sapiens
gaggaagaggctgca

SEQ ID NO: 1543 - DNA, 15 bp, Homo sapiens
cgaggaagaggctgc

SEQ ID NO: 1544 - DNA, 15 bp, Homo sapiens
ccgaggaagaggctg

SEQ ID NO: 1545 - DNA, 15 bp, Homo sapiens
gccgaggaagaggct

SEQ ID NO: 1546 - DNA, 15 bp, Homo sapiens
agccgaggaagaggc

SEQ ID NO: 1547 - DNA, 15 bp, Homo sapiens
aagccgaggaagagg

SEQ ID NO: 1548 - DNA, 15 bp, Homo sapiens
gaagccgaggaagag

SEQ ID NO: 1549 - DNA, 15 bp, Homo sapiens
agaagccgaggaaga

SEQ ID NO: 1550 - DNA, 15 bp, Homo sapiens
gagaagccgaggaag

SEQ ID NO: 1551 - DNA, 15 bp, Homo sapiens
ggagaagccgaggaa

SEQ ID NO: 1552 - DNA, 15 bp, Homo sapiens
aggagaagccgagga

SEQ ID NO: 1553 - DNA, 15 bp, Homo sapiens
caggagaagccgagg

SEQ ID NO: 1554 - DNA, 15 bp, Homo sapiens
tcaggagaagccgag

SEQ ID NO: 1555 - DNA, 15 bp, Homo sapiens
ttcaggagaagccga

SEQ ID NO: 1556 - DNA, 15 bp, Homo sapiens
tttcaggagaagccg

SEQ ID NO: 1557 - DNA, 15 bp, Homo sapiens
ctttcaggagaagcc

SEQ ID NO: 1558 - DNA, 15 bp, Homo sapiens
cctttcaggagaagc

SEQ ID NO: 1559 - DNA, 15 bp, Homo sapiens
ccctttcaggagaag

SEQ ID NO: 1560 - DNA, 15 bp, Homo sapiens
tccctttcaggagaa

SEQ ID NO: 1561 - DNA, 15 bp, Homo sapiens
ttccctttcaggaga

SEQ ID NO: 1562 - DNA, 15 bp, Homo sapiens
cttccctttcaggag

SEQ ID NO: 1563 - DNA, 15 bp, Homo sapiens
ccttccctttcagga

SEQ ID NO: 1564 - DNA, 15 bp, Homo sapiens
accttccctttcagg

SEQ ID NO: 1565 - DNA, 15 bp, Homo sapiens
caccttccctttcag

SEQ ID NO: 1566 - DNA, 15 bp, Homo sapiens
ccaccttccctttca

SEQ ID NO: 1567 - DNA, 15 bp, Homo sapiens
tccaccttccctttc

SEQ ID NO: 1568 - DNA, 15 bp, Homo sapiens
ttccaccttcccttt

SEQ ID NO: 1569 - DNA, 15 bp, Homo sapiens
cttccaccttccctt

SEQ ID NO: 1570 - DNA, 15 bp, Homo sapiens
gcttccaccttccct

SEQ ID NO: 1571 - DNA, 15 bp, Homo sapiens
ggcttccaccttccc

SEQ ID NO: 1572 - DNA, 15 bp, Homo sapiens
cggcttccaccttcc

SEQ ID NO: 1573 - DNA, 15 bp, Homo sapiens
acggcttccaccttc

SEQ ID NO: 1574 - DNA, 15 bp, Homo sapiens
cacggcttccacctt

SEQ ID NO: 1575 - DNA, 15 bp, Homo sapiens
ccacggcttccacct

SEQ ID NO: 1576 - DNA, 15 bp, Homo sapiens
cccacggcttccacc

SEQ ID NO: 1577 - DNA, 15 bp, Homo sapiens
gcccacggcttccac

SEQ ID NO: 1578 - DNA, 15 bp, Homo sapiens
agcccacggcttcca

SEQ ID NO: 1579 - DNA, 15 bp, Homo sapiens
gagcccacggcttcc

SEQ ID NO: 1580 - DNA, 15 bp, Homo sapiens
cgagcccacggcttc

SEQ ID NO: 1581 - DNA, 15 bp, Homo sapiens
ccgagcccacggctt

SEQ ID NO: 1582 - DNA, 15 bp, Homo sapiens
cccgagcccacggct

SEQ ID NO: 1583 - DNA, 15 bp, Homo sapiens
gcccgagcccacggc

SEQ ID NO: 1584 - DNA, 15 bp, Homo sapiens
cgcccgagcccacgg

SEQ ID NO: 1585 - DNA, 15 bp, Homo sapiens
ccgcccgagcccacg

SEQ ID NO: 1586 - DNA, 15 bp, Homo sapiens
cccgcccgagcccac

SEQ ID NO: 1587 - DNA, 15 bp, Homo sapiens
tcccgcccgagccca

SEQ ID NO: 1588 - DNA, 15 bp, Homo sapiens
ctcccgcccgagccc

SEQ ID NO: 1589 - DNA, 15 bp, Homo sapiens
gctcccgcccgagcc

SEQ ID NO: 1590 - DNA, 15 bp, Homo sapiens
ggctcccgcccgagc

SEQ ID NO: 1591 - DNA, 15 bp, Homo sapiens
cggctcccgcccgag

SEQ ID NO: 1592 - DNA, 15 bp, Homo sapiens
ccggctcccgcccga

SEQ ID NO: 1593 - DNA, 15 bp, Homo sapiens
gccggctcccgcccg

SEQ ID NO: 1594 - DNA, 15 bp, Homo sapiens
agccggctcccgccc

SEQ ID NO: 1595 - DNA, 15 bp, Homo sapiens
cagccggctcccgcc

SEQ ID NO: 1596 - DNA, 15 bp, Homo sapiens
tcagccggctcccgc

SEQ ID NO: 1597 - DNA, 15 bp, Homo sapiens
ctcagccggctcccg

SEQ ID NO: 1598 - DNA, 15 bp, Homo sapiens
cctcagccggctccc

SEQ ID NO: 1599 - DNA, 15 bp, Homo sapiens
gcctcagccggctcc

SEQ ID NO: 1600 - DNA, 15 bp, Homo sapiens
cgcctcagccggctc

SEQ ID NO: 1601 - DNA, 15 bp, Homo sapiens
gcgcctcagccggct

SEQ ID NO: 1602 - DNA, 15 bp, Homo sapiens
cgcgcctcagccggc

SEQ ID NO: 1603 - DNA, 15 bp, Homo sapiens
ccgcgcctcagccgg

SEQ ID NO: 1604 - DNA, 15 bp, Homo sapiens
gccgcgcctcagccg

SEQ ID NO: 1605 - DNA, 15 bp, Homo sapiens
cgccgcgcctcagcc

SEQ ID NO: 1606 - DNA, 15 bp, Homo sapiens
ccgccgcgcctcagc

SEQ ID NO: 1607 - DNA, 15 bp, Homo sapiens
gccgccgcgcctcag

SEQ ID NO: 1608 - DNA, 15 bp, Homo sapiens
cgccgccgcgcctca

SEQ ID NO: 1609 - DNA, 15 bp, Homo sapiens
ccgccgccgcgcctc

SEQ ID NO: 1610 - DNA, 15 bp, Homo sapiens
gccgccgccgcgcct

SEQ ID NO: 1611 - DNA, 15 bp, Homo sapiens
cgccgccgccgcgcc

SEQ ID NO: 1612 - DNA, 15 bp, Homo sapiens
ccgccgccgccgcgc

SEQ ID NO: 1613 - DNA, 15 bp, Homo sapiens
gccgccgccgccgcg

SEQ ID NO: 1614 - DNA, 15 bp, Homo sapiens
cgccgccgccgccgc

SEQ ID NO: 1615 - DNA, 15 bp, Homo sapiens
ccgccgccgccgccg

SEQ ID NO: 1616 - DNA, 15 bp, Homo sapiens
gccgccgccgccgcc

SEQ ID NO: 1617 - DNA, 15 bp, Homo sapiens
tgccgccgccgccgc

SEQ ID NO: 1618 - DNA, 15 bp, Homo sapiens
gtgccgccgccgccg

SEQ ID NO: 1619 - DNA, 15 bp, Homo sapiens
ggtgccgccgccgcc

SEQ ID NO: 1620 - DNA, 15 bp, Homo sapiens
aggtgccgccgccgc

SEQ ID NO: 1621 - DNA, 15 bp, Homo sapiens
gaggtgccgccgccg

SEQ ID NO: 1622 - DNA, 15 bp, Homo sapiens
ggaggtgccgccgcc

SEQ ID NO: 1623 - DNA, 15 bp, Homo sapiens
gggaggtgccgccgc

SEQ ID NO: 1624 - DNA, 15 bp, Homo sapiens
cgggaggtgccgccg

SEQ ID NO: 1625 - DNA, 15 bp, Homo sapiens
gcgggaggtgccgcc

SEQ ID NO: 1626 - DNA, 15 bp, Homo sapiens
agcgggaggtgccgc

SEQ ID NO: 1627 - DNA, 15 bp, Homo sapiens
gagcgggaggtgccg

SEQ ID NO: 1628 - DNA, 15 bp, Homo sapiens
ggagcgggaggtgcc

SEQ ID NO: 1629 - DNA, 15 bp, Homo sapiens
aggagcgggaggtgc

SEQ ID NO: 1630 - DNA, 15 bp, Homo sapiens
caggagcgggaggtg

SEQ ID NO: 1631 - DNA, 15 bp, Homo sapiens
ccaggagcgggaggt

SEQ ID NO: 1632 - DNA, 15 bp, Homo sapiens
tccaggagcgggagg

SEQ ID NO: 1633 - DNA, 15 bp, Homo sapiens
ctccaggagcgggag

SEQ ID NO: 1634 - DNA, 15 bp, Homo sapiens
gctccaggagcggga

SEQ ID NO: 1635 - DNA, 15 bp, Homo sapiens
cgctccaggagcggg

SEQ ID NO: 1636 - DNA, 15 bp, Homo sapiens
ccgctccaggagcgg

SEQ ID NO: 1637 - DNA, 15 bp, Homo sapiens
cccgctccaggagcg

SEQ ID NO: 1638 - DNA, 15 bp, Homo sapiens
ccccgctccaggagc

SEQ ID NO: 1639 - DNA, 15 bp, Homo sapiens
cccccgctccaggag

SEQ ID NO: 1640 - DNA, 15 bp, Homo sapiens
ccccccgctccagga

SEQ ID NO: 1641 - DNA, 15 bp, Homo sapiens
cccccccgctccagg

SEQ ID NO: 1642 - DNA, 15 bp, Homo sapiens
tcccccccgctccag

SEQ ID NO: 1643 - DNA, 15 bp, Homo sapiens
ctcccccccgctcca

SEQ ID NO: 1644 - DNA, 15 bp, Homo sapiens
tctcccccccgctcc

SEQ ID NO: 1645 - DNA, 15 bp, Homo sapiens
ttctcccccccgctc

SEQ ID NO: 1646 - DNA, 15 bp, Homo sapiens
cttctcccccccgct

SEQ ID NO: 1647 - DNA, 15 bp, Homo sapiens
gcttctcccccccgc

SEQ ID NO: 1648 - DNA, 15 bp, Homo sapiens
cgcttctcccccccg

SEQ ID NO: 1649 - DNA, 15 bp, Homo sapiens
ccgcttctccccccc

SEQ ID NO: 1650 - DNA, 15 bp, Homo sapiens
gccgcttctcccccc

SEQ ID NO: 1651 - DNA, 15 bp, Homo sapiens
cgccgcttctccccc

SEQ ID NO: 1652 - DNA, 15 bp, Homo sapiens
ccgccgcttctcccc

SEQ ID NO: 1653 - DNA, 15 bp, Homo sapiens
gccgccgcttctccc

SEQ ID NO: 1654 - DNA, 15 bp, Homo sapiens
cgccgccgcttctcc

SEQ ID NO: 1655 - DNA, 15 bp, Homo sapiens
ccgccgccgcttctc

SEQ ID NO: 1656 - DNA, 15 bp, Homo sapiens
gccgccgccgcttct

SEQ ID NO: 1657 - DNA, 15 bp, Homo sapiens
cgccgccgccgcttc

SEQ ID NO: 1658 - DNA, 15 bp, Homo sapiens
ccgccgccgccgctt

SEQ ID NO: 1659 - DNA, 15 bp, Homo sapiens
gccgccgccgccgct

SEQ ID NO: 1660 - DNA, 15 bp, Homo sapiens
ggccgccgccgccgc

SEQ ID NO: 1661 - DNA, 15 bp, Homo sapiens
cggccgccgccgccg

SEQ ID NO: 1662 - DNA, 15 bp, Homo sapiens
gcggccgccgccgcc

SEQ ID NO: 1663 - DNA, 15 bp, Homo sapiens
cgcggccgccgccgc

SEQ ID NO: 1664 - DNA, 15 bp, Homo sapiens
cgccgcggccgccgc

SEQ ID NO: 1665 - DNA, 15 bp, Homo sapiens
ccgccgcggccgccg

SEQ ID NO: 1666 - DNA, 15 bp, Homo sapiens
gccgccgcggccgcc

SEQ ID NO: 1667 - DNA, 15 bp, Homo sapiens
agccgccgcggccgc

SEQ ID NO: 1668 - DNA, 15 bp, Homo sapiens
cagccgccgcggccg

SEQ ID NO: 1669 - DNA, 15 bp, Homo sapiens
gcagccgccgcggcc

SEQ ID NO: 1670 - DNA, 15 bp, Homo sapiens
tgcagccgccgcggc

SEQ ID NO: 1671 - DNA, 15 bp, Homo sapiens
ctgcagccgccgcgg

SEQ ID NO: 1672 - DNA, 15 bp, Homo sapiens
gctgcagccgccgcg

SEQ ID NO: 1673 - DNA, 15 bp, Homo sapiens
agctgcagccgccgc

SEQ ID NO: 1674 - DNA, 15 bp, Homo sapiens
gagctgcagccgccg

SEQ ID NO: 1675 - DNA, 15 bp, Homo sapiens
ggagctgcagccgcc

SEQ ID NO: 1676 - DNA, 15 bp, Homo sapiens
tggagctgcagccgc

SEQ ID NO: 1677 - DNA, 15 bp, Homo sapiens
ctggagctgcagccg

SEQ ID NO: 1678 - DNA, 15 bp, Homo sapiens
cctggagctgcagcc

SEQ ID NO: 1679 - DNA, 15 bp, Homo sapiens
ccctggagctgcagc

SEQ ID NO: 1680 - DNA, 15 bp, Homo sapiens
tccctggagctgcag

SEQ ID NO: 1681 - DNA, 15 bp, Homo sapiens
ctccctggagctgca

SEQ ID NO: 1682 - DNA, 15 bp, Homo sapiens
cctccctggagctgc

SEQ ID NO: 1683 - DNA, 15 bp, Homo sapiens
ccctccctggagctg

SEQ ID NO: 1684 - DNA, 15 bp, Homo sapiens
cccctccctggagct

SEQ ID NO: 1685 - DNA, 15 bp, Homo sapiens
ccccctccctggagc

SEQ ID NO: 1686 - DNA, 15 bp, Homo sapiens
accccctccctggag

SEQ ID NO: 1687 - DNA, 15 bp, Homo sapiens
gaccccctccctgga

SEQ ID NO: 1688 - DNA, 15 bp, Homo sapiens
agaccccctccctgg

SEQ ID NO: 1689 - DNA, 15 bp, Homo sapiens
cagaccccctccctg

SEQ ID NO: 1690 - DNA, 15 bp, Homo sapiens
tcagaccccctccct

SEQ ID NO: 1691 - DNA, 15 bp, Homo sapiens
ctcagaccccctccc

SEQ ID NO: 1692 - DNA, 15 bp, Homo sapiens
actcagaccccctcc

SEQ ID NO: 1693 - DNA, 15 bp, Homo sapiens
gactcagaccccctc

SEQ ID NO: 1694 - DNA, 15 bp, Homo sapiens
cgactcagaccccct

SEQ ID NO: 1695 - DNA, 15 bp, Homo sapiens
gcgactcagaccccc

SEQ ID NO: 1696 - DNA, 15 bp, Homo sapiens
ggcgactcagacccc

SEQ ID NO: 1697 - DNA, 15 bp, Homo sapiens
aggcgactcagaccc

SEQ ID NO: 1698 - DNA, 15 bp, Homo sapiens
caggcgactcagacc

SEQ ID NO: 1699 - DNA, 15 bp, Homo sapiens
acaggcgactcagac

SEQ ID NO: 1700 - DNA, 15 bp, Homo sapiens
gacaggcgactcaga

SEQ ID NO: 1701 - DNA, 15 bp, Homo sapiens
tgacaggcgactcag

SEQ ID NO: 1702 - DNA, 15 bp, Homo sapiens
gtgacaggcgactca

SEQ ID NO: 1703 - DNA, 15 bp, Homo sapiens
ggtgacaggcgactc

SEQ ID NO: 1704 - DNA, 15 bp, Homo sapiens
tggtgacaggcgact

SEQ ID NO: 1705 - DNA, 15 bp, Homo sapiens
atggtgacaggcgac

SEQ ID NO: 1706 - DNA, 15 bp, Homo sapiens
aatggtgacaggcga

SEQ ID NO: 1707 - DNA, 15 bp, Homo sapiens
aaatggtgacaggcg

SEQ ID NO: 1708 - DNA, 15 bp, Homo sapiens
gaaatggtgacaggc

SEQ ID NO: 1709 - DNA, 15 bp, Homo sapiens
ggaaatggtgacagg

SEQ ID NO: 1710 - DNA, 15 bp, Homo sapiens
tggaaatggtgacag

SEQ ID NO: 1711 - DNA, 15 bp, Homo sapiens
ctggaaatggtgaca

SEQ ID NO: 1712 - DNA, 15 bp, Homo sapiens
cctggaaatggtgac

SEQ ID NO: 1713 - DNA, 15 bp, Homo sapiens
ccctggaaatggtga

SEQ ID NO: 1714 - DNA, 15 bp, Homo sapiens
gccctggaaatggtg

SEQ ID NO: 1715 - DNA, 15 bp, Homo sapiens
agccctggaaatggt

SEQ ID NO: 1716 - DNA, 15 bp, Homo sapiens
cagccctggaaatgg

SEQ ID NO: 1717 - DNA, 15 bp, Homo sapiens
ccagccctggaaatg

SEQ ID NO: 1718 - DNA, 15 bp, Homo sapiens
cccagccctggaaat

SEQ ID NO: 1719 - DNA, 15 bp, Homo sapiens
tcccagccctggaaa

SEQ ID NO: 1720 - DNA, 15 bp, Homo sapiens
ttcccagccctggaa

SEQ ID NO: 1721 - DNA, 15 bp, Homo sapiens
gttcccagccctgga

SEQ ID NO: 1722 - DNA, 15 bp, Homo sapiens
cgttcccagccctgg

SEQ ID NO: 1723 - DNA, 15 bp, Homo sapiens
gcgttcccagccctg

SEQ ID NO: 1724 - DNA, 15 bp, Homo sapiens
ggcgttcccagccct

SEQ ID NO: 1725 - DNA, 15 bp, Homo sapiens
cggcgttcccagccc

SEQ ID NO: 1726 - DNA, 15 bp, Homo sapiens
ccggcgttcccagcc

SEQ ID NO: 1727 - DNA, 15 bp, Homo sapiens
tccggcgttcccagc

SEQ ID NO: 1728 - DNA, 15 bp, Homo sapiens
ctccggcgttcccag

SEQ ID NO: 1729 - DNA, 15 bp, Homo sapiens
tctccggcgttccca

SEQ ID NO: 1730 - DNA, 15 bp, Homo sapiens
ctctccggcgttccc

SEQ ID NO: 1731 - DNA, 15 bp, Homo sapiens
actctccggcgttcc

SEQ ID NO: 1732 - DNA, 15 bp, Homo sapiens
aactctccggcgttc

SEQ ID NO: 1733 - DNA, 15 bp, Homo sapiens
caactctccggcgtt

SEQ ID NO: 1734 - DNA, 15 bp, Homo sapiens
ccaactctccggcgt

SEQ ID NO: 1735 - DNA, 15 bp, Homo sapiens
accaactctccggcg

SEQ ID NO: 1736 - DNA, 15 bp, Homo sapiens
gaccaactctccggc

SEQ ID NO: 1737 - DNA, 15 bp, Homo sapiens
agaccaactctccgg

SEQ ID NO: 1738 - DNA, 15 bp, Homo sapiens
gagaccaactctccg

SEQ ID NO: 1739 - DNA, 15 bp, Homo sapiens
agagaccaactctcc

SEQ ID NO: 1740 - DNA, 15 bp, Homo sapiens
gagagaccaactctc

SEQ ID NO: 1741 - DNA, 15 bp, Homo sapiens
ggagagaccaactct

SEQ ID NO: 1742 - DNA, 15 bp, Homo sapiens
gggagagaccaactc

SEQ ID NO: 1743 - DNA, 15 bp, Homo sapiens
ggggagagaccaact

SEQ ID NO: 1744 - DNA, 15 bp, Homo sapiens
aggggagagaccaac

SEQ ID NO: 1745 - DNA, 15 bp, Homo sapiens
aaggggagagaccaa

SEQ ID NO: 1746 - DNA, 15 bp, Homo sapiens
gaaggggagagacca

SEQ ID NO: 1747 - DNA, 15 bp, Homo sapiens
agaaggggagagacc

SEQ ID NO: 1748 - DNA, 15 bp, Homo sapiens
tagaaggggagagac

SEQ ID NO: 1749 - DNA, 15 bp, Homo sapiens
gtagaaggggagaga

SEQ ID NO: 1750 - DNA, 15 bp, Homo sapiens
agtagaaggggagag

SEQ ID NO: 1751 - DNA, 15 bp, Homo sapiens
cagtagaaggggaga

SEQ ID NO: 1752 - DNA, 15 bp, Homo sapiens
gcagtagaaggggag

SEQ ID NO: 1753 - DNA, 15 bp, Homo sapiens
ggcagtagaagggga

SEQ ID NO: 1754 - DNA, 15 bp, Homo sapiens
aggcagtagaagggg

SEQ ID NO: 1755 - DNA, 15 bp, Homo sapiens
gaggcagtagaaggg

SEQ ID NO: 1756 - DNA, 15 bp, Homo sapiens
ggaggcagtagaagg

SEQ ID NO: 1757 - DNA, 15 bp, Homo sapiens
tggaggcagtagaag

SEQ ID NO: 1758 - DNA, 15 bp, Homo sapiens
ttggaggcagtagaa

SEQ ID NO: 1759 - DNA, 15 bp, Homo sapiens
gttggaggcagtaga

SEQ ID NO: 1760 - DNA, 15 bp, Homo sapiens
tgttggaggcagtag

SEQ ID NO: 1761 - DNA, 15 bp, Homo sapiens
gtgttggaggcagta

SEQ ID NO: 1762 - DNA, 15 bp, Homo sapiens
cgtgttggaggcagt

SEQ ID NO: 1763 - DNA, 15 bp, Homo sapiens
ccgtgttggaggcag

SEQ ID NO: 1764 - DNA, 15 bp, Homo sapiens
gccgtgttggaggca

SEQ ID NO: 1765 - DNA, 15 bp, Homo sapiens
cgccgtgttggaggc

SEQ ID NO: 1766 - DNA, 15 bp, Homo sapiens
ccgccgtgttggagg

SEQ ID NO: 1767 - DNA, 15 bp, Homo sapiens
gccgccgtgttggag

SEQ ID NO: 1768 - DNA, 15 bp, Homo sapiens
cgccgccgtgttgga

SEQ ID NO: 1769 - DNA, 15 bp, Homo sapiens
ccgccgccgtgttgg

SEQ ID NO: 1770 - DNA, 15 bp, Homo sapiens
gccgccgccgtgttg

SEQ ID NO: 1771 - DNA, 15 bp, Homo sapiens
cgccgccgccgtgtt

SEQ ID NO: 1772 - DNA, 15 bp, Homo sapiens
ccgccgccgccgtgt

SEQ ID NO: 1773 - DNA, 15 bp, Homo sapiens
gccgccgccgccgtg

SEQ ID NO: 1774 - DNA, 15 bp, Homo sapiens
cgccgccgccgccgt

SEQ ID NO: 1775 - DNA, 15 bp, Homo sapiens
agccgccgccgccgc

SEQ ID NO: 1776 - DNA, 15 bp, Homo sapiens
cagccgccgccgccg

SEQ ID NO: 1777 - DNA, 15 bp, Homo sapiens
ccagccgccgccgcc

SEQ ID NO: 1778 - DNA, 15 bp, Homo sapiens
gccagccgccgccgc

SEQ ID NO: 1779 - DNA, 15 bp, Homo sapiens
tgccagccgccgccg

SEQ ID NO: 1780 - DNA, 15 bp, Homo sapiens
gtgccagccgccgcc

SEQ ID NO: 1781 - DNA, 15 bp, Homo sapiens
tgtgccagccgccgc

SEQ ID NO: 1782 - DNA, 15 bp, Homo sapiens
atgtgccagccgccg

SEQ ID NO: 1783 - DNA, 15 bp, Homo sapiens
gatgtgccagccgcc

SEQ ID NO: 1784 - DNA, 15 bp, Homo sapiens
ggatgtgccagccgc

SEQ ID NO: 1785 - DNA, 15 bp, Homo sapiens
tggatgtgccagccg

SEQ ID NO: 1786 - DNA, 15 bp, Homo sapiens
ctggatgtgccagcc

SEQ ID NO: 1787 - DNA, 15 bp, Homo sapiens
cctggatgtgccagc

SEQ ID NO: 1788 - DNA, 15 bp, Homo sapiens
ccctggatgtgccag

SEQ ID NO: 1789 - DNA, 15 bp, Homo sapiens
tccctggatgtgcca

SEQ ID NO: 1790 - DNA, 15 bp, Homo sapiens
gtccctggatgtgcc

SEQ ID NO: 1791 - DNA, 15 bp, Homo sapiens
ggtccctggatgtgc

SEQ ID NO: 1792 - DNA, 15 bp, Homo sapiens
gggtccctggatgtg

SEQ ID NO: 1793 - DNA, 15 bp, Homo sapiens
cgggtccctggatgt

SEQ ID NO: 1794 - DNA, 15 bp, Homo sapiens
ccgggtccctggatg

SEQ ID NO: 1795 - DNA, 15 bp, Homo sapiens
cccgggtccctggat

SEQ ID NO: 1796 - DNA, 15 bp, Homo sapiens
gcccgggtccctgga

SEQ ID NO: 1797 - DNA, 15 bp, Homo sapiens
ggcccgggtccctgg

SEQ ID NO: 1798 - DNA, 15 bp, Homo sapiens
cggcccgggtccctg

SEQ ID NO: 1799 - DNA, 15 bp, Homo sapiens
ccggcccgggtccct

SEQ ID NO: 1800 - DNA, 15 bp, Homo sapiens
accggcccgggtccc

SEQ ID NO: 1801 - DNA, 15 bp, Homo sapiens
aaccggcccgggtcc

SEQ ID NO: 1802 - DNA, 15 bp, Homo sapiens
aaaccggcccgggtc

SEQ ID NO: 1803 - DNA, 15 bp, Homo sapiens
aaaaccggcccgggt

SEQ ID NO: 1804 - DNA, 15 bp, Homo sapiens
taaaaccggcccggg

SEQ ID NO: 1805 - DNA, 15 bp, Homo sapiens
ttaaaaccggcccgg

SEQ ID NO: 1806 - DNA, 15 bp, Homo sapiens
tttaaaaccggcccg

SEQ ID NO: 1807 - DNA, 15 bp, Homo sapiens
gtttaaaaccggccc

SEQ ID NO: 1808 - DNA, 15 bp, Homo sapiens
ggtttaaaaccggcc

SEQ ID NO: 1809 - DNA, 15 bp, Homo sapiens
aggtttaaaaccggc

SEQ ID NO: 1810 - DNA, 15 bp, Homo sapiens
gaggtttaaaaccgg

SEQ ID NO: 1811 - DNA, 15 bp, Homo sapiens
ggaggtttaaaaccg

SEQ ID NO: 1812 - DNA, 15 bp, Homo sapiens
gggaggtttaaaacc

SEQ ID NO: 1813 - DNA, 15 bp, Homo sapiens
cgggaggtttaaaac

SEQ ID NO: 1814 - DNA, 15 bp, Homo sapiens
acgggaggtttaaaa

SEQ ID NO: 1815 - DNA, 15 bp, Homo sapiens
cacgggaggtttaaa

SEQ ID NO: 1816 - DNA, 15 bp, Homo sapiens
gcacgggaggtttaa

SEQ ID NO: 1817 - DNA, 15 bp, Homo sapiens
cgcacgggaggttta

SEQ ID NO: 1818 - DNA, 15 bp, Homo sapiens
gcgcacgggaggttt

SEQ ID NO: 1819 - DNA, 15 bp, Homo sapiens
ggcgcacgggaggtt

SEQ ID NO: 1820 - DNA, 15 bp, Homo sapiens
cggcgcacgggaggt

SEQ ID NO: 1821 - DNA, 15 bp, Homo sapiens
gcggcgcacgggagg

SEQ ID NO: 1822 - DNA, 15 bp, Homo sapiens
ggcggcgcacgggag

SEQ ID NO: 1823 - DNA, 15 bp, Homo sapiens
cggcggcgcacggga

SEQ ID NO: 1824 - DNA, 15 bp, Homo sapiens
gcggcggcgcacggg

SEQ ID NO: 1825 - DNA, 15 bp, Homo sapiens
ggcggcggcgcacgg

SEQ ID NO: 1826 - DNA, 15 bp, Homo sapiens
cggcggcggcgcacg

SEQ ID NO: 1827 - DNA, 15 bp, Homo sapiens
gcggcggcggcgcac

SEQ ID NO: 1828 - DNA, 15 bp, Homo sapiens
tgcggcggcggcgca

SEQ ID NO: 1829 - DNA, 15 bp, Homo sapiens
gtgcggcggcggcgc

SEQ ID NO: 1830 - DNA, 15 bp, Homo sapiens
ggtgcggcggcggcg

SEQ ID NO: 1831 - DNA, 15 bp, Homo sapiens
gggtgcggcggcggc

SEQ ID NO: 1832 - DNA, 15 bp, Homo sapiens
ggggtgcggcggcgg

SEQ ID NO: 1833 - DNA, 15 bp, Homo sapiens
gggggtgcggcggcg

SEQ ID NO: 1834 - DNA, 15 bp, Homo sapiens
ggggggtgcggcggc

SEQ ID NO: 1835 - DNA, 15 bp, Homo sapiens
cggggggtgcggcgg

SEQ ID NO: 1836 - DNA, 15 bp, Homo sapiens
acggggggtgcggcg

SEQ ID NO: 1837 - DNA, 15 bp, Homo sapiens
cacggggggtgcggc

SEQ ID NO: 1838 - DNA, 15 bp, Homo sapiens
ccacggggggtgcgg

SEQ ID NO: 1839 - DNA, 15 bp, Homo sapiens
gccacggggggtgcg

SEQ ID NO: 1840 - DNA, 15 bp, Homo sapiens
ggccacggggggtgc

SEQ ID NO: 1841 - DNA, 15 bp, Homo sapiens
gggccacggggggtg

SEQ ID NO: 1842 - DNA, 15 bp, Homo sapiens
cgggccacggggggt

SEQ ID NO: 1843 - DNA, 15 bp, Homo sapiens
ccgggccacgggggg

SEQ ID NO: 1844 - DNA, 15 bp, Homo sapiens
cccgggccacggggg

SEQ ID NO: 1845 - DNA, 15 bp, Homo sapiens
gcccgggccacgggg

SEQ ID NO: 1846 - DNA, 15 bp, Homo sapiens
agcccgggccacggg

SEQ ID NO: 1847 - DNA, 15 bp, Homo sapiens
gagcccgggccacgg

SEQ ID NO: 1848 - DNA, 15 bp, Homo sapiens
ggagcccgggccacg

SEQ ID NO: 1849 - DNA, 15 bp, Homo sapiens
cggagcccgggccac

SEQ ID NO: 1850 - DNA, 15 bp, Homo sapiens
ccggagcccgggcca

SEQ ID NO: 1851 - DNA, 15 bp, Homo sapiens
tccggagcccgggcc

SEQ ID NO: 1852 - DNA, 15 bp, Homo sapiens
ctccggagcccgggc

SEQ ID NO: 1853 - DNA, 15 bp, Homo sapiens
cctccggagcccggg

SEQ ID NO: 1854 - DNA, 15 bp, Homo sapiens
gcctccggagcccgg

SEQ ID NO: 1855 - DNA, 15 bp, Homo sapiens
ggcctccggagcccg

SEQ ID NO: 1856 - DNA, 15 bp, Homo sapiens
cggcctccggagccc

SEQ ID NO: 1857 - DNA, 15 bp, Homo sapiens
gcggcctccggagcc

SEQ ID NO: 1858 - DNA, 15 bp, Homo sapiens
ggcggcctccggagc

SEQ ID NO: 1859 - DNA, 15 bp, Homo sapiens
cggcggcctccggag

SEQ ID NO: 1860 - DNA, 15 bp, Homo sapiens
ccggcggcctccgga

SEQ ID NO: 1861 - DNA, 15 bp, Homo sapiens
gccggcggcctccgg

SEQ ID NO: 1862 - DNA, 15 bp, Homo sapiens
cgccggcggcctccg

SEQ ID NO: 1863 - DNA, 15 bp, Homo sapiens
ccgccggcggcctcc

SEQ ID NO: 1864 - DNA, 15 bp, Homo sapiens
tccgccggcggcctc

SEQ ID NO: 1865 - DNA, 15 bp, Homo sapiens
ctccgccggcggcct

SEQ ID NO: 1866 - DNA, 15 bp, Homo sapiens
cctccgccggcggcc

SEQ ID NO: 1867 - DNA, 15 bp, Homo sapiens
gcctccgccggcggc

SEQ ID NO: 1868 - DNA, 15 bp, Homo sapiens
tgcctccgccggcgg

SEQ ID NO: 1869 - DNA, 15 bp, Homo sapiens
ctgcctccgccggcg

SEQ ID NO: 1870 - DNA, 15 bp, Homo sapiens
gctgcctccgccggc

SEQ ID NO: 1871 - DNA, 15 bp, Homo sapiens
ggctgcctccgccgg

SEQ ID NO: 1872 - DNA, 15 bp, Homo sapiens
cggctgcctccgccg

SEQ ID NO: 1873 - DNA, 15 bp, Homo sapiens
acggctgcctccgcc

SEQ ID NO: 1874 - DNA, 15 bp, Homo sapiens
aacggctgcctccgc

SEQ ID NO: 1875 - DNA, 15 bp, Homo sapiens
gaacggctgcctccg

SEQ ID NO: 1876 - DNA, 15 bp, Homo sapiens
cgaacggctgcctcc

SEQ ID NO: 1877 - DNA, 15 bp, Homo sapiens
ccgaacggctgcctc

SEQ ID NO: 1878 - DNA, 15 bp, Homo sapiens
tccgaacggctgcct

SEQ ID NO: 1879 - DNA, 15 bp, Homo sapiens
ctccgaacggctgcc

SEQ ID NO: 1880 - DNA, 15 bp, Homo sapiens
cctccgaacggctgc

SEQ ID NO: 1881 - DNA, 15 bp, Homo sapiens
tcctccgaacggctg

SEQ ID NO: 1882 - DNA, 15 bp, Homo sapiens
atcctccgaacggct

SEQ ID NO: 1883 - DNA, 15 bp, Homo sapiens
aatcctccgaacggc

SEQ ID NO: 1884 - DNA, 15 bp, Homo sapiens
taatcctccgaacgg

SEQ ID NO: 1885 - DNA, 15 bp, Homo sapiens
ataatcctccgaacg

SEQ ID NO: 1886 - DNA, 15 bp, Homo sapiens
aataatcctccgaac

SEQ ID NO: 1887 - DNA, 15 bp, Homo sapiens
gaataatcctccgaa

SEQ ID NO: 1888 - DNA, 15 bp, Homo sapiens
cgaataatcctccga

SEQ ID NO: 1889 - DNA, 15 bp, Homo sapiens
acgaataatcctccg

SEQ ID NO: 1890 - DNA, 15 bp, Homo sapiens
gacgaataatcctcc

SEQ ID NO: 1891 - DNA, 15 bp, Homo sapiens
agacgaataatcctc

SEQ ID NO: 1892 - DNA, 15 bp, Homo sapiens
aagacgaataatcct

SEQ ID NO: 1893 - DNA, 15 bp, Homo sapiens
gaagacgaataatcc

SEQ ID NO: 1894 - DNA, 15 bp, Homo sapiens
agaagacgaataatc

SEQ ID NO: 1895 - DNA, 15 bp, Homo sapiens
gagaagacgaataat

SEQ ID NO: 1896 - DNA, 15 bp, Homo sapiens
ggagaagacgaataa

SEQ ID NO: 1897 - DNA, 15 bp, Homo sapiens
gggagaagacgaata

SEQ ID NO: 1898 - DNA, 15 bp, Homo sapiens
ggggagaagacgaat

SEQ ID NO: 1899 - DNA, 15 bp, Homo sapiens
tggggagaagacgaa

SEQ ID NO: 1900 - DNA, 15 bp, Homo sapiens
atggggagaagacga

SEQ ID NO: 1901 - DNA, 15 bp, Homo sapiens
aatggggagaagacg

SEQ ID NO: 1902 - DNA, 15 bp, Homo sapiens
gaatggggagaagac

SEQ ID NO: 1903 - DNA, 15 bp, Homo sapiens
ggaatggggagaaga

SEQ ID NO: 1904 - DNA, 15 bp, Homo sapiens
cggaatggggagaag

SEQ ID NO: 1905 - DNA, 15 bp, Homo sapiens
gcggaatggggagaa

SEQ ID NO: 1906 - DNA, 15 bp, Homo sapiens
agcggaatggggaga

SEQ ID NO: 1907 - DNA, 15 bp, Homo sapiens
cagcggaatggggag

SEQ ID NO: 1908 - DNA, 15 bp, Homo sapiens
gcagcggaatgggga

SEQ ID NO: 1909 - DNA, 15 bp, Homo sapiens
ggcagcggaatgggg

SEQ ID NO: 1910 - DNA, 15 bp, Homo sapiens
cggcagcggaatggg

SEQ ID NO: 1911 - DNA, 15 bp, Homo sapiens
gcggcagcggaatgg

SEQ ID NO: 1912 - DNA, 15 bp, Homo sapiens
ggcggcagcggaatg

SEQ ID NO: 1913 - DNA, 15 bp, Homo sapiens
cggcggcagcggaat

SEQ ID NO: 1914 - DNA, 15 bp, Homo sapiens
gcggcggcagcggaa

SEQ ID NO: 1915 - DNA, 15 bp, Homo sapiens
agcggcggcagcgga

SEQ ID NO: 1916 - DNA, 15 bp, Homo sapiens
cagcggcggcagcgg

SEQ ID NO: 1917 - DNA, 15 bp, Homo sapiens
gcagcggcggcagcg

SEQ ID NO: 1918 - DNA, 15 bp, Homo sapiens
ggcagcggcggcagc

SEQ ID NO: 1919 - DNA, 15 bp, Homo sapiens
tggcagcggcggcag

SEQ ID NO: 1920 - DNA, 15 bp, Homo sapiens
ctggcagcggcggca

SEQ ID NO: 1921 - DNA, 15 bp, Homo sapiens
cctggcagcggcggc

SEQ ID NO: 1922 - DNA, 15 bp, Homo sapiens
gcctggcagcggcgg

SEQ ID NO: 1923 - DNA, 15 bp, Homo sapiens
ggcctggcagcggcg

SEQ ID NO: 1924 - DNA, 15 bp, Homo sapiens
aggcctggcagcggc

SEQ ID NO: 1925 - DNA, 15 bp, Homo sapiens
gaggcctggcagcgg

SEQ ID NO: 1926 - DNA, 15 bp, Homo sapiens
agaggcctggcagcg

SEQ ID NO: 1927 - DNA, 15 bp, Homo sapiens
cagaggcctggcagc

SEQ ID NO: 1928 - DNA, 15 bp, Homo sapiens
ccagaggcctggcag

SEQ ID NO: 1929 - DNA, 15 bp, Homo sapiens
gccagaggcctggca

SEQ ID NO: 1930 - DNA, 15 bp, Homo sapiens
agccagaggcctggc

SEQ ID NO: 1931 - DNA, 15 bp, Homo sapiens
cagccagaggcctgg

SEQ ID NO: 1932 - DNA, 15 bp, Homo sapiens
gcagccagaggcctg

SEQ ID NO: 1933 - DNA, 15 bp, Homo sapiens
agcagccagaggcct

SEQ ID NO: 1934 - DNA, 15 bp, Homo sapiens
cagcagccagaggcc

SEQ ID NO: 1935 - DNA, 15 bp, Homo sapiens
tcagcagccagaggc

SEQ ID NO: 1936 - DNA, 15 bp, Homo sapiens
ctcagcagccagagg

SEQ ID NO: 1937 - DNA, 15 bp, Homo sapiens
cctcagcagccagag

SEQ ID NO: 1938 - DNA, 15 bp, Homo sapiens
tcctcagcagccaga

SEQ ID NO: 1939 - DNA, 15 bp, Homo sapiens
ctcctcagcagccag

SEQ ID NO: 1940 - DNA, 15 bp, Homo sapiens
tctcctcagcagcca

SEQ ID NO: 1941 - DNA, 15 bp, Homo sapiens
ttctcctcagcagcc

SEQ ID NO: 1942 - DNA, 15 bp, Homo sapiens
cttctcctcagcagc

SEQ ID NO: 1943 - DNA, 15 bp, Homo sapiens
gcttctcctcagcag

SEQ ID NO: 1944 - DNA, 15 bp, Homo sapiens
tgcttctcctcagca

SEQ ID NO: 1945 - DNA, 15 bp, Homo sapiens
ctgcttctcctcagc

SEQ ID NO: 1946 - DNA, 15 bp, Homo sapiens
cctgcttctcctcag

SEQ ID NO: 1947 - DNA, 15 bp, Homo sapiens
gcctgcttctcctca

SEQ ID NO: 1948 - DNA, 15 bp, Homo sapiens
ggcctgcttctcctc

SEQ ID NO: 1949 - DNA, 15 bp, Homo sapiens
gggcctgcttctcct

SEQ ID NO: 1950 - DNA, 15 bp, Homo sapiens
tgggcctgcttctcc

SEQ ID NO: 1951 - DNA, 15 bp, Homo sapiens
ctgggcctgcttctc

SEQ ID NO: 1952 - DNA, 15 bp, Homo sapiens
actgggcctgcttct

SEQ ID NO: 1953 - DNA, 15 bp, Homo sapiens
gactgggcctgcttc

SEQ ID NO: 1954 - DNA, 15 bp, Homo sapiens
cgactgggcctgctt

SEQ ID NO: 1955 - DNA, 15 bp, Homo sapiens
gcgactgggcctgct

SEQ ID NO: 1956 - DNA, 15 bp, Homo sapiens
agcgactgggcctgc

SEQ ID NO: 1957 - DNA, 15 bp, Homo sapiens
cagcgactgggcctg

SEQ ID NO: 1958 - DNA, 15 bp, Homo sapiens
gcagcgactgggcct

SEQ ID NO: 1959 - DNA, 15 bp, Homo sapiens
tgcagcgactgggcc

SEQ ID NO: 1960 - DNA, 15 bp, Homo sapiens
ttgcagcgactgggc

SEQ ID NO: 1961 - DNA, 15 bp, Homo sapiens
gttgcagcgactggg

SEQ ID NO: 1962 - DNA, 15 bp, Homo sapiens
ggttgcagcgactgg

SEQ ID NO: 1963 - DNA, 15 bp, Homo sapiens
tggttgcagcgactg

SEQ ID NO: 1964 - DNA, 15 bp, Homo sapiens
atggttgcagcgact

SEQ ID NO: 1965 - DNA, 15 bp, Homo sapiens
gatggttgcagcgac

SEQ ID NO: 1966 - DNA, 15 bp, Homo sapiens
ggatggttgcagcga

SEQ ID NO: 1967 - DNA, 15 bp, Homo sapiens
tggatggttgcagcg

SEQ ID NO: 1968 - DNA, 15 bp, Homo sapiens
ctggatggttgcagc

SEQ ID NO: 1969 - DNA, 15 bp, Homo sapiens
gctggatggttgcag

SEQ ID NO: 1970 - DNA, 15 bp, Homo sapiens
tgctggatggttgca

SEQ ID NO: 1971 - DNA, 15 bp, Homo sapiens
ctgctggatggttgc

SEQ ID NO: 1972 - DNA, 15 bp, Homo sapiens
gctgctggatggttg

SEQ ID NO: 1973 - DNA, 15 bp, Homo sapiens
ggctgctggatggtt

SEQ ID NO: 1974 - DNA, 15 bp, Homo sapiens
cggctgctggatggt

SEQ ID NO: 1975 - DNA, 15 bp, Homo sapiens
gcggctgctggatgg

SEQ ID NO: 1976 - DNA, 15 bp, Homo sapiens
ggcggctgctggatg

SEQ ID NO: 1977 - DNA, 15 bp, Homo sapiens
cggcggctgctggat

SEQ ID NO: 1978 - DNA, 15 bp, Homo sapiens
gcggcggctgctgga

SEQ ID NO: 1979 - DNA, 15 bp, Homo sapiens
tgcggcggctgctgg

SEQ ID NO: 1980 - DNA, 15 bp, Homo sapiens
ctgcggcggctgctg

SEQ ID NO: 1981 - DNA, 15 bp, Homo sapiens
gctgcggcggctgct

SEQ ID NO: 1982 - DNA, 15 bp, Homo sapiens
tgctgcggcggctgc

SEQ ID NO: 1983 - DNA, 15 bp, Homo sapiens
ctgctgcggcggctg

SEQ ID NO: 1984 - DNA, 15 bp, Homo sapiens
gctgctgcggcggct

SEQ ID NO: 1985 - DNA, 15 bp, Homo sapiens
ggctgctgcggcggc

SEQ ID NO: 1986 - DNA, 15 bp, Homo sapiens
tggctgctgcggcgg

SEQ ID NO: 1987 - DNA, 15 bp, Homo sapiens
atggctgctgcggcg

SEQ ID NO: 1988 - DNA, 15 bp, Homo sapiens
aatggctgctgcggc

SEQ ID NO: 1989 - DNA, 15 bp, Homo sapiens
taatggctgctgcgg

SEQ ID NO: 1990 - DNA, 15 bp, Homo sapiens
gtaatggctgctgcg

SEQ ID NO: 1991 - DNA, 15 bp, Homo sapiens
ggtaatggctgctgc

SEQ ID NO: 1992 - DNA, 15 bp, Homo sapiens
gggtaatggctgctg

SEQ ID NO: 1993 - DNA, 15 bp, Homo sapiens
cgggtaatggctgct

SEQ ID NO: 1994 - DNA, 15 bp, Homo sapiens
ccgggtaatggctgc

SEQ ID NO: 1995 - DNA, 15 bp, Homo sapiens
gccgggtaatggctg

SEQ ID NO: 1996 - DNA, 15 bp, Homo sapiens
agccgggtaatggct

SEQ ID NO: 1997 - DNA, 15 bp, Homo sapiens
cagccgggtaatggc

SEQ ID NO: 1998 - DNA, 15 bp, Homo sapiens
gcagccgggtaatgg

SEQ ID NO: 1999 - DNA, 15 bp, Homo sapiens
cgcagccgggtaatg

SEQ ID NO: 2000 - DNA, 15 bp, Homo sapiens
ccgcagccgggtaat

SEQ ID NO: 2001 - DNA, 15 bp, Homo sapiens
accgcagccgggtaa

SEQ ID NO: 2002 - DNA, 15 bp, Homo sapiens
gaccgcagccgggta

SEQ ID NO: 2003 - DNA, 15 bp, Homo sapiens
ggaccgcagccgggt

SEQ ID NO: 2004 - DNA, 15 bp, Homo sapiens
tggaccgcagccggg

SEQ ID NO: 2005 - DNA, 15 bp, Homo sapiens
ctggaccgcagccgg

SEQ ID NO: 2006 - DNA, 15 bp, Homo sapiens
tctggaccgcagccg

SEQ ID NO: 2007 - DNA, 15 bp, Homo sapiens
ctctggaccgcagcc

SEQ ID NO: 2008 - DNA, 15 bp, Homo sapiens
gctctggaccgcagc

SEQ ID NO: 2009 - DNA, 15 bp, Homo sapiens
ggctctggaccgcag

SEQ ID NO: 2010 - DNA, 15 bp, Homo sapiens
tggctctggaccgca

SEQ ID NO: 2011 - DNA, 15 bp, Homo sapiens
ttggctctggaccgc

SEQ ID NO: 2012 - DNA, 15 bp, Homo sapiens
cttggctctggaccg

SEQ ID NO: 2013 - DNA, 15 bp, Homo sapiens
gcttggctctggacc

SEQ ID NO: 2014 - DNA, 15 bp, Homo sapiens
cgcttggctctggac

SEQ ID NO: 2015 - DNA, 15 bp, Homo sapiens
ccgcttggctctgga

SEQ ID NO: 2016 - DNA, 15 bp, Homo sapiens
gccgcttggctctgg

SEQ ID NO: 2017 - DNA, 15 bp, Homo sapiens
cgccgcttggctctg

SEQ ID NO: 2018 - DNA, 15 bp, Homo sapiens
ccgccgcttggctct

SEQ ID NO: 2019 - DNA, 15 bp, Homo sapiens
gccgccgcttggctc

SEQ ID NO: 2020 - DNA, 15 bp, Homo sapiens
tgccgccgcttggct

SEQ ID NO: 2021 - DNA, 15 bp, Homo sapiens
ctgccgccgcttggc

SEQ ID NO: 2022 - DNA, 15 bp, Homo sapiens
tctgccgccgcttgg

SEQ ID NO: 2023 - DNA, 15 bp, Homo sapiens
ctctgccgccgcttg

SEQ ID NO: 2024 - DNA, 15 bp, Homo sapiens
gctctgccgccgctt

SEQ ID NO: 2025 - DNA, 15 bp, Homo sapiens
cgctctgccgccgct

SEQ ID NO: 2026 - DNA, 15 bp, Homo sapiens
tcgctctgccgccgc

SEQ ID NO: 2027 - DNA, 15 bp, Homo sapiens
ctcgctctgccgccg

SEQ ID NO: 2028 - DNA, 15 bp, Homo sapiens
cctcgctctgccgcc

SEQ ID NO: 2029 - DNA, 15 bp, Homo sapiens
ccctcgctctgccgc

SEQ ID NO: 2030 - DNA, 15 bp, Homo sapiens
cccctcgctctgccg

SEQ ID NO: 2031 - DNA, 15 bp, Homo sapiens
gcccctcgctctgcc

SEQ ID NO: 2032 - DNA, 15 bp, Homo sapiens
tgcccctcgctctgc

SEQ ID NO: 2033 - DNA, 15 bp, Homo sapiens
atgcccctcgctctg

SEQ ID NO: 2034 - DNA, 15 bp, Homo sapiens
gatgcccctcgctct

SEQ ID NO: 2035 - DNA, 15 bp, Homo sapiens
tgatgcccctcgctc

SEQ ID NO: 2036 - DNA, 15 bp, Homo sapiens
ctgatgcccctcgct

SEQ ID NO: 2037 - DNA, 15 bp, Homo sapiens
gctgatgcccctcgc

SEQ ID NO: 2038 - DNA, 15 bp, Homo sapiens
agctgatgcccctcg

SEQ ID NO: 2039 - DNA, 15 bp, Homo sapiens
tagctgatgcccctc

SEQ ID NO: 2040 - DNA, 15 bp, Homo sapiens
gtagctgatgcccct

SEQ ID NO: 2041 - DNA, 15 bp, Homo sapiens
ggtagctgatgcccc

SEQ ID NO: 2042 - DNA, 15 bp, Homo sapiens
cggtagctgatgccc

SEQ ID NO: 2043 - DNA, 15 bp, Homo sapiens
gcggtagctgatgcc

SEQ ID NO: 2044 - DNA, 15 bp, Homo sapiens
ggcggtagctgatgc

SEQ ID NO: 2045 - DNA, 15 bp, Homo sapiens
tggcggtagctgatg

SEQ ID NO: 2046 - DNA, 15 bp, Homo sapiens
ttggcggtagctgat

SEQ ID NO: 2047 - DNA, 15 bp, Homo sapiens
cttggcggtagctga

SEQ ID NO: 2048 - DNA, 15 bp, Homo sapiens
acttggcggtagctg

SEQ ID NO: 2049 - DNA, 15 bp, Homo sapiens
gacttggcggtagct

SEQ ID NO: 2050 - DNA, 15 bp, Homo sapiens
ggacttggcggtagc

SEQ ID NO: 2051 - DNA, 15 bp, Homo sapiens
tggacttggcggtag

SEQ ID NO: 2052 - DNA, 15 bp, Homo sapiens
ctggacttggcggta

SEQ ID NO: 2053 - DNA, 15 bp, Homo sapiens
tctggacttggcggt

SEQ ID NO: 2054 - DNA, 15 bp, Homo sapiens
ctctggacttggcgg

SEQ ID NO: 2055 - DNA, 15 bp, Homo sapiens
gctctggacttggcg

SEQ ID NO: 2056 - DNA, 15 bp, Homo sapiens
ggctctggacttggc

SEQ ID NO: 2057 - DNA, 15 bp, Homo sapiens
tggctctggacttgg

SEQ ID NO: 2058 - DNA, 15 bp, Homo sapiens
atggctctggacttg

SEQ ID NO: 2059 - DNA, 15 bp, Homo sapiens
aatggctctggactt

SEQ ID NO: 2060 - DNA, 15 bp, Homo sapiens
aaatggctctggact

SEQ ID NO: 2061 - DNA, 15 bp, Homo sapiens
gaaatggctctggac

SEQ ID NO: 2062 - DNA, 15 bp, Homo sapiens
ggaaatggctctgga

SEQ ID NO: 2063 - DNA, 15 bp, Homo sapiens
tggaaatggctctgg

SEQ ID NO: 2064 - DNA, 15 bp, Homo sapiens
atggaaatggctctg

SEQ ID NO: 2065 - DNA, 15 bp, Homo sapiens
gatggaaatggctct

SEQ ID NO: 2066 - DNA, 15 bp, Homo sapiens
ggatggaaatggctc

SEQ ID NO: 2067 - DNA, 15 bp, Homo sapiens
aggatggaaatggct

SEQ ID NO: 2068 - DNA, 15 bp, Homo sapiens
caggatggaaatggc

SEQ ID NO: 2069 - DNA, 15 bp, Homo sapiens
gcaggatggaaatgg

SEQ ID NO: 2070 - DNA, 15 bp, Homo sapiens
tgcaggatggaaatg

SEQ ID NO: 2071 - DNA, 15 bp, Homo sapiens
ctgcaggatggaaat

SEQ ID NO: 2072 - DNA, 15 bp, Homo sapiens
tctgcaggatggaaa

SEQ ID NO: 2073 - DNA, 15 bp, Homo sapiens
ttctgcaggatggaa

SEQ ID NO: 2074 - DNA, 15 bp, Homo sapiens
cttctgcaggatgga

SEQ ID NO: 2075 - DNA, 15 bp, Homo sapiens
tcttctgcaggatgg

SEQ ID NO: 2076 - DNA, 15 bp, Homo sapiens
ttcttctgcaggatg

SEQ ID NO: 2077 - DNA, 15 bp, Homo sapiens
cttcttctgcaggat

SEQ ID NO: 2078 - DNA, 15 bp, Homo sapiens
gcttcttctgcagga

SEQ ID NO: 2079 - DNA, 15 bp, Homo sapiens
ggcttcttctgcagg

SEQ ID NO: 2080 - DNA, 15 bp, Homo sapiens
gggcttcttctgcag

SEQ ID NO: 2081 - DNA, 15 bp, Homo sapiens
ggggcttcttctgca

SEQ ID NO: 2082 - DNA, 15 bp, Homo sapiens
cggggcttcttctgc

SEQ ID NO: 2083 - DNA, 15 bp, Homo sapiens
gcggggcttcttctg

SEQ ID NO: 2084 - DNA, 15 bp, Homo sapiens
ggcggggcttcttct

SEQ ID NO: 2085 - DNA, 15 bp, Homo sapiens
tggcggggcttcttc

SEQ ID NO: 2086 - DNA, 15 bp, Homo sapiens
gtggcggggcttctt

SEQ ID NO: 2087 - DNA, 15 bp, Homo sapiens
ggtggcggggcttct

SEQ ID NO: 2088 - DNA, 15 bp, Homo sapiens
tggtggcggggcttc

SEQ ID NO: 2089 - DNA, 15 bp, Homo sapiens
ctggtggcggggctt

SEQ ID NO: 2090 - DNA, 15 bp, Homo sapiens
gctggtggcggggct

SEQ ID NO: 2091 - DNA, 15 bp, Homo sapiens
tgctggtggcggggc

SEQ ID NO: 2092 - DNA, 15 bp, Homo sapiens
ctgctggtggcgggg

SEQ ID NO: 2093 - DNA, 15 bp, Homo sapiens
gctgctggtggcggg

SEQ ID NO: 2094 - DNA, 15 bp, Homo sapiens
agctgctggtggcgg

SEQ ID NO: 2095 - DNA, 15 bp, Homo sapiens
aagctgctggtggcg

SEQ ID NO: 2096 - DNA, 15 bp, Homo sapiens
gaagctgctggtggc

SEQ ID NO: 2097 - DNA, 15 bp, Homo sapiens
agaagctgctggtgg

SEQ ID NO: 2098 - DNA, 15 bp, Homo sapiens
cagaagctgctggtg

SEQ ID NO: 2099 - DNA, 15 bp, Homo sapiens
gcagaagctgctggt

SEQ ID NO: 2100 - DNA, 15 bp, Homo sapiens
ggcagaagctgctgg

SEQ ID NO: 2101 - DNA, 15 bp, Homo sapiens
tggcagaagctgctg

SEQ ID NO: 2102 - DNA, 15 bp, Homo sapiens
atggcagaagctgct

SEQ ID NO: 2103 - DNA, 15 bp, Homo sapiens
gatggcagaagctgc

SEQ ID NO: 2104 - DNA, 15 bp, Homo sapiens
agatggcagaagctg

SEQ ID NO: 2105 - DNA, 15 bp, Homo sapiens
gagatggcagaagct

SEQ ID NO: 2106 - DNA, 15 bp, Homo sapiens
agagatggcagaagc

SEQ ID NO: 2107 - DNA, 15 bp, Homo sapiens
gagagatggcagaag

SEQ ID NO: 2108 - DNA, 15 bp, Homo sapiens
agagagatggcagaa

SEQ ID NO: 2109 - DNA, 15 bp, Homo sapiens
gagagagatggcaga

SEQ ID NO: 2110 - DNA, 15 bp, Homo sapiens
ggagagagatggcag

SEQ ID NO: 2111 - DNA, 15 bp, Homo sapiens
aggagagagatggca

SEQ ID NO: 2112 - DNA, 15 bp, Homo sapiens
gaggagagagatggc

SEQ ID NO: 2113 - DNA, 15 bp, Homo sapiens
ggaggagagagatgg

SEQ ID NO: 2114 - DNA, 15 bp, Homo sapiens
aggaggagagagatg

SEQ ID NO: 2115 - DNA, 15 bp, Homo sapiens
aaggaggagagagat

SEQ ID NO: 2116 - DNA, 15 bp, Homo sapiens
aaaggaggagagaga

SEQ ID NO: 2117 - DNA, 15 bp, Homo sapiens
aaaaggaggagagag

SEQ ID NO: 2118 - DNA, 15 bp, Homo sapiens
aaaaaggaggagaga

SEQ ID NO: 2119 - DNA, 15 bp, Homo sapiens
gaaaaaggaggagag

SEQ ID NO: 2120 - DNA, 15 bp, Homo sapiens
agaaaaaggaggaga

SEQ ID NO: 2121 - DNA, 15 bp, Homo sapiens
aagaaaaaggaggag

SEQ ID NO: 2122 - DNA, 15 bp, Homo sapiens
gaagaaaaaggagga

SEQ ID NO: 2123 - DNA, 15 bp, Homo sapiens
tgaagaaaaaggagg

SEQ ID NO: 2124 - DNA, 15 bp, Homo sapiens
ctgaagaaaaaggag

SEQ ID NO: 2125 - DNA, 15 bp, Homo sapiens
gctgaagaaaaagga

SEQ ID NO: 2126 - DNA, 15 bp, Homo sapiens
ggctgaagaaaaagg

SEQ ID NO: 2127 - DNA, 15 bp, Homo sapiens
tggctgaagaaaaag

SEQ ID NO: 2128 - DNA, 15 bp, Homo sapiens
gtggctgaagaaaaa

SEQ ID NO: 2129 - DNA, 15 bp, Homo sapiens
tgtggctgaagaaaa

SEQ ID NO: 2130 - DNA, 15 bp, Homo sapiens
ctgtggctgaagaaa

SEQ ID NO: 2131 - DNA, 15 bp, Homo sapiens
cctgtggctgaagaa

SEQ ID NO: 2132 - DNA, 15 bp, Homo sapiens
gcctgtggctgaaga

SEQ ID NO: 2133 - DNA, 15 bp, Homo sapiens
agcctgtggctgaag

SEQ ID NO: 2134 - DNA, 15 bp, Homo sapiens
gagcctgtggctgaa

SEQ ID NO: 2135 - DNA, 15 bp, Homo sapiens
ggagcctgtggctga

SEQ ID NO: 2136 - DNA, 15 bp, Homo sapiens
gggagcctgtggctg

SEQ ID NO: 2137 - DNA, 15 bp, Homo sapiens
tgggagcctgtggct

SEQ ID NO: 2138 - DNA, 15 bp, Homo sapiens
ctgggagcctgtggc

SEQ ID NO: 2139 - DNA, 15 bp, Homo sapiens
tctgggagcctgtgg

SEQ ID NO: 2140 - DNA, 15 bp, Homo sapiens
gtctgggagcctgtg

SEQ ID NO: 2141 - DNA, 15 bp, Homo sapiens
tgtctgggagcctgt

SEQ ID NO: 2142 - DNA, 15 bp, Homo sapiens
atgtctgggagcctg

SEQ ID NO: 2143 - DNA, 15 bp, Homo sapiens
catgtctgggagcct

SEQ ID NO: 2144 - DNA, 15 bp, Homo sapiens
tcatgtctgggagcc

SEQ ID NO: 2145 - DNA, 15 bp, Homo sapiens
gtcatgtctgggagc

SEQ ID NO: 2146 - DNA, 15 bp, Homo sapiens
tgtcatgtctgggag

SEQ ID NO: 2147 - DNA, 15 bp, Homo sapiens
ctgtcatgtctggga

SEQ ID NO: 2148 - DNA, 15 bp, Homo sapiens
gctgtcatgtctggg

SEQ ID NO: 2149 - DNA, 15 bp, Homo sapiens
ggctgtcatgtctgg

SEQ ID NO: 2150 - DNA, 15 bp, Homo sapiens
tggctgtcatgtctg

SEQ ID NO: 2151 - DNA, 15 bp, Homo sapiens
atggctgtcatgtct

SEQ ID NO: 2152 - DNA, 15 bp, Homo sapiens
gatggctgtcatgtc

SEQ ID NO: 2153 - DNA, 15 bp, Homo sapiens
tgatggctgtcatgt

SEQ ID NO: 2154 - DNA, 15 bp, Homo sapiens
atgatggctgtcatg

SEQ ID NO: 2155 - DNA, 15 bp, Homo sapiens
gatgatggctgtcat

SEQ ID NO: 2156 - DNA, 15 bp, Homo sapiens
tgatgatggctgtca

SEQ ID NO: 2157 - DNA, 15 bp, Homo sapiens
ttgatgatggctgtc

SEQ ID NO: 2158 - DNA, 15 bp, Homo sapiens
tttgatgatggctgt

SEQ ID NO: 2159 - DNA, 15 bp, Homo sapiens
ctttgatgatggctg

SEQ ID NO: 2160 - DNA, 15 bp, Homo sapiens
tctttgatgatggct

SEQ ID NO: 2161 - DNA, 15 bp, Homo sapiens
ctctttgatgatggc

SEQ ID NO: 2162 - DNA, 15 bp, Homo sapiens
tctctttgatgatgg

SEQ ID NO: 2163 - DNA, 15 bp, Homo sapiens
atctctttgatgatg

SEQ ID NO: 2164 - DNA, 15 bp, Homo sapiens
gatctctttgatgat

SEQ ID NO: 2165 - DNA, 15 bp, Homo sapiens
cgatctctttgatga

SEQ ID NO: 2166 - DNA, 15 bp, Homo sapiens
acgatctctttgatg

SEQ ID NO: 2167 - DNA, 15 bp, Homo sapiens
aacgatctctttgat

SEQ ID NO: 2168 - DNA, 15 bp, Homo sapiens
taacgatctctttga

SEQ ID NO: 2169 - DNA, 15 bp, Homo sapiens
ctaacgatctctttg

SEQ ID NO: 2170 - DNA, 15 bp, Homo sapiens
gctaacgatctcttt

SEQ ID NO: 2171 - DNA, 15 bp, Homo sapiens
tgctaacgatctctt

SEQ ID NO: 2172 - DNA, 15 bp, Homo sapiens
ctgctaacgatctct

SEQ ID NO: 2173 - DNA, 15 bp, Homo sapiens
tctgctaacgatctc

SEQ ID NO: 2174 - DNA, 15 bp, Homo sapiens
ttctgctaacgatct

SEQ ID NO: 2175 - DNA, 15 bp, Homo sapiens
tttctgctaacgatc

SEQ ID NO: 2176 - DNA, 15 bp, Homo sapiens
gtttctgctaacgat

SEQ ID NO: 2177 - DNA, 15 bp, Homo sapiens
tgtttctgctaacga

SEQ ID NO: 2178 - DNA, 15 bp, Homo sapiens
ttgtttctgctaacg

SEQ ID NO: 2179 - DNA, 15 bp, Homo sapiens
tttgtttctgctaac

SEQ ID NO: 2180 - DNA, 15 bp, Homo sapiens
ttttgtttctgctaa

SEQ ID NO: 2181 - DNA, 15 bp, Homo sapiens
cttttgtttctgcta

SEQ ID NO: 2182 - DNA, 15 bp, Homo sapiens
ccttttgtttctgct

SEQ ID NO: 2183 - DNA, 15 bp, Homo sapiens
tccttttgtttctgc

SEQ ID NO: 2184 - DNA, 15 bp, Homo sapiens
ctccttttgtttctg

SEQ ID NO: 2185 - DNA, 15 bp, Homo sapiens
tctccttttgtttct

SEQ ID NO: 2186 - DNA, 15 bp, Homo sapiens
atctccttttgtttc

SEQ ID NO: 2187 - DNA, 15 bp, Homo sapiens
tatctccttttgttt

SEQ ID NO: 2188 - DNA, 15 bp, Homo sapiens
atatctccttttgtt

SEQ ID NO: 2189 - DNA, 15 bp, Homo sapiens
gatatctccttttgt

SEQ ID NO: 2190 - DNA, 15 bp, Homo sapiens
tgatatctccttttg

SEQ ID NO: 2191 - DNA, 15 bp, Homo sapiens
ttgatatctcctttt

SEQ ID NO: 2192 - DNA, 15 bp, Homo sapiens
cttgatatctccttt

SEQ ID NO: 2193 - DNA, 15 bp, Homo sapiens
tcttgatatctcctt

SEQ ID NO: 2194 - DNA, 15 bp, Homo sapiens
ctcttgatatctcct

SEQ ID NO: 2195 - DNA, 15 bp, Homo sapiens
cctcttgatatctcc

SEQ ID NO: 2196 - DNA, 15 bp, Homo sapiens
tcctcttgatatctc

SEQ ID NO: 2197 - DNA, 15 bp, Homo sapiens
atcctcttgatatct

SEQ ID NO: 2198 - DNA, 15 bp, Homo sapiens
catcctcttgatatc

SEQ ID NO: 2199 - DNA, 15 bp, Homo sapiens
ccatcctcttgatat

SEQ ID NO: 2200 - DNA, 15 bp, Homo sapiens
tccatcctcttgata

SEQ ID NO: 2201 - DNA, 15 bp, Homo sapiens
atccatcctcttgat

SEQ ID NO: 2202 - DNA, 15 bp, Homo sapiens
aatccatcctcttga

SEQ ID NO: 2203 - DNA, 15 bp, Homo sapiens
gaatccatcctcttg

SEQ ID NO: 2204 - DNA, 15 bp, Homo sapiens
cgaatccatcctctt

SEQ ID NO: 2205 - DNA, 15 bp, Homo sapiens
tcgaatccatcctct

SEQ ID NO: 2206 - DNA, 15 bp, Homo sapiens
gtcgaatccatcctc

SEQ ID NO: 2207 - DNA, 15 bp, Homo sapiens
agtcgaatccatcct

SEQ ID NO: 2208 - DNA, 15 bp, Homo sapiens
aagtcgaatccatcc

SEQ ID NO: 2209 - DNA, 15 bp, Homo sapiens
taagtcgaatccatc

SEQ ID NO: 2210 - DNA, 15 bp, Homo sapiens
ctaagtcgaatccat

SEQ ID NO: 2211 - DNA, 15 bp, Homo sapiens
tctaagtcgaatcca

SEQ ID NO: 2212 - DNA, 15 bp, Homo sapiens
gtctaagtcgaatcc

SEQ ID NO: 2213 - DNA, 15 bp, Homo sapiens
agtctaagtcgaatc

SEQ ID NO: 2214 - DNA, 15 bp, Homo sapiens
aagtctaagtcgaat

SEQ ID NO: 2215 - DNA, 15 bp, Homo sapiens
caagtctaagtcgaa

SEQ ID NO: 2216 - DNA, 15 bp, Homo sapiens
tcaagtctaagtcga

SEQ ID NO: 2217 - DNA, 15 bp, Homo sapiens
gtcaagtctaagtcg

SEQ ID NO: 2218 - DNA, 15 bp, Homo sapiens
ggtcaagtctaagtc

SEQ ID NO: 2219 - DNA, 15 bp, Homo sapiens
aggtcaagtctaagt

SEQ ID NO: 2220 - DNA, 15 bp, Homo sapiens
caggtcaagtctaag

SEQ ID NO: 2221 - DNA, 15 bp, Homo sapiens
acaggtcaagtctaa

SEQ ID NO: 2222 - DNA, 15 bp, Homo sapiens
tacaggtcaagtcta

SEQ ID NO: 2223 - DNA, 15 bp, Homo sapiens
atacaggtcaagtct

SEQ ID NO: 2224 - DNA, 15 bp, Homo sapiens
gatacaggtcaagtc

SEQ ID NO: 2225 - DNA, 15 bp, Homo sapiens
ggatacaggtcaagt

SEQ ID NO: 2226 - DNA, 15 bp, Homo sapiens
tggatacaggtcaag

SEQ ID NO: 2227 - DNA, 15 bp, Homo sapiens
atggatacaggtcaa

SEQ ID NO: 2228 - DNA, 15 bp, Homo sapiens
aatggatacaggtca

SEQ ID NO: 2229 - DNA, 15 bp, Homo sapiens
aaatggatacaggtc

SEQ ID NO: 2230 - DNA, 15 bp, Homo sapiens
gaaatggatacaggt

SEQ ID NO: 2231 - DNA, 15 bp, Homo sapiens
agaaatggatacagg

SEQ ID NO: 2232 - DNA, 15 bp, Homo sapiens
cagaaatggatacag

SEQ ID NO: 2233 - DNA, 15 bp, Homo sapiens
gcagaaatggataca

SEQ ID NO: 2234 - DNA, 15 bp, Homo sapiens
cgcagaaatggatac

SEQ ID NO: 2235 - DNA, 15 bp, Homo sapiens
ccgcagaaatggata

SEQ ID NO: 2236 - DNA, 15 bp, Homo sapiens
gccgcagaaatggat

SEQ ID NO: 2237 - DNA, 15 bp, Homo sapiens
agccgcagaaatgga

SEQ ID NO: 2238 - DNA, 15 bp, Homo sapiens
cagccgcagaaatgg

SEQ ID NO: 2239 - DNA, 15 bp, Homo sapiens
gcagccgcagaaatg

SEQ ID NO: 2240 - DNA, 15 bp, Homo sapiens
agcagccgcagaaat

SEQ ID NO: 2241 - DNA, 15 bp, Homo sapiens
gagcagccgcagaaa

SEQ ID NO: 2242 - DNA, 15 bp, Homo sapiens
ggagcagccgcagaa

SEQ ID NO: 2243 - DNA, 15 bp, Homo sapiens
aggagcagccgcaga

SEQ ID NO: 2244 - DNA, 15 bp, Homo sapiens
gaggagcagccgcag

SEQ ID NO: 2245 - DNA, 15 bp, Homo sapiens
agaggagcagccgca

SEQ ID NO: 2246 - DNA, 15 bp, Homo sapiens
aagaggagcagccgc

SEQ ID NO: 2247 - DNA, 15 bp, Homo sapiens
aaagaggagcagccg

SEQ ID NO: 2248 - DNA, 15 bp, Homo sapiens
taaagaggagcagcc

SEQ ID NO: 2249 - DNA, 15 bp, Homo sapiens
gtaaagaggagcagc

SEQ ID NO: 2250 - DNA, 15 bp, Homo sapiens
ggtaaagaggagcag

SEQ ID NO: 2251 - DNA, 15 bp, Homo sapiens
aggtaaagaggagca

SEQ ID NO: 2252 - DNA, 15 bp, Homo sapiens
aaggtaaagaggagc

SEQ ID NO: 2253 - DNA, 15 bp, Homo sapiens
aaaggtaaagaggag

SEQ ID NO: 2254 - DNA, 15 bp, Homo sapiens
gaaaggtaaagagga

SEQ ID NO: 2255 - DNA, 15 bp, Homo sapiens
agaaaggtaaagagg

SEQ ID NO: 2256 - DNA, 15 bp, Homo sapiens
cagaaaggtaaagag

SEQ ID NO: 2257 - DNA, 15 bp, Homo sapiens
acagaaaggtaaaga

SEQ ID NO: 2258 - DNA, 15 bp, Homo sapiens
gacagaaaggtaaag

SEQ ID NO: 2259 - DNA, 15 bp, Homo sapiens
tgacagaaaggtaaa

SEQ ID NO: 2260 - DNA, 15 bp, Homo sapiens
gtgacagaaaggtaa

SEQ ID NO: 2261 - DNA, 15 bp, Homo sapiens
agtgacagaaaggta

SEQ ID NO: 2262 - DNA, 15 bp, Homo sapiens
gagtgacagaaaggt

SEQ ID NO: 2263 - DNA, 15 bp, Homo sapiens
agagtgacagaaagg

SEQ ID NO: 2264 - DNA, 15 bp, Homo sapiens
gagagtgacagaaag

SEQ ID NO: 2265 - DNA, 15 bp, Homo sapiens
agagagtgacagaaa

SEQ ID NO: 2266 - DNA, 15 bp, Homo sapiens
aagagagtgacagaa

SEQ ID NO: 2267 - DNA, 15 bp, Homo sapiens
taagagagtgacaga

SEQ ID NO: 2268 - DNA, 15 bp, Homo sapiens
ctaagagagtgacag

SEQ ID NO: 2269 - DNA, 15 bp, Homo sapiens
tctaagagagtgaca

SEQ ID NO: 2270 - DNA, 15 bp, Homo sapiens
ttctaagagagtgac

SEQ ID NO: 2271 - DNA, 15 bp, Homo sapiens
gttctaagagagtga

SEQ ID NO: 2272 - DNA, 15 bp, Homo sapiens
cgttctaagagagtg

SEQ ID NO: 2273 - DNA, 15 bp, Homo sapiens
acgttctaagagagt

SEQ ID NO: 2274 - DNA, 15 bp, Homo sapiens
cacgttctaagagag

SEQ ID NO: 2275 - DNA, 15 bp, Homo sapiens
ccacgttctaagaga

SEQ ID NO: 2276 - DNA, 15 bp, Homo sapiens
cccacgttctaagag

SEQ ID NO: 2277 - DNA, 15 bp, Homo sapiens
tcccacgttctaaga

SEQ ID NO: 2278 - DNA, 15 bp, Homo sapiens
ctcccacgttctaag

SEQ ID NO: 2279 - DNA, 15 bp, Homo sapiens
actcccacgttctaa

SEQ ID NO: 2280 - DNA, 15 bp, Homo sapiens
tactcccacgttcta

SEQ ID NO: 2281 - DNA, 15 bp, Homo sapiens
ctactcccacgttct

SEQ ID NO: 2282 - DNA, 15 bp, Homo sapiens
tctactcccacgttc

SEQ ID NO: 2283 - DNA, 15 bp, Homo sapiens
gtctactcccacgtt

SEQ ID NO: 2284 - DNA, 15 bp, Homo sapiens
cgtctactcccacgt

SEQ ID NO: 2285 - DNA, 15 bp, Homo sapiens
ccgtctactcccacg

SEQ ID NO: 2286 - DNA, 15 bp, Homo sapiens
tccgtctactcccac

SEQ ID NO: 2287 - DNA, 15 bp, Homo sapiens
atccgtctactccca

SEQ ID NO: 2288 - DNA, 15 bp, Homo sapiens
catccgtctactccc

SEQ ID NO: 2289 - DNA, 15 bp, Homo sapiens
gcatccgtctactcc

SEQ ID NO: 2290 - DNA, 15 bp, Homo sapiens
cgcatccgtctactc

SEQ ID NO: 2291 - DNA, 15 bp, Homo sapiens
tcgcatccgtctact

SEQ ID NO: 2292 - DNA, 15 bp, Homo sapiens
ttcgcatccgtctac

SEQ ID NO: 2293 - DNA, 15 bp, Homo sapiens
tttcgcatccgtcta

SEQ ID NO: 2294 - DNA, 15 bp, Homo sapiens
ttttcgcatccgtct

SEQ ID NO: 2295 - DNA, 15 bp, Homo sapiens
attttcgcatccgtc

SEQ ID NO: 2296 - DNA, 15 bp, Homo sapiens
cattttcgcatccgt

SEQ ID NO: 2297 - DNA, 15 bp, Homo sapiens
acattttcgcatccg

SEQ ID NO: 2298 - DNA, 15 bp, Homo sapiens
gacattttcgcatcc

SEQ ID NO: 2299 - DNA, 15 bp, Homo sapiens
ggacattttcgcatc

SEQ ID NO: 2300 - DNA, 15 bp, Homo sapiens
cggacattttcgcat

SEQ ID NO: 2301 - DNA, 15 bp, Homo sapiens
acggacattttcgca

SEQ ID NO: 2302 - DNA, 15 bp, Homo sapiens
tacggacattttcgc

SEQ ID NO: 2303 - DNA, 15 bp, Homo sapiens
ctacggacattttcg

SEQ ID NO: 2304 - DNA, 15 bp, Homo sapiens
actacggacattttc

SEQ ID NO: 2305 - DNA, 15 bp, Homo sapiens
aactacggacatttt

SEQ ID NO: 2306 - DNA, 15 bp, Homo sapiens
aaactacggacattt

SEQ ID NO: 2307 - DNA, 15 bp, Homo sapiens
caaactacggacatt

SEQ ID NO: 2308 - DNA, 15 bp, Homo sapiens
ccaaactacggacat

SEQ ID NO: 2309 - DNA, 15 bp, Homo sapiens
cccaaactacggaca

SEQ ID NO: 2310 - DNA, 15 bp, Homo sapiens
acccaaactacggac

SEQ ID NO: 2311 - DNA, 15 bp, Homo sapiens
cacccaaactacgga

SEQ ID NO: 2312 - DNA, 15 bp, Homo sapiens
tcacccaaactacgg

SEQ ID NO: 2313 - DNA, 15 bp, Homo sapiens
gtcacccaaactacg

SEQ ID NO: 2314 - DNA, 15 bp, Homo sapiens
agtcacccaaactac

SEQ ID NO: 2315 - DNA, 15 bp, Homo sapiens
tagtcacccaaacta

SEQ ID NO: 2316 - DNA, 15 bp, Homo sapiens
atagtcacccaaact

SEQ ID NO: 2317 - DNA, 15 bp, Homo sapiens
tatagtcacccaaac

SEQ ID NO: 2318 - DNA, 15 bp, Homo sapiens
ttatagtcacccaaa

SEQ ID NO: 2319 - DNA, 15 bp, Homo sapiens
gttatagtcacccaa

SEQ ID NO: 2320 - DNA, 15 bp, Homo sapiens
tgttatagtcaccca

SEQ ID NO: 2321 - DNA, 15 bp, Homo sapiens
atgttatagtcaccc

SEQ ID NO: 2322 - DNA, 15 bp, Homo sapiens
aatgttatagtcacc

SEQ ID NO: 2323 - DNA, 15 bp, Homo sapiens
aaatgttatagtcac

SEQ ID NO: 2324 - DNA, 15 bp, Homo sapiens
taaatgttatagtca

SEQ ID NO: 2325 - DNA, 15 bp, Homo sapiens
ttaaatgttatagtc

SEQ ID NO: 2326 - DNA, 15 bp, Homo sapiens
gttaaatgttatagt

SEQ ID NO: 2327 - DNA, 15 bp, Homo sapiens
ggttaaatgttatag

SEQ ID NO: 2328 - DNA, 15 bp, Homo sapiens
gggttaaatgttata

SEQ ID NO: 2329 - DNA, 15 bp, Homo sapiens
agggttaaatgttat

SEQ ID NO: 2330 - DNA, 15 bp, Homo sapiens
cagggttaaatgtta

SEQ ID NO: 2331 - DNA, 15 bp, Homo sapiens
ccagggttaaatgtt

SEQ ID NO: 2332 - DNA, 15 bp, Homo sapiens
accagggttaaatgt

SEQ ID NO: 2333 - DNA, 15 bp, Homo sapiens
gaccagggttaaatg

SEQ ID NO: 2334 - DNA, 15 bp, Homo sapiens
tgaccagggttaaat

SEQ ID NO: 2335 - DNA, 15 bp, Homo sapiens
ctgaccagggttaaa

SEQ ID NO: 2336 - DNA, 15 bp, Homo sapiens
cctgaccagggttaa

SEQ ID NO: 2337 - DNA, 15 bp, Homo sapiens
acctgaccagggtta

SEQ ID NO: 2338 - DNA, 15 bp, Homo sapiens
aacctgaccagggtt

SEQ ID NO: 2339 - DNA, 15 bp, Homo sapiens
caacctgaccagggt

SEQ ID NO: 2340 - DNA, 15 bp, Homo sapiens
gcaacctgaccaggg

SEQ ID NO: 2341 - DNA, 15 bp, Homo sapiens
agcaacctgaccagg

SEQ ID NO: 2342 - DNA, 15 bp, Homo sapiens
tagcaacctgaccag

SEQ ID NO: 2343 - DNA, 15 bp, Homo sapiens
ctagcaacctgacca

SEQ ID NO: 2344 - DNA, 15 bp, Homo sapiens
cctagcaacctgacc

SEQ ID NO: 2345 - DNA, 15 bp, Homo sapiens
acctagcaacctgac

SEQ ID NO: 2346 - DNA, 15 bp, Homo sapiens
gacctagcaacctga

SEQ ID NO: 2347 - DNA, 15 bp, Homo sapiens
tgacctagcaacctg

SEQ ID NO: 2348 - DNA, 15 bp, Homo sapiens
atgacctagcaacct

SEQ ID NO: 2349 - DNA, 15 bp, Homo sapiens
tatgacctagcaacc

SEQ ID NO: 2350 - DNA, 15 bp, Homo sapiens
atatgacctagcaac

SEQ ID NO: 2351 - DNA, 15 bp, Homo sapiens
tatatgacctagcaa

SEQ ID NO: 2352 - DNA, 15 bp, Homo sapiens
atatatgacctagca

SEQ ID NO: 2353 - DNA, 15 bp, Homo sapiens
aatatatgacctagc

SEQ ID NO: 2354 - DNA, 15 bp, Homo sapiens
aaatatatgacctag

SEQ ID NO: 2355 - DNA, 15 bp, Homo sapiens
aaaatatatgaccta

SEQ ID NO: 2356 - DNA, 15 bp, Homo sapiens
caaaatatatgacct

SEQ ID NO: 2357 - DNA, 15 bp, Homo sapiens
acaaaatatatgacc

SEQ ID NO: 2358 - DNA, 15 bp, Homo sapiens
cacaaaatatatgac

SEQ ID NO: 2359 - DNA, 15 bp, Homo sapiens
acacaaaatatatga

SEQ ID NO: 2360 - DNA, 15 bp, Homo sapiens
aacacaaaatatatg

SEQ ID NO: 2361 - DNA, 15 bp, Homo sapiens
aaacacaaaatatat

SEQ ID NO: 2362 - DNA, 15 bp, Homo sapiens
gaaacacaaaatata

SEQ ID NO: 2363 - DNA, 15 bp, Homo sapiens
ggaaacacaaaatat

SEQ ID NO: 2364 - DNA, 15 bp, Homo sapiens
aggaaacacaaaata

SEQ ID NO: 2365 - DNA, 15 bp, Homo sapiens
aaggaaacacaaaat

SEQ ID NO: 2366 - DNA, 15 bp, Homo sapiens
aaaggaaacacaaaa

SEQ ID NO: 2367 - DNA, 15 bp, Homo sapiens
gaaaggaaacacaaa

SEQ ID NO: 2368 - DNA, 15 bp, Homo sapiens
agaaaggaaacacaa

SEQ ID NO: 2369 - DNA, 15 bp, Homo sapiens
cagaaaggaaacaca

SEQ ID NO: 2370 - DNA, 15 bp, Homo sapiens
acagaaaggaaacac

SEQ ID NO: 2371 - DNA, 15 bp, Homo sapiens
cacagaaaggaaaca

SEQ ID NO: 2372 - DNA, 15 bp, Homo sapiens
acacagaaaggaaac

SEQ ID NO: 2373 - DNA, 15 bp, Homo sapiens
tacacagaaaggaaa

SEQ ID NO: 2374 - DNA, 15 bp, Homo sapiens
atacacagaaaggaa

SEQ ID NO: 2375 - DNA, 15 bp, Homo sapiens
aatacacagaaagga

SEQ ID NO: 2376 - DNA, 15 bp, Homo sapiens
gaatacacagaaagg

SEQ ID NO: 2377 - DNA, 15 bp, Homo sapiens
tgaatacacagaaag

SEQ ID NO: 2378 - DNA, 15 bp, Homo sapiens
ttgaatacacagaaa

SEQ ID NO: 2379 - DNA, 15 bp, Homo sapiens
gttgaatacacagaa

SEQ ID NO: 2380 - DNA, 15 bp, Homo sapiens
ggttgaatacacaga

SEQ ID NO: 2381 - DNA, 15 bp, Homo sapiens
aggttgaatacacag

SEQ ID NO: 2382 - DNA, 15 bp, Homo sapiens
taggttgaatacaca

SEQ ID NO: 2383 - DNA, 15 bp, Homo sapiens
ctaggttgaatacac

SEQ ID NO: 2384 - DNA, 15 bp, Homo sapiens
cctaggttgaataca

SEQ ID NO: 2385 - DNA, 15 bp, Homo sapiens
ccctaggttgaatac

SEQ ID NO: 2386 - DNA, 15 bp, Homo sapiens
accctaggttgaata

SEQ ID NO: 2387 - DNA, 15 bp, Homo sapiens
caccctaggttgaat

SEQ ID NO: 2388 - DNA, 15 bp, Homo sapiens
acaccctaggttgaa

SEQ ID NO: 2389 - DNA, 15 bp, Homo sapiens
cacaccctaggttga

SEQ ID NO: 2390 - DNA, 15 bp, Homo sapiens
acacaccctaggttg

SEQ ID NO: 2391 - DNA, 15 bp, Homo sapiens
aacacaccctaggtt

SEQ ID NO: 2392 - DNA, 15 bp, Homo sapiens
aaacacaccctaggt

SEQ ID NO: 2393 - DNA, 15 bp, Homo sapiens
caaacacaccctagg

SEQ ID NO: 2394 - DNA, 15 bp, Homo sapiens
ccaaacacaccctag

SEQ ID NO: 2395 - DNA, 15 bp, Homo sapiens
gccaaacacacccta

SEQ ID NO: 2396 - DNA, 15 bp, Homo sapiens
agccaaacacaccct

SEQ ID NO: 2397 - DNA, 15 bp, Homo sapiens
tagccaaacacaccc

SEQ ID NO: 2398 - DNA, 15 bp, Homo sapiens
ctagccaaacacacc

SEQ ID NO: 2399 - DNA, 15 bp, Homo sapiens
tctagccaaacacac

SEQ ID NO: 2400 - DNA, 15 bp, Homo sapiens
gtctagccaaacaca

SEQ ID NO: 2401 - DNA, 15 bp, Homo sapiens
cgtctagccaaacac

SEQ ID NO: 2402 - DNA, 15 bp, Homo sapiens
ccgtctagccaaaca

SEQ ID NO: 2403 - DNA, 15 bp, Homo sapiens
tccgtctagccaaac

SEQ ID NO: 2404 - DNA, 15 bp, Homo sapiens
ttccgtctagccaaa

SEQ ID NO: 2405 - DNA, 15 bp, Homo sapiens
gttccgtctagccaa

SEQ ID NO: 2406 - DNA, 15 bp, Homo sapiens
agttccgtctagcca

SEQ ID NO: 2407 - DNA, 15 bp, Homo sapiens
gagttccgtctagcc

SEQ ID NO: 2408 - DNA, 15 bp, Homo sapiens
agagttccgtctagc

SEQ ID NO: 2409 - DNA, 15 bp, Homo sapiens
aagagttccgtctag

SEQ ID NO: 2410 - DNA, 15 bp, Homo sapiens
caagagttccgtcta

SEQ ID NO: 2411 - DNA, 15 bp, Homo sapiens
gcaagagttccgtct

SEQ ID NO: 2412 - DNA, 15 bp, Homo sapiens
ggcaagagttccgtc

SEQ ID NO: 2413 - DNA, 15 bp, Homo sapiens
aggcaagagttccgt

SEQ ID NO: 2414 - DNA, 15 bp, Homo sapiens
caggcaagagttccg

SEQ ID NO: 2415 - DNA, 15 bp, Homo sapiens
ccaggcaagagttcc

SEQ ID NO: 2416 - DNA, 15 bp, Homo sapiens
accaggcaagagttc

SEQ ID NO: 2417 - DNA, 15 bp, Homo sapiens
aaccaggcaagagtt

SEQ ID NO: 2418 - DNA, 15 bp, Homo sapiens
caaccaggcaagagt

SEQ ID NO: 2419 - DNA, 15 bp, Homo sapiens
gcaaccaggcaagag

SEQ ID NO: 2420 - DNA, 15 bp, Homo sapiens
tgcaaccaggcaaga

SEQ ID NO: 2421 - DNA, 15 bp, Homo sapiens
ttgcaaccaggcaag

SEQ ID NO: 2422 - DNA, 15 bp, Homo sapiens
cttgcaaccaggcaa

SEQ ID NO: 2423 - DNA, 15 bp, Homo sapiens
acttgcaaccaggca

SEQ ID NO: 2424 - DNA, 15 bp, Homo sapiens
cacttgcaaccaggc

SEQ ID NO: 2425 - DNA, 15 bp, Homo sapiens
acacttgcaaccagg

SEQ ID NO: 2426 - DNA, 15 bp, Homo sapiens
gacacttgcaaccag

SEQ ID NO: 2427 - DNA, 15 bp, Homo sapiens
tgacacttgcaacca

SEQ ID NO: 2428 - DNA, 15 bp, Homo sapiens
ttgacacttgcaacc

SEQ ID NO: 2429 - DNA, 15 bp, Homo sapiens
cttgacacttgcaac

SEQ ID NO: 2430 - DNA, 15 bp, Homo sapiens
gcttgacacttgcaa

SEQ ID NO: 2431 - DNA, 15 bp, Homo sapiens
ggcttgacacttgca

SEQ ID NO: 2432 - DNA, 15 bp, Homo sapiens
tggcttgacacttgc

SEQ ID NO: 2433 - DNA, 15 bp, Homo sapiens
gtggcttgacacttg

SEQ ID NO: 2434 - DNA, 15 bp, Homo sapiens
ggtggcttgacactt

SEQ ID NO: 2435 - DNA, 15 bp, Homo sapiens
cggtggcttgacact

SEQ ID NO: 2436 - DNA, 15 bp, Homo sapiens
tcggtggcttgacac

SEQ ID NO: 2437 - DNA, 15 bp, Homo sapiens
atcggtggcttgaca

SEQ ID NO: 2438 - DNA, 15 bp, Homo sapiens
aatcggtggcttgac

SEQ ID NO: 2439 - DNA, 15 bp, Homo sapiens
caatcggtggcttga

SEQ ID NO: 2440 - DNA, 15 bp, Homo sapiens
gcaatcggtggcttg

SEQ ID NO: 2441 - DNA, 15 bp, Homo sapiens
agcaatcggtggctt

SEQ ID NO: 2442 - DNA, 15 bp, Homo sapiens
aagcaatcggtggct

SEQ ID NO: 2443 - DNA, 15 bp, Homo sapiens
aaagcaatcggtggc

SEQ ID NO: 2444 - DNA, 15 bp, Homo sapiens
gaaagcaatcggtgg

SEQ ID NO: 2445 - DNA, 15 bp, Homo sapiens
agaaagcaatcggtg

SEQ ID NO: 2446 - DNA, 15 bp, Homo sapiens
aagaaagcaatcggt

SEQ ID NO: 2447 - DNA, 15 bp, Homo sapiens
taagaaagcaatcgg

SEQ ID NO: 2448 - DNA, 15 bp, Homo sapiens
ctaagaaagcaatcg

SEQ ID NO: 2449 - DNA, 15 bp, Homo sapiens
cctaagaaagcaatc

SEQ ID NO: 2450 - DNA, 15 bp, Homo sapiens
gcctaagaaagcaat

SEQ ID NO: 2451 - DNA, 15 bp, Homo sapiens
agcctaagaaagcaa

SEQ ID NO: 2452 - DNA, 15 bp, Homo sapiens
tagcctaagaaagca

SEQ ID NO: 2453 - DNA, 15 bp, Homo sapiens
atagcctaagaaagc

SEQ ID NO: 2454 - DNA, 15 bp, Homo sapiens
gatagcctaagaaag

SEQ ID NO: 2455 - DNA, 15 bp, Homo sapiens
agatagcctaagaaa

SEQ ID NO: 2456 - DNA, 15 bp, Homo sapiens
tagatagcctaagaa

SEQ ID NO: 2457 - DNA, 15 bp, Homo sapiens
atagatagcctaaga

SEQ ID NO: 2458 - DNA, 15 bp, Homo sapiens
tatagatagcctaag

SEQ ID NO: 2459 - DNA, 15 bp, Homo sapiens
atatagatagcctaa

SEQ ID NO: 2460 - DNA, 15 bp, Homo sapiens
catatagatagccta

SEQ ID NO: 2461 - DNA, 15 bp, Homo sapiens
ccatatagatagcct

SEQ ID NO: 2462 - DNA, 15 bp, Homo sapiens
accatatagatagcc

SEQ ID NO: 2463 - DNA, 15 bp, Homo sapiens
gaccatatagatagc

SEQ ID NO: 2464 - DNA, 15 bp, Homo sapiens
agaccatatagatag

SEQ ID NO: 2465 - DNA, 15 bp, Homo sapiens
gagaccatatagata

SEQ ID NO: 2466 - DNA, 15 bp, Homo sapiens
agagaccatatagat

SEQ ID NO: 2467 - DNA, 15 bp, Homo sapiens
aagagaccatataga

SEQ ID NO: 2468 - DNA, 15 bp, Homo sapiens
gaagagaccatatag

SEQ ID NO: 2469 - DNA, 15 bp, Homo sapiens
ggaagagaccatata

SEQ ID NO: 2470 - DNA, 15 bp, Homo sapiens
aggaagagaccatat

SEQ ID NO: 2471 - DNA, 15 bp, Homo sapiens
caggaagagaccata

SEQ ID NO: 2472 - DNA, 15 bp, Homo sapiens
tcaggaagagaccat

SEQ ID NO: 2473 - DNA, 15 bp, Homo sapiens
ctcaggaagagacca

SEQ ID NO: 2474 - DNA, 15 bp, Homo sapiens
cctcaggaagagacc

SEQ ID NO: 2475 - DNA, 15 bp, Homo sapiens
ccctcaggaagagac

SEQ ID NO: 2476 - DNA, 15 bp, Homo sapiens
gccctcaggaagaga

SEQ ID NO: 2477 - DNA, 15 bp, Homo sapiens
agccctcaggaagag

SEQ ID NO: 2478 - DNA, 15 bp, Homo sapiens
tagccctcaggaaga

SEQ ID NO: 2479 - DNA, 15 bp, Homo sapiens
atagccctcaggaag

SEQ ID NO: 2480 - DNA, 15 bp, Homo sapiens
aatagccctcaggaa

SEQ ID NO: 2481 - DNA, 15 bp, Homo sapiens
caatagccctcagga

SEQ ID NO: 2482 - DNA, 15 bp, Homo sapiens
acaatagccctcagg

SEQ ID NO: 2483 - DNA, 15 bp, Homo sapiens
gacaatagccctcag

SEQ ID NO: 2484 - DNA, 15 bp, Homo sapiens
ggacaatagccctca

SEQ ID NO: 2485 - DNA, 15 bp, Homo sapiens
cggacaatagccctc

SEQ ID NO: 2486 - DNA, 15 bp, Homo sapiens
acggacaatagccct

SEQ ID NO: 2487 - DNA, 15 bp, Homo sapiens
aacggacaatagccc

SEQ ID NO: 2488 - DNA, 15 bp, Homo sapiens
taacggacaatagcc

SEQ ID NO: 2489 - DNA, 15 bp, Homo sapiens
ttaacggacaatagc

SEQ ID NO: 2490 - DNA, 15 bp, Homo sapiens
attaacggacaatag

SEQ ID NO: 2491 - DNA, 15 bp, Homo sapiens
tattaacggacaata

SEQ ID NO: 2492 - DNA, 15 bp, Homo sapiens
gtattaacggacaat

SEQ ID NO: 2493 - DNA, 15 bp, Homo sapiens
tgtattaacggacaa

SEQ ID NO: 2494 - DNA, 15 bp, Homo sapiens
ctgtattaacggaca

SEQ ID NO: 2495 - DNA, 15 bp, Homo sapiens
tctgtattaacggac

SEQ ID NO: 2496 - DNA, 15 bp, Homo sapiens
ttctgtattaacgga

SEQ ID NO: 2497 - DNA, 15 bp, Homo sapiens
attctgtattaacgg

SEQ ID NO: 2498 - DNA, 15 bp, Homo sapiens
tattctgtattaacg

SEQ ID NO: 2499 - DNA, 15 bp, Homo sapiens
gtattctgtattaac

SEQ ID NO: 2500 - DNA, 15 bp, Homo sapiens
tgtattctgtattaa

SEQ ID NO: 2501 - DNA, 15 bp, Homo sapiens
ctgtattctgtatta

SEQ ID NO: 2502 - DNA, 15 bp, Homo sapiens
actgtattctgtatt

SEQ ID NO: 2503 - DNA, 15 bp, Homo sapiens
tactgtattctgtat

SEQ ID NO: 2504 - DNA, 15 bp, Homo sapiens
gtactgtattctgta

SEQ ID NO: 2505 - DNA, 15 bp, Homo sapiens
tgtactgtattctgt

SEQ ID NO: 2506 - DNA, 15 bp, Homo sapiens
gtgtactgtattctg

SEQ ID NO: 2507 - DNA, 15 bp, Homo sapiens
agtgtactgtattct

SEQ ID NO: 2508 - DNA, 15 bp, Homo sapiens
cagtgtactgtattc

SEQ ID NO: 2509 - DNA, 15 bp, Homo sapiens
acagtgtactgtatt

SEQ ID NO: 2510 - DNA, 15 bp, Homo sapiens
aacagtgtactgtat

SEQ ID NO: 2511 - DNA, 15 bp, Homo sapiens
taacagtgtactgta

SEQ ID NO: 2512 - DNA, 15 bp, Homo sapiens
ctaacagtgtactgt

SEQ ID NO: 2513 - DNA, 15 bp, Homo sapiens
actaacagtgtactg

SEQ ID NO: 2514 - DNA, 15 bp, Homo sapiens
cactaacagtgtact

SEQ ID NO: 2515 - DNA, 15 bp, Homo sapiens
ccactaacagtgtac

SEQ ID NO: 2516 - DNA, 15 bp, Homo sapiens
tccactaacagtgta

SEQ ID NO: 2517 - DNA, 15 bp, Homo sapiens
atccactaacagtgt

SEQ ID NO: 2518 - DNA, 15 bp, Homo sapiens
aatccactaacagtg

SEQ ID NO: 2519 - DNA, 15 bp, Homo sapiens
taatccactaacagt

SEQ ID NO: 2520 - DNA, 15 bp, Homo sapiens
ctaatccactaacag

SEQ ID NO: 2521 - DNA, 15 bp, Homo sapiens
gctaatccactaaca

SEQ ID NO: 2522 - DNA, 15 bp, Homo sapiens
cgctaatccactaac

SEQ ID NO: 2523 - DNA, 15 bp, Homo sapiens
tcgctaatccactaa

SEQ ID NO: 2524 - DNA, 15 bp, Homo sapiens
ctcgctaatccacta

SEQ ID NO: 2525 - DNA, 15 bp, Homo sapiens
gctcgctaatccact

SEQ ID NO: 2526 - DNA, 15 bp, Homo sapiens
agctcgctaatccac

SEQ ID NO: 2527 - DNA, 15 bp, Homo sapiens
gagctcgctaatcca

SEQ ID NO: 2528 - DNA, 15 bp, Homo sapiens
cgagctcgctaatcc

SEQ ID NO: 2529 - DNA, 15 bp, Homo sapiens
ccgagctcgctaatc

SEQ ID NO: 2530 - DNA, 15 bp, Homo sapiens
accgagctcgctaat

SEQ ID NO: 2531 - DNA, 15 bp, Homo sapiens
taccgagctcgctaa

SEQ ID NO: 2532 - DNA, 15 bp, Homo sapiens
ttaccgagctcgcta

SEQ ID NO: 2533 - DNA, 15 bp, Homo sapiens
attaccgagctcgct

SEQ ID NO: 2534 - DNA, 15 bp, Homo sapiens
gattaccgagctcgc

SEQ ID NO: 2535 - DNA, 15 bp, Homo sapiens
ggattaccgagctcg

SEQ ID NO: 2536 - DNA, 15 bp, Homo sapiens
cggattaccgagctc

SEQ ID NO: 2537 - DNA, 15 bp, Homo sapiens
ccggattaccgagct

SEQ ID NO: 2538 - DNA, 15 bp, Homo sapiens
accggattaccgagc

SEQ ID NO: 2539 - DNA, 15 bp, Homo sapiens
gaccggattaccgag

SEQ ID NO: 2540 - DNA, 15 bp, Homo sapiens
agaccggattaccga

SEQ ID NO: 2541 - DNA, 15 bp, Homo sapiens
gagaccggattaccg

SEQ ID NO: 2542 - DNA, 15 bp, Homo sapiens
ggagaccggattacc

SEQ ID NO: 2543 - DNA, 15 bp, Homo sapiens
aggagaccggattac

SEQ ID NO: 2544 - DNA, 15 bp, Homo sapiens
taggagaccggatta

SEQ ID NO: 2545 - DNA, 15 bp, Homo sapiens
ttaggagaccggatt

SEQ ID NO: 2546 - DNA, 15 bp, Homo sapiens
tttaggagaccggat

SEQ ID NO: 2547 - DNA, 15 bp, Homo sapiens
atttaggagaccgga

SEQ ID NO: 2548 - DNA, 15 bp, Homo sapiens
catttaggagaccgg

SEQ ID NO: 2549 - DNA, 15 bp, Homo sapiens
tcatttaggagaccg

SEQ ID NO: 2550 - DNA, 15 bp, Homo sapiens
ttcatttaggagacc

SEQ ID NO: 2551 - DNA, 15 bp, Homo sapiens
gttcatttaggagac

SEQ ID NO: 2552 - DNA, 15 bp, Homo sapiens
tgttcatttaggaga

SEQ ID NO: 2553 - DNA, 15 bp, Homo sapiens
ttgttcatttaggag

SEQ ID NO: 2554 - DNA, 15 bp, Homo sapiens
tttgttcatttagga

SEQ ID NO: 2555 - DNA, 15 bp, Homo sapiens
ttttgttcatttagg

SEQ ID NO: 2556 - DNA, 15 bp, Homo sapiens
tttttgttcatttag

SEQ ID NO: 2557 - DNA, 15 bp, Homo sapiens
ttttttgttcattta

SEQ ID NO: 2558 - DNA, 15 bp, Homo sapiens
cttttttgttcattt

SEQ ID NO: 2559 - DNA, 15 bp, Homo sapiens
acttttttgttcatt

SEQ ID NO: 2560 - DNA, 15 bp, Homo sapiens
tacttttttgttcat

SEQ ID NO: 2561 - DNA, 15 bp, Homo sapiens
ctacttttttgttca

SEQ ID NO: 2562 - DNA, 15 bp, Homo sapiens
tctacttttttgttc

SEQ ID NO: 2563 - DNA, 15 bp, Homo sapiens
gtctacttttttgtt

SEQ ID NO: 2564 - DNA, 15 bp, Homo sapiens
cgtctacttttttgt

SEQ ID NO: 2565 - DNA, 15 bp, Homo sapiens
gcgtctacttttttg

SEQ ID NO: 2566 - DNA, 15 bp, Homo sapiens
agcgtctactttttt

SEQ ID NO: 2567 - DNA, 15 bp, Homo sapiens
aagcgtctacttttt

SEQ ID NO: 2568 - DNA, 15 bp, Homo sapiens
aaagcgtctactttt

SEQ ID NO: 2569 - DNA, 15 bp, Homo sapiens
aaaagcgtctacttt

SEQ ID NO: 2570 - DNA, 15 bp, Homo sapiens
aaaaagcgtctactt

SEQ ID NO: 2571 - DNA, 15 bp, Homo sapiens
caaaaagcgtctact

SEQ ID NO: 2572 - DNA, 15 bp, Homo sapiens
tcaaaaagcgtctac

SEQ ID NO: 2573 - DNA, 15 bp, Homo sapiens
ctcaaaaagcgtcta

SEQ ID NO: 2574 - DNA, 15 bp, Homo sapiens
cctcaaaaagcgtct

SEQ ID NO: 2575 - DNA, 15 bp, Homo sapiens
acctcaaaaagcgtc

SEQ ID NO: 2576 - DNA, 15 bp, Homo sapiens
aacctcaaaaagcgt

SEQ ID NO: 2577 - DNA, 15 bp, Homo sapiens
caacctcaaaaagcg

SEQ ID NO: 2578 - DNA, 15 bp, Homo sapiens
tcaacctcaaaaagc

SEQ ID NO: 2579 - DNA, 15 bp, Homo sapiens
ctcaacctcaaaaag

SEQ ID NO: 2580 - DNA, 15 bp, Homo sapiens
gctcaacctcaaaaa

SEQ ID NO: 2581 - DNA, 15 bp, Homo sapiens
tgctcaacctcaaaa

SEQ ID NO: 2582 - DNA, 15 bp, Homo sapiens
atgctcaacctcaaa

SEQ ID NO: 2583 - DNA, 15 bp, Homo sapiens
tatgctcaacctcaa

SEQ ID NO: 2584 - DNA, 15 bp, Homo sapiens
atatgctcaacctca

SEQ ID NO: 2585 - DNA, 15 bp, Homo sapiens
aatatgctcaacctc

SEQ ID NO: 2586 - DNA, 15 bp, Homo sapiens
aaatatgctcaacct

SEQ ID NO: 2587 - DNA, 15 bp, Homo sapiens
gaaatatgctcaacc

SEQ ID NO: 2588 - DNA, 15 bp, Homo sapiens
cgaaatatgctcaac

SEQ ID NO: 2589 - DNA, 15 bp, Homo sapiens
tcgaaatatgctcaa

SEQ ID NO: 2590 - DNA, 15 bp, Homo sapiens
atcgaaatatgctca

SEQ ID NO: 2591 - DNA, 15 bp, Homo sapiens
aatcgaaatatgctc

SEQ ID NO: 2592 - DNA, 15 bp, Homo sapiens
taatcgaaatatgct

SEQ ID NO: 2593 - DNA, 15 bp, Homo sapiens
ttaatcgaaatatgc

SEQ ID NO: 2594 - DNA, 15 bp, Homo sapiens
tttaatcgaaatatg

SEQ ID NO: 2595 - DNA, 15 bp, Homo sapiens
atttaatcgaaatat

SEQ ID NO: 2596 - DNA, 15 bp, Homo sapiens
gatttaatcgaaata

SEQ ID NO: 2597 - DNA, 15 bp, Homo sapiens
agatttaatcgaaat

SEQ ID NO: 2598 - DNA, 15 bp, Homo sapiens
aagatttaatcgaaa

SEQ ID NO: 2599 - DNA, 15 bp, Homo sapiens
caagatttaatcgaa

SEQ ID NO: 2600 - DNA, 15 bp, Homo sapiens
ccaagatttaatcga

SEQ ID NO: 2601 - DNA, 15 bp, Homo sapiens
gccaagatttaatcg

SEQ ID NO: 2602 - DNA, 15 bp, Homo sapiens
agccaagatttaatc

SEQ ID NO: 2603 - DNA, 15 bp, Homo sapiens
aagccaagatttaat

SEQ ID NO: 2604 - DNA, 15 bp, Homo sapiens
taagccaagatttaa

SEQ ID NO: 2605 - DNA, 15 bp, Homo sapiens
ctaagccaagattta

SEQ ID NO: 2606 - DNA, 15 bp, Homo sapiens
cctaagccaagattt

SEQ ID NO: 2607 - DNA, 15 bp, Homo sapiens
gcctaagccaagatt

SEQ ID NO: 2608 - DNA, 15 bp, Homo sapiens
ggcctaagccaagat

SEQ ID NO: 2609 - DNA, 15 bp, Homo sapiens
gggcctaagccaaga

SEQ ID NO: 2610 - DNA, 15 bp, Homo sapiens
agggcctaagccaag

SEQ ID NO: 2611 - DNA, 15 bp, Homo sapiens
tagggcctaagccaa

SEQ ID NO: 2612 - DNA, 15 bp, Homo sapiens
ctagggcctaagcca

SEQ ID NO: 2613 - DNA, 15 bp, Homo sapiens
tctagggcctaagcc

SEQ ID NO: 2614 - DNA, 15 bp, Homo sapiens
atctagggcctaagc

SEQ ID NO: 2615 - DNA, 15 bp, Homo sapiens
gatctagggcctaag

SEQ ID NO: 2616 - DNA, 15 bp, Homo sapiens
tgatctagggcctaa

SEQ ID NO: 2617 - DNA, 15 bp, Homo sapiens
ttgatctagggccta

SEQ ID NO: 2618 - DNA, 15 bp, Homo sapiens
cttgatctagggcct

SEQ ID NO: 2619 - DNA, 15 bp, Homo sapiens
ccttgatctagggcc

SEQ ID NO: 2620 - DNA, 15 bp, Homo sapiens
cccttgatctagggc

SEQ ID NO: 2621 - DNA, 15 bp, Homo sapiens
acccttgatctaggg

SEQ ID NO: 2622 - DNA, 15 bp, Homo sapiens
aacccttgatctagg

SEQ ID NO: 2623 - DNA, 15 bp, Homo sapiens
aaacccttgatctag

SEQ ID NO: 2624 - DNA, 15 bp, Homo sapiens
taaacccttgatcta

SEQ ID NO: 2625 - DNA, 15 bp, Homo sapiens
ctaaacccttgatct

SEQ ID NO: 2626 - DNA, 15 bp, Homo sapiens
tctaaacccttgatc

SEQ ID NO: 2627 - DNA, 15 bp, Homo sapiens
atctaaacccttgat

SEQ ID NO: 2628 - DNA, 15 bp, Homo sapiens
gatctaaacccttga

SEQ ID NO: 2629 - DNA, 15 bp, Homo sapiens
tgatctaaacccttg

SEQ ID NO: 2630 - DNA, 15 bp, Homo sapiens
ctgatctaaaccctt

SEQ ID NO: 2631 - DNA, 15 bp, Homo sapiens
tctgatctaaaccct

SEQ ID NO: 2632 - DNA, 15 bp, Homo sapiens
ttctgatctaaaccc

SEQ ID NO: 2633 - DNA, 15 bp, Homo sapiens
attctgatctaaacc

SEQ ID NO: 2634 - DNA, 15 bp, Homo sapiens
tattctgatctaaac

SEQ ID NO: 2635 - DNA, 15 bp, Homo sapiens
ttattctgatctaaa

SEQ ID NO: 2636 - DNA, 15 bp, Homo sapiens
tttattctgatctaa

SEQ ID NO: 2637 - DNA, 15 bp, Homo sapiens
ttttattctgatcta

SEQ ID NO: 2638 - DNA, 15 bp, Homo sapiens
attttattctgatct

SEQ ID NO: 2639 - DNA, 15 bp, Homo sapiens
cattttattctgatc

SEQ ID NO: 2640 - DNA, 15 bp, Homo sapiens
tcattttattctgat

SEQ ID NO: 2641 - DNA, 15 bp, Homo sapiens
ttcattttattctga

SEQ ID NO: 2642 - DNA, 15 bp, Homo sapiens
tttcattttattctg

SEQ ID NO: 2643 - DNA, 15 bp, Homo sapiens
ttttcattttattct

SEQ ID NO: 2644 - DNA, 15 bp, Homo sapiens
attttcattttattc

SEQ ID NO: 2645 - DNA, 15 bp, Homo sapiens
aattttcattttatt

SEQ ID NO: 2646 - DNA, 15 bp, Homo sapiens
taattttcattttat

SEQ ID NO: 2647 - DNA, 15 bp, Homo sapiens
ctaattttcatttta

SEQ ID NO: 2648 - DNA, 15 bp, Homo sapiens
actaattttcatttt

SEQ ID NO: 2649 - DNA, 15 bp, Homo sapiens
cactaattttcattt

SEQ ID NO: 2650 - DNA, 15 bp, Homo sapiens
acactaattttcatt

SEQ ID NO: 2651 - DNA, 15 bp, Homo sapiens
aacactaattttcat

SEQ ID NO: 2652 - DNA, 15 bp, Homo sapiens
caacactaattttca

SEQ ID NO: 2653 - DNA, 15 bp, Homo sapiens
gcaacactaattttc

SEQ ID NO: 2654 - DNA, 15 bp, Homo sapiens
tgcaacactaatttt

SEQ ID NO: 2655 - DNA, 15 bp, Homo sapiens
gtgcaacactaattt

SEQ ID NO: 2656 - DNA, 15 bp, Homo sapiens
cgtgcaacactaatt

SEQ ID NO: 2657 - DNA, 15 bp, Homo sapiens
acgtgcaacactaat

SEQ ID NO: 2658 - DNA, 15 bp, Homo sapiens
tacgtgcaacactaa

SEQ ID NO: 2659 - DNA, 15 bp, Homo sapiens
gtacgtgcaacacta

SEQ ID NO: 2660 - DNA, 15 bp, Homo sapiens
cgtacgtgcaacact

SEQ ID NO: 2661 - DNA, 15 bp, Homo sapiens
gcgtacgtgcaacac

SEQ ID NO: 2662 - DNA, 15 bp, Homo sapiens
tgcgtacgtgcaaca

SEQ ID NO: 2663 - DNA, 15 bp, Homo sapiens
atgcgtacgtgcaac

SEQ ID NO: 2664 - DNA, 15 bp, Homo sapiens
tatgcgtacgtgcaa

SEQ ID NO: 2665 - DNA, 15 bp, Homo sapiens
atatgcgtacgtgca

SEQ ID NO: 2666 - DNA, 15 bp, Homo sapiens
aatatgcgtacgtgc

SEQ ID NO: 2667 - DNA, 15 bp, Homo sapiens
caatatgcgtacgtg

SEQ ID NO: 2668 - DNA, 15 bp, Homo sapiens
gcaatatgcgtacgt

SEQ ID NO: 2669 - DNA, 15 bp, Homo sapiens
tgcaatatgcgtacg

SEQ ID NO: 2670 - DNA, 15 bp, Homo sapiens
atgcaatatgcgtac

SEQ ID NO: 2671 - DNA, 15 bp, Homo sapiens
gatgcaatatgcgta

SEQ ID NO: 2672 - DNA, 15 bp, Homo sapiens
tgatgcaatatgcgt

SEQ ID NO: 2673 - DNA, 15 bp, Homo sapiens
ctgatgcaatatgcg

SEQ ID NO: 2674 - DNA, 15 bp, Homo sapiens
tctgatgcaatatgc

SEQ ID NO: 2675 - DNA, 15 bp, Homo sapiens
ttctgatgcaatatg

SEQ ID NO: 2676 - DNA, 15 bp, Homo sapiens
attctgatgcaatat

SEQ ID NO: 2677 - DNA, 15 bp, Homo sapiens
gattctgatgcaata

SEQ ID NO: 2678 - DNA, 15 bp, Homo sapiens
agattctgatgcaat

SEQ ID NO: 2679 - DNA, 15 bp, Homo sapiens
aagattctgatgcaa

SEQ ID NO: 2680 - DNA, 15 bp, Homo sapiens
caagattctgatgca

SEQ ID NO: 2681 - DNA, 15 bp, Homo sapiens
gcaagattctgatgc

SEQ ID NO: 2682 - DNA, 15 bp, Homo sapiens
tgcaagattctgatg

SEQ ID NO: 2683 - DNA, 15 bp, Homo sapiens
ctgcaagattctgat

SEQ ID NO: 2684 - DNA, 15 bp, Homo sapiens
actgcaagattctga

SEQ ID NO: 2685 - DNA, 15 bp, Homo sapiens
cactgcaagattctg

SEQ ID NO: 2686 - DNA, 15 bp, Homo sapiens
tcactgcaagattct

SEQ ID NO: 2687 - DNA, 15 bp, Homo sapiens
atcactgcaagattc

SEQ ID NO: 2688 - DNA, 15 bp, Homo sapiens
aatcactgcaagatt

SEQ ID NO: 2689 - DNA, 15 bp, Homo sapiens
caatcactgcaagat

SEQ ID NO: 2690 - DNA, 15 bp, Homo sapiens
acaatcactgcaaga

SEQ ID NO: 2691 - DNA, 15 bp, Homo sapiens
aacaatcactgcaag

SEQ ID NO: 2692 - DNA, 15 bp, Homo sapiens
aaacaatcactgcaa

SEQ ID NO: 2693 - DNA, 15 bp, Homo sapiens
aaaacaatcactgca

SEQ ID NO: 2694 - DNA, 15 bp, Homo sapiens
taaaacaatcactgc

SEQ ID NO: 2695 - DNA, 15 bp, Homo sapiens
ctaaaacaatcactg

SEQ ID NO: 2696 - DNA, 15 bp, Homo sapiens
actaaaacaatcact

SEQ ID NO: 2697 - DNA, 15 bp, Homo sapiens
aactaaaacaatcac

SEQ ID NO: 2698 - DNA, 15 bp, Homo sapiens
aaactaaaacaatca

SEQ ID NO: 2699 - DNA, 15 bp, Homo sapiens
gaaactaaaacaatc

SEQ ID NO: 2700 - DNA, 15 bp, Homo sapiens
ggaaactaaaacaat

SEQ ID NO: 2701 - DNA, 15 bp, Homo sapiens
aggaaactaaaacaa

SEQ ID NO: 2702 - DNA, 15 bp, Homo sapiens
caggaaactaaaaca

SEQ ID NO: 2703 - DNA, 15 bp, Homo sapiens
tcaggaaactaaaac

SEQ ID NO: 2704 - DNA, 15 bp, Homo sapiens
ctcaggaaactaaaa

SEQ ID NO: 2705 - DNA, 15 bp, Homo sapiens
actcaggaaactaaa

SEQ ID NO: 2706 - DNA, 15 bp, Homo sapiens
aactcaggaaactaa

SEQ ID NO: 2707 - DNA, 15 bp, Homo sapiens
caactcaggaaacta

SEQ ID NO: 2708 - DNA, 15 bp, Homo sapiens
gcaactcaggaaact

SEQ ID NO: 2709 - DNA, 15 bp, Homo sapiens
tgcaactcaggaaac

SEQ ID NO: 2710 - DNA, 15 bp, Homo sapiens
atgcaactcaggaaa

SEQ ID NO: 2711 - DNA, 15 bp, Homo sapiens
aatgcaactcaggaa

SEQ ID NO: 2712 - DNA, 15 bp, Homo sapiens
caatgcaactcagga

SEQ ID NO: 2713 - DNA, 15 bp, Homo sapiens
tcaatgcaactcagg

SEQ ID NO: 2714 - DNA, 15 bp, Homo sapiens
atcaatgcaactcag

SEQ ID NO: 2715 - DNA, 15 bp, Homo sapiens
tatcaatgcaactca

SEQ ID NO: 2716 - DNA, 15 bp, Homo sapiens
ctatcaatgcaactc

SEQ ID NO: 2717 - DNA, 15 bp, Homo sapiens
tctatcaatgcaact

SEQ ID NO: 2718 - DNA, 15 bp, Homo sapiens
atctatcaatgcaac

SEQ ID NO: 2719 - DNA, 15 bp, Homo sapiens
aatctatcaatgcaa

SEQ ID NO: 2720 - DNA, 15 bp, Homo sapiens
gaatctatcaatgca

SEQ ID NO: 2721 - DNA, 15 bp, Homo sapiens
agaatctatcaatgc

SEQ ID NO: 2722 - DNA, 15 bp, Homo sapiens
aagaatctatcaatg

SEQ ID NO: 2723 - DNA, 15 bp, Homo sapiens
aaagaatctatcaat

SEQ ID NO: 2724 - DNA, 15 bp, Homo sapiens
aaaagaatctatcaa

SEQ ID NO: 2725 - DNA, 15 bp, Homo sapiens
taaaagaatctatca

SEQ ID NO: 2726 - DNA, 15 bp, Homo sapiens
ttaaaagaatctatc

SEQ ID NO: 2727 - DNA, 15 bp, Homo sapiens
tttaaaagaatctat

SEQ ID NO: 2728 - DNA, 15 bp, Homo sapiens
ttttaaaagaatcta

SEQ ID NO: 2729 - DNA, 15 bp, Homo sapiens
attttaaaagaatct

SEQ ID NO: 2730 - DNA, 15 bp, Homo sapiens
tattttaaaagaatc

SEQ ID NO: 2731 - DNA, 15 bp, Homo sapiens
atattttaaaagaat

SEQ ID NO: 2732 - DNA, 15 bp, Homo sapiens
catattttaaaagaa

SEQ ID NO: 2733 - DNA, 15 bp, Homo sapiens
tcatattttaaaaga

SEQ ID NO: 2734 - DNA, 15 bp, Homo sapiens
gtcatattttaaaag

SEQ ID NO: 2735 - DNA, 15 bp, Homo sapiens
agtcatattttaaaa

SEQ ID NO: 2736 - DNA, 15 bp, Homo sapiens
cagtcatattttaaa

SEQ ID NO: 2737 - DNA, 15 bp, Homo sapiens
tcagtcatattttaa

SEQ ID NO: 2738 - DNA, 15 bp, Homo sapiens
atcagtcatatttta

SEQ ID NO: 2739 - DNA, 15 bp, Homo sapiens
aatcagtcatatttt

SEQ ID NO: 2740 - DNA, 15 bp, Homo sapiens
aaatcagtcatattt

SEQ ID NO: 2741 - DNA, 15 bp, Homo sapiens
caaatcagtcatatt

SEQ ID NO: 2742 - DNA, 15 bp, Homo sapiens
gcaaatcagtcatat

SEQ ID NO: 2743 - DNA, 15 bp, Homo sapiens
tgcaaatcagtcata

SEQ ID NO: 2744 - DNA, 15 bp, Homo sapiens
atgcaaatcagtcat

SEQ ID NO: 2745 - DNA, 15 bp, Homo sapiens
tatgcaaatcagtca

SEQ ID NO: 2746 - DNA, 15 bp, Homo sapiens
ttatgcaaatcagtc

SEQ ID NO: 2747 - DNA, 15 bp, Homo sapiens
gttatgcaaatcagt

SEQ ID NO: 2748 - DNA, 15 bp, Homo sapiens
agttatgcaaatcag

SEQ ID NO: 2749 - DNA, 15 bp, Homo sapiens
aagttatgcaaatca

SEQ ID NO: 2750 - DNA, 15 bp, Homo sapiens
aaagttatgcaaatc

SEQ ID NO: 2751 - DNA, 15 bp, Homo sapiens
taaagttatgcaaat

SEQ ID NO: 2752 - DNA, 15 bp, Homo sapiens
ctaaagttatgcaaa

SEQ ID NO: 2753 - DNA, 15 bp, Homo sapiens
tctaaagttatgcaa

SEQ ID NO: 2754 - DNA, 15 bp, Homo sapiens
ttctaaagttatgca

SEQ ID NO: 2755 - DNA, 15 bp, Homo sapiens
cttctaaagttatgc

SEQ ID NO: 2756 - DNA, 15 bp, Homo sapiens
gcttctaaagttatg

SEQ ID NO: 2757 - DNA, 15 bp, Homo sapiens
tgcttctaaagttat

SEQ ID NO: 2758 - DNA, 15 bp, Homo sapiens
ctgcttctaaagtta

SEQ ID NO: 2759 - DNA, 15 bp, Homo sapiens
tctgcttctaaagtt

SEQ ID NO: 2760 - DNA, 15 bp, Homo sapiens
ttctgcttctaaagt

SEQ ID NO: 2761 - DNA, 15 bp, Homo sapiens
attctgcttctaaag

SEQ ID NO: 2762 - DNA, 15 bp, Homo sapiens
gattctgcttctaaa

SEQ ID NO: 2763 - DNA, 15 bp, Homo sapiens
tgattctgcttctaa

SEQ ID NO: 2764 - DNA, 15 bp, Homo sapiens
atgattctgcttcta

SEQ ID NO: 2765 - DNA, 15 bp, Homo sapiens
aatgattctgcttct

SEQ ID NO: 2766 - DNA, 15 bp, Homo sapiens
aaatgattctgcttc

SEQ ID NO: 2767 - DNA, 15 bp, Homo sapiens
aaaatgattctgctt

SEQ ID NO: 2768 - DNA, 15 bp, Homo sapiens
gaaaatgattctgct

SEQ ID NO: 2769 - DNA, 15 bp, Homo sapiens
tgaaaatgattctgc

SEQ ID NO: 2770 - DNA, 15 bp, Homo sapiens
ctgaaaatgattctg

SEQ ID NO: 2771 - DNA, 15 bp, Homo sapiens
actgaaaatgattct

SEQ ID NO: 2772 - DNA, 15 bp, Homo sapiens
tactgaaaatgattc

SEQ ID NO: 2773 - DNA, 15 bp, Homo sapiens
atactgaaaatgatt

SEQ ID NO: 2774 - DNA, 15 bp, Homo sapiens
tatactgaaaatgat

SEQ ID NO: 2775 - DNA, 15 bp, Homo sapiens
atatactgaaaatga

SEQ ID NO: 2776 - DNA, 15 bp, Homo sapiens
tatatactgaaaatg

SEQ ID NO: 2777 - DNA, 15 bp, Homo sapiens
atatatactgaaaat

SEQ ID NO: 2778 - DNA, 15 bp, Homo sapiens
catatatactgaaaa

SEQ ID NO: 2779 - DNA, 15 bp, Homo sapiens
ccatatatactgaaa

SEQ ID NO: 2780 - DNA, 15 bp, Homo sapiens
accatatatactgaa

SEQ ID NO: 2781 - DNA, 15 bp, Homo sapiens
caccatatatactga

SEQ ID NO: 2782 - DNA, 15 bp, Homo sapiens
gcaccatatatactg

SEQ ID NO: 2783 - DNA, 15 bp, Homo sapiens
tgcaccatatatact

SEQ ID NO: 2784 - DNA, 15 bp, Homo sapiens
gtgcaccatatatac

SEQ ID NO: 2785 - DNA, 15 bp, Homo sapiens
tgtgcaccatatata

SEQ ID NO: 2786 - DNA, 15 bp, Homo sapiens
atgtgcaccatatat

SEQ ID NO: 2787 - DNA, 15 bp, Homo sapiens
aatgtgcaccatata

SEQ ID NO: 2788 - DNA, 15 bp, Homo sapiens
caatgtgcaccatat

SEQ ID NO: 2789 - DNA, 15 bp, Homo sapiens
tcaatgtgcaccata

SEQ ID NO: 2790 - DNA, 15 bp, Homo sapiens
ctcaatgtgcaccat

SEQ ID NO: 2791 - DNA, 15 bp, Homo sapiens
cctcaatgtgcacca

SEQ ID NO: 2792 - DNA, 15 bp, Homo sapiens
ccctcaatgtgcacc

SEQ ID NO: 2793 - DNA, 15 bp, Homo sapiens
gccctcaatgtgcac

SEQ ID NO: 2794 - DNA, 15 bp, Homo sapiens
tgccctcaatgtgca

SEQ ID NO: 2795 - DNA, 15 bp, Homo sapiens
ttgccctcaatgtgc

SEQ ID NO: 2796 - DNA, 15 bp, Homo sapiens
tttgccctcaatgtg

SEQ ID NO: 2797 - DNA, 15 bp, Homo sapiens
ttttgccctcaatgt

SEQ ID NO: 2798 - DNA, 15 bp, Homo sapiens
tttttgccctcaatg

SEQ ID NO: 2799 - DNA, 15 bp, Homo sapiens
ctttttgccctcaat

SEQ ID NO: 2800 - DNA, 15 bp, Homo sapiens
actttttgccctcaa

SEQ ID NO: 2801 - DNA, 15 bp, Homo sapiens
tactttttgccctca

SEQ ID NO: 2802 - DNA, 15 bp, Homo sapiens
ctactttttgccctc

SEQ ID NO: 2803 - DNA, 15 bp, Homo sapiens
actactttttgccct

SEQ ID NO: 2804 - DNA, 15 bp, Homo sapiens
aactactttttgccc

SEQ ID NO: 2805 - DNA, 15 bp, Homo sapiens
aaactactttttgcc

SEQ ID NO: 2806 - DNA, 15 bp, Homo sapiens
aaaactactttttgc

SEQ ID NO: 2807 - DNA, 15 bp, Homo sapiens
caaaactactttttg

SEQ ID NO: 2808 - DNA, 15 bp, Homo sapiens
acaaaactacttttt

SEQ ID NO: 2809 - DNA, 15 bp, Homo sapiens
aacaaaactactttt

SEQ ID NO: 2810 - DNA, 15 bp, Homo sapiens
taacaaaactacttt

SEQ ID NO: 2811 - DNA, 15 bp, Homo sapiens
ttaacaaaactactt

SEQ ID NO: 2812 - DNA, 15 bp, Homo sapiens
attaacaaaactact

SEQ ID NO: 2813 - DNA, 15 bp, Homo sapiens
cattaacaaaactac

SEQ ID NO: 2814 - DNA, 15 bp, Homo sapiens
acattaacaaaacta

SEQ ID NO: 2815 - DNA, 15 bp, Homo sapiens
aacattaacaaaact

SEQ ID NO: 2816 - DNA, 15 bp, Homo sapiens
aaacattaacaaaac

SEQ ID NO: 2817 - DNA, 15 bp, Homo sapiens
taaacattaacaaaa

SEQ ID NO: 2818 - DNA, 15 bp, Homo sapiens
ttaaacattaacaaa

SEQ ID NO: 2819 - DNA, 15 bp, Homo sapiens
tttaaacattaacaa

SEQ ID NO: 2820 - DNA, 15 bp, Homo sapiens
gtttaaacattaaca

SEQ ID NO: 2821 - DNA, 15 bp, Homo sapiens
agtttaaacattaac

SEQ ID NO: 2822 - DNA, 15 bp, Homo sapiens
aagtttaaacattaa

SEQ ID NO: 2823 - DNA, 15 bp, Homo sapiens
taagtttaaacatta

SEQ ID NO: 2824 - DNA, 15 bp, Homo sapiens
ttaagtttaaacatt

SEQ ID NO: 2825 - DNA, 15 bp, Homo sapiens
cttaagtttaaacat

SEQ ID NO: 2826 - DNA, 15 bp, Homo sapiens
acttaagtttaaaca

SEQ ID NO: 2827 - DNA, 15 bp, Homo sapiens
aacttaagtttaaac

SEQ ID NO: 2828 - DNA, 15 bp, Homo sapiens
taacttaagtttaaa

SEQ ID NO: 2829 - DNA, 15 bp, Homo sapiens
gtaacttaagtttaa

SEQ ID NO: 2830 - DNA, 15 bp, Homo sapiens
ggtaacttaagttta

SEQ ID NO: 2831 - DNA, 15 bp, Homo sapiens
aggtaacttaagttt

SEQ ID NO: 2832 - DNA, 15 bp, Homo sapiens
taggtaacttaagtt

SEQ ID NO: 2833 - DNA, 15 bp, Homo sapiens
gtaggtaacttaagt

SEQ ID NO: 2834 - DNA, 15 bp, Homo sapiens
tgtaggtaacttaag

SEQ ID NO: 2835 - DNA, 15 bp, Homo sapiens
ttgtaggtaacttaa

SEQ ID NO: 2836 - DNA, 15 bp, Homo sapiens
gttgtaggtaactta

SEQ ID NO: 2837 - DNA, 15 bp, Homo sapiens
agttgtaggtaactt

SEQ ID NO: 2838 - DNA, 15 bp, Homo sapiens
aagttgtaggtaact

SEQ ID NO: 2839 - DNA, 15 bp, Homo sapiens
aaagttgtaggtaac

SEQ ID NO: 2840 - DNA, 15 bp, Homo sapiens
caaagttgtaggtaa

SEQ ID NO: 2841 - DNA, 15 bp, Homo sapiens
tcaaagttgtaggta

SEQ ID NO: 2842 - DNA, 15 bp, Homo sapiens
ttcaaagttgtaggt

SEQ ID NO: 2843 - DNA, 15 bp, Homo sapiens
gttcaaagttgtagg

SEQ ID NO: 2844 - DNA, 15 bp, Homo sapiens
agttcaaagttgtag

SEQ ID NO: 2845 - DNA, 15 bp, Homo sapiens
cagttcaaagttgta

SEQ ID NO: 2846 - DNA, 15 bp, Homo sapiens
acagttcaaagttgt

SEQ ID NO: 2847 - DNA, 15 bp, Homo sapiens
tacagttcaaagttg

SEQ ID NO: 2848 - DNA, 15 bp, Homo sapiens
atacagttcaaagtt

SEQ ID NO: 2849 - DNA, 15 bp, Homo sapiens
catacagttcaaagt

SEQ ID NO: 2850 - DNA, 15 bp, Homo sapiens
acatacagttcaaag

SEQ ID NO: 2851 - DNA, 15 bp, Homo sapiens
tacatacagttcaaa

SEQ ID NO: 2852 - DNA, 15 bp, Homo sapiens
ctacatacagttcaa

SEQ ID NO: 2853 - DNA, 15 bp, Homo sapiens
tctacatacagttca

SEQ ID NO: 2854 - DNA, 15 bp, Homo sapiens
ttctacatacagttc

SEQ ID NO: 2855 - DNA, 15 bp, Homo sapiens
cttctacatacagtt

SEQ ID NO: 2856 - DNA, 15 bp, Homo sapiens
acttctacatacagt

SEQ ID NO: 2857 - DNA, 15 bp, Homo sapiens
aacttctacatacag

SEQ ID NO: 2858 - DNA, 15 bp, Homo sapiens
aaacttctacataca

SEQ ID NO: 2859 - DNA, 15 bp, Homo sapiens
aaaacttctacatac

SEQ ID NO: 2860 - DNA, 15 bp, Homo sapiens
caaaacttctacata

SEQ ID NO: 2861 - DNA, 15 bp, Homo sapiens
acaaaacttctacat

SEQ ID NO: 2862 - DNA, 15 bp, Homo sapiens
tacaaaacttctaca

SEQ ID NO: 2863 - DNA, 15 bp, Homo sapiens
ctacaaaacttctac

SEQ ID NO: 2864 - DNA, 15 bp, Homo sapiens
actacaaaacttcta

SEQ ID NO: 2865 - DNA, 15 bp, Homo sapiens
aactacaaaacttct

SEQ ID NO: 2866 - DNA, 15 bp, Homo sapiens
aaactacaaaacttc

SEQ ID NO: 2867 - DNA, 15 bp, Homo sapiens
caaactacaaaactt

SEQ ID NO: 2868 - DNA, 15 bp, Homo sapiens
tcaaactacaaaact

SEQ ID NO: 2869 - DNA, 15 bp, Homo sapiens
ttcaaactacaaaac

SEQ ID NO: 2870 - DNA, 15 bp, Homo sapiens
cttcaaactacaaaa

SEQ ID NO: 2871 - DNA, 15 bp, Homo sapiens
acttcaaactacaaa

SEQ ID NO: 2872 - DNA, 15 bp, Homo sapiens
gacttcaaactacaa

SEQ ID NO: 2873 - DNA, 15 bp, Homo sapiens
tgacttcaaactaca

SEQ ID NO: 2874 - DNA, 15 bp, Homo sapiens
ttgacttcaaactac

SEQ ID NO: 2875 - DNA, 15 bp, Homo sapiens
attgacttcaaacta

SEQ ID NO: 2876 - DNA, 15 bp, Homo sapiens
tattgacttcaaact

SEQ ID NO: 2877 - DNA, 15 bp, Homo sapiens
ctattgacttcaaac

SEQ ID NO: 2878 - DNA, 15 bp, Homo sapiens
actattgacttcaaa

SEQ ID NO: 2879 - DNA, 15 bp, Homo sapiens
cactattgacttcaa

SEQ ID NO: 2880 - DNA, 15 bp, Homo sapiens
gcactattgacttca

SEQ ID NO: 2881 - DNA, 15 bp, Homo sapiens
ggcactattgacttc

SEQ ID NO: 2882 - DNA, 15 bp, Homo sapiens
tggcactattgactt

SEQ ID NO: 2883 - DNA, 15 bp, Homo sapiens
atggcactattgact

SEQ ID NO: 2884 - DNA, 15 bp, Homo sapiens
tatggcactattgac

SEQ ID NO: 2885 - DNA, 15 bp, Homo sapiens
ttatggcactattga

SEQ ID NO: 2886 - DNA, 15 bp, Homo sapiens
attatggcactattg

SEQ ID NO: 2887 - DNA, 15 bp, Homo sapiens
tattatggcactatt

SEQ ID NO: 2888 - DNA, 15 bp, Homo sapiens
atattatggcactat

SEQ ID NO: 2889 - DNA, 15 bp, Homo sapiens
tatattatggcacta

SEQ ID NO: 2890 - DNA, 15 bp, Homo sapiens
gtatattatggcact

SEQ ID NO: 2891 - DNA, 15 bp, Homo sapiens
ggtatattatggcac

SEQ ID NO: 2892 - DNA, 15 bp, Homo sapiens
aggtatattatggca

SEQ ID NO: 2893 - DNA, 15 bp, Homo sapiens
aaggtatattatggc

SEQ ID NO: 2894 - DNA, 15 bp, Homo sapiens
taaggtatattatgg

SEQ ID NO: 2895 - DNA, 15 bp, Homo sapiens
ataaggtatattatg

SEQ ID NO: 2896 - DNA, 15 bp, Homo sapiens
tataaggtatattat

SEQ ID NO: 2897 - DNA, 15 bp, Homo sapiens
ttataaggtatatta

SEQ ID NO: 2898 - DNA, 15 bp, Homo sapiens
cttataaggtatatt

SEQ ID NO: 2899 - DNA, 15 bp, Homo sapiens
ccttataaggtatat

SEQ ID NO: 2900 - DNA, 15 bp, Homo sapiens
gccttataaggtata

SEQ ID NO: 2901 - DNA, 15 bp, Homo sapiens
cgccttataaggtat

SEQ ID NO: 2902 - DNA, 15 bp, Homo sapiens
acgccttataaggta

SEQ ID NO: 2903 - DNA, 15 bp, Homo sapiens
aacgccttataaggt

SEQ ID NO: 2904 - DNA, 15 bp, Homo sapiens
gaacgccttataagg

SEQ ID NO: 2905 - DNA, 15 bp, Homo sapiens
agaacgccttataag

SEQ ID NO: 2906 - DNA, 15 bp, Homo sapiens
aagaacgccttataa

SEQ ID NO: 2907 - DNA, 15 bp, Homo sapiens
taagaacgccttata

SEQ ID NO: 2908 - DNA, 15 bp, Homo sapiens
gtaagaacgccttat

SEQ ID NO: 2909 - DNA, 15 bp, Homo sapiens
agtaagaacgcctta

SEQ ID NO: 2910 - DNA, 15 bp, Homo sapiens
tagtaagaacgcctt

SEQ ID NO: 2911 - DNA, 15 bp, Homo sapiens
ctagtaagaacgcct

SEQ ID NO: 2912 - DNA, 15 bp, Homo sapiens
tctagtaagaacgcc

SEQ ID NO: 2913 - DNA, 15 bp, Homo sapiens
atctagtaagaacgc

SEQ ID NO: 2914 - DNA, 15 bp, Homo sapiens
gatctagtaagaacg

SEQ ID NO: 2915 - DNA, 15 bp, Homo sapiens
agatctagtaagaac

SEQ ID NO: 2916 - DNA, 15 bp, Homo sapiens
aagatctagtaagaa

SEQ ID NO: 2917 - DNA, 15 bp, Homo sapiens
aaagatctagtaaga

SEQ ID NO: 2918 - DNA, 15 bp, Homo sapiens
caaagatctagtaag

SEQ ID NO: 2919 - DNA, 15 bp, Homo sapiens
acaaagatctagtaa

SEQ ID NO: 2920 - DNA, 15 bp, Homo sapiens
aacaaagatctagta

SEQ ID NO: 2921 - DNA, 15 bp, Homo sapiens
taacaaagatctagt

SEQ ID NO: 2922 - DNA, 15 bp, Homo sapiens
ataacaaagatctag

SEQ ID NO: 2923 - DNA, 15 bp, Homo sapiens
tataacaaagatcta

SEQ ID NO: 2924 - DNA, 15 bp, Homo sapiens
atataacaaagatct

SEQ ID NO: 2925 - DNA, 15 bp, Homo sapiens
aatataacaaagatc

SEQ ID NO: 2926 - DNA, 15 bp, Homo sapiens
aaatataacaaagat

SEQ ID NO: 2927 - DNA, 15 bp, Homo sapiens
taaatataacaaaga

SEQ ID NO: 2928 - DNA, 15 bp, Homo sapiens
gtaaatataacaaag

SEQ ID NO: 2929 - DNA, 15 bp, Homo sapiens
ggtaaatataacaaa

SEQ ID NO: 2930 - DNA, 15 bp, Homo sapiens
aggtaaatataacaa

SEQ ID NO: 2931 - DNA, 15 bp, Homo sapiens
aaggtaaatataaca

SEQ ID NO: 2932 - DNA, 15 bp, Homo sapiens
aaaggtaaatataac

SEQ ID NO: 2933 - DNA, 15 bp, Homo sapiens
aaaaggtaaatataa

SEQ ID NO: 2934 - DNA, 15 bp, Homo sapiens
aaaaaggtaaatata

SEQ ID NO: 2935 - DNA, 15 bp, Homo sapiens
gaaaaaggtaaatat

SEQ ID NO: 2936 - DNA, 15 bp, Homo sapiens
agaaaaaggtaaata

SEQ ID NO: 2937 - DNA, 15 bp, Homo sapiens
gagaaaaaggtaaat

SEQ ID NO: 2938 - DNA, 15 bp, Homo sapiens
agagaaaaaggtaaa

SEQ ID NO: 2939 - DNA, 15 bp, Homo sapiens
gagagaaaaaggtaa

SEQ ID NO: 2940 - DNA, 15 bp, Homo sapiens
ggagagaaaaaggta

SEQ ID NO: 2941 - DNA, 15 bp, Homo sapiens
gggagagaaaaaggt

SEQ ID NO: 2942 - DNA, 15 bp, Homo sapiens
agggagagaaaaagg

SEQ ID NO: 2943 - DNA, 15 bp, Homo sapiens
tagggagagaaaaag

SEQ ID NO: 2944 - DNA, 15 bp, Homo sapiens
atagggagagaaaaa

SEQ ID NO: 2945 - DNA, 15 bp, Homo sapiens
catagggagagaaaa

SEQ ID NO: 2946 - DNA, 15 bp, Homo sapiens
ccatagggagagaaa

SEQ ID NO: 2947 - DNA, 15 bp, Homo sapiens
cccatagggagagaa

SEQ ID NO: 2948 - DNA, 15 bp, Homo sapiens
ccccatagggagaga

SEQ ID NO: 2949 - DNA, 15 bp, Homo sapiens
accccatagggagag

SEQ ID NO: 2950 - DNA, 15 bp, Homo sapiens
caccccatagggaga

SEQ ID NO: 2951 - DNA, 15 bp, Homo sapiens
tcaccccatagggag

SEQ ID NO: 2952 - DNA, 15 bp, Homo sapiens
atcaccccataggga

SEQ ID NO: 2953 - DNA, 15 bp, Homo sapiens
catcaccccataggg

SEQ ID NO: 2954 - DNA, 15 bp, Homo sapiens
acatcaccccatagg

SEQ ID NO: 2955 - DNA, 15 bp, Homo sapiens
tacatcaccccatag

SEQ ID NO: 2956 - DNA, 15 bp, Homo sapiens
ctacatcaccccata

SEQ ID NO: 2957 - DNA, 15 bp, Homo sapiens
cctacatcaccccat

SEQ ID NO: 2958 - DNA, 15 bp, Homo sapiens
tcctacatcacccca

SEQ ID NO: 2959 - DNA, 15 bp, Homo sapiens
atcctacatcacccc

SEQ ID NO: 2960 - DNA, 15 bp, Homo sapiens
tatcctacatcaccc

SEQ ID NO: 2961 - DNA, 15 bp, Homo sapiens
ctatcctacatcacc

SEQ ID NO: 2962 - DNA, 15 bp, Homo sapiens
actatcctacatcac

SEQ ID NO: 2963 - DNA, 15 bp, Homo sapiens
cactatcctacatca

SEQ ID NO: 2964 - DNA, 15 bp, Homo sapiens
gcactatcctacatc

SEQ ID NO: 2965 - DNA, 15 bp, Homo sapiens
agcactatcctacat

SEQ ID NO: 2966 - DNA, 15 bp, Homo sapiens
aagcactatcctaca

SEQ ID NO: 2967 - DNA, 15 bp, Homo sapiens
caagcactatcctac

SEQ ID NO: 2968 - DNA, 15 bp, Homo sapiens
tcaagcactatccta

SEQ ID NO: 2969 - DNA, 15 bp, Homo sapiens
ttcaagcactatcct

SEQ ID NO: 2970 - DNA, 15 bp, Homo sapiens
tttcaagcactatcc

SEQ ID NO: 2971 - DNA, 15 bp, Homo sapiens
atttcaagcactatc

SEQ ID NO: 2972 - DNA, 15 bp, Homo sapiens
aatttcaagcactat

SEQ ID NO: 2973 - DNA, 15 bp, Homo sapiens
aaatttcaagcacta

SEQ ID NO: 2974 - DNA, 15 bp, Homo sapiens
caaatttcaagcact

SEQ ID NO: 2975 - DNA, 15 bp, Homo sapiens
gcaaatttcaagcac

SEQ ID NO: 2976 - DNA, 15 bp, Homo sapiens
tgcaaatttcaagca

SEQ ID NO: 2977 - DNA, 15 bp, Homo sapiens
gtgcaaatttcaagc

SEQ ID NO: 2978 - DNA, 15 bp, Homo sapiens
agtgcaaatttcaag

SEQ ID NO: 2979 - DNA, 15 bp, Homo sapiens
aagtgcaaatttcaa

SEQ ID NO: 2980 - DNA, 15 bp, Homo sapiens
gaagtgcaaatttca

SEQ ID NO: 2981 - DNA, 15 bp, Homo sapiens
tgaagtgcaaatttc

SEQ ID NO: 2982 - DNA, 15 bp, Homo sapiens
ctgaagtgcaaattt

SEQ ID NO: 2983 - DNA, 15 bp, Homo sapiens
actgaagtgcaaatt

SEQ ID NO: 2984 - DNA, 15 bp, Homo sapiens
tactgaagtgcaaat

SEQ ID NO: 2985 - DNA, 15 bp, Homo sapiens
ctactgaagtgcaaa

SEQ ID NO: 2986 - DNA, 15 bp, Homo sapiens
gctactgaagtgcaa

SEQ ID NO: 2987 - DNA, 15 bp, Homo sapiens
tgctactgaagtgca

SEQ ID NO: 2988 - DNA, 15 bp, Homo sapiens
atgctactgaagtgc

SEQ ID NO: 2989 - DNA, 15 bp, Homo sapiens
aatgctactgaagtg

SEQ ID NO: 2990 - DNA, 15 bp, Homo sapiens
aaatgctactgaagt

SEQ ID NO: 2991 - DNA, 15 bp, Homo sapiens
taaatgctactgaag

SEQ ID NO: 2992 - DNA, 15 bp, Homo sapiens
ttaaatgctactgaa

SEQ ID NO: 2993 - DNA, 15 bp, Homo sapiens
attaaatgctactga

SEQ ID NO: 2994 - DNA, 15 bp, Homo sapiens
cattaaatgctactg

SEQ ID NO: 2995 - DNA, 15 bp, Homo sapiens
acattaaatgctact

SEQ ID NO: 2996 - DNA, 15 bp, Homo sapiens
aacattaaatgctac

SEQ ID NO: 2997 - DNA, 15 bp, Homo sapiens
gaacattaaatgcta

SEQ ID NO: 2998 - DNA, 15 bp, Homo sapiens
tgaacattaaatgct

SEQ ID NO: 2999 - DNA, 15 bp, Homo sapiens
ctgaacattaaatgc

SEQ ID NO: 3000 - DNA, 15 bp, Homo sapiens
actgaacattaaatg

SEQ ID NO: 3001 - DNA, 15 bp, Homo sapiens
cactgaacattaaat

SEQ ID NO: 3002 - DNA, 15 bp, Homo sapiens
gcactgaacattaaa

SEQ ID NO: 3003 - DNA, 15 bp, Homo sapiens
agcactgaacattaa

SEQ ID NO: 3004 - DNA, 15 bp, Homo sapiens
gagcactgaacatta

SEQ ID NO: 3005 - DNA, 15 bp, Homo sapiens
agagcactgaacatt

SEQ ID NO: 3006 - DNA, 15 bp, Homo sapiens
aagagcactgaacat

SEQ ID NO: 3007 - DNA, 15 bp, Homo sapiens
caagagcactgaaca

SEQ ID NO: 3008 - DNA, 15 bp, Homo sapiens
acaagagcactgaac

SEQ ID NO: 3009 - DNA, 15 bp, Homo sapiens
gacaagagcactgaa

SEQ ID NO: 3010 - DNA, 15 bp, Homo sapiens
tgacaagagcactga

SEQ ID NO: 3011 - DNA, 15 bp, Homo sapiens
atgacaagagcactg

SEQ ID NO: 3012 - DNA, 15 bp, Homo sapiens
tatgacaagagcact

SEQ ID NO: 3013 - DNA, 15 bp, Homo sapiens
ttatgacaagagcac

SEQ ID NO: 3014 - DNA, 15 bp, Homo sapiens
tttatgacaagagca

SEQ ID NO: 3015 - DNA, 15 bp, Homo sapiens
gtttatgacaagagc

SEQ ID NO: 3016 - DNA, 15 bp, Homo sapiens
tgtttatgacaagag

SEQ ID NO: 3017 - DNA, 15 bp, Homo sapiens
atgtttatgacaaga

SEQ ID NO: 3018 - DNA, 15 bp, Homo sapiens
tatgtttatgacaag

SEQ ID NO: 3019 - DNA, 15 bp, Homo sapiens
ctatgtttatgacaa

SEQ ID NO: 3020 - DNA, 15 bp, Homo sapiens
tctatgtttatgaca

SEQ ID NO: 3021 - DNA, 15 bp, Homo sapiens
ttctatgtttatgac

SEQ ID NO: 3022 - DNA, 15 bp, Homo sapiens
attctatgtttatga

SEQ ID NO: 3023 - DNA, 15 bp, Homo sapiens
cattctatgtttatg

SEQ ID NO: 3024 - DNA, 15 bp, Homo sapiens
ccattctatgtttat

SEQ ID NO: 3025 - DNA, 15 bp, Homo sapiens
tccattctatgttta

SEQ ID NO: 3026 - DNA, 15 bp, Homo sapiens
atccattctatgttt

SEQ ID NO: 3027 - DNA, 15 bp, Homo sapiens
tatccattctatgtt

SEQ ID NO: 3028 - DNA, 15 bp, Homo sapiens
atatccattctatgt

SEQ ID NO: 3029 - DNA, 15 bp, Homo sapiens
aatatccattctatg

SEQ ID NO: 3030 - DNA, 15 bp, Homo sapiens
caatatccattctat

SEQ ID NO: 3031 - DNA, 15 bp, Homo sapiens
tcaatatccattcta

SEQ ID NO: 3032 - DNA, 15 bp, Homo sapiens
ctcaatatccattct

SEQ ID NO: 3033 - DNA, 15 bp, Homo sapiens
actcaatatccattc

SEQ ID NO: 3034 - DNA, 15 bp, Homo sapiens
tactcaatatccatt

SEQ ID NO: 3035 - DNA, 15 bp, Homo sapiens
ctactcaatatccat

SEQ ID NO: 3036 - DNA, 15 bp, Homo sapiens
actactcaatatcca

SEQ ID NO: 3037 - DNA, 15 bp, Homo sapiens
aactactcaatatcc

SEQ ID NO: 3038 - DNA, 15 bp, Homo sapiens
aaactactcaatatc

SEQ ID NO: 3039 - DNA, 15 bp, Homo sapiens
gaaactactcaatat

SEQ ID NO: 3040 - DNA, 15 bp, Homo sapiens
agaaactactcaata

SEQ ID NO: 3041 - DNA, 15 bp, Homo sapiens
cagaaactactcaat

SEQ ID NO: 3042 - DNA, 15 bp, Homo sapiens
tcagaaactactcaa

SEQ ID NO: 3043 - DNA, 15 bp, Homo sapiens
atcagaaactactca

SEQ ID NO: 3044 - DNA, 15 bp, Homo sapiens
gatcagaaactactc

SEQ ID NO: 3045 - DNA, 15 bp, Homo sapiens
ggatcagaaactact

SEQ ID NO: 3046 - DNA, 15 bp, Homo sapiens
gggatcagaaactac

SEQ ID NO: 3047 - DNA, 15 bp, Homo sapiens
tgggatcagaaacta

SEQ ID NO: 3048 - DNA, 15 bp, Homo sapiens
ctgggatcagaaact

SEQ ID NO: 3049 - DNA, 15 bp, Homo sapiens
tctgggatcagaaac

SEQ ID NO: 3050 - DNA, 15 bp, Homo sapiens
atctgggatcagaaa

SEQ ID NO: 3051 - DNA, 15 bp, Homo sapiens
catctgggatcagaa

SEQ ID NO: 3052 - DNA, 15 bp, Homo sapiens
ccatctgggatcaga

SEQ ID NO: 3053 - DNA, 15 bp, Homo sapiens
accatctgggatcag

SEQ ID NO: 3054 - DNA, 15 bp, Homo sapiens
taccatctgggatca

SEQ ID NO: 3055 - DNA, 15 bp, Homo sapiens
ttaccatctgggatc

SEQ ID NO: 3056 - DNA, 15 bp, Homo sapiens
attaccatctgggat

SEQ ID NO: 3057 - DNA, 15 bp, Homo sapiens
cattaccatctggga

SEQ ID NO: 3058 - DNA, 15 bp, Homo sapiens
acattaccatctggg

SEQ ID NO: 3059 - DNA, 15 bp, Homo sapiens
cacattaccatctgg

SEQ ID NO: 3060 - DNA, 15 bp, Homo sapiens
acacattaccatctg

SEQ ID NO: 3061 - DNA, 15 bp, Homo sapiens
tacacattaccatct

SEQ ID NO: 3062 - DNA, 15 bp, Homo sapiens
ctacacattaccatc

SEQ ID NO: 3063 - DNA, 15 bp, Homo sapiens
cctacacattaccat

SEQ ID NO: 3064 - DNA, 15 bp, Homo sapiens
acctacacattacca

SEQ ID NO: 3065 - DNA, 15 bp, Homo sapiens
aacctacacattacc

SEQ ID NO: 3066 - DNA, 15 bp, Homo sapiens
gaacctacacattac

SEQ ID NO: 3067 - DNA, 15 bp, Homo sapiens
tgaacctacacatta

SEQ ID NO: 3068 - DNA, 15 bp, Homo sapiens
ttgaacctacacatt

SEQ ID NO: 3069 - DNA, 15 bp, Homo sapiens
cttgaacctacacat

SEQ ID NO: 3070 - DNA, 15 bp, Homo sapiens
ccttgaacctacaca

SEQ ID NO: 3071 - DNA, 15 bp, Homo sapiens
cccttgaacctacac

SEQ ID NO: 3072 - DNA, 15 bp, Homo sapiens
acccttgaacctaca

SEQ ID NO: 3073 - DNA, 15 bp, Homo sapiens
tacccttgaacctac

SEQ ID NO: 3074 - DNA, 15 bp, Homo sapiens
atacccttgaaccta

SEQ ID NO: 3075 - DNA, 15 bp, Homo sapiens
aatacccttgaacct

SEQ ID NO: 3076 - DNA, 15 bp, Homo sapiens
caatacccttgaacc

SEQ ID NO: 3077 - DNA, 15 bp, Homo sapiens
acaatacccttgaac

SEQ ID NO: 3078 - DNA, 15 bp, Homo sapiens
cacaatacccttgaa

SEQ ID NO: 3079 - DNA, 15 bp, Homo sapiens
acacaatacccttga

SEQ ID NO: 3080 - DNA, 15 bp, Homo sapiens
cacacaatacccttg

SEQ ID NO: 3081 - DNA, 15 bp, Homo sapiens
acacacaataccctt

SEQ ID NO: 3082 - DNA, 15 bp, Homo sapiens
tacacacaataccct

SEQ ID NO: 3083 - DNA, 15 bp, Homo sapiens
ctacacacaataccc

SEQ ID NO: 3084 - DNA, 15 bp, Homo sapiens
gctacacacaatacc

SEQ ID NO: 3085 - DNA, 15 bp, Homo sapiens
tgctacacacaatac

SEQ ID NO: 3086 - DNA, 15 bp, Homo sapiens
ttgctacacacaata

SEQ ID NO: 3087 - DNA, 15 bp, Homo sapiens
cttgctacacacaat

SEQ ID NO: 3088 - DNA, 15 bp, Homo sapiens
acttgctacacacaa

SEQ ID NO: 3089 - DNA, 15 bp, Homo sapiens
cacttgctacacaca

SEQ ID NO: 3090 - DNA, 15 bp, Homo sapiens
tcacttgctacacac

SEQ ID NO: 3091 - DNA, 15 bp, Homo sapiens
ttcacttgctacaca

SEQ ID NO: 3092 - DNA, 15 bp, Homo sapiens
cttcacttgctacac

SEQ ID NO: 3093 - DNA, 15 bp, Homo sapiens
tcttcacttgctaca

SEQ ID NO: 3094 - DNA, 15 bp, Homo sapiens
atcttcacttgctac

SEQ ID NO: 3095 - DNA, 15 bp, Homo sapiens
aatcttcacttgcta

SEQ ID NO: 3096 - DNA, 15 bp, Homo sapiens
caatcttcacttgct

SEQ ID NO: 3097 - DNA, 15 bp, Homo sapiens
gcaatcttcacttgc

SEQ ID NO: 3098 - DNA, 15 bp, Homo sapiens
tgcaatcttcacttg

SEQ ID NO: 3099 - DNA, 15 bp, Homo sapiens
ctgcaatcttcactt

SEQ ID NO: 3100 - DNA, 15 bp, Homo sapiens
tctgcaatcttcact

SEQ ID NO: 3101 - DNA, 15 bp, Homo sapiens
ttctgcaatcttcac

SEQ ID NO: 3102 - DNA, 15 bp, Homo sapiens
tttctgcaatcttca

SEQ ID NO: 3103 - DNA, 15 bp, Homo sapiens
atttctgcaatcttc

SEQ ID NO: 3104 - DNA, 15 bp, Homo sapiens
tatttctgcaatctt

SEQ ID NO: 3105 - DNA, 15 bp, Homo sapiens
ttatttctgcaatct

SEQ ID NO: 3106 - DNA, 15 bp, Homo sapiens
tttatttctgcaatc

SEQ ID NO: 3107 - DNA, 15 bp, Homo sapiens
ttttatttctgcaat

SEQ ID NO: 3108 - DNA, 15 bp, Homo sapiens
gttttatttctgcaa

SEQ ID NO: 3109 - DNA, 15 bp, Homo sapiens
agttttatttctgca

SEQ ID NO: 3110 - DNA, 15 bp, Homo sapiens
aagttttatttctgc

SEQ ID NO: 3111 - DNA, 15 bp, Homo sapiens
gaagttttatttctg

SEQ ID NO: 3112 - DNA, 15 bp, Homo sapiens
tgaagttttatttct

SEQ ID NO: 3113 - DNA, 15 bp, Homo sapiens
ctgaagttttatttc

SEQ ID NO: 3114 - DNA, 15 bp, Homo sapiens
actgaagttttattt

SEQ ID NO: 3115 - DNA, 15 bp, Homo sapiens
aactgaagttttatt

SEQ ID NO: 3116 - DNA, 15 bp, Homo sapiens
gaactgaagttttat

SEQ ID NO: 3117 - DNA, 15 bp, Homo sapiens
tgaactgaagtttta

SEQ ID NO: 3118 - DNA, 15 bp, Homo sapiens
atgaactgaagtttt

SEQ ID NO: 3119 - DNA, 15 bp, Homo sapiens
catgaactgaagttt

SEQ ID NO: 3120 - DNA, 15 bp, Homo sapiens
gcatgaactgaagtt

SEQ ID NO: 3121 - DNA, 15 bp, Homo sapiens
agcatgaactgaagt

SEQ ID NO: 3122 - DNA, 15 bp, Homo sapiens
aagcatgaactgaag

SEQ ID NO: 3123 - DNA, 15 bp, Homo sapiens
caagcatgaactgaa

SEQ ID NO: 3124 - DNA, 15 bp, Homo sapiens
tcaagcatgaactga

SEQ ID NO: 3125 - DNA, 15 bp, Homo sapiens
ttcaagcatgaactg

SEQ ID NO: 3126 - DNA, 15 bp, Homo sapiens
tttcaagcatgaact

SEQ ID NO: 3127 - DNA, 15 bp, Homo sapiens
atttcaagcatgaac

SEQ ID NO: 3128 - DNA, 15 bp, Homo sapiens
aatttcaagcatgaa

SEQ ID NO: 3129 - DNA, 15 bp, Homo sapiens
aaatttcaagcatga

SEQ ID NO: 3130 - DNA, 15 bp, Homo sapiens
taaatttcaagcatg

SEQ ID NO: 3131 - DNA, 15 bp, Homo sapiens
ttaaatttcaagcat

SEQ ID NO: 3132 - DNA, 15 bp, Homo sapiens
cttaaatttcaagca

SEQ ID NO: 3133 - DNA, 15 bp, Homo sapiens
acttaaatttcaagc

SEQ ID NO: 3134 - DNA, 15 bp, Homo sapiens
tacttaaatttcaag

SEQ ID NO: 3135 - DNA, 15 bp, Homo sapiens
atacttaaatttcaa

SEQ ID NO: 3136 - DNA, 15 bp, Homo sapiens
aatacttaaatttca

SEQ ID NO: 3137 - DNA, 15 bp, Homo sapiens
caatacttaaatttc

SEQ ID NO: 3138 - DNA, 15 bp, Homo sapiens
acaatacttaaattt

SEQ ID NO: 3139 - DNA, 15 bp, Homo sapiens
aacaatacttaaatt

SEQ ID NO: 3140 - DNA, 15 bp, Homo sapiens
caacaatacttaaat

SEQ ID NO: 3141 - DNA, 15 bp, Homo sapiens
acaacaatacttaaa

SEQ ID NO: 3142 - DNA, 15 bp, Homo sapiens
cacaacaatacttaa

SEQ ID NO: 3143 - DNA, 15 bp, Homo sapiens
tcacaacaatactta

SEQ ID NO: 3144 - DNA, 15 bp, Homo sapiens
atcacaacaatactt

SEQ ID NO: 3145 - DNA, 15 bp, Homo sapiens
catcacaacaatact

SEQ ID NO: 3146 - DNA, 15 bp, Homo sapiens
gcatcacaacaatac

SEQ ID NO: 3147 - DNA, 15 bp, Homo sapiens
ggcatcacaacaata

SEQ ID NO: 3148 - DNA, 15 bp, Homo sapiens
tggcatcacaacaat

SEQ ID NO: 3149 - DNA, 15 bp, Homo sapiens
ctggcatcacaacaa

SEQ ID NO: 3150 - DNA, 15 bp, Homo sapiens
tctggcatcacaaca

SEQ ID NO: 3151 - DNA, 15 bp, Homo sapiens
ttctggcatcacaac

SEQ ID NO: 3152 - DNA, 15 bp, Homo sapiens
attctggcatcacaa

SEQ ID NO: 3153 - DNA, 15 bp, Homo sapiens
aattctggcatcaca

SEQ ID NO: 3154 - DNA, 15 bp, Homo sapiens
caattctggcatcac

SEQ ID NO: 3155 - DNA, 15 bp, Homo sapiens
gcaattctggcatca

SEQ ID NO: 3156 - DNA, 15 bp, Homo sapiens
agcaattctggcatc

SEQ ID NO: 3157 - DNA, 15 bp, Homo sapiens
cagcaattctggcat

SEQ ID NO: 3158 - DNA, 15 bp, Homo sapiens
gcagcaattctggca

SEQ ID NO: 3159 - DNA, 15 bp, Homo sapiens
agcagcaattctggc

SEQ ID NO: 3160 - DNA, 15 bp, Homo sapiens
gagcagcaattctgg

SEQ ID NO: 3161 - DNA, 15 bp, Homo sapiens
tgagcagcaattctg

SEQ ID NO: 3162 - DNA, 15 bp, Homo sapiens
gtgagcagcaattct

SEQ ID NO: 3163 - DNA, 15 bp, Homo sapiens
ggtgagcagcaattc

SEQ ID NO: 3164 - DNA, 15 bp, Homo sapiens
cggtgagcagcaatt

SEQ ID NO: 3165 - DNA, 15 bp, Homo sapiens
acggtgagcagcaat

SEQ ID NO: 3166 - DNA, 15 bp, Homo sapiens
aacggtgagcagcaa

SEQ ID NO: 3167 - DNA, 15 bp, Homo sapiens
aaacggtgagcagca

SEQ ID NO: 3168 - DNA, 15 bp, Homo sapiens
aaaacggtgagcagc

SEQ ID NO: 3169 - DNA, 15 bp, Homo sapiens
aaaaacggtgagcag

SEQ ID NO: 3170 - DNA, 15 bp, Homo sapiens
taaaaacggtgagca

SEQ ID NO: 3171 - DNA, 15 bp, Homo sapiens
ctaaaaacggtgagc

SEQ ID NO: 3172 - DNA, 15 bp, Homo sapiens
cctaaaaacggtgag

SEQ ID NO: 3173 - DNA, 15 bp, Homo sapiens
acctaaaaacggtga

SEQ ID NO: 3174 - DNA, 15 bp, Homo sapiens
aacctaaaaacggtg

SEQ ID NO: 3175 - DNA, 15 bp, Homo sapiens
aaacctaaaaacggt

SEQ ID NO: 3176 - DNA, 15 bp, Homo sapiens
gaaacctaaaaacgg

SEQ ID NO: 3177 - DNA, 15 bp, Homo sapiens
tgaaacctaaaaacg

SEQ ID NO: 3178 - DNA, 15 bp, Homo sapiens
ctgaaacctaaaaac

SEQ ID NO: 3179 - DNA, 15 bp, Homo sapiens
cctgaaacctaaaaa

SEQ ID NO: 3180 - DNA, 15 bp, Homo sapiens
acctgaaacctaaaa

SEQ ID NO: 3181 - DNA, 15 bp, Homo sapiens
gacctgaaacctaaa

SEQ ID NO: 3182 - DNA, 15 bp, Homo sapiens
ggacctgaaacctaa

SEQ ID NO: 3183 - DNA, 15 bp, Homo sapiens
aggacctgaaaccta

SEQ ID NO: 3184 - DNA, 15 bp, Homo sapiens
gaggacctgaaacct

SEQ ID NO: 3185 - DNA, 15 bp, Homo sapiens
agaggacctgaaacc

SEQ ID NO: 3186 - DNA, 15 bp, Homo sapiens
cagaggacctgaaac

SEQ ID NO: 3187 - DNA, 15 bp, Homo sapiens
tcagaggacctgaaa

SEQ ID NO: 3188 - DNA, 15 bp, Homo sapiens
gtcagaggacctgaa

SEQ ID NO: 3189 - DNA, 15 bp, Homo sapiens
tgtcagaggacctga

SEQ ID NO: 3190 - DNA, 15 bp, Homo sapiens
gtgtcagaggacctg

SEQ ID NO: 3191 - DNA, 15 bp, Homo sapiens
ggtgtcagaggacct

SEQ ID NO: 3192 - DNA, 15 bp, Homo sapiens
aggtgtcagaggacc

SEQ ID NO: 3193 - DNA, 15 bp, Homo sapiens
aaggtgtcagaggac

SEQ ID NO: 3194 - DNA, 15 bp, Homo sapiens
aaaggtgtcagagga

SEQ ID NO: 3195 - DNA, 15 bp, Homo sapiens
aaaaggtgtcagagg

SEQ ID NO: 3196 - DNA, 15 bp, Homo sapiens
caaaaggtgtcagag

SEQ ID NO: 3197 - DNA, 15 bp, Homo sapiens
ccaaaaggtgtcaga

SEQ ID NO: 3198 - DNA, 15 bp, Homo sapiens
accaaaaggtgtcag

SEQ ID NO: 3199 - DNA, 15 bp, Homo sapiens
taccaaaaggtgtca

SEQ ID NO: 3200 - DNA, 15 bp, Homo sapiens
ataccaaaaggtgtc

SEQ ID NO: 3201 - DNA, 15 bp, Homo sapiens
gataccaaaaggtgt

SEQ ID NO: 3202 - DNA, 15 bp, Homo sapiens
cgataccaaaaggtg

SEQ ID NO: 3203 - DNA, 15 bp, Homo sapiens
acgataccaaaaggt

SEQ ID NO: 3204 - DNA, 15 bp, Homo sapiens
aacgataccaaaagg

SEQ ID NO: 3205 - DNA, 15 bp, Homo sapiens
taacgataccaaaag

SEQ ID NO: 3206 - DNA, 15 bp, Homo sapiens
ttaacgataccaaaa

SEQ ID NO: 3207 - DNA, 15 bp, Homo sapiens
attaacgataccaaa

SEQ ID NO: 3208 - DNA, 15 bp, Homo sapiens
aattaacgataccaa

SEQ ID NO: 3209 - DNA, 15 bp, Homo sapiens
aaattaacgatacca

SEQ ID NO: 3210 - DNA, 15 bp, Homo sapiens
aaaattaacgatacc

SEQ ID NO: 3211 - DNA, 15 bp, Homo sapiens
taaaattaacgatac

SEQ ID NO: 3212 - DNA, 15 bp, Homo sapiens
gtaaaattaacgata

SEQ ID NO: 3213 - DNA, 15 bp, Homo sapiens
agtaaaattaacgat

SEQ ID NO: 3214 - DNA, 15 bp, Homo sapiens
cagtaaaattaacga

SEQ ID NO: 3215 - DNA, 15 bp, Homo sapiens
tcagtaaaattaacg

SEQ ID NO: 3216 - DNA, 15 bp, Homo sapiens
atcagtaaaattaac

SEQ ID NO: 3217 - DNA, 15 bp, Homo sapiens
aatcagtaaaattaa

SEQ ID NO: 3218 - DNA, 15 bp, Homo sapiens
aaatcagtaaaatta

SEQ ID NO: 3219 - DNA, 15 bp, Homo sapiens
caaatcagtaaaatt

SEQ ID NO: 3220 - DNA, 15 bp, Homo sapiens
acaaatcagtaaaat

SEQ ID NO: 3221 - DNA, 15 bp, Homo sapiens
cacaaatcagtaaaa

SEQ ID NO: 3222 - DNA, 15 bp, Homo sapiens
acacaaatcagtaaa

SEQ ID NO: 3223 - DNA, 15 bp, Homo sapiens
tacacaaatcagtaa

SEQ ID NO: 3224 - DNA, 15 bp, Homo sapiens
ctacacaaatcagta

SEQ ID NO: 3225 - DNA, 15 bp, Homo sapiens
tctacacaaatcagt

SEQ ID NO: 3226 - DNA, 15 bp, Homo sapiens
ttctacacaaatcag

SEQ ID NO: 3227 - DNA, 15 bp, Homo sapiens
attctacacaaatca

SEQ ID NO: 3228 - DNA, 15 bp, Homo sapiens
cattctacacaaatc

SEQ ID NO: 3229 - DNA, 15 bp, Homo sapiens
acattctacacaaat

SEQ ID NO: 3230 - DNA, 15 bp, Homo sapiens
gacattctacacaaa

SEQ ID NO: 3231 - DNA, 15 bp, Homo sapiens
tgacattctacacaa

SEQ ID NO: 3232 - DNA, 15 bp, Homo sapiens
ctgacattctacaca

SEQ ID NO: 3233 - DNA, 15 bp, Homo sapiens
actgacattctacac

SEQ ID NO: 3234 - DNA, 15 bp, Homo sapiens
aactgacattctaca

SEQ ID NO: 3235 - DNA, 15 bp, Homo sapiens
caactgacattctac

SEQ ID NO: 3236 - DNA, 15 bp, Homo sapiens
acaactgacattcta

SEQ ID NO: 3237 - DNA, 15 bp, Homo sapiens
tacaactgacattct

SEQ ID NO: 3238 - DNA, 15 bp, Homo sapiens
atacaactgacattc

SEQ ID NO: 3239 - DNA, 15 bp, Homo sapiens
aatacaactgacatt

SEQ ID NO: 3240 - DNA, 15 bp, Homo sapiens
aaatacaactgacat

SEQ ID NO: 3241 - DNA, 15 bp, Homo sapiens
aaaatacaactgaca

SEQ ID NO: 3242 - DNA, 15 bp, Homo sapiens
taaaatacaactgac

SEQ ID NO: 3243 - DNA, 15 bp, Homo sapiens
gtaaaatacaactga

SEQ ID NO: 3244 - DNA, 15 bp, Homo sapiens
ggtaaaatacaactg

SEQ ID NO: 3245 - DNA, 15 bp, Homo sapiens
tggtaaaatacaact

SEQ ID NO: 3246 - DNA, 15 bp, Homo sapiens
ctggtaaaatacaac

SEQ ID NO: 3247 - DNA, 15 bp, Homo sapiens
gctggtaaaatacaa

SEQ ID NO: 3248 - DNA, 15 bp, Homo sapiens
agctggtaaaataca

SEQ ID NO: 3249 - DNA, 15 bp, Homo sapiens
tagctggtaaaatac

SEQ ID NO: 3250 - DNA, 15 bp, Homo sapiens
ttagctggtaaaata

SEQ ID NO: 3251 - DNA, 15 bp, Homo sapiens
attagctggtaaaat

SEQ ID NO: 3252 - DNA, 15 bp, Homo sapiens
tattagctggtaaaa

SEQ ID NO: 3253 - DNA, 15 bp, Homo sapiens
atattagctggtaaa

SEQ ID NO: 3254 - DNA, 15 bp, Homo sapiens
gatattagctggtaa

SEQ ID NO: 3255 - DNA, 15 bp, Homo sapiens
agatattagctggta

SEQ ID NO: 3256 - DNA, 15 bp, Homo sapiens
tagatattagctggt

SEQ ID NO: 3257 - DNA, 15 bp, Homo sapiens
ctagatattagctgg

SEQ ID NO: 3258 - DNA, 15 bp, Homo sapiens
tctagatattagctg

SEQ ID NO: 3259 - DNA, 15 bp, Homo sapiens
ttctagatattagct

SEQ ID NO: 3260 - DNA, 15 bp, Homo sapiens
tttctagatattagc

SEQ ID NO: 3261 - DNA, 15 bp, Homo sapiens
atttctagatattag

SEQ ID NO: 3262 - DNA, 15 bp, Homo sapiens
catttctagatatta

SEQ ID NO: 3263 - DNA, 15 bp, Homo sapiens
gcatttctagatatt

SEQ ID NO: 3264 - DNA, 15 bp, Homo sapiens
agcatttctagatat

SEQ ID NO: 3265 - DNA, 15 bp, Homo sapiens
cagcatttctagata

SEQ ID NO: 3266 - DNA, 15 bp, Homo sapiens
ccagcatttctagat

SEQ ID NO: 3267 - DNA, 15 bp, Homo sapiens
gccagcatttctaga

SEQ ID NO: 3268 - DNA, 15 bp, Homo sapiens
tgccagcatttctag

SEQ ID NO: 3269 - DNA, 15 bp, Homo sapiens
ttgccagcatttcta

SEQ ID NO: 3270 - DNA, 15 bp, Homo sapiens
cttgccagcatttct

SEQ ID NO: 3271 - DNA, 15 bp, Homo sapiens
tcttgccagcatttc

SEQ ID NO: 3272 - DNA, 15 bp, Homo sapiens
ctcttgccagcattt

SEQ ID NO: 3273 - DNA, 15 bp, Homo sapiens
cctcttgccagcatt

SEQ ID NO: 3274 - DNA, 15 bp, Homo sapiens
ccctcttgccagcat

SEQ ID NO: 3275 - DNA, 15 bp, Homo sapiens
cccctcttgccagca

SEQ ID NO: 3276 - DNA, 15 bp, Homo sapiens
acccctcttgccagc

SEQ ID NO: 3277 - DNA, 15 bp, Homo sapiens
aacccctcttgccag

SEQ ID NO: 3278 - DNA, 15 bp, Homo sapiens
aaacccctcttgcca

SEQ ID NO: 3279 - DNA, 15 bp, Homo sapiens
taaacccctcttgcc

SEQ ID NO: 3280 - DNA, 15 bp, Homo sapiens
gtaaacccctcttgc

SEQ ID NO: 3281 - DNA, 15 bp, Homo sapiens
agtaaacccctcttg

SEQ ID NO: 3282 - DNA, 15 bp, Homo sapiens
gagtaaacccctctt

SEQ ID NO: 3283 - DNA, 15 bp, Homo sapiens
ggagtaaacccctct

SEQ ID NO: 3284 - DNA, 15 bp, Homo sapiens
tggagtaaacccctc

SEQ ID NO: 3285 - DNA, 15 bp, Homo sapiens
ctggagtaaacccct

SEQ ID NO: 3286 - DNA, 15 bp, Homo sapiens
gctggagtaaacccc

SEQ ID NO: 3287 - DNA, 15 bp, Homo sapiens
agctggagtaaaccc

SEQ ID NO: 3288 - DNA, 15 bp, Homo sapiens
aagctggagtaaacc

SEQ ID NO: 3289 - DNA, 15 bp, Homo sapiens
aaagctggagtaaac

SEQ ID NO: 3290 - DNA, 15 bp, Homo sapiens
taaagctggagtaaa

SEQ ID NO: 3291 - DNA, 15 bp, Homo sapiens
ctaaagctggagtaa

SEQ ID NO: 3292 - DNA, 15 bp, Homo sapiens
tctaaagctggagta

SEQ ID NO: 3293 - DNA, 15 bp, Homo sapiens
atctaaagctggagt

SEQ ID NO: 3294 - DNA, 15 bp, Homo sapiens
aatctaaagctggag

SEQ ID NO: 3295 - DNA, 15 bp, Homo sapiens
caatctaaagctgga

SEQ ID NO: 3296 - DNA, 15 bp, Homo sapiens
acaatctaaagctgg

SEQ ID NO: 3297 - DNA, 15 bp, Homo sapiens
tacaatctaaagctg

SEQ ID NO: 3298 - DNA, 15 bp, Homo sapiens
ctacaatctaaagct

SEQ ID NO: 3299 - DNA, 15 bp, Homo sapiens
cctacaatctaaagc

SEQ ID NO: 3300 - DNA, 15 bp, Homo sapiens
acctacaatctaaag

SEQ ID NO: 3301 - DNA, 15 bp, Homo sapiens
tacctacaatctaaa

SEQ ID NO: 3302 - DNA, 15 bp, Homo sapiens
atacctacaatctaa

SEQ ID NO: 3303 - DNA, 15 bp, Homo sapiens
catacctacaatcta

SEQ ID NO: 3304 - DNA, 15 bp, Homo sapiens
acatacctacaatct

SEQ ID NO: 3305 - DNA, 15 bp, Homo sapiens
aacatacctacaatc

SEQ ID NO: 3306 - DNA, 15 bp, Homo sapiens
taacatacctacaat

SEQ ID NO: 3307 - DNA, 15 bp, Homo sapiens
ctaacatacctacaa

SEQ ID NO: 3308 - DNA, 15 bp, Homo sapiens
gctaacatacctaca

SEQ ID NO: 3309 - DNA, 15 bp, Homo sapiens
agctaacatacctac

SEQ ID NO: 3310 - DNA, 15 bp, Homo sapiens
aagctaacataccta

SEQ ID NO: 3311 - DNA, 15 bp, Homo sapiens
aaagctaacatacct

SEQ ID NO: 3312 - DNA, 15 bp, Homo sapiens
aaaagctaacatacc

SEQ ID NO: 3313 - DNA, 15 bp, Homo sapiens
aaaaagctaacatac

SEQ ID NO: 3314 - DNA, 15 bp, Homo sapiens
aaaaaagctaacata

SEQ ID NO: 3315 - DNA, 15 bp, Homo sapiens
gaaaaaagctaacat

SEQ ID NO: 3316 - DNA, 15 bp, Homo sapiens
tgaaaaaagctaaca

SEQ ID NO: 3317 - DNA, 15 bp, Homo sapiens
atgaaaaaagctaac

SEQ ID NO: 3318 - DNA, 15 bp, Homo sapiens
tatgaaaaaagctaa

SEQ ID NO: 3319 - DNA, 15 bp, Homo sapiens
gtatgaaaaaagcta

SEQ ID NO: 3320 - DNA, 15 bp, Homo sapiens
tgtatgaaaaaagct

SEQ ID NO: 3321 - DNA, 15 bp, Homo sapiens
ctgtatgaaaaaagc

SEQ ID NO: 3322 - DNA, 15 bp, Homo sapiens
actgtatgaaaaaag

SEQ ID NO: 3323 - DNA, 15 bp, Homo sapiens
cactgtatgaaaaaa

SEQ ID NO: 3324 - DNA, 15 bp, Homo sapiens
acactgtatgaaaaa

SEQ ID NO: 3325 - DNA, 15 bp, Homo sapiens
tacactgtatgaaaa

SEQ ID NO: 3326 - DNA, 15 bp, Homo sapiens
atacactgtatgaaa

SEQ ID NO: 3327 - DNA, 15 bp, Homo sapiens
aatacactgtatgaa

SEQ ID NO: 3328 - DNA, 15 bp, Homo sapiens
taatacactgtatga

SEQ ID NO: 3329 - DNA, 15 bp, Homo sapiens
ttaatacactgtatg

SEQ ID NO: 3330 - DNA, 15 bp, Homo sapiens
tttaatacactgtat

SEQ ID NO: 3331 - DNA, 15 bp, Homo sapiens
atttaatacactgta

SEQ ID NO: 3332 - DNA, 15 bp, Homo sapiens
aatttaatacactgt

SEQ ID NO: 3333 - DNA, 15 bp, Homo sapiens
aaatttaatacactg

SEQ ID NO: 3334 - DNA, 15 bp, Homo sapiens
taaatttaatacact

SEQ ID NO: 3335 - DNA, 15 bp, Homo sapiens
gtaaatttaatacac

SEQ ID NO: 3336 - DNA, 15 bp, Homo sapiens
agtaaatttaataca

SEQ ID NO: 3337 - DNA, 15 bp, Homo sapiens
cagtaaatttaatac

SEQ ID NO: 3338 - DNA, 15 bp, Homo sapiens
tcagtaaatttaata

SEQ ID NO: 3339 - DNA, 15 bp, Homo sapiens
ctcagtaaatttaat

SEQ ID NO: 3340 - DNA, 15 bp, Homo sapiens
actcagtaaatttaa

SEQ ID NO: 3341 - DNA, 15 bp, Homo sapiens
gactcagtaaattta

SEQ ID NO: 3342 - DNA, 15 bp, Homo sapiens
tgactcagtaaattt

SEQ ID NO: 3343 - DNA, 15 bp, Homo sapiens
ctgactcagtaaatt

SEQ ID NO: 3344 - DNA, 15 bp, Homo sapiens
gctgactcagtaaat

SEQ ID NO: 3345 - DNA, 15 bp, Homo sapiens
agctgactcagtaaa

SEQ ID NO: 3346 - DNA, 15 bp, Homo sapiens
aagctgactcagtaa

SEQ ID NO: 3347 - DNA, 15 bp, Homo sapiens
caagctgactcagta

SEQ ID NO: 3348 - DNA, 15 bp, Homo sapiens
gcaagctgactcagt

SEQ ID NO: 3349 - DNA, 15 bp, Homo sapiens
agcaagctgactcag

SEQ ID NO: 3350 - DNA, 15 bp, Homo sapiens
cagcaagctgactca

SEQ ID NO: 3351 - DNA, 15 bp, Homo sapiens
tcagcaagctgactc

SEQ ID NO: 3352 - DNA, 15 bp, Homo sapiens
ttcagcaagctgact

SEQ ID NO: 3353 - DNA, 15 bp, Homo sapiens
attcagcaagctgac

SEQ ID NO: 3354 - DNA, 15 bp, Homo sapiens
tattcagcaagctga

SEQ ID NO: 3355 - DNA, 15 bp, Homo sapiens
ttattcagcaagctg

SEQ ID NO: 3356 - DNA, 15 bp, Homo sapiens
cttattcagcaagct

SEQ ID NO: 3357 - DNA, 15 bp, Homo sapiens
tcttattcagcaagc

SEQ ID NO: 3358 - DNA, 15 bp, Homo sapiens
gtcttattcagcaag

SEQ ID NO: 3359 - DNA, 15 bp, Homo sapiens
tgtcttattcagcaa

SEQ ID NO: 3360 - DNA, 15 bp, Homo sapiens
ctgtcttattcagca

SEQ ID NO: 3361 - DNA, 15 bp, Homo sapiens
tctgtcttattcagc

SEQ ID NO: 3362 - DNA, 15 bp, Homo sapiens
ttctgtcttattcag

SEQ ID NO: 3363 - DNA, 15 bp, Homo sapiens
gcttctgtcttattc

SEQ ID NO: 3364 - DNA, 15 bp, Homo sapiens
ggcttctgtcttatt

SEQ ID NO: 3365 - DNA, 15 bp, Homo sapiens
gggcttctgtcttat

SEQ ID NO: 3366 - DNA, 15 bp, Homo sapiens
tgggcttctgtctta

SEQ ID NO: 3367 - DNA, 15 bp, Homo sapiens
ttgggcttctgtctt

SEQ ID NO: 3368 - DNA, 15 bp, Homo sapiens
cttgggcttctgtct

SEQ ID NO: 3369 - DNA, 15 bp, Homo sapiens
tcttgggcttctgtc

SEQ ID NO: 3370 - DNA, 15 bp, Homo sapiens
ttcttgggcttctgt

SEQ ID NO: 3371 - DNA, 15 bp, Homo sapiens
attcttgggcttctg

SEQ ID NO: 3372 - DNA, 15 bp, Homo sapiens
aattcttgggcttct

SEQ ID NO: 3373 - DNA, 15 bp, Homo sapiens
aaattcttgggcttc

SEQ ID NO: 3374 - DNA, 15 bp, Homo sapiens
aaaattcttgggctt

SEQ ID NO: 3375 - DNA, 15 bp, Homo sapiens
taaaattcttgggct

SEQ ID NO: 3376 - DNA, 15 bp, Homo sapiens
ttaaaattcttgggc

SEQ ID NO: 3377 - DNA, 15 bp, Homo sapiens
gttaaaattcttggg

SEQ ID NO: 3378 - DNA, 15 bp, Homo sapiens
tgttaaaattcttgg

SEQ ID NO: 3379 - DNA, 15 bp, Homo sapiens
ctgttaaaattcttg

SEQ ID NO: 3380 - DNA, 15 bp, Homo sapiens
actgttaaaattctt

SEQ ID NO: 3381 - DNA, 15 bp, Homo sapiens
cactgttaaaattct

SEQ ID NO: 3382 - DNA, 15 bp, Homo sapiens
acactgttaaaattc

SEQ ID NO: 3383 - DNA, 15 bp, Homo sapiens
cacactgttaaaatt

SEQ ID NO: 3384 - DNA, 15 bp, Homo sapiens
acacactgttaaaat

SEQ ID NO: 3385 - DNA, 15 bp, Homo sapiens
tacacactgttaaaa

SEQ ID NO: 3386 - DNA, 15 bp, Homo sapiens
ctacacactgttaaa

SEQ ID NO: 3387 - DNA, 15 bp, Homo sapiens
gctacacactgttaa

SEQ ID NO: 3388 - DNA, 15 bp, Homo sapiens
agctacacactgtta

SEQ ID NO: 3389 - DNA, 15 bp, Homo sapiens
aagctacacactgtt

SEQ ID NO: 3390 - DNA, 15 bp, Homo sapiens
aaagctacacactgt

SEQ ID NO: 3391 - DNA, 15 bp, Homo sapiens
taaagctacacactg

SEQ ID NO: 3392 - DNA, 15 bp, Homo sapiens
ctaaagctacacact

SEQ ID NO: 3393 - DNA, 15 bp, Homo sapiens
actaaagctacacac

SEQ ID NO: 3394 - DNA, 15 bp, Homo sapiens
aactaaagctacaca

SEQ ID NO: 3395 - DNA, 15 bp, Homo sapiens
caactaaagctacac

SEQ ID NO: 3396 - DNA, 15 bp, Homo sapiens
acaactaaagctaca

SEQ ID NO: 3397 - DNA, 15 bp, Homo sapiens
gacaactaaagctac

SEQ ID NO: 3398 - DNA, 15 bp, Homo sapiens
agacaactaaagcta

SEQ ID NO: 3399 - DNA, 15 bp, Homo sapiens
tagacaactaaagct

SEQ ID NO: 3400 - DNA, 15 bp, Homo sapiens
ttagacaactaaagc

SEQ ID NO: 3401 - DNA, 15 bp, Homo sapiens
tttagacaactaaag

SEQ ID NO: 3402 - DNA, 15 bp, Homo sapiens
ttttagacaactaaa

SEQ ID NO: 3403 - DNA, 15 bp, Homo sapiens
cttttagacaactaa

SEQ ID NO: 3404 - DNA, 15 bp, Homo sapiens
acttttagacaacta

SEQ ID NO: 3405 - DNA, 15 bp, Homo sapiens
aacttttagacaact

SEQ ID NO: 3406 - DNA, 15 bp, Homo sapiens
taacttttagacaac

SEQ ID NO: 3407 - DNA, 15 bp, Homo sapiens
ctaacttttagacaa

SEQ ID NO: 3408 - DNA, 15 bp, Homo sapiens
cctaacttttagaca

SEQ ID NO: 3409 - DNA, 15 bp, Homo sapiens
gcctaacttttagac

SEQ ID NO: 3410 - DNA, 15 bp, Homo sapiens
ggcctaacttttaga

SEQ ID NO: 3411 - DNA, 15 bp, Homo sapiens
aggcctaacttttag

SEQ ID NO: 3412 - DNA, 15 bp, Homo sapiens
aaggcctaactttta

SEQ ID NO: 3413 - DNA, 15 bp, Homo sapiens
gaaggcctaactttt

SEQ ID NO: 3414 - DNA, 15 bp, Homo sapiens
cgaaggcctaacttt

SEQ ID NO: 3415 - DNA, 15 bp, Homo sapiens
ccgaaggcctaactt

SEQ ID NO: 3416 - DNA, 15 bp, Homo sapiens
cccgaaggcctaact

SEQ ID NO: 3417 - DNA, 15 bp, Homo sapiens
gcccgaaggcctaac

SEQ ID NO: 3418 - DNA, 15 bp, Homo sapiens
agcccgaaggcctaa

SEQ ID NO: 3419 - DNA, 15 bp, Homo sapiens
aagcccgaaggccta

SEQ ID NO: 3420 - DNA, 15 bp, Homo sapiens
gaagcccgaaggcct

SEQ ID NO: 3421 - DNA, 15 bp, Homo sapiens
tgaagcccgaaggcc

SEQ ID NO: 3422 - DNA, 15 bp, Homo sapiens
ttgaagcccgaaggc

SEQ ID NO: 3423 - DNA, 15 bp, Homo sapiens
tttgaagcccgaagg

SEQ ID NO: 3424 - DNA, 15 bp, Homo sapiens
ttttgaagcccgaag

SEQ ID NO: 3425 - DNA, 15 bp, Homo sapiens
cttttgaagcccgaa

SEQ ID NO: 3426 - DNA, 15 bp, Homo sapiens
acttttgaagcccga

SEQ ID NO: 3427 - DNA, 15 bp, Homo sapiens
aacttttgaagcccg

SEQ ID NO: 3428 - DNA, 15 bp, Homo sapiens
taacttttgaagccc

SEQ ID NO: 3429 - DNA, 15 bp, Homo sapiens
ctaacttttgaagcc

SEQ ID NO: 3430 - DNA, 15 bp, Homo sapiens
actaacttttgaagc

SEQ ID NO: 3431 - DNA, 15 bp, Homo sapiens
cactaacttttgaag

SEQ ID NO: 3432 - DNA, 15 bp, Homo sapiens
ccactaacttttgaa

SEQ ID NO: 3433 - DNA, 15 bp, Homo sapiens
accactaacttttga

SEQ ID NO: 3434 - DNA, 15 bp, Homo sapiens
gaccactaacttttg

SEQ ID NO: 3435 - DNA, 15 bp, Homo sapiens
tgaccactaactttt

SEQ ID NO: 3436 - DNA, 15 bp, Homo sapiens
atgaccactaacttt

SEQ ID NO: 3437 - DNA, 15 bp, Homo sapiens
gatgaccactaactt

SEQ ID NO: 3438 - DNA, 15 bp, Homo sapiens
cgatgaccactaact

SEQ ID NO: 3439 - DNA, 15 bp, Homo sapiens
tcgatgaccactaac

SEQ ID NO: 3440 - DNA, 15 bp, Homo sapiens
ttcgatgaccactaa

SEQ ID NO: 3441 - DNA, 15 bp, Homo sapiens
tttcgatgaccacta

SEQ ID NO: 3442 - DNA, 15 bp, Homo sapiens
ttttcgatgaccact

SEQ ID NO: 3443 - DNA, 15 bp, Homo sapiens
cttttcgatgaccac

SEQ ID NO: 3444 - DNA, 15 bp, Homo sapiens
gcttttcgatgacca

SEQ ID NO: 3445 - DNA, 15 bp, Homo sapiens
tgcttttcgatgacc

SEQ ID NO: 3446 - DNA, 15 bp, Homo sapiens
atgcttttcgatgac

SEQ ID NO: 3447 - DNA, 15 bp, Homo sapiens
aatgcttttcgatga

SEQ ID NO: 3448 - DNA, 15 bp, Homo sapiens
taatgcttttcgatg

SEQ ID NO: 3449 - DNA, 15 bp, Homo sapiens
ttaatgcttttcgat

SEQ ID NO: 3450 - DNA, 15 bp, Homo sapiens
attaatgcttttcga

SEQ ID NO: 3451 - DNA, 15 bp, Homo sapiens
gattaatgcttttcg

SEQ ID NO: 3452 - DNA, 15 bp, Homo sapiens
agattaatgcttttc

SEQ ID NO: 3453 - DNA, 15 bp, Homo sapiens
aagattaatgctttt

SEQ ID NO: 3454 - DNA, 15 bp, Homo sapiens
aaagattaatgcttt

SEQ ID NO: 3455 - DNA, 15 bp, Homo sapiens
caaagattaatgctt

SEQ ID NO: 3456 - DNA, 15 bp, Homo sapiens
gcaaagattaatgct

SEQ ID NO: 3457 - DNA, 15 bp, Homo sapiens
tgcaaagattaatgc

SEQ ID NO: 3458 - DNA, 15 bp, Homo sapiens
ctgcaaagattaatg

SEQ ID NO: 3459 - DNA, 15 bp, Homo sapiens
actgcaaagattaat

SEQ ID NO: 3460 - DNA, 15 bp, Homo sapiens
aactgcaaagattaa

SEQ ID NO: 3461 - DNA, 15 bp, Homo sapiens
aaactgcaaagatta

SEQ ID NO: 3462 - DNA, 15 bp, Homo sapiens
gaaactgcaaagatt

SEQ ID NO: 3463 - DNA, 15 bp, Homo sapiens
tgaaactgcaaagat

SEQ ID NO: 3464 - DNA, 15 bp, Homo sapiens
ctgaaactgcaaaga

SEQ ID NO: 3465 - DNA, 15 bp, Homo sapiens
cctgaaactgcaaag

SEQ ID NO: 3466 - DNA, 15 bp, Homo sapiens
acctgaaactgcaaa

SEQ ID NO: 3467 - DNA, 15 bp, Homo sapiens
tacctgaaactgcaa

SEQ ID NO: 3468 - DNA, 15 bp, Homo sapiens
gtacctgaaactgca

SEQ ID NO: 3469 - DNA, 15 bp, Homo sapiens
tgtacctgaaactgc

SEQ ID NO: 3470 - DNA, 15 bp, Homo sapiens
ttgtacctgaaactg

SEQ ID NO: 3471 - DNA, 15 bp, Homo sapiens
gttgtacctgaaact

SEQ ID NO: 3472 - DNA, 15 bp, Homo sapiens
tgttgtacctgaaac

SEQ ID NO: 3473 - DNA, 15 bp, Homo sapiens
gtgttgtacctgaaa

SEQ ID NO: 3474 - DNA, 15 bp, Homo sapiens
tgtgttgtacctgaa

SEQ ID NO: 3475 - DNA, 15 bp, Homo sapiens
atgtgttgtacctga

SEQ ID NO: 3476 - DNA, 15 bp, Homo sapiens
aatgtgttgtacctg

SEQ ID NO: 3477 - DNA, 15 bp, Homo sapiens
caatgtgttgtacct

SEQ ID NO: 3478 - DNA, 15 bp, Homo sapiens
ccaatgtgttgtacc

SEQ ID NO: 3479 - DNA, 15 bp, Homo sapiens
accaatgtgttgtac

SEQ ID NO: 3480 - DNA, 15 bp, Homo sapiens
aaccaatgtgttgta

SEQ ID NO: 3481 - DNA, 15 bp, Homo sapiens
aaaccaatgtgttgt

SEQ ID NO: 3482 - DNA, 15 bp, Homo sapiens
aaaaccaatgtgttg

SEQ ID NO: 3483 - DNA, 15 bp, Homo sapiens
caaaaccaatgtgtt

SEQ ID NO: 3484 - DNA, 15 bp, Homo sapiens
tcaaaaccaatgtgt

SEQ ID NO: 3485 - DNA, 15 bp, Homo sapiens
atcaaaaccaatgtg

SEQ ID NO: 3486 - DNA, 15 bp, Homo sapiens
aatcaaaaccaatgt

SEQ ID NO: 3487 - DNA, 15 bp, Homo sapiens
taatcaaaaccaatg

SEQ ID NO: 3488 - DNA, 15 bp, Homo sapiens
ctaatcaaaaccaat

SEQ ID NO: 3489 - DNA, 15 bp, Homo sapiens
cctaatcaaaaccaa

SEQ ID NO: 3490 - DNA, 15 bp, Homo sapiens
ccctaatcaaaacca

SEQ ID NO: 3491 - DNA, 15 bp, Homo sapiens
tccctaatcaaaacc

SEQ ID NO: 3492 - DNA, 15 bp, Homo sapiens
atccctaatcaaaac

SEQ ID NO: 3493 - DNA, 15 bp, Homo sapiens
catccctaatcaaaa

SEQ ID NO: 3494 - DNA, 15 bp, Homo sapiens
ccatccctaatcaaa

SEQ ID NO: 3495 - DNA, 15 bp, Homo sapiens
cccatccctaatcaa

SEQ ID NO: 3496 - DNA, 15 bp, Homo sapiens
ccccatccctaatca

SEQ ID NO: 3497 - DNA, 15 bp, Homo sapiens
tccccatccctaatc

SEQ ID NO: 3498 - DNA, 15 bp, Homo sapiens
atccccatccctaat

SEQ ID NO: 3499 - DNA, 15 bp, Homo sapiens
catccccatccctaa

SEQ ID NO: 3500 - DNA, 15 bp, Homo sapiens
ccatccccatcccta

SEQ ID NO: 3501 - DNA, 15 bp, Homo sapiens
cccatccccatccct

SEQ ID NO: 3502 - DNA, 15 bp, Homo sapiens
ccccatccccatccc

SEQ ID NO: 3503 - DNA, 15 bp, Homo sapiens
gccccatccccatcc

SEQ ID NO: 3504 - DNA, 15 bp, Homo sapiens
ggccccatccccatc

SEQ ID NO: 3505 - DNA, 15 bp, Homo sapiens
gggccccatccccat

SEQ ID NO: 3506 - DNA, 15 bp, Homo sapiens
agggccccatcccca

SEQ ID NO: 3507 - DNA, 15 bp, Homo sapiens
gagggccccatcccc

SEQ ID NO: 3508 - DNA, 15 bp, Homo sapiens
agagggccccatccc

SEQ ID NO: 3509 - DNA, 15 bp, Homo sapiens
aagagggccccatcc

SEQ ID NO: 3510 - DNA, 15 bp, Homo sapiens
aaagagggccccatc

SEQ ID NO: 3511 - DNA, 15 bp, Homo sapiens
aaaagagggccccat

SEQ ID NO: 3512 - DNA, 15 bp, Homo sapiens
aaaaagagggcccca

SEQ ID NO: 3513 - DNA, 15 bp, Homo sapiens
caaaaagagggcccc

SEQ ID NO: 3514 - DNA, 15 bp, Homo sapiens
gcaaaaagagggccc

SEQ ID NO: 3515 - DNA, 15 bp, Homo sapiens
tgcaaaaagagggcc

SEQ ID NO: 3516 - DNA, 15 bp, Homo sapiens
ctgcaaaaagagggc

SEQ ID NO: 3517 - DNA, 15 bp, Homo sapiens
tctgcaaaaagaggg

SEQ ID NO: 3518 - DNA, 15 bp, Homo sapiens
ttctgcaaaaagagg

SEQ ID NO: 3519 - DNA, 15 bp, Homo sapiens
attctgcaaaaagag

SEQ ID NO: 3520 - DNA, 15 bp, Homo sapiens
cattctgcaaaaaga

SEQ ID NO: 3521 - DNA, 15 bp, Homo sapiens
ccattctgcaaaaag

SEQ ID NO: 3522 - DNA, 15 bp, Homo sapiens
cccattctgcaaaaa

SEQ ID NO: 3523 - DNA, 15 bp, Homo sapiens
ccccattctgcaaaa

SEQ ID NO: 3524 - DNA, 15 bp, Homo sapiens
tccccattctgcaaa

SEQ ID NO: 3525 - DNA, 15 bp, Homo sapiens
ttccccattctgcaa

SEQ ID NO: 3526 - DNA, 15 bp, Homo sapiens
tttccccattctgca

SEQ ID NO: 3527 - DNA, 15 bp, Homo sapiens
ctttccccattctgc

SEQ ID NO: 3528 - DNA, 15 bp, Homo sapiens
actttccccattctg

SEQ ID NO: 3529 - DNA, 15 bp, Homo sapiens
tactttccccattct

SEQ ID NO: 3530 - DNA, 15 bp, Homo sapiens
atactttccccattc

SEQ ID NO: 3531 - DNA, 15 bp, Homo sapiens
aatactttccccatt

SEQ ID NO: 3532 - DNA, 15 bp, Homo sapiens
caatactttccccat

SEQ ID NO: 3533 - DNA, 15 bp, Homo sapiens
tcaatactttcccca

SEQ ID NO: 3534 - DNA, 15 bp, Homo sapiens
gtcaatactttcccc

SEQ ID NO: 3535 - DNA, 15 bp, Homo sapiens
tgtcaatactttccc

SEQ ID NO: 3536 - DNA, 15 bp, Homo sapiens
ctgtcaatactttcc

SEQ ID NO: 3537 - DNA, 15 bp, Homo sapiens
cctgtcaatactttc

SEQ ID NO: 3538 - DNA, 15 bp, Homo sapiens
tcctgtcaatacttt

SEQ ID NO: 3539 - DNA, 15 bp, Homo sapiens
ttcctgtcaatactt

SEQ ID NO: 3540 - DNA, 15 bp, Homo sapiens
attcctgtcaatact

SEQ ID NO: 3541 - DNA, 15 bp, Homo sapiens
aattcctgtcaatac

SEQ ID NO: 3542 - DNA, 15 bp, Homo sapiens
caattcctgtcaata

SEQ ID NO: 3543 - DNA, 15 bp, Homo sapiens
tcaattcctgtcaat

SEQ ID NO: 3544 - DNA, 15 bp, Homo sapiens
ctcaattcctgtcaa

SEQ ID NO: 3545 - DNA, 15 bp, Homo sapiens
tctcaattcctgtca

SEQ ID NO: 3546 - DNA, 15 bp, Homo sapiens
ctctcaattcctgtc

SEQ ID NO: 3547 - DNA, 15 bp, Homo sapiens
gctctcaattcctgt

SEQ ID NO: 3548 - DNA, 15 bp, Homo sapiens
agctctcaattcctg

SEQ ID NO: 3549 - DNA, 15 bp, Homo sapiens
tagctctcaattcct

SEQ ID NO: 3550 - DNA, 15 bp, Homo sapiens
atagctctcaattcc

SEQ ID NO: 3551 - DNA, 15 bp, Homo sapiens
aatagctctcaattc

SEQ ID NO: 3552 - DNA, 15 bp, Homo sapiens
caatagctctcaatt

SEQ ID NO: 3553 - DNA, 15 bp, Homo sapiens
ccaatagctctcaat

SEQ ID NO: 3554 - DNA, 15 bp, Homo sapiens
accaatagctctcaa

SEQ ID NO: 3555 - DNA, 15 bp, Homo sapiens
taccaatagctctca

SEQ ID NO: 3556 - DNA, 15 bp, Homo sapiens
ctaccaatagctctc

SEQ ID NO: 3557 - DNA, 15 bp, Homo sapiens
cctaccaatagctct

SEQ ID NO: 3558 - DNA, 15 bp, Homo sapiens
gcctaccaatagctc

SEQ ID NO: 3559 - DNA, 15 bp, Homo sapiens
ggcctaccaatagct

SEQ ID NO: 3560 - DNA, 15 bp, Homo sapiens
tggcctaccaatagc

SEQ ID NO: 3561 - DNA, 15 bp, Homo sapiens
ctggcctaccaatag

SEQ ID NO: 3562 - DNA, 15 bp, Homo sapiens
actggcctaccaata

SEQ ID NO: 3563 - DNA, 15 bp, Homo sapiens
cactggcctaccaat

SEQ ID NO: 3564 - DNA, 15 bp, Homo sapiens
acactggcctaccaa

SEQ ID NO: 3565 - DNA, 15 bp, Homo sapiens
tacactggcctacca

SEQ ID NO: 3566 - DNA, 15 bp, Homo sapiens
atacactggcctacc

SEQ ID NO: 3567 - DNA, 15 bp, Homo sapiens
tatacactggcctac

SEQ ID NO: 3568 - DNA, 15 bp, Homo sapiens
ttatacactggccta

SEQ ID NO: 3569 - DNA, 15 bp, Homo sapiens
cttatacactggcct

SEQ ID NO: 3570 - DNA, 15 bp, Homo sapiens
ccttatacactggcc

SEQ ID NO: 3571 - DNA, 15 bp, Homo sapiens
accttatacactggc

SEQ ID NO: 3572 - DNA, 15 bp, Homo sapiens
taccttatacactgg

SEQ ID NO: 3573 - DNA, 15 bp, Homo sapiens
ataccttatacactg

SEQ ID NO: 3574 - DNA, 15 bp, Homo sapiens
cataccttatacact

SEQ ID NO: 3575 - DNA, 15 bp, Homo sapiens
acataccttatacac

SEQ ID NO: 3576 - DNA, 15 bp, Homo sapiens
cacataccttataca

SEQ ID NO: 3577 - DNA, 15 bp, Homo sapiens
tcacataccttatac

SEQ ID NO: 3578 - DNA, 15 bp, Homo sapiens
ttcacataccttata

SEQ ID NO: 3579 - DNA, 15 bp, Homo sapiens
tttcacataccttat

SEQ ID NO: 3580 - DNA, 15 bp, Homo sapiens
ttttcacatacctta

SEQ ID NO: 3581 - DNA, 15 bp, Homo sapiens
gttttcacatacctt

SEQ ID NO: 3582 - DNA, 15 bp, Homo sapiens
tgttttcacatacct

SEQ ID NO: 3583 - DNA, 15 bp, Homo sapiens
ctgttttcacatacc

SEQ ID NO: 3584 - DNA, 15 bp, Homo sapiens
tctgttttcacatac

SEQ ID NO: 3585 - DNA, 15 bp, Homo sapiens
ttctgttttcacata

SEQ ID NO: 3586 - DNA, 15 bp, Homo sapiens
attctgttttcacat

SEQ ID NO: 3587 - DNA, 15 bp, Homo sapiens
aattctgttttcaca

SEQ ID NO: 3588 - DNA, 15 bp, Homo sapiens
taattctgttttcac

SEQ ID NO: 3589 - DNA, 15 bp, Homo sapiens
ttaattctgttttca

SEQ ID NO: 3590 - DNA, 15 bp, Homo sapiens
cttaattctgttttc

SEQ ID NO: 3591 - DNA, 15 bp, Homo sapiens
acttaattctgtttt

SEQ ID NO: 3592 - DNA, 15 bp, Homo sapiens
aacttaattctgttt

SEQ ID NO: 3593 - DNA, 15 bp, Homo sapiens
taacttaattctgtt

SEQ ID NO: 3594 - DNA, 15 bp, Homo sapiens
ataacttaattctgt

SEQ ID NO: 3595 - DNA, 15 bp, Homo sapiens
aataacttaattctg

SEQ ID NO: 3596 - DNA, 15 bp, Homo sapiens
caataacttaattct

SEQ ID NO: 3597 - DNA, 15 bp, Homo sapiens
ccaataacttaattc

SEQ ID NO: 3598 - DNA, 15 bp, Homo sapiens
accaataacttaatt

SEQ ID NO: 3599 - DNA, 15 bp, Homo sapiens
gaccaataacttaat

SEQ ID NO: 3600 - DNA, 15 bp, Homo sapiens
agaccaataacttaa

SEQ ID NO: 3601 - DNA, 15 bp, Homo sapiens
cagaccaataactta

SEQ ID NO: 3602 - DNA, 15 bp, Homo sapiens
tcagaccaataactt

SEQ ID NO: 3603 - DNA, 15 bp, Homo sapiens
ttcagaccaataact

SEQ ID NO: 3604 - DNA, 15 bp, Homo sapiens
cttcagaccaataac

SEQ ID NO: 3605 - DNA, 15 bp, Homo sapiens
acttcagaccaataa

SEQ ID NO: 3606 - DNA, 15 bp, Homo sapiens
cacttcagaccaata

SEQ ID NO: 3607 - DNA, 15 bp, Homo sapiens
tcacttcagaccaat

SEQ ID NO: 3608 - DNA, 15 bp, Homo sapiens
gtcacttcagaccaa

SEQ ID NO: 3609 - DNA, 15 bp, Homo sapiens
agtcacttcagacca

SEQ ID NO: 3610 - DNA, 15 bp, Homo sapiens
cagtcacttcagacc

SEQ ID NO: 3611 - DNA, 15 bp, Homo sapiens
tcagtcacttcagac

SEQ ID NO: 3612 - DNA, 15 bp, Homo sapiens
ttcagtcacttcaga

SEQ ID NO: 3613 - DNA, 15 bp, Homo sapiens
cttcagtcacttcag

SEQ ID NO: 3614 - DNA, 15 bp, Homo sapiens
gcttcagtcacttca

SEQ ID NO: 3615 - DNA, 15 bp, Homo sapiens
tgcttcagtcacttc

SEQ ID NO: 3616 - DNA, 15 bp, Homo sapiens
atgcttcagtcactt

SEQ ID NO: 3617 - DNA, 15 bp, Homo sapiens
aatgcttcagtcact

SEQ ID NO: 3618 - DNA, 15 bp, Homo sapiens
aaatgcttcagtcac

SEQ ID NO: 3619 - DNA, 15 bp, Homo sapiens
taaatgcttcagtca

SEQ ID NO: 3620 - DNA, 15 bp, Homo sapiens
ctaaatgcttcagtc

SEQ ID NO: 3621 - DNA, 15 bp, Homo sapiens
cctaaatgcttcagt

SEQ ID NO: 3622 - DNA, 15 bp, Homo sapiens
gcctaaatgcttcag

SEQ ID NO: 3623 - DNA, 15 bp, Homo sapiens
agcctaaatgcttca

SEQ ID NO: 3624 - DNA, 15 bp, Homo sapiens
gagcctaaatgcttc

SEQ ID NO: 3625 - DNA, 15 bp, Homo sapiens
agagcctaaatgctt

SEQ ID NO: 3626 - DNA, 15 bp, Homo sapiens
tagagcctaaatgct

SEQ ID NO: 3627 - DNA, 15 bp, Homo sapiens
atagagcctaaatgc

SEQ ID NO: 3628 - DNA, 15 bp, Homo sapiens
gatagagcctaaatg

SEQ ID NO: 3629 - DNA, 15 bp, Homo sapiens
tgatagagcctaaat

SEQ ID NO: 3630 - DNA, 15 bp, Homo sapiens
ttgatagagcctaaa

SEQ ID NO: 3631 - DNA, 15 bp, Homo sapiens
cttgatagagcctaa

SEQ ID NO: 3632 - DNA, 15 bp, Homo sapiens
ccttgatagagccta

SEQ ID NO: 3633 - DNA, 15 bp, Homo sapiens
gccttgatagagcct

SEQ ID NO: 3634 - DNA, 15 bp, Homo sapiens
ggccttgatagagcc

SEQ ID NO: 3635 - DNA, 15 bp, Homo sapiens
aggccttgatagagc

SEQ ID NO: 3636 - DNA, 15 bp, Homo sapiens
taggccttgatagag

SEQ ID NO: 3637 - DNA, 15 bp, Homo sapiens
ttaggccttgataga

SEQ ID NO: 3638 - DNA, 15 bp, Homo sapiens
tttaggccttgatag

SEQ ID NO: 3639 - DNA, 15 bp, Homo sapiens
ttttaggccttgata

SEQ ID NO: 3640 - DNA, 15 bp, Homo sapiens
attttaggccttgat

SEQ ID NO: 3641 - DNA, 15 bp, Homo sapiens
aattttaggccttga

SEQ ID NO: 3642 - DNA, 15 bp, Homo sapiens
aaattttaggccttg

SEQ ID NO: 3643 - DNA, 15 bp, Homo sapiens
caaattttaggcctt

SEQ ID NO: 3644 - DNA, 15 bp, Homo sapiens
ccaaattttaggcct

SEQ ID NO: 3645 - DNA, 15 bp, Homo sapiens
accaaattttaggcc

SEQ ID NO: 3646 - DNA, 15 bp, Homo sapiens
taccaaattttaggc

SEQ ID NO: 3647 - DNA, 15 bp, Homo sapiens
ttaccaaattttagg

SEQ ID NO: 3648 - DNA, 15 bp, Homo sapiens
attaccaaattttag

SEQ ID NO: 3649 - DNA, 15 bp, Homo sapiens
tattaccaaatttta

SEQ ID NO: 3650 - DNA, 15 bp, Homo sapiens
atattaccaaatttt

SEQ ID NO: 3651 - DNA, 15 bp, Homo sapiens
catattaccaaattt

SEQ ID NO: 3652 - DNA, 15 bp, Homo sapiens
tcatattaccaaatt

SEQ ID NO: 3653 - DNA, 15 bp, Homo sapiens
ctcatattaccaaat

SEQ ID NO: 3654 - DNA, 15 bp, Homo sapiens
actcatattaccaaa

SEQ ID NO: 3655 - DNA, 15 bp, Homo sapiens
aactcatattaccaa

SEQ ID NO: 3656 - DNA, 15 bp, Homo sapiens
aaactcatattacca

SEQ ID NO: 3657 - DNA, 15 bp, Homo sapiens
caaactcatattacc

SEQ ID NO: 3658 - DNA, 15 bp, Homo sapiens
ccaaactcatattac

SEQ ID NO: 3659 - DNA, 15 bp, Homo sapiens
accaaactcatatta

SEQ ID NO: 3660 - DNA, 15 bp, Homo sapiens
taccaaactcatatt

SEQ ID NO: 3661 - DNA, 15 bp, Homo sapiens
ttaccaaactcatat

SEQ ID NO: 3662 - DNA, 15 bp, Homo sapiens
attaccaaactcata

SEQ ID NO: 3663 - DNA, 15 bp, Homo sapiens
cattaccaaactcat

SEQ ID NO: 3664 - DNA, 15 bp, Homo sapiens
gcattaccaaactca

SEQ ID NO: 3665 - DNA, 15 bp, Homo sapiens
cgcattaccaaactc

SEQ ID NO: 3666 - DNA, 15 bp, Homo sapiens
tcgcattaccaaact

SEQ ID NO: 3667 - DNA, 15 bp, Homo sapiens
ttcgcattaccaaac

SEQ ID NO: 3668 - DNA, 15 bp, Homo sapiens
attcgcattaccaaa

SEQ ID NO: 3669 - DNA, 15 bp, Homo sapiens
aattcgcattaccaa

SEQ ID NO: 3670 - DNA, 15 bp, Homo sapiens
caattcgcattacca

SEQ ID NO: 3671 - DNA, 15 bp, Homo sapiens
acaattcgcattacc

SEQ ID NO: 3672 - DNA, 15 bp, Homo sapiens
cacaattcgcattac

SEQ ID NO: 3673 - DNA, 15 bp, Homo sapiens
ccacaattcgcatta

SEQ ID NO: 3674 - DNA, 15 bp, Homo sapiens
gccacaattcgcatt

SEQ ID NO: 3675 - DNA, 15 bp, Homo sapiens
tgccacaattcgcat

SEQ ID NO: 3676 - DNA, 15 bp, Homo sapiens
ctgccacaattcgca

SEQ ID NO: 3677 - DNA, 15 bp, Homo sapiens
actgccacaattcgc

SEQ ID NO: 3678 - DNA, 15 bp, Homo sapiens
cactgccacaattcg

SEQ ID NO: 3679 - DNA, 15 bp, Homo sapiens
ccactgccacaattc

SEQ ID NO: 3680 - DNA, 15 bp, Homo sapiens
tccactgccacaatt

SEQ ID NO: 3681 - DNA, 15 bp, Homo sapiens
gtccactgccacaat

SEQ ID NO: 3682 - DNA, 15 bp, Homo sapiens
tgtccactgccacaa

SEQ ID NO: 3683 - DNA, 15 bp, Homo sapiens
ttgtccactgccaca

SEQ ID NO: 3684 - DNA, 15 bp, Homo sapiens
attgtccactgccac

SEQ ID NO: 3685 - DNA, 15 bp, Homo sapiens
tattgtccactgcca

SEQ ID NO: 3686 - DNA, 15 bp, Homo sapiens
atattgtccactgcc

SEQ ID NO: 3687 - DNA, 15 bp, Homo sapiens
aatattgtccactgc

SEQ ID NO: 3688 - DNA, 15 bp, Homo sapiens
aaatattgtccactg

SEQ ID NO: 3689 - DNA, 15 bp, Homo sapiens
taaatattgtccact

SEQ ID NO: 3690 - DNA, 15 bp, Homo sapiens
ctaaatattgtccac

SEQ ID NO: 3691 - DNA, 15 bp, Homo sapiens
actaaatattgtcca

SEQ ID NO: 3692 - DNA, 15 bp, Homo sapiens
aactaaatattgtcc

SEQ ID NO: 3693 - DNA, 15 bp, Homo sapiens
taactaaatattgtc

SEQ ID NO: 3694 - DNA, 15 bp, Homo sapiens
ttaactaaatattgt

SEQ ID NO: 3695 - DNA, 15 bp, Homo sapiens
tttaactaaatattg

SEQ ID NO: 3696 - DNA, 15 bp, Homo sapiens
ttttaactaaatatt

SEQ ID NO: 3697 - DNA, 15 bp, Homo sapiens
attttaactaaatat

SEQ ID NO: 3698 - DNA, 15 bp, Homo sapiens
aattttaactaaata

SEQ ID NO: 3699 - DNA, 15 bp, Homo sapiens
taattttaactaaat

SEQ ID NO: 3700 - DNA, 15 bp, Homo sapiens
ataattttaactaaa

SEQ ID NO: 3701 - DNA, 15 bp, Homo sapiens
cataattttaactaa

SEQ ID NO: 3702 - DNA, 15 bp, Homo sapiens
acataattttaacta

SEQ ID NO: 3703 - DNA, 15 bp, Homo sapiens
tacataattttaact

SEQ ID NO: 3704 - DNA, 15 bp, Homo sapiens
ttacataattttaac

SEQ ID NO: 3705 - DNA, 15 bp, Homo sapiens
attacataattttaa

SEQ ID NO: 3706 - DNA, 15 bp, Homo sapiens
aattacataatttta

SEQ ID NO: 3707 - DNA, 15 bp, Homo sapiens
caattacataatttt

SEQ ID NO: 3708 - DNA, 15 bp, Homo sapiens
gcaattacataattt

SEQ ID NO: 3709 - DNA, 15 bp, Homo sapiens
tgcaattacataatt

SEQ ID NO: 3710 - DNA, 15 bp, Homo sapiens
atgcaattacataat

SEQ ID NO: 3711 - DNA, 15 bp, Homo sapiens
tatgcaattacataa

SEQ ID NO: 3712 - DNA, 15 bp, Homo sapiens
ttatgcaattacata

SEQ ID NO: 3713 - DNA, 15 bp, Homo sapiens
cttatgcaattacat

SEQ ID NO: 3714 - DNA, 15 bp, Homo sapiens
acttatgcaattaca

SEQ ID NO: 3715 - DNA, 15 bp, Homo sapiens
tacttatgcaattac

SEQ ID NO: 3716 - DNA, 15 bp, Homo sapiens
gtacttatgcaatta

SEQ ID NO: 3717 - DNA, 15 bp, Homo sapiens
agtacttatgcaatt

SEQ ID NO: 3718 - DNA, 15 bp, Homo sapiens
tagtacttatgcaat

SEQ ID NO: 3719 - DNA, 15 bp, Homo sapiens
ctagtacttatgcaa

SEQ ID NO: 3720 - DNA, 15 bp, Homo sapiens
gctagtacttatgca

SEQ ID NO: 3721 - DNA, 15 bp, Homo sapiens
tgctagtacttatgc

SEQ ID NO: 3722 - DNA, 15 bp, Homo sapiens
gtgctagtacttatg

SEQ ID NO: 3723 - DNA, 15 bp, Homo sapiens
tgtgctagtacttat

SEQ ID NO: 3724 - DNA, 15 bp, Homo sapiens
ctgtgctagtactta

SEQ ID NO: 3725 - DNA, 15 bp, Homo sapiens
actgtgctagtactt

SEQ ID NO: 3726 - DNA, 15 bp, Homo sapiens
tactgtgctagtact

SEQ ID NO: 3727 - DNA, 15 bp, Homo sapiens
atactgtgctagtac

SEQ ID NO: 3728 - DNA, 15 bp, Homo sapiens
aatactgtgctagta

SEQ ID NO: 3729 - DNA, 15 bp, Homo sapiens
aaatactgtgctagt

SEQ ID NO: 3730 - DNA, 15 bp, Homo sapiens
aaaatactgtgctag

SEQ ID NO: 3731 - DNA, 15 bp, Homo sapiens
aaaaatactgtgcta

SEQ ID NO: 3732 - DNA, 15 bp, Homo sapiens
taaaaatactgtgct

SEQ ID NO: 3733 - DNA, 15 bp, Homo sapiens
ttaaaaatactgtgc

SEQ ID NO: 3734 - DNA, 15 bp, Homo sapiens
attaaaaatactgtg

SEQ ID NO: 3735 - DNA, 15 bp, Homo sapiens
tattaaaaatactgt

SEQ ID NO: 3736 - DNA, 15 bp, Homo sapiens
ttattaaaaatactg

SEQ ID NO: 3737 - DNA, 15 bp, Homo sapiens
tttattaaaaatact

SEQ ID NO: 3738 - DNA, 15 bp, Homo sapiens
ttttattaaaaatac

SEQ ID NO: 3739 - DNA, 15 bp, Homo sapiens
cttttattaaaaata

SEQ ID NO: 3740 - DNA, 15 bp, Homo sapiens
acttttattaaaaat

SEQ ID NO: 3741 - DNA, 15 bp, Homo sapiens
aacttttattaaaaa

SEQ ID NO: 3742 - DNA, 15 bp, Homo sapiens
taacttttattaaaa

SEQ ID NO: 3743 - DNA, 15 bp, Homo sapiens
ataacttttattaaa

SEQ ID NO: 3744 - DNA, 15 bp, Homo sapiens
aataacttttattaa

SEQ ID NO: 3745 - DNA, 15 bp, Homo sapiens
aaataacttttatta

SEQ ID NO: 3746 - DNA, 15 bp, Homo sapiens
gaaataacttttatt

SEQ ID NO: 3747 - DNA, 15 bp, Homo sapiens
agaaataacttttat

SEQ ID NO: 3748 - DNA, 15 bp, Homo sapiens
aagaaataactttta

SEQ ID NO: 3749 - DNA, 15 bp, Homo sapiens
taagaaataactttt

SEQ ID NO: 3750 - DNA, 15 bp, Homo sapiens
ctaagaaataacttt

SEQ ID NO: 3751 - DNA, 15 bp, Homo sapiens
gctaagaaataactt

SEQ ID NO: 3752 - DNA, 15 bp, Homo sapiens
tgctaagaaataact

SEQ ID NO: 3753 - DNA, 15 bp, Homo sapiens
ttgctaagaaataac

SEQ ID NO: 3754 - DNA, 15 bp, Homo sapiens
tttgctaagaaataa

SEQ ID NO: 3755 - DNA, 15 bp, Homo sapiens
atttgctaagaaata

SEQ ID NO: 3756 - DNA, 15 bp, Homo sapiens
catttgctaagaaat

SEQ ID NO: 3757 - DNA, 15 bp, Homo sapiens
acatttgctaagaaa

SEQ ID NO: 3758 - DNA, 15 bp, Homo sapiens
gacatttgctaagaa

SEQ ID NO: 3759 - DNA, 15 bp, Homo sapiens
tgacatttgctaaga

SEQ ID NO: 3760 - DNA, 15 bp, Homo sapiens
ctgacatttgctaag

SEQ ID NO: 3761 - DNA, 15 bp, Homo sapiens
actgacatttgctaa

SEQ ID NO: 3762 - DNA, 15 bp, Homo sapiens
aactgacatttgcta

SEQ ID NO: 3763 - DNA, 15 bp, Homo sapiens
caactgacatttgct

SEQ ID NO: 3764 - DNA, 15 bp, Homo sapiens
gcaactgacatttgc

SEQ ID NO: 3765 - DNA, 15 bp, Homo sapiens
tgcaactgacatttg

SEQ ID NO: 3766 - DNA, 15 bp, Homo sapiens
atgcaactgacattt

SEQ ID NO: 3767 - DNA, 15 bp, Homo sapiens
aatgcaactgacatt

SEQ ID NO: 3768 - DNA, 15 bp, Homo sapiens
aaatgcaactgacat

SEQ ID NO: 3769 - DNA, 15 bp, Homo sapiens
aaaatgcaactgaca

SEQ ID NO: 3770 - DNA, 15 bp, Homo sapiens
caaaatgcaactgac

SEQ ID NO: 3771 - DNA, 15 bp, Homo sapiens
acaaaatgcaactga

SEQ ID NO: 3772 - DNA, 15 bp, Homo sapiens
gacaaaatgcaactg

SEQ ID NO: 3773 - DNA, 15 bp, Homo sapiens
agacaaaatgcaact

SEQ ID NO: 3774 - DNA, 15 bp, Homo sapiens
tagacaaaatgcaac

SEQ ID NO: 3775 - DNA, 15 bp, Homo sapiens
ttagacaaaatgcaa

SEQ ID NO: 3776 - DNA, 15 bp, Homo sapiens
tttagacaaaatgca

SEQ ID NO: 3777 - DNA, 15 bp, Homo sapiens
ctttagacaaaatgc

SEQ ID NO: 3778 - DNA, 15 bp, Homo sapiens
cctttagacaaaatg

SEQ ID NO: 3779 - DNA, 15 bp, Homo sapiens
acctttagacaaaat

SEQ ID NO: 3780 - DNA, 15 bp, Homo sapiens
tacctttagacaaaa

SEQ ID NO: 3781 - DNA, 15 bp, Homo sapiens
ctacctttagacaaa

SEQ ID NO: 3782 - DNA, 15 bp, Homo sapiens
tctacctttagacaa

SEQ ID NO: 3783 - DNA, 15 bp, Homo sapiens
ctctacctttagaca

SEQ ID NO: 3784 - DNA, 15 bp, Homo sapiens
actctacctttagac

SEQ ID NO: 3785 - DNA, 15 bp, Homo sapiens
cactctacctttaga

SEQ ID NO: 3786 - DNA, 15 bp, Homo sapiens
tcactctacctttag

SEQ ID NO: 3787 - DNA, 15 bp, Homo sapiens
gtcactctaccttta

SEQ ID NO: 3788 - DNA, 15 bp, Homo sapiens
tgtcactctaccttt

SEQ ID NO: 3789 - DNA, 15 bp, Homo sapiens
gtgtcactctacctt

SEQ ID NO: 3790 - DNA, 15 bp, Homo sapiens
agtgtcactctacct

SEQ ID NO: 3791 - DNA, 15 bp, Homo sapiens
tagtgtcactctacc

SEQ ID NO: 3792 - DNA, 15 bp, Homo sapiens
gtagtgtcactctac

SEQ ID NO: 3793 - DNA, 15 bp, Homo sapiens
tgtagtgtcactcta

SEQ ID NO: 3794 - DNA, 15 bp, Homo sapiens
ctgtagtgtcactct

SEQ ID NO: 3795 - DNA, 15 bp, Homo sapiens
actgtagtgtcactc

SEQ ID NO: 3796 - DNA, 15 bp, Homo sapiens
cactgtagtgtcact

SEQ ID NO: 3797 - DNA, 15 bp, Homo sapiens
acactgtagtgtcac

SEQ ID NO: 3798 - DNA, 15 bp, Homo sapiens
gacactgtagtgtca

SEQ ID NO: 3799 - DNA, 15 bp, Homo sapiens
agacactgtagtgtc

SEQ ID NO: 3800 - DNA, 15 bp, Homo sapiens
tagacactgtagtgt

SEQ ID NO: 3801 - DNA, 15 bp, Homo sapiens
atagacactgtagtg

SEQ ID NO: 3802 - DNA, 15 bp, Homo sapiens
tatagacactgtagt

SEQ ID NO: 3803 - DNA, 15 bp, Homo sapiens
atatagacactgtag

SEQ ID NO: 3804 - DNA, 15 bp, Homo sapiens
catatagacactgta

SEQ ID NO: 3805 - DNA, 15 bp, Homo sapiens
acatatagacactgt

SEQ ID NO: 3806 - DNA, 15 bp, Homo sapiens
gacatatagacactg

SEQ ID NO: 3807 - DNA, 15 bp, Homo sapiens
ggacatatagacact

SEQ ID NO: 3808 - DNA, 15 bp, Homo sapiens
aggacatatagacac

SEQ ID NO: 3809 - DNA, 15 bp, Homo sapiens
caggacatatagaca

SEQ ID NO: 3810 - DNA, 15 bp, Homo sapiens
gcaggacatatagac

SEQ ID NO: 3811 - DNA, 15 bp, Homo sapiens
agcaggacatataga

SEQ ID NO: 3812 - DNA, 15 bp, Homo sapiens
tagcaggacatatag

SEQ ID NO: 3813 - DNA, 15 bp, Homo sapiens
ttagcaggacatata

SEQ ID NO: 3814 - DNA, 15 bp, Homo sapiens
tttagcaggacatat

SEQ ID NO: 3815 - DNA, 15 bp, Homo sapiens
ttttagcaggacata

SEQ ID NO: 3816 - DNA, 15 bp, Homo sapiens
tttttagcaggacat

SEQ ID NO: 3817 - DNA, 15 bp, Homo sapiens
atttttagcaggaca

SEQ ID NO: 3818 - DNA, 15 bp, Homo sapiens
aatttttagcaggac

SEQ ID NO: 3819 - DNA, 15 bp, Homo sapiens
caatttttagcagga

SEQ ID NO: 3820 - DNA, 15 bp, Homo sapiens
acaatttttagcagg

SEQ ID NO: 3821 - DNA, 15 bp, Homo sapiens
cacaatttttagcag

SEQ ID NO: 3822 - DNA, 15 bp, Homo sapiens
ccacaatttttagca

SEQ ID NO: 3823 - DNA, 15 bp, Homo sapiens
cccacaatttttagc

SEQ ID NO: 3824 - DNA, 15 bp, Homo sapiens
ccccacaatttttag

SEQ ID NO: 3825 - DNA, 15 bp, Homo sapiens
tccccacaattttta

SEQ ID NO: 3826 - DNA, 15 bp, Homo sapiens
ttccccacaattttt

SEQ ID NO: 3827 - DNA, 15 bp, Homo sapiens
attccccacaatttt

SEQ ID NO: 3828 - DNA, 15 bp, Homo sapiens
tattccccacaattt

SEQ ID NO: 3829 - DNA, 15 bp, Homo sapiens
atattccccacaatt

SEQ ID NO: 3830 - DNA, 15 bp, Homo sapiens
aatattccccacaat

SEQ ID NO: 3831 - DNA, 15 bp, Homo sapiens
aaatattccccacaa

SEQ ID NO: 3832 - DNA, 15 bp, Homo sapiens
aaaatattccccaca

SEQ ID NO: 3833 - DNA, 15 bp, Homo sapiens
aaaaatattccccac

SEQ ID NO: 3834 - DNA, 15 bp, Homo sapiens
aaaaaatattcccca

SEQ ID NO: 3835 - DNA, 15 bp, Homo sapiens
aaaaaaatattcccc

SEQ ID NO: 3836 - DNA, 15 bp, Homo sapiens
aaaaaaaatattccc

SEQ ID NO: 3837 - DNA, 15 bp, Homo sapiens
aaaaaaaaatattcc

SEQ ID NO: 3838 - DNA, 15 bp, Homo sapiens
taaaaaaaaatattc

SEQ ID NO: 3839 - DNA, 15 bp, Homo sapiens
ttaaaaaaaaatatt

SEQ ID NO: 3840 - DNA, 15 bp, Homo sapiens
cttaaaaaaaaatat

SEQ ID NO: 3841 - DNA, 15 bp, Homo sapiens
tcttaaaaaaaaata

SEQ ID NO: 3842 - DNA, 15 bp, Homo sapiens
gtcttaaaaaaaaat

SEQ ID NO: 3843 - DNA, 15 bp, Homo sapiens
gctgtcttaaaaaaa

SEQ ID NO: 3844 - DNA, 15 bp, Homo sapiens
cgctgtcttaaaaaa

SEQ ID NO: 3845 - DNA, 15 bp, Homo sapiens
acgctgtcttaaaaa

SEQ ID NO: 3846 - DNA, 15 bp, Homo sapiens
aacgctgtcttaaaa

SEQ ID NO: 3847 - DNA, 15 bp, Homo sapiens
aaacgctgtcttaaa

SEQ ID NO: 3848 - DNA, 15 bp, Homo sapiens
taaacgctgtcttaa

SEQ ID NO: 3849 - DNA, 15 bp, Homo sapiens
ataaacgctgtctta

SEQ ID NO: 3850 - DNA, 15 bp, Homo sapiens
tataaacgctgtctt

SEQ ID NO: 3851 - DNA, 15 bp, Homo sapiens
atataaacgctgtct

SEQ ID NO: 3852 - DNA, 15 bp, Homo sapiens
gatataaacgctgtc

SEQ ID NO: 3853 - DNA, 15 bp, Homo sapiens
cgatataaacgctgt

SEQ ID NO: 3854 - DNA, 15 bp, Homo sapiens
ccgatataaacgctg

SEQ ID NO: 3855 - DNA, 15 bp, Homo sapiens
cccgatataaacgct

SEQ ID NO: 3856 - DNA, 15 bp, Homo sapiens
tcccgatataaacgc

SEQ ID NO: 3857 - DNA, 15 bp, Homo sapiens
ctcccgatataaacg

SEQ ID NO: 3858 - DNA, 15 bp, Homo sapiens
tctcccgatataaac

SEQ ID NO: 3859 - DNA, 15 bp, Homo sapiens
ctctcccgatataaa

SEQ ID NO: 3860 - DNA, 15 bp, Homo sapiens
cctctcccgatataa

SEQ ID NO: 3861 - DNA, 15 bp, Homo sapiens
acctctcccgatata

SEQ ID NO: 3862 - DNA, 15 bp, Homo sapiens
aacctctcccgatat

SEQ ID NO: 3863 - DNA, 15 bp, Homo sapiens
aaacctctcccgata

SEQ ID NO: 3864 - DNA, 15 bp, Homo sapiens
aaaacctctcccgat

SEQ ID NO: 3865 - DNA, 15 bp, Homo sapiens
taaaacctctcccga

SEQ ID NO: 3866 - DNA, 15 bp, Homo sapiens
ataaaacctctcccg

SEQ ID NO: 3867 - DNA, 15 bp, Homo sapiens
aataaaacctctccc

SEQ ID NO: 3868 - DNA, 15 bp, Homo sapiens
gaataaaacctctcc

SEQ ID NO: 3869 - DNA, 15 bp, Homo sapiens
ggaataaaacctctc

SEQ ID NO: 3870 - DNA, 15 bp, Homo sapiens
cggaataaaacctct

SEQ ID NO: 3871 - DNA, 15 bp, Homo sapiens
acggaataaaacctc

SEQ ID NO: 3872 - DNA, 15 bp, Homo sapiens
aacggaataaaacct

SEQ ID NO: 3873 - DNA, 15 bp, Homo sapiens
caacggaataaaacc

SEQ ID NO: 3874 - DNA, 15 bp, Homo sapiens
ccaacggaataaaac

SEQ ID NO: 3875 - DNA, 15 bp, Homo sapiens
tccaacggaataaaa

SEQ ID NO: 3876 - DNA, 15 bp, Homo sapiens
atccaacggaataaa

SEQ ID NO: 3877 - DNA, 15 bp, Homo sapiens
aatccaacggaataa

SEQ ID NO: 3878 - DNA, 15 bp, Homo sapiens
taatccaacggaata

SEQ ID NO: 3879 - DNA, 15 bp, Homo sapiens
ataatccaacggaat

SEQ ID NO: 3880 - DNA, 15 bp, Homo sapiens
cataatccaacggaa

SEQ ID NO: 3881 - DNA, 15 bp, Homo sapiens
acataatccaacgga

SEQ ID NO: 3882 - DNA, 15 bp, Homo sapiens
aacataatccaacgg

SEQ ID NO: 3883 - DNA, 15 bp, Homo sapiens
taacataatccaacg

SEQ ID NO: 3884 - DNA, 15 bp, Homo sapiens
ctaacataatccaac

SEQ ID NO: 3885 - DNA, 15 bp, Homo sapiens
gctaacataatccaa

SEQ ID NO: 3886 - DNA, 15 bp, Homo sapiens
agctaacataatcca

SEQ ID NO: 3887 - DNA, 15 bp, Homo sapiens
cagctaacataatcc

SEQ ID NO: 3888 - DNA, 15 bp, Homo sapiens
gcagctaacataatc

SEQ ID NO: 3889 - DNA, 15 bp, Homo sapiens
tgcagctaacataat

SEQ ID NO: 3890 - DNA, 15 bp, Homo sapiens
atgcagctaacataa

SEQ ID NO: 3891 - DNA, 15 bp, Homo sapiens
tatgcagctaacata

SEQ ID NO: 3892 - DNA, 15 bp, Homo sapiens
atatgcagctaacat

SEQ ID NO: 3893 - DNA, 15 bp, Homo sapiens
tatatgcagctaaca

SEQ ID NO: 3894 - DNA, 15 bp, Homo sapiens
ttatatgcagctaac

SEQ ID NO: 3895 - DNA, 15 bp, Homo sapiens
tttatatgcagctaa

SEQ ID NO: 3896 - DNA, 15 bp, Homo sapiens
atttatatgcagcta

SEQ ID NO: 3897 - DNA, 15 bp, Homo sapiens
catttatatgcagct

SEQ ID NO: 3898 - DNA, 15 bp, Homo sapiens
acatttatatgcagc

SEQ ID NO: 3899 - DNA, 15 bp, Homo sapiens
cacatttatatgcag

SEQ ID NO: 3900 - DNA, 15 bp, Homo sapiens
gcacatttatatgca

SEQ ID NO: 3901 - DNA, 15 bp, Homo sapiens
tgcacatttatatgc

SEQ ID NO: 3902 - DNA, 15 bp, Homo sapiens
gtgcacatttatatg

SEQ ID NO: 3903 - DNA, 15 bp, Homo sapiens
tgtgcacatttatat

SEQ ID NO: 3904 - DNA, 15 bp, Homo sapiens
ctgtgcacatttata

SEQ ID NO: 3905 - DNA, 15 bp, Homo sapiens
actgtgcacatttat

SEQ ID NO: 3906 - DNA, 15 bp, Homo sapiens
aactgtgcacattta

SEQ ID NO: 3907 - DNA, 15 bp, Homo sapiens
taactgtgcacattt

SEQ ID NO: 3908 - DNA, 15 bp, Homo sapiens
ttaactgtgcacatt

SEQ ID NO: 3909 - DNA, 15 bp, Homo sapiens
attaactgtgcacat

SEQ ID NO: 3910 - DNA, 15 bp, Homo sapiens
aattaactgtgcaca

SEQ ID NO: 3911 - DNA, 15 bp, Homo sapiens
aaattaactgtgcac

SEQ ID NO: 3912 - DNA, 15 bp, Homo sapiens
aaaattaactgtgca

SEQ ID NO: 3913 - DNA, 15 bp, Homo sapiens
caaaattaactgtgc

SEQ ID NO: 3914 - DNA, 15 bp, Homo sapiens
gcaaaattaactgtg

SEQ ID NO: 3915 - DNA, 15 bp, Homo sapiens
ggcaaaattaactgt

SEQ ID NO: 3916 - DNA, 15 bp, Homo sapiens
gggcaaaattaactg

SEQ ID NO: 3917 - DNA, 15 bp, Homo sapiens
tgggcaaaattaact

SEQ ID NO: 3918 - DNA, 15 bp, Homo sapiens
ttgggcaaaattaac

SEQ ID NO: 3919 - DNA, 15 bp, Homo sapiens
cttgggcaaaattaa

SEQ ID NO: 3920 - DNA, 15 bp, Homo sapiens
acttgggcaaaatta

SEQ ID NO: 3921 - DNA, 15 bp, Homo sapiens
aacttgggcaaaatt

SEQ ID NO: 3922 - DNA, 15 bp, Homo sapiens
aaacttgggcaaaat

SEQ ID NO: 3923 - DNA, 15 bp, Homo sapiens
aaaacttgggcaaaa

SEQ ID NO: 3924 - DNA, 15 bp, Homo sapiens
aaaaacttgggcaaa

SEQ ID NO: 3925 - DNA, 15 bp, Homo sapiens
caaaaacttgggcaa

SEQ ID NO: 3926 - DNA, 15 bp, Homo sapiens
acaaaaacttgggca

SEQ ID NO: 3927 - DNA, 15 bp, Homo sapiens
aacaaaaacttgggc

SEQ ID NO: 3928 - DNA, 15 bp, Homo sapiens
aaacaaaaacttggg

SEQ ID NO: 3929 - DNA, 15 bp, Homo sapiens
aaaacaaaaacttgg

SEQ ID NO: 3930 - DNA, 15 bp, Homo sapiens
caaaacaaaaacttg

SEQ ID NO: 3931 - DNA, 15 bp, Homo sapiens
tcaaaacaaaaactt

SEQ ID NO: 3932 - DNA, 15 bp, Homo sapiens
ttcaaaacaaaaact

SEQ ID NO: 3933 - DNA, 15 bp, Homo sapiens
tttcaaaacaaaaac

SEQ ID NO: 3934 - DNA, 15 bp, Homo sapiens
atttcaaaacaaaaa

SEQ ID NO: 3935 - DNA, 15 bp, Homo sapiens
catttcaaaacaaaa

SEQ ID NO: 3936 - DNA, 15 bp, Homo sapiens
tcatttcaaaacaaa

SEQ ID NO: 3937 - DNA, 15 bp, Homo sapiens
ttcatttcaaaacaa

SEQ ID NO: 3938 - DNA, 15 bp, Homo sapiens
attcatttcaaaaca

SEQ ID NO: 3939 - DNA, 15 bp, Homo sapiens
cattcatttcaaaac

SEQ ID NO: 3940 - DNA, 15 bp, Homo sapiens
acattcatttcaaaa

SEQ ID NO: 3941 - DNA, 15 bp, Homo sapiens
tacattcatttcaaa

SEQ ID NO: 3942 - DNA, 15 bp, Homo sapiens
ttacattcatttcaa

SEQ ID NO: 3943 - DNA, 15 bp, Homo sapiens
tttacattcatttca

SEQ ID NO: 3944 - DNA, 15 bp, Homo sapiens
ttttacattcatttc

SEQ ID NO: 3945 - DNA, 15 bp, Homo sapiens
gttttacattcattt

SEQ ID NO: 3946 - DNA, 15 bp, Homo sapiens
agttttacattcatt

SEQ ID NO: 3947 - DNA, 15 bp, Homo sapiens
aagttttacattcat

SEQ ID NO: 3948 - DNA, 15 bp, Homo sapiens
taagttttacattca

SEQ ID NO: 3949 - DNA, 15 bp, Homo sapiens
gtaagttttacattc

SEQ ID NO: 3950 - DNA, 15 bp, Homo sapiens
agtaagttttacatt

SEQ ID NO: 3951 - DNA, 15 bp, Homo sapiens
cagtaagttttacat

SEQ ID NO: 3952 - DNA, 15 bp, Homo sapiens
tcagtaagttttaca

SEQ ID NO: 3953 - DNA, 15 bp, Homo sapiens
ttcagtaagttttac

SEQ ID NO: 3954 - DNA, 15 bp, Homo sapiens
cttcagtaagtttta

SEQ ID NO: 3955 - DNA, 15 bp, Homo sapiens
tcttcagtaagtttt

SEQ ID NO: 3956 - DNA, 15 bp, Homo sapiens
ttcttcagtaagttt

SEQ ID NO: 3957 - DNA, 15 bp, Homo sapiens
cttcttcagtaagtt

SEQ ID NO: 3958 - DNA, 15 bp, Homo sapiens
acttcttcagtaagt

SEQ ID NO: 3959 - DNA, 15 bp, Homo sapiens
tacttcttcagtaag

SEQ ID NO: 3960 - DNA, 15 bp, Homo sapiens
ctacttcttcagtaa

SEQ ID NO: 3961 - DNA, 15 bp, Homo sapiens
gctacttcttcagta

SEQ ID NO: 3962 - DNA, 15 bp, Homo sapiens
agctacttcttcagt

SEQ ID NO: 3963 - DNA, 15 bp, Homo sapiens
aagctacttcttcag

SEQ ID NO: 3964 - DNA, 15 bp, Homo sapiens
gaagctacttcttca

SEQ ID NO: 3965 - DNA, 15 bp, Homo sapiens
ggaagctacttcttc

SEQ ID NO: 3966 - DNA, 15 bp, Homo sapiens
gggaagctacttctt

SEQ ID NO: 3967 - DNA, 15 bp, Homo sapiens
tgggaagctacttct

SEQ ID NO: 3968 - DNA, 15 bp, Homo sapiens
ttgggaagctacttc

SEQ ID NO: 3969 - DNA, 15 bp, Homo sapiens
tttgggaagctactt

SEQ ID NO: 3970 - DNA, 15 bp, Homo sapiens
ttttgggaagctact

SEQ ID NO: 3971 - DNA, 15 bp, Homo sapiens
attttgggaagctac

SEQ ID NO: 3972 - DNA, 15 bp, Homo sapiens
aattttgggaagcta

SEQ ID NO: 3973 - DNA, 15 bp, Homo sapiens
aaattttgggaagct

SEQ ID NO: 3974 - DNA, 15 bp, Homo sapiens
taaattttgggaagc

SEQ ID NO: 3975 - DNA, 15 bp, Homo sapiens
ctaaattttgggaag

SEQ ID NO: 3976 - DNA, 15 bp, Homo sapiens
actaaattttgggaa

SEQ ID NO: 3977 - DNA, 15 bp, Homo sapiens
aactaaattttggga

SEQ ID NO: 3978 - DNA, 15 bp, Homo sapiens
aaactaaattttggg

SEQ ID NO: 3979 - DNA, 15 bp, Homo sapiens
aaaactaaattttgg

SEQ ID NO: 3980 - DNA, 15 bp, Homo sapiens
gaaaactaaattttg

SEQ ID NO: 3981 - DNA, 15 bp, Homo sapiens
agaaaactaaatttt

SEQ ID NO: 3982 - DNA, 15 bp, Homo sapiens
cagaaaactaaattt

SEQ ID NO: 3983 - DNA, 15 bp, Homo sapiens
acagaaaactaaatt

SEQ ID NO: 3984 - DNA, 15 bp, Homo sapiens
aacagaaaactaaat

SEQ ID NO: 3985 - DNA, 15 bp, Homo sapiens
taacagaaaactaaa

SEQ ID NO: 3986 - DNA, 15 bp, Homo sapiens
ttaacagaaaactaa

SEQ ID NO: 3987 - DNA, 15 bp, Homo sapiens
cttaacagaaaacta

SEQ ID NO: 3988 - DNA, 15 bp, Homo sapiens
gcttaacagaaaact

SEQ ID NO: 3989 - DNA, 15 bp, Homo sapiens
ggcttaacagaaaac

SEQ ID NO: 3990 - DNA, 15 bp, Homo sapiens
tggcttaacagaaaa

SEQ ID NO: 3991 - DNA, 15 bp, Homo sapiens
ttggcttaacagaaa

SEQ ID NO: 3992 - DNA, 15 bp, Homo sapiens
tttggcttaacagaa

SEQ ID NO: 3993 - DNA, 15 bp, Homo sapiens
ttttggcttaacaga

SEQ ID NO: 3994 - DNA, 15 bp, Homo sapiens
tttttggcttaacag

SEQ ID NO: 3995 - DNA, 15 bp, Homo sapiens
atttttggcttaaca

SEQ ID NO: 3996 - DNA, 15 bp, Homo sapiens
tatttttggcttaac

SEQ ID NO: 3997 - DNA, 15 bp, Homo sapiens
atatttttggcttaa

SEQ ID NO: 3998 - DNA, 15 bp, Homo sapiens
aatatttttggctta

SEQ ID NO: 3999 - DNA, 15 bp, Homo sapiens
taatatttttggctt

SEQ ID NO: 4000 - DNA, 15 bp, Homo sapiens
ataatatttttggct

SEQ ID NO: 4001 - DNA, 15 bp, Homo sapiens
aataatatttttggc

SEQ ID NO: 4002 - DNA, 15 bp, Homo sapiens
aaataatatttttgg

SEQ ID NO: 4003 - DNA, 15 bp, Homo sapiens
aaaataatatttttg

SEQ ID NO: 4004 - DNA, 15 bp, Homo sapiens
taaaataatattttt

SEQ ID NO: 4005 - DNA, 15 bp, Homo sapiens
ttaaaataatatttt

SEQ ID NO: 4006 - DNA, 15 bp, Homo sapiens
tttaaaataatattt

SEQ ID NO: 4007 - DNA, 15 bp, Homo sapiens
ttttaaaataatatt

SEQ ID NO: 4008 - DNA, 15 bp, Homo sapiens
cttttaaaataatat

SEQ ID NO: 4009 - DNA, 15 bp, Homo sapiens
tcttttaaaataata

SEQ ID NO: 4010 - DNA, 15 bp, Homo sapiens
ctcttttaaaataat

SEQ ID NO: 4011 - DNA, 15 bp, Homo sapiens
actcttttaaaataa

SEQ ID NO: 4012 - DNA, 15 bp, Homo sapiens
tactcttttaaaata

SEQ ID NO: 4013 - DNA, 15 bp, Homo sapiens
atactcttttaaaat

SEQ ID NO: 4014 - DNA, 15 bp, Homo sapiens
aatactcttttaaaa

SEQ ID NO: 4015 - DNA, 15 bp, Homo sapiens
aaatactcttttaaa

SEQ ID NO: 4016 - DNA, 15 bp, Homo sapiens
caaatactcttttaa

SEQ ID NO: 4017 - DNA, 15 bp, Homo sapiens
gcaaatactctttta

SEQ ID NO: 4018 - DNA, 15 bp, Homo sapiens
tgcaaatactctttt

SEQ ID NO: 4019 - DNA, 15 bp, Homo sapiens
ttgcaaatactcttt

SEQ ID NO: 4020 - DNA, 15 bp, Homo sapiens
tttgcaaatactctt

SEQ ID NO: 4021 - DNA, 15 bp, Homo sapiens
atttgcaaatactct

SEQ ID NO: 4022 - DNA, 15 bp, Homo sapiens
aatttgcaaatactc

SEQ ID NO: 4023 - DNA, 15 bp, Homo sapiens
aaatttgcaaatact

SEQ ID NO: 4024 - DNA, 15 bp, Homo sapiens
aaaatttgcaaatac

SEQ ID NO: 4025 - DNA, 15 bp, Homo sapiens
caaaatttgcaaata

SEQ ID NO: 4026 - DNA, 15 bp, Homo sapiens
tcaaaatttgcaaat

SEQ ID NO: 4027 - DNA, 15 bp, Homo sapiens
ttcaaaatttgcaaa

SEQ ID NO: 4028 - DNA, 15 bp, Homo sapiens
cttcaaaatttgcaa

SEQ ID NO: 4029 - DNA, 15 bp, Homo sapiens
acttcaaaatttgca

SEQ ID NO: 4030 - DNA, 15 bp, Homo sapiens
aacttcaaaatttgc

SEQ ID NO: 4031 - DNA, 15 bp, Homo sapiens
caacttcaaaatttg

SEQ ID NO: 4032 - DNA, 15 bp, Homo sapiens
tcaacttcaaaattt

SEQ ID NO: 4033 - DNA, 15 bp, Homo sapiens
gtcaacttcaaaatt

SEQ ID NO: 4034 - DNA, 15 bp, Homo sapiens
tgtcaacttcaaaat

SEQ ID NO: 4035 - DNA, 15 bp, Homo sapiens
atgtcaacttcaaaa

SEQ ID NO: 4036 - DNA, 15 bp, Homo sapiens
aatgtcaacttcaaa

SEQ ID NO: 4037 - DNA, 15 bp, Homo sapiens
taatgtcaacttcaa

SEQ ID NO: 4038 - DNA, 15 bp, Homo sapiens
ttaatgtcaacttca

SEQ ID NO: 4039 - DNA, 15 bp, Homo sapiens
attaatgtcaacttc

SEQ ID NO: 4040 - DNA, 15 bp, Homo sapiens
aattaatgtcaactt

SEQ ID NO: 4041 - DNA, 15 bp, Homo sapiens
caattaatgtcaact

SEQ ID NO: 4042 - DNA, 15 bp, Homo sapiens
tcaattaatgtcaac

SEQ ID NO: 4043 - DNA, 15 bp, Homo sapiens
ctcaattaatgtcaa

SEQ ID NO: 4044 - DNA, 15 bp, Homo sapiens
tctcaattaatgtca

SEQ ID NO: 4045 - DNA, 15 bp, Homo sapiens
ttctcaattaatgtc

SEQ ID NO: 4046 - DNA, 15 bp, Homo sapiens
attctcaattaatgt

SEQ ID NO: 4047 - DNA, 15 bp, Homo sapiens
cattctcaattaatg

SEQ ID NO: 4048 - DNA, 15 bp, Homo sapiens
acattctcaattaat

SEQ ID NO: 4049 - DNA, 15 bp, Homo sapiens
aacattctcaattaa

SEQ ID NO: 4050 - DNA, 15 bp, Homo sapiens
taacattctcaatta

SEQ ID NO: 4051 - DNA, 15 bp, Homo sapiens
gtaacattctcaatt

SEQ ID NO: 4052 - DNA, 15 bp, Homo sapiens
agtaacattctcaat

SEQ ID NO: 4053 - DNA, 15 bp, Homo sapiens
tagtaacattctcaa

SEQ ID NO: 4054 - DNA, 15 bp, Homo sapiens
ttagtaacattctca

SEQ ID NO: 4055 - DNA, 15 bp, Homo sapiens
cttagtaacattctc

SEQ ID NO: 4056 - DNA, 15 bp, Homo sapiens
ccttagtaacattct

SEQ ID NO: 4057 - DNA, 15 bp, Homo sapiens
gccttagtaacattc

SEQ ID NO: 4058 - DNA, 15 bp, Homo sapiens
agccttagtaacatt

SEQ ID NO: 4059 - DNA, 15 bp, Homo sapiens
tagccttagtaacat

SEQ ID NO: 4060 - DNA, 15 bp, Homo sapiens
ttagccttagtaaca

SEQ ID NO: 4061 - DNA, 15 bp, Homo sapiens
tttagccttagtaac

SEQ ID NO: 4062 - DNA, 15 bp, Homo sapiens
gtttagccttagtaa

SEQ ID NO: 4063 - DNA, 15 bp, Homo sapiens
agtttagccttagta

SEQ ID NO: 4064 - DNA, 15 bp, Homo sapiens
cagtttagccttagt

SEQ ID NO: 4065 - DNA, 15 bp, Homo sapiens
ccagtttagccttag

SEQ ID NO: 4066 - DNA, 15 bp, Homo sapiens
tccagtttagcctta

SEQ ID NO: 4067 - DNA, 15 bp, Homo sapiens
gtccagtttagcctt

SEQ ID NO: 4068 - DNA, 15 bp, Homo sapiens
ggtccagtttagcct

SEQ ID NO: 4069 - DNA, 15 bp, Homo sapiens
gggtccagtttagcc

SEQ ID NO: 4070 - DNA, 15 bp, Homo sapiens
cgggtccagtttagc

SEQ ID NO: 4071 - DNA, 15 bp, Homo sapiens
gcgggtccagtttag

SEQ ID NO: 4072 - DNA, 15 bp, Homo sapiens
agcgggtccagttta

SEQ ID NO: 4073 - DNA, 15 bp, Homo sapiens
aagcgggtccagttt

SEQ ID NO: 4074 - DNA, 15 bp, Homo sapiens
caagcgggtccagtt

SEQ ID NO: 4075 - DNA, 15 bp, Homo sapiens
gcaagcgggtccagt

SEQ ID NO: 4076 - DNA, 15 bp, Homo sapiens
ggcaagcgggtccag

SEQ ID NO: 4077 - DNA, 15 bp, Homo sapiens
gggcaagcgggtcca

SEQ ID NO: 4078 - DNA, 15 bp, Homo sapiens
tgggcaagcgggtcc

SEQ ID NO: 4079 - DNA, 15 bp, Homo sapiens
ctgggcaagcgggtc

SEQ ID NO: 4080 - DNA, 15 bp, Homo sapiens
tctgggcaagcgggt

SEQ ID NO: 4081 - DNA, 15 bp, Homo sapiens
ttctgggcaagcggg

SEQ ID NO: 4082 - DNA, 15 bp, Homo sapiens
cttctgggcaagcgg

SEQ ID NO: 4083 - DNA, 15 bp, Homo sapiens
tcttctgggcaagcg

SEQ ID NO: 4084 - DNA, 15 bp, Homo sapiens
atcttctgggcaagc

SEQ ID NO: 4085 - DNA, 15 bp, Homo sapiens
tatcttctgggcaag

SEQ ID NO: 4086 - DNA, 15 bp, Homo sapiens
ttatcttctgggcaa

SEQ ID NO: 4087 - DNA, 15 bp, Homo sapiens
attatcttctgggca

SEQ ID NO: 4088 - DNA, 15 bp, Homo sapiens
aattatcttctgggc

SEQ ID NO: 4089 - DNA, 15 bp, Homo sapiens
taattatcttctggg

SEQ ID NO: 4090 - DNA, 15 bp, Homo sapiens
ataattatcttctgg

SEQ ID NO: 4091 - DNA, 15 bp, Homo sapiens
cataattatcttctg

SEQ ID NO: 4092 - DNA, 15 bp, Homo sapiens
ccataattatcttct

SEQ ID NO: 4093 - DNA, 15 bp, Homo sapiens
tccataattatcttc

SEQ ID NO: 4094 - DNA, 15 bp, Homo sapiens
ttccataattatctt

SEQ ID NO: 4095 - DNA, 15 bp, Homo sapiens
tttccataattatct

SEQ ID NO: 4096 - DNA, 15 bp, Homo sapiens
ttttccataattatc

SEQ ID NO: 4097 - DNA, 15 bp, Homo sapiens
tttttccataattat

SEQ ID NO: 4098 - DNA, 15 bp, Homo sapiens
atttttccataatta

SEQ ID NO: 4099 - DNA, 15 bp, Homo sapiens
aatttttccataatt

SEQ ID NO: 4100 - DNA, 15 bp, Homo sapiens
gaatttttccataat

SEQ ID NO: 4101 - DNA, 15 bp, Homo sapiens
agaatttttccataa

SEQ ID NO: 4102 - DNA, 15 bp, Homo sapiens
aagaatttttccata

SEQ ID NO: 4103 - DNA, 15 bp, Homo sapiens
aaagaatttttccat

SEQ ID NO: 4104 - DNA, 15 bp, Homo sapiens
aaaagaatttttcca

SEQ ID NO: 4105 - DNA, 15 bp, Homo sapiens
caaaagaatttttcc

SEQ ID NO: 4106 - DNA, 15 bp, Homo sapiens
acaaaagaatttttc

SEQ ID NO: 4107 - DNA, 15 bp, Homo sapiens
cacaaaagaattttt

SEQ ID NO: 4108 - DNA, 15 bp, Homo sapiens
tcacaaaagaatttt

SEQ ID NO: 4109 - DNA, 15 bp, Homo sapiens
gtcacaaaagaattt

SEQ ID NO: 4110 - DNA, 15 bp, Homo sapiens
agtcacaaaagaatt

SEQ ID NO: 4111 - DNA, 15 bp, Homo sapiens
aagtcacaaaagaat

SEQ ID NO: 4112 - DNA, 15 bp, Homo sapiens
gaagtcacaaaagaa

SEQ ID NO: 4113 - DNA, 15 bp, Homo sapiens
ggaagtcacaaaaga

SEQ ID NO: 4114 - DNA, 15 bp, Homo sapiens
tggaagtcacaaaag

SEQ ID NO: 4115 - DNA, 15 bp, Homo sapiens
ttggaagtcacaaaa

SEQ ID NO: 4116 - DNA, 15 bp, Homo sapiens
tttggaagtcacaaa

SEQ ID NO: 4117 - DNA, 15 bp, Homo sapiens
ctttggaagtcacaa

SEQ ID NO: 4118 - DNA, 15 bp, Homo sapiens
gctttggaagtcaca

SEQ ID NO: 4119 - DNA, 15 bp, Homo sapiens
tgctttggaagtcac

SEQ ID NO: 4120 - DNA, 15 bp, Homo sapiens
ctgctttggaagtca

SEQ ID NO: 4121 - DNA, 15 bp, Homo sapiens
actgctttggaagtc

SEQ ID NO: 4122 - DNA, 15 bp, Homo sapiens
gactgctttggaagt

SEQ ID NO: 4123 - DNA, 15 bp, Homo sapiens
agactgctttggaag

SEQ ID NO: 4124 - DNA, 15 bp, Homo sapiens
tagactgctttggaa

SEQ ID NO: 4125 - DNA, 15 bp, Homo sapiens
gtagactgctttgga

SEQ ID NO: 4126 - DNA, 15 bp, Homo sapiens
agtagactgctttgg

SEQ ID NO: 4127 - DNA, 15 bp, Homo sapiens
tagtagactgctttg

SEQ ID NO: 4128 - DNA, 15 bp, Homo sapiens
atagtagactgcttt

SEQ ID NO: 4129 - DNA, 15 bp, Homo sapiens
aatagtagactgctt

SEQ ID NO: 4130 - DNA, 15 bp, Homo sapiens
taatagtagactgct

SEQ ID NO: 4131 - DNA, 15 bp, Homo sapiens
ctaatagtagactgc

SEQ ID NO: 4132 - DNA, 15 bp, Homo sapiens
gctaatagtagactg

SEQ ID NO: 4133 - DNA, 15 bp, Homo sapiens
tgctaatagtagact

SEQ ID NO: 4134 - DNA, 15 bp, Homo sapiens
atgctaatagtagac

SEQ ID NO: 4135 - DNA, 15 bp, Homo sapiens
catgctaatagtaga

SEQ ID NO: 4136 - DNA, 15 bp, Homo sapiens
tcatgctaatagtag

SEQ ID NO: 4137 - DNA, 15 bp, Homo sapiens
ttcatgctaatagta

SEQ ID NO: 4138 - DNA, 15 bp, Homo sapiens
attcatgctaatagt

SEQ ID NO: 4139 - DNA, 15 bp, Homo sapiens
aattcatgctaatag

SEQ ID NO: 4140 - DNA, 15 bp, Homo sapiens
taattcatgctaata

SEQ ID NO: 4141 - DNA, 15 bp, Homo sapiens
gtaattcatgctaat

SEQ ID NO: 4142 - DNA, 15 bp, Homo sapiens
agtaattcatgctaa

SEQ ID NO: 4143 - DNA, 15 bp, Homo sapiens
cagtaattcatgcta

SEQ ID NO: 4144 - DNA, 15 bp, Homo sapiens
tcagtaattcatgct

SEQ ID NO: 4145 - DNA, 15 bp, Homo sapiens
gtcagtaattcatgc

SEQ ID NO: 4146 - DNA, 15 bp, Homo sapiens
tgtcagtaattcatg

SEQ ID NO: 4147 - DNA, 15 bp, Homo sapiens
ctgtcagtaattcat

SEQ ID NO: 4148 - DNA, 15 bp, Homo sapiens
actgtcagtaattca

SEQ ID NO: 4149 - DNA, 15 bp, Homo sapiens
gactgtcagtaattc

SEQ ID NO: 4150 - DNA, 15 bp, Homo sapiens
tgactgtcagtaatt

SEQ ID NO: 4151 - DNA, 15 bp, Homo sapiens
atgactgtcagtaat

SEQ ID NO: 4152 - DNA, 15 bp, Homo sapiens
gatgactgtcagtaa

SEQ ID NO: 4153 - DNA, 15 bp, Homo sapiens
ggatgactgtcagta

SEQ ID NO: 4154 - DNA, 15 bp, Homo sapiens
tggatgactgtcagt

SEQ ID NO: 4155 - DNA, 15 bp, Homo sapiens
ttggatgactgtcag

SEQ ID NO: 4156 - DNA, 15 bp, Homo sapiens
tttggatgactgtca

SEQ ID NO: 4157 - DNA, 15 bp, Homo sapiens
atttggatgactgtc

SEQ ID NO: 4158 - DNA, 15 bp, Homo sapiens
tatttggatgactgt

SEQ ID NO: 4159 - DNA, 15 bp, Homo sapiens
atatttggatgactg

SEQ ID NO: 4160 - DNA, 15 bp, Homo sapiens
tatatttggatgact

SEQ ID NO: 4161 - DNA, 15 bp, Homo sapiens
atatatttggatgac

SEQ ID NO: 4162 - DNA, 15 bp, Homo sapiens
tatatatttggatga

SEQ ID NO: 4163 - DNA, 15 bp, Homo sapiens
ctatatatttggatg

SEQ ID NO: 4164 - DNA, 15 bp, Homo sapiens
cctatatatttggat

SEQ ID NO: 4165 - DNA, 15 bp, Homo sapiens
tcctatatatttgga

SEQ ID NO: 4166 - DNA, 15 bp, Homo sapiens
ttcctatatatttgg

SEQ ID NO: 4167 - DNA, 15 bp, Homo sapiens
gttcctatatatttg

SEQ ID NO: 4168 - DNA, 15 bp, Homo sapiens
tgttcctatatattt

SEQ ID NO: 4169 - DNA, 15 bp, Homo sapiens
ttgttcctatatatt

SEQ ID NO: 4170 - DNA, 15 bp, Homo sapiens
tttgttcctatatat

SEQ ID NO: 4171 - DNA, 15 bp, Homo sapiens
ttttgttcctatata

SEQ ID NO: 4172 - DNA, 15 bp, Homo sapiens
tttttgttcctatat

SEQ ID NO: 4173 - DNA, 15 bp, Homo sapiens
ttttttgttcctata

SEQ ID NO: 4174 - DNA, 15 bp, Homo sapiens
attttttgttcctat

SEQ ID NO: 4175 - DNA, 15 bp, Homo sapiens
aattttttgttccta

SEQ ID NO: 4176 - DNA, 15 bp, Homo sapiens
taattttttgttcct

SEQ ID NO: 4177 - DNA, 15 bp, Homo sapiens
ttaattttttgttcc

SEQ ID NO: 4178 - DNA, 15 bp, Homo sapiens
tttaattttttgttc

SEQ ID NO: 4179 - DNA, 15 bp, Homo sapiens
atttaattttttgtt

SEQ ID NO: 4180 - DNA, 15 bp, Homo sapiens
catttaattttttgt

SEQ ID NO: 4181 - DNA, 15 bp, Homo sapiens
acatttaattttttg

SEQ ID NO: 4182 - DNA, 15 bp, Homo sapiens
aacatttaatttttt

SEQ ID NO: 4183 - DNA, 15 bp, Homo sapiens
aaacatttaattttt

SEQ ID NO: 4184 - DNA, 15 bp, Homo sapiens
taaacatttaatttt

SEQ ID NO: 4185 - DNA, 15 bp, Homo sapiens
ataaacatttaattt

SEQ ID NO: 4186 - DNA, 15 bp, Homo sapiens
cataaacatttaatt

SEQ ID NO: 4187 - DNA, 15 bp, Homo sapiens
acataaacatttaat

SEQ ID NO: 4188 - DNA, 15 bp, Homo sapiens
tacataaacatttaa

SEQ ID NO: 4189 - DNA, 15 bp, Homo sapiens
ttacataaacattta

SEQ ID NO: 4190 - DNA, 15 bp, Homo sapiens
gttacataaacattt

SEQ ID NO: 4191 - DNA, 15 bp, Homo sapiens
agttacataaacatt

SEQ ID NO: 4192 - DNA, 15 bp, Homo sapiens
aagttacataaacat

SEQ ID NO: 4193 - DNA, 15 bp, Homo sapiens
aaagttacataaaca

SEQ ID NO: 4194 - DNA, 15 bp, Homo sapiens
caaagttacataaac

SEQ ID NO: 4195 - DNA, 15 bp, Homo sapiens
tcaaagttacataaa

SEQ ID NO: 4196 - DNA, 15 bp, Homo sapiens
ttcaaagttacataa

SEQ ID NO: 4197 - DNA, 15 bp, Homo sapiens
tttcaaagttacata

SEQ ID NO: 4198 - DNA, 15 bp, Homo sapiens
ttttcaaagttacat

SEQ ID NO: 4199 - DNA, 15 bp, Homo sapiens
tttttcaaagttaca

SEQ ID NO: 4200 - DNA, 15 bp, Homo sapiens
ttttttcaaagttac

SEQ ID NO: 4201 - DNA, 15 bp, Homo sapiens
tttttttcaaagtta

SEQ ID NO: 4202 - DNA, 15 bp, Homo sapiens
ttttttttcaaagtt

SEQ ID NO: 4203 - DNA, 15 bp, Homo sapiens
cttttttttcaaagt

SEQ ID NO: 4204 - DNA, 15 bp, Homo sapiens
gcttttttttcaaag

SEQ ID NO: 4205 - DNA, 15 bp, Homo sapiens
ggcttttttttcaaa

SEQ ID NO: 4206 - DNA, 15 bp, Homo sapiens
aggcttttttttcaa

SEQ ID NO: 4207 - DNA, 15 bp, Homo sapiens
aaggcttttttttca

SEQ ID NO: 4208 - DNA, 15 bp, Homo sapiens
aaaggcttttttttc

SEQ ID NO: 4209 - DNA, 15 bp, Homo sapiens
caaaggctttttttt

SEQ ID NO: 4210 - DNA, 15 bp, Homo sapiens
tcaaaggcttttttt

SEQ ID NO: 4211 - DNA, 15 bp, Homo sapiens
ttcaaaggctttttt

SEQ ID NO: 4212 - DNA, 15 bp, Homo sapiens
cttcaaaggcttttt

SEQ ID NO: 4213 - DNA, 15 bp, Homo sapiens
tcttcaaaggctttt

SEQ ID NO: 4214 - DNA, 15 bp, Homo sapiens
ttcttcaaaggcttt

SEQ ID NO: 4215 - DNA, 15 bp, Homo sapiens
tttcttcaaaggctt

SEQ ID NO: 4216 - DNA, 15 bp, Homo sapiens
ttttcttcaaaggct

SEQ ID NO: 4217 - DNA, 15 bp, Homo sapiens
attttcttcaaaggc

SEQ ID NO: 4218 - DNA, 15 bp, Homo sapiens
tattttcttcaaagg

SEQ ID NO: 4219 - DNA, 15 bp, Homo sapiens
ttattttcttcaaag

SEQ ID NO: 4220 - DNA, 15 bp, Homo sapiens
attattttcttcaaa

SEQ ID NO: 4221 - DNA, 15 bp, Homo sapiens
aattattttcttcaa

SEQ ID NO: 4222 - DNA, 15 bp, Homo sapiens
caattattttcttca

SEQ ID NO: 4223 - DNA, 15 bp, Homo sapiens
tcaattattttcttc

SEQ ID NO: 4224 - DNA, 15 bp, Homo sapiens
ttcaattattttctt

SEQ ID NO: 4225 - DNA, 15 bp, Homo sapiens
attcaattattttct

SEQ ID NO: 4226 - DNA, 15 bp, Homo sapiens
cattcaattattttc

SEQ ID NO: 4227 - DNA, 15 bp, Homo sapiens
gcattcaattatttt

SEQ ID NO: 4228 - DNA, 15 bp, Homo sapiens
agcattcaattattt

SEQ ID NO: 4229 - DNA, 15 bp, Homo sapiens
cagcattcaattatt

SEQ ID NO: 4230 - DNA, 15 bp, Homo sapiens
acagcattcaattat

SEQ ID NO: 4231 - DNA, 15 bp, Homo sapiens
gacagcattcaatta

SEQ ID NO: 4232 - DNA, 15 bp, Homo sapiens
agacagcattcaatt

SEQ ID NO: 4233 - DNA, 15 bp, Homo sapiens
cagacagcattcaat

SEQ ID NO: 4234 - DNA, 15 bp, Homo sapiens
ccagacagcattcaa

SEQ ID NO: 4235 - DNA, 15 bp, Homo sapiens
cccagacagcattca

SEQ ID NO: 4236 - DNA, 15 bp, Homo sapiens
tcccagacagcattc

SEQ ID NO: 4237 - DNA, 15 bp, Homo sapiens
ctcccagacagcatt

SEQ ID NO: 4238 - DNA, 15 bp, Homo sapiens
tctcccagacagcat

SEQ ID NO: 4239 - DNA, 15 bp, Homo sapiens
gtctcccagacagca

SEQ ID NO: 4240 - DNA, 15 bp, Homo sapiens
tgtctcccagacagc

SEQ ID NO: 4241 - DNA, 15 bp, Homo sapiens
ctgtctcccagacag

SEQ ID NO: 4242 - DNA, 15 bp, Homo sapiens
tctgtctcccagaca

SEQ ID NO: 4243 - DNA, 15 bp, Homo sapiens
atctgtctcccagac

SEQ ID NO: 4244 - DNA, 15 bp, Homo sapiens
aatctgtctcccaga

SEQ ID NO: 4245 - DNA, 15 bp, Homo sapiens
aaatctgtctcccag

SEQ ID NO: 4246 - DNA, 15 bp, Homo sapiens
gaaatctgtctccca

SEQ ID NO: 4247 - DNA, 15 bp, Homo sapiens
agaaatctgtctccc

SEQ ID NO: 4248 - DNA, 15 bp, Homo sapiens
aagaaatctgtctcc

SEQ ID NO: 4249 - DNA, 15 bp, Homo sapiens
aaagaaatctgtctc

SEQ ID NO: 4250 - DNA, 15 bp, Homo sapiens
gaaagaaatctgtct

SEQ ID NO: 4251 - DNA, 15 bp, Homo sapiens
tgaaagaaatctgtc

SEQ ID NO: 4252 - DNA, 15 bp, Homo sapiens
ctgaaagaaatctgt

SEQ ID NO: 4253 - DNA, 15 bp, Homo sapiens
gctgaaagaaatctg

SEQ ID NO: 4254 - DNA, 15 bp, Homo sapiens
tgctgaaagaaatct

SEQ ID NO: 4255 - DNA, 15 bp, Homo sapiens
gtgctgaaagaaatc

SEQ ID NO: 4256 - DNA, 15 bp, Homo sapiens
agtgctgaaagaaat

SEQ ID NO: 4257 - DNA, 15 bp, Homo sapiens
aagtgctgaaagaaa

SEQ ID NO: 4258 - DNA, 15 bp, Homo sapiens
taagtgctgaaagaa

SEQ ID NO: 4259 - DNA, 15 bp, Homo sapiens
ttaagtgctgaaaga

SEQ ID NO: 4260 - DNA, 15 bp, Homo sapiens
tttaagtgctgaaag

SEQ ID NO: 4261 - DNA, 15 bp, Homo sapiens
ctttaagtgctgaaa

SEQ ID NO: 4262 - DNA, 15 bp, Homo sapiens
actttaagtgctgaa

SEQ ID NO: 4263 - DNA, 15 bp, Homo sapiens
tactttaagtgctga

SEQ ID NO: 4264 - DNA, 15 bp, Homo sapiens
gtactttaagtgctg

SEQ ID NO: 4265 - DNA, 15 bp, Homo sapiens
tgtactttaagtgct

SEQ ID NO: 4266 - DNA, 15 bp, Homo sapiens
atgtactttaagtgc

SEQ ID NO: 4267 - DNA, 15 bp, Homo sapiens
tatgtactttaagtg

SEQ ID NO: 4268 - DNA, 15 bp, Homo sapiens
ttatgtactttaagt

SEQ ID NO: 4269 - DNA, 15 bp, Homo sapiens
gttatgtactttaag

SEQ ID NO: 4270 - DNA, 15 bp, Homo sapiens
tgttatgtactttaa

SEQ ID NO: 4271 - DNA, 15 bp, Homo sapiens
gtgttatgtacttta

SEQ ID NO: 4272 - DNA, 15 bp, Homo sapiens
tgtgttatgtacttt

SEQ ID NO: 4273 - DNA, 15 bp, Homo sapiens
gtgtgttatgtactt

SEQ ID NO: 4274 - DNA, 15 bp, Homo sapiens
agtgtgttatgtact

SEQ ID NO: 4275 - DNA, 15 bp, Homo sapiens
tagtgtgttatgtac

SEQ ID NO: 4276 - DNA, 15 bp, Homo sapiens
gtagtgtgttatgta

SEQ ID NO: 4277 - DNA, 15 bp, Homo sapiens
agtagtgtgttatgt

SEQ ID NO: 4278 - DNA, 15 bp, Homo sapiens
aagtagtgtgttatg

SEQ ID NO: 4279 - DNA, 15 bp, Homo sapiens
aaagtagtgtgttat

SEQ ID NO: 4280 - DNA, 15 bp, Homo sapiens
aaaagtagtgtgtta

SEQ ID NO: 4281 - DNA, 15 bp, Homo sapiens
taaaagtagtgtgtt

SEQ ID NO: 4282 - DNA, 15 bp, Homo sapiens
gtaaaagtagtgtgt

SEQ ID NO: 4283 - DNA, 15 bp, Homo sapiens
agtaaaagtagtgtg

SEQ ID NO: 4284 - DNA, 15 bp, Homo sapiens
aagtaaaagtagtgt

SEQ ID NO: 4285 - DNA, 15 bp, Homo sapiens
aaagtaaaagtagtg

SEQ ID NO: 4286 - DNA, 15 bp, Homo sapiens
aaaagtaaaagtagt

SEQ ID NO: 4287 - DNA, 15 bp, Homo sapiens
gaaaagtaaaagtag

SEQ ID NO: 4288 - DNA, 15 bp, Homo sapiens
ggaaaagtaaaagta

SEQ ID NO: 4289 - DNA, 15 bp, Homo sapiens
gggaaaagtaaaagt

SEQ ID NO: 4290 - DNA, 15 bp, Homo sapiens
tgggaaaagtaaaag

SEQ ID NO: 4291 - DNA, 15 bp, Homo sapiens
gtgggaaaagtaaaa

SEQ ID NO: 4292 - DNA, 15 bp, Homo sapiens
agtgggaaaagtaaa

SEQ ID NO: 4293 - DNA, 15 bp, Homo sapiens
aagtgggaaaagtaa

SEQ ID NO: 4294 - DNA, 15 bp, Homo sapiens
caagtgggaaaagta

SEQ ID NO: 4295 - DNA, 15 bp, Homo sapiens
tcaagtgggaaaagt

SEQ ID NO: 4296 - DNA, 15 bp, Homo sapiens
atcaagtgggaaaag

SEQ ID NO: 4297 - DNA, 15 bp, Homo sapiens
aatcaagtgggaaaa

SEQ ID NO: 4298 - DNA, 15 bp, Homo sapiens
aaatcaagtgggaaa

SEQ ID NO: 4299 - DNA, 15 bp, Homo sapiens
aaaatcaagtgggaa

SEQ ID NO: 4300 - DNA, 15 bp, Homo sapiens
taaaatcaagtggga

SEQ ID NO: 4301 - DNA, 15 bp, Homo sapiens
ttaaaatcaagtggg

SEQ ID NO: 4302 - DNA, 15 bp, Homo sapiens
tttaaaatcaagtgg

SEQ ID NO: 4303 - DNA, 15 bp, Homo sapiens
atttaaaatcaagtg

SEQ ID NO: 4304 - DNA, 15 bp, Homo sapiens
aatttaaaatcaagt

SEQ ID NO: 4305 - DNA, 15 bp, Homo sapiens
taatttaaaatcaag

SEQ ID NO: 4306 - DNA, 15 bp, Homo sapiens
ataatttaaaatcaa

SEQ ID NO: 4307 - DNA, 15 bp, Homo sapiens
gataatttaaaatca

SEQ ID NO: 4308 - DNA, 15 bp, Homo sapiens
tgataatttaaaatc

SEQ ID NO: 4309 - DNA, 15 bp, Homo sapiens
ctgataatttaaaat

SEQ ID NO: 4310 - DNA, 15 bp, Homo sapiens
cctgataatttaaaa

SEQ ID NO: 4311 - DNA, 15 bp, Homo sapiens
ccctgataatttaaa

SEQ ID NO: 4312 - DNA, 15 bp, Homo sapiens
accctgataatttaa

SEQ ID NO: 4313 - DNA, 15 bp, Homo sapiens
aaccctgataattta

SEQ ID NO: 4314 - DNA, 15 bp, Homo sapiens
taaccctgataattt

SEQ ID NO: 4315 - DNA, 15 bp, Homo sapiens
ataaccctgataatt

SEQ ID NO: 4316 - DNA, 15 bp, Homo sapiens
aataaccctgataat

SEQ ID NO: 4317 - DNA, 15 bp, Homo sapiens
taataaccctgataa

SEQ ID NO: 4318 - DNA, 15 bp, Homo sapiens
ttaataaccctgata

SEQ ID NO: 4319 - DNA, 15 bp, Homo sapiens
cttaataaccctgat

SEQ ID NO: 4320 - DNA, 15 bp, Homo sapiens
tcttaataaccctga

SEQ ID NO: 4321 - DNA, 15 bp, Homo sapiens
gtcttaataaccctg

SEQ ID NO: 4322 - DNA, 15 bp, Homo sapiens
ggtcttaataaccct

SEQ ID NO: 4323 - DNA, 15 bp, Homo sapiens
aggtcttaataaccc

SEQ ID NO: 4324 - DNA, 15 bp, Homo sapiens
aaggtcttaataacc

SEQ ID NO: 4325 - DNA, 15 bp, Homo sapiens
taaggtcttaataac

SEQ ID NO: 4326 - DNA, 15 bp, Homo sapiens
ttaaggtcttaataa

SEQ ID NO: 4327 - DNA, 15 bp, Homo sapiens
tttaaggtcttaata

SEQ ID NO: 4328 - DNA, 15 bp, Homo sapiens
ttttaaggtcttaat

SEQ ID NO: 4329 - DNA, 15 bp, Homo sapiens
attttaaggtcttaa

SEQ ID NO: 4330 - DNA, 15 bp, Homo sapiens
aattttaaggtctta

SEQ ID NO: 4331 - DNA, 15 bp, Homo sapiens
taattttaaggtctt

SEQ ID NO: 4332 - DNA, 15 bp, Homo sapiens
ataattttaaggtct

SEQ ID NO: 4333 - DNA, 15 bp, Homo sapiens
aataattttaaggtc

SEQ ID NO: 4334 - DNA, 15 bp, Homo sapiens
aaataattttaaggt

SEQ ID NO: 4335 - DNA, 15 bp, Homo sapiens
aaaataattttaagg

SEQ ID NO: 4336 - DNA, 15 bp, Homo sapiens
taaaataattttaag

SEQ ID NO: 4337 - DNA, 15 bp, Homo sapiens
gtaaaataattttaa

SEQ ID NO: 4338 - DNA, 15 bp, Homo sapiens
ggtaaaataatttta

SEQ ID NO: 4339 - DNA, 15 bp, Homo sapiens
tggtaaaataatttt

SEQ ID NO: 4340 - DNA, 15 bp, Homo sapiens
ctggtaaaataattt

SEQ ID NO: 4341 - DNA, 15 bp, Homo sapiens
cctggtaaaataatt

SEQ ID NO: 4342 - DNA, 15 bp, Homo sapiens
acctggtaaaataat

SEQ ID NO: 4343 - DNA, 15 bp, Homo sapiens
aacctggtaaaataa

SEQ ID NO: 4344 - DNA, 15 bp, Homo sapiens
aaacctggtaaaata

SEQ ID NO: 4345 - DNA, 15 bp, Homo sapiens
aaaacctggtaaaat

SEQ ID NO: 4346 - DNA, 15 bp, Homo sapiens
aaaaacctggtaaaa

SEQ ID NO: 4347 - DNA, 15 bp, Homo sapiens
taaaaacctggtaaa

SEQ ID NO: 4348 - DNA, 15 bp, Homo sapiens
gtaaaaacctggtaa

SEQ ID NO: 4349 - DNA, 15 bp, Homo sapiens
tgtaaaaacctggta

SEQ ID NO: 4350 - DNA, 15 bp, Homo sapiens
atgtaaaaacctggt

SEQ ID NO: 4351 - DNA, 15 bp, Homo sapiens
catgtaaaaacctgg

SEQ ID NO: 4352 - DNA, 15 bp, Homo sapiens
acatgtaaaaacctg

SEQ ID NO: 4353 - DNA, 15 bp, Homo sapiens
cacatgtaaaaacct

SEQ ID NO: 4354 - DNA, 15 bp, Homo sapiens
tcacatgtaaaaacc

SEQ ID NO: 4355 - DNA, 15 bp, Homo sapiens
ctcacatgtaaaaac

SEQ ID NO: 4356 - DNA, 15 bp, Homo sapiens
gctcacatgtaaaaa

SEQ ID NO: 4357 - DNA, 15 bp, Homo sapiens
agctcacatgtaaaa

SEQ ID NO: 4358 - DNA, 15 bp, Homo sapiens
cagctcacatgtaaa

SEQ ID NO: 4359 - DNA, 15 bp, Homo sapiens
acagctcacatgtaa

SEQ ID NO: 4360 - DNA, 15 bp, Homo sapiens
cacagctcacatgta

SEQ ID NO: 4361 - DNA, 15 bp, Homo sapiens
tcacagctcacatgt

SEQ ID NO: 4362 - DNA, 15 bp, Homo sapiens
gtcacagctcacatg

SEQ ID NO: 4363 - DNA, 15 bp, Homo sapiens
tgtcacagctcacat

SEQ ID NO: 4364 - DNA, 15 bp, Homo sapiens
atgtcacagctcaca

SEQ ID NO: 4365 - DNA, 15 bp, Homo sapiens
catgtcacagctcac

SEQ ID NO: 4366 - DNA, 15 bp, Homo sapiens
tcatgtcacagctca

SEQ ID NO: 4367 - DNA, 15 bp, Homo sapiens
gtcatgtcacagctc

SEQ ID NO: 4368 - DNA, 15 bp, Homo sapiens
agtcatgtcacagct

SEQ ID NO: 4369 - DNA, 15 bp, Homo sapiens
cagtcatgtcacagc

SEQ ID NO: 4370 - DNA, 15 bp, Homo sapiens
ccagtcatgtcacag

SEQ ID NO: 4371 - DNA, 15 bp, Homo sapiens
gccagtcatgtcaca

SEQ ID NO: 4372 - DNA, 15 bp, Homo sapiens
tgccagtcatgtcac

SEQ ID NO: 4373 - DNA, 15 bp, Homo sapiens
atgccagtcatgtca

SEQ ID NO: 4374 - DNA, 15 bp, Homo sapiens
aatgccagtcatgtc

SEQ ID NO: 4375 - DNA, 15 bp, Homo sapiens
aaatgccagtcatgt

SEQ ID NO: 4376 - DNA, 15 bp, Homo sapiens
aaaatgccagtcatg

SEQ ID NO: 4377 - DNA, 15 bp, Homo sapiens
gaaaatgccagtcat

SEQ ID NO: 4378 - DNA, 15 bp, Homo sapiens
agaaaatgccagtca

SEQ ID NO: 4379 - DNA, 15 bp, Homo sapiens
aagaaaatgccagtc

SEQ ID NO: 4380 - DNA, 15 bp, Homo sapiens
aaagaaaatgccagt

SEQ ID NO: 4381 - DNA, 15 bp, Homo sapiens
caaagaaaatgccag

SEQ ID NO: 4382 - DNA, 15 bp, Homo sapiens
tcaaagaaaatgcca

SEQ ID NO: 4383 - DNA, 15 bp, Homo sapiens
atcaaagaaaatgcc

SEQ ID NO: 4384 - DNA, 15 bp, Homo sapiens
aatcaaagaaaatgc

SEQ ID NO: 4385 - DNA, 15 bp, Homo sapiens
aaatcaaagaaaatg

SEQ ID NO: 4386 - DNA, 15 bp, Homo sapiens
gaaatcaaagaaaat

SEQ ID NO: 4387 - DNA, 15 bp, Homo sapiens
tgaaatcaaagaaaa

SEQ ID NO: 4388 - DNA, 15 bp, Homo sapiens
ctgaaatcaaagaaa

SEQ ID NO: 4389 - DNA, 15 bp, Homo sapiens
gctgaaatcaaagaa

SEQ ID NO: 4390 - DNA, 15 bp, Homo sapiens
cgctgaaatcaaaga

SEQ ID NO: 4391 - DNA, 15 bp, Homo sapiens
acgctgaaatcaaag

SEQ ID NO: 4392 - DNA, 15 bp, Homo sapiens
tacgctgaaatcaaa

SEQ ID NO: 4393 - DNA, 15 bp, Homo sapiens
atacgctgaaatcaa

SEQ ID NO: 4394 - DNA, 15 bp, Homo sapiens
catacgctgaaatca

SEQ ID NO: 4395 - DNA, 15 bp, Homo sapiens
acatacgctgaaatc

SEQ ID NO: 4396 - DNA, 15 bp, Homo sapiens
aacatacgctgaaat

SEQ ID NO: 4397 - DNA, 15 bp, Homo sapiens
caacatacgctgaaa

SEQ ID NO: 4398 - DNA, 15 bp, Homo sapiens
ccaacatacgctgaa

SEQ ID NO: 4399 - DNA, 15 bp, Homo sapiens
accaacatacgctga

SEQ ID NO: 4400 - DNA, 15 bp, Homo sapiens
gaccaacatacgctg

SEQ ID NO: 4401 - DNA, 15 bp, Homo sapiens
agaccaacatacgct

SEQ ID NO: 4402 - DNA, 15 bp, Homo sapiens
gagaccaacatacgc

SEQ ID NO: 4403 - DNA, 15 bp, Homo sapiens
agagaccaacatacg

SEQ ID NO: 4404 - DNA, 15 bp, Homo sapiens
tagagaccaacatac

SEQ ID NO: 4405 - DNA, 15 bp, Homo sapiens
gtagagaccaacata

SEQ ID NO: 4406 - DNA, 15 bp, Homo sapiens
tgtagagaccaacat

SEQ ID NO: 4407 - DNA, 15 bp, Homo sapiens
gtgtagagaccaaca

SEQ ID NO: 4408 - DNA, 15 bp, Homo sapiens
tgtgtagagaccaac

SEQ ID NO: 4409 - DNA, 15 bp, Homo sapiens
atgtgtagagaccaa

SEQ ID NO: 4410 - DNA, 15 bp, Homo sapiens
catgtgtagagacca

SEQ ID NO: 4411 - DNA, 15 bp, Homo sapiens
tcatgtgtagagacc

SEQ ID NO: 4412 - DNA, 15 bp, Homo sapiens
ttcatgtgtagagac

SEQ ID NO: 4413 - DNA, 15 bp, Homo sapiens
tttcatgtgtagaga

SEQ ID NO: 4414 - DNA, 15 bp, Homo sapiens
atttcatgtgtagag

SEQ ID NO: 4415 - DNA, 15 bp, Homo sapiens
aatttcatgtgtaga

SEQ ID NO: 4416 - DNA, 15 bp, Homo sapiens
aaatttcatgtgtag

SEQ ID NO: 4417 - DNA, 15 bp, Homo sapiens
caaatttcatgtgta

SEQ ID NO: 4418 - DNA, 15 bp, Homo sapiens
acaaatttcatgtgt

SEQ ID NO: 4419 - DNA, 15 bp, Homo sapiens
cacaaatttcatgtg

SEQ ID NO: 4420 - DNA, 15 bp, Homo sapiens
acacaaatttcatgt

SEQ ID NO: 4421 - DNA, 15 bp, Homo sapiens
cacacaaatttcatg

SEQ ID NO: 4422 - DNA, 15 bp, Homo sapiens
tcacacaaatttcat

SEQ ID NO: 4423 - DNA, 15 bp, Homo sapiens
gtcacacaaatttca

SEQ ID NO: 4424 - DNA, 15 bp, Homo sapiens
agtcacacaaatttc

SEQ ID NO: 4425 - DNA, 15 bp, Homo sapiens
aagtcacacaaattt

SEQ ID NO: 4426 - DNA, 15 bp, Homo sapiens
taagtcacacaaatt

SEQ ID NO: 4427 - DNA, 15 bp, Homo sapiens
ttaagtcacacaaat

SEQ ID NO: 4428 - DNA, 15 bp, Homo sapiens
tttaagtcacacaaa

SEQ ID NO: 4429 - DNA, 15 bp, Homo sapiens
ttttaagtcacacaa

SEQ ID NO: 4430 - DNA, 15 bp, Homo sapiens
gttttaagtcacaca

SEQ ID NO: 4431 - DNA, 15 bp, Homo sapiens
agttttaagtcacac

SEQ ID NO: 4432 - DNA, 15 bp, Homo sapiens
aagttttaagtcaca

SEQ ID NO: 4433 - DNA, 15 bp, Homo sapiens
aaagttttaagtcac

SEQ ID NO: 4434 - DNA, 15 bp, Homo sapiens
gaaagttttaagtca

SEQ ID NO: 4435 - DNA, 15 bp, Homo sapiens
agaaagttttaagtc

SEQ ID NO: 4436 - DNA, 15 bp, Homo sapiens
gagaaagttttaagt

SEQ ID NO: 4437 - DNA, 15 bp, Homo sapiens
agagaaagttttaag

SEQ ID NO: 4438 - DNA, 15 bp, Homo sapiens
tagagaaagttttaa

SEQ ID NO: 4439 - DNA, 15 bp, Homo sapiens
ttagagaaagtttta

SEQ ID NO: 4440 - DNA, 15 bp, Homo sapiens
tttagagaaagtttt

SEQ ID NO: 4441 - DNA, 15 bp, Homo sapiens
ttttagagaaagttt

SEQ ID NO: 4442 - DNA, 15 bp, Homo sapiens
gttttagagaaagtt

SEQ ID NO: 4443 - DNA, 15 bp, Homo sapiens
agttttagagaaagt

SEQ ID NO: 4444 - DNA, 15 bp, Homo sapiens
cagttttagagaaag

SEQ ID NO: 4445 - DNA, 15 bp, Homo sapiens
acagttttagagaaa

SEQ ID NO: 4446 - DNA, 15 bp, Homo sapiens
tacagttttagagaa

SEQ ID NO: 4447 - DNA, 15 bp, Homo sapiens
gtacagttttagaga

SEQ ID NO: 4448 - DNA, 15 bp, Homo sapiens
agtacagttttagag

SEQ ID NO: 4449 - DNA, 15 bp, Homo sapiens
aagtacagttttaga

SEQ ID NO: 4450 - DNA, 15 bp, Homo sapiens
aaagtacagttttag

SEQ ID NO: 4451 - DNA, 15 bp, Homo sapiens
aaaagtacagtttta

SEQ ID NO: 4452 - DNA, 15 bp, Homo sapiens
taaaagtacagtttt

SEQ ID NO: 4453 - DNA, 15 bp, Homo sapiens
ctaaaagtacagttt

SEQ ID NO: 4454 - DNA, 15 bp, Homo sapiens
actaaaagtacagtt

SEQ ID NO: 4455 - DNA, 15 bp, Homo sapiens
aactaaaagtacagt

SEQ ID NO: 4456 - DNA, 15 bp, Homo sapiens
taactaaaagtacag

SEQ ID NO: 4457 - DNA, 15 bp, Homo sapiens
ataactaaaagtaca

SEQ ID NO: 4458 - DNA, 15 bp, Homo sapiens
cataactaaaagtac

SEQ ID NO: 4459 - DNA, 15 bp, Homo sapiens
tcataactaaaagta

SEQ ID NO: 4460 - DNA, 15 bp, Homo sapiens
atcataactaaaagt

SEQ ID NO: 4461 - DNA, 15 bp, Homo sapiens
tatcataactaaaag

SEQ ID NO: 4462 - DNA, 15 bp, Homo sapiens
atatcataactaaaa

SEQ ID NO: 4463 - DNA, 15 bp, Homo sapiens
catatcataactaaa

SEQ ID NO: 4464 - DNA, 15 bp, Homo sapiens
gcatatcataactaa

SEQ ID NO: 4465 - DNA, 15 bp, Homo sapiens
tgcatatcataacta

SEQ ID NO: 4466 - DNA, 15 bp, Homo sapiens
atgcatatcataact

SEQ ID NO: 4467 - DNA, 15 bp, Homo sapiens
tatgcatatcataac

SEQ ID NO: 4468 - DNA, 15 bp, Homo sapiens
ctatgcatatcataa

SEQ ID NO: 4469 - DNA, 15 bp, Homo sapiens
tctatgcatatcata

SEQ ID NO: 4470 - DNA, 15 bp, Homo sapiens
ttctatgcatatcat

SEQ ID NO: 4471 - DNA, 15 bp, Homo sapiens
tttctatgcatatca

SEQ ID NO: 4472 - DNA, 15 bp, Homo sapiens
ctttctatgcatatc

SEQ ID NO: 4473 - DNA, 15 bp, Homo sapiens
gctttctatgcatat

SEQ ID NO: 4474 - DNA, 15 bp, Homo sapiens
tgctttctatgcata

SEQ ID NO: 4475 - DNA, 15 bp, Homo sapiens
ctgctttctatgcat

SEQ ID NO: 4476 - DNA, 15 bp, Homo sapiens
actgctttctatgca

SEQ ID NO: 4477 - DNA, 15 bp, Homo sapiens
tactgctttctatgc

SEQ ID NO: 4478 - DNA, 15 bp, Homo sapiens
atactgctttctatg

SEQ ID NO: 4479 - DNA, 15 bp, Homo sapiens
gatactgctttctat

SEQ ID NO: 4480 - DNA, 15 bp, Homo sapiens
tgatactgctttcta

SEQ ID NO: 4481 - DNA, 15 bp, Homo sapiens
ttgatactgctttct

SEQ ID NO: 4482 - DNA, 15 bp, Homo sapiens
tttgatactgctttc

SEQ ID NO: 4483 - DNA, 15 bp, Homo sapiens
atttgatactgcttt

SEQ ID NO: 4484 - DNA, 15 bp, Homo sapiens
tatttgatactgctt

SEQ ID NO: 4485 - DNA, 15 bp, Homo sapiens
atatttgatactgct

SEQ ID NO: 4486 - DNA, 15 bp, Homo sapiens
aatatttgatactgc

SEQ ID NO: 4487 - DNA, 15 bp, Homo sapiens
caatatttgatactg

SEQ ID NO: 4488 - DNA, 15 bp, Homo sapiens
gcaatatttgatact

SEQ ID NO: 4489 - DNA, 15 bp, Homo sapiens
cgcaatatttgatac

SEQ ID NO: 4490 - DNA, 15 bp, Homo sapiens
acgcaatatttgata

SEQ ID NO: 4491 - DNA, 15 bp, Homo sapiens
gacgcaatatttgat

SEQ ID NO: 4492 - DNA, 15 bp, Homo sapiens
tgacgcaatatttga

SEQ ID NO: 4493 - DNA, 15 bp, Homo sapiens
ttgacgcaatatttg

SEQ ID NO: 4494 - DNA, 15 bp, Homo sapiens
tttgacgcaatattt

SEQ ID NO: 4495 - DNA, 15 bp, Homo sapiens
atttgacgcaatatt

SEQ ID NO: 4496 - DNA, 15 bp, Homo sapiens
catttgacgcaatat

SEQ ID NO: 4497 - DNA, 15 bp, Homo sapiens
tcatttgacgcaata

SEQ ID NO: 4498 - DNA, 15 bp, Homo sapiens
gtcatttgacgcaat

SEQ ID NO: 4499 - DNA, 15 bp, Homo sapiens
agtcatttgacgcaa

SEQ ID NO: 4500 - DNA, 15 bp, Homo sapiens
tagtcatttgacgca

SEQ ID NO: 4501 - DNA, 15 bp, Homo sapiens
ttagtcatttgacgc

SEQ ID NO: 4502 - DNA, 15 bp, Homo sapiens
attagtcatttgacg

SEQ ID NO: 4503 - DNA, 15 bp, Homo sapiens
tattagtcatttgac

SEQ ID NO: 4504 - DNA, 15 bp, Homo sapiens
ttattagtcatttga

SEQ ID NO: 4505 - DNA, 15 bp, Homo sapiens
gttattagtcatttg

SEQ ID NO: 4506 - DNA, 15 bp, Homo sapiens
tgttattagtcattt

SEQ ID NO: 4507 - DNA, 15 bp, Homo sapiens
gtgttattagtcatt

SEQ ID NO: 4508 - DNA, 15 bp, Homo sapiens
agtgttattagtcat

SEQ ID NO: 4509 - DNA, 15 bp, Homo sapiens
aagtgttattagtca

SEQ ID NO: 4510 - DNA, 15 bp, Homo sapiens
taagtgttattagtc

SEQ ID NO: 4511 - DNA, 15 bp, Homo sapiens
ttaagtgttattagt

SEQ ID NO: 4512 - DNA, 15 bp, Homo sapiens
attaagtgttattag

SEQ ID NO: 4513 - DNA, 15 bp, Homo sapiens
aattaagtgttatta

SEQ ID NO: 4514 - DNA, 15 bp, Homo sapiens
aaattaagtgttatt

SEQ ID NO: 4515 - DNA, 15 bp, Homo sapiens
gaaattaagtgttat

SEQ ID NO: 4516 - DNA, 15 bp, Homo sapiens
agaaattaagtgtta

SEQ ID NO: 4517 - DNA, 15 bp, Homo sapiens
tagaaattaagtgtt

SEQ ID NO: 4518 - DNA, 15 bp, Homo sapiens
ctagaaattaagtgt

SEQ ID NO: 4519 - DNA, 15 bp, Homo sapiens
tctagaaattaagtg

SEQ ID NO: 4520 - DNA, 15 bp, Homo sapiens
ctctagaaattaagt

SEQ ID NO: 4521 - DNA, 15 bp, Homo sapiens
actctagaaattaag

SEQ ID NO: 4522 - DNA, 15 bp, Homo sapiens
aactctagaaattaa

SEQ ID NO: 4523 - DNA, 15 bp, Homo sapiens
caactctagaaatta

SEQ ID NO: 4524 - DNA, 15 bp, Homo sapiens
acaactctagaaatt

SEQ ID NO: 4525 - DNA, 15 bp, Homo sapiens
cacaactctagaaat

SEQ ID NO: 4526 - DNA, 15 bp, Homo sapiens
ccacaactctagaaa

SEQ ID NO: 4527 - DNA, 15 bp, Homo sapiens
accacaactctagaa

SEQ ID NO: 4528 - DNA, 15 bp, Homo sapiens
aaccacaactctaga

SEQ ID NO: 4529 - DNA, 15 bp, Homo sapiens
aaaccacaactctag

SEQ ID NO: 4530 - DNA, 15 bp, Homo sapiens
aaaaccacaactcta

SEQ ID NO: 4531 - DNA, 15 bp, Homo sapiens
taaaaccacaactct

SEQ ID NO: 4532 - DNA, 15 bp, Homo sapiens
ataaaaccacaactc

SEQ ID NO: 4533 - DNA, 15 bp, Homo sapiens
aataaaaccacaact

SEQ ID NO: 4534 - DNA, 15 bp, Homo sapiens
caataaaaccacaac

SEQ ID NO: 4535 - DNA, 15 bp, Homo sapiens
tcaataaaaccacaa

SEQ ID NO: 4536 - DNA, 15 bp, Homo sapiens
ctcaataaaaccaca

SEQ ID NO: 4537 - DNA, 15 bp, Homo sapiens
gctcaataaaaccac

SEQ ID NO: 4538 - DNA, 15 bp, Homo sapiens
ggctcaataaaacca

SEQ ID NO: 4539 - DNA, 15 bp, Homo sapiens
tggctcaataaaacc

SEQ ID NO: 4540 - DNA, 15 bp, Homo sapiens
ttggctcaataaaac

SEQ ID NO: 4541 - DNA, 15 bp, Homo sapiens
tttggctcaataaaa

SEQ ID NO: 4542 - DNA, 15 bp, Homo sapiens
ttttggctcaataaa

SEQ ID NO: 4543 - DNA, 15 bp, Homo sapiens
cttttggctcaataa

SEQ ID NO: 4544 - DNA, 15 bp, Homo sapiens
acttttggctcaata

SEQ ID NO: 4545 - DNA, 15 bp, Homo sapiens
aacttttggctcaat

SEQ ID NO: 4546 - DNA, 15 bp, Homo sapiens
caacttttggctcaa

SEQ ID NO: 4547 - DNA, 15 bp, Homo sapiens
tcaacttttggctca

SEQ ID NO: 4548 - DNA, 15 bp, Homo sapiens
atcaacttttggctc

SEQ ID NO: 4549 - DNA, 15 bp, Homo sapiens
tatcaacttttggct

SEQ ID NO: 4550 - DNA, 15 bp, Homo sapiens
atatcaacttttggc

SEQ ID NO: 4551 - DNA, 15 bp, Homo sapiens
catatcaacttttgg

SEQ ID NO: 4552 - DNA, 15 bp, Homo sapiens
tcatatcaacttttg

SEQ ID NO: 4553 - DNA, 15 bp, Homo sapiens
ttcatatcaactttt

SEQ ID NO: 4554 - DNA, 15 bp, Homo sapiens
tttcatatcaacttt

SEQ ID NO: 4555 - DNA, 15 bp, Homo sapiens
ttttcatatcaactt

SEQ ID NO: 4556 - DNA, 15 bp, Homo sapiens
tttttcatatcaact

SEQ ID NO: 4557 - DNA, 15 bp, Homo sapiens
ttttttcatatcaac

SEQ ID NO: 4558 - DNA, 15 bp, Homo sapiens
tttttttcatatcaa

SEQ ID NO: 4559 - DNA, 15 bp, Homo sapiens
ctttttttcatatca

SEQ ID NO: 4560 - DNA, 15 bp, Homo sapiens
actttttttcatatc

SEQ ID NO: 4561 - DNA, 15 bp, Homo sapiens
gactttttttcatat

SEQ ID NO: 4562 - DNA, 15 bp, Homo sapiens
tgactttttttcata

SEQ ID NO: 4563 - DNA, 15 bp, Homo sapiens
ctgactttttttcat

SEQ ID NO: 4564 - DNA, 15 bp, Homo sapiens
actgactttttttca

SEQ ID NO: 4565 - DNA, 15 bp, Homo sapiens
tactgactttttttc

SEQ ID NO: 4566 - DNA, 15 bp, Homo sapiens
ttactgacttttttt

SEQ ID NO: 4567 - DNA, 15 bp, Homo sapiens
cttactgactttttt

SEQ ID NO: 4568 - DNA, 15 bp, Homo sapiens
ccttactgacttttt

SEQ ID NO: 4569 - DNA, 15 bp, Homo sapiens
tccttactgactttt

SEQ ID NO: 4570 - DNA, 15 bp, Homo sapiens
ttccttactgacttt

SEQ ID NO: 4571 - DNA, 15 bp, Homo sapiens
tttccttactgactt

SEQ ID NO: 4572 - DNA, 15 bp, Homo sapiens
ctttccttactgact

SEQ ID NO: 4573 - DNA, 15 bp, Homo sapiens
actttccttactgac

SEQ ID NO: 4574 - DNA, 15 bp, Homo sapiens
gactttccttactga

SEQ ID NO: 4575 - DNA, 15 bp, Homo sapiens
tgactttccttactg

SEQ ID NO: 4576 - DNA, 15 bp, Homo sapiens
ctgactttccttact

SEQ ID NO: 4577 - DNA, 15 bp, Homo sapiens
actgactttccttac

SEQ ID NO: 4578 - DNA, 15 bp, Homo sapiens
cactgactttcctta

SEQ ID NO: 4579 - DNA, 15 bp, Homo sapiens
tcactgactttcctt

SEQ ID NO: 4580 - DNA, 15 bp, Homo sapiens
ttcactgactttcct

SEQ ID NO: 4581 - DNA, 15 bp, Homo sapiens
cttcactgactttcc

SEQ ID NO: 4582 - DNA, 15 bp, Homo sapiens
acttcactgactttc

SEQ ID NO: 4583 - DNA, 15 bp, Homo sapiens
cacttcactgacttt

SEQ ID NO: 4584 - DNA, 15 bp, Homo sapiens
gcacttcactgactt

SEQ ID NO: 4585 - DNA, 15 bp, Homo sapiens
agcacttcactgact

SEQ ID NO: 4586 - DNA, 15 bp, Homo sapiens
aagcacttcactgac

SEQ ID NO: 4587 - DNA, 15 bp, Homo sapiens
caagcacttcactga

SEQ ID NO: 4588 - DNA, 15 bp, Homo sapiens
gcaagcacttcactg

SEQ ID NO: 4589 - DNA, 15 bp, Homo sapiens
agcaagcacttcact

SEQ ID NO: 4590 - DNA, 15 bp, Homo sapiens
aagcaagcacttcac

SEQ ID NO: 4591 - DNA, 15 bp, Homo sapiens
aaagcaagcacttca

SEQ ID NO: 4592 - DNA, 15 bp, Homo sapiens
aaaagcaagcacttc

SEQ ID NO: 4593 - DNA, 15 bp, Homo sapiens
aaaaagcaagcactt

SEQ ID NO: 4594 - DNA, 15 bp, Homo sapiens
aaaaaagcaagcact

SEQ ID NO: 4595 - DNA, 15 bp, Homo sapiens
caaaaaagcaagcac

SEQ ID NO: 4596 - DNA, 15 bp, Homo sapiens
tcaaaaaagcaagca

SEQ ID NO: 4597 - DNA, 15 bp, Homo sapiens
atcaaaaaagcaagc

SEQ ID NO: 4598 - DNA, 15 bp, Homo sapiens
tatcaaaaaagcaag

SEQ ID NO: 4599 - DNA, 15 bp, Homo sapiens
ttatcaaaaaagcaa

SEQ ID NO: 4600 - DNA, 15 bp, Homo sapiens
attatcaaaaaagca

SEQ ID NO: 4601 - DNA, 15 bp, Homo sapiens
aattatcaaaaaagc

SEQ ID NO: 4602 - DNA, 15 bp, Homo sapiens
caattatcaaaaaag

SEQ ID NO: 4603 - DNA, 15 bp, Homo sapiens
gcaattatcaaaaaa

SEQ ID NO: 4604 - DNA, 15 bp, Homo sapiens
tgcaattatcaaaaa

SEQ ID NO: 4605 - DNA, 15 bp, Homo sapiens
gtgcaattatcaaaa

SEQ ID NO: 4606 - DNA, 15 bp, Homo sapiens
agtgcaattatcaaa

SEQ ID NO: 4607 - DNA, 15 bp, Homo sapiens
gagtgcaattatcaa

SEQ ID NO: 4608 - DNA, 15 bp, Homo sapiens
ggagtgcaattatca

SEQ ID NO: 4609 - DNA, 15 bp, Homo sapiens
gggagtgcaattatc

SEQ ID NO: 4610 - DNA, 15 bp, Homo sapiens
tgggagtgcaattat

SEQ ID NO: 4611 - DNA, 15 bp, Homo sapiens
ttgggagtgcaatta

SEQ ID NO: 4612 - DNA, 15 bp, Homo sapiens
attgggagtgcaatt

SEQ ID NO: 4613 - DNA, 15 bp, Homo sapiens
tattgggagtgcaat

SEQ ID NO: 4614 - DNA, 15 bp, Homo sapiens
ttattgggagtgcaa

SEQ ID NO: 4615 - DNA, 15 bp, Homo sapiens
attattgggagtgca

SEQ ID NO: 4616 - DNA, 15 bp, Homo sapiens
aattattgggagtgc

SEQ ID NO: 4617 - DNA, 15 bp, Homo sapiens
aaattattgggagtg

SEQ ID NO: 4618 - DNA, 15 bp, Homo sapiens
aaaattattgggagt

SEQ ID NO: 4619 - DNA, 15 bp, Homo sapiens
caaaattattgggag

SEQ ID NO: 4620 - DNA, 15 bp, Homo sapiens
tcaaaattattggga

SEQ ID NO: 4621 - DNA, 15 bp, Homo sapiens
atcaaaattattggg

SEQ ID NO: 4622 - DNA, 15 bp, Homo sapiens
tatcaaaattattgg

SEQ ID NO: 4623 - DNA, 15 bp, Homo sapiens
atatcaaaattattg

SEQ ID NO: 4624 - DNA, 15 bp, Homo sapiens
aatatcaaaattatt

SEQ ID NO: 4625 - DNA, 15 bp, Homo sapiens
gaatatcaaaattat

SEQ ID NO: 4626 - DNA, 15 bp, Homo sapiens
ggaatatcaaaatta

SEQ ID NO: 4627 - DNA, 15 bp, Homo sapiens
tggaatatcaaaatt

SEQ ID NO: 4628 - DNA, 15 bp, Homo sapiens
ttggaatatcaaaat

SEQ ID NO: 4629 - DNA, 15 bp, Homo sapiens
gttggaatatcaaaa

SEQ ID NO: 4630 - DNA, 15 bp, Homo sapiens
cgttggaatatcaaa

SEQ ID NO: 4631 - DNA, 15 bp, Homo sapiens
acgttggaatatcaa

SEQ ID NO: 4632 - DNA, 15 bp, Homo sapiens
tacgttggaatatca

SEQ ID NO: 4633 - DNA, 15 bp, Homo sapiens
gtacgttggaatatc

SEQ ID NO: 4634 - DNA, 15 bp, Homo sapiens
agtacgttggaatat

SEQ ID NO: 4635 - DNA, 15 bp, Homo sapiens
aagtacgttggaata

SEQ ID NO: 4636 - DNA, 15 bp, Homo sapiens
caagtacgttggaat

SEQ ID NO: 4637 - DNA, 15 bp, Homo sapiens
ccaagtacgttggaa

SEQ ID NO: 4638 - DNA, 15 bp, Homo sapiens
accaagtacgttgga

SEQ ID NO: 4639 - DNA, 15 bp, Homo sapiens
aaccaagtacgttgg

SEQ ID NO: 4640 - DNA, 15 bp, Homo sapiens
aaaccaagtacgttg

SEQ ID NO: 4641 - DNA, 15 bp, Homo sapiens
caaaccaagtacgtt

SEQ ID NO: 4642 - DNA, 15 bp, Homo sapiens
gcaaaccaagtacgt

SEQ ID NO: 4643 - DNA, 15 bp, Homo sapiens
agcaaaccaagtacg

SEQ ID NO: 4644 - DNA, 15 bp, Homo sapiens
aagcaaaccaagtac

SEQ ID NO: 4645 - DNA, 15 bp, Homo sapiens
caagcaaaccaagta

SEQ ID NO: 4646 - DNA, 15 bp, Homo sapiens
acaagcaaaccaagt

SEQ ID NO: 4647 - DNA, 15 bp, Homo sapiens
aacaagcaaaccaag

SEQ ID NO: 4648 - DNA, 15 bp, Homo sapiens
aaacaagcaaaccaa

SEQ ID NO: 4649 - DNA, 15 bp, Homo sapiens
aaaacaagcaaacca

SEQ ID NO: 4650 - DNA, 15 bp, Homo sapiens
gaaaacaagcaaacc

SEQ ID NO: 4651 - DNA, 15 bp, Homo sapiens
tgaaaacaagcaaac

SEQ ID NO: 4652 - DNA, 15 bp, Homo sapiens
gtgaaaacaagcaaa

SEQ ID NO: 4653 - DNA, 15 bp, Homo sapiens
cgtgaaaacaagcaa

SEQ ID NO: 4654 - DNA, 15 bp, Homo sapiens
acgtgaaaacaagca

SEQ ID NO: 4655 - DNA, 15 bp, Homo sapiens
aacgtgaaaacaagc

SEQ ID NO: 4656 - DNA, 15 bp, Homo sapiens
taacgtgaaaacaag

SEQ ID NO: 4657 - DNA, 15 bp, Homo sapiens
ttaacgtgaaaacaa

SEQ ID NO: 4658 - DNA, 15 bp, Homo sapiens
attaacgtgaaaaca

SEQ ID NO: 4659 - DNA, 15 bp, Homo sapiens
cattaacgtgaaaac

SEQ ID NO: 4660 - DNA, 15 bp, Homo sapiens
acattaacgtgaaaa

SEQ ID NO: 4661 - DNA, 15 bp, Homo sapiens
aacattaacgtgaaa

SEQ ID NO: 4662 - DNA, 15 bp, Homo sapiens
aaacattaacgtgaa

SEQ ID NO: 4663 - DNA, 15 bp, Homo sapiens
aaaacattaacgtga

SEQ ID NO: 4664 - DNA, 15 bp, Homo sapiens
gaaaacattaacgtg

SEQ ID NO: 4665 - DNA, 15 bp, Homo sapiens
agaaaacattaacgt

SEQ ID NO: 4666 - DNA, 15 bp, Homo sapiens
cagaaaacattaacg

SEQ ID NO: 4667 - DNA, 15 bp, Homo sapiens
acagaaaacattaac

SEQ ID NO: 4668 - DNA, 15 bp, Homo sapiens
aacagaaaacattaa

SEQ ID NO: 4669 - DNA, 15 bp, Homo sapiens
aaacagaaaacatta

SEQ ID NO: 4670 - DNA, 15 bp, Homo sapiens
taaacagaaaacatt

SEQ ID NO: 4671 - DNA, 15 bp, Homo sapiens
ataaacagaaaacat

SEQ ID NO: 4672 - DNA, 15 bp, Homo sapiens
aataaacagaaaaca

SEQ ID NO: 4673 - DNA, 15 bp, Homo sapiens
caataaacagaaaac

SEQ ID NO: 4674 - DNA, 15 bp, Homo sapiens
ccaataaacagaaaa

SEQ ID NO: 4675 - DNA, 15 bp, Homo sapiens
tccaataaacagaaa

SEQ ID NO: 4676 - DNA, 15 bp, Homo sapiens
ctccaataaacagaa

SEQ ID NO: 4677 - DNA, 15 bp, Homo sapiens
actccaataaacaga

SEQ ID NO: 4678 - DNA, 15 bp, Homo sapiens
cactccaataaacag

SEQ ID NO: 4679 - DNA, 15 bp, Homo sapiens
ccactccaataaaca

SEQ ID NO: 4680 - DNA, 15 bp, Homo sapiens
cccactccaataaac

SEQ ID NO: 4681 - DNA, 15 bp, Homo sapiens
tcccactccaataaa

SEQ ID NO: 4682 - DNA, 15 bp, Homo sapiens
ttcccactccaataa

SEQ ID NO: 4683 - DNA, 15 bp, Homo sapiens
cttcccactccaata

SEQ ID NO: 4684 - DNA, 15 bp, Homo sapiens
ccttcccactccaat

SEQ ID NO: 4685 - DNA, 15 bp, Homo sapiens
gccttcccactccaa

SEQ ID NO: 4686 - DNA, 15 bp, Homo sapiens
tgccttcccactcca

SEQ ID NO: 4687 - DNA, 15 bp, Homo sapiens
atgccttcccactcc

SEQ ID NO: 4688 - DNA, 15 bp, Homo sapiens
aatgccttcccactc

SEQ ID NO: 4689 - DNA, 15 bp, Homo sapiens
taatgccttcccact

SEQ ID NO: 4690 - DNA, 15 bp, Homo sapiens
ttaatgccttcccac

SEQ ID NO: 4691 - DNA, 15 bp, Homo sapiens
tttaatgccttccca

SEQ ID NO: 4692 - DNA, 15 bp, Homo sapiens
ttttaatgccttccc

SEQ ID NO: 4693 - DNA, 15 bp, Homo sapiens
attttaatgccttcc

SEQ ID NO: 4694 - DNA, 15 bp, Homo sapiens
aattttaatgccttc

SEQ ID NO: 4695 - DNA, 15 bp, Homo sapiens
caattttaatgcctt

SEQ ID NO: 4696 - DNA, 15 bp, Homo sapiens
acaattttaatgcct

SEQ ID NO: 4697 - DNA, 15 bp, Homo sapiens
gacaattttaatgcc

SEQ ID NO: 4698 - DNA, 15 bp, Homo sapiens
tgacaattttaatgc

SEQ ID NO: 4699 - DNA, 15 bp, Homo sapiens
atgacaattttaatg

SEQ ID NO: 4700 - DNA, 15 bp, Homo sapiens
aatgacaattttaat

SEQ ID NO: 4701 - DNA, 15 bp, Homo sapiens
caatgacaattttaa

SEQ ID NO: 4702 - DNA, 15 bp, Homo sapiens
tcaatgacaatttta

SEQ ID NO: 4703 - DNA, 15 bp, Homo sapiens
ttcaatgacaatttt

SEQ ID NO: 4704 - DNA, 15 bp, Homo sapiens
cttcaatgacaattt

SEQ ID NO: 4705 - DNA, 15 bp, Homo sapiens
tcttcaatgacaatt

SEQ ID NO: 4706 - DNA, 15 bp, Homo sapiens
gtcttcaatgacaat

SEQ ID NO: 4707 - DNA, 15 bp, Homo sapiens
agtcttcaatgacaa

SEQ ID NO: 4708 - DNA, 15 bp, Homo sapiens
aagtcttcaatgaca

SEQ ID NO: 4709 - DNA, 15 bp, Homo sapiens
aaagtcttcaatgac

SEQ ID NO: 4710 - DNA, 15 bp, Homo sapiens
caaagtcttcaatga

SEQ ID NO: 4711 - DNA, 15 bp, Homo sapiens
acaaagtcttcaatg

SEQ ID NO: 4712 - DNA, 15 bp, Homo sapiens
gacaaagtcttcaat

SEQ ID NO: 4713 - DNA, 15 bp, Homo sapiens
agacaaagtcttcaa

SEQ ID NO: 4714 - DNA, 15 bp, Homo sapiens
aagacaaagtcttca

SEQ ID NO: 4715 - DNA, 15 bp, Homo sapiens
aaagacaaagtcttc

SEQ ID NO: 4716 - DNA, 15 bp, Homo sapiens
caaagacaaagtctt

SEQ ID NO: 4717 - DNA, 15 bp, Homo sapiens
tcaaagacaaagtct

SEQ ID NO: 4718 - DNA, 15 bp, Homo sapiens
gtcaaagacaaagtc

SEQ ID NO: 4719 - DNA, 15 bp, Homo sapiens
tgtcaaagacaaagt

SEQ ID NO: 4720 - DNA, 15 bp, Homo sapiens
atgtcaaagacaaag

SEQ ID NO: 4721 - DNA, 15 bp, Homo sapiens
catgtcaaagacaaa

SEQ ID NO: 4722 - DNA, 15 bp, Homo sapiens
acatgtcaaagacaa

SEQ ID NO: 4723 - DNA, 15 bp, Homo sapiens
aacatgtcaaagaca

SEQ ID NO: 4724 - DNA, 15 bp, Homo sapiens
caacatgtcaaagac

SEQ ID NO: 4725 - DNA, 15 bp, Homo sapiens
acaacatgtcaaaga

SEQ ID NO: 4726 - DNA, 15 bp, Homo sapiens
tacaacatgtcaaag

SEQ ID NO: 4727 - DNA, 15 bp, Homo sapiens
ctacaacatgtcaaa

SEQ ID NO: 4728 - DNA, 15 bp, Homo sapiens
actacaacatgtcaa

SEQ ID NO: 4729 - DNA, 15 bp, Homo sapiens
tactacaacatgtca

SEQ ID NO: 4730 - DNA, 15 bp, Homo sapiens
atactacaacatgtc

SEQ ID NO: 4731 - DNA, 15 bp, Homo sapiens
aatactacaacatgt

SEQ ID NO: 4732 - DNA, 15 bp, Homo sapiens
aaatactacaacatg

SEQ ID NO: 4733 - DNA, 15 bp, Homo sapiens
taaatactacaacat

SEQ ID NO: 4734 - DNA, 15 bp, Homo sapiens
ataaatactacaaca

SEQ ID NO: 4735 - DNA, 15 bp, Homo sapiens
aataaatactacaac

SEQ ID NO: 4736 - DNA, 15 bp, Homo sapiens
aaataaatactacaa

SEQ ID NO: 4737 - DNA, 15 bp, Homo sapiens
gaaataaatactaca

SEQ ID NO: 4738 - DNA, 15 bp, Homo sapiens
tgaaataaatactac

SEQ ID NO: 4739 - DNA, 15 bp, Homo sapiens
ctgaaataaatacta

SEQ ID NO: 4740 - DNA, 15 bp, Homo sapiens
actgaaataaatact

SEQ ID NO: 4741 - DNA, 15 bp, Homo sapiens
tactgaaataaatac

SEQ ID NO: 4742 - DNA, 15 bp, Homo sapiens
ttactgaaataaata

SEQ ID NO: 4743 - DNA, 15 bp, Homo sapiens
gttactgaaataaat

SEQ ID NO: 4744 - DNA, 15 bp, Homo sapiens
agttactgaaataaa

SEQ ID NO: 4745 - DNA, 15 bp, Homo sapiens
tagttactgaaataa

SEQ ID NO: 4746 - DNA, 15 bp, Homo sapiens
ttagttactgaaata

SEQ ID NO: 4747 - DNA, 15 bp, Homo sapiens
gttagttactgaaat

SEQ ID NO: 4748 - DNA, 15 bp, Homo sapiens
ggttagttactgaaa

SEQ ID NO: 4749 - DNA, 15 bp, Homo sapiens
aggttagttactgaa

SEQ ID NO: 4750 - DNA, 15 bp, Homo sapiens
caggttagttactga

SEQ ID NO: 4751 - DNA, 15 bp, Homo sapiens
acaggttagttactg

SEQ ID NO: 4752 - DNA, 15 bp, Homo sapiens
cacaggttagttact

SEQ ID NO: 4753 - DNA, 15 bp, Homo sapiens
tcacaggttagttac

SEQ ID NO: 4754 - DNA, 15 bp, Homo sapiens
ttcacaggttagtta

SEQ ID NO: 4755 - DNA, 15 bp, Homo sapiens
tttcacaggttagtt

SEQ ID NO: 4756 - DNA, 15 bp, Homo sapiens
ttttcacaggttagt

SEQ ID NO: 4757 - DNA, 15 bp, Homo sapiens
cttttcacaggttag

SEQ ID NO: 4758 - DNA, 15 bp, Homo sapiens
acttttcacaggtta

SEQ ID NO: 4759 - DNA, 15 bp, Homo sapiens
aacttttcacaggtt

SEQ ID NO: 4760 - DNA, 15 bp, Homo sapiens
taacttttcacaggt

SEQ ID NO: 4761 - DNA, 15 bp, Homo sapiens
ttaacttttcacagg

SEQ ID NO: 4762 - DNA, 15 bp, Homo sapiens
tttaacttttcacag

SEQ ID NO: 4763 - DNA, 15 bp, Homo sapiens
atttaacttttcaca

SEQ ID NO: 4764 - DNA, 15 bp, Homo sapiens
aatttaacttttcac

SEQ ID NO: 4765 - DNA, 15 bp, Homo sapiens
gaatttaacttttca

SEQ ID NO: 4766 - DNA, 15 bp, Homo sapiens
ggaatttaacttttc

SEQ ID NO: 4767 - DNA, 15 bp, Homo sapiens
aggaatttaactttt

SEQ ID NO: 4768 - DNA, 15 bp, Homo sapiens
aaggaatttaacttt

SEQ ID NO: 4769 - DNA, 15 bp, Homo sapiens
aaaggaatttaactt

SEQ ID NO: 4770 - DNA, 15 bp, Homo sapiens
taaaggaatttaact

SEQ ID NO: 4771 - DNA, 15 bp, Homo sapiens
ataaaggaatttaac

SEQ ID NO: 4772 - DNA, 15 bp, Homo sapiens
cataaaggaatttaa

SEQ ID NO: 4773 - DNA, 15 bp, Homo sapiens
tcataaaggaattta

SEQ ID NO: 4774 - DNA, 15 bp, Homo sapiens
ttcataaaggaattt

SEQ ID NO: 4775 - DNA, 15 bp, Homo sapiens
tttcataaaggaatt

SEQ ID NO: 4776 - DNA, 15 bp, Homo sapiens
ctttcataaaggaat

SEQ ID NO: 4777 - DNA, 15 bp, Homo sapiens
actttcataaaggaa

SEQ ID NO: 4778 - DNA, 15 bp, Homo sapiens
tactttcataaagga

SEQ ID NO: 4779 - DNA, 15 bp, Homo sapiens
ctactttcataaagg

SEQ ID NO: 4780 - DNA, 15 bp, Homo sapiens
actactttcataaag

SEQ ID NO: 4781 - DNA, 15 bp, Homo sapiens
cactactttcataaa

SEQ ID NO: 4782 - DNA, 15 bp, Homo sapiens
tcactactttcataa

SEQ ID NO: 4783 - DNA, 15 bp, Homo sapiens
atcactactttcata

SEQ ID NO: 4784 - DNA, 15 bp, Homo sapiens
aatcactactttcat

SEQ ID NO: 4785 - DNA, 15 bp, Homo sapiens
caatcactactttca

SEQ ID NO: 4786 - DNA, 15 bp, Homo sapiens
ccaatcactactttc

SEQ ID NO: 4787 - DNA, 15 bp, Homo sapiens
tccaatcactacttt

SEQ ID NO: 4788 - DNA, 15 bp, Homo sapiens
ctccaatcactactt

SEQ ID NO: 4789 - DNA, 15 bp, Homo sapiens
actccaatcactact

SEQ ID NO: 4790 - DNA, 15 bp, Homo sapiens
tactccaatcactac

SEQ ID NO: 4791 - DNA, 15 bp, Homo sapiens
atactccaatcacta

SEQ ID NO: 4792 - DNA, 15 bp, Homo sapiens
aatactccaatcact

SEQ ID NO: 4793 - DNA, 15 bp, Homo sapiens
aaatactccaatcac

SEQ ID NO: 4794 - DNA, 15 bp, Homo sapiens
aaaatactccaatca

SEQ ID NO: 4795 - DNA, 15 bp, Homo sapiens
aaaaatactccaatc

SEQ ID NO: 4796 - DNA, 15 bp, Homo sapiens
taaaaatactccaat

SEQ ID NO: 4797 - DNA, 15 bp, Homo sapiens
ataaaaatactccaa

SEQ ID NO: 4798 - DNA, 15 bp, Homo sapiens
gataaaaatactcca

SEQ ID NO: 4799 - DNA, 15 bp, Homo sapiens
agataaaaatactcc

SEQ ID NO: 4800 - DNA, 15 bp, Homo sapiens
cagataaaaatactc

SEQ ID NO: 4801 - DNA, 15 bp, Homo sapiens
tcagataaaaatact

SEQ ID NO: 4802 - DNA, 15 bp, Homo sapiens
atcagataaaaatac

SEQ ID NO: 4803 - DNA, 15 bp, Homo sapiens
tatcagataaaaata

SEQ ID NO: 4804 - DNA, 15 bp, Homo sapiens
ttatcagataaaaat

SEQ ID NO: 4805 - DNA, 15 bp, Homo sapiens
tttatcagataaaaa

SEQ ID NO: 4806 - DNA, 15 bp, Homo sapiens
ctttatcagataaaa

SEQ ID NO: 4807 - DNA, 15 bp, Homo sapiens
tctttatcagataaa

SEQ ID NO: 4808 - DNA, 15 bp, Homo sapiens
ttctttatcagataa

SEQ ID NO: 4809 - DNA, 15 bp, Homo sapiens
tttctttatcagata

SEQ ID NO: 4810 - DNA, 15 bp, Homo sapiens
ctttctttatcagat

SEQ ID NO: 4811 - DNA, 15 bp, Homo sapiens
tctttctttatcaga

SEQ ID NO: 4812 - DNA, 15 bp, Homo sapiens
atctttctttatcag

SEQ ID NO: 4813 - DNA, 15 bp, Homo sapiens
aatctttctttatca

SEQ ID NO: 4814 - DNA, 15 bp, Homo sapiens
taatctttctttatc

SEQ ID NO: 4815 - DNA, 15 bp, Homo sapiens
ttaatctttctttat

SEQ ID NO: 4816 - DNA, 15 bp, Homo sapiens
attaatctttcttta

SEQ ID NO: 4817 - DNA, 15 bp, Homo sapiens
tattaatctttcttt

SEQ ID NO: 4818 - DNA, 15 bp, Homo sapiens
ttattaatctttctt

SEQ ID NO: 4819 - DNA, 15 bp, Homo sapiens
attattaatctttct

SEQ ID NO: 4820 - DNA, 15 bp, Homo sapiens
cattattaatctttc

SEQ ID NO: 4821 - DNA, 15 bp, Homo sapiens
tcattattaatcttt

SEQ ID NO: 4822 - DNA, 15 bp, Homo sapiens
ttcattattaatctt

SEQ ID NO: 4823 - DNA, 15 bp, Homo sapiens
cttcattattaatct

SEQ ID NO: 4824 - DNA, 15 bp, Homo sapiens
gcttcattattaatc

SEQ ID NO: 4825 - DNA, 15 bp, Homo sapiens
ggcttcattattaat

SEQ ID NO: 4826 - DNA, 15 bp, Homo sapiens
tggcttcattattaa

SEQ ID NO: 4827 - DNA, 15 bp, Homo sapiens
atggcttcattatta

SEQ ID NO: 4828 - DNA, 15 bp, Homo sapiens
aatggcttcattatt

SEQ ID NO: 4829 - DNA, 15 bp, Homo sapiens
aaatggcttcattat

SEQ ID NO: 4830 - DNA, 15 bp, Homo sapiens
gaaatggcttcatta

SEQ ID NO: 4831 - DNA, 15 bp, Homo sapiens
agaaatggcttcatt

SEQ ID NO: 4832 - DNA, 15 bp, Homo sapiens
gagaaatggcttcat

SEQ ID NO: 4833 - DNA, 15 bp, Homo sapiens
ggagaaatggcttca

SEQ ID NO: 4834 - DNA, 15 bp, Homo sapiens
cggagaaatggcttc

SEQ ID NO: 4835 - DNA, 15 bp, Homo sapiens
tcggagaaatggctt

SEQ ID NO: 4836 - DNA, 15 bp, Homo sapiens
ctcggagaaatggct

SEQ ID NO: 4837 - DNA, 15 bp, Homo sapiens
cctcggagaaatggc

SEQ ID NO: 4838 - DNA, 15 bp, Homo sapiens
tcctcggagaaatgg

SEQ ID NO: 4839 - DNA, 15 bp, Homo sapiens
ttcctcggagaaatg

SEQ ID NO: 4840 - DNA, 15 bp, Homo sapiens
tttcctcggagaaat

SEQ ID NO: 4841 - DNA, 15 bp, Homo sapiens
ttttcctcggagaaa

SEQ ID NO: 4842 - DNA, 15 bp, Homo sapiens
attttcctcggagaa

SEQ ID NO: 4843 - DNA, 15 bp, Homo sapiens
aattttcctcggaga

SEQ ID NO: 4844 - DNA, 15 bp, Homo sapiens
caattttcctcggag

SEQ ID NO: 4845 - DNA, 15 bp, Homo sapiens
tcaattttcctcgga

SEQ ID NO: 4846 - DNA, 15 bp, Homo sapiens
ctcaattttcctcgg

SEQ ID NO: 4847 - DNA, 15 bp, Homo sapiens
cctcaattttcctcg

SEQ ID NO: 4848 - DNA, 15 bp, Homo sapiens
tcctcaattttcctc

SEQ ID NO: 4849 - DNA, 15 bp, Homo sapiens
gtcctcaattttcct

SEQ ID NO: 4850 - DNA, 15 bp, Homo sapiens
tgtcctcaattttcc

SEQ ID NO: 4851 - DNA, 15 bp, Homo sapiens
ttgtcctcaattttc

SEQ ID NO: 4852 - DNA, 15 bp, Homo sapiens
attgtcctcaatttt

SEQ ID NO: 4853 - DNA, 15 bp, Homo sapiens
tattgtcctcaattt

SEQ ID NO: 4854 - DNA, 15 bp, Homo sapiens
ttattgtcctcaatt

SEQ ID NO: 4855 - DNA, 15 bp, Homo sapiens
attattgtcctcaat

SEQ ID NO: 4856 - DNA, 15 bp, Homo sapiens
aattattgtcctcaa

SEQ ID NO: 4857 - DNA, 15 bp, Homo sapiens
gaattattgtcctca

SEQ ID NO: 4858 - DNA, 15 bp, Homo sapiens
tgaattattgtcctc

SEQ ID NO: 4859 - DNA, 15 bp, Homo sapiens
ctgaattattgtcct

SEQ ID NO: 4860 - DNA, 15 bp, Homo sapiens
actgaattattgtcc

SEQ ID NO: 4861 - DNA, 15 bp, Homo sapiens
aactgaattattgtc

SEQ ID NO: 4862 - DNA, 15 bp, Homo sapiens
aaactgaattattgt

SEQ ID NO: 4863 - DNA, 15 bp, Homo sapiens
aaaactgaattattg

SEQ ID NO: 4864 - DNA, 15 bp, Homo sapiens
taaaactgaattatt

SEQ ID NO: 4865 - DNA, 15 bp, Homo sapiens
ttaaaactgaattat

SEQ ID NO: 4866 - DNA, 15 bp, Homo sapiens
tttaaaactgaatta

SEQ ID NO: 4867 - DNA, 15 bp, Homo sapiens
ttttaaaactgaatt

SEQ ID NO: 4868 - DNA, 15 bp, Homo sapiens
attttaaaactgaat

SEQ ID NO: 4869 - DNA, 15 bp, Homo sapiens
tattttaaaactgaa

SEQ ID NO: 4870 - DNA, 15 bp, Homo sapiens
atattttaaaactga

SEQ ID NO: 4871 - DNA, 15 bp, Homo sapiens
aatattttaaaactg

SEQ ID NO: 4872 - DNA, 15 bp, Homo sapiens
taatattttaaaact

SEQ ID NO: 4873 - DNA, 15 bp, Homo sapiens
ataatattttaaaac

SEQ ID NO: 4874 - DNA, 15 bp, Homo sapiens
gataatattttaaaa

SEQ ID NO: 4875 - DNA, 15 bp, Homo sapiens
cgataatattttaaa

SEQ ID NO: 4876 - DNA, 15 bp, Homo sapiens
gcgataatattttaa

SEQ ID NO: 4877 - DNA, 15 bp, Homo sapiens
tgcgataatatttta

SEQ ID NO: 4878 - DNA, 15 bp, Homo sapiens
ttgcgataatatttt

SEQ ID NO: 4879 - DNA, 15 bp, Homo sapiens
tttgcgataatattt

SEQ ID NO: 4880 - DNA, 15 bp, Homo sapiens
ttttgcgataatatt

SEQ ID NO: 4881 - DNA, 15 bp, Homo sapiens
attttgcgataatat

SEQ ID NO: 4882 - DNA, 15 bp, Homo sapiens
aattttgcgataata

SEQ ID NO: 4883 - DNA, 15 bp, Homo sapiens
taattttgcgataat

SEQ ID NO: 4884 - DNA, 15 bp, Homo sapiens
ttaattttgcgataa

SEQ ID NO: 4885 - DNA, 15 bp, Homo sapiens
tttaattttgcgata

SEQ ID NO: 4886 - DNA, 15 bp, Homo sapiens
atttaattttgcgat

SEQ ID NO: 4887 - DNA, 15 bp, Homo sapiens
aatttaattttgcga

SEQ ID NO: 4888 - DNA, 15 bp, Homo sapiens
taatttaattttgcg

SEQ ID NO: 4889 - DNA, 15 bp, Homo sapiens
ataatttaattttgc

SEQ ID NO: 4890 - DNA, 15 bp, Homo sapiens
aataatttaattttg

SEQ ID NO: 4891 - DNA, 15 bp, Homo sapiens
gaataatttaatttt

SEQ ID NO: 4892 - DNA, 15 bp, Homo sapiens
agaataatttaattt

SEQ ID NO: 4893 - DNA, 15 bp, Homo sapiens
tagaataatttaatt

SEQ ID NO: 4894 - DNA, 15 bp, Homo sapiens
ttagaataatttaat

SEQ ID NO: 4895 - DNA, 15 bp, Homo sapiens
tttagaataatttaa

SEQ ID NO: 4896 - DNA, 15 bp, Homo sapiens
ttttagaataattta

SEQ ID NO: 4897 - DNA, 15 bp, Homo sapiens
tttttagaataattt

SEQ ID NO: 4898 - DNA, 15 bp, Homo sapiens
atttttagaataatt

SEQ ID NO: 4899 - DNA, 15 bp, Homo sapiens
aatttttagaataat

SEQ ID NO: 4900 - DNA, 15 bp, Homo sapiens
aaatttttagaataa

SEQ ID NO: 4901 - DNA, 15 bp, Homo sapiens
caaatttttagaata

SEQ ID NO: 4902 - DNA, 15 bp, Homo sapiens
acaaatttttagaat

SEQ ID NO: 4903 - DNA, 15 bp, Homo sapiens
aacaaatttttagaa

SEQ ID NO: 4904 - DNA, 15 bp, Homo sapiens
taacaaatttttaga

SEQ ID NO: 4905 - DNA, 15 bp, Homo sapiens
ctaacaaatttttag

SEQ ID NO: 4906 - DNA, 15 bp, Homo sapiens
actaacaaattttta

SEQ ID NO: 4907 - DNA, 15 bp, Homo sapiens
tactaacaaattttt

SEQ ID NO: 4908 - DNA, 15 bp, Homo sapiens
ctactaacaaatttt

SEQ ID NO: 4909 - DNA, 15 bp, Homo sapiens
cctactaacaaattt

SEQ ID NO: 4910 - DNA, 15 bp, Homo sapiens
ccctactaacaaatt

SEQ ID NO: 4911 - DNA, 15 bp, Homo sapiens
accctactaacaaat

SEQ ID NO: 4912 - DNA, 15 bp, Homo sapiens
aaccctactaacaaa

SEQ ID NO: 4913 - DNA, 15 bp, Homo sapiens
taaccctactaacaa

SEQ ID NO: 4914 - DNA, 15 bp, Homo sapiens
ataaccctactaaca

SEQ ID NO: 4915 - DNA, 15 bp, Homo sapiens
tataaccctactaac

SEQ ID NO: 4916 - DNA, 15 bp, Homo sapiens
atataaccctactaa

SEQ ID NO: 4917 - DNA, 15 bp, Homo sapiens
catataaccctacta

SEQ ID NO: 4918 - DNA, 15 bp, Homo sapiens
gcatataaccctact

SEQ ID NO: 4919 - DNA, 15 bp, Homo sapiens
agcatataaccctac

SEQ ID NO: 4920 - DNA, 15 bp, Homo sapiens
aagcatataacccta

SEQ ID NO: 4921 - DNA, 15 bp, Homo sapiens
taagcatataaccct

SEQ ID NO: 4922 - DNA, 15 bp, Homo sapiens
ttaagcatataaccc

SEQ ID NO: 4923 - DNA, 15 bp, Homo sapiens
attaagcatataacc

SEQ ID NO: 4924 - DNA, 15 bp, Homo sapiens
tattaagcatataac

SEQ ID NO: 4925 - DNA, 15 bp, Homo sapiens
atattaagcatataa

SEQ ID NO: 4926 - DNA, 15 bp, Homo sapiens
aatattaagcatata

SEQ ID NO: 4927 - DNA, 15 bp, Homo sapiens
taatattaagcatat

SEQ ID NO: 4928 - DNA, 15 bp, Homo sapiens
ctaatattaagcata

SEQ ID NO: 4929 - DNA, 15 bp, Homo sapiens
actaatattaagcat

SEQ ID NO: 4930 - DNA, 15 bp, Homo sapiens
gactaatattaagca

SEQ ID NO: 4931 - DNA, 15 bp, Homo sapiens
agactaatattaagc

SEQ ID NO: 4932 - DNA, 15 bp, Homo sapiens
cagactaatattaag

SEQ ID NO: 4933 - DNA, 15 bp, Homo sapiens
tcagactaatattaa

SEQ ID NO: 4934 - DNA, 15 bp, Homo sapiens
ttcagactaatatta

SEQ ID NO: 4935 - DNA, 15 bp, Homo sapiens
tttcagactaatatt

SEQ ID NO: 4936 - DNA, 15 bp, Homo sapiens
atttcagactaatat

SEQ ID NO: 4937 - DNA, 15 bp, Homo sapiens
tatttcagactaata

SEQ ID NO: 4938 - DNA, 15 bp, Homo sapiens
atatttcagactaat

SEQ ID NO: 4939 - DNA, 15 bp, Homo sapiens
tatatttcagactaa

SEQ ID NO: 4940 - DNA, 15 bp, Homo sapiens
ctatatttcagacta

SEQ ID NO: 4941 - DNA, 15 bp, Homo sapiens
actatatttcagact

SEQ ID NO: 4942 - DNA, 15 bp, Homo sapiens
cactatatttcagac

SEQ ID NO: 4943 - DNA, 15 bp, Homo sapiens
gcactatatttcaga

SEQ ID NO: 4944 - DNA, 15 bp, Homo sapiens
agcactatatttcag

SEQ ID NO: 4945 - DNA, 15 bp, Homo sapiens
cagcactatatttca

SEQ ID NO: 4946 - DNA, 15 bp, Homo sapiens
tcagcactatatttc

SEQ ID NO: 4947 - DNA, 15 bp, Homo sapiens
ttcagcactatattt

SEQ ID NO: 4948 - DNA, 15 bp, Homo sapiens
attcagcactatatt

SEQ ID NO: 4949 - DNA, 15 bp, Homo sapiens
aattcagcactatat

SEQ ID NO: 4950 - DNA, 15 bp, Homo sapiens
aaattcagcactata

SEQ ID NO: 4951 - DNA, 15 bp, Homo sapiens
caaattcagcactat

SEQ ID NO: 4952 - DNA, 15 bp, Homo sapiens
tcaaattcagcacta

SEQ ID NO: 4953 - DNA, 15 bp, Homo sapiens
ctcaaattcagcact

SEQ ID NO: 4954 - DNA, 15 bp, Homo sapiens
tctcaaattcagcac

SEQ ID NO: 4955 - DNA, 15 bp, Homo sapiens
gtctcaaattcagca

SEQ ID NO: 4956 - DNA, 15 bp, Homo sapiens
agtctcaaattcagc

SEQ ID NO: 4957 - DNA, 15 bp, Homo sapiens
tagtctcaaattcag

SEQ ID NO: 4958 - DNA, 15 bp, Homo sapiens
atagtctcaaattca

SEQ ID NO: 4959 - DNA, 15 bp, Homo sapiens
tatagtctcaaattc

SEQ ID NO: 4960 - DNA, 15 bp, Homo sapiens
ctatagtctcaaatt

SEQ ID NO: 4961 - DNA, 15 bp, Homo sapiens
tctatagtctcaaat

SEQ ID NO: 4962 - DNA, 15 bp, Homo sapiens
ttctatagtctcaaa

SEQ ID NO: 4963 - DNA, 15 bp, Homo sapiens
tttctatagtctcaa

SEQ ID NO: 4964 - DNA, 15 bp, Homo sapiens
ttttctatagtctca

SEQ ID NO: 4965 - DNA, 15 bp, Homo sapiens
tttttctatagtctc

SEQ ID NO: 4966 - DNA, 15 bp, Homo sapiens
atttttctatagtct

SEQ ID NO: 4967 - DNA, 15 bp, Homo sapiens
aatttttctatagtc

SEQ ID NO: 4968 - DNA, 15 bp, Homo sapiens
taatttttctatagt

SEQ ID NO: 4969 - DNA, 15 bp, Homo sapiens
ttaatttttctatag

SEQ ID NO: 4970 - DNA, 15 bp, Homo sapiens
cttaatttttctata

SEQ ID NO: 4971 - DNA, 15 bp, Homo sapiens
acttaatttttctat

SEQ ID NO: 4972 - DNA, 15 bp, Homo sapiens
cacttaatttttcta

SEQ ID NO: 4973 - DNA, 15 bp, Homo sapiens
acacttaatttttct

SEQ ID NO: 4974 - DNA, 15 bp, Homo sapiens
tacacttaatttttc

SEQ ID NO: 4975 - DNA, 15 bp, Homo sapiens
atacacttaattttt

SEQ ID NO: 4976 - DNA, 15 bp, Homo sapiens
aatacacttaatttt

SEQ ID NO: 4977 - DNA, 15 bp, Homo sapiens
aaatacacttaattt

SEQ ID NO: 4978 - DNA, 15 bp, Homo sapiens
taaatacacttaatt

SEQ ID NO: 4979 - DNA, 15 bp, Homo sapiens
ctaaatacacttaat

SEQ ID NO: 4980 - DNA, 15 bp, Homo sapiens
cctaaatacacttaa

SEQ ID NO: 4981 - DNA, 15 bp, Homo sapiens
ccctaaatacactta

SEQ ID NO: 4982 - DNA, 15 bp, Homo sapiens
accctaaatacactt

SEQ ID NO: 4983 - DNA, 15 bp, Homo sapiens
taccctaaatacact

SEQ ID NO: 4984 - DNA, 15 bp, Homo sapiens
ataccctaaatacac

SEQ ID NO: 4985 - DNA, 15 bp, Homo sapiens
cataccctaaataca

SEQ ID NO: 4986 - DNA, 15 bp, Homo sapiens
acataccctaaatac

SEQ ID NO: 4987 - DNA, 15 bp, Homo sapiens
cacataccctaaata

SEQ ID NO: 4988 - DNA, 15 bp, Homo sapiens
ccacataccctaaat

SEQ ID NO: 4989 - DNA, 15 bp, Homo sapiens
tccacataccctaaa

SEQ ID NO: 4990 - DNA, 15 bp, Homo sapiens
ttccacataccctaa

SEQ ID NO: 4991 - DNA, 15 bp, Homo sapiens
tttccacatacccta

SEQ ID NO: 4992 - DNA, 15 bp, Homo sapiens
gtttccacataccct

SEQ ID NO: 4993 - DNA, 15 bp, Homo sapiens
cgtttccacataccc

SEQ ID NO: 4994 - DNA, 15 bp, Homo sapiens
acgtttccacatacc

SEQ ID NO: 4995 - DNA, 15 bp, Homo sapiens
aacgtttccacatac

SEQ ID NO: 4996 - DNA, 15 bp, Homo sapiens
taacgtttccacata

SEQ ID NO: 4997 - DNA, 15 bp, Homo sapiens
ctaacgtttccacat

SEQ ID NO: 4998 - DNA, 15 bp, Homo sapiens
cctaacgtttccaca

SEQ ID NO: 4999 - DNA, 15 bp, Homo sapiens
gcctaacgtttccac

SEQ ID NO: 5000 - DNA, 15 bp, Homo sapiens
agcctaacgtttcca

SEQ ID NO: 5001 - DNA, 15 bp, Homo sapiens
aagcctaacgtttcc

SEQ ID NO: 5002 - DNA, 15 bp, Homo sapiens
gaagcctaacgtttc

SEQ ID NO: 5003 - DNA, 15 bp, Homo sapiens
agaagcctaacgttt

SEQ ID NO: 5004 - DNA, 15 bp, Homo sapiens
cagaagcctaacgtt

SEQ ID NO: 5005 - DNA, 15 bp, Homo sapiens
acagaagcctaacgt

SEQ ID NO: 5006 - DNA, 15 bp, Homo sapiens
aacagaagcctaacg

SEQ ID NO: 5007 - DNA, 15 bp, Homo sapiens
caacagaagcctaac

SEQ ID NO: 5008 - DNA, 15 bp, Homo sapiens
acaacagaagcctaa

SEQ ID NO: 5009 - DNA, 15 bp, Homo sapiens
tacaacagaagccta

SEQ ID NO: 5010 - DNA, 15 bp, Homo sapiens
atacaacagaagcct

SEQ ID NO: 5011 - DNA, 15 bp, Homo sapiens
aatacaacagaagcc

SEQ ID NO: 5012 - DNA, 15 bp, Homo sapiens
aaatacaacagaagc

SEQ ID NO: 5013 - DNA, 15 bp, Homo sapiens
aaaatacaacagaag

SEQ ID NO: 5014 - DNA, 15 bp, Homo sapiens
aaaaatacaacagaa

SEQ ID NO: 5015 - DNA, 15 bp, Homo sapiens
taaaaatacaacaga

SEQ ID NO: 5016 - DNA, 15 bp, Homo sapiens
ataaaaatacaacag

SEQ ID NO: 5017 - DNA, 15 bp, Homo sapiens
aataaaaatacaaca

SEQ ID NO: 5018 - DNA, 15 bp, Homo sapiens
caataaaaatacaac

SEQ ID NO: 5019 - DNA, 15 bp, Homo sapiens
acaataaaaatacaa

SEQ ID NO: 5020 - DNA, 15 bp, Homo sapiens
aacaataaaaataca

SEQ ID NO: 5021 - DNA, 15 bp, Homo sapiens
aaacaataaaaatac

SEQ ID NO: 5022 - DNA, 15 bp, Homo sapiens
caaacaataaaaata

SEQ ID NO: 5023 - DNA, 15 bp, Homo sapiens
ccaaacaataaaaat

SEQ ID NO: 5024 - DNA, 15 bp, Homo sapiens
accaaacaataaaaa

SEQ ID NO: 5025 - DNA, 15 bp, Homo sapiens
taccaaacaataaaa

SEQ ID NO: 5026 - DNA, 15 bp, Homo sapiens
ctaccaaacaataaa

SEQ ID NO: 5027 - DNA, 15 bp, Homo sapiens
tctaccaaacaataa

SEQ ID NO: 5028 - DNA, 15 bp, Homo sapiens
atctaccaaacaata

SEQ ID NO: 5029 - DNA, 15 bp, Homo sapiens
aatctaccaaacaat

SEQ ID NO: 5030 - DNA, 15 bp, Homo sapiens
aaatctaccaaacaa

SEQ ID NO: 5031 - DNA, 15 bp, Homo sapiens
caaatctaccaaaca

SEQ ID NO: 5032 - DNA, 15 bp, Homo sapiens
gcaaatctaccaaac

SEQ ID NO: 5033 - DNA, 15 bp, Homo sapiens
ggcaaatctaccaaa

SEQ ID NO: 5034 - DNA, 15 bp, Homo sapiens
aggcaaatctaccaa

SEQ ID NO: 5035 - DNA, 15 bp, Homo sapiens
gaggcaaatctacca

SEQ ID NO: 5036 - DNA, 15 bp, Homo sapiens
agaggcaaatctacc

SEQ ID NO: 5037 - DNA, 15 bp, Homo sapiens
aagaggcaaatctac

SEQ ID NO: 5038 - DNA, 15 bp, Homo sapiens
aaagaggcaaatcta

SEQ ID NO: 5039 - DNA, 15 bp, Homo sapiens
aaaagaggcaaatct

SEQ ID NO: 5040 - DNA, 15 bp, Homo sapiens
gaaaagaggcaaatc

SEQ ID NO: 5041 - DNA, 15 bp, Homo sapiens
tgaaaagaggcaaat

SEQ ID NO: 5042 - DNA, 15 bp, Homo sapiens
ttgaaaagaggcaaa

SEQ ID NO: 5043 - DNA, 15 bp, Homo sapiens
tttgaaaagaggcaa

SEQ ID NO: 5044 - DNA, 15 bp, Homo sapiens
atttgaaaagaggca

SEQ ID NO: 5045 - DNA, 15 bp, Homo sapiens
tatttgaaaagaggc

SEQ ID NO: 5046 - DNA, 15 bp, Homo sapiens
ttatttgaaaagagg

SEQ ID NO: 5047 - DNA, 15 bp, Homo sapiens
tttatttgaaaagag

SEQ ID NO: 5048 - DNA, 15 bp, Homo sapiens
atttatttgaaaaga

SEQ ID NO: 5049 - DNA, 15 bp, Homo sapiens
catttatttgaaaag

SEQ ID NO: 5050 - DNA, 15 bp, Homo sapiens
acatttatttgaaaa

SEQ ID NO: 5051 - DNA, 15 bp, Homo sapiens
aacatttatttgaaa

SEQ ID NO: 5052 - DNA, 15 bp, Homo sapiens
gaacatttatttgaa

SEQ ID NO: 5053 - DNA, 15 bp, Homo sapiens
tgaacatttatttga

SEQ ID NO: 5054 - DNA, 15 bp, Homo sapiens
gtgaacatttatttg

SEQ ID NO: 5055 - DNA, 15 bp, Homo sapiens
tgtgaacatttattt

SEQ ID NO: 5056 - DNA, 15 bp, Homo sapiens
ctgtgaacatttatt

SEQ ID NO: 5057 - DNA, 15 bp, Homo sapiens
cctgtgaacatttat

SEQ ID NO: 5058 - DNA, 15 bp, Homo sapiens
ccctgtgaacattta

SEQ ID NO: 5059 - DNA, 15 bp, Homo sapiens
tccctgtgaacattt

SEQ ID NO: 5060 - DNA, 15 bp, Homo sapiens
ttccctgtgaacatt

SEQ ID NO: 5061 - DNA, 15 bp, Homo sapiens
attccctgtgaacat

SEQ ID NO: 5062 - DNA, 15 bp, Homo sapiens
tattccctgtgaaca

SEQ ID NO: 5063 - DNA, 15 bp, Homo sapiens
gtattccctgtgaac

SEQ ID NO: 5064 - DNA, 15 bp, Homo sapiens
agtattccctgtgaa

SEQ ID NO: 5065 - DNA, 15 bp, Homo sapiens
aagtattccctgtga

SEQ ID NO: 5066 - DNA, 15 bp, Homo sapiens
aaagtattccctgtg

SEQ ID NO: 5067 - DNA, 15 bp, Homo sapiens
aaaagtattccctgt

SEQ ID NO: 5068 - DNA, 15 bp, Homo sapiens
taaaagtattccctg

SEQ ID NO: 5069 - DNA, 15 bp, Homo sapiens
ttaaaagtattccct

SEQ ID NO: 5070 - DNA, 15 bp, Homo sapiens
gttaaaagtattccc

SEQ ID NO: 5071 - DNA, 15 bp, Homo sapiens
agttaaaagtattcc

SEQ ID NO: 5072 - DNA, 15 bp, Homo sapiens
aagttaaaagtattc

SEQ ID NO: 5073 - DNA, 15 bp, Homo sapiens
caagttaaaagtatt

SEQ ID NO: 5074 - DNA, 15 bp, Homo sapiens
acaagttaaaagtat

SEQ ID NO: 5075 - DNA, 15 bp, Homo sapiens
tacaagttaaaagta

SEQ ID NO: 5076 - DNA, 15 bp, Homo sapiens
ctacaagttaaaagt

SEQ ID NO: 5077 - DNA, 15 bp, Homo sapiens
tctacaagttaaaag

SEQ ID NO: 5078 - DNA, 15 bp, Homo sapiens
ctctacaagttaaaa

SEQ ID NO: 5079 - DNA, 15 bp, Homo sapiens
tctctacaagttaaa

SEQ ID NO: 5080 - DNA, 15 bp, Homo sapiens
ctctctacaagttaa

SEQ ID NO: 5081 - DNA, 15 bp, Homo sapiens
actctctacaagtta

SEQ ID NO: 5082 - DNA, 15 bp, Homo sapiens
tactctctacaagtt

SEQ ID NO: 5083 - DNA, 15 bp, Homo sapiens
gtactctctacaagt

SEQ ID NO: 5084 - DNA, 15 bp, Homo sapiens
tgtactctctacaag

SEQ ID NO: 5085 - DNA, 15 bp, Homo sapiens
ctgtactctctacaa

SEQ ID NO: 5086 - DNA, 15 bp, Homo sapiens
actgtactctctaca

SEQ ID NO: 5087 - DNA, 15 bp, Homo sapiens
cactgtactctctac

SEQ ID NO: 5088 - DNA, 15 bp, Homo sapiens
tcactgtactctcta

SEQ ID NO: 5089 - DNA, 15 bp, Homo sapiens
gtcactgtactctct

SEQ ID NO: 5090 - DNA, 15 bp, Homo sapiens
agtcactgtactctc

SEQ ID NO: 5091 - DNA, 15 bp, Homo sapiens
tagtcactgtactct

SEQ ID NO: 5092 - DNA, 15 bp, Homo sapiens
atagtcactgtactc

SEQ ID NO: 5093 - DNA, 15 bp, Homo sapiens
aatagtcactgtact

SEQ ID NO: 5094 - DNA, 15 bp, Homo sapiens
caatagtcactgtac

SEQ ID NO: 5095 - DNA, 15 bp, Homo sapiens
tcaatagtcactgta

SEQ ID NO: 5096 - DNA, 15 bp, Homo sapiens
ttcaatagtcactgt

SEQ ID NO: 5097 - DNA, 15 bp, Homo sapiens
cttcaatagtcactg

SEQ ID NO: 5098 - DNA, 15 bp, Homo sapiens
acttcaatagtcact

SEQ ID NO: 5099 - DNA, 15 bp, Homo sapiens
aacttcaatagtcac

SEQ ID NO: 5100 - DNA, 15 bp, Homo sapiens
taacttcaatagtca

SEQ ID NO: 5101 - DNA, 15 bp, Homo sapiens
gtaacttcaatagtc

SEQ ID NO: 5102 - DNA, 15 bp, Homo sapiens
ggtaacttcaatagt

SEQ ID NO: 5103 - DNA, 15 bp, Homo sapiens
aggtaacttcaatag

SEQ ID NO: 5104 - DNA, 15 bp, Homo sapiens
taggtaacttcaata

SEQ ID NO: 5105 - DNA, 15 bp, Homo sapiens
ttaggtaacttcaat

SEQ ID NO: 5106 - DNA, 15 bp, Homo sapiens
tttaggtaacttcaa

SEQ ID NO: 5107 - DNA, 15 bp, Homo sapiens
atttaggtaacttca

SEQ ID NO: 5108 - DNA, 15 bp, Homo sapiens
aatttaggtaacttc

SEQ ID NO: 5109 - DNA, 15 bp, Homo sapiens
taatttaggtaactt

SEQ ID NO: 5110 - DNA, 15 bp, Homo sapiens
gtaatttaggtaact

SEQ ID NO: 5111 - DNA, 15 bp, Homo sapiens
ggtaatttaggtaac

SEQ ID NO: 5112 - DNA, 15 bp, Homo sapiens
aggtaatttaggtaa

SEQ ID NO: 5113 - DNA, 15 bp, Homo sapiens
gaggtaatttaggta

SEQ ID NO: 5114 - DNA, 15 bp, Homo sapiens
tgaggtaatttaggt

SEQ ID NO: 5115 - DNA, 15 bp, Homo sapiens
ttgaggtaatttagg

SEQ ID NO: 5116 - DNA, 15 bp, Homo sapiens
cttgaggtaatttag

SEQ ID NO: 5117 - DNA, 15 bp, Homo sapiens
ccttgaggtaattta

SEQ ID NO: 5118 - DNA, 15 bp, Homo sapiens
accttgaggtaattt

SEQ ID NO: 5119 - DNA, 15 bp, Homo sapiens
taccttgaggtaatt

SEQ ID NO: 5120 - DNA, 15 bp, Homo sapiens
ttaccttgaggtaat

SEQ ID NO: 5121 - DNA, 15 bp, Homo sapiens
cttaccttgaggtaa

SEQ ID NO: 5122 - DNA, 15 bp, Homo sapiens
acttaccttgaggta

SEQ ID NO: 5123 - DNA, 15 bp, Homo sapiens
cacttaccttgaggt

SEQ ID NO: 5124 - DNA, 15 bp, Homo sapiens
tcacttaccttgagg

SEQ ID NO: 5125 - DNA, 15 bp, Homo sapiens
atcacttaccttgag

SEQ ID NO: 5126 - DNA, 15 bp, Homo sapiens
aatcacttaccttga

SEQ ID NO: 5127 - DNA, 15 bp, Homo sapiens
taatcacttaccttg

SEQ ID NO: 5128 - DNA, 15 bp, Homo sapiens
gtaatcacttacctt

SEQ ID NO: 5129 - DNA, 15 bp, Homo sapiens
agtaatcacttacct

SEQ ID NO: 5130 - DNA, 15 bp, Homo sapiens
cagtaatcacttacc

SEQ ID NO: 5131 - DNA, 15 bp, Homo sapiens
tcagtaatcacttac

SEQ ID NO: 5132 - DNA, 15 bp, Homo sapiens
ttcagtaatcactta

SEQ ID NO: 5133 - DNA, 15 bp, Homo sapiens
tttcagtaatcactt

SEQ ID NO: 5134 - DNA, 15 bp, Homo sapiens
atttcagtaatcact

SEQ ID NO: 5135 - DNA, 15 bp, Homo sapiens
aatttcagtaatcac

SEQ ID NO: 5136 - DNA, 15 bp, Homo sapiens
taatttcagtaatca

SEQ ID NO: 5137 - DNA, 15 bp, Homo sapiens
ttaatttcagtaatc

SEQ ID NO: 5138 - DNA, 15 bp, Homo sapiens
attaatttcagtaat

SEQ ID NO: 5139 - DNA, 15 bp, Homo sapiens
gattaatttcagtaa

SEQ ID NO: 5140 - DNA, 15 bp, Homo sapiens
tgattaatttcagta

SEQ ID NO: 5141 - DNA, 15 bp, Homo sapiens
atgattaatttcagt

SEQ ID NO: 5142 - DNA, 15 bp, Homo sapiens
catgattaatttcag

SEQ ID NO: 5143 - DNA, 15 bp, Homo sapiens
tcatgattaatttca

SEQ ID NO: 5144 - DNA, 15 bp, Homo sapiens
ctcatgattaatttc

SEQ ID NO: 5145 - DNA, 15 bp, Homo sapiens
cctcatgattaattt

SEQ ID NO: 5146 - DNA, 15 bp, Homo sapiens
ccctcatgattaatt

SEQ ID NO: 5147 - DNA, 15 bp, Homo sapiens
accctcatgattaat

SEQ ID NO: 5148 - DNA, 15 bp, Homo sapiens
aaccctcatgattaa

SEQ ID NO: 5149 - DNA, 15 bp, Homo sapiens
aaaccctcatgatta

SEQ ID NO: 5150 - DNA, 15 bp, Homo sapiens
aaaaccctcatgatt

SEQ ID NO: 5151 - DNA, 15 bp, Homo sapiens
taaaaccctcatgat

SEQ ID NO: 5152 - DNA, 15 bp, Homo sapiens
ttaaaaccctcatga

SEQ ID NO: 5153 - DNA, 15 bp, Homo sapiens
tttaaaaccctcatg

SEQ ID NO: 5154 - DNA, 15 bp, Homo sapiens
ttttaaaaccctcat

SEQ ID NO: 5155 - DNA, 15 bp, Homo sapiens
tttttaaaaccctca

SEQ ID NO: 5156 - DNA, 15 bp, Homo sapiens
ctttttaaaaccctc

SEQ ID NO: 5157 - DNA, 15 bp, Homo sapiens
actttttaaaaccct

SEQ ID NO: 5158 - DNA, 15 bp, Homo sapiens
tactttttaaaaccc

SEQ ID NO: 5159 - DNA, 15 bp, Homo sapiens
atactttttaaaacc

SEQ ID NO: 5160 - DNA, 15 bp, Homo sapiens
aatactttttaaaac

SEQ ID NO: 5161 - DNA, 15 bp, Homo sapiens
gaatactttttaaaa

SEQ ID NO: 5162 - DNA, 15 bp, Homo sapiens
agaatactttttaaa

SEQ ID NO: 5163 - DNA, 15 bp, Homo sapiens
tagaatactttttaa

SEQ ID NO: 5164 - DNA, 15 bp, Homo sapiens
atagaatacttttta

SEQ ID NO: 5165 - DNA, 15 bp, Homo sapiens
aatagaatacttttt

SEQ ID NO: 5166 - DNA, 15 bp, Homo sapiens
gaatagaatactttt

SEQ ID NO: 5167 - DNA, 15 bp, Homo sapiens
tgaatagaatacttt

SEQ ID NO: 5168 - DNA, 15 bp, Homo sapiens
gtgaatagaatactt

SEQ ID NO: 5169 - DNA, 15 bp, Homo sapiens
tgtgaatagaatact

SEQ ID NO: 5170 - DNA, 15 bp, Homo sapiens
ttgtgaatagaatac

SEQ ID NO: 5171 - DNA, 15 bp, Homo sapiens
gttgtgaatagaata

SEQ ID NO: 5172 - DNA, 15 bp, Homo sapiens
tgttgtgaatagaat

SEQ ID NO: 5173 - DNA, 15 bp, Homo sapiens
atgttgtgaatagaa

SEQ ID NO: 5174 - DNA, 15 bp, Homo sapiens
aatgttgtgaataga

SEQ ID NO: 5175 - DNA, 15 bp, Homo sapiens
aaatgttgtgaatag

SEQ ID NO: 5176 - DNA, 15 bp, Homo sapiens
taaatgttgtgaata

SEQ ID NO: 5177 - DNA, 15 bp, Homo sapiens
ataaatgttgtgaat

SEQ ID NO: 5178 - DNA, 15 bp, Homo sapiens
aataaatgttgtgaa

SEQ ID NO: 5179 - DNA, 15 bp, Homo sapiens
aaataaatgttgtga

SEQ ID NO: 5180 - DNA, 15 bp, Homo sapiens
aaaataaatgttgtg

SEQ ID NO: 5181 - DNA, 15 bp, Homo sapiens
taaaataaatgttgt

SEQ ID NO: 5182 - DNA, 15 bp, Homo sapiens
gtaaaataaatgttg

SEQ ID NO: 5183 - DNA, 15 bp, Homo sapiens
tgtaaaataaatgtt

SEQ ID NO: 5184 - DNA, 15 bp, Homo sapiens
atgtaaaataaatgt

SEQ ID NO: 5185 - DNA, 15 bp, Homo sapiens
aatgtaaaataaatg

SEQ ID NO: 5186 - DNA, 15 bp, Homo sapiens
caatgtaaaataaat

SEQ ID NO: 5187 - DNA, 15 bp, Homo sapiens
acaatgtaaaataaa

SEQ ID NO: 5188 - DNA, 15 bp, Homo sapiens
aacaatgtaaaataa

SEQ ID NO: 5189 - DNA, 15 bp, Homo sapiens
aaacaatgtaaaata

SEQ ID NO: 5190 - DNA, 15 bp, Homo sapiens
aaaacaatgtaaaat

SEQ ID NO: 5191 - DNA, 15 bp, Homo sapiens
caaaacaatgtaaaa

SEQ ID NO: 5192 - DNA, 15 bp, Homo sapiens
acaaaacaatgtaaa

SEQ ID NO: 5193 - DNA, 15 bp, Homo sapiens
tacaaaacaatgtaa

SEQ ID NO: 5194 - DNA, 15 bp, Homo sapiens
atacaaaacaatgta

SEQ ID NO: 5195 - DNA, 15 bp, Homo sapiens
gatacaaaacaatgt

SEQ ID NO: 5196 - DNA, 15 bp, Homo sapiens
agatacaaaacaatg

SEQ ID NO: 5197 - DNA, 15 bp, Homo sapiens
cagatacaaaacaat

SEQ ID NO: 5198 - DNA, 15 bp, Homo sapiens
gcagatacaaaacaa

SEQ ID NO: 5199 - DNA, 15 bp, Homo sapiens
agcagatacaaaaca

SEQ ID NO: 5200 - DNA, 15 bp, Homo sapiens
tagcagatacaaaac

SEQ ID NO: 5201 - DNA, 15 bp, Homo sapiens
ttagcagatacaaaa

SEQ ID NO: 5202 - DNA, 15 bp, Homo sapiens
cttagcagatacaaa

SEQ ID NO: 5203 - DNA, 15 bp, Homo sapiens
acttagcagatacaa

SEQ ID NO: 5204 - DNA, 15 bp, Homo sapiens
aacttagcagataca

SEQ ID NO: 5205 - DNA, 15 bp, Homo sapiens
taacttagcagatac

SEQ ID NO: 5206 - DNA, 15 bp, Homo sapiens
ataacttagcagata

SEQ ID NO: 5207 - DNA, 15 bp, Homo sapiens
tataacttagcagat

SEQ ID NO: 5208 - DNA, 15 bp, Homo sapiens
atataacttagcaga

SEQ ID NO: 5209 - DNA, 15 bp, Homo sapiens
aatataacttagcag

SEQ ID NO: 5210 - DNA, 15 bp, Homo sapiens
aaatataacttagca

SEQ ID NO: 5211 - DNA, 15 bp, Homo sapiens
gaaatataacttagc

SEQ ID NO: 5212 - DNA, 15 bp, Homo sapiens
ggaaatataacttag

SEQ ID NO: 5213 - DNA, 15 bp, Homo sapiens
aggaaatataactta

SEQ ID NO: 5214 - DNA, 15 bp, Homo sapiens
caggaaatataactt

SEQ ID NO: 5215 - DNA, 15 bp, Homo sapiens
tcaggaaatataact

SEQ ID NO: 5216 - DNA, 15 bp, Homo sapiens
ttcaggaaatataac

SEQ ID NO: 5217 - DNA, 15 bp, Homo sapiens
tttcaggaaatataa

SEQ ID NO: 5218 - DNA, 15 bp, Homo sapiens
ttttcaggaaatata

SEQ ID NO: 5219 - DNA, 15 bp, Homo sapiens
tttttcaggaaatat

SEQ ID NO: 5220 - DNA, 15 bp, Homo sapiens
gtttttcaggaaata

SEQ ID NO: 5221 - DNA, 15 bp, Homo sapiens
tgtttttcaggaaat

SEQ ID NO: 5222 - DNA, 15 bp, Homo sapiens
atgtttttcaggaaa

SEQ ID NO: 5223 - DNA, 15 bp, Homo sapiens
catgtttttcaggaa

SEQ ID NO: 5224 - DNA, 15 bp, Homo sapiens
tcatgtttttcagga

SEQ ID NO: 5225 - DNA, 15 bp, Homo sapiens
gtcatgtttttcagg

SEQ ID NO: 5226 - DNA, 15 bp, Homo sapiens
agtcatgtttttcag

SEQ ID NO: 5227 - DNA, 15 bp, Homo sapiens
cagtcatgtttttca

SEQ ID NO: 5228 - DNA, 15 bp, Homo sapiens
ccagtcatgtttttc

SEQ ID NO: 5229 - DNA, 15 bp, Homo sapiens
tccagtcatgttttt

SEQ ID NO: 5230 - DNA, 15 bp, Homo sapiens
gtccagtcatgtttt

SEQ ID NO: 5231 - DNA, 15 bp, Homo sapiens
ggtccagtcatgttt

SEQ ID NO: 5232 - DNA, 15 bp, Homo sapiens
tggtccagtcatgtt

SEQ ID NO: 5233 - DNA, 15 bp, Homo sapiens
gtggtccagtcatgt

SEQ ID NO: 5234 - DNA, 15 bp, Homo sapiens
ggtggtccagtcatg

SEQ ID NO: 5235 - DNA, 15 bp, Homo sapiens
aggtggtccagtcat

SEQ ID NO: 5236 - DNA, 15 bp, Homo sapiens
taggtggtccagtca

SEQ ID NO: 5237 - DNA, 15 bp, Homo sapiens
ttaggtggtccagtc

SEQ ID NO: 5238 - DNA, 15 bp, Homo sapiens
attaggtggtccagt

SEQ ID NO: 5239 - DNA, 15 bp, Homo sapiens
aattaggtggtccag

SEQ ID NO: 5240 - DNA, 15 bp, Homo sapiens
caattaggtggtcca

SEQ ID NO: 5241 - DNA, 15 bp, Homo sapiens
gcaattaggtggtcc

SEQ ID NO: 5242 - DNA, 15 bp, Homo sapiens
agcaattaggtggtc

SEQ ID NO: 5243 - DNA, 15 bp, Homo sapiens
cagcaattaggtggt

SEQ ID NO: 5244 - DNA, 15 bp, Homo sapiens
acagcaattaggtgg

SEQ ID NO: 5245 - DNA, 15 bp, Homo sapiens
tacagcaattaggtg

SEQ ID NO: 5246 - DNA, 15 bp, Homo sapiens
atacagcaattaggt

SEQ ID NO: 5247 - DNA, 15 bp, Homo sapiens
catacagcaattagg

SEQ ID NO: 5248 - DNA, 15 bp, Homo sapiens
tcatacagcaattag

SEQ ID NO: 5249 - DNA, 15 bp, Homo sapiens
atcatacagcaatta

SEQ ID NO: 5250 - DNA, 15 bp, Homo sapiens
tatcatacagcaatt

SEQ ID NO: 5251 - DNA, 15 bp, Homo sapiens
ttatcatacagcaat

SEQ ID NO: 5252 - DNA, 15 bp, Homo sapiens
gttatcatacagcaa

SEQ ID NO: 5253 - DNA, 15 bp, Homo sapiens
agttatcatacagca

SEQ ID NO: 5254 - DNA, 15 bp, Homo sapiens
aagttatcatacagc

SEQ ID NO: 5255 - DNA, 15 bp, Homo sapiens
taagttatcatacag

SEQ ID NO: 5256 - DNA, 15 bp, Homo sapiens
gtaagttatcataca

SEQ ID NO: 5257 - DNA, 15 bp, Homo sapiens
tgtaagttatcatac

SEQ ID NO: 5258 - DNA, 15 bp, Homo sapiens
ttgtaagttatcata

SEQ ID NO: 5259 - DNA, 15 bp, Homo sapiens
tttgtaagttatcat

SEQ ID NO: 5260 - DNA, 15 bp, Homo sapiens
gtttgtaagttatca

SEQ ID NO: 5261 - DNA, 15 bp, Homo sapiens
agtttgtaagttatc

SEQ ID NO: 5262 - DNA, 15 bp, Homo sapiens
aagtttgtaagttat

SEQ ID NO: 5263 - DNA, 15 bp, Homo sapiens
gaagtttgtaagtta

SEQ ID NO: 5264 - DNA, 15 bp, Homo sapiens
tgaagtttgtaagtt

SEQ ID NO: 5265 - DNA, 15 bp, Homo sapiens
atgaagtttgtaagt

SEQ ID NO: 5266 - DNA, 15 bp, Homo sapiens
aatgaagtttgtaag

SEQ ID NO: 5267 - DNA, 15 bp, Homo sapiens
aaatgaagtttgtaa

SEQ ID NO: 5268 - DNA, 15 bp, Homo sapiens
aaaatgaagtttgta

SEQ ID NO: 5269 - DNA, 15 bp, Homo sapiens
aaaaatgaagtttgt

SEQ ID NO: 5270 - DNA, 15 bp, Homo sapiens
gaaaaatgaagtttg

SEQ ID NO: 5271 - DNA, 15 bp, Homo sapiens
tgaaaaatgaagttt

SEQ ID NO: 5272 - DNA, 15 bp, Homo sapiens
atgaaaaatgaagtt

SEQ ID NO: 5273 - DNA, 15 bp, Homo sapiens
tatgaaaaatgaagt

SEQ ID NO: 5274 - DNA, 15 bp, Homo sapiens
ctatgaaaaatgaag

SEQ ID NO: 5275 - DNA, 15 bp, Homo sapiens
actatgaaaaatgaa

SEQ ID NO: 5276 - DNA, 15 bp, Homo sapiens
cactatgaaaaatga

SEQ ID NO: 5277 - DNA, 15 bp, Homo sapiens
gcactatgaaaaatg

SEQ ID NO: 5278 - DNA, 15 bp, Homo sapiens
agcactatgaaaaat

SEQ ID NO: 5279 - DNA, 15 bp, Homo sapiens
aagcactatgaaaaa

SEQ ID NO: 5280 - DNA, 15 bp, Homo sapiens
taagcactatgaaaa

SEQ ID NO: 5281 - DNA, 15 bp, Homo sapiens
ataagcactatgaaa

SEQ ID NO: 5282 - DNA, 15 bp, Homo sapiens
aataagcactatgaa

SEQ ID NO: 5283 - DNA, 15 bp, Homo sapiens
gaataagcactatga

SEQ ID NO: 5284 - DNA, 15 bp, Homo sapiens
tgaataagcactatg

SEQ ID NO: 5285 - DNA, 15 bp, Homo sapiens
ttgaataagcactat

SEQ ID NO: 5286 - DNA, 15 bp, Homo sapiens
cttgaataagcacta

SEQ ID NO: 5287 - DNA, 15 bp, Homo sapiens
acttgaataagcact

SEQ ID NO: 5288 - DNA, 15 bp, Homo sapiens
cacttgaataagcac

SEQ ID NO: 5289 - DNA, 15 bp, Homo sapiens
acacttgaataagca

SEQ ID NO: 5290 - DNA, 15 bp, Homo sapiens
tacacttgaataagc

SEQ ID NO: 5291 - DNA, 15 bp, Homo sapiens
ttacacttgaataag

SEQ ID NO: 5292 - DNA, 15 bp, Homo sapiens
tttacacttgaataa

SEQ ID NO: 5293 - DNA, 15 bp, Homo sapiens
ctttacacttgaata

SEQ ID NO: 5294 - DNA, 15 bp, Homo sapiens
gctttacacttgaat

SEQ ID NO: 5295 - DNA, 15 bp, Homo sapiens
tgctttacacttgaa

SEQ ID NO: 5296 - DNA, 15 bp, Homo sapiens
gtgctttacacttga

SEQ ID NO: 5297 - DNA, 15 bp, Homo sapiens
tgtgctttacacttg

SEQ ID NO: 5298 - DNA, 15 bp, Homo sapiens
ttgtgctttacactt

SEQ ID NO: 5299 - DNA, 15 bp, Homo sapiens
gttgtgctttacact

SEQ ID NO: 5300 - DNA, 15 bp, Homo sapiens
agttgtgctttacac

SEQ ID NO: 5301 - DNA, 15 bp, Homo sapiens
cagttgtgctttaca

SEQ ID NO: 5302 - DNA, 15 bp, Homo sapiens
tcagttgtgctttac

SEQ ID NO: 5303 - DNA, 15 bp, Homo sapiens
ttcagttgtgcttta

SEQ ID NO: 5304 - DNA, 15 bp, Homo sapiens
tttcagttgtgcttt

SEQ ID NO: 5305 - DNA, 15 bp, Homo sapiens
ctttcagttgtgctt

SEQ ID NO: 5306 - DNA, 15 bp, Homo sapiens
cctttcagttgtgct

SEQ ID NO: 5307 - DNA, 15 bp, Homo sapiens
tcctttcagttgtgc

SEQ ID NO: 5308 - DNA, 15 bp, Homo sapiens
ctcctttcagttgtg

SEQ ID NO: 5309 - DNA, 15 bp, Homo sapiens
actcctttcagttgt

SEQ ID NO: 5310 - DNA, 15 bp, Homo sapiens
tactcctttcagttg

SEQ ID NO: 5311 - DNA, 15 bp, Homo sapiens
ttactcctttcagtt

SEQ ID NO: 5312 - DNA, 15 bp, Homo sapiens
attactcctttcagt

SEQ ID NO: 5313 - DNA, 15 bp, Homo sapiens
cattactcctttcag

SEQ ID NO: 5314 - DNA, 15 bp, Homo sapiens
acattactcctttca

SEQ ID NO: 5315 - DNA, 15 bp, Homo sapiens
tacattactcctttc

SEQ ID NO: 5316 - DNA, 15 bp, Homo sapiens
gtacattactccttt

SEQ ID NO: 5317 - DNA, 15 bp, Homo sapiens
tgtacattactcctt

SEQ ID NO: 5318 - DNA, 15 bp, Homo sapiens
ctgtacattactcct

SEQ ID NO: 5319 - DNA, 15 bp, Homo sapiens
actgtacattactcc

SEQ ID NO: 5320 - DNA, 15 bp, Homo sapiens
aactgtacattactc

SEQ ID NO: 5321 - DNA, 15 bp, Homo sapiens
aaactgtacattact

SEQ ID NO: 5322 - DNA, 15 bp, Homo sapiens
taaactgtacattac

SEQ ID NO: 5323 - DNA, 15 bp, Homo sapiens
ataaactgtacatta

SEQ ID NO: 5324 - DNA, 15 bp, Homo sapiens
tataaactgtacatt

SEQ ID NO: 5325 - DNA, 15 bp, Homo sapiens
atataaactgtacat

SEQ ID NO: 5326 - DNA, 15 bp, Homo sapiens
catataaactgtaca

SEQ ID NO: 5327 - DNA, 15 bp, Homo sapiens
tcatataaactgtac

SEQ ID NO: 5328 - DNA, 15 bp, Homo sapiens
ctcatataaactgta

SEQ ID NO: 5329 - DNA, 15 bp, Homo sapiens
cctcatataaactgt

SEQ ID NO: 5330 - DNA, 15 bp, Homo sapiens
tcctcatataaactg

SEQ ID NO: 5331 - DNA, 15 bp, Homo sapiens
ttcctcatataaact

SEQ ID NO: 5332 - DNA, 15 bp, Homo sapiens
tttcctcatataaac

SEQ ID NO: 5333 - DNA, 15 bp, Homo sapiens
ttttcctcatataaa

SEQ ID NO: 5334 - DNA, 15 bp, Homo sapiens
tttttcctcatataa

SEQ ID NO: 5335 - DNA, 15 bp, Homo sapiens
ctttttcctcatata

SEQ ID NO: 5336 - DNA, 15 bp, Homo sapiens
cctttttcctcatat

SEQ ID NO: 5337 - DNA, 15 bp, Homo sapiens
tcctttttcctcata

SEQ ID NO: 5338 - DNA, 15 bp, Homo sapiens
ttcctttttcctcat

SEQ ID NO: 5339 - DNA, 15 bp, Homo sapiens
attcctttttcctca

SEQ ID NO: 5340 - DNA, 15 bp, Homo sapiens
aattcctttttcctc

SEQ ID NO: 5341 - DNA, 15 bp, Homo sapiens
aaattcctttttcct

SEQ ID NO: 5342 - DNA, 15 bp, Homo sapiens
aaaattcctttttcc

SEQ ID NO: 5343 - DNA, 15 bp, Homo sapiens
taaaattcctttttc

SEQ ID NO: 5344 - DNA, 15 bp, Homo sapiens
ataaaattccttttt

SEQ ID NO: 5345 - DNA, 15 bp, Homo sapiens
aataaaattcctttt

SEQ ID NO: 5346 - DNA, 15 bp, Homo sapiens
caataaaattccttt

SEQ ID NO: 5347 - DNA, 15 bp, Homo sapiens
gcaataaaattcctt

SEQ ID NO: 5348 - DNA, 15 bp, Homo sapiens
agcaataaaattcct

SEQ ID NO: 5349 - DNA, 15 bp, Homo sapiens
cagcaataaaattcc

SEQ ID NO: 5350 - DNA, 15 bp, Homo sapiens
gcagcaataaaattc

SEQ ID NO: 5351 - DNA, 15 bp, Homo sapiens
ggcagcaataaaatt

SEQ ID NO: 5352 - DNA, 15 bp, Homo sapiens
tggcagcaataaaat

SEQ ID NO: 5353 - DNA, 15 bp, Homo sapiens
ctggcagcaataaaa

SEQ ID NO: 5354 - DNA, 15 bp, Homo sapiens
actggcagcaataaa

SEQ ID NO: 5355 - DNA, 15 bp, Homo sapiens
cactggcagcaataa

SEQ ID NO: 5356 - DNA, 15 bp, Homo sapiens
acactggcagcaata

SEQ ID NO: 5357 - DNA, 15 bp, Homo sapiens
tacactggcagcaat

SEQ ID NO: 5358 - DNA, 15 bp, Homo sapiens
ttacactggcagcaa

SEQ ID NO: 5359 - DNA, 15 bp, Homo sapiens
tttacactggcagca

SEQ ID NO: 5360 - DNA, 15 bp, Homo sapiens
ttttacactggcagc

SEQ ID NO: 5361 - DNA, 15 bp, Homo sapiens
cttttacactggcag

SEQ ID NO: 5362 - DNA, 15 bp, Homo sapiens
acttttacactggca

SEQ ID NO: 5363 - DNA, 15 bp, Homo sapiens
aacttttacactggc

SEQ ID NO: 5364 - DNA, 15 bp, Homo sapiens
aaacttttacactgg

SEQ ID NO: 5365 - DNA, 15 bp, Homo sapiens
caaacttttacactg

SEQ ID NO: 5366 - DNA, 15 bp, Homo sapiens
gcaaacttttacact

SEQ ID NO: 5367 - DNA, 15 bp, Homo sapiens
tgcaaacttttacac

SEQ ID NO: 5368 - DNA, 15 bp, Homo sapiens
gtgcaaacttttaca

SEQ ID NO: 5369 - DNA, 15 bp, Homo sapiens
tgtgcaaacttttac

SEQ ID NO: 5370 - DNA, 15 bp, Homo sapiens
ctgtgcaaactttta

SEQ ID NO: 5371 - DNA, 15 bp, Homo sapiens
gctgtgcaaactttt

SEQ ID NO: 5372 - DNA, 15 bp, Homo sapiens
tgctgtgcaaacttt

SEQ ID NO: 5373 - DNA, 15 bp, Homo sapiens
ctgctgtgcaaactt

SEQ ID NO: 5374 - DNA, 15 bp, Homo sapiens
actgctgtgcaaact

SEQ ID NO: 5375 - DNA, 15 bp, Homo sapiens
tactgctgtgcaaac

SEQ ID NO: 5376 - DNA, 15 bp, Homo sapiens
atactgctgtgcaaa

SEQ ID NO: 5377 - DNA, 15 bp, Homo sapiens
tatactgctgtgcaa

SEQ ID NO: 5378 - DNA, 15 bp, Homo sapiens
ctatactgctgtgca

SEQ ID NO: 5379 - DNA, 15 bp, Homo sapiens
actatactgctgtgc

SEQ ID NO: 5380 - DNA, 15 bp, Homo sapiens
gactatactgctgtg

SEQ ID NO: 5381 - DNA, 15 bp, Homo sapiens
tgactatactgctgt

SEQ ID NO: 5382 - DNA, 15 bp, Homo sapiens
atgactatactgctg

SEQ ID NO: 5383 - DNA, 15 bp, Homo sapiens
gatgactatactgct

SEQ ID NO: 5384 - DNA, 15 bp, Homo sapiens
tgatgactatactgc

SEQ ID NO: 5385 - DNA, 15 bp, Homo sapiens
ttgatgactatactg

SEQ ID NO: 5386 - DNA, 15 bp, Homo sapiens
attgatgactatact

SEQ ID NO: 5387 - DNA, 15 bp, Homo sapiens
cattgatgactatac

SEQ ID NO: 5388 - DNA, 15 bp, Homo sapiens
gcattgatgactata

SEQ ID NO: 5389 - DNA, 15 bp, Homo sapiens
tgcattgatgactat

SEQ ID NO: 5390 - DNA, 15 bp, Homo sapiens
ctgcattgatgacta

SEQ ID NO: 5391 - DNA, 15 bp, Homo sapiens
tctgcattgatgact

SEQ ID NO: 5392 - DNA, 15 bp, Homo sapiens
atctgcattgatgac

SEQ ID NO: 5393 - DNA, 15 bp, Homo sapiens
aatctgcattgatga

SEQ ID NO: 5394 - DNA, 15 bp, Homo sapiens
aaatctgcattgatg

SEQ ID NO: 5395 - DNA, 15 bp, Homo sapiens
taaatctgcattgat

SEQ ID NO: 5396 - DNA, 15 bp, Homo sapiens
gtaaatctgcattga

SEQ ID NO: 5397 - DNA, 15 bp, Homo sapiens
tgtaaatctgcattg

SEQ ID NO: 5398 - DNA, 15 bp, Homo sapiens
atgtaaatctgcatt

SEQ ID NO: 5399 - DNA, 15 bp, Homo sapiens
aatgtaaatctgcat

SEQ ID NO: 5400 - DNA, 15 bp, Homo sapiens
caatgtaaatctgca

SEQ ID NO: 5401 - DNA, 15 bp, Homo sapiens
gcaatgtaaatctgc

SEQ ID NO: 5402 - DNA, 15 bp, Homo sapiens
agcaatgtaaatctg

SEQ ID NO: 5403 - DNA, 15 bp, Homo sapiens
aagcaatgtaaatct

SEQ ID NO: 5404 - DNA, 15 bp, Homo sapiens
taagcaatgtaaatc

SEQ ID NO: 5405 - DNA, 15 bp, Homo sapiens
ataagcaatgtaaat

SEQ ID NO: 5406 - DNA, 15 bp, Homo sapiens
tataagcaatgtaaa

SEQ ID NO: 5407 - DNA, 15 bp, Homo sapiens
ttataagcaatgtaa

SEQ ID NO: 5408 - DNA, 15 bp, Homo sapiens
attataagcaatgta

SEQ ID NO: 5409 - DNA, 15 bp, Homo sapiens
tattataagcaatgt

SEQ ID NO: 5410 - DNA, 15 bp, Homo sapiens
atattataagcaatg

SEQ ID NO: 5411 - DNA, 15 bp, Homo sapiens
tatattataagcaat

SEQ ID NO: 5412 - DNA, 15 bp, Homo sapiens
gtatattataagcaa

SEQ ID NO: 5413 - DNA, 15 bp, Homo sapiens
agtatattataagca

SEQ ID NO: 5414 - DNA, 15 bp, Homo sapiens
tagtatattataagc

SEQ ID NO: 5415 - DNA, 15 bp, Homo sapiens
ttagtatattataag

SEQ ID NO: 5416 - DNA, 15 bp, Homo sapiens
cttagtatattataa

SEQ ID NO: 5417 - DNA, 15 bp, Homo sapiens
acttagtatattata

SEQ ID NO: 5418 - DNA, 15 bp, Homo sapiens
tacttagtatattat

SEQ ID NO: 5419 - DNA, 15 bp, Homo sapiens
ttacttagtatatta

SEQ ID NO: 5420 - DNA, 15 bp, Homo sapiens
tttacttagtatatt

SEQ ID NO: 5421 - DNA, 15 bp, Homo sapiens
atttacttagtatat

SEQ ID NO: 5422 - DNA, 15 bp, Homo sapiens
tatttacttagtata

SEQ ID NO: 5423 - DNA, 15 bp, Homo sapiens
gtatttacttagtat

SEQ ID NO: 5424 - DNA, 15 bp, Homo sapiens
agtatttacttagta

SEQ ID NO: 5425 - DNA, 15 bp, Homo sapiens
tagtatttacttagt

SEQ ID NO: 5426 - DNA, 15 bp, Homo sapiens
ttagtatttacttag

SEQ ID NO: 5427 - DNA, 15 bp, Homo sapiens
tttagtatttactta

SEQ ID NO: 5428 - DNA, 15 bp, Homo sapiens
atttagtatttactt

SEQ ID NO: 5429 - DNA, 15 bp, Homo sapiens
catttagtatttact

SEQ ID NO: 5430 - DNA, 15 bp, Homo sapiens
tcatttagtatttac

SEQ ID NO: 5431 - DNA, 15 bp, Homo sapiens
atcatttagtattta

SEQ ID NO: 5432 - DNA, 15 bp, Homo sapiens
aatcatttagtattt

SEQ ID NO: 5433 - DNA, 15 bp, Homo sapiens
taatcatttagtatt

SEQ ID NO: 5434 - DNA, 15 bp, Homo sapiens
ttaatcatttagtat

SEQ ID NO: 5435 - DNA, 15 bp, Homo sapiens
tttaatcatttagta

SEQ ID NO: 5436 - DNA, 15 bp, Homo sapiens
ctttaatcatttagt

SEQ ID NO: 5437 - DNA, 15 bp, Homo sapiens
tctttaatcatttag

SEQ ID NO: 5438 - DNA, 15 bp, Homo sapiens
atctttaatcattta

SEQ ID NO: 5439 - DNA, 15 bp, Homo sapiens
tatctttaatcattt

SEQ ID NO: 5440 - DNA, 15 bp, Homo sapiens
ttatctttaatcatt

SEQ ID NO: 5441 - DNA, 15 bp, Homo sapiens
attatctttaatcat

SEQ ID NO: 5442 - DNA, 15 bp, Homo sapiens
tattatctttaatca

SEQ ID NO: 5443 - DNA, 15 bp, Homo sapiens
ttattatctttaatc

SEQ ID NO: 5444 - DNA, 15 bp, Homo sapiens
tttattatctttaat

SEQ ID NO: 5445 - DNA, 15 bp, Homo sapiens
ttttattatctttaa

SEQ ID NO: 5446 - DNA, 15 bp, Homo sapiens
attttattatcttta

SEQ ID NO: 5447 - DNA, 15 bp, Homo sapiens
tattttattatcttt

SEQ ID NO: 5448 - DNA, 15 bp, Homo sapiens
atattttattatctt

SEQ ID NO: 5449 - DNA, 15 bp, Homo sapiens
catattttattatct

SEQ ID NO: 5450 - DNA, 15 bp, Homo sapiens
ccatattttattatc

SEQ ID NO: 5451 - DNA, 15 bp, Homo sapiens
accatattttattat

SEQ ID NO: 5452 - DNA, 15 bp, Homo sapiens
caccatattttatta

SEQ ID NO: 5453 - DNA, 15 bp, Homo sapiens
tcaccatattttatt

SEQ ID NO: 5454 - DNA, 15 bp, Homo sapiens
ctcaccatattttat

SEQ ID NO: 5455 - DNA, 15 bp, Homo sapiens
cctcaccatatttta

SEQ ID NO: 5456 - DNA, 15 bp, Homo sapiens
acctcaccatatttt

SEQ ID NO: 5457 - DNA, 15 bp, Homo sapiens
tacctcaccatattt

SEQ ID NO: 5458 - DNA, 15 bp, Homo sapiens
atacctcaccatatt

SEQ ID NO: 5459 - DNA, 15 bp, Homo sapiens
tatacctcaccatat

SEQ ID NO: 5460 - DNA, 15 bp, Homo sapiens
ttatacctcaccata

SEQ ID NO: 5461 - DNA, 15 bp, Homo sapiens
gttatacctcaccat

SEQ ID NO: 5462 - DNA, 15 bp, Homo sapiens
ggttatacctcacca

SEQ ID NO: 5463 - DNA, 15 bp, Homo sapiens
tggttatacctcacc

SEQ ID NO: 5464 - DNA, 15 bp, Homo sapiens
gtggttatacctcac

SEQ ID NO: 5465 - DNA, 15 bp, Homo sapiens
ggtggttatacctca

SEQ ID NO: 5466 - DNA, 15 bp, Homo sapiens
aggtggttatacctc

SEQ ID NO: 5467 - DNA, 15 bp, Homo sapiens
aaggtggttatacct

SEQ ID NO: 5468 - DNA, 15 bp, Homo sapiens
gaaggtggttatacc

SEQ ID NO: 5469 - DNA, 15 bp, Homo sapiens
tgaaggtggttatac

SEQ ID NO: 5470 - DNA, 15 bp, Homo sapiens
atgaaggtggttata

SEQ ID NO: 5471 - DNA, 15 bp, Homo sapiens
aatgaaggtggttat

SEQ ID NO: 5472 - DNA, 15 bp, Homo sapiens
aaatgaaggtggtta

SEQ ID NO: 5473 - DNA, 15 bp, Homo sapiens
aaaatgaaggtggtt

SEQ ID NO: 5474 - DNA, 15 bp, Homo sapiens
taaaatgaaggtggt

SEQ ID NO: 5475 - DNA, 15 bp, Homo sapiens
ttaaaatgaaggtgg

SEQ ID NO: 5476 - DNA, 15 bp, Homo sapiens
tttaaaatgaaggtg

SEQ ID NO: 5477 - DNA, 15 bp, Homo sapiens
gtttaaaatgaaggt

SEQ ID NO: 5478 - DNA, 15 bp, Homo sapiens
agtttaaaatgaagg

SEQ ID NO: 5479 - DNA, 15 bp, Homo sapiens
aagtttaaaatgaag

SEQ ID NO: 5480 - DNA, 15 bp, Homo sapiens
taagtttaaaatgaa

SEQ ID NO: 5481 - DNA, 15 bp, Homo sapiens
ctaagtttaaaatga

SEQ ID NO: 5482 - DNA, 15 bp, Homo sapiens
actaagtttaaaatg

SEQ ID NO: 5483 - DNA, 15 bp, Homo sapiens
aactaagtttaaaat

SEQ ID NO: 5484 - DNA, 15 bp, Homo sapiens
aaactaagtttaaaa

SEQ ID NO: 5485 - DNA, 15 bp, Homo sapiens
aaaactaagtttaaa

SEQ ID NO: 5486 - DNA, 15 bp, Homo sapiens
taaaactaagtttaa

SEQ ID NO: 5487 - DNA, 15 bp, Homo sapiens
ctaaaactaagttta

SEQ ID NO: 5488 - DNA, 15 bp, Homo sapiens
tctaaaactaagttt

SEQ ID NO: 5489 - DNA, 15 bp, Homo sapiens
ttctaaaactaagtt

SEQ ID NO: 5490 - DNA, 15 bp, Homo sapiens
cttctaaaactaagt

SEQ ID NO: 5491 - DNA, 15 bp, Homo sapiens
tcttctaaaactaag

SEQ ID NO: 5492 - DNA, 15 bp, Homo sapiens
atcttctaaaactaa

SEQ ID NO: 5493 - DNA, 15 bp, Homo sapiens
tatcttctaaaacta

SEQ ID NO: 5494 - DNA, 15 bp, Homo sapiens
ctatcttctaaaact

SEQ ID NO: 5495 - DNA, 15 bp, Homo sapiens
actatcttctaaaac

SEQ ID NO: 5496 - DNA, 15 bp, Homo sapiens
tactatcttctaaaa

SEQ ID NO: 5497 - DNA, 15 bp, Homo sapiens
ttactatcttctaaa

SEQ ID NO: 5498 - DNA, 15 bp, Homo sapiens
tttactatcttctaa

SEQ ID NO: 5499 - DNA, 15 bp, Homo sapiens
ctttactatcttcta

SEQ ID NO: 5500 - DNA, 15 bp, Homo sapiens
tctttactatcttct

SEQ ID NO: 5501 - DNA, 15 bp, Homo sapiens
ttctttactatcttc

SEQ ID NO: 5502 - DNA, 15 bp, Homo sapiens
tttctttactatctt

SEQ ID NO: 5503 - DNA, 15 bp, Homo sapiens
ctttctttactatct

SEQ ID NO: 5504 - DNA, 15 bp, Homo sapiens
tctttctttactatc

SEQ ID NO: 5505 - DNA, 15 bp, Homo sapiens
atctttctttactat

SEQ ID NO: 5506 - DNA, 15 bp, Homo sapiens
aatctttctttacta

SEQ ID NO: 5507 - DNA, 15 bp, Homo sapiens
gaatctttctttact

SEQ ID NO: 5508 - DNA, 15 bp, Homo sapiens
ggaatctttctttac

SEQ ID NO: 5509 - DNA, 15 bp, Homo sapiens
aggaatctttcttta

SEQ ID NO: 5510 - DNA, 15 bp, Homo sapiens
aaggaatctttcttt

SEQ ID NO: 5511 - DNA, 15 bp, Homo sapiens
aaaggaatctttctt

SEQ ID NO: 5512 - DNA, 15 bp, Homo sapiens
taaaggaatctttct

SEQ ID NO: 5513 - DNA, 15 bp, Homo sapiens
ataaaggaatctttc

SEQ ID NO: 5514 - DNA, 15 bp, Homo sapiens
aataaaggaatcttt

SEQ ID NO: 5515 - DNA, 15 bp, Homo sapiens
taataaaggaatctt

SEQ ID NO: 5516 - DNA, 15 bp, Homo sapiens
gtaataaaggaatct

SEQ ID NO: 5517 - DNA, 15 bp, Homo sapiens
ggtaataaaggaatc

SEQ ID NO: 5518 - DNA, 15 bp, Homo sapiens
aggtaataaaggaat

SEQ ID NO: 5519 - DNA, 15 bp, Homo sapiens
aaggtaataaaggaa

SEQ ID NO: 5520 - DNA, 15 bp, Homo sapiens
aaaggtaataaagga

SEQ ID NO: 5521 - DNA, 15 bp, Homo sapiens
aaaaggtaataaagg

SEQ ID NO: 5522 - DNA, 15 bp, Homo sapiens
aaaaaggtaataaag

SEQ ID NO: 5523 - DNA, 15 bp, Homo sapiens
taaaaaggtaataaa

SEQ ID NO: 5524 - DNA, 15 bp, Homo sapiens
ctaaaaaggtaataa

SEQ ID NO: 5525 - DNA, 15 bp, Homo sapiens
tctaaaaaggtaata

SEQ ID NO: 5526 - DNA, 15 bp, Homo sapiens
ttctaaaaaggtaat

SEQ ID NO: 5527 - DNA, 15 bp, Homo sapiens
attctaaaaaggtaa

SEQ ID NO: 5528 - DNA, 15 bp, Homo sapiens
aattctaaaaaggta

SEQ ID NO: 5529 - DNA, 15 bp, Homo sapiens
aaattctaaaaaggt

SEQ ID NO: 5530 - DNA, 15 bp, Homo sapiens
aaaattctaaaaagg

SEQ ID NO: 5531 - DNA, 15 bp, Homo sapiens
taaaattctaaaaag

SEQ ID NO: 5532 - DNA, 15 bp, Homo sapiens
ataaaattctaaaaa

SEQ ID NO: 5533 - DNA, 15 bp, Homo sapiens
aataaaattctaaaa

SEQ ID NO: 5534 - DNA, 15 bp, Homo sapiens
aaataaaattctaaa

SEQ ID NO: 5535 - DNA, 15 bp, Homo sapiens
aaaataaaattctaa

SEQ ID NO: 5536 - DNA, 15 bp, Homo sapiens
aaaaataaaattcta

SEQ ID NO: 5537 - DNA, 15 bp, Homo sapiens
taaaaataaaattct

SEQ ID NO: 5538 - DNA, 15 bp, Homo sapiens
ttaaaaataaaattc

SEQ ID NO: 5539 - DNA, 15 bp, Homo sapiens
attaaaaataaaatt

SEQ ID NO: 5540 - DNA, 15 bp, Homo sapiens
tattaaaaataaaat

SEQ ID NO: 5541 - DNA, 15 bp, Homo sapiens
ttattaaaaataaaa

SEQ ID NO: 5542 - DNA, 15 bp, Homo sapiens
gttattaaaaataaa

SEQ ID NO: 5543 - DNA, 15 bp, Homo sapiens
tgttattaaaaataa

SEQ ID NO: 5544 - DNA, 15 bp, Homo sapiens
atgttattaaaaata

SEQ ID NO: 5545 - DNA, 15 bp, Homo sapiens
catgttattaaaaat

SEQ ID NO: 5546 - DNA, 15 bp, Homo sapiens
ccatgttattaaaaa

SEQ ID NO: 5547 - DNA, 15 bp, Homo sapiens
cccatgttattaaaa

SEQ ID NO: 5548 - DNA, 15 bp, Homo sapiens
tcccatgttattaaa

SEQ ID NO: 5549 - DNA, 15 bp, Homo sapiens
ttcccatgttattaa

SEQ ID NO: 5550 - DNA, 15 bp, Homo sapiens
tttcccatgttatta

SEQ ID NO: 5551 - DNA, 15 bp, Homo sapiens
ctttcccatgttatt

SEQ ID NO: 5552 - DNA, 15 bp, Homo sapiens
cctttcccatgttat

SEQ ID NO: 5553 - DNA, 15 bp, Homo sapiens
gcctttcccatgtta

SEQ ID NO: 5554 - DNA, 15 bp, Homo sapiens
tgcctttcccatgtt

SEQ ID NO: 5555 - DNA, 15 bp, Homo sapiens
ttgcctttcccatgt

SEQ ID NO: 5556 - DNA, 15 bp, Homo sapiens
gttgcctttcccatg

SEQ ID NO: 5557 - DNA, 15 bp, Homo sapiens
agttgcctttcccat

SEQ ID NO: 5558 - DNA, 15 bp, Homo sapiens
cagttgcctttccca

SEQ ID NO: 5559 - DNA, 15 bp, Homo sapiens
ccagttgcctttccc

SEQ ID NO: 5560 - DNA, 15 bp, Homo sapiens
accagttgcctttcc

SEQ ID NO: 5561 - DNA, 15 bp, Homo sapiens
caccagttgcctttc

SEQ ID NO: 5562 - DNA, 15 bp, Homo sapiens
tcaccagttgccttt

SEQ ID NO: 5563 - DNA, 15 bp, Homo sapiens
atcaccagttgcctt

SEQ ID NO: 5564 - DNA, 15 bp, Homo sapiens
tatcaccagttgcct

SEQ ID NO: 5565 - DNA, 15 bp, Homo sapiens
atatcaccagttgcc

SEQ ID NO: 5566 - DNA, 15 bp, Homo sapiens
aatatcaccagttgc

SEQ ID NO: 5567 - DNA, 15 bp, Homo sapiens
aaatatcaccagttg

SEQ ID NO: 5568 - DNA, 15 bp, Homo sapiens
aaaatatcaccagtt

SEQ ID NO: 5569 - DNA, 15 bp, Homo sapiens
taaaatatcaccagt

SEQ ID NO: 5570 - DNA, 15 bp, Homo sapiens
ttaaaatatcaccag

SEQ ID NO: 5571 - DNA, 15 bp, Homo sapiens
attaaaatatcacca

SEQ ID NO: 5572 - DNA, 15 bp, Homo sapiens
aattaaaatatcacc

SEQ ID NO: 5573 - DNA, 15 bp, Homo sapiens
aaattaaaatatcac

SEQ ID NO: 5574 - DNA, 15 bp, Homo sapiens
aaaattaaaatatca

SEQ ID NO: 5575 - DNA, 15 bp, Homo sapiens
aaaaattaaaatatc

SEQ ID NO: 5576 - DNA, 15 bp, Homo sapiens
caaaaattaaaatat

SEQ ID NO: 5577 - DNA, 15 bp, Homo sapiens
acaaaaattaaaata

SEQ ID NO: 5578 - DNA, 15 bp, Homo sapiens
tacaaaaattaaaat

SEQ ID NO: 5579 - DNA, 15 bp, Homo sapiens
atacaaaaattaaaa

SEQ ID NO: 5580 - DNA, 15 bp, Homo sapiens
catacaaaaattaaa

SEQ ID NO: 5581 - DNA, 15 bp, Homo sapiens
ccatacaaaaattaa

SEQ ID NO: 5582 - DNA, 15 bp, Homo sapiens
tccatacaaaaatta

SEQ ID NO: 5583 - DNA, 15 bp, Homo sapiens
ttccatacaaaaatt

SEQ ID NO: 5584 - DNA, 15 bp, Homo sapiens
gttccatacaaaaat

SEQ ID NO: 5585 - DNA, 15 bp, Homo sapiens
tgttccatacaaaaa

SEQ ID NO: 5586 - DNA, 15 bp, Homo sapiens
ctgttccatacaaaa

SEQ ID NO: 5587 - DNA, 15 bp, Homo sapiens
actgttccatacaaa

SEQ ID NO: 5588 - DNA, 15 bp, Homo sapiens
cactgttccatacaa

SEQ ID NO: 5589 - DNA, 15 bp, Homo sapiens
gcactgttccataca

SEQ ID NO: 5590 - DNA, 15 bp, Homo sapiens
tgcactgttccatac

SEQ ID NO: 5591 - DNA, 15 bp, Homo sapiens
atgcactgttccata

SEQ ID NO: 5592 - DNA, 15 bp, Homo sapiens
gatgcactgttccat

SEQ ID NO: 5593 - DNA, 15 bp, Homo sapiens
agatgcactgttcca

SEQ ID NO: 5594 - DNA, 15 bp, Homo sapiens
cagatgcactgttcc

SEQ ID NO: 5595 - DNA, 15 bp, Homo sapiens
gcagatgcactgttc

SEQ ID NO: 5596 - DNA, 15 bp, Homo sapiens
agcagatgcactgtt

SEQ ID NO: 5597 - DNA, 15 bp, Homo sapiens
aagcagatgcactgt

SEQ ID NO: 5598 - DNA, 15 bp, Homo sapiens
aaagcagatgcactg

SEQ ID NO: 5599 - DNA, 15 bp, Homo sapiens
gaaagcagatgcact

SEQ ID NO: 5600 - DNA, 15 bp, Homo sapiens
agaaagcagatgcac

SEQ ID NO: 5601 - DNA, 15 bp, Homo sapiens
gagaaagcagatgca

SEQ ID NO: 5602 - DNA, 15 bp, Homo sapiens
tgagaaagcagatgc

SEQ ID NO: 5603 - DNA, 15 bp, Homo sapiens
atgagaaagcagatg

SEQ ID NO: 5604 - DNA, 15 bp, Homo sapiens
tatgagaaagcagat

SEQ ID NO: 5605 - DNA, 15 bp, Homo sapiens
ctatgagaaagcaga

SEQ ID NO: 5606 - DNA, 15 bp, Homo sapiens
gctatgagaaagcag

SEQ ID NO: 5607 - DNA, 15 bp, Homo sapiens
ggctatgagaaagca

SEQ ID NO: 5608 - DNA, 15 bp, Homo sapiens
tggctatgagaaagc

SEQ ID NO: 5609 - DNA, 15 bp, Homo sapiens
gtggctatgagaaag

SEQ ID NO: 5610 - DNA, 15 bp, Homo sapiens
tgtggctatgagaaa

SEQ ID NO: 5611 - DNA, 15 bp, Homo sapiens
atgtggctatgagaa

SEQ ID NO: 5612 - DNA, 15 bp, Homo sapiens
tatgtggctatgaga

SEQ ID NO: 5613 - DNA, 15 bp, Homo sapiens
ttatgtggctatgag

SEQ ID NO: 5614 - DNA, 15 bp, Homo sapiens
tttatgtggctatga

SEQ ID NO: 5615 - DNA, 15 bp, Homo sapiens
ttttatgtggctatg

SEQ ID NO: 5616 - DNA, 15 bp, Homo sapiens
attttatgtggctat

SEQ ID NO: 5617 - DNA, 15 bp, Homo sapiens
tattttatgtggcta

SEQ ID NO: 5618 - DNA, 15 bp, Homo sapiens
gtattttatgtggct

SEQ ID NO: 5619 - DNA, 15 bp, Homo sapiens
tgtattttatgtggc

SEQ ID NO: 5620 - DNA, 15 bp, Homo sapiens
atgtattttatgtgg

SEQ ID NO: 5621 - DNA, 15 bp, Homo sapiens
tatgtattttatgtg

SEQ ID NO: 5622 - DNA, 15 bp, Homo sapiens
ttatgtattttatgt

SEQ ID NO: 5623 - DNA, 15 bp, Homo sapiens
tttatgtattttatg

SEQ ID NO: 5624 - DNA, 15 bp, Homo sapiens
gtttatgtattttat

SEQ ID NO: 5625 - DNA, 15 bp, Homo sapiens
agtttatgtatttta

SEQ ID NO: 5626 - DNA, 15 bp, Homo sapiens
aagtttatgtatttt

SEQ ID NO: 5627 - DNA, 15 bp, Homo sapiens
gaagtttatgtattt

SEQ ID NO: 5628 - DNA, 15 bp, Homo sapiens
agaagtttatgtatt

SEQ ID NO: 5629 - DNA, 15 bp, Homo sapiens
aagaagtttatgtat

SEQ ID NO: 5630 - DNA, 15 bp, Homo sapiens
taagaagtttatgta

SEQ ID NO: 5631 - DNA, 15 bp, Homo sapiens
ctaagaagtttatgt

SEQ ID NO: 5632 - DNA, 15 bp, Homo sapiens
actaagaagtttatg

SEQ ID NO: 5633 - DNA, 15 bp, Homo sapiens
cactaagaagtttat

SEQ ID NO: 5634 - DNA, 15 bp, Homo sapiens
acactaagaagttta

SEQ ID NO: 5635 - DNA, 15 bp, Homo sapiens
aacactaagaagttt

SEQ ID NO: 5636 - DNA, 15 bp, Homo sapiens
taacactaagaagtt

SEQ ID NO: 5637 - DNA, 15 bp, Homo sapiens
ataacactaagaagt

SEQ ID NO: 5638 - DNA, 15 bp, Homo sapiens
cataacactaagaag

SEQ ID NO: 5639 - DNA, 15 bp, Homo sapiens
tcataacactaagaa

SEQ ID NO: 5640 - DNA, 15 bp, Homo sapiens
ttcataacactaaga

SEQ ID NO: 5641 - DNA, 15 bp, Homo sapiens
tttcataacactaag

SEQ ID NO: 5642 - DNA, 15 bp, Homo sapiens
atttcataacactaa

SEQ ID NO: 5643 - DNA, 15 bp, Homo sapiens
catttcataacacta

SEQ ID NO: 5644 - DNA, 15 bp, Homo sapiens
ccatttcataacact

SEQ ID NO: 5645 - DNA, 15 bp, Homo sapiens
gccatttcataacac

SEQ ID NO: 5646 - DNA, 15 bp, Homo sapiens
agccatttcataaca

SEQ ID NO: 5647 - DNA, 15 bp, Homo sapiens
aagccatttcataac

SEQ ID NO: 5648 - DNA, 15 bp, Homo sapiens
taagccatttcataa

SEQ ID NO: 5649 - DNA, 15 bp, Homo sapiens
gtaagccatttcata

SEQ ID NO: 5650 - DNA, 15 bp, Homo sapiens
agtaagccatttcat

SEQ ID NO: 5651 - DNA, 15 bp, Homo sapiens
aagtaagccatttca

SEQ ID NO: 5652 - DNA, 15 bp, Homo sapiens
aaagtaagccatttc

SEQ ID NO: 5653 - DNA, 15 bp, Homo sapiens
aaaagtaagccattt

SEQ ID NO: 5654 - DNA, 15 bp, Homo sapiens
aaaaagtaagccatt

SEQ ID NO: 5655 - DNA, 15 bp, Homo sapiens
caaaaagtaagccat

SEQ ID NO: 5656 - DNA, 15 bp, Homo sapiens
ccaaaaagtaagcca

SEQ ID NO: 5657 - DNA, 15 bp, Homo sapiens
tccaaaaagtaagcc

SEQ ID NO: 5658 - DNA, 15 bp, Homo sapiens
ttccaaaaagtaagc

SEQ ID NO: 5659 - DNA, 15 bp, Homo sapiens
cttccaaaaagtaag

SEQ ID NO: 5660 - DNA, 15 bp, Homo sapiens
acttccaaaaagtaa

SEQ ID NO: 5661 - DNA, 15 bp, Homo sapiens
cacttccaaaaagta

SEQ ID NO: 5662 - DNA, 15 bp, Homo sapiens
tcacttccaaaaagt

SEQ ID NO: 5663 - DNA, 15 bp, Homo sapiens
ttcacttccaaaaag

SEQ ID NO: 5664 - DNA, 15 bp, Homo sapiens
cttcacttccaaaaa

SEQ ID NO: 5665 - DNA, 15 bp, Homo sapiens
tcttcacttccaaaa

SEQ ID NO: 5666 - DNA, 15 bp, Homo sapiens
ttcttcacttccaaa

SEQ ID NO: 5667 - DNA, 15 bp, Homo sapiens
cttcttcacttccaa

SEQ ID NO: 5668 - DNA, 15 bp, Homo sapiens
acttcttcacttcca

SEQ ID NO: 5669 - DNA, 15 bp, Homo sapiens
gacttcttcacttcc

SEQ ID NO: 5670 - DNA, 15 bp, Homo sapiens
agacttcttcacttc

SEQ ID NO: 5671 - DNA, 15 bp, Homo sapiens
aagacttcttcactt

SEQ ID NO: 5672 - DNA, 15 bp, Homo sapiens
gaagacttcttcact

SEQ ID NO: 5673 - DNA, 15 bp, Homo sapiens
tgaagacttcttcac

SEQ ID NO: 5674 - DNA, 15 bp, Homo sapiens
ttgaagacttcttca

SEQ ID NO: 5675 - DNA, 15 bp, Homo sapiens
attgaagacttcttc

SEQ ID NO: 5676 - DNA, 15 bp, Homo sapiens
aattgaagacttctt

SEQ ID NO: 5677 - DNA, 15 bp, Homo sapiens
gaattgaagacttct

SEQ ID NO: 5678 - DNA, 15 bp, Homo sapiens
agaattgaagacttc

SEQ ID NO: 5679 - DNA, 15 bp, Homo sapiens
aagaattgaagactt

SEQ ID NO: 5680 - DNA, 15 bp, Homo sapiens
taagaattgaagact

SEQ ID NO: 5681 - DNA, 15 bp, Homo sapiens
ataagaattgaagac

SEQ ID NO: 5682 - DNA, 15 bp, Homo sapiens
aataagaattgaaga

SEQ ID NO: 5683 - DNA, 15 bp, Homo sapiens
aaataagaattgaag

SEQ ID NO: 5684 - DNA, 15 bp, Homo sapiens
aaaataagaattgaa

SEQ ID NO: 5685 - DNA, 15 bp, Homo sapiens
gaaaataagaattga

SEQ ID NO: 5686 - DNA, 15 bp, Homo sapiens
agaaaataagaattg

SEQ ID NO: 5687 - DNA, 15 bp, Homo sapiens
tagaaaataagaatt

SEQ ID NO: 5688 - DNA, 15 bp, Homo sapiens
ttagaaaataagaat

SEQ ID NO: 5689 - DNA, 15 bp, Homo sapiens
attagaaaataagaa

SEQ ID NO: 5690 - DNA, 15 bp, Homo sapiens
cattagaaaataaga

SEQ ID NO: 5691 - DNA, 15 bp, Homo sapiens
acattagaaaataag

SEQ ID NO: 5692 - DNA, 15 bp, Homo sapiens
aacattagaaaataa

SEQ ID NO: 5693 - DNA, 15 bp, Homo sapiens
taacattagaaaata

SEQ ID NO: 5694 - DNA, 15 bp, Homo sapiens
ataacattagaaaat

SEQ ID NO: 5695 - DNA, 15 bp, Homo sapiens
aataacattagaaaa

SEQ ID NO: 5696 - DNA, 15 bp, Homo sapiens
aaataacattagaaa

SEQ ID NO: 5697 - DNA, 15 bp, Homo sapiens
aaaataacattagaa

SEQ ID NO: 5698 - DNA, 15 bp, Homo sapiens
caaaataacattaga

SEQ ID NO: 5699 - DNA, 15 bp, Homo sapiens
tcaaaataacattag

SEQ ID NO: 5700 - DNA, 15 bp, Homo sapiens
ttcaaaataacatta

SEQ ID NO: 5701 - DNA, 15 bp, Homo sapiens
tttcaaaataacatt

SEQ ID NO: 5702 - DNA, 15 bp, Homo sapiens
atttcaaaataacat

SEQ ID NO: 5703 - DNA, 15 bp, Homo sapiens
aatttcaaaataaca

SEQ ID NO: 5704 - DNA, 15 bp, Homo sapiens
aaatttcaaaataac

SEQ ID NO: 5705 - DNA, 15 bp, Homo sapiens
caaatttcaaaataa

SEQ ID NO: 5706 - DNA, 15 bp, Homo sapiens
gcaaatttcaaaata

SEQ ID NO: 5707 - DNA, 15 bp, Homo sapiens
ggcaaatttcaaaat

SEQ ID NO: 5708 - DNA, 15 bp, Homo sapiens
aggcaaatttcaaaa

SEQ ID NO: 5709 - DNA, 15 bp, Homo sapiens
gaggcaaatttcaaa

SEQ ID NO: 5710 - DNA, 15 bp, Homo sapiens
ggaggcaaatttcaa

SEQ ID NO: 5711 - DNA, 15 bp, Homo sapiens
tggaggcaaatttca

SEQ ID NO: 5712 - DNA, 15 bp, Homo sapiens
atggaggcaaatttc

SEQ ID NO: 5713 - DNA, 15 bp, Homo sapiens
aatggaggcaaattt

SEQ ID NO: 5714 - DNA, 15 bp, Homo sapiens
aaatggaggcaaatt

SEQ ID NO: 5715 - DNA, 15 bp, Homo sapiens
caaatggaggcaaat

SEQ ID NO: 5716 - DNA, 15 bp, Homo sapiens
gcaaatggaggcaaa

SEQ ID NO: 5717 - DNA, 15 bp, Homo sapiens
agcaaatggaggcaa

SEQ ID NO: 5718 - DNA, 15 bp, Homo sapiens
cagcaaatggaggca

SEQ ID NO: 5719 - DNA, 15 bp, Homo sapiens
acagcaaatggaggc

SEQ ID NO: 5720 - DNA, 15 bp, Homo sapiens
aacagcaaatggagg

SEQ ID NO: 5721 - DNA, 15 bp, Homo sapiens
aaacagcaaatggag

SEQ ID NO: 5722 - DNA, 15 bp, Homo sapiens
caaacagcaaatgga

SEQ ID NO: 5723 - DNA, 15 bp, Homo sapiens
acaaacagcaaatgg

SEQ ID NO: 5724 - DNA, 15 bp, Homo sapiens
aacaaacagcaaatg

SEQ ID NO: 5725 - DNA, 15 bp, Homo sapiens
gaacaaacagcaaat

SEQ ID NO: 5726 - DNA, 15 bp, Homo sapiens
tgaacaaacagcaaa

SEQ ID NO: 5727 - DNA, 15 bp, Homo sapiens
atgaacaaacagcaa

SEQ ID NO: 5728 - DNA, 15 bp, Homo sapiens
aatgaacaaacagca

SEQ ID NO: 5729 - DNA, 15 bp, Homo sapiens
aaatgaacaaacagc

SEQ ID NO: 5730 - DNA, 15 bp, Homo sapiens
caaatgaacaaacag

SEQ ID NO: 5731 - DNA, 15 bp, Homo sapiens
ccaaatgaacaaaca

SEQ ID NO: 5732 - DNA, 15 bp, Homo sapiens
accaaatgaacaaac

SEQ ID NO: 5733 - DNA, 15 bp, Homo sapiens
caccaaatgaacaaa

SEQ ID NO: 5734 - DNA, 15 bp, Homo sapiens
tcaccaaatgaacaa

SEQ ID NO: 5735 - DNA, 15 bp, Homo sapiens
atcaccaaatgaaca

SEQ ID NO: 5736 - DNA, 15 bp, Homo sapiens
tatcaccaaatgaac

SEQ ID NO: 5737 - DNA, 15 bp, Homo sapiens
ctatcaccaaatgaa

SEQ ID NO: 5738 - DNA, 15 bp, Homo sapiens
gctatcaccaaatga

SEQ ID NO: 5739 - DNA, 15 bp, Homo sapiens
cgctatcaccaaatg

SEQ ID NO: 5740 - DNA, 15 bp, Homo sapiens
gcgctatcaccaaat

SEQ ID NO: 5741 - DNA, 15 bp, Homo sapiens
tgcgctatcaccaaa

SEQ ID NO: 5742 - DNA, 15 bp, Homo sapiens
ttgcgctatcaccaa

SEQ ID NO: 5743 - DNA, 15 bp, Homo sapiens
gttgcgctatcacca

SEQ ID NO: 5744 - DNA, 15 bp, Homo sapiens
tgttgcgctatcacc

SEQ ID NO: 5745 - DNA, 15 bp, Homo sapiens
gtgttgcgctatcac

SEQ ID NO: 5746 - DNA, 15 bp, Homo sapiens
agtgttgcgctatca

SEQ ID NO: 5747 - DNA, 15 bp, Homo sapiens
aagtgttgcgctatc

SEQ ID NO: 5748 - DNA, 15 bp, Homo sapiens
taagtgttgcgctat

SEQ ID NO: 5749 - DNA, 15 bp, Homo sapiens
ttaagtgttgcgcta

SEQ ID NO: 5750 - DNA, 15 bp, Homo sapiens
tttaagtgttgcgct

SEQ ID NO: 5751 - DNA, 15 bp, Homo sapiens
ttttaagtgttgcgc

SEQ ID NO: 5752 - DNA, 15 bp, Homo sapiens
tttttaagtgttgcg

SEQ ID NO: 5753 - DNA, 15 bp, Homo sapiens
ttttttaagtgttgc

SEQ ID NO: 5754 - DNA, 15 bp, Homo sapiens
tttttttaagtgttg

SEQ ID NO: 5755 - DNA, 15 bp, Homo sapiens
atttttttaagtgtt

SEQ ID NO: 5756 - DNA, 15 bp, Homo sapiens
tatttttttaagtgt

SEQ ID NO: 5757 - DNA, 15 bp, Homo sapiens
atatttttttaagtg

SEQ ID NO: 5758 - DNA, 15 bp, Homo sapiens
aatatttttttaagt

SEQ ID NO: 5759 - DNA, 15 bp, Homo sapiens
aaatatttttttaag

SEQ ID NO: 5760 - DNA, 15 bp, Homo sapiens
aaaatatttttttaa

SEQ ID NO: 5761 - DNA, 15 bp, Homo sapiens
taaaatattttttta

SEQ ID NO: 5762 - DNA, 15 bp, Homo sapiens
ttaaaatattttttt

SEQ ID NO: 5763 - DNA, 15 bp, Homo sapiens
cttaaaatatttttt

SEQ ID NO: 5764 - DNA, 15 bp, Homo sapiens
gcttaaaatattttt

SEQ ID NO: 5765 - DNA, 15 bp, Homo sapiens
ggcttaaaatatttt

SEQ ID NO: 5766 - DNA, 15 bp, Homo sapiens
cggcttaaaatattt

SEQ ID NO: 5767 - DNA, 15 bp, Homo sapiens
gcggcttaaaatatt

SEQ ID NO: 5768 - DNA, 15 bp, Homo sapiens
agcggcttaaaatat

SEQ ID NO: 5769 - DNA, 15 bp, Homo sapiens
aagcggcttaaaata

SEQ ID NO: 5770 - DNA, 15 bp, Homo sapiens
gaagcggcttaaaat

SEQ ID NO: 5771 - DNA, 15 bp, Homo sapiens
agaagcggcttaaaa

SEQ ID NO: 5772 - DNA, 15 bp, Homo sapiens
cagaagcggcttaaa

SEQ ID NO: 5773 - DNA, 15 bp, Homo sapiens
tcagaagcggcttaa

SEQ ID NO: 5774 - DNA, 15 bp, Homo sapiens
ttcagaagcggctta

SEQ ID NO: 5775 - DNA, 15 bp, Homo sapiens
cttcagaagcggctt

SEQ ID NO: 5776 - DNA, 15 bp, Homo sapiens
acttcagaagcggct

SEQ ID NO: 5777 - DNA, 15 bp, Homo sapiens
tacttcagaagcggc

SEQ ID NO: 5778 - DNA, 15 bp, Homo sapiens
ttacttcagaagcgg

SEQ ID NO: 5779 - DNA, 15 bp, Homo sapiens
attacttcagaagcg

SEQ ID NO: 5780 - DNA, 15 bp, Homo sapiens
gattacttcagaagc

SEQ ID NO: 5781 - DNA, 15 bp, Homo sapiens
tgattacttcagaag

SEQ ID NO: 5782 - DNA, 15 bp, Homo sapiens
gtgattacttcagaa

SEQ ID NO: 5783 - DNA, 15 bp, Homo sapiens
agtgattacttcaga

SEQ ID NO: 5784 - DNA, 15 bp, Homo sapiens
aagtgattacttcag

SEQ ID NO: 5785 - DNA, 15 bp, Homo sapiens
gaagtgattacttca

SEQ ID NO: 5786 - DNA, 15 bp, Homo sapiens
tgaagtgattacttc

SEQ ID NO: 5787 - DNA, 15 bp, Homo sapiens
ctgaagtgattactt

SEQ ID NO: 5788 - DNA, 15 bp, Homo sapiens
actgaagtgattact

SEQ ID NO: 5789 - DNA, 15 bp, Homo sapiens
cactgaagtgattac

SEQ ID NO: 5790 - DNA, 15 bp, Homo sapiens
tcactgaagtgatta

SEQ ID NO: 5791 - DNA, 15 bp, Homo sapiens
gtcactgaagtgatt

SEQ ID NO: 5792 - DNA, 15 bp, Homo sapiens
agtcactgaagtgat

SEQ ID NO: 5793 - DNA, 15 bp, Homo sapiens
aagtcactgaagtga

SEQ ID NO: 5794 - DNA, 15 bp, Homo sapiens
aaagtcactgaagtg

SEQ ID NO: 5795 - DNA, 15 bp, Homo sapiens
aaaagtcactgaagt

SEQ ID NO: 5796 - DNA, 15 bp, Homo sapiens
taaaagtcactgaag

SEQ ID NO: 5797 - DNA, 15 bp, Homo sapiens
ttaaaagtcactgaa

SEQ ID NO: 5798 - DNA, 15 bp, Homo sapiens
attaaaagtcactga

SEQ ID NO: 5799 - DNA, 15 bp, Homo sapiens
cattaaaagtcactg

SEQ ID NO: 5800 - DNA, 15 bp, Homo sapiens
ccattaaaagtcact

SEQ ID NO: 5801 - DNA, 15 bp, Homo sapiens
tccattaaaagtcac

SEQ ID NO: 5802 - DNA, 15 bp, Homo sapiens
ctccattaaaagtca

SEQ ID NO: 5803 - DNA, 15 bp, Homo sapiens
cctccattaaaagtc

SEQ ID NO: 5804 - DNA, 15 bp, Homo sapiens
tcctccattaaaagt

SEQ ID NO: 5805 - DNA, 15 bp, Homo sapiens
ctcctccattaaaag

SEQ ID NO: 5806 - DNA, 15 bp, Homo sapiens
actcctccattaaaa

SEQ ID NO: 5807 - DNA, 15 bp, Homo sapiens
tactcctccattaaa

SEQ ID NO: 5808 - DNA, 15 bp, Homo sapiens
atactcctccattaa

SEQ ID NO: 5809 - DNA, 15 bp, Homo sapiens
aatactcctccatta

SEQ ID NO: 5810 - DNA, 15 bp, Homo sapiens
aaatactcctccatt

SEQ ID NO: 5811 - DNA, 15 bp, Homo sapiens
caaatactcctccat

SEQ ID NO: 5812 - DNA, 15 bp, Homo sapiens
acaaatactcctcca

SEQ ID NO: 5813 - DNA, 15 bp, Homo sapiens
aacaaatactcctcc

SEQ ID NO: 5814 - DNA, 15 bp, Homo sapiens
taacaaatactcctc

SEQ ID NO: 5815 - DNA, 15 bp, Homo sapiens
ataacaaatactcct

SEQ ID NO: 5816 - DNA, 15 bp, Homo sapiens
cataacaaatactcc

SEQ ID NO: 5817 - DNA, 15 bp, Homo sapiens
ccataacaaatactc

SEQ ID NO: 5818 - DNA, 15 bp, Homo sapiens
cccataacaaatact

SEQ ID NO: 5819 - DNA, 15 bp, Homo sapiens
tcccataacaaatac

SEQ ID NO: 5820 - DNA, 15 bp, Homo sapiens
ttcccataacaaata

SEQ ID NO: 5821 - DNA, 15 bp, Homo sapiens
tttcccataacaaat

SEQ ID NO: 5822 - DNA, 15 bp, Homo sapiens
atttcccataacaaa

SEQ ID NO: 5823 - DNA, 15 bp, Homo sapiens
aatttcccataacaa

SEQ ID NO: 5824 - DNA, 15 bp, Homo sapiens
gaatttcccataaca

SEQ ID NO: 5825 - DNA, 15 bp, Homo sapiens
tgaatttcccataac

SEQ ID NO: 5826 - DNA, 15 bp, Homo sapiens
gtgaatttcccataa

SEQ ID NO: 5827 - DNA, 15 bp, Homo sapiens
agtgaatttcccata

SEQ ID NO: 5828 - DNA, 15 bp, Homo sapiens
aagtgaatttcccat

SEQ ID NO: 5829 - DNA, 15 bp, Homo sapiens
gaagtgaatttccca

SEQ ID NO: 5830 - DNA, 15 bp, Homo sapiens
tgaagtgaatttccc

SEQ ID NO: 5831 - DNA, 15 bp, Homo sapiens
gtgaagtgaatttcc

SEQ ID NO: 5832 - DNA, 15 bp, Homo sapiens
tgtgaagtgaatttc

SEQ ID NO: 5833 - DNA, 15 bp, Homo sapiens
ttgtgaagtgaattt

SEQ ID NO: 5834 - DNA, 15 bp, Homo sapiens
tttgtgaagtgaatt

SEQ ID NO: 5835 - DNA, 15 bp, Homo sapiens
ctttgtgaagtgaat

SEQ ID NO: 5836 - DNA, 15 bp, Homo sapiens
actttgtgaagtgaa

SEQ ID NO: 5837 - DNA, 15 bp, Homo sapiens
aactttgtgaagtga

SEQ ID NO: 5838 - DNA, 15 bp, Homo sapiens
aaactttgtgaagtg

SEQ ID NO: 5839 - DNA, 15 bp, Homo sapiens
aaaactttgtgaagt

SEQ ID NO: 5840 - DNA, 15 bp, Homo sapiens
taaaactttgtgaag

SEQ ID NO: 5841 - DNA, 15 bp, Homo sapiens
ttaaaactttgtgaa

SEQ ID NO: 5842 - DNA, 15 bp, Homo sapiens
gttaaaactttgtga

SEQ ID NO: 5843 - DNA, 15 bp, Homo sapiens
tgttaaaactttgtg

SEQ ID NO: 5844 - DNA, 15 bp, Homo sapiens
atgttaaaactttgt

SEQ ID NO: 5845 - DNA, 15 bp, Homo sapiens
aatgttaaaactttg

SEQ ID NO: 5846 - DNA, 15 bp, Homo sapiens
taatgttaaaacttt

SEQ ID NO: 5847 - DNA, 15 bp, Homo sapiens
ttaatgttaaaactt

SEQ ID NO: 5848 - DNA, 15 bp, Homo sapiens
attaatgttaaaact

SEQ ID NO: 5849 - DNA, 15 bp, Homo sapiens
aattaatgttaaaac

SEQ ID NO: 5850 - DNA, 15 bp, Homo sapiens
gaattaatgttaaaa

SEQ ID NO: 5851 - DNA, 15 bp, Homo sapiens
tgaattaatgttaaa

SEQ ID NO: 5852 - DNA, 15 bp, Homo sapiens
gtgaattaatgttaa

SEQ ID NO: 5853 - DNA, 15 bp, Homo sapiens
agtgaattaatgtta

SEQ ID NO: 5854 - DNA, 15 bp, Homo sapiens
aagtgaattaatgtt

SEQ ID NO: 5855 - DNA, 15 bp, Homo sapiens
caagtgaattaatgt

SEQ ID NO: 5856 - DNA, 15 bp, Homo sapiens
tcaagtgaattaatg

SEQ ID NO: 5857 - DNA, 15 bp, Homo sapiens
ttcaagtgaattaat

SEQ ID NO: 5858 - DNA, 15 bp, Homo sapiens
cttcaagtgaattaa

SEQ ID NO: 5859 - DNA, 15 bp, Homo sapiens
acttcaagtgaatta

SEQ ID NO: 5860 - DNA, 15 bp, Homo sapiens
tacttcaagtgaatt

SEQ ID NO: 5861 - DNA, 15 bp, Homo sapiens
ttacttcaagtgaat

SEQ ID NO: 5862 - DNA, 15 bp, Homo sapiens
tttacttcaagtgaa

SEQ ID NO: 5863 - DNA, 15 bp, Homo sapiens
gtttacttcaagtga

SEQ ID NO: 5864 - DNA, 15 bp, Homo sapiens
cgtttacttcaagtg

SEQ ID NO: 5865 - DNA, 15 bp, Homo sapiens
acgtttacttcaagt

SEQ ID NO: 5866 - DNA, 15 bp, Homo sapiens
cacgtttacttcaag

SEQ ID NO: 5867 - DNA, 15 bp, Homo sapiens
gcacgtttacttcaa

SEQ ID NO: 5868 - DNA, 15 bp, Homo sapiens
agcacgtttacttca

SEQ ID NO: 5869 - DNA, 15 bp, Homo sapiens
tagcacgtttacttc

SEQ ID NO: 5870 - DNA, 15 bp, Homo sapiens
atagcacgtttactt

SEQ ID NO: 5871 - DNA, 15 bp, Homo sapiens
aatagcacgtttact

SEQ ID NO: 5872 - DNA, 15 bp, Homo sapiens
aaatagcacgtttac

SEQ ID NO: 5873 - DNA, 15 bp, Homo sapiens
aaaatagcacgttta

SEQ ID NO: 5874 - DNA, 15 bp, Homo sapiens
aaaaatagcacgttt

SEQ ID NO: 5875 - DNA, 15 bp, Homo sapiens
taaaaatagcacgtt

SEQ ID NO: 5876 - DNA, 15 bp, Homo sapiens
ttaaaaatagcacgt

SEQ ID NO: 5877 - DNA, 15 bp, Homo sapiens
tttaaaaatagcacg

SEQ ID NO: 5878 - DNA, 15 bp, Homo sapiens
atttaaaaatagcac

SEQ ID NO: 5879 - DNA, 15 bp, Homo sapiens
aatttaaaaatagca

SEQ ID NO: 5880 - DNA, 15 bp, Homo sapiens
aaatttaaaaatagc

SEQ ID NO: 5881 - DNA, 15 bp, Homo sapiens
aaaatttaaaaatag

SEQ ID NO: 5882 - DNA, 15 bp, Homo sapiens
gaaaatttaaaaata

SEQ ID NO: 5883 - DNA, 15 bp, Homo sapiens
tgaaaatttaaaaat

SEQ ID NO: 5884 - DNA, 15 bp, Homo sapiens
atgaaaatttaaaaa

SEQ ID NO: 5885 - DNA, 15 bp, Homo sapiens
gatgaaaatttaaaa

SEQ ID NO: 5886 - DNA, 15 bp, Homo sapiens
agatgaaaatttaaa

SEQ ID NO: 5887 - DNA, 15 bp, Homo sapiens
gagatgaaaatttaa

SEQ ID NO: 5888 - DNA, 15 bp, Homo sapiens
tgagatgaaaattta

SEQ ID NO: 5889 - DNA, 15 bp, Homo sapiens
ttgagatgaaaattt

SEQ ID NO: 5890 - DNA, 15 bp, Homo sapiens
attgagatgaaaatt

SEQ ID NO: 5891 - DNA, 15 bp, Homo sapiens
gattgagatgaaaat

SEQ ID NO: 5892 - DNA, 15 bp, Homo sapiens
agattgagatgaaaa

SEQ ID NO: 5893 - DNA, 15 bp, Homo sapiens
aagattgagatgaaa

SEQ ID NO: 5894 - DNA, 15 bp, Homo sapiens
aaagattgagatgaa

SEQ ID NO: 5895 - DNA, 15 bp, Homo sapiens
aaaagattgagatga

SEQ ID NO: 5896 - DNA, 15 bp, Homo sapiens
taaaagattgagatg

SEQ ID NO: 5897 - DNA, 15 bp, Homo sapiens
ttaaaagattgagat

SEQ ID NO: 5898 - DNA, 15 bp, Homo sapiens
cttaaaagattgaga

SEQ ID NO: 5899 - DNA, 15 bp, Homo sapiens
acttaaaagattgag

SEQ ID NO: 5900 - DNA, 15 bp, Homo sapiens
tacttaaaagattga

SEQ ID NO: 5901 - DNA, 15 bp, Homo sapiens
ttacttaaaagattg

SEQ ID NO: 5902 - DNA, 15 bp, Homo sapiens
cttacttaaaagatt

SEQ ID NO: 5903 - DNA, 15 bp, Homo sapiens
tcttacttaaaagat

SEQ ID NO: 5904 - DNA, 15 bp, Homo sapiens
gtcttacttaaaaga

SEQ ID NO: 5905 - DNA, 15 bp, Homo sapiens
cgtcttacttaaaag

SEQ ID NO: 5906 - DNA, 15 bp, Homo sapiens
tcgtcttacttaaaa

SEQ ID NO: 5907 - DNA, 15 bp, Homo sapiens
ttcgtcttacttaaa

SEQ ID NO: 5908 - DNA, 15 bp, Homo sapiens
tttcgtcttacttaa

SEQ ID NO: 5909 - DNA, 15 bp, Homo sapiens
ctttcgtcttactta

SEQ ID NO: 5910 - DNA, 15 bp, Homo sapiens
gctttcgtcttactt

SEQ ID NO: 5911 - DNA, 15 bp, Homo sapiens
agctttcgtcttact

SEQ ID NO: 5912 - DNA, 15 bp, Homo sapiens
aagctttcgtcttac

SEQ ID NO: 5913 - DNA, 15 bp, Homo sapiens
taagctttcgtctta

SEQ ID NO: 5914 - DNA, 15 bp, Homo sapiens
ctaagctttcgtctt

SEQ ID NO: 5915 - DNA, 15 bp, Homo sapiens
cctaagctttcgtct

SEQ ID NO: 5916 - DNA, 15 bp, Homo sapiens
tcctaagctttcgtc

SEQ ID NO: 5917 - DNA, 15 bp, Homo sapiens
ttcctaagctttcgt

SEQ ID NO: 5918 - DNA, 15 bp, Homo sapiens
tttcctaagctttcg

SEQ ID NO: 5919 - DNA, 15 bp, Homo sapiens
atttcctaagctttc

SEQ ID NO: 5920 - DNA, 15 bp, Homo sapiens
gatttcctaagcttt

SEQ ID NO: 5921 - DNA, 15 bp, Homo sapiens
tgatttcctaagctt

SEQ ID NO: 5922 - DNA, 15 bp, Homo sapiens
gtgatttcctaagct

SEQ ID NO: 5923 - DNA, 15 bp, Homo sapiens
agtgatttcctaagc

SEQ ID NO: 5924 - DNA, 15 bp, Homo sapiens
aagtgatttcctaag

SEQ ID NO: 5925 - DNA, 15 bp, Homo sapiens
aaagtgatttcctaa

SEQ ID NO: 5926 - DNA, 15 bp, Homo sapiens
aaaagtgatttccta

SEQ ID NO: 5927 - DNA, 15 bp, Homo sapiens
taaaagtgatttcct

SEQ ID NO: 5928 - DNA, 15 bp, Homo sapiens
ataaaagtgatttcc

SEQ ID NO: 5929 - DNA, 15 bp, Homo sapiens
aataaaagtgatttc

SEQ ID NO: 5930 - DNA, 15 bp, Homo sapiens
taataaaagtgattt

SEQ ID NO: 5931 - DNA, 15 bp, Homo sapiens
ataataaaagtgatt

SEQ ID NO: 5932 - DNA, 15 bp, Homo sapiens
aataataaaagtgat

SEQ ID NO: 5933 - DNA, 15 bp, Homo sapiens
caataataaaagtga

SEQ ID NO: 5934 - DNA, 15 bp, Homo sapiens
tcaataataaaagtg

SEQ ID NO: 5935 - DNA, 15 bp, Homo sapiens
atcaataataaaagt

SEQ ID NO: 5936 - DNA, 15 bp, Homo sapiens
tatcaataataaaag

SEQ ID NO: 5937 - DNA, 15 bp, Homo sapiens
atatcaataataaaa

SEQ ID NO: 5938 - DNA, 15 bp, Homo sapiens
aatatcaataataaa

SEQ ID NO: 5939 - DNA, 15 bp, Homo sapiens
caatatcaataataa

SEQ ID NO: 5940 - DNA, 15 bp, Homo sapiens
acaatatcaataata

SEQ ID NO: 5941 - DNA, 15 bp, Homo sapiens
cacaatatcaataat

SEQ ID NO: 5942 - DNA, 15 bp, Homo sapiens
acacaatatcaataa

SEQ ID NO: 5943 - DNA, 15 bp, Homo sapiens
cacacaatatcaata

SEQ ID NO: 5944 - DNA, 15 bp, Homo sapiens
acacacaatatcaat

SEQ ID NO: 5945 - DNA, 15 bp, Homo sapiens
cacacacaatatcaa

SEQ ID NO: 5946 - DNA, 15 bp, Homo sapiens
tcacacacaatatca

SEQ ID NO: 5947 - DNA, 15 bp, Homo sapiens
gtcacacacaatatc

SEQ ID NO: 5948 - DNA, 15 bp, Homo sapiens
agtcacacacaatat

SEQ ID NO: 5949 - DNA, 15 bp, Homo sapiens
aagtcacacacaata

SEQ ID NO: 5950 - DNA, 15 bp, Homo sapiens
gaagtcacacacaat

SEQ ID NO: 5951 - DNA, 15 bp, Homo sapiens
tgaagtcacacacaa

SEQ ID NO: 5952 - DNA, 15 bp, Homo sapiens
ctgaagtcacacaca

SEQ ID NO: 5953 - DNA, 15 bp, Homo sapiens
tctgaagtcacacac

SEQ ID NO: 5954 - DNA, 15 bp, Homo sapiens
ctctgaagtcacaca

SEQ ID NO: 5955 - DNA, 15 bp, Homo sapiens
actctgaagtcacac

SEQ ID NO: 5956 - DNA, 15 bp, Homo sapiens
aactctgaagtcaca

SEQ ID NO: 5957 - DNA, 15 bp, Homo sapiens
aaactctgaagtcac

SEQ ID NO: 5958 - DNA, 15 bp, Homo sapiens
caaactctgaagtca

SEQ ID NO: 5959 - DNA, 15 bp, Homo sapiens
acaaactctgaagtc

SEQ ID NO: 5960 - DNA, 15 bp, Homo sapiens
tacaaactctgaagt

SEQ ID NO: 5961 - DNA, 15 bp, Homo sapiens
ttacaaactctgaag

SEQ ID NO: 5962 - DNA, 15 bp, Homo sapiens
tttacaaactctgaa

SEQ ID NO: 5963 - DNA, 15 bp, Homo sapiens
ctttacaaactctga

SEQ ID NO: 5964 - DNA, 15 bp, Homo sapiens
tctttacaaactctg

SEQ ID NO: 5965 - DNA, 15 bp, Homo sapiens
ctctttacaaactct

SEQ ID NO: 5966 - DNA, 15 bp, Homo sapiens
tctctttacaaactc

SEQ ID NO: 5967 - DNA, 15 bp, Homo sapiens
ttctctttacaaact

SEQ ID NO: 5968 - DNA, 15 bp, Homo sapiens
attctctttacaaac

SEQ ID NO: 5969 - DNA, 15 bp, Homo sapiens
aattctctttacaaa

SEQ ID NO: 5970 - DNA, 15 bp, Homo sapiens
caattctctttacaa

SEQ ID NO: 5971 - DNA, 15 bp, Homo sapiens
acaattctctttaca

SEQ ID NO: 5972 - DNA, 15 bp, Homo sapiens
tacaattctctttac

SEQ ID NO: 5973 - DNA, 15 bp, Homo sapiens
ctacaattctcttta

SEQ ID NO: 5974 - DNA, 15 bp, Homo sapiens
tctacaattctcttt

SEQ ID NO: 5975 - DNA, 15 bp, Homo sapiens
ttctacaattctctt

SEQ ID NO: 5976 - DNA, 15 bp, Homo sapiens
cttctacaattctct

SEQ ID NO: 5977 - DNA, 15 bp, Homo sapiens
acttctacaattctc

SEQ ID NO: 5978 - DNA, 15 bp, Homo sapiens
cacttctacaattct

SEQ ID NO: 5979 - DNA, 15 bp, Homo sapiens
acacttctacaattc

SEQ ID NO: 5980 - DNA, 15 bp, Homo sapiens
aacacttctacaatt

SEQ ID NO: 5981 - DNA, 15 bp, Homo sapiens
caacacttctacaat

SEQ ID NO: 5982 - DNA, 15 bp, Homo sapiens
gcaacacttctacaa

SEQ ID NO: 5983 - DNA, 15 bp, Homo sapiens
tgcaacacttctaca

SEQ ID NO: 5984 - DNA, 15 bp, Homo sapiens
atgcaacacttctac

SEQ ID NO: 5985 - DNA, 15 bp, Homo sapiens
catgcaacacttcta

SEQ ID NO: 5986 - DNA, 15 bp, Homo sapiens
gcatgcaacacttct

SEQ ID NO: 5987 - DNA, 15 bp, Homo sapiens
tgcatgcaacacttc

SEQ ID NO: 5988 - DNA, 15 bp, Homo sapiens
atgcatgcaacactt

SEQ ID NO: 5989 - DNA, 15 bp, Homo sapiens
tatgcatgcaacact

SEQ ID NO: 5990 - DNA, 15 bp, Homo sapiens
atatgcatgcaacac

SEQ ID NO: 5991 - DNA, 15 bp, Homo sapiens
catatgcatgcaaca

SEQ ID NO: 5992 - DNA, 15 bp, Homo sapiens
tcatatgcatgcaac

SEQ ID NO: 5993 - DNA, 15 bp, Homo sapiens
gtcatatgcatgcaa

SEQ ID NO: 5994 - DNA, 15 bp, Homo sapiens
tgtcatatgcatgca

SEQ ID NO: 5995 - DNA, 15 bp, Homo sapiens
ttgtcatatgcatgc

SEQ ID NO: 5996 - DNA, 15 bp, Homo sapiens
attgtcatatgcatg

SEQ ID NO: 5997 - DNA, 15 bp, Homo sapiens
aattgtcatatgcat

SEQ ID NO: 5998 - DNA, 15 bp, Homo sapiens
aaattgtcatatgca

SEQ ID NO: 5999 - DNA, 15 bp, Homo sapiens
aaaattgtcatatgc

SEQ ID NO: 6000 - DNA, 15 bp, Homo sapiens
gaaaattgtcatatg

SEQ ID NO: 6001 - DNA, 15 bp, Homo sapiens
agaaaattgtcatat

SEQ ID NO: 6002 - DNA, 15 bp, Homo sapiens
cagaaaattgtcata

SEQ ID NO: 6003 - DNA, 15 bp, Homo sapiens
gcagaaaattgtcat

SEQ ID NO: 6004 - DNA, 15 bp, Homo sapiens
agcagaaaattgtca

SEQ ID NO: 6005 - DNA, 15 bp, Homo sapiens
aagcagaaaattgtc

SEQ ID NO: 6006 - DNA, 15 bp, Homo sapiens
taagcagaaaattgt

SEQ ID NO: 6007 - DNA, 15 bp, Homo sapiens
ttaagcagaaaattg

SEQ ID NO: 6008 - DNA, 15 bp, Homo sapiens
attaagcagaaaatt

SEQ ID NO: 6009 - DNA, 15 bp, Homo sapiens
aattaagcagaaaat

SEQ ID NO: 6010 - DNA, 15 bp, Homo sapiens
caattaagcagaaaa

SEQ ID NO: 6011 - DNA, 15 bp, Homo sapiens
tcaattaagcagaaa

SEQ ID NO: 6012 - DNA, 15 bp, Homo sapiens
ttcaattaagcagaa

SEQ ID NO: 6013 - DNA, 15 bp, Homo sapiens
tttcaattaagcaga

SEQ ID NO: 6014 - DNA, 15 bp, Homo sapiens
atttcaattaagcag

SEQ ID NO: 6015 - DNA, 15 bp, Homo sapiens
catttcaattaagca

SEQ ID NO: 6016 - DNA, 15 bp, Homo sapiens
acatttcaattaagc

SEQ ID NO: 6017 - DNA, 15 bp, Homo sapiens
cacatttcaattaag

SEQ ID NO: 6018 - DNA, 15 bp, Homo sapiens
tcacatttcaattaa

SEQ ID NO: 6019 - DNA, 15 bp, Homo sapiens
ctcacatttcaatta

SEQ ID NO: 6020 - DNA, 15 bp, Homo sapiens
cctcacatttcaatt

SEQ ID NO: 6021 - DNA, 15 bp, Homo sapiens
gcctcacatttcaat

SEQ ID NO: 6022 - DNA, 15 bp, Homo sapiens
ggcctcacatttcaa

SEQ ID NO: 6023 - DNA, 15 bp, Homo sapiens
aggcctcacatttca

SEQ ID NO: 6024 - DNA, 15 bp, Homo sapiens
gaggcctcacatttc

SEQ ID NO: 6025 - DNA, 15 bp, Homo sapiens
agaggcctcacattt

SEQ ID NO: 6026 - DNA, 15 bp, Homo sapiens
cagaggcctcacatt

SEQ ID NO: 6027 - DNA, 15 bp, Homo sapiens
gcagaggcctcacat

SEQ ID NO: 6028 - DNA, 15 bp, Homo sapiens
ggcagaggcctcaca

SEQ ID NO: 6029 - DNA, 15 bp, Homo sapiens
tggcagaggcctcac

SEQ ID NO: 6030 - DNA, 15 bp, Homo sapiens
atggcagaggcctca

SEQ ID NO: 6031 - DNA, 15 bp, Homo sapiens
tatggcagaggcctc

SEQ ID NO: 6032 - DNA, 15 bp, Homo sapiens
gtatggcagaggcct

SEQ ID NO: 6033 - DNA, 15 bp, Homo sapiens
agtatggcagaggcc

SEQ ID NO: 6034 - DNA, 15 bp, Homo sapiens
tagtatggcagaggc

SEQ ID NO: 6035 - DNA, 15 bp, Homo sapiens
gtagtatggcagagg

SEQ ID NO: 6036 - DNA, 15 bp, Homo sapiens
tgtagtatggcagag

SEQ ID NO: 6037 - DNA, 15 bp, Homo sapiens
ttgtagtatggcaga

SEQ ID NO: 6038 - DNA, 15 bp, Homo sapiens
cttgtagtatggcag

SEQ ID NO: 6039 - DNA, 15 bp, Homo sapiens
ccttgtagtatggca

SEQ ID NO: 6040 - DNA, 15 bp, Homo sapiens
tccttgtagtatggc

SEQ ID NO: 6041 - DNA, 15 bp, Homo sapiens
atccttgtagtatgg

SEQ ID NO: 6042 - DNA, 15 bp, Homo sapiens
aatccttgtagtatg

SEQ ID NO: 6043 - DNA, 15 bp, Homo sapiens
aaatccttgtagtat

SEQ ID NO: 6044 - DNA, 15 bp, Homo sapiens
taaatccttgtagta

SEQ ID NO: 6045 - DNA, 15 bp, Homo sapiens
ctaaatccttgtagt

SEQ ID NO: 6046 - DNA, 15 bp, Homo sapiens
gctaaatccttgtag

SEQ ID NO: 6047 - DNA, 15 bp, Homo sapiens
agctaaatccttgta

SEQ ID NO: 6048 - DNA, 15 bp, Homo sapiens
aagctaaatccttgt

SEQ ID NO: 6049 - DNA, 15 bp, Homo sapiens
gaagctaaatccttg

SEQ ID NO: 6050 - DNA, 15 bp, Homo sapiens
ggaagctaaatcctt

SEQ ID NO: 6051 - DNA, 15 bp, Homo sapiens
tggaagctaaatcct

SEQ ID NO: 6052 - DNA, 15 bp, Homo sapiens
ctggaagctaaatcc

SEQ ID NO: 6053 - DNA, 15 bp, Homo sapiens
tctggaagctaaatc

SEQ ID NO: 6054 - DNA, 15 bp, Homo sapiens
ttctggaagctaaat

SEQ ID NO: 6055 - DNA, 15 bp, Homo sapiens
tttctggaagctaaa

SEQ ID NO: 6056 - DNA, 15 bp, Homo sapiens
ttttctggaagctaa

SEQ ID NO: 6057 - DNA, 15 bp, Homo sapiens
attttctggaagcta

SEQ ID NO: 6058 - DNA, 15 bp, Homo sapiens
cattttctggaagct

SEQ ID NO: 6059 - DNA, 15 bp, Homo sapiens
acattttctggaagc

SEQ ID NO: 6060 - DNA, 15 bp, Homo sapiens
tacattttctggaag

SEQ ID NO: 6061 - DNA, 15 bp, Homo sapiens
ttacattttctggaa

SEQ ID NO: 6062 - DNA, 15 bp, Homo sapiens
attacattttctgga

SEQ ID NO: 6063 - DNA, 15 bp, Homo sapiens
tattacattttctgg

SEQ ID NO: 6064 - DNA, 15 bp, Homo sapiens
atattacattttctg

SEQ ID NO: 6065 - DNA, 15 bp, Homo sapiens
aatattacattttct

SEQ ID NO: 6066 - DNA, 15 bp, Homo sapiens
taatattacattttc

SEQ ID NO: 6067 - DNA, 15 bp, Homo sapiens
ttaatattacatttt

SEQ ID NO: 6068 - DNA, 15 bp, Homo sapiens
gttaatattacattt

SEQ ID NO: 6069 - DNA, 15 bp, Homo sapiens
tgttaatattacatt

SEQ ID NO: 6070 - DNA, 15 bp, Homo sapiens
atgttaatattacat

SEQ ID NO: 6071 - DNA, 15 bp, Homo sapiens
tatgttaatattaca

SEQ ID NO: 6072 - DNA, 15 bp, Homo sapiens
ctatgttaatattac

SEQ ID NO: 6073 - DNA, 15 bp, Homo sapiens
gctatgttaatatta

SEQ ID NO: 6074 - DNA, 15 bp, Homo sapiens
agctatgttaatatt

SEQ ID NO: 6075 - DNA, 15 bp, Homo sapiens
aagctatgttaatat

SEQ ID NO: 6076 - DNA, 15 bp, Homo sapiens
taagctatgttaata

SEQ ID NO: 6077 - DNA, 15 bp, Homo sapiens
ttaagctatgttaat

SEQ ID NO: 6078 - DNA, 15 bp, Homo sapiens
cttaagctatgttaa

SEQ ID NO: 6079 - DNA, 15 bp, Homo sapiens
tcttaagctatgtta

SEQ ID NO: 6080 - DNA, 15 bp, Homo sapiens
ttcttaagctatgtt

SEQ ID NO: 6081 - DNA, 15 bp, Homo sapiens
tttcttaagctatgt

SEQ ID NO: 6082 - DNA, 15 bp, Homo sapiens
atttcttaagctatg

SEQ ID NO: 6083 - DNA, 15 bp, Homo sapiens
catttcttaagctat

SEQ ID NO: 6084 - DNA, 15 bp, Homo sapiens
acatttcttaagcta

SEQ ID NO: 6085 - DNA, 15 bp, Homo sapiens
tacatttcttaagct

SEQ ID NO: 6086 - DNA, 15 bp, Homo sapiens
atacatttcttaagc

SEQ ID NO: 6087 - DNA, 15 bp, Homo sapiens
aatacatttcttaag

SEQ ID NO: 6088 - DNA, 15 bp, Homo sapiens
aaatacatttcttaa

SEQ ID NO: 6089 - DNA, 15 bp, Homo sapiens
aaaatacatttctta

SEQ ID NO: 6090 - DNA, 15 bp, Homo sapiens
aaaaatacatttctt

SEQ ID NO: 6091 - DNA, 15 bp, Homo sapiens
aaaaaatacatttct

SEQ ID NO: 6092 - DNA, 15 bp, Homo sapiens
aaaaaaatacatttc

SEQ ID NO: 6093 - DNA, 15 bp, Homo sapiens
aaaaaaaatacattt

SEQ ID NO: 6094 - DNA, 15 bp, Homo sapiens
aaaaaaaaatacatt

SEQ ID NO: 6095 - DNA, 15 bp, Homo sapiens
aaaaaaaaaatacat

SEQ ID NO: 6096 - DNA, 15 bp, Homo sapiens
aaaaaaaaaaataca

SEQ ID NO: 6097 - DNA, 15 bp, Homo sapiens
gaaaaaaaaaaatac

SEQ ID NO: 6098 - DNA, 15 bp, Homo sapiens
agaaaaaaaaaaata

SEQ ID NO: 6099 - DNA, 15 bp, Homo sapiens
cagaaaaaaaaaaat

SEQ ID NO: 6100 - DNA, 15 bp, Homo sapiens
acagaaaaaaaaaaa

SEQ ID NO: 6101 - DNA, 15 bp, Homo sapiens
tacagaaaaaaaaaa

SEQ ID NO: 6102 - DNA, 15 bp, Homo sapiens
ctacagaaaaaaaaa

SEQ ID NO: 6103 - DNA, 15 bp, Homo sapiens
tctacagaaaaaaaa

SEQ ID NO: 6104 - DNA, 15 bp, Homo sapiens
ttctacagaaaaaaa

SEQ ID NO: 6105 - DNA, 15 bp, Homo sapiens
tttctacagaaaaaa

SEQ ID NO: 6106 - DNA, 15 bp, Homo sapiens
gtttctacagaaaaa

SEQ ID NO: 6107 - DNA, 15 bp, Homo sapiens
ggtttctacagaaaa

SEQ ID NO: 6108 - DNA, 15 bp, Homo sapiens
cggtttctacagaaa

SEQ ID NO: 6109 - DNA, 15 bp, Homo sapiens
acggtttctacagaa

SEQ ID NO: 6110 - DNA, 15 bp, Homo sapiens
aacggtttctacaga

SEQ ID NO: 6111 - DNA, 15 bp, Homo sapiens
caacggtttctacag

SEQ ID NO: 6112 - DNA, 15 bp, Homo sapiens
ccaacggtttctaca

SEQ ID NO: 6113 - DNA, 15 bp, Homo sapiens
cccaacggtttctac

SEQ ID NO: 6114 - DNA, 15 bp, Homo sapiens
acccaacggtttcta

SEQ ID NO: 6115 - DNA, 15 bp, Homo sapiens
aacccaacggtttct

SEQ ID NO: 6116 - DNA, 15 bp, Homo sapiens
taacccaacggtttc

SEQ ID NO: 6117 - DNA, 15 bp, Homo sapiens
ttaacccaacggttt

SEQ ID NO: 6118 - DNA, 15 bp, Homo sapiens
tttaacccaacggtt

SEQ ID NO: 6119 - DNA, 15 bp, Homo sapiens
gtttaacccaacggt

SEQ ID NO: 6120 - DNA, 15 bp, Homo sapiens
tgtttaacccaacgg

SEQ ID NO: 6121 - DNA, 15 bp, Homo sapiens
ttgtttaacccaacg

SEQ ID NO: 6122 - DNA, 15 bp, Homo sapiens
tttgtttaacccaac

SEQ ID NO: 6123 - DNA, 15 bp, Homo sapiens
gtttgtttaacccaa

SEQ ID NO: 6124 - DNA, 15 bp, Homo sapiens
tgtttgtttaaccca

SEQ ID NO: 6125 - DNA, 15 bp, Homo sapiens
ctgtttgtttaaccc

SEQ ID NO: 6126 - DNA, 15 bp, Homo sapiens
actgtttgtttaacc

SEQ ID NO: 6127 - DNA, 15 bp, Homo sapiens
aactgtttgtttaac

SEQ ID NO: 6128 - DNA, 15 bp, Homo sapiens
gaactgtttgtttaa

SEQ ID NO: 6129 - DNA, 15 bp, Homo sapiens
tgaactgtttgttta

SEQ ID NO: 6130 - DNA, 15 bp, Homo sapiens
ctgaactgtttgttt

SEQ ID NO: 6131 - DNA, 15 bp, Homo sapiens
tctgaactgtttgtt

SEQ ID NO: 6132 - DNA, 15 bp, Homo sapiens
ttctgaactgtttgt

SEQ ID NO: 6133 - DNA, 15 bp, Homo sapiens
cttctgaactgtttg

SEQ ID NO: 6134 - DNA, 15 bp, Homo sapiens
acttctgaactgttt

SEQ ID NO: 6135 - DNA, 15 bp, Homo sapiens
aacttctgaactgtt

SEQ ID NO: 6136 - DNA, 15 bp, Homo sapiens
aaacttctgaactgt

SEQ ID NO: 6137 - DNA, 15 bp, Homo sapiens
aaaacttctgaactg

SEQ ID NO: 6138 - DNA, 15 bp, Homo sapiens
taaaacttctgaact

SEQ ID NO: 6139 - DNA, 15 bp, Homo sapiens
ataaaacttctgaac

SEQ ID NO: 6140 - DNA, 15 bp, Homo sapiens
aataaaacttctgaa

SEQ ID NO: 6141 - DNA, 15 bp, Homo sapiens
taataaaacttctga

SEQ ID NO: 6142 - DNA, 15 bp, Homo sapiens
gtaataaaacttctg

SEQ ID NO: 6143 - DNA, 15 bp, Homo sapiens
tgtaataaaacttct

SEQ ID NO: 6144 - DNA, 15 bp, Homo sapiens
atgtaataaaacttc

SEQ ID NO: 6145 - DNA, 15 bp, Homo sapiens
catgtaataaaactt

SEQ ID NO: 6146 - DNA, 15 bp, Homo sapiens
ccatgtaataaaact

SEQ ID NO: 6147 - DNA, 15 bp, Homo sapiens
tccatgtaataaaac

SEQ ID NO: 6148 - DNA, 15 bp, Homo sapiens
ttccatgtaataaaa

SEQ ID NO: 6149 - DNA, 15 bp, Homo sapiens
gttccatgtaataaa

SEQ ID NO: 6150 - DNA, 15 bp, Homo sapiens
ggttccatgtaataa

SEQ ID NO: 6151 - DNA, 15 bp, Homo sapiens
gggttccatgtaata

SEQ ID NO: 6152 - DNA, 15 bp, Homo sapiens
tgggttccatgtaat

SEQ ID NO: 6153 - DNA, 15 bp, Homo sapiens
atgggttccatgtaa

SEQ ID NO: 6154 - DNA, 15 bp, Homo sapiens
aatgggttccatgta

SEQ ID NO: 6155 - DNA, 15 bp, Homo sapiens
taatgggttccatgt

SEQ ID NO: 6156 - DNA, 15 bp, Homo sapiens
ctaatgggttccatg

SEQ ID NO: 6157 - DNA, 15 bp, Homo sapiens
actaatgggttccat

SEQ ID NO: 6158 - DNA, 15 bp, Homo sapiens
aactaatgggttcca

SEQ ID NO: 6159 - DNA, 15 bp, Homo sapiens
gaactaatgggttcc

SEQ ID NO: 6160 - DNA, 15 bp, Homo sapiens
agaactaatgggttc

SEQ ID NO: 6161 - DNA, 15 bp, Homo sapiens
aagaactaatgggtt

SEQ ID NO: 6162 - DNA, 15 bp, Homo sapiens
taagaactaatgggt

SEQ ID NO: 6163 - DNA, 15 bp, Homo sapiens
ttaagaactaatggg

SEQ ID NO: 6164 - DNA, 15 bp, Homo sapiens
attaagaactaatgg

SEQ ID NO: 6165 - DNA, 15 bp, Homo sapiens
gattaagaactaatg

SEQ ID NO: 6166 - DNA, 15 bp, Homo sapiens
agattaagaactaat

SEQ ID NO: 6167 - DNA, 15 bp, Homo sapiens
aagattaagaactaa

SEQ ID NO: 6168 - DNA, 15 bp, Homo sapiens
caagattaagaacta

SEQ ID NO: 6169 - DNA, 15 bp, Homo sapiens
acaagattaagaact

SEQ ID NO: 6170 - DNA, 15 bp, Homo sapiens
aacaagattaagaac

SEQ ID NO: 6171 - DNA, 15 bp, Homo sapiens
taacaagattaagaa

SEQ ID NO: 6172 - DNA, 15 bp, Homo sapiens
gtaacaagattaaga

SEQ ID NO: 6173 - DNA, 15 bp, Homo sapiens
ggtaacaagattaag

SEQ ID NO: 6174 - DNA, 15 bp, Homo sapiens
aggtaacaagattaa

SEQ ID NO: 6175 - DNA, 15 bp, Homo sapiens
aaggtaacaagatta

SEQ ID NO: 6176 - DNA, 15 bp, Homo sapiens
aaaggtaacaagatt

SEQ ID NO: 6177 - DNA, 15 bp, Homo sapiens
aaaaggtaacaagat

SEQ ID NO: 6178 - DNA, 15 bp, Homo sapiens
aaaaaggtaacaaga

SEQ ID NO: 6179 - DNA, 15 bp, Homo sapiens
gaaaaaggtaacaag

SEQ ID NO: 6180 - DNA, 15 bp, Homo sapiens
agaaaaaggtaacaa

SEQ ID NO: 6181 - DNA, 15 bp, Homo sapiens
aagaaaaaggtaaca

SEQ ID NO: 6182 - DNA, 15 bp, Homo sapiens
gaagaaaaaggtaac

SEQ ID NO: 6183 - DNA, 15 bp, Homo sapiens
tgaagaaaaaggtaa

SEQ ID NO: 6184 - DNA, 15 bp, Homo sapiens
atgaagaaaaaggta

SEQ ID NO: 6185 - DNA, 15 bp, Homo sapiens
aatgaagaaaaaggt

SEQ ID NO: 6186 - DNA, 15 bp, Homo sapiens
aaatgaagaaaaagg

SEQ ID NO: 6187 - DNA, 15 bp, Homo sapiens
aaaatgaagaaaaag

SEQ ID NO: 6188 - DNA, 15 bp, Homo sapiens
aaaaatgaagaaaaa

SEQ ID NO: 6189 - DNA, 15 bp, Homo sapiens
aaaaaatgaagaaaa

SEQ ID NO: 6190 - DNA, 15 bp, Homo sapiens
gaaaaaatgaagaaa

SEQ ID NO: 6191 - DNA, 15 bp, Homo sapiens
agaaaaaatgaagaa

SEQ ID NO: 6192 - DNA, 15 bp, Homo sapiens
cagaaaaaatgaaga

SEQ ID NO: 6193 - DNA, 15 bp, Homo sapiens
acagaaaaaatgaag

SEQ ID NO: 6194 - DNA, 15 bp, Homo sapiens
aacagaaaaaatgaa

SEQ ID NO: 6195 - DNA, 15 bp, Homo sapiens
taacagaaaaaatga

SEQ ID NO: 6196 - DNA, 15 bp, Homo sapiens
ttaacagaaaaaatg

SEQ ID NO: 6197 - DNA, 15 bp, Homo sapiens
tttaacagaaaaaat

SEQ ID NO: 6198 - DNA, 15 bp, Homo sapiens
gtttaacagaaaaaa

SEQ ID NO: 6199 - DNA, 15 bp, Homo sapiens
agtttaacagaaaaa

SEQ ID NO: 6200 - DNA, 15 bp, Homo sapiens
aagtttaacagaaaa

SEQ ID NO: 6201 - DNA, 15 bp, Homo sapiens
caagtttaacagaaa

SEQ ID NO: 6202 - DNA, 15 bp, Homo sapiens
tcaagtttaacagaa

SEQ ID NO: 6203 - DNA, 15 bp, Homo sapiens
atcaagtttaacaga

SEQ ID NO: 6204 - DNA, 15 bp, Homo sapiens
aatcaagtttaacag

SEQ ID NO: 6205 - DNA, 15 bp, Homo sapiens
aaatcaagtttaaca

SEQ ID NO: 6206 - DNA, 15 bp, Homo sapiens
aaaatcaagtttaac

SEQ ID NO: 6207 - DNA, 15 bp, Homo sapiens
gaaaatcaagtttaa

SEQ ID NO: 6208 - DNA, 15 bp, Homo sapiens
tgaaaatcaagttta

SEQ ID NO: 6209 - DNA, 15 bp, Homo sapiens
gtgaaaatcaagttt

SEQ ID NO: 6210 - DNA, 15 bp, Homo sapiens
tgtgaaaatcaagtt

SEQ ID NO: 6211 - DNA, 15 bp, Homo sapiens
ctgtgaaaatcaagt

SEQ ID NO: 6212 - DNA, 15 bp, Homo sapiens
actgtgaaaatcaag

SEQ ID NO: 6213 - DNA, 15 bp, Homo sapiens
gactgtgaaaatcaa

SEQ ID NO: 6214 - DNA, 15 bp, Homo sapiens
tgactgtgaaaatca

SEQ ID NO: 6215 - DNA, 15 bp, Homo sapiens
ctgactgtgaaaatc

SEQ ID NO: 6216 - DNA, 15 bp, Homo sapiens
gctgactgtgaaaat

SEQ ID NO: 6217 - DNA, 15 bp, Homo sapiens
tgctgactgtgaaaa

SEQ ID NO: 6218 - DNA, 15 bp, Homo sapiens
atgctgactgtgaaa

SEQ ID NO: 6219 - DNA, 15 bp, Homo sapiens
aatgctgactgtgaa

SEQ ID NO: 6220 - DNA, 15 bp, Homo sapiens
caatgctgactgtga

SEQ ID NO: 6221 - DNA, 15 bp, Homo sapiens
tcaatgctgactgtg

SEQ ID NO: 6222 - DNA, 15 bp, Homo sapiens
ttcaatgctgactgt

SEQ ID NO: 6223 - DNA, 15 bp, Homo sapiens
cttcaatgctgactg

SEQ ID NO: 6224 - DNA, 15 bp, Homo sapiens
tcttcaatgctgact

SEQ ID NO: 6225 - DNA, 15 bp, Homo sapiens
ttcttcaatgctgac

SEQ ID NO: 6226 - DNA, 15 bp, Homo sapiens
attcttcaatgctga

SEQ ID NO: 6227 - DNA, 15 bp, Homo sapiens
aattcttcaatgctg

SEQ ID NO: 6228 - DNA, 15 bp, Homo sapiens
gaattcttcaatgct

SEQ ID NO: 6229 - DNA, 15 bp, Homo sapiens
tgaattcttcaatgc

SEQ ID NO: 6230 - DNA, 15 bp, Homo sapiens
atgaattcttcaatg

SEQ ID NO: 6231 - DNA, 15 bp, Homo sapiens
gatgaattcttcaat

SEQ ID NO: 6232 - DNA, 15 bp, Homo sapiens
agatgaattcttcaa

SEQ ID NO: 6233 - DNA, 15 bp, Homo sapiens
aagatgaattcttca

SEQ ID NO: 6234 - DNA, 15 bp, Homo sapiens
caagatgaattcttc

SEQ ID NO: 6235 - DNA, 15 bp, Homo sapiens
acaagatgaattctt

SEQ ID NO: 6236 - DNA, 15 bp, Homo sapiens
cacaagatgaattct

SEQ ID NO: 6237 - DNA, 15 bp, Homo sapiens
ccacaagatgaattc

SEQ ID NO: 6238 - DNA, 15 bp, Homo sapiens
gccacaagatgaatt

SEQ ID NO: 6239 - DNA, 15 bp, Homo sapiens
ggccacaagatgaat

SEQ ID NO: 6240 - DNA, 15 bp, Homo sapiens
aggccacaagatgaa

SEQ ID NO: 6241 - DNA, 15 bp, Homo sapiens
caggccacaagatga

SEQ ID NO: 6242 - DNA, 15 bp, Homo sapiens
tcaggccacaagatg

SEQ ID NO: 6243 - DNA, 15 bp, Homo sapiens
ttcaggccacaagat

SEQ ID NO: 6244 - DNA, 15 bp, Homo sapiens
attcaggccacaaga

SEQ ID NO: 6245 - DNA, 15 bp, Homo sapiens
aattcaggccacaag

SEQ ID NO: 6246 - DNA, 15 bp, Homo sapiens
gaattcaggccacaa

SEQ ID NO: 6247 - DNA, 15 bp, Homo sapiens
tgaattcaggccaca

SEQ ID NO: 6248 - DNA, 15 bp, Homo sapiens
atgaattcaggccac

SEQ ID NO: 6249 - DNA, 15 bp, Homo sapiens
aatgaattcaggcca

SEQ ID NO: 6250 - DNA, 15 bp, Homo sapiens
taatgaattcaggcc

SEQ ID NO: 6251 - DNA, 15 bp, Homo sapiens
ttaatgaattcaggc

SEQ ID NO: 6252 - DNA, 15 bp, Homo sapiens
cttaatgaattcagg

SEQ ID NO: 6253 - DNA, 15 bp, Homo sapiens
tcttaatgaattcag

SEQ ID NO: 6254 - DNA, 15 bp, Homo sapiens
ttcttaatgaattca

SEQ ID NO: 6255 - DNA, 15 bp, Homo sapiens
tttcttaatgaattc

SEQ ID NO: 6256 - DNA, 15 bp, Homo sapiens
ttttcttaatgaatt

SEQ ID NO: 6257 - DNA, 15 bp, Homo sapiens
cttttcttaatgaat

SEQ ID NO: 6258 - DNA, 15 bp, Homo sapiens
tcttttcttaatgaa

SEQ ID NO: 6259 - DNA, 15 bp, Homo sapiens
atcttttcttaatga

SEQ ID NO: 6260 - DNA, 15 bp, Homo sapiens
catcttttcttaatg

SEQ ID NO: 6261 - DNA, 15 bp, Homo sapiens
acatcttttcttaat

SEQ ID NO: 6262 - DNA, 15 bp, Homo sapiens
aacatcttttcttaa

SEQ ID NO: 6263 - DNA, 15 bp, Homo sapiens
taacatcttttctta

SEQ ID NO: 6264 - DNA, 15 bp, Homo sapiens
ctaacatcttttctt

SEQ ID NO: 6265 - DNA, 15 bp, Homo sapiens
cctaacatcttttct

SEQ ID NO: 6266 - DNA, 15 bp, Homo sapiens
tcctaacatcttttc

SEQ ID NO: 6267 - DNA, 15 bp, Homo sapiens
atcctaacatctttt

SEQ ID NO: 6268 - DNA, 15 bp, Homo sapiens
aatcctaacatcttt

SEQ ID NO: 6269 - DNA, 15 bp, Homo sapiens
aaatcctaacatctt

SEQ ID NO: 6270 - DNA, 15 bp, Homo sapiens
caaatcctaacatct

SEQ ID NO: 6271 - DNA, 15 bp, Homo sapiens
acaaatcctaacatc

SEQ ID NO: 6272 - DNA, 15 bp, Homo sapiens
aacaaatcctaacat

SEQ ID NO: 6273 - DNA, 15 bp, Homo sapiens
gaacaaatcctaaca

SEQ ID NO: 6274 - DNA, 15 bp, Homo sapiens
agaacaaatcctaac

SEQ ID NO: 6275 - DNA, 15 bp, Homo sapiens
cagaacaaatcctaa

SEQ ID NO: 6276 - DNA, 15 bp, Homo sapiens
tcagaacaaatccta

SEQ ID NO: 6277 - DNA, 15 bp, Homo sapiens
ttcagaacaaatcct

SEQ ID NO: 6278 - DNA, 15 bp, Homo sapiens
cttcagaacaaatcc

SEQ ID NO: 6279 - DNA, 15 bp, Homo sapiens
tcttcagaacaaatc

SEQ ID NO: 6280 - DNA, 15 bp, Homo sapiens
atcttcagaacaaat

SEQ ID NO: 6281 - DNA, 15 bp, Homo sapiens
tatcttcagaacaaa

SEQ ID NO: 6282 - DNA, 15 bp, Homo sapiens
ctatcttcagaacaa

SEQ ID NO: 6283 - DNA, 15 bp, Homo sapiens
actatcttcagaaca

SEQ ID NO: 6284 - DNA, 15 bp, Homo sapiens
cactatcttcagaac

SEQ ID NO: 6285 - DNA, 15 bp, Homo sapiens
tcactatcttcagaa

SEQ ID NO: 6286 - DNA, 15 bp, Homo sapiens
gtcactatcttcaga

SEQ ID NO: 6287 - DNA, 15 bp, Homo sapiens
agtcactatcttcag

SEQ ID NO: 6288 - DNA, 15 bp, Homo sapiens
aagtcactatcttca

SEQ ID NO: 6289 - DNA, 15 bp, Homo sapiens
taagtcactatcttc

SEQ ID NO: 6290 - DNA, 15 bp, Homo sapiens
ctaagtcactatctt

SEQ ID NO: 6291 - DNA, 15 bp, Homo sapiens
cctaagtcactatct

SEQ ID NO: 6292 - DNA, 15 bp, Homo sapiens
tcctaagtcactatc

SEQ ID NO: 6293 - DNA, 15 bp, Homo sapiens
ttcctaagtcactat

SEQ ID NO: 6294 - DNA, 15 bp, Homo sapiens
tttcctaagtcacta

SEQ ID NO: 6295 - DNA, 15 bp, Homo sapiens
atttcctaagtcact

SEQ ID NO: 6296 - DNA, 15 bp, Homo sapiens
aatttcctaagtcac

SEQ ID NO: 6297 - DNA, 15 bp, Homo sapiens
aaatttcctaagtca

SEQ ID NO: 6298 - DNA, 15 bp, Homo sapiens
caaatttcctaagtc

SEQ ID NO: 6299 - DNA, 15 bp, Homo sapiens
acaaatttcctaagt

SEQ ID NO: 6300 - DNA, 15 bp, Homo sapiens
cacaaatttcctaag

SEQ ID NO: 6301 - DNA, 15 bp, Homo sapiens
tcacaaatttcctaa

SEQ ID NO: 6302 - DNA, 15 bp, Homo sapiens
ctcacaaatttccta

SEQ ID NO: 6303 - DNA, 15 bp, Homo sapiens
tctcacaaatttcct

SEQ ID NO: 6304 - DNA, 15 bp, Homo sapiens
gtctcacaaatttcc

SEQ ID NO: 6305 - DNA, 15 bp, Homo sapiens
agtctcacaaatttc

SEQ ID NO: 6306 - DNA, 15 bp, Homo sapiens
cagtctcacaaattt

SEQ ID NO: 6307 - DNA, 15 bp, Homo sapiens
ccagtctcacaaatt

SEQ ID NO: 6308 - DNA, 15 bp, Homo sapiens
cccagtctcacaaat

SEQ ID NO: 6309 - DNA, 15 bp, Homo sapiens
ccccagtctcacaaa

SEQ ID NO: 6310 - DNA, 15 bp, Homo sapiens
accccagtctcacaa

SEQ ID NO: 6311 - DNA, 15 bp, Homo sapiens
gaccccagtctcaca

SEQ ID NO: 6312 - DNA, 15 bp, Homo sapiens
tgaccccagtctcac

SEQ ID NO: 6313 - DNA, 15 bp, Homo sapiens
ctgaccccagtctca

SEQ ID NO: 6314 - DNA, 15 bp, Homo sapiens
actgaccccagtctc

SEQ ID NO: 6315 - DNA, 15 bp, Homo sapiens
gactgaccccagtct

SEQ ID NO: 6316 - DNA, 15 bp, Homo sapiens
tgactgaccccagtc

SEQ ID NO: 6317 - DNA, 15 bp, Homo sapiens
ctgactgaccccagt

SEQ ID NO: 6318 - DNA, 15 bp, Homo sapiens
actgactgaccccag

SEQ ID NO: 6319 - DNA, 15 bp, Homo sapiens
aactgactgacccca

SEQ ID NO: 6320 - DNA, 15 bp, Homo sapiens
gaactgactgacccc

SEQ ID NO: 6321 - DNA, 15 bp, Homo sapiens
agaactgactgaccc

SEQ ID NO: 6322 - DNA, 15 bp, Homo sapiens
cagaactgactgacc

SEQ ID NO: 6323 - DNA, 15 bp, Homo sapiens
acagaactgactgac

SEQ ID NO: 6324 - DNA, 15 bp, Homo sapiens
aacagaactgactga

SEQ ID NO: 6325 - DNA, 15 bp, Homo sapiens
aaacagaactgactg

SEQ ID NO: 6326 - DNA, 15 bp, Homo sapiens
aaaacagaactgact

SEQ ID NO: 6327 - DNA, 15 bp, Homo sapiens
taaaacagaactgac

SEQ ID NO: 6328 - DNA, 15 bp, Homo sapiens
gtaaaacagaactga

SEQ ID NO: 6329 - DNA, 15 bp, Homo sapiens
tgtaaaacagaactg

SEQ ID NO: 6330 - DNA, 15 bp, Homo sapiens
ttgtaaaacagaact

SEQ ID NO: 6331 - DNA, 15 bp, Homo sapiens
attgtaaaacagaac

SEQ ID NO: 6332 - DNA, 15 bp, Homo sapiens
aattgtaaaacagaa

SEQ ID NO: 6333 - DNA, 15 bp, Homo sapiens
caattgtaaaacaga

SEQ ID NO: 6334 - DNA, 15 bp, Homo sapiens
gcaattgtaaaacag

SEQ ID NO: 6335 - DNA, 15 bp, Homo sapiens
agcaattgtaaaaca

SEQ ID NO: 6336 - DNA, 15 bp, Homo sapiens
aagcaattgtaaaac

SEQ ID NO: 6337 - DNA, 15 bp, Homo sapiens
aaagcaattgtaaaa

SEQ ID NO: 6338 - DNA, 15 bp, Homo sapiens
gaaagcaattgtaaa

SEQ ID NO: 6339 - DNA, 15 bp, Homo sapiens
agaaagcaattgtaa

SEQ ID NO: 6340 - DNA, 15 bp, Homo sapiens
tagaaagcaattgta

SEQ ID NO: 6341 - DNA, 15 bp, Homo sapiens
atagaaagcaattgt

SEQ ID NO: 6342 - DNA, 15 bp, Homo sapiens
aatagaaagcaattg

SEQ ID NO: 6343 - DNA, 15 bp, Homo sapiens
aaatagaaagcaatt

SEQ ID NO: 6344 - DNA, 15 bp, Homo sapiens
caaatagaaagcaat

SEQ ID NO: 6345 - DNA, 15 bp, Homo sapiens
ccaaatagaaagcaa

SEQ ID NO: 6346 - DNA, 15 bp, Homo sapiens
accaaatagaaagca

SEQ ID NO: 6347 - DNA, 15 bp, Homo sapiens
taccaaatagaaagc

SEQ ID NO: 6348 - DNA, 15 bp, Homo sapiens
ctaccaaatagaaag

SEQ ID NO: 6349 - DNA, 15 bp, Homo sapiens
gctaccaaatagaaa

SEQ ID NO: 6350 - DNA, 15 bp, Homo sapiens
agctaccaaatagaa

SEQ ID NO: 6351 - DNA, 15 bp, Homo sapiens
aagctaccaaataga

SEQ ID NO: 6352 - DNA, 15 bp, Homo sapiens
aaagctaccaaatag

SEQ ID NO: 6353 - DNA, 15 bp, Homo sapiens
caaagctaccaaata

SEQ ID NO: 6354 - DNA, 15 bp, Homo sapiens
tcaaagctaccaaat

SEQ ID NO: 6355 - DNA, 15 bp, Homo sapiens
ttcaaagctaccaaa

SEQ ID NO: 6356 - DNA, 15 bp, Homo sapiens
tttcaaagctaccaa

SEQ ID NO: 6357 - DNA, 15 bp, Homo sapiens
atttcaaagctacca

SEQ ID NO: 6358 - DNA, 15 bp, Homo sapiens
aatttcaaagctacc

SEQ ID NO: 6359 - DNA, 15 bp, Homo sapiens
taatttcaaagctac

SEQ ID NO: 6360 - DNA, 15 bp, Homo sapiens
ttaatttcaaagcta

SEQ ID NO: 6361 - DNA, 15 bp, Homo sapiens
attaatttcaaagct

SEQ ID NO: 6362 - DNA, 15 bp, Homo sapiens
aattaatttcaaagc

SEQ ID NO: 6363 - DNA, 15 bp, Homo sapiens
aaattaatttcaaag

SEQ ID NO: 6364 - DNA, 15 bp, Homo sapiens
taaattaatttcaaa

SEQ ID NO: 6365 - DNA, 15 bp, Homo sapiens
ctaaattaatttcaa

SEQ ID NO: 6366 - DNA, 15 bp, Homo sapiens
actaaattaatttca

SEQ ID NO: 6367 - DNA, 15 bp, Homo sapiens
aactaaattaatttc

SEQ ID NO: 6368 - DNA, 15 bp, Homo sapiens
caactaaattaattt

SEQ ID NO: 6369 - DNA, 15 bp, Homo sapiens
gcaactaaattaatt

SEQ ID NO: 6370 - DNA, 15 bp, Homo sapiens
agcaactaaattaat

SEQ ID NO: 6371 - DNA, 15 bp, Homo sapiens
aagcaactaaattaa

SEQ ID NO: 6372 - DNA, 15 bp, Homo sapiens
taagcaactaaatta

SEQ ID NO: 6373 - DNA, 15 bp, Homo sapiens
ataagcaactaaatt

SEQ ID NO: 6374 - DNA, 15 bp, Homo sapiens
gataagcaactaaat

SEQ ID NO: 6375 - DNA, 15 bp, Homo sapiens
tgataagcaactaaa

SEQ ID NO: 6376 - DNA, 15 bp, Homo sapiens
ctgataagcaactaa

SEQ ID NO: 6377 - DNA, 15 bp, Homo sapiens
tctgataagcaacta

SEQ ID NO: 6378 - DNA, 15 bp, Homo sapiens
ctctgataagcaact

SEQ ID NO: 6379 - DNA, 15 bp, Homo sapiens
tctctgataagcaac

SEQ ID NO: 6380 - DNA, 15 bp, Homo sapiens
ctctctgataagcaa

SEQ ID NO: 6381 - DNA, 15 bp, Homo sapiens
tctctctgataagca

SEQ ID NO: 6382 - DNA, 15 bp, Homo sapiens
ttctctctgataagc

SEQ ID NO: 6383 - DNA, 15 bp, Homo sapiens
attctctctgataag

SEQ ID NO: 6384 - DNA, 15 bp, Homo sapiens
tattctctctgataa

SEQ ID NO: 6385 - DNA, 15 bp, Homo sapiens
ttattctctctgata

SEQ ID NO: 6386 - DNA, 15 bp, Homo sapiens
attattctctctgat

SEQ ID NO: 6387 - DNA, 15 bp, Homo sapiens
cattattctctctga

SEQ ID NO: 6388 - DNA, 15 bp, Homo sapiens
acattattctctctg

SEQ ID NO: 6389 - DNA, 15 bp, Homo sapiens
aacattattctctct

SEQ ID NO: 6390 - DNA, 15 bp, Homo sapiens
caacattattctctc

SEQ ID NO: 6391 - DNA, 15 bp, Homo sapiens
tcaacattattctct

SEQ ID NO: 6392 - DNA, 15 bp, Homo sapiens
ctcaacattattctc

SEQ ID NO: 6393 - DNA, 15 bp, Homo sapiens
cctcaacattattct

SEQ ID NO: 6394 - DNA, 15 bp, Homo sapiens
acctcaacattattc

SEQ ID NO: 6395 - DNA, 15 bp, Homo sapiens
aacctcaacattatt

SEQ ID NO: 6396 - DNA, 15 bp, Homo sapiens
taacctcaacattat

SEQ ID NO: 6397 - DNA, 15 bp, Homo sapiens
ctaacctcaacatta

SEQ ID NO: 6398 - DNA, 15 bp, Homo sapiens
tctaacctcaacatt

SEQ ID NO: 6399 - DNA, 15 bp, Homo sapiens
gtctaacctcaacat

SEQ ID NO: 6400 - DNA, 15 bp, Homo sapiens
agtctaacctcaaca

SEQ ID NO: 6401 - DNA, 15 bp, Homo sapiens
tagtctaacctcaac

SEQ ID NO: 6402 - DNA, 15 bp, Homo sapiens
ttagtctaacctcaa

SEQ ID NO: 6403 - DNA, 15 bp, Homo sapiens
gttagtctaacctca

SEQ ID NO: 6404 - DNA, 15 bp, Homo sapiens
ggttagtctaacctc

SEQ ID NO: 6405 - DNA, 15 bp, Homo sapiens
aggttagtctaacct

SEQ ID NO: 6406 - DNA, 15 bp, Homo sapiens
aaggttagtctaacc

SEQ ID NO: 6407 - DNA, 15 bp, Homo sapiens
taaggttagtctaac

SEQ ID NO: 6408 - DNA, 15 bp, Homo sapiens
ttaaggttagtctaa

SEQ ID NO: 6409 - DNA, 15 bp, Homo sapiens
tttaaggttagtcta

SEQ ID NO: 6410 - DNA, 15 bp, Homo sapiens
atttaaggttagtct

SEQ ID NO: 6411 - DNA, 15 bp, Homo sapiens
aatttaaggttagtc

SEQ ID NO: 6412 - DNA, 15 bp, Homo sapiens
caatttaaggttagt

SEQ ID NO: 6413 - DNA, 15 bp, Homo sapiens
ccaatttaaggttag

SEQ ID NO: 6414 - DNA, 15 bp, Homo sapiens
accaatttaaggtta

SEQ ID NO: 6415 - DNA, 15 bp, Homo sapiens
taccaatttaaggtt

SEQ ID NO: 6416 - DNA, 15 bp, Homo sapiens
ttaccaatttaaggt

SEQ ID NO: 6417 - DNA, 15 bp, Homo sapiens
cttaccaatttaagg

SEQ ID NO: 6418 - DNA, 15 bp, Homo sapiens
ccttaccaatttaag

SEQ ID NO: 6419 - DNA, 15 bp, Homo sapiens
gccttaccaatttaa

SEQ ID NO: 6420 - DNA, 15 bp, Homo sapiens
agccttaccaattta

SEQ ID NO: 6421 - DNA, 15 bp, Homo sapiens
aagccttaccaattt

SEQ ID NO: 6422 - DNA, 15 bp, Homo sapiens
aaagccttaccaatt

SEQ ID NO: 6423 - DNA, 15 bp, Homo sapiens
caaagccttaccaat

SEQ ID NO: 6424 - DNA, 15 bp, Homo sapiens
gcaaagccttaccaa

SEQ ID NO: 6425 - DNA, 15 bp, Homo sapiens
agcaaagccttacca

SEQ ID NO: 6426 - DNA, 15 bp, Homo sapiens
cagcaaagccttacc

SEQ ID NO: 6427 - DNA, 15 bp, Homo sapiens
tcagcaaagccttac

SEQ ID NO: 6428 - DNA, 15 bp, Homo sapiens
ctcagcaaagcctta

SEQ ID NO: 6429 - DNA, 15 bp, Homo sapiens
gctcagcaaagcctt

SEQ ID NO: 6430 - DNA, 15 bp, Homo sapiens
tgctcagcaaagcct

SEQ ID NO: 6431 - DNA, 15 bp, Homo sapiens
ttgctcagcaaagcc

SEQ ID NO: 6432 - DNA, 15 bp, Homo sapiens
tttgctcagcaaagc

SEQ ID NO: 6433 - DNA, 15 bp, Homo sapiens
gtttgctcagcaaag

SEQ ID NO: 6434 - DNA, 15 bp, Homo sapiens
agtttgctcagcaaa

SEQ ID NO: 6435 - DNA, 15 bp, Homo sapiens
cagtttgctcagcaa

SEQ ID NO: 6436 - DNA, 15 bp, Homo sapiens
tcagtttgctcagca

SEQ ID NO: 6437 - DNA, 15 bp, Homo sapiens
atcagtttgctcagc

SEQ ID NO: 6438 - DNA, 15 bp, Homo sapiens
tatcagtttgctcag

SEQ ID NO: 6439 - DNA, 15 bp, Homo sapiens
ttatcagtttgctca

SEQ ID NO: 6440 - DNA, 15 bp, Homo sapiens
gttatcagtttgctc

SEQ ID NO: 6441 - DNA, 15 bp, Homo sapiens
agttatcagtttgct

SEQ ID NO: 6442 - DNA, 15 bp, Homo sapiens
cagttatcagtttgc

SEQ ID NO: 6443 - DNA, 15 bp, Homo sapiens
acagttatcagtttg

SEQ ID NO: 6444 - DNA, 15 bp, Homo sapiens
tacagttatcagttt

SEQ ID NO: 6445 - DNA, 15 bp, Homo sapiens
ttacagttatcagtt

SEQ ID NO: 6446 - DNA, 15 bp, Homo sapiens
cttacagttatcagt

SEQ ID NO: 6447 - DNA, 15 bp, Homo sapiens
acttacagttatcag

SEQ ID NO: 6448 - DNA, 15 bp, Homo sapiens
gacttacagttatca

SEQ ID NO: 6449 - DNA, 15 bp, Homo sapiens
agacttacagttatc

SEQ ID NO: 6450 - DNA, 15 bp, Homo sapiens
aagacttacagttat

SEQ ID NO: 6451 - DNA, 15 bp, Homo sapiens
aaagacttacagtta

SEQ ID NO: 6452 - DNA, 15 bp, Homo sapiens
aaaagacttacagtt

SEQ ID NO: 6453 - DNA, 15 bp, Homo sapiens
taaaagacttacagt

SEQ ID NO: 6454 - DNA, 15 bp, Homo sapiens
ataaaagacttacag

SEQ ID NO: 6455 - DNA, 15 bp, Homo sapiens
tataaaagacttaca

SEQ ID NO: 6456 - DNA, 15 bp, Homo sapiens
ctataaaagacttac

SEQ ID NO: 6457 - DNA, 15 bp, Homo sapiens
cctataaaagactta

SEQ ID NO: 6458 - DNA, 15 bp, Homo sapiens
ccctataaaagactt

SEQ ID NO: 6459 - DNA, 15 bp, Homo sapiens
accctataaaagact

SEQ ID NO: 6460 - DNA, 15 bp, Homo sapiens
caccctataaaagac

SEQ ID NO: 6461 - DNA, 15 bp, Homo sapiens
gcaccctataaaaga

SEQ ID NO: 6462 - DNA, 15 bp, Homo sapiens
tgcaccctataaaag

SEQ ID NO: 6463 - DNA, 15 bp, Homo sapiens
atgcaccctataaaa

SEQ ID NO: 6464 - DNA, 15 bp, Homo sapiens
aatgcaccctataaa

SEQ ID NO: 6465 - DNA, 15 bp, Homo sapiens
taatgcaccctataa

SEQ ID NO: 6466 - DNA, 15 bp, Homo sapiens
gtaatgcaccctata

SEQ ID NO: 6467 - DNA, 15 bp, Homo sapiens
agtaatgcaccctat

SEQ ID NO: 6468 - DNA, 15 bp, Homo sapiens
cagtaatgcacccta

SEQ ID NO: 6469 - DNA, 15 bp, Homo sapiens
gcagtaatgcaccct

SEQ ID NO: 6470 - DNA, 15 bp, Homo sapiens
ggcagtaatgcaccc

SEQ ID NO: 6471 - DNA, 15 bp, Homo sapiens
tggcagtaatgcacc

SEQ ID NO: 6472 - DNA, 15 bp, Homo sapiens
gtggcagtaatgcac

SEQ ID NO: 6473 - DNA, 15 bp, Homo sapiens
tgtggcagtaatgca

SEQ ID NO: 6474 - DNA, 15 bp, Homo sapiens
atgtggcagtaatgc

SEQ ID NO: 6475 - DNA, 15 bp, Homo sapiens
tatgtggcagtaatg

SEQ ID NO: 6476 - DNA, 15 bp, Homo sapiens
atatgtggcagtaat

SEQ ID NO: 6477 - DNA, 15 bp, Homo sapiens
tatatgtggcagtaa

SEQ ID NO: 6478 - DNA, 15 bp, Homo sapiens
gtatatgtggcagta

SEQ ID NO: 6479 - DNA, 15 bp, Homo sapiens
cgtatatgtggcagt

SEQ ID NO: 6480 - DNA, 15 bp, Homo sapiens
acgtatatgtggcag

SEQ ID NO: 6481 - DNA, 15 bp, Homo sapiens
aacgtatatgtggca

SEQ ID NO: 6482 - DNA, 15 bp, Homo sapiens
gaacgtatatgtggc

SEQ ID NO: 6483 - DNA, 15 bp, Homo sapiens
agaacgtatatgtgg

SEQ ID NO: 6484 - DNA, 15 bp, Homo sapiens
aagaacgtatatgtg

SEQ ID NO: 6485 - DNA, 15 bp, Homo sapiens
gaagaacgtatatgt

SEQ ID NO: 6486 - DNA, 15 bp, Homo sapiens
ggaagaacgtatatg

SEQ ID NO: 6487 - DNA, 15 bp, Homo sapiens
tggaagaacgtatat

SEQ ID NO: 6488 - DNA, 15 bp, Homo sapiens
atggaagaacgtata

SEQ ID NO: 6489 - DNA, 15 bp, Homo sapiens
tatggaagaacgtat

SEQ ID NO: 6490 - DNA, 15 bp, Homo sapiens
ctatggaagaacgta

SEQ ID NO: 6491 - DNA, 15 bp, Homo sapiens
cctatggaagaacgt

SEQ ID NO: 6492 - DNA, 15 bp, Homo sapiens
acctatggaagaacg

SEQ ID NO: 6493 - DNA, 15 bp, Homo sapiens
cacctatggaagaac

SEQ ID NO: 6494 - DNA, 15 bp, Homo sapiens
ccacctatggaagaa

SEQ ID NO: 6495 - DNA, 15 bp, Homo sapiens
accacctatggaaga

SEQ ID NO: 6496 - DNA, 15 bp, Homo sapiens
aaccacctatggaag

SEQ ID NO: 6497 - DNA, 15 bp, Homo sapiens
taaccacctatggaa

SEQ ID NO: 6498 - DNA, 15 bp, Homo sapiens
ttaaccacctatgga

SEQ ID NO: 6499 - DNA, 15 bp, Homo sapiens
tttaaccacctatgg

SEQ ID NO: 6500 - DNA, 15 bp, Homo sapiens
ttttaaccacctatg

SEQ ID NO: 6501 - DNA, 15 bp, Homo sapiens
cttttaaccacctat

SEQ ID NO: 6502 - DNA, 15 bp, Homo sapiens
acttttaaccaccta

SEQ ID NO: 6503 - DNA, 15 bp, Homo sapiens
tacttttaaccacct

SEQ ID NO: 6504 - DNA, 15 bp, Homo sapiens
atacttttaaccacc

SEQ ID NO: 6505 - DNA, 15 bp, Homo sapiens
tatacttttaaccac

SEQ ID NO: 6506 - DNA, 15 bp, Homo sapiens
atatacttttaacca

SEQ ID NO: 6507 - DNA, 15 bp, Homo sapiens
aatatacttttaacc

SEQ ID NO: 6508 - DNA, 15 bp, Homo sapiens
caatatacttttaac

SEQ ID NO: 6509 - DNA, 15 bp, Homo sapiens
ccaatatacttttaa

SEQ ID NO: 6510 - DNA, 15 bp, Homo sapiens
accaatatactttta

SEQ ID NO: 6511 - DNA, 15 bp, Homo sapiens
gaccaatatactttt

SEQ ID NO: 6512 - DNA, 15 bp, Homo sapiens
agaccaatatacttt

SEQ ID NO: 6513 - DNA, 15 bp, Homo sapiens
cagaccaatatactt

SEQ ID NO: 6514 - DNA, 15 bp, Homo sapiens
acagaccaatatact

SEQ ID NO: 6515 - DNA, 15 bp, Homo sapiens
cacagaccaatatac

SEQ ID NO: 6516 - DNA, 15 bp, Homo sapiens
acacagaccaatata

SEQ ID NO: 6517 - DNA, 15 bp, Homo sapiens
aacacagaccaatat

SEQ ID NO: 6518 - DNA, 15 bp, Homo sapiens
aaacacagaccaata

SEQ ID NO: 6519 - DNA, 15 bp, Homo sapiens
caaacacagaccaat

SEQ ID NO: 6520 - DNA, 15 bp, Homo sapiens
ccaaacacagaccaa

SEQ ID NO: 6521 - DNA, 15 bp, Homo sapiens
accaaacacagacca

SEQ ID NO: 6522 - DNA, 15 bp, Homo sapiens
caccaaacacagacc

SEQ ID NO: 6523 - DNA, 15 bp, Homo sapiens
tcaccaaacacagac

SEQ ID NO: 6524 - DNA, 15 bp, Homo sapiens
atcaccaaacacaga

SEQ ID NO: 6525 - DNA, 15 bp, Homo sapiens
aatcaccaaacacag

SEQ ID NO: 6526 - DNA, 15 bp, Homo sapiens
gaatcaccaaacaca

SEQ ID NO: 6527 - DNA, 15 bp, Homo sapiens
agaatcaccaaacac

SEQ ID NO: 6528 - DNA, 15 bp, Homo sapiens
gagaatcaccaaaca

SEQ ID NO: 6529 - DNA, 15 bp, Homo sapiens
agagaatcaccaaac

SEQ ID NO: 6530 - DNA, 15 bp, Homo sapiens
aagagaatcaccaaa

SEQ ID NO: 6531 - DNA, 15 bp, Homo sapiens
aaagagaatcaccaa

SEQ ID NO: 6532 - DNA, 15 bp, Homo sapiens
caaagagaatcacca

SEQ ID NO: 6533 - DNA, 15 bp, Homo sapiens
acaaagagaatcacc

SEQ ID NO: 6534 - DNA, 15 bp, Homo sapiens
tacaaagagaatcac

SEQ ID NO: 6535 - DNA, 15 bp, Homo sapiens
gtacaaagagaatca

SEQ ID NO: 6536 - DNA, 15 bp, Homo sapiens
tgtacaaagagaatc

SEQ ID NO: 6537 - DNA, 15 bp, Homo sapiens
atgtacaaagagaat

SEQ ID NO: 6538 - DNA, 15 bp, Homo sapiens
tatgtacaaagagaa

SEQ ID NO: 6539 - DNA, 15 bp, Homo sapiens
atatgtacaaagaga

SEQ ID NO: 6540 - DNA, 15 bp, Homo sapiens
aatatgtacaaagag

SEQ ID NO: 6541 - DNA, 15 bp, Homo sapiens
caatatgtacaaaga

SEQ ID NO: 6542 - DNA, 15 bp, Homo sapiens
tcaatatgtacaaag

SEQ ID NO: 6543 - DNA, 15 bp, Homo sapiens
ctcaatatgtacaaa

SEQ ID NO: 6544 - DNA, 15 bp, Homo sapiens
actcaatatgtacaa

SEQ ID NO: 6545 - DNA, 15 bp, Homo sapiens
tactcaatatgtaca

SEQ ID NO: 6546 - DNA, 15 bp, Homo sapiens
atactcaatatgtac

SEQ ID NO: 6547 - DNA, 15 bp, Homo sapiens
tatactcaatatgta

SEQ ID NO: 6548 - DNA, 15 bp, Homo sapiens
atatactcaatatgt

SEQ ID NO: 6549 - DNA, 15 bp, Homo sapiens
catatactcaatatg

SEQ ID NO: 6550 - DNA, 15 bp, Homo sapiens
gcatatactcaatat

SEQ ID NO: 6551 - DNA, 15 bp, Homo sapiens
tgcatatactcaata

SEQ ID NO: 6552 - DNA, 15 bp, Homo sapiens
atgcatatactcaat

SEQ ID NO: 6553 - DNA, 15 bp, Homo sapiens
aatgcatatactcaa

SEQ ID NO: 6554 - DNA, 15 bp, Homo sapiens
gaatgcatatactca

SEQ ID NO: 6555 - DNA, 15 bp, Homo sapiens
tgaatgcatatactc

SEQ ID NO: 6556 - DNA, 15 bp, Homo sapiens
gtgaatgcatatact

SEQ ID NO: 6557 - DNA, 15 bp, Homo sapiens
agtgaatgcatatac

SEQ ID NO: 6558 - DNA, 15 bp, Homo sapiens
tagtgaatgcatata

SEQ ID NO: 6559 - DNA, 15 bp, Homo sapiens
ttagtgaatgcatat

SEQ ID NO: 6560 - DNA, 15 bp, Homo sapiens
attagtgaatgcata

SEQ ID NO: 6561 - DNA, 15 bp, Homo sapiens
cattagtgaatgcat

SEQ ID NO: 6562 - DNA, 15 bp, Homo sapiens
acattagtgaatgca

SEQ ID NO: 6563 - DNA, 15 bp, Homo sapiens
tacattagtgaatgc

SEQ ID NO: 6564 - DNA, 15 bp, Homo sapiens
ttacattagtgaatg

SEQ ID NO: 6565 - DNA, 15 bp, Homo sapiens
tttacattagtgaat

SEQ ID NO: 6566 - DNA, 15 bp, Homo sapiens
ttttacattagtgaa

SEQ ID NO: 6567 - DNA, 15 bp, Homo sapiens
attttacattagtga

SEQ ID NO: 6568 - DNA, 15 bp, Homo sapiens
tattttacattagtg

SEQ ID NO: 6569 - DNA, 15 bp, Homo sapiens
ttattttacattagt

SEQ ID NO: 6570 - DNA, 15 bp, Homo sapiens
attattttacattag

SEQ ID NO: 6571 - DNA, 15 bp, Homo sapiens
aattattttacatta

SEQ ID NO: 6572 - DNA, 15 bp, Homo sapiens
aaattattttacatt

SEQ ID NO: 6573 - DNA, 15 bp, Homo sapiens
caaattattttacat

SEQ ID NO: 6574 - DNA, 15 bp, Homo sapiens
gcaaattattttaca

SEQ ID NO: 6575 - DNA, 15 bp, Homo sapiens
ggcaaattattttac

SEQ ID NO: 6576 - DNA, 15 bp, Homo sapiens
tggcaaattatttta

SEQ ID NO: 6577 - DNA, 15 bp, Homo sapiens
ttggcaaattatttt

SEQ ID NO: 6578 - DNA, 15 bp, Homo sapiens
cttggcaaattattt

SEQ ID NO: 6579 - DNA, 15 bp, Homo sapiens
tcttggcaaattatt

SEQ ID NO: 6580 - DNA, 15 bp, Homo sapiens
ttcttggcaaattat

SEQ ID NO: 6581 - DNA, 15 bp, Homo sapiens
tttcttggcaaatta

SEQ ID NO: 6582 - DNA, 15 bp, Homo sapiens
ctttcttggcaaatt

SEQ ID NO: 6583 - DNA, 15 bp, Homo sapiens
cctttcttggcaaat

SEQ ID NO: 6584 - DNA, 15 bp, Homo sapiens
acctttcttggcaaa

SEQ ID NO: 6585 - DNA, 15 bp, Homo sapiens
cacctttcttggcaa

SEQ ID NO: 6586 - DNA, 15 bp, Homo sapiens
tcacctttcttggca

SEQ ID NO: 6587 - DNA, 15 bp, Homo sapiens
ttcacctttcttggc

SEQ ID NO: 6588 - DNA, 15 bp, Homo sapiens
tttcacctttcttgg

SEQ ID NO: 6589 - DNA, 15 bp, Homo sapiens
atttcacctttcttg

SEQ ID NO: 6590 - DNA, 15 bp, Homo sapiens
aatttcacctttctt

SEQ ID NO: 6591 - DNA, 15 bp, Homo sapiens
taatttcacctttct

SEQ ID NO: 6592 - DNA, 15 bp, Homo sapiens
ctaatttcacctttc

SEQ ID NO: 6593 - DNA, 15 bp, Homo sapiens
actaatttcaccttt

SEQ ID NO: 6594 - DNA, 15 bp, Homo sapiens
tactaatttcacctt

SEQ ID NO: 6595 - DNA, 15 bp, Homo sapiens
atactaatttcacct

SEQ ID NO: 6596 - DNA, 15 bp, Homo sapiens
tatactaatttcacc

SEQ ID NO: 6597 - DNA, 15 bp, Homo sapiens
atatactaatttcac

SEQ ID NO: 6598 - DNA, 15 bp, Homo sapiens
aatatactaatttca

SEQ ID NO: 6599 - DNA, 15 bp, Homo sapiens
caatatactaatttc

SEQ ID NO: 6600 - DNA, 15 bp, Homo sapiens
acaatatactaattt

SEQ ID NO: 6601 - DNA, 15 bp, Homo sapiens
tacaatatactaatt

SEQ ID NO: 6602 - DNA, 15 bp, Homo sapiens
gtacaatatactaat

SEQ ID NO: 6603 - DNA, 15 bp, Homo sapiens
agtacaatatactaa

SEQ ID NO: 6604 - DNA, 15 bp, Homo sapiens
aagtacaatatacta

SEQ ID NO: 6605 - DNA, 15 bp, Homo sapiens
caagtacaatatact

SEQ ID NO: 6606 - DNA, 15 bp, Homo sapiens
tcaagtacaatatac

SEQ ID NO: 6607 - DNA, 15 bp, Homo sapiens
gtcaagtacaatata

SEQ ID NO: 6608 - DNA, 15 bp, Homo sapiens
agtcaagtacaatat

SEQ ID NO: 6609 - DNA, 15 bp, Homo sapiens
tagtcaagtacaata

SEQ ID NO: 6610 - DNA, 15 bp, Homo sapiens
atagtcaagtacaat

SEQ ID NO: 6611 - DNA, 15 bp, Homo sapiens
aatagtcaagtacaa

SEQ ID NO: 6612 - DNA, 15 bp, Homo sapiens
gaatagtcaagtaca

SEQ ID NO: 6613 - DNA, 15 bp, Homo sapiens
tgaatagtcaagtac

SEQ ID NO: 6614 - DNA, 15 bp, Homo sapiens
gtgaatagtcaagta

SEQ ID NO: 6615 - DNA, 15 bp, Homo sapiens
ggtgaatagtcaagt

SEQ ID NO: 6616 - DNA, 15 bp, Homo sapiens
aggtgaatagtcaag

SEQ ID NO: 6617 - DNA, 15 bp, Homo sapiens
aaggtgaatagtcaa

SEQ ID NO: 6618 - DNA, 15 bp, Homo sapiens
aaaggtgaatagtca

SEQ ID NO: 6619 - DNA, 15 bp, Homo sapiens
gaaaggtgaatagtc

SEQ ID NO: 6620 - DNA, 15 bp, Homo sapiens
ggaaaggtgaatagt

SEQ ID NO: 6621 - DNA, 15 bp, Homo sapiens
gggaaaggtgaatag

SEQ ID NO: 6622 - DNA, 15 bp, Homo sapiens
agggaaaggtgaata

SEQ ID NO: 6623 - DNA, 15 bp, Homo sapiens
aagggaaaggtgaat

SEQ ID NO: 6624 - DNA, 15 bp, Homo sapiens
taagggaaaggtgaa

SEQ ID NO: 6625 - DNA, 15 bp, Homo sapiens
ctaagggaaaggtga

SEQ ID NO: 6626 - DNA, 15 bp, Homo sapiens
actaagggaaaggtg

SEQ ID NO: 6627 - DNA, 15 bp, Homo sapiens
aactaagggaaaggt

SEQ ID NO: 6628 - DNA, 15 bp, Homo sapiens
aaactaagggaaagg

SEQ ID NO: 6629 - DNA, 15 bp, Homo sapiens
aaaactaagggaaag

SEQ ID NO: 6630 - DNA, 15 bp, Homo sapiens
aaaaactaagggaaa

SEQ ID NO: 6631 - DNA, 15 bp, Homo sapiens
aaaaaactaagggaa

SEQ ID NO: 6632 - DNA, 15 bp, Homo sapiens
caaaaaactaaggga

SEQ ID NO: 6633 - DNA, 15 bp, Homo sapiens
tcaaaaaactaaggg

SEQ ID NO: 6634 - DNA, 15 bp, Homo sapiens
ttcaaaaaactaagg

SEQ ID NO: 6635 - DNA, 15 bp, Homo sapiens
attcaaaaaactaag

SEQ ID NO: 6636 - DNA, 15 bp, Homo sapiens
aattcaaaaaactaa

SEQ ID NO: 6637 - DNA, 15 bp, Homo sapiens
aaattcaaaaaacta

SEQ ID NO: 6638 - DNA, 15 bp, Homo sapiens
aaaattcaaaaaact

SEQ ID NO: 6639 - DNA, 15 bp, Homo sapiens
aaaaattcaaaaaac

SEQ ID NO: 6640 - DNA, 15 bp, Homo sapiens
aaaaaattcaaaaaa

SEQ ID NO: 6641 - DNA, 15 bp, Homo sapiens
aaaaaaattcaaaaa

SEQ ID NO: 6642 - DNA, 15 bp, Homo sapiens
gaaaaaaattcaaaa

SEQ ID NO: 6643 - DNA, 15 bp, Homo sapiens
tgaaaaaaattcaaa

SEQ ID NO: 6644 - DNA, 15 bp, Homo sapiens
atgaaaaaaattcaa

SEQ ID NO: 6645 - DNA, 15 bp, Homo sapiens
aatgaaaaaaattca

SEQ ID NO: 6646 - DNA, 15 bp, Homo sapiens
caatgaaaaaaattc

SEQ ID NO: 6647 - DNA, 15 bp, Homo sapiens
ccaatgaaaaaaatt

SEQ ID NO: 6648 - DNA, 15 bp, Homo sapiens
accaatgaaaaaaat

SEQ ID NO: 6649 - DNA, 15 bp, Homo sapiens
aaccaatgaaaaaaa

SEQ ID NO: 6650 - DNA, 15 bp, Homo sapiens
caaccaatgaaaaaa

SEQ ID NO: 6651 - DNA, 15 bp, Homo sapiens
gcaaccaatgaaaaa

SEQ ID NO: 6652 - DNA, 15 bp, Homo sapiens
tgcaaccaatgaaaa

SEQ ID NO: 6653 - DNA, 15 bp, Homo sapiens
ctgcaaccaatgaaa

SEQ ID NO: 6654 - DNA, 15 bp, Homo sapiens
tctgcaaccaatgaa

SEQ ID NO: 6655 - DNA, 15 bp, Homo sapiens
ctctgcaaccaatga

SEQ ID NO: 6656 - DNA, 15 bp, Homo sapiens
cctctgcaaccaatg

SEQ ID NO: 6657 - DNA, 15 bp, Homo sapiens
tcctctgcaaccaat

SEQ ID NO: 6658 - DNA, 15 bp, Homo sapiens
ttcctctgcaaccaa

SEQ ID NO: 6659 - DNA, 15 bp, Homo sapiens
cttcctctgcaacca

SEQ ID NO: 6660 - DNA, 15 bp, Homo sapiens
acttcctctgcaacc

SEQ ID NO: 6661 - DNA, 15 bp, Homo sapiens
tacttcctctgcaac

SEQ ID NO: 6662 - DNA, 15 bp, Homo sapiens
atacttcctctgcaa

SEQ ID NO: 6663 - DNA, 15 bp, Homo sapiens
aatacttcctctgca

SEQ ID NO: 6664 - DNA, 15 bp, Homo sapiens
taatacttcctctgc

SEQ ID NO: 6665 - DNA, 15 bp, Homo sapiens
ctaatacttcctctg

SEQ ID NO: 6666 - DNA, 15 bp, Homo sapiens
gctaatacttcctct

SEQ ID NO: 6667 - DNA, 15 bp, Homo sapiens
tgctaatacttcctc

SEQ ID NO: 6668 - DNA, 15 bp, Homo sapiens
ttgctaatacttcct

SEQ ID NO: 6669 - DNA, 15 bp, Homo sapiens
attgctaatacttcc

SEQ ID NO: 6670 - DNA, 15 bp, Homo sapiens
aattgctaatacttc

SEQ ID NO: 6671 - DNA, 15 bp, Homo sapiens
aaattgctaatactt

SEQ ID NO: 6672 - DNA, 15 bp, Homo sapiens
taaattgctaatact

SEQ ID NO: 6673 - DNA, 15 bp, Homo sapiens
ttaaattgctaatac

SEQ ID NO: 6674 - DNA, 15 bp, Homo sapiens
attaaattgctaata

SEQ ID NO: 6675 - DNA, 15 bp, Homo sapiens
aattaaattgctaat

SEQ ID NO: 6676 - DNA, 15 bp, Homo sapiens
gaattaaattgctaa

SEQ ID NO: 6677 - DNA, 15 bp, Homo sapiens
agaattaaattgcta

SEQ ID NO: 6678 - DNA, 15 bp, Homo sapiens
aagaattaaattgct

SEQ ID NO: 6679 - DNA, 15 bp, Homo sapiens
aaagaattaaattgc

SEQ ID NO: 6680 - DNA, 15 bp, Homo sapiens
aaaagaattaaattg

SEQ ID NO: 6681 - DNA, 15 bp, Homo sapiens
taaaagaattaaatt

SEQ ID NO: 6682 - DNA, 15 bp, Homo sapiens
ttaaaagaattaaat

SEQ ID NO: 6683 - DNA, 15 bp, Homo sapiens
tttaaaagaattaaa

SEQ ID NO: 6684 - DNA, 15 bp, Homo sapiens
ttttaaaagaattaa

SEQ ID NO: 6685 - DNA, 15 bp, Homo sapiens
attttaaaagaatta

SEQ ID NO: 6686 - DNA, 15 bp, Homo sapiens
tattttaaaagaatt

SEQ ID NO: 6687 - DNA, 15 bp, Homo sapiens
ttattttaaaagaat

SEQ ID NO: 6688 - DNA, 15 bp, Homo sapiens
attattttaaaagaa

SEQ ID NO: 6689 - DNA, 15 bp, Homo sapiens
aattattttaaaaga

SEQ ID NO: 6690 - DNA, 15 bp, Homo sapiens
aaattattttaaaag

SEQ ID NO: 6691 - DNA, 15 bp, Homo sapiens
caaattattttaaaa

SEQ ID NO: 6692 - DNA, 15 bp, Homo sapiens
gcaaattattttaaa

SEQ ID NO: 6693 - DNA, 15 bp, Homo sapiens
tgcaaattattttaa

SEQ ID NO: 6694 - DNA, 15 bp, Homo sapiens
gtgcaaattatttta

SEQ ID NO: 6695 - DNA, 15 bp, Homo sapiens
agtgcaaattatttt

SEQ ID NO: 6696 - DNA, 15 bp, Homo sapiens
cagtgcaaattattt

SEQ ID NO: 6697 - DNA, 15 bp, Homo sapiens
ccagtgcaaattatt

SEQ ID NO: 6698 - DNA, 15 bp, Homo sapiens
tccagtgcaaattat

SEQ ID NO: 6699 - DNA, 15 bp, Homo sapiens
ttccagtgcaaatta

SEQ ID NO: 6700 - DNA, 15 bp, Homo sapiens
attccagtgcaaatt

SEQ ID NO: 6701 - DNA, 15 bp, Homo sapiens
tattccagtgcaaat

SEQ ID NO: 6702 - DNA, 15 bp, Homo sapiens
ttattccagtgcaaa

SEQ ID NO: 6703 - DNA, 15 bp, Homo sapiens
tttattccagtgcaa

SEQ ID NO: 6704 - DNA, 15 bp, Homo sapiens
atttattccagtgca

SEQ ID NO: 6705 - DNA, 15 bp, Homo sapiens
tatttattccagtgc

SEQ ID NO: 6706 - DNA, 15 bp, Homo sapiens
ttatttattccagtg

SEQ ID NO: 6707 - DNA, 15 bp, Homo sapiens
cttatttattccagt

SEQ ID NO: 6708 - DNA, 15 bp, Homo sapiens
acttatttattccag

SEQ ID NO: 6709 - DNA, 15 bp, Homo sapiens
tacttatttattcca

SEQ ID NO: 6710 - DNA, 15 bp, Homo sapiens
atacttatttattcc

SEQ ID NO: 6711 - DNA, 15 bp, Homo sapiens
gatacttatttattc

SEQ ID NO: 6712 - DNA, 15 bp, Homo sapiens
cgatacttatttatt

SEQ ID NO: 6713 - DNA, 15 bp, Homo sapiens
ccgatacttatttat

SEQ ID NO: 6714 - DNA, 15 bp, Homo sapiens
gccgatacttattta

SEQ ID NO: 6715 - DNA, 15 bp, Homo sapiens
tgccgatacttattt

SEQ ID NO: 6716 - DNA, 15 bp, Homo sapiens
ttgccgatacttatt

SEQ ID NO: 6717 - DNA, 15 bp, Homo sapiens
tttgccgatacttat

SEQ ID NO: 6718 - DNA, 15 bp, Homo sapiens
atttgccgatactta

SEQ ID NO: 6719 - DNA, 15 bp, Homo sapiens
tatttgccgatactt

SEQ ID NO: 6720 - DNA, 15 bp, Homo sapiens
atatttgccgatact

SEQ ID NO: 6721 - DNA, 15 bp, Homo sapiens
tatatttgccgatac

SEQ ID NO: 6722 - DNA, 15 bp, Homo sapiens
ttatatttgccgata

SEQ ID NO: 6723 - DNA, 15 bp, Homo sapiens
cttatatttgccgat

SEQ ID NO: 6724 - DNA, 15 bp, Homo sapiens
tcttatatttgccga

SEQ ID NO: 6725 - DNA, 15 bp, Homo sapiens
ttcttatatttgccg

SEQ ID NO: 6726 - DNA, 15 bp, Homo sapiens
cttcttatatttgcc

SEQ ID NO: 6727 - DNA, 15 bp, Homo sapiens
tcttcttatatttgc

SEQ ID NO: 6728 - DNA, 15 bp, Homo sapiens
ctcttcttatatttg

SEQ ID NO: 6729 - DNA, 15 bp, Homo sapiens
actcttcttatattt

SEQ ID NO: 6730 - DNA, 15 bp, Homo sapiens
tactcttcttatatt

SEQ ID NO: 6731 - DNA, 15 bp, Homo sapiens
ttactcttcttatat

SEQ ID NO: 6732 - DNA, 15 bp, Homo sapiens
gttactcttcttata

SEQ ID NO: 6733 - DNA, 15 bp, Homo sapiens
tgttactcttcttat

SEQ ID NO: 6734 - DNA, 15 bp, Homo sapiens
atgttactcttctta

SEQ ID NO: 6735 - DNA, 15 bp, Homo sapiens
tatgttactcttctt

SEQ ID NO: 6736 - DNA, 15 bp, Homo sapiens
ttatgttactcttct

SEQ ID NO: 6737 - DNA, 15 bp, Homo sapiens
attatgttactcttc

SEQ ID NO: 6738 - DNA, 15 bp, Homo sapiens
aattatgttactctt

SEQ ID NO: 6739 - DNA, 15 bp, Homo sapiens
aaattatgttactct

SEQ ID NO: 6740 - DNA, 15 bp, Homo sapiens
taaattatgttactc

SEQ ID NO: 6741 - DNA, 15 bp, Homo sapiens
ttaaattatgttact

SEQ ID NO: 6742 - DNA, 15 bp, Homo sapiens
cttaaattatgttac

SEQ ID NO: 6743 - DNA, 15 bp, Homo sapiens
ccttaaattatgtta

SEQ ID NO: 6744 - DNA, 15 bp, Homo sapiens
cccttaaattatgtt

SEQ ID NO: 6745 - DNA, 15 bp, Homo sapiens
acccttaaattatgt

SEQ ID NO: 6746 - DNA, 15 bp, Homo sapiens
cacccttaaattatg

SEQ ID NO: 6747 - DNA, 15 bp, Homo sapiens
tcacccttaaattat

SEQ ID NO: 6748 - DNA, 15 bp, Homo sapiens
ttcacccttaaatta

SEQ ID NO: 6749 - DNA, 15 bp, Homo sapiens
attcacccttaaatt

SEQ ID NO: 6750 - DNA, 15 bp, Homo sapiens
aattcacccttaaat

SEQ ID NO: 6751 - DNA, 15 bp, Homo sapiens
taattcacccttaaa

SEQ ID NO: 6752 - DNA, 15 bp, Homo sapiens
ttaattcacccttaa

SEQ ID NO: 6753 - DNA, 15 bp, Homo sapiens
attaattcaccctta

SEQ ID NO: 6754 - DNA, 15 bp, Homo sapiens
aattaattcaccctt

SEQ ID NO: 6755 - DNA, 15 bp, Homo sapiens
aaattaattcaccct

SEQ ID NO: 6756 - DNA, 15 bp, Homo sapiens
aaaattaattcaccc

SEQ ID NO: 6757 - DNA, 15 bp, Homo sapiens
taaaattaattcacc

SEQ ID NO: 6758 - DNA, 15 bp, Homo sapiens
ataaaattaattcac

SEQ ID NO: 6759 - DNA, 15 bp, Homo sapiens
aataaaattaattca

SEQ ID NO: 6760 - DNA, 15 bp, Homo sapiens
aaataaaattaattc

SEQ ID NO: 6761 - DNA, 15 bp, Homo sapiens
caaataaaattaatt

SEQ ID NO: 6762 - DNA, 15 bp, Homo sapiens
ccaaataaaattaat

SEQ ID NO: 6763 - DNA, 15 bp, Homo sapiens
cccaaataaaattaa

SEQ ID NO: 6764 - DNA, 15 bp, Homo sapiens
tcccaaataaaatta

SEQ ID NO: 6765 - DNA, 15 bp, Homo sapiens
ttcccaaataaaatt

SEQ ID NO: 6766 - DNA, 15 bp, Homo sapiens
cttcccaaataaaat

SEQ ID NO: 6767 - DNA, 15 bp, Homo sapiens
acttcccaaataaaa

SEQ ID NO: 6768 - DNA, 15 bp, Homo sapiens
aacttcccaaataaa

SEQ ID NO: 6769 - DNA, 15 bp, Homo sapiens
aaacttcccaaataa

SEQ ID NO: 6770 - DNA, 15 bp, Homo sapiens
aaaacttcccaaata

SEQ ID NO: 6771 - DNA, 15 bp, Homo sapiens
taaaacttcccaaat

SEQ ID NO: 6772 - DNA, 15 bp, Homo sapiens
ctaaaacttcccaaa

SEQ ID NO: 6773 - DNA, 15 bp, Homo sapiens
actaaaacttcccaa

SEQ ID NO: 6774 - DNA, 15 bp, Homo sapiens
aactaaaacttccca

SEQ ID NO: 6775 - DNA, 15 bp, Homo sapiens
gaactaaaacttccc

SEQ ID NO: 6776 - DNA, 15 bp, Homo sapiens
agaactaaaacttcc

SEQ ID NO: 6777 - DNA, 15 bp, Homo sapiens
cagaactaaaacttc

SEQ ID NO: 6778 - DNA, 15 bp, Homo sapiens
acagaactaaaactt

SEQ ID NO: 6779 - DNA, 15 bp, Homo sapiens
tacagaactaaaact

SEQ ID NO: 6780 - DNA, 15 bp, Homo sapiens
atacagaactaaaac

SEQ ID NO: 6781 - DNA, 15 bp, Homo sapiens
tatacagaactaaaa

SEQ ID NO: 6782 - DNA, 15 bp, Homo sapiens
ctatacagaactaaa

SEQ ID NO: 6783 - DNA, 15 bp, Homo sapiens
actatacagaactaa

SEQ ID NO: 6784 - DNA, 15 bp, Homo sapiens
aactatacagaacta

SEQ ID NO: 6785 - DNA, 15 bp, Homo sapiens
taactatacagaact

SEQ ID NO: 6786 - DNA, 15 bp, Homo sapiens
ttaactatacagaac

SEQ ID NO: 6787 - DNA, 15 bp, Homo sapiens
cttaactatacagaa

SEQ ID NO: 6788 - DNA, 15 bp, Homo sapiens
ccttaactatacaga

SEQ ID NO: 6789 - DNA, 15 bp, Homo sapiens
gccttaactatacag

SEQ ID NO: 6790 - DNA, 15 bp, Homo sapiens
tgccttaactataca

SEQ ID NO: 6791 - DNA, 15 bp, Homo sapiens
ctgccttaactatac

SEQ ID NO: 6792 - DNA, 15 bp, Homo sapiens
tctgccttaactata

SEQ ID NO: 6793 - DNA, 15 bp, Homo sapiens
atctgccttaactat

SEQ ID NO: 6794 - DNA, 15 bp, Homo sapiens
aatctgccttaacta

SEQ ID NO: 6795 - DNA, 15 bp, Homo sapiens
gaatctgccttaact

SEQ ID NO: 6796 - DNA, 15 bp, Homo sapiens
agaatctgccttaac

SEQ ID NO: 6797 - DNA, 15 bp, Homo sapiens
aagaatctgccttaa

SEQ ID NO: 6798 - DNA, 15 bp, Homo sapiens
gaagaatctgcctta

SEQ ID NO: 6799 - DNA, 15 bp, Homo sapiens
tgaagaatctgcctt

SEQ ID NO: 6800 - DNA, 15 bp, Homo sapiens
atgaagaatctgcct

SEQ ID NO: 6801 - DNA, 15 bp, Homo sapiens
aatgaagaatctgcc

SEQ ID NO: 6802 - DNA, 15 bp, Homo sapiens
aaatgaagaatctgc

SEQ ID NO: 6803 - DNA, 15 bp, Homo sapiens
caaatgaagaatctg

SEQ ID NO: 6804 - DNA, 15 bp, Homo sapiens
gcaaatgaagaatct

SEQ ID NO: 6805 - DNA, 15 bp, Homo sapiens
tgcaaatgaagaatc

SEQ ID NO: 6806 - DNA, 15 bp, Homo sapiens
ttgcaaatgaagaat

SEQ ID NO: 6807 - DNA, 15 bp, Homo sapiens
gttgcaaatgaagaa

SEQ ID NO: 6808 - DNA, 15 bp, Homo sapiens
tgttgcaaatgaaga

SEQ ID NO: 6809 - DNA, 15 bp, Homo sapiens
ctgttgcaaatgaag

SEQ ID NO: 6810 - DNA, 15 bp, Homo sapiens
actgttgcaaatgaa

SEQ ID NO: 6811 - DNA, 15 bp, Homo sapiens
aactgttgcaaatga

SEQ ID NO: 6812 - DNA, 15 bp, Homo sapiens
caactgttgcaaatg

SEQ ID NO: 6813 - DNA, 15 bp, Homo sapiens
tcaactgttgcaaat

SEQ ID NO: 6814 - DNA, 15 bp, Homo sapiens
gtcaactgttgcaaa

SEQ ID NO: 6815 - DNA, 15 bp, Homo sapiens
tgtcaactgttgcaa

SEQ ID NO: 6816 - DNA, 15 bp, Homo sapiens
atgtcaactgttgca

SEQ ID NO: 6817 - DNA, 15 bp, Homo sapiens
aatgtcaactgttgc

SEQ ID NO: 6818 - DNA, 15 bp, Homo sapiens
caatgtcaactgttg

SEQ ID NO: 6819 - DNA, 15 bp, Homo sapiens
ccaatgtcaactgtt

SEQ ID NO: 6820 - DNA, 15 bp, Homo sapiens
cccaatgtcaactgt

SEQ ID NO: 6821 - DNA, 15 bp, Homo sapiens
tcccaatgtcaactg

SEQ ID NO: 6822 - DNA, 15 bp, Homo sapiens
gtcccaatgtcaact

SEQ ID NO: 6823 - DNA, 15 bp, Homo sapiens
tgtcccaatgtcaac

SEQ ID NO: 6824 - DNA, 15 bp, Homo sapiens
atgtcccaatgtcaa

SEQ ID NO: 6825 - DNA, 15 bp, Homo sapiens
catgtcccaatgtca

SEQ ID NO: 6826 - DNA, 15 bp, Homo sapiens
acatgtcccaatgtc

SEQ ID NO: 6827 - DNA, 15 bp, Homo sapiens
cacatgtcccaatgt

SEQ ID NO: 6828 - DNA, 15 bp, Homo sapiens
acacatgtcccaatg

SEQ ID NO: 6829 - DNA, 15 bp, Homo sapiens
cacacatgtcccaat

SEQ ID NO: 6830 - DNA, 15 bp, Homo sapiens
tcacacatgtcccaa

SEQ ID NO: 6831 - DNA, 15 bp, Homo sapiens
ttcacacatgtccca

SEQ ID NO: 6832 - DNA, 15 bp, Homo sapiens
gttcacacatgtccc

SEQ ID NO: 6833 - DNA, 15 bp, Homo sapiens
tgttcacacatgtcc

SEQ ID NO: 6834 - DNA, 15 bp, Homo sapiens
atgttcacacatgtc

SEQ ID NO: 6835 - DNA, 15 bp, Homo sapiens
gatgttcacacatgt

SEQ ID NO: 6836 - DNA, 15 bp, Homo sapiens
agatgttcacacatg

SEQ ID NO: 6837 - DNA, 15 bp, Homo sapiens
aagatgttcacacat

SEQ ID NO: 6838 - DNA, 15 bp, Homo sapiens
gaagatgttcacaca

SEQ ID NO: 6839 - DNA, 15 bp, Homo sapiens
tgaagatgttcacac

SEQ ID NO: 6840 - DNA, 15 bp, Homo sapiens
ttgaagatgttcaca

SEQ ID NO: 6841 - DNA, 15 bp, Homo sapiens
cttgaagatgttcac

SEQ ID NO: 6842 - DNA, 15 bp, Homo sapiens
ccttgaagatgttca

SEQ ID NO: 6843 - DNA, 15 bp, Homo sapiens
accttgaagatgttc

SEQ ID NO: 6844 - DNA, 15 bp, Homo sapiens
taccttgaagatgtt

SEQ ID NO: 6845 - DNA, 15 bp, Homo sapiens
ataccttgaagatgt

SEQ ID NO: 6846 - DNA, 15 bp, Homo sapiens
aataccttgaagatg

SEQ ID NO: 6847 - DNA, 15 bp, Homo sapiens
taataccttgaagat

SEQ ID NO: 6848 - DNA, 15 bp, Homo sapiens
ctaataccttgaaga

SEQ ID NO: 6849 - DNA, 15 bp, Homo sapiens
cctaataccttgaag

SEQ ID NO: 6850 - DNA, 15 bp, Homo sapiens
tcctaataccttgaa

SEQ ID NO: 6851 - DNA, 15 bp, Homo sapiens
gtcctaataccttga

SEQ ID NO: 6852 - DNA, 15 bp, Homo sapiens
tgtcctaataccttg

SEQ ID NO: 6853 - DNA, 15 bp, Homo sapiens
atgtcctaatacctt

SEQ ID NO: 6854 - DNA, 15 bp, Homo sapiens
gatgtcctaatacct

SEQ ID NO: 6855 - DNA, 15 bp, Homo sapiens
agatgtcctaatacc

SEQ ID NO: 6856 - DNA, 15 bp, Homo sapiens
aagatgtcctaatac

SEQ ID NO: 6857 - DNA, 15 bp, Homo sapiens
gaagatgtcctaata

SEQ ID NO: 6858 - DNA, 15 bp, Homo sapiens
tgaagatgtcctaat

SEQ ID NO: 6859 - DNA, 15 bp, Homo sapiens
ttgaagatgtcctaa

SEQ ID NO: 6860 - DNA, 15 bp, Homo sapiens
cttgaagatgtccta

SEQ ID NO: 6861 - DNA, 15 bp, Homo sapiens
ccttgaagatgtcct

SEQ ID NO: 6862 - DNA, 15 bp, Homo sapiens
gccttgaagatgtcc

SEQ ID NO: 6863 - DNA, 15 bp, Homo sapiens
tgccttgaagatgtc

SEQ ID NO: 6864 - DNA, 15 bp, Homo sapiens
atgccttgaagatgt

SEQ ID NO: 6865 - DNA, 15 bp, Homo sapiens
aatgccttgaagatg

SEQ ID NO: 6866 - DNA, 15 bp, Homo sapiens
taatgccttgaagat

SEQ ID NO: 6867 - DNA, 15 bp, Homo sapiens
gtaatgccttgaaga

SEQ ID NO: 6868 - DNA, 15 bp, Homo sapiens
agtaatgccttgaag

SEQ ID NO: 6869 - DNA, 15 bp, Homo sapiens
aagtaatgccttgaa

SEQ ID NO: 6870 - DNA, 15 bp, Homo sapiens
aaagtaatgccttga

SEQ ID NO: 6871 - DNA, 15 bp, Homo sapiens
aaaagtaatgccttg

SEQ ID NO: 6872 - DNA, 15 bp, Homo sapiens
aaaaagtaatgcctt

SEQ ID NO: 6873 - DNA, 15 bp, Homo sapiens
caaaaagtaatgcct

SEQ ID NO: 6874 - DNA, 15 bp, Homo sapiens
ccaaaaagtaatgcc

SEQ ID NO: 6875 - DNA, 15 bp, Homo sapiens
gccaaaaagtaatgc

SEQ ID NO: 6876 - DNA, 15 bp, Homo sapiens
tgccaaaaagtaatg

SEQ ID NO: 6877 - DNA, 15 bp, Homo sapiens
ctgccaaaaagtaat

SEQ ID NO: 6878 - DNA, 15 bp, Homo sapiens
actgccaaaaagtaa

SEQ ID NO: 6879 - DNA, 15 bp, Homo sapiens
cactgccaaaaagta

SEQ ID NO: 6880 - DNA, 15 bp, Homo sapiens
acactgccaaaaagt

SEQ ID NO: 6881 - DNA, 15 bp, Homo sapiens
aacactgccaaaaag

SEQ ID NO: 6882 - DNA, 15 bp, Homo sapiens
caacactgccaaaaa

SEQ ID NO: 6883 - DNA, 15 bp, Homo sapiens
tcaacactgccaaaa

SEQ ID NO: 6884 - DNA, 15 bp, Homo sapiens
ctcaacactgccaaa

SEQ ID NO: 6885 - DNA, 15 bp, Homo sapiens
tctcaacactgccaa

SEQ ID NO: 6886 - DNA, 15 bp, Homo sapiens
ttctcaacactgcca

SEQ ID NO: 6887 - DNA, 15 bp, Homo sapiens
attctcaacactgcc

SEQ ID NO: 6888 - DNA, 15 bp, Homo sapiens
aattctcaacactgc

SEQ ID NO: 6889 - DNA, 15 bp, Homo sapiens
aaattctcaacactg

SEQ ID NO: 6890 - DNA, 15 bp, Homo sapiens
aaaattctcaacact

SEQ ID NO: 6891 - DNA, 15 bp, Homo sapiens
aaaaattctcaacac

SEQ ID NO: 6892 - DNA, 15 bp, Homo sapiens
aaaaaattctcaaca

SEQ ID NO: 6893 - DNA, 15 bp, Homo sapiens
aaaaaaattctcaac

SEQ ID NO: 6894 - DNA, 15 bp, Homo sapiens
aaaaaaaattctcaa

SEQ ID NO: 6895 - DNA, 15 bp, Homo sapiens
aaaaaaaaattctca

SEQ ID NO: 6896 - DNA, 15 bp, Homo sapiens
aaaaaaaaaattctc

SEQ ID NO: 6897 - DNA, 15 bp, Homo sapiens
aaaaaaaaaaattct

SEQ ID NO: 6898 - DNA, 15 bp, Homo sapiens
aaaaaaaaaaaattc

SEQ ID NO: 6899 - DNA, 15 bp, Homo sapiens
aaaaaaaaaaaaatt

SEQ ID NO: 6900 - DNA, 15 bp, Homo sapiens
ctcaaaaaaaaaaaa

SEQ ID NO: 6901 - DNA, 15 bp, Homo sapiens
tctcaaaaaaaaaaa

SEQ ID NO: 6902 - DNA, 15 bp, Homo sapiens
ttccatctcaaaaaa

SEQ ID NO: 6903 - DNA, 15 bp, Homo sapiens
attccatctcaaaaa

SEQ ID NO: 6904 - DNA, 15 bp, Homo sapiens
gattccatctcaaaa

SEQ ID NO: 6905 - DNA, 15 bp, Homo sapiens
agattccatctcaaa

SEQ ID NO: 6906 - DNA, 15 bp, Homo sapiens
gagattccatctcaa

SEQ ID NO: 6907 - DNA, 15 bp, Homo sapiens
cgagattccatctca

SEQ ID NO: 6908 - DNA, 15 bp, Homo sapiens
gcgagattccatctc

SEQ ID NO: 6909 - DNA, 15 bp, Homo sapiens
agcgagattccatct

SEQ ID NO: 6910 - DNA, 15 bp, Homo sapiens
gagcgagattccatc

SEQ ID NO: 6911 - DNA, 15 bp, Homo sapiens
agagcgagattccat

SEQ ID NO: 6912 - DNA, 15 bp, Homo sapiens
tagagcgagattcca

SEQ ID NO: 6913 - DNA, 15 bp, Homo sapiens
atagagcgagattcc

SEQ ID NO: 6914 - DNA, 15 bp, Homo sapiens
gatagagcgagattc

SEQ ID NO: 6915 - DNA, 15 bp, Homo sapiens
cgatagagcgagatt

SEQ ID NO: 6916 - DNA, 15 bp, Homo sapiens
gcgatagagcgagat

SEQ ID NO: 6917 - DNA, 15 bp, Homo sapiens
ggcgatagagcgaga

SEQ ID NO: 6918 - DNA, 15 bp, Homo sapiens
gggcgatagagcgag

SEQ ID NO: 6919 - DNA, 15 bp, Homo sapiens
tgggcgatagagcga

SEQ ID NO: 6920 - DNA, 15 bp, Homo sapiens
ctgggcgatagagcg

SEQ ID NO: 6921 - DNA, 15 bp, Homo sapiens
actgggcgatagagc

SEQ ID NO: 6922 - DNA, 15 bp, Homo sapiens
gactgggcgatagag

SEQ ID NO: 6923 - DNA, 15 bp, Homo sapiens
agactgggcgataga

SEQ ID NO: 6924 - DNA, 15 bp, Homo sapiens
cagactgggcgatag

SEQ ID NO: 6925 - DNA, 15 bp, Homo sapiens
ccagactgggcgata

SEQ ID NO: 6926 - DNA, 15 bp, Homo sapiens
cccagactgggcgat

SEQ ID NO: 6927 - DNA, 15 bp, Homo sapiens
ccccagactgggcga

SEQ ID NO: 6928 - DNA, 15 bp, Homo sapiens
accccagactgggcg

SEQ ID NO: 6929 - DNA, 15 bp, Homo sapiens
caccccagactgggc

SEQ ID NO: 6930 - DNA, 15 bp, Homo sapiens
gcaccccagactggg

SEQ ID NO: 6931 - DNA, 15 bp, Homo sapiens
tgcaccccagactgg

SEQ ID NO: 6932 - DNA, 15 bp, Homo sapiens
ctgcaccccagactg

SEQ ID NO: 6933 - DNA, 15 bp, Homo sapiens
actgcaccccagact

SEQ ID NO: 6934 - DNA, 15 bp, Homo sapiens
cactgcaccccagac

SEQ ID NO: 6935 - DNA, 15 bp, Homo sapiens
ccactgcaccccaga

SEQ ID NO: 6936 - DNA, 15 bp, Homo sapiens
gccactgcaccccag

SEQ ID NO: 6937 - DNA, 15 bp, Homo sapiens
tgccactgcacccca

SEQ ID NO: 6938 - DNA, 15 bp, Homo sapiens
ctgccactgcacccc

SEQ ID NO: 6939 - DNA, 15 bp, Homo sapiens
cctgccactgcaccc

SEQ ID NO: 6940 - DNA, 15 bp, Homo sapiens
tcctgccactgcacc

SEQ ID NO: 6941 - DNA, 15 bp, Homo sapiens
atcctgccactgcac

SEQ ID NO: 6942 - DNA, 15 bp, Homo sapiens
gatcctgccactgca

SEQ ID NO: 6943 - DNA, 15 bp, Homo sapiens
agatcctgccactgc

SEQ ID NO: 6944 - DNA, 15 bp, Homo sapiens
gagatcctgccactg

SEQ ID NO: 6945 - DNA, 15 bp, Homo sapiens
cgagatcctgccact

SEQ ID NO: 6946 - DNA, 15 bp, Homo sapiens
ccgagatcctgccac

SEQ ID NO: 6947 - DNA, 15 bp, Homo sapiens
gccgagatcctgcca

SEQ ID NO: 6948 - DNA, 15 bp, Homo sapiens
agccgagatcctgcc

SEQ ID NO: 6949 - DNA, 15 bp, Homo sapiens
gagccgagatcctgc

SEQ ID NO: 6950 - DNA, 15 bp, Homo sapiens
tgagccgagatcctg

SEQ ID NO: 6951 - DNA, 15 bp, Homo sapiens
gtgagccgagatcct

SEQ ID NO: 6952 - DNA, 15 bp, Homo sapiens
agtgagccgagatcc

SEQ ID NO: 6953 - DNA, 15 bp, Homo sapiens
cagtgagccgagatc

SEQ ID NO: 6954 - DNA, 15 bp, Homo sapiens
ccagtgagccgagat

SEQ ID NO: 6955 - DNA, 15 bp, Homo sapiens
tccagtgagccgaga

SEQ ID NO: 6956 - DNA, 15 bp, Homo sapiens
ttccagtgagccgag

SEQ ID NO: 6957 - DNA, 15 bp, Homo sapiens
gttccagtgagccga

SEQ ID NO: 6958 - DNA, 15 bp, Homo sapiens
ggttccagtgagccg

SEQ ID NO: 6959 - DNA, 15 bp, Homo sapiens
aggttccagtgagcc

SEQ ID NO: 6960 - DNA, 15 bp, Homo sapiens
gaggttccagtgagc

SEQ ID NO: 6961 - DNA, 15 bp, Homo sapiens
agaggttccagtgag

SEQ ID NO: 6962 - DNA, 15 bp, Homo sapiens
cagaggttccagtga

SEQ ID NO: 6963 - DNA, 15 bp, Homo sapiens
gcagaggttccagtg

SEQ ID NO: 6964 - DNA, 15 bp, Homo sapiens
ggcagaggttccagt

SEQ ID NO: 6965 - DNA, 15 bp, Homo sapiens
aggcagaggttccag

SEQ ID NO: 6966 - DNA, 15 bp, Homo sapiens
gaggcagaggttcca

SEQ ID NO: 6967 - DNA, 15 bp, Homo sapiens
ggaggcagaggttcc

SEQ ID NO: 6968 - DNA, 15 bp, Homo sapiens
gggaggcagaggttc

SEQ ID NO: 6969 - DNA, 15 bp, Homo sapiens
tgggaggcagaggtt

SEQ ID NO: 6970 - DNA, 15 bp, Homo sapiens
ctgggaggcagaggt

SEQ ID NO: 6971 - DNA, 15 bp, Homo sapiens
cctgggaggcagagg

SEQ ID NO: 6972 - DNA, 15 bp, Homo sapiens
acctgggaggcagag

SEQ ID NO: 6973 - DNA, 15 bp, Homo sapiens
aacctgggaggcaga

SEQ ID NO: 6974 - DNA, 15 bp, Homo sapiens
gaacctgggaggcag

SEQ ID NO: 6975 - DNA, 15 bp, Homo sapiens
tgaacctgggaggca

SEQ ID NO: 6976 - DNA, 15 bp, Homo sapiens
ctgaacctgggaggc

SEQ ID NO: 6977 - DNA, 15 bp, Homo sapiens
cctgaacctgggagg

SEQ ID NO: 6978 - DNA, 15 bp, Homo sapiens
gcctgaacctgggag

SEQ ID NO: 6979 - DNA, 15 bp, Homo sapiens
cgcctgaacctggga

SEQ ID NO: 6980 - DNA, 15 bp, Homo sapiens
tcgcctgaacctggg

SEQ ID NO: 6981 - DNA, 15 bp, Homo sapiens
atcgcctgaacctgg

SEQ ID NO: 6982 - DNA, 15 bp, Homo sapiens
aatcgcctgaacctg

SEQ ID NO: 6983 - DNA, 15 bp, Homo sapiens
gaatcgcctgaacct

SEQ ID NO: 6984 - DNA, 15 bp, Homo sapiens
agaatcgcctgaacc

SEQ ID NO: 6985 - DNA, 15 bp, Homo sapiens
gagaatcgcctgaac

SEQ ID NO: 6986 - DNA, 15 bp, Homo sapiens
ggagaatcgcctgaa

SEQ ID NO: 6987 - DNA, 15 bp, Homo sapiens
aggagaatcgcctga

SEQ ID NO: 6988 - DNA, 15 bp, Homo sapiens
caggagaatcgcctg

SEQ ID NO: 6989 - DNA, 15 bp, Homo sapiens
gcaggagaatcgcct

SEQ ID NO: 6990 - DNA, 15 bp, Homo sapiens
ggcaggagaatcgcc

SEQ ID NO: 6991 - DNA, 15 bp, Homo sapiens
caggcaggagaatcg

SEQ ID NO: 6992 - DNA, 15 bp, Homo sapiens
tcaggcaggagaatc

SEQ ID NO: 6993 - DNA, 15 bp, Homo sapiens
ttcaggcaggagaat

SEQ ID NO: 6994 - DNA, 15 bp, Homo sapiens
gttcaggcaggagaa

SEQ ID NO: 6995 - DNA, 15 bp, Homo sapiens
ggttcaggcaggaga

SEQ ID NO: 6996 - DNA, 15 bp, Homo sapiens
aggttcaggcaggag

SEQ ID NO: 6997 - DNA, 15 bp, Homo sapiens
gaggttcaggcagga

SEQ ID NO: 6998 - DNA, 15 bp, Homo sapiens
ggaggttcaggcagg

SEQ ID NO: 6999 - DNA, 15 bp, Homo sapiens
gggaggttcaggcag

SEQ ID NO: 7000 - DNA, 15 bp, Homo sapiens
tgggaggttcaggca

SEQ ID NO: 7001 - DNA, 15 bp, Homo sapiens
ttgggaggttcaggc

SEQ ID NO: 7002 - DNA, 15 bp, Homo sapiens
cttgggaggttcagg

SEQ ID NO: 7003 - DNA, 15 bp, Homo sapiens
gcttgggaggttcag

SEQ ID NO: 7004 - DNA, 15 bp, Homo sapiens
tgcttgggaggttca

SEQ ID NO: 7005 - DNA, 15 bp, Homo sapiens
ctgcttgggaggttc

SEQ ID NO: 7006 - DNA, 15 bp, Homo sapiens
gctgcttgggaggtt

SEQ ID NO: 7007 - DNA, 15 bp, Homo sapiens
agctgcttgggaggt

SEQ ID NO: 7008 - DNA, 15 bp, Homo sapiens
cagctgcttgggagg

SEQ ID NO: 7009 - DNA, 15 bp, Homo sapiens
ccagctgcttgggag

SEQ ID NO: 7010 - DNA, 15 bp, Homo sapiens
cccagctgcttggga

SEQ ID NO: 7011 - DNA, 15 bp, Homo sapiens
tcccagctgcttggg

SEQ ID NO: 7012 - DNA, 15 bp, Homo sapiens
atcccagctgcttgg

SEQ ID NO: 7013 - DNA, 15 bp, Homo sapiens
aatcccagctgcttg

SEQ ID NO: 7014 - DNA, 15 bp, Homo sapiens
taatcccagctgctt

SEQ ID NO: 7015 - DNA, 15 bp, Homo sapiens
ataatcccagctgct

SEQ ID NO: 7016 - DNA, 15 bp, Homo sapiens
tataatcccagctgc

SEQ ID NO: 7017 - DNA, 15 bp, Homo sapiens
ctataatcccagctg

SEQ ID NO: 7018 - DNA, 15 bp, Homo sapiens
cctataatcccagct

SEQ ID NO: 7019 - DNA, 15 bp, Homo sapiens
cacctataatcccag

SEQ ID NO: 7020 - DNA, 15 bp, Homo sapiens
gcacctataatccca

SEQ ID NO: 7021 - DNA, 15 bp, Homo sapiens
tgcacctataatccc

SEQ ID NO: 7022 - DNA, 15 bp, Homo sapiens
atgcacctataatcc

SEQ ID NO: 7023 - DNA, 15 bp, Homo sapiens
catgcacctataatc

SEQ ID NO: 7024 - DNA, 15 bp, Homo sapiens
gcatgcacctataat

SEQ ID NO: 7025 - DNA, 15 bp, Homo sapiens
ggcatgcacctataa

SEQ ID NO: 7026 - DNA, 15 bp, Homo sapiens
tggcatgcacctata

SEQ ID NO: 7027 - DNA, 15 bp, Homo sapiens
gtggcatgcacctat

SEQ ID NO: 7028 - DNA, 15 bp, Homo sapiens
ggtggcatgcaccta

SEQ ID NO: 7029 - DNA, 15 bp, Homo sapiens
tggtggcatgcacct

SEQ ID NO: 7030 - DNA, 15 bp, Homo sapiens
gtggtggcatgcacc

SEQ ID NO: 7031 - DNA, 15 bp, Homo sapiens
cgtggtggcatgcac

SEQ ID NO: 7032 - DNA, 15 bp, Homo sapiens
gcgtggtggcatgca

SEQ ID NO: 7033 - DNA, 15 bp, Homo sapiens
ggcgtggtggcatgc

SEQ ID NO: 7034 - DNA, 15 bp, Homo sapiens
gggcgtggtggcatg

SEQ ID NO: 7035 - DNA, 15 bp, Homo sapiens
tgggcgtggtggcat

SEQ ID NO: 7036 - DNA, 15 bp, Homo sapiens
ctgggcgtggtggca

SEQ ID NO: 7037 - DNA, 15 bp, Homo sapiens
tctgggcgtggtggc

SEQ ID NO: 7038 - DNA, 15 bp, Homo sapiens
atctgggcgtggtgg

SEQ ID NO: 7039 - DNA, 15 bp, Homo sapiens
tatctgggcgtggtg

SEQ ID NO: 7040 - DNA, 15 bp, Homo sapiens
ctatctgggcgtggt

SEQ ID NO: 7041 - DNA, 15 bp, Homo sapiens
actatctgggcgtgg

SEQ ID NO: 7042 - DNA, 15 bp, Homo sapiens
aactatctgggcgtg

SEQ ID NO: 7043 - DNA, 15 bp, Homo sapiens
aaactatctgggcgt

SEQ ID NO: 7044 - DNA, 15 bp, Homo sapiens
aaaactatctgggcg

SEQ ID NO: 7045 - DNA, 15 bp, Homo sapiens
aaaaactatctgggc

SEQ ID NO: 7046 - DNA, 15 bp, Homo sapiens
caaaaactatctggg

SEQ ID NO: 7047 - DNA, 15 bp, Homo sapiens
acaaaaactatctgg

SEQ ID NO: 7048 - DNA, 15 bp, Homo sapiens
tacaaaaactatctg

SEQ ID NO: 7049 - DNA, 15 bp, Homo sapiens
gtacaaaaactatct

SEQ ID NO: 7050 - DNA, 15 bp, Homo sapiens
agtacaaaaactatc

SEQ ID NO: 7051 - DNA, 15 bp, Homo sapiens
aagtacaaaaactat

SEQ ID NO: 7052 - DNA, 15 bp, Homo sapiens
aaagtacaaaaacta

SEQ ID NO: 7053 - DNA, 15 bp, Homo sapiens
aaaagtacaaaaact

SEQ ID NO: 7054 - DNA, 15 bp, Homo sapiens
taaaagtacaaaaac

SEQ ID NO: 7055 - DNA, 15 bp, Homo sapiens
ctaaaagtacaaaaa

SEQ ID NO: 7056 - DNA, 15 bp, Homo sapiens
actaaaagtacaaaa

SEQ ID NO: 7057 - DNA, 15 bp, Homo sapiens
tactaaaagtacaaa

SEQ ID NO: 7058 - DNA, 15 bp, Homo sapiens
ctactaaaagtacaa

SEQ ID NO: 7059 - DNA, 15 bp, Homo sapiens
tctactaaaagtaca

SEQ ID NO: 7060 - DNA, 15 bp, Homo sapiens
ctctactaaaagtac

SEQ ID NO: 7061 - DNA, 15 bp, Homo sapiens
tctctactaaaagta

SEQ ID NO: 7062 - DNA, 15 bp, Homo sapiens
atctctactaaaagt

SEQ ID NO: 7063 - DNA, 15 bp, Homo sapiens
catctctactaaaag

SEQ ID NO: 7064 - DNA, 15 bp, Homo sapiens
ccatctctactaaaa

SEQ ID NO: 7065 - DNA, 15 bp, Homo sapiens
cccatctctactaaa

SEQ ID NO: 7066 - DNA, 15 bp, Homo sapiens
ccccatctctactaa

SEQ ID NO: 7067 - DNA, 15 bp, Homo sapiens
accccatctctacta

SEQ ID NO: 7068 - DNA, 15 bp, Homo sapiens
aaccccatctctact

SEQ ID NO: 7069 - DNA, 15 bp, Homo sapiens
aaaccccatctctac

SEQ ID NO: 7070 - DNA, 15 bp, Homo sapiens
aaaaccccatctcta

SEQ ID NO: 7071 - DNA, 15 bp, Homo sapiens
taaaaccccatctct

SEQ ID NO: 7072 - DNA, 15 bp, Homo sapiens
gtaaaaccccatctc

SEQ ID NO: 7073 - DNA, 15 bp, Homo sapiens
ggtaaaaccccatct

SEQ ID NO: 7074 - DNA, 15 bp, Homo sapiens
tggtaaaaccccatc

SEQ ID NO: 7075 - DNA, 15 bp, Homo sapiens
gtggtaaaaccccat

SEQ ID NO: 7076 - DNA, 15 bp, Homo sapiens
ggtggtaaaacccca

SEQ ID NO: 7077 - DNA, 15 bp, Homo sapiens
aggtggtaaaacccc

SEQ ID NO: 7078 - DNA, 15 bp, Homo sapiens
aaggtggtaaaaccc

SEQ ID NO: 7079 - DNA, 15 bp, Homo sapiens
caaggtggtaaaacc

SEQ ID NO: 7080 - DNA, 15 bp, Homo sapiens
ccaaggtggtaaaac

SEQ ID NO: 7081 - DNA, 15 bp, Homo sapiens
gccaaggtggtaaaa

SEQ ID NO: 7082 - DNA, 15 bp, Homo sapiens
ggccaaggtggtaaa

SEQ ID NO: 7083 - DNA, 15 bp, Homo sapiens
tggccaaggtggtaa

SEQ ID NO: 7084 - DNA, 15 bp, Homo sapiens
ctggccaaggtggta

SEQ ID NO: 7085 - DNA, 15 bp, Homo sapiens
cctggccaaggtggt

SEQ ID NO: 7086 - DNA, 15 bp, Homo sapiens
gcctggccaaggtgg

SEQ ID NO: 7087 - DNA, 15 bp, Homo sapiens
agcctggccaaggtg

SEQ ID NO: 7088 - DNA, 15 bp, Homo sapiens
cagcctggccaaggt

SEQ ID NO: 7089 - DNA, 15 bp, Homo sapiens
ccagcctggccaagg

SEQ ID NO: 7090 - DNA, 15 bp, Homo sapiens
accagcctggccaag

SEQ ID NO: 7091 - DNA, 15 bp, Homo sapiens
gaccagcctggccaa

SEQ ID NO: 7092 - DNA, 15 bp, Homo sapiens
agaccagcctggcca

SEQ ID NO: 7093 - DNA, 15 bp, Homo sapiens
gagaccagcctggcc

SEQ ID NO: 7094 - DNA, 15 bp, Homo sapiens
tgagaccagcctggc

SEQ ID NO: 7095 - DNA, 15 bp, Homo sapiens
tttgagaccagcctg

SEQ ID NO: 7096 - DNA, 15 bp, Homo sapiens
gagtttgagaccagc

SEQ ID NO: 7097 - DNA, 15 bp, Homo sapiens
ggagtttgagaccag

SEQ ID NO: 7098 - DNA, 15 bp, Homo sapiens
tggagtttgagacca

SEQ ID NO: 7099 - DNA, 15 bp, Homo sapiens
ctggagtttgagacc

SEQ ID NO: 7100 - DNA, 15 bp, Homo sapiens
tctggagtttgagac

SEQ ID NO: 7101 - DNA, 15 bp, Homo sapiens
gtctggagtttgaga

SEQ ID NO: 7102 - DNA, 15 bp, Homo sapiens
ggtctggagtttgag

SEQ ID NO: 7103 - DNA, 15 bp, Homo sapiens
aggtctggagtttga

SEQ ID NO: 7104 - DNA, 15 bp, Homo sapiens
gaggtctggagtttg

SEQ ID NO: 7105 - DNA, 15 bp, Homo sapiens
tgaggtctggagttt

SEQ ID NO: 7106 - DNA, 15 bp, Homo sapiens
ttgaggtctggagtt

SEQ ID NO: 7107 - DNA, 15 bp, Homo sapiens
cttgaggtctggagt

SEQ ID NO: 7108 - DNA, 15 bp, Homo sapiens
acttgaggtctggag

SEQ ID NO: 7109 - DNA, 15 bp, Homo sapiens
cacttgaggtctgga

SEQ ID NO: 7110 - DNA, 15 bp, Homo sapiens
tcacttgaggtctgg

SEQ ID NO: 7111 - DNA, 15 bp, Homo sapiens
atcacttgaggtctg

SEQ ID NO: 7112 - DNA, 15 bp, Homo sapiens
gatcacttgaggtct

SEQ ID NO: 7113 - DNA, 15 bp, Homo sapiens
gaggcaggcggatca

SEQ ID NO: 7114 - DNA, 15 bp, Homo sapiens
cgaggcaggcggatc

SEQ ID NO: 7115 - DNA, 15 bp, Homo sapiens
ccgaggcaggcggat

SEQ ID NO: 7116 - DNA, 15 bp, Homo sapiens
gccgaggcaggcgga

SEQ ID NO: 7117 - DNA, 15 bp, Homo sapiens
ggccgaggcaggcgg

SEQ ID NO: 7118 - DNA, 15 bp, Homo sapiens
aggccgaggcaggcg

SEQ ID NO: 7119 - DNA, 15 bp, Homo sapiens
gaggccgaggcaggc

SEQ ID NO: 7120 - DNA, 15 bp, Homo sapiens
ggaggccgaggcagg

SEQ ID NO: 7121 - DNA, 15 bp, Homo sapiens
gggaggccgaggcag

SEQ ID NO: 7122 - DNA, 15 bp, Homo sapiens
tgggaggccgaggca

SEQ ID NO: 7123 - DNA, 15 bp, Homo sapiens
ttgggaggccgaggc

SEQ ID NO: 7124 - DNA, 15 bp, Homo sapiens
tttgggaggccgagg

SEQ ID NO: 7125 - DNA, 15 bp, Homo sapiens
ttttgggaggccgag

SEQ ID NO: 7126 - DNA, 15 bp, Homo sapiens
attttgggaggccga

SEQ ID NO: 7127 - DNA, 15 bp, Homo sapiens
cattttgggaggccg

SEQ ID NO: 7128 - DNA, 15 bp, Homo sapiens
gcattttgggaggcc

SEQ ID NO: 7129 - DNA, 15 bp, Homo sapiens
gtaatcccagcattt

SEQ ID NO: 7130 - DNA, 15 bp, Homo sapiens
tgtaatcccagcatt

SEQ ID NO: 7131 - DNA, 15 bp, Homo sapiens
ctgtaatcccagcat

SEQ ID NO: 7132 - DNA, 15 bp, Homo sapiens
cctgtaatcccagca

SEQ ID NO: 7133 - DNA, 15 bp, Homo sapiens
gcctgtaatcccagc

SEQ ID NO: 7134 - DNA, 15 bp, Homo sapiens
cgcctgtaatcccag

SEQ ID NO: 7135 - DNA, 15 bp, Homo sapiens
acgcctgtaatccca

SEQ ID NO: 7136 - DNA, 15 bp, Homo sapiens
cacgcctgtaatccc

SEQ ID NO: 7137 - DNA, 15 bp, Homo sapiens
tcacgcctgtaatcc

SEQ ID NO: 7138 - DNA, 15 bp, Homo sapiens
ctcacgcctgtaatc

SEQ ID NO: 7139 - DNA, 15 bp, Homo sapiens
gctcacgcctgtaat

SEQ ID NO: 7140 - DNA, 15 bp, Homo sapiens
ggctcacgcctgtaa

SEQ ID NO: 7141 - DNA, 15 bp, Homo sapiens
tggctcacgcctgta

SEQ ID NO: 7142 - DNA, 15 bp, Homo sapiens
gtggctcacgcctgt

SEQ ID NO: 7143 - DNA, 15 bp, Homo sapiens
agtggctcacgcctg

SEQ ID NO: 7144 - DNA, 15 bp, Homo sapiens
cagtggctcacgcct

SEQ ID NO: 7145 - DNA, 15 bp, Homo sapiens
gcagtggctcacgcc

SEQ ID NO: 7146 - DNA, 15 bp, Homo sapiens
cgcagtggctcacgc

SEQ ID NO: 7147 - DNA, 15 bp, Homo sapiens
gcgcagtggctcacg

SEQ ID NO: 7148 - DNA, 15 bp, Homo sapiens
ggcgcagtggctcac

SEQ ID NO: 7149 - DNA, 15 bp, Homo sapiens
aggcgcagtggctca

SEQ ID NO: 7150 - DNA, 15 bp, Homo sapiens
caggcgcagtggctc

SEQ ID NO: 7151 - DNA, 15 bp, Homo sapiens
ccaggcgcagtggct

SEQ ID NO: 7152 - DNA, 15 bp, Homo sapiens
gccaggcgcagtggc

SEQ ID NO: 7153 - DNA, 15 bp, Homo sapiens
ggccaggcgcagtgg

SEQ ID NO: 7154 - DNA, 15 bp, Homo sapiens
tggccaggcgcagtg

SEQ ID NO: 7155 - DNA, 15 bp, Homo sapiens
ctggccaggcgcagt

SEQ ID NO: 7156 - DNA, 15 bp, Homo sapiens
actggccaggcgcag

SEQ ID NO: 7157 - DNA, 15 bp, Homo sapiens
cactggccaggcgca

SEQ ID NO: 7158 - DNA, 15 bp, Homo sapiens
acactggccaggcgc

SEQ ID NO: 7159 - DNA, 15 bp, Homo sapiens
aacactggccaggcg

SEQ ID NO: 7160 - DNA, 15 bp, Homo sapiens
caacactggccaggc

SEQ ID NO: 7161 - DNA, 15 bp, Homo sapiens
tcaacactggccagg

SEQ ID NO: 7162 - DNA, 15 bp, Homo sapiens
ctcaacactggccag

SEQ ID NO: 7163 - DNA, 15 bp, Homo sapiens
tctcaacactggcca

SEQ ID NO: 7164 - DNA, 15 bp, Homo sapiens
ttctcaacactggcc

SEQ ID NO: 7165 - DNA, 15 bp, Homo sapiens
attctcaacactggc

SEQ ID NO: 7166 - DNA, 15 bp, Homo sapiens
tattctcaacactgg

SEQ ID NO: 7167 - DNA, 15 bp, Homo sapiens
atattctcaacactg

SEQ ID NO: 7168 - DNA, 15 bp, Homo sapiens
aatattctcaacact

SEQ ID NO: 7169 - DNA, 15 bp, Homo sapiens
caatattctcaacac

SEQ ID NO: 7170 - DNA, 15 bp, Homo sapiens
tcaatattctcaaca

SEQ ID NO: 7171 - DNA, 15 bp, Homo sapiens
ctcaatattctcaac

SEQ ID NO: 7172 - DNA, 15 bp, Homo sapiens
tctcaatattctcaa

SEQ ID NO: 7173 - DNA, 15 bp, Homo sapiens
ctctcaatattctca

SEQ ID NO: 7174 - DNA, 15 bp, Homo sapiens
tctctcaatattctc

SEQ ID NO: 7175 - DNA, 15 bp, Homo sapiens
atctctcaatattct

SEQ ID NO: 7176 - DNA, 15 bp, Homo sapiens
catctctcaatattc

SEQ ID NO: 7177 - DNA, 15 bp, Homo sapiens
ccatctctcaatatt

SEQ ID NO: 7178 - DNA, 15 bp, Homo sapiens
tccatctctcaatat

SEQ ID NO: 7179 - DNA, 15 bp, Homo sapiens
atccatctctcaata

SEQ ID NO: 7180 - DNA, 15 bp, Homo sapiens
tatccatctctcaat

SEQ ID NO: 7181 - DNA, 15 bp, Homo sapiens
atatccatctctcaa

SEQ ID NO: 7182 - DNA, 15 bp, Homo sapiens
aatatccatctctca

SEQ ID NO: 7183 - DNA, 15 bp, Homo sapiens
caatatccatctctc

SEQ ID NO: 7184 - DNA, 15 bp, Homo sapiens
acaatatccatctct

SEQ ID NO: 7185 - DNA, 15 bp, Homo sapiens
tacaatatccatctc

SEQ ID NO: 7186 - DNA, 15 bp, Homo sapiens
ctacaatatccatct

SEQ ID NO: 7187 - DNA, 15 bp, Homo sapiens
gctacaatatccatc

SEQ ID NO: 7188 - DNA, 15 bp, Homo sapiens
agctacaatatccat

SEQ ID NO: 7189 - DNA, 15 bp, Homo sapiens
cagctacaatatcca

SEQ ID NO: 7190 - DNA, 15 bp, Homo sapiens
acagctacaatatcc

SEQ ID NO: 7191 - DNA, 15 bp, Homo sapiens
tacagctacaatatc

SEQ ID NO: 7192 - DNA, 15 bp, Homo sapiens
gtacagctacaatat

SEQ ID NO: 7193 - DNA, 15 bp, Homo sapiens
ggtacagctacaata

SEQ ID NO: 7194 - DNA, 15 bp, Homo sapiens
aggtacagctacaat

SEQ ID NO: 7195 - DNA, 15 bp, Homo sapiens
caggtacagctacaa

SEQ ID NO: 7196 - DNA, 15 bp, Homo sapiens
gcaggtacagctaca

SEQ ID NO: 7197 - DNA, 15 bp, Homo sapiens
ggcaggtacagctac

SEQ ID NO: 7198 - DNA, 15 bp, Homo sapiens
tggcaggtacagcta

SEQ ID NO: 7199 - DNA, 15 bp, Homo sapiens
atggcaggtacagct

SEQ ID NO: 7200 - DNA, 15 bp, Homo sapiens
gatggcaggtacagc

SEQ ID NO: 7201 - DNA, 15 bp, Homo sapiens
tgatggcaggtacag

SEQ ID NO: 7202 - DNA, 15 bp, Homo sapiens
ttgatggcaggtaca

SEQ ID NO: 7203 - DNA, 15 bp, Homo sapiens
tttgatggcaggtac

SEQ ID NO: 7204 - DNA, 15 bp, Homo sapiens
ttttgatggcaggta

SEQ ID NO: 7205 - DNA, 15 bp, Homo sapiens
cttttgatggcaggt

SEQ ID NO: 7206 - DNA, 15 bp, Homo sapiens
tcttttgatggcagg

SEQ ID NO: 7207 - DNA, 15 bp, Homo sapiens
ttcttttgatggcag

SEQ ID NO: 7208 - DNA, 15 bp, Homo sapiens
attcttttgatggca

SEQ ID NO: 7209 - DNA, 15 bp, Homo sapiens
aattcttttgatggc

SEQ ID NO: 7210 - DNA, 15 bp, Homo sapiens
aaattcttttgatgg

SEQ ID NO: 7211 - DNA, 15 bp, Homo sapiens
aaaattcttttgatg

SEQ ID NO: 7212 - DNA, 15 bp, Homo sapiens
gaaaattcttttgat

SEQ ID NO: 7213 - DNA, 15 bp, Homo sapiens
agaaaattcttttga

SEQ ID NO: 7214 - DNA, 15 bp, Homo sapiens
aagaaaattcttttg

SEQ ID NO: 7215 - DNA, 15 bp, Homo sapiens
caagaaaattctttt

SEQ ID NO: 7216 - DNA, 15 bp, Homo sapiens
tcaagaaaattcttt

SEQ ID NO: 7217 - DNA, 15 bp, Homo sapiens
gtcaagaaaattctt

SEQ ID NO: 7218 - DNA, 15 bp, Homo sapiens
ggtcaagaaaattct

SEQ ID NO: 7219 - DNA, 15 bp, Homo sapiens
aggtcaagaaaattc

SEQ ID NO: 7220 - DNA, 15 bp, Homo sapiens
gaggtcaagaaaatt

SEQ ID NO: 7221 - DNA, 15 bp, Homo sapiens
ggaggtcaagaaaat

SEQ ID NO: 7222 - DNA, 15 bp, Homo sapiens
tggaggtcaagaaaa

SEQ ID NO: 7223 - DNA, 15 bp, Homo sapiens
gtggaggtcaagaaa

SEQ ID NO: 7224 - DNA, 15 bp, Homo sapiens
tgtggaggtcaagaa

SEQ ID NO: 7225 - DNA, 15 bp, Homo sapiens
atgtggaggtcaaga

SEQ ID NO: 7226 - DNA, 15 bp, Homo sapiens
tatgtggaggtcaag

SEQ ID NO: 7227 - DNA, 15 bp, Homo sapiens
ctatgtggaggtcaa

SEQ ID NO: 7228 - DNA, 15 bp, Homo sapiens
actatgtggaggtca

SEQ ID NO: 7229 - DNA, 15 bp, Homo sapiens
cactatgtggaggtc

SEQ ID NO: 7230 - DNA, 15 bp, Homo sapiens
acactatgtggaggt

SEQ ID NO: 7231 - DNA, 15 bp, Homo sapiens
cacactatgtggagg

SEQ ID NO: 7232 - DNA, 15 bp, Homo sapiens
tcacactatgtggag

SEQ ID NO: 7233 - DNA, 15 bp, Homo sapiens
ttcacactatgtgga

SEQ ID NO: 7234 - DNA, 15 bp, Homo sapiens
tttcacactatgtgg

SEQ ID NO: 7235 - DNA, 15 bp, Homo sapiens
ttttcacactatgtg

SEQ ID NO: 7236 - DNA, 15 bp, Homo sapiens
tttttcacactatgt

SEQ ID NO: 7237 - DNA, 15 bp, Homo sapiens
ctttttcacactatg

SEQ ID NO: 7238 - DNA, 15 bp, Homo sapiens
tctttttcacactat

SEQ ID NO: 7239 - DNA, 15 bp, Homo sapiens
ttctttttcacacta

SEQ ID NO: 7240 - DNA, 15 bp, Homo sapiens
cttctttttcacact

SEQ ID NO: 7241 - DNA, 15 bp, Homo sapiens
tcttctttttcacac

SEQ ID NO: 7242 - DNA, 15 bp, Homo sapiens
gtcttctttttcaca

SEQ ID NO: 7243 - DNA, 15 bp, Homo sapiens
agtcttctttttcac

SEQ ID NO: 7244 - DNA, 15 bp, Homo sapiens
cagtcttctttttca

SEQ ID NO: 7245 - DNA, 15 bp, Homo sapiens
acagtcttctttttc

SEQ ID NO: 7246 - DNA, 15 bp, Homo sapiens
aacagtcttcttttt

SEQ ID NO: 7247 - DNA, 15 bp, Homo sapiens
aaacagtcttctttt

SEQ ID NO: 7248 - DNA, 15 bp, Homo sapiens
taaacagtcttcttt

SEQ ID NO: 7249 - DNA, 15 bp, Homo sapiens
gtaaacagtcttctt

SEQ ID NO: 7250 - DNA, 15 bp, Homo sapiens
tgtaaacagtcttct

SEQ ID NO: 7251 - DNA, 15 bp, Homo sapiens
gtgtaaacagtcttc

SEQ ID NO: 7252 - DNA, 15 bp, Homo sapiens
tgtgtaaacagtctt

SEQ ID NO: 7253 - DNA, 15 bp, Homo sapiens
atgtgtaaacagtct

SEQ ID NO: 7254 - DNA, 15 bp, Homo sapiens
aatgtgtaaacagtc

SEQ ID NO: 7255 - DNA, 15 bp, Homo sapiens
taatgtgtaaacagt

SEQ ID NO: 7256 - DNA, 15 bp, Homo sapiens
ataatgtgtaaacag

SEQ ID NO: 7257 - DNA, 15 bp, Homo sapiens
tataatgtgtaaaca

SEQ ID NO: 7258 - DNA, 15 bp, Homo sapiens
atataatgtgtaaac

SEQ ID NO: 7259 - DNA, 15 bp, Homo sapiens
aatataatgtgtaaa

SEQ ID NO: 7260 - DNA, 15 bp, Homo sapiens
aaatataatgtgtaa

SEQ ID NO: 7261 - DNA, 15 bp, Homo sapiens
aaaatataatgtgta

SEQ ID NO: 7262 - DNA, 15 bp, Homo sapiens
taaaatataatgtgt

SEQ ID NO: 7263 - DNA, 15 bp, Homo sapiens
ttaaaatataatgtg

SEQ ID NO: 7264 - DNA, 15 bp, Homo sapiens
cttaaaatataatgt

SEQ ID NO: 7265 - DNA, 15 bp, Homo sapiens
acttaaaatataatg

SEQ ID NO: 7266 - DNA, 15 bp, Homo sapiens
tacttaaaatataat

SEQ ID NO: 7267 - DNA, 15 bp, Homo sapiens
ttacttaaaatataa

SEQ ID NO: 7268 - DNA, 15 bp, Homo sapiens
attacttaaaatata

SEQ ID NO: 7269 - DNA, 15 bp, Homo sapiens
aattacttaaaatat

SEQ ID NO: 7270 - DNA, 15 bp, Homo sapiens
taattacttaaaata

SEQ ID NO: 7271 - DNA, 15 bp, Homo sapiens
ataattacttaaaat

SEQ ID NO: 7272 - DNA, 15 bp, Homo sapiens
tataattacttaaaa

SEQ ID NO: 7273 - DNA, 15 bp, Homo sapiens
gtataattacttaaa

SEQ ID NO: 7274 - DNA, 15 bp, Homo sapiens
tgtataattacttaa

SEQ ID NO: 7275 - DNA, 15 bp, Homo sapiens
gtgtataattactta

SEQ ID NO: 7276 - DNA, 15 bp, Homo sapiens
tgtgtataattactt

SEQ ID NO: 7277 - DNA, 15 bp, Homo sapiens
atgtgtataattact

SEQ ID NO: 7278 - DNA, 15 bp, Homo sapiens
tatgtgtataattac

SEQ ID NO: 7279 - DNA, 15 bp, Homo sapiens
ttatgtgtataatta

SEQ ID NO: 7280 - DNA, 15 bp, Homo sapiens
attatgtgtataatt

SEQ ID NO: 7281 - DNA, 15 bp, Homo sapiens
aattatgtgtataat

SEQ ID NO: 7282 - DNA, 15 bp, Homo sapiens
taattatgtgtataa

SEQ ID NO: 7283 - DNA, 15 bp, Homo sapiens
ataattatgtgtata

SEQ ID NO: 7284 - DNA, 15 bp, Homo sapiens
aataattatgtgtat

SEQ ID NO: 7285 - DNA, 15 bp, Homo sapiens
taataattatgtgta

SEQ ID NO: 7286 - DNA, 15 bp, Homo sapiens
ataataattatgtgt

SEQ ID NO: 7287 - DNA, 15 bp, Homo sapiens
gataataattatgtg

SEQ ID NO: 7288 - DNA, 15 bp, Homo sapiens
tgataataattatgt

SEQ ID NO: 7289 - DNA, 15 bp, Homo sapiens
ctgataataattatg

SEQ ID NO: 7290 - DNA, 15 bp, Homo sapiens
actgataataattat

SEQ ID NO: 7291 - DNA, 15 bp, Homo sapiens
tactgataataatta

SEQ ID NO: 7292 - DNA, 15 bp, Homo sapiens
gtactgataataatt

SEQ ID NO: 7293 - DNA, 15 bp, Homo sapiens
agtactgataataat

SEQ ID NO: 7294 - DNA, 15 bp, Homo sapiens
gagtactgataataa

SEQ ID NO: 7295 - DNA, 15 bp, Homo sapiens
tgagtactgataata

SEQ ID NO: 7296 - DNA, 15 bp, Homo sapiens
gtgagtactgataat

SEQ ID NO: 7297 - DNA, 15 bp, Homo sapiens
ggtgagtactgataa

SEQ ID NO: 7298 - DNA, 15 bp, Homo sapiens
tggtgagtactgata

SEQ ID NO: 7299 - DNA, 15 bp, Homo sapiens
gtggtgagtactgat

SEQ ID NO: 7300 - DNA, 15 bp, Homo sapiens
agtggtgagtactga

SEQ ID NO: 7301 - DNA, 15 bp, Homo sapiens
aagtggtgagtactg

SEQ ID NO: 7302 - DNA, 15 bp, Homo sapiens
gaagtggtgagtact

SEQ ID NO: 7303 - DNA, 15 bp, Homo sapiens
tgaagtggtgagtac

SEQ ID NO: 7304 - DNA, 15 bp, Homo sapiens
ttgaagtggtgagta

SEQ ID NO: 7305 - DNA, 15 bp, Homo sapiens
tttgaagtggtgagt

SEQ ID NO: 7306 - DNA, 15 bp, Homo sapiens
atttgaagtggtgag

SEQ ID NO: 7307 - DNA, 15 bp, Homo sapiens
tatttgaagtggtga

SEQ ID NO: 7308 - DNA, 15 bp, Homo sapiens
atatttgaagtggtg

SEQ ID NO: 7309 - DNA, 15 bp, Homo sapiens
catatttgaagtggt

SEQ ID NO: 7310 - DNA, 15 bp, Homo sapiens
tcatatttgaagtgg

SEQ ID NO: 7311 - DNA, 15 bp, Homo sapiens
ttcatatttgaagtg

SEQ ID NO: 7312 - DNA, 15 bp, Homo sapiens
gttcatatttgaagt

SEQ ID NO: 7313 - DNA, 15 bp, Homo sapiens
tgttcatatttgaag

SEQ ID NO: 7314 - DNA, 15 bp, Homo sapiens
ctgttcatatttgaa

SEQ ID NO: 7315 - DNA, 15 bp, Homo sapiens
actgttcatatttga

SEQ ID NO: 7316 - DNA, 15 bp, Homo sapiens
cactgttcatatttg

SEQ ID NO: 7317 - DNA, 15 bp, Homo sapiens
tcactgttcatattt

SEQ ID NO: 7318 - DNA, 15 bp, Homo sapiens
ttcactgttcatatt

SEQ ID NO: 7319 - DNA, 15 bp, Homo sapiens
attcactgttcatat

SEQ ID NO: 7320 - DNA, 15 bp, Homo sapiens
gattcactgttcata

SEQ ID NO: 7321 - DNA, 15 bp, Homo sapiens
agattcactgttcat

SEQ ID NO: 7322 - DNA, 15 bp, Homo sapiens
tagattcactgttca

SEQ ID NO: 7323 - DNA, 15 bp, Homo sapiens
ttagattcactgttc

SEQ ID NO: 7324 - DNA, 15 bp, Homo sapiens
gttagattcactgtt

SEQ ID NO: 7325 - DNA, 15 bp, Homo sapiens
ggttagattcactgt

SEQ ID NO: 7326 - DNA, 15 bp, Homo sapiens
tggttagattcactg

SEQ ID NO: 7327 - DNA, 15 bp, Homo sapiens
ctggttagattcact

SEQ ID NO: 7328 - DNA, 15 bp, Homo sapiens
actggttagattcac

SEQ ID NO: 7329 - DNA, 15 bp, Homo sapiens
cactggttagattca

SEQ ID NO: 7330 - DNA, 15 bp, Homo sapiens
acactggttagattc

SEQ ID NO: 7331 - DNA, 15 bp, Homo sapiens
aacactggttagatt

SEQ ID NO: 7332 - DNA, 15 bp, Homo sapiens
aaacactggttagat

SEQ ID NO: 7333 - DNA, 15 bp, Homo sapiens
caaacactggttaga

SEQ ID NO: 7334 - DNA, 15 bp, Homo sapiens
tcaaacactggttag

SEQ ID NO: 7335 - DNA, 15 bp, Homo sapiens
atcaaacactggtta

SEQ ID NO: 7336 - DNA, 15 bp, Homo sapiens
aatcaaacactggtt

SEQ ID NO: 7337 - DNA, 15 bp, Homo sapiens
aaatcaaacactggt

SEQ ID NO: 7338 - DNA, 15 bp, Homo sapiens
gaaatcaaacactgg

SEQ ID NO: 7339 - DNA, 15 bp, Homo sapiens
agaaatcaaacactg

SEQ ID NO: 7340 - DNA, 15 bp, Homo sapiens
gagaaatcaaacact

SEQ ID NO: 7341 - DNA, 15 bp, Homo sapiens
agagaaatcaaacac

SEQ ID NO: 7342 - DNA, 15 bp, Homo sapiens
cagagaaatcaaaca

SEQ ID NO: 7343 - DNA, 15 bp, Homo sapiens
acagagaaatcaaac

SEQ ID NO: 7344 - DNA, 15 bp, Homo sapiens
cacagagaaatcaaa

SEQ ID NO: 7345 - DNA, 15 bp, Homo sapiens
acacagagaaatcaa

SEQ ID NO: 7346 - DNA, 15 bp, Homo sapiens
cacacagagaaatca

SEQ ID NO: 7347 - DNA, 15 bp, Homo sapiens
acacacagagaaatc

SEQ ID NO: 7348 - DNA, 15 bp, Homo sapiens
cacacacagagaaat

SEQ ID NO: 7349 - DNA, 15 bp, Homo sapiens
acacacacagagaaa

SEQ ID NO: 7350 - DNA, 15 bp, Homo sapiens
tacacacacagagaa

SEQ ID NO: 7351 - DNA, 15 bp, Homo sapiens
atacacacacagaga

SEQ ID NO: 7352 - DNA, 15 bp, Homo sapiens
catacacacacagag

SEQ ID NO: 7353 - DNA, 15 bp, Homo sapiens
acatacacacacaga

SEQ ID NO: 7354 - DNA, 15 bp, Homo sapiens
cacatacacacacag

SEQ ID NO: 7355 - DNA, 15 bp, Homo sapiens
acacatacacacaca

SEQ ID NO: 7356 - DNA, 15 bp, Homo sapiens
tacacatacacacac

SEQ ID NO: 7357 - DNA, 15 bp, Homo sapiens
atacacatacacaca

SEQ ID NO: 7358 - DNA, 15 bp, Homo sapiens
tatacacatacacac

SEQ ID NO: 7359 - DNA, 15 bp, Homo sapiens
gtatacacatacaca

SEQ ID NO: 7360 - DNA, 15 bp, Homo sapiens
tgtatacacatacac

SEQ ID NO: 7361 - DNA, 15 bp, Homo sapiens
ttgtatacacataca

SEQ ID NO: 7362 - DNA, 15 bp, Homo sapiens
tttgtatacacatac

SEQ ID NO: 7363 - DNA, 15 bp, Homo sapiens
ctttgtatacacata

SEQ ID NO: 7364 - DNA, 15 bp, Homo sapiens
actttgtatacacat

SEQ ID NO: 7365 - DNA, 15 bp, Homo sapiens
aactttgtatacaca

SEQ ID NO: 7366 - DNA, 15 bp, Homo sapiens
taactttgtatacac

SEQ ID NO: 7367 - DNA, 15 bp, Homo sapiens
ctaactttgtataca

SEQ ID NO: 7368 - DNA, 15 bp, Homo sapiens
gctaactttgtatac

SEQ ID NO: 7369 - DNA, 15 bp, Homo sapiens
tgctaactttgtata

SEQ ID NO: 7370 - DNA, 15 bp, Homo sapiens
ttgctaactttgtat

SEQ ID NO: 7371 - DNA, 15 bp, Homo sapiens
tttgctaactttgta

SEQ ID NO: 7372 - DNA, 15 bp, Homo sapiens
gtttgctaactttgt

SEQ ID NO: 7373 - DNA, 15 bp, Homo sapiens
ggtttgctaactttg

SEQ ID NO: 7374 - DNA, 15 bp, Homo sapiens
aggtttgctaacttt

SEQ ID NO: 7375 - DNA, 15 bp, Homo sapiens
aaggtttgctaactt

SEQ ID NO: 7376 - DNA, 15 bp, Homo sapiens
aaaggtttgctaact

SEQ ID NO: 7377 - DNA, 15 bp, Homo sapiens
aaaaggtttgctaac

SEQ ID NO: 7378 - DNA, 15 bp, Homo sapiens
taaaaggtttgctaa

SEQ ID NO: 7379 - DNA, 15 bp, Homo sapiens
ataaaaggtttgcta

SEQ ID NO: 7380 - DNA, 15 bp, Homo sapiens
gataaaaggtttgct

SEQ ID NO: 7381 - DNA, 15 bp, Homo sapiens
agataaaaggtttgc

SEQ ID NO: 7382 - DNA, 15 bp, Homo sapiens
aagataaaaggtttg

SEQ ID NO: 7383 - DNA, 15 bp, Homo sapiens
taagataaaaggttt

SEQ ID NO: 7384 - DNA, 15 bp, Homo sapiens
ttaagataaaaggtt

SEQ ID NO: 7385 - DNA, 15 bp, Homo sapiens
attaagataaaaggt

SEQ ID NO: 7386 - DNA, 15 bp, Homo sapiens
tattaagataaaagg

SEQ ID NO: 7387 - DNA, 15 bp, Homo sapiens
atattaagataaaag

SEQ ID NO: 7388 - DNA, 15 bp, Homo sapiens
aatattaagataaaa

SEQ ID NO: 7389 - DNA, 15 bp, Homo sapiens
aaatattaagataaa

SEQ ID NO: 7390 - DNA, 15 bp, Homo sapiens
taaatattaagataa

SEQ ID NO: 7391 - DNA, 15 bp, Homo sapiens
ataaatattaagata

SEQ ID NO: 7392 - DNA, 15 bp, Homo sapiens
aataaatattaagat

SEQ ID NO: 7393 - DNA, 15 bp, Homo sapiens
taataaatattaaga

SEQ ID NO: 7394 - DNA, 15 bp, Homo sapiens
ttaataaatattaag

SEQ ID NO: 7395 - DNA, 15 bp, Homo sapiens
tttaataaatattaa

SEQ ID NO: 7396 - DNA, 15 bp, Homo sapiens
ttttaataaatatta

SEQ ID NO: 7397 - DNA, 15 bp, Homo sapiens
tttttaataaatatt

SEQ ID NO: 7398 - DNA, 15 bp, Homo sapiens
ttttttaataaatat

SEQ ID NO: 7399 - DNA, 15 bp, Homo sapiens
gttttttaataaata

SEQ ID NO: 7400 - DNA, 15 bp, Homo sapiens
cgttttttaataaat

SEQ ID NO: 7401 - DNA, 15 bp, Homo sapiens
tcgttttttaataaa

SEQ ID NO: 7402 - DNA, 15 bp, Homo sapiens
ttcgttttttaataa

SEQ ID NO: 7403 - DNA, 15 bp, Homo sapiens
attcgttttttaata

SEQ ID NO: 7404 - DNA, 15 bp, Homo sapiens
aattcgttttttaat

SEQ ID NO: 7405 - DNA, 15 bp, Homo sapiens
aaattcgttttttaa

SEQ ID NO: 7406 - DNA, 15 bp, Homo sapiens
aaaattcgtttttta

SEQ ID NO: 7407 - DNA, 15 bp, Homo sapiens
aaaaattcgtttttt

SEQ ID NO: 7408 - DNA, 15 bp, Homo sapiens
caaaaattcgttttt

SEQ ID NO: 7409 - DNA, 15 bp, Homo sapiens
acaaaaattcgtttt

SEQ ID NO: 7410 - DNA, 15 bp, Homo sapiens
aacaaaaattcgttt

SEQ ID NO: 7411 - DNA, 15 bp, Homo sapiens
aaacaaaaattcgtt

SEQ ID NO: 7412 - DNA, 15 bp, Homo sapiens
gaaacaaaaattcgt

SEQ ID NO: 7413 - DNA, 15 bp, Homo sapiens
agaaacaaaaattcg

SEQ ID NO: 7414 - DNA, 15 bp, Homo sapiens
aagaaacaaaaattc

SEQ ID NO: 7415 - DNA, 15 bp, Homo sapiens
aaagaaacaaaaatt

SEQ ID NO: 7416 - DNA, 15 bp, Homo sapiens
taaagaaacaaaaat

SEQ ID NO: 7417 - DNA, 15 bp, Homo sapiens
ttaaagaaacaaaaa

SEQ ID NO: 7418 - DNA, 15 bp, Homo sapiens
tttaaagaaacaaaa

SEQ ID NO: 7419 - DNA, 15 bp, Homo sapiens
ctttaaagaaacaaa

SEQ ID NO: 7420 - DNA, 15 bp, Homo sapiens
tctttaaagaaacaa

SEQ ID NO: 7421 - DNA, 15 bp, Homo sapiens
ttctttaaagaaaca

SEQ ID NO: 7422 - DNA, 15 bp, Homo sapiens
tttctttaaagaaac

SEQ ID NO: 7423 - DNA, 15 bp, Homo sapiens
ttttctttaaagaaa

SEQ ID NO: 7424 - DNA, 15 bp, Homo sapiens
cttttctttaaagaa

SEQ ID NO: 7425 - DNA, 15 bp, Homo sapiens
tcttttctttaaaga

SEQ ID NO: 7426 - DNA, 15 bp, Homo sapiens
gtcttttctttaaag

SEQ ID NO: 7427 - DNA, 15 bp, Homo sapiens
agtcttttctttaaa

SEQ ID NO: 7428 - DNA, 15 bp, Homo sapiens
tagtcttttctttaa

SEQ ID NO: 7429 - DNA, 15 bp, Homo sapiens
gtagtcttttcttta

SEQ ID NO: 7430 - DNA, 15 bp, Homo sapiens
ggtagtcttttcttt

SEQ ID NO: 7431 - DNA, 15 bp, Homo sapiens
aggtagtcttttctt

SEQ ID NO: 7432 - DNA, 15 bp, Homo sapiens
aaggtagtcttttct

SEQ ID NO: 7433 - DNA, 15 bp, Homo sapiens
taaggtagtcttttc

SEQ ID NO: 7434 - DNA, 15 bp, Homo sapiens
ctaaggtagtctttt

SEQ ID NO: 7435 - DNA, 15 bp, Homo sapiens
tctaaggtagtcttt

SEQ ID NO: 7436 - DNA, 15 bp, Homo sapiens
ctctaaggtagtctt

SEQ ID NO: 7437 - DNA, 15 bp, Homo sapiens
tctctaaggtagtct

SEQ ID NO: 7438 - DNA, 15 bp, Homo sapiens
ttctctaaggtagtc

SEQ ID NO: 7439 - DNA, 15 bp, Homo sapiens
attctctaaggtagt

SEQ ID NO: 7440 - DNA, 15 bp, Homo sapiens
tattctctaaggtag

SEQ ID NO: 7441 - DNA, 15 bp, Homo sapiens
atattctctaaggta

SEQ ID NO: 7442 - DNA, 15 bp, Homo sapiens
aatattctctaaggt

SEQ ID NO: 7443 - DNA, 15 bp, Homo sapiens
caatattctctaagg

SEQ ID NO: 7444 - DNA, 15 bp, Homo sapiens
acaatattctctaag

SEQ ID NO: 7445 - DNA, 15 bp, Homo sapiens
aacaatattctctaa

SEQ ID NO: 7446 - DNA, 15 bp, Homo sapiens
gaacaatattctcta

SEQ ID NO: 7447 - DNA, 15 bp, Homo sapiens
agaacaatattctct

SEQ ID NO: 7448 - DNA, 15 bp, Homo sapiens
tagaacaatattctc

SEQ ID NO: 7449 - DNA, 15 bp, Homo sapiens
atagaacaatattct

SEQ ID NO: 7450 - DNA, 15 bp, Homo sapiens
tatagaacaatattc

SEQ ID NO: 7451 - DNA, 15 bp, Homo sapiens
ctatagaacaatatt

SEQ ID NO: 7452 - DNA, 15 bp, Homo sapiens
actatagaacaatat

SEQ ID NO: 7453 - DNA, 15 bp, Homo sapiens
aactatagaacaata

SEQ ID NO: 7454 - DNA, 15 bp, Homo sapiens
aaactatagaacaat

SEQ ID NO: 7455 - DNA, 15 bp, Homo sapiens
aaaactatagaacaa

SEQ ID NO: 7456 - DNA, 15 bp, Homo sapiens
aaaaactatagaaca

SEQ ID NO: 7457 - DNA, 15 bp, Homo sapiens
taaaaactatagaac

SEQ ID NO: 7458 - DNA, 15 bp, Homo sapiens
ttaaaaactatagaa

SEQ ID NO: 7459 - DNA, 15 bp, Homo sapiens
tttaaaaactataga

SEQ ID NO: 7460 - DNA, 15 bp, Homo sapiens
atttaaaaactatag

SEQ ID NO: 7461 - DNA, 15 bp, Homo sapiens
tatttaaaaactata

SEQ ID NO: 7462 - DNA, 15 bp, Homo sapiens
atatttaaaaactat

SEQ ID NO: 7463 - DNA, 15 bp, Homo sapiens
catatttaaaaacta

SEQ ID NO: 7464 - DNA, 15 bp, Homo sapiens
ccatatttaaaaact

SEQ ID NO: 7465 - DNA, 15 bp, Homo sapiens
accatatttaaaaac

SEQ ID NO: 7466 - DNA, 15 bp, Homo sapiens
gaccatatttaaaaa

SEQ ID NO: 7467 - DNA, 15 bp, Homo sapiens
tgaccatatttaaaa

SEQ ID NO: 7468 - DNA, 15 bp, Homo sapiens
ctgaccatatttaaa

SEQ ID NO: 7469 - DNA, 15 bp, Homo sapiens
tctgaccatatttaa

SEQ ID NO: 7470 - DNA, 15 bp, Homo sapiens
atctgaccatattta

SEQ ID NO: 7471 - DNA, 15 bp, Homo sapiens
gatctgaccatattt

SEQ ID NO: 7472 - DNA, 15 bp, Homo sapiens
agatctgaccatatt

SEQ ID NO: 7473 - DNA, 15 bp, Homo sapiens
tagatctgaccatat

SEQ ID NO: 7474 - DNA, 15 bp, Homo sapiens
atagatctgaccata

SEQ ID NO: 7475 - DNA, 15 bp, Homo sapiens
aatagatctgaccat

SEQ ID NO: 7476 - DNA, 15 bp, Homo sapiens
aaatagatctgacca

SEQ ID NO: 7477 - DNA, 15 bp, Homo sapiens
aaaatagatctgacc

SEQ ID NO: 7478 - DNA, 15 bp, Homo sapiens
taaaatagatctgac

SEQ ID NO: 7479 - DNA, 15 bp, Homo sapiens
ttaaaatagatctga

SEQ ID NO: 7480 - DNA, 15 bp, Homo sapiens
tttaaaatagatctg

SEQ ID NO: 7481 - DNA, 15 bp, Homo sapiens
atttaaaatagatct

SEQ ID NO: 7482 - DNA, 15 bp, Homo sapiens
aatttaaaatagatc

SEQ ID NO: 7483 - DNA, 15 bp, Homo sapiens
taatttaaaatagat

SEQ ID NO: 7484 - DNA, 15 bp, Homo sapiens
ataatttaaaataga

SEQ ID NO: 7485 - DNA, 15 bp, Homo sapiens
cataatttaaaatag

SEQ ID NO: 7486 - DNA, 15 bp, Homo sapiens
acataatttaaaata

SEQ ID NO: 7487 - DNA, 15 bp, Homo sapiens
aacataatttaaaat

SEQ ID NO: 7488 - DNA, 15 bp, Homo sapiens
taacataatttaaaa

SEQ ID NO: 7489 - DNA, 15 bp, Homo sapiens
ttaacataatttaaa

SEQ ID NO: 7490 - DNA, 15 bp, Homo sapiens
tttaacataatttaa

SEQ ID NO: 7491 - DNA, 15 bp, Homo sapiens
ttttaacataattta

SEQ ID NO: 7492 - DNA, 15 bp, Homo sapiens
attttaacataattt

SEQ ID NO: 7493 - DNA, 15 bp, Homo sapiens
aattttaacataatt

SEQ ID NO: 7494 - DNA, 15 bp, Homo sapiens
aaattttaacataat

SEQ ID NO: 7495 - DNA, 15 bp, Homo sapiens
aaaattttaacataa

SEQ ID NO: 7496 - DNA, 15 bp, Homo sapiens
caaaattttaacata

SEQ ID NO: 7497 - DNA, 15 bp, Homo sapiens
tcaaaattttaacat

SEQ ID NO: 7498 - DNA, 15 bp, Homo sapiens
ctcaaaattttaaca

SEQ ID NO: 7499 - DNA, 15 bp, Homo sapiens
actcaaaattttaac

SEQ ID NO: 7500 - DNA, 15 bp, Homo sapiens
tactcaaaattttaa

SEQ ID NO: 7501 - DNA, 15 bp, Homo sapiens
atactcaaaatttta

SEQ ID NO: 7502 - DNA, 15 bp, Homo sapiens
aatactcaaaatttt

SEQ ID NO: 7503 - DNA, 15 bp, Homo sapiens
taatactcaaaattt

SEQ ID NO: 7504 - DNA, 15 bp, Homo sapiens
gtaatactcaaaatt

SEQ ID NO: 7505 - DNA, 15 bp, Homo sapiens
cgtaatactcaaaat

SEQ ID NO: 7506 - DNA, 15 bp, Homo sapiens
acgtaatactcaaaa

SEQ ID NO: 7507 - DNA, 15 bp, Homo sapiens
aacgtaatactcaaa

SEQ ID NO: 7508 - DNA, 15 bp, Homo sapiens
aaacgtaatactcaa

SEQ ID NO: 7509 - DNA, 15 bp, Homo sapiens
taaacgtaatactca

SEQ ID NO: 7510 - DNA, 15 bp, Homo sapiens
ataaacgtaatactc

SEQ ID NO: 7511 - DNA, 15 bp, Homo sapiens
gataaacgtaatact

SEQ ID NO: 7512 - DNA, 15 bp, Homo sapiens
agataaacgtaatac

SEQ ID NO: 7513 - DNA, 15 bp, Homo sapiens
tagataaacgtaata

SEQ ID NO: 7514 - DNA, 15 bp, Homo sapiens
atagataaacgtaat

SEQ ID NO: 7515 - DNA, 15 bp, Homo sapiens
tatagataaacgtaa

SEQ ID NO: 7516 - DNA, 15 bp, Homo sapiens
gtatagataaacgta

SEQ ID NO: 7517 - DNA, 15 bp, Homo sapiens
agtatagataaacgt

SEQ ID NO: 7518 - DNA, 15 bp, Homo sapiens
aagtatagataaacg

SEQ ID NO: 7519 - DNA, 15 bp, Homo sapiens
aaagtatagataaac

SEQ ID NO: 7520 - DNA, 15 bp, Homo sapiens
aaaagtatagataaa

SEQ ID NO: 7521 - DNA, 15 bp, Homo sapiens
taaaagtatagataa

SEQ ID NO: 7522 - DNA, 15 bp, Homo sapiens
ttaaaagtatagata

SEQ ID NO: 7523 - DNA, 15 bp, Homo sapiens
cttaaaagtatagat

SEQ ID NO: 7524 - DNA, 15 bp, Homo sapiens
gcttaaaagtataga

SEQ ID NO: 7525 - DNA, 15 bp, Homo sapiens
tgcttaaaagtatag

SEQ ID NO: 7526 - DNA, 15 bp, Homo sapiens
atgcttaaaagtata

SEQ ID NO: 7527 - DNA, 15 bp, Homo sapiens
tatgcttaaaagtat

SEQ ID NO: 7528 - DNA, 15 bp, Homo sapiens
atatgcttaaaagta

SEQ ID NO: 7529 - DNA, 15 bp, Homo sapiens
tatatgcttaaaagt

SEQ ID NO: 7530 - DNA, 15 bp, Homo sapiens
atatatgcttaaaag

SEQ ID NO: 7531 - DNA, 15 bp, Homo sapiens
tatatatgcttaaaa

SEQ ID NO: 7532 - DNA, 15 bp, Homo sapiens
gtatatatgcttaaa

SEQ ID NO: 7533 - DNA, 15 bp, Homo sapiens
tgtatatatgcttaa

SEQ ID NO: 7534 - DNA, 15 bp, Homo sapiens
atgtatatatgctta

SEQ ID NO: 7535 - DNA, 15 bp, Homo sapiens
aatgtatatatgctt

SEQ ID NO: 7536 - DNA, 15 bp, Homo sapiens
caatgtatatatgct

SEQ ID NO: 7537 - DNA, 15 bp, Homo sapiens
acaatgtatatatgc

SEQ ID NO: 7538 - DNA, 15 bp, Homo sapiens
aacaatgtatatatg

SEQ ID NO: 7539 - DNA, 15 bp, Homo sapiens
aaacaatgtatatat

SEQ ID NO: 7540 - DNA, 15 bp, Homo sapiens
gaaacaatgtatata

SEQ ID NO: 7541 - DNA, 15 bp, Homo sapiens
tgaaacaatgtatat

SEQ ID NO: 7542 - DNA, 15 bp, Homo sapiens
atgaaacaatgtata

SEQ ID NO: 7543 - DNA, 15 bp, Homo sapiens
aatgaaacaatgtat

SEQ ID NO: 7544 - DNA, 15 bp, Homo sapiens
aaatgaaacaatgta

SEQ ID NO: 7545 - DNA, 15 bp, Homo sapiens
aaaatgaaacaatgt

SEQ ID NO: 7546 - DNA, 15 bp, Homo sapiens
taaaatgaaacaatg

SEQ ID NO: 7547 - DNA, 15 bp, Homo sapiens
ctaaaatgaaacaat

SEQ ID NO: 7548 - DNA, 15 bp, Homo sapiens
tctaaaatgaaacaa

SEQ ID NO: 7549 - DNA, 15 bp, Homo sapiens
atctaaaatgaaaca

SEQ ID NO: 7550 - DNA, 15 bp, Homo sapiens
aatctaaaatgaaac

SEQ ID NO: 7551 - DNA, 15 bp, Homo sapiens
aaatctaaaatgaaa

SEQ ID NO: 7552 - DNA, 15 bp, Homo sapiens
aaaatctaaaatgaa

SEQ ID NO: 7553 - DNA, 15 bp, Homo sapiens
taaaatctaaaatga

SEQ ID NO: 7554 - DNA, 15 bp, Homo sapiens
ctaaaatctaaaatg

SEQ ID NO: 7555 - DNA, 15 bp, Homo sapiens
cctaaaatctaaaat

SEQ ID NO: 7556 - DNA, 15 bp, Homo sapiens
ccctaaaatctaaaa

SEQ ID NO: 7557 - DNA, 15 bp, Homo sapiens
tccctaaaatctaaa

SEQ ID NO: 7558 - DNA, 15 bp, Homo sapiens
ctccctaaaatctaa

SEQ ID NO: 7559 - DNA, 15 bp, Homo sapiens
cctccctaaaatcta

SEQ ID NO: 7560 - DNA, 15 bp, Homo sapiens
gcctccctaaaatct

SEQ ID NO: 7561 - DNA, 15 bp, Homo sapiens
tgcctccctaaaatc

SEQ ID NO: 7562 - DNA, 15 bp, Homo sapiens
ctgcctccctaaaat

SEQ ID NO: 7563 - DNA, 15 bp, Homo sapiens
actgcctccctaaaa

SEQ ID NO: 7564 - DNA, 15 bp, Homo sapiens
cactgcctccctaaa

SEQ ID NO: 7565 - DNA, 15 bp, Homo sapiens
acactgcctccctaa

SEQ ID NO: 7566 - DNA, 15 bp, Homo sapiens
cacactgcctcccta

SEQ ID NO: 7567 - DNA, 15 bp, Homo sapiens
ccacactgcctccct

SEQ ID NO: 7568 - DNA, 15 bp, Homo sapiens
cccacactgcctccc

SEQ ID NO: 7569 - DNA, 15 bp, Homo sapiens
gcccacactgcctcc

SEQ ID NO: 7570 - DNA, 15 bp, Homo sapiens
agcccacactgcctc

SEQ ID NO: 7571 - DNA, 15 bp, Homo sapiens
gagcccacactgcct

SEQ ID NO: 7572 - DNA, 15 bp, Homo sapiens
agagcccacactgcc

SEQ ID NO: 7573 - DNA, 15 bp, Homo sapiens
cagagcccacactgc

SEQ ID NO: 7574 - DNA, 15 bp, Homo sapiens
ccagagcccacactg

SEQ ID NO: 7575 - DNA, 15 bp, Homo sapiens
tccagagcccacact

SEQ ID NO: 7576 - DNA, 15 bp, Homo sapiens
ctccagagcccacac

SEQ ID NO: 7577 - DNA, 15 bp, Homo sapiens
gctccagagcccaca

SEQ ID NO: 7578 - DNA, 15 bp, Homo sapiens
ggctccagagcccac

SEQ ID NO: 7579 - DNA, 15 bp, Homo sapiens
tggctccagagccca

SEQ ID NO: 7580 - DNA, 15 bp, Homo sapiens
ctggctccagagccc

SEQ ID NO: 7581 - DNA, 15 bp, Homo sapiens
tctggctccagagcc

SEQ ID NO: 7582 - DNA, 15 bp, Homo sapiens
gtctggctccagagc

SEQ ID NO: 7583 - DNA, 15 bp, Homo sapiens
agtctggctccagag

SEQ ID NO: 7584 - DNA, 15 bp, Homo sapiens
cagtctggctccaga

SEQ ID NO: 7585 - DNA, 15 bp, Homo sapiens
gcagtctggctccag

SEQ ID NO: 7586 - DNA, 15 bp, Homo sapiens
agcagtctggctcca

SEQ ID NO: 7587 - DNA, 15 bp, Homo sapiens
aagcagtctggctcc

SEQ ID NO: 7588 - DNA, 15 bp, Homo sapiens
caagcagtctggctc

SEQ ID NO: 7589 - DNA, 15 bp, Homo sapiens
acaagcagtctggct

SEQ ID NO: 7590 - DNA, 15 bp, Homo sapiens
aacaagcagtctggc

SEQ ID NO: 7591 - DNA, 15 bp, Homo sapiens
aaacaagcagtctgg

SEQ ID NO: 7592 - DNA, 15 bp, Homo sapiens
aaaacaagcagtctg

SEQ ID NO: 7593 - DNA, 15 bp, Homo sapiens
caaaacaagcagtct

SEQ ID NO: 7594 - DNA, 15 bp, Homo sapiens
acaaaacaagcagtc

SEQ ID NO: 7595 - DNA, 15 bp, Homo sapiens
tacaaaacaagcagt

SEQ ID NO: 7596 - DNA, 15 bp, Homo sapiens
ttacaaaacaagcag

SEQ ID NO: 7597 - DNA, 15 bp, Homo sapiens
attacaaaacaagca

SEQ ID NO: 7598 - DNA, 15 bp, Homo sapiens
gattacaaaacaagc

SEQ ID NO: 7599 - DNA, 15 bp, Homo sapiens
ggattacaaaacaag

SEQ ID NO: 7600 - DNA, 15 bp, Homo sapiens
aggattacaaaacaa

SEQ ID NO: 7601 - DNA, 15 bp, Homo sapiens
caggattacaaaaca

SEQ ID NO: 7602 - DNA, 15 bp, Homo sapiens
ccaggattacaaaac

SEQ ID NO: 7603 - DNA, 15 bp, Homo sapiens
tccaggattacaaaa

SEQ ID NO: 7604 - DNA, 15 bp, Homo sapiens
atccaggattacaaa

SEQ ID NO: 7605 - DNA, 15 bp, Homo sapiens
gatccaggattacaa

SEQ ID NO: 7606 - DNA, 15 bp, Homo sapiens
agatccaggattaca

SEQ ID NO: 7607 - DNA, 15 bp, Homo sapiens
aagatccaggattac

SEQ ID NO: 7608 - DNA, 15 bp, Homo sapiens
gaagatccaggatta

SEQ ID NO: 7609 - DNA, 15 bp, Homo sapiens
ggaagatccaggatt

SEQ ID NO: 7610 - DNA, 15 bp, Homo sapiens
tggaagatccaggat

SEQ ID NO: 7611 - DNA, 15 bp, Homo sapiens
atggaagatccagga

SEQ ID NO: 7612 - DNA, 15 bp, Homo sapiens
aatggaagatccagg

SEQ ID NO: 7613 - DNA, 15 bp, Homo sapiens
aaatggaagatccag

SEQ ID NO: 7614 - DNA, 15 bp, Homo sapiens
taaatggaagatcca

SEQ ID NO: 7615 - DNA, 15 bp, Homo sapiens
ctaaatggaagatcc

SEQ ID NO: 7616 - DNA, 15 bp, Homo sapiens
actaaatggaagatc

SEQ ID NO: 7617 - DNA, 15 bp, Homo sapiens
tactaaatggaagat

SEQ ID NO: 7618 - DNA, 15 bp, Homo sapiens
ctactaaatggaaga

SEQ ID NO: 7619 - DNA, 15 bp, Homo sapiens
gctactaaatggaag

SEQ ID NO: 7620 - DNA, 15 bp, Homo sapiens
agctactaaatggaa

SEQ ID NO: 7621 - DNA, 15 bp, Homo sapiens
cagctactaaatgga

SEQ ID NO: 7622 - DNA, 15 bp, Homo sapiens
ccagctactaaatgg

SEQ ID NO: 7623 - DNA, 15 bp, Homo sapiens
tccagctactaaatg

SEQ ID NO: 7624 - DNA, 15 bp, Homo sapiens
atccagctactaaat

SEQ ID NO: 7625 - DNA, 15 bp, Homo sapiens
catccagctactaaa

SEQ ID NO: 7626 - DNA, 15 bp, Homo sapiens
tcatccagctactaa

SEQ ID NO: 7627 - DNA, 15 bp, Homo sapiens
gtcatccagctacta

SEQ ID NO: 7628 - DNA, 15 bp, Homo sapiens
agtcatccagctact

SEQ ID NO: 7629 - DNA, 15 bp, Homo sapiens
aagtcatccagctac

SEQ ID NO: 7630 - DNA, 15 bp, Homo sapiens
aaagtcatccagcta

SEQ ID NO: 7631 - DNA, 15 bp, Homo sapiens
caaagtcatccagct

SEQ ID NO: 7632 - DNA, 15 bp, Homo sapiens
tcaaagtcatccagc

SEQ ID NO: 7633 - DNA, 15 bp, Homo sapiens
ctcaaagtcatccag

SEQ ID NO: 7634 - DNA, 15 bp, Homo sapiens
actcaaagtcatcca

SEQ ID NO: 7635 - DNA, 15 bp, Homo sapiens
tactcaaagtcatcc

SEQ ID NO: 7636 - DNA, 15 bp, Homo sapiens
ctactcaaagtcatc

SEQ ID NO: 7637 - DNA, 15 bp, Homo sapiens
cctactcaaagtcat

SEQ ID NO: 7638 - DNA, 15 bp, Homo sapiens
acctactcaaagtca

SEQ ID NO: 7639 - DNA, 15 bp, Homo sapiens
aacctactcaaagtc

SEQ ID NO: 7640 - DNA, 15 bp, Homo sapiens
taacctactcaaagt

SEQ ID NO: 7641 - DNA, 15 bp, Homo sapiens
ataacctactcaaag

SEQ ID NO: 7642 - DNA, 15 bp, Homo sapiens
aataacctactcaaa

SEQ ID NO: 7643 - DNA, 15 bp, Homo sapiens
aaataacctactcaa

SEQ ID NO: 7644 - DNA, 15 bp, Homo sapiens
taaataacctactca

SEQ ID NO: 7645 - DNA, 15 bp, Homo sapiens
ctaaataacctactc

SEQ ID NO: 7646 - DNA, 15 bp, Homo sapiens
tctaaataacctact

SEQ ID NO: 7647 - DNA, 15 bp, Homo sapiens
atctaaataacctac

SEQ ID NO: 7648 - DNA, 15 bp, Homo sapiens
aatctaaataaccta

SEQ ID NO: 7649 - DNA, 15 bp, Homo sapiens
aaatctaaataacct

SEQ ID NO: 7650 - DNA, 15 bp, Homo sapiens
aaaatctaaataacc

SEQ ID NO: 7651 - DNA, 15 bp, Homo sapiens
gaaaatctaaataac

SEQ ID NO: 7652 - DNA, 15 bp, Homo sapiens
agaaaatctaaataa

SEQ ID NO: 7653 - DNA, 15 bp, Homo sapiens
gagaaaatctaaata

SEQ ID NO: 7654 - DNA, 15 bp, Homo sapiens
tgagaaaatctaaat

SEQ ID NO: 7655 - DNA, 15 bp, Homo sapiens
ttgagaaaatctaaa

SEQ ID NO: 7656 - DNA, 15 bp, Homo sapiens
attgagaaaatctaa

SEQ ID NO: 7657 - DNA, 15 bp, Homo sapiens
gattgagaaaatcta

SEQ ID NO: 7658 - DNA, 15 bp, Homo sapiens
agattgagaaaatct

SEQ ID NO: 7659 - DNA, 15 bp, Homo sapiens
tagattgagaaaatc

SEQ ID NO: 7660 - DNA, 15 bp, Homo sapiens
atagattgagaaaat

SEQ ID NO: 7661 - DNA, 15 bp, Homo sapiens
aatagattgagaaaa

SEQ ID NO: 7662 - DNA, 15 bp, Homo sapiens
aaatagattgagaaa

SEQ ID NO: 7663 - DNA, 15 bp, Homo sapiens
aaaatagattgagaa

SEQ ID NO: 7664 - DNA, 15 bp, Homo sapiens
taaaatagattgaga

SEQ ID NO: 7665 - DNA, 15 bp, Homo sapiens
ataaaatagattgag

SEQ ID NO: 7666 - DNA, 15 bp, Homo sapiens
gataaaatagattga

SEQ ID NO: 7667 - DNA, 15 bp, Homo sapiens
agataaaatagattg

SEQ ID NO: 7668 - DNA, 15 bp, Homo sapiens
cagataaaatagatt

SEQ ID NO: 7669 - DNA, 15 bp, Homo sapiens
acagataaaatagat

SEQ ID NO: 7670 - DNA, 15 bp, Homo sapiens
tacagataaaataga

SEQ ID NO: 7671 - DNA, 15 bp, Homo sapiens
ttacagataaaatag

SEQ ID NO: 7672 - DNA, 15 bp, Homo sapiens
tttacagataaaata

SEQ ID NO: 7673 - DNA, 15 bp, Homo sapiens
ttttacagataaaat

SEQ ID NO: 7674 - DNA, 15 bp, Homo sapiens
attttacagataaaa

SEQ ID NO: 7675 - DNA, 15 bp, Homo sapiens
cattttacagataaa

SEQ ID NO: 7676 - DNA, 15 bp, Homo sapiens
ccattttacagataa

SEQ ID NO: 7677 - DNA, 15 bp, Homo sapiens
cccattttacagata

SEQ ID NO: 7678 - DNA, 15 bp, Homo sapiens
ccccattttacagat

SEQ ID NO: 7679 - DNA, 15 bp, Homo sapiens
tccccattttacaga

SEQ ID NO: 7680 - DNA, 15 bp, Homo sapiens
atccccattttacag

SEQ ID NO: 7681 - DNA, 15 bp, Homo sapiens
catccccattttaca

SEQ ID NO: 7682 - DNA, 15 bp, Homo sapiens
tcatccccattttac

SEQ ID NO: 7683 - DNA, 15 bp, Homo sapiens
atcatccccatttta

SEQ ID NO: 7684 - DNA, 15 bp, Homo sapiens
tatcatccccatttt

SEQ ID NO: 7685 - DNA, 15 bp, Homo sapiens
ttatcatccccattt

SEQ ID NO: 7686 - DNA, 15 bp, Homo sapiens
attatcatccccatt

SEQ ID NO: 7687 - DNA, 15 bp, Homo sapiens
cattatcatccccat

SEQ ID NO: 7688 - DNA, 15 bp, Homo sapiens
ccattatcatcccca

SEQ ID NO: 7689 - DNA, 15 bp, Homo sapiens
tccattatcatcccc

SEQ ID NO: 7690 - DNA, 15 bp, Homo sapiens
ttccattatcatccc

SEQ ID NO: 7691 - DNA, 15 bp, Homo sapiens
gttccattatcatcc

SEQ ID NO: 7692 - DNA, 15 bp, Homo sapiens
ggttccattatcatc

SEQ ID NO: 7693 - DNA, 15 bp, Homo sapiens
aggttccattatcat

SEQ ID NO: 7694 - DNA, 15 bp, Homo sapiens
taggttccattatca

SEQ ID NO: 7695 - DNA, 15 bp, Homo sapiens
gtaggttccattatc

SEQ ID NO: 7696 - DNA, 15 bp, Homo sapiens
ggtaggttccattat

SEQ ID NO: 7697 - DNA, 15 bp, Homo sapiens
cggtaggttccatta

SEQ ID NO: 7698 - DNA, 15 bp, Homo sapiens
gcggtaggttccatt

SEQ ID NO: 7699 - DNA, 15 bp, Homo sapiens
tgcggtaggttccat

SEQ ID NO: 7700 - DNA, 15 bp, Homo sapiens
atgcggtaggttcca

SEQ ID NO: 7701 - DNA, 15 bp, Homo sapiens
tatgcggtaggttcc

SEQ ID NO: 7702 - DNA, 15 bp, Homo sapiens
gtatgcggtaggttc

SEQ ID NO: 7703 - DNA, 15 bp, Homo sapiens
cgtatgcggtaggtt

SEQ ID NO: 7704 - DNA, 15 bp, Homo sapiens
acgtatgcggtaggt

SEQ ID NO: 7705 - DNA, 15 bp, Homo sapiens
aacgtatgcggtagg

SEQ ID NO: 7706 - DNA, 15 bp, Homo sapiens
aaacgtatgcggtag

SEQ ID NO: 7707 - DNA, 15 bp, Homo sapiens
taaacgtatgcggta

SEQ ID NO: 7708 - DNA, 15 bp, Homo sapiens
ataaacgtatgcggt

SEQ ID NO: 7709 - DNA, 15 bp, Homo sapiens
gataaacgtatgcgg

SEQ ID NO: 7710 - DNA, 15 bp, Homo sapiens
agataaacgtatgcg

SEQ ID NO: 7711 - DNA, 15 bp, Homo sapiens
aagataaacgtatgc

SEQ ID NO: 7712 - DNA, 15 bp, Homo sapiens
caagataaacgtatg

SEQ ID NO: 7713 - DNA, 15 bp, Homo sapiens
tcaagataaacgtat

SEQ ID NO: 7714 - DNA, 15 bp, Homo sapiens
ttcaagataaacgta

SEQ ID NO: 7715 - DNA, 15 bp, Homo sapiens
attcaagataaacgt

SEQ ID NO: 7716 - DNA, 15 bp, Homo sapiens
tattcaagataaacg

SEQ ID NO: 7717 - DNA, 15 bp, Homo sapiens
ctattcaagataaac

SEQ ID NO: 7718 - DNA, 15 bp, Homo sapiens
actattcaagataaa

SEQ ID NO: 7719 - DNA, 15 bp, Homo sapiens
tactattcaagataa

SEQ ID NO: 7720 - DNA, 15 bp, Homo sapiens
ttactattcaagata

SEQ ID NO: 7721 - DNA, 15 bp, Homo sapiens
cttactattcaagat

SEQ ID NO: 7722 - DNA, 15 bp, Homo sapiens
acttactattcaaga

SEQ ID NO: 7723 - DNA, 15 bp, Homo sapiens
cacttactattcaag

SEQ ID NO: 7724 - DNA, 15 bp, Homo sapiens
tcacttactattcaa

SEQ ID NO: 7725 - DNA, 15 bp, Homo sapiens
ctcacttactattca

SEQ ID NO: 7726 - DNA, 15 bp, Homo sapiens
tctcacttactattc

SEQ ID NO: 7727 - DNA, 15 bp, Homo sapiens
atctcacttactatt

SEQ ID NO: 7728 - DNA, 15 bp, Homo sapiens
tatctcacttactat

SEQ ID NO: 7729 - DNA, 15 bp, Homo sapiens
ttatctcacttacta

SEQ ID NO: 7730 - DNA, 15 bp, Homo sapiens
attatctcacttact

SEQ ID NO: 7731 - DNA, 15 bp, Homo sapiens
tattatctcacttac

SEQ ID NO: 7732 - DNA, 15 bp, Homo sapiens
ttattatctcactta

SEQ ID NO: 7733 - DNA, 15 bp, Homo sapiens
attattatctcactt

SEQ ID NO: 7734 - DNA, 15 bp, Homo sapiens
tattattatctcact

SEQ ID NO: 7735 - DNA, 15 bp, Homo sapiens
ttattattatctcac

SEQ ID NO: 7736 - DNA, 15 bp, Homo sapiens
cttattattatctca

SEQ ID NO: 7737 - DNA, 15 bp, Homo sapiens
acttattattatctc

SEQ ID NO: 7738 - DNA, 15 bp, Homo sapiens
tacttattattatct

SEQ ID NO: 7739 - DNA, 15 bp, Homo sapiens
ttacttattattatc

SEQ ID NO: 7740 - DNA, 15 bp, Homo sapiens
attacttattattat

SEQ ID NO: 7741 - DNA, 15 bp, Homo sapiens
aattacttattatta

SEQ ID NO: 7742 - DNA, 15 bp, Homo sapiens
aaattacttattatt

SEQ ID NO: 7743 - DNA, 15 bp, Homo sapiens
gaaattacttattat

SEQ ID NO: 7744 - DNA, 15 bp, Homo sapiens
tgaaattacttatta

SEQ ID NO: 7745 - DNA, 15 bp, Homo sapiens
atgaaattacttatt

SEQ ID NO: 7746 - DNA, 15 bp, Homo sapiens
aatgaaattacttat

SEQ ID NO: 7747 - DNA, 15 bp, Homo sapiens
aaatgaaattactta

SEQ ID NO: 7748 - DNA, 15 bp, Homo sapiens
taaatgaaattactt

SEQ ID NO: 7749 - DNA, 15 bp, Homo sapiens
ctaaatgaaattact

SEQ ID NO: 7750 - DNA, 15 bp, Homo sapiens
gctaaatgaaattac

SEQ ID NO: 7751 - DNA, 15 bp, Homo sapiens
tgctaaatgaaatta

SEQ ID NO: 7752 - DNA, 15 bp, Homo sapiens
atgctaaatgaaatt

SEQ ID NO: 7753 - DNA, 15 bp, Homo sapiens
tatgctaaatgaaat

SEQ ID NO: 7754 - DNA, 15 bp, Homo sapiens
ctatgctaaatgaaa

SEQ ID NO: 7755 - DNA, 15 bp, Homo sapiens
actatgctaaatgaa

SEQ ID NO: 7756 - DNA, 15 bp, Homo sapiens
tactatgctaaatga

SEQ ID NO: 7757 - DNA, 15 bp, Homo sapiens
gtactatgctaaatg

SEQ ID NO: 7758 - DNA, 15 bp, Homo sapiens
ggtactatgctaaat

SEQ ID NO: 7759 - DNA, 15 bp, Homo sapiens
aggtactatgctaaa

SEQ ID NO: 7760 - DNA, 15 bp, Homo sapiens
caggtactatgctaa

SEQ ID NO: 7761 - DNA, 15 bp, Homo sapiens
gcaggtactatgcta

SEQ ID NO: 7762 - DNA, 15 bp, Homo sapiens
ggcaggtactatgct

SEQ ID NO: 7763 - DNA, 15 bp, Homo sapiens
tggcaggtactatgc

SEQ ID NO: 7764 - DNA, 15 bp, Homo sapiens
gtggcaggtactatg

SEQ ID NO: 7765 - DNA, 15 bp, Homo sapiens
tgtggcaggtactat

SEQ ID NO: 7766 - DNA, 15 bp, Homo sapiens
atgtggcaggtacta

SEQ ID NO: 7767 - DNA, 15 bp, Homo sapiens
aatgtggcaggtact

SEQ ID NO: 7768 - DNA, 15 bp, Homo sapiens
caatgtggcaggtac

SEQ ID NO: 7769 - DNA, 15 bp, Homo sapiens
acaatgtggcaggta

SEQ ID NO: 7770 - DNA, 15 bp, Homo sapiens
tacaatgtggcaggt

SEQ ID NO: 7771 - DNA, 15 bp, Homo sapiens
ttacaatgtggcagg

SEQ ID NO: 7772 - DNA, 15 bp, Homo sapiens
tttacaatgtggcag

SEQ ID NO: 7773 - DNA, 15 bp, Homo sapiens
atttacaatgtggca

SEQ ID NO: 7774 - DNA, 15 bp, Homo sapiens
tatttacaatgtggc

SEQ ID NO: 7775 - DNA, 15 bp, Homo sapiens
gtatttacaatgtgg

SEQ ID NO: 7776 - DNA, 15 bp, Homo sapiens
agtatttacaatgtg

SEQ ID NO: 7777 - DNA, 15 bp, Homo sapiens
aagtatttacaatgt

SEQ ID NO: 7778 - DNA, 15 bp, Homo sapiens
taagtatttacaatg

SEQ ID NO: 7779 - DNA, 15 bp, Homo sapiens
ttaagtatttacaat

SEQ ID NO: 7780 - DNA, 15 bp, Homo sapiens
tttaagtatttacaa

SEQ ID NO: 7781 - DNA, 15 bp, Homo sapiens
atttaagtatttaca

SEQ ID NO: 7782 - DNA, 15 bp, Homo sapiens
catttaagtatttac

SEQ ID NO: 7783 - DNA, 15 bp, Homo sapiens
ccatttaagtattta

SEQ ID NO: 7784 - DNA, 15 bp, Homo sapiens
accatttaagtattt

SEQ ID NO: 7785 - DNA, 15 bp, Homo sapiens
taccatttaagtatt

SEQ ID NO: 7786 - DNA, 15 bp, Homo sapiens
ctaccatttaagtat

SEQ ID NO: 7787 - DNA, 15 bp, Homo sapiens
gctaccatttaagta

SEQ ID NO: 7788 - DNA, 15 bp, Homo sapiens
agctaccatttaagt

SEQ ID NO: 7789 - DNA, 15 bp, Homo sapiens
tagctaccatttaag

SEQ ID NO: 7790 - DNA, 15 bp, Homo sapiens
gtagctaccatttaa

SEQ ID NO: 7791 - DNA, 15 bp, Homo sapiens
agtagctaccattta

SEQ ID NO: 7792 - DNA, 15 bp, Homo sapiens
cagtagctaccattt

SEQ ID NO: 7793 - DNA, 15 bp, Homo sapiens
gcagtagctaccatt

SEQ ID NO: 7794 - DNA, 15 bp, Homo sapiens
agcagtagctaccat

SEQ ID NO: 7795 - DNA, 15 bp, Homo sapiens
gagcagtagctacca

SEQ ID NO: 7796 - DNA, 15 bp, Homo sapiens
agagcagtagctacc

SEQ ID NO: 7797 - DNA, 15 bp, Homo sapiens
cagagcagtagctac

SEQ ID NO: 7798 - DNA, 15 bp, Homo sapiens
tcagagcagtagcta

SEQ ID NO: 7799 - DNA, 15 bp, Homo sapiens
ttcagagcagtagct

SEQ ID NO: 7800 - DNA, 15 bp, Homo sapiens
tttcagagcagtagc

SEQ ID NO: 7801 - DNA, 15 bp, Homo sapiens
ttttcagagcagtag

SEQ ID NO: 7802 - DNA, 15 bp, Homo sapiens
tttttcagagcagta

SEQ ID NO: 7803 - DNA, 15 bp, Homo sapiens
gtttttcagagcagt

SEQ ID NO: 7804 - DNA, 15 bp, Homo sapiens
agtttttcagagcag

SEQ ID NO: 7805 - DNA, 15 bp, Homo sapiens
cagtttttcagagca

SEQ ID NO: 7806 - DNA, 15 bp, Homo sapiens
acagtttttcagagc

SEQ ID NO: 7807 - DNA, 15 bp, Homo sapiens
tacagtttttcagag

SEQ ID NO: 7808 - DNA, 15 bp, Homo sapiens
ttacagtttttcaga

SEQ ID NO: 7809 - DNA, 15 bp, Homo sapiens
attacagtttttcag

SEQ ID NO: 7810 - DNA, 15 bp, Homo sapiens
aattacagtttttca

SEQ ID NO: 7811 - DNA, 15 bp, Homo sapiens
aaattacagtttttc

SEQ ID NO: 7812 - DNA, 15 bp, Homo sapiens
gaaattacagttttt

SEQ ID NO: 7813 - DNA, 15 bp, Homo sapiens
tgaaattacagtttt

SEQ ID NO: 7814 - DNA, 15 bp, Homo sapiens
ctgaaattacagttt

SEQ ID NO: 7815 - DNA, 15 bp, Homo sapiens
cctgaaattacagtt

SEQ ID NO: 7816 - DNA, 15 bp, Homo sapiens
acctgaaattacagt

SEQ ID NO: 7817 - DNA, 15 bp, Homo sapiens
aacctgaaattacag

SEQ ID NO: 7818 - DNA, 15 bp, Homo sapiens
taacctgaaattaca

SEQ ID NO: 7819 - DNA, 15 bp, Homo sapiens
ataacctgaaattac

SEQ ID NO: 7820 - DNA, 15 bp, Homo sapiens
cataacctgaaatta

SEQ ID NO: 7821 - DNA, 15 bp, Homo sapiens
acataacctgaaatt

SEQ ID NO: 7822 - DNA, 15 bp, Homo sapiens
tacataacctgaaat

SEQ ID NO: 7823 - DNA, 15 bp, Homo sapiens
atacataacctgaaa

SEQ ID NO: 7824 - DNA, 15 bp, Homo sapiens
catacataacctgaa

SEQ ID NO: 7825 - DNA, 15 bp, Homo sapiens
acatacataacctga

SEQ ID NO: 7826 - DNA, 15 bp, Homo sapiens
tacatacataacctg

SEQ ID NO: 7827 - DNA, 15 bp, Homo sapiens
ctacatacataacct

SEQ ID NO: 7828 - DNA, 15 bp, Homo sapiens
cctacatacataacc

SEQ ID NO: 7829 - DNA, 15 bp, Homo sapiens
ccctacatacataac

SEQ ID NO: 7830 - DNA, 15 bp, Homo sapiens
tccctacatacataa

SEQ ID NO: 7831 - DNA, 15 bp, Homo sapiens
ttccctacatacata

SEQ ID NO: 7832 - DNA, 15 bp, Homo sapiens
tttccctacatacat

SEQ ID NO: 7833 - DNA, 15 bp, Homo sapiens
atttccctacataca

SEQ ID NO: 7834 - DNA, 15 bp, Homo sapiens
aatttccctacatac

SEQ ID NO: 7835 - DNA, 15 bp, Homo sapiens
taatttccctacata

SEQ ID NO: 7836 - DNA, 15 bp, Homo sapiens
ataatttccctacat

SEQ ID NO: 7837 - DNA, 15 bp, Homo sapiens
aataatttccctaca

SEQ ID NO: 7838 - DNA, 15 bp, Homo sapiens
aaataatttccctac

SEQ ID NO: 7839 - DNA, 15 bp, Homo sapiens
caaataatttcccta

SEQ ID NO: 7840 - DNA, 15 bp, Homo sapiens
acaaataatttccct

SEQ ID NO: 7841 - DNA, 15 bp, Homo sapiens
tacaaataatttccc

SEQ ID NO: 7842 - DNA, 15 bp, Homo sapiens
atacaaataatttcc

SEQ ID NO: 7843 - DNA, 15 bp, Homo sapiens
aatacaaataatttc

SEQ ID NO: 7844 - DNA, 15 bp, Homo sapiens
aaatacaaataattt

SEQ ID NO: 7845 - DNA, 15 bp, Homo sapiens
aaaatacaaataatt

SEQ ID NO: 7846 - DNA, 15 bp, Homo sapiens
gaaaatacaaataat

SEQ ID NO: 7847 - DNA, 15 bp, Homo sapiens
tgaaaatacaaataa

SEQ ID NO: 7848 - DNA, 15 bp, Homo sapiens
atgaaaatacaaata

SEQ ID NO: 7849 - DNA, 15 bp, Homo sapiens
aatgaaaatacaaat

SEQ ID NO: 7850 - DNA, 15 bp, Homo sapiens
aaatgaaaatacaaa

SEQ ID NO: 7851 - DNA, 15 bp, Homo sapiens
taaatgaaaatacaa

SEQ ID NO: 7852 - DNA, 15 bp, Homo sapiens
ataaatgaaaataca

SEQ ID NO: 7853 - DNA, 15 bp, Homo sapiens
cataaatgaaaatac

SEQ ID NO: 7854 - DNA, 15 bp, Homo sapiens
ccataaatgaaaata

SEQ ID NO: 7855 - DNA, 15 bp, Homo sapiens
accataaatgaaaat

SEQ ID NO: 7856 - DNA, 15 bp, Homo sapiens
caccataaatgaaaa

SEQ ID NO: 7857 - DNA, 15 bp, Homo sapiens
acaccataaatgaaa

SEQ ID NO: 7858 - DNA, 15 bp, Homo sapiens
tacaccataaatgaa

SEQ ID NO: 7859 - DNA, 15 bp, Homo sapiens
atacaccataaatga

SEQ ID NO: 7860 - DNA, 15 bp, Homo sapiens
catacaccataaatg

SEQ ID NO: 7861 - DNA, 15 bp, Homo sapiens
tcatacaccataaat

SEQ ID NO: 7862 - DNA, 15 bp, Homo sapiens
atcatacaccataaa

SEQ ID NO: 7863 - DNA, 15 bp, Homo sapiens
aatcatacaccataa

SEQ ID NO: 7864 - DNA, 15 bp, Homo sapiens
caatcatacaccata

SEQ ID NO: 7865 - DNA, 15 bp, Homo sapiens
acaatcatacaccat

SEQ ID NO: 7866 - DNA, 15 bp, Homo sapiens
tacaatcatacacca

SEQ ID NO: 7867 - DNA, 15 bp, Homo sapiens
ttacaatcatacacc

SEQ ID NO: 7868 - DNA, 15 bp, Homo sapiens
gttacaatcatacac

SEQ ID NO: 7869 - DNA, 15 bp, Homo sapiens
agttacaatcataca

SEQ ID NO: 7870 - DNA, 15 bp, Homo sapiens
cagttacaatcatac

SEQ ID NO: 7871 - DNA, 15 bp, Homo sapiens
tcagttacaatcata

SEQ ID NO: 7872 - DNA, 15 bp, Homo sapiens
ttcagttacaatcat

SEQ ID NO: 7873 - DNA, 15 bp, Homo sapiens
attcagttacaatca

SEQ ID NO: 7874 - DNA, 15 bp, Homo sapiens
aattcagttacaatc

SEQ ID NO: 7875 - DNA, 15 bp, Homo sapiens
aaattcagttacaat

SEQ ID NO: 7876 - DNA, 15 bp, Homo sapiens
gaaattcagttacaa

SEQ ID NO: 7877 - DNA, 15 bp, Homo sapiens
ggaaattcagttaca

SEQ ID NO: 7878 - DNA, 15 bp, Homo sapiens
aggaaattcagttac

SEQ ID NO: 7879 - DNA, 15 bp, Homo sapiens
gaggaaattcagtta

SEQ ID NO: 7880 - DNA, 15 bp, Homo sapiens
tgaggaaattcagtt

SEQ ID NO: 7881 - DNA, 15 bp, Homo sapiens
ctgaggaaattcagt

SEQ ID NO: 7882 - DNA, 15 bp, Homo sapiens
actgaggaaattcag

SEQ ID NO: 7883 - DNA, 15 bp, Homo sapiens
aactgaggaaattca

SEQ ID NO: 7884 - DNA, 15 bp, Homo sapiens
aaactgaggaaattc

SEQ ID NO: 7885 - DNA, 15 bp, Homo sapiens
caaactgaggaaatt

SEQ ID NO: 7886 - DNA, 15 bp, Homo sapiens
ccaaactgaggaaat

SEQ ID NO: 7887 - DNA, 15 bp, Homo sapiens
cccaaactgaggaaa

SEQ ID NO: 7888 - DNA, 15 bp, Homo sapiens
gcccaaactgaggaa

SEQ ID NO: 7889 - DNA, 15 bp, Homo sapiens
ggcccaaactgagga

SEQ ID NO: 7890 - DNA, 15 bp, Homo sapiens
tggcccaaactgagg

SEQ ID NO: 7891 - DNA, 15 bp, Homo sapiens
atggcccaaactgag

SEQ ID NO: 7892 - DNA, 15 bp, Homo sapiens
catggcccaaactga

SEQ ID NO: 7893 - DNA, 15 bp, Homo sapiens
acatggcccaaactg

SEQ ID NO: 7894 - DNA, 15 bp, Homo sapiens
aacatggcccaaact

SEQ ID NO: 7895 - DNA, 15 bp, Homo sapiens
taacatggcccaaac

SEQ ID NO: 7896 - DNA, 15 bp, Homo sapiens
ctaacatggcccaaa

SEQ ID NO: 7897 - DNA, 15 bp, Homo sapiens
cctaacatggcccaa

SEQ ID NO: 7898 - DNA, 15 bp, Homo sapiens
tcctaacatggccca

SEQ ID NO: 7899 - DNA, 15 bp, Homo sapiens
atcctaacatggccc

SEQ ID NO: 7900 - DNA, 15 bp, Homo sapiens
aatcctaacatggcc

SEQ ID NO: 7901 - DNA, 15 bp, Homo sapiens
aaatcctaacatggc

SEQ ID NO: 7902 - DNA, 15 bp, Homo sapiens
aaaatcctaacatgg

SEQ ID NO: 7903 - DNA, 15 bp, Homo sapiens
caaaatcctaacatg

SEQ ID NO: 7904 - DNA, 15 bp, Homo sapiens
acaaaatcctaacat

SEQ ID NO: 7905 - DNA, 15 bp, Homo sapiens
aacaaaatcctaaca

SEQ ID NO: 7906 - DNA, 15 bp, Homo sapiens
aaacaaaatcctaac

SEQ ID NO: 7907 - DNA, 15 bp, Homo sapiens
gaaacaaaatcctaa

SEQ ID NO: 7908 - DNA, 15 bp, Homo sapiens
tgaaacaaaatccta

SEQ ID NO: 7909 - DNA, 15 bp, Homo sapiens
ttgaaacaaaatcct

SEQ ID NO: 7910 - DNA, 15 bp, Homo sapiens
cttgaaacaaaatcc

SEQ ID NO: 7911 - DNA, 15 bp, Homo sapiens
acttgaaacaaaatc

SEQ ID NO: 7912 - DNA, 15 bp, Homo sapiens
aacttgaaacaaaat

SEQ ID NO: 7913 - DNA, 15 bp, Homo sapiens
taacttgaaacaaaa

SEQ ID NO: 7914 - DNA, 15 bp, Homo sapiens
ataacttgaaacaaa

SEQ ID NO: 7915 - DNA, 15 bp, Homo sapiens
tataacttgaaacaa

SEQ ID NO: 7916 - DNA, 15 bp, Homo sapiens
ttataacttgaaaca

SEQ ID NO: 7917 - DNA, 15 bp, Homo sapiens
cttataacttgaaac

SEQ ID NO: 7918 - DNA, 15 bp, Homo sapiens
acttataacttgaaa

SEQ ID NO: 7919 - DNA, 15 bp, Homo sapiens
cacttataacttgaa

SEQ ID NO: 7920 - DNA, 15 bp, Homo sapiens
acacttataacttga

SEQ ID NO: 7921 - DNA, 15 bp, Homo sapiens
aacacttataacttg

SEQ ID NO: 7922 - DNA, 15 bp, Homo sapiens
aaacacttataactt

SEQ ID NO: 7923 - DNA, 15 bp, Homo sapiens
aaaacacttataact

SEQ ID NO: 7924 - DNA, 15 bp, Homo sapiens
aaaaacacttataac

SEQ ID NO: 7925 - DNA, 15 bp, Homo sapiens
taaaaacacttataa

SEQ ID NO: 7926 - DNA, 15 bp, Homo sapiens
ttaaaaacacttata

SEQ ID NO: 7927 - DNA, 15 bp, Homo sapiens
tttaaaaacacttat

SEQ ID NO: 7928 - DNA, 15 bp, Homo sapiens
ttttaaaaacactta

SEQ ID NO: 7929 - DNA, 15 bp, Homo sapiens
tttttaaaaacactt

SEQ ID NO: 7930 - DNA, 15 bp, Homo sapiens
atttttaaaaacact

SEQ ID NO: 7931 - DNA, 15 bp, Homo sapiens
tatttttaaaaacac

SEQ ID NO: 7932 - DNA, 15 bp, Homo sapiens
ttatttttaaaaaca

SEQ ID NO: 7933 - DNA, 15 bp, Homo sapiens
cttatttttaaaaac

SEQ ID NO: 7934 - DNA, 15 bp, Homo sapiens
ccttatttttaaaaa

SEQ ID NO: 7935 - DNA, 15 bp, Homo sapiens
cccttatttttaaaa

SEQ ID NO: 7936 - DNA, 15 bp, Homo sapiens
acccttatttttaaa

SEQ ID NO: 7937 - DNA, 15 bp, Homo sapiens
tacccttatttttaa

SEQ ID NO: 7938 - DNA, 15 bp, Homo sapiens
atacccttattttta

SEQ ID NO: 7939 - DNA, 15 bp, Homo sapiens
aatacccttattttt

SEQ ID NO: 7940 - DNA, 15 bp, Homo sapiens
gaatacccttatttt

SEQ ID NO: 7941 - DNA, 15 bp, Homo sapiens
ggaatacccttattt

SEQ ID NO: 7942 - DNA, 15 bp, Homo sapiens
aggaatacccttatt

SEQ ID NO: 7943 - DNA, 15 bp, Homo sapiens
aaggaatacccttat

SEQ ID NO: 7944 - DNA, 15 bp, Homo sapiens
aaaggaataccctta

SEQ ID NO: 7945 - DNA, 15 bp, Homo sapiens
taaaggaataccctt

SEQ ID NO: 7946 - DNA, 15 bp, Homo sapiens
ctaaaggaataccct

SEQ ID NO: 7947 - DNA, 15 bp, Homo sapiens
cctaaaggaataccc

SEQ ID NO: 7948 - DNA, 15 bp, Homo sapiens
tcctaaaggaatacc

SEQ ID NO: 7949 - DNA, 15 bp, Homo sapiens
ttcctaaaggaatac

SEQ ID NO: 7950 - DNA, 15 bp, Homo sapiens
cttcctaaaggaata

SEQ ID NO: 7951 - DNA, 15 bp, Homo sapiens
acttcctaaaggaat

SEQ ID NO: 7952 - DNA, 15 bp, Homo sapiens
gacttcctaaaggaa

SEQ ID NO: 7953 - DNA, 15 bp, Homo sapiens
agacttcctaaagga

SEQ ID NO: 7954 - DNA, 15 bp, Homo sapiens
cagacttcctaaagg

SEQ ID NO: 7955 - DNA, 15 bp, Homo sapiens
ccagacttcctaaag

SEQ ID NO: 7956 - DNA, 15 bp, Homo sapiens
cccagacttcctaaa

SEQ ID NO: 7957 - DNA, 15 bp, Homo sapiens
acccagacttcctaa

SEQ ID NO: 7958 - DNA, 15 bp, Homo sapiens
tacccagacttccta

SEQ ID NO: 7959 - DNA, 15 bp, Homo sapiens
atacccagacttcct

SEQ ID NO: 7960 - DNA, 15 bp, Homo sapiens
catacccagacttcc

SEQ ID NO: 7961 - DNA, 15 bp, Homo sapiens
tcatacccagacttc

SEQ ID NO: 7962 - DNA, 15 bp, Homo sapiens
gtcatacccagactt

SEQ ID NO: 7963 - DNA, 15 bp, Homo sapiens
tgtcatacccagact

SEQ ID NO: 7964 - DNA, 15 bp, Homo sapiens
atgtcatacccagac

SEQ ID NO: 7965 - DNA, 15 bp, Homo sapiens
catgtcatacccaga

SEQ ID NO: 7966 - DNA, 15 bp, Homo sapiens
acatgtcatacccag

SEQ ID NO: 7967 - DNA, 15 bp, Homo sapiens
gacatgtcataccca

SEQ ID NO: 7968 - DNA, 15 bp, Homo sapiens
agacatgtcataccc

SEQ ID NO: 7969 - DNA, 15 bp, Homo sapiens
cagacatgtcatacc

SEQ ID NO: 7970 - DNA, 15 bp, Homo sapiens
acagacatgtcatac

SEQ ID NO: 7971 - DNA, 15 bp, Homo sapiens
cacagacatgtcata

SEQ ID NO: 7972 - DNA, 15 bp, Homo sapiens
tcacagacatgtcat

SEQ ID NO: 7973 - DNA, 15 bp, Homo sapiens
atcacagacatgtca

SEQ ID NO: 7974 - DNA, 15 bp, Homo sapiens
aatcacagacatgtc

SEQ ID NO: 7975 - DNA, 15 bp, Homo sapiens
aaatcacagacatgt

SEQ ID NO: 7976 - DNA, 15 bp, Homo sapiens
aaaatcacagacatg

SEQ ID NO: 7977 - DNA, 15 bp, Homo sapiens
caaaatcacagacat

SEQ ID NO: 7978 - DNA, 15 bp, Homo sapiens
gcaaaatcacagaca

SEQ ID NO: 7979 - DNA, 15 bp, Homo sapiens
agcaaaatcacagac

SEQ ID NO: 7980 - DNA, 15 bp, Homo sapiens
cagcaaaatcacaga

SEQ ID NO: 7981 - DNA, 15 bp, Homo sapiens
ccagcaaaatcacag

SEQ ID NO: 7982 - DNA, 15 bp, Homo sapiens
accagcaaaatcaca

SEQ ID NO: 7983 - DNA, 15 bp, Homo sapiens
aaccagcaaaatcac

SEQ ID NO: 7984 - DNA, 15 bp, Homo sapiens
gaaccagcaaaatca

SEQ ID NO: 7985 - DNA, 15 bp, Homo sapiens
tgaaccagcaaaatc

SEQ ID NO: 7986 - DNA, 15 bp, Homo sapiens
atgaaccagcaaaat

SEQ ID NO: 7987 - DNA, 15 bp, Homo sapiens
gatgaaccagcaaaa

SEQ ID NO: 7988 - DNA, 15 bp, Homo sapiens
tgatgaaccagcaaa

SEQ ID NO: 7989 - DNA, 15 bp, Homo sapiens
gtgatgaaccagcaa

SEQ ID NO: 7990 - DNA, 15 bp, Homo sapiens
tgtgatgaaccagca

SEQ ID NO: 7991 - DNA, 15 bp, Homo sapiens
ttgtgatgaaccagc

SEQ ID NO: 7992 - DNA, 15 bp, Homo sapiens
tttgtgatgaaccag

SEQ ID NO: 7993 - DNA, 15 bp, Homo sapiens
atttgtgatgaacca

SEQ ID NO: 7994 - DNA, 15 bp, Homo sapiens
catttgtgatgaacc

SEQ ID NO: 7995 - DNA, 15 bp, Homo sapiens
ccatttgtgatgaac

SEQ ID NO: 7996 - DNA, 15 bp, Homo sapiens
cccatttgtgatgaa

SEQ ID NO: 7997 - DNA, 15 bp, Homo sapiens
tcccatttgtgatga

SEQ ID NO: 7998 - DNA, 15 bp, Homo sapiens
ttcccatttgtgatg

SEQ ID NO: 7999 - DNA, 15 bp, Homo sapiens
tttcccatttgtgat

SEQ ID NO: 8000 - DNA, 15 bp, Homo sapiens
atttcccatttgtga

SEQ ID NO: 8001 - DNA, 15 bp, Homo sapiens
tatttcccatttgtg

SEQ ID NO: 8002 - DNA, 15 bp, Homo sapiens
ttatttcccatttgt

SEQ ID NO: 8003 - DNA, 15 bp, Homo sapiens
tttatttcccatttg

SEQ ID NO: 8004 - DNA, 15 bp, Homo sapiens
atttatttcccattt

SEQ ID NO: 8005 - DNA, 15 bp, Homo sapiens
gatttatttcccatt

SEQ ID NO: 8006 - DNA, 15 bp, Homo sapiens
agatttatttcccat

SEQ ID NO: 8007 - DNA, 15 bp, Homo sapiens
gagatttatttccca

SEQ ID NO: 8008 - DNA, 15 bp, Homo sapiens
agagatttatttccc

SEQ ID NO: 8009 - DNA, 15 bp, Homo sapiens
cagagatttatttcc

SEQ ID NO: 8010 - DNA, 15 bp, Homo sapiens
gcagagatttatttc

SEQ ID NO: 8011 - DNA, 15 bp, Homo sapiens
agcagagatttattt

SEQ ID NO: 8012 - DNA, 15 bp, Homo sapiens
tagcagagatttatt

SEQ ID NO: 8013 - DNA, 15 bp, Homo sapiens
ttagcagagatttat

SEQ ID NO: 8014 - DNA, 15 bp, Homo sapiens
gttagcagagattta

SEQ ID NO: 8015 - DNA, 15 bp, Homo sapiens
agttagcagagattt

SEQ ID NO: 8016 - DNA, 15 bp, Homo sapiens
gagttagcagagatt

SEQ ID NO: 8017 - DNA, 15 bp, Homo sapiens
tgagttagcagagat

SEQ ID NO: 8018 - DNA, 15 bp, Homo sapiens
ttgagttagcagaga

SEQ ID NO: 8019 - DNA, 15 bp, Homo sapiens
tttgagttagcagag

SEQ ID NO: 8020 - DNA, 15 bp, Homo sapiens
gtttgagttagcaga

SEQ ID NO: 8021 - DNA, 15 bp, Homo sapiens
agtttgagttagcag

SEQ ID NO: 8022 - DNA, 15 bp, Homo sapiens
cagtttgagttagca

SEQ ID NO: 8023 - DNA, 15 bp, Homo sapiens
acagtttgagttagc

SEQ ID NO: 8024 - DNA, 15 bp, Homo sapiens
aacagtttgagttag

SEQ ID NO: 8025 - DNA, 15 bp, Homo sapiens
caacagtttgagtta

SEQ ID NO: 8026 - DNA, 15 bp, Homo sapiens
tcaacagtttgagtt

SEQ ID NO: 8027 - DNA, 15 bp, Homo sapiens
gtcaacagtttgagt

SEQ ID NO: 8028 - DNA, 15 bp, Homo sapiens
ggtcaacagtttgag

SEQ ID NO: 8029 - DNA, 15 bp, Homo sapiens
tggtcaacagtttga

SEQ ID NO: 8030 - DNA, 15 bp, Homo sapiens
ttggtcaacagtttg

SEQ ID NO: 8031 - DNA, 15 bp, Homo sapiens
tttggtcaacagttt

SEQ ID NO: 8032 - DNA, 15 bp, Homo sapiens
ctttggtcaacagtt

SEQ ID NO: 8033 - DNA, 15 bp, Homo sapiens
actttggtcaacagt

SEQ ID NO: 8034 - DNA, 15 bp, Homo sapiens
tactttggtcaacag

SEQ ID NO: 8035 - DNA, 15 bp, Homo sapiens
ttactttggtcaaca

SEQ ID NO: 8036 - DNA, 15 bp, Homo sapiens
tttactttggtcaac

SEQ ID NO: 8037 - DNA, 15 bp, Homo sapiens
ttttactttggtcaa

SEQ ID NO: 8038 - DNA, 15 bp, Homo sapiens
attttactttggtca

SEQ ID NO: 8039 - DNA, 15 bp, Homo sapiens
aattttactttggtc

SEQ ID NO: 8040 - DNA, 15 bp, Homo sapiens
taattttactttggt

SEQ ID NO: 8041 - DNA, 15 bp, Homo sapiens
ttaattttactttgg

SEQ ID NO: 8042 - DNA, 15 bp, Homo sapiens
attaattttactttg

SEQ ID NO: 8043 - DNA, 15 bp, Homo sapiens
aattaattttacttt

SEQ ID NO: 8044 - DNA, 15 bp, Homo sapiens
taattaattttactt

SEQ ID NO: 8045 - DNA, 15 bp, Homo sapiens
ataattaattttact

SEQ ID NO: 8046 - DNA, 15 bp, Homo sapiens
cataattaattttac

SEQ ID NO: 8047 - DNA, 15 bp, Homo sapiens
gcataattaatttta

SEQ ID NO: 8048 - DNA, 15 bp, Homo sapiens
ggcataattaatttt

SEQ ID NO: 8049 - DNA, 15 bp, Homo sapiens
tggcataattaattt

SEQ ID NO: 8050 - DNA, 15 bp, Homo sapiens
ttggcataattaatt

SEQ ID NO: 8051 - DNA, 15 bp, Homo sapiens
attggcataattaat

SEQ ID NO: 8052 - DNA, 15 bp, Homo sapiens
gattggcataattaa

SEQ ID NO: 8053 - DNA, 15 bp, Homo sapiens
tgattggcataatta

SEQ ID NO: 8054 - DNA, 15 bp, Homo sapiens
ttgattggcataatt

SEQ ID NO: 8055 - DNA, 15 bp, Homo sapiens
tttgattggcataat

SEQ ID NO: 8056 - DNA, 15 bp, Homo sapiens
ttttgattggcataa

SEQ ID NO: 8057 - DNA, 15 bp, Homo sapiens
tttttgattggcata

SEQ ID NO: 8058 - DNA, 15 bp, Homo sapiens
gtttttgattggcat

SEQ ID NO: 8059 - DNA, 15 bp, Homo sapiens
agtttttgattggca

SEQ ID NO: 8060 - DNA, 15 bp, Homo sapiens
tagtttttgattggc

SEQ ID NO: 8061 - DNA, 15 bp, Homo sapiens
atagtttttgattgg

SEQ ID NO: 8062 - DNA, 15 bp, Homo sapiens
aatagtttttgattg

SEQ ID NO: 8063 - DNA, 15 bp, Homo sapiens
aaatagtttttgatt

SEQ ID NO: 8064 - DNA, 15 bp, Homo sapiens
caaatagtttttgat

SEQ ID NO: 8065 - DNA, 15 bp, Homo sapiens
gcaaatagtttttga

SEQ ID NO: 8066 - DNA, 15 bp, Homo sapiens
agcaaatagtttttg

SEQ ID NO: 8067 - DNA, 15 bp, Homo sapiens
aagcaaatagttttt

SEQ ID NO: 8068 - DNA, 15 bp, Homo sapiens
aaagcaaatagtttt

SEQ ID NO: 8069 - DNA, 15 bp, Homo sapiens
taaagcaaatagttt

SEQ ID NO: 8070 - DNA, 15 bp, Homo sapiens
ttaaagcaaatagtt

SEQ ID NO: 8071 - DNA, 15 bp, Homo sapiens
tttaaagcaaatagt

SEQ ID NO: 8072 - DNA, 15 bp, Homo sapiens
ttttaaagcaaatag

SEQ ID NO: 8073 - DNA, 15 bp, Homo sapiens
attttaaagcaaata

SEQ ID NO: 8074 - DNA, 15 bp, Homo sapiens
tattttaaagcaaat

SEQ ID NO: 8075 - DNA, 15 bp, Homo sapiens
atattttaaagcaaa

SEQ ID NO: 8076 - DNA, 15 bp, Homo sapiens
tatattttaaagcaa

SEQ ID NO: 8077 - DNA, 15 bp, Homo sapiens
ttatattttaaagca

SEQ ID NO: 8078 - DNA, 15 bp, Homo sapiens
tttatattttaaagc

SEQ ID NO: 8079 - DNA, 15 bp, Homo sapiens
ttttatattttaaag

SEQ ID NO: 8080 - DNA, 15 bp, Homo sapiens
cttttatattttaaa

SEQ ID NO: 8081 - DNA, 15 bp, Homo sapiens
ccttttatattttaa

SEQ ID NO: 8082 - DNA, 15 bp, Homo sapiens
gccttttatatttta

SEQ ID NO: 8083 - DNA, 15 bp, Homo sapiens
tgccttttatatttt

SEQ ID NO: 8084 - DNA, 15 bp, Homo sapiens
ttgccttttatattt

SEQ ID NO: 8085 - DNA, 15 bp, Homo sapiens
tttgccttttatatt

SEQ ID NO: 8086 - DNA, 15 bp, Homo sapiens
ttttgccttttatat

SEQ ID NO: 8087 - DNA, 15 bp, Homo sapiens
tttttgccttttata

SEQ ID NO: 8088 - DNA, 15 bp, Homo sapiens
gtttttgccttttat

SEQ ID NO: 8089 - DNA, 15 bp, Homo sapiens
agtttttgcctttta

SEQ ID NO: 8090 - DNA, 15 bp, Homo sapiens
aagtttttgcctttt

SEQ ID NO: 8091 - DNA, 15 bp, Homo sapiens
gaagtttttgccttt

SEQ ID NO: 8092 - DNA, 15 bp, Homo sapiens
ggaagtttttgcctt

SEQ ID NO: 8093 - DNA, 15 bp, Homo sapiens
aggaagtttttgcct

SEQ ID NO: 8094 - DNA, 15 bp, Homo sapiens
taggaagtttttgcc

SEQ ID NO: 8095 - DNA, 15 bp, Homo sapiens
ataggaagtttttgc

SEQ ID NO: 8096 - DNA, 15 bp, Homo sapiens
aataggaagtttttg

SEQ ID NO: 8097 - DNA, 15 bp, Homo sapiens
taataggaagttttt

SEQ ID NO: 8098 - DNA, 15 bp, Homo sapiens
ctaataggaagtttt

SEQ ID NO: 8099 - DNA, 15 bp, Homo sapiens
gctaataggaagttt

SEQ ID NO: 8100 - DNA, 15 bp, Homo sapiens
tgctaataggaagtt

SEQ ID NO: 8101 - DNA, 15 bp, Homo sapiens
atgctaataggaagt

SEQ ID NO: 8102 - DNA, 15 bp, Homo sapiens
tatgctaataggaag

SEQ ID NO: 8103 - DNA, 15 bp, Homo sapiens
ttatgctaataggaa

SEQ ID NO: 8104 - DNA, 15 bp, Homo sapiens
attatgctaatagga

SEQ ID NO: 8105 - DNA, 15 bp, Homo sapiens
cattatgctaatagg

SEQ ID NO: 8106 - DNA, 15 bp, Homo sapiens
tcattatgctaatag

SEQ ID NO: 8107 - DNA, 15 bp, Homo sapiens
ttcattatgctaata

SEQ ID NO: 8108 - DNA, 15 bp, Homo sapiens
cttcattatgctaat

SEQ ID NO: 8109 - DNA, 15 bp, Homo sapiens
acttcattatgctaa

SEQ ID NO: 8110 - DNA, 15 bp, Homo sapiens
tacttcattatgcta

SEQ ID NO: 8111 - DNA, 15 bp, Homo sapiens
ctacttcattatgct

SEQ ID NO: 8112 - DNA, 15 bp, Homo sapiens
tctacttcattatgc

SEQ ID NO: 8113 - DNA, 15 bp, Homo sapiens
ttctacttcattatg

SEQ ID NO: 8114 - DNA, 15 bp, Homo sapiens
attctacttcattat

SEQ ID NO: 8115 - DNA, 15 bp, Homo sapiens
aattctacttcatta

SEQ ID NO: 8116 - DNA, 15 bp, Homo sapiens
aaattctacttcatt

SEQ ID NO: 8117 - DNA, 15 bp, Homo sapiens
aaaattctacttcat

SEQ ID NO: 8118 - DNA, 15 bp, Homo sapiens
aaaaattctacttca

SEQ ID NO: 8119 - DNA, 15 bp, Homo sapiens
taaaaattctacttc

SEQ ID NO: 8120 - DNA, 15 bp, Homo sapiens
ttaaaaattctactt

SEQ ID NO: 8121 - DNA, 15 bp, Homo sapiens
tttaaaaattctact

SEQ ID NO: 8122 - DNA, 15 bp, Homo sapiens
gtttaaaaattctac

SEQ ID NO: 8123 - DNA, 15 bp, Homo sapiens
agtttaaaaattcta

SEQ ID NO: 8124 - DNA, 15 bp, Homo sapiens
aagtttaaaaattct

SEQ ID NO: 8125 - DNA, 15 bp, Homo sapiens
aaagtttaaaaattc

SEQ ID NO: 8126 - DNA, 15 bp, Homo sapiens
caaagtttaaaaatt

SEQ ID NO: 8127 - DNA, 15 bp, Homo sapiens
acaaagtttaaaaat

SEQ ID NO: 8128 - DNA, 15 bp, Homo sapiens
aacaaagtttaaaaa

SEQ ID NO: 8129 - DNA, 15 bp, Homo sapiens
taacaaagtttaaaa

SEQ ID NO: 8130 - DNA, 15 bp, Homo sapiens
ataacaaagtttaaa

SEQ ID NO: 8131 - DNA, 15 bp, Homo sapiens
tataacaaagtttaa

SEQ ID NO: 8132 - DNA, 15 bp, Homo sapiens
ttataacaaagttta

SEQ ID NO: 8133 - DNA, 15 bp, Homo sapiens
attataacaaagttt

SEQ ID NO: 8134 - DNA, 15 bp, Homo sapiens
gattataacaaagtt

SEQ ID NO: 8135 - DNA, 15 bp, Homo sapiens
agattataacaaagt

SEQ ID NO: 8136 - DNA, 15 bp, Homo sapiens
aagattataacaaag

SEQ ID NO: 8137 - DNA, 15 bp, Homo sapiens
taagattataacaaa

SEQ ID NO: 8138 - DNA, 15 bp, Homo sapiens
ttaagattataacaa

SEQ ID NO: 8139 - DNA, 15 bp, Homo sapiens
tttaagattataaca

SEQ ID NO: 8140 - DNA, 15 bp, Homo sapiens
atttaagattataac

SEQ ID NO: 8141 - DNA, 15 bp, Homo sapiens
aatttaagattataa

SEQ ID NO: 8142 - DNA, 15 bp, Homo sapiens
aaatttaagattata

SEQ ID NO: 8143 - DNA, 15 bp, Homo sapiens
aaaatttaagattat

SEQ ID NO: 8144 - DNA, 15 bp, Homo sapiens
gaaaatttaagatta

SEQ ID NO: 8145 - DNA, 15 bp, Homo sapiens
agaaaatttaagatt

SEQ ID NO: 8146 - DNA, 15 bp, Homo sapiens
aagaaaatttaagat

SEQ ID NO: 8147 - DNA, 15 bp, Homo sapiens
aaagaaaatttaaga

SEQ ID NO: 8148 - DNA, 15 bp, Homo sapiens
taaagaaaatttaag

SEQ ID NO: 8149 - DNA, 15 bp, Homo sapiens
ctaaagaaaatttaa

SEQ ID NO: 8150 - DNA, 15 bp, Homo sapiens
actaaagaaaattta

SEQ ID NO: 8151 - DNA, 15 bp, Homo sapiens
cactaaagaaaattt

SEQ ID NO: 8152 - DNA, 15 bp, Homo sapiens
acactaaagaaaatt

SEQ ID NO: 8153 - DNA, 15 bp, Homo sapiens
aacactaaagaaaat

SEQ ID NO: 8154 - DNA, 15 bp, Homo sapiens
caacactaaagaaaa

SEQ ID NO: 8155 - DNA, 15 bp, Homo sapiens
tcaacactaaagaaa

SEQ ID NO: 8156 - DNA, 15 bp, Homo sapiens
ttcaacactaaagaa

SEQ ID NO: 8157 - DNA, 15 bp, Homo sapiens
cttcaacactaaaga

SEQ ID NO: 8158 - DNA, 15 bp, Homo sapiens
tcttcaacactaaag

SEQ ID NO: 8159 - DNA, 15 bp, Homo sapiens
atcttcaacactaaa

SEQ ID NO: 8160 - DNA, 15 bp, Homo sapiens
tatcttcaacactaa

SEQ ID NO: 8161 - DNA, 15 bp, Homo sapiens
ctatcttcaacacta

SEQ ID NO: 8162 - DNA, 15 bp, Homo sapiens
cctatcttcaacact

SEQ ID NO: 8163 - DNA, 15 bp, Homo sapiens
acctatcttcaacac

SEQ ID NO: 8164 - DNA, 15 bp, Homo sapiens
gacctatcttcaaca

SEQ ID NO: 8165 - DNA, 15 bp, Homo sapiens
tgacctatcttcaac

SEQ ID NO: 8166 - DNA, 15 bp, Homo sapiens
ttgacctatcttcaa

SEQ ID NO: 8167 - DNA, 15 bp, Homo sapiens
gttgacctatcttca

SEQ ID NO: 8168 - DNA, 15 bp, Homo sapiens
agttgacctatcttc

SEQ ID NO: 8169 - DNA, 15 bp, Homo sapiens
aagttgacctatctt

SEQ ID NO: 8170 - DNA, 15 bp, Homo sapiens
taagttgacctatct

SEQ ID NO: 8171 - DNA, 15 bp, Homo sapiens
ttaagttgacctatc

SEQ ID NO: 8172 - DNA, 15 bp, Homo sapiens
gttaagttgacctat

SEQ ID NO: 8173 - DNA, 15 bp, Homo sapiens
agttaagttgaccta

SEQ ID NO: 8174 - DNA, 15 bp, Homo sapiens
tagttaagttgacct

SEQ ID NO: 8175 - DNA, 15 bp, Homo sapiens
atagttaagttgacc

SEQ ID NO: 8176 - DNA, 15 bp, Homo sapiens
gatagttaagttgac

SEQ ID NO: 8177 - DNA, 15 bp, Homo sapiens
tgatagttaagttga

SEQ ID NO: 8178 - DNA, 15 bp, Homo sapiens
atgatagttaagttg

SEQ ID NO: 8179 - DNA, 15 bp, Homo sapiens
tatgatagttaagtt

SEQ ID NO: 8180 - DNA, 15 bp, Homo sapiens
gtatgatagttaagt

SEQ ID NO: 8181 - DNA, 15 bp, Homo sapiens
tgtatgatagttaag

SEQ ID NO: 8182 - DNA, 15 bp, Homo sapiens
atgtatgatagttaa

SEQ ID NO: 8183 - DNA, 15 bp, Homo sapiens
aatgtatgatagtta

SEQ ID NO: 8184 - DNA, 15 bp, Homo sapiens
aaatgtatgatagtt

SEQ ID NO: 8185 - DNA, 15 bp, Homo sapiens
aaaatgtatgatagt

SEQ ID NO: 8186 - DNA, 15 bp, Homo sapiens
aaaaatgtatgatag

SEQ ID NO: 8187 - DNA, 15 bp, Homo sapiens
taaaaatgtatgata

SEQ ID NO: 8188 - DNA, 15 bp, Homo sapiens
ataaaaatgtatgat

SEQ ID NO: 8189 - DNA, 15 bp, Homo sapiens
aataaaaatgtatga

SEQ ID NO: 8190 - DNA, 15 bp, Homo sapiens
gaataaaaatgtatg

SEQ ID NO: 8191 - DNA, 15 bp, Homo sapiens
tgaataaaaatgtat

SEQ ID NO: 8192 - DNA, 15 bp, Homo sapiens
gtgaataaaaatgta

SEQ ID NO: 8193 - DNA, 15 bp, Homo sapiens
tgtgaataaaaatgt

SEQ ID NO: 8194 - DNA, 15 bp, Homo sapiens
atgtgaataaaaatg

SEQ ID NO: 8195 - DNA, 15 bp, Homo sapiens
tatgtgaataaaaat

SEQ ID NO: 8196 - DNA, 15 bp, Homo sapiens
ttatgtgaataaaaa

SEQ ID NO: 8197 - DNA, 15 bp, Homo sapiens
tttatgtgaataaaa

SEQ ID NO: 8198 - DNA, 15 bp, Homo sapiens
ctttatgtgaataaa

SEQ ID NO: 8199 - DNA, 15 bp, Homo sapiens
actttatgtgaataa

SEQ ID NO: 8200 - DNA, 15 bp, Homo sapiens
tactttatgtgaata

SEQ ID NO: 8201 - DNA, 15 bp, Homo sapiens
ttactttatgtgaat

SEQ ID NO: 8202 - DNA, 15 bp, Homo sapiens
tttactttatgtgaa

SEQ ID NO: 8203 - DNA, 15 bp, Homo sapiens
gtttactttatgtga

SEQ ID NO: 8204 - DNA, 15 bp, Homo sapiens
agtttactttatgtg

SEQ ID NO: 8205 - DNA, 15 bp, Homo sapiens
gagtttactttatgt

SEQ ID NO: 8206 - DNA, 15 bp, Homo sapiens
agagtttactttatg

SEQ ID NO: 8207 - DNA, 15 bp, Homo sapiens
cagagtttactttat

SEQ ID NO: 8208 - DNA, 15 bp, Homo sapiens
gcagagtttacttta

SEQ ID NO: 8209 - DNA, 15 bp, Homo sapiens
ggcagagtttacttt

SEQ ID NO: 8210 - DNA, 15 bp, Homo sapiens
aggcagagtttactt

SEQ ID NO: 8211 - DNA, 15 bp, Homo sapiens
gaggcagagtttact

SEQ ID NO: 8212 - DNA, 15 bp, Homo sapiens
tgaggcagagtttac

SEQ ID NO: 8213 - DNA, 15 bp, Homo sapiens
ttgaggcagagttta

SEQ ID NO: 8214 - DNA, 15 bp, Homo sapiens
tttgaggcagagttt

SEQ ID NO: 8215 - DNA, 15 bp, Homo sapiens
atttgaggcagagtt

SEQ ID NO: 8216 - DNA, 15 bp, Homo sapiens
catttgaggcagagt

SEQ ID NO: 8217 - DNA, 15 bp, Homo sapiens
acatttgaggcagag

SEQ ID NO: 8218 - DNA, 15 bp, Homo sapiens
tacatttgaggcaga

SEQ ID NO: 8219 - DNA, 15 bp, Homo sapiens
ttacatttgaggcag

SEQ ID NO: 8220 - DNA, 15 bp, Homo sapiens
attacatttgaggca

SEQ ID NO: 8221 - DNA, 15 bp, Homo sapiens
tattacatttgaggc

SEQ ID NO: 8222 - DNA, 15 bp, Homo sapiens
ttattacatttgagg

SEQ ID NO: 8223 - DNA, 15 bp, Homo sapiens
tttattacatttgag

SEQ ID NO: 8224 - DNA, 15 bp, Homo sapiens
gtttattacatttga

SEQ ID NO: 8225 - DNA, 15 bp, Homo sapiens
agtttattacatttg

SEQ ID NO: 8226 - DNA, 15 bp, Homo sapiens
aagtttattacattt

SEQ ID NO: 8227 - DNA, 15 bp, Homo sapiens
taagtttattacatt

SEQ ID NO: 8228 - DNA, 15 bp, Homo sapiens
ttaagtttattacat

SEQ ID NO: 8229 - DNA, 15 bp, Homo sapiens
attaagtttattaca

SEQ ID NO: 8230 - DNA, 15 bp, Homo sapiens
tattaagtttattac

SEQ ID NO: 8231 - DNA, 15 bp, Homo sapiens
atattaagtttatta

SEQ ID NO: 8232 - DNA, 15 bp, Homo sapiens
catattaagtttatt

SEQ ID NO: 8233 - DNA, 15 bp, Homo sapiens
tcatattaagtttat

SEQ ID NO: 8234 - DNA, 15 bp, Homo sapiens
ctcatattaagttta

SEQ ID NO: 8235 - DNA, 15 bp, Homo sapiens
actcatattaagttt

SEQ ID NO: 8236 - DNA, 15 bp, Homo sapiens
aactcatattaagtt

SEQ ID NO: 8237 - DNA, 15 bp, Homo sapiens
taactcatattaagt

SEQ ID NO: 8238 - DNA, 15 bp, Homo sapiens
ataactcatattaag

SEQ ID NO: 8239 - DNA, 15 bp, Homo sapiens
cataactcatattaa

SEQ ID NO: 8240 - DNA, 15 bp, Homo sapiens
acataactcatatta

SEQ ID NO: 8241 - DNA, 15 bp, Homo sapiens
tacataactcatatt

SEQ ID NO: 8242 - DNA, 15 bp, Homo sapiens
ttacataactcatat

SEQ ID NO: 8243 - DNA, 15 bp, Homo sapiens
tttacataactcata

SEQ ID NO: 8244 - DNA, 15 bp, Homo sapiens
gtttacataactcat

SEQ ID NO: 8245 - DNA, 15 bp, Homo sapiens
agtttacataactca

SEQ ID NO: 8246 - DNA, 15 bp, Homo sapiens
aagtttacataactc

SEQ ID NO: 8247 - DNA, 15 bp, Homo sapiens
aaagtttacataact

SEQ ID NO: 8248 - DNA, 15 bp, Homo sapiens
caaagtttacataac

SEQ ID NO: 8249 - DNA, 15 bp, Homo sapiens
ccaaagtttacataa

SEQ ID NO: 8250 - DNA, 15 bp, Homo sapiens
accaaagtttacata

SEQ ID NO: 8251 - DNA, 15 bp, Homo sapiens
gaccaaagtttacat

SEQ ID NO: 8252 - DNA, 15 bp, Homo sapiens
tgaccaaagtttaca

SEQ ID NO: 8253 - DNA, 15 bp, Homo sapiens
ttgaccaaagtttac

SEQ ID NO: 8254 - DNA, 15 bp, Homo sapiens
attgaccaaagttta

SEQ ID NO: 8255 - DNA, 15 bp, Homo sapiens
tattgaccaaagttt

SEQ ID NO: 8256 - DNA, 15 bp, Homo sapiens
ctattgaccaaagtt

SEQ ID NO: 8257 - DNA, 15 bp, Homo sapiens
tctattgaccaaagt

SEQ ID NO: 8258 - DNA, 15 bp, Homo sapiens
ctctattgaccaaag

SEQ ID NO: 8259 - DNA, 15 bp, Homo sapiens
cctctattgaccaaa

SEQ ID NO: 8260 - DNA, 15 bp, Homo sapiens
acctctattgaccaa

SEQ ID NO: 8261 - DNA, 15 bp, Homo sapiens
tacctctattgacca

SEQ ID NO: 8262 - DNA, 15 bp, Homo sapiens
atacctctattgacc

SEQ ID NO: 8263 - DNA, 15 bp, Homo sapiens
tatacctctattgac

SEQ ID NO: 8264 - DNA, 15 bp, Homo sapiens
atatacctctattga

SEQ ID NO: 8265 - DNA, 15 bp, Homo sapiens
aatatacctctattg

SEQ ID NO: 8266 - DNA, 15 bp, Homo sapiens
aaatatacctctatt

SEQ ID NO: 8267 - DNA, 15 bp, Homo sapiens
aaaatatacctctat

SEQ ID NO: 8268 - DNA, 15 bp, Homo sapiens
aaaaatatacctcta

SEQ ID NO: 8269 - DNA, 15 bp, Homo sapiens
aaaaaatatacctct

SEQ ID NO: 8270 - DNA, 15 bp, Homo sapiens
taaaaaatatacctc

SEQ ID NO: 8271 - DNA, 15 bp, Homo sapiens
ctaaaaaatatacct

SEQ ID NO: 8272 - DNA, 15 bp, Homo sapiens
gctaaaaaatatacc

SEQ ID NO: 8273 - DNA, 15 bp, Homo sapiens
tgctaaaaaatatac

SEQ ID NO: 8274 - DNA, 15 bp, Homo sapiens
atgctaaaaaatata

SEQ ID NO: 8275 - DNA, 15 bp, Homo sapiens
aatgctaaaaaatat

SEQ ID NO: 8276 - DNA, 15 bp, Homo sapiens
aaatgctaaaaaata

SEQ ID NO: 8277 - DNA, 15 bp, Homo sapiens
gaaatgctaaaaaat

SEQ ID NO: 8278 - DNA, 15 bp, Homo sapiens
ggaaatgctaaaaaa

SEQ ID NO: 8279 - DNA, 15 bp, Homo sapiens
aggaaatgctaaaaa

SEQ ID NO: 8280 - DNA, 15 bp, Homo sapiens
aaggaaatgctaaaa

SEQ ID NO: 8281 - DNA, 15 bp, Homo sapiens
aaaggaaatgctaaa

SEQ ID NO: 8282 - DNA, 15 bp, Homo sapiens
aaaaggaaatgctaa

SEQ ID NO: 8283 - DNA, 15 bp, Homo sapiens
caaaaggaaatgcta

SEQ ID NO: 8284 - DNA, 15 bp, Homo sapiens
tcaaaaggaaatgct

SEQ ID NO: 8285 - DNA, 15 bp, Homo sapiens
ttcaaaaggaaatgc

SEQ ID NO: 8286 - DNA, 15 bp, Homo sapiens
tttcaaaaggaaatg

SEQ ID NO: 8287 - DNA, 15 bp, Homo sapiens
ttttcaaaaggaaat

SEQ ID NO: 8288 - DNA, 15 bp, Homo sapiens
attttcaaaaggaaa

SEQ ID NO: 8289 - DNA, 15 bp, Homo sapiens
aattttcaaaaggaa

SEQ ID NO: 8290 - DNA, 15 bp, Homo sapiens
aaattttcaaaagga

SEQ ID NO: 8291 - DNA, 15 bp, Homo sapiens
gaaattttcaaaagg

SEQ ID NO: 8292 - DNA, 15 bp, Homo sapiens
tgaaattttcaaaag

SEQ ID NO: 8293 - DNA, 15 bp, Homo sapiens
ctgaaattttcaaaa

SEQ ID NO: 8294 - DNA, 15 bp, Homo sapiens
gctgaaattttcaaa

SEQ ID NO: 8295 - DNA, 15 bp, Homo sapiens
ggctgaaattttcaa

SEQ ID NO: 8296 - DNA, 15 bp, Homo sapiens
aggctgaaattttca

SEQ ID NO: 8297 - DNA, 15 bp, Homo sapiens
aaggctgaaattttc

SEQ ID NO: 8298 - DNA, 15 bp, Homo sapiens
aaaggctgaaatttt

SEQ ID NO: 8299 - DNA, 15 bp, Homo sapiens
aaaaggctgaaattt

SEQ ID NO: 8300 - DNA, 15 bp, Homo sapiens
caaaaggctgaaatt

SEQ ID NO: 8301 - DNA, 15 bp, Homo sapiens
tcaaaaggctgaaat

SEQ ID NO: 8302 - DNA, 15 bp, Homo sapiens
ctcaaaaggctgaaa

SEQ ID NO: 8303 - DNA, 15 bp, Homo sapiens
cctcaaaaggctgaa

SEQ ID NO: 8304 - DNA, 15 bp, Homo sapiens
ccctcaaaaggctga

SEQ ID NO: 8305 - DNA, 15 bp, Homo sapiens
tccctcaaaaggctg

SEQ ID NO: 8306 - DNA, 15 bp, Homo sapiens
ctccctcaaaaggct

SEQ ID NO: 8307 - DNA, 15 bp, Homo sapiens
actccctcaaaaggc

SEQ ID NO: 8308 - DNA, 15 bp, Homo sapiens
gactccctcaaaagg

SEQ ID NO: 8309 - DNA, 15 bp, Homo sapiens
agactccctcaaaag

SEQ ID NO: 8310 - DNA, 15 bp, Homo sapiens
aagactccctcaaaa

SEQ ID NO: 8311 - DNA, 15 bp, Homo sapiens
caagactccctcaaa

SEQ ID NO: 8312 - DNA, 15 bp, Homo sapiens
gcaagactccctcaa

SEQ ID NO: 8313 - DNA, 15 bp, Homo sapiens
tgcaagactccctca

SEQ ID NO: 8314 - DNA, 15 bp, Homo sapiens
ttgcaagactccctc

SEQ ID NO: 8315 - DNA, 15 bp, Homo sapiens
gttgcaagactccct

SEQ ID NO: 8316 - DNA, 15 bp, Homo sapiens
agttgcaagactccc

SEQ ID NO: 8317 - DNA, 15 bp, Homo sapiens
cagttgcaagactcc

SEQ ID NO: 8318 - DNA, 15 bp, Homo sapiens
tcagttgcaagactc

SEQ ID NO: 8319 - DNA, 15 bp, Homo sapiens
ttcagttgcaagact

SEQ ID NO: 8320 - DNA, 15 bp, Homo sapiens
attcagttgcaagac

SEQ ID NO: 8321 - DNA, 15 bp, Homo sapiens
cattcagttgcaaga

SEQ ID NO: 8322 - DNA, 15 bp, Homo sapiens
acattcagttgcaag

SEQ ID NO: 8323 - DNA, 15 bp, Homo sapiens
gacattcagttgcaa

SEQ ID NO: 8324 - DNA, 15 bp, Homo sapiens
tgacattcagttgca

SEQ ID NO: 8325 - DNA, 15 bp, Homo sapiens
ttgacattcagttgc

SEQ ID NO: 8326 - DNA, 15 bp, Homo sapiens
cttgacattcagttg

SEQ ID NO: 8327 - DNA, 15 bp, Homo sapiens
acttgacattcagtt

SEQ ID NO: 8328 - DNA, 15 bp, Homo sapiens
aacttgacattcagt

SEQ ID NO: 8329 - DNA, 15 bp, Homo sapiens
taacttgacattcag

SEQ ID NO: 8330 - DNA, 15 bp, Homo sapiens
gtaacttgacattca

SEQ ID NO: 8331 - DNA, 15 bp, Homo sapiens
tgtaacttgacattc

SEQ ID NO: 8332 - DNA, 15 bp, Homo sapiens
atgtaacttgacatt

SEQ ID NO: 8333 - DNA, 15 bp, Homo sapiens
aatgtaacttgacat

SEQ ID NO: 8334 - DNA, 15 bp, Homo sapiens
aaatgtaacttgaca

SEQ ID NO: 8335 - DNA, 15 bp, Homo sapiens
taaatgtaacttgac

SEQ ID NO: 8336 - DNA, 15 bp, Homo sapiens
ataaatgtaacttga

SEQ ID NO: 8337 - DNA, 15 bp, Homo sapiens
aataaatgtaacttg

SEQ ID NO: 8338 - DNA, 15 bp, Homo sapiens
taataaatgtaactt

SEQ ID NO: 8339 - DNA, 15 bp, Homo sapiens
gtaataaatgtaact

SEQ ID NO: 8340 - DNA, 15 bp, Homo sapiens
tgtaataaatgtaac

SEQ ID NO: 8341 - DNA, 15 bp, Homo sapiens
ttgtaataaatgtaa

SEQ ID NO: 8342 - DNA, 15 bp, Homo sapiens
attgtaataaatgta

SEQ ID NO: 8343 - DNA, 15 bp, Homo sapiens
tattgtaataaatgt

SEQ ID NO: 8344 - DNA, 15 bp, Homo sapiens
ttattgtaataaatg

SEQ ID NO: 8345 - DNA, 15 bp, Homo sapiens
tttattgtaataaat

SEQ ID NO: 8346 - DNA, 15 bp, Homo sapiens
ttttattgtaataaa

SEQ ID NO: 8347 - DNA, 15 bp, Homo sapiens
attttattgtaataa

SEQ ID NO: 8348 - DNA, 15 bp, Homo sapiens
cattttattgtaata

SEQ ID NO: 8349 - DNA, 15 bp, Homo sapiens
ccattttattgtaat

SEQ ID NO: 8350 - DNA, 15 bp, Homo sapiens
tccattttattgtaa

SEQ ID NO: 8351 - DNA, 15 bp, Homo sapiens
gtccattttattgta

SEQ ID NO: 8352 - DNA, 15 bp, Homo sapiens
tgtccattttattgt

SEQ ID NO: 8353 - DNA, 15 bp, Homo sapiens
gtgtccattttattg

SEQ ID NO: 8354 - DNA, 15 bp, Homo sapiens
agtgtccattttatt

SEQ ID NO: 8355 - DNA, 15 bp, Homo sapiens
aagtgtccattttat

SEQ ID NO: 8356 - DNA, 15 bp, Homo sapiens
taagtgtccatttta

SEQ ID NO: 8357 - DNA, 15 bp, Homo sapiens
ttaagtgtccatttt

SEQ ID NO: 8358 - DNA, 15 bp, Homo sapiens
attaagtgtccattt

SEQ ID NO: 8359 - DNA, 15 bp, Homo sapiens
tattaagtgtccatt

SEQ ID NO: 8360 - DNA, 15 bp, Homo sapiens
atattaagtgtccat

SEQ ID NO: 8361 - DNA, 15 bp, Homo sapiens
tatattaagtgtcca

SEQ ID NO: 8362 - DNA, 15 bp, Homo sapiens
ttatattaagtgtcc

SEQ ID NO: 8363 - DNA, 15 bp, Homo sapiens
attatattaagtgtc

SEQ ID NO: 8364 - DNA, 15 bp, Homo sapiens
gattatattaagtgt

SEQ ID NO: 8365 - DNA, 15 bp, Homo sapiens
agattatattaagtg

SEQ ID NO: 8366 - DNA, 15 bp, Homo sapiens
cagattatattaagt

SEQ ID NO: 8367 - DNA, 15 bp, Homo sapiens
acagattatattaag

SEQ ID NO: 8368 - DNA, 15 bp, Homo sapiens
tacagattatattaa

SEQ ID NO: 8369 - DNA, 15 bp, Homo sapiens
ttacagattatatta

SEQ ID NO: 8370 - DNA, 15 bp, Homo sapiens
attacagattatatt

SEQ ID NO: 8371 - DNA, 15 bp, Homo sapiens
cattacagattatat

SEQ ID NO: 8372 - DNA, 15 bp, Homo sapiens
gcattacagattata

SEQ ID NO: 8373 - DNA, 15 bp, Homo sapiens
tgcattacagattat

SEQ ID NO: 8374 - DNA, 15 bp, Homo sapiens
atgcattacagatta

SEQ ID NO: 8375 - DNA, 15 bp, Homo sapiens
aatgcattacagatt

SEQ ID NO: 8376 - DNA, 15 bp, Homo sapiens
taatgcattacagat

SEQ ID NO: 8377 - DNA, 15 bp, Homo sapiens
ttaatgcattacaga

SEQ ID NO: 8378 - DNA, 15 bp, Homo sapiens
gttaatgcattacag

SEQ ID NO: 8379 - DNA, 15 bp, Homo sapiens
tgttaatgcattaca

SEQ ID NO: 8380 - DNA, 15 bp, Homo sapiens
atgttaatgcattac

SEQ ID NO: 8381 - DNA, 15 bp, Homo sapiens
tatgttaatgcatta

SEQ ID NO: 8382 - DNA, 15 bp, Homo sapiens
ttatgttaatgcatt

SEQ ID NO: 8383 - DNA, 15 bp, Homo sapiens
attatgttaatgcat

SEQ ID NO: 8384 - DNA, 15 bp, Homo sapiens
tattatgttaatgca

SEQ ID NO: 8385 - DNA, 15 bp, Homo sapiens
atattatgttaatgc

SEQ ID NO: 8386 - DNA, 15 bp, Homo sapiens
catattatgttaatg

SEQ ID NO: 8387 - DNA, 15 bp, Homo sapiens
ccatattatgttaat

SEQ ID NO: 8388 - DNA, 15 bp, Homo sapiens
cccatattatgttaa

SEQ ID NO: 8389 - DNA, 15 bp, Homo sapiens
tcccatattatgtta

SEQ ID NO: 8390 - DNA, 15 bp, Homo sapiens
ttcccatattatgtt

SEQ ID NO: 8391 - DNA, 15 bp, Homo sapiens
gttcccatattatgt

SEQ ID NO: 8392 - DNA, 15 bp, Homo sapiens
agttcccatattatg

SEQ ID NO: 8393 - DNA, 15 bp, Homo sapiens
aagttcccatattat

SEQ ID NO: 8394 - DNA, 15 bp, Homo sapiens
aaagttcccatatta

SEQ ID NO: 8395 - DNA, 15 bp, Homo sapiens
aaaagttcccatatt

SEQ ID NO: 8396 - DNA, 15 bp, Homo sapiens
taaaagttcccatat

SEQ ID NO: 8397 - DNA, 15 bp, Homo sapiens
ttaaaagttcccata

SEQ ID NO: 8398 - DNA, 15 bp, Homo sapiens
tttaaaagttcccat

SEQ ID NO: 8399 - DNA, 15 bp, Homo sapiens
ctttaaaagttccca

SEQ ID NO: 8400 - DNA, 15 bp, Homo sapiens
actttaaaagttccc

SEQ ID NO: 8401 - DNA, 15 bp, Homo sapiens
tactttaaaagttcc

SEQ ID NO: 8402 - DNA, 15 bp, Homo sapiens
atactttaaaagttc

SEQ ID NO: 8403 - DNA, 15 bp, Homo sapiens
aatactttaaaagtt

SEQ ID NO: 8404 - DNA, 15 bp, Homo sapiens
gaatactttaaaagt

SEQ ID NO: 8405 - DNA, 15 bp, Homo sapiens
tgaatactttaaaag

SEQ ID NO: 8406 - DNA, 15 bp, Homo sapiens
ctgaatactttaaaa

SEQ ID NO: 8407 - DNA, 15 bp, Homo sapiens
actgaatactttaaa

SEQ ID NO: 8408 - DNA, 15 bp, Homo sapiens
gactgaatactttaa

SEQ ID NO: 8409 - DNA, 15 bp, Homo sapiens
agactgaatacttta

SEQ ID NO: 8410 - DNA, 15 bp, Homo sapiens
gagactgaatacttt

SEQ ID NO: 8411 - DNA, 15 bp, Homo sapiens
agagactgaatactt

SEQ ID NO: 8412 - DNA, 15 bp, Homo sapiens
cagagactgaatact

SEQ ID NO: 8413 - DNA, 15 bp, Homo sapiens
acagagactgaatac

SEQ ID NO: 8414 - DNA, 15 bp, Homo sapiens
tacagagactgaata

SEQ ID NO: 8415 - DNA, 15 bp, Homo sapiens
atacagagactgaat

SEQ ID NO: 8416 - DNA, 15 bp, Homo sapiens
aatacagagactgaa

SEQ ID NO: 8417 - DNA, 15 bp, Homo sapiens
taatacagagactga

SEQ ID NO: 8418 - DNA, 15 bp, Homo sapiens
ataatacagagactg

SEQ ID NO: 8419 - DNA, 15 bp, Homo sapiens
aataatacagagact

SEQ ID NO: 8420 - DNA, 15 bp, Homo sapiens
caataatacagagac

SEQ ID NO: 8421 - DNA, 15 bp, Homo sapiens
tcaataatacagaga

SEQ ID NO: 8422 - DNA, 15 bp, Homo sapiens
ctcaataatacagag

SEQ ID NO: 8423 - DNA, 15 bp, Homo sapiens
actcaataatacaga

SEQ ID NO: 8424 - DNA, 15 bp, Homo sapiens
gactcaataatacag

SEQ ID NO: 8425 - DNA, 15 bp, Homo sapiens
ggactcaataataca

SEQ ID NO: 8426 - DNA, 15 bp, Homo sapiens
aggactcaataatac

SEQ ID NO: 8427 - DNA, 15 bp, Homo sapiens
taggactcaataata

SEQ ID NO: 8428 - DNA, 15 bp, Homo sapiens
ataggactcaataat

SEQ ID NO: 8429 - DNA, 15 bp, Homo sapiens
aataggactcaataa

SEQ ID NO: 8430 - DNA, 15 bp, Homo sapiens
aaataggactcaata

SEQ ID NO: 8431 - DNA, 15 bp, Homo sapiens
gaaataggactcaat

SEQ ID NO: 8432 - DNA, 15 bp, Homo sapiens
ggaaataggactcaa

SEQ ID NO: 8433 - DNA, 15 bp, Homo sapiens
tggaaataggactca

SEQ ID NO: 8434 - DNA, 15 bp, Homo sapiens
gtggaaataggactc

SEQ ID NO: 8435 - DNA, 15 bp, Homo sapiens
tgtggaaataggact

SEQ ID NO: 8436 - DNA, 15 bp, Homo sapiens
atgtggaaataggac

SEQ ID NO: 8437 - DNA, 15 bp, Homo sapiens
aatgtggaaatagga

SEQ ID NO: 8438 - DNA, 15 bp, Homo sapiens
aaatgtggaaatagg

SEQ ID NO: 8439 - DNA, 15 bp, Homo sapiens
caaatgtggaaatag

SEQ ID NO: 8440 - DNA, 15 bp, Homo sapiens
ccaaatgtggaaata

SEQ ID NO: 8441 - DNA, 15 bp, Homo sapiens
gccaaatgtggaaat

SEQ ID NO: 8442 - DNA, 15 bp, Homo sapiens
ggccaaatgtggaaa

SEQ ID NO: 8443 - DNA, 15 bp, Homo sapiens
tggccaaatgtggaa

SEQ ID NO: 8444 - DNA, 15 bp, Homo sapiens
ctggccaaatgtgga

SEQ ID NO: 8445 - DNA, 15 bp, Homo sapiens
cctggccaaatgtgg

SEQ ID NO: 8446 - DNA, 15 bp, Homo sapiens
tcctggccaaatgtg

SEQ ID NO: 8447 - DNA, 15 bp, Homo sapiens
atcctggccaaatgt

SEQ ID NO: 8448 - DNA, 15 bp, Homo sapiens
aatcctggccaaatg

SEQ ID NO: 8449 - DNA, 15 bp, Homo sapiens
gaatcctggccaaat

SEQ ID NO: 8450 - DNA, 15 bp, Homo sapiens
agaatcctggccaaa

SEQ ID NO: 8451 - DNA, 15 bp, Homo sapiens
gagaatcctggccaa

SEQ ID NO: 8452 - DNA, 15 bp, Homo sapiens
tgagaatcctggcca

SEQ ID NO: 8453 - DNA, 15 bp, Homo sapiens
ttgagaatcctggcc

SEQ ID NO: 8454 - DNA, 15 bp, Homo sapiens
attgagaatcctggc

SEQ ID NO: 8455 - DNA, 15 bp, Homo sapiens
tattgagaatcctgg

SEQ ID NO: 8456 - DNA, 15 bp, Homo sapiens
atattgagaatcctg

SEQ ID NO: 8457 - DNA, 15 bp, Homo sapiens
catattgagaatcct

SEQ ID NO: 8458 - DNA, 15 bp, Homo sapiens
tcatattgagaatcc

SEQ ID NO: 8459 - DNA, 15 bp, Homo sapiens
atcatattgagaatc

SEQ ID NO: 8460 - DNA, 15 bp, Homo sapiens
aatcatattgagaat

SEQ ID NO: 8461 - DNA, 15 bp, Homo sapiens
aaatcatattgagaa

SEQ ID NO: 8462 - DNA, 15 bp, Homo sapiens
taaatcatattgaga

SEQ ID NO: 8463 - DNA, 15 bp, Homo sapiens
ctaaatcatattgag

SEQ ID NO: 8464 - DNA, 15 bp, Homo sapiens
cctaaatcatattga

SEQ ID NO: 8465 - DNA, 15 bp, Homo sapiens
gcctaaatcatattg

SEQ ID NO: 8466 - DNA, 15 bp, Homo sapiens
ggcctaaatcatatt

SEQ ID NO: 8467 - DNA, 15 bp, Homo sapiens
gggcctaaatcatat

SEQ ID NO: 8468 - DNA, 15 bp, Homo sapiens
tgggcctaaatcata

SEQ ID NO: 8469 - DNA, 15 bp, Homo sapiens
ttgggcctaaatcat

SEQ ID NO: 8470 - DNA, 15 bp, Homo sapiens
cttgggcctaaatca

SEQ ID NO: 8471 - DNA, 15 bp, Homo sapiens
tcttgggcctaaatc

SEQ ID NO: 8472 - DNA, 15 bp, Homo sapiens
gtcttgggcctaaat

SEQ ID NO: 8473 - DNA, 15 bp, Homo sapiens
cgtcttgggcctaaa

SEQ ID NO: 8474 - DNA, 15 bp, Homo sapiens
acgtcttgggcctaa

SEQ ID NO: 8475 - DNA, 15 bp, Homo sapiens
cacgtcttgggccta

SEQ ID NO: 8476 - DNA, 15 bp, Homo sapiens
ccacgtcttgggcct

SEQ ID NO: 8477 - DNA, 15 bp, Homo sapiens
cccacgtcttgggcc

SEQ ID NO: 8478 - DNA, 15 bp, Homo sapiens
tcccacgtcttgggc

SEQ ID NO: 8479 - DNA, 15 bp, Homo sapiens
ttcccacgtcttggg

SEQ ID NO: 8480 - DNA, 15 bp, Homo sapiens
cttcccacgtcttgg

SEQ ID NO: 8481 - DNA, 15 bp, Homo sapiens
tcttcccacgtcttg

SEQ ID NO: 8482 - DNA, 15 bp, Homo sapiens
ttcttcccacgtctt

SEQ ID NO: 8483 - DNA, 15 bp, Homo sapiens
tttcttcccacgtct

SEQ ID NO: 8484 - DNA, 15 bp, Homo sapiens
ctttcttcccacgtc

SEQ ID NO: 8485 - DNA, 15 bp, Homo sapiens
tctttcttcccacgt

SEQ ID NO: 8486 - DNA, 15 bp, Homo sapiens
ttctttcttcccacg

SEQ ID NO: 8487 - DNA, 15 bp, Homo sapiens
cttctttcttcccac

SEQ ID NO: 8488 - DNA, 15 bp, Homo sapiens
acttctttcttccca

SEQ ID NO: 8489 - DNA, 15 bp, Homo sapiens
tacttctttcttccc

SEQ ID NO: 8490 - DNA, 15 bp, Homo sapiens
ttacttctttcttcc

SEQ ID NO: 8491 - DNA, 15 bp, Homo sapiens
tttacttctttcttc

SEQ ID NO: 8492 - DNA, 15 bp, Homo sapiens
ctttacttctttctt

SEQ ID NO: 8493 - DNA, 15 bp, Homo sapiens
tctttacttctttct

SEQ ID NO: 8494 - DNA, 15 bp, Homo sapiens
ttctttacttctttc

SEQ ID NO: 8495 - DNA, 15 bp, Homo sapiens
gttctttacttcttt

SEQ ID NO: 8496 - DNA, 15 bp, Homo sapiens
agttctttacttctt

SEQ ID NO: 8497 - DNA, 15 bp, Homo sapiens
tagttctttacttct

SEQ ID NO: 8498 - DNA, 15 bp, Homo sapiens
ttagttctttacttc

SEQ ID NO: 8499 - DNA, 15 bp, Homo sapiens
tttagttctttactt

SEQ ID NO: 8500 - DNA, 15 bp, Homo sapiens
ctttagttctttact

SEQ ID NO: 8501 - DNA, 15 bp, Homo sapiens
cctttagttctttac

SEQ ID NO: 8502 - DNA, 15 bp, Homo sapiens
tcctttagttcttta

SEQ ID NO: 8503 - DNA, 15 bp, Homo sapiens
atcctttagttcttt

SEQ ID NO: 8504 - DNA, 15 bp, Homo sapiens
aatcctttagttctt

SEQ ID NO: 8505 - DNA, 15 bp, Homo sapiens
aaatcctttagttct

SEQ ID NO: 8506 - DNA, 15 bp, Homo sapiens
aaaatcctttagttc

SEQ ID NO: 8507 - DNA, 15 bp, Homo sapiens
aaaaatcctttagtt

SEQ ID NO: 8508 - DNA, 15 bp, Homo sapiens
aaaaaatcctttagt

SEQ ID NO: 8509 - DNA, 15 bp, Homo sapiens
aaaaaaatcctttag

SEQ ID NO: 8510 - DNA, 15 bp, Homo sapiens
gaaaaaaatccttta

SEQ ID NO: 8511 - DNA, 15 bp, Homo sapiens
agaaaaaaatccttt

SEQ ID NO: 8512 - DNA, 15 bp, Homo sapiens
aagaaaaaaatcctt

SEQ ID NO: 8513 - DNA, 15 bp, Homo sapiens
gaagaaaaaaatcct

SEQ ID NO: 8514 - DNA, 15 bp, Homo sapiens
tgaagaaaaaaatcc

SEQ ID NO: 8515 - DNA, 15 bp, Homo sapiens
atgaagaaaaaaatc

SEQ ID NO: 8516 - DNA, 15 bp, Homo sapiens
aatgaagaaaaaaat

SEQ ID NO: 8517 - DNA, 15 bp, Homo sapiens
aaatgaagaaaaaaa

SEQ ID NO: 8518 - DNA, 15 bp, Homo sapiens
aaaatgaagaaaaaa

SEQ ID NO: 8519 - DNA, 15 bp, Homo sapiens
aaaaaaatgaagaaa

SEQ ID NO: 8520 - DNA, 15 bp, Homo sapiens
taaaaaaatgaagaa

SEQ ID NO: 8521 - DNA, 15 bp, Homo sapiens
ttaaaaaaatgaaga

SEQ ID NO: 8522 - DNA, 15 bp, Homo sapiens
attaaaaaaatgaag

SEQ ID NO: 8523 - DNA, 15 bp, Homo sapiens
aattaaaaaaatgaa

SEQ ID NO: 8524 - DNA, 15 bp, Homo sapiens
caattaaaaaaatga

SEQ ID NO: 8525 - DNA, 15 bp, Homo sapiens
tcaattaaaaaaatg

SEQ ID NO: 8526 - DNA, 15 bp, Homo sapiens
ttcaattaaaaaaat

SEQ ID NO: 8527 - DNA, 15 bp, Homo sapiens
attcaattaaaaaaa

SEQ ID NO: 8528 - DNA, 15 bp, Homo sapiens
tattcaattaaaaaa

SEQ ID NO: 8529 - DNA, 15 bp, Homo sapiens
atattcaattaaaaa

SEQ ID NO: 8530 - DNA, 15 bp, Homo sapiens
catattcaattaaaa

SEQ ID NO: 8531 - DNA, 15 bp, Homo sapiens
ccatattcaattaaa

SEQ ID NO: 8532 - DNA, 15 bp, Homo sapiens
cccatattcaattaa

SEQ ID NO: 8533 - DNA, 15 bp, Homo sapiens
ccccatattcaatta

SEQ ID NO: 8534 - DNA, 15 bp, Homo sapiens
tccccatattcaatt

SEQ ID NO: 8535 - DNA, 15 bp, Homo sapiens
ttccccatattcaat

SEQ ID NO: 8536 - DNA, 15 bp, Homo sapiens
tttccccatattcaa

SEQ ID NO: 8537 - DNA, 15 bp, Homo sapiens
ctttccccatattca

SEQ ID NO: 8538 - DNA, 15 bp, Homo sapiens
tctttccccatattc

SEQ ID NO: 8539 - DNA, 15 bp, Homo sapiens
atctttccccatatt

SEQ ID NO: 8540 - DNA, 15 bp, Homo sapiens
catctttccccatat

SEQ ID NO: 8541 - DNA, 15 bp, Homo sapiens
ccatctttccccata

SEQ ID NO: 8542 - DNA, 15 bp, Homo sapiens
tccatctttccccat

SEQ ID NO: 8543 - DNA, 15 bp, Homo sapiens
ttccatctttcccca

SEQ ID NO: 8544 - DNA, 15 bp, Homo sapiens
attccatctttcccc

SEQ ID NO: 8545 - DNA, 15 bp, Homo sapiens
tattccatctttccc

SEQ ID NO: 8546 - DNA, 15 bp, Homo sapiens
ttattccatctttcc

SEQ ID NO: 8547 - DNA, 15 bp, Homo sapiens
cttattccatctttc

SEQ ID NO: 8548 - DNA, 15 bp, Homo sapiens
gcttattccatcttt

SEQ ID NO: 8549 - DNA, 15 bp, Homo sapiens
agcttattccatctt

SEQ ID NO: 8550 - DNA, 15 bp, Homo sapiens
aagcttattccatct

SEQ ID NO: 8551 - DNA, 15 bp, Homo sapiens
taagcttattccatc

SEQ ID NO: 8552 - DNA, 15 bp, Homo sapiens
ataagcttattccat

SEQ ID NO: 8553 - DNA, 15 bp, Homo sapiens
gataagcttattcca

SEQ ID NO: 8554 - DNA, 15 bp, Homo sapiens
agataagcttattcc

SEQ ID NO: 8555 - DNA, 15 bp, Homo sapiens
cagataagcttattc

SEQ ID NO: 8556 - DNA, 15 bp, Homo sapiens
acagataagcttatt

SEQ ID NO: 8557 - DNA, 15 bp, Homo sapiens
gacagataagcttat

SEQ ID NO: 8558 - DNA, 15 bp, Homo sapiens
ggacagataagctta

SEQ ID NO: 8559 - DNA, 15 bp, Homo sapiens
tggacagataagctt

SEQ ID NO: 8560 - DNA, 15 bp, Homo sapiens
ctggacagataagct

SEQ ID NO: 8561 - DNA, 15 bp, Homo sapiens
actggacagataagc

SEQ ID NO: 8562 - DNA, 15 bp, Homo sapiens
tactggacagataag

SEQ ID NO: 8563 - DNA, 15 bp, Homo sapiens
ttactggacagataa

SEQ ID NO: 8564 - DNA, 15 bp, Homo sapiens
tttactggacagata

SEQ ID NO: 8565 - DNA, 15 bp, Homo sapiens
ctttactggacagat

SEQ ID NO: 8566 - DNA, 15 bp, Homo sapiens
cctttactggacaga

SEQ ID NO: 8567 - DNA, 15 bp, Homo sapiens
gcctttactggacag

SEQ ID NO: 8568 - DNA, 15 bp, Homo sapiens
ggcctttactggaca

SEQ ID NO: 8569 - DNA, 15 bp, Homo sapiens
tggcctttactggac

SEQ ID NO: 8570 - DNA, 15 bp, Homo sapiens
atggcctttactgga

SEQ ID NO: 8571 - DNA, 15 bp, Homo sapiens
aatggcctttactgg

SEQ ID NO: 8572 - DNA, 15 bp, Homo sapiens
taatggcctttactg

SEQ ID NO: 8573 - DNA, 15 bp, Homo sapiens
ataatggcctttact

SEQ ID NO: 8574 - DNA, 15 bp, Homo sapiens
cataatggcctttac

SEQ ID NO: 8575 - DNA, 15 bp, Homo sapiens
acataatggccttta

SEQ ID NO: 8576 - DNA, 15 bp, Homo sapiens
cacataatggccttt

SEQ ID NO: 8577 - DNA, 15 bp, Homo sapiens
acacataatggcctt

SEQ ID NO: 8578 - DNA, 15 bp, Homo sapiens
tacacataatggcct

SEQ ID NO: 8579 - DNA, 15 bp, Homo sapiens
gtacacataatggcc

SEQ ID NO: 8580 - DNA, 15 bp, Homo sapiens
tgtacacataatggc

SEQ ID NO: 8581 - DNA, 15 bp, Homo sapiens
atgtacacataatgg

SEQ ID NO: 8582 - DNA, 15 bp, Homo sapiens
tatgtacacataatg

SEQ ID NO: 8583 - DNA, 15 bp, Homo sapiens
ctatgtacacataat

SEQ ID NO: 8584 - DNA, 15 bp, Homo sapiens
cctatgtacacataa

SEQ ID NO: 8585 - DNA, 15 bp, Homo sapiens
ccctatgtacacata

SEQ ID NO: 8586 - DNA, 15 bp, Homo sapiens
tccctatgtacacat

SEQ ID NO: 8587 - DNA, 15 bp, Homo sapiens
atccctatgtacaca

SEQ ID NO: 8588 - DNA, 15 bp, Homo sapiens
aatccctatgtacac

SEQ ID NO: 8589 - DNA, 15 bp, Homo sapiens
taatccctatgtaca

SEQ ID NO: 8590 - DNA, 15 bp, Homo sapiens
ataatccctatgtac

SEQ ID NO: 8591 - DNA, 15 bp, Homo sapiens
aataatccctatgta

SEQ ID NO: 8592 - DNA, 15 bp, Homo sapiens
taataatccctatgt

SEQ ID NO: 8593 - DNA, 15 bp, Homo sapiens
ataataatccctatg

SEQ ID NO: 8594 - DNA, 15 bp, Homo sapiens
aataataatccctat

SEQ ID NO: 8595 - DNA, 15 bp, Homo sapiens
aaataataatcccta

SEQ ID NO: 8596 - DNA, 15 bp, Homo sapiens
aaaataataatccct

SEQ ID NO: 8597 - DNA, 15 bp, Homo sapiens
aaaaataataatccc

SEQ ID NO: 8598 - DNA, 15 bp, Homo sapiens
gaaaaataataatcc

SEQ ID NO: 8599 - DNA, 15 bp, Homo sapiens
ggaaaaataataatc

SEQ ID NO: 8600 - DNA, 15 bp, Homo sapiens
gggaaaaataataat

SEQ ID NO: 8601 - DNA, 15 bp, Homo sapiens
ggggaaaaataataa

SEQ ID NO: 8602 - DNA, 15 bp, Homo sapiens
gggggaaaaataata

SEQ ID NO: 8603 - DNA, 15 bp, Homo sapiens
ggggggaaaaataat

SEQ ID NO: 8604 - DNA, 15 bp, Homo sapiens
gggggggaaaaataa

SEQ ID NO: 8605 - DNA, 15 bp, Homo sapiens
agggggggaaaaata

SEQ ID NO: 8606 - DNA, 15 bp, Homo sapiens
aagggggggaaaaat

SEQ ID NO: 8607 - DNA, 15 bp, Homo sapiens
caagggggggaaaaa

SEQ ID NO: 8608 - DNA, 15 bp, Homo sapiens
ccaagggggggaaaa

SEQ ID NO: 8609 - DNA, 15 bp, Homo sapiens
cccaagggggggaaa

SEQ ID NO: 8610 - DNA, 15 bp, Homo sapiens
gcccaagggggggaa

SEQ ID NO: 8611 - DNA, 15 bp, Homo sapiens
agcccaaggggggga

SEQ ID NO: 8612 - DNA, 15 bp, Homo sapiens
cagcccaaggggggg

SEQ ID NO: 8613 - DNA, 15 bp, Homo sapiens
acagcccaagggggg

SEQ ID NO: 8614 - DNA, 15 bp, Homo sapiens
tacagcccaaggggg

SEQ ID NO: 8615 - DNA, 15 bp, Homo sapiens
gtacagcccaagggg

SEQ ID NO: 8616 - DNA, 15 bp, Homo sapiens
agtacagcccaaggg

SEQ ID NO: 8617 - DNA, 15 bp, Homo sapiens
cagtacagcccaagg

SEQ ID NO: 8618 - DNA, 15 bp, Homo sapiens
tcagtacagcccaag

SEQ ID NO: 8619 - DNA, 15 bp, Homo sapiens
atcagtacagcccaa

SEQ ID NO: 8620 - DNA, 15 bp, Homo sapiens
aatcagtacagccca

SEQ ID NO: 8621 - DNA, 15 bp, Homo sapiens
aaatcagtacagccc

SEQ ID NO: 8622 - DNA, 15 bp, Homo sapiens
gaaatcagtacagcc

SEQ ID NO: 8623 - DNA, 15 bp, Homo sapiens
ggaaatcagtacagc

SEQ ID NO: 8624 - DNA, 15 bp, Homo sapiens
gggaaatcagtacag

SEQ ID NO: 8625 - DNA, 15 bp, Homo sapiens
tgggaaatcagtaca

SEQ ID NO: 8626 - DNA, 15 bp, Homo sapiens
ctgggaaatcagtac

SEQ ID NO: 8627 - DNA, 15 bp, Homo sapiens
tctgggaaatcagta

SEQ ID NO: 8628 - DNA, 15 bp, Homo sapiens
atctgggaaatcagt

SEQ ID NO: 8629 - DNA, 15 bp, Homo sapiens
catctgggaaatcag

SEQ ID NO: 8630 - DNA, 15 bp, Homo sapiens
acatctgggaaatca

SEQ ID NO: 8631 - DNA, 15 bp, Homo sapiens
tacatctgggaaatc

SEQ ID NO: 8632 - DNA, 15 bp, Homo sapiens
gtacatctgggaaat

SEQ ID NO: 8633 - DNA, 15 bp, Homo sapiens
ggtacatctgggaaa

SEQ ID NO: 8634 - DNA, 15 bp, Homo sapiens
tggtacatctgggaa

SEQ ID NO: 8635 - DNA, 15 bp, Homo sapiens
gtggtacatctggga

SEQ ID NO: 8636 - DNA, 15 bp, Homo sapiens
tgtggtacatctggg

SEQ ID NO: 8637 - DNA, 15 bp, Homo sapiens
ctgtggtacatctgg

SEQ ID NO: 8638 - DNA, 15 bp, Homo sapiens
gctgtggtacatctg

SEQ ID NO: 8639 - DNA, 15 bp, Homo sapiens
tgctgtggtacatct

SEQ ID NO: 8640 - DNA, 15 bp, Homo sapiens
gtgctgtggtacatc

SEQ ID NO: 8641 - DNA, 15 bp, Homo sapiens
agtgctgtggtacat

SEQ ID NO: 8642 - DNA, 15 bp, Homo sapiens
gagtgctgtggtaca

SEQ ID NO: 8643 - DNA, 15 bp, Homo sapiens
agagtgctgtggtac

SEQ ID NO: 8644 - DNA, 15 bp, Homo sapiens
aagagtgctgtggta

SEQ ID NO: 8645 - DNA, 15 bp, Homo sapiens
taagagtgctgtggt

SEQ ID NO: 8646 - DNA, 15 bp, Homo sapiens
ctaagagtgctgtgg

SEQ ID NO: 8647 - DNA, 15 bp, Homo sapiens
actaagagtgctgtg

SEQ ID NO: 8648 - DNA, 15 bp, Homo sapiens
tactaagagtgctgt

SEQ ID NO: 8649 - DNA, 15 bp, Homo sapiens
ctactaagagtgctg

SEQ ID NO: 8650 - DNA, 15 bp, Homo sapiens
actactaagagtgct

SEQ ID NO: 8651 - DNA, 15 bp, Homo sapiens
cactactaagagtgc

SEQ ID NO: 8652 - DNA, 15 bp, Homo sapiens
tcactactaagagtg

SEQ ID NO: 8653 - DNA, 15 bp, Homo sapiens
ttcactactaagagt

SEQ ID NO: 8654 - DNA, 15 bp, Homo sapiens
cttcactactaagag

SEQ ID NO: 8655 - DNA, 15 bp, Homo sapiens
gcttcactactaaga

SEQ ID NO: 8656 - DNA, 15 bp, Homo sapiens
tgcttcactactaag

SEQ ID NO: 8657 - DNA, 15 bp, Homo sapiens
gtgcttcactactaa

SEQ ID NO: 8658 - DNA, 15 bp, Homo sapiens
agtgcttcactacta

SEQ ID NO: 8659 - DNA, 15 bp, Homo sapiens
aagtgcttcactact

SEQ ID NO: 8660 - DNA, 15 bp, Homo sapiens
caagtgcttcactac

SEQ ID NO: 8661 - DNA, 15 bp, Homo sapiens
tcaagtgcttcacta

SEQ ID NO: 8662 - DNA, 15 bp, Homo sapiens
gtcaagtgcttcact

SEQ ID NO: 8663 - DNA, 15 bp, Homo sapiens
agtcaagtgcttcac

SEQ ID NO: 8664 - DNA, 15 bp, Homo sapiens
aagtcaagtgcttca

SEQ ID NO: 8665 - DNA, 15 bp, Homo sapiens
gaagtcaagtgcttc

SEQ ID NO: 8666 - DNA, 15 bp, Homo sapiens
agaagtcaagtgctt

SEQ ID NO: 8667 - DNA, 15 bp, Homo sapiens
tagaagtcaagtgct

SEQ ID NO: 8668 - DNA, 15 bp, Homo sapiens
ctagaagtcaagtgc

SEQ ID NO: 8669 - DNA, 15 bp, Homo sapiens
actagaagtcaagtg

SEQ ID NO: 8670 - DNA, 15 bp, Homo sapiens
cactagaagtcaagt

SEQ ID NO: 8671 - DNA, 15 bp, Homo sapiens
tcactagaagtcaag

SEQ ID NO: 8672 - DNA, 15 bp, Homo sapiens
ctcactagaagtcaa

SEQ ID NO: 8673 - DNA, 15 bp, Homo sapiens
actcactagaagtca

SEQ ID NO: 8674 - DNA, 15 bp, Homo sapiens
cactcactagaagtc

SEQ ID NO: 8675 - DNA, 15 bp, Homo sapiens
ccactcactagaagt

SEQ ID NO: 8676 - DNA, 15 bp, Homo sapiens
tccactcactagaag

SEQ ID NO: 8677 - DNA, 15 bp, Homo sapiens
atccactcactagaa

SEQ ID NO: 8678 - DNA, 15 bp, Homo sapiens
aatccactcactaga

SEQ ID NO: 8679 - DNA, 15 bp, Homo sapiens
aaatccactcactag

SEQ ID NO: 8680 - DNA, 15 bp, Homo sapiens
aaaatccactcacta

SEQ ID NO: 8681 - DNA, 15 bp, Homo sapiens
aaaaatccactcact

SEQ ID NO: 8682 - DNA, 15 bp, Homo sapiens
aaaaaatccactcac

SEQ ID NO: 8683 - DNA, 15 bp, Homo sapiens
caaaaaatccactca

SEQ ID NO: 8684 - DNA, 15 bp, Homo sapiens
acaaaaaatccactc

SEQ ID NO: 8685 - DNA, 15 bp, Homo sapiens
cacaaaaaatccact

SEQ ID NO: 8686 - DNA, 15 bp, Homo sapiens
acacaaaaaatccac

SEQ ID NO: 8687 - DNA, 15 bp, Homo sapiens
cacacaaaaaatcca

SEQ ID NO: 8688 - DNA, 15 bp, Homo sapiens
acacacaaaaaatcc

SEQ ID NO: 8689 - DNA, 15 bp, Homo sapiens
cacacacaaaaaatc

SEQ ID NO: 8690 - DNA, 15 bp, Homo sapiens
acacacacaaaaaat

SEQ ID NO: 8691 - DNA, 15 bp, Homo sapiens
cacacacacaaaaaa

SEQ ID NO: 8692 - DNA, 15 bp, Homo sapiens
acacacacacaaaaa

SEQ ID NO: 8693 - DNA, 15 bp, Homo sapiens
aacacacacacaaaa

SEQ ID NO: 8694 - DNA, 15 bp, Homo sapiens
aaacacacacacaaa

SEQ ID NO: 8695 - DNA, 15 bp, Homo sapiens
aaaacacacacacaa

SEQ ID NO: 8696 - DNA, 15 bp, Homo sapiens
taaaacacacacaca

SEQ ID NO: 8697 - DNA, 15 bp, Homo sapiens
ataaaacacacacac

SEQ ID NO: 8698 - DNA, 15 bp, Homo sapiens
tataaaacacacaca

SEQ ID NO: 8699 - DNA, 15 bp, Homo sapiens
atataaaacacacac

SEQ ID NO: 8700 - DNA, 15 bp, Homo sapiens
aatataaaacacaca

SEQ ID NO: 8701 - DNA, 15 bp, Homo sapiens
caatataaaacacac

SEQ ID NO: 8702 - DNA, 15 bp, Homo sapiens
gcaatataaaacaca

SEQ ID NO: 8703 - DNA, 15 bp, Homo sapiens
tgcaatataaaacac

SEQ ID NO: 8704 - DNA, 15 bp, Homo sapiens
ctgcaatataaaaca

SEQ ID NO: 8705 - DNA, 15 bp, Homo sapiens
tctgcaatataaaac

SEQ ID NO: 8706 - DNA, 15 bp, Homo sapiens
ctctgcaatataaaa

SEQ ID NO: 8707 - DNA, 15 bp, Homo sapiens
actctgcaatataaa

SEQ ID NO: 8708 - DNA, 15 bp, Homo sapiens
cactctgcaatataa

SEQ ID NO: 8709 - DNA, 15 bp, Homo sapiens
tcactctgcaatata

SEQ ID NO: 8710 - DNA, 15 bp, Homo sapiens
ttcactctgcaatat

SEQ ID NO: 8711 - DNA, 15 bp, Homo sapiens
attcactctgcaata

SEQ ID NO: 8712 - DNA, 15 bp, Homo sapiens
tattcactctgcaat

SEQ ID NO: 8713 - DNA, 15 bp, Homo sapiens
gtattcactctgcaa

SEQ ID NO: 8714 - DNA, 15 bp, Homo sapiens
tgtattcactctgca

SEQ ID NO: 8715 - DNA, 15 bp, Homo sapiens
gtgtattcactctgc

SEQ ID NO: 8716 - DNA, 15 bp, Homo sapiens
agtgtattcactctg

SEQ ID NO: 8717 - DNA, 15 bp, Homo sapiens
gagtgtattcactct

SEQ ID NO: 8718 - DNA, 15 bp, Homo sapiens
agagtgtattcactc

SEQ ID NO: 8719 - DNA, 15 bp, Homo sapiens
cagagtgtattcact

SEQ ID NO: 8720 - DNA, 15 bp, Homo sapiens
acagagtgtattcac

SEQ ID NO: 8721 - DNA, 15 bp, Homo sapiens
gacagagtgtattca

SEQ ID NO: 8722 - DNA, 15 bp, Homo sapiens
agacagagtgtattc

SEQ ID NO: 8723 - DNA, 15 bp, Homo sapiens
cagacagagtgtatt

SEQ ID NO: 8724 - DNA, 15 bp, Homo sapiens
tcagacagagtgtat

SEQ ID NO: 8725 - DNA, 15 bp, Homo sapiens
atcagacagagtgta

SEQ ID NO: 8726 - DNA, 15 bp, Homo sapiens
tatcagacagagtgt

SEQ ID NO: 8727 - DNA, 15 bp, Homo sapiens
gtatcagacagagtg

SEQ ID NO: 8728 - DNA, 15 bp, Homo sapiens
agtatcagacagagt

SEQ ID NO: 8729 - DNA, 15 bp, Homo sapiens
tagtatcagacagag

SEQ ID NO: 8730 - DNA, 15 bp, Homo sapiens
atagtatcagacaga

SEQ ID NO: 8731 - DNA, 15 bp, Homo sapiens
catagtatcagacag

SEQ ID NO: 8732 - DNA, 15 bp, Homo sapiens
acatagtatcagaca

SEQ ID NO: 8733 - DNA, 15 bp, Homo sapiens
cacatagtatcagac

SEQ ID NO: 8734 - DNA, 15 bp, Homo sapiens
tcacatagtatcaga

SEQ ID NO: 8735 - DNA, 15 bp, Homo sapiens
gtcacatagtatcag

SEQ ID NO: 8736 - DNA, 15 bp, Homo sapiens
agtcacatagtatca

SEQ ID NO: 8737 - DNA, 15 bp, Homo sapiens
aagtcacatagtatc

SEQ ID NO: 8738 - DNA, 15 bp, Homo sapiens
aaagtcacatagtat

SEQ ID NO: 8739 - DNA, 15 bp, Homo sapiens
gaaagtcacatagta

SEQ ID NO: 8740 - DNA, 15 bp, Homo sapiens
agaaagtcacatagt

SEQ ID NO: 8741 - DNA, 15 bp, Homo sapiens
cagaaagtcacatag

SEQ ID NO: 8742 - DNA, 15 bp, Homo sapiens
tcagaaagtcacata

SEQ ID NO: 8743 - DNA, 15 bp, Homo sapiens
atcagaaagtcacat

SEQ ID NO: 8744 - DNA, 15 bp, Homo sapiens
aatcagaaagtcaca

SEQ ID NO: 8745 - DNA, 15 bp, Homo sapiens
taatcagaaagtcac

SEQ ID NO: 8746 - DNA, 15 bp, Homo sapiens
ataatcagaaagtca

SEQ ID NO: 8747 - DNA, 15 bp, Homo sapiens
cataatcagaaagtc

SEQ ID NO: 8748 - DNA, 15 bp, Homo sapiens
acataatcagaaagt

SEQ ID NO: 8749 - DNA, 15 bp, Homo sapiens
cacataatcagaaag

SEQ ID NO: 8750 - DNA, 15 bp, Homo sapiens
tcacataatcagaaa

SEQ ID NO: 8751 - DNA, 15 bp, Homo sapiens
atcacataatcagaa

SEQ ID NO: 8752 - DNA, 15 bp, Homo sapiens
aatcacataatcaga

SEQ ID NO: 8753 - DNA, 15 bp, Homo sapiens
aaatcacataatcag

SEQ ID NO: 8754 - DNA, 15 bp, Homo sapiens
aaaatcacataatca

SEQ ID NO: 8755 - DNA, 15 bp, Homo sapiens
aaaaatcacataatc

SEQ ID NO: 8756 - DNA, 15 bp, Homo sapiens
taaaaatcacataat

SEQ ID NO: 8757 - DNA, 15 bp, Homo sapiens
ataaaaatcacataa

SEQ ID NO: 8758 - DNA, 15 bp, Homo sapiens
cataaaaatcacata

SEQ ID NO: 8759 - DNA, 15 bp, Homo sapiens
gcataaaaatcacat

SEQ ID NO: 8760 - DNA, 15 bp, Homo sapiens
tgcataaaaatcaca

SEQ ID NO: 8761 - DNA, 15 bp, Homo sapiens
atgcataaaaatcac

SEQ ID NO: 8762 - DNA, 15 bp, Homo sapiens
aatgcataaaaatca

SEQ ID NO: 8763 - DNA, 15 bp, Homo sapiens
aaatgcataaaaatc

SEQ ID NO: 8764 - DNA, 15 bp, Homo sapiens
aaaatgcataaaaat

SEQ ID NO: 8765 - DNA, 15 bp, Homo sapiens
taaaatgcataaaaa

SEQ ID NO: 8766 - DNA, 15 bp, Homo sapiens
ataaaatgcataaaa

SEQ ID NO: 8767 - DNA, 15 bp, Homo sapiens
cataaaatgcataaa

SEQ ID NO: 8768 - DNA, 15 bp, Homo sapiens
acataaaatgcataa

SEQ ID NO: 8769 - DNA, 15 bp, Homo sapiens
cacataaaatgcata

SEQ ID NO: 8770 - DNA, 15 bp, Homo sapiens
acacataaaatgcat

SEQ ID NO: 8771 - DNA, 15 bp, Homo sapiens
aacacataaaatgca

SEQ ID NO: 8772 - DNA, 15 bp, Homo sapiens
aaacacataaaatgc

SEQ ID NO: 8773 - DNA, 15 bp, Homo sapiens
aaaacacataaaatg

SEQ ID NO: 8774 - DNA, 15 bp, Homo sapiens
caaaacacataaaat

SEQ ID NO: 8775 - DNA, 15 bp, Homo sapiens
acaaaacacataaaa

SEQ ID NO: 8776 - DNA, 15 bp, Homo sapiens
tacaaaacacataaa

SEQ ID NO: 8777 - DNA, 15 bp, Homo sapiens
ttacaaaacacataa

SEQ ID NO: 8778 - DNA, 15 bp, Homo sapiens
tttacaaaacacata

SEQ ID NO: 8779 - DNA, 15 bp, Homo sapiens
gtttacaaaacacat

SEQ ID NO: 8780 - DNA, 15 bp, Homo sapiens
agtttacaaaacaca

SEQ ID NO: 8781 - DNA, 15 bp, Homo sapiens
tagtttacaaaacac

SEQ ID NO: 8782 - DNA, 15 bp, Homo sapiens
ctagtttacaaaaca

SEQ ID NO: 8783 - DNA, 15 bp, Homo sapiens
gctagtttacaaaac

SEQ ID NO: 8784 - DNA, 15 bp, Homo sapiens
agctagtttacaaaa

SEQ ID NO: 8785 - DNA, 15 bp, Homo sapiens
cagctagtttacaaa

SEQ ID NO: 8786 - DNA, 15 bp, Homo sapiens
acagctagtttacaa

SEQ ID NO: 8787 - DNA, 15 bp, Homo sapiens
tacagctagtttaca

SEQ ID NO: 8788 - DNA, 15 bp, Homo sapiens
atacagctagtttac

SEQ ID NO: 8789 - DNA, 15 bp, Homo sapiens
aatacagctagttta

SEQ ID NO: 8790 - DNA, 15 bp, Homo sapiens
aaatacagctagttt

SEQ ID NO: 8791 - DNA, 15 bp, Homo sapiens
aaaatacagctagtt

SEQ ID NO: 8792 - DNA, 15 bp, Homo sapiens
aaaaatacagctagt

SEQ ID NO: 8793 - DNA, 15 bp, Homo sapiens
caaaaatacagctag

SEQ ID NO: 8794 - DNA, 15 bp, Homo sapiens
ccaaaaatacagcta

SEQ ID NO: 8795 - DNA, 15 bp, Homo sapiens
accaaaaatacagct

SEQ ID NO: 8796 - DNA, 15 bp, Homo sapiens
gaccaaaaatacagc

SEQ ID NO: 8797 - DNA, 15 bp, Homo sapiens
ggaccaaaaatacag

SEQ ID NO: 8798 - DNA, 15 bp, Homo sapiens
tggaccaaaaataca

SEQ ID NO: 8799 - DNA, 15 bp, Homo sapiens
atggaccaaaaatac

SEQ ID NO: 8800 - DNA, 15 bp, Homo sapiens
catggaccaaaaata

SEQ ID NO: 8801 - DNA, 15 bp, Homo sapiens
acatggaccaaaaat

SEQ ID NO: 8802 - DNA, 15 bp, Homo sapiens
gacatggaccaaaaa

SEQ ID NO: 8803 - DNA, 15 bp, Homo sapiens
agacatggaccaaaa

SEQ ID NO: 8804 - DNA, 15 bp, Homo sapiens
tagacatggaccaaa

SEQ ID NO: 8805 - DNA, 15 bp, Homo sapiens
ctagacatggaccaa

SEQ ID NO: 8806 - DNA, 15 bp, Homo sapiens
cctagacatggacca

SEQ ID NO: 8807 - DNA, 15 bp, Homo sapiens
acctagacatggacc

SEQ ID NO: 8808 - DNA, 15 bp, Homo sapiens
aacctagacatggac

SEQ ID NO: 8809 - DNA, 15 bp, Homo sapiens
caacctagacatgga

SEQ ID NO: 8810 - DNA, 15 bp, Homo sapiens
acaacctagacatgg

SEQ ID NO: 8811 - DNA, 15 bp, Homo sapiens
tacaacctagacatg

SEQ ID NO: 8812 - DNA, 15 bp, Homo sapiens
ctacaacctagacat

SEQ ID NO: 8813 - DNA, 15 bp, Homo sapiens
tctacaacctagaca

SEQ ID NO: 8814 - DNA, 15 bp, Homo sapiens
ttctacaacctagac

SEQ ID NO: 8815 - DNA, 15 bp, Homo sapiens
attctacaacctaga

SEQ ID NO: 8816 - DNA, 15 bp, Homo sapiens
aattctacaacctag

SEQ ID NO: 8817 - DNA, 15 bp, Homo sapiens
caattctacaaccta

SEQ ID NO: 8818 - DNA, 15 bp, Homo sapiens
tcaattctacaacct

SEQ ID NO: 8819 - DNA, 15 bp, Homo sapiens
ttcaattctacaacc

SEQ ID NO: 8820 - DNA, 15 bp, Homo sapiens
attcaattctacaac

SEQ ID NO: 8821 - DNA, 15 bp, Homo sapiens
aattcaattctacaa

SEQ ID NO: 8822 - DNA, 15 bp, Homo sapiens
caattcaattctaca

SEQ ID NO: 8823 - DNA, 15 bp, Homo sapiens
acaattcaattctac

SEQ ID NO: 8824 - DNA, 15 bp, Homo sapiens
cacaattcaattcta

SEQ ID NO: 8825 - DNA, 15 bp, Homo sapiens
gcacaattcaattct

SEQ ID NO: 8826 - DNA, 15 bp, Homo sapiens
tgcacaattcaattc

SEQ ID NO: 8827 - DNA, 15 bp, Homo sapiens
atgcacaattcaatt

SEQ ID NO: 8828 - DNA, 15 bp, Homo sapiens
aatgcacaattcaat

SEQ ID NO: 8829 - DNA, 15 bp, Homo sapiens
aaatgcacaattcaa

SEQ ID NO: 8830 - DNA, 15 bp, Homo sapiens
aaaatgcacaattca

SEQ ID NO: 8831 - DNA, 15 bp, Homo sapiens
caaaatgcacaattc

SEQ ID NO: 8832 - DNA, 15 bp, Homo sapiens
ccaaaatgcacaatt

SEQ ID NO: 8833 - DNA, 15 bp, Homo sapiens
gccaaaatgcacaat

SEQ ID NO: 8834 - DNA, 15 bp, Homo sapiens
tgccaaaatgcacaa

SEQ ID NO: 8835 - DNA, 15 bp, Homo sapiens
atgccaaaatgcaca

SEQ ID NO: 8836 - DNA, 15 bp, Homo sapiens
gatgccaaaatgcac

SEQ ID NO: 8837 - DNA, 15 bp, Homo sapiens
agatgccaaaatgca

SEQ ID NO: 8838 - DNA, 15 bp, Homo sapiens
cagatgccaaaatgc

SEQ ID NO: 8839 - DNA, 15 bp, Homo sapiens
tcagatgccaaaatg

SEQ ID NO: 8840 - DNA, 15 bp, Homo sapiens
ctcagatgccaaaat

SEQ ID NO: 8841 - DNA, 15 bp, Homo sapiens
gctcagatgccaaaa

SEQ ID NO: 8842 - DNA, 15 bp, Homo sapiens
tgctcagatgccaaa

SEQ ID NO: 8843 - DNA, 15 bp, Homo sapiens
gtgctcagatgccaa

SEQ ID NO: 8844 - DNA, 15 bp, Homo sapiens
tgtgctcagatgcca

SEQ ID NO: 8845 - DNA, 15 bp, Homo sapiens
ctgtgctcagatgcc

SEQ ID NO: 8846 - DNA, 15 bp, Homo sapiens
gctgtgctcagatgc

SEQ ID NO: 8847 - DNA, 15 bp, Homo sapiens
agctgtgctcagatg

SEQ ID NO: 8848 - DNA, 15 bp, Homo sapiens
cagctgtgctcagat

SEQ ID NO: 8849 - DNA, 15 bp, Homo sapiens
tcagctgtgctcaga

SEQ ID NO: 8850 - DNA, 15 bp, Homo sapiens
ctcagctgtgctcag

SEQ ID NO: 8851 - DNA, 15 bp, Homo sapiens
actcagctgtgctca

SEQ ID NO: 8852 - DNA, 15 bp, Homo sapiens
aactcagctgtgctc

SEQ ID NO: 8853 - DNA, 15 bp, Homo sapiens
aaactcagctgtgct

SEQ ID NO: 8854 - DNA, 15 bp, Homo sapiens
aaaactcagctgtgc

SEQ ID NO: 8855 - DNA, 15 bp, Homo sapiens
gaaaactcagctgtg

SEQ ID NO: 8856 - DNA, 15 bp, Homo sapiens
agaaaactcagctgt

SEQ ID NO: 8857 - DNA, 15 bp, Homo sapiens
tagaaaactcagctg

SEQ ID NO: 8858 - DNA, 15 bp, Homo sapiens
ttagaaaactcagct

SEQ ID NO: 8859 - DNA, 15 bp, Homo sapiens
tttagaaaactcagc

SEQ ID NO: 8860 - DNA, 15 bp, Homo sapiens
atttagaaaactcag

SEQ ID NO: 8861 - DNA, 15 bp, Homo sapiens
gatttagaaaactca

SEQ ID NO: 8862 - DNA, 15 bp, Homo sapiens
tgatttagaaaactc

SEQ ID NO: 8863 - DNA, 15 bp, Homo sapiens
ttgatttagaaaact

SEQ ID NO: 8864 - DNA, 15 bp, Homo sapiens
attgatttagaaaac

SEQ ID NO: 8865 - DNA, 15 bp, Homo sapiens
gattgatttagaaaa

SEQ ID NO: 8866 - DNA, 15 bp, Homo sapiens
agattgatttagaaa

SEQ ID NO: 8867 - DNA, 15 bp, Homo sapiens
gagattgatttagaa

SEQ ID NO: 8868 - DNA, 15 bp, Homo sapiens
agagattgatttaga

SEQ ID NO: 8869 - DNA, 15 bp, Homo sapiens
gagagattgatttag

SEQ ID NO: 8870 - DNA, 15 bp, Homo sapiens
agagagattgattta

SEQ ID NO: 8871 - DNA, 15 bp, Homo sapiens
gagagagattgattt

SEQ ID NO: 8872 - DNA, 15 bp, Homo sapiens
ggagagagattgatt

SEQ ID NO: 8873 - DNA, 15 bp, Homo sapiens
aggagagagattgat

SEQ ID NO: 8874 - DNA, 15 bp, Homo sapiens
aaggagagagattga

SEQ ID NO: 8875 - DNA, 15 bp, Homo sapiens
caaggagagagattg

SEQ ID NO: 8876 - DNA, 15 bp, Homo sapiens
gcaaggagagagatt

SEQ ID NO: 8877 - DNA, 15 bp, Homo sapiens
tgcaaggagagagat

SEQ ID NO: 8878 - DNA, 15 bp, Homo sapiens
gtgcaaggagagaga

SEQ ID NO: 8879 - DNA, 15 bp, Homo sapiens
ggtgcaaggagagag

SEQ ID NO: 8880 - DNA, 15 bp, Homo sapiens
aggtgcaaggagaga

SEQ ID NO: 8881 - DNA, 15 bp, Homo sapiens
taggtgcaaggagag

SEQ ID NO: 8882 - DNA, 15 bp, Homo sapiens
ctaggtgcaaggaga

SEQ ID NO: 8883 - DNA, 15 bp, Homo sapiens
actaggtgcaaggag

SEQ ID NO: 8884 - DNA, 15 bp, Homo sapiens
aactaggtgcaagga

SEQ ID NO: 8885 - DNA, 15 bp, Homo sapiens
aaactaggtgcaagg

SEQ ID NO: 8886 - DNA, 15 bp, Homo sapiens
aaaactaggtgcaag

SEQ ID NO: 8887 - DNA, 15 bp, Homo sapiens
aaaaactaggtgcaa

SEQ ID NO: 8888 - DNA, 15 bp, Homo sapiens
caaaaactaggtgca

SEQ ID NO: 8889 - DNA, 15 bp, Homo sapiens
gcaaaaactaggtgc

SEQ ID NO: 8890 - DNA, 15 bp, Homo sapiens
agcaaaaactaggtg

SEQ ID NO: 8891 - DNA, 15 bp, Homo sapiens
aagcaaaaactaggt

SEQ ID NO: 8892 - DNA, 15 bp, Homo sapiens
aaagcaaaaactagg

SEQ ID NO: 8893 - DNA, 15 bp, Homo sapiens
taaagcaaaaactag

SEQ ID NO: 8894 - DNA, 15 bp, Homo sapiens
ctaaagcaaaaacta

SEQ ID NO: 8895 - DNA, 15 bp, Homo sapiens
tctaaagcaaaaact

SEQ ID NO: 8896 - DNA, 15 bp, Homo sapiens
atctaaagcaaaaac

SEQ ID NO: 8897 - DNA, 15 bp, Homo sapiens
gatctaaagcaaaaa

SEQ ID NO: 8898 - DNA, 15 bp, Homo sapiens
tgatctaaagcaaaa

SEQ ID NO: 8899 - DNA, 15 bp, Homo sapiens
gtgatctaaagcaaa

SEQ ID NO: 8900 - DNA, 15 bp, Homo sapiens
agtgatctaaagcaa

SEQ ID NO: 8901 - DNA, 15 bp, Homo sapiens
tagtgatctaaagca

SEQ ID NO: 8902 - DNA, 15 bp, Homo sapiens
gtagtgatctaaagc

SEQ ID NO: 8903 - DNA, 15 bp, Homo sapiens
ggtagtgatctaaag

SEQ ID NO: 8904 - DNA, 15 bp, Homo sapiens
aggtagtgatctaaa

SEQ ID NO: 8905 - DNA, 15 bp, Homo sapiens
taggtagtgatctaa

SEQ ID NO: 8906 - DNA, 15 bp, Homo sapiens
ttaggtagtgatcta

SEQ ID NO: 8907 - DNA, 15 bp, Homo sapiens
cttaggtagtgatct

SEQ ID NO: 8908 - DNA, 15 bp, Homo sapiens
tcttaggtagtgatc

SEQ ID NO: 8909 - DNA, 15 bp, Homo sapiens
gtcttaggtagtgat

SEQ ID NO: 8910 - DNA, 15 bp, Homo sapiens
agtcttaggtagtga

SEQ ID NO: 8911 - DNA, 15 bp, Homo sapiens
aagtcttaggtagtg

SEQ ID NO: 8912 - DNA, 15 bp, Homo sapiens
taagtcttaggtagt

SEQ ID NO: 8913 - DNA, 15 bp, Homo sapiens
gtaagtcttaggtag

SEQ ID NO: 8914 - DNA, 15 bp, Homo sapiens
agtaagtcttaggta

SEQ ID NO: 8915 - DNA, 15 bp, Homo sapiens
cagtaagtcttaggt

SEQ ID NO: 8916 - DNA, 15 bp, Homo sapiens
acagtaagtcttagg

SEQ ID NO: 8917 - DNA, 15 bp, Homo sapiens
aacagtaagtcttag

SEQ ID NO: 8918 - DNA, 15 bp, Homo sapiens
caacagtaagtctta

SEQ ID NO: 8919 - DNA, 15 bp, Homo sapiens
tcaacagtaagtctt

SEQ ID NO: 8920 - DNA, 15 bp, Homo sapiens
atcaacagtaagtct

SEQ ID NO: 8921 - DNA, 15 bp, Homo sapiens
aatcaacagtaagtc

SEQ ID NO: 8922 - DNA, 15 bp, Homo sapiens
aaatcaacagtaagt

SEQ ID NO: 8923 - DNA, 15 bp, Homo sapiens
taaatcaacagtaag

SEQ ID NO: 8924 - DNA, 15 bp, Homo sapiens
ttaaatcaacagtaa

SEQ ID NO: 8925 - DNA, 15 bp, Homo sapiens
attaaatcaacagta

SEQ ID NO: 8926 - DNA, 15 bp, Homo sapiens
tattaaatcaacagt

SEQ ID NO: 8927 - DNA, 15 bp, Homo sapiens
atattaaatcaacag

SEQ ID NO: 8928 - DNA, 15 bp, Homo sapiens
aatattaaatcaaca

SEQ ID NO: 8929 - DNA, 15 bp, Homo sapiens
taatattaaatcaac

SEQ ID NO: 8930 - DNA, 15 bp, Homo sapiens
ctaatattaaatcaa

SEQ ID NO: 8931 - DNA, 15 bp, Homo sapiens
tctaatattaaatca

SEQ ID NO: 8932 - DNA, 15 bp, Homo sapiens
ctctaatattaaatc

SEQ ID NO: 8933 - DNA, 15 bp, Homo sapiens
gctctaatattaaat

SEQ ID NO: 8934 - DNA, 15 bp, Homo sapiens
tgctctaatattaaa

SEQ ID NO: 8935 - DNA, 15 bp, Homo sapiens
gtgctctaatattaa

SEQ ID NO: 8936 - DNA, 15 bp, Homo sapiens
agtgctctaatatta

SEQ ID NO: 8937 - DNA, 15 bp, Homo sapiens
aagtgctctaatatt

SEQ ID NO: 8938 - DNA, 15 bp, Homo sapiens
taagtgctctaatat

SEQ ID NO: 8939 - DNA, 15 bp, Homo sapiens
ttaagtgctctaata

SEQ ID NO: 8940 - DNA, 15 bp, Homo sapiens
cttaagtgctctaat

SEQ ID NO: 8941 - DNA, 15 bp, Homo sapiens
gcttaagtgctctaa

SEQ ID NO: 8942 - DNA, 15 bp, Homo sapiens
tgcttaagtgctcta

SEQ ID NO: 8943 - DNA, 15 bp, Homo sapiens
atgcttaagtgctct

SEQ ID NO: 8944 - DNA, 15 bp, Homo sapiens
tatgcttaagtgctc

SEQ ID NO: 8945 - DNA, 15 bp, Homo sapiens
ctatgcttaagtgct

SEQ ID NO: 8946 - DNA, 15 bp, Homo sapiens
gctatgcttaagtgc

SEQ ID NO: 8947 - DNA, 15 bp, Homo sapiens
agctatgcttaagtg

SEQ ID NO: 8948 - DNA, 15 bp, Homo sapiens
aagctatgcttaagt

SEQ ID NO: 8949 - DNA, 15 bp, Homo sapiens
aaagctatgcttaag

SEQ ID NO: 8950 - DNA, 15 bp, Homo sapiens
caaagctatgcttaa

SEQ ID NO: 8951 - DNA, 15 bp, Homo sapiens
tcaaagctatgctta

SEQ ID NO: 8952 - DNA, 15 bp, Homo sapiens
gtcaaagctatgctt

SEQ ID NO: 8953 - DNA, 15 bp, Homo sapiens
agtcaaagctatgct

SEQ ID NO: 8954 - DNA, 15 bp, Homo sapiens
aagtcaaagctatgc

SEQ ID NO: 8955 - DNA, 15 bp, Homo sapiens
aaagtcaaagctatg

SEQ ID NO: 8956 - DNA, 15 bp, Homo sapiens
aaaagtcaaagctat

SEQ ID NO: 8957 - DNA, 15 bp, Homo sapiens
taaaagtcaaagcta

SEQ ID NO: 8958 - DNA, 15 bp, Homo sapiens
ataaaagtcaaagct

SEQ ID NO: 8959 - DNA, 15 bp, Homo sapiens
aataaaagtcaaagc

SEQ ID NO: 8960 - DNA, 15 bp, Homo sapiens
aaataaaagtcaaag

SEQ ID NO: 8961 - DNA, 15 bp, Homo sapiens
gaaataaaagtcaaa

SEQ ID NO: 8962 - DNA, 15 bp, Homo sapiens
ggaaataaaagtcaa

SEQ ID NO: 8963 - DNA, 15 bp, Homo sapiens
aggaaataaaagtca

SEQ ID NO: 8964 - DNA, 15 bp, Homo sapiens
aaggaaataaaagtc

SEQ ID NO: 8965 - DNA, 15 bp, Homo sapiens
aaaggaaataaaagt

SEQ ID NO: 8966 - DNA, 15 bp, Homo sapiens
caaaggaaataaaag

SEQ ID NO: 8967 - DNA, 15 bp, Homo sapiens
tcaaaggaaataaaa

SEQ ID NO: 8968 - DNA, 15 bp, Homo sapiens
atcaaaggaaataaa

SEQ ID NO: 8969 - DNA, 15 bp, Homo sapiens
aatcaaaggaaataa

SEQ ID NO: 8970 - DNA, 15 bp, Homo sapiens
aaatcaaaggaaata

SEQ ID NO: 8971 - DNA, 15 bp, Homo sapiens
aaaatcaaaggaaat

SEQ ID NO: 8972 - DNA, 15 bp, Homo sapiens
aaaaatcaaaggaaa

SEQ ID NO: 8973 - DNA, 15 bp, Homo sapiens
caaaaatcaaaggaa

SEQ ID NO: 8974 - DNA, 15 bp, Homo sapiens
acaaaaatcaaagga

SEQ ID NO: 8975 - DNA, 15 bp, Homo sapiens
tacaaaaatcaaagg

SEQ ID NO: 8976 - DNA, 15 bp, Homo sapiens
ctacaaaaatcaaag

SEQ ID NO: 8977 - DNA, 15 bp, Homo sapiens
tctacaaaaatcaaa

SEQ ID NO: 8978 - DNA, 15 bp, Homo sapiens
atctacaaaaatcaa

SEQ ID NO: 8979 - DNA, 15 bp, Homo sapiens
aatctacaaaaatca

SEQ ID NO: 8980 - DNA, 15 bp, Homo sapiens
aaatctacaaaaatc

SEQ ID NO: 8981 - DNA, 15 bp, Homo sapiens
aaaatctacaaaaat

SEQ ID NO: 8982 - DNA, 15 bp, Homo sapiens
gaaaatctacaaaaa

SEQ ID NO: 8983 - DNA, 15 bp, Homo sapiens
tgaaaatctacaaaa

SEQ ID NO: 8984 - DNA, 15 bp, Homo sapiens
ctgaaaatctacaaa

SEQ ID NO: 8985 - DNA, 15 bp, Homo sapiens
cctgaaaatctacaa

SEQ ID NO: 8986 - DNA, 15 bp, Homo sapiens
gcctgaaaatctaca

SEQ ID NO: 8987 - DNA, 15 bp, Homo sapiens
agcctgaaaatctac

SEQ ID NO: 8988 - DNA, 15 bp, Homo sapiens
cagcctgaaaatcta

SEQ ID NO: 8989 - DNA, 15 bp, Homo sapiens
tcagcctgaaaatct

SEQ ID NO: 8990 - DNA, 15 bp, Homo sapiens
ttcagcctgaaaatc

SEQ ID NO: 8991 - DNA, 15 bp, Homo sapiens
cttcagcctgaaaat

SEQ ID NO: 8992 - DNA, 15 bp, Homo sapiens
acttcagcctgaaaa

SEQ ID NO: 8993 - DNA, 15 bp, Homo sapiens
tacttcagcctgaaa

SEQ ID NO: 8994 - DNA, 15 bp, Homo sapiens
gtacttcagcctgaa

SEQ ID NO: 8995 - DNA, 15 bp, Homo sapiens
tgtacttcagcctga

SEQ ID NO: 8996 - DNA, 15 bp, Homo sapiens
ttgtacttcagcctg

SEQ ID NO: 8997 - DNA, 15 bp, Homo sapiens
attgtacttcagcct

SEQ ID NO: 8998 - DNA, 15 bp, Homo sapiens
tattgtacttcagcc

SEQ ID NO: 8999 - DNA, 15 bp, Homo sapiens
ttattgtacttcagc

SEQ ID NO: 9000 - DNA, 15 bp, Homo sapiens
cttattgtacttcag

SEQ ID NO: 9001 - DNA, 15 bp, Homo sapiens
ccttattgtacttca

SEQ ID NO: 9002 - DNA, 15 bp, Homo sapiens
accttattgtacttc

SEQ ID NO: 9003 - DNA, 15 bp, Homo sapiens
aaccttattgtactt

SEQ ID NO: 9004 - DNA, 15 bp, Homo sapiens
gaaccttattgtact

SEQ ID NO: 9005 - DNA, 15 bp, Homo sapiens
agaaccttattgtac

SEQ ID NO: 9006 - DNA, 15 bp, Homo sapiens
gagaaccttattgta

SEQ ID NO: 9007 - DNA, 15 bp, Homo sapiens
agagaaccttattgt

SEQ ID NO: 9008 - DNA, 15 bp, Homo sapiens
cagagaaccttattg

SEQ ID NO: 9009 - DNA, 15 bp, Homo sapiens
acagagaaccttatt

SEQ ID NO: 9010 - DNA, 15 bp, Homo sapiens
aacagagaaccttat

SEQ ID NO: 9011 - DNA, 15 bp, Homo sapiens
gaacagagaacctta

SEQ ID NO: 9012 - DNA, 15 bp, Homo sapiens
agaacagagaacctt

SEQ ID NO: 9013 - DNA, 15 bp, Homo sapiens
aagaacagagaacct

SEQ ID NO: 9014 - DNA, 15 bp, Homo sapiens
aaagaacagagaacc

SEQ ID NO: 9015 - DNA, 15 bp, Homo sapiens
taaagaacagagaac

SEQ ID NO: 9016 - DNA, 15 bp, Homo sapiens
gtaaagaacagagaa

SEQ ID NO: 9017 - DNA, 15 bp, Homo sapiens
agtaaagaacagaga

SEQ ID NO: 9018 - DNA, 15 bp, Homo sapiens
tagtaaagaacagag

SEQ ID NO: 9019 - DNA, 15 bp, Homo sapiens
ctagtaaagaacaga

SEQ ID NO: 9020 - DNA, 15 bp, Homo sapiens
actagtaaagaacag

SEQ ID NO: 9021 - DNA, 15 bp, Homo sapiens
tactagtaaagaaca

SEQ ID NO: 9022 - DNA, 15 bp, Homo sapiens
ttactagtaaagaac

SEQ ID NO: 9023 - DNA, 15 bp, Homo sapiens
attactagtaaagaa

SEQ ID NO: 9024 - DNA, 15 bp, Homo sapiens
aattactagtaaaga

SEQ ID NO: 9025 - DNA, 15 bp, Homo sapiens
caattactagtaaag

SEQ ID NO: 9026 - DNA, 15 bp, Homo sapiens
gcaattactagtaaa

SEQ ID NO: 9027 - DNA, 15 bp, Homo sapiens
tgcaattactagtaa

SEQ ID NO: 9028 - DNA, 15 bp, Homo sapiens
ttgcaattactagta

SEQ ID NO: 9029 - DNA, 15 bp, Homo sapiens
tttgcaattactagt

SEQ ID NO: 9030 - DNA, 15 bp, Homo sapiens
ctttgcaattactag

SEQ ID NO: 9031 - DNA, 15 bp, Homo sapiens
tctttgcaattacta

SEQ ID NO: 9032 - DNA, 15 bp, Homo sapiens
atctttgcaattact

SEQ ID NO: 9033 - DNA, 15 bp, Homo sapiens
aatctttgcaattac

SEQ ID NO: 9034 - DNA, 15 bp, Homo sapiens
caatctttgcaatta

SEQ ID NO: 9035 - DNA, 15 bp, Homo sapiens
acaatctttgcaatt

SEQ ID NO: 9036 - DNA, 15 bp, Homo sapiens
tacaatctttgcaat

SEQ ID NO: 9037 - DNA, 15 bp, Homo sapiens
atacaatctttgcaa

SEQ ID NO: 9038 - DNA, 15 bp, Homo sapiens
aatacaatctttgca

SEQ ID NO: 9039 - DNA, 15 bp, Homo sapiens
gaatacaatctttgc

SEQ ID NO: 9040 - DNA, 15 bp, Homo sapiens
agaatacaatctttg

SEQ ID NO: 9041 - DNA, 15 bp, Homo sapiens
cagaatacaatcttt

SEQ ID NO: 9042 - DNA, 15 bp, Homo sapiens
acagaatacaatctt

SEQ ID NO: 9043 - DNA, 15 bp, Homo sapiens
cacagaatacaatct

SEQ ID NO: 9044 - DNA, 15 bp, Homo sapiens
tcacagaatacaatc

SEQ ID NO: 9045 - DNA, 15 bp, Homo sapiens
ttcacagaatacaat

SEQ ID NO: 9046 - DNA, 15 bp, Homo sapiens
attcacagaatacaa

SEQ ID NO: 9047 - DNA, 15 bp, Homo sapiens
aattcacagaataca

SEQ ID NO: 9048 - DNA, 15 bp, Homo sapiens
aaattcacagaatac

SEQ ID NO: 9049 - DNA, 15 bp, Homo sapiens
aaaattcacagaata

SEQ ID NO: 9050 - DNA, 15 bp, Homo sapiens
taaaattcacagaat

SEQ ID NO: 9051 - DNA, 15 bp, Homo sapiens
ataaaattcacagaa

SEQ ID NO: 9052 - DNA, 15 bp, Homo sapiens
aataaaattcacaga

SEQ ID NO: 9053 - DNA, 15 bp, Homo sapiens
aaataaaattcacag

SEQ ID NO: 9054 - DNA, 15 bp, Homo sapiens
caaataaaattcaca

SEQ ID NO: 9055 - DNA, 15 bp, Homo sapiens
acaaataaaattcac

SEQ ID NO: 9056 - DNA, 15 bp, Homo sapiens
aacaaataaaattca

SEQ ID NO: 9057 - DNA, 15 bp, Homo sapiens
aaacaaataaaattc

SEQ ID NO: 9058 - DNA, 15 bp, Homo sapiens
taaacaaataaaatt

SEQ ID NO: 9059 - DNA, 15 bp, Homo sapiens
ttaaacaaataaaat

SEQ ID NO: 9060 - DNA, 15 bp, Homo sapiens
attaaacaaataaaa

SEQ ID NO: 9061 - DNA, 15 bp, Homo sapiens
tattaaacaaataaa

SEQ ID NO: 9062 - DNA, 15 bp, Homo sapiens
gtattaaacaaataa

SEQ ID NO: 9063 - DNA, 15 bp, Homo sapiens
agtattaaacaaata

SEQ ID NO: 9064 - DNA, 15 bp, Homo sapiens
aagtattaaacaaat

SEQ ID NO: 9065 - DNA, 15 bp, Homo sapiens
aaagtattaaacaaa

SEQ ID NO: 9066 - DNA, 15 bp, Homo sapiens
aaaagtattaaacaa

SEQ ID NO: 9067 - DNA, 15 bp, Homo sapiens
caaaagtattaaaca

SEQ ID NO: 9068 - DNA, 15 bp, Homo sapiens
tcaaaagtattaaac

SEQ ID NO: 9069 - DNA, 15 bp, Homo sapiens
atcaaaagtattaaa

SEQ ID NO: 9070 - DNA, 15 bp, Homo sapiens
gatcaaaagtattaa

SEQ ID NO: 9071 - DNA, 15 bp, Homo sapiens
agatcaaaagtatta

SEQ ID NO: 9072 - DNA, 15 bp, Homo sapiens
aagatcaaaagtatt

SEQ ID NO: 9073 - DNA, 15 bp, Homo sapiens
aaagatcaaaagtat

SEQ ID NO: 9074 - DNA, 15 bp, Homo sapiens
aaaagatcaaaagta

SEQ ID NO: 9075 - DNA, 15 bp, Homo sapiens
caaaagatcaaaagt

SEQ ID NO: 9076 - DNA, 15 bp, Homo sapiens
tcaaaagatcaaaag

SEQ ID NO: 9077 - DNA, 15 bp, Homo sapiens
ttcaaaagatcaaaa

SEQ ID NO: 9078 - DNA, 15 bp, Homo sapiens
cttcaaaagatcaaa

SEQ ID NO: 9079 - DNA, 15 bp, Homo sapiens
tcttcaaaagatcaa

SEQ ID NO: 9080 - DNA, 15 bp, Homo sapiens
ctcttcaaaagatca

SEQ ID NO: 9081 - DNA, 15 bp, Homo sapiens
cctcttcaaaagatc

SEQ ID NO: 9082 - DNA, 15 bp, Homo sapiens
tcctcttcaaaagat

SEQ ID NO: 9083 - DNA, 15 bp, Homo sapiens
atcctcttcaaaaga

SEQ ID NO: 9084 - DNA, 15 bp, Homo sapiens
catcctcttcaaaag

SEQ ID NO: 9085 - DNA, 15 bp, Homo sapiens
acatcctcttcaaaa

SEQ ID NO: 9086 - DNA, 15 bp, Homo sapiens
tacatcctcttcaaa

SEQ ID NO: 9087 - DNA, 15 bp, Homo sapiens
ttacatcctcttcaa

SEQ ID NO: 9088 - DNA, 15 bp, Homo sapiens
attacatcctcttca

SEQ ID NO: 9089 - DNA, 15 bp, Homo sapiens
aattacatcctcttc

SEQ ID NO: 9090 - DNA, 15 bp, Homo sapiens
taattacatcctctt

SEQ ID NO: 9091 - DNA, 15 bp, Homo sapiens
ataattacatcctct

SEQ ID NO: 9092 - DNA, 15 bp, Homo sapiens
aataattacatcctc

SEQ ID NO: 9093 - DNA, 15 bp, Homo sapiens
aaataattacatcct

SEQ ID NO: 9094 - DNA, 15 bp, Homo sapiens
taaataattacatcc

SEQ ID NO: 9095 - DNA, 15 bp, Homo sapiens
ttaaataattacatc

SEQ ID NO: 9096 - DNA, 15 bp, Homo sapiens
cttaaataattacat

SEQ ID NO: 9097 - DNA, 15 bp, Homo sapiens
ccttaaataattaca

SEQ ID NO: 9098 - DNA, 15 bp, Homo sapiens
accttaaataattac

SEQ ID NO: 9099 - DNA, 15 bp, Homo sapiens
taccttaaataatta

SEQ ID NO: 9100 - DNA, 15 bp, Homo sapiens
ataccttaaataatt

SEQ ID NO: 9101 - DNA, 15 bp, Homo sapiens
aataccttaaataat

SEQ ID NO: 9102 - DNA, 15 bp, Homo sapiens
taataccttaaataa

SEQ ID NO: 9103 - DNA, 15 bp, Homo sapiens
ataataccttaaata

SEQ ID NO: 9104 - DNA, 15 bp, Homo sapiens
cataataccttaaat

SEQ ID NO: 9105 - DNA, 15 bp, Homo sapiens
tcataataccttaaa

SEQ ID NO: 9106 - DNA, 15 bp, Homo sapiens
ttcataataccttaa

SEQ ID NO: 9107 - DNA, 15 bp, Homo sapiens
tttcataatacctta

SEQ ID NO: 9108 - DNA, 15 bp, Homo sapiens
atttcataatacctt

SEQ ID NO: 9109 - DNA, 15 bp, Homo sapiens
catttcataatacct

SEQ ID NO: 9110 - DNA, 15 bp, Homo sapiens
gcatttcataatacc

SEQ ID NO: 9111 - DNA, 15 bp, Homo sapiens
tgcatttcataatac

SEQ ID NO: 9112 - DNA, 15 bp, Homo sapiens
atgcatttcataata

SEQ ID NO: 9113 - DNA, 15 bp, Homo sapiens
aatgcatttcataat

SEQ ID NO: 9114 - DNA, 15 bp, Homo sapiens
caatgcatttcataa

SEQ ID NO: 9115 - DNA, 15 bp, Homo sapiens
acaatgcatttcata

SEQ ID NO: 9116 - DNA, 15 bp, Homo sapiens
cacaatgcatttcat

SEQ ID NO: 9117 - DNA, 15 bp, Homo sapiens
tcacaatgcatttca

SEQ ID NO: 9118 - DNA, 15 bp, Homo sapiens
atcacaatgcatttc

SEQ ID NO: 9119 - DNA, 15 bp, Homo sapiens
aatcacaatgcattt

SEQ ID NO: 9120 - DNA, 15 bp, Homo sapiens
aaatcacaatgcatt

SEQ ID NO: 9121 - DNA, 15 bp, Homo sapiens
caaatcacaatgcat

SEQ ID NO: 9122 - DNA, 15 bp, Homo sapiens
tcaaatcacaatgca

SEQ ID NO: 9123 - DNA, 15 bp, Homo sapiens
ttcaaatcacaatgc

SEQ ID NO: 9124 - DNA, 15 bp, Homo sapiens
attcaaatcacaatg

SEQ ID NO: 9125 - DNA, 15 bp, Homo sapiens
aattcaaatcacaat

SEQ ID NO: 9126 - DNA, 15 bp, Homo sapiens
taattcaaatcacaa

SEQ ID NO: 9127 - DNA, 15 bp, Homo sapiens
ctaattcaaatcaca

SEQ ID NO: 9128 - DNA, 15 bp, Homo sapiens
tctaattcaaatcac

SEQ ID NO: 9129 - DNA, 15 bp, Homo sapiens
atctaattcaaatca

SEQ ID NO: 9130 - DNA, 15 bp, Homo sapiens
tatctaattcaaatc

SEQ ID NO: 9131 - DNA, 15 bp, Homo sapiens
gtatctaattcaaat

SEQ ID NO: 9132 - DNA, 15 bp, Homo sapiens
agtatctaattcaaa

SEQ ID NO: 9133 - DNA, 15 bp, Homo sapiens
gagtatctaattcaa

SEQ ID NO: 9134 - DNA, 15 bp, Homo sapiens
agagtatctaattca

SEQ ID NO: 9135 - DNA, 15 bp, Homo sapiens
aagagtatctaattc

SEQ ID NO: 9136 - DNA, 15 bp, Homo sapiens
aaagagtatctaatt

SEQ ID NO: 9137 - DNA, 15 bp, Homo sapiens
caaagagtatctaat

SEQ ID NO: 9138 - DNA, 15 bp, Homo sapiens
ccaaagagtatctaa

SEQ ID NO: 9139 - DNA, 15 bp, Homo sapiens
tccaaagagtatcta

SEQ ID NO: 9140 - DNA, 15 bp, Homo sapiens
ctccaaagagtatct

SEQ ID NO: 9141 - DNA, 15 bp, Homo sapiens
tctccaaagagtatc

SEQ ID NO: 9142 - DNA, 15 bp, Homo sapiens
atctccaaagagtat

SEQ ID NO: 9143 - DNA, 15 bp, Homo sapiens
catctccaaagagta

SEQ ID NO: 9144 - DNA, 15 bp, Homo sapiens
ccatctccaaagagt

SEQ ID NO: 9145 - DNA, 15 bp, Homo sapiens
tccatctccaaagag

SEQ ID NO: 9146 - DNA, 15 bp, Homo sapiens
ctccatctccaaaga

SEQ ID NO: 9147 - DNA, 15 bp, Homo sapiens
actccatctccaaag

SEQ ID NO: 9148 - DNA, 15 bp, Homo sapiens
aactccatctccaaa

SEQ ID NO: 9149 - DNA, 15 bp, Homo sapiens
aaactccatctccaa

SEQ ID NO: 9150 - DNA, 15 bp, Homo sapiens
aaaactccatctcca

SEQ ID NO: 9151 - DNA, 15 bp, Homo sapiens
caaaactccatctcc

SEQ ID NO: 9152 - DNA, 15 bp, Homo sapiens
gcaaaactccatctc

SEQ ID NO: 9153 - DNA, 15 bp, Homo sapiens
agcaaaactccatct

SEQ ID NO: 9154 - DNA, 15 bp, Homo sapiens
cagcaaaactccatc

SEQ ID NO: 9155 - DNA, 15 bp, Homo sapiens
acagcaaaactccat

SEQ ID NO: 9156 - DNA, 15 bp, Homo sapiens
aacagcaaaactcca

SEQ ID NO: 9157 - DNA, 15 bp, Homo sapiens
caacagcaaaactcc

SEQ ID NO: 9158 - DNA, 15 bp, Homo sapiens
acaacagcaaaactc

SEQ ID NO: 9159 - DNA, 15 bp, Homo sapiens
aacaacagcaaaact

SEQ ID NO: 9160 - DNA, 15 bp, Homo sapiens
caacaacagcaaaac

SEQ ID NO: 9161 - DNA, 15 bp, Homo sapiens
gcaacaacagcaaaa

SEQ ID NO: 9162 - DNA, 15 bp, Homo sapiens
ggcaacaacagcaaa

SEQ ID NO: 9163 - DNA, 15 bp, Homo sapiens
gggcaacaacagcaa

SEQ ID NO: 9164 - DNA, 15 bp, Homo sapiens
tgggcaacaacagca

SEQ ID NO: 9165 - DNA, 15 bp, Homo sapiens
ctgggcaacaacagc

SEQ ID NO: 9166 - DNA, 15 bp, Homo sapiens
cctgggcaacaacag

SEQ ID NO: 9167 - DNA, 15 bp, Homo sapiens
gcctgggcaacaaca

SEQ ID NO: 9168 - DNA, 15 bp, Homo sapiens
agcctgggcaacaac

SEQ ID NO: 9169 - DNA, 15 bp, Homo sapiens
cagcctgggcaacaa

SEQ ID NO: 9170 - DNA, 15 bp, Homo sapiens
ccagcctgggcaaca

SEQ ID NO: 9171 - DNA, 15 bp, Homo sapiens
tccagcctgggcaac

SEQ ID NO: 9172 - DNA, 15 bp, Homo sapiens
ctccagcctgggcaa

SEQ ID NO: 9173 - DNA, 15 bp, Homo sapiens
actccagcctgggca

SEQ ID NO: 9174 - DNA, 15 bp, Homo sapiens
cactccagcctgggc

SEQ ID NO: 9175 - DNA, 15 bp, Homo sapiens
gcactccagcctggg

SEQ ID NO: 9176 - DNA, 15 bp, Homo sapiens
tgcactccagcctgg

SEQ ID NO: 9177 - DNA, 15 bp, Homo sapiens
ttgcactccagcctg

SEQ ID NO: 9178 - DNA, 15 bp, Homo sapiens
attgcactccagcct

SEQ ID NO: 9179 - DNA, 15 bp, Homo sapiens
cattgcactccagcc

SEQ ID NO: 9180 - DNA, 15 bp, Homo sapiens
ccattgcactccagc

SEQ ID NO: 9181 - DNA, 15 bp, Homo sapiens
accattgcactccag

SEQ ID NO: 9182 - DNA, 15 bp, Homo sapiens
caccattgcactcca

SEQ ID NO: 9183 - DNA, 15 bp, Homo sapiens
acaccattgcactcc

SEQ ID NO: 9184 - DNA, 15 bp, Homo sapiens
cacaccattgcactc

SEQ ID NO: 9185 - DNA, 15 bp, Homo sapiens
tcacaccattgcact

SEQ ID NO: 9186 - DNA, 15 bp, Homo sapiens
atcacaccattgcac

SEQ ID NO: 9187 - DNA, 15 bp, Homo sapiens
gatcacaccattgca

SEQ ID NO: 9188 - DNA, 15 bp, Homo sapiens
agatcacaccattgc

SEQ ID NO: 9189 - DNA, 15 bp, Homo sapiens
gagatcacaccattg

SEQ ID NO: 9190 - DNA, 15 bp, Homo sapiens
cgagatcacaccatt

SEQ ID NO: 9191 - DNA, 15 bp, Homo sapiens
ccgagatcacaccat

SEQ ID NO: 9192 - DNA, 15 bp, Homo sapiens
ggtgagccgagatca

SEQ ID NO: 9193 - DNA, 15 bp, Homo sapiens
tggtgagccgagatc

SEQ ID NO: 9194 - DNA, 15 bp, Homo sapiens
gtggtgagccgagat

SEQ ID NO: 9195 - DNA, 15 bp, Homo sapiens
tgtggtgagccgaga

SEQ ID NO: 9196 - DNA, 15 bp, Homo sapiens
ctgtggtgagccgag

SEQ ID NO: 9197 - DNA, 15 bp, Homo sapiens
gctgtggtgagccga

SEQ ID NO: 9198 - DNA, 15 bp, Homo sapiens
ggctgtggtgagccg

SEQ ID NO: 9199 - DNA, 15 bp, Homo sapiens
aggctgtggtgagcc

SEQ ID NO: 9200 - DNA, 15 bp, Homo sapiens
gaggctgtggtgagc

SEQ ID NO: 9201 - DNA, 15 bp, Homo sapiens
ggaggctgtggtgag

SEQ ID NO: 9202 - DNA, 15 bp, Homo sapiens
cggaggctgtggtga

SEQ ID NO: 9203 - DNA, 15 bp, Homo sapiens
gcggaggctgtggtg

SEQ ID NO: 9204 - DNA, 15 bp, Homo sapiens
ggcggaggctgtggt

SEQ ID NO: 9205 - DNA, 15 bp, Homo sapiens
aggcggaggctgtgg

SEQ ID NO: 9206 - DNA, 15 bp, Homo sapiens
gaggcggaggctgtg

SEQ ID NO: 9207 - DNA, 15 bp, Homo sapiens
ggaggcggaggctgt

SEQ ID NO: 9208 - DNA, 15 bp, Homo sapiens
aggaggcggaggctg

SEQ ID NO: 9209 - DNA, 15 bp, Homo sapiens
caggaggcggaggct

SEQ ID NO: 9210 - DNA, 15 bp, Homo sapiens
ccaggaggcggaggc

SEQ ID NO: 9211 - DNA, 15 bp, Homo sapiens
cccaggaggcggagg

SEQ ID NO: 9212 - DNA, 15 bp, Homo sapiens
acccaggaggcggag

SEQ ID NO: 9213 - DNA, 15 bp, Homo sapiens
aacccaggaggcgga

SEQ ID NO: 9214 - DNA, 15 bp, Homo sapiens
gaacccaggaggcgg

SEQ ID NO: 9215 - DNA, 15 bp, Homo sapiens
tgaacccaggaggcg

SEQ ID NO: 9216 - DNA, 15 bp, Homo sapiens
ttgaacccaggaggc

SEQ ID NO: 9217 - DNA, 15 bp, Homo sapiens
cttgaacccaggagg

SEQ ID NO: 9218 - DNA, 15 bp, Homo sapiens
tgcttgaacccagga

SEQ ID NO: 9219 - DNA, 15 bp, Homo sapiens
ttgcttgaacccagg

SEQ ID NO: 9220 - DNA, 15 bp, Homo sapiens
attgcttgaacccag

SEQ ID NO: 9221 - DNA, 15 bp, Homo sapiens
aattgcttgaaccca

SEQ ID NO: 9222 - DNA, 15 bp, Homo sapiens
gaattgcttgaaccc

SEQ ID NO: 9223 - DNA, 15 bp, Homo sapiens
agaattgcttgaacc

SEQ ID NO: 9224 - DNA, 15 bp, Homo sapiens
gagaattgcttgaac

SEQ ID NO: 9225 - DNA, 15 bp, Homo sapiens
agagaattgcttgaa

SEQ ID NO: 9226 - DNA, 15 bp, Homo sapiens
aagagaattgcttga

SEQ ID NO: 9227 - DNA, 15 bp, Homo sapiens
caagagaattgcttg

SEQ ID NO: 9228 - DNA, 15 bp, Homo sapiens
gcaagagaattgctt

SEQ ID NO: 9229 - DNA, 15 bp, Homo sapiens
ggcaagagaattgct

SEQ ID NO: 9230 - DNA, 15 bp, Homo sapiens
cggcaagagaattgc

SEQ ID NO: 9231 - DNA, 15 bp, Homo sapiens
gcggcaagagaattg

SEQ ID NO: 9232 - DNA, 15 bp, Homo sapiens
tgcggcaagagaatt

SEQ ID NO: 9233 - DNA, 15 bp, Homo sapiens
ctgcggcaagagaat

SEQ ID NO: 9234 - DNA, 15 bp, Homo sapiens
gctgcggcaagagaa

SEQ ID NO: 9235 - DNA, 15 bp, Homo sapiens
ggctgcggcaagaga

SEQ ID NO: 9236 - DNA, 15 bp, Homo sapiens
aggctgcggcaagag

SEQ ID NO: 9237 - DNA, 15 bp, Homo sapiens
gaggctgcggcaaga

SEQ ID NO: 9238 - DNA, 15 bp, Homo sapiens
ggaggctgcggcaag

SEQ ID NO: 9239 - DNA, 15 bp, Homo sapiens
gggaggctgcggcaa

SEQ ID NO: 9240 - DNA, 15 bp, Homo sapiens
tgggaggctgcggca

SEQ ID NO: 9241 - DNA, 15 bp, Homo sapiens
ttgggaggctgcggc

SEQ ID NO: 9242 - DNA, 15 bp, Homo sapiens
cttgggaggctgcgg

SEQ ID NO: 9243 - DNA, 15 bp, Homo sapiens
acttgggaggctgcg

SEQ ID NO: 9244 - DNA, 15 bp, Homo sapiens
tacttgggaggctgc

SEQ ID NO: 9245 - DNA, 15 bp, Homo sapiens
tccagctacttggga

SEQ ID NO: 9246 - DNA, 15 bp, Homo sapiens
ttccagctacttggg

SEQ ID NO: 9247 - DNA, 15 bp, Homo sapiens
attccagctacttgg

SEQ ID NO: 9248 - DNA, 15 bp, Homo sapiens
aattccagctacttg

SEQ ID NO: 9249 - DNA, 15 bp, Homo sapiens
taattccagctactt

SEQ ID NO: 9250 - DNA, 15 bp, Homo sapiens
gtaattccagctact

SEQ ID NO: 9251 - DNA, 15 bp, Homo sapiens
tgtaattccagctac

SEQ ID NO: 9252 - DNA, 15 bp, Homo sapiens
ctgtaattccagcta

SEQ ID NO: 9253 - DNA, 15 bp, Homo sapiens
cctgtaattccagct

SEQ ID NO: 9254 - DNA, 15 bp, Homo sapiens
gcctgtaattccagc

SEQ ID NO: 9255 - DNA, 15 bp, Homo sapiens
tgcctgtaattccag

SEQ ID NO: 9256 - DNA, 15 bp, Homo sapiens
atgcctgtaattcca

SEQ ID NO: 9257 - DNA, 15 bp, Homo sapiens
catgcctgtaattcc

SEQ ID NO: 9258 - DNA, 15 bp, Homo sapiens
gcatgcctgtaattc

SEQ ID NO: 9259 - DNA, 15 bp, Homo sapiens
cgcatgcctgtaatt

SEQ ID NO: 9260 - DNA, 15 bp, Homo sapiens
gcgcatgcctgtaat

SEQ ID NO: 9261 - DNA, 15 bp, Homo sapiens
ggcgcatgcctgtaa

SEQ ID NO: 9262 - DNA, 15 bp, Homo sapiens
tggcgcatgcctgta

SEQ ID NO: 9263 - DNA, 15 bp, Homo sapiens
gtggcgcatgcctgt

SEQ ID NO: 9264 - DNA, 15 bp, Homo sapiens
ggtggcgcatgcctg

SEQ ID NO: 9265 - DNA, 15 bp, Homo sapiens
tggtggcgcatgcct

SEQ ID NO: 9266 - DNA, 15 bp, Homo sapiens
gtggtggcgcatgcc

SEQ ID NO: 9267 - DNA, 15 bp, Homo sapiens
cgtggtggcgcatgc

SEQ ID NO: 9268 - DNA, 15 bp, Homo sapiens
gcgtggtggcgcatg

SEQ ID NO: 9269 - DNA, 15 bp, Homo sapiens
ggcgtggtggcgcat

SEQ ID NO: 9270 - DNA, 15 bp, Homo sapiens
gggcgtggtggcgca

SEQ ID NO: 9271 - DNA, 15 bp, Homo sapiens
cgggcgtggtggcgc

SEQ ID NO: 9272 - DNA, 15 bp, Homo sapiens
ccgggcgtggtggcg

SEQ ID NO: 9273 - DNA, 15 bp, Homo sapiens
gccgggcgtggtggc

SEQ ID NO: 9274 - DNA, 15 bp, Homo sapiens
agccgggcgtggtgg

SEQ ID NO: 9275 - DNA, 15 bp, Homo sapiens
tagccgggcgtggtg

SEQ ID NO: 9276 - DNA, 15 bp, Homo sapiens
ttagccgggcgtggt

SEQ ID NO: 9277 - DNA, 15 bp, Homo sapiens
attagccgggcgtgg

SEQ ID NO: 9278 - DNA, 15 bp, Homo sapiens
aattagccgggcgtg

SEQ ID NO: 9279 - DNA, 15 bp, Homo sapiens
aaattagccgggcgt

SEQ ID NO: 9280 - DNA, 15 bp, Homo sapiens
aaaattagccgggcg

SEQ ID NO: 9281 - DNA, 15 bp, Homo sapiens
taaaattagccgggc

SEQ ID NO: 9282 - DNA, 15 bp, Homo sapiens
ataaaattagccggg

SEQ ID NO: 9283 - DNA, 15 bp, Homo sapiens
tataaaattagccgg

SEQ ID NO: 9284 - DNA, 15 bp, Homo sapiens
atataaaattagccg

SEQ ID NO: 9285 - DNA, 15 bp, Homo sapiens
aatataaaattagcc

SEQ ID NO: 9286 - DNA, 15 bp, Homo sapiens
aaatataaaattagc

SEQ ID NO: 9287 - DNA, 15 bp, Homo sapiens
aaaatataaaattag

SEQ ID NO: 9288 - DNA, 15 bp, Homo sapiens
aaaaatataaaatta

SEQ ID NO: 9289 - DNA, 15 bp, Homo sapiens
aaaaaatataaaatt

SEQ ID NO: 9290 - DNA, 15 bp, Homo sapiens
aaaaaaatataaaat

SEQ ID NO: 9291 - DNA, 15 bp, Homo sapiens
aaaaaaaatataaaa

SEQ ID NO: 9292 - DNA, 15 bp, Homo sapiens
aaaaaaaaatataaa

SEQ ID NO: 9293 - DNA, 15 bp, Homo sapiens
aaaaaaaaaatataa

SEQ ID NO: 9294 - DNA, 15 bp, Homo sapiens
gaaaaaaaaaatata

SEQ ID NO: 9295 - DNA, 15 bp, Homo sapiens
tgaaaaaaaaaatat

SEQ ID NO: 9296 - DNA, 15 bp, Homo sapiens
ctgaaaaaaaaaata

SEQ ID NO: 9297 - DNA, 15 bp, Homo sapiens
actgaaaaaaaaaat

SEQ ID NO: 9298 - DNA, 15 bp, Homo sapiens
tactgaaaaaaaaaa

SEQ ID NO: 9299 - DNA, 15 bp, Homo sapiens
ctactgaaaaaaaaa

SEQ ID NO: 9300 - DNA, 15 bp, Homo sapiens
tctactgaaaaaaaa

SEQ ID NO: 9301 - DNA, 15 bp, Homo sapiens
ctctactgaaaaaaa

SEQ ID NO: 9302 - DNA, 15 bp, Homo sapiens
tctctactgaaaaaa

SEQ ID NO: 9303 - DNA, 15 bp, Homo sapiens
atctctactgaaaaa

SEQ ID NO: 9304 - DNA, 15 bp, Homo sapiens
catctctactgaaaa

SEQ ID NO: 9305 - DNA, 15 bp, Homo sapiens
ccatctctactgaaa

SEQ ID NO: 9306 - DNA, 15 bp, Homo sapiens
cccatctctactgaa

SEQ ID NO: 9307 - DNA, 15 bp, Homo sapiens
ccccatctctactga

SEQ ID NO: 9308 - DNA, 15 bp, Homo sapiens
cccccatctctactg

SEQ ID NO: 9309 - DNA, 15 bp, Homo sapiens
ccccccatctctact

SEQ ID NO: 9310 - DNA, 15 bp, Homo sapiens
accccccatctctac

SEQ ID NO: 9311 - DNA, 15 bp, Homo sapiens
aaccccccatctcta

SEQ ID NO: 9312 - DNA, 15 bp, Homo sapiens
aaaccccccatctct

SEQ ID NO: 9313 - DNA, 15 bp, Homo sapiens
gaaaccccccatctc

SEQ ID NO: 9314 - DNA, 15 bp, Homo sapiens
agaaaccccccatct

SEQ ID NO: 9315 - DNA, 15 bp, Homo sapiens
gagaaaccccccatc

SEQ ID NO: 9316 - DNA, 15 bp, Homo sapiens
ggagaaaccccccat

SEQ ID NO: 9317 - DNA, 15 bp, Homo sapiens
tggagaaacccccca

SEQ ID NO: 9318 - DNA, 15 bp, Homo sapiens
atggagaaacccccc

SEQ ID NO: 9319 - DNA, 15 bp, Homo sapiens
catggagaaaccccc

SEQ ID NO: 9320 - DNA, 15 bp, Homo sapiens
acatggagaaacccc

SEQ ID NO: 9321 - DNA, 15 bp, Homo sapiens
aacatggagaaaccc

SEQ ID NO: 9322 - DNA, 15 bp, Homo sapiens
caacatggagaaacc

SEQ ID NO: 9323 - DNA, 15 bp, Homo sapiens
ccaacatggagaaac

SEQ ID NO: 9324 - DNA, 15 bp, Homo sapiens
accaacatggagaaa

SEQ ID NO: 9325 - DNA, 15 bp, Homo sapiens
gaccaacatggagaa

SEQ ID NO: 9326 - DNA, 15 bp, Homo sapiens
tgaccaacatggaga

SEQ ID NO: 9327 - DNA, 15 bp, Homo sapiens
ctgaccaacatggag

SEQ ID NO: 9328 - DNA, 15 bp, Homo sapiens
cctgaccaacatgga

SEQ ID NO: 9329 - DNA, 15 bp, Homo sapiens
gcctgaccaacatgg

SEQ ID NO: 9330 - DNA, 15 bp, Homo sapiens
agcctgaccaacatg

SEQ ID NO: 9331 - DNA, 15 bp, Homo sapiens
cagcctgaccaacat

SEQ ID NO: 9332 - DNA, 15 bp, Homo sapiens
ccagcctgaccaaca

SEQ ID NO: 9333 - DNA, 15 bp, Homo sapiens
gccagcctgaccaac

SEQ ID NO: 9334 - DNA, 15 bp, Homo sapiens
ggccagcctgaccaa

SEQ ID NO: 9335 - DNA, 15 bp, Homo sapiens
aggccagcctgacca

SEQ ID NO: 9336 - DNA, 15 bp, Homo sapiens
gaggccagcctgacc

SEQ ID NO: 9337 - DNA, 15 bp, Homo sapiens
cgaggccagcctgac

SEQ ID NO: 9338 - DNA, 15 bp, Homo sapiens
tcgaggccagcctga

SEQ ID NO: 9339 - DNA, 15 bp, Homo sapiens
ttcgaggccagcctg

SEQ ID NO: 9340 - DNA, 15 bp, Homo sapiens
gttcgaggccagcct

SEQ ID NO: 9341 - DNA, 15 bp, Homo sapiens
agttcgaggccagcc

SEQ ID NO: 9342 - DNA, 15 bp, Homo sapiens
gagttcgaggccagc

SEQ ID NO: 9343 - DNA, 15 bp, Homo sapiens
agagttcgaggccag

SEQ ID NO: 9344 - DNA, 15 bp, Homo sapiens
aagagttcgaggcca

SEQ ID NO: 9345 - DNA, 15 bp, Homo sapiens
caagagttcgaggcc

SEQ ID NO: 9346 - DNA, 15 bp, Homo sapiens
tcaagagttcgaggc

SEQ ID NO: 9347 - DNA, 15 bp, Homo sapiens
gtcaagagttcgagg

SEQ ID NO: 9348 - DNA, 15 bp, Homo sapiens
ggtcaagagttcgag

SEQ ID NO: 9349 - DNA, 15 bp, Homo sapiens
aggtcaagagttcga

SEQ ID NO: 9350 - DNA, 15 bp, Homo sapiens
gaggtcaagagttcg

SEQ ID NO: 9351 - DNA, 15 bp, Homo sapiens
tgaggtcaagagttc

SEQ ID NO: 9352 - DNA, 15 bp, Homo sapiens
ctgaggtcaagagtt

SEQ ID NO: 9353 - DNA, 15 bp, Homo sapiens
cctgaggtcaagagt

SEQ ID NO: 9354 - DNA, 15 bp, Homo sapiens
acctgaggtcaagag

SEQ ID NO: 9355 - DNA, 15 bp, Homo sapiens
tacctgaggtcaaga

SEQ ID NO: 9356 - DNA, 15 bp, Homo sapiens
ttacctgaggtcaag

SEQ ID NO: 9357 - DNA, 15 bp, Homo sapiens
attacctgaggtcaa

SEQ ID NO: 9358 - DNA, 15 bp, Homo sapiens
gattacctgaggtca

SEQ ID NO: 9359 - DNA, 15 bp, Homo sapiens
agattacctgaggtc

SEQ ID NO: 9360 - DNA, 15 bp, Homo sapiens
cagattacctgaggt

SEQ ID NO: 9361 - DNA, 15 bp, Homo sapiens
gcagattacctgagg

SEQ ID NO: 9362 - DNA, 15 bp, Homo sapiens
ggcagattacctgag

SEQ ID NO: 9363 - DNA, 15 bp, Homo sapiens
aggcagattacctga

SEQ ID NO: 9364 - DNA, 15 bp, Homo sapiens
caggcagattacctg

SEQ ID NO: 9365 - DNA, 15 bp, Homo sapiens
acaggcagattacct

SEQ ID NO: 9366 - DNA, 15 bp, Homo sapiens
gacaggcagattacc

SEQ ID NO: 9367 - DNA, 15 bp, Homo sapiens
agacaggcagattac

SEQ ID NO: 9368 - DNA, 15 bp, Homo sapiens
gagacaggcagatta

SEQ ID NO: 9369 - DNA, 15 bp, Homo sapiens
tgagacaggcagatt

SEQ ID NO: 9370 - DNA, 15 bp, Homo sapiens
ctgagacaggcagat

SEQ ID NO: 9371 - DNA, 15 bp, Homo sapiens
gctgagacaggcaga

SEQ ID NO: 9372 - DNA, 15 bp, Homo sapiens
ggctgagacaggcag

SEQ ID NO: 9373 - DNA, 15 bp, Homo sapiens
aggctgagacaggca

SEQ ID NO: 9374 - DNA, 15 bp, Homo sapiens
caggctgagacaggc

SEQ ID NO: 9375 - DNA, 15 bp, Homo sapiens
gcaggctgagacagg

SEQ ID NO: 9376 - DNA, 15 bp, Homo sapiens
agcaggctgagacag

SEQ ID NO: 9377 - DNA, 15 bp, Homo sapiens
tagcaggctgagaca

SEQ ID NO: 9378 - DNA, 15 bp, Homo sapiens
ttagcaggctgagac

SEQ ID NO: 9379 - DNA, 15 bp, Homo sapiens
tttagcaggctgaga

SEQ ID NO: 9380 - DNA, 15 bp, Homo sapiens
ctttagcaggctgag

SEQ ID NO: 9381 - DNA, 15 bp, Homo sapiens
actttagcaggctga

SEQ ID NO: 9382 - DNA, 15 bp, Homo sapiens
cactttagcaggctg

SEQ ID NO: 9383 - DNA, 15 bp, Homo sapiens
gcactttagcaggct

SEQ ID NO: 9384 - DNA, 15 bp, Homo sapiens
agcactttagcaggc

SEQ ID NO: 9385 - DNA, 15 bp, Homo sapiens
cagcactttagcagg

SEQ ID NO: 9386 - DNA, 15 bp, Homo sapiens
tcagcactttagcag

SEQ ID NO: 9387 - DNA, 15 bp, Homo sapiens
ctcagcactttagca

SEQ ID NO: 9388 - DNA, 15 bp, Homo sapiens
tctcagcactttagc

SEQ ID NO: 9389 - DNA, 15 bp, Homo sapiens
atctcagcactttag

SEQ ID NO: 9390 - DNA, 15 bp, Homo sapiens
aatctcagcacttta

SEQ ID NO: 9391 - DNA, 15 bp, Homo sapiens
taatctcagcacttt

SEQ ID NO: 9392 - DNA, 15 bp, Homo sapiens
gtaatctcagcactt

SEQ ID NO: 9393 - DNA, 15 bp, Homo sapiens
tgtaatctcagcact

SEQ ID NO: 9394 - DNA, 15 bp, Homo sapiens
ctgtaatctcagcac

SEQ ID NO: 9395 - DNA, 15 bp, Homo sapiens
cctgtaatctcagca

SEQ ID NO: 9396 - DNA, 15 bp, Homo sapiens
gcctgtaatctcagc

SEQ ID NO: 9397 - DNA, 15 bp, Homo sapiens
tgcctgtaatctcag

SEQ ID NO: 9398 - DNA, 15 bp, Homo sapiens
atgcctgtaatctca

SEQ ID NO: 9399 - DNA, 15 bp, Homo sapiens
catgcctgtaatctc

SEQ ID NO: 9400 - DNA, 15 bp, Homo sapiens
tcatgcctgtaatct

SEQ ID NO: 9401 - DNA, 15 bp, Homo sapiens
ctcatgcctgtaatc

SEQ ID NO: 9402 - DNA, 15 bp, Homo sapiens
gcagtggctcatgcc

SEQ ID NO: 9403 - DNA, 15 bp, Homo sapiens
cgcagtggctcatgc

SEQ ID NO: 9404 - DNA, 15 bp, Homo sapiens
gcgcagtggctcatg

SEQ ID NO: 9405 - DNA, 15 bp, Homo sapiens
ggcgcagtggctcat

SEQ ID NO: 9406 - DNA, 15 bp, Homo sapiens
gggcgcagtggctca

SEQ ID NO: 9407 - DNA, 15 bp, Homo sapiens
cgggcgcagtggctc

SEQ ID NO: 9408 - DNA, 15 bp, Homo sapiens
ccgggcgcagtggct

SEQ ID NO: 9409 - DNA, 15 bp, Homo sapiens
gccgggcgcagtggc

SEQ ID NO: 9410 - DNA, 15 bp, Homo sapiens
ggccgggcgcagtgg

SEQ ID NO: 9411 - DNA, 15 bp, Homo sapiens
aggccgggcgcagtg

SEQ ID NO: 9412 - DNA, 15 bp, Homo sapiens
gaggccgggcgcagt

SEQ ID NO: 9413 - DNA, 15 bp, Homo sapiens
tgaggccgggcgcag

SEQ ID NO: 9414 - DNA, 15 bp, Homo sapiens
ctgaggccgggcgca

SEQ ID NO: 9415 - DNA, 15 bp, Homo sapiens
tctgaggccgggcgc

SEQ ID NO: 9416 - DNA, 15 bp, Homo sapiens
atctgaggccgggcg

SEQ ID NO: 9417 - DNA, 15 bp, Homo sapiens
tatctgaggccgggc

SEQ ID NO: 9418 - DNA, 15 bp, Homo sapiens
gtatctgaggccggg

SEQ ID NO: 9419 - DNA, 15 bp, Homo sapiens
agtatctgaggccgg

SEQ ID NO: 9420 - DNA, 15 bp, Homo sapiens
gagtatctgaggccg

SEQ ID NO: 9421 - DNA, 15 bp, Homo sapiens
agagtatctgaggcc

SEQ ID NO: 9422 - DNA, 15 bp, Homo sapiens
aagagtatctgaggc

SEQ ID NO: 9423 - DNA, 15 bp, Homo sapiens
aaagagtatctgagg

SEQ ID NO: 9424 - DNA, 15 bp, Homo sapiens
aaaagagtatctgag

SEQ ID NO: 9425 - DNA, 15 bp, Homo sapiens
taaaagagtatctga

SEQ ID NO: 9426 - DNA, 15 bp, Homo sapiens
ttaaaagagtatctg

SEQ ID NO: 9427 - DNA, 15 bp, Homo sapiens
attaaaagagtatct

SEQ ID NO: 9428 - DNA, 15 bp, Homo sapiens
aattaaaagagtatc

SEQ ID NO: 9429 - DNA, 15 bp, Homo sapiens
taattaaaagagtat

SEQ ID NO: 9430 - DNA, 15 bp, Homo sapiens
ctaattaaaagagta

SEQ ID NO: 9431 - DNA, 15 bp, Homo sapiens
tctaattaaaagagt

SEQ ID NO: 9432 - DNA, 15 bp, Homo sapiens
atctaattaaaagag

SEQ ID NO: 9433 - DNA, 15 bp, Homo sapiens
catctaattaaaaga

SEQ ID NO: 9434 - DNA, 15 bp, Homo sapiens
gcatctaattaaaag

SEQ ID NO: 9435 - DNA, 15 bp, Homo sapiens
cgcatctaattaaaa

SEQ ID NO: 9436 - DNA, 15 bp, Homo sapiens
acgcatctaattaaa

SEQ ID NO: 9437 - DNA, 15 bp, Homo sapiens
aacgcatctaattaa

SEQ ID NO: 9438 - DNA, 15 bp, Homo sapiens
aaacgcatctaatta

SEQ ID NO: 9439 - DNA, 15 bp, Homo sapiens
taaacgcatctaatt

SEQ ID NO: 9440 - DNA, 15 bp, Homo sapiens
ttaaacgcatctaat

SEQ ID NO: 9441 - DNA, 15 bp, Homo sapiens
tttaaacgcatctaa

SEQ ID NO: 9442 - DNA, 15 bp, Homo sapiens
ttttaaacgcatcta

SEQ ID NO: 9443 - DNA, 15 bp, Homo sapiens
tttttaaacgcatct

SEQ ID NO: 9444 - DNA, 15 bp, Homo sapiens
atttttaaacgcatc

SEQ ID NO: 9445 - DNA, 15 bp, Homo sapiens
aatttttaaacgcat

SEQ ID NO: 9446 - DNA, 15 bp, Homo sapiens
aaatttttaaacgca

SEQ ID NO: 9447 - DNA, 15 bp, Homo sapiens
taaatttttaaacgc

SEQ ID NO: 9448 - DNA, 15 bp, Homo sapiens
ttaaatttttaaacg

SEQ ID NO: 9449 - DNA, 15 bp, Homo sapiens
gttaaatttttaaac

SEQ ID NO: 9450 - DNA, 15 bp, Homo sapiens
ggttaaatttttaaa

SEQ ID NO: 9451 - DNA, 15 bp, Homo sapiens
gggttaaatttttaa

SEQ ID NO: 9452 - DNA, 15 bp, Homo sapiens
tgggttaaattttta

SEQ ID NO: 9453 - DNA, 15 bp, Homo sapiens
gtgggttaaattttt

SEQ ID NO: 9454 - DNA, 15 bp, Homo sapiens
ggtgggttaaatttt

SEQ ID NO: 9455 - DNA, 15 bp, Homo sapiens
tggtgggttaaattt

SEQ ID NO: 9456 - DNA, 15 bp, Homo sapiens
atggtgggttaaatt

SEQ ID NO: 9457 - DNA, 15 bp, Homo sapiens
aatggtgggttaaat

SEQ ID NO: 9458 - DNA, 15 bp, Homo sapiens
caatggtgggttaaa

SEQ ID NO: 9459 - DNA, 15 bp, Homo sapiens
gcaatggtgggttaa

SEQ ID NO: 9460 - DNA, 15 bp, Homo sapiens
agcaatggtgggtta

SEQ ID NO: 9461 - DNA, 15 bp, Homo sapiens
cagcaatggtgggtt

SEQ ID NO: 9462 - DNA, 15 bp, Homo sapiens
ccagcaatggtgggt

SEQ ID NO: 9463 - DNA, 15 bp, Homo sapiens
gccagcaatggtggg

SEQ ID NO: 9464 - DNA, 15 bp, Homo sapiens
tgccagcaatggtgg

SEQ ID NO: 9465 - DNA, 15 bp, Homo sapiens
atgccagcaatggtg

SEQ ID NO: 9466 - DNA, 15 bp, Homo sapiens
catgccagcaatggt

SEQ ID NO: 9467 - DNA, 15 bp, Homo sapiens
tcatgccagcaatgg

SEQ ID NO: 9468 - DNA, 15 bp, Homo sapiens
ttcatgccagcaatg

SEQ ID NO: 9469 - DNA, 15 bp, Homo sapiens
attcatgccagcaat

SEQ ID NO: 9470 - DNA, 15 bp, Homo sapiens
tattcatgccagcaa

SEQ ID NO: 9471 - DNA, 15 bp, Homo sapiens
ctattcatgccagca

SEQ ID NO: 9472 - DNA, 15 bp, Homo sapiens
tctattcatgccagc

SEQ ID NO: 9473 - DNA, 15 bp, Homo sapiens
atctattcatgccag

SEQ ID NO: 9474 - DNA, 15 bp, Homo sapiens
catctattcatgcca

SEQ ID NO: 9475 - DNA, 15 bp, Homo sapiens
acatctattcatgcc

SEQ ID NO: 9476 - DNA, 15 bp, Homo sapiens
tacatctattcatgc

SEQ ID NO: 9477 - DNA, 15 bp, Homo sapiens
atacatctattcatg

SEQ ID NO: 9478 - DNA, 15 bp, Homo sapiens
aatacatctattcat

SEQ ID NO: 9479 - DNA, 15 bp, Homo sapiens
aaatacatctattca

SEQ ID NO: 9480 - DNA, 15 bp, Homo sapiens
aaaatacatctattc

SEQ ID NO: 9481 - DNA, 15 bp, Homo sapiens
aaaaatacatctatt

SEQ ID NO: 9482 - DNA, 15 bp, Homo sapiens
taaaaatacatctat

SEQ ID NO: 9483 - DNA, 15 bp, Homo sapiens
ctaaaaatacatcta

SEQ ID NO: 9484 - DNA, 15 bp, Homo sapiens
tctaaaaatacatct

SEQ ID NO: 9485 - DNA, 15 bp, Homo sapiens
ctctaaaaatacatc

SEQ ID NO: 9486 - DNA, 15 bp, Homo sapiens
actctaaaaatacat

SEQ ID NO: 9487 - DNA, 15 bp, Homo sapiens
cactctaaaaataca

SEQ ID NO: 9488 - DNA, 15 bp, Homo sapiens
tcactctaaaaatac

SEQ ID NO: 9489 - DNA, 15 bp, Homo sapiens
atcactctaaaaata

SEQ ID NO: 9490 - DNA, 15 bp, Homo sapiens
aatcactctaaaaat

SEQ ID NO: 9491 - DNA, 15 bp, Homo sapiens
gaatcactctaaaaa

SEQ ID NO: 9492 - DNA, 15 bp, Homo sapiens
tgaatcactctaaaa

SEQ ID NO: 9493 - DNA, 15 bp, Homo sapiens
atgaatcactctaaa

SEQ ID NO: 9494 - DNA, 15 bp, Homo sapiens
tatgaatcactctaa

SEQ ID NO: 9495 - DNA, 15 bp, Homo sapiens
ttatgaatcactcta

SEQ ID NO: 9496 - DNA, 15 bp, Homo sapiens
tttatgaatcactct

SEQ ID NO: 9497 - DNA, 15 bp, Homo sapiens
atttatgaatcactc

SEQ ID NO: 9498 - DNA, 15 bp, Homo sapiens
tatttatgaatcact

SEQ ID NO: 9499 - DNA, 15 bp, Homo sapiens
atatttatgaatcac

SEQ ID NO: 9500 - DNA, 15 bp, Homo sapiens
gatatttatgaatca

SEQ ID NO: 9501 - DNA, 15 bp, Homo sapiens
cgatatttatgaatc

SEQ ID NO: 9502 - DNA, 15 bp, Homo sapiens
acgatatttatgaat

SEQ ID NO: 9503 - DNA, 15 bp, Homo sapiens
tacgatatttatgaa

SEQ ID NO: 9504 - DNA, 15 bp, Homo sapiens
atacgatatttatga

SEQ ID NO: 9505 - DNA, 15 bp, Homo sapiens
tatacgatatttatg

SEQ ID NO: 9506 - DNA, 15 bp, Homo sapiens
gtatacgatatttat

SEQ ID NO: 9507 - DNA, 15 bp, Homo sapiens
tgtatacgatattta

SEQ ID NO: 9508 - DNA, 15 bp, Homo sapiens
atgtatacgatattt

SEQ ID NO: 9509 - DNA, 15 bp, Homo sapiens
catgtatacgatatt

SEQ ID NO: 9510 - DNA, 15 bp, Homo sapiens
acatgtatacgatat

SEQ ID NO: 9511 - DNA, 15 bp, Homo sapiens
aacatgtatacgata

SEQ ID NO: 9512 - DNA, 15 bp, Homo sapiens
aaacatgtatacgat

SEQ ID NO: 9513 - DNA, 15 bp, Homo sapiens
taaacatgtatacga

SEQ ID NO: 9514 - DNA, 15 bp, Homo sapiens
ttaaacatgtatacg

SEQ ID NO: 9515 - DNA, 15 bp, Homo sapiens
tttaaacatgtatac

SEQ ID NO: 9516 - DNA, 15 bp, Homo sapiens
ctttaaacatgtata

SEQ ID NO: 9517 - DNA, 15 bp, Homo sapiens
actttaaacatgtat

SEQ ID NO: 9518 - DNA, 15 bp, Homo sapiens
aactttaaacatgta

SEQ ID NO: 9519 - DNA, 15 bp, Homo sapiens
taactttaaacatgt

SEQ ID NO: 9520 - DNA, 15 bp, Homo sapiens
gtaactttaaacatg

SEQ ID NO: 9521 - DNA, 15 bp, Homo sapiens
tgtaactttaaacat

SEQ ID NO: 9522 - DNA, 15 bp, Homo sapiens
ttgtaactttaaaca

SEQ ID NO: 9523 - DNA, 15 bp, Homo sapiens
tttgtaactttaaac

SEQ ID NO: 9524 - DNA, 15 bp, Homo sapiens
gtttgtaactttaaa

SEQ ID NO: 9525 - DNA, 15 bp, Homo sapiens
agtttgtaactttaa

SEQ ID NO: 9526 - DNA, 15 bp, Homo sapiens
aagtttgtaacttta

SEQ ID NO: 9527 - DNA, 15 bp, Homo sapiens
aaagtttgtaacttt

SEQ ID NO: 9528 - DNA, 15 bp, Homo sapiens
aaaagtttgtaactt

SEQ ID NO: 9529 - DNA, 15 bp, Homo sapiens
aaaaagtttgtaact

SEQ ID NO: 9530 - DNA, 15 bp, Homo sapiens
caaaaagtttgtaac

SEQ ID NO: 9531 - DNA, 15 bp, Homo sapiens
gcaaaaagtttgtaa

SEQ ID NO: 9532 - DNA, 15 bp, Homo sapiens
agcaaaaagtttgta

SEQ ID NO: 9533 - DNA, 15 bp, Homo sapiens
aagcaaaaagtttgt

SEQ ID NO: 9534 - DNA, 15 bp, Homo sapiens
taagcaaaaagtttg

SEQ ID NO: 9535 - DNA, 15 bp, Homo sapiens
ataagcaaaaagttt

SEQ ID NO: 9536 - DNA, 15 bp, Homo sapiens
aataagcaaaaagtt

SEQ ID NO: 9537 - DNA, 15 bp, Homo sapiens
aaataagcaaaaagt

SEQ ID NO: 9538 - DNA, 15 bp, Homo sapiens
gaaataagcaaaaag

SEQ ID NO: 9539 - DNA, 15 bp, Homo sapiens
tgaaataagcaaaaa

SEQ ID NO: 9540 - DNA, 15 bp, Homo sapiens
ttgaaataagcaaaa

SEQ ID NO: 9541 - DNA, 15 bp, Homo sapiens
tttgaaataagcaaa

SEQ ID NO: 9542 - DNA, 15 bp, Homo sapiens
ttttgaaataagcaa

SEQ ID NO: 9543 - DNA, 15 bp, Homo sapiens
attttgaaataagca

SEQ ID NO: 9544 - DNA, 15 bp, Homo sapiens
cattttgaaataagc

SEQ ID NO: 9545 - DNA, 15 bp, Homo sapiens
gcattttgaaataag

SEQ ID NO: 9546 - DNA, 15 bp, Homo sapiens
tgcattttgaaataa

SEQ ID NO: 9547 - DNA, 15 bp, Homo sapiens
ctgcattttgaaata

SEQ ID NO: 9548 - DNA, 15 bp, Homo sapiens
cctgcattttgaaat

SEQ ID NO: 9549 - DNA, 15 bp, Homo sapiens
tcctgcattttgaaa

SEQ ID NO: 9550 - DNA, 15 bp, Homo sapiens
atcctgcattttgaa

SEQ ID NO: 9551 - DNA, 15 bp, Homo sapiens
aatcctgcattttga

SEQ ID NO: 9552 - DNA, 15 bp, Homo sapiens
gaatcctgcattttg

SEQ ID NO: 9553 - DNA, 15 bp, Homo sapiens
agaatcctgcatttt

SEQ ID NO: 9554 - DNA, 15 bp, Homo sapiens
aagaatcctgcattt

SEQ ID NO: 9555 - DNA, 15 bp, Homo sapiens
aaagaatcctgcatt

SEQ ID NO: 9556 - DNA, 15 bp, Homo sapiens
aaaagaatcctgcat

SEQ ID NO: 9557 - DNA, 15 bp, Homo sapiens
gaaaagaatcctgca

SEQ ID NO: 9558 - DNA, 15 bp, Homo sapiens
ggaaaagaatcctgc

SEQ ID NO: 9559 - DNA, 15 bp, Homo sapiens
tggaaaagaatcctg

SEQ ID NO: 9560 - DNA, 15 bp, Homo sapiens
atggaaaagaatcct

SEQ ID NO: 9561 - DNA, 15 bp, Homo sapiens
aatggaaaagaatcc

SEQ ID NO: 9562 - DNA, 15 bp, Homo sapiens
aaatggaaaagaatc

SEQ ID NO: 9563 - DNA, 15 bp, Homo sapiens
taaatggaaaagaat

SEQ ID NO: 9564 - DNA, 15 bp, Homo sapiens
ttaaatggaaaagaa

SEQ ID NO: 9565 - DNA, 15 bp, Homo sapiens
tttaaatggaaaaga

SEQ ID NO: 9566 - DNA, 15 bp, Homo sapiens
ttttaaatggaaaag

SEQ ID NO: 9567 - DNA, 15 bp, Homo sapiens
attttaaatggaaaa

SEQ ID NO: 9568 - DNA, 15 bp, Homo sapiens
aattttaaatggaaa

SEQ ID NO: 9569 - DNA, 15 bp, Homo sapiens
gaattttaaatggaa

SEQ ID NO: 9570 - DNA, 15 bp, Homo sapiens
ggaattttaaatgga

SEQ ID NO: 9571 - DNA, 15 bp, Homo sapiens
gggaattttaaatgg

SEQ ID NO: 9572 - DNA, 15 bp, Homo sapiens
agggaattttaaatg

SEQ ID NO: 9573 - DNA, 15 bp, Homo sapiens
gagggaattttaaat

SEQ ID NO: 9574 - DNA, 15 bp, Homo sapiens
agagggaattttaaa

SEQ ID NO: 9575 - DNA, 15 bp, Homo sapiens
gagagggaattttaa

SEQ ID NO: 9576 - DNA, 15 bp, Homo sapiens
agagagggaatttta

SEQ ID NO: 9577 - DNA, 15 bp, Homo sapiens
aagagagggaatttt

SEQ ID NO: 9578 - DNA, 15 bp, Homo sapiens
aaagagagggaattt

SEQ ID NO: 9579 - DNA, 15 bp, Homo sapiens
caaagagagggaatt

SEQ ID NO: 9580 - DNA, 15 bp, Homo sapiens
acaaagagagggaat

SEQ ID NO: 9581 - DNA, 15 bp, Homo sapiens
cacaaagagagggaa

SEQ ID NO: 9582 - DNA, 15 bp, Homo sapiens
tcacaaagagaggga

SEQ ID NO: 9583 - DNA, 15 bp, Homo sapiens
ctcacaaagagaggg

SEQ ID NO: 9584 - DNA, 15 bp, Homo sapiens
tctcacaaagagagg

SEQ ID NO: 9585 - DNA, 15 bp, Homo sapiens
gtctcacaaagagag

SEQ ID NO: 9586 - DNA, 15 bp, Homo sapiens
agtctcacaaagaga

SEQ ID NO: 9587 - DNA, 15 bp, Homo sapiens
aagtctcacaaagag

SEQ ID NO: 9588 - DNA, 15 bp, Homo sapiens
gaagtctcacaaaga

SEQ ID NO: 9589 - DNA, 15 bp, Homo sapiens
agaagtctcacaaag

SEQ ID NO: 9590 - DNA, 15 bp, Homo sapiens
aagaagtctcacaaa

SEQ ID NO: 9591 - DNA, 15 bp, Homo sapiens
aaagaagtctcacaa

SEQ ID NO: 9592 - DNA, 15 bp, Homo sapiens
aaaagaagtctcaca

SEQ ID NO: 9593 - DNA, 15 bp, Homo sapiens
aaaaagaagtctcac

SEQ ID NO: 9594 - DNA, 15 bp, Homo sapiens
caaaaagaagtctca

SEQ ID NO: 9595 - DNA, 15 bp, Homo sapiens
tcaaaaagaagtctc

SEQ ID NO: 9596 - DNA, 15 bp, Homo sapiens
ctcaaaaagaagtct

SEQ ID NO: 9597 - DNA, 15 bp, Homo sapiens
actcaaaaagaagtc

SEQ ID NO: 9598 - DNA, 15 bp, Homo sapiens
tactcaaaaagaagt

SEQ ID NO: 9599 - DNA, 15 bp, Homo sapiens
atactcaaaaagaag

SEQ ID NO: 9600 - DNA, 15 bp, Homo sapiens
aatactcaaaaagaa

SEQ ID NO: 9601 - DNA, 15 bp, Homo sapiens
gaatactcaaaaaga

SEQ ID NO: 9602 - DNA, 15 bp, Homo sapiens
agaatactcaaaaag

SEQ ID NO: 9603 - DNA, 15 bp, Homo sapiens
cagaatactcaaaaa

SEQ ID NO: 9604 - DNA, 15 bp, Homo sapiens
ccagaatactcaaaa

SEQ ID NO: 9605 - DNA, 15 bp, Homo sapiens
accagaatactcaaa

SEQ ID NO: 9606 - DNA, 15 bp, Homo sapiens
aaccagaatactcaa

SEQ ID NO: 9607 - DNA, 15 bp, Homo sapiens
taaccagaatactca

SEQ ID NO: 9608 - DNA, 15 bp, Homo sapiens
gtaaccagaatactc

SEQ ID NO: 9609 - DNA, 15 bp, Homo sapiens
agtaaccagaatact

SEQ ID NO: 9610 - DNA, 15 bp, Homo sapiens
gagtaaccagaatac

SEQ ID NO: 9611 - DNA, 15 bp, Homo sapiens
agagtaaccagaata

SEQ ID NO: 9612 - DNA, 15 bp, Homo sapiens
tagagtaaccagaat

SEQ ID NO: 9613 - DNA, 15 bp, Homo sapiens
ttagagtaaccagaa

SEQ ID NO: 9614 - DNA, 15 bp, Homo sapiens
tttagagtaaccaga

SEQ ID NO: 9615 - DNA, 15 bp, Homo sapiens
gtttagagtaaccag

SEQ ID NO: 9616 - DNA, 15 bp, Homo sapiens
agtttagagtaacca

SEQ ID NO: 9617 - DNA, 15 bp, Homo sapiens
cagtttagagtaacc

SEQ ID NO: 9618 - DNA, 15 bp, Homo sapiens
tcagtttagagtaac

SEQ ID NO: 9619 - DNA, 15 bp, Homo sapiens
atcagtttagagtaa

SEQ ID NO: 9620 - DNA, 15 bp, Homo sapiens
aatcagtttagagta

SEQ ID NO: 9621 - DNA, 15 bp, Homo sapiens
caatcagtttagagt

SEQ ID NO: 9622 - DNA, 15 bp, Homo sapiens
ccaatcagtttagag

SEQ ID NO: 9623 - DNA, 15 bp, Homo sapiens
tccaatcagtttaga

SEQ ID NO: 9624 - DNA, 15 bp, Homo sapiens
ctccaatcagtttag

SEQ ID NO: 9625 - DNA, 15 bp, Homo sapiens
tctccaatcagttta

SEQ ID NO: 9626 - DNA, 15 bp, Homo sapiens
atctccaatcagttt

SEQ ID NO: 9627 - DNA, 15 bp, Homo sapiens
catctccaatcagtt

SEQ ID NO: 9628 - DNA, 15 bp, Homo sapiens
tcatctccaatcagt

SEQ ID NO: 9629 - DNA, 15 bp, Homo sapiens
ttcatctccaatcag

SEQ ID NO: 9630 - DNA, 15 bp, Homo sapiens
tttcatctccaatca

SEQ ID NO: 9631 - DNA, 15 bp, Homo sapiens
atttcatctccaatc

SEQ ID NO: 9632 - DNA, 15 bp, Homo sapiens
aatttcatctccaat

SEQ ID NO: 9633 - DNA, 15 bp, Homo sapiens
taatttcatctccaa

SEQ ID NO: 9634 - DNA, 15 bp, Homo sapiens
ctaatttcatctcca

SEQ ID NO: 9635 - DNA, 15 bp, Homo sapiens
tctaatttcatctcc

SEQ ID NO: 9636 - DNA, 15 bp, Homo sapiens
atctaatttcatctc

SEQ ID NO: 9637 - DNA, 15 bp, Homo sapiens
tatctaatttcatct

SEQ ID NO: 9638 - DNA, 15 bp, Homo sapiens
ctatctaatttcatc

SEQ ID NO: 9639 - DNA, 15 bp, Homo sapiens
tctatctaatttcat

SEQ ID NO: 9640 - DNA, 15 bp, Homo sapiens
ttctatctaatttca

SEQ ID NO: 9641 - DNA, 15 bp, Homo sapiens
attctatctaatttc

SEQ ID NO: 9642 - DNA, 15 bp, Homo sapiens
aattctatctaattt

SEQ ID NO: 9643 - DNA, 15 bp, Homo sapiens
caattctatctaatt

SEQ ID NO: 9644 - DNA, 15 bp, Homo sapiens
tcaattctatctaat

SEQ ID NO: 9645 - DNA, 15 bp, Homo sapiens
ttcaattctatctaa

SEQ ID NO: 9646 - DNA, 15 bp, Homo sapiens
tttcaattctatcta

SEQ ID NO: 9647 - DNA, 15 bp, Homo sapiens
ttttcaattctatct

SEQ ID NO: 9648 - DNA, 15 bp, Homo sapiens
gttttcaattctatc

SEQ ID NO: 9649 - DNA, 15 bp, Homo sapiens
agttttcaattctat

SEQ ID NO: 9650 - DNA, 15 bp, Homo sapiens
cagttttcaattcta

SEQ ID NO: 9651 - DNA, 15 bp, Homo sapiens
acagttttcaattct

SEQ ID NO: 9652 - DNA, 15 bp, Homo sapiens
tacagttttcaattc

SEQ ID NO: 9653 - DNA, 15 bp, Homo sapiens
gtacagttttcaatt

SEQ ID NO: 9654 - DNA, 15 bp, Homo sapiens
agtacagttttcaat

SEQ ID NO: 9655 - DNA, 15 bp, Homo sapiens
aagtacagttttcaa

SEQ ID NO: 9656 - DNA, 15 bp, Homo sapiens
aaagtacagttttca

SEQ ID NO: 9657 - DNA, 15 bp, Homo sapiens
aaaagtacagttttc

SEQ ID NO: 9658 - DNA, 15 bp, Homo sapiens
ttaaaagtacagttt

SEQ ID NO: 9659 - DNA, 15 bp, Homo sapiens
tttaaaagtacagtt

SEQ ID NO: 9660 - DNA, 15 bp, Homo sapiens
ttttaaaagtacagt

SEQ ID NO: 9661 - DNA, 15 bp, Homo sapiens
attttaaaagtacag

SEQ ID NO: 9662 - DNA, 15 bp, Homo sapiens
cattttaaaagtaca

SEQ ID NO: 9663 - DNA, 15 bp, Homo sapiens
tcattttaaaagtac

SEQ ID NO: 9664 - DNA, 15 bp, Homo sapiens
ttcattttaaaagta

SEQ ID NO: 9665 - DNA, 15 bp, Homo sapiens
tttcattttaaaagt

SEQ ID NO: 9666 - DNA, 15 bp, Homo sapiens
atttcattttaaaag

SEQ ID NO: 9667 - DNA, 15 bp, Homo sapiens
aatttcattttaaaa

SEQ ID NO: 9668 - DNA, 15 bp, Homo sapiens
aaatttcattttaaa

SEQ ID NO: 9669 - DNA, 15 bp, Homo sapiens
aaaatttcattttaa

SEQ ID NO: 9670 - DNA, 15 bp, Homo sapiens
caaaatttcatttta

SEQ ID NO: 9671 - DNA, 15 bp, Homo sapiens
ccaaaatttcatttt

SEQ ID NO: 9672 - DNA, 15 bp, Homo sapiens
cccaaaatttcattt

SEQ ID NO: 9673 - DNA, 15 bp, Homo sapiens
ccccaaaatttcatt

SEQ ID NO: 9674 - DNA, 15 bp, Homo sapiens
tccccaaaatttcat

SEQ ID NO: 9675 - DNA, 15 bp, Homo sapiens
atccccaaaatttca

SEQ ID NO: 9676 - DNA, 15 bp, Homo sapiens
catccccaaaatttc

SEQ ID NO: 9677 - DNA, 15 bp, Homo sapiens
acatccccaaaattt

SEQ ID NO: 9678 - DNA, 15 bp, Homo sapiens
gacatccccaaaatt

SEQ ID NO: 9679 - DNA, 15 bp, Homo sapiens
tgacatccccaaaat

SEQ ID NO: 9680 - DNA, 15 bp, Homo sapiens
atgacatccccaaaa

SEQ ID NO: 9681 - DNA, 15 bp, Homo sapiens
aatgacatccccaaa

SEQ ID NO: 9682 - DNA, 15 bp, Homo sapiens
taatgacatccccaa

SEQ ID NO: 9683 - DNA, 15 bp, Homo sapiens
ttaatgacatcccca

SEQ ID NO: 9684 - DNA, 15 bp, Homo sapiens
cttaatgacatcccc

SEQ ID NO: 9685 - DNA, 15 bp, Homo sapiens
gcttaatgacatccc

SEQ ID NO: 9686 - DNA, 15 bp, Homo sapiens
agcttaatgacatcc

SEQ ID NO: 9687 - DNA, 15 bp, Homo sapiens
aagcttaatgacatc

SEQ ID NO: 9688 - DNA, 15 bp, Homo sapiens
caagcttaatgacat

SEQ ID NO: 9689 - DNA, 15 bp, Homo sapiens
tcaagcttaatgaca

SEQ ID NO: 9690 - DNA, 15 bp, Homo sapiens
atcaagcttaatgac

SEQ ID NO: 9691 - DNA, 15 bp, Homo sapiens
aatcaagcttaatga

SEQ ID NO: 9692 - DNA, 15 bp, Homo sapiens
aaatcaagcttaatg

SEQ ID NO: 9693 - DNA, 15 bp, Homo sapiens
aaaatcaagcttaat

SEQ ID NO: 9694 - DNA, 15 bp, Homo sapiens
aaaaatcaagcttaa

SEQ ID NO: 9695 - DNA, 15 bp, Homo sapiens
aaaaaatcaagctta

SEQ ID NO: 9696 - DNA, 15 bp, Homo sapiens
taaaaaatcaagctt

SEQ ID NO: 9697 - DNA, 15 bp, Homo sapiens
ctaaaaaatcaagct

SEQ ID NO: 9698 - DNA, 15 bp, Homo sapiens
cctaaaaaatcaagc

SEQ ID NO: 9699 - DNA, 15 bp, Homo sapiens
acctaaaaaatcaag

SEQ ID NO: 9700 - DNA, 15 bp, Homo sapiens
aacctaaaaaatcaa

SEQ ID NO: 9701 - DNA, 15 bp, Homo sapiens
aaacctaaaaaatca

SEQ ID NO: 9702 - DNA, 15 bp, Homo sapiens
aaaacctaaaaaatc

SEQ ID NO: 9703 - DNA, 15 bp, Homo sapiens
aaaaacctaaaaaat

SEQ ID NO: 9704 - DNA, 15 bp, Homo sapiens
aaaaaacctaaaaaa

SEQ ID NO: 9705 - DNA, 15 bp, Homo sapiens
aaaaaaacctaaaaa

SEQ ID NO: 9706 - DNA, 15 bp, Homo sapiens
aaaaaaaacctaaaa

SEQ ID NO: 9707 - DNA, 15 bp, Homo sapiens
aaaaaaaaacctaaa

SEQ ID NO: 9708 - DNA, 15 bp, Homo sapiens
aaaaaaaaaacctaa

SEQ ID NO: 9709 - DNA, 15 bp, Homo sapiens
taaaaaaaaaaccta

SEQ ID NO: 9710 - DNA, 15 bp, Homo sapiens
ctaaaaaaaaaacct

SEQ ID NO: 9711 - DNA, 15 bp, Homo sapiens
actaaaaaaaaaacc

SEQ ID NO: 9712 - DNA, 15 bp, Homo sapiens
cactaaaaaaaaaac

SEQ ID NO: 9713 - DNA, 15 bp, Homo sapiens
acactaaaaaaaaaa

SEQ ID NO: 9714 - DNA, 15 bp, Homo sapiens
cacactaaaaaaaaa

SEQ ID NO: 9715 - DNA, 15 bp, Homo sapiens
acacactaaaaaaaa

SEQ ID NO: 9716 - DNA, 15 bp, Homo sapiens
tacacactaaaaaaa

SEQ ID NO: 9717 - DNA, 15 bp, Homo sapiens
atacacactaaaaaa

SEQ ID NO: 9718 - DNA, 15 bp, Homo sapiens
aatacacactaaaaa

SEQ ID NO: 9719 - DNA, 15 bp, Homo sapiens
taatacacactaaaa

SEQ ID NO: 9720 - DNA, 15 bp, Homo sapiens
ataatacacactaaa

SEQ ID NO: 9721 - DNA, 15 bp, Homo sapiens
tataatacacactaa

SEQ ID NO: 9722 - DNA, 15 bp, Homo sapiens
ttataatacacacta

SEQ ID NO: 9723 - DNA, 15 bp, Homo sapiens
tttataatacacact

SEQ ID NO: 9724 - DNA, 15 bp, Homo sapiens
atttataatacacac

SEQ ID NO: 9725 - DNA, 15 bp, Homo sapiens
aatttataatacaca

SEQ ID NO: 9726 - DNA, 15 bp, Homo sapiens
taatttataatacac

SEQ ID NO: 9727 - DNA, 15 bp, Homo sapiens
ataatttataataca

SEQ ID NO: 9728 - DNA, 15 bp, Homo sapiens
aataatttataatac

SEQ ID NO: 9729 - DNA, 15 bp, Homo sapiens
aaataatttataata

SEQ ID NO: 9730 - DNA, 15 bp, Homo sapiens
aaaataatttataat

SEQ ID NO: 9731 - DNA, 15 bp, Homo sapiens
taaaataatttataa

SEQ ID NO: 9732 - DNA, 15 bp, Homo sapiens
gtaaaataatttata

SEQ ID NO: 9733 - DNA, 15 bp, Homo sapiens
tgtaaaataatttat

SEQ ID NO: 9734 - DNA, 15 bp, Homo sapiens
gtgtaaaataattta

SEQ ID NO: 9735 - DNA, 15 bp, Homo sapiens
agtgtaaaataattt

SEQ ID NO: 9736 - DNA, 15 bp, Homo sapiens
cagtgtaaaataatt

SEQ ID NO: 9737 - DNA, 15 bp, Homo sapiens
tcagtgtaaaataat

SEQ ID NO: 9738 - DNA, 15 bp, Homo sapiens
atcagtgtaaaataa

SEQ ID NO: 9739 - DNA, 15 bp, Homo sapiens
aatcagtgtaaaata

SEQ ID NO: 9740 - DNA, 15 bp, Homo sapiens
caatcagtgtaaaat

SEQ ID NO: 9741 - DNA, 15 bp, Homo sapiens
acaatcagtgtaaaa

SEQ ID NO: 9742 - DNA, 15 bp, Homo sapiens
gacaatcagtgtaaa

SEQ ID NO: 9743 - DNA, 15 bp, Homo sapiens
tgacaatcagtgtaa

SEQ ID NO: 9744 - DNA, 15 bp, Homo sapiens
ctgacaatcagtgta

SEQ ID NO: 9745 - DNA, 15 bp, Homo sapiens
gctgacaatcagtgt

SEQ ID NO: 9746 - DNA, 15 bp, Homo sapiens
cgctgacaatcagtg

SEQ ID NO: 9747 - DNA, 15 bp, Homo sapiens
tcgctgacaatcagt

SEQ ID NO: 9748 - DNA, 15 bp, Homo sapiens
atcgctgacaatcag

SEQ ID NO: 9749 - DNA, 15 bp, Homo sapiens
tatcgctgacaatca

SEQ ID NO: 9750 - DNA, 15 bp, Homo sapiens
ttatcgctgacaatc

SEQ ID NO: 9751 - DNA, 15 bp, Homo sapiens
tttatcgctgacaat

SEQ ID NO: 9752 - DNA, 15 bp, Homo sapiens
ttttatcgctgacaa

SEQ ID NO: 9753 - DNA, 15 bp, Homo sapiens
attttatcgctgaca

SEQ ID NO: 9754 - DNA, 15 bp, Homo sapiens
cattttatcgctgac

SEQ ID NO: 9755 - DNA, 15 bp, Homo sapiens
ccattttatcgctga

SEQ ID NO: 9756 - DNA, 15 bp, Homo sapiens
tccattttatcgctg

SEQ ID NO: 9757 - DNA, 15 bp, Homo sapiens
ttccattttatcgct

SEQ ID NO: 9758 - DNA, 15 bp, Homo sapiens
attccattttatcgc

SEQ ID NO: 9759 - DNA, 15 bp, Homo sapiens
cattccattttatcg

SEQ ID NO: 9760 - DNA, 15 bp, Homo sapiens
gcattccattttatc

SEQ ID NO: 9761 - DNA, 15 bp, Homo sapiens
ggcattccattttat

SEQ ID NO: 9762 - DNA, 15 bp, Homo sapiens
aggcattccatttta

SEQ ID NO: 9763 - DNA, 15 bp, Homo sapiens
caggcattccatttt

SEQ ID NO: 9764 - DNA, 15 bp, Homo sapiens
ccaggcattccattt

SEQ ID NO: 9765 - DNA, 15 bp, Homo sapiens
cccaggcattccatt

SEQ ID NO: 9766 - DNA, 15 bp, Homo sapiens
tcccaggcattccat

SEQ ID NO: 9767 - DNA, 15 bp, Homo sapiens
atcccaggcattcca

SEQ ID NO: 9768 - DNA, 15 bp, Homo sapiens
aatcccaggcattcc

SEQ ID NO: 9769 - DNA, 15 bp, Homo sapiens
aaatcccaggcattc

SEQ ID NO: 9770 - DNA, 15 bp, Homo sapiens
aaaatcccaggcatt

SEQ ID NO: 9771 - DNA, 15 bp, Homo sapiens
aaaaatcccaggcat

SEQ ID NO: 9772 - DNA, 15 bp, Homo sapiens
aaaaaatcccaggca

SEQ ID NO: 9773 - DNA, 15 bp, Homo sapiens
taaaaaatcccaggc

SEQ ID NO: 9774 - DNA, 15 bp, Homo sapiens
ttaaaaaatcccagg

SEQ ID NO: 9775 - DNA, 15 bp, Homo sapiens
tttaaaaaatcccag

SEQ ID NO: 9776 - DNA, 15 bp, Homo sapiens
ttttaaaaaatccca

SEQ ID NO: 9777 - DNA, 15 bp, Homo sapiens
attttaaaaaatccc

SEQ ID NO: 9778 - DNA, 15 bp, Homo sapiens
aattttaaaaaatcc

SEQ ID NO: 9779 - DNA, 15 bp, Homo sapiens
aaattttaaaaaatc

SEQ ID NO: 9780 - DNA, 15 bp, Homo sapiens
taaattttaaaaaat

SEQ ID NO: 9781 - DNA, 15 bp, Homo sapiens
ataaattttaaaaaa

SEQ ID NO: 9782 - DNA, 15 bp, Homo sapiens
aataaattttaaaaa

SEQ ID NO: 9783 - DNA, 15 bp, Homo sapiens
aaataaattttaaaa

SEQ ID NO: 9784 - DNA, 15 bp, Homo sapiens
aaaataaattttaaa

SEQ ID NO: 9785 - DNA, 15 bp, Homo sapiens
taaaataaattttaa

SEQ ID NO: 9786 - DNA, 15 bp, Homo sapiens
ataaaataaatttta

SEQ ID NO: 9787 - DNA, 15 bp, Homo sapiens
aataaaataaatttt

SEQ ID NO: 9788 - DNA, 15 bp, Homo sapiens
gaataaaataaattt

SEQ ID NO: 9789 - DNA, 15 bp, Homo sapiens
tgaataaaataaatt

SEQ ID NO: 9790 - DNA, 15 bp, Homo sapiens
atgaataaaataaat

SEQ ID NO: 9791 - DNA, 15 bp, Homo sapiens
aatgaataaaataaa

SEQ ID NO: 9792 - DNA, 15 bp, Homo sapiens
aaatgaataaaataa

SEQ ID NO: 9793 - DNA, 15 bp, Homo sapiens
aaaatgaataaaata

SEQ ID NO: 9794 - DNA, 15 bp, Homo sapiens
aaaaatgaataaaat

SEQ ID NO: 9795 - DNA, 15 bp, Homo sapiens
taaaaatgaataaaa

SEQ ID NO: 9796 - DNA, 15 bp, Homo sapiens
ataaaaatgaataaa

SEQ ID NO: 9797 - DNA, 15 bp, Homo sapiens
tataaaaatgaataa

SEQ ID NO: 9798 - DNA, 15 bp, Homo sapiens
ttataaaaatgaata

SEQ ID NO: 9799 - DNA, 15 bp, Homo sapiens
cttataaaaatgaat

SEQ ID NO: 9800 - DNA, 15 bp, Homo sapiens
ccttataaaaatgaa

SEQ ID NO: 9801 - DNA, 15 bp, Homo sapiens
accttataaaaatga

SEQ ID NO: 9802 - DNA, 15 bp, Homo sapiens
taccttataaaaatg

SEQ ID NO: 9803 - DNA, 15 bp, Homo sapiens
ttaccttataaaaat

SEQ ID NO: 9804 - DNA, 15 bp, Homo sapiens
tttaccttataaaaa

SEQ ID NO: 9805 - DNA, 15 bp, Homo sapiens
ttttaccttataaaa

SEQ ID NO: 9806 - DNA, 15 bp, Homo sapiens
tttttaccttataaa

SEQ ID NO: 9807 - DNA, 15 bp, Homo sapiens
gtttttaccttataa

SEQ ID NO: 9808 - DNA, 15 bp, Homo sapiens
tgtttttaccttata

SEQ ID NO: 9809 - DNA, 15 bp, Homo sapiens
ctgtttttaccttat

SEQ ID NO: 9810 - DNA, 15 bp, Homo sapiens
actgtttttacctta

SEQ ID NO: 9811 - DNA, 15 bp, Homo sapiens
cactgtttttacctt

SEQ ID NO: 9812 - DNA, 15 bp, Homo sapiens
acactgtttttacct

SEQ ID NO: 9813 - DNA, 15 bp, Homo sapiens
aacactgtttttacc

SEQ ID NO: 9814 - DNA, 15 bp, Homo sapiens
aaacactgtttttac

SEQ ID NO: 9815 - DNA, 15 bp, Homo sapiens
aaaacactgttttta

SEQ ID NO: 9816 - DNA, 15 bp, Homo sapiens
caaaacactgttttt

SEQ ID NO: 9817 - DNA, 15 bp, Homo sapiens
gcaaaacactgtttt

SEQ ID NO: 9818 - DNA, 15 bp, Homo sapiens
agcaaaacactgttt

SEQ ID NO: 9819 - DNA, 15 bp, Homo sapiens
tagcaaaacactgtt

SEQ ID NO: 9820 - DNA, 15 bp, Homo sapiens
ctagcaaaacactgt

SEQ ID NO: 9821 - DNA, 15 bp, Homo sapiens
cctagcaaaacactg

SEQ ID NO: 9822 - DNA, 15 bp, Homo sapiens
gcctagcaaaacact

SEQ ID NO: 9823 - DNA, 15 bp, Homo sapiens
agcctagcaaaacac

SEQ ID NO: 9824 - DNA, 15 bp, Homo sapiens
aagcctagcaaaaca

SEQ ID NO: 9825 - DNA, 15 bp, Homo sapiens
taagcctagcaaaac

SEQ ID NO: 9826 - DNA, 15 bp, Homo sapiens
ttaagcctagcaaaa

SEQ ID NO: 9827 - DNA, 15 bp, Homo sapiens
attaagcctagcaaa

SEQ ID NO: 9828 - DNA, 15 bp, Homo sapiens
aattaagcctagcaa

SEQ ID NO: 9829 - DNA, 15 bp, Homo sapiens
aaattaagcctagca

SEQ ID NO: 9830 - DNA, 15 bp, Homo sapiens
caaattaagcctagc

SEQ ID NO: 9831 - DNA, 15 bp, Homo sapiens
tcaaattaagcctag

SEQ ID NO: 9832 - DNA, 15 bp, Homo sapiens
gtcaaattaagccta

SEQ ID NO: 9833 - DNA, 15 bp, Homo sapiens
ggtcaaattaagcct

SEQ ID NO: 9834 - DNA, 15 bp, Homo sapiens
tggtcaaattaagcc

SEQ ID NO: 9835 - DNA, 15 bp, Homo sapiens
atggtcaaattaagc

SEQ ID NO: 9836 - DNA, 15 bp, Homo sapiens
catggtcaaattaag

SEQ ID NO: 9837 - DNA, 15 bp, Homo sapiens
acatggtcaaattaa

SEQ ID NO: 9838 - DNA, 15 bp, Homo sapiens
aacatggtcaaatta

SEQ ID NO: 9839 - DNA, 15 bp, Homo sapiens
caacatggtcaaatt

SEQ ID NO: 9840 - DNA, 15 bp, Homo sapiens
acaacatggtcaaat

SEQ ID NO: 9841 - DNA, 15 bp, Homo sapiens
tacaacatggtcaaa

SEQ ID NO: 9842 - DNA, 15 bp, Homo sapiens
ttacaacatggtcaa

SEQ ID NO: 9843 - DNA, 15 bp, Homo sapiens
tttacaacatggtca

SEQ ID NO: 9844 - DNA, 15 bp, Homo sapiens
ttttacaacatggtc

SEQ ID NO: 9845 - DNA, 15 bp, Homo sapiens
attttacaacatggt

SEQ ID NO: 9846 - DNA, 15 bp, Homo sapiens
aattttacaacatgg

SEQ ID NO: 9847 - DNA, 15 bp, Homo sapiens
aaattttacaacatg

SEQ ID NO: 9848 - DNA, 15 bp, Homo sapiens
taaattttacaacat

SEQ ID NO: 9849 - DNA, 15 bp, Homo sapiens
ataaattttacaaca

SEQ ID NO: 9850 - DNA, 15 bp, Homo sapiens
aataaattttacaac

SEQ ID NO: 9851 - DNA, 15 bp, Homo sapiens
caataaattttacaa

SEQ ID NO: 9852 - DNA, 15 bp, Homo sapiens
acaataaattttaca

SEQ ID NO: 9853 - DNA, 15 bp, Homo sapiens
tacaataaattttac

SEQ ID NO: 9854 - DNA, 15 bp, Homo sapiens
atacaataaatttta

SEQ ID NO: 9855 - DNA, 15 bp, Homo sapiens
tatacaataaatttt

SEQ ID NO: 9856 - DNA, 15 bp, Homo sapiens
gtatacaataaattt

SEQ ID NO: 9857 - DNA, 15 bp, Homo sapiens
ggtatacaataaatt

SEQ ID NO: 9858 - DNA, 15 bp, Homo sapiens
aggtatacaataaat

SEQ ID NO: 9859 - DNA, 15 bp, Homo sapiens
aaggtatacaataaa

SEQ ID NO: 9860 - DNA, 15 bp, Homo sapiens
caaggtatacaataa

SEQ ID NO: 9861 - DNA, 15 bp, Homo sapiens
tcaaggtatacaata

SEQ ID NO: 9862 - DNA, 15 bp, Homo sapiens
ttcaaggtatacaat

SEQ ID NO: 9863 - DNA, 15 bp, Homo sapiens
tttcaaggtatacaa

SEQ ID NO: 9864 - DNA, 15 bp, Homo sapiens
ctttcaaggtataca

SEQ ID NO: 9865 - DNA, 15 bp, Homo sapiens
tctttcaaggtatac

SEQ ID NO: 9866 - DNA, 15 bp, Homo sapiens
ttctttcaaggtata

SEQ ID NO: 9867 - DNA, 15 bp, Homo sapiens
attctttcaaggtat

SEQ ID NO: 9868 - DNA, 15 bp, Homo sapiens
gattctttcaaggta

SEQ ID NO: 9869 - DNA, 15 bp, Homo sapiens
tgattctttcaaggt

SEQ ID NO: 9870 - DNA, 15 bp, Homo sapiens
atgattctttcaagg

SEQ ID NO: 9871 - DNA, 15 bp, Homo sapiens
aatgattctttcaag

SEQ ID NO: 9872 - DNA, 15 bp, Homo sapiens
aaatgattctttcaa

SEQ ID NO: 9873 - DNA, 15 bp, Homo sapiens
taaatgattctttca

SEQ ID NO: 9874 - DNA, 15 bp, Homo sapiens
ataaatgattctttc

SEQ ID NO: 9875 - DNA, 15 bp, Homo sapiens
cataaatgattcttt

SEQ ID NO: 9876 - DNA, 15 bp, Homo sapiens
tcataaatgattctt

SEQ ID NO: 9877 - DNA, 15 bp, Homo sapiens
ttcataaatgattct

SEQ ID NO: 9878 - DNA, 15 bp, Homo sapiens
tttcataaatgattc

SEQ ID NO: 9879 - DNA, 15 bp, Homo sapiens
ctttcataaatgatt

SEQ ID NO: 9880 - DNA, 15 bp, Homo sapiens
tctttcataaatgat

SEQ ID NO: 9881 - DNA, 15 bp, Homo sapiens
atctttcataaatga

SEQ ID NO: 9882 - DNA, 15 bp, Homo sapiens
tatctttcataaatg

SEQ ID NO: 9883 - DNA, 15 bp, Homo sapiens
gtatctttcataaat

SEQ ID NO: 9884 - DNA, 15 bp, Homo sapiens
agtatctttcataaa

SEQ ID NO: 9885 - DNA, 15 bp, Homo sapiens
cagtatctttcataa

SEQ ID NO: 9886 - DNA, 15 bp, Homo sapiens
tcagtatctttcata

SEQ ID NO: 9887 - DNA, 15 bp, Homo sapiens
ttcagtatctttcat

SEQ ID NO: 9888 - DNA, 15 bp, Homo sapiens
attcagtatctttca

SEQ ID NO: 9889 - DNA, 15 bp, Homo sapiens
aattcagtatctttc

SEQ ID NO: 9890 - DNA, 15 bp, Homo sapiens
taattcagtatcttt

SEQ ID NO: 9891 - DNA, 15 bp, Homo sapiens
ctaattcagtatctt

SEQ ID NO: 9892 - DNA, 15 bp, Homo sapiens
gctaattcagtatct

SEQ ID NO: 9893 - DNA, 15 bp, Homo sapiens
agctaattcagtatc

SEQ ID NO: 9894 - DNA, 15 bp, Homo sapiens
tagctaattcagtat

SEQ ID NO: 9895 - DNA, 15 bp, Homo sapiens
ttagctaattcagta

SEQ ID NO: 9896 - DNA, 15 bp, Homo sapiens
attagctaattcagt

SEQ ID NO: 9897 - DNA, 15 bp, Homo sapiens
tattagctaattcag

SEQ ID NO: 9898 - DNA, 15 bp, Homo sapiens
atattagctaattca

SEQ ID NO: 9899 - DNA, 15 bp, Homo sapiens
tatattagctaattc

SEQ ID NO: 9900 - DNA, 15 bp, Homo sapiens
atatattagctaatt

SEQ ID NO: 9901 - DNA, 15 bp, Homo sapiens
tatatattagctaat

SEQ ID NO: 9902 - DNA, 15 bp, Homo sapiens
gtatatattagctaa

SEQ ID NO: 9903 - DNA, 15 bp, Homo sapiens
agtatatattagcta

SEQ ID NO: 9904 - DNA, 15 bp, Homo sapiens
gagtatatattagct

SEQ ID NO: 9905 - DNA, 15 bp, Homo sapiens
agagtatatattagc

SEQ ID NO: 9906 - DNA, 15 bp, Homo sapiens
cagagtatatattag

SEQ ID NO: 9907 - DNA, 15 bp, Homo sapiens
acagagtatatatta

SEQ ID NO: 9908 - DNA, 15 bp, Homo sapiens
gacagagtatatatt

SEQ ID NO: 9909 - DNA, 15 bp, Homo sapiens
agacagagtatatat

SEQ ID NO: 9910 - DNA, 15 bp, Homo sapiens
aagacagagtatata

SEQ ID NO: 9911 - DNA, 15 bp, Homo sapiens
taagacagagtatat

SEQ ID NO: 9912 - DNA, 15 bp, Homo sapiens
ataagacagagtata

SEQ ID NO: 9913 - DNA, 15 bp, Homo sapiens
cataagacagagtat

SEQ ID NO: 9914 - DNA, 15 bp, Homo sapiens
acataagacagagta

SEQ ID NO: 9915 - DNA, 15 bp, Homo sapiens
tacataagacagagt

SEQ ID NO: 9916 - DNA, 15 bp, Homo sapiens
ctacataagacagag

SEQ ID NO: 9917 - DNA, 15 bp, Homo sapiens
actacataagacaga

SEQ ID NO: 9918 - DNA, 15 bp, Homo sapiens
aactacataagacag

SEQ ID NO: 9919 - DNA, 15 bp, Homo sapiens
aaactacataagaca

SEQ ID NO: 9920 - DNA, 15 bp, Homo sapiens
aaaactacataagac

SEQ ID NO: 9921 - DNA, 15 bp, Homo sapiens
aaaaactacataaga

SEQ ID NO: 9922 - DNA, 15 bp, Homo sapiens
caaaaactacataag

SEQ ID NO: 9923 - DNA, 15 bp, Homo sapiens
tcaaaaactacataa

SEQ ID NO: 9924 - DNA, 15 bp, Homo sapiens
atcaaaaactacata

SEQ ID NO: 9925 - DNA, 15 bp, Homo sapiens
aatcaaaaactacat

SEQ ID NO: 9926 - DNA, 15 bp, Homo sapiens
taatcaaaaactaca

SEQ ID NO: 9927 - DNA, 15 bp, Homo sapiens
ttaatcaaaaactac

SEQ ID NO: 9928 - DNA, 15 bp, Homo sapiens
gttaatcaaaaacta

SEQ ID NO: 9929 - DNA, 15 bp, Homo sapiens
tgttaatcaaaaact

SEQ ID NO: 9930 - DNA, 15 bp, Homo sapiens
ttgttaatcaaaaac

SEQ ID NO: 9931 - DNA, 15 bp, Homo sapiens
attgttaatcaaaaa

SEQ ID NO: 9932 - DNA, 15 bp, Homo sapiens
tattgttaatcaaaa

SEQ ID NO: 9933 - DNA, 15 bp, Homo sapiens
gtattgttaatcaaa

SEQ ID NO: 9934 - DNA, 15 bp, Homo sapiens
tgtattgttaatcaa

SEQ ID NO: 9935 - DNA, 15 bp, Homo sapiens
gtgtattgttaatca

SEQ ID NO: 9936 - DNA, 15 bp, Homo sapiens
agtgtattgttaatc

SEQ ID NO: 9937 - DNA, 15 bp, Homo sapiens
aagtgtattgttaat

SEQ ID NO: 9938 - DNA, 15 bp, Homo sapiens
aaagtgtattgttaa

SEQ ID NO: 9939 - DNA, 15 bp, Homo sapiens
aaaagtgtattgtta

SEQ ID NO: 9940 - DNA, 15 bp, Homo sapiens
aaaaagtgtattgtt

SEQ ID NO: 9941 - DNA, 15 bp, Homo sapiens
taaaaagtgtattgt

SEQ ID NO: 9942 - DNA, 15 bp, Homo sapiens
ttaaaaagtgtattg

SEQ ID NO: 9943 - DNA, 15 bp, Homo sapiens
tttaaaaagtgtatt

SEQ ID NO: 9944 - DNA, 15 bp, Homo sapiens
atttaaaaagtgtat

SEQ ID NO: 9945 - DNA, 15 bp, Homo sapiens
gatttaaaaagtgta

SEQ ID NO: 9946 - DNA, 15 bp, Homo sapiens
tgatttaaaaagtgt

SEQ ID NO: 9947 - DNA, 15 bp, Homo sapiens
atgatttaaaaagtg

SEQ ID NO: 9948 - DNA, 15 bp, Homo sapiens
aatgatttaaaaagt

SEQ ID NO: 9949 - DNA, 15 bp, Homo sapiens
taatgatttaaaaag

SEQ ID NO: 9950 - DNA, 15 bp, Homo sapiens
ctaatgatttaaaaa

SEQ ID NO: 9951 - DNA, 15 bp, Homo sapiens
gctaatgatttaaaa

SEQ ID NO: 9952 - DNA, 15 bp, Homo sapiens
agctaatgatttaaa

SEQ ID NO: 9953 - DNA, 15 bp, Homo sapiens
gagctaatgatttaa

SEQ ID NO: 9954 - DNA, 15 bp, Homo sapiens
tgagctaatgattta

SEQ ID NO: 9955 - DNA, 15 bp, Homo sapiens
atgagctaatgattt

SEQ ID NO: 9956 - DNA, 15 bp, Homo sapiens
aatgagctaatgatt

SEQ ID NO: 9957 - DNA, 15 bp, Homo sapiens
aaatgagctaatgat

SEQ ID NO: 9958 - DNA, 15 bp, Homo sapiens
caaatgagctaatga

SEQ ID NO: 9959 - DNA, 15 bp, Homo sapiens
tcaaatgagctaatg

SEQ ID NO: 9960 - DNA, 15 bp, Homo sapiens
atcaaatgagctaat

SEQ ID NO: 9961 - DNA, 15 bp, Homo sapiens
aatcaaatgagctaa

SEQ ID NO: 9962 - DNA, 15 bp, Homo sapiens
aaatcaaatgagcta

SEQ ID NO: 9963 - DNA, 15 bp, Homo sapiens
aaaatcaaatgagct

SEQ ID NO: 9964 - DNA, 15 bp, Homo sapiens
caaaatcaaatgagc

SEQ ID NO: 9965 - DNA, 15 bp, Homo sapiens
gcaaaatcaaatgag

SEQ ID NO: 9966 - DNA, 15 bp, Homo sapiens
tgcaaaatcaaatga

SEQ ID NO: 9967 - DNA, 15 bp, Homo sapiens
ttgcaaaatcaaatg

SEQ ID NO: 9968 - DNA, 15 bp, Homo sapiens
tttgcaaaatcaaat

SEQ ID NO: 9969 - DNA, 15 bp, Homo sapiens
ctttgcaaaatcaaa

SEQ ID NO: 9970 - DNA, 15 bp, Homo sapiens
tctttgcaaaatcaa

SEQ ID NO: 9971 - DNA, 15 bp, Homo sapiens
ttctttgcaaaatca

SEQ ID NO: 9972 - DNA, 15 bp, Homo sapiens
cttctttgcaaaatc

SEQ ID NO: 9973 - DNA, 15 bp, Homo sapiens
tcttctttgcaaaat

SEQ ID NO: 9974 - DNA, 15 bp, Homo sapiens
ttcttctttgcaaaa

SEQ ID NO: 9975 - DNA, 15 bp, Homo sapiens
gttcttctttgcaaa

SEQ ID NO: 9976 - DNA, 15 bp, Homo sapiens
tgttcttctttgcaa

SEQ ID NO: 9977 - DNA, 15 bp, Homo sapiens
ctgttcttctttgca

SEQ ID NO: 9978 - DNA, 15 bp, Homo sapiens
cctgttcttctttgc

SEQ ID NO: 9979 - DNA, 15 bp, Homo sapiens
acctgttcttctttg

SEQ ID NO: 9980 - DNA, 15 bp, Homo sapiens
tacctgttcttcttt

SEQ ID NO: 9981 - DNA, 15 bp, Homo sapiens
ttacctgttcttctt

SEQ ID NO: 9982 - DNA, 15 bp, Homo sapiens
gttacctgttcttct

SEQ ID NO: 9983 - DNA, 15 bp, Homo sapiens
ggttacctgttcttc

SEQ ID NO: 9984 - DNA, 15 bp, Homo sapiens
aggttacctgttctt

SEQ ID NO: 9985 - DNA, 15 bp, Homo sapiens
taggttacctgttct

SEQ ID NO: 9986 - DNA, 15 bp, Homo sapiens
ttaggttacctgttc

SEQ ID NO: 9987 - DNA, 15 bp, Homo sapiens
cttaggttacctgtt

SEQ ID NO: 9988 - DNA, 15 bp, Homo sapiens
tcttaggttacctgt

SEQ ID NO: 9989 - DNA, 15 bp, Homo sapiens
ctcttaggttacctg

SEQ ID NO: 9990 - DNA, 15 bp, Homo sapiens
cctcttaggttacct

SEQ ID NO: 9991 - DNA, 15 bp, Homo sapiens
gcctcttaggttacc

SEQ ID NO: 9992 - DNA, 15 bp, Homo sapiens
tgcctcttaggttac

SEQ ID NO: 9993 - DNA, 15 bp, Homo sapiens
ctgcctcttaggtta

SEQ ID NO: 9994 - DNA, 15 bp, Homo sapiens
tctgcctcttaggtt

SEQ ID NO: 9995 - DNA, 15 bp, Homo sapiens
gtctgcctcttaggt

SEQ ID NO: 9996 - DNA, 15 bp, Homo sapiens
tgtctgcctcttagg

SEQ ID NO: 9997 - DNA, 15 bp, Homo sapiens
ctgtctgcctcttag

SEQ ID NO: 9998 - DNA, 15 bp, Homo sapiens
tctgtctgcctctta

SEQ ID NO: 9999 - DNA, 15 bp, Homo sapiens
ttctgtctgcctctt

SEQ ID NO: 10000 - DNA, 15 bp, Homo sapiens
gttctgtctgcctct

SEQ ID NO: 10001 - DNA, 15 bp, Homo sapiens
tgttctgtctgcctc

SEQ ID NO: 10002 - DNA, 15 bp, Homo sapiens
ctgttctgtctgcct

SEQ ID NO: 10003 - DNA, 15 bp, Homo sapiens
cctgttctgtctgcc

SEQ ID NO: 10004 - DNA, 15 bp, Homo sapiens
gcctgttctgtctgc

SEQ ID NO: 10005 - DNA, 15 bp, Homo sapiens
tgcctgttctgtctg

SEQ ID NO: 10006 - DNA, 15 bp, Homo sapiens
atgcctgttctgtct

SEQ ID NO: 10007 - DNA, 15 bp, Homo sapiens
aatgcctgttctgtc

SEQ ID NO: 10008 - DNA, 15 bp, Homo sapiens
taatgcctgttctgt

SEQ ID NO: 10009 - DNA, 15 bp, Homo sapiens
gtaatgcctgttctg

SEQ ID NO: 10010 - DNA, 15 bp, Homo sapiens
agtaatgcctgttct

SEQ ID NO: 10011 - DNA, 15 bp, Homo sapiens
aagtaatgcctgttc

SEQ ID NO: 10012 - DNA, 15 bp, Homo sapiens
aaagtaatgcctgtt

SEQ ID NO: 10013 - DNA, 15 bp, Homo sapiens
aaaagtaatgcctgt

SEQ ID NO: 10014 - DNA, 15 bp, Homo sapiens
taaaagtaatgcctg

SEQ ID NO: 10015 - DNA, 15 bp, Homo sapiens
ataaaagtaatgcct

SEQ ID NO: 10016 - DNA, 15 bp, Homo sapiens
aataaaagtaatgcc

SEQ ID NO: 10017 - DNA, 15 bp, Homo sapiens
aaataaaagtaatgc

SEQ ID NO: 10018 - DNA, 15 bp, Homo sapiens
aaaataaaagtaatg

SEQ ID NO: 10019 - DNA, 15 bp, Homo sapiens
aaaaataaaagtaat

SEQ ID NO: 10020 - DNA, 15 bp, Homo sapiens
gaaaaataaaagtaa

SEQ ID NO: 10021 - DNA, 15 bp, Homo sapiens
agaaaaataaaagta

SEQ ID NO: 10022 - DNA, 15 bp, Homo sapiens
aagaaaaataaaagt

SEQ ID NO: 10023 - DNA, 15 bp, Homo sapiens
aaagaaaaataaaag

SEQ ID NO: 10024 - DNA, 15 bp, Homo sapiens
gaaagaaaaataaaa

SEQ ID NO: 10025 - DNA, 15 bp, Homo sapiens
agaaagaaaaataaa

SEQ ID NO: 10026 - DNA, 15 bp, Homo sapiens
aagaaagaaaaataa

SEQ ID NO: 10027 - DNA, 15 bp, Homo sapiens
aaagaaagaaaaata

SEQ ID NO: 10028 - DNA, 15 bp, Homo sapiens
aaaagaaagaaaaat

SEQ ID NO: 10029 - DNA, 15 bp, Homo sapiens
aaaaagaaagaaaaa

SEQ ID NO: 10030 - DNA, 15 bp, Homo sapiens
aaaaaagaaagaaaa

SEQ ID NO: 10031 - DNA, 15 bp, Homo sapiens
taaaaaagaaagaaa

SEQ ID NO: 10032 - DNA, 15 bp, Homo sapiens
ataaaaaagaaagaa

SEQ ID NO: 10033 - DNA, 15 bp, Homo sapiens
aataaaaaagaaaga

SEQ ID NO: 10034 - DNA, 15 bp, Homo sapiens
aaataaaaaagaaag

SEQ ID NO: 10035 - DNA, 15 bp, Homo sapiens
aaaataaaaaagaaa

SEQ ID NO: 10036 - DNA, 15 bp, Homo sapiens
taaaataaaaaagaa

SEQ ID NO: 10037 - DNA, 15 bp, Homo sapiens
ataaaataaaaaaga

SEQ ID NO: 10038 - DNA, 15 bp, Homo sapiens
aataaaataaaaaag

SEQ ID NO: 10039 - DNA, 15 bp, Homo sapiens
aaataaaataaaaaa

SEQ ID NO: 10040 - DNA, 15 bp, Homo sapiens
taaataaaataaaaa

SEQ ID NO: 10041 - DNA, 15 bp, Homo sapiens
ataaataaaataaaa

SEQ ID NO: 10042 - DNA, 15 bp, Homo sapiens
aataaataaaataaa

SEQ ID NO: 10043 - DNA, 15 bp, Homo sapiens
aaataaataaaataa

SEQ ID NO: 10044 - DNA, 15 bp, Homo sapiens
taaataaataaaata

SEQ ID NO: 10045 - DNA, 15 bp, Homo sapiens
ataaataaataaaat

SEQ ID NO: 10046 - DNA, 15 bp, Homo sapiens
aataaataaataaaa

SEQ ID NO: 10047 - DNA, 15 bp, Homo sapiens
aaataaataaataaa

SEQ ID NO: 10048 - DNA, 15 bp, Homo sapiens
taaataaataaataa

SEQ ID NO: 10049 - DNA, 15 bp, Homo sapiens
ataaataaataaata

SEQ ID NO: 10050 - DNA, 15 bp, Homo sapiens
aataaataaataaat

SEQ ID NO: 10051 - DNA, 15 bp, Homo sapiens
aaaataaataaataa

SEQ ID NO: 10052 - DNA, 15 bp, Homo sapiens
aaaaataaataaata

SEQ ID NO: 10053 - DNA, 15 bp, Homo sapiens
aaaaaataaataaat

SEQ ID NO: 10054 - DNA, 15 bp, Homo sapiens
caaaaaataaataaa

SEQ ID NO: 10055 - DNA, 15 bp, Homo sapiens
gcaaaaaataaataa

SEQ ID NO: 10056 - DNA, 15 bp, Homo sapiens
tgcaaaaaataaata

SEQ ID NO: 10057 - DNA, 15 bp, Homo sapiens
ctgcaaaaaataaat

SEQ ID NO: 10058 - DNA, 15 bp, Homo sapiens
gctgcaaaaaataaa

SEQ ID NO: 10059 - DNA, 15 bp, Homo sapiens
agctgcaaaaaataa

SEQ ID NO: 10060 - DNA, 15 bp, Homo sapiens
aagctgcaaaaaata

SEQ ID NO: 10061 - DNA, 15 bp, Homo sapiens
taagctgcaaaaaat

SEQ ID NO: 10062 - DNA, 15 bp, Homo sapiens
ctaagctgcaaaaaa

SEQ ID NO: 10063 - DNA, 15 bp, Homo sapiens
cctaagctgcaaaaa

SEQ ID NO: 10064 - DNA, 15 bp, Homo sapiens
tcctaagctgcaaaa

SEQ ID NO: 10065 - DNA, 15 bp, Homo sapiens
ttcctaagctgcaaa

SEQ ID NO: 10066 - DNA, 15 bp, Homo sapiens
attcctaagctgcaa

SEQ ID NO: 10067 - DNA, 15 bp, Homo sapiens
aattcctaagctgca

SEQ ID NO: 10068 - DNA, 15 bp, Homo sapiens
caattcctaagctgc

SEQ ID NO: 10069 - DNA, 15 bp, Homo sapiens
acaattcctaagctg

SEQ ID NO: 10070 - DNA, 15 bp, Homo sapiens
tacaattcctaagct

SEQ ID NO: 10071 - DNA, 15 bp, Homo sapiens
ctacaattcctaagc

SEQ ID NO: 10072 - DNA, 15 bp, Homo sapiens
gctacaattcctaag

SEQ ID NO: 10073 - DNA, 15 bp, Homo sapiens
agctacaattcctaa

SEQ ID NO: 10074 - DNA, 15 bp, Homo sapiens
gagctacaattccta

SEQ ID NO: 10075 - DNA, 15 bp, Homo sapiens
ggagctacaattcct

SEQ ID NO: 10076 - DNA, 15 bp, Homo sapiens
tggagctacaattcc

SEQ ID NO: 10077 - DNA, 15 bp, Homo sapiens
ctggagctacaattc

SEQ ID NO: 10078 - DNA, 15 bp, Homo sapiens
actggagctacaatt

SEQ ID NO: 10079 - DNA, 15 bp, Homo sapiens
cactggagctacaat

SEQ ID NO: 10080 - DNA, 15 bp, Homo sapiens
ccactggagctacaa

SEQ ID NO: 10081 - DNA, 15 bp, Homo sapiens
tccactggagctaca

SEQ ID NO: 10082 - DNA, 15 bp, Homo sapiens
ttccactggagctac

SEQ ID NO: 10083 - DNA, 15 bp, Homo sapiens
attccactggagcta

SEQ ID NO: 10084 - DNA, 15 bp, Homo sapiens
gattccactggagct

SEQ ID NO: 10085 - DNA, 15 bp, Homo sapiens
tgattccactggagc

SEQ ID NO: 10086 - DNA, 15 bp, Homo sapiens
ctgattccactggag

SEQ ID NO: 10087 - DNA, 15 bp, Homo sapiens
actgattccactgga

SEQ ID NO: 10088 - DNA, 15 bp, Homo sapiens
tactgattccactgg

SEQ ID NO: 10089 - DNA, 15 bp, Homo sapiens
atactgattccactg

SEQ ID NO: 10090 - DNA, 15 bp, Homo sapiens
gatactgattccact

SEQ ID NO: 10091 - DNA, 15 bp, Homo sapiens
agatactgattccac

SEQ ID NO: 10092 - DNA, 15 bp, Homo sapiens
aagatactgattcca

SEQ ID NO: 10093 - DNA, 15 bp, Homo sapiens
caagatactgattcc

SEQ ID NO: 10094 - DNA, 15 bp, Homo sapiens
acaagatactgattc

SEQ ID NO: 10095 - DNA, 15 bp, Homo sapiens
aacaagatactgatt

SEQ ID NO: 10096 - DNA, 15 bp, Homo sapiens
taacaagatactgat

SEQ ID NO: 10097 - DNA, 15 bp, Homo sapiens
ttaacaagatactga

SEQ ID NO: 10098 - DNA, 15 bp, Homo sapiens
attaacaagatactg

SEQ ID NO: 10099 - DNA, 15 bp, Homo sapiens
cattaacaagatact

SEQ ID NO: 10100 - DNA, 15 bp, Homo sapiens
ccattaacaagatac

SEQ ID NO: 10101 - DNA, 15 bp, Homo sapiens
gccattaacaagata

SEQ ID NO: 10102 - DNA, 15 bp, Homo sapiens
agccattaacaagat

SEQ ID NO: 10103 - DNA, 15 bp, Homo sapiens
tagccattaacaaga

SEQ ID NO: 10104 - DNA, 15 bp, Homo sapiens
ctagccattaacaag

SEQ ID NO: 10105 - DNA, 15 bp, Homo sapiens
actagccattaacaa

SEQ ID NO: 10106 - DNA, 15 bp, Homo sapiens
cactagccattaaca

SEQ ID NO: 10107 - DNA, 15 bp, Homo sapiens
tcactagccattaac

SEQ ID NO: 10108 - DNA, 15 bp, Homo sapiens
ttcactagccattaa

SEQ ID NO: 10109 - DNA, 15 bp, Homo sapiens
tttcactagccatta

SEQ ID NO: 10110 - DNA, 15 bp, Homo sapiens
ctttcactagccatt

SEQ ID NO: 10111 - DNA, 15 bp, Homo sapiens
tctttcactagccat

SEQ ID NO: 10112 - DNA, 15 bp, Homo sapiens
gtctttcactagcca

SEQ ID NO: 10113 - DNA, 15 bp, Homo sapiens
agtctttcactagcc

SEQ ID NO: 10114 - DNA, 15 bp, Homo sapiens
cagtctttcactagc

SEQ ID NO: 10115 - DNA, 15 bp, Homo sapiens
tcagtctttcactag

SEQ ID NO: 10116 - DNA, 15 bp, Homo sapiens
ctcagtctttcacta

SEQ ID NO: 10117 - DNA, 15 bp, Homo sapiens
actcagtctttcact

SEQ ID NO: 10118 - DNA, 15 bp, Homo sapiens
gactcagtctttcac

SEQ ID NO: 10119 - DNA, 15 bp, Homo sapiens
agactcagtctttca

SEQ ID NO: 10120 - DNA, 15 bp, Homo sapiens
cagactcagtctttc

SEQ ID NO: 10121 - DNA, 15 bp, Homo sapiens
tcagactcagtcttt

SEQ ID NO: 10122 - DNA, 15 bp, Homo sapiens
ttcagactcagtctt

SEQ ID NO: 10123 - DNA, 15 bp, Homo sapiens
cttcagactcagtct

SEQ ID NO: 10124 - DNA, 15 bp, Homo sapiens
tcttcagactcagtc

SEQ ID NO: 10125 - DNA, 15 bp, Homo sapiens
ttcttcagactcagt

SEQ ID NO: 10126 - DNA, 15 bp, Homo sapiens
cttcttcagactcag

SEQ ID NO: 10127 - DNA, 15 bp, Homo sapiens
ccttcttcagactca

SEQ ID NO: 10128 - DNA, 15 bp, Homo sapiens
tccttcttcagactc

SEQ ID NO: 10129 - DNA, 15 bp, Homo sapiens
atccttcttcagact

SEQ ID NO: 10130 - DNA, 15 bp, Homo sapiens
catccttcttcagac

SEQ ID NO: 10131 - DNA, 15 bp, Homo sapiens
gcatccttcttcaga

SEQ ID NO: 10132 - DNA, 15 bp, Homo sapiens
tgcatccttcttcag

SEQ ID NO: 10133 - DNA, 15 bp, Homo sapiens
ctgcatccttcttca

SEQ ID NO: 10134 - DNA, 15 bp, Homo sapiens
cctgcatccttcttc

SEQ ID NO: 10135 - DNA, 15 bp, Homo sapiens
tcctgcatccttctt

SEQ ID NO: 10136 - DNA, 15 bp, Homo sapiens
gtcctgcatccttct

SEQ ID NO: 10137 - DNA, 15 bp, Homo sapiens
agtcctgcatccttc

SEQ ID NO: 10138 - DNA, 15 bp, Homo sapiens
aagtcctgcatcctt

SEQ ID NO: 10139 - DNA, 15 bp, Homo sapiens
aaagtcctgcatcct

SEQ ID NO: 10140 - DNA, 15 bp, Homo sapiens
aaaagtcctgcatcc

SEQ ID NO: 10141 - DNA, 15 bp, Homo sapiens
aaaaagtcctgcatc

SEQ ID NO: 10142 - DNA, 15 bp, Homo sapiens
aaaaaagtcctgcat

SEQ ID NO: 10143 - DNA, 15 bp, Homo sapiens
caaaaaagtcctgca

SEQ ID NO: 10144 - DNA, 15 bp, Homo sapiens
ccaaaaaagtcctgc

SEQ ID NO: 10145 - DNA, 15 bp, Homo sapiens
gccaaaaaagtcctg

SEQ ID NO: 10146 - DNA, 15 bp, Homo sapiens
tgccaaaaaagtcct

SEQ ID NO: 10147 - DNA, 15 bp, Homo sapiens
gtgccaaaaaagtcc

SEQ ID NO: 10148 - DNA, 15 bp, Homo sapiens
agtgccaaaaaagtc

SEQ ID NO: 10149 - DNA, 15 bp, Homo sapiens
aagtgccaaaaaagt

SEQ ID NO: 10150 - DNA, 15 bp, Homo sapiens
caagtgccaaaaaag

SEQ ID NO: 10151 - DNA, 15 bp, Homo sapiens
ccaagtgccaaaaaa

SEQ ID NO: 10152 - DNA, 15 bp, Homo sapiens
accaagtgccaaaaa

SEQ ID NO: 10153 - DNA, 15 bp, Homo sapiens
caccaagtgccaaaa

SEQ ID NO: 10154 - DNA, 15 bp, Homo sapiens
gcaccaagtgccaaa

SEQ ID NO: 10155 - DNA, 15 bp, Homo sapiens
tgcaccaagtgccaa

SEQ ID NO: 10156 - DNA, 15 bp, Homo sapiens
ctgcaccaagtgcca

SEQ ID NO: 10157 - DNA, 15 bp, Homo sapiens
actgcaccaagtgcc

SEQ ID NO: 10158 - DNA, 15 bp, Homo sapiens
tactgcaccaagtgc

SEQ ID NO: 10159 - DNA, 15 bp, Homo sapiens
atactgcaccaagtg

SEQ ID NO: 10160 - DNA, 15 bp, Homo sapiens
aatactgcaccaagt

SEQ ID NO: 10161 - DNA, 15 bp, Homo sapiens
aaatactgcaccaag

SEQ ID NO: 10162 - DNA, 15 bp, Homo sapiens
aaaatactgcaccaa

SEQ ID NO: 10163 - DNA, 15 bp, Homo sapiens
aaaaatactgcacca

SEQ ID NO: 10164 - DNA, 15 bp, Homo sapiens
gaaaaatactgcacc

SEQ ID NO: 10165 - DNA, 15 bp, Homo sapiens
ggaaaaatactgcac

SEQ ID NO: 10166 - DNA, 15 bp, Homo sapiens
gggaaaaatactgca

SEQ ID NO: 10167 - DNA, 15 bp, Homo sapiens
tgggaaaaatactgc

SEQ ID NO: 10168 - DNA, 15 bp, Homo sapiens
atgggaaaaatactg

SEQ ID NO: 10169 - DNA, 15 bp, Homo sapiens
aatgggaaaaatact

SEQ ID NO: 10170 - DNA, 15 bp, Homo sapiens
taatgggaaaaatac

SEQ ID NO: 10171 - DNA, 15 bp, Homo sapiens
ataatgggaaaaata

SEQ ID NO: 10172 - DNA, 15 bp, Homo sapiens
cataatgggaaaaat

SEQ ID NO: 10173 - DNA, 15 bp, Homo sapiens
acataatgggaaaaa

SEQ ID NO: 10174 - DNA, 15 bp, Homo sapiens
aacataatgggaaaa

SEQ ID NO: 10175 - DNA, 15 bp, Homo sapiens
taacataatgggaaa

SEQ ID NO: 10176 - DNA, 15 bp, Homo sapiens
gtaacataatgggaa

SEQ ID NO: 10177 - DNA, 15 bp, Homo sapiens
tgtaacataatggga

SEQ ID NO: 10178 - DNA, 15 bp, Homo sapiens
atgtaacataatggg

SEQ ID NO: 10179 - DNA, 15 bp, Homo sapiens
catgtaacataatgg

SEQ ID NO: 10180 - DNA, 15 bp, Homo sapiens
tcatgtaacataatg

SEQ ID NO: 10181 - DNA, 15 bp, Homo sapiens
ctcatgtaacataat

SEQ ID NO: 10182 - DNA, 15 bp, Homo sapiens
actcatgtaacataa

SEQ ID NO: 10183 - DNA, 15 bp, Homo sapiens
cactcatgtaacata

SEQ ID NO: 10184 - DNA, 15 bp, Homo sapiens
ccactcatgtaacat

SEQ ID NO: 10185 - DNA, 15 bp, Homo sapiens
accactcatgtaaca

SEQ ID NO: 10186 - DNA, 15 bp, Homo sapiens
aaccactcatgtaac

SEQ ID NO: 10187 - DNA, 15 bp, Homo sapiens
gaaccactcatgtaa

SEQ ID NO: 10188 - DNA, 15 bp, Homo sapiens
agaaccactcatgta

SEQ ID NO: 10189 - DNA, 15 bp, Homo sapiens
aagaaccactcatgt

SEQ ID NO: 10190 - DNA, 15 bp, Homo sapiens
taagaaccactcatg

SEQ ID NO: 10191 - DNA, 15 bp, Homo sapiens
ttaagaaccactcat

SEQ ID NO: 10192 - DNA, 15 bp, Homo sapiens
tttaagaaccactca

SEQ ID NO: 10193 - DNA, 15 bp, Homo sapiens
gtttaagaaccactc

SEQ ID NO: 10194 - DNA, 15 bp, Homo sapiens
agtttaagaaccact

SEQ ID NO: 10195 - DNA, 15 bp, Homo sapiens
aagtttaagaaccac

SEQ ID NO: 10196 - DNA, 15 bp, Homo sapiens
gaagtttaagaacca

SEQ ID NO: 10197 - DNA, 15 bp, Homo sapiens
tgaagtttaagaacc

SEQ ID NO: 10198 - DNA, 15 bp, Homo sapiens
ctgaagtttaagaac

SEQ ID NO: 10199 - DNA, 15 bp, Homo sapiens
actgaagtttaagaa

SEQ ID NO: 10200 - DNA, 15 bp, Homo sapiens
cactgaagtttaaga

SEQ ID NO: 10201 - DNA, 15 bp, Homo sapiens
acactgaagtttaag

SEQ ID NO: 10202 - DNA, 15 bp, Homo sapiens
cacactgaagtttaa

SEQ ID NO: 10203 - DNA, 15 bp, Homo sapiens
acacactgaagttta

SEQ ID NO: 10204 - DNA, 15 bp, Homo sapiens
aacacactgaagttt

SEQ ID NO: 10205 - DNA, 15 bp, Homo sapiens
taacacactgaagtt

SEQ ID NO: 10206 - DNA, 15 bp, Homo sapiens
ctaacacactgaagt

SEQ ID NO: 10207 - DNA, 15 bp, Homo sapiens
tctaacacactgaag

SEQ ID NO: 10208 - DNA, 15 bp, Homo sapiens
ttctaacacactgaa

SEQ ID NO: 10209 - DNA, 15 bp, Homo sapiens
gttctaacacactga

SEQ ID NO: 10210 - DNA, 15 bp, Homo sapiens
tgttctaacacactg

SEQ ID NO: 10211 - DNA, 15 bp, Homo sapiens
ttgttctaacacact

SEQ ID NO: 10212 - DNA, 15 bp, Homo sapiens
gttgttctaacacac

SEQ ID NO: 10213 - DNA, 15 bp, Homo sapiens
ggttgttctaacaca

SEQ ID NO: 10214 - DNA, 15 bp, Homo sapiens
aggttgttctaacac

SEQ ID NO: 10215 - DNA, 15 bp, Homo sapiens
caggttgttctaaca

SEQ ID NO: 10216 - DNA, 15 bp, Homo sapiens
tcaggttgttctaac

SEQ ID NO: 10217 - DNA, 15 bp, Homo sapiens
ttcaggttgttctaa

SEQ ID NO: 10218 - DNA, 15 bp, Homo sapiens
cttcaggttgttcta

SEQ ID NO: 10219 - DNA, 15 bp, Homo sapiens
ccttcaggttgttct

SEQ ID NO: 10220 - DNA, 15 bp, Homo sapiens
cccttcaggttgttc

SEQ ID NO: 10221 - DNA, 15 bp, Homo sapiens
gcccttcaggttgtt

SEQ ID NO: 10222 - DNA, 15 bp, Homo sapiens
agcccttcaggttgt

SEQ ID NO: 10223 - DNA, 15 bp, Homo sapiens
aagcccttcaggttg

SEQ ID NO: 10224 - DNA, 15 bp, Homo sapiens
taagcccttcaggtt

SEQ ID NO: 10225 - DNA, 15 bp, Homo sapiens
ataagcccttcaggt

SEQ ID NO: 10226 - DNA, 15 bp, Homo sapiens
aataagcccttcagg

SEQ ID NO: 10227 - DNA, 15 bp, Homo sapiens
taataagcccttcag

SEQ ID NO: 10228 - DNA, 15 bp, Homo sapiens
ttaataagcccttca

SEQ ID NO: 10229 - DNA, 15 bp, Homo sapiens
cttaataagcccttc

SEQ ID NO: 10230 - DNA, 15 bp, Homo sapiens
gcttaataagccctt

SEQ ID NO: 10231 - DNA, 15 bp, Homo sapiens
agcttaataagccct

SEQ ID NO: 10232 - DNA, 15 bp, Homo sapiens
tagcttaataagccc

SEQ ID NO: 10233 - DNA, 15 bp, Homo sapiens
atagcttaataagcc

SEQ ID NO: 10234 - DNA, 15 bp, Homo sapiens
catagcttaataagc

SEQ ID NO: 10235 - DNA, 15 bp, Homo sapiens
ccatagcttaataag

SEQ ID NO: 10236 - DNA, 15 bp, Homo sapiens
tccatagcttaataa

SEQ ID NO: 10237 - DNA, 15 bp, Homo sapiens
atccatagcttaata

SEQ ID NO: 10238 - DNA, 15 bp, Homo sapiens
aatccatagcttaat

SEQ ID NO: 10239 - DNA, 15 bp, Homo sapiens
caatccatagcttaa

SEQ ID NO: 10240 - DNA, 15 bp, Homo sapiens
gcaatccatagctta

SEQ ID NO: 10241 - DNA, 15 bp, Homo sapiens
agcaatccatagctt

SEQ ID NO: 10242 - DNA, 15 bp, Homo sapiens
aagcaatccatagct

SEQ ID NO: 10243 - DNA, 15 bp, Homo sapiens
taagcaatccatagc

SEQ ID NO: 10244 - DNA, 15 bp, Homo sapiens
gtaagcaatccatag

SEQ ID NO: 10245 - DNA, 15 bp, Homo sapiens
agtaagcaatccata

SEQ ID NO: 10246 - DNA, 15 bp, Homo sapiens
gagtaagcaatccat

SEQ ID NO: 10247 - DNA, 15 bp, Homo sapiens
ggagtaagcaatcca

SEQ ID NO: 10248 - DNA, 15 bp, Homo sapiens
tggagtaagcaatcc

SEQ ID NO: 10249 - DNA, 15 bp, Homo sapiens
gtggagtaagcaatc

SEQ ID NO: 10250 - DNA, 15 bp, Homo sapiens
ggtggagtaagcaat

SEQ ID NO: 10251 - DNA, 15 bp, Homo sapiens
gggtggagtaagcaa

SEQ ID NO: 10252 - DNA, 15 bp, Homo sapiens
agggtggagtaagca

SEQ ID NO: 10253 - DNA, 15 bp, Homo sapiens
gagggtggagtaagc

SEQ ID NO: 10254 - DNA, 15 bp, Homo sapiens
tgagggtggagtaag

SEQ ID NO: 10255 - DNA, 15 bp, Homo sapiens
ctgagggtggagtaa

SEQ ID NO: 10256 - DNA, 15 bp, Homo sapiens
tctgagggtggagta

SEQ ID NO: 10257 - DNA, 15 bp, Homo sapiens
ctctgagggtggagt

SEQ ID NO: 10258 - DNA, 15 bp, Homo sapiens
actctgagggtggag

SEQ ID NO: 10259 - DNA, 15 bp, Homo sapiens
aactctgagggtgga

SEQ ID NO: 10260 - DNA, 15 bp, Homo sapiens
aaactctgagggtgg

SEQ ID NO: 10261 - DNA, 15 bp, Homo sapiens
gaaactctgagggtg

SEQ ID NO: 10262 - DNA, 15 bp, Homo sapiens
agaaactctgagggt

SEQ ID NO: 10263 - DNA, 15 bp, Homo sapiens
cagaaactctgaggg

SEQ ID NO: 10264 - DNA, 15 bp, Homo sapiens
tcagaaactctgagg

SEQ ID NO: 10265 - DNA, 15 bp, Homo sapiens
atcagaaactctgag

SEQ ID NO: 10266 - DNA, 15 bp, Homo sapiens
aatcagaaactctga

SEQ ID NO: 10267 - DNA, 15 bp, Homo sapiens
gaatcagaaactctg

SEQ ID NO: 10268 - DNA, 15 bp, Homo sapiens
tgaatcagaaactct

SEQ ID NO: 10269 - DNA, 15 bp, Homo sapiens
ctgaatcagaaactc

SEQ ID NO: 10270 - DNA, 15 bp, Homo sapiens
actgaatcagaaact

SEQ ID NO: 10271 - DNA, 15 bp, Homo sapiens
tactgaatcagaaac

SEQ ID NO: 10272 - DNA, 15 bp, Homo sapiens
ctactgaatcagaaa

SEQ ID NO: 10273 - DNA, 15 bp, Homo sapiens
cctactgaatcagaa

SEQ ID NO: 10274 - DNA, 15 bp, Homo sapiens
acctactgaatcaga

SEQ ID NO: 10275 - DNA, 15 bp, Homo sapiens
gacctactgaatcag

SEQ ID NO: 10276 - DNA, 15 bp, Homo sapiens
agacctactgaatca

SEQ ID NO: 10277 - DNA, 15 bp, Homo sapiens
cagacctactgaatc

SEQ ID NO: 10278 - DNA, 15 bp, Homo sapiens
ccagacctactgaat

SEQ ID NO: 10279 - DNA, 15 bp, Homo sapiens
tccagacctactgaa

SEQ ID NO: 10280 - DNA, 15 bp, Homo sapiens
atccagacctactga

SEQ ID NO: 10281 - DNA, 15 bp, Homo sapiens
aatccagacctactg

SEQ ID NO: 10282 - DNA, 15 bp, Homo sapiens
caatccagacctact

SEQ ID NO: 10283 - DNA, 15 bp, Homo sapiens
ccaatccagacctac

SEQ ID NO: 10284 - DNA, 15 bp, Homo sapiens
cccaatccagaccta

SEQ ID NO: 10285 - DNA, 15 bp, Homo sapiens
tcccaatccagacct

SEQ ID NO: 10286 - DNA, 15 bp, Homo sapiens
gtcccaatccagacc

SEQ ID NO: 10287 - DNA, 15 bp, Homo sapiens
ggtcccaatccagac

SEQ ID NO: 10288 - DNA, 15 bp, Homo sapiens
aggtcccaatccaga

SEQ ID NO: 10289 - DNA, 15 bp, Homo sapiens
caggtcccaatccag

SEQ ID NO: 10290 - DNA, 15 bp, Homo sapiens
tcaggtcccaatcca

SEQ ID NO: 10291 - DNA, 15 bp, Homo sapiens
ctcaggtcccaatcc

SEQ ID NO: 10292 - DNA, 15 bp, Homo sapiens
tctcaggtcccaatc

SEQ ID NO: 10293 - DNA, 15 bp, Homo sapiens
ttctcaggtcccaat

SEQ ID NO: 10294 - DNA, 15 bp, Homo sapiens
attctcaggtcccaa

SEQ ID NO: 10295 - DNA, 15 bp, Homo sapiens
aattctcaggtccca

SEQ ID NO: 10296 - DNA, 15 bp, Homo sapiens
aaattctcaggtccc

SEQ ID NO: 10297 - DNA, 15 bp, Homo sapiens
aaaattctcaggtcc

SEQ ID NO: 10298 - DNA, 15 bp, Homo sapiens
aaaaattctcaggtc

SEQ ID NO: 10299 - DNA, 15 bp, Homo sapiens
taaaaattctcaggt

SEQ ID NO: 10300 - DNA, 15 bp, Homo sapiens
ataaaaattctcagg

SEQ ID NO: 10301 - DNA, 15 bp, Homo sapiens
aataaaaattctcag

SEQ ID NO: 10302 - DNA, 15 bp, Homo sapiens
aaataaaaattctca

SEQ ID NO: 10303 - DNA, 15 bp, Homo sapiens
gaaataaaaattctc

SEQ ID NO: 10304 - DNA, 15 bp, Homo sapiens
agaaataaaaattct

SEQ ID NO: 10305 - DNA, 15 bp, Homo sapiens
aagaaataaaaattc

SEQ ID NO: 10306 - DNA, 15 bp, Homo sapiens
taagaaataaaaatt

SEQ ID NO: 10307 - DNA, 15 bp, Homo sapiens
ctaagaaataaaaat

SEQ ID NO: 10308 - DNA, 15 bp, Homo sapiens
tctaagaaataaaaa

SEQ ID NO: 10309 - DNA, 15 bp, Homo sapiens
ttctaagaaataaaa

SEQ ID NO: 10310 - DNA, 15 bp, Homo sapiens
cttctaagaaataaa

SEQ ID NO: 10311 - DNA, 15 bp, Homo sapiens
acttctaagaaataa

SEQ ID NO: 10312 - DNA, 15 bp, Homo sapiens
aacttctaagaaata

SEQ ID NO: 10313 - DNA, 15 bp, Homo sapiens
aaacttctaagaaat

SEQ ID NO: 10314 - DNA, 15 bp, Homo sapiens
aaaacttctaagaaa

SEQ ID NO: 10315 - DNA, 15 bp, Homo sapiens
gaaaacttctaagaa

SEQ ID NO: 10316 - DNA, 15 bp, Homo sapiens
tgaaaacttctaaga

SEQ ID NO: 10317 - DNA, 15 bp, Homo sapiens
ttgaaaacttctaag

SEQ ID NO: 10318 - DNA, 15 bp, Homo sapiens
cttgaaaacttctaa

SEQ ID NO: 10319 - DNA, 15 bp, Homo sapiens
acttgaaaacttcta

SEQ ID NO: 10320 - DNA, 15 bp, Homo sapiens
cacttgaaaacttct

SEQ ID NO: 10321 - DNA, 15 bp, Homo sapiens
tcacttgaaaacttc

SEQ ID NO: 10322 - DNA, 15 bp, Homo sapiens
atcacttgaaaactt

SEQ ID NO: 10323 - DNA, 15 bp, Homo sapiens
catcacttgaaaact

SEQ ID NO: 10324 - DNA, 15 bp, Homo sapiens
gcatcacttgaaaac

SEQ ID NO: 10325 - DNA, 15 bp, Homo sapiens
agcatcacttgaaaa

SEQ ID NO: 10326 - DNA, 15 bp, Homo sapiens
cagcatcacttgaaa

SEQ ID NO: 10327 - DNA, 15 bp, Homo sapiens
tcagcatcacttgaa

SEQ ID NO: 10328 - DNA, 15 bp, Homo sapiens
atcagcatcacttga

SEQ ID NO: 10329 - DNA, 15 bp, Homo sapiens
catcagcatcacttg

SEQ ID NO: 10330 - DNA, 15 bp, Homo sapiens
gcatcagcatcactt

SEQ ID NO: 10331 - DNA, 15 bp, Homo sapiens
agcatcagcatcact

SEQ ID NO: 10332 - DNA, 15 bp, Homo sapiens
cagcatcagcatcac

SEQ ID NO: 10333 - DNA, 15 bp, Homo sapiens
ccagcatcagcatca

SEQ ID NO: 10334 - DNA, 15 bp, Homo sapiens
accagcatcagcatc

SEQ ID NO: 10335 - DNA, 15 bp, Homo sapiens
caccagcatcagcat

SEQ ID NO: 10336 - DNA, 15 bp, Homo sapiens
gcaccagcatcagca

SEQ ID NO: 10337 - DNA, 15 bp, Homo sapiens
agcaccagcatcagc

SEQ ID NO: 10338 - DNA, 15 bp, Homo sapiens
gagcaccagcatcag

SEQ ID NO: 10339 - DNA, 15 bp, Homo sapiens
agagcaccagcatca

SEQ ID NO: 10340 - DNA, 15 bp, Homo sapiens
cagagcaccagcatc

SEQ ID NO: 10341 - DNA, 15 bp, Homo sapiens
ccagagcaccagcat

SEQ ID NO: 10342 - DNA, 15 bp, Homo sapiens
cccagagcaccagca

SEQ ID NO: 10343 - DNA, 15 bp, Homo sapiens
ccccagagcaccagc

SEQ ID NO: 10344 - DNA, 15 bp, Homo sapiens
tccccagagcaccag

SEQ ID NO: 10345 - DNA, 15 bp, Homo sapiens
atccccagagcacca

SEQ ID NO: 10346 - DNA, 15 bp, Homo sapiens
gatccccagagcacc

SEQ ID NO: 10347 - DNA, 15 bp, Homo sapiens
tgatccccagagcac

SEQ ID NO: 10348 - DNA, 15 bp, Homo sapiens
gtgatccccagagca

SEQ ID NO: 10349 - DNA, 15 bp, Homo sapiens
tgtgatccccagagc

SEQ ID NO: 10350 - DNA, 15 bp, Homo sapiens
gtgtgatccccagag

SEQ ID NO: 10351 - DNA, 15 bp, Homo sapiens
agtgtgatccccaga

SEQ ID NO: 10352 - DNA, 15 bp, Homo sapiens
aagtgtgatccccag

SEQ ID NO: 10353 - DNA, 15 bp, Homo sapiens
aaagtgtgatcccca

SEQ ID NO: 10354 - DNA, 15 bp, Homo sapiens
caaagtgtgatcccc

SEQ ID NO: 10355 - DNA, 15 bp, Homo sapiens
tcaaagtgtgatccc

SEQ ID NO: 10356 - DNA, 15 bp, Homo sapiens
ctcaaagtgtgatcc

SEQ ID NO: 10357 - DNA, 15 bp, Homo sapiens
cctcaaagtgtgatc

SEQ ID NO: 10358 - DNA, 15 bp, Homo sapiens
tcctcaaagtgtgat

SEQ ID NO: 10359 - DNA, 15 bp, Homo sapiens
gtcctcaaagtgtga

SEQ ID NO: 10360 - DNA, 15 bp, Homo sapiens
ggtcctcaaagtgtg

SEQ ID NO: 10361 - DNA, 15 bp, Homo sapiens
tggtcctcaaagtgt

SEQ ID NO: 10362 - DNA, 15 bp, Homo sapiens
gtggtcctcaaagtg

SEQ ID NO: 10363 - DNA, 15 bp, Homo sapiens
ggtggtcctcaaagt

SEQ ID NO: 10364 - DNA, 15 bp, Homo sapiens
tggtggtcctcaaag

SEQ ID NO: 10365 - DNA, 15 bp, Homo sapiens
ttggtggtcctcaaa

SEQ ID NO: 10366 - DNA, 15 bp, Homo sapiens
attggtggtcctcaa

SEQ ID NO: 10367 - DNA, 15 bp, Homo sapiens
cattggtggtcctca

SEQ ID NO: 10368 - DNA, 15 bp, Homo sapiens
tcattggtggtcctc

SEQ ID NO: 10369 - DNA, 15 bp, Homo sapiens
ttcattggtggtcct

SEQ ID NO: 10370 - DNA, 15 bp, Homo sapiens
gttcattggtggtcc

SEQ ID NO: 10371 - DNA, 15 bp, Homo sapiens
tgttcattggtggtc

SEQ ID NO: 10372 - DNA, 15 bp, Homo sapiens
atgttcattggtggt

SEQ ID NO: 10373 - DNA, 15 bp, Homo sapiens
aatgttcattggtgg

SEQ ID NO: 10374 - DNA, 15 bp, Homo sapiens
taatgttcattggtg

SEQ ID NO: 10375 - DNA, 15 bp, Homo sapiens
ataatgttcattggt

SEQ ID NO: 10376 - DNA, 15 bp, Homo sapiens
gataatgttcattgg

SEQ ID NO: 10377 - DNA, 15 bp, Homo sapiens
agataatgttcattg

SEQ ID NO: 10378 - DNA, 15 bp, Homo sapiens
gagataatgttcatt

SEQ ID NO: 10379 - DNA, 15 bp, Homo sapiens
ggagataatgttcat

SEQ ID NO: 10380 - DNA, 15 bp, Homo sapiens
gggagataatgttca

SEQ ID NO: 10381 - DNA, 15 bp, Homo sapiens
tgggagataatgttc

SEQ ID NO: 10382 - DNA, 15 bp, Homo sapiens
gtgggagataatgtt

SEQ ID NO: 10383 - DNA, 15 bp, Homo sapiens
ggtgggagataatgt

SEQ ID NO: 10384 - DNA, 15 bp, Homo sapiens
tggtgggagataatg

SEQ ID NO: 10385 - DNA, 15 bp, Homo sapiens
ttggtgggagataat

SEQ ID NO: 10386 - DNA, 15 bp, Homo sapiens
cttggtgggagataa

SEQ ID NO: 10387 - DNA, 15 bp, Homo sapiens
gcttggtgggagata

SEQ ID NO: 10388 - DNA, 15 bp, Homo sapiens
tgcttggtgggagat

SEQ ID NO: 10389 - DNA, 15 bp, Homo sapiens
ttgcttggtgggaga

SEQ ID NO: 10390 - DNA, 15 bp, Homo sapiens
tttgcttggtgggag

SEQ ID NO: 10391 - DNA, 15 bp, Homo sapiens
gtttgcttggtggga

SEQ ID NO: 10392 - DNA, 15 bp, Homo sapiens
ggtttgcttggtggg

SEQ ID NO: 10393 - DNA, 15 bp, Homo sapiens
gggtttgcttggtgg

SEQ ID NO: 10394 - DNA, 15 bp, Homo sapiens
agggtttgcttggtg

SEQ ID NO: 10395 - DNA, 15 bp, Homo sapiens
aagggtttgcttggt

SEQ ID NO: 10396 - DNA, 15 bp, Homo sapiens
taagggtttgcttgg

SEQ ID NO: 10397 - DNA, 15 bp, Homo sapiens
ttaagggtttgcttg

SEQ ID NO: 10398 - DNA, 15 bp, Homo sapiens
gttaagggtttgctt

SEQ ID NO: 10399 - DNA, 15 bp, Homo sapiens
tgttaagggtttgct

SEQ ID NO: 10400 - DNA, 15 bp, Homo sapiens
atgttaagggtttgc

SEQ ID NO: 10401 - DNA, 15 bp, Homo sapiens
catgttaagggtttg

SEQ ID NO: 10402 - DNA, 15 bp, Homo sapiens
acatgttaagggttt

SEQ ID NO: 10403 - DNA, 15 bp, Homo sapiens
aacatgttaagggtt

SEQ ID NO: 10404 - DNA, 15 bp, Homo sapiens
taacatgttaagggt

SEQ ID NO: 10405 - DNA, 15 bp, Homo sapiens
ataacatgttaaggg

SEQ ID NO: 10406 - DNA, 15 bp, Homo sapiens
tataacatgttaagg

SEQ ID NO: 10407 - DNA, 15 bp, Homo sapiens
gtataacatgttaag

SEQ ID NO: 10408 - DNA, 15 bp, Homo sapiens
agtataacatgttaa

SEQ ID NO: 10409 - DNA, 15 bp, Homo sapiens
gagtataacatgtta

SEQ ID NO: 10410 - DNA, 15 bp, Homo sapiens
ggagtataacatgtt

SEQ ID NO: 10411 - DNA, 15 bp, Homo sapiens
aggagtataacatgt

SEQ ID NO: 10412 - DNA, 15 bp, Homo sapiens
aaggagtataacatg

SEQ ID NO: 10413 - DNA, 15 bp, Homo sapiens
aaaggagtataacat

SEQ ID NO: 10414 - DNA, 15 bp, Homo sapiens
taaaggagtataaca

SEQ ID NO: 10415 - DNA, 15 bp, Homo sapiens
ctaaaggagtataac

SEQ ID NO: 10416 - DNA, 15 bp, Homo sapiens
cctaaaggagtataa

SEQ ID NO: 10417 - DNA, 15 bp, Homo sapiens
acctaaaggagtata

SEQ ID NO: 10418 - DNA, 15 bp, Homo sapiens
aacctaaaggagtat

SEQ ID NO: 10419 - DNA, 15 bp, Homo sapiens
taacctaaaggagta

SEQ ID NO: 10420 - DNA, 15 bp, Homo sapiens
ataacctaaaggagt

SEQ ID NO: 10421 - DNA, 15 bp, Homo sapiens
aataacctaaaggag

SEQ ID NO: 10422 - DNA, 15 bp, Homo sapiens
taataacctaaagga

SEQ ID NO: 10423 - DNA, 15 bp, Homo sapiens
ctaataacctaaagg

SEQ ID NO: 10424 - DNA, 15 bp, Homo sapiens
tctaataacctaaag

SEQ ID NO: 10425 - DNA, 15 bp, Homo sapiens
ttctaataacctaaa

SEQ ID NO: 10426 - DNA, 15 bp, Homo sapiens
attctaataacctaa

SEQ ID NO: 10427 - DNA, 15 bp, Homo sapiens
aattctaataaccta

SEQ ID NO: 10428 - DNA, 15 bp, Homo sapiens
aaattctaataacct

SEQ ID NO: 10429 - DNA, 15 bp, Homo sapiens
taaattctaataacc

SEQ ID NO: 10430 - DNA, 15 bp, Homo sapiens
ataaattctaataac

SEQ ID NO: 10431 - DNA, 15 bp, Homo sapiens
tataaattctaataa

SEQ ID NO: 10432 - DNA, 15 bp, Homo sapiens
gtataaattctaata

SEQ ID NO: 10433 - DNA, 15 bp, Homo sapiens
tgtataaattctaat

SEQ ID NO: 10434 - DNA, 15 bp, Homo sapiens
atgtataaattctaa

SEQ ID NO: 10435 - DNA, 15 bp, Homo sapiens
catgtataaattcta

SEQ ID NO: 10436 - DNA, 15 bp, Homo sapiens
gcatgtataaattct

SEQ ID NO: 10437 - DNA, 15 bp, Homo sapiens
tgcatgtataaattc

SEQ ID NO: 10438 - DNA, 15 bp, Homo sapiens
atgcatgtataaatt

SEQ ID NO: 10439 - DNA, 15 bp, Homo sapiens
aatgcatgtataaat

SEQ ID NO: 10440 - DNA, 15 bp, Homo sapiens
taatgcatgtataaa

SEQ ID NO: 10441 - DNA, 15 bp, Homo sapiens
ataatgcatgtataa

SEQ ID NO: 10442 - DNA, 15 bp, Homo sapiens
aataatgcatgtata

SEQ ID NO: 10443 - DNA, 15 bp, Homo sapiens
aaataatgcatgtat

SEQ ID NO: 10444 - DNA, 15 bp, Homo sapiens
gaaataatgcatgta

SEQ ID NO: 10445 - DNA, 15 bp, Homo sapiens
tgaaataatgcatgt

SEQ ID NO: 10446 - DNA, 15 bp, Homo sapiens
atgaaataatgcatg

SEQ ID NO: 10447 - DNA, 15 bp, Homo sapiens
aatgaaataatgcat

SEQ ID NO: 10448 - DNA, 15 bp, Homo sapiens
aaatgaaataatgca

SEQ ID NO: 10449 - DNA, 15 bp, Homo sapiens
caaatgaaataatgc

SEQ ID NO: 10450 - DNA, 15 bp, Homo sapiens
tcaaatgaaataatg

SEQ ID NO: 10451 - DNA, 15 bp, Homo sapiens
gtcaaatgaaataat

SEQ ID NO: 10452 - DNA, 15 bp, Homo sapiens
ggtcaaatgaaataa

SEQ ID NO: 10453 - DNA, 15 bp, Homo sapiens
aggtcaaatgaaata

SEQ ID NO: 10454 - DNA, 15 bp, Homo sapiens
caggtcaaatgaaat

SEQ ID NO: 10455 - DNA, 15 bp, Homo sapiens
acaggtcaaatgaaa

SEQ ID NO: 10456 - DNA, 15 bp, Homo sapiens
tacaggtcaaatgaa

SEQ ID NO: 10457 - DNA, 15 bp, Homo sapiens
ttacaggtcaaatga

SEQ ID NO: 10458 - DNA, 15 bp, Homo sapiens
tttacaggtcaaatg

SEQ ID NO: 10459 - DNA, 15 bp, Homo sapiens
gtttacaggtcaaat

SEQ ID NO: 10460 - DNA, 15 bp, Homo sapiens
agtttacaggtcaaa

SEQ ID NO: 10461 - DNA, 15 bp, Homo sapiens
gagtttacaggtcaa

SEQ ID NO: 10462 - DNA, 15 bp, Homo sapiens
agagtttacaggtca

SEQ ID NO: 10463 - DNA, 15 bp, Homo sapiens
tagagtttacaggtc

SEQ ID NO: 10464 - DNA, 15 bp, Homo sapiens
ttagagtttacaggt

SEQ ID NO: 10465 - DNA, 15 bp, Homo sapiens
cttagagtttacagg

SEQ ID NO: 10466 - DNA, 15 bp, Homo sapiens
acttagagtttacag

SEQ ID NO: 10467 - DNA, 15 bp, Homo sapiens
tacttagagtttaca

SEQ ID NO: 10468 - DNA, 15 bp, Homo sapiens
ttacttagagtttac

SEQ ID NO: 10469 - DNA, 15 bp, Homo sapiens
gttacttagagttta

SEQ ID NO: 10470 - DNA, 15 bp, Homo sapiens
agttacttagagttt

SEQ ID NO: 10471 - DNA, 15 bp, Homo sapiens
aagttacttagagtt

SEQ ID NO: 10472 - DNA, 15 bp, Homo sapiens
aaagttacttagagt

SEQ ID NO: 10473 - DNA, 15 bp, Homo sapiens
caaagttacttagag

SEQ ID NO: 10474 - DNA, 15 bp, Homo sapiens
gcaaagttacttaga

SEQ ID NO: 10475 - DNA, 15 bp, Homo sapiens
tgcaaagttacttag

SEQ ID NO: 10476 - DNA, 15 bp, Homo sapiens
atgcaaagttactta

SEQ ID NO: 10477 - DNA, 15 bp, Homo sapiens
catgcaaagttactt

SEQ ID NO: 10478 - DNA, 15 bp, Homo sapiens
ccatgcaaagttact

SEQ ID NO: 10479 - DNA, 15 bp, Homo sapiens
tccatgcaaagttac

SEQ ID NO: 10480 - DNA, 15 bp, Homo sapiens
ttccatgcaaagtta

SEQ ID NO: 10481 - DNA, 15 bp, Homo sapiens
tttccatgcaaagtt

SEQ ID NO: 10482 - DNA, 15 bp, Homo sapiens
ttttccatgcaaagt

SEQ ID NO: 10483 - DNA, 15 bp, Homo sapiens
attttccatgcaaag

SEQ ID NO: 10484 - DNA, 15 bp, Homo sapiens
cattttccatgcaaa

SEQ ID NO: 10485 - DNA, 15 bp, Homo sapiens
acattttccatgcaa

SEQ ID NO: 10486 - DNA, 15 bp, Homo sapiens
aacattttccatgca

SEQ ID NO: 10487 - DNA, 15 bp, Homo sapiens
taacattttccatgc

SEQ ID NO: 10488 - DNA, 15 bp, Homo sapiens
ataacattttccatg

SEQ ID NO: 10489 - DNA, 15 bp, Homo sapiens
gataacattttccat

SEQ ID NO: 10490 - DNA, 15 bp, Homo sapiens
ggataacattttcca

SEQ ID NO: 10491 - DNA, 15 bp, Homo sapiens
aggataacattttcc

SEQ ID NO: 10492 - DNA, 15 bp, Homo sapiens
caggataacattttc

SEQ ID NO: 10493 - DNA, 15 bp, Homo sapiens
tcaggataacatttt

SEQ ID NO: 10494 - DNA, 15 bp, Homo sapiens
atcaggataacattt

SEQ ID NO: 10495 - DNA, 15 bp, Homo sapiens
aatcaggataacatt

SEQ ID NO: 10496 - DNA, 15 bp, Homo sapiens
aaatcaggataacat

SEQ ID NO: 10497 - DNA, 15 bp, Homo sapiens
aaaatcaggataaca

SEQ ID NO: 10498 - DNA, 15 bp, Homo sapiens
taaaatcaggataac

SEQ ID NO: 10499 - DNA, 15 bp, Homo sapiens
ataaaatcaggataa

SEQ ID NO: 10500 - DNA, 15 bp, Homo sapiens
tataaaatcaggata

SEQ ID NO: 10501 - DNA, 15 bp, Homo sapiens
ctataaaatcaggat

SEQ ID NO: 10502 - DNA, 15 bp, Homo sapiens
tctataaaatcagga

SEQ ID NO: 10503 - DNA, 15 bp, Homo sapiens
gtctataaaatcagg

SEQ ID NO: 10504 - DNA, 15 bp, Homo sapiens
cgtctataaaatcag

SEQ ID NO: 10505 - DNA, 15 bp, Homo sapiens
tcgtctataaaatca

SEQ ID NO: 10506 - DNA, 15 bp, Homo sapiens
ctcgtctataaaatc

SEQ ID NO: 10507 - DNA, 15 bp, Homo sapiens
tctcgtctataaaat

SEQ ID NO: 10508 - DNA, 15 bp, Homo sapiens
atctcgtctataaaa

SEQ ID NO: 10509 - DNA, 15 bp, Homo sapiens
tatctcgtctataaa

SEQ ID NO: 10510 - DNA, 15 bp, Homo sapiens
ctatctcgtctataa

SEQ ID NO: 10511 - DNA, 15 bp, Homo sapiens
actatctcgtctata

SEQ ID NO: 10512 - DNA, 15 bp, Homo sapiens
cactatctcgtctat

SEQ ID NO: 10513 - DNA, 15 bp, Homo sapiens
tcactatctcgtcta

SEQ ID NO: 10514 - DNA, 15 bp, Homo sapiens
ctcactatctcgtct

SEQ ID NO: 10515 - DNA, 15 bp, Homo sapiens
actcactatctcgtc

SEQ ID NO: 10516 - DNA, 15 bp, Homo sapiens
aactcactatctcgt

SEQ ID NO: 10517 - DNA, 15 bp, Homo sapiens
aaactcactatctcg

SEQ ID NO: 10518 - DNA, 15 bp, Homo sapiens
taaactcactatctc

SEQ ID NO: 10519 - DNA, 15 bp, Homo sapiens
ctaaactcactatct

SEQ ID NO: 10520 - DNA, 15 bp, Homo sapiens
tctaaactcactatc

SEQ ID NO: 10521 - DNA, 15 bp, Homo sapiens
ttctaaactcactat

SEQ ID NO: 10522 - DNA, 15 bp, Homo sapiens
tttctaaactcacta

SEQ ID NO: 10523 - DNA, 15 bp, Homo sapiens
ctttctaaactcact

SEQ ID NO: 10524 - DNA, 15 bp, Homo sapiens
cctttctaaactcac

SEQ ID NO: 10525 - DNA, 15 bp, Homo sapiens
gcctttctaaactca

SEQ ID NO: 10526 - DNA, 15 bp, Homo sapiens
tgcctttctaaactc

SEQ ID NO: 10527 - DNA, 15 bp, Homo sapiens
ctgcctttctaaact

SEQ ID NO: 10528 - DNA, 15 bp, Homo sapiens
actgcctttctaaac

SEQ ID NO: 10529 - DNA, 15 bp, Homo sapiens
tactgcctttctaaa

SEQ ID NO: 10530 - DNA, 15 bp, Homo sapiens
atactgcctttctaa

SEQ ID NO: 10531 - DNA, 15 bp, Homo sapiens
catactgcctttcta

SEQ ID NO: 10532 - DNA, 15 bp, Homo sapiens
ccatactgcctttct

SEQ ID NO: 10533 - DNA, 15 bp, Homo sapiens
accatactgcctttc

SEQ ID NO: 10534 - DNA, 15 bp, Homo sapiens
caccatactgccttt

SEQ ID NO: 10535 - DNA, 15 bp, Homo sapiens
ccaccatactgcctt

SEQ ID NO: 10536 - DNA, 15 bp, Homo sapiens
tccaccatactgcct

SEQ ID NO: 10537 - DNA, 15 bp, Homo sapiens
ttccaccatactgcc

SEQ ID NO: 10538 - DNA, 15 bp, Homo sapiens
attccaccatactgc

SEQ ID NO: 10539 - DNA, 15 bp, Homo sapiens
cattccaccatactg

SEQ ID NO: 10540 - DNA, 15 bp, Homo sapiens
ccattccaccatact

SEQ ID NO: 10541 - DNA, 15 bp, Homo sapiens
tccattccaccatac

SEQ ID NO: 10542 - DNA, 15 bp, Homo sapiens
ctccattccaccata

SEQ ID NO: 10543 - DNA, 15 bp, Homo sapiens
gctccattccaccat

SEQ ID NO: 10544 - DNA, 15 bp, Homo sapiens
tgctccattccacca

SEQ ID NO: 10545 - DNA, 15 bp, Homo sapiens
atgctccattccacc

SEQ ID NO: 10546 - DNA, 15 bp, Homo sapiens
tatgctccattccac

SEQ ID NO: 10547 - DNA, 15 bp, Homo sapiens
ctatgctccattcca

SEQ ID NO: 10548 - DNA, 15 bp, Homo sapiens
tctatgctccattcc

SEQ ID NO: 10549 - DNA, 15 bp, Homo sapiens
atctatgctccattc

SEQ ID NO: 10550 - DNA, 15 bp, Homo sapiens
aatctatgctccatt

SEQ ID NO: 10551 - DNA, 15 bp, Homo sapiens
aaatctatgctccat

SEQ ID NO: 10552 - DNA, 15 bp, Homo sapiens
caaatctatgctcca

SEQ ID NO: 10553 - DNA, 15 bp, Homo sapiens
ccaaatctatgctcc

SEQ ID NO: 10554 - DNA, 15 bp, Homo sapiens
tccaaatctatgctc

SEQ ID NO: 10555 - DNA, 15 bp, Homo sapiens
ctccaaatctatgct

SEQ ID NO: 10556 - DNA, 15 bp, Homo sapiens
actccaaatctatgc

SEQ ID NO: 10557 - DNA, 15 bp, Homo sapiens
aactccaaatctatg

SEQ ID NO: 10558 - DNA, 15 bp, Homo sapiens
caactccaaatctat

SEQ ID NO: 10559 - DNA, 15 bp, Homo sapiens
ccaactccaaatcta

SEQ ID NO: 10560 - DNA, 15 bp, Homo sapiens
gccaactccaaatct

SEQ ID NO: 10561 - DNA, 15 bp, Homo sapiens
agccaactccaaatc

SEQ ID NO: 10562 - DNA, 15 bp, Homo sapiens
tagccaactccaaat

SEQ ID NO: 10563 - DNA, 15 bp, Homo sapiens
ctagccaactccaaa

SEQ ID NO: 10564 - DNA, 15 bp, Homo sapiens
tctagccaactccaa

SEQ ID NO: 10565 - DNA, 15 bp, Homo sapiens
gtctagccaactcca

SEQ ID NO: 10566 - DNA, 15 bp, Homo sapiens
ggtctagccaactcc

SEQ ID NO: 10567 - DNA, 15 bp, Homo sapiens
aggtctagccaactc

SEQ ID NO: 10568 - DNA, 15 bp, Homo sapiens
taggtctagccaact

SEQ ID NO: 10569 - DNA, 15 bp, Homo sapiens
ttaggtctagccaac

SEQ ID NO: 10570 - DNA, 15 bp, Homo sapiens
tttaggtctagccaa

SEQ ID NO: 10571 - DNA, 15 bp, Homo sapiens
ctttaggtctagcca

SEQ ID NO: 10572 - DNA, 15 bp, Homo sapiens
actttaggtctagcc

SEQ ID NO: 10573 - DNA, 15 bp, Homo sapiens
gactttaggtctagc

SEQ ID NO: 10574 - DNA, 15 bp, Homo sapiens
ggactttaggtctag

SEQ ID NO: 10575 - DNA, 15 bp, Homo sapiens
tggactttaggtcta

SEQ ID NO: 10576 - DNA, 15 bp, Homo sapiens
ctggactttaggtct

SEQ ID NO: 10577 - DNA, 15 bp, Homo sapiens
tctggactttaggtc

SEQ ID NO: 10578 - DNA, 15 bp, Homo sapiens
atctggactttaggt

SEQ ID NO: 10579 - DNA, 15 bp, Homo sapiens
aatctggactttagg

SEQ ID NO: 10580 - DNA, 15 bp, Homo sapiens
taatctggactttag

SEQ ID NO: 10581 - DNA, 15 bp, Homo sapiens
ttaatctggacttta

SEQ ID NO: 10582 - DNA, 15 bp, Homo sapiens
tttaatctggacttt

SEQ ID NO: 10583 - DNA, 15 bp, Homo sapiens
atttaatctggactt

SEQ ID NO: 10584 - DNA, 15 bp, Homo sapiens
gatttaatctggact

SEQ ID NO: 10585 - DNA, 15 bp, Homo sapiens
agatttaatctggac

SEQ ID NO: 10586 - DNA, 15 bp, Homo sapiens
gagatttaatctgga

SEQ ID NO: 10587 - DNA, 15 bp, Homo sapiens
agagatttaatctgg

SEQ ID NO: 10588 - DNA, 15 bp, Homo sapiens
cagagatttaatctg

SEQ ID NO: 10589 - DNA, 15 bp, Homo sapiens
gcagagatttaatct

SEQ ID NO: 10590 - DNA, 15 bp, Homo sapiens
agcagagatttaatc

SEQ ID NO: 10591 - DNA, 15 bp, Homo sapiens
gagcagagatttaat

SEQ ID NO: 10592 - DNA, 15 bp, Homo sapiens
tgagcagagatttaa

SEQ ID NO: 10593 - DNA, 15 bp, Homo sapiens
ttgagcagagattta

SEQ ID NO: 10594 - DNA, 15 bp, Homo sapiens
cttgagcagagattt

SEQ ID NO: 10595 - DNA, 15 bp, Homo sapiens
ccttgagcagagatt

SEQ ID NO: 10596 - DNA, 15 bp, Homo sapiens
gccttgagcagagat

SEQ ID NO: 10597 - DNA, 15 bp, Homo sapiens
agccttgagcagaga

SEQ ID NO: 10598 - DNA, 15 bp, Homo sapiens
cagccttgagcagag

SEQ ID NO: 10599 - DNA, 15 bp, Homo sapiens
ccagccttgagcaga

SEQ ID NO: 10600 - DNA, 15 bp, Homo sapiens
cccagccttgagcag

SEQ ID NO: 10601 - DNA, 15 bp, Homo sapiens
gcccagccttgagca

SEQ ID NO: 10602 - DNA, 15 bp, Homo sapiens
cgcccagccttgagc

SEQ ID NO: 10603 - DNA, 15 bp, Homo sapiens
acgcccagccttgag

SEQ ID NO: 10604 - DNA, 15 bp, Homo sapiens
cacgcccagccttga

SEQ ID NO: 10605 - DNA, 15 bp, Homo sapiens
ccacgcccagccttg

SEQ ID NO: 10606 - DNA, 15 bp, Homo sapiens
accacgcccagcctt

SEQ ID NO: 10607 - DNA, 15 bp, Homo sapiens
caccacgcccagcct

SEQ ID NO: 10608 - DNA, 15 bp, Homo sapiens
ccaccacgcccagcc

SEQ ID NO: 10609 - DNA, 15 bp, Homo sapiens
gccaccacgcccagc

SEQ ID NO: 10610 - DNA, 15 bp, Homo sapiens
agccaccacgcccag

SEQ ID NO: 10611 - DNA, 15 bp, Homo sapiens
gagccaccacgccca

SEQ ID NO: 10612 - DNA, 15 bp, Homo sapiens
tgagccaccacgccc

SEQ ID NO: 10613 - DNA, 15 bp, Homo sapiens
atgagccaccacgcc

SEQ ID NO: 10614 - DNA, 15 bp, Homo sapiens
catgagccaccacgc

SEQ ID NO: 10615 - DNA, 15 bp, Homo sapiens
gcatgagccaccacg

SEQ ID NO: 10616 - DNA, 15 bp, Homo sapiens
ggcatgagccaccac

SEQ ID NO: 10617 - DNA, 15 bp, Homo sapiens
aggcatgagccacca

SEQ ID NO: 10618 - DNA, 15 bp, Homo sapiens
caggcatgagccacc

SEQ ID NO: 10619 - DNA, 15 bp, Homo sapiens
acaggcatgagccac

SEQ ID NO: 10620 - DNA, 15 bp, Homo sapiens
tacaggcatgagcca

SEQ ID NO: 10621 - DNA, 15 bp, Homo sapiens
ttacaggcatgagcc

SEQ ID NO: 10622 - DNA, 15 bp, Homo sapiens
attacaggcatgagc

SEQ ID NO: 10623 - DNA, 15 bp, Homo sapiens
gattacaggcatgag

SEQ ID NO: 10624 - DNA, 15 bp, Homo sapiens
actgggattacaggc

SEQ ID NO: 10625 - DNA, 15 bp, Homo sapiens
cactgggattacagg

SEQ ID NO: 10626 - DNA, 15 bp, Homo sapiens
gcactgggattacag

SEQ ID NO: 10627 - DNA, 15 bp, Homo sapiens
agcactgggattaca

SEQ ID NO: 10628 - DNA, 15 bp, Homo sapiens
aagcactgggattac

SEQ ID NO: 10629 - DNA, 15 bp, Homo sapiens
aaagcactgggatta

SEQ ID NO: 10630 - DNA, 15 bp, Homo sapiens
caaagcactgggatt

SEQ ID NO: 10631 - DNA, 15 bp, Homo sapiens
ccaaagcactgggat

SEQ ID NO: 10632 - DNA, 15 bp, Homo sapiens
cccaaagcactggga

SEQ ID NO: 10633 - DNA, 15 bp, Homo sapiens
tcccaaagcactggg

SEQ ID NO: 10634 - DNA, 15 bp, Homo sapiens
ctcccaaagcactgg

SEQ ID NO: 10635 - DNA, 15 bp, Homo sapiens
cctcccaaagcactg

SEQ ID NO: 10636 - DNA, 15 bp, Homo sapiens
gcctcccaaagcact

SEQ ID NO: 10637 - DNA, 15 bp, Homo sapiens
ggcctcccaaagcac

SEQ ID NO: 10638 - DNA, 15 bp, Homo sapiens
tggcctcccaaagca

SEQ ID NO: 10639 - DNA, 15 bp, Homo sapiens
ctggcctcccaaagc

SEQ ID NO: 10640 - DNA, 15 bp, Homo sapiens
gctggcctcccaaag

SEQ ID NO: 10641 - DNA, 15 bp, Homo sapiens
cgctggcctcccaaa

SEQ ID NO: 10642 - DNA, 15 bp, Homo sapiens
acgctggcctcccaa

SEQ ID NO: 10643 - DNA, 15 bp, Homo sapiens
aacgctggcctccca

SEQ ID NO: 10644 - DNA, 15 bp, Homo sapiens
caacgctggcctccc

SEQ ID NO: 10645 - DNA, 15 bp, Homo sapiens
ccaacgctggcctcc

SEQ ID NO: 10646 - DNA, 15 bp, Homo sapiens
gccaacgctggcctc

SEQ ID NO: 10647 - DNA, 15 bp, Homo sapiens
tgccaacgctggcct

SEQ ID NO: 10648 - DNA, 15 bp, Homo sapiens
ctgccaacgctggcc

SEQ ID NO: 10649 - DNA, 15 bp, Homo sapiens
tctgccaacgctggc

SEQ ID NO: 10650 - DNA, 15 bp, Homo sapiens
atctgccaacgctgg

SEQ ID NO: 10651 - DNA, 15 bp, Homo sapiens
aatctgccaacgctg

SEQ ID NO: 10652 - DNA, 15 bp, Homo sapiens
caatctgccaacgct

SEQ ID NO: 10653 - DNA, 15 bp, Homo sapiens
gcaatctgccaacgc

SEQ ID NO: 10654 - DNA, 15 bp, Homo sapiens
agcaatctgccaacg

SEQ ID NO: 10655 - DNA, 15 bp, Homo sapiens
aagcaatctgccaac

SEQ ID NO: 10656 - DNA, 15 bp, Homo sapiens
caagcaatctgccaa

SEQ ID NO: 10657 - DNA, 15 bp, Homo sapiens
tcaagcaatctgcca

SEQ ID NO: 10658 - DNA, 15 bp, Homo sapiens
ctcaagcaatctgcc

SEQ ID NO: 10659 - DNA, 15 bp, Homo sapiens
actcaagcaatctgc

SEQ ID NO: 10660 - DNA, 15 bp, Homo sapiens
gactcaagcaatctg

SEQ ID NO: 10661 - DNA, 15 bp, Homo sapiens
agactcaagcaatct

SEQ ID NO: 10662 - DNA, 15 bp, Homo sapiens
cagactcaagcaatc

SEQ ID NO: 10663 - DNA, 15 bp, Homo sapiens
ccagactcaagcaat

SEQ ID NO: 10664 - DNA, 15 bp, Homo sapiens
tccagactcaagcaa

SEQ ID NO: 10665 - DNA, 15 bp, Homo sapiens
ttccagactcaagca

SEQ ID NO: 10666 - DNA, 15 bp, Homo sapiens
cttccagactcaagc

SEQ ID NO: 10667 - DNA, 15 bp, Homo sapiens
acttccagactcaag

SEQ ID NO: 10668 - DNA, 15 bp, Homo sapiens
aacttccagactcaa

SEQ ID NO: 10669 - DNA, 15 bp, Homo sapiens
gaacttccagactca

SEQ ID NO: 10670 - DNA, 15 bp, Homo sapiens
cgaacttccagactc

SEQ ID NO: 10671 - DNA, 15 bp, Homo sapiens
tcgaacttccagact

SEQ ID NO: 10672 - DNA, 15 bp, Homo sapiens
ctcgaacttccagac

SEQ ID NO: 10673 - DNA, 15 bp, Homo sapiens
tctcgaacttccaga

SEQ ID NO: 10674 - DNA, 15 bp, Homo sapiens
gtctcgaacttccag

SEQ ID NO: 10675 - DNA, 15 bp, Homo sapiens
ggtctcgaacttcca

SEQ ID NO: 10676 - DNA, 15 bp, Homo sapiens
tggtctcgaacttcc

SEQ ID NO: 10677 - DNA, 15 bp, Homo sapiens
ctggtctcgaacttc

SEQ ID NO: 10678 - DNA, 15 bp, Homo sapiens
actggtctcgaactt

SEQ ID NO: 10679 - DNA, 15 bp, Homo sapiens
gactggtctcgaact

SEQ ID NO: 10680 - DNA, 15 bp, Homo sapiens
agactggtctcgaac

SEQ ID NO: 10681 - DNA, 15 bp, Homo sapiens
cagactggtctcgaa

SEQ ID NO: 10682 - DNA, 15 bp, Homo sapiens
ccagactggtctcga

SEQ ID NO: 10683 - DNA, 15 bp, Homo sapiens
cccagactggtctcg

SEQ ID NO: 10684 - DNA, 15 bp, Homo sapiens
gcccagactggtctc

SEQ ID NO: 10685 - DNA, 15 bp, Homo sapiens
tgcccagactggtct

SEQ ID NO: 10686 - DNA, 15 bp, Homo sapiens
ttgcccagactggtc

SEQ ID NO: 10687 - DNA, 15 bp, Homo sapiens
gttgcccagactggt

SEQ ID NO: 10688 - DNA, 15 bp, Homo sapiens
tgttgcccagactgg

SEQ ID NO: 10689 - DNA, 15 bp, Homo sapiens
atgttgcccagactg

SEQ ID NO: 10690 - DNA, 15 bp, Homo sapiens
tatgttgcccagact

SEQ ID NO: 10691 - DNA, 15 bp, Homo sapiens
ctatgttgcccagac

SEQ ID NO: 10692 - DNA, 15 bp, Homo sapiens
cctatgttgcccaga

SEQ ID NO: 10693 - DNA, 15 bp, Homo sapiens
gcctatgttgcccag

SEQ ID NO: 10694 - DNA, 15 bp, Homo sapiens
tgcctatgttgccca

SEQ ID NO: 10695 - DNA, 15 bp, Homo sapiens
ctgcctatgttgccc

SEQ ID NO: 10696 - DNA, 15 bp, Homo sapiens
tctgcctatgttgcc

SEQ ID NO: 10697 - DNA, 15 bp, Homo sapiens
gtctgcctatgttgc

SEQ ID NO: 10698 - DNA, 15 bp, Homo sapiens
ggtctgcctatgttg

SEQ ID NO: 10699 - DNA, 15 bp, Homo sapiens
gggtctgcctatgtt

SEQ ID NO: 10700 - DNA, 15 bp, Homo sapiens
agggtctgcctatgt

SEQ ID NO: 10701 - DNA, 15 bp, Homo sapiens
cagggtctgcctatg

SEQ ID NO: 10702 - DNA, 15 bp, Homo sapiens
acagggtctgcctat

SEQ ID NO: 10703 - DNA, 15 bp, Homo sapiens
gacagggtctgccta

SEQ ID NO: 10704 - DNA, 15 bp, Homo sapiens
agacagggtctgcct

SEQ ID NO: 10705 - DNA, 15 bp, Homo sapiens
gagacagggtctgcc

SEQ ID NO: 10706 - DNA, 15 bp, Homo sapiens
agagacagggtctgc

SEQ ID NO: 10707 - DNA, 15 bp, Homo sapiens
tagagacagggtctg

SEQ ID NO: 10708 - DNA, 15 bp, Homo sapiens
gtagagacagggtct

SEQ ID NO: 10709 - DNA, 15 bp, Homo sapiens
tgtagagacagggtc

SEQ ID NO: 10710 - DNA, 15 bp, Homo sapiens
ttgtagagacagggt

SEQ ID NO: 10711 - DNA, 15 bp, Homo sapiens
tttgtagagacaggg

SEQ ID NO: 10712 - DNA, 15 bp, Homo sapiens
ttttgtagagacagg

SEQ ID NO: 10713 - DNA, 15 bp, Homo sapiens
tttttgtagagacag

SEQ ID NO: 10714 - DNA, 15 bp, Homo sapiens
ttttttgtagagaca

SEQ ID NO: 10715 - DNA, 15 bp, Homo sapiens
tttttttgtagagac

SEQ ID NO: 10716 - DNA, 15 bp, Homo sapiens
ttttttttgtagaga

SEQ ID NO: 10717 - DNA, 15 bp, Homo sapiens
tttttttttgtagag

SEQ ID NO: 10718 - DNA, 15 bp, Homo sapiens
atttttttttgtaga

SEQ ID NO: 10719 - DNA, 15 bp, Homo sapiens
tatttttttttgtag

SEQ ID NO: 10720 - DNA, 15 bp, Homo sapiens
gtatttttttttgta

SEQ ID NO: 10721 - DNA, 15 bp, Homo sapiens
tgtatttttttttgt

SEQ ID NO: 10722 - DNA, 15 bp, Homo sapiens
ttgtatttttttttg

SEQ ID NO: 10723 - DNA, 15 bp, Homo sapiens
tttgtattttttttt

SEQ ID NO: 10724 - DNA, 15 bp, Homo sapiens
ttttgtatttttttt

SEQ ID NO: 10725 - DNA, 15 bp, Homo sapiens
tttttgtattttttt

SEQ ID NO: 10726 - DNA, 15 bp, Homo sapiens
atttttgtatttttt

SEQ ID NO: 10727 - DNA, 15 bp, Homo sapiens
actaatttttgtatt

SEQ ID NO: 10728 - DNA, 15 bp, Homo sapiens
gactaatttttgtat

SEQ ID NO: 10729 - DNA, 15 bp, Homo sapiens
cgactaatttttgta

SEQ ID NO: 10730 - DNA, 15 bp, Homo sapiens
ccgactaatttttgt

SEQ ID NO: 10731 - DNA, 15 bp, Homo sapiens
cccgactaatttttg

SEQ ID NO: 10732 - DNA, 15 bp, Homo sapiens
acccgactaattttt

SEQ ID NO: 10733 - DNA, 15 bp, Homo sapiens
cacccgactaatttt

SEQ ID NO: 10734 - DNA, 15 bp, Homo sapiens
acacccgactaattt

SEQ ID NO: 10735 - DNA, 15 bp, Homo sapiens
aacacccgactaatt

SEQ ID NO: 10736 - DNA, 15 bp, Homo sapiens
taacacccgactaat

SEQ ID NO: 10737 - DNA, 15 bp, Homo sapiens
ataacacccgactaa

SEQ ID NO: 10738 - DNA, 15 bp, Homo sapiens
tataacacccgacta

SEQ ID NO: 10739 - DNA, 15 bp, Homo sapiens
ctataacacccgact

SEQ ID NO: 10740 - DNA, 15 bp, Homo sapiens
actataacacccgac

SEQ ID NO: 10741 - DNA, 15 bp, Homo sapiens
cactataacacccga

SEQ ID NO: 10742 - DNA, 15 bp, Homo sapiens
gcactataacacccg

SEQ ID NO: 10743 - DNA, 15 bp, Homo sapiens
cgcactataacaccc

SEQ ID NO: 10744 - DNA, 15 bp, Homo sapiens
gcgcactataacacc

SEQ ID NO: 10745 - DNA, 15 bp, Homo sapiens
tgcgcactataacac

SEQ ID NO: 10746 - DNA, 15 bp, Homo sapiens
atgcgcactataaca

SEQ ID NO: 10747 - DNA, 15 bp, Homo sapiens
aatgcgcactataac

SEQ ID NO: 10748 - DNA, 15 bp, Homo sapiens
caatgcgcactataa

SEQ ID NO: 10749 - DNA, 15 bp, Homo sapiens
ccaatgcgcactata

SEQ ID NO: 10750 - DNA, 15 bp, Homo sapiens
accaatgcgcactat

SEQ ID NO: 10751 - DNA, 15 bp, Homo sapiens
taccaatgcgcacta

SEQ ID NO: 10752 - DNA, 15 bp, Homo sapiens
ctaccaatgcgcact

SEQ ID NO: 10753 - DNA, 15 bp, Homo sapiens
actaccaatgcgcac

SEQ ID NO: 10754 - DNA, 15 bp, Homo sapiens
gactaccaatgcgca

SEQ ID NO: 10755 - DNA, 15 bp, Homo sapiens
ggactaccaatgcgc

SEQ ID NO: 10756 - DNA, 15 bp, Homo sapiens
gggactaccaatgcg

SEQ ID NO: 10757 - DNA, 15 bp, Homo sapiens
tgggactaccaatgc

SEQ ID NO: 10758 - DNA, 15 bp, Homo sapiens
ctgggactaccaatg

SEQ ID NO: 10759 - DNA, 15 bp, Homo sapiens
gctgggactaccaat

SEQ ID NO: 10760 - DNA, 15 bp, Homo sapiens
agctgggactaccaa

SEQ ID NO: 10761 - DNA, 15 bp, Homo sapiens
tagctgggactacca

SEQ ID NO: 10762 - DNA, 15 bp, Homo sapiens
gtagctgggactacc

SEQ ID NO: 10763 - DNA, 15 bp, Homo sapiens
cagtagctgggacta

SEQ ID NO: 10764 - DNA, 15 bp, Homo sapiens
tcagtagctgggact

SEQ ID NO: 10765 - DNA, 15 bp, Homo sapiens
ctcagtagctgggac

SEQ ID NO: 10766 - DNA, 15 bp, Homo sapiens
cctcagtagctggga

SEQ ID NO: 10767 - DNA, 15 bp, Homo sapiens
tcctcagtagctggg

SEQ ID NO: 10768 - DNA, 15 bp, Homo sapiens
ctcctcagtagctgg

SEQ ID NO: 10769 - DNA, 15 bp, Homo sapiens
cctcctcagtagctg

SEQ ID NO: 10770 - DNA, 15 bp, Homo sapiens
gcctcctcagtagct

SEQ ID NO: 10771 - DNA, 15 bp, Homo sapiens
agcctcctcagtagc

SEQ ID NO: 10772 - DNA, 15 bp, Homo sapiens
cagcctcctcagtag

SEQ ID NO: 10773 - DNA, 15 bp, Homo sapiens
tcagcctcctcagta

SEQ ID NO: 10774 - DNA, 15 bp, Homo sapiens
ctcagcctcctcagt

SEQ ID NO: 10775 - DNA, 15 bp, Homo sapiens
cctcagcctcctcag

SEQ ID NO: 10776 - DNA, 15 bp, Homo sapiens
acctcagcctcctca

SEQ ID NO: 10777 - DNA, 15 bp, Homo sapiens
cacctcagcctcctc

SEQ ID NO: 10778 - DNA, 15 bp, Homo sapiens
ccacctcagcctcct

SEQ ID NO: 10779 - DNA, 15 bp, Homo sapiens
cccacctcagcctcc

SEQ ID NO: 10780 - DNA, 15 bp, Homo sapiens
tcccacctcagcctc

SEQ ID NO: 10781 - DNA, 15 bp, Homo sapiens
atcccacctcagcct

SEQ ID NO: 10782 - DNA, 15 bp, Homo sapiens
gatcccacctcagcc

SEQ ID NO: 10783 - DNA, 15 bp, Homo sapiens
tgatcccacctcagc

SEQ ID NO: 10784 - DNA, 15 bp, Homo sapiens
gtgatcccacctcag

SEQ ID NO: 10785 - DNA, 15 bp, Homo sapiens
ggtgatcccacctca

SEQ ID NO: 10786 - DNA, 15 bp, Homo sapiens
aggtgatcccacctc

SEQ ID NO: 10787 - DNA, 15 bp, Homo sapiens
caggtgatcccacct

SEQ ID NO: 10788 - DNA, 15 bp, Homo sapiens
tcaggtgatcccacc

SEQ ID NO: 10789 - DNA, 15 bp, Homo sapiens
ctcaggtgatcccac

SEQ ID NO: 10790 - DNA, 15 bp, Homo sapiens
tctcaggtgatccca

SEQ ID NO: 10791 - DNA, 15 bp, Homo sapiens
gtctcaggtgatccc

SEQ ID NO: 10792 - DNA, 15 bp, Homo sapiens
agtctcaggtgatcc

SEQ ID NO: 10793 - DNA, 15 bp, Homo sapiens
cagtctcaggtgatc

SEQ ID NO: 10794 - DNA, 15 bp, Homo sapiens
ccagtctcaggtgat

SEQ ID NO: 10795 - DNA, 15 bp, Homo sapiens
cccagtctcaggtga

SEQ ID NO: 10796 - DNA, 15 bp, Homo sapiens
tcccagtctcaggtg

SEQ ID NO: 10797 - DNA, 15 bp, Homo sapiens
gtcccagtctcaggt

SEQ ID NO: 10798 - DNA, 15 bp, Homo sapiens
agtcccagtctcagg

SEQ ID NO: 10799 - DNA, 15 bp, Homo sapiens
aagtcccagtctcag

SEQ ID NO: 10800 - DNA, 15 bp, Homo sapiens
aaagtcccagtctca

SEQ ID NO: 10801 - DNA, 15 bp, Homo sapiens
caaagtcccagtctc

SEQ ID NO: 10802 - DNA, 15 bp, Homo sapiens
tcaaagtcccagtct

SEQ ID NO: 10803 - DNA, 15 bp, Homo sapiens
ctcaaagtcccagtc

SEQ ID NO: 10804 - DNA, 15 bp, Homo sapiens
cctcaaagtcccagt

SEQ ID NO: 10805 - DNA, 15 bp, Homo sapiens
gcctcaaagtcccag

SEQ ID NO: 10806 - DNA, 15 bp, Homo sapiens
agcctcaaagtccca

SEQ ID NO: 10807 - DNA, 15 bp, Homo sapiens
cagcctcaaagtccc

SEQ ID NO: 10808 - DNA, 15 bp, Homo sapiens
gcagcctcaaagtcc

SEQ ID NO: 10809 - DNA, 15 bp, Homo sapiens
tgcagcctcaaagtc

SEQ ID NO: 10810 - DNA, 15 bp, Homo sapiens
atgcagcctcaaagt

SEQ ID NO: 10811 - DNA, 15 bp, Homo sapiens
aatgcagcctcaaag

SEQ ID NO: 10812 - DNA, 15 bp, Homo sapiens
caatgcagcctcaaa

SEQ ID NO: 10813 - DNA, 15 bp, Homo sapiens
tcaatgcagcctcaa

SEQ ID NO: 10814 - DNA, 15 bp, Homo sapiens
ctcaatgcagcctca

SEQ ID NO: 10815 - DNA, 15 bp, Homo sapiens
gctcaatgcagcctc

SEQ ID NO: 10816 - DNA, 15 bp, Homo sapiens
agctcaatgcagcct

SEQ ID NO: 10817 - DNA, 15 bp, Homo sapiens
cagctcaatgcagcc

SEQ ID NO: 10818 - DNA, 15 bp, Homo sapiens
acagctcaatgcagc

SEQ ID NO: 10819 - DNA, 15 bp, Homo sapiens
cacagctcaatgcag

SEQ ID NO: 10820 - DNA, 15 bp, Homo sapiens
tcacagctcaatgca

SEQ ID NO: 10821 - DNA, 15 bp, Homo sapiens
atcacagctcaatgc

SEQ ID NO: 10822 - DNA, 15 bp, Homo sapiens
aatcacagctcaatg

SEQ ID NO: 10823 - DNA, 15 bp, Homo sapiens
caatcacagctcaat

SEQ ID NO: 10824 - DNA, 15 bp, Homo sapiens
ccaatcacagctcaa

SEQ ID NO: 10825 - DNA, 15 bp, Homo sapiens
cccaatcacagctca

SEQ ID NO: 10826 - DNA, 15 bp, Homo sapiens
tcccaatcacagctc

SEQ ID NO: 10827 - DNA, 15 bp, Homo sapiens
gtcccaatcacagct

SEQ ID NO: 10828 - DNA, 15 bp, Homo sapiens
tgtcccaatcacagc

SEQ ID NO: 10829 - DNA, 15 bp, Homo sapiens
gtgtcccaatcacag

SEQ ID NO: 10830 - DNA, 15 bp, Homo sapiens
agtgtcccaatcaca

SEQ ID NO: 10831 - DNA, 15 bp, Homo sapiens
cagtgtcccaatcac

SEQ ID NO: 10832 - DNA, 15 bp, Homo sapiens
acagtgtcccaatca

SEQ ID NO: 10833 - DNA, 15 bp, Homo sapiens
tacagtgtcccaatc

SEQ ID NO: 10834 - DNA, 15 bp, Homo sapiens
gtacagtgtcccaat

SEQ ID NO: 10835 - DNA, 15 bp, Homo sapiens
agtacagtgtcccaa

SEQ ID NO: 10836 - DNA, 15 bp, Homo sapiens
gagtacagtgtccca

SEQ ID NO: 10837 - DNA, 15 bp, Homo sapiens
ggagtacagtgtccc

SEQ ID NO: 10838 - DNA, 15 bp, Homo sapiens
aggagtacagtgtcc

SEQ ID NO: 10839 - DNA, 15 bp, Homo sapiens
caggagtacagtgtc

SEQ ID NO: 10840 - DNA, 15 bp, Homo sapiens
gcaggagtacagtgt

SEQ ID NO: 10841 - DNA, 15 bp, Homo sapiens
ggcaggagtacagtg

SEQ ID NO: 10842 - DNA, 15 bp, Homo sapiens
aggcaggagtacagt

SEQ ID NO: 10843 - DNA, 15 bp, Homo sapiens
caggcaggagtacag

SEQ ID NO: 10844 - DNA, 15 bp, Homo sapiens
ccaggcaggagtaca

SEQ ID NO: 10845 - DNA, 15 bp, Homo sapiens
cccaggcaggagtac

SEQ ID NO: 10846 - DNA, 15 bp, Homo sapiens
acccaggcaggagta

SEQ ID NO: 10847 - DNA, 15 bp, Homo sapiens
cacccaggcaggagt

SEQ ID NO: 10848 - DNA, 15 bp, Homo sapiens
tcacccaggcaggag

SEQ ID NO: 10849 - DNA, 15 bp, Homo sapiens
gtcacccaggcagga

SEQ ID NO: 10850 - DNA, 15 bp, Homo sapiens
tgtcacccaggcagg

SEQ ID NO: 10851 - DNA, 15 bp, Homo sapiens
ctgtcacccaggcag

SEQ ID NO: 10852 - DNA, 15 bp, Homo sapiens
tctgtcacccaggca

SEQ ID NO: 10853 - DNA, 15 bp, Homo sapiens
ctctgtcacccaggc

SEQ ID NO: 10854 - DNA, 15 bp, Homo sapiens
actctgtcacccagg

SEQ ID NO: 10855 - DNA, 15 bp, Homo sapiens
cactctgtcacccag

SEQ ID NO: 10856 - DNA, 15 bp, Homo sapiens
tcactctgtcaccca

SEQ ID NO: 10857 - DNA, 15 bp, Homo sapiens
ctcactctgtcaccc

SEQ ID NO: 10858 - DNA, 15 bp, Homo sapiens
tctcactctgtcacc

SEQ ID NO: 10859 - DNA, 15 bp, Homo sapiens
gtctcactctgtcac

SEQ ID NO: 10860 - DNA, 15 bp, Homo sapiens
ggtctcactctgtca

SEQ ID NO: 10861 - DNA, 15 bp, Homo sapiens
gggtctcactctgtc

SEQ ID NO: 10862 - DNA, 15 bp, Homo sapiens
agggtctcactctgt

SEQ ID NO: 10863 - DNA, 15 bp, Homo sapiens
gagggtctcactctg

SEQ ID NO: 10864 - DNA, 15 bp, Homo sapiens
agagggtctcactct

SEQ ID NO: 10865 - DNA, 15 bp, Homo sapiens
gagagggtctcactc

SEQ ID NO: 10866 - DNA, 15 bp, Homo sapiens
agagagggtctcact

SEQ ID NO: 10867 - DNA, 15 bp, Homo sapiens
gagagagggtctcac

SEQ ID NO: 10868 - DNA, 15 bp, Homo sapiens
tgagagagggtctca

SEQ ID NO: 10869 - DNA, 15 bp, Homo sapiens
ttgagagagggtctc

SEQ ID NO: 10870 - DNA, 15 bp, Homo sapiens
tttgagagagggtct

SEQ ID NO: 10871 - DNA, 15 bp, Homo sapiens
ttttgagagagggtc

SEQ ID NO: 10872 - DNA, 15 bp, Homo sapiens
tttttgagagagggt

SEQ ID NO: 10873 - DNA, 15 bp, Homo sapiens
atttttgagagaggg

SEQ ID NO: 10874 - DNA, 15 bp, Homo sapiens
tatttttgagagagg

SEQ ID NO: 10875 - DNA, 15 bp, Homo sapiens
ttatttttgagagag

SEQ ID NO: 10876 - DNA, 15 bp, Homo sapiens
tttatttttgagaga

SEQ ID NO: 10877 - DNA, 15 bp, Homo sapiens
atttatttttgagag

SEQ ID NO: 10878 - DNA, 15 bp, Homo sapiens
tatttatttttgaga

SEQ ID NO: 10879 - DNA, 15 bp, Homo sapiens
ttatttatttttgag

SEQ ID NO: 10880 - DNA, 15 bp, Homo sapiens
tttatttatttttga

SEQ ID NO: 10881 - DNA, 15 bp, Homo sapiens
atttatttatttttg

SEQ ID NO: 10882 - DNA, 15 bp, Homo sapiens
tatttatttattttt

SEQ ID NO: 10883 - DNA, 15 bp, Homo sapiens
ttatttatttatttt

SEQ ID NO: 10884 - DNA, 15 bp, Homo sapiens
tttatttatttattt

SEQ ID NO: 10885 - DNA, 15 bp, Homo sapiens
atttatttatttatt

SEQ ID NO: 10886 - DNA, 15 bp, Homo sapiens
tatttatttatttat

SEQ ID NO: 10887 - DNA, 15 bp, Homo sapiens
gtatttatttattta

SEQ ID NO: 10888 - DNA, 15 bp, Homo sapiens
tgtatttatttattt

SEQ ID NO: 10889 - DNA, 15 bp, Homo sapiens
atgtatttatttatt

SEQ ID NO: 10890 - DNA, 15 bp, Homo sapiens
gatgtatttatttat

SEQ ID NO: 10891 - DNA, 15 bp, Homo sapiens
ggatgtatttattta

SEQ ID NO: 10892 - DNA, 15 bp, Homo sapiens
gggatgtatttattt

SEQ ID NO: 10893 - DNA, 15 bp, Homo sapiens
ggggatgtatttatt

SEQ ID NO: 10894 - DNA, 15 bp, Homo sapiens
cggggatgtatttat

SEQ ID NO: 10895 - DNA, 15 bp, Homo sapiens
gcggggatgtattta

SEQ ID NO: 10896 - DNA, 15 bp, Homo sapiens
agcggggatgtattt

SEQ ID NO: 10897 - DNA, 15 bp, Homo sapiens
gagcggggatgtatt

SEQ ID NO: 10898 - DNA, 15 bp, Homo sapiens
tgagcggggatgtat

SEQ ID NO: 10899 - DNA, 15 bp, Homo sapiens
ctgagcggggatgta

SEQ ID NO: 10900 - DNA, 15 bp, Homo sapiens
gctgagcggggatgt

SEQ ID NO: 10901 - DNA, 15 bp, Homo sapiens
ggctgagcggggatg

SEQ ID NO: 10902 - DNA, 15 bp, Homo sapiens
tggctgagcggggat

SEQ ID NO: 10903 - DNA, 15 bp, Homo sapiens
gtggctgagcgggga

SEQ ID NO: 10904 - DNA, 15 bp, Homo sapiens
agtggctgagcgggg

SEQ ID NO: 10905 - DNA, 15 bp, Homo sapiens
aagtggctgagcggg

SEQ ID NO: 10906 - DNA, 15 bp, Homo sapiens
taagtggctgagcgg

SEQ ID NO: 10907 - DNA, 15 bp, Homo sapiens
ataagtggctgagcg

SEQ ID NO: 10908 - DNA, 15 bp, Homo sapiens
gataagtggctgagc

SEQ ID NO: 10909 - DNA, 15 bp, Homo sapiens
tgataagtggctgag

SEQ ID NO: 10910 - DNA, 15 bp, Homo sapiens
ctgataagtggctga

SEQ ID NO: 10911 - DNA, 15 bp, Homo sapiens
actgataagtggctg

SEQ ID NO: 10912 - DNA, 15 bp, Homo sapiens
aactgataagtggct

SEQ ID NO: 10913 - DNA, 15 bp, Homo sapiens
taactgataagtggc

SEQ ID NO: 10914 - DNA, 15 bp, Homo sapiens
gtaactgataagtgg

SEQ ID NO: 10915 - DNA, 15 bp, Homo sapiens
cgtaactgataagtg

SEQ ID NO: 10916 - DNA, 15 bp, Homo sapiens
acgtaactgataagt

SEQ ID NO: 10917 - DNA, 15 bp, Homo sapiens
tacgtaactgataag

SEQ ID NO: 10918 - DNA, 15 bp, Homo sapiens
ctacgtaactgataa

SEQ ID NO: 10919 - DNA, 15 bp, Homo sapiens
tctacgtaactgata

SEQ ID NO: 10920 - DNA, 15 bp, Homo sapiens
atctacgtaactgat

SEQ ID NO: 10921 - DNA, 15 bp, Homo sapiens
tatctacgtaactga

SEQ ID NO: 10922 - DNA, 15 bp, Homo sapiens
gtatctacgtaactg

SEQ ID NO: 10923 - DNA, 15 bp, Homo sapiens
tgtatctacgtaact

SEQ ID NO: 10924 - DNA, 15 bp, Homo sapiens
gtgtatctacgtaac

SEQ ID NO: 10925 - DNA, 15 bp, Homo sapiens
agtgtatctacgtaa

SEQ ID NO: 10926 - DNA, 15 bp, Homo sapiens
cagtgtatctacgta

SEQ ID NO: 10927 - DNA, 15 bp, Homo sapiens
gcagtgtatctacgt

SEQ ID NO: 10928 - DNA, 15 bp, Homo sapiens
ggcagtgtatctacg

SEQ ID NO: 10929 - DNA, 15 bp, Homo sapiens
aggcagtgtatctac

SEQ ID NO: 10930 - DNA, 15 bp, Homo sapiens
taggcagtgtatcta

SEQ ID NO: 10931 - DNA, 15 bp, Homo sapiens
ttaggcagtgtatct

SEQ ID NO: 10932 - DNA, 15 bp, Homo sapiens
gttaggcagtgtatc

SEQ ID NO: 10933 - DNA, 15 bp, Homo sapiens
ggttaggcagtgtat

SEQ ID NO: 10934 - DNA, 15 bp, Homo sapiens
aggttaggcagtgta

SEQ ID NO: 10935 - DNA, 15 bp, Homo sapiens
aaggttaggcagtgt

SEQ ID NO: 10936 - DNA, 15 bp, Homo sapiens
taaggttaggcagtg

SEQ ID NO: 10937 - DNA, 15 bp, Homo sapiens
ctaaggttaggcagt

SEQ ID NO: 10938 - DNA, 15 bp, Homo sapiens
actaaggttaggcag

SEQ ID NO: 10939 - DNA, 15 bp, Homo sapiens
cactaaggttaggca

SEQ ID NO: 10940 - DNA, 15 bp, Homo sapiens
tcactaaggttaggc

SEQ ID NO: 10941 - DNA, 15 bp, Homo sapiens
ttcactaaggttagg

SEQ ID NO: 10942 - DNA, 15 bp, Homo sapiens
gttcactaaggttag

SEQ ID NO: 10943 - DNA, 15 bp, Homo sapiens
ggttcactaaggtta

SEQ ID NO: 10944 - DNA, 15 bp, Homo sapiens
gggttcactaaggtt

SEQ ID NO: 10945 - DNA, 15 bp, Homo sapiens
agggttcactaaggt

SEQ ID NO: 10946 - DNA, 15 bp, Homo sapiens
cagggttcactaagg

SEQ ID NO: 10947 - DNA, 15 bp, Homo sapiens
acagggttcactaag

SEQ ID NO: 10948 - DNA, 15 bp, Homo sapiens
aacagggttcactaa

SEQ ID NO: 10949 - DNA, 15 bp, Homo sapiens
aaacagggttcacta

SEQ ID NO: 10950 - DNA, 15 bp, Homo sapiens
gaaacagggttcact

SEQ ID NO: 10951 - DNA, 15 bp, Homo sapiens
cgaaacagggttcac

SEQ ID NO: 10952 - DNA, 15 bp, Homo sapiens
tcgaaacagggttca

SEQ ID NO: 10953 - DNA, 15 bp, Homo sapiens
gtcgaaacagggttc

SEQ ID NO: 10954 - DNA, 15 bp, Homo sapiens
tgtcgaaacagggtt

SEQ ID NO: 10955 - DNA, 15 bp, Homo sapiens
ttgtcgaaacagggt

SEQ ID NO: 10956 - DNA, 15 bp, Homo sapiens
gttgtcgaaacaggg

SEQ ID NO: 10957 - DNA, 15 bp, Homo sapiens
agttgtcgaaacagg

SEQ ID NO: 10958 - DNA, 15 bp, Homo sapiens
gagttgtcgaaacag

SEQ ID NO: 10959 - DNA, 15 bp, Homo sapiens
ggagttgtcgaaaca

SEQ ID NO: 10960 - DNA, 15 bp, Homo sapiens
tggagttgtcgaaac

SEQ ID NO: 10961 - DNA, 15 bp, Homo sapiens
ttggagttgtcgaaa

SEQ ID NO: 10962 - DNA, 15 bp, Homo sapiens
tttggagttgtcgaa

SEQ ID NO: 10963 - DNA, 15 bp, Homo sapiens
ttttggagttgtcga

SEQ ID NO: 10964 - DNA, 15 bp, Homo sapiens
attttggagttgtcg

SEQ ID NO: 10965 - DNA, 15 bp, Homo sapiens
cattttggagttgtc

SEQ ID NO: 10966 - DNA, 15 bp, Homo sapiens
ccattttggagttgt

SEQ ID NO: 10967 - DNA, 15 bp, Homo sapiens
cccattttggagttg

SEQ ID NO: 10968 - DNA, 15 bp, Homo sapiens
tcccattttggagtt

SEQ ID NO: 10969 - DNA, 15 bp, Homo sapiens
ctcccattttggagt

SEQ ID NO: 10970 - DNA, 15 bp, Homo sapiens
actcccattttggag

SEQ ID NO: 10971 - DNA, 15 bp, Homo sapiens
tactcccattttgga

SEQ ID NO: 10972 - DNA, 15 bp, Homo sapiens
ttactcccattttgg

SEQ ID NO: 10973 - DNA, 15 bp, Homo sapiens
tttactcccattttg

SEQ ID NO: 10974 - DNA, 15 bp, Homo sapiens
ttttactcccatttt

SEQ ID NO: 10975 - DNA, 15 bp, Homo sapiens
tttttactcccattt

SEQ ID NO: 10976 - DNA, 15 bp, Homo sapiens
atttttactcccatt

SEQ ID NO: 10977 - DNA, 15 bp, Homo sapiens
gatttttactcccat

SEQ ID NO: 10978 - DNA, 15 bp, Homo sapiens
ggatttttactccca

SEQ ID NO: 10979 - DNA, 15 bp, Homo sapiens
aggatttttactccc

SEQ ID NO: 10980 - DNA, 15 bp, Homo sapiens
taggatttttactcc

SEQ ID NO: 10981 - DNA, 15 bp, Homo sapiens
ttaggatttttactc

SEQ ID NO: 10982 - DNA, 15 bp, Homo sapiens
tttaggatttttact

SEQ ID NO: 10983 - DNA, 15 bp, Homo sapiens
gtttaggatttttac

SEQ ID NO: 10984 - DNA, 15 bp, Homo sapiens
agtttaggattttta

SEQ ID NO: 10985 - DNA, 15 bp, Homo sapiens
aagtttaggattttt

SEQ ID NO: 10986 - DNA, 15 bp, Homo sapiens
caagtttaggatttt

SEQ ID NO: 10987 - DNA, 15 bp, Homo sapiens
acaagtttaggattt

SEQ ID NO: 10988 - DNA, 15 bp, Homo sapiens
tacaagtttaggatt

SEQ ID NO: 10989 - DNA, 15 bp, Homo sapiens
gtacaagtttaggat

SEQ ID NO: 10990 - DNA, 15 bp, Homo sapiens
tgtacaagtttagga

SEQ ID NO: 10991 - DNA, 15 bp, Homo sapiens
ctgtacaagtttagg

SEQ ID NO: 10992 - DNA, 15 bp, Homo sapiens
actgtacaagtttag

SEQ ID NO: 10993 - DNA, 15 bp, Homo sapiens
cactgtacaagttta

SEQ ID NO: 10994 - DNA, 15 bp, Homo sapiens
ccactgtacaagttt

SEQ ID NO: 10995 - DNA, 15 bp, Homo sapiens
accactgtacaagtt

SEQ ID NO: 10996 - DNA, 15 bp, Homo sapiens
aaccactgtacaagt

SEQ ID NO: 10997 - DNA, 15 bp, Homo sapiens
aaaccactgtacaag

SEQ ID NO: 10998 - DNA, 15 bp, Homo sapiens
aaaaccactgtacaa

SEQ ID NO: 10999 - DNA, 15 bp, Homo sapiens
aaaaaccactgtaca

SEQ ID NO: 11000 - DNA, 15 bp, Homo sapiens
aaaaaaccactgtac

SEQ ID NO: 11001 - DNA, 15 bp, Homo sapiens
taaaaaaccactgta

SEQ ID NO: 11002 - DNA, 15 bp, Homo sapiens
ctaaaaaaccactgt

SEQ ID NO: 11003 - DNA, 15 bp, Homo sapiens
actaaaaaaccactg

SEQ ID NO: 11004 - DNA, 15 bp, Homo sapiens
aactaaaaaaccact

SEQ ID NO: 11005 - DNA, 15 bp, Homo sapiens
aaactaaaaaaccac

SEQ ID NO: 11006 - DNA, 15 bp, Homo sapiens
aaaactaaaaaacca

SEQ ID NO: 11007 - DNA, 15 bp, Homo sapiens
caaaactaaaaaacc

SEQ ID NO: 11008 - DNA, 15 bp, Homo sapiens
acaaaactaaaaaac

SEQ ID NO: 11009 - DNA, 15 bp, Homo sapiens
aacaaaactaaaaaa

SEQ ID NO: 11010 - DNA, 15 bp, Homo sapiens
taacaaaactaaaaa

SEQ ID NO: 11011 - DNA, 15 bp, Homo sapiens
ttaacaaaactaaaa

SEQ ID NO: 11012 - DNA, 15 bp, Homo sapiens
tttaacaaaactaaa

SEQ ID NO: 11013 - DNA, 15 bp, Homo sapiens
ttttaacaaaactaa

SEQ ID NO: 11014 - DNA, 15 bp, Homo sapiens
cttttaacaaaacta

SEQ ID NO: 11015 - DNA, 15 bp, Homo sapiens
acttttaacaaaact

SEQ ID NO: 11016 - DNA, 15 bp, Homo sapiens
tacttttaacaaaac

SEQ ID NO: 11017 - DNA, 15 bp, Homo sapiens
gtacttttaacaaaa

SEQ ID NO: 11018 - DNA, 15 bp, Homo sapiens
tgtacttttaacaaa

SEQ ID NO: 11019 - DNA, 15 bp, Homo sapiens
ctgtacttttaacaa

SEQ ID NO: 11020 - DNA, 15 bp, Homo sapiens
cctgtacttttaaca

SEQ ID NO: 11021 - DNA, 15 bp, Homo sapiens
acctgtacttttaac

SEQ ID NO: 11022 - DNA, 15 bp, Homo sapiens
cacctgtacttttaa

SEQ ID NO: 11023 - DNA, 15 bp, Homo sapiens
tcacctgtactttta

SEQ ID NO: 11024 - DNA, 15 bp, Homo sapiens
ctcacctgtactttt

SEQ ID NO: 11025 - DNA, 15 bp, Homo sapiens
cctcacctgtacttt

SEQ ID NO: 11026 - DNA, 15 bp, Homo sapiens
acctcacctgtactt

SEQ ID NO: 11027 - DNA, 15 bp, Homo sapiens
aacctcacctgtact

SEQ ID NO: 11028 - DNA, 15 bp, Homo sapiens
aaacctcacctgtac

SEQ ID NO: 11029 - DNA, 15 bp, Homo sapiens
aaaacctcacctgta

SEQ ID NO: 11030 - DNA, 15 bp, Homo sapiens
aaaaacctcacctgt

SEQ ID NO: 11031 - DNA, 15 bp, Homo sapiens
aaaaaacctcacctg

SEQ ID NO: 11032 - DNA, 15 bp, Homo sapiens
aaaaaaacctcacct

SEQ ID NO: 11033 - DNA, 15 bp, Homo sapiens
gaaaaaaacctcacc

SEQ ID NO: 11034 - DNA, 15 bp, Homo sapiens
tgaaaaaaacctcac

SEQ ID NO: 11035 - DNA, 15 bp, Homo sapiens
ctgaaaaaaacctca

SEQ ID NO: 11036 - DNA, 15 bp, Homo sapiens
tctgaaaaaaacctc

SEQ ID NO: 11037 - DNA, 15 bp, Homo sapiens
ctctgaaaaaaacct

SEQ ID NO: 11038 - DNA, 15 bp, Homo sapiens
actctgaaaaaaacc

SEQ ID NO: 11039 - DNA, 15 bp, Homo sapiens
tactctgaaaaaaac

SEQ ID NO: 11040 - DNA, 15 bp, Homo sapiens
atactctgaaaaaaa

SEQ ID NO: 11041 - DNA, 15 bp, Homo sapiens
aatactctgaaaaaa

SEQ ID NO: 11042 - DNA, 15 bp, Homo sapiens
caatactctgaaaaa

SEQ ID NO: 11043 - DNA, 15 bp, Homo sapiens
ccaatactctgaaaa

SEQ ID NO: 11044 - DNA, 15 bp, Homo sapiens
accaatactctgaaa

SEQ ID NO: 11045 - DNA, 15 bp, Homo sapiens
aaccaatactctgaa

SEQ ID NO: 11046 - DNA, 15 bp, Homo sapiens
caaccaatactctga

SEQ ID NO: 11047 - DNA, 15 bp, Homo sapiens
gcaaccaatactctg

SEQ ID NO: 11048 - DNA, 15 bp, Homo sapiens
ggcaaccaatactct

SEQ ID NO: 11049 - DNA, 15 bp, Homo sapiens
tggcaaccaatactc

SEQ ID NO: 11050 - DNA, 15 bp, Homo sapiens
atggcaaccaatact

SEQ ID NO: 11051 - DNA, 15 bp, Homo sapiens
gatggcaaccaatac

SEQ ID NO: 11052 - DNA, 15 bp, Homo sapiens
agatggcaaccaata

SEQ ID NO: 11053 - DNA, 15 bp, Homo sapiens
cagatggcaaccaat

SEQ ID NO: 11054 - DNA, 15 bp, Homo sapiens
tcagatggcaaccaa

SEQ ID NO: 11055 - DNA, 15 bp, Homo sapiens
ctcagatggcaacca

SEQ ID NO: 11056 - DNA, 15 bp, Homo sapiens
tctcagatggcaacc

SEQ ID NO: 11057 - DNA, 15 bp, Homo sapiens
ctctcagatggcaac

SEQ ID NO: 11058 - DNA, 15 bp, Homo sapiens
actctcagatggcaa

SEQ ID NO: 11059 - DNA, 15 bp, Homo sapiens
cactctcagatggca

SEQ ID NO: 11060 - DNA, 15 bp, Homo sapiens
tcactctcagatggc

SEQ ID NO: 11061 - DNA, 15 bp, Homo sapiens
atcactctcagatgg

SEQ ID NO: 11062 - DNA, 15 bp, Homo sapiens
gatcactctcagatg

SEQ ID NO: 11063 - DNA, 15 bp, Homo sapiens
ggatcactctcagat

SEQ ID NO: 11064 - DNA, 15 bp, Homo sapiens
gggatcactctcaga

SEQ ID NO: 11065 - DNA, 15 bp, Homo sapiens
ggggatcactctcag

SEQ ID NO: 11066 - DNA, 15 bp, Homo sapiens
aggggatcactctca

SEQ ID NO: 11067 - DNA, 15 bp, Homo sapiens
aaggggatcactctc

SEQ ID NO: 11068 - DNA, 15 bp, Homo sapiens
aaaggggatcactct

SEQ ID NO: 11069 - DNA, 15 bp, Homo sapiens
gaaaggggatcactc

SEQ ID NO: 11070 - DNA, 15 bp, Homo sapiens
tgaaaggggatcact

SEQ ID NO: 11071 - DNA, 15 bp, Homo sapiens
gtgaaaggggatcac

SEQ ID NO: 11072 - DNA, 15 bp, Homo sapiens
ggtgaaaggggatca

SEQ ID NO: 11073 - DNA, 15 bp, Homo sapiens
aggtgaaaggggatc

SEQ ID NO: 11074 - DNA, 15 bp, Homo sapiens
gaggtgaaaggggat

SEQ ID NO: 11075 - DNA, 15 bp, Homo sapiens
ggaggtgaaagggga

SEQ ID NO: 11076 - DNA, 15 bp, Homo sapiens
aggaggtgaaagggg

SEQ ID NO: 11077 - DNA, 15 bp, Homo sapiens
gaggaggtgaaaggg

SEQ ID NO: 11078 - DNA, 15 bp, Homo sapiens
agaggaggtgaaagg

SEQ ID NO: 11079 - DNA, 15 bp, Homo sapiens
tagaggaggtgaaag

SEQ ID NO: 11080 - DNA, 15 bp, Homo sapiens
ctagaggaggtgaaa

SEQ ID NO: 11081 - DNA, 15 bp, Homo sapiens
cctagaggaggtgaa

SEQ ID NO: 11082 - DNA, 15 bp, Homo sapiens
tcctagaggaggtga

SEQ ID NO: 11083 - DNA, 15 bp, Homo sapiens
gtcctagaggaggtg

SEQ ID NO: 11084 - DNA, 15 bp, Homo sapiens
agtcctagaggaggt

SEQ ID NO: 11085 - DNA, 15 bp, Homo sapiens
aagtcctagaggagg

SEQ ID NO: 11086 - DNA, 15 bp, Homo sapiens
aaagtcctagaggag

SEQ ID NO: 11087 - DNA, 15 bp, Homo sapiens
aaaagtcctagagga

SEQ ID NO: 11088 - DNA, 15 bp, Homo sapiens
taaaagtcctagagg

SEQ ID NO: 11089 - DNA, 15 bp, Homo sapiens
ctaaaagtcctagag

SEQ ID NO: 11090 - DNA, 15 bp, Homo sapiens
gctaaaagtcctaga

SEQ ID NO: 11091 - DNA, 15 bp, Homo sapiens
tgctaaaagtcctag

SEQ ID NO: 11092 - DNA, 15 bp, Homo sapiens
atgctaaaagtccta

SEQ ID NO: 11093 - DNA, 15 bp, Homo sapiens
aatgctaaaagtcct

SEQ ID NO: 11094 - DNA, 15 bp, Homo sapiens
aaatgctaaaagtcc

SEQ ID NO: 11095 - DNA, 15 bp, Homo sapiens
aaaatgctaaaagtc

SEQ ID NO: 11096 - DNA, 15 bp, Homo sapiens
gaaaatgctaaaagt

SEQ ID NO: 11097 - DNA, 15 bp, Homo sapiens
agaaaatgctaaaag

SEQ ID NO: 11098 - DNA, 15 bp, Homo sapiens
cagaaaatgctaaaa

SEQ ID NO: 11099 - DNA, 15 bp, Homo sapiens
ccagaaaatgctaaa

SEQ ID NO: 11100 - DNA, 15 bp, Homo sapiens
tccagaaaatgctaa

SEQ ID NO: 11101 - DNA, 15 bp, Homo sapiens
ctccagaaaatgcta

SEQ ID NO: 11102 - DNA, 15 bp, Homo sapiens
tctccagaaaatgct

SEQ ID NO: 11103 - DNA, 15 bp, Homo sapiens
gtctccagaaaatgc

SEQ ID NO: 11104 - DNA, 15 bp, Homo sapiens
tgtctccagaaaatg

SEQ ID NO: 11105 - DNA, 15 bp, Homo sapiens
atgtctccagaaaat

SEQ ID NO: 11106 - DNA, 15 bp, Homo sapiens
aatgtctccagaaaa

SEQ ID NO: 11107 - DNA, 15 bp, Homo sapiens
aaatgtctccagaaa

SEQ ID NO: 11108 - DNA, 15 bp, Homo sapiens
aaaatgtctccagaa

SEQ ID NO: 11109 - DNA, 15 bp, Homo sapiens
caaaatgtctccaga

SEQ ID NO: 11110 - DNA, 15 bp, Homo sapiens
ccaaaatgtctccag

SEQ ID NO: 11111 - DNA, 15 bp, Homo sapiens
accaaaatgtctcca

SEQ ID NO: 11112 - DNA, 15 bp, Homo sapiens
caccaaaatgtctcc

SEQ ID NO: 11113 - DNA, 15 bp, Homo sapiens
ccaccaaaatgtctc

SEQ ID NO: 11114 - DNA, 15 bp, Homo sapiens
accaccaaaatgtct

SEQ ID NO: 11115 - DNA, 15 bp, Homo sapiens
gaccaccaaaatgtc

SEQ ID NO: 11116 - DNA, 15 bp, Homo sapiens
tgaccaccaaaatgt

SEQ ID NO: 11117 - DNA, 15 bp, Homo sapiens
gtgaccaccaaaatg

SEQ ID NO: 11118 - DNA, 15 bp, Homo sapiens
tgtgaccaccaaaat

SEQ ID NO: 11119 - DNA, 15 bp, Homo sapiens
ctgtgaccaccaaaa

SEQ ID NO: 11120 - DNA, 15 bp, Homo sapiens
gctgtgaccaccaaa

SEQ ID NO: 11121 - DNA, 15 bp, Homo sapiens
agctgtgaccaccaa

SEQ ID NO: 11122 - DNA, 15 bp, Homo sapiens
cagctgtgaccacca

SEQ ID NO: 11123 - DNA, 15 bp, Homo sapiens
ccagctgtgaccacc

SEQ ID NO: 11124 - DNA, 15 bp, Homo sapiens
cccagctgtgaccac

SEQ ID NO: 11125 - DNA, 15 bp, Homo sapiens
ccccagctgtgacca

SEQ ID NO: 11126 - DNA, 15 bp, Homo sapiens
accccagctgtgacc

SEQ ID NO: 11127 - DNA, 15 bp, Homo sapiens
caccccagctgtgac

SEQ ID NO: 11128 - DNA, 15 bp, Homo sapiens
ccaccccagctgtga

SEQ ID NO: 11129 - DNA, 15 bp, Homo sapiens
accaccccagctgtg

SEQ ID NO: 11130 - DNA, 15 bp, Homo sapiens
taccaccccagctgt

SEQ ID NO: 11131 - DNA, 15 bp, Homo sapiens
ctaccaccccagctg

SEQ ID NO: 11132 - DNA, 15 bp, Homo sapiens
tctaccaccccagct

SEQ ID NO: 11133 - DNA, 15 bp, Homo sapiens
ctctaccaccccagc

SEQ ID NO: 11134 - DNA, 15 bp, Homo sapiens
actctaccaccccag

SEQ ID NO: 11135 - DNA, 15 bp, Homo sapiens
cactctaccacccca

SEQ ID NO: 11136 - DNA, 15 bp, Homo sapiens
acactctaccacccc

SEQ ID NO: 11137 - DNA, 15 bp, Homo sapiens
cacactctaccaccc

SEQ ID NO: 11138 - DNA, 15 bp, Homo sapiens
gcacactctaccacc

SEQ ID NO: 11139 - DNA, 15 bp, Homo sapiens
agcacactctaccac

SEQ ID NO: 11140 - DNA, 15 bp, Homo sapiens
tagcacactctacca

SEQ ID NO: 11141 - DNA, 15 bp, Homo sapiens
atagcacactctacc

SEQ ID NO: 11142 - DNA, 15 bp, Homo sapiens
aatagcacactctac

SEQ ID NO: 11143 - DNA, 15 bp, Homo sapiens
caatagcacactcta

SEQ ID NO: 11144 - DNA, 15 bp, Homo sapiens
ccaatagcacactct

SEQ ID NO: 11145 - DNA, 15 bp, Homo sapiens
gccaatagcacactc

SEQ ID NO: 11146 - DNA, 15 bp, Homo sapiens
agccaatagcacact

SEQ ID NO: 11147 - DNA, 15 bp, Homo sapiens
tagccaatagcacac

SEQ ID NO: 11148 - DNA, 15 bp, Homo sapiens
ctagccaatagcaca

SEQ ID NO: 11149 - DNA, 15 bp, Homo sapiens
cctagccaatagcac

SEQ ID NO: 11150 - DNA, 15 bp, Homo sapiens
ccctagccaatagca

SEQ ID NO: 11151 - DNA, 15 bp, Homo sapiens
cccctagccaatagc

SEQ ID NO: 11152 - DNA, 15 bp, Homo sapiens
gcccctagccaatag

SEQ ID NO: 11153 - DNA, 15 bp, Homo sapiens
agcccctagccaata

SEQ ID NO: 11154 - DNA, 15 bp, Homo sapiens
aagcccctagccaat

SEQ ID NO: 11155 - DNA, 15 bp, Homo sapiens
caagcccctagccaa

SEQ ID NO: 11156 - DNA, 15 bp, Homo sapiens
tcaagcccctagcca

SEQ ID NO: 11157 - DNA, 15 bp, Homo sapiens
ttcaagcccctagcc

SEQ ID NO: 11158 - DNA, 15 bp, Homo sapiens
cttcaagcccctagc

SEQ ID NO: 11159 - DNA, 15 bp, Homo sapiens
gcttcaagcccctag

SEQ ID NO: 11160 - DNA, 15 bp, Homo sapiens
ggcttcaagccccta

SEQ ID NO: 11161 - DNA, 15 bp, Homo sapiens
tggcttcaagcccct

SEQ ID NO: 11162 - DNA, 15 bp, Homo sapiens
ctggcttcaagcccc

SEQ ID NO: 11163 - DNA, 15 bp, Homo sapiens
actggcttcaagccc

SEQ ID NO: 11164 - DNA, 15 bp, Homo sapiens
cactggcttcaagcc

SEQ ID NO: 11165 - DNA, 15 bp, Homo sapiens
tcactggcttcaagc

SEQ ID NO: 11166 - DNA, 15 bp, Homo sapiens
atcactggcttcaag

SEQ ID NO: 11167 - DNA, 15 bp, Homo sapiens
catcactggcttcaa

SEQ ID NO: 11168 - DNA, 15 bp, Homo sapiens
gcatcactggcttca

SEQ ID NO: 11169 - DNA, 15 bp, Homo sapiens
agcatcactggcttc

SEQ ID NO: 11170 - DNA, 15 bp, Homo sapiens
cagcatcactggctt

SEQ ID NO: 11171 - DNA, 15 bp, Homo sapiens
gcagcatcactggct

SEQ ID NO: 11172 - DNA, 15 bp, Homo sapiens
agcagcatcactggc

SEQ ID NO: 11173 - DNA, 15 bp, Homo sapiens
aagcagcatcactgg

SEQ ID NO: 11174 - DNA, 15 bp, Homo sapiens
taagcagcatcactg

SEQ ID NO: 11175 - DNA, 15 bp, Homo sapiens
ttaagcagcatcact

SEQ ID NO: 11176 - DNA, 15 bp, Homo sapiens
gttaagcagcatcac

SEQ ID NO: 11177 - DNA, 15 bp, Homo sapiens
tgttaagcagcatca

SEQ ID NO: 11178 - DNA, 15 bp, Homo sapiens
atgttaagcagcatc

SEQ ID NO: 11179 - DNA, 15 bp, Homo sapiens
gatgttaagcagcat

SEQ ID NO: 11180 - DNA, 15 bp, Homo sapiens
ggatgttaagcagca

SEQ ID NO: 11181 - DNA, 15 bp, Homo sapiens
aggatgttaagcagc

SEQ ID NO: 11182 - DNA, 15 bp, Homo sapiens
taggatgttaagcag

SEQ ID NO: 11183 - DNA, 15 bp, Homo sapiens
ataggatgttaagca

SEQ ID NO: 11184 - DNA, 15 bp, Homo sapiens
tataggatgttaagc

SEQ ID NO: 11185 - DNA, 15 bp, Homo sapiens
atataggatgttaag

SEQ ID NO: 11186 - DNA, 15 bp, Homo sapiens
catataggatgttaa

SEQ ID NO: 11187 - DNA, 15 bp, Homo sapiens
ccatataggatgtta

SEQ ID NO: 11188 - DNA, 15 bp, Homo sapiens
gccatataggatgtt

SEQ ID NO: 11189 - DNA, 15 bp, Homo sapiens
tgccatataggatgt

SEQ ID NO: 11190 - DNA, 15 bp, Homo sapiens
gtgccatataggatg

SEQ ID NO: 11191 - DNA, 15 bp, Homo sapiens
tgtgccatataggat

SEQ ID NO: 11192 - DNA, 15 bp, Homo sapiens
ttgtgccatatagga

SEQ ID NO: 11193 - DNA, 15 bp, Homo sapiens
cttgtgccatatagg

SEQ ID NO: 11194 - DNA, 15 bp, Homo sapiens
tcttgtgccatatag

SEQ ID NO: 11195 - DNA, 15 bp, Homo sapiens
gtcttgtgccatata

SEQ ID NO: 11196 - DNA, 15 bp, Homo sapiens
ggtcttgtgccatat

SEQ ID NO: 11197 - DNA, 15 bp, Homo sapiens
gggtcttgtgccata

SEQ ID NO: 11198 - DNA, 15 bp, Homo sapiens
ggggtcttgtgccat

SEQ ID NO: 11199 - DNA, 15 bp, Homo sapiens
aggggtcttgtgcca

SEQ ID NO: 11200 - DNA, 15 bp, Homo sapiens
gaggggtcttgtgcc

SEQ ID NO: 11201 - DNA, 15 bp, Homo sapiens
ggaggggtcttgtgc

SEQ ID NO: 11202 - DNA, 15 bp, Homo sapiens
gggaggggtcttgtg

SEQ ID NO: 11203 - DNA, 15 bp, Homo sapiens
ggggaggggtcttgt

SEQ ID NO: 11204 - DNA, 15 bp, Homo sapiens
tggggaggggtcttg

SEQ ID NO: 11205 - DNA, 15 bp, Homo sapiens
atggggaggggtctt

SEQ ID NO: 11206 - DNA, 15 bp, Homo sapiens
gatggggaggggtct

SEQ ID NO: 11207 - DNA, 15 bp, Homo sapiens
tgatggggaggggtc

SEQ ID NO: 11208 - DNA, 15 bp, Homo sapiens
ttgatggggaggggt

SEQ ID NO: 11209 - DNA, 15 bp, Homo sapiens
gttgatggggagggg

SEQ ID NO: 11210 - DNA, 15 bp, Homo sapiens
tgttgatggggaggg

SEQ ID NO: 11211 - DNA, 15 bp, Homo sapiens
ttgttgatggggagg

SEQ ID NO: 11212 - DNA, 15 bp, Homo sapiens
tttgttgatggggag

SEQ ID NO: 11213 - DNA, 15 bp, Homo sapiens
ctttgttgatgggga

SEQ ID NO: 11214 - DNA, 15 bp, Homo sapiens
tctttgttgatgggg

SEQ ID NO: 11215 - DNA, 15 bp, Homo sapiens
ttctttgttgatggg

SEQ ID NO: 11216 - DNA, 15 bp, Homo sapiens
attctttgttgatgg

SEQ ID NO: 11217 - DNA, 15 bp, Homo sapiens
aattctttgttgatg

SEQ ID NO: 11218 - DNA, 15 bp, Homo sapiens
taattctttgttgat

SEQ ID NO: 11219 - DNA, 15 bp, Homo sapiens
ataattctttgttga

SEQ ID NO: 11220 - DNA, 15 bp, Homo sapiens
gataattctttgttg

SEQ ID NO: 11221 - DNA, 15 bp, Homo sapiens
agataattctttgtt

SEQ ID NO: 11222 - DNA, 15 bp, Homo sapiens
tagataattctttgt

SEQ ID NO: 11223 - DNA, 15 bp, Homo sapiens
ctagataattctttg

SEQ ID NO: 11224 - DNA, 15 bp, Homo sapiens
gctagataattcttt

SEQ ID NO: 11225 - DNA, 15 bp, Homo sapiens
ggctagataattctt

SEQ ID NO: 11226 - DNA, 15 bp, Homo sapiens
gggctagataattct

SEQ ID NO: 11227 - DNA, 15 bp, Homo sapiens
tgggctagataattc

SEQ ID NO: 11228 - DNA, 15 bp, Homo sapiens
ttgggctagataatt

SEQ ID NO: 11229 - DNA, 15 bp, Homo sapiens
tttgggctagataat

SEQ ID NO: 11230 - DNA, 15 bp, Homo sapiens
ttttgggctagataa

SEQ ID NO: 11231 - DNA, 15 bp, Homo sapiens
attttgggctagata

SEQ ID NO: 11232 - DNA, 15 bp, Homo sapiens
cattttgggctagat

SEQ ID NO: 11233 - DNA, 15 bp, Homo sapiens
gcattttgggctaga

SEQ ID NO: 11234 - DNA, 15 bp, Homo sapiens
agcattttgggctag

SEQ ID NO: 11235 - DNA, 15 bp, Homo sapiens
cagcattttgggcta

SEQ ID NO: 11236 - DNA, 15 bp, Homo sapiens
acagcattttgggct

SEQ ID NO: 11237 - DNA, 15 bp, Homo sapiens
cacagcattttgggc

SEQ ID NO: 11238 - DNA, 15 bp, Homo sapiens
acacagcattttggg

SEQ ID NO: 11239 - DNA, 15 bp, Homo sapiens
tacacagcattttgg

SEQ ID NO: 11240 - DNA, 15 bp, Homo sapiens
ttacacagcattttg

SEQ ID NO: 11241 - DNA, 15 bp, Homo sapiens
tttacacagcatttt

SEQ ID NO: 11242 - DNA, 15 bp, Homo sapiens
ttttacacagcattt

SEQ ID NO: 11243 - DNA, 15 bp, Homo sapiens
attttacacagcatt

SEQ ID NO: 11244 - DNA, 15 bp, Homo sapiens
cattttacacagcat

SEQ ID NO: 11245 - DNA, 15 bp, Homo sapiens
acattttacacagca

SEQ ID NO: 11246 - DNA, 15 bp, Homo sapiens
gacattttacacagc

SEQ ID NO: 11247 - DNA, 15 bp, Homo sapiens
agacattttacacag

SEQ ID NO: 11248 - DNA, 15 bp, Homo sapiens
cagacattttacaca

SEQ ID NO: 11249 - DNA, 15 bp, Homo sapiens
ccagacattttacac

SEQ ID NO: 11250 - DNA, 15 bp, Homo sapiens
accagacattttaca

SEQ ID NO: 11251 - DNA, 15 bp, Homo sapiens
taccagacattttac

SEQ ID NO: 11252 - DNA, 15 bp, Homo sapiens
ataccagacatttta

SEQ ID NO: 11253 - DNA, 15 bp, Homo sapiens
tataccagacatttt

SEQ ID NO: 11254 - DNA, 15 bp, Homo sapiens
atataccagacattt

SEQ ID NO: 11255 - DNA, 15 bp, Homo sapiens
tatataccagacatt

SEQ ID NO: 11256 - DNA, 15 bp, Homo sapiens
ttatataccagacat

SEQ ID NO: 11257 - DNA, 15 bp, Homo sapiens
attatataccagaca

SEQ ID NO: 11258 - DNA, 15 bp, Homo sapiens
tattatataccagac

SEQ ID NO: 11259 - DNA, 15 bp, Homo sapiens
ttattatataccaga

SEQ ID NO: 11260 - DNA, 15 bp, Homo sapiens
cttattatataccag

SEQ ID NO: 11261 - DNA, 15 bp, Homo sapiens
acttattatatacca

SEQ ID NO: 11262 - DNA, 15 bp, Homo sapiens
tacttattatatacc

SEQ ID NO: 11263 - DNA, 15 bp, Homo sapiens
atacttattatatac

SEQ ID NO: 11264 - DNA, 15 bp, Homo sapiens
tatacttattatata

SEQ ID NO: 11265 - DNA, 15 bp, Homo sapiens
ttatacttattatat

SEQ ID NO: 11266 - DNA, 15 bp, Homo sapiens
attatacttattata

SEQ ID NO: 11267 - DNA, 15 bp, Homo sapiens
tattatacttattat

SEQ ID NO: 11268 - DNA, 15 bp, Homo sapiens
atattatacttatta

SEQ ID NO: 11269 - DNA, 15 bp, Homo sapiens
aatattatacttatt

SEQ ID NO: 11270 - DNA, 15 bp, Homo sapiens
aaatattatacttat

SEQ ID NO: 11271 - DNA, 15 bp, Homo sapiens
caaatattatactta

SEQ ID NO: 11272 - DNA, 15 bp, Homo sapiens
tcaaatattatactt

SEQ ID NO: 11273 - DNA, 15 bp, Homo sapiens
atcaaatattatact

SEQ ID NO: 11274 - DNA, 15 bp, Homo sapiens
catcaaatattatac

SEQ ID NO: 11275 - DNA, 15 bp, Homo sapiens
tcatcaaatattata

SEQ ID NO: 11276 - DNA, 15 bp, Homo sapiens
ttcatcaaatattat

SEQ ID NO: 11277 - DNA, 15 bp, Homo sapiens
tttcatcaaatatta

SEQ ID NO: 11278 - DNA, 15 bp, Homo sapiens
ttttcatcaaatatt

SEQ ID NO: 11279 - DNA, 15 bp, Homo sapiens
attttcatcaaatat

SEQ ID NO: 11280 - DNA, 15 bp, Homo sapiens
gattttcatcaaata

SEQ ID NO: 11281 - DNA, 15 bp, Homo sapiens
tgattttcatcaaat

SEQ ID NO: 11282 - DNA, 15 bp, Homo sapiens
ctgattttcatcaaa

SEQ ID NO: 11283 - DNA, 15 bp, Homo sapiens
actgattttcatcaa

SEQ ID NO: 11284 - DNA, 15 bp, Homo sapiens
tactgattttcatca

SEQ ID NO: 11285 - DNA, 15 bp, Homo sapiens
gtactgattttcatc

SEQ ID NO: 11286 - DNA, 15 bp, Homo sapiens
ggtactgattttcat

SEQ ID NO: 11287 - DNA, 15 bp, Homo sapiens
aggtactgattttca

SEQ ID NO: 11288 - DNA, 15 bp, Homo sapiens
aaggtactgattttc

SEQ ID NO: 11289 - DNA, 15 bp, Homo sapiens
aaaggtactgatttt

SEQ ID NO: 11290 - DNA, 15 bp, Homo sapiens
caaaggtactgattt

SEQ ID NO: 11291 - DNA, 15 bp, Homo sapiens
gcaaaggtactgatt

SEQ ID NO: 11292 - DNA, 15 bp, Homo sapiens
ggcaaaggtactgat

SEQ ID NO: 11293 - DNA, 15 bp, Homo sapiens
gggcaaaggtactga

SEQ ID NO: 11294 - DNA, 15 bp, Homo sapiens
ggggcaaaggtactg

SEQ ID NO: 11295 - DNA, 15 bp, Homo sapiens
gggggcaaaggtact

SEQ ID NO: 11296 - DNA, 15 bp, Homo sapiens
tgggggcaaaggtac

SEQ ID NO: 11297 - DNA, 15 bp, Homo sapiens
ctgggggcaaaggta

SEQ ID NO: 11298 - DNA, 15 bp, Homo sapiens
cctgggggcaaaggt

SEQ ID NO: 11299 - DNA, 15 bp, Homo sapiens
acctgggggcaaagg

SEQ ID NO: 11300 - DNA, 15 bp, Homo sapiens
cacctgggggcaaag

SEQ ID NO: 11301 - DNA, 15 bp, Homo sapiens
acacctgggggcaaa

SEQ ID NO: 11302 - DNA, 15 bp, Homo sapiens
cacacctgggggcaa

SEQ ID NO: 11303 - DNA, 15 bp, Homo sapiens
tcacacctgggggca

SEQ ID NO: 11304 - DNA, 15 bp, Homo sapiens
atcacacctgggggc

SEQ ID NO: 11305 - DNA, 15 bp, Homo sapiens
tatcacacctggggg

SEQ ID NO: 11306 - DNA, 15 bp, Homo sapiens
atatcacacctgggg

SEQ ID NO: 11307 - DNA, 15 bp, Homo sapiens
aatatcacacctggg

SEQ ID NO: 11308 - DNA, 15 bp, Homo sapiens
aaatatcacacctgg

SEQ ID NO: 11309 - DNA, 15 bp, Homo sapiens
taaatatcacacctg

SEQ ID NO: 11310 - DNA, 15 bp, Homo sapiens
ttaaatatcacacct

SEQ ID NO: 11311 - DNA, 15 bp, Homo sapiens
cttaaatatcacacc

SEQ ID NO: 11312 - DNA, 15 bp, Homo sapiens
tcttaaatatcacac

SEQ ID NO: 11313 - DNA, 15 bp, Homo sapiens
ttcttaaatatcaca

SEQ ID NO: 11314 - DNA, 15 bp, Homo sapiens
cttcttaaatatcac

SEQ ID NO: 11315 - DNA, 15 bp, Homo sapiens
ccttcttaaatatca

SEQ ID NO: 11316 - DNA, 15 bp, Homo sapiens
accttcttaaatatc

SEQ ID NO: 11317 - DNA, 15 bp, Homo sapiens
gaccttcttaaatat

SEQ ID NO: 11318 - DNA, 15 bp, Homo sapiens
tgaccttcttaaata

SEQ ID NO: 11319 - DNA, 15 bp, Homo sapiens
ttgaccttcttaaat

SEQ ID NO: 11320 - DNA, 15 bp, Homo sapiens
gttgaccttcttaaa

SEQ ID NO: 11321 - DNA, 15 bp, Homo sapiens
agttgaccttcttaa

SEQ ID NO: 11322 - DNA, 15 bp, Homo sapiens
aagttgaccttctta

SEQ ID NO: 11323 - DNA, 15 bp, Homo sapiens
taagttgaccttctt

SEQ ID NO: 11324 - DNA, 15 bp, Homo sapiens
gtaagttgaccttct

SEQ ID NO: 11325 - DNA, 15 bp, Homo sapiens
agtaagttgaccttc

SEQ ID NO: 11326 - DNA, 15 bp, Homo sapiens
tagtaagttgacctt

SEQ ID NO: 11327 - DNA, 15 bp, Homo sapiens
ttagtaagttgacct

SEQ ID NO: 11328 - DNA, 15 bp, Homo sapiens
tttagtaagttgacc

SEQ ID NO: 11329 - DNA, 15 bp, Homo sapiens
atttagtaagttgac

SEQ ID NO: 11330 - DNA, 15 bp, Homo sapiens
gatttagtaagttga

SEQ ID NO: 11331 - DNA, 15 bp, Homo sapiens
tgatttagtaagttg

SEQ ID NO: 11332 - DNA, 15 bp, Homo sapiens
ctgatttagtaagtt

SEQ ID NO: 11333 - DNA, 15 bp, Homo sapiens
actgatttagtaagt

SEQ ID NO: 11334 - DNA, 15 bp, Homo sapiens
cactgatttagtaag

SEQ ID NO: 11335 - DNA, 15 bp, Homo sapiens
tcactgatttagtaa

SEQ ID NO: 11336 - DNA, 15 bp, Homo sapiens
atcactgatttagta

SEQ ID NO: 11337 - DNA, 15 bp, Homo sapiens
catcactgatttagt

SEQ ID NO: 11338 - DNA, 15 bp, Homo sapiens
ccatcactgatttag

SEQ ID NO: 11339 - DNA, 15 bp, Homo sapiens
tccatcactgattta

SEQ ID NO: 11340 - DNA, 15 bp, Homo sapiens
ctccatcactgattt

SEQ ID NO: 11341 - DNA, 15 bp, Homo sapiens
actccatcactgatt

SEQ ID NO: 11342 - DNA, 15 bp, Homo sapiens
aactccatcactgat

SEQ ID NO: 11343 - DNA, 15 bp, Homo sapiens
taactccatcactga

SEQ ID NO: 11344 - DNA, 15 bp, Homo sapiens
ctaactccatcactg

SEQ ID NO: 11345 - DNA, 15 bp, Homo sapiens
actaactccatcact

SEQ ID NO: 11346 - DNA, 15 bp, Homo sapiens
gactaactccatcac

SEQ ID NO: 11347 - DNA, 15 bp, Homo sapiens
ggactaactccatca

SEQ ID NO: 11348 - DNA, 15 bp, Homo sapiens
aggactaactccatc

SEQ ID NO: 11349 - DNA, 15 bp, Homo sapiens
taggactaactccat

SEQ ID NO: 11350 - DNA, 15 bp, Homo sapiens
ttaggactaactcca

SEQ ID NO: 11351 - DNA, 15 bp, Homo sapiens
gttaggactaactcc

SEQ ID NO: 11352 - DNA, 15 bp, Homo sapiens
tgttaggactaactc

SEQ ID NO: 11353 - DNA, 15 bp, Homo sapiens
atgttaggactaact

SEQ ID NO: 11354 - DNA, 15 bp, Homo sapiens
gatgttaggactaac

SEQ ID NO: 11355 - DNA, 15 bp, Homo sapiens
agatgttaggactaa

SEQ ID NO: 11356 - DNA, 15 bp, Homo sapiens
cagatgttaggacta

SEQ ID NO: 11357 - DNA, 15 bp, Homo sapiens
ccagatgttaggact

SEQ ID NO: 11358 - DNA, 15 bp, Homo sapiens
cccagatgttaggac

SEQ ID NO: 11359 - DNA, 15 bp, Homo sapiens
acccagatgttagga

SEQ ID NO: 11360 - DNA, 15 bp, Homo sapiens
cacccagatgttagg

SEQ ID NO: 11361 - DNA, 15 bp, Homo sapiens
acacccagatgttag

SEQ ID NO: 11362 - DNA, 15 bp, Homo sapiens
aacacccagatgtta

SEQ ID NO: 11363 - DNA, 15 bp, Homo sapiens
gaacacccagatgtt

SEQ ID NO: 11364 - DNA, 15 bp, Homo sapiens
agaacacccagatgt

SEQ ID NO: 11365 - DNA, 15 bp, Homo sapiens
cagaacacccagatg

SEQ ID NO: 11366 - DNA, 15 bp, Homo sapiens
tcagaacacccagat

SEQ ID NO: 11367 - DNA, 15 bp, Homo sapiens
gtcagaacacccaga

SEQ ID NO: 11368 - DNA, 15 bp, Homo sapiens
agtcagaacacccag

SEQ ID NO: 11369 - DNA, 15 bp, Homo sapiens
cagtcagaacaccca

SEQ ID NO: 11370 - DNA, 15 bp, Homo sapiens
gcagtcagaacaccc

SEQ ID NO: 11371 - DNA, 15 bp, Homo sapiens
agcagtcagaacacc

SEQ ID NO: 11372 - DNA, 15 bp, Homo sapiens
cagcagtcagaacac

SEQ ID NO: 11373 - DNA, 15 bp, Homo sapiens
gcagcagtcagaaca

SEQ ID NO: 11374 - DNA, 15 bp, Homo sapiens
agcagcagtcagaac

SEQ ID NO: 11375 - DNA, 15 bp, Homo sapiens
tagcagcagtcagaa

SEQ ID NO: 11376 - DNA, 15 bp, Homo sapiens
ctagcagcagtcaga

SEQ ID NO: 11377 - DNA, 15 bp, Homo sapiens
cctagcagcagtcag

SEQ ID NO: 11378 - DNA, 15 bp, Homo sapiens
gcctagcagcagtca

SEQ ID NO: 11379 - DNA, 15 bp, Homo sapiens
ggcctagcagcagtc

SEQ ID NO: 11380 - DNA, 15 bp, Homo sapiens
tggcctagcagcagt

SEQ ID NO: 11381 - DNA, 15 bp, Homo sapiens
ctggcctagcagcag

SEQ ID NO: 11382 - DNA, 15 bp, Homo sapiens
actggcctagcagca

SEQ ID NO: 11383 - DNA, 15 bp, Homo sapiens
tactggcctagcagc

SEQ ID NO: 11384 - DNA, 15 bp, Homo sapiens
atactggcctagcag

SEQ ID NO: 11385 - DNA, 15 bp, Homo sapiens
aatactggcctagca

SEQ ID NO: 11386 - DNA, 15 bp, Homo sapiens
gaatactggcctagc

SEQ ID NO: 11387 - DNA, 15 bp, Homo sapiens
agaatactggcctag

SEQ ID NO: 11388 - DNA, 15 bp, Homo sapiens
aagaatactggccta

SEQ ID NO: 11389 - DNA, 15 bp, Homo sapiens
aaagaatactggcct

SEQ ID NO: 11390 - DNA, 15 bp, Homo sapiens
taaagaatactggcc

SEQ ID NO: 11391 - DNA, 15 bp, Homo sapiens
ataaagaatactggc

SEQ ID NO: 11392 - DNA, 15 bp, Homo sapiens
tataaagaatactgg

SEQ ID NO: 11393 - DNA, 15 bp, Homo sapiens
atataaagaatactg

SEQ ID NO: 11394 - DNA, 15 bp, Homo sapiens
catataaagaatact

SEQ ID NO: 11395 - DNA, 15 bp, Homo sapiens
tcatataaagaatac

SEQ ID NO: 11396 - DNA, 15 bp, Homo sapiens
atcatataaagaata

SEQ ID NO: 11397 - DNA, 15 bp, Homo sapiens
tatcatataaagaat

SEQ ID NO: 11398 - DNA, 15 bp, Homo sapiens
ttatcatataaagaa

SEQ ID NO: 11399 - DNA, 15 bp, Homo sapiens
attatcatataaaga

SEQ ID NO: 11400 - DNA, 15 bp, Homo sapiens
tattatcatataaag

SEQ ID NO: 11401 - DNA, 15 bp, Homo sapiens
ttattatcatataaa

SEQ ID NO: 11402 - DNA, 15 bp, Homo sapiens
cttattatcatataa

SEQ ID NO: 11403 - DNA, 15 bp, Homo sapiens
tcttattatcatata

SEQ ID NO: 11404 - DNA, 15 bp, Homo sapiens
ttcttattatcatat

SEQ ID NO: 11405 - DNA, 15 bp, Homo sapiens
gttcttattatcata

SEQ ID NO: 11406 - DNA, 15 bp, Homo sapiens
agttcttattatcat

SEQ ID NO: 11407 - DNA, 15 bp, Homo sapiens
aagttcttattatca

SEQ ID NO: 11408 - DNA, 15 bp, Homo sapiens
aaagttcttattatc

SEQ ID NO: 11409 - DNA, 15 bp, Homo sapiens
caaagttcttattat

SEQ ID NO: 11410 - DNA, 15 bp, Homo sapiens
acaaagttcttatta

SEQ ID NO: 11411 - DNA, 15 bp, Homo sapiens
gacaaagttcttatt

SEQ ID NO: 11412 - DNA, 15 bp, Homo sapiens
ggacaaagttcttat

SEQ ID NO: 11413 - DNA, 15 bp, Homo sapiens
tggacaaagttctta

SEQ ID NO: 11414 - DNA, 15 bp, Homo sapiens
gtggacaaagttctt

SEQ ID NO: 11415 - DNA, 15 bp, Homo sapiens
tgtggacaaagttct

SEQ ID NO: 11416 - DNA, 15 bp, Homo sapiens
ctgtggacaaagttc

SEQ ID NO: 11417 - DNA, 15 bp, Homo sapiens
tctgtggacaaagtt

SEQ ID NO: 11418 - DNA, 15 bp, Homo sapiens
ttctgtggacaaagt

SEQ ID NO: 11419 - DNA, 15 bp, Homo sapiens
cttctgtggacaaag

SEQ ID NO: 11420 - DNA, 15 bp, Homo sapiens
tcttctgtggacaaa

SEQ ID NO: 11421 - DNA, 15 bp, Homo sapiens
atcttctgtggacaa

SEQ ID NO: 11422 - DNA, 15 bp, Homo sapiens
tatcttctgtggaca

SEQ ID NO: 11423 - DNA, 15 bp, Homo sapiens
atatcttctgtggac

SEQ ID NO: 11424 - DNA, 15 bp, Homo sapiens
gatatcttctgtgga

SEQ ID NO: 11425 - DNA, 15 bp, Homo sapiens
ggatatcttctgtgg

SEQ ID NO: 11426 - DNA, 15 bp, Homo sapiens
gggatatcttctgtg

SEQ ID NO: 11427 - DNA, 15 bp, Homo sapiens
agggatatcttctgt

SEQ ID NO: 11428 - DNA, 15 bp, Homo sapiens
tagggatatcttctg

SEQ ID NO: 11429 - DNA, 15 bp, Homo sapiens
ttagggatatcttct

SEQ ID NO: 11430 - DNA, 15 bp, Homo sapiens
attagggatatcttc

SEQ ID NO: 11431 - DNA, 15 bp, Homo sapiens
tattagggatatctt

SEQ ID NO: 11432 - DNA, 15 bp, Homo sapiens
ttattagggatatct

SEQ ID NO: 11433 - DNA, 15 bp, Homo sapiens
gttattagggatatc

SEQ ID NO: 11434 - DNA, 15 bp, Homo sapiens
tgttattagggatat

SEQ ID NO: 11435 - DNA, 15 bp, Homo sapiens
ttgttattagggata

SEQ ID NO: 11436 - DNA, 15 bp, Homo sapiens
tttgttattagggat

SEQ ID NO: 11437 - DNA, 15 bp, Homo sapiens
ttttgttattaggga

SEQ ID NO: 11438 - DNA, 15 bp, Homo sapiens
tttttgttattaggg

SEQ ID NO: 11439 - DNA, 15 bp, Homo sapiens
ttttttgttattagg

SEQ ID NO: 11440 - DNA, 15 bp, Homo sapiens
cttttttgttattag

SEQ ID NO: 11441 - DNA, 15 bp, Homo sapiens
ccttttttgttatta

SEQ ID NO: 11442 - DNA, 15 bp, Homo sapiens
accttttttgttatt

SEQ ID NO: 11443 - DNA, 15 bp, Homo sapiens
aaccttttttgttat

SEQ ID NO: 11444 - DNA, 15 bp, Homo sapiens
aaaccttttttgtta

SEQ ID NO: 11445 - DNA, 15 bp, Homo sapiens
taaaccttttttgtt

SEQ ID NO: 11446 - DNA, 15 bp, Homo sapiens
ataaaccttttttgt

SEQ ID NO: 11447 - DNA, 15 bp, Homo sapiens
aataaaccttttttg

SEQ ID NO: 11448 - DNA, 15 bp, Homo sapiens
aaataaacctttttt

SEQ ID NO: 11449 - DNA, 15 bp, Homo sapiens
caaataaaccttttt

SEQ ID NO: 11450 - DNA, 15 bp, Homo sapiens
tcaaataaacctttt

SEQ ID NO: 11451 - DNA, 15 bp, Homo sapiens
ttcaaataaaccttt

SEQ ID NO: 11452 - DNA, 15 bp, Homo sapiens
cttcaaataaacctt

SEQ ID NO: 11453 - DNA, 15 bp, Homo sapiens
tcttcaaataaacct

SEQ ID NO: 11454 - DNA, 15 bp, Homo sapiens
ctcttcaaataaacc

SEQ ID NO: 11455 - DNA, 15 bp, Homo sapiens
cctcttcaaataaac

SEQ ID NO: 11456 - DNA, 15 bp, Homo sapiens
tcctcttcaaataaa

SEQ ID NO: 11457 - DNA, 15 bp, Homo sapiens
gtcctcttcaaataa

SEQ ID NO: 11458 - DNA, 15 bp, Homo sapiens
agtcctcttcaaata

SEQ ID NO: 11459 - DNA, 15 bp, Homo sapiens
gagtcctcttcaaat

SEQ ID NO: 11460 - DNA, 15 bp, Homo sapiens
tgagtcctcttcaaa

SEQ ID NO: 11461 - DNA, 15 bp, Homo sapiens
atgagtcctcttcaa

SEQ ID NO: 11462 - DNA, 15 bp, Homo sapiens
catgagtcctcttca

SEQ ID NO: 11463 - DNA, 15 bp, Homo sapiens
acatgagtcctcttc

SEQ ID NO: 11464 - DNA, 15 bp, Homo sapiens
cacatgagtcctctt

SEQ ID NO: 11465 - DNA, 15 bp, Homo sapiens
acacatgagtcctct

SEQ ID NO: 11466 - DNA, 15 bp, Homo sapiens
aacacatgagtcctc

SEQ ID NO: 11467 - DNA, 15 bp, Homo sapiens
gaacacatgagtcct

SEQ ID NO: 11468 - DNA, 15 bp, Homo sapiens
agaacacatgagtcc

SEQ ID NO: 11469 - DNA, 15 bp, Homo sapiens
aagaacacatgagtc

SEQ ID NO: 11470 - DNA, 15 bp, Homo sapiens
aaagaacacatgagt

SEQ ID NO: 11471 - DNA, 15 bp, Homo sapiens
caaagaacacatgag

SEQ ID NO: 11472 - DNA, 15 bp, Homo sapiens
ccaaagaacacatga

SEQ ID NO: 11473 - DNA, 15 bp, Homo sapiens
gccaaagaacacatg

SEQ ID NO: 11474 - DNA, 15 bp, Homo sapiens
agccaaagaacacat

SEQ ID NO: 11475 - DNA, 15 bp, Homo sapiens
cagccaaagaacaca

SEQ ID NO: 11476 - DNA, 15 bp, Homo sapiens
tcagccaaagaacac

SEQ ID NO: 11477 - DNA, 15 bp, Homo sapiens
atcagccaaagaaca

SEQ ID NO: 11478 - DNA, 15 bp, Homo sapiens
aatcagccaaagaac

SEQ ID NO: 11479 - DNA, 15 bp, Homo sapiens
caatcagccaaagaa

SEQ ID NO: 11480 - DNA, 15 bp, Homo sapiens
acaatcagccaaaga

SEQ ID NO: 11481 - DNA, 15 bp, Homo sapiens
cacaatcagccaaag

SEQ ID NO: 11482 - DNA, 15 bp, Homo sapiens
tcacaatcagccaaa

SEQ ID NO: 11483 - DNA, 15 bp, Homo sapiens
ttcacaatcagccaa

SEQ ID NO: 11484 - DNA, 15 bp, Homo sapiens
tttcacaatcagcca

SEQ ID NO: 11485 - DNA, 15 bp, Homo sapiens
ctttcacaatcagcc

SEQ ID NO: 11486 - DNA, 15 bp, Homo sapiens
actttcacaatcagc

SEQ ID NO: 11487 - DNA, 15 bp, Homo sapiens
cactttcacaatcag

SEQ ID NO: 11488 - DNA, 15 bp, Homo sapiens
acactttcacaatca

SEQ ID NO: 11489 - DNA, 15 bp, Homo sapiens
aacactttcacaatc

SEQ ID NO: 11490 - DNA, 15 bp, Homo sapiens
caacactttcacaat

SEQ ID NO: 11491 - DNA, 15 bp, Homo sapiens
gcaacactttcacaa

SEQ ID NO: 11492 - DNA, 15 bp, Homo sapiens
agcaacactttcaca

SEQ ID NO: 11493 - DNA, 15 bp, Homo sapiens
aagcaacactttcac

SEQ ID NO: 11494 - DNA, 15 bp, Homo sapiens
aaagcaacactttca

SEQ ID NO: 11495 - DNA, 15 bp, Homo sapiens
caaagcaacactttc

SEQ ID NO: 11496 - DNA, 15 bp, Homo sapiens
tcaaagcaacacttt

SEQ ID NO: 11497 - DNA, 15 bp, Homo sapiens
ttcaaagcaacactt

SEQ ID NO: 11498 - DNA, 15 bp, Homo sapiens
gttcaaagcaacact

SEQ ID NO: 11499 - DNA, 15 bp, Homo sapiens
agttcaaagcaacac

SEQ ID NO: 11500 - DNA, 15 bp, Homo sapiens
aagttcaaagcaaca

SEQ ID NO: 11501 - DNA, 15 bp, Homo sapiens
gaagttcaaagcaac

SEQ ID NO: 11502 - DNA, 15 bp, Homo sapiens
agaagttcaaagcaa

SEQ ID NO: 11503 - DNA, 15 bp, Homo sapiens
cagaagttcaaagca

SEQ ID NO: 11504 - DNA, 15 bp, Homo sapiens
acagaagttcaaagc

SEQ ID NO: 11505 - DNA, 15 bp, Homo sapiens
aacagaagttcaaag

SEQ ID NO: 11506 - DNA, 15 bp, Homo sapiens
taacagaagttcaaa

SEQ ID NO: 11507 - DNA, 15 bp, Homo sapiens
ctaacagaagttcaa

SEQ ID NO: 11508 - DNA, 15 bp, Homo sapiens
tctaacagaagttca

SEQ ID NO: 11509 - DNA, 15 bp, Homo sapiens
ttctaacagaagttc

SEQ ID NO: 11510 - DNA, 15 bp, Homo sapiens
tttctaacagaagtt

SEQ ID NO: 11511 - DNA, 15 bp, Homo sapiens
ttttctaacagaagt

SEQ ID NO: 11512 - DNA, 15 bp, Homo sapiens
cttttctaacagaag

SEQ ID NO: 11513 - DNA, 15 bp, Homo sapiens
ccttttctaacagaa

SEQ ID NO: 11514 - DNA, 15 bp, Homo sapiens
accttttctaacaga

SEQ ID NO: 11515 - DNA, 15 bp, Homo sapiens
aaccttttctaacag

SEQ ID NO: 11516 - DNA, 15 bp, Homo sapiens
caaccttttctaaca

SEQ ID NO: 11517 - DNA, 15 bp, Homo sapiens
tcaaccttttctaac

SEQ ID NO: 11518 - DNA, 15 bp, Homo sapiens
ttcaaccttttctaa

SEQ ID NO: 11519 - DNA, 15 bp, Homo sapiens
cttcaaccttttcta

SEQ ID NO: 11520 - DNA, 15 bp, Homo sapiens
tcttcaaccttttct

SEQ ID NO: 11521 - DNA, 15 bp, Homo sapiens
atcttcaaccttttc

SEQ ID NO: 11522 - DNA, 15 bp, Homo sapiens
catcttcaacctttt

SEQ ID NO: 11523 - DNA, 15 bp, Homo sapiens
acatcttcaaccttt

SEQ ID NO: 11524 - DNA, 15 bp, Homo sapiens
aacatcttcaacctt

SEQ ID NO: 11525 - DNA, 15 bp, Homo sapiens
aaacatcttcaacct

SEQ ID NO: 11526 - DNA, 15 bp, Homo sapiens
aaaacatcttcaacc

SEQ ID NO: 11527 - DNA, 15 bp, Homo sapiens
gaaaacatcttcaac

SEQ ID NO: 11528 - DNA, 15 bp, Homo sapiens
ggaaaacatcttcaa

SEQ ID NO: 11529 - DNA, 15 bp, Homo sapiens
cggaaaacatcttca

SEQ ID NO: 11530 - DNA, 15 bp, Homo sapiens
acggaaaacatcttc

SEQ ID NO: 11531 - DNA, 15 bp, Homo sapiens
tacggaaaacatctt

SEQ ID NO: 11532 - DNA, 15 bp, Homo sapiens
ttacggaaaacatct

SEQ ID NO: 11533 - DNA, 15 bp, Homo sapiens
cttacggaaaacatc

SEQ ID NO: 11534 - DNA, 15 bp, Homo sapiens
acttacggaaaacat

SEQ ID NO: 11535 - DNA, 15 bp, Homo sapiens
cacttacggaaaaca

SEQ ID NO: 11536 - DNA, 15 bp, Homo sapiens
acacttacggaaaac

SEQ ID NO: 11537 - DNA, 15 bp, Homo sapiens
aacacttacggaaaa

SEQ ID NO: 11538 - DNA, 15 bp, Homo sapiens
aaacacttacggaaa

SEQ ID NO: 11539 - DNA, 15 bp, Homo sapiens
aaaacacttacggaa

SEQ ID NO: 11540 - DNA, 15 bp, Homo sapiens
aaaaacacttacgga

SEQ ID NO: 11541 - DNA, 15 bp, Homo sapiens
taaaaacacttacgg

SEQ ID NO: 11542 - DNA, 15 bp, Homo sapiens
ttaaaaacacttacg

SEQ ID NO: 11543 - DNA, 15 bp, Homo sapiens
attaaaaacacttac

SEQ ID NO: 11544 - DNA, 15 bp, Homo sapiens
tattaaaaacactta

SEQ ID NO: 11545 - DNA, 15 bp, Homo sapiens
gtattaaaaacactt

SEQ ID NO: 11546 - DNA, 15 bp, Homo sapiens
agtattaaaaacact

SEQ ID NO: 11547 - DNA, 15 bp, Homo sapiens
cagtattaaaaacac

SEQ ID NO: 11548 - DNA, 15 bp, Homo sapiens
acagtattaaaaaca

SEQ ID NO: 11549 - DNA, 15 bp, Homo sapiens
tacagtattaaaaac

SEQ ID NO: 11550 - DNA, 15 bp, Homo sapiens
gtacagtattaaaaa

SEQ ID NO: 11551 - DNA, 15 bp, Homo sapiens
cgtacagtattaaaa

SEQ ID NO: 11552 - DNA, 15 bp, Homo sapiens
acgtacagtattaaa

SEQ ID NO: 11553 - DNA, 15 bp, Homo sapiens
tacgtacagtattaa

SEQ ID NO: 11554 - DNA, 15 bp, Homo sapiens
ctacgtacagtatta

SEQ ID NO: 11555 - DNA, 15 bp, Homo sapiens
actacgtacagtatt

SEQ ID NO: 11556 - DNA, 15 bp, Homo sapiens
tactacgtacagtat

SEQ ID NO: 11557 - DNA, 15 bp, Homo sapiens
atactacgtacagta

SEQ ID NO: 11558 - DNA, 15 bp, Homo sapiens
aatactacgtacagt

SEQ ID NO: 11559 - DNA, 15 bp, Homo sapiens
gaatactacgtacag

SEQ ID NO: 11560 - DNA, 15 bp, Homo sapiens
tgaatactacgtaca

SEQ ID NO: 11561 - DNA, 15 bp, Homo sapiens
ctgaatactacgtac

SEQ ID NO: 11562 - DNA, 15 bp, Homo sapiens
tctgaatactacgta

SEQ ID NO: 11563 - DNA, 15 bp, Homo sapiens
ttctgaatactacgt

SEQ ID NO: 11564 - DNA, 15 bp, Homo sapiens
cttctgaatactacg

SEQ ID NO: 11565 - DNA, 15 bp, Homo sapiens
ccttctgaatactac

SEQ ID NO: 11566 - DNA, 15 bp, Homo sapiens
tccttctgaatacta

SEQ ID NO: 11567 - DNA, 15 bp, Homo sapiens
atccttctgaatact

SEQ ID NO: 11568 - DNA, 15 bp, Homo sapiens
catccttctgaatac

SEQ ID NO: 11569 - DNA, 15 bp, Homo sapiens
acatccttctgaata

SEQ ID NO: 11570 - DNA, 15 bp, Homo sapiens
aacatccttctgaat

SEQ ID NO: 11571 - DNA, 15 bp, Homo sapiens
aaacatccttctgaa

SEQ ID NO: 11572 - DNA, 15 bp, Homo sapiens
taaacatccttctga

SEQ ID NO: 11573 - DNA, 15 bp, Homo sapiens
ttaaacatccttctg

SEQ ID NO: 11574 - DNA, 15 bp, Homo sapiens
attaaacatccttct

SEQ ID NO: 11575 - DNA, 15 bp, Homo sapiens
aattaaacatccttc

SEQ ID NO: 11576 - DNA, 15 bp, Homo sapiens
aaattaaacatcctt

SEQ ID NO: 11577 - DNA, 15 bp, Homo sapiens
aaaattaaacatcct

SEQ ID NO: 11578 - DNA, 15 bp, Homo sapiens
aaaaattaaacatcc

SEQ ID NO: 11579 - DNA, 15 bp, Homo sapiens
aaaaaattaaacatc

SEQ ID NO: 11580 - DNA, 15 bp, Homo sapiens
aaaaaaattaaacat

SEQ ID NO: 11581 - DNA, 15 bp, Homo sapiens
aaaaaaaattaaaca

SEQ ID NO: 11582 - DNA, 15 bp, Homo sapiens
aaaaaaaaattaaac

SEQ ID NO: 11583 - DNA, 15 bp, Homo sapiens
aaaaaaaaaattaaa

SEQ ID NO: 11584 - DNA, 15 bp, Homo sapiens
taaaaaaaaaattaa

SEQ ID NO: 11585 - DNA, 15 bp, Homo sapiens
ttaaaaaaaaaatta

SEQ ID NO: 11586 - DNA, 15 bp, Homo sapiens
attaaaaaaaaaatt

SEQ ID NO: 11587 - DNA, 15 bp, Homo sapiens
aattaaaaaaaaaat

SEQ ID NO: 11588 - DNA, 15 bp, Homo sapiens
aaattaaaaaaaaaa

SEQ ID NO: 11589 - DNA, 15 bp, Homo sapiens
aaaattaaaaaaaaa

SEQ ID NO: 11590 - DNA, 15 bp, Homo sapiens
caaaattaaaaaaaa

SEQ ID NO: 11591 - DNA, 15 bp, Homo sapiens
gcaaaattaaaaaaa

SEQ ID NO: 11592 - DNA, 15 bp, Homo sapiens
agcaaaattaaaaaa

SEQ ID NO: 11593 - DNA, 15 bp, Homo sapiens
tagcaaaattaaaaa

SEQ ID NO: 11594 - DNA, 15 bp, Homo sapiens
ctagcaaaattaaaa

SEQ ID NO: 11595 - DNA, 15 bp, Homo sapiens
actagcaaaattaaa

SEQ ID NO: 11596 - DNA, 15 bp, Homo sapiens
tactagcaaaattaa

SEQ ID NO: 11597 - DNA, 15 bp, Homo sapiens
ctactagcaaaatta

SEQ ID NO: 11598 - DNA, 15 bp, Homo sapiens
actactagcaaaatt

SEQ ID NO: 11599 - DNA, 15 bp, Homo sapiens
aactactagcaaaat

SEQ ID NO: 11600 - DNA, 15 bp, Homo sapiens
aaactactagcaaaa

SEQ ID NO: 11601 - DNA, 15 bp, Homo sapiens
aaaactactagcaaa

SEQ ID NO: 11602 - DNA, 15 bp, Homo sapiens
aaaaactactagcaa

SEQ ID NO: 11603 - DNA, 15 bp, Homo sapiens
taaaaactactagca

SEQ ID NO: 11604 - DNA, 15 bp, Homo sapiens
ttaaaaactactagc

SEQ ID NO: 11605 - DNA, 15 bp, Homo sapiens
tttaaaaactactag

SEQ ID NO: 11606 - DNA, 15 bp, Homo sapiens
ctttaaaaactacta

SEQ ID NO: 11607 - DNA, 15 bp, Homo sapiens
actttaaaaactact

SEQ ID NO: 11608 - DNA, 15 bp, Homo sapiens
tactttaaaaactac

SEQ ID NO: 11609 - DNA, 15 bp, Homo sapiens
ttactttaaaaacta

SEQ ID NO: 11610 - DNA, 15 bp, Homo sapiens
attactttaaaaact

SEQ ID NO: 11611 - DNA, 15 bp, Homo sapiens
gattactttaaaaac

SEQ ID NO: 11612 - DNA, 15 bp, Homo sapiens
ggattactttaaaaa

SEQ ID NO: 11613 - DNA, 15 bp, Homo sapiens
aggattactttaaaa

SEQ ID NO: 11614 - DNA, 15 bp, Homo sapiens
aaggattactttaaa

SEQ ID NO: 11615 - DNA, 15 bp, Homo sapiens
aaaggattactttaa

SEQ ID NO: 11616 - DNA, 15 bp, Homo sapiens
aaaaggattacttta

SEQ ID NO: 11617 - DNA, 15 bp, Homo sapiens
aaaaaggattacttt

SEQ ID NO: 11618 - DNA, 15 bp, Homo sapiens
gaaaaaggattactt

SEQ ID NO: 11619 - DNA, 15 bp, Homo sapiens
ggaaaaaggattact

SEQ ID NO: 11620 - DNA, 15 bp, Homo sapiens
aggaaaaaggattac

SEQ ID NO: 11621 - DNA, 15 bp, Homo sapiens
aaggaaaaaggatta

SEQ ID NO: 11622 - DNA, 15 bp, Homo sapiens
aaaggaaaaaggatt

SEQ ID NO: 11623 - DNA, 15 bp, Homo sapiens
taaaggaaaaaggat

SEQ ID NO: 11624 - DNA, 15 bp, Homo sapiens
ttaaaggaaaaagga

SEQ ID NO: 11625 - DNA, 15 bp, Homo sapiens
attaaaggaaaaagg

SEQ ID NO: 11626 - DNA, 15 bp, Homo sapiens
aattaaaggaaaaag

SEQ ID NO: 11627 - DNA, 15 bp, Homo sapiens
taattaaaggaaaaa

SEQ ID NO: 11628 - DNA, 15 bp, Homo sapiens
ataattaaaggaaaa

SEQ ID NO: 11629 - DNA, 15 bp, Homo sapiens
cataattaaaggaaa

SEQ ID NO: 11630 - DNA, 15 bp, Homo sapiens
acataattaaaggaa

SEQ ID NO: 11631 - DNA, 15 bp, Homo sapiens
tacataattaaagga

SEQ ID NO: 11632 - DNA, 15 bp, Homo sapiens
ctacataattaaagg

SEQ ID NO: 11633 - DNA, 15 bp, Homo sapiens
actacataattaaag

SEQ ID NO: 11634 - DNA, 15 bp, Homo sapiens
aactacataattaaa

SEQ ID NO: 11635 - DNA, 15 bp, Homo sapiens
caactacataattaa

SEQ ID NO: 11636 - DNA, 15 bp, Homo sapiens
acaactacataatta

SEQ ID NO: 11637 - DNA, 15 bp, Homo sapiens
aacaactacataatt

SEQ ID NO: 11638 - DNA, 15 bp, Homo sapiens
caacaactacataat

SEQ ID NO: 11639 - DNA, 15 bp, Homo sapiens
tcaacaactacataa

SEQ ID NO: 11640 - DNA, 15 bp, Homo sapiens
ttcaacaactacata

SEQ ID NO: 11641 - DNA, 15 bp, Homo sapiens
gttcaacaactacat

SEQ ID NO: 11642 - DNA, 15 bp, Homo sapiens
agttcaacaactaca

SEQ ID NO: 11643 - DNA, 15 bp, Homo sapiens
cagttcaacaactac

SEQ ID NO: 11644 - DNA, 15 bp, Homo sapiens
acagttcaacaacta

SEQ ID NO: 11645 - DNA, 15 bp, Homo sapiens
aacagttcaacaact

SEQ ID NO: 11646 - DNA, 15 bp, Homo sapiens
caacagttcaacaac

SEQ ID NO: 11647 - DNA, 15 bp, Homo sapiens
ccaacagttcaacaa

SEQ ID NO: 11648 - DNA, 15 bp, Homo sapiens
cccaacagttcaaca

SEQ ID NO: 11649 - DNA, 15 bp, Homo sapiens
tcccaacagttcaac

SEQ ID NO: 11650 - DNA, 15 bp, Homo sapiens
ctcccaacagttcaa

SEQ ID NO: 11651 - DNA, 15 bp, Homo sapiens
actcccaacagttca

SEQ ID NO: 11652 - DNA, 15 bp, Homo sapiens
aactcccaacagttc

SEQ ID NO: 11653 - DNA, 15 bp, Homo sapiens
taactcccaacagtt

SEQ ID NO: 11654 - DNA, 15 bp, Homo sapiens
gtaactcccaacagt

SEQ ID NO: 11655 - DNA, 15 bp, Homo sapiens
agtaactcccaacag

SEQ ID NO: 11656 - DNA, 15 bp, Homo sapiens
aagtaactcccaaca

SEQ ID NO: 11657 - DNA, 15 bp, Homo sapiens
aaagtaactcccaac

SEQ ID NO: 11658 - DNA, 15 bp, Homo sapiens
aaaagtaactcccaa

SEQ ID NO: 11659 - DNA, 15 bp, Homo sapiens
gaaaagtaactccca

SEQ ID NO: 11660 - DNA, 15 bp, Homo sapiens
agaaaagtaactccc

SEQ ID NO: 11661 - DNA, 15 bp, Homo sapiens
gagaaaagtaactcc

SEQ ID NO: 11662 - DNA, 15 bp, Homo sapiens
agagaaaagtaactc

SEQ ID NO: 11663 - DNA, 15 bp, Homo sapiens
aagagaaaagtaact

SEQ ID NO: 11664 - DNA, 15 bp, Homo sapiens
taagagaaaagtaac

SEQ ID NO: 11665 - DNA, 15 bp, Homo sapiens
gtaagagaaaagtaa

SEQ ID NO: 11666 - DNA, 15 bp, Homo sapiens
agtaagagaaaagta

SEQ ID NO: 11667 - DNA, 15 bp, Homo sapiens
tagtaagagaaaagt

SEQ ID NO: 11668 - DNA, 15 bp, Homo sapiens
atagtaagagaaaag

SEQ ID NO: 11669 - DNA, 15 bp, Homo sapiens
aatagtaagagaaaa

SEQ ID NO: 11670 - DNA, 15 bp, Homo sapiens
aaatagtaagagaaa

SEQ ID NO: 11671 - DNA, 15 bp, Homo sapiens
aaaatagtaagagaa

SEQ ID NO: 11672 - DNA, 15 bp, Homo sapiens
caaaatagtaagaga

SEQ ID NO: 11673 - DNA, 15 bp, Homo sapiens
acaaaatagtaagag

SEQ ID NO: 11674 - DNA, 15 bp, Homo sapiens
aacaaaatagtaaga

SEQ ID NO: 11675 - DNA, 15 bp, Homo sapiens
taacaaaatagtaag

SEQ ID NO: 11676 - DNA, 15 bp, Homo sapiens
ataacaaaatagtaa

SEQ ID NO: 11677 - DNA, 15 bp, Homo sapiens
aataacaaaatagta

SEQ ID NO: 11678 - DNA, 15 bp, Homo sapiens
aaataacaaaatagt

SEQ ID NO: 11679 - DNA, 15 bp, Homo sapiens
taaataacaaaatag

SEQ ID NO: 11680 - DNA, 15 bp, Homo sapiens
ttaaataacaaaata

SEQ ID NO: 11681 - DNA, 15 bp, Homo sapiens
attaaataacaaaat

SEQ ID NO: 11682 - DNA, 15 bp, Homo sapiens
cattaaataacaaaa

SEQ ID NO: 11683 - DNA, 15 bp, Homo sapiens
acattaaataacaaa

SEQ ID NO: 11684 - DNA, 15 bp, Homo sapiens
tacattaaataacaa

SEQ ID NO: 11685 - DNA, 15 bp, Homo sapiens
atacattaaataaca

SEQ ID NO: 11686 - DNA, 15 bp, Homo sapiens
aatacattaaataac

SEQ ID NO: 11687 - DNA, 15 bp, Homo sapiens
gaatacattaaataa

SEQ ID NO: 11688 - DNA, 15 bp, Homo sapiens
agaatacattaaata

SEQ ID NO: 11689 - DNA, 15 bp, Homo sapiens
aagaatacattaaat

SEQ ID NO: 11690 - DNA, 15 bp, Homo sapiens
aaagaatacattaaa

SEQ ID NO: 11691 - DNA, 15 bp, Homo sapiens
caaagaatacattaa

SEQ ID NO: 11692 - DNA, 15 bp, Homo sapiens
tcaaagaatacatta

SEQ ID NO: 11693 - DNA, 15 bp, Homo sapiens
gtcaaagaatacatt

SEQ ID NO: 11694 - DNA, 15 bp, Homo sapiens
ggtcaaagaatacat

SEQ ID NO: 11695 - DNA, 15 bp, Homo sapiens
aggtcaaagaataca

SEQ ID NO: 11696 - DNA, 15 bp, Homo sapiens
aaggtcaaagaatac

SEQ ID NO: 11697 - DNA, 15 bp, Homo sapiens
taaggtcaaagaata

SEQ ID NO: 11698 - DNA, 15 bp, Homo sapiens
ataaggtcaaagaat

SEQ ID NO: 11699 - DNA, 15 bp, Homo sapiens
cataaggtcaaagaa

SEQ ID NO: 11700 - DNA, 15 bp, Homo sapiens
gcataaggtcaaaga

SEQ ID NO: 11701 - DNA, 15 bp, Homo sapiens
agcataaggtcaaag

SEQ ID NO: 11702 - DNA, 15 bp, Homo sapiens
aagcataaggtcaaa

SEQ ID NO: 11703 - DNA, 15 bp, Homo sapiens
aaagcataaggtcaa

SEQ ID NO: 11704 - DNA, 15 bp, Homo sapiens
aaaagcataaggtca

SEQ ID NO: 11705 - DNA, 15 bp, Homo sapiens
aaaaagcataaggtc

SEQ ID NO: 11706 - DNA, 15 bp, Homo sapiens
aaaaaagcataaggt

SEQ ID NO: 11707 - DNA, 15 bp, Homo sapiens
taaaaaagcataagg

SEQ ID NO: 11708 - DNA, 15 bp, Homo sapiens
ataaaaaagcataag

SEQ ID NO: 11709 - DNA, 15 bp, Homo sapiens
aataaaaaagcataa

SEQ ID NO: 11710 - DNA, 15 bp, Homo sapiens
gaataaaaaagcata

SEQ ID NO: 11711 - DNA, 15 bp, Homo sapiens
agaataaaaaagcat

SEQ ID NO: 11712 - DNA, 15 bp, Homo sapiens
tagaataaaaaagca

SEQ ID NO: 11713 - DNA, 15 bp, Homo sapiens
ttagaataaaaaagc

SEQ ID NO: 11714 - DNA, 15 bp, Homo sapiens
tttagaataaaaaag

SEQ ID NO: 11715 - DNA, 15 bp, Homo sapiens
ctttagaataaaaaa

SEQ ID NO: 11716 - DNA, 15 bp, Homo sapiens
gctttagaataaaaa

SEQ ID NO: 11717 - DNA, 15 bp, Homo sapiens
agctttagaataaaa

SEQ ID NO: 11718 - DNA, 15 bp, Homo sapiens
cagctttagaataaa

SEQ ID NO: 11719 - DNA, 15 bp, Homo sapiens
gcagctttagaataa

SEQ ID NO: 11720 - DNA, 15 bp, Homo sapiens
agcagctttagaata

SEQ ID NO: 11721 - DNA, 15 bp, Homo sapiens
aagcagctttagaat

SEQ ID NO: 11722 - DNA, 15 bp, Homo sapiens
aaagcagctttagaa

SEQ ID NO: 11723 - DNA, 15 bp, Homo sapiens
aaaagcagctttaga

SEQ ID NO: 11724 - DNA, 15 bp, Homo sapiens
taaaagcagctttag

SEQ ID NO: 11725 - DNA, 15 bp, Homo sapiens
ataaaagcagcttta

SEQ ID NO: 11726 - DNA, 15 bp, Homo sapiens
aataaaagcagcttt

SEQ ID NO: 11727 - DNA, 15 bp, Homo sapiens
taataaaagcagctt

SEQ ID NO: 11728 - DNA, 15 bp, Homo sapiens
ataataaaagcagct

SEQ ID NO: 11729 - DNA, 15 bp, Homo sapiens
tataataaaagcagc

SEQ ID NO: 11730 - DNA, 15 bp, Homo sapiens
ctataataaaagcag

SEQ ID NO: 11731 - DNA, 15 bp, Homo sapiens
actataataaaagca

SEQ ID NO: 11732 - DNA, 15 bp, Homo sapiens
gactataataaaagc

SEQ ID NO: 11733 - DNA, 15 bp, Homo sapiens
tgactataataaaag

SEQ ID NO: 11734 - DNA, 15 bp, Homo sapiens
ctgactataataaaa

SEQ ID NO: 11735 - DNA, 15 bp, Homo sapiens
tctgactataataaa

SEQ ID NO: 11736 - DNA, 15 bp, Homo sapiens
atctgactataataa

SEQ ID NO: 11737 - DNA, 15 bp, Homo sapiens
tatctgactataata

SEQ ID NO: 11738 - DNA, 15 bp, Homo sapiens
atatctgactataat

SEQ ID NO: 11739 - DNA, 15 bp, Homo sapiens
catatctgactataa

SEQ ID NO: 11740 - DNA, 15 bp, Homo sapiens
tcatatctgactata

SEQ ID NO: 11741 - DNA, 15 bp, Homo sapiens
atcatatctgactat

SEQ ID NO: 11742 - DNA, 15 bp, Homo sapiens
catcatatctgacta

SEQ ID NO: 11743 - DNA, 15 bp, Homo sapiens
tcatcatatctgact

SEQ ID NO: 11744 - DNA, 15 bp, Homo sapiens
ttcatcatatctgac

SEQ ID NO: 11745 - DNA, 15 bp, Homo sapiens
cttcatcatatctga

SEQ ID NO: 11746 - DNA, 15 bp, Homo sapiens
acttcatcatatctg

SEQ ID NO: 11747 - DNA, 15 bp, Homo sapiens
aacttcatcatatct

SEQ ID NO: 11748 - DNA, 15 bp, Homo sapiens
taacttcatcatatc

SEQ ID NO: 11749 - DNA, 15 bp, Homo sapiens
ttaacttcatcatat

SEQ ID NO: 11750 - DNA, 15 bp, Homo sapiens
tttaacttcatcata

SEQ ID NO: 11751 - DNA, 15 bp, Homo sapiens
atttaacttcatcat

SEQ ID NO: 11752 - DNA, 15 bp, Homo sapiens
catttaacttcatca

SEQ ID NO: 11753 - DNA, 15 bp, Homo sapiens
acatttaacttcatc

SEQ ID NO: 11754 - DNA, 15 bp, Homo sapiens
tacatttaacttcat

SEQ ID NO: 11755 - DNA, 15 bp, Homo sapiens
gtacatttaacttca

SEQ ID NO: 11756 - DNA, 15 bp, Homo sapiens
tgtacatttaacttc

SEQ ID NO: 11757 - DNA, 15 bp, Homo sapiens
ttgtacatttaactt

SEQ ID NO: 11758 - DNA, 15 bp, Homo sapiens
attgtacatttaact

SEQ ID NO: 11759 - DNA, 15 bp, Homo sapiens
cattgtacatttaac

SEQ ID NO: 11760 - DNA, 15 bp, Homo sapiens
acattgtacatttaa

SEQ ID NO: 11761 - DNA, 15 bp, Homo sapiens
tacattgtacattta

SEQ ID NO: 11762 - DNA, 15 bp, Homo sapiens
ttacattgtacattt

SEQ ID NO: 11763 - DNA, 15 bp, Homo sapiens
tttacattgtacatt

SEQ ID NO: 11764 - DNA, 15 bp, Homo sapiens
ttttacattgtacat

SEQ ID NO: 11765 - DNA, 15 bp, Homo sapiens
attttacattgtaca

SEQ ID NO: 11766 - DNA, 15 bp, Homo sapiens
aattttacattgtac

SEQ ID NO: 11767 - DNA, 15 bp, Homo sapiens
caattttacattgta

SEQ ID NO: 11768 - DNA, 15 bp, Homo sapiens
gcaattttacattgt

SEQ ID NO: 11769 - DNA, 15 bp, Homo sapiens
tgcaattttacattg

SEQ ID NO: 11770 - DNA, 15 bp, Homo sapiens
ttgcaattttacatt

SEQ ID NO: 11771 - DNA, 15 bp, Homo sapiens
tttgcaattttacat

SEQ ID NO: 11772 - DNA, 15 bp, Homo sapiens
atttgcaattttaca

SEQ ID NO: 11773 - DNA, 15 bp, Homo sapiens
aatttgcaattttac

SEQ ID NO: 11774 - DNA, 15 bp, Homo sapiens
aaatttgcaatttta

SEQ ID NO: 11775 - DNA, 15 bp, Homo sapiens
gaaatttgcaatttt

SEQ ID NO: 11776 - DNA, 15 bp, Homo sapiens
ggaaatttgcaattt

SEQ ID NO: 11777 - DNA, 15 bp, Homo sapiens
tggaaatttgcaatt

SEQ ID NO: 11778 - DNA, 15 bp, Homo sapiens
ttggaaatttgcaat

SEQ ID NO: 11779 - DNA, 15 bp, Homo sapiens
gttggaaatttgcaa

SEQ ID NO: 11780 - DNA, 15 bp, Homo sapiens
cgttggaaatttgca

SEQ ID NO: 11781 - DNA, 15 bp, Homo sapiens
tcgttggaaatttgc

SEQ ID NO: 11782 - DNA, 15 bp, Homo sapiens
ctcgttggaaatttg

SEQ ID NO: 11783 - DNA, 15 bp, Homo sapiens
gctcgttggaaattt

SEQ ID NO: 11784 - DNA, 15 bp, Homo sapiens
agctcgttggaaatt

SEQ ID NO: 11785 - DNA, 15 bp, Homo sapiens
tagctcgttggaaat

SEQ ID NO: 11786 - DNA, 15 bp, Homo sapiens
atagctcgttggaaa

SEQ ID NO: 11787 - DNA, 15 bp, Homo sapiens
tatagctcgttggaa

SEQ ID NO: 11788 - DNA, 15 bp, Homo sapiens
gtatagctcgttgga

SEQ ID NO: 11789 - DNA, 15 bp, Homo sapiens
tgtatagctcgttgg

SEQ ID NO: 11790 - DNA, 15 bp, Homo sapiens
ttgtatagctcgttg

SEQ ID NO: 11791 - DNA, 15 bp, Homo sapiens
tttgtatagctcgtt

SEQ ID NO: 11792 - DNA, 15 bp, Homo sapiens
gtttgtatagctcgt

SEQ ID NO: 11793 - DNA, 15 bp, Homo sapiens
agtttgtatagctcg

SEQ ID NO: 11794 - DNA, 15 bp, Homo sapiens
aagtttgtatagctc

SEQ ID NO: 11795 - DNA, 15 bp, Homo sapiens
taagtttgtatagct

SEQ ID NO: 11796 - DNA, 15 bp, Homo sapiens
ttaagtttgtatagc

SEQ ID NO: 11797 - DNA, 15 bp, Homo sapiens
tttaagtttgtatag

SEQ ID NO: 11798 - DNA, 15 bp, Homo sapiens
atttaagtttgtata

SEQ ID NO: 11799 - DNA, 15 bp, Homo sapiens
tatttaagtttgtat

SEQ ID NO: 11800 - DNA, 15 bp, Homo sapiens
atatttaagtttgta

SEQ ID NO: 11801 - DNA, 15 bp, Homo sapiens
aatatttaagtttgt

SEQ ID NO: 11802 - DNA, 15 bp, Homo sapiens
aaatatttaagtttg

SEQ ID NO: 11803 - DNA, 15 bp, Homo sapiens
gaaatatttaagttt

SEQ ID NO: 11804 - DNA, 15 bp, Homo sapiens
agaaatatttaagtt

SEQ ID NO: 11805 - DNA, 15 bp, Homo sapiens
tagaaatatttaagt

SEQ ID NO: 11806 - DNA, 15 bp, Homo sapiens
ttagaaatatttaag

SEQ ID NO: 11807 - DNA, 15 bp, Homo sapiens
cttagaaatatttaa

SEQ ID NO: 11808 - DNA, 15 bp, Homo sapiens
acttagaaatattta

SEQ ID NO: 11809 - DNA, 15 bp, Homo sapiens
tacttagaaatattt

SEQ ID NO: 11810 - DNA, 15 bp, Homo sapiens
ttacttagaaatatt

SEQ ID NO: 11811 - DNA, 15 bp, Homo sapiens
tttacttagaaatat

SEQ ID NO: 11812 - DNA, 15 bp, Homo sapiens
ctttacttagaaata

SEQ ID NO: 11813 - DNA, 15 bp, Homo sapiens
tctttacttagaaat

SEQ ID NO: 11814 - DNA, 15 bp, Homo sapiens
ttctttacttagaaa

SEQ ID NO: 11815 - DNA, 15 bp, Homo sapiens
tttctttacttagaa

SEQ ID NO: 11816 - DNA, 15 bp, Homo sapiens
ttttctttacttaga

SEQ ID NO: 11817 - DNA, 15 bp, Homo sapiens
attttctttacttag

SEQ ID NO: 11818 - DNA, 15 bp, Homo sapiens
tattttctttactta

SEQ ID NO: 11819 - DNA, 15 bp, Homo sapiens
ctattttctttactt

SEQ ID NO: 11820 - DNA, 15 bp, Homo sapiens
cctattttctttact

SEQ ID NO: 11821 - DNA, 15 bp, Homo sapiens
ccctattttctttac

SEQ ID NO: 11822 - DNA, 15 bp, Homo sapiens
gccctattttcttta

SEQ ID NO: 11823 - DNA, 15 bp, Homo sapiens
agccctattttcttt

SEQ ID NO: 11824 - DNA, 15 bp, Homo sapiens
cagccctattttctt

SEQ ID NO: 11825 - DNA, 15 bp, Homo sapiens
tcagccctattttct

SEQ ID NO: 11826 - DNA, 15 bp, Homo sapiens
gtcagccctattttc

SEQ ID NO: 11827 - DNA, 15 bp, Homo sapiens
agtcagccctatttt

SEQ ID NO: 11828 - DNA, 15 bp, Homo sapiens
gagtcagccctattt

SEQ ID NO: 11829 - DNA, 15 bp, Homo sapiens
agagtcagccctatt

SEQ ID NO: 11830 - DNA, 15 bp, Homo sapiens
tagagtcagccctat

SEQ ID NO: 11831 - DNA, 15 bp, Homo sapiens
ttagagtcagcccta

SEQ ID NO: 11832 - DNA, 15 bp, Homo sapiens
cttagagtcagccct

SEQ ID NO: 11833 - DNA, 15 bp, Homo sapiens
ccttagagtcagccc

SEQ ID NO: 11834 - DNA, 15 bp, Homo sapiens
accttagagtcagcc

SEQ ID NO: 11835 - DNA, 15 bp, Homo sapiens
aaccttagagtcagc

SEQ ID NO: 11836 - DNA, 15 bp, Homo sapiens
gaaccttagagtcag

SEQ ID NO: 11837 - DNA, 15 bp, Homo sapiens
agaaccttagagtca

SEQ ID NO: 11838 - DNA, 15 bp, Homo sapiens
aagaaccttagagtc

SEQ ID NO: 11839 - DNA, 15 bp, Homo sapiens
aaagaaccttagagt

SEQ ID NO: 11840 - DNA, 15 bp, Homo sapiens
caaagaaccttagag

SEQ ID NO: 11841 - DNA, 15 bp, Homo sapiens
tcaaagaaccttaga

SEQ ID NO: 11842 - DNA, 15 bp, Homo sapiens
atcaaagaaccttag

SEQ ID NO: 11843 - DNA, 15 bp, Homo sapiens
gatcaaagaacctta

SEQ ID NO: 11844 - DNA, 15 bp, Homo sapiens
ggatcaaagaacctt

SEQ ID NO: 11845 - DNA, 15 bp, Homo sapiens
tggatcaaagaacct

SEQ ID NO: 11846 - DNA, 15 bp, Homo sapiens
atggatcaaagaacc

SEQ ID NO: 11847 - DNA, 15 bp, Homo sapiens
catggatcaaagaac

SEQ ID NO: 11848 - DNA, 15 bp, Homo sapiens
acatggatcaaagaa

SEQ ID NO: 11849 - DNA, 15 bp, Homo sapiens
cacatggatcaaaga

SEQ ID NO: 11850 - DNA, 15 bp, Homo sapiens
acacatggatcaaag

SEQ ID NO: 11851 - DNA, 15 bp, Homo sapiens
aacacatggatcaaa

SEQ ID NO: 11852 - DNA, 15 bp, Homo sapiens
caacacatggatcaa

SEQ ID NO: 11853 - DNA, 15 bp, Homo sapiens
gcaacacatggatca

SEQ ID NO: 11854 - DNA, 15 bp, Homo sapiens
tgcaacacatggatc

SEQ ID NO: 11855 - DNA, 15 bp, Homo sapiens
atgcaacacatggat

SEQ ID NO: 11856 - DNA, 15 bp, Homo sapiens
aatgcaacacatgga

SEQ ID NO: 11857 - DNA, 15 bp, Homo sapiens
gaatgcaacacatgg

SEQ ID NO: 11858 - DNA, 15 bp, Homo sapiens
agaatgcaacacatg

SEQ ID NO: 11859 - DNA, 15 bp, Homo sapiens
aagaatgcaacacat

SEQ ID NO: 11860 - DNA, 15 bp, Homo sapiens
aaagaatgcaacaca

SEQ ID NO: 11861 - DNA, 15 bp, Homo sapiens
aaaagaatgcaacac

SEQ ID NO: 11862 - DNA, 15 bp, Homo sapiens
gaaaagaatgcaaca

SEQ ID NO: 11863 - DNA, 15 bp, Homo sapiens
agaaaagaatgcaac

SEQ ID NO: 11864 - DNA, 15 bp, Homo sapiens
tagaaaagaatgcaa

SEQ ID NO: 11865 - DNA, 15 bp, Homo sapiens
ctagaaaagaatgca

SEQ ID NO: 11866 - DNA, 15 bp, Homo sapiens
cctagaaaagaatgc

SEQ ID NO: 11867 - DNA, 15 bp, Homo sapiens
gcctagaaaagaatg

SEQ ID NO: 11868 - DNA, 15 bp, Homo sapiens
ggcctagaaaagaat

SEQ ID NO: 11869 - DNA, 15 bp, Homo sapiens
gggcctagaaaagaa

SEQ ID NO: 11870 - DNA, 15 bp, Homo sapiens
agggcctagaaaaga

SEQ ID NO: 11871 - DNA, 15 bp, Homo sapiens
tagggcctagaaaag

SEQ ID NO: 11872 - DNA, 15 bp, Homo sapiens
ttagggcctagaaaa

SEQ ID NO: 11873 - DNA, 15 bp, Homo sapiens
tttagggcctagaaa

SEQ ID NO: 11874 - DNA, 15 bp, Homo sapiens
atttagggcctagaa

SEQ ID NO: 11875 - DNA, 15 bp, Homo sapiens
aatttagggcctaga

SEQ ID NO: 11876 - DNA, 15 bp, Homo sapiens
aaatttagggcctag

SEQ ID NO: 11877 - DNA, 15 bp, Homo sapiens
caaatttagggccta

SEQ ID NO: 11878 - DNA, 15 bp, Homo sapiens
gcaaatttagggcct

SEQ ID NO: 11879 - DNA, 15 bp, Homo sapiens
agcaaatttagggcc

SEQ ID NO: 11880 - DNA, 15 bp, Homo sapiens
tagcaaatttagggc

SEQ ID NO: 11881 - DNA, 15 bp, Homo sapiens
atagcaaatttaggg

SEQ ID NO: 11882 - DNA, 15 bp, Homo sapiens
catagcaaatttagg

SEQ ID NO: 11883 - DNA, 15 bp, Homo sapiens
gcatagcaaatttag

SEQ ID NO: 11884 - DNA, 15 bp, Homo sapiens
ggcatagcaaattta

SEQ ID NO: 11885 - DNA, 15 bp, Homo sapiens
tggcatagcaaattt

SEQ ID NO: 11886 - DNA, 15 bp, Homo sapiens
ctggcatagcaaatt

SEQ ID NO: 11887 - DNA, 15 bp, Homo sapiens
gctggcatagcaaat

SEQ ID NO: 11888 - DNA, 15 bp, Homo sapiens
ggctggcatagcaaa

SEQ ID NO: 11889 - DNA, 15 bp, Homo sapiens
aggctggcatagcaa

SEQ ID NO: 11890 - DNA, 15 bp, Homo sapiens
caggctggcatagca

SEQ ID NO: 11891 - DNA, 15 bp, Homo sapiens
acaggctggcatagc

SEQ ID NO: 11892 - DNA, 15 bp, Homo sapiens
aacaggctggcatag

SEQ ID NO: 11893 - DNA, 15 bp, Homo sapiens
caacaggctggcata

SEQ ID NO: 11894 - DNA, 15 bp, Homo sapiens
tcaacaggctggcat

SEQ ID NO: 11895 - DNA, 15 bp, Homo sapiens
ttcaacaggctggca

SEQ ID NO: 11896 - DNA, 15 bp, Homo sapiens
attcaacaggctggc

SEQ ID NO: 11897 - DNA, 15 bp, Homo sapiens
aattcaacaggctgg

SEQ ID NO: 11898 - DNA, 15 bp, Homo sapiens
taattcaacaggctg

SEQ ID NO: 11899 - DNA, 15 bp, Homo sapiens
ttaattcaacaggct

SEQ ID NO: 11900 - DNA, 15 bp, Homo sapiens
tttaattcaacaggc

SEQ ID NO: 11901 - DNA, 15 bp, Homo sapiens
ctttaattcaacagg

SEQ ID NO: 11902 - DNA, 15 bp, Homo sapiens
actttaattcaacag

SEQ ID NO: 11903 - DNA, 15 bp, Homo sapiens
cactttaattcaaca

SEQ ID NO: 11904 - DNA, 15 bp, Homo sapiens
gcactttaattcaac

SEQ ID NO: 11905 - DNA, 15 bp, Homo sapiens
agcactttaattcaa

SEQ ID NO: 11906 - DNA, 15 bp, Homo sapiens
aagcactttaattca

SEQ ID NO: 11907 - DNA, 15 bp, Homo sapiens
aaagcactttaattc

SEQ ID NO: 11908 - DNA, 15 bp, Homo sapiens
taaagcactttaatt

SEQ ID NO: 11909 - DNA, 15 bp, Homo sapiens
ataaagcactttaat

SEQ ID NO: 11910 - DNA, 15 bp, Homo sapiens
aataaagcactttaa

SEQ ID NO: 11911 - DNA, 15 bp, Homo sapiens
aaataaagcacttta

SEQ ID NO: 11912 - DNA, 15 bp, Homo sapiens
taaataaagcacttt

SEQ ID NO: 11913 - DNA, 15 bp, Homo sapiens
ataaataaagcactt

SEQ ID NO: 11914 - DNA, 15 bp, Homo sapiens
gataaataaagcact

SEQ ID NO: 11915 - DNA, 15 bp, Homo sapiens
agataaataaagcac

SEQ ID NO: 11916 - DNA, 15 bp, Homo sapiens
tagataaataaagca

SEQ ID NO: 11917 - DNA, 15 bp, Homo sapiens
ttagataaataaagc

SEQ ID NO: 11918 - DNA, 15 bp, Homo sapiens
tttagataaataaag

SEQ ID NO: 11919 - DNA, 15 bp, Homo sapiens
atttagataaataaa

SEQ ID NO: 11920 - DNA, 15 bp, Homo sapiens
aatttagataaataa

SEQ ID NO: 11921 - DNA, 15 bp, Homo sapiens
taatttagataaata

SEQ ID NO: 11922 - DNA, 15 bp, Homo sapiens
ctaatttagataaat

SEQ ID NO: 11923 - DNA, 15 bp, Homo sapiens
tctaatttagataaa

SEQ ID NO: 11924 - DNA, 15 bp, Homo sapiens
ttctaatttagataa

SEQ ID NO: 11925 - DNA, 15 bp, Homo sapiens
tttctaatttagata

SEQ ID NO: 11926 - DNA, 15 bp, Homo sapiens
gtttctaatttagat

SEQ ID NO: 11927 - DNA, 15 bp, Homo sapiens
agtttctaatttaga

SEQ ID NO: 11928 - DNA, 15 bp, Homo sapiens
aagtttctaatttag

SEQ ID NO: 11929 - DNA, 15 bp, Homo sapiens
caagtttctaattta

SEQ ID NO: 11930 - DNA, 15 bp, Homo sapiens
acaagtttctaattt

SEQ ID NO: 11931 - DNA, 15 bp, Homo sapiens
tacaagtttctaatt

SEQ ID NO: 11932 - DNA, 15 bp, Homo sapiens
atacaagtttctaat

SEQ ID NO: 11933 - DNA, 15 bp, Homo sapiens
aatacaagtttctaa

SEQ ID NO: 11934 - DNA, 15 bp, Homo sapiens
taatacaagtttcta

SEQ ID NO: 11935 - DNA, 15 bp, Homo sapiens
ttaatacaagtttct

SEQ ID NO: 11936 - DNA, 15 bp, Homo sapiens
tttaatacaagtttc

SEQ ID NO: 11937 - DNA, 15 bp, Homo sapiens
ctttaatacaagttt

SEQ ID NO: 11938 - DNA, 15 bp, Homo sapiens
actttaatacaagtt

SEQ ID NO: 11939 - DNA, 15 bp, Homo sapiens
cactttaatacaagt

SEQ ID NO: 11940 - DNA, 15 bp, Homo sapiens
tcactttaatacaag

SEQ ID NO: 11941 - DNA, 15 bp, Homo sapiens
ttcactttaatacaa

SEQ ID NO: 11942 - DNA, 15 bp, Homo sapiens
cttcactttaataca

SEQ ID NO: 11943 - DNA, 15 bp, Homo sapiens
acttcactttaatac

SEQ ID NO: 11944 - DNA, 15 bp, Homo sapiens
aacttcactttaata

SEQ ID NO: 11945 - DNA, 15 bp, Homo sapiens
aaacttcactttaat

SEQ ID NO: 11946 - DNA, 15 bp, Homo sapiens
aaaacttcactttaa

SEQ ID NO: 11947 - DNA, 15 bp, Homo sapiens
taaaacttcacttta

SEQ ID NO: 11948 - DNA, 15 bp, Homo sapiens
ctaaaacttcacttt

SEQ ID NO: 11949 - DNA, 15 bp, Homo sapiens
tctaaaacttcactt

SEQ ID NO: 11950 - DNA, 15 bp, Homo sapiens
ttctaaaacttcact

SEQ ID NO: 11951 - DNA, 15 bp, Homo sapiens
tttctaaaacttcac

SEQ ID NO: 11952 - DNA, 15 bp, Homo sapiens
ttttctaaaacttca

SEQ ID NO: 11953 - DNA, 15 bp, Homo sapiens
tttttctaaaacttc

SEQ ID NO: 11954 - DNA, 15 bp, Homo sapiens
ttttttctaaaactt

SEQ ID NO: 11955 - DNA, 15 bp, Homo sapiens
tttttttctaaaact

SEQ ID NO: 11956 - DNA, 15 bp, Homo sapiens
ctttttttctaaaac

SEQ ID NO: 11957 - DNA, 15 bp, Homo sapiens
tctttttttctaaaa

SEQ ID NO: 11958 - DNA, 15 bp, Homo sapiens
ttctttttttctaaa

SEQ ID NO: 11959 - DNA, 15 bp, Homo sapiens
tttctttttttctaa

SEQ ID NO: 11960 - DNA, 15 bp, Homo sapiens
gtttctttttttcta

SEQ ID NO: 11961 - DNA, 15 bp, Homo sapiens
tgtttctttttttct

SEQ ID NO: 11962 - DNA, 15 bp, Homo sapiens
ttgtttctttttttc

SEQ ID NO: 11963 - DNA, 15 bp, Homo sapiens
tttgtttcttttttt

SEQ ID NO: 11964 - DNA, 15 bp, Homo sapiens
ttttgtttctttttt

SEQ ID NO: 11965 - DNA, 15 bp, Homo sapiens
attttgtttcttttt

SEQ ID NO: 11966 - DNA, 15 bp, Homo sapiens
gattttgtttctttt

SEQ ID NO: 11967 - DNA, 15 bp, Homo sapiens
cgattttgtttcttt

SEQ ID NO: 11968 - DNA, 15 bp, Homo sapiens
ccgattttgtttctt

SEQ ID NO: 11969 - DNA, 15 bp, Homo sapiens
tccgattttgtttct

SEQ ID NO: 11970 - DNA, 15 bp, Homo sapiens
ttccgattttgtttc

SEQ ID NO: 11971 - DNA, 15 bp, Homo sapiens
attccgattttgttt

SEQ ID NO: 11972 - DNA, 15 bp, Homo sapiens
cattccgattttgtt

SEQ ID NO: 11973 - DNA, 15 bp, Homo sapiens
ccattccgattttgt

SEQ ID NO: 11974 - DNA, 15 bp, Homo sapiens
tccattccgattttg

SEQ ID NO: 11975 - DNA, 15 bp, Homo sapiens
ctccattccgatttt

SEQ ID NO: 11976 - DNA, 15 bp, Homo sapiens
actccattccgattt

SEQ ID NO: 11977 - DNA, 15 bp, Homo sapiens
aactccattccgatt

SEQ ID NO: 11978 - DNA, 15 bp, Homo sapiens
aaactccattccgat

SEQ ID NO: 11979 - DNA, 15 bp, Homo sapiens
aaaactccattccga

SEQ ID NO: 11980 - DNA, 15 bp, Homo sapiens
taaaactccattccg

SEQ ID NO: 11981 - DNA, 15 bp, Homo sapiens
ctaaaactccattcc

SEQ ID NO: 11982 - DNA, 15 bp, Homo sapiens
cctaaaactccattc

SEQ ID NO: 11983 - DNA, 15 bp, Homo sapiens
acctaaaactccatt

SEQ ID NO: 11984 - DNA, 15 bp, Homo sapiens
aacctaaaactccat

SEQ ID NO: 11985 - DNA, 15 bp, Homo sapiens
taacctaaaactcca

SEQ ID NO: 11986 - DNA, 15 bp, Homo sapiens
ctaacctaaaactcc

SEQ ID NO: 11987 - DNA, 15 bp, Homo sapiens
gctaacctaaaactc

SEQ ID NO: 11988 - DNA, 15 bp, Homo sapiens
ggctaacctaaaact

SEQ ID NO: 11989 - DNA, 15 bp, Homo sapiens
gggctaacctaaaac

SEQ ID NO: 11990 - DNA, 15 bp, Homo sapiens
tgggctaacctaaaa

SEQ ID NO: 11991 - DNA, 15 bp, Homo sapiens
ctgggctaacctaaa

SEQ ID NO: 11992 - DNA, 15 bp, Homo sapiens
tctgggctaacctaa

SEQ ID NO: 11993 - DNA, 15 bp, Homo sapiens
ctctgggctaaccta

SEQ ID NO: 11994 - DNA, 15 bp, Homo sapiens
tctctgggctaacct

SEQ ID NO: 11995 - DNA, 15 bp, Homo sapiens
atctctgggctaacc

SEQ ID NO: 11996 - DNA, 15 bp, Homo sapiens
catctctgggctaac

SEQ ID NO: 11997 - DNA, 15 bp, Homo sapiens
ccatctctgggctaa

SEQ ID NO: 11998 - DNA, 15 bp, Homo sapiens
cccatctctgggcta

SEQ ID NO: 11999 - DNA, 15 bp, Homo sapiens
tcccatctctgggct

SEQ ID NO: 12000 - DNA, 15 bp, Homo sapiens
ttcccatctctgggc

SEQ ID NO: 12001 - DNA, 15 bp, Homo sapiens
cttcccatctctggg

SEQ ID NO: 12002 - DNA, 15 bp, Homo sapiens
tcttcccatctctgg

SEQ ID NO: 12003 - DNA, 15 bp, Homo sapiens
atcttcccatctctg

SEQ ID NO: 12004 - DNA, 15 bp, Homo sapiens
catcttcccatctct

SEQ ID NO: 12005 - DNA, 15 bp, Homo sapiens
gcatcttcccatctc

SEQ ID NO: 12006 - DNA, 15 bp, Homo sapiens
ggcatcttcccatct

SEQ ID NO: 12007 - DNA, 15 bp, Homo sapiens
tggcatcttcccatc

SEQ ID NO: 12008 - DNA, 15 bp, Homo sapiens
ttggcatcttcccat

SEQ ID NO: 12009 - DNA, 15 bp, Homo sapiens
cttggcatcttccca

SEQ ID NO: 12010 - DNA, 15 bp, Homo sapiens
tcttggcatcttccc

SEQ ID NO: 12011 - DNA, 15 bp, Homo sapiens
ttcttggcatcttcc

SEQ ID NO: 12012 - DNA, 15 bp, Homo sapiens
cttcttggcatcttc

SEQ ID NO: 12013 - DNA, 15 bp, Homo sapiens
ccttcttggcatctt

SEQ ID NO: 12014 - DNA, 15 bp, Homo sapiens
accttcttggcatct

SEQ ID NO: 12015 - DNA, 15 bp, Homo sapiens
taccttcttggcatc

SEQ ID NO: 12016 - DNA, 15 bp, Homo sapiens
ctaccttcttggcat

SEQ ID NO: 12017 - DNA, 15 bp, Homo sapiens
gctaccttcttggca

SEQ ID NO: 12018 - DNA, 15 bp, Homo sapiens
agctaccttcttggc

SEQ ID NO: 12019 - DNA, 15 bp, Homo sapiens
aagctaccttcttgg

SEQ ID NO: 12020 - DNA, 15 bp, Homo sapiens
aaagctaccttcttg

SEQ ID NO: 12021 - DNA, 15 bp, Homo sapiens
taaagctaccttctt

SEQ ID NO: 12022 - DNA, 15 bp, Homo sapiens
ctaaagctaccttct

SEQ ID NO: 12023 - DNA, 15 bp, Homo sapiens
actaaagctaccttc

SEQ ID NO: 12024 - DNA, 15 bp, Homo sapiens
cactaaagctacctt

SEQ ID NO: 12025 - DNA, 15 bp, Homo sapiens
ccactaaagctacct

SEQ ID NO: 12026 - DNA, 15 bp, Homo sapiens
tccactaaagctacc

SEQ ID NO: 12027 - DNA, 15 bp, Homo sapiens
atccactaaagctac

SEQ ID NO: 12028 - DNA, 15 bp, Homo sapiens
aatccactaaagcta

SEQ ID NO: 12029 - DNA, 15 bp, Homo sapiens
gaatccactaaagct

SEQ ID NO: 12030 - DNA, 15 bp, Homo sapiens
agaatccactaaagc

SEQ ID NO: 12031 - DNA, 15 bp, Homo sapiens
cagaatccactaaag

SEQ ID NO: 12032 - DNA, 15 bp, Homo sapiens
tcagaatccactaaa

SEQ ID NO: 12033 - DNA, 15 bp, Homo sapiens
ttcagaatccactaa

SEQ ID NO: 12034 - DNA, 15 bp, Homo sapiens
attcagaatccacta

SEQ ID NO: 12035 - DNA, 15 bp, Homo sapiens
aattcagaatccact

SEQ ID NO: 12036 - DNA, 15 bp, Homo sapiens
aaattcagaatccac

SEQ ID NO: 12037 - DNA, 15 bp, Homo sapiens
aaaattcagaatcca

SEQ ID NO: 12038 - DNA, 15 bp, Homo sapiens
aaaaattcagaatcc

SEQ ID NO: 12039 - DNA, 15 bp, Homo sapiens
aaaaaattcagaatc

SEQ ID NO: 12040 - DNA, 15 bp, Homo sapiens
caaaaaattcagaat

SEQ ID NO: 12041 - DNA, 15 bp, Homo sapiens
ccaaaaaattcagaa

SEQ ID NO: 12042 - DNA, 15 bp, Homo sapiens
accaaaaaattcaga

SEQ ID NO: 12043 - DNA, 15 bp, Homo sapiens
aaccaaaaaattcag

SEQ ID NO: 12044 - DNA, 15 bp, Homo sapiens
aaaccaaaaaattca

SEQ ID NO: 12045 - DNA, 15 bp, Homo sapiens
aaaaccaaaaaattc

SEQ ID NO: 12046 - DNA, 15 bp, Homo sapiens
caaaaccaaaaaatt

SEQ ID NO: 12047 - DNA, 15 bp, Homo sapiens
acaaaaccaaaaaat

SEQ ID NO: 12048 - DNA, 15 bp, Homo sapiens
aacaaaaccaaaaaa

SEQ ID NO: 12049 - DNA, 15 bp, Homo sapiens
aaacaaaaccaaaaa

SEQ ID NO: 12050 - DNA, 15 bp, Homo sapiens
aaaacaaaaccaaaa

SEQ ID NO: 12051 - DNA, 15 bp, Homo sapiens
caaaacaaaaccaaa

SEQ ID NO: 12052 - DNA, 15 bp, Homo sapiens
acaaaacaaaaccaa

SEQ ID NO: 12053 - DNA, 15 bp, Homo sapiens
aacaaaacaaaacca

SEQ ID NO: 12054 - DNA, 15 bp, Homo sapiens
aaacaaaacaaaacc

SEQ ID NO: 12055 - DNA, 15 bp, Homo sapiens
aaaacaaaacaaaac

SEQ ID NO: 12056 - DNA, 15 bp, Homo sapiens
aaaaacaaaacaaaa

SEQ ID NO: 12057 - DNA, 15 bp, Homo sapiens
taaaaacaaaacaaa

SEQ ID NO: 12058 - DNA, 15 bp, Homo sapiens
ctaaaaacaaaacaa

SEQ ID NO: 12059 - DNA, 15 bp, Homo sapiens
cctaaaaacaaaaca

SEQ ID NO: 12060 - DNA, 15 bp, Homo sapiens
ccctaaaaacaaaac

SEQ ID NO: 12061 - DNA, 15 bp, Homo sapiens
gccctaaaaacaaaa

SEQ ID NO: 12062 - DNA, 15 bp, Homo sapiens
tgccctaaaaacaaa

SEQ ID NO: 12063 - DNA, 15 bp, Homo sapiens
ctgccctaaaaacaa

SEQ ID NO: 12064 - DNA, 15 bp, Homo sapiens
cctgccctaaaaaca

SEQ ID NO: 12065 - DNA, 15 bp, Homo sapiens
gcctgccctaaaaac

SEQ ID NO: 12066 - DNA, 15 bp, Homo sapiens
tgcctgccctaaaaa

SEQ ID NO: 12067 - DNA, 15 bp, Homo sapiens
ttgcctgccctaaaa

SEQ ID NO: 12068 - DNA, 15 bp, Homo sapiens
tttgcctgccctaaa

SEQ ID NO: 12069 - DNA, 15 bp, Homo sapiens
atttgcctgccctaa

SEQ ID NO: 12070 - DNA, 15 bp, Homo sapiens
catttgcctgcccta

SEQ ID NO: 12071 - DNA, 15 bp, Homo sapiens
acatttgcctgccct

SEQ ID NO: 12072 - DNA, 15 bp, Homo sapiens
tacatttgcctgccc

SEQ ID NO: 12073 - DNA, 15 bp, Homo sapiens
ttacatttgcctgcc

SEQ ID NO: 12074 - DNA, 15 bp, Homo sapiens
attacatttgcctgc

SEQ ID NO: 12075 - DNA, 15 bp, Homo sapiens
aattacatttgcctg

SEQ ID NO: 12076 - DNA, 15 bp, Homo sapiens
taattacatttgcct

SEQ ID NO: 12077 - DNA, 15 bp, Homo sapiens
gtaattacatttgcc

SEQ ID NO: 12078 - DNA, 15 bp, Homo sapiens
tgtaattacatttgc

SEQ ID NO: 12079 - DNA, 15 bp, Homo sapiens
ttgtaattacatttg

SEQ ID NO: 12080 - DNA, 15 bp, Homo sapiens
tttgtaattacattt

SEQ ID NO: 12081 - DNA, 15 bp, Homo sapiens
ttttgtaattacatt

SEQ ID NO: 12082 - DNA, 15 bp, Homo sapiens
cttttgtaattacat

SEQ ID NO: 12083 - DNA, 15 bp, Homo sapiens
ccttttgtaattaca

SEQ ID NO: 12084 - DNA, 15 bp, Homo sapiens
cccttttgtaattac

SEQ ID NO: 12085 - DNA, 15 bp, Homo sapiens
acccttttgtaatta

SEQ ID NO: 12086 - DNA, 15 bp, Homo sapiens
aacccttttgtaatt

SEQ ID NO: 12087 - DNA, 15 bp, Homo sapiens
gaacccttttgtaat

SEQ ID NO: 12088 - DNA, 15 bp, Homo sapiens
agaacccttttgtaa

SEQ ID NO: 12089 - DNA, 15 bp, Homo sapiens
tagaacccttttgta

SEQ ID NO: 12090 - DNA, 15 bp, Homo sapiens
ctagaacccttttgt

SEQ ID NO: 12091 - DNA, 15 bp, Homo sapiens
cctagaacccttttg

SEQ ID NO: 12092 - DNA, 15 bp, Homo sapiens
tcctagaaccctttt

SEQ ID NO: 12093 - DNA, 15 bp, Homo sapiens
ttcctagaacccttt

SEQ ID NO: 12094 - DNA, 15 bp, Homo sapiens
attcctagaaccctt

SEQ ID NO: 12095 - DNA, 15 bp, Homo sapiens
tattcctagaaccct

SEQ ID NO: 12096 - DNA, 15 bp, Homo sapiens
ctattcctagaaccc

SEQ ID NO: 12097 - DNA, 15 bp, Homo sapiens
tctattcctagaacc

SEQ ID NO: 12098 - DNA, 15 bp, Homo sapiens
atctattcctagaac

SEQ ID NO: 12099 - DNA, 15 bp, Homo sapiens
aatctattcctagaa

SEQ ID NO: 12100 - DNA, 15 bp, Homo sapiens
caatctattcctaga

SEQ ID NO: 12101 - DNA, 15 bp, Homo sapiens
gcaatctattcctag

SEQ ID NO: 12102 - DNA, 15 bp, Homo sapiens
agcaatctattccta

SEQ ID NO: 12103 - DNA, 15 bp, Homo sapiens
cagcaatctattcct

SEQ ID NO: 12104 - DNA, 15 bp, Homo sapiens
acagcaatctattcc

SEQ ID NO: 12105 - DNA, 15 bp, Homo sapiens
cacagcaatctattc

SEQ ID NO: 12106 - DNA, 15 bp, Homo sapiens
tcacagcaatctatt

SEQ ID NO: 12107 - DNA, 15 bp, Homo sapiens
atcacagcaatctat

SEQ ID NO: 12108 - DNA, 15 bp, Homo sapiens
aatcacagcaatcta

SEQ ID NO: 12109 - DNA, 15 bp, Homo sapiens
aaatcacagcaatct

SEQ ID NO: 12110 - DNA, 15 bp, Homo sapiens
aaaatcacagcaatc

SEQ ID NO: 12111 - DNA, 15 bp, Homo sapiens
aaaaatcacagcaat

SEQ ID NO: 12112 - DNA, 15 bp, Homo sapiens
aaaaaatcacagcaa

SEQ ID NO: 12113 - DNA, 15 bp, Homo sapiens
aaaaaaatcacagca

SEQ ID NO: 12114 - DNA, 15 bp, Homo sapiens
aaaaaaaatcacagc

SEQ ID NO: 12115 - DNA, 15 bp, Homo sapiens
gaaaaaaaatcacag

SEQ ID NO: 12116 - DNA, 15 bp, Homo sapiens
agaaaaaaaatcaca

SEQ ID NO: 12117 - DNA, 15 bp, Homo sapiens
cagaaaaaaaatcac

SEQ ID NO: 12118 - DNA, 15 bp, Homo sapiens
acagaaaaaaaatca

SEQ ID NO: 12119 - DNA, 15 bp, Homo sapiens
aacagaaaaaaaatc

SEQ ID NO: 12120 - DNA, 15 bp, Homo sapiens
aaacagaaaaaaaat

SEQ ID NO: 12121 - DNA, 15 bp, Homo sapiens
caaacagaaaaaaaa

SEQ ID NO: 12122 - DNA, 15 bp, Homo sapiens
gcaaacagaaaaaaa

SEQ ID NO: 12123 - DNA, 15 bp, Homo sapiens
tgcaaacagaaaaaa

SEQ ID NO: 12124 - DNA, 15 bp, Homo sapiens
atgcaaacagaaaaa

SEQ ID NO: 12125 - DNA, 15 bp, Homo sapiens
catgcaaacagaaaa

SEQ ID NO: 12126 - DNA, 15 bp, Homo sapiens
tcatgcaaacagaaa

SEQ ID NO: 12127 - DNA, 15 bp, Homo sapiens
atcatgcaaacagaa

SEQ ID NO: 12128 - DNA, 15 bp, Homo sapiens
aatcatgcaaacaga

SEQ ID NO: 12129 - DNA, 15 bp, Homo sapiens
aaatcatgcaaacag

SEQ ID NO: 12130 - DNA, 15 bp, Homo sapiens
aaaatcatgcaaaca

SEQ ID NO: 12131 - DNA, 15 bp, Homo sapiens
taaaatcatgcaaac

SEQ ID NO: 12132 - DNA, 15 bp, Homo sapiens
gtaaaatcatgcaaa

SEQ ID NO: 12133 - DNA, 15 bp, Homo sapiens
tgtaaaatcatgcaa

SEQ ID NO: 12134 - DNA, 15 bp, Homo sapiens
ctgtaaaatcatgca

SEQ ID NO: 12135 - DNA, 15 bp, Homo sapiens
actgtaaaatcatgc

SEQ ID NO: 12136 - DNA, 15 bp, Homo sapiens
aactgtaaaatcatg

SEQ ID NO: 12137 - DNA, 15 bp, Homo sapiens
aaactgtaaaatcat

SEQ ID NO: 12138 - DNA, 15 bp, Homo sapiens
caaactgtaaaatca

SEQ ID NO: 12139 - DNA, 15 bp, Homo sapiens
gcaaactgtaaaatc

SEQ ID NO: 12140 - DNA, 15 bp, Homo sapiens
agcaaactgtaaaat

SEQ ID NO: 12141 - DNA, 15 bp, Homo sapiens
aagcaaactgtaaaa

SEQ ID NO: 12142 - DNA, 15 bp, Homo sapiens
aaagcaaactgtaaa

SEQ ID NO: 12143 - DNA, 15 bp, Homo sapiens
caaagcaaactgtaa

SEQ ID NO: 12144 - DNA, 15 bp, Homo sapiens
gcaaagcaaactgta

SEQ ID NO: 12145 - DNA, 15 bp, Homo sapiens
ggcaaagcaaactgt

SEQ ID NO: 12146 - DNA, 15 bp, Homo sapiens
aggcaaagcaaactg

SEQ ID NO: 12147 - DNA, 15 bp, Homo sapiens
gaggcaaagcaaact

SEQ ID NO: 12148 - DNA, 15 bp, Homo sapiens
agaggcaaagcaaac

SEQ ID NO: 12149 - DNA, 15 bp, Homo sapiens
gagaggcaaagcaaa

SEQ ID NO: 12150 - DNA, 15 bp, Homo sapiens
tgagaggcaaagcaa

SEQ ID NO: 12151 - DNA, 15 bp, Homo sapiens
gtgagaggcaaagca

SEQ ID NO: 12152 - DNA, 15 bp, Homo sapiens
agtgagaggcaaagc

SEQ ID NO: 12153 - DNA, 15 bp, Homo sapiens
aagtgagaggcaaag

SEQ ID NO: 12154 - DNA, 15 bp, Homo sapiens
aaagtgagaggcaaa

SEQ ID NO: 12155 - DNA, 15 bp, Homo sapiens
aaaagtgagaggcaa

SEQ ID NO: 12156 - DNA, 15 bp, Homo sapiens
caaaagtgagaggca

SEQ ID NO: 12157 - DNA, 15 bp, Homo sapiens
tcaaaagtgagaggc

SEQ ID NO: 12158 - DNA, 15 bp, Homo sapiens
ttcaaaagtgagagg

SEQ ID NO: 12159 - DNA, 15 bp, Homo sapiens
attcaaaagtgagag

SEQ ID NO: 12160 - DNA, 15 bp, Homo sapiens
cattcaaaagtgaga

SEQ ID NO: 12161 - DNA, 15 bp, Homo sapiens
gcattcaaaagtgag

SEQ ID NO: 12162 - DNA, 15 bp, Homo sapiens
tgcattcaaaagtga

SEQ ID NO: 12163 - DNA, 15 bp, Homo sapiens
ctgcattcaaaagtg

SEQ ID NO: 12164 - DNA, 15 bp, Homo sapiens
tctgcattcaaaagt

SEQ ID NO: 12165 - DNA, 15 bp, Homo sapiens
ttctgcattcaaaag

SEQ ID NO: 12166 - DNA, 15 bp, Homo sapiens
attctgcattcaaaa

SEQ ID NO: 12167 - DNA, 15 bp, Homo sapiens
tattctgcattcaaa

SEQ ID NO: 12168 - DNA, 15 bp, Homo sapiens
ttattctgcattcaa

SEQ ID NO: 12169 - DNA, 15 bp, Homo sapiens
tttattctgcattca

SEQ ID NO: 12170 - DNA, 15 bp, Homo sapiens
ttttattctgcattc

SEQ ID NO: 12171 - DNA, 15 bp, Homo sapiens
attttattctgcatt

SEQ ID NO: 12172 - DNA, 15 bp, Homo sapiens
cattttattctgcat

SEQ ID NO: 12173 - DNA, 15 bp, Homo sapiens
acattttattctgca

SEQ ID NO: 12174 - DNA, 15 bp, Homo sapiens
gacattttattctgc

SEQ ID NO: 12175 - DNA, 15 bp, Homo sapiens
tgacattttattctg

SEQ ID NO: 12176 - DNA, 15 bp, Homo sapiens
ttgacattttattct

SEQ ID NO: 12177 - DNA, 15 bp, Homo sapiens
cttgacattttattc

SEQ ID NO: 12178 - DNA, 15 bp, Homo sapiens
ccttgacattttatt

SEQ ID NO: 12179 - DNA, 15 bp, Homo sapiens
gccttgacattttat

SEQ ID NO: 12180 - DNA, 15 bp, Homo sapiens
ggccttgacatttta

SEQ ID NO: 12181 - DNA, 15 bp, Homo sapiens
aggccttgacatttt

SEQ ID NO: 12182 - DNA, 15 bp, Homo sapiens
aaggccttgacattt

SEQ ID NO: 12183 - DNA, 15 bp, Homo sapiens
taaggccttgacatt

SEQ ID NO: 12184 - DNA, 15 bp, Homo sapiens
ataaggccttgacat

SEQ ID NO: 12185 - DNA, 15 bp, Homo sapiens
aataaggccttgaca

SEQ ID NO: 12186 - DNA, 15 bp, Homo sapiens
aaataaggccttgac

SEQ ID NO: 12187 - DNA, 15 bp, Homo sapiens
aaaataaggccttga

SEQ ID NO: 12188 - DNA, 15 bp, Homo sapiens
aaaaataaggccttg

SEQ ID NO: 12189 - DNA, 15 bp, Homo sapiens
aaaaaataaggcctt

SEQ ID NO: 12190 - DNA, 15 bp, Homo sapiens
aaaaaaataaggcct

SEQ ID NO: 12191 - DNA, 15 bp, Homo sapiens
aaaaaaaataaggcc

SEQ ID NO: 12192 - DNA, 15 bp, Homo sapiens
aaaaaaaaataaggc

SEQ ID NO: 12193 - DNA, 15 bp, Homo sapiens
taaaaaaaaataagg

SEQ ID NO: 12194 - DNA, 15 bp, Homo sapiens
ttaaaaaaaaataag

SEQ ID NO: 12195 - DNA, 15 bp, Homo sapiens
tttaaaaaaaaataa

SEQ ID NO: 12196 - DNA, 15 bp, Homo sapiens
atttaaaaaaaaata

SEQ ID NO: 12197 - DNA, 15 bp, Homo sapiens
aatttaaaaaaaaat

SEQ ID NO: 12198 - DNA, 15 bp, Homo sapiens
gaatttaaaaaaaaa

SEQ ID NO: 12199 - DNA, 15 bp, Homo sapiens
agaatttaaaaaaaa

SEQ ID NO: 12200 - DNA, 15 bp, Homo sapiens
aagaatttaaaaaaa

SEQ ID NO: 12201 - DNA, 15 bp, Homo sapiens
taagaatttaaaaaa

SEQ ID NO: 12202 - DNA, 15 bp, Homo sapiens
ttaagaatttaaaaa

SEQ ID NO: 12203 - DNA, 15 bp, Homo sapiens
cttaagaatttaaaa

SEQ ID NO: 12204 - DNA, 15 bp, Homo sapiens
tcttaagaatttaaa

SEQ ID NO: 12205 - DNA, 15 bp, Homo sapiens
ttcttaagaatttaa

SEQ ID NO: 12206 - DNA, 15 bp, Homo sapiens
tttcttaagaattta

SEQ ID NO: 12207 - DNA, 15 bp, Homo sapiens
atttcttaagaattt

SEQ ID NO: 12208 - DNA, 15 bp, Homo sapiens
aatttcttaagaatt

SEQ ID NO: 12209 - DNA, 15 bp, Homo sapiens
aaatttcttaagaat

SEQ ID NO: 12210 - DNA, 15 bp, Homo sapiens
taaatttcttaagaa

SEQ ID NO: 12211 - DNA, 15 bp, Homo sapiens
ttaaatttcttaaga

SEQ ID NO: 12212 - DNA, 15 bp, Homo sapiens
cttaaatttcttaag

SEQ ID NO: 12213 - DNA, 15 bp, Homo sapiens
tcttaaatttcttaa

SEQ ID NO: 12214 - DNA, 15 bp, Homo sapiens
atcttaaatttctta

SEQ ID NO: 12215 - DNA, 15 bp, Homo sapiens
aatcttaaatttctt

SEQ ID NO: 12216 - DNA, 15 bp, Homo sapiens
aaatcttaaatttct

SEQ ID NO: 12217 - DNA, 15 bp, Homo sapiens
caaatcttaaatttc

SEQ ID NO: 12218 - DNA, 15 bp, Homo sapiens
tcaaatcttaaattt

SEQ ID NO: 12219 - DNA, 15 bp, Homo sapiens
gtcaaatcttaaatt

SEQ ID NO: 12220 - DNA, 15 bp, Homo sapiens
agtcaaatcttaaat

SEQ ID NO: 12221 - DNA, 15 bp, Homo sapiens
cagtcaaatcttaaa

SEQ ID NO: 12222 - DNA, 15 bp, Homo sapiens
acagtcaaatcttaa

SEQ ID NO: 12223 - DNA, 15 bp, Homo sapiens
aacagtcaaatctta

SEQ ID NO: 12224 - DNA, 15 bp, Homo sapiens
taacagtcaaatctt

SEQ ID NO: 12225 - DNA, 15 bp, Homo sapiens
ttaacagtcaaatct

SEQ ID NO: 12226 - DNA, 15 bp, Homo sapiens
attaacagtcaaatc

SEQ ID NO: 12227 - DNA, 15 bp, Homo sapiens
aattaacagtcaaat

SEQ ID NO: 12228 - DNA, 15 bp, Homo sapiens
gaattaacagtcaaa

SEQ ID NO: 12229 - DNA, 15 bp, Homo sapiens
ggaattaacagtcaa

SEQ ID NO: 12230 - DNA, 15 bp, Homo sapiens
aggaattaacagtca

SEQ ID NO: 12231 - DNA, 15 bp, Homo sapiens
aaggaattaacagtc

SEQ ID NO: 12232 - DNA, 15 bp, Homo sapiens
aaaggaattaacagt

SEQ ID NO: 12233 - DNA, 15 bp, Homo sapiens
aaaaggaattaacag

SEQ ID NO: 12234 - DNA, 15 bp, Homo sapiens
caaaaggaattaaca

SEQ ID NO: 12235 - DNA, 15 bp, Homo sapiens
tcaaaaggaattaac

SEQ ID NO: 12236 - DNA, 15 bp, Homo sapiens
ttcaaaaggaattaa

SEQ ID NO: 12237 - DNA, 15 bp, Homo sapiens
tttcaaaaggaatta

SEQ ID NO: 12238 - DNA, 15 bp, Homo sapiens
atttcaaaaggaatt

SEQ ID NO: 12239 - DNA, 15 bp, Homo sapiens
tatttcaaaaggaat

SEQ ID NO: 12240 - DNA, 15 bp, Homo sapiens
atatttcaaaaggaa

SEQ ID NO: 12241 - DNA, 15 bp, Homo sapiens
catatttcaaaagga

SEQ ID NO: 12242 - DNA, 15 bp, Homo sapiens
ccatatttcaaaagg

SEQ ID NO: 12243 - DNA, 15 bp, Homo sapiens
cccatatttcaaaag

SEQ ID NO: 12244 - DNA, 15 bp, Homo sapiens
tcccatatttcaaaa

SEQ ID NO: 12245 - DNA, 15 bp, Homo sapiens
atcccatatttcaaa

SEQ ID NO: 12246 - DNA, 15 bp, Homo sapiens
tatcccatatttcaa

SEQ ID NO: 12247 - DNA, 15 bp, Homo sapiens
atatcccatatttca

SEQ ID NO: 12248 - DNA, 15 bp, Homo sapiens
aatatcccatatttc

SEQ ID NO: 12249 - DNA, 15 bp, Homo sapiens
aaatatcccatattt

SEQ ID NO: 12250 - DNA, 15 bp, Homo sapiens
aaaatatcccatatt

SEQ ID NO: 12251 - DNA, 15 bp, Homo sapiens
caaaatatcccatat

SEQ ID NO: 12252 - DNA, 15 bp, Homo sapiens
tcaaaatatcccata

SEQ ID NO: 12253 - DNA, 15 bp, Homo sapiens
ctcaaaatatcccat

SEQ ID NO: 12254 - DNA, 15 bp, Homo sapiens
tctcaaaatatccca

SEQ ID NO: 12255 - DNA, 15 bp, Homo sapiens
atctcaaaatatccc

SEQ ID NO: 12256 - DNA, 15 bp, Homo sapiens
tatctcaaaatatcc

SEQ ID NO: 12257 - DNA, 15 bp, Homo sapiens
gtatctcaaaatatc

SEQ ID NO: 12258 - DNA, 15 bp, Homo sapiens
ggtatctcaaaatat

SEQ ID NO: 12259 - DNA, 15 bp, Homo sapiens
tggtatctcaaaata

SEQ ID NO: 12260 - DNA, 15 bp, Homo sapiens
ttggtatctcaaaat

SEQ ID NO: 12261 - DNA, 15 bp, Homo sapiens
attggtatctcaaaa

SEQ ID NO: 12262 - DNA, 15 bp, Homo sapiens
aattggtatctcaaa

SEQ ID NO: 12263 - DNA, 15 bp, Homo sapiens
taattggtatctcaa

SEQ ID NO: 12264 - DNA, 15 bp, Homo sapiens
ataattggtatctca

SEQ ID NO: 12265 - DNA, 15 bp, Homo sapiens
aataattggtatctc

SEQ ID NO: 12266 - DNA, 15 bp, Homo sapiens
aaataattggtatct

SEQ ID NO: 12267 - DNA, 15 bp, Homo sapiens
taaataattggtatc

SEQ ID NO: 12268 - DNA, 15 bp, Homo sapiens
ttaaataattggtat

SEQ ID NO: 12269 - DNA, 15 bp, Homo sapiens
cttaaataattggta

SEQ ID NO: 12270 - DNA, 15 bp, Homo sapiens
tcttaaataattggt

SEQ ID NO: 12271 - DNA, 15 bp, Homo sapiens
gtcttaaataattgg

SEQ ID NO: 12272 - DNA, 15 bp, Homo sapiens
tgtcttaaataattg

SEQ ID NO: 12273 - DNA, 15 bp, Homo sapiens
ttgtcttaaataatt

SEQ ID NO: 12274 - DNA, 15 bp, Homo sapiens
tttgtcttaaataat

SEQ ID NO: 12275 - DNA, 15 bp, Homo sapiens
atttgtcttaaataa

SEQ ID NO: 12276 - DNA, 15 bp, Homo sapiens
tatttgtcttaaata

SEQ ID NO: 12277 - DNA, 15 bp, Homo sapiens
ctatttgtcttaaat

SEQ ID NO: 12278 - DNA, 15 bp, Homo sapiens
cctatttgtcttaaa

SEQ ID NO: 12279 - DNA, 15 bp, Homo sapiens
tcctatttgtcttaa

SEQ ID NO: 12280 - DNA, 15 bp, Homo sapiens
gtcctatttgtctta

SEQ ID NO: 12281 - DNA, 15 bp, Homo sapiens
agtcctatttgtctt

SEQ ID NO: 12282 - DNA, 15 bp, Homo sapiens
gagtcctatttgtct

SEQ ID NO: 12283 - DNA, 15 bp, Homo sapiens
tgagtcctatttgtc

SEQ ID NO: 12284 - DNA, 15 bp, Homo sapiens
atgagtcctatttgt

SEQ ID NO: 12285 - DNA, 15 bp, Homo sapiens
aatgagtcctatttg

SEQ ID NO: 12286 - DNA, 15 bp, Homo sapiens
caatgagtcctattt

SEQ ID NO: 12287 - DNA, 15 bp, Homo sapiens
acaatgagtcctatt

SEQ ID NO: 12288 - DNA, 15 bp, Homo sapiens
aacaatgagtcctat

SEQ ID NO: 12289 - DNA, 15 bp, Homo sapiens
taacaatgagtccta

SEQ ID NO: 12290 - DNA, 15 bp, Homo sapiens
gtaacaatgagtcct

SEQ ID NO: 12291 - DNA, 15 bp, Homo sapiens
tgtaacaatgagtcc

SEQ ID NO: 12292 - DNA, 15 bp, Homo sapiens
ttgtaacaatgagtc

SEQ ID NO: 12293 - DNA, 15 bp, Homo sapiens
attgtaacaatgagt

SEQ ID NO: 12294 - DNA, 15 bp, Homo sapiens
aattgtaacaatgag

SEQ ID NO: 12295 - DNA, 15 bp, Homo sapiens
gaattgtaacaatga

SEQ ID NO: 12296 - DNA, 15 bp, Homo sapiens
tgaattgtaacaatg

SEQ ID NO: 12297 - DNA, 15 bp, Homo sapiens
ctgaattgtaacaat

SEQ ID NO: 12298 - DNA, 15 bp, Homo sapiens
actgaattgtaacaa

SEQ ID NO: 12299 - DNA, 15 bp, Homo sapiens
aactgaattgtaaca

SEQ ID NO: 12300 - DNA, 15 bp, Homo sapiens
caactgaattgtaac

SEQ ID NO: 12301 - DNA, 15 bp, Homo sapiens
tcaactgaattgtaa

SEQ ID NO: 12302 - DNA, 15 bp, Homo sapiens
ttcaactgaattgta

SEQ ID NO: 12303 - DNA, 15 bp, Homo sapiens
attcaactgaattgt

SEQ ID NO: 12304 - DNA, 15 bp, Homo sapiens
tattcaactgaattg

SEQ ID NO: 12305 - DNA, 15 bp, Homo sapiens
ttattcaactgaatt

SEQ ID NO: 12306 - DNA, 15 bp, Homo sapiens
cttattcaactgaat

SEQ ID NO: 12307 - DNA, 15 bp, Homo sapiens
ccttattcaactgaa

SEQ ID NO: 12308 - DNA, 15 bp, Homo sapiens
gccttattcaactga

SEQ ID NO: 12309 - DNA, 15 bp, Homo sapiens
agccttattcaactg

SEQ ID NO: 12310 - DNA, 15 bp, Homo sapiens
aagccttattcaact

SEQ ID NO: 12311 - DNA, 15 bp, Homo sapiens
taagccttattcaac

SEQ ID NO: 12312 - DNA, 15 bp, Homo sapiens
ataagccttattcaa

SEQ ID NO: 12313 - DNA, 15 bp, Homo sapiens
cataagccttattca

SEQ ID NO: 12314 - DNA, 15 bp, Homo sapiens
tcataagccttattc

SEQ ID NO: 12315 - DNA, 15 bp, Homo sapiens
atcataagccttatt

SEQ ID NO: 12316 - DNA, 15 bp, Homo sapiens
catcataagccttat

SEQ ID NO: 12317 - DNA, 15 bp, Homo sapiens
acatcataagcctta

SEQ ID NO: 12318 - DNA, 15 bp, Homo sapiens
aacatcataagcctt

SEQ ID NO: 12319 - DNA, 15 bp, Homo sapiens
aaacatcataagcct

SEQ ID NO: 12320 - DNA, 15 bp, Homo sapiens
taaacatcataagcc

SEQ ID NO: 12321 - DNA, 15 bp, Homo sapiens
ataaacatcataagc

SEQ ID NO: 12322 - DNA, 15 bp, Homo sapiens
aataaacatcataag

SEQ ID NO: 12323 - DNA, 15 bp, Homo sapiens
aaataaacatcataa

SEQ ID NO: 12324 - DNA, 15 bp, Homo sapiens
gaaataaacatcata

SEQ ID NO: 12325 - DNA, 15 bp, Homo sapiens
tgaaataaacatcat

SEQ ID NO: 12326 - DNA, 15 bp, Homo sapiens
ctgaaataaacatca

SEQ ID NO: 12327 - DNA, 15 bp, Homo sapiens
actgaaataaacatc

SEQ ID NO: 12328 - DNA, 15 bp, Homo sapiens
tactgaaataaacat

SEQ ID NO: 12329 - DNA, 15 bp, Homo sapiens
atactgaaataaaca

SEQ ID NO: 12330 - DNA, 15 bp, Homo sapiens
tatactgaaataaac

SEQ ID NO: 12331 - DNA, 15 bp, Homo sapiens
atatactgaaataaa

SEQ ID NO: 12332 - DNA, 15 bp, Homo sapiens
catatactgaaataa

SEQ ID NO: 12333 - DNA, 15 bp, Homo sapiens
tcatatactgaaata

SEQ ID NO: 12334 - DNA, 15 bp, Homo sapiens
ttcatatactgaaat

SEQ ID NO: 12335 - DNA, 15 bp, Homo sapiens
attcatatactgaaa

SEQ ID NO: 12336 - DNA, 15 bp, Homo sapiens
cattcatatactgaa

SEQ ID NO: 12337 - DNA, 15 bp, Homo sapiens
tcattcatatactga

SEQ ID NO: 12338 - DNA, 15 bp, Homo sapiens
ttcattcatatactg

SEQ ID NO: 12339 - DNA, 15 bp, Homo sapiens
tttcattcatatact

SEQ ID NO: 12340 - DNA, 15 bp, Homo sapiens
ttttcattcatatac

SEQ ID NO: 12341 - DNA, 15 bp, Homo sapiens
gttttcattcatata

SEQ ID NO: 12342 - DNA, 15 bp, Homo sapiens
agttttcattcatat

SEQ ID NO: 12343 - DNA, 15 bp, Homo sapiens
tagttttcattcata

SEQ ID NO: 12344 - DNA, 15 bp, Homo sapiens
atagttttcattcat

SEQ ID NO: 12345 - DNA, 15 bp, Homo sapiens
catagttttcattca

SEQ ID NO: 12346 - DNA, 15 bp, Homo sapiens
acatagttttcattc

SEQ ID NO: 12347 - DNA, 15 bp, Homo sapiens
cacatagttttcatt

SEQ ID NO: 12348 - DNA, 15 bp, Homo sapiens
gcacatagttttcat

SEQ ID NO: 12349 - DNA, 15 bp, Homo sapiens
agcacatagttttca

SEQ ID NO: 12350 - DNA, 15 bp, Homo sapiens
aagcacatagttttc

SEQ ID NO: 12351 - DNA, 15 bp, Homo sapiens
taagcacatagtttt

SEQ ID NO: 12352 - DNA, 15 bp, Homo sapiens
ataagcacatagttt

SEQ ID NO: 12353 - DNA, 15 bp, Homo sapiens
aataagcacatagtt

SEQ ID NO: 12354 - DNA, 15 bp, Homo sapiens
caataagcacatagt

SEQ ID NO: 12355 - DNA, 15 bp, Homo sapiens
acaataagcacatag

SEQ ID NO: 12356 - DNA, 15 bp, Homo sapiens
tacaataagcacata

SEQ ID NO: 12357 - DNA, 15 bp, Homo sapiens
gtacaataagcacat

SEQ ID NO: 12358 - DNA, 15 bp, Homo sapiens
agtacaataagcaca

SEQ ID NO: 12359 - DNA, 15 bp, Homo sapiens
aagtacaataagcac

SEQ ID NO: 12360 - DNA, 15 bp, Homo sapiens
taagtacaataagca

SEQ ID NO: 12361 - DNA, 15 bp, Homo sapiens
ttaagtacaataagc

SEQ ID NO: 12362 - DNA, 15 bp, Homo sapiens
cttaagtacaataag

SEQ ID NO: 12363 - DNA, 15 bp, Homo sapiens
tcttaagtacaataa

SEQ ID NO: 12364 - DNA, 15 bp, Homo sapiens
ttcttaagtacaata

SEQ ID NO: 12365 - DNA, 15 bp, Homo sapiens
tttcttaagtacaat

SEQ ID NO: 12366 - DNA, 15 bp, Homo sapiens
ttttcttaagtacaa

SEQ ID NO: 12367 - DNA, 15 bp, Homo sapiens
attttcttaagtaca

SEQ ID NO: 12368 - DNA, 15 bp, Homo sapiens
aattttcttaagtac

SEQ ID NO: 12369 - DNA, 15 bp, Homo sapiens
aaattttcttaagta

SEQ ID NO: 12370 - DNA, 15 bp, Homo sapiens
gaaattttcttaagt

SEQ ID NO: 12371 - DNA, 15 bp, Homo sapiens
agaaattttcttaag

SEQ ID NO: 12372 - DNA, 15 bp, Homo sapiens
aagaaattttcttaa

SEQ ID NO: 12373 - DNA, 15 bp, Homo sapiens
aaagaaattttctta

SEQ ID NO: 12374 - DNA, 15 bp, Homo sapiens
aaaagaaattttctt

SEQ ID NO: 12375 - DNA, 15 bp, Homo sapiens
taaaagaaattttct

SEQ ID NO: 12376 - DNA, 15 bp, Homo sapiens
ataaaagaaattttc

SEQ ID NO: 12377 - DNA, 15 bp, Homo sapiens
aataaaagaaatttt

SEQ ID NO: 12378 - DNA, 15 bp, Homo sapiens
taataaaagaaattt

SEQ ID NO: 12379 - DNA, 15 bp, Homo sapiens
ttaataaaagaaatt

SEQ ID NO: 12380 - DNA, 15 bp, Homo sapiens
tttaataaaagaaat

SEQ ID NO: 12381 - DNA, 15 bp, Homo sapiens
ttttaataaaagaaa

SEQ ID NO: 12382 - DNA, 15 bp, Homo sapiens
tttttaataaaagaa

SEQ ID NO: 12383 - DNA, 15 bp, Homo sapiens
gtttttaataaaaga

SEQ ID NO: 12384 - DNA, 15 bp, Homo sapiens
tgtttttaataaaag

SEQ ID NO: 12385 - DNA, 15 bp, Homo sapiens
atgtttttaataaaa

SEQ ID NO: 12386 - DNA, 15 bp, Homo sapiens
catgtttttaataaa

SEQ ID NO: 12387 - DNA, 15 bp, Homo sapiens
tcatgtttttaataa

SEQ ID NO: 12388 - DNA, 15 bp, Homo sapiens
gtcatgtttttaata

SEQ ID NO: 12389 - DNA, 15 bp, Homo sapiens
agtcatgtttttaat

SEQ ID NO: 12390 - DNA, 15 bp, Homo sapiens
tagtcatgtttttaa

SEQ ID NO: 12391 - DNA, 15 bp, Homo sapiens
ttagtcatgttttta

SEQ ID NO: 12392 - DNA, 15 bp, Homo sapiens
tttagtcatgttttt

SEQ ID NO: 12393 - DNA, 15 bp, Homo sapiens
ctttagtcatgtttt

SEQ ID NO: 12394 - DNA, 15 bp, Homo sapiens
tctttagtcatgttt

SEQ ID NO: 12395 - DNA, 15 bp, Homo sapiens
ctctttagtcatgtt

SEQ ID NO: 12396 - DNA, 15 bp, Homo sapiens
tctctttagtcatgt

SEQ ID NO: 12397 - DNA, 15 bp, Homo sapiens
ttctctttagtcatg

SEQ ID NO: 12398 - DNA, 15 bp, Homo sapiens
attctctttagtcat

SEQ ID NO: 12399 - DNA, 15 bp, Homo sapiens
aattctctttagtca

SEQ ID NO: 12400 - DNA, 15 bp, Homo sapiens
aaattctctttagtc

SEQ ID NO: 12401 - DNA, 15 bp, Homo sapiens
aaaattctctttagt

SEQ ID NO: 12402 - DNA, 15 bp, Homo sapiens
taaaattctctttag

SEQ ID NO: 12403 - DNA, 15 bp, Homo sapiens
ttaaaattctcttta

SEQ ID NO: 12404 - DNA, 15 bp, Homo sapiens
tttaaaattctcttt

SEQ ID NO: 12405 - DNA, 15 bp, Homo sapiens
ttttaaaattctctt

SEQ ID NO: 12406 - DNA, 15 bp, Homo sapiens
tttttaaaattctct

SEQ ID NO: 12407 - DNA, 15 bp, Homo sapiens
atttttaaaattctc

SEQ ID NO: 12408 - DNA, 15 bp, Homo sapiens
gatttttaaaattct

SEQ ID NO: 12409 - DNA, 15 bp, Homo sapiens
tgatttttaaaattc

SEQ ID NO: 12410 - DNA, 15 bp, Homo sapiens
gtgatttttaaaatt

SEQ ID NO: 12411 - DNA, 15 bp, Homo sapiens
ggtgatttttaaaat

SEQ ID NO: 12412 - DNA, 15 bp, Homo sapiens
gggtgatttttaaaa

SEQ ID NO: 12413 - DNA, 15 bp, Homo sapiens
tgggtgatttttaaa

SEQ ID NO: 12414 - DNA, 15 bp, Homo sapiens
gtgggtgatttttaa

SEQ ID NO: 12415 - DNA, 15 bp, Homo sapiens
agtgggtgattttta

SEQ ID NO: 12416 - DNA, 15 bp, Homo sapiens
cagtgggtgattttt

SEQ ID NO: 12417 - DNA, 15 bp, Homo sapiens
acagtgggtgatttt

SEQ ID NO: 12418 - DNA, 15 bp, Homo sapiens
gacagtgggtgattt

SEQ ID NO: 12419 - DNA, 15 bp, Homo sapiens
ggacagtgggtgatt

SEQ ID NO: 12420 - DNA, 15 bp, Homo sapiens
aggacagtgggtgat

SEQ ID NO: 12421 - DNA, 15 bp, Homo sapiens
taggacagtgggtga

SEQ ID NO: 12422 - DNA, 15 bp, Homo sapiens
gtaggacagtgggtg

SEQ ID NO: 12423 - DNA, 15 bp, Homo sapiens
agtaggacagtgggt

SEQ ID NO: 12424 - DNA, 15 bp, Homo sapiens
aagtaggacagtggg

SEQ ID NO: 12425 - DNA, 15 bp, Homo sapiens
gaagtaggacagtgg

SEQ ID NO: 12426 - DNA, 15 bp, Homo sapiens
agaagtaggacagtg

SEQ ID NO: 12427 - DNA, 15 bp, Homo sapiens
gagaagtaggacagt

SEQ ID NO: 12428 - DNA, 15 bp, Homo sapiens
agagaagtaggacag

SEQ ID NO: 12429 - DNA, 15 bp, Homo sapiens
tagagaagtaggaca

SEQ ID NO: 12430 - DNA, 15 bp, Homo sapiens
ttagagaagtaggac

SEQ ID NO: 12431 - DNA, 15 bp, Homo sapiens
tttagagaagtagga

SEQ ID NO: 12432 - DNA, 15 bp, Homo sapiens
ttttagagaagtagg

SEQ ID NO: 12433 - DNA, 15 bp, Homo sapiens
gttttagagaagtag

SEQ ID NO: 12434 - DNA, 15 bp, Homo sapiens
agttttagagaagta

SEQ ID NO: 12435 - DNA, 15 bp, Homo sapiens
aagttttagagaagt

SEQ ID NO: 12436 - DNA, 15 bp, Homo sapiens
taagttttagagaag

SEQ ID NO: 12437 - DNA, 15 bp, Homo sapiens
ttaagttttagagaa

SEQ ID NO: 12438 - DNA, 15 bp, Homo sapiens
attaagttttagaga

SEQ ID NO: 12439 - DNA, 15 bp, Homo sapiens
cattaagttttagag

SEQ ID NO: 12440 - DNA, 15 bp, Homo sapiens
acattaagttttaga

SEQ ID NO: 12441 - DNA, 15 bp, Homo sapiens
aacattaagttttag

SEQ ID NO: 12442 - DNA, 15 bp, Homo sapiens
aaacattaagtttta

SEQ ID NO: 12443 - DNA, 15 bp, Homo sapiens
aaaacattaagtttt

SEQ ID NO: 12444 - DNA, 15 bp, Homo sapiens
gaaaacattaagttt

SEQ ID NO: 12445 - DNA, 15 bp, Homo sapiens
tgaaaacattaagtt

SEQ ID NO: 12446 - DNA, 15 bp, Homo sapiens
atgaaaacattaagt

SEQ ID NO: 12447 - DNA, 15 bp, Homo sapiens
tatgaaaacattaag

SEQ ID NO: 12448 - DNA, 15 bp, Homo sapiens
atatgaaaacattaa

SEQ ID NO: 12449 - DNA, 15 bp, Homo sapiens
aatatgaaaacatta

SEQ ID NO: 12450 - DNA, 15 bp, Homo sapiens
taatatgaaaacatt

SEQ ID NO: 12451 - DNA, 15 bp, Homo sapiens
ctaatatgaaaacat

SEQ ID NO: 12452 - DNA, 15 bp, Homo sapiens
gctaatatgaaaaca

SEQ ID NO: 12453 - DNA, 15 bp, Homo sapiens
agctaatatgaaaac

SEQ ID NO: 12454 - DNA, 15 bp, Homo sapiens
aagctaatatgaaaa

SEQ ID NO: 12455 - DNA, 15 bp, Homo sapiens
gaagctaatatgaaa

SEQ ID NO: 12456 - DNA, 15 bp, Homo sapiens
ggaagctaatatgaa

SEQ ID NO: 12457 - DNA, 15 bp, Homo sapiens
tggaagctaatatga

SEQ ID NO: 12458 - DNA, 15 bp, Homo sapiens
ctggaagctaatatg

SEQ ID NO: 12459 - DNA, 15 bp, Homo sapiens
actggaagctaatat

SEQ ID NO: 12460 - DNA, 15 bp, Homo sapiens
aactggaagctaata

SEQ ID NO: 12461 - DNA, 15 bp, Homo sapiens
aaactggaagctaat

SEQ ID NO: 12462 - DNA, 15 bp, Homo sapiens
aaaactggaagctaa

SEQ ID NO: 12463 - DNA, 15 bp, Homo sapiens
caaaactggaagcta

SEQ ID NO: 12464 - DNA, 15 bp, Homo sapiens
acaaaactggaagct

SEQ ID NO: 12465 - DNA, 15 bp, Homo sapiens
aacaaaactggaagc

SEQ ID NO: 12466 - DNA, 15 bp, Homo sapiens
gaacaaaactggaag

SEQ ID NO: 12467 - DNA, 15 bp, Homo sapiens
tgaacaaaactggaa

SEQ ID NO: 12468 - DNA, 15 bp, Homo sapiens
atgaacaaaactgga

SEQ ID NO: 12469 - DNA, 15 bp, Homo sapiens
tatgaacaaaactgg

SEQ ID NO: 12470 - DNA, 15 bp, Homo sapiens
atatgaacaaaactg

SEQ ID NO: 12471 - DNA, 15 bp, Homo sapiens
catatgaacaaaact

SEQ ID NO: 12472 - DNA, 15 bp, Homo sapiens
gcatatgaacaaaac

SEQ ID NO: 12473 - DNA, 15 bp, Homo sapiens
tgcatatgaacaaaa

SEQ ID NO: 12474 - DNA, 15 bp, Homo sapiens
atgcatatgaacaaa

SEQ ID NO: 12475 - DNA, 15 bp, Homo sapiens
tatgcatatgaacaa

SEQ ID NO: 12476 - DNA, 15 bp, Homo sapiens
atatgcatatgaaca

SEQ ID NO: 12477 - DNA, 15 bp, Homo sapiens
tatatgcatatgaac

SEQ ID NO: 12478 - DNA, 15 bp, Homo sapiens
gtatatgcatatgaa

SEQ ID NO: 12479 - DNA, 15 bp, Homo sapiens
agtatatgcatatga

SEQ ID NO: 12480 - DNA, 15 bp, Homo sapiens
aagtatatgcatatg

SEQ ID NO: 12481 - DNA, 15 bp, Homo sapiens
aaagtatatgcatat

SEQ ID NO: 12482 - DNA, 15 bp, Homo sapiens
taaagtatatgcata

SEQ ID NO: 12483 - DNA, 15 bp, Homo sapiens
ttaaagtatatgcat

SEQ ID NO: 12484 - DNA, 15 bp, Homo sapiens
tttaaagtatatgca

SEQ ID NO: 12485 - DNA, 15 bp, Homo sapiens
ttttaaagtatatgc

SEQ ID NO: 12486 - DNA, 15 bp, Homo sapiens
gttttaaagtatatg

SEQ ID NO: 12487 - DNA, 15 bp, Homo sapiens
ggttttaaagtatat

SEQ ID NO: 12488 - DNA, 15 bp, Homo sapiens
aggttttaaagtata

SEQ ID NO: 12489 - DNA, 15 bp, Homo sapiens
taggttttaaagtat

SEQ ID NO: 12490 - DNA, 15 bp, Homo sapiens
ctaggttttaaagta

SEQ ID NO: 12491 - DNA, 15 bp, Homo sapiens
actaggttttaaagt

SEQ ID NO: 12492 - DNA, 15 bp, Homo sapiens
aactaggttttaaag

SEQ ID NO: 12493 - DNA, 15 bp, Homo sapiens
gaactaggttttaaa

SEQ ID NO: 12494 - DNA, 15 bp, Homo sapiens
tgaactaggttttaa

SEQ ID NO: 12495 - DNA, 15 bp, Homo sapiens
atgaactaggtttta

SEQ ID NO: 12496 - DNA, 15 bp, Homo sapiens
catgaactaggtttt

SEQ ID NO: 12497 - DNA, 15 bp, Homo sapiens
ccatgaactaggttt

SEQ ID NO: 12498 - DNA, 15 bp, Homo sapiens
accatgaactaggtt

SEQ ID NO: 12499 - DNA, 15 bp, Homo sapiens
caccatgaactaggt

SEQ ID NO: 12500 - DNA, 15 bp, Homo sapiens
tcaccatgaactagg

SEQ ID NO: 12501 - DNA, 15 bp, Homo sapiens
ttcaccatgaactag

SEQ ID NO: 12502 - DNA, 15 bp, Homo sapiens
gttcaccatgaacta

SEQ ID NO: 12503 - DNA, 15 bp, Homo sapiens
agttcaccatgaact

SEQ ID NO: 12504 - DNA, 15 bp, Homo sapiens
aagttcaccatgaac

SEQ ID NO: 12505 - DNA, 15 bp, Homo sapiens
taagttcaccatgaa

SEQ ID NO: 12506 - DNA, 15 bp, Homo sapiens
ttaagttcaccatga

SEQ ID NO: 12507 - DNA, 15 bp, Homo sapiens
cttaagttcaccatg

SEQ ID NO: 12508 - DNA, 15 bp, Homo sapiens
tcttaagttcaccat

SEQ ID NO: 12509 - DNA, 15 bp, Homo sapiens
ctcttaagttcacca

SEQ ID NO: 12510 - DNA, 15 bp, Homo sapiens
cctcttaagttcacc

SEQ ID NO: 12511 - DNA, 15 bp, Homo sapiens
ccctcttaagttcac

SEQ ID NO: 12512 - DNA, 15 bp, Homo sapiens
accctcttaagttca

SEQ ID NO: 12513 - DNA, 15 bp, Homo sapiens
caccctcttaagttc

SEQ ID NO: 12514 - DNA, 15 bp, Homo sapiens
acaccctcttaagtt

SEQ ID NO: 12515 - DNA, 15 bp, Homo sapiens
aacaccctcttaagt

SEQ ID NO: 12516 - DNA, 15 bp, Homo sapiens
gaacaccctcttaag

SEQ ID NO: 12517 - DNA, 15 bp, Homo sapiens
agaacaccctcttaa

SEQ ID NO: 12518 - DNA, 15 bp, Homo sapiens
aagaacaccctctta

SEQ ID NO: 12519 - DNA, 15 bp, Homo sapiens
aaagaacaccctctt

SEQ ID NO: 12520 - DNA, 15 bp, Homo sapiens
aaaagaacaccctct

SEQ ID NO: 12521 - DNA, 15 bp, Homo sapiens
aaaaagaacaccctc

SEQ ID NO: 12522 - DNA, 15 bp, Homo sapiens
taaaaagaacaccct

SEQ ID NO: 12523 - DNA, 15 bp, Homo sapiens
ttaaaaagaacaccc

SEQ ID NO: 12524 - DNA, 15 bp, Homo sapiens
tttaaaaagaacacc

SEQ ID NO: 12525 - DNA, 15 bp, Homo sapiens
ttttaaaaagaacac

SEQ ID NO: 12526 - DNA, 15 bp, Homo sapiens
tttttaaaaagaaca

SEQ ID NO: 12527 - DNA, 15 bp, Homo sapiens
ttttttaaaaagaac

SEQ ID NO: 12528 - DNA, 15 bp, Homo sapiens
gttttttaaaaagaa

SEQ ID NO: 12529 - DNA, 15 bp, Homo sapiens
tgttttttaaaaaga

SEQ ID NO: 12530 - DNA, 15 bp, Homo sapiens
ttgttttttaaaaag

SEQ ID NO: 12531 - DNA, 15 bp, Homo sapiens
attgttttttaaaaa

SEQ ID NO: 12532 - DNA, 15 bp, Homo sapiens
aattgttttttaaaa

SEQ ID NO: 12533 - DNA, 15 bp, Homo sapiens
aaattgttttttaaa

SEQ ID NO: 12534 - DNA, 15 bp, Homo sapiens
gaaattgttttttaa

SEQ ID NO: 12535 - DNA, 15 bp, Homo sapiens
ggaaattgtttttta

SEQ ID NO: 12536 - DNA, 15 bp, Homo sapiens
tggaaattgtttttt

SEQ ID NO: 12537 - DNA, 15 bp, Homo sapiens
atggaaattgttttt

SEQ ID NO: 12538 - DNA, 15 bp, Homo sapiens
aatggaaattgtttt

SEQ ID NO: 12539 - DNA, 15 bp, Homo sapiens
caatggaaattgttt

SEQ ID NO: 12540 - DNA, 15 bp, Homo sapiens
gcaatggaaattgtt

SEQ ID NO: 12541 - DNA, 15 bp, Homo sapiens
tgcaatggaaattgt

SEQ ID NO: 12542 - DNA, 15 bp, Homo sapiens
gtgcaatggaaattg

SEQ ID NO: 12543 - DNA, 15 bp, Homo sapiens
agtgcaatggaaatt

SEQ ID NO: 12544 - DNA, 15 bp, Homo sapiens
aagtgcaatggaaat

SEQ ID NO: 12545 - DNA, 15 bp, Homo sapiens
aaagtgcaatggaaa

SEQ ID NO: 12546 - DNA, 15 bp, Homo sapiens
caaagtgcaatggaa

SEQ ID NO: 12547 - DNA, 15 bp, Homo sapiens
acaaagtgcaatgga

SEQ ID NO: 12548 - DNA, 15 bp, Homo sapiens
gacaaagtgcaatgg

SEQ ID NO: 12549 - DNA, 15 bp, Homo sapiens
cgacaaagtgcaatg

SEQ ID NO: 12550 - DNA, 15 bp, Homo sapiens
acgacaaagtgcaat

SEQ ID NO: 12551 - DNA, 15 bp, Homo sapiens
aacgacaaagtgcaa

SEQ ID NO: 12552 - DNA, 15 bp, Homo sapiens
caacgacaaagtgca

SEQ ID NO: 12553 - DNA, 15 bp, Homo sapiens
gcaacgacaaagtgc

SEQ ID NO: 12554 - DNA, 15 bp, Homo sapiens
ggcaacgacaaagtg

SEQ ID NO: 12555 - DNA, 15 bp, Homo sapiens
aggcaacgacaaagt

SEQ ID NO: 12556 - DNA, 15 bp, Homo sapiens
aaggcaacgacaaag

SEQ ID NO: 12557 - DNA, 15 bp, Homo sapiens
taaggcaacgacaaa

SEQ ID NO: 12558 - DNA, 15 bp, Homo sapiens
ttaaggcaacgacaa

SEQ ID NO: 12559 - DNA, 15 bp, Homo sapiens
attaaggcaacgaca

SEQ ID NO: 12560 - DNA, 15 bp, Homo sapiens
aattaaggcaacgac

SEQ ID NO: 12561 - DNA, 15 bp, Homo sapiens
taattaaggcaacga

SEQ ID NO: 12562 - DNA, 15 bp, Homo sapiens
ttaattaaggcaacg

SEQ ID NO: 12563 - DNA, 15 bp, Homo sapiens
tttaattaaggcaac

SEQ ID NO: 12564 - DNA, 15 bp, Homo sapiens
atttaattaaggcaa

SEQ ID NO: 12565 - DNA, 15 bp, Homo sapiens
catttaattaaggca

SEQ ID NO: 12566 - DNA, 15 bp, Homo sapiens
ccatttaattaaggc

SEQ ID NO: 12567 - DNA, 15 bp, Homo sapiens
accatttaattaagg

SEQ ID NO: 12568 - DNA, 15 bp, Homo sapiens
caccatttaattaag

SEQ ID NO: 12569 - DNA, 15 bp, Homo sapiens
tcaccatttaattaa

SEQ ID NO: 12570 - DNA, 15 bp, Homo sapiens
ttcaccatttaatta

SEQ ID NO: 12571 - DNA, 15 bp, Homo sapiens
tttcaccatttaatt

SEQ ID NO: 12572 - DNA, 15 bp, Homo sapiens
atttcaccatttaat

SEQ ID NO: 12573 - DNA, 15 bp, Homo sapiens
gatttcaccatttaa

SEQ ID NO: 12574 - DNA, 15 bp, Homo sapiens
tgatttcaccattta

SEQ ID NO: 12575 - DNA, 15 bp, Homo sapiens
atgatttcaccattt

SEQ ID NO: 12576 - DNA, 15 bp, Homo sapiens
gatgatttcaccatt

SEQ ID NO: 12577 - DNA, 15 bp, Homo sapiens
tgatgatttcaccat

SEQ ID NO: 12578 - DNA, 15 bp, Homo sapiens
ctgatgatttcacca

SEQ ID NO: 12579 - DNA, 15 bp, Homo sapiens
tctgatgatttcacc

SEQ ID NO: 12580 - DNA, 15 bp, Homo sapiens
ttctgatgatttcac

SEQ ID NO: 12581 - DNA, 15 bp, Homo sapiens
tttctgatgatttca

SEQ ID NO: 12582 - DNA, 15 bp, Homo sapiens
atttctgatgatttc

SEQ ID NO: 12583 - DNA, 15 bp, Homo sapiens
tatttctgatgattt

SEQ ID NO: 12584 - DNA, 15 bp, Homo sapiens
atatttctgatgatt

SEQ ID NO: 12585 - DNA, 15 bp, Homo sapiens
aatatttctgatgat

SEQ ID NO: 12586 - DNA, 15 bp, Homo sapiens
aaatatttctgatga

SEQ ID NO: 12587 - DNA, 15 bp, Homo sapiens
taaatatttctgatg

SEQ ID NO: 12588 - DNA, 15 bp, Homo sapiens
ataaatatttctgat

SEQ ID NO: 12589 - DNA, 15 bp, Homo sapiens
aataaatatttctga

SEQ ID NO: 12590 - DNA, 15 bp, Homo sapiens
aaataaatatttctg

SEQ ID NO: 12591 - DNA, 15 bp, Homo sapiens
aaaataaatatttct

SEQ ID NO: 12592 - DNA, 15 bp, Homo sapiens
gaaaataaatatttc

SEQ ID NO: 12593 - DNA, 15 bp, Homo sapiens
ggaaaataaatattt

SEQ ID NO: 12594 - DNA, 15 bp, Homo sapiens
aggaaaataaatatt

SEQ ID NO: 12595 - DNA, 15 bp, Homo sapiens
taggaaaataaatat

SEQ ID NO: 12596 - DNA, 15 bp, Homo sapiens
ataggaaaataaata

SEQ ID NO: 12597 - DNA, 15 bp, Homo sapiens
tataggaaaataaat

SEQ ID NO: 12598 - DNA, 15 bp, Homo sapiens
gtataggaaaataaa

SEQ ID NO: 12599 - DNA, 15 bp, Homo sapiens
agtataggaaaataa

SEQ ID NO: 12600 - DNA, 15 bp, Homo sapiens
aagtataggaaaata

SEQ ID NO: 12601 - DNA, 15 bp, Homo sapiens
taagtataggaaaat

SEQ ID NO: 12602 - DNA, 15 bp, Homo sapiens
ataagtataggaaaa

SEQ ID NO: 12603 - DNA, 15 bp, Homo sapiens
tataagtataggaaa

SEQ ID NO: 12604 - DNA, 15 bp, Homo sapiens
gtataagtataggaa

SEQ ID NO: 12605 - DNA, 15 bp, Homo sapiens
tgtataagtatagga

SEQ ID NO: 12606 - DNA, 15 bp, Homo sapiens
atgtataagtatagg

SEQ ID NO: 12607 - DNA, 15 bp, Homo sapiens
aatgtataagtatag

SEQ ID NO: 12608 - DNA, 15 bp, Homo sapiens
aaatgtataagtata

SEQ ID NO: 12609 - DNA, 15 bp, Homo sapiens
taaatgtataagtat

SEQ ID NO: 12610 - DNA, 15 bp, Homo sapiens
ataaatgtataagta

SEQ ID NO: 12611 - DNA, 15 bp, Homo sapiens
aataaatgtataagt

SEQ ID NO: 12612 - DNA, 15 bp, Homo sapiens
taataaatgtataag

SEQ ID NO: 12613 - DNA, 15 bp, Homo sapiens
ttaataaatgtataa

SEQ ID NO: 12614 - DNA, 15 bp, Homo sapiens
cttaataaatgtata

SEQ ID NO: 12615 - DNA, 15 bp, Homo sapiens
gcttaataaatgtat

SEQ ID NO: 12616 - DNA, 15 bp, Homo sapiens
agcttaataaatgta

SEQ ID NO: 12617 - DNA, 15 bp, Homo sapiens
aagcttaataaatgt

SEQ ID NO: 12618 - DNA, 15 bp, Homo sapiens
caagcttaataaatg

SEQ ID NO: 12619 - DNA, 15 bp, Homo sapiens
acaagcttaataaat

SEQ ID NO: 12620 - DNA, 15 bp, Homo sapiens
aacaagcttaataaa

SEQ ID NO: 12621 - DNA, 15 bp, Homo sapiens
aaacaagcttaataa

SEQ ID NO: 12622 - DNA, 15 bp, Homo sapiens
gaaacaagcttaata

SEQ ID NO: 12623 - DNA, 15 bp, Homo sapiens
ggaaacaagcttaat

SEQ ID NO: 12624 - DNA, 15 bp, Homo sapiens
tggaaacaagcttaa

SEQ ID NO: 12625 - DNA, 15 bp, Homo sapiens
atggaaacaagctta

SEQ ID NO: 12626 - DNA, 15 bp, Homo sapiens
aatggaaacaagctt

SEQ ID NO: 12627 - DNA, 15 bp, Homo sapiens
aaatggaaacaagct

SEQ ID NO: 12628 - DNA, 15 bp, Homo sapiens
aaaatggaaacaagc

SEQ ID NO: 12629 - DNA, 15 bp, Homo sapiens
aaaaatggaaacaag

SEQ ID NO: 12630 - DNA, 15 bp, Homo sapiens
aaaaaatggaaacaa

SEQ ID NO: 12631 - DNA, 15 bp, Homo sapiens
aaaaaaatggaaaca

SEQ ID NO: 12632 - DNA, 15 bp, Homo sapiens
taaaaaaatggaaac

SEQ ID NO: 12633 - DNA, 15 bp, Homo sapiens
ataaaaaaatggaaa

SEQ ID NO: 12634 - DNA, 15 bp, Homo sapiens
aataaaaaaatggaa

SEQ ID NO: 12635 - DNA, 15 bp, Homo sapiens
aaataaaaaaatgga

SEQ ID NO: 12636 - DNA, 15 bp, Homo sapiens
aaaataaaaaaatgg

SEQ ID NO: 12637 - DNA, 15 bp, Homo sapiens
caaaataaaaaaatg

SEQ ID NO: 12638 - DNA, 15 bp, Homo sapiens
acaaaataaaaaaat

SEQ ID NO: 12639 - DNA, 15 bp, Homo sapiens
cacaaaataaaaaaa

SEQ ID NO: 12640 - DNA, 15 bp, Homo sapiens
tcacaaaataaaaaa

SEQ ID NO: 12641 - DNA, 15 bp, Homo sapiens
atcacaaaataaaaa

SEQ ID NO: 12642 - DNA, 15 bp, Homo sapiens
aatcacaaaataaaa

SEQ ID NO: 12643 - DNA, 15 bp, Homo sapiens
aaatcacaaaataaa

SEQ ID NO: 12644 - DNA, 15 bp, Homo sapiens
aaaatcacaaaataa

SEQ ID NO: 12645 - DNA, 15 bp, Homo sapiens
aaaaatcacaaaata

SEQ ID NO: 12646 - DNA, 15 bp, Homo sapiens
aaaaaatcacaaaat

SEQ ID NO: 12647 - DNA, 15 bp, Homo sapiens
taaaaaatcacaaaa

SEQ ID NO: 12648 - DNA, 15 bp, Homo sapiens
ttaaaaaatcacaaa

SEQ ID NO: 12649 - DNA, 15 bp, Homo sapiens
cttaaaaaatcacaa

SEQ ID NO: 12650 - DNA, 15 bp, Homo sapiens
acttaaaaaatcaca

SEQ ID NO: 12651 - DNA, 15 bp, Homo sapiens
cacttaaaaaatcac

SEQ ID NO: 12652 - DNA, 15 bp, Homo sapiens
ccacttaaaaaatca

SEQ ID NO: 12653 - DNA, 15 bp, Homo sapiens
tccacttaaaaaatc

SEQ ID NO: 12654 - DNA, 15 bp, Homo sapiens
atccacttaaaaaat

SEQ ID NO: 12655 - DNA, 15 bp, Homo sapiens
aatccacttaaaaaa

SEQ ID NO: 12656 - DNA, 15 bp, Homo sapiens
aaatccacttaaaaa

SEQ ID NO: 12657 - DNA, 15 bp, Homo sapiens
taaatccacttaaaa

SEQ ID NO: 12658 - DNA, 15 bp, Homo sapiens
ttaaatccacttaaa

SEQ ID NO: 12659 - DNA, 15 bp, Homo sapiens
cttaaatccacttaa

SEQ ID NO: 12660 - DNA, 15 bp, Homo sapiens
tcttaaatccactta

SEQ ID NO: 12661 - DNA, 15 bp, Homo sapiens
atcttaaatccactt

SEQ ID NO: 12662 - DNA, 15 bp, Homo sapiens
tatcttaaatccact

SEQ ID NO: 12663 - DNA, 15 bp, Homo sapiens
ttatcttaaatccac

SEQ ID NO: 12664 - DNA, 15 bp, Homo sapiens
gttatcttaaatcca

SEQ ID NO: 12665 - DNA, 15 bp, Homo sapiens
ggttatcttaaatcc

SEQ ID NO: 12666 - DNA, 15 bp, Homo sapiens
aggttatcttaaatc

SEQ ID NO: 12667 - DNA, 15 bp, Homo sapiens
taggttatcttaaat

SEQ ID NO: 12668 - DNA, 15 bp, Homo sapiens
ttaggttatcttaaa

SEQ ID NO: 12669 - DNA, 15 bp, Homo sapiens
tttaggttatcttaa

SEQ ID NO: 12670 - DNA, 15 bp, Homo sapiens
gtttaggttatctta

SEQ ID NO: 12671 - DNA, 15 bp, Homo sapiens
tgtttaggttatctt

SEQ ID NO: 12672 - DNA, 15 bp, Homo sapiens
atgtttaggttatct

SEQ ID NO: 12673 - DNA, 15 bp, Homo sapiens
aatgtttaggttatc

SEQ ID NO: 12674 - DNA, 15 bp, Homo sapiens
taatgtttaggttat

SEQ ID NO: 12675 - DNA, 15 bp, Homo sapiens
ctaatgtttaggtta

SEQ ID NO: 12676 - DNA, 15 bp, Homo sapiens
tctaatgtttaggtt

SEQ ID NO: 12677 - DNA, 15 bp, Homo sapiens
ctctaatgtttaggt

SEQ ID NO: 12678 - DNA, 15 bp, Homo sapiens
tctctaatgtttagg

SEQ ID NO: 12679 - DNA, 15 bp, Homo sapiens
ctctctaatgtttag

SEQ ID NO: 12680 - DNA, 15 bp, Homo sapiens
cctctctaatgttta

SEQ ID NO: 12681 - DNA, 15 bp, Homo sapiens
tcctctctaatgttt

SEQ ID NO: 12682 - DNA, 15 bp, Homo sapiens
atcctctctaatgtt

SEQ ID NO: 12683 - DNA, 15 bp, Homo sapiens
aatcctctctaatgt

SEQ ID NO: 12684 - DNA, 15 bp, Homo sapiens
aaatcctctctaatg

SEQ ID NO: 12685 - DNA, 15 bp, Homo sapiens
aaaatcctctctaat

SEQ ID NO: 12686 - DNA, 15 bp, Homo sapiens
gaaaatcctctctaa

SEQ ID NO: 12687 - DNA, 15 bp, Homo sapiens
tgaaaatcctctcta

SEQ ID NO: 12688 - DNA, 15 bp, Homo sapiens
atgaaaatcctctct

SEQ ID NO: 12689 - DNA, 15 bp, Homo sapiens
catgaaaatcctctc

SEQ ID NO: 12690 - DNA, 15 bp, Homo sapiens
ccatgaaaatcctct

SEQ ID NO: 12691 - DNA, 15 bp, Homo sapiens
accatgaaaatcctc

SEQ ID NO: 12692 - DNA, 15 bp, Homo sapiens
aaccatgaaaatcct

SEQ ID NO: 12693 - DNA, 15 bp, Homo sapiens
aaaccatgaaaatcc

SEQ ID NO: 12694 - DNA, 15 bp, Homo sapiens
aaaaccatgaaaatc

SEQ ID NO: 12695 - DNA, 15 bp, Homo sapiens
caaaaccatgaaaat

SEQ ID NO: 12696 - DNA, 15 bp, Homo sapiens
tcaaaaccatgaaaa

SEQ ID NO: 12697 - DNA, 15 bp, Homo sapiens
atcaaaaccatgaaa

SEQ ID NO: 12698 - DNA, 15 bp, Homo sapiens
aatcaaaaccatgaa

SEQ ID NO: 12699 - DNA, 15 bp, Homo sapiens
gaatcaaaaccatga

SEQ ID NO: 12700 - DNA, 15 bp, Homo sapiens
tgaatcaaaaccatg

SEQ ID NO: 12701 - DNA, 15 bp, Homo sapiens
atgaatcaaaaccat

SEQ ID NO: 12702 - DNA, 15 bp, Homo sapiens
catgaatcaaaacca

SEQ ID NO: 12703 - DNA, 15 bp, Homo sapiens
tcatgaatcaaaacc

SEQ ID NO: 12704 - DNA, 15 bp, Homo sapiens
ttcatgaatcaaaac

SEQ ID NO: 12705 - DNA, 15 bp, Homo sapiens
tttcatgaatcaaaa

SEQ ID NO: 12706 - DNA, 15 bp, Homo sapiens
atttcatgaatcaaa

SEQ ID NO: 12707 - DNA, 15 bp, Homo sapiens
gatttcatgaatcaa

SEQ ID NO: 12708 - DNA, 15 bp, Homo sapiens
tgatttcatgaatca

SEQ ID NO: 12709 - DNA, 15 bp, Homo sapiens
atgatttcatgaatc

SEQ ID NO: 12710 - DNA, 15 bp, Homo sapiens
tatgatttcatgaat

SEQ ID NO: 12711 - DNA, 15 bp, Homo sapiens
ttatgatttcatgaa

SEQ ID NO: 12712 - DNA, 15 bp, Homo sapiens
attatgatttcatga

SEQ ID NO: 12713 - DNA, 15 bp, Homo sapiens
cattatgatttcatg

SEQ ID NO: 12714 - DNA, 15 bp, Homo sapiens
acattatgatttcat

SEQ ID NO: 12715 - DNA, 15 bp, Homo sapiens
aacattatgatttca

SEQ ID NO: 12716 - DNA, 15 bp, Homo sapiens
taacattatgatttc

SEQ ID NO: 12717 - DNA, 15 bp, Homo sapiens
ataacattatgattt

SEQ ID NO: 12718 - DNA, 15 bp, Homo sapiens
tataacattatgatt

SEQ ID NO: 12719 - DNA, 15 bp, Homo sapiens
gtataacattatgat

SEQ ID NO: 12720 - DNA, 15 bp, Homo sapiens
tgtataacattatga

SEQ ID NO: 12721 - DNA, 15 bp, Homo sapiens
ttgtataacattatg

SEQ ID NO: 12722 - DNA, 15 bp, Homo sapiens
tttgtataacattat

SEQ ID NO: 12723 - DNA, 15 bp, Homo sapiens
gtttgtataacatta

SEQ ID NO: 12724 - DNA, 15 bp, Homo sapiens
ggtttgtataacatt

SEQ ID NO: 12725 - DNA, 15 bp, Homo sapiens
aggtttgtataacat

SEQ ID NO: 12726 - DNA, 15 bp, Homo sapiens
taggtttgtataaca

SEQ ID NO: 12727 - DNA, 15 bp, Homo sapiens
ttaggtttgtataac

SEQ ID NO: 12728 - DNA, 15 bp, Homo sapiens
gttaggtttgtataa

SEQ ID NO: 12729 - DNA, 15 bp, Homo sapiens
agttaggtttgtata

SEQ ID NO: 12730 - DNA, 15 bp, Homo sapiens
cagttaggtttgtat

SEQ ID NO: 12731 - DNA, 15 bp, Homo sapiens
tcagttaggtttgta

SEQ ID NO: 12732 - DNA, 15 bp, Homo sapiens
ttcagttaggtttgt

SEQ ID NO: 12733 - DNA, 15 bp, Homo sapiens
cttcagttaggtttg

SEQ ID NO: 12734 - DNA, 15 bp, Homo sapiens
acttcagttaggttt

SEQ ID NO: 12735 - DNA, 15 bp, Homo sapiens
cacttcagttaggtt

SEQ ID NO: 12736 - DNA, 15 bp, Homo sapiens
acacttcagttaggt

SEQ ID NO: 12737 - DNA, 15 bp, Homo sapiens
aacacttcagttagg

SEQ ID NO: 12738 - DNA, 15 bp, Homo sapiens
taacacttcagttag

SEQ ID NO: 12739 - DNA, 15 bp, Homo sapiens
ctaacacttcagtta

SEQ ID NO: 12740 - DNA, 15 bp, Homo sapiens
tctaacacttcagtt

SEQ ID NO: 12741 - DNA, 15 bp, Homo sapiens
ctctaacacttcagt

SEQ ID NO: 12742 - DNA, 15 bp, Homo sapiens
gctctaacacttcag

SEQ ID NO: 12743 - DNA, 15 bp, Homo sapiens
ggctctaacacttca

SEQ ID NO: 12744 - DNA, 15 bp, Homo sapiens
aggctctaacacttc

SEQ ID NO: 12745 - DNA, 15 bp, Homo sapiens
aaggctctaacactt

SEQ ID NO: 12746 - DNA, 15 bp, Homo sapiens
caaggctctaacact

SEQ ID NO: 12747 - DNA, 15 bp, Homo sapiens
tcaaggctctaacac

SEQ ID NO: 12748 - DNA, 15 bp, Homo sapiens
ttcaaggctctaaca

SEQ ID NO: 12749 - DNA, 15 bp, Homo sapiens
cttcaaggctctaac

SEQ ID NO: 12750 - DNA, 15 bp, Homo sapiens
tcttcaaggctctaa

SEQ ID NO: 12751 - DNA, 15 bp, Homo sapiens
atcttcaaggctcta

SEQ ID NO: 12752 - DNA, 15 bp, Homo sapiens
aatcttcaaggctct

SEQ ID NO: 12753 - DNA, 15 bp, Homo sapiens
aaatcttcaaggctc

SEQ ID NO: 12754 - DNA, 15 bp, Homo sapiens
aaaatcttcaaggct

SEQ ID NO: 12755 - DNA, 15 bp, Homo sapiens
aaaaatcttcaaggc

SEQ ID NO: 12756 - DNA, 15 bp, Homo sapiens
gaaaaatcttcaagg

SEQ ID NO: 12757 - DNA, 15 bp, Homo sapiens
ggaaaaatcttcaag

SEQ ID NO: 12758 - DNA, 15 bp, Homo sapiens
gggaaaaatcttcaa

SEQ ID NO: 12759 - DNA, 15 bp, Homo sapiens
ggggaaaaatcttca

SEQ ID NO: 12760 - DNA, 15 bp, Homo sapiens
gggggaaaaatcttc

SEQ ID NO: 12761 - DNA, 15 bp, Homo sapiens
cgggggaaaaatctt

SEQ ID NO: 12762 - DNA, 15 bp, Homo sapiens
tcgggggaaaaatct

SEQ ID NO: 12763 - DNA, 15 bp, Homo sapiens
ttcgggggaaaaatc

SEQ ID NO: 12764 - DNA, 15 bp, Homo sapiens
attcgggggaaaaat

SEQ ID NO: 12765 - DNA, 15 bp, Homo sapiens
aattcgggggaaaaa

SEQ ID NO: 12766 - DNA, 15 bp, Homo sapiens
taattcgggggaaaa

SEQ ID NO: 12767 - DNA, 15 bp, Homo sapiens
gtaattcgggggaaa

SEQ ID NO: 12768 - DNA, 15 bp, Homo sapiens
tgtaattcgggggaa

SEQ ID NO: 12769 - DNA, 15 bp, Homo sapiens
atgtaattcggggga

SEQ ID NO: 12770 - DNA, 15 bp, Homo sapiens
tatgtaattcggggg

SEQ ID NO: 12771 - DNA, 15 bp, Homo sapiens
atatgtaattcgggg

SEQ ID NO: 12772 - DNA, 15 bp, Homo sapiens
tatatgtaattcggg

SEQ ID NO: 12773 - DNA, 15 bp, Homo sapiens
ctatatgtaattcgg

SEQ ID NO: 12774 - DNA, 15 bp, Homo sapiens
actatatgtaattcg

SEQ ID NO: 12775 - DNA, 15 bp, Homo sapiens
tactatatgtaattc

SEQ ID NO: 12776 - DNA, 15 bp, Homo sapiens
ttactatatgtaatt

SEQ ID NO: 12777 - DNA, 15 bp, Homo sapiens
gttactatatgtaat

SEQ ID NO: 12778 - DNA, 15 bp, Homo sapiens
agttactatatgtaa

SEQ ID NO: 12779 - DNA, 15 bp, Homo sapiens
gagttactatatgta

SEQ ID NO: 12780 - DNA, 15 bp, Homo sapiens
agagttactatatgt

SEQ ID NO: 12781 - DNA, 15 bp, Homo sapiens
tagagttactatatg

SEQ ID NO: 12782 - DNA, 15 bp, Homo sapiens
gtagagttactatat

SEQ ID NO: 12783 - DNA, 15 bp, Homo sapiens
agtagagttactata

SEQ ID NO: 12784 - DNA, 15 bp, Homo sapiens
aagtagagttactat

SEQ ID NO: 12785 - DNA, 15 bp, Homo sapiens
caagtagagttacta

SEQ ID NO: 12786 - DNA, 15 bp, Homo sapiens
acaagtagagttact

SEQ ID NO: 12787 - DNA, 15 bp, Homo sapiens
tacaagtagagttac

SEQ ID NO: 12788 - DNA, 15 bp, Homo sapiens
atacaagtagagtta

SEQ ID NO: 12789 - DNA, 15 bp, Homo sapiens
aatacaagtagagtt

SEQ ID NO: 12790 - DNA, 15 bp, Homo sapiens
aaatacaagtagagt

SEQ ID NO: 12791 - DNA, 15 bp, Homo sapiens
taaatacaagtagag

SEQ ID NO: 12792 - DNA, 15 bp, Homo sapiens
ttaaatacaagtaga

SEQ ID NO: 12793 - DNA, 15 bp, Homo sapiens
attaaatacaagtag

SEQ ID NO: 12794 - DNA, 15 bp, Homo sapiens
tattaaatacaagta

SEQ ID NO: 12795 - DNA, 15 bp, Homo sapiens
gtattaaatacaagt

SEQ ID NO: 12796 - DNA, 15 bp, Homo sapiens
agtattaaatacaag

SEQ ID NO: 12797 - DNA, 15 bp, Homo sapiens
cagtattaaatacaa

SEQ ID NO: 12798 - DNA, 15 bp, Homo sapiens
tcagtattaaataca

SEQ ID NO: 12799 - DNA, 15 bp, Homo sapiens
ttcagtattaaatac

SEQ ID NO: 12800 - DNA, 15 bp, Homo sapiens
tttcagtattaaata

SEQ ID NO: 12801 - DNA, 15 bp, Homo sapiens
ctttcagtattaaat

SEQ ID NO: 12802 - DNA, 15 bp, Homo sapiens
gctttcagtattaaa

SEQ ID NO: 12803 - DNA, 15 bp, Homo sapiens
tgctttcagtattaa

SEQ ID NO: 12804 - DNA, 15 bp, Homo sapiens
atgctttcagtatta

SEQ ID NO: 12805 - DNA, 15 bp, Homo sapiens
tatgctttcagtatt

SEQ ID NO: 12806 - DNA, 15 bp, Homo sapiens
atatgctttcagtat

SEQ ID NO: 12807 - DNA, 15 bp, Homo sapiens
aatatgctttcagta

SEQ ID NO: 12808 - DNA, 15 bp, Homo sapiens
aaatatgctttcagt

SEQ ID NO: 12809 - DNA, 15 bp, Homo sapiens
aaaatatgctttcag

SEQ ID NO: 12810 - DNA, 15 bp, Homo sapiens
taaaatatgctttca

SEQ ID NO: 12811 - DNA, 15 bp, Homo sapiens
gtaaaatatgctttc

SEQ ID NO: 12812 - DNA, 15 bp, Homo sapiens
agtaaaatatgcttt

SEQ ID NO: 12813 - DNA, 15 bp, Homo sapiens
aagtaaaatatgctt

SEQ ID NO: 12814 - DNA, 15 bp, Homo sapiens
taagtaaaatatgct

SEQ ID NO: 12815 - DNA, 15 bp, Homo sapiens
ataagtaaaatatgc

SEQ ID NO: 12816 - DNA, 15 bp, Homo sapiens
aataagtaaaatatg

SEQ ID NO: 12817 - DNA, 15 bp, Homo sapiens
aaataagtaaaatat

SEQ ID NO: 12818 - DNA, 15 bp, Homo sapiens
taaataagtaaaata

SEQ ID NO: 12819 - DNA, 15 bp, Homo sapiens
ttaaataagtaaaat

SEQ ID NO: 12820 - DNA, 15 bp, Homo sapiens
cttaaataagtaaaa

SEQ ID NO: 12821 - DNA, 15 bp, Homo sapiens
acttaaataagtaaa

SEQ ID NO: 12822 - DNA, 15 bp, Homo sapiens
cacttaaataagtaa

SEQ ID NO: 12823 - DNA, 15 bp, Homo sapiens
tcacttaaataagta

SEQ ID NO: 12824 - DNA, 15 bp, Homo sapiens
ctcacttaaataagt

SEQ ID NO: 12825 - DNA, 15 bp, Homo sapiens
tctcacttaaataag

SEQ ID NO: 12826 - DNA, 15 bp, Homo sapiens
gtctcacttaaataa

SEQ ID NO: 12827 - DNA, 15 bp, Homo sapiens
tgtctcacttaaata

SEQ ID NO: 12828 - DNA, 15 bp, Homo sapiens
ttgtctcacttaaat

SEQ ID NO: 12829 - DNA, 15 bp, Homo sapiens
tttgtctcacttaaa

SEQ ID NO: 12830 - DNA, 15 bp, Homo sapiens
ctttgtctcacttaa

SEQ ID NO: 12831 - DNA, 15 bp, Homo sapiens
actttgtctcactta

SEQ ID NO: 12832 - DNA, 15 bp, Homo sapiens
tactttgtctcactt

SEQ ID NO: 12833 - DNA, 15 bp, Homo sapiens
ttactttgtctcact

SEQ ID NO: 12834 - DNA, 15 bp, Homo sapiens
tttactttgtctcac

SEQ ID NO: 12835 - DNA, 15 bp, Homo sapiens
ttttactttgtctca

SEQ ID NO: 12836 - DNA, 15 bp, Homo sapiens
attttactttgtctc

SEQ ID NO: 12837 - DNA, 15 bp, Homo sapiens
aattttactttgtct

SEQ ID NO: 12838 - DNA, 15 bp, Homo sapiens
aaattttactttgtc

SEQ ID NO: 12839 - DNA, 15 bp, Homo sapiens
taaattttactttgt

SEQ ID NO: 12840 - DNA, 15 bp, Homo sapiens
ctaaattttactttg

SEQ ID NO: 12841 - DNA, 15 bp, Homo sapiens
gctaaattttacttt

SEQ ID NO: 12842 - DNA, 15 bp, Homo sapiens
agctaaattttactt

SEQ ID NO: 12843 - DNA, 15 bp, Homo sapiens
cagctaaattttact

SEQ ID NO: 12844 - DNA, 15 bp, Homo sapiens
tcagctaaattttac

SEQ ID NO: 12845 - DNA, 15 bp, Homo sapiens
ttcagctaaatttta

SEQ ID NO: 12846 - DNA, 15 bp, Homo sapiens
attcagctaaatttt

SEQ ID NO: 12847 - DNA, 15 bp, Homo sapiens
tattcagctaaattt

SEQ ID NO: 12848 - DNA, 15 bp, Homo sapiens
gtattcagctaaatt

SEQ ID NO: 12849 - DNA, 15 bp, Homo sapiens
agtattcagctaaat

SEQ ID NO: 12850 - DNA, 15 bp, Homo sapiens
aagtattcagctaaa

SEQ ID NO: 12851 - DNA, 15 bp, Homo sapiens
aaagtattcagctaa

SEQ ID NO: 12852 - DNA, 15 bp, Homo sapiens
taaagtattcagcta

SEQ ID NO: 12853 - DNA, 15 bp, Homo sapiens
ctaaagtattcagct

SEQ ID NO: 12854 - DNA, 15 bp, Homo sapiens
tctaaagtattcagc

SEQ ID NO: 12855 - DNA, 15 bp, Homo sapiens
atctaaagtattcag

SEQ ID NO: 12856 - DNA, 15 bp, Homo sapiens
gatctaaagtattca

SEQ ID NO: 12857 - DNA, 15 bp, Homo sapiens
agatctaaagtattc

SEQ ID NO: 12858 - DNA, 15 bp, Homo sapiens
tagatctaaagtatt

SEQ ID NO: 12859 - DNA, 15 bp, Homo sapiens
atagatctaaagtat

SEQ ID NO: 12860 - DNA, 15 bp, Homo sapiens
gatagatctaaagta

SEQ ID NO: 12861 - DNA, 15 bp, Homo sapiens
tgatagatctaaagt

SEQ ID NO: 12862 - DNA, 15 bp, Homo sapiens
atgatagatctaaag

SEQ ID NO: 12863 - DNA, 15 bp, Homo sapiens
aatgatagatctaaa

SEQ ID NO: 12864 - DNA, 15 bp, Homo sapiens
aaatgatagatctaa

SEQ ID NO: 12865 - DNA, 15 bp, Homo sapiens
gaaatgatagatcta

SEQ ID NO: 12866 - DNA, 15 bp, Homo sapiens
ggaaatgatagatct

SEQ ID NO: 12867 - DNA, 15 bp, Homo sapiens
aggaaatgatagatc

SEQ ID NO: 12868 - DNA, 15 bp, Homo sapiens
aaggaaatgatagat

SEQ ID NO: 12869 - DNA, 15 bp, Homo sapiens
aaaggaaatgataga

SEQ ID NO: 12870 - DNA, 15 bp, Homo sapiens
aaaaggaaatgatag

SEQ ID NO: 12871 - DNA, 15 bp, Homo sapiens
gaaaaggaaatgata

SEQ ID NO: 12872 - DNA, 15 bp, Homo sapiens
ggaaaaggaaatgat

SEQ ID NO: 12873 - DNA, 15 bp, Homo sapiens
aggaaaaggaaatga

SEQ ID NO: 12874 - DNA, 15 bp, Homo sapiens
caggaaaaggaaatg

SEQ ID NO: 12875 - DNA, 15 bp, Homo sapiens
acaggaaaaggaaat

SEQ ID NO: 12876 - DNA, 15 bp, Homo sapiens
aacaggaaaaggaaa

SEQ ID NO: 12877 - DNA, 15 bp, Homo sapiens
caacaggaaaaggaa

SEQ ID NO: 12878 - DNA, 15 bp, Homo sapiens
acaacaggaaaagga

SEQ ID NO: 12879 - DNA, 15 bp, Homo sapiens
tacaacaggaaaagg

SEQ ID NO: 12880 - DNA, 15 bp, Homo sapiens
ttacaacaggaaaag

SEQ ID NO: 12881 - DNA, 15 bp, Homo sapiens
cttacaacaggaaaa

SEQ ID NO: 12882 - DNA, 15 bp, Homo sapiens
tcttacaacaggaaa

SEQ ID NO: 12883 - DNA, 15 bp, Homo sapiens
ttcttacaacaggaa

SEQ ID NO: 12884 - DNA, 15 bp, Homo sapiens
gttcttacaacagga

SEQ ID NO: 12885 - DNA, 15 bp, Homo sapiens
tgttcttacaacagg

SEQ ID NO: 12886 - DNA, 15 bp, Homo sapiens
atgttcttacaacag

SEQ ID NO: 12887 - DNA, 15 bp, Homo sapiens
aatgttcttacaaca

SEQ ID NO: 12888 - DNA, 15 bp, Homo sapiens
taatgttcttacaac

SEQ ID NO: 12889 - DNA, 15 bp, Homo sapiens
gtaatgttcttacaa

SEQ ID NO: 12890 - DNA, 15 bp, Homo sapiens
tgtaatgttcttaca

SEQ ID NO: 12891 - DNA, 15 bp, Homo sapiens
atgtaatgttcttac

SEQ ID NO: 12892 - DNA, 15 bp, Homo sapiens
aatgtaatgttctta

SEQ ID NO: 12893 - DNA, 15 bp, Homo sapiens
caatgtaatgttctt

SEQ ID NO: 12894 - DNA, 15 bp, Homo sapiens
acaatgtaatgttct

SEQ ID NO: 12895 - DNA, 15 bp, Homo sapiens
cacaatgtaatgttc

SEQ ID NO: 12896 - DNA, 15 bp, Homo sapiens
acacaatgtaatgtt

SEQ ID NO: 12897 - DNA, 15 bp, Homo sapiens
aacacaatgtaatgt

SEQ ID NO: 12898 - DNA, 15 bp, Homo sapiens
caacacaatgtaatg

SEQ ID NO: 12899 - DNA, 15 bp, Homo sapiens
tcaacacaatgtaat

SEQ ID NO: 12900 - DNA, 15 bp, Homo sapiens
ttcaacacaatgtaa

SEQ ID NO: 12901 - DNA, 15 bp, Homo sapiens
tttcaacacaatgta

SEQ ID NO: 12902 - DNA, 15 bp, Homo sapiens
atttcaacacaatgt

SEQ ID NO: 12903 - DNA, 15 bp, Homo sapiens
aatttcaacacaatg

SEQ ID NO: 12904 - DNA, 15 bp, Homo sapiens
taatttcaacacaat

SEQ ID NO: 12905 - DNA, 15 bp, Homo sapiens
ttaatttcaacacaa

SEQ ID NO: 12906 - DNA, 15 bp, Homo sapiens
tttaatttcaacaca

SEQ ID NO: 12907 - DNA, 15 bp, Homo sapiens
ctttaatttcaacac

SEQ ID NO: 12908 - DNA, 15 bp, Homo sapiens
actttaatttcaaca

SEQ ID NO: 12909 - DNA, 15 bp, Homo sapiens
cactttaatttcaac

SEQ ID NO: 12910 - DNA, 15 bp, Homo sapiens
ccactttaatttcaa

SEQ ID NO: 12911 - DNA, 15 bp, Homo sapiens
tccactttaatttca

SEQ ID NO: 12912 - DNA, 15 bp, Homo sapiens
atccactttaatttc

SEQ ID NO: 12913 - DNA, 15 bp, Homo sapiens
tatccactttaattt

SEQ ID NO: 12914 - DNA, 15 bp, Homo sapiens
atatccactttaatt

SEQ ID NO: 12915 - DNA, 15 bp, Homo sapiens
tatatccactttaat

SEQ ID NO: 12916 - DNA, 15 bp, Homo sapiens
ctatatccactttaa

SEQ ID NO: 12917 - DNA, 15 bp, Homo sapiens
tctatatccacttta

SEQ ID NO: 12918 - DNA, 15 bp, Homo sapiens
ttctatatccacttt

SEQ ID NO: 12919 - DNA, 15 bp, Homo sapiens
cttctatatccactt

SEQ ID NO: 12920 - DNA, 15 bp, Homo sapiens
ccttctatatccact

SEQ ID NO: 12921 - DNA, 15 bp, Homo sapiens
accttctatatccac

SEQ ID NO: 12922 - DNA, 15 bp, Homo sapiens
taccttctatatcca

SEQ ID NO: 12923 - DNA, 15 bp, Homo sapiens
ttaccttctatatcc

SEQ ID NO: 12924 - DNA, 15 bp, Homo sapiens
attaccttctatatc

SEQ ID NO: 12925 - DNA, 15 bp, Homo sapiens
aattaccttctatat

SEQ ID NO: 12926 - DNA, 15 bp, Homo sapiens
taattaccttctata

SEQ ID NO: 12927 - DNA, 15 bp, Homo sapiens
ctaattaccttctat

SEQ ID NO: 12928 - DNA, 15 bp, Homo sapiens
tctaattaccttcta

SEQ ID NO: 12929 - DNA, 15 bp, Homo sapiens
ttctaattaccttct

SEQ ID NO: 12930 - DNA, 15 bp, Homo sapiens
attctaattaccttc

SEQ ID NO: 12931 - DNA, 15 bp, Homo sapiens
tattctaattacctt

SEQ ID NO: 12932 - DNA, 15 bp, Homo sapiens
ttattctaattacct

SEQ ID NO: 12933 - DNA, 15 bp, Homo sapiens
tttattctaattacc

SEQ ID NO: 12934 - DNA, 15 bp, Homo sapiens
gtttattctaattac

SEQ ID NO: 12935 - DNA, 15 bp, Homo sapiens
agtttattctaatta

SEQ ID NO: 12936 - DNA, 15 bp, Homo sapiens
cagtttattctaatt

SEQ ID NO: 12937 - DNA, 15 bp, Homo sapiens
gcagtttattctaat

SEQ ID NO: 12938 - DNA, 15 bp, Homo sapiens
ggcagtttattctaa

SEQ ID NO: 12939 - DNA, 15 bp, Homo sapiens
tggcagtttattcta

SEQ ID NO: 12940 - DNA, 15 bp, Homo sapiens
gtggcagtttattct

SEQ ID NO: 12941 - DNA, 15 bp, Homo sapiens
tgtggcagtttattc

SEQ ID NO: 12942 - DNA, 15 bp, Homo sapiens
atgtggcagtttatt

SEQ ID NO: 12943 - DNA, 15 bp, Homo sapiens
gatgtggcagtttat

SEQ ID NO: 12944 - DNA, 15 bp, Homo sapiens
tgatgtggcagttta

SEQ ID NO: 12945 - DNA, 15 bp, Homo sapiens
atgatgtggcagttt

SEQ ID NO: 12946 - DNA, 15 bp, Homo sapiens
aatgatgtggcagtt

SEQ ID NO: 12947 - DNA, 15 bp, Homo sapiens
aaatgatgtggcagt

SEQ ID NO: 12948 - DNA, 15 bp, Homo sapiens
aaaatgatgtggcag

SEQ ID NO: 12949 - DNA, 15 bp, Homo sapiens
aaaaatgatgtggca

SEQ ID NO: 12950 - DNA, 15 bp, Homo sapiens
taaaaatgatgtggc

SEQ ID NO: 12951 - DNA, 15 bp, Homo sapiens
ataaaaatgatgtgg

SEQ ID NO: 12952 - DNA, 15 bp, Homo sapiens
tataaaaatgatgtg

SEQ ID NO: 12953 - DNA, 15 bp, Homo sapiens
ctataaaaatgatgt

SEQ ID NO: 12954 - DNA, 15 bp, Homo sapiens
actataaaaatgatg

SEQ ID NO: 12955 - DNA, 15 bp, Homo sapiens
tactataaaaatgat

SEQ ID NO: 12956 - DNA, 15 bp, Homo sapiens
ttactataaaaatga

SEQ ID NO: 12957 - DNA, 15 bp, Homo sapiens
tttactataaaaatg

SEQ ID NO: 12958 - DNA, 15 bp, Homo sapiens
ctttactataaaaat

SEQ ID NO: 12959 - DNA, 15 bp, Homo sapiens
actttactataaaaa

SEQ ID NO: 12960 - DNA, 15 bp, Homo sapiens
cactttactataaaa

SEQ ID NO: 12961 - DNA, 15 bp, Homo sapiens
ccactttactataaa

SEQ ID NO: 12962 - DNA, 15 bp, Homo sapiens
accactttactataa

SEQ ID NO: 12963 - DNA, 15 bp, Homo sapiens
taccactttactata

SEQ ID NO: 12964 - DNA, 15 bp, Homo sapiens
ttaccactttactat

SEQ ID NO: 12965 - DNA, 15 bp, Homo sapiens
attaccactttacta

SEQ ID NO: 12966 - DNA, 15 bp, Homo sapiens
tattaccactttact

SEQ ID NO: 12967 - DNA, 15 bp, Homo sapiens
ttattaccactttac

SEQ ID NO: 12968 - DNA, 15 bp, Homo sapiens
gttattaccacttta

SEQ ID NO: 12969 - DNA, 15 bp, Homo sapiens
tgttattaccacttt

SEQ ID NO: 12970 - DNA, 15 bp, Homo sapiens
gtgttattaccactt

SEQ ID NO: 12971 - DNA, 15 bp, Homo sapiens
agtgttattaccact

SEQ ID NO: 12972 - DNA, 15 bp, Homo sapiens
tagtgttattaccac

SEQ ID NO: 12973 - DNA, 15 bp, Homo sapiens
atagtgttattacca

SEQ ID NO: 12974 - DNA, 15 bp, Homo sapiens
aatagtgttattacc

SEQ ID NO: 12975 - DNA, 15 bp, Homo sapiens
caatagtgttattac

SEQ ID NO: 12976 - DNA, 15 bp, Homo sapiens
gcaatagtgttatta

SEQ ID NO: 12977 - DNA, 15 bp, Homo sapiens
agcaatagtgttatt

SEQ ID NO: 12978 - DNA, 15 bp, Homo sapiens
aagcaatagtgttat

SEQ ID NO: 12979 - DNA, 15 bp, Homo sapiens
aaagcaatagtgtta

SEQ ID NO: 12980 - DNA, 15 bp, Homo sapiens
gaaagcaatagtgtt

SEQ ID NO: 12981 - DNA, 15 bp, Homo sapiens
agaaagcaatagtgt

SEQ ID NO: 12982 - DNA, 15 bp, Homo sapiens
cagaaagcaatagtg

SEQ ID NO: 12983 - DNA, 15 bp, Homo sapiens
acagaaagcaatagt

SEQ ID NO: 12984 - DNA, 15 bp, Homo sapiens
aacagaaagcaatag

SEQ ID NO: 12985 - DNA, 15 bp, Homo sapiens
aaacagaaagcaata

SEQ ID NO: 12986 - DNA, 15 bp, Homo sapiens
aaaacagaaagcaat

SEQ ID NO: 12987 - DNA, 15 bp, Homo sapiens
aaaaacagaaagcaa

SEQ ID NO: 12988 - DNA, 15 bp, Homo sapiens
aaaaaacagaaagca

SEQ ID NO: 12989 - DNA, 15 bp, Homo sapiens
aaaaaaacagaaagc

SEQ ID NO: 12990 - DNA, 15 bp, Homo sapiens
taaaaaaacagaaag

SEQ ID NO: 12991 - DNA, 15 bp, Homo sapiens
ttaaaaaaacagaaa

SEQ ID NO: 12992 - DNA, 15 bp, Homo sapiens
attaaaaaaacagaa

SEQ ID NO: 12993 - DNA, 15 bp, Homo sapiens
gattaaaaaaacaga

SEQ ID NO: 12994 - DNA, 15 bp, Homo sapiens
tgattaaaaaaacag

SEQ ID NO: 12995 - DNA, 15 bp, Homo sapiens
ctgattaaaaaaaca

SEQ ID NO: 12996 - DNA, 15 bp, Homo sapiens
tctgattaaaaaaac

SEQ ID NO: 12997 - DNA, 15 bp, Homo sapiens
ttctgattaaaaaaa

SEQ ID NO: 12998 - DNA, 15 bp, Homo sapiens
cttctgattaaaaaa

SEQ ID NO: 12999 - DNA, 15 bp, Homo sapiens
ccttctgattaaaaa

SEQ ID NO: 13000 - DNA, 15 bp, Homo sapiens
tccttctgattaaaa

SEQ ID NO: 13001 - DNA, 15 bp, Homo sapiens
ctccttctgattaaa

SEQ ID NO: 13002 - DNA, 15 bp, Homo sapiens
actccttctgattaa

SEQ ID NO: 13003 - DNA, 15 bp, Homo sapiens
tactccttctgatta

SEQ ID NO: 13004 - DNA, 15 bp, Homo sapiens
atactccttctgatt

SEQ ID NO: 13005 - DNA, 15 bp, Homo sapiens
catactccttctgat

SEQ ID NO: 13006 - DNA, 15 bp, Homo sapiens
ccatactccttctga

SEQ ID NO: 13007 - DNA, 15 bp, Homo sapiens
cccatactccttctg

SEQ ID NO: 13008 - DNA, 15 bp, Homo sapiens
gcccatactccttct

SEQ ID NO: 13009 - DNA, 15 bp, Homo sapiens
agcccatactccttc

SEQ ID NO: 13010 - DNA, 15 bp, Homo sapiens
aagcccatactcctt

SEQ ID NO: 13011 - DNA, 15 bp, Homo sapiens
taagcccatactcct

SEQ ID NO: 13012 - DNA, 15 bp, Homo sapiens
ataagcccatactcc

SEQ ID NO: 13013 - DNA, 15 bp, Homo sapiens
tataagcccatactc

SEQ ID NO: 13014 - DNA, 15 bp, Homo sapiens
ttataagcccatact

SEQ ID NO: 13015 - DNA, 15 bp, Homo sapiens
attataagcccatac

SEQ ID NO: 13016 - DNA, 15 bp, Homo sapiens
cattataagcccata

SEQ ID NO: 13017 - DNA, 15 bp, Homo sapiens
tcattataagcccat

SEQ ID NO: 13018 - DNA, 15 bp, Homo sapiens
atcattataagccca

SEQ ID NO: 13019 - DNA, 15 bp, Homo sapiens
catcattataagccc

SEQ ID NO: 13020 - DNA, 15 bp, Homo sapiens
acatcattataagcc

SEQ ID NO: 13021 - DNA, 15 bp, Homo sapiens
aacatcattataagc

SEQ ID NO: 13022 - DNA, 15 bp, Homo sapiens
taacatcattataag

SEQ ID NO: 13023 - DNA, 15 bp, Homo sapiens
gtaacatcattataa

SEQ ID NO: 13024 - DNA, 15 bp, Homo sapiens
agtaacatcattata

SEQ ID NO: 13025 - DNA, 15 bp, Homo sapiens
cagtaacatcattat

SEQ ID NO: 13026 - DNA, 15 bp, Homo sapiens
acagtaacatcatta

SEQ ID NO: 13027 - DNA, 15 bp, Homo sapiens
aacagtaacatcatt

SEQ ID NO: 13028 - DNA, 15 bp, Homo sapiens
gaacagtaacatcat

SEQ ID NO: 13029 - DNA, 15 bp, Homo sapiens
ggaacagtaacatca

SEQ ID NO: 13030 - DNA, 15 bp, Homo sapiens
gggaacagtaacatc

SEQ ID NO: 13031 - DNA, 15 bp, Homo sapiens
agggaacagtaacat

SEQ ID NO: 13032 - DNA, 15 bp, Homo sapiens
cagggaacagtaaca

SEQ ID NO: 13033 - DNA, 15 bp, Homo sapiens
tcagggaacagtaac

SEQ ID NO: 13034 - DNA, 15 bp, Homo sapiens
ttcagggaacagtaa

SEQ ID NO: 13035 - DNA, 15 bp, Homo sapiens
cttcagggaacagta

SEQ ID NO: 13036 - DNA, 15 bp, Homo sapiens
gcttcagggaacagt

SEQ ID NO: 13037 - DNA, 15 bp, Homo sapiens
tgcttcagggaacag

SEQ ID NO: 13038 - DNA, 15 bp, Homo sapiens
atgcttcagggaaca

SEQ ID NO: 13039 - DNA, 15 bp, Homo sapiens
tatgcttcagggaac

SEQ ID NO: 13040 - DNA, 15 bp, Homo sapiens
atatgcttcagggaa

SEQ ID NO: 13041 - DNA, 15 bp, Homo sapiens
aatatgcttcaggga

SEQ ID NO: 13042 - DNA, 15 bp, Homo sapiens
aaatatgcttcaggg

SEQ ID NO: 13043 - DNA, 15 bp, Homo sapiens
aaaatatgcttcagg

SEQ ID NO: 13044 - DNA, 15 bp, Homo sapiens
caaaatatgcttcag

SEQ ID NO: 13045 - DNA, 15 bp, Homo sapiens
tcaaaatatgcttca

SEQ ID NO: 13046 - DNA, 15 bp, Homo sapiens
ttcaaaatatgcttc

SEQ ID NO: 13047 - DNA, 15 bp, Homo sapiens
attcaaaatatgctt

SEQ ID NO: 13048 - DNA, 15 bp, Homo sapiens
cattcaaaatatgct

SEQ ID NO: 13049 - DNA, 15 bp, Homo sapiens
tcattcaaaatatgc

SEQ ID NO: 13050 - DNA, 15 bp, Homo sapiens
atcattcaaaatatg

SEQ ID NO: 13051 - DNA, 15 bp, Homo sapiens
tatcattcaaaatat

SEQ ID NO: 13052 - DNA, 15 bp, Homo sapiens
gtatcattcaaaata

SEQ ID NO: 13053 - DNA, 15 bp, Homo sapiens
cgtatcattcaaaat

SEQ ID NO: 13054 - DNA, 15 bp, Homo sapiens
ccgtatcattcaaaa

SEQ ID NO: 13055 - DNA, 15 bp, Homo sapiens
accgtatcattcaaa

SEQ ID NO: 13056 - DNA, 15 bp, Homo sapiens
aaccgtatcattcaa

SEQ ID NO: 13057 - DNA, 15 bp, Homo sapiens
aaaccgtatcattca

SEQ ID NO: 13058 - DNA, 15 bp, Homo sapiens
taaaccgtatcattc

SEQ ID NO: 13059 - DNA, 15 bp, Homo sapiens
ataaaccgtatcatt

SEQ ID NO: 13060 - DNA, 15 bp, Homo sapiens
tataaaccgtatcat

SEQ ID NO: 13061 - DNA, 15 bp, Homo sapiens
atataaaccgtatca

SEQ ID NO: 13062 - DNA, 15 bp, Homo sapiens
aatataaaccgtatc

SEQ ID NO: 13063 - DNA, 15 bp, Homo sapiens
aaatataaaccgtat

SEQ ID NO: 13064 - DNA, 15 bp, Homo sapiens
caaatataaaccgta

SEQ ID NO: 13065 - DNA, 15 bp, Homo sapiens
gcaaatataaaccgt

SEQ ID NO: 13066 - DNA, 15 bp, Homo sapiens
tgcaaatataaaccg

SEQ ID NO: 13067 - DNA, 15 bp, Homo sapiens
gtgcaaatataaacc

SEQ ID NO: 13068 - DNA, 15 bp, Homo sapiens
tgtgcaaatataaac

SEQ ID NO: 13069 - DNA, 15 bp, Homo sapiens
ctgtgcaaatataaa

SEQ ID NO: 13070 - DNA, 15 bp, Homo sapiens
actgtgcaaatataa

SEQ ID NO: 13071 - DNA, 15 bp, Homo sapiens
aactgtgcaaatata

SEQ ID NO: 13072 - DNA, 15 bp, Homo sapiens
caactgtgcaaatat

SEQ ID NO: 13073 - DNA, 15 bp, Homo sapiens
gcaactgtgcaaata

SEQ ID NO: 13074 - DNA, 15 bp, Homo sapiens
ggcaactgtgcaaat

SEQ ID NO: 13075 - DNA, 15 bp, Homo sapiens
gggcaactgtgcaaa

SEQ ID NO: 13076 - DNA, 15 bp, Homo sapiens
tgggcaactgtgcaa

SEQ ID NO: 13077 - DNA, 15 bp, Homo sapiens
ctgggcaactgtgca

SEQ ID NO: 13078 - DNA, 15 bp, Homo sapiens
cctgggcaactgtgc

SEQ ID NO: 13079 - DNA, 15 bp, Homo sapiens
acctgggcaactgtg

SEQ ID NO: 13080 - DNA, 15 bp, Homo sapiens
tacctgggcaactgt

SEQ ID NO: 13081 - DNA, 15 bp, Homo sapiens
ttacctgggcaactg

SEQ ID NO: 13082 - DNA, 15 bp, Homo sapiens
attacctgggcaact

SEQ ID NO: 13083 - DNA, 15 bp, Homo sapiens
gattacctgggcaac

SEQ ID NO: 13084 - DNA, 15 bp, Homo sapiens
tgattacctgggcaa

SEQ ID NO: 13085 - DNA, 15 bp, Homo sapiens
atgattacctgggca

SEQ ID NO: 13086 - DNA, 15 bp, Homo sapiens
aatgattacctgggc

SEQ ID NO: 13087 - DNA, 15 bp, Homo sapiens
caatgattacctggg

SEQ ID NO: 13088 - DNA, 15 bp, Homo sapiens
acaatgattacctgg

SEQ ID NO: 13089 - DNA, 15 bp, Homo sapiens
cacaatgattacctg

SEQ ID NO: 13090 - DNA, 15 bp, Homo sapiens
tcacaatgattacct

SEQ ID NO: 13091 - DNA, 15 bp, Homo sapiens
atcacaatgattacc

SEQ ID NO: 13092 - DNA, 15 bp, Homo sapiens
tatcacaatgattac

SEQ ID NO: 13093 - DNA, 15 bp, Homo sapiens
atatcacaatgatta

SEQ ID NO: 13094 - DNA, 15 bp, Homo sapiens
aatatcacaatgatt

SEQ ID NO: 13095 - DNA, 15 bp, Homo sapiens
taatatcacaatgat

SEQ ID NO: 13096 - DNA, 15 bp, Homo sapiens
ttaatatcacaatga

SEQ ID NO: 13097 - DNA, 15 bp, Homo sapiens
attaatatcacaatg

SEQ ID NO: 13098 - DNA, 15 bp, Homo sapiens
aattaatatcacaat

SEQ ID NO: 13099 - DNA, 15 bp, Homo sapiens
caattaatatcacaa

SEQ ID NO: 13100 - DNA, 15 bp, Homo sapiens
tcaattaatatcaca

SEQ ID NO: 13101 - DNA, 15 bp, Homo sapiens
atcaattaatatcac

SEQ ID NO: 13102 - DNA, 15 bp, Homo sapiens
gatcaattaatatca

SEQ ID NO: 13103 - DNA, 15 bp, Homo sapiens
tgatcaattaatatc

SEQ ID NO: 13104 - DNA, 15 bp, Homo sapiens
ttgatcaattaatat

SEQ ID NO: 13105 - DNA, 15 bp, Homo sapiens
attgatcaattaata

SEQ ID NO: 13106 - DNA, 15 bp, Homo sapiens
aattgatcaattaat

SEQ ID NO: 13107 - DNA, 15 bp, Homo sapiens
aaattgatcaattaa

SEQ ID NO: 13108 - DNA, 15 bp, Homo sapiens
caaattgatcaatta

SEQ ID NO: 13109 - DNA, 15 bp, Homo sapiens
gcaaattgatcaatt

SEQ ID NO: 13110 - DNA, 15 bp, Homo sapiens
agcaaattgatcaat

SEQ ID NO: 13111 - DNA, 15 bp, Homo sapiens
tagcaaattgatcaa

SEQ ID NO: 13112 - DNA, 15 bp, Homo sapiens
atagcaaattgatca

SEQ ID NO: 13113 - DNA, 15 bp, Homo sapiens
aatagcaaattgatc

SEQ ID NO: 13114 - DNA, 15 bp, Homo sapiens
aaatagcaaattgat

SEQ ID NO: 13115 - DNA, 15 bp, Homo sapiens
taaatagcaaattga

SEQ ID NO: 13116 - DNA, 15 bp, Homo sapiens
ataaatagcaaattg

SEQ ID NO: 13117 - DNA, 15 bp, Homo sapiens
aataaatagcaaatt

SEQ ID NO: 13118 - DNA, 15 bp, Homo sapiens
aaataaatagcaaat

SEQ ID NO: 13119 - DNA, 15 bp, Homo sapiens
caaataaatagcaaa

SEQ ID NO: 13120 - DNA, 15 bp, Homo sapiens
gcaaataaatagcaa

SEQ ID NO: 13121 - DNA, 15 bp, Homo sapiens
cgcaaataaatagca

SEQ ID NO: 13122 - DNA, 15 bp, Homo sapiens
acgcaaataaatagc

SEQ ID NO: 13123 - DNA, 15 bp, Homo sapiens
aacgcaaataaatag

SEQ ID NO: 13124 - DNA, 15 bp, Homo sapiens
aaacgcaaataaata

SEQ ID NO: 13125 - DNA, 15 bp, Homo sapiens
aaaacgcaaataaat

SEQ ID NO: 13126 - DNA, 15 bp, Homo sapiens
taaaacgcaaataaa

SEQ ID NO: 13127 - DNA, 15 bp, Homo sapiens
ttaaaacgcaaataa

SEQ ID NO: 13128 - DNA, 15 bp, Homo sapiens
tttaaaacgcaaata

SEQ ID NO: 13129 - DNA, 15 bp, Homo sapiens
atttaaaacgcaaat

SEQ ID NO: 13130 - DNA, 15 bp, Homo sapiens
gatttaaaacgcaaa

SEQ ID NO: 13131 - DNA, 15 bp, Homo sapiens
tgatttaaaacgcaa

SEQ ID NO: 13132 - DNA, 15 bp, Homo sapiens
ctgatttaaaacgca

SEQ ID NO: 13133 - DNA, 15 bp, Homo sapiens
actgatttaaaacgc

SEQ ID NO: 13134 - DNA, 15 bp, Homo sapiens
tactgatttaaaacg

SEQ ID NO: 13135 - DNA, 15 bp, Homo sapiens
gtactgatttaaaac

SEQ ID NO: 13136 - DNA, 15 bp, Homo sapiens
agtactgatttaaaa

SEQ ID NO: 13137 - DNA, 15 bp, Homo sapiens
tagtactgatttaaa

SEQ ID NO: 13138 - DNA, 15 bp, Homo sapiens
ctagtactgatttaa

SEQ ID NO: 13139 - DNA, 15 bp, Homo sapiens
actagtactgattta

SEQ ID NO: 13140 - DNA, 15 bp, Homo sapiens
tactagtactgattt

SEQ ID NO: 13141 - DNA, 15 bp, Homo sapiens
atactagtactgatt

SEQ ID NO: 13142 - DNA, 15 bp, Homo sapiens
aatactagtactgat

SEQ ID NO: 13143 - DNA, 15 bp, Homo sapiens
aaatactagtactga

SEQ ID NO: 13144 - DNA, 15 bp, Homo sapiens
caaatactagtactg

SEQ ID NO: 13145 - DNA, 15 bp, Homo sapiens
acaaatactagtact

SEQ ID NO: 13146 - DNA, 15 bp, Homo sapiens
cacaaatactagtac

SEQ ID NO: 13147 - DNA, 15 bp, Homo sapiens
gcacaaatactagta

SEQ ID NO: 13148 - DNA, 15 bp, Homo sapiens
agcacaaatactagt

SEQ ID NO: 13149 - DNA, 15 bp, Homo sapiens
aagcacaaatactag

SEQ ID NO: 13150 - DNA, 15 bp, Homo sapiens
taagcacaaatacta

SEQ ID NO: 13151 - DNA, 15 bp, Homo sapiens
ttaagcacaaatact

SEQ ID NO: 13152 - DNA, 15 bp, Homo sapiens
tttaagcacaaatac

SEQ ID NO: 13153 - DNA, 15 bp, Homo sapiens
ttttaagcacaaata

SEQ ID NO: 13154 - DNA, 15 bp, Homo sapiens
tttttaagcacaaat

SEQ ID NO: 13155 - DNA, 15 bp, Homo sapiens
atttttaagcacaaa

SEQ ID NO: 13156 - DNA, 15 bp, Homo sapiens
aatttttaagcacaa

SEQ ID NO: 13157 - DNA, 15 bp, Homo sapiens
aaatttttaagcaca

SEQ ID NO: 13158 - DNA, 15 bp, Homo sapiens
aaaatttttaagcac

SEQ ID NO: 13159 - DNA, 15 bp, Homo sapiens
caaaatttttaagca

SEQ ID NO: 13160 - DNA, 15 bp, Homo sapiens
gcaaaatttttaagc

SEQ ID NO: 13161 - DNA, 15 bp, Homo sapiens
tgcaaaatttttaag

SEQ ID NO: 13162 - DNA, 15 bp, Homo sapiens
atgcaaaatttttaa

SEQ ID NO: 13163 - DNA, 15 bp, Homo sapiens
tatgcaaaattttta

SEQ ID NO: 13164 - DNA, 15 bp, Homo sapiens
atatgcaaaattttt

SEQ ID NO: 13165 - DNA, 15 bp, Homo sapiens
catatgcaaaatttt

SEQ ID NO: 13166 - DNA, 15 bp, Homo sapiens
acatatgcaaaattt

SEQ ID NO: 13167 - DNA, 15 bp, Homo sapiens
aacatatgcaaaatt

SEQ ID NO: 13168 - DNA, 15 bp, Homo sapiens
aaacatatgcaaaat

SEQ ID NO: 13169 - DNA, 15 bp, Homo sapiens
aaaacatatgcaaaa

SEQ ID NO: 13170 - DNA, 15 bp, Homo sapiens
taaaacatatgcaaa

SEQ ID NO: 13171 - DNA, 15 bp, Homo sapiens
ataaaacatatgcaa

SEQ ID NO: 13172 - DNA, 15 bp, Homo sapiens
gataaaacatatgca

SEQ ID NO: 13173 - DNA, 15 bp, Homo sapiens
tgataaaacatatgc

SEQ ID NO: 13174 - DNA, 15 bp, Homo sapiens
ctgataaaacatatg

SEQ ID NO: 13175 - DNA, 15 bp, Homo sapiens
tctgataaaacatat

SEQ ID NO: 13176 - DNA, 15 bp, Homo sapiens
atctgataaaacata

SEQ ID NO: 13177 - DNA, 15 bp, Homo sapiens
aatctgataaaacat

SEQ ID NO: 13178 - DNA, 15 bp, Homo sapiens
aaatctgataaaaca

SEQ ID NO: 13179 - DNA, 15 bp, Homo sapiens
taaatctgataaaac

SEQ ID NO: 13180 - DNA, 15 bp, Homo sapiens
ttaaatctgataaaa

SEQ ID NO: 13181 - DNA, 15 bp, Homo sapiens
attaaatctgataaa

SEQ ID NO: 13182 - DNA, 15 bp, Homo sapiens
aattaaatctgataa

SEQ ID NO: 13183 - DNA, 15 bp, Homo sapiens
aaattaaatctgata

SEQ ID NO: 13184 - DNA, 15 bp, Homo sapiens
aaaattaaatctgat

SEQ ID NO: 13185 - DNA, 15 bp, Homo sapiens
aaaaattaaatctga

SEQ ID NO: 13186 - DNA, 15 bp, Homo sapiens
taaaaattaaatctg

SEQ ID NO: 13187 - DNA, 15 bp, Homo sapiens
ttaaaaattaaatct

SEQ ID NO: 13188 - DNA, 15 bp, Homo sapiens
cttaaaaattaaatc

SEQ ID NO: 13189 - DNA, 15 bp, Homo sapiens
acttaaaaattaaat

SEQ ID NO: 13190 - DNA, 15 bp, Homo sapiens
cacttaaaaattaaa

SEQ ID NO: 13191 - DNA, 15 bp, Homo sapiens
acacttaaaaattaa

SEQ ID NO: 13192 - DNA, 15 bp, Homo sapiens
gacacttaaaaatta

SEQ ID NO: 13193 - DNA, 15 bp, Homo sapiens
tgacacttaaaaatt

SEQ ID NO: 13194 - DNA, 15 bp, Homo sapiens
ctgacacttaaaaat

SEQ ID NO: 13195 - DNA, 15 bp, Homo sapiens
tctgacacttaaaaa

SEQ ID NO: 13196 - DNA, 15 bp, Homo sapiens
atctgacacttaaaa

SEQ ID NO: 13197 - DNA, 15 bp, Homo sapiens
tatctgacacttaaa

SEQ ID NO: 13198 - DNA, 15 bp, Homo sapiens
gtatctgacacttaa

SEQ ID NO: 13199 - DNA, 15 bp, Homo sapiens
agtatctgacactta

SEQ ID NO: 13200 - DNA, 15 bp, Homo sapiens
tagtatctgacactt

SEQ ID NO: 13201 - DNA, 15 bp, Homo sapiens
ttagtatctgacact

SEQ ID NO: 13202 - DNA, 15 bp, Homo sapiens
tttagtatctgacac

SEQ ID NO: 13203 - DNA, 15 bp, Homo sapiens
ttttagtatctgaca

SEQ ID NO: 13204 - DNA, 15 bp, Homo sapiens
gttttagtatctgac

SEQ ID NO: 13205 - DNA, 15 bp, Homo sapiens
tgttttagtatctga

SEQ ID NO: 13206 - DNA, 15 bp, Homo sapiens
ttgttttagtatctg

SEQ ID NO: 13207 - DNA, 15 bp, Homo sapiens
tttgttttagtatct

SEQ ID NO: 13208 - DNA, 15 bp, Homo sapiens
atttgttttagtatc

SEQ ID NO: 13209 - DNA, 15 bp, Homo sapiens
tatttgttttagtat

SEQ ID NO: 13210 - DNA, 15 bp, Homo sapiens
ttatttgttttagta

SEQ ID NO: 13211 - DNA, 15 bp, Homo sapiens
gttatttgttttagt

SEQ ID NO: 13212 - DNA, 15 bp, Homo sapiens
ggttatttgttttag

SEQ ID NO: 13213 - DNA, 15 bp, Homo sapiens
aggttatttgtttta

SEQ ID NO: 13214 - DNA, 15 bp, Homo sapiens
aaggttatttgtttt

SEQ ID NO: 13215 - DNA, 15 bp, Homo sapiens
taaggttatttgttt

SEQ ID NO: 13216 - DNA, 15 bp, Homo sapiens
ttaaggttatttgtt

SEQ ID NO: 13217 - DNA, 15 bp, Homo sapiens
gttaaggttatttgt

SEQ ID NO: 13218 - DNA, 15 bp, Homo sapiens
agttaaggttatttg

SEQ ID NO: 13219 - DNA, 15 bp, Homo sapiens
aagttaaggttattt

SEQ ID NO: 13220 - DNA, 15 bp, Homo sapiens
aaagttaaggttatt

SEQ ID NO: 13221 - DNA, 15 bp, Homo sapiens
taaagttaaggttat

SEQ ID NO: 13222 - DNA, 15 bp, Homo sapiens
ataaagttaaggtta

SEQ ID NO: 13223 - DNA, 15 bp, Homo sapiens
aataaagttaaggtt

SEQ ID NO: 13224 - DNA, 15 bp, Homo sapiens
taataaagttaaggt

SEQ ID NO: 13225 - DNA, 15 bp, Homo sapiens
ttaataaagttaagg

SEQ ID NO: 13226 - DNA, 15 bp, Homo sapiens
tttaataaagttaag

SEQ ID NO: 13227 - DNA, 15 bp, Homo sapiens
atttaataaagttaa

SEQ ID NO: 13228 - DNA, 15 bp, Homo sapiens
aatttaataaagtta

SEQ ID NO: 13229 - DNA, 15 bp, Homo sapiens
taatttaataaagtt

SEQ ID NO: 13230 - DNA, 15 bp, Homo sapiens
ataatttaataaagt

SEQ ID NO: 13231 - DNA, 15 bp, Homo sapiens
tataatttaataaag

SEQ ID NO: 13232 - DNA, 15 bp, Homo sapiens
ttataatttaataaa

SEQ ID NO: 13233 - DNA, 15 bp, Homo sapiens
attataatttaataa

SEQ ID NO: 13234 - DNA, 15 bp, Homo sapiens
aattataatttaata

SEQ ID NO: 13235 - DNA, 15 bp, Homo sapiens
aaattataatttaat

SEQ ID NO: 13236 - DNA, 15 bp, Homo sapiens
aaaattataatttaa

SEQ ID NO: 13237 - DNA, 15 bp, Homo sapiens
aaaaattataattta

SEQ ID NO: 13238 - DNA, 15 bp, Homo sapiens
aaaaaattataattt

SEQ ID NO: 13239 - DNA, 15 bp, Homo sapiens
taaaaaattataatt

SEQ ID NO: 13240 - DNA, 15 bp, Homo sapiens
ataaaaaattataat

SEQ ID NO: 13241 - DNA, 15 bp, Homo sapiens
gataaaaaattataa

SEQ ID NO: 13242 - DNA, 15 bp, Homo sapiens
tgataaaaaattata

SEQ ID NO: 13243 - DNA, 15 bp, Homo sapiens
atgataaaaaattat

SEQ ID NO: 13244 - DNA, 15 bp, Homo sapiens
catgataaaaaatta

SEQ ID NO: 13245 - DNA, 15 bp, Homo sapiens
tcatgataaaaaatt

SEQ ID NO: 13246 - DNA, 15 bp, Homo sapiens
ctcatgataaaaaat

SEQ ID NO: 13247 - DNA, 15 bp, Homo sapiens
cctcatgataaaaaa

SEQ ID NO: 13248 - DNA, 15 bp, Homo sapiens
acctcatgataaaaa

SEQ ID NO: 13249 - DNA, 15 bp, Homo sapiens
cacctcatgataaaa

SEQ ID NO: 13250 - DNA, 15 bp, Homo sapiens
ccacctcatgataaa

SEQ ID NO: 13251 - DNA, 15 bp, Homo sapiens
accacctcatgataa

SEQ ID NO: 13252 - DNA, 15 bp, Homo sapiens
taccacctcatgata

SEQ ID NO: 13253 - DNA, 15 bp, Homo sapiens
ataccacctcatgat

SEQ ID NO: 13254 - DNA, 15 bp, Homo sapiens
aataccacctcatga

SEQ ID NO: 13255 - DNA, 15 bp, Homo sapiens
gaataccacctcatg

SEQ ID NO: 13256 - DNA, 15 bp, Homo sapiens
tgaataccacctcat

SEQ ID NO: 13257 - DNA, 15 bp, Homo sapiens
atgaataccacctca

SEQ ID NO: 13258 - DNA, 15 bp, Homo sapiens
aatgaataccacctc

SEQ ID NO: 13259 - DNA, 15 bp, Homo sapiens
aaatgaataccacct

SEQ ID NO: 13260 - DNA, 15 bp, Homo sapiens
taaatgaataccacc

SEQ ID NO: 13261 - DNA, 15 bp, Homo sapiens
ataaatgaataccac

SEQ ID NO: 13262 - DNA, 15 bp, Homo sapiens
aataaatgaatacca

SEQ ID NO: 13263 - DNA, 15 bp, Homo sapiens
gaataaatgaatacc

SEQ ID NO: 13264 - DNA, 15 bp, Homo sapiens
tgaataaatgaatac

SEQ ID NO: 13265 - DNA, 15 bp, Homo sapiens
atgaataaatgaata

SEQ ID NO: 13266 - DNA, 15 bp, Homo sapiens
tatgaataaatgaat

SEQ ID NO: 13267 - DNA, 15 bp, Homo sapiens
atatgaataaatgaa

SEQ ID NO: 13268 - DNA, 15 bp, Homo sapiens
tatatgaataaatga

SEQ ID NO: 13269 - DNA, 15 bp, Homo sapiens
ctatatgaataaatg

SEQ ID NO: 13270 - DNA, 15 bp, Homo sapiens
actatatgaataaat

SEQ ID NO: 13271 - DNA, 15 bp, Homo sapiens
aactatatgaataaa

SEQ ID NO: 13272 - DNA, 15 bp, Homo sapiens
taactatatgaataa

SEQ ID NO: 13273 - DNA, 15 bp, Homo sapiens
ctaactatatgaata

SEQ ID NO: 13274 - DNA, 15 bp, Homo sapiens
tctaactatatgaat

SEQ ID NO: 13275 - DNA, 15 bp, Homo sapiens
ttctaactatatgaa

SEQ ID NO: 13276 - DNA, 15 bp, Homo sapiens
gttctaactatatga

SEQ ID NO: 13277 - DNA, 15 bp, Homo sapiens
tgttctaactatatg

SEQ ID NO: 13278 - DNA, 15 bp, Homo sapiens
ttgttctaactatat

SEQ ID NO: 13279 - DNA, 15 bp, Homo sapiens
tttgttctaactata

SEQ ID NO: 13280 - DNA, 15 bp, Homo sapiens
ttttgttctaactat

SEQ ID NO: 13281 - DNA, 15 bp, Homo sapiens
tttttgttctaacta

SEQ ID NO: 13282 - DNA, 15 bp, Homo sapiens
ttttttgttctaact

SEQ ID NO: 13283 - DNA, 15 bp, Homo sapiens
attttttgttctaac

SEQ ID NO: 13284 - DNA, 15 bp, Homo sapiens
tattttttgttctaa

SEQ ID NO: 13285 - DNA, 15 bp, Homo sapiens
atattttttgttcta

SEQ ID NO: 13286 - DNA, 15 bp, Homo sapiens
aatattttttgttct

SEQ ID NO: 13287 - DNA, 15 bp, Homo sapiens
aaatattttttgttc

SEQ ID NO: 13288 - DNA, 15 bp, Homo sapiens
taaatattttttgtt

SEQ ID NO: 13289 - DNA, 15 bp, Homo sapiens
ttaaatattttttgt

SEQ ID NO: 13290 - DNA, 15 bp, Homo sapiens
tttaaatattttttg

SEQ ID NO: 13291 - DNA, 15 bp, Homo sapiens
ttttaaatatttttt

SEQ ID NO: 13292 - DNA, 15 bp, Homo sapiens
attttaaatattttt

SEQ ID NO: 13293 - DNA, 15 bp, Homo sapiens
tattttaaatatttt

SEQ ID NO: 13294 - DNA, 15 bp, Homo sapiens
atattttaaatattt

SEQ ID NO: 13295 - DNA, 15 bp, Homo sapiens
aatattttaaatatt

SEQ ID NO: 13296 - DNA, 15 bp, Homo sapiens
caatattttaaatat

SEQ ID NO: 13297 - DNA, 15 bp, Homo sapiens
tcaatattttaaata

SEQ ID NO: 13298 - DNA, 15 bp, Homo sapiens
ctcaatattttaaat

SEQ ID NO: 13299 - DNA, 15 bp, Homo sapiens
cctcaatattttaaa

SEQ ID NO: 13300 - DNA, 15 bp, Homo sapiens
acctcaatattttaa

SEQ ID NO: 13301 - DNA, 15 bp, Homo sapiens
tacctcaatatttta

SEQ ID NO: 13302 - DNA, 15 bp, Homo sapiens
ctacctcaatatttt

SEQ ID NO: 13303 - DNA, 15 bp, Homo sapiens
tctacctcaatattt

SEQ ID NO: 13304 - DNA, 15 bp, Homo sapiens
ttctacctcaatatt

SEQ ID NO: 13305 - DNA, 15 bp, Homo sapiens
tttctacctcaatat

SEQ ID NO: 13306 - DNA, 15 bp, Homo sapiens
gtttctacctcaata

SEQ ID NO: 13307 - DNA, 15 bp, Homo sapiens
tgtttctacctcaat

SEQ ID NO: 13308 - DNA, 15 bp, Homo sapiens
ttgtttctacctcaa

SEQ ID NO: 13309 - DNA, 15 bp, Homo sapiens
tttgtttctacctca

SEQ ID NO: 13310 - DNA, 15 bp, Homo sapiens
atttgtttctacctc

SEQ ID NO: 13311 - DNA, 15 bp, Homo sapiens
aatttgtttctacct

SEQ ID NO: 13312 - DNA, 15 bp, Homo sapiens
taatttgtttctacc

SEQ ID NO: 13313 - DNA, 15 bp, Homo sapiens
ctaatttgtttctac

SEQ ID NO: 13314 - DNA, 15 bp, Homo sapiens
actaatttgtttcta

SEQ ID NO: 13315 - DNA, 15 bp, Homo sapiens
gactaatttgtttct

SEQ ID NO: 13316 - DNA, 15 bp, Homo sapiens
agactaatttgtttc

SEQ ID NO: 13317 - DNA, 15 bp, Homo sapiens
gagactaatttgttt

SEQ ID NO: 13318 - DNA, 15 bp, Homo sapiens
agagactaatttgtt

SEQ ID NO: 13319 - DNA, 15 bp, Homo sapiens
aagagactaatttgt

SEQ ID NO: 13320 - DNA, 15 bp, Homo sapiens
aaagagactaatttg

SEQ ID NO: 13321 - DNA, 15 bp, Homo sapiens
aaaagagactaattt

SEQ ID NO: 13322 - DNA, 15 bp, Homo sapiens
aaaaagagactaatt

SEQ ID NO: 13323 - DNA, 15 bp, Homo sapiens
taaaaagagactaat

SEQ ID NO: 13324 - DNA, 15 bp, Homo sapiens
ttaaaaagagactaa

SEQ ID NO: 13325 - DNA, 15 bp, Homo sapiens
attaaaaagagacta

SEQ ID NO: 13326 - DNA, 15 bp, Homo sapiens
aattaaaaagagact

SEQ ID NO: 13327 - DNA, 15 bp, Homo sapiens
taattaaaaagagac

SEQ ID NO: 13328 - DNA, 15 bp, Homo sapiens
ttaattaaaaagaga

SEQ ID NO: 13329 - DNA, 15 bp, Homo sapiens
tttaattaaaaagag

SEQ ID NO: 13330 - DNA, 15 bp, Homo sapiens
ttttaattaaaaaga

SEQ ID NO: 13331 - DNA, 15 bp, Homo sapiens
cttttaattaaaaag

SEQ ID NO: 13332 - DNA, 15 bp, Homo sapiens
gcttttaattaaaaa

SEQ ID NO: 13333 - DNA, 15 bp, Homo sapiens
ggcttttaattaaaa

SEQ ID NO: 13334 - DNA, 15 bp, Homo sapiens
tggcttttaattaaa

SEQ ID NO: 13335 - DNA, 15 bp, Homo sapiens
ctggcttttaattaa

SEQ ID NO: 13336 - DNA, 15 bp, Homo sapiens
tctggcttttaatta

SEQ ID NO: 13337 - DNA, 15 bp, Homo sapiens
atctggcttttaatt

SEQ ID NO: 13338 - DNA, 15 bp, Homo sapiens
aatctggcttttaat

SEQ ID NO: 13339 - DNA, 15 bp, Homo sapiens
taatctggcttttaa

SEQ ID NO: 13340 - DNA, 15 bp, Homo sapiens
gtaatctggctttta

SEQ ID NO: 13341 - DNA, 15 bp, Homo sapiens
agtaatctggctttt

SEQ ID NO: 13342 - DNA, 15 bp, Homo sapiens
aagtaatctggcttt

SEQ ID NO: 13343 - DNA, 15 bp, Homo sapiens
caagtaatctggctt

SEQ ID NO: 13344 - DNA, 15 bp, Homo sapiens
acaagtaatctggct

SEQ ID NO: 13345 - DNA, 15 bp, Homo sapiens
aacaagtaatctggc

SEQ ID NO: 13346 - DNA, 15 bp, Homo sapiens
taacaagtaatctgg

SEQ ID NO: 13347 - DNA, 15 bp, Homo sapiens
ctaacaagtaatctg

SEQ ID NO: 13348 - DNA, 15 bp, Homo sapiens
tctaacaagtaatct

SEQ ID NO: 13349 - DNA, 15 bp, Homo sapiens
ctctaacaagtaatc

SEQ ID NO: 13350 - DNA, 15 bp, Homo sapiens
actctaacaagtaat

SEQ ID NO: 13351 - DNA, 15 bp, Homo sapiens
tactctaacaagtaa

SEQ ID NO: 13352 - DNA, 15 bp, Homo sapiens
ttactctaacaagta

SEQ ID NO: 13353 - DNA, 15 bp, Homo sapiens
gttactctaacaagt

SEQ ID NO: 13354 - DNA, 15 bp, Homo sapiens
tgttactctaacaag

SEQ ID NO: 13355 - DNA, 15 bp, Homo sapiens
atgttactctaacaa

SEQ ID NO: 13356 - DNA, 15 bp, Homo sapiens
aatgttactctaaca

SEQ ID NO: 13357 - DNA, 15 bp, Homo sapiens
aaatgttactctaac

SEQ ID NO: 13358 - DNA, 15 bp, Homo sapiens
aaaatgttactctaa

SEQ ID NO: 13359 - DNA, 15 bp, Homo sapiens
gaaaatgttactcta

SEQ ID NO: 13360 - DNA, 15 bp, Homo sapiens
ggaaaatgttactct

SEQ ID NO: 13361 - DNA, 15 bp, Homo sapiens
gggaaaatgttactc

SEQ ID NO: 13362 - DNA, 15 bp, Homo sapiens
tgggaaaatgttact

SEQ ID NO: 13363 - DNA, 15 bp, Homo sapiens
ttgggaaaatgttac

SEQ ID NO: 13364 - DNA, 15 bp, Homo sapiens
tttgggaaaatgtta

SEQ ID NO: 13365 - DNA, 15 bp, Homo sapiens
atttgggaaaatgtt

SEQ ID NO: 13366 - DNA, 15 bp, Homo sapiens
catttgggaaaatgt

SEQ ID NO: 13367 - DNA, 15 bp, Homo sapiens
tcatttgggaaaatg

SEQ ID NO: 13368 - DNA, 15 bp, Homo sapiens
ctcatttgggaaaat

SEQ ID NO: 13369 - DNA, 15 bp, Homo sapiens
cctcatttgggaaaa

SEQ ID NO: 13370 - DNA, 15 bp, Homo sapiens
acctcatttgggaaa

SEQ ID NO: 13371 - DNA, 15 bp, Homo sapiens
tacctcatttgggaa

SEQ ID NO: 13372 - DNA, 15 bp, Homo sapiens
ttacctcatttggga

SEQ ID NO: 13373 - DNA, 15 bp, Homo sapiens
tttacctcatttggg

SEQ ID NO: 13374 - DNA, 15 bp, Homo sapiens
ttttacctcatttgg

SEQ ID NO: 13375 - DNA, 15 bp, Homo sapiens
attttacctcatttg

SEQ ID NO: 13376 - DNA, 15 bp, Homo sapiens
aattttacctcattt

SEQ ID NO: 13377 - DNA, 15 bp, Homo sapiens
caattttacctcatt

SEQ ID NO: 13378 - DNA, 15 bp, Homo sapiens
acaattttacctcat

SEQ ID NO: 13379 - DNA, 15 bp, Homo sapiens
aacaattttacctca

SEQ ID NO: 13380 - DNA, 15 bp, Homo sapiens
caacaattttacctc

SEQ ID NO: 13381 - DNA, 15 bp, Homo sapiens
gcaacaattttacct

SEQ ID NO: 13382 - DNA, 15 bp, Homo sapiens
cgcaacaattttacc

SEQ ID NO: 13383 - DNA, 15 bp, Homo sapiens
tcgcaacaattttac

SEQ ID NO: 13384 - DNA, 15 bp, Homo sapiens
gtcgcaacaatttta

SEQ ID NO: 13385 - DNA, 15 bp, Homo sapiens
agtcgcaacaatttt

SEQ ID NO: 13386 - DNA, 15 bp, Homo sapiens
cagtcgcaacaattt

SEQ ID NO: 13387 - DNA, 15 bp, Homo sapiens
acagtcgcaacaatt

SEQ ID NO: 13388 - DNA, 15 bp, Homo sapiens
aacagtcgcaacaat

SEQ ID NO: 13389 - DNA, 15 bp, Homo sapiens
taacagtcgcaacaa

SEQ ID NO: 13390 - DNA, 15 bp, Homo sapiens
ttaacagtcgcaaca

SEQ ID NO: 13391 - DNA, 15 bp, Homo sapiens
tttaacagtcgcaac

SEQ ID NO: 13392 - DNA, 15 bp, Homo sapiens
gtttaacagtcgcaa

SEQ ID NO: 13393 - DNA, 15 bp, Homo sapiens
agtttaacagtcgca

SEQ ID NO: 13394 - DNA, 15 bp, Homo sapiens
aagtttaacagtcgc

SEQ ID NO: 13395 - DNA, 15 bp, Homo sapiens
taagtttaacagtcg

SEQ ID NO: 13396 - DNA, 15 bp, Homo sapiens
ttaagtttaacagtc

SEQ ID NO: 13397 - DNA, 15 bp, Homo sapiens
cttaagtttaacagt

SEQ ID NO: 13398 - DNA, 15 bp, Homo sapiens
ccttaagtttaacag

SEQ ID NO: 13399 - DNA, 15 bp, Homo sapiens
tccttaagtttaaca

SEQ ID NO: 13400 - DNA, 15 bp, Homo sapiens
ttccttaagtttaac

SEQ ID NO: 13401 - DNA, 15 bp, Homo sapiens
tttccttaagtttaa

SEQ ID NO: 13402 - DNA, 15 bp, Homo sapiens
atttccttaagttta

SEQ ID NO: 13403 - DNA, 15 bp, Homo sapiens
aatttccttaagttt

SEQ ID NO: 13404 - DNA, 15 bp, Homo sapiens
aaatttccttaagtt

SEQ ID NO: 13405 - DNA, 15 bp, Homo sapiens
aaaatttccttaagt

SEQ ID NO: 13406 - DNA, 15 bp, Homo sapiens
caaaatttccttaag

SEQ ID NO: 13407 - DNA, 15 bp, Homo sapiens
tcaaaatttccttaa

SEQ ID NO: 13408 - DNA, 15 bp, Homo sapiens
atcaaaatttcctta

SEQ ID NO: 13409 - DNA, 15 bp, Homo sapiens
gatcaaaatttcctt

SEQ ID NO: 13410 - DNA, 15 bp, Homo sapiens
agatcaaaatttcct

SEQ ID NO: 13411 - DNA, 15 bp, Homo sapiens
tagatcaaaatttcc

SEQ ID NO: 13412 - DNA, 15 bp, Homo sapiens
ctagatcaaaatttc

SEQ ID NO: 13413 - DNA, 15 bp, Homo sapiens
cctagatcaaaattt

SEQ ID NO: 13414 - DNA, 15 bp, Homo sapiens
acctagatcaaaatt

SEQ ID NO: 13415 - DNA, 15 bp, Homo sapiens
cacctagatcaaaat

SEQ ID NO: 13416 - DNA, 15 bp, Homo sapiens
acacctagatcaaaa

SEQ ID NO: 13417 - DNA, 15 bp, Homo sapiens
cacacctagatcaaa

SEQ ID NO: 13418 - DNA, 15 bp, Homo sapiens
ccacacctagatcaa

SEQ ID NO: 13419 - DNA, 15 bp, Homo sapiens
accacacctagatca

SEQ ID NO: 13420 - DNA, 15 bp, Homo sapiens
taccacacctagatc

SEQ ID NO: 13421 - DNA, 15 bp, Homo sapiens
ataccacacctagat

SEQ ID NO: 13422 - DNA, 15 bp, Homo sapiens
tataccacacctaga

SEQ ID NO: 13423 - DNA, 15 bp, Homo sapiens
atataccacacctag

SEQ ID NO: 13424 - DNA, 15 bp, Homo sapiens
tatataccacaccta

SEQ ID NO: 13425 - DNA, 15 bp, Homo sapiens
gtatataccacacct

SEQ ID NO: 13426 - DNA, 15 bp, Homo sapiens
ggtatataccacacc

SEQ ID NO: 13427 - DNA, 15 bp, Homo sapiens
aggtatataccacac

SEQ ID NO: 13428 - DNA, 15 bp, Homo sapiens
aaggtatataccaca

SEQ ID NO: 13429 - DNA, 15 bp, Homo sapiens
gaaggtatataccac

SEQ ID NO: 13430 - DNA, 15 bp, Homo sapiens
agaaggtatatacca

SEQ ID NO: 13431 - DNA, 15 bp, Homo sapiens
aagaaggtatatacc

SEQ ID NO: 13432 - DNA, 15 bp, Homo sapiens
caagaaggtatatac

SEQ ID NO: 13433 - DNA, 15 bp, Homo sapiens
acaagaaggtatata

SEQ ID NO: 13434 - DNA, 15 bp, Homo sapiens
cacaagaaggtatat

SEQ ID NO: 13435 - DNA, 15 bp, Homo sapiens
ccacaagaaggtata

SEQ ID NO: 13436 - DNA, 15 bp, Homo sapiens
cccacaagaaggtat

SEQ ID NO: 13437 - DNA, 15 bp, Homo sapiens
ccccacaagaaggta

SEQ ID NO: 13438 - DNA, 15 bp, Homo sapiens
accccacaagaaggt

SEQ ID NO: 13439 - DNA, 15 bp, Homo sapiens
caccccacaagaagg

SEQ ID NO: 13440 - DNA, 15 bp, Homo sapiens
gcaccccacaagaag

SEQ ID NO: 13441 - DNA, 15 bp, Homo sapiens
agcaccccacaagaa

SEQ ID NO: 13442 - DNA, 15 bp, Homo sapiens
tagcaccccacaaga

SEQ ID NO: 13443 - DNA, 15 bp, Homo sapiens
ttagcaccccacaag

SEQ ID NO: 13444 - DNA, 15 bp, Homo sapiens
attagcaccccacaa

SEQ ID NO: 13445 - DNA, 15 bp, Homo sapiens
cattagcaccccaca

SEQ ID NO: 13446 - DNA, 15 bp, Homo sapiens
tcattagcaccccac

SEQ ID NO: 13447 - DNA, 15 bp, Homo sapiens
ttcattagcacccca

SEQ ID NO: 13448 - DNA, 15 bp, Homo sapiens
tttcattagcacccc

SEQ ID NO: 13449 - DNA, 15 bp, Homo sapiens
ttttcattagcaccc

SEQ ID NO: 13450 - DNA, 15 bp, Homo sapiens
gttttcattagcacc

SEQ ID NO: 13451 - DNA, 15 bp, Homo sapiens
tgttttcattagcac

SEQ ID NO: 13452 - DNA, 15 bp, Homo sapiens
ctgttttcattagca

SEQ ID NO: 13453 - DNA, 15 bp, Homo sapiens
cctgttttcattagc

SEQ ID NO: 13454 - DNA, 15 bp, Homo sapiens
ccctgttttcattag

SEQ ID NO: 13455 - DNA, 15 bp, Homo sapiens
tccctgttttcatta

SEQ ID NO: 13456 - DNA, 15 bp, Homo sapiens
atccctgttttcatt

SEQ ID NO: 13457 - DNA, 15 bp, Homo sapiens
catccctgttttcat

SEQ ID NO: 13458 - DNA, 15 bp, Homo sapiens
ccatccctgttttca

SEQ ID NO: 13459 - DNA, 15 bp, Homo sapiens
gccatccctgttttc

SEQ ID NO: 13460 - DNA, 15 bp, Homo sapiens
tgccatccctgtttt

SEQ ID NO: 13461 - DNA, 15 bp, Homo sapiens
ttgccatccctgttt

SEQ ID NO: 13462 - DNA, 15 bp, Homo sapiens
tttgccatccctgtt

SEQ ID NO: 13463 - DNA, 15 bp, Homo sapiens
ttttgccatccctgt

SEQ ID NO: 13464 - DNA, 15 bp, Homo sapiens
tttttgccatccctg

SEQ ID NO: 13465 - DNA, 15 bp, Homo sapiens
atttttgccatccct

SEQ ID NO: 13466 - DNA, 15 bp, Homo sapiens
tatttttgccatccc

SEQ ID NO: 13467 - DNA, 15 bp, Homo sapiens
atatttttgccatcc

SEQ ID NO: 13468 - DNA, 15 bp, Homo sapiens
aatatttttgccatc

SEQ ID NO: 13469 - DNA, 15 bp, Homo sapiens
aaatatttttgccat

SEQ ID NO: 13470 - DNA, 15 bp, Homo sapiens
aaaatatttttgcca

SEQ ID NO: 13471 - DNA, 15 bp, Homo sapiens
caaaatatttttgcc

SEQ ID NO: 13472 - DNA, 15 bp, Homo sapiens
acaaaatatttttgc

SEQ ID NO: 13473 - DNA, 15 bp, Homo sapiens
aacaaaatatttttg

SEQ ID NO: 13474 - DNA, 15 bp, Homo sapiens
aaacaaaatattttt

SEQ ID NO: 13475 - DNA, 15 bp, Homo sapiens
caaacaaaatatttt

SEQ ID NO: 13476 - DNA, 15 bp, Homo sapiens
acaaacaaaatattt

SEQ ID NO: 13477 - DNA, 15 bp, Homo sapiens
cacaaacaaaatatt

SEQ ID NO: 13478 - DNA, 15 bp, Homo sapiens
tcacaaacaaaatat

SEQ ID NO: 13479 - DNA, 15 bp, Homo sapiens
ctcacaaacaaaata

SEQ ID NO: 13480 - DNA, 15 bp, Homo sapiens
actcacaaacaaaat

SEQ ID NO: 13481 - DNA, 15 bp, Homo sapiens
cactcacaaacaaaa

SEQ ID NO: 13482 - DNA, 15 bp, Homo sapiens
acactcacaaacaaa

SEQ ID NO: 13483 - DNA, 15 bp, Homo sapiens
tacactcacaaacaa

SEQ ID NO: 13484 - DNA, 15 bp, Homo sapiens
atacactcacaaaca

SEQ ID NO: 13485 - DNA, 15 bp, Homo sapiens
catacactcacaaac

SEQ ID NO: 13486 - DNA, 15 bp, Homo sapiens
gcatacactcacaaa

SEQ ID NO: 13487 - DNA, 15 bp, Homo sapiens
tgcatacactcacaa

SEQ ID NO: 13488 - DNA, 15 bp, Homo sapiens
atgcatacactcaca

SEQ ID NO: 13489 - DNA, 15 bp, Homo sapiens
aatgcatacactcac

SEQ ID NO: 13490 - DNA, 15 bp, Homo sapiens
aaatgcatacactca

SEQ ID NO: 13491 - DNA, 15 bp, Homo sapiens
taaatgcatacactc

SEQ ID NO: 13492 - DNA, 15 bp, Homo sapiens
ataaatgcatacact

SEQ ID NO: 13493 - DNA, 15 bp, Homo sapiens
cataaatgcatacac

SEQ ID NO: 13494 - DNA, 15 bp, Homo sapiens
gcataaatgcataca

SEQ ID NO: 13495 - DNA, 15 bp, Homo sapiens
agcataaatgcatac

SEQ ID NO: 13496 - DNA, 15 bp, Homo sapiens
aagcataaatgcata

SEQ ID NO: 13497 - DNA, 15 bp, Homo sapiens
aaagcataaatgcat

SEQ ID NO: 13498 - DNA, 15 bp, Homo sapiens
aaaagcataaatgca

SEQ ID NO: 13499 - DNA, 15 bp, Homo sapiens
aaaaagcataaatgc

SEQ ID NO: 13500 - DNA, 15 bp, Homo sapiens
caaaaagcataaatg

SEQ ID NO: 13501 - DNA, 15 bp, Homo sapiens
tcaaaaagcataaat

SEQ ID NO: 13502 - DNA, 15 bp, Homo sapiens
gtcaaaaagcataaa

SEQ ID NO: 13503 - DNA, 15 bp, Homo sapiens
tgtcaaaaagcataa

SEQ ID NO: 13504 - DNA, 15 bp, Homo sapiens
ttgtcaaaaagcata

SEQ ID NO: 13505 - DNA, 15 bp, Homo sapiens
gttgtcaaaaagcat

SEQ ID NO: 13506 - DNA, 15 bp, Homo sapiens
ggttgtcaaaaagca

SEQ ID NO: 13507 - DNA, 15 bp, Homo sapiens
aggttgtcaaaaagc

SEQ ID NO: 13508 - DNA, 15 bp, Homo sapiens
taggttgtcaaaaag

SEQ ID NO: 13509 - DNA, 15 bp, Homo sapiens
ttaggttgtcaaaaa

SEQ ID NO: 13510 - DNA, 15 bp, Homo sapiens
cttaggttgtcaaaa

SEQ ID NO: 13511 - DNA, 15 bp, Homo sapiens
tcttaggttgtcaaa

SEQ ID NO: 13512 - DNA, 15 bp, Homo sapiens
ttcttaggttgtcaa

SEQ ID NO: 13513 - DNA, 15 bp, Homo sapiens
tttcttaggttgtca

SEQ ID NO: 13514 - DNA, 15 bp, Homo sapiens
gtttcttaggttgtc

SEQ ID NO: 13515 - DNA, 15 bp, Homo sapiens
tgtttcttaggttgt

SEQ ID NO: 13516 - DNA, 15 bp, Homo sapiens
gtgtttcttaggttg

SEQ ID NO: 13517 - DNA, 15 bp, Homo sapiens
agtgtttcttaggtt

SEQ ID NO: 13518 - DNA, 15 bp, Homo sapiens
gagtgtttcttaggt

SEQ ID NO: 13519 - DNA, 15 bp, Homo sapiens
agagtgtttcttagg

SEQ ID NO: 13520 - DNA, 15 bp, Homo sapiens
aagagtgtttcttag

SEQ ID NO: 13521 - DNA, 15 bp, Homo sapiens
taagagtgtttctta

SEQ ID NO: 13522 - DNA, 15 bp, Homo sapiens
gtaagagtgtttctt

SEQ ID NO: 13523 - DNA, 15 bp, Homo sapiens
tgtaagagtgtttct

SEQ ID NO: 13524 - DNA, 15 bp, Homo sapiens
atgtaagagtgtttc

SEQ ID NO: 13525 - DNA, 15 bp, Homo sapiens
gatgtaagagtgttt

SEQ ID NO: 13526 - DNA, 15 bp, Homo sapiens
agatgtaagagtgtt

SEQ ID NO: 13527 - DNA, 15 bp, Homo sapiens
cagatgtaagagtgt

SEQ ID NO: 13528 - DNA, 15 bp, Homo sapiens
tcagatgtaagagtg

SEQ ID NO: 13529 - DNA, 15 bp, Homo sapiens
ctcagatgtaagagt

SEQ ID NO: 13530 - DNA, 15 bp, Homo sapiens
actcagatgtaagag

SEQ ID NO: 13531 - DNA, 15 bp, Homo sapiens
tactcagatgtaaga

SEQ ID NO: 13532 - DNA, 15 bp, Homo sapiens
atactcagatgtaag

SEQ ID NO: 13533 - DNA, 15 bp, Homo sapiens
gatactcagatgtaa

SEQ ID NO: 13534 - DNA, 15 bp, Homo sapiens
agatactcagatgta

SEQ ID NO: 13535 - DNA, 15 bp, Homo sapiens
aagatactcagatgt

SEQ ID NO: 13536 - DNA, 15 bp, Homo sapiens
aaagatactcagatg

SEQ ID NO: 13537 - DNA, 15 bp, Homo sapiens
gaaagatactcagat

SEQ ID NO: 13538 - DNA, 15 bp, Homo sapiens
tgaaagatactcaga

SEQ ID NO: 13539 - DNA, 15 bp, Homo sapiens
atgaaagatactcag

SEQ ID NO: 13540 - DNA, 15 bp, Homo sapiens
catgaaagatactca

SEQ ID NO: 13541 - DNA, 15 bp, Homo sapiens
ccatgaaagatactc

SEQ ID NO: 13542 - DNA, 15 bp, Homo sapiens
tccatgaaagatact

SEQ ID NO: 13543 - DNA, 15 bp, Homo sapiens
gtccatgaaagatac

SEQ ID NO: 13544 - DNA, 15 bp, Homo sapiens
agtccatgaaagata

SEQ ID NO: 13545 - DNA, 15 bp, Homo sapiens
tagtccatgaaagat

SEQ ID NO: 13546 - DNA, 15 bp, Homo sapiens
ctagtccatgaaaga

SEQ ID NO: 13547 - DNA, 15 bp, Homo sapiens
gctagtccatgaaag

SEQ ID NO: 13548 - DNA, 15 bp, Homo sapiens
agctagtccatgaaa

SEQ ID NO: 13549 - DNA, 15 bp, Homo sapiens
cagctagtccatgaa

SEQ ID NO: 13550 - DNA, 15 bp, Homo sapiens
acagctagtccatga

SEQ ID NO: 13551 - DNA, 15 bp, Homo sapiens
tacagctagtccatg

SEQ ID NO: 13552 - DNA, 15 bp, Homo sapiens
ctacagctagtccat

SEQ ID NO: 13553 - DNA, 15 bp, Homo sapiens
cctacagctagtcca

SEQ ID NO: 13554 - DNA, 15 bp, Homo sapiens
tcctacagctagtcc

SEQ ID NO: 13555 - DNA, 15 bp, Homo sapiens
ttcctacagctagtc

SEQ ID NO: 13556 - DNA, 15 bp, Homo sapiens
tttcctacagctagt

SEQ ID NO: 13557 - DNA, 15 bp, Homo sapiens
atttcctacagctag

SEQ ID NO: 13558 - DNA, 15 bp, Homo sapiens
gatttcctacagcta

SEQ ID NO: 13559 - DNA, 15 bp, Homo sapiens
agatttcctacagct

SEQ ID NO: 13560 - DNA, 15 bp, Homo sapiens
tagatttcctacagc

SEQ ID NO: 13561 - DNA, 15 bp, Homo sapiens
atagatttcctacag

SEQ ID NO: 13562 - DNA, 15 bp, Homo sapiens
tatagatttcctaca

SEQ ID NO: 13563 - DNA, 15 bp, Homo sapiens
atatagatttcctac

SEQ ID NO: 13564 - DNA, 15 bp, Homo sapiens
tatatagatttccta

SEQ ID NO: 13565 - DNA, 15 bp, Homo sapiens
ttatatagatttcct

SEQ ID NO: 13566 - DNA, 15 bp, Homo sapiens
tttatatagatttcc

SEQ ID NO: 13567 - DNA, 15 bp, Homo sapiens
ttttatatagatttc

SEQ ID NO: 13568 - DNA, 15 bp, Homo sapiens
attttatatagattt

SEQ ID NO: 13569 - DNA, 15 bp, Homo sapiens
tattttatatagatt

SEQ ID NO: 13570 - DNA, 15 bp, Homo sapiens
ctattttatatagat

SEQ ID NO: 13571 - DNA, 15 bp, Homo sapiens
gctattttatataga

SEQ ID NO: 13572 - DNA, 15 bp, Homo sapiens
agctattttatatag

SEQ ID NO: 13573 - DNA, 15 bp, Homo sapiens
aagctattttatata

SEQ ID NO: 13574 - DNA, 15 bp, Homo sapiens
taagctattttatat

SEQ ID NO: 13575 - DNA, 15 bp, Homo sapiens
ctaagctattttata

SEQ ID NO: 13576 - DNA, 15 bp, Homo sapiens
actaagctattttat

SEQ ID NO: 13577 - DNA, 15 bp, Homo sapiens
tactaagctatttta

SEQ ID NO: 13578 - DNA, 15 bp, Homo sapiens
atactaagctatttt

SEQ ID NO: 13579 - DNA, 15 bp, Homo sapiens
tatactaagctattt

SEQ ID NO: 13580 - DNA, 15 bp, Homo sapiens
gtatactaagctatt

SEQ ID NO: 13581 - DNA, 15 bp, Homo sapiens
agtatactaagctat

SEQ ID NO: 13582 - DNA, 15 bp, Homo sapiens
cagtatactaagcta

SEQ ID NO: 13583 - DNA, 15 bp, Homo sapiens
tcagtatactaagct

SEQ ID NO: 13584 - DNA, 15 bp, Homo sapiens
ttcagtatactaagc

SEQ ID NO: 13585 - DNA, 15 bp, Homo sapiens
tttcagtatactaag

SEQ ID NO: 13586 - DNA, 15 bp, Homo sapiens
ctttcagtatactaa

SEQ ID NO: 13587 - DNA, 15 bp, Homo sapiens
actttcagtatacta

SEQ ID NO: 13588 - DNA, 15 bp, Homo sapiens
tactttcagtatact

SEQ ID NO: 13589 - DNA, 15 bp, Homo sapiens
atactttcagtatac

SEQ ID NO: 13590 - DNA, 15 bp, Homo sapiens
catactttcagtata

SEQ ID NO: 13591 - DNA, 15 bp, Homo sapiens
tcatactttcagtat

SEQ ID NO: 13592 - DNA, 15 bp, Homo sapiens
gtcatactttcagta

SEQ ID NO: 13593 - DNA, 15 bp, Homo sapiens
tgtcatactttcagt

SEQ ID NO: 13594 - DNA, 15 bp, Homo sapiens
atgtcatactttcag

SEQ ID NO: 13595 - DNA, 15 bp, Homo sapiens
tatgtcatactttca

SEQ ID NO: 13596 - DNA, 15 bp, Homo sapiens
ctatgtcatactttc

SEQ ID NO: 13597 - DNA, 15 bp, Homo sapiens
actatgtcatacttt

SEQ ID NO: 13598 - DNA, 15 bp, Homo sapiens
aactatgtcatactt

SEQ ID NO: 13599 - DNA, 15 bp, Homo sapiens
aaactatgtcatact

SEQ ID NO: 13600 - DNA, 15 bp, Homo sapiens
aaaactatgtcatac

SEQ ID NO: 13601 - DNA, 15 bp, Homo sapiens
taaaactatgtcata

SEQ ID NO: 13602 - DNA, 15 bp, Homo sapiens
gtaaaactatgtcat

SEQ ID NO: 13603 - DNA, 15 bp, Homo sapiens
tgtaaaactatgtca

SEQ ID NO: 13604 - DNA, 15 bp, Homo sapiens
atgtaaaactatgtc

SEQ ID NO: 13605 - DNA, 15 bp, Homo sapiens
tatgtaaaactatgt

SEQ ID NO: 13606 - DNA, 15 bp, Homo sapiens
atatgtaaaactatg

SEQ ID NO: 13607 - DNA, 15 bp, Homo sapiens
gatatgtaaaactat

SEQ ID NO: 13608 - DNA, 15 bp, Homo sapiens
agatatgtaaaacta

SEQ ID NO: 13609 - DNA, 15 bp, Homo sapiens
tagatatgtaaaact

SEQ ID NO: 13610 - DNA, 15 bp, Homo sapiens
ctagatatgtaaaac

SEQ ID NO: 13611 - DNA, 15 bp, Homo sapiens
tctagatatgtaaaa

SEQ ID NO: 13612 - DNA, 15 bp, Homo sapiens
atctagatatgtaaa

SEQ ID NO: 13613 - DNA, 15 bp, Homo sapiens
aatctagatatgtaa

SEQ ID NO: 13614 - DNA, 15 bp, Homo sapiens
caatctagatatgta

SEQ ID NO: 13615 - DNA, 15 bp, Homo sapiens
acaatctagatatgt

SEQ ID NO: 13616 - DNA, 15 bp, Homo sapiens
cacaatctagatatg

SEQ ID NO: 13617 - DNA, 15 bp, Homo sapiens
ccacaatctagatat

SEQ ID NO: 13618 - DNA, 15 bp, Homo sapiens
accacaatctagata

SEQ ID NO: 13619 - DNA, 15 bp, Homo sapiens
aaccacaatctagat

SEQ ID NO: 13620 - DNA, 15 bp, Homo sapiens
caaccacaatctaga

SEQ ID NO: 13621 - DNA, 15 bp, Homo sapiens
acaaccacaatctag

SEQ ID NO: 13622 - DNA, 15 bp, Homo sapiens
cacaaccacaatcta

SEQ ID NO: 13623 - DNA, 15 bp, Homo sapiens
tcacaaccacaatct

SEQ ID NO: 13624 - DNA, 15 bp, Homo sapiens
atcacaaccacaatc

SEQ ID NO: 13625 - DNA, 15 bp, Homo sapiens
aatcacaaccacaat

SEQ ID NO: 13626 - DNA, 15 bp, Homo sapiens
taatcacaaccacaa

SEQ ID NO: 13627 - DNA, 15 bp, Homo sapiens
ataatcacaaccaca

SEQ ID NO: 13628 - DNA, 15 bp, Homo sapiens
tataatcacaaccac

SEQ ID NO: 13629 - DNA, 15 bp, Homo sapiens
atataatcacaacca

SEQ ID NO: 13630 - DNA, 15 bp, Homo sapiens
tatataatcacaacc

SEQ ID NO: 13631 - DNA, 15 bp, Homo sapiens
atatataatcacaac

SEQ ID NO: 13632 - DNA, 15 bp, Homo sapiens
tatatataatcacaa

SEQ ID NO: 13633 - DNA, 15 bp, Homo sapiens
ttatatataatcaca

SEQ ID NO: 13634 - DNA, 15 bp, Homo sapiens
attatatataatcac

SEQ ID NO: 13635 - DNA, 15 bp, Homo sapiens
tattatatataatca

SEQ ID NO: 13636 - DNA, 15 bp, Homo sapiens
gtattatatataatc

SEQ ID NO: 13637 - DNA, 15 bp, Homo sapiens
agtattatatataat

SEQ ID NO: 13638 - DNA, 15 bp, Homo sapiens
tagtattatatataa

SEQ ID NO: 13639 - DNA, 15 bp, Homo sapiens
atagtattatatata

SEQ ID NO: 13640 - DNA, 15 bp, Homo sapiens
tatagtattatatat

SEQ ID NO: 13641 - DNA, 15 bp, Homo sapiens
ttatagtattatata

SEQ ID NO: 13642 - DNA, 15 bp, Homo sapiens
tttatagtattatat

SEQ ID NO: 13643 - DNA, 15 bp, Homo sapiens
ttttatagtattata

SEQ ID NO: 13644 - DNA, 15 bp, Homo sapiens
attttatagtattat

SEQ ID NO: 13645 - DNA, 15 bp, Homo sapiens
tattttatagtatta

SEQ ID NO: 13646 - DNA, 15 bp, Homo sapiens
atattttatagtatt

SEQ ID NO: 13647 - DNA, 15 bp, Homo sapiens
catattttatagtat

SEQ ID NO: 13648 - DNA, 15 bp, Homo sapiens
gcatattttatagta

SEQ ID NO: 13649 - DNA, 15 bp, Homo sapiens
agcatattttatagt

SEQ ID NO: 13650 - DNA, 15 bp, Homo sapiens
tagcatattttatag

SEQ ID NO: 13651 - DNA, 15 bp, Homo sapiens
ttagcatattttata

SEQ ID NO: 13652 - DNA, 15 bp, Homo sapiens
gttagcatattttat

SEQ ID NO: 13653 - DNA, 15 bp, Homo sapiens
cgttagcatatttta

SEQ ID NO: 13654 - DNA, 15 bp, Homo sapiens
acgttagcatatttt

SEQ ID NO: 13655 - DNA, 15 bp, Homo sapiens
cacgttagcatattt

SEQ ID NO: 13656 - DNA, 15 bp, Homo sapiens
gcacgttagcatatt

SEQ ID NO: 13657 - DNA, 15 bp, Homo sapiens
agcacgttagcatat

SEQ ID NO: 13658 - DNA, 15 bp, Homo sapiens
cagcacgttagcata

SEQ ID NO: 13659 - DNA, 15 bp, Homo sapiens
gcagcacgttagcat

SEQ ID NO: 13660 - DNA, 15 bp, Homo sapiens
agcagcacgttagca

SEQ ID NO: 13661 - DNA, 15 bp, Homo sapiens
aagcagcacgttagc

SEQ ID NO: 13662 - DNA, 15 bp, Homo sapiens
taagcagcacgttag

SEQ ID NO: 13663 - DNA, 15 bp, Homo sapiens
ttaagcagcacgtta

SEQ ID NO: 13664 - DNA, 15 bp, Homo sapiens
attaagcagcacgtt

SEQ ID NO: 13665 - DNA, 15 bp, Homo sapiens
tattaagcagcacgt

SEQ ID NO: 13666 - DNA, 15 bp, Homo sapiens
ttattaagcagcacg

SEQ ID NO: 13667 - DNA, 15 bp, Homo sapiens
attattaagcagcac

SEQ ID NO: 13668 - DNA, 15 bp, Homo sapiens
tattattaagcagca

SEQ ID NO: 13669 - DNA, 15 bp, Homo sapiens
gtattattaagcagc

SEQ ID NO: 13670 - DNA, 15 bp, Homo sapiens
agtattattaagcag

SEQ ID NO: 13671 - DNA, 15 bp, Homo sapiens
tagtattattaagca

SEQ ID NO: 13672 - DNA, 15 bp, Homo sapiens
atagtattattaagc

SEQ ID NO: 13673 - DNA, 15 bp, Homo sapiens
aatagtattattaag

SEQ ID NO: 13674 - DNA, 15 bp, Homo sapiens
aaatagtattattaa

SEQ ID NO: 13675 - DNA, 15 bp, Homo sapiens
caaatagtattatta

SEQ ID NO: 13676 - DNA, 15 bp, Homo sapiens
ccaaatagtattatt

SEQ ID NO: 13677 - DNA, 15 bp, Homo sapiens
tccaaatagtattat

SEQ ID NO: 13678 - DNA, 15 bp, Homo sapiens
atccaaatagtatta

SEQ ID NO: 13679 - DNA, 15 bp, Homo sapiens
aatccaaatagtatt

SEQ ID NO: 13680 - DNA, 15 bp, Homo sapiens
aaatccaaatagtat

SEQ ID NO: 13681 - DNA, 15 bp, Homo sapiens
aaaatccaaatagta

SEQ ID NO: 13682 - DNA, 15 bp, Homo sapiens
aaaaatccaaatagt

SEQ ID NO: 13683 - DNA, 15 bp, Homo sapiens
aaaaaatccaaatag

SEQ ID NO: 13684 - DNA, 15 bp, Homo sapiens
aaaaaaatccaaata

SEQ ID NO: 13685 - DNA, 15 bp, Homo sapiens
aaaaaaaatccaaat

SEQ ID NO: 13686 - DNA, 15 bp, Homo sapiens
taaaaaaaatccaaa

SEQ ID NO: 13687 - DNA, 15 bp, Homo sapiens
ttaaaaaaaatccaa

SEQ ID NO: 13688 - DNA, 15 bp, Homo sapiens
attaaaaaaaatcca

SEQ ID NO: 13689 - DNA, 15 bp, Homo sapiens
tattaaaaaaaatcc

SEQ ID NO: 13690 - DNA, 15 bp, Homo sapiens
gtattaaaaaaaatc

SEQ ID NO: 13691 - DNA, 15 bp, Homo sapiens
agtattaaaaaaaat

SEQ ID NO: 13692 - DNA, 15 bp, Homo sapiens
cagtattaaaaaaaa

SEQ ID NO: 13693 - DNA, 15 bp, Homo sapiens
tcagtattaaaaaaa

SEQ ID NO: 13694 - DNA, 15 bp, Homo sapiens
ttcagtattaaaaaa

SEQ ID NO: 13695 - DNA, 15 bp, Homo sapiens
tttcagtattaaaaa

SEQ ID NO: 13696 - DNA, 15 bp, Homo sapiens
ttttcagtattaaaa

SEQ ID NO: 13697 - DNA, 15 bp, Homo sapiens
cttttcagtattaaa

SEQ ID NO: 13698 - DNA, 15 bp, Homo sapiens
ccttttcagtattaa

SEQ ID NO: 13699 - DNA, 15 bp, Homo sapiens
accttttcagtatta

SEQ ID NO: 13700 - DNA, 15 bp, Homo sapiens
gaccttttcagtatt

SEQ ID NO: 13701 - DNA, 15 bp, Homo sapiens
tgaccttttcagtat

SEQ ID NO: 13702 - DNA, 15 bp, Homo sapiens
gtgaccttttcagta

SEQ ID NO: 13703 - DNA, 15 bp, Homo sapiens
tgtgaccttttcagt

SEQ ID NO: 13704 - DNA, 15 bp, Homo sapiens
gtgtgaccttttcag

SEQ ID NO: 13705 - DNA, 15 bp, Homo sapiens
tgtgtgaccttttca

SEQ ID NO: 13706 - DNA, 15 bp, Homo sapiens
ctgtgtgaccttttc

SEQ ID NO: 13707 - DNA, 15 bp, Homo sapiens
tctgtgtgacctttt

SEQ ID NO: 13708 - DNA, 15 bp, Homo sapiens
atctgtgtgaccttt

SEQ ID NO: 13709 - DNA, 15 bp, Homo sapiens
aatctgtgtgacctt

SEQ ID NO: 13710 - DNA, 15 bp, Homo sapiens
caatctgtgtgacct

SEQ ID NO: 13711 - DNA, 15 bp, Homo sapiens
acaatctgtgtgacc

SEQ ID NO: 13712 - DNA, 15 bp, Homo sapiens
cacaatctgtgtgac

SEQ ID NO: 13713 - DNA, 15 bp, Homo sapiens
tcacaatctgtgtga

SEQ ID NO: 13714 - DNA, 15 bp, Homo sapiens
atcacaatctgtgtg

SEQ ID NO: 13715 - DNA, 15 bp, Homo sapiens
aatcacaatctgtgt

SEQ ID NO: 13716 - DNA, 15 bp, Homo sapiens
taatcacaatctgtg

SEQ ID NO: 13717 - DNA, 15 bp, Homo sapiens
ataatcacaatctgt

SEQ ID NO: 13718 - DNA, 15 bp, Homo sapiens
aataatcacaatctg

SEQ ID NO: 13719 - DNA, 15 bp, Homo sapiens
caataatcacaatct

SEQ ID NO: 13720 - DNA, 15 bp, Homo sapiens
acaataatcacaatc

SEQ ID NO: 13721 - DNA, 15 bp, Homo sapiens
cacaataatcacaat

SEQ ID NO: 13722 - DNA, 15 bp, Homo sapiens
acacaataatcacaa

SEQ ID NO: 13723 - DNA, 15 bp, Homo sapiens
tacacaataatcaca

SEQ ID NO: 13724 - DNA, 15 bp, Homo sapiens
ctacacaataatcac

SEQ ID NO: 13725 - DNA, 15 bp, Homo sapiens
actacacaataatca

SEQ ID NO: 13726 - DNA, 15 bp, Homo sapiens
cactacacaataatc

SEQ ID NO: 13727 - DNA, 15 bp, Homo sapiens
acactacacaataat

SEQ ID NO: 13728 - DNA, 15 bp, Homo sapiens
gacactacacaataa

SEQ ID NO: 13729 - DNA, 15 bp, Homo sapiens
ggacactacacaata

SEQ ID NO: 13730 - DNA, 15 bp, Homo sapiens
tggacactacacaat

SEQ ID NO: 13731 - DNA, 15 bp, Homo sapiens
ttggacactacacaa

SEQ ID NO: 13732 - DNA, 15 bp, Homo sapiens
cttggacactacaca

SEQ ID NO: 13733 - DNA, 15 bp, Homo sapiens
tcttggacactacac

SEQ ID NO: 13734 - DNA, 15 bp, Homo sapiens
ttcttggacactaca

SEQ ID NO: 13735 - DNA, 15 bp, Homo sapiens
gttcttggacactac

SEQ ID NO: 13736 - DNA, 15 bp, Homo sapiens
agttcttggacacta

SEQ ID NO: 13737 - DNA, 15 bp, Homo sapiens
tagttcttggacact

SEQ ID NO: 13738 - DNA, 15 bp, Homo sapiens
ttagttcttggacac

SEQ ID NO: 13739 - DNA, 15 bp, Homo sapiens
cttagttcttggaca

SEQ ID NO: 13740 - DNA, 15 bp, Homo sapiens
ccttagttcttggac

SEQ ID NO: 13741 - DNA, 15 bp, Homo sapiens
gccttagttcttgga

SEQ ID NO: 13742 - DNA, 15 bp, Homo sapiens
ggccttagttcttgg

SEQ ID NO: 13743 - DNA, 15 bp, Homo sapiens
aggccttagttcttg

SEQ ID NO: 13744 - DNA, 15 bp, Homo sapiens
taggccttagttctt

SEQ ID NO: 13745 - DNA, 15 bp, Homo sapiens
gtaggccttagttct

SEQ ID NO: 13746 - DNA, 15 bp, Homo sapiens
ggtaggccttagttc

SEQ ID NO: 13747 - DNA, 15 bp, Homo sapiens
tggtaggccttagtt

SEQ ID NO: 13748 - DNA, 15 bp, Homo sapiens
atggtaggccttagt

SEQ ID NO: 13749 - DNA, 15 bp, Homo sapiens
gatggtaggccttag

SEQ ID NO: 13750 - DNA, 15 bp, Homo sapiens
agatggtaggcctta

SEQ ID NO: 13751 - DNA, 15 bp, Homo sapiens
cagatggtaggcctt

SEQ ID NO: 13752 - DNA, 15 bp, Homo sapiens
acagatggtaggcct

SEQ ID NO: 13753 - DNA, 15 bp, Homo sapiens
aacagatggtaggcc

SEQ ID NO: 13754 - DNA, 15 bp, Homo sapiens
taacagatggtaggc

SEQ ID NO: 13755 - DNA, 15 bp, Homo sapiens
gtaacagatggtagg

SEQ ID NO: 13756 - DNA, 15 bp, Homo sapiens
agtaacagatggtag

SEQ ID NO: 13757 - DNA, 15 bp, Homo sapiens
gagtaacagatggta

SEQ ID NO: 13758 - DNA, 15 bp, Homo sapiens
tgagtaacagatggt

SEQ ID NO: 13759 - DNA, 15 bp, Homo sapiens
ttgagtaacagatgg

SEQ ID NO: 13760 - DNA, 15 bp, Homo sapiens
tttgagtaacagatg

SEQ ID NO: 13761 - DNA, 15 bp, Homo sapiens
atttgagtaacagat

SEQ ID NO: 13762 - DNA, 15 bp, Homo sapiens
catttgagtaacaga

SEQ ID NO: 13763 - DNA, 15 bp, Homo sapiens
acatttgagtaacag

SEQ ID NO: 13764 - DNA, 15 bp, Homo sapiens
tacatttgagtaaca

SEQ ID NO: 13765 - DNA, 15 bp, Homo sapiens
atacatttgagtaac

SEQ ID NO: 13766 - DNA, 15 bp, Homo sapiens
catacatttgagtaa

SEQ ID NO: 13767 - DNA, 15 bp, Homo sapiens
tcatacatttgagta

SEQ ID NO: 13768 - DNA, 15 bp, Homo sapiens
ttcatacatttgagt

SEQ ID NO: 13769 - DNA, 15 bp, Homo sapiens
tttcatacatttgag

SEQ ID NO: 13770 - DNA, 15 bp, Homo sapiens
ttttcatacatttga

SEQ ID NO: 13771 - DNA, 15 bp, Homo sapiens
tttttcatacatttg

SEQ ID NO: 13772 - DNA, 15 bp, Homo sapiens
ctttttcatacattt

SEQ ID NO: 13773 - DNA, 15 bp, Homo sapiens
actttttcatacatt

SEQ ID NO: 13774 - DNA, 15 bp, Homo sapiens
aactttttcatacat

SEQ ID NO: 13775 - DNA, 15 bp, Homo sapiens
taactttttcataca

SEQ ID NO: 13776 - DNA, 15 bp, Homo sapiens
ttaactttttcatac

SEQ ID NO: 13777 - DNA, 15 bp, Homo sapiens
cttaactttttcata

SEQ ID NO: 13778 - DNA, 15 bp, Homo sapiens
tcttaactttttcat

SEQ ID NO: 13779 - DNA, 15 bp, Homo sapiens
atcttaactttttca

SEQ ID NO: 13780 - DNA, 15 bp, Homo sapiens
tatcttaactttttc

SEQ ID NO: 13781 - DNA, 15 bp, Homo sapiens
ttatcttaacttttt

SEQ ID NO: 13782 - DNA, 15 bp, Homo sapiens
attatcttaactttt

SEQ ID NO: 13783 - DNA, 15 bp, Homo sapiens
aattatcttaacttt

SEQ ID NO: 13784 - DNA, 15 bp, Homo sapiens
aaattatcttaactt

SEQ ID NO: 13785 - DNA, 15 bp, Homo sapiens
taaattatcttaact

SEQ ID NO: 13786 - DNA, 15 bp, Homo sapiens
ctaaattatcttaac

SEQ ID NO: 13787 - DNA, 15 bp, Homo sapiens
actaaattatcttaa

SEQ ID NO: 13788 - DNA, 15 bp, Homo sapiens
cactaaattatctta

SEQ ID NO: 13789 - DNA, 15 bp, Homo sapiens
tcactaaattatctt

SEQ ID NO: 13790 - DNA, 15 bp, Homo sapiens
atcactaaattatct

SEQ ID NO: 13791 - DNA, 15 bp, Homo sapiens
tatcactaaattatc

SEQ ID NO: 13792 - DNA, 15 bp, Homo sapiens
atatcactaaattat

SEQ ID NO: 13793 - DNA, 15 bp, Homo sapiens
tatatcactaaatta

SEQ ID NO: 13794 - DNA, 15 bp, Homo sapiens
ttatatcactaaatt

SEQ ID NO: 13795 - DNA, 15 bp, Homo sapiens
cttatatcactaaat

SEQ ID NO: 13796 - DNA, 15 bp, Homo sapiens
acttatatcactaaa

SEQ ID NO: 13797 - DNA, 15 bp, Homo sapiens
cacttatatcactaa

SEQ ID NO: 13798 - DNA, 15 bp, Homo sapiens
ccacttatatcacta

SEQ ID NO: 13799 - DNA, 15 bp, Homo sapiens
accacttatatcact

SEQ ID NO: 13800 - DNA, 15 bp, Homo sapiens
aaccacttatatcac

SEQ ID NO: 13801 - DNA, 15 bp, Homo sapiens
aaaccacttatatca

SEQ ID NO: 13802 - DNA, 15 bp, Homo sapiens
aaaaccacttatatc

SEQ ID NO: 13803 - DNA, 15 bp, Homo sapiens
caaaaccacttatat

SEQ ID NO: 13804 - DNA, 15 bp, Homo sapiens
tcaaaaccacttata

SEQ ID NO: 13805 - DNA, 15 bp, Homo sapiens
gtcaaaaccacttat

SEQ ID NO: 13806 - DNA, 15 bp, Homo sapiens
tgtcaaaaccactta

SEQ ID NO: 13807 - DNA, 15 bp, Homo sapiens
gtgtcaaaaccactt

SEQ ID NO: 13808 - DNA, 15 bp, Homo sapiens
ggtgtcaaaaccact

SEQ ID NO: 13809 - DNA, 15 bp, Homo sapiens
tggtgtcaaaaccac

SEQ ID NO: 13810 - DNA, 15 bp, Homo sapiens
gtggtgtcaaaacca

SEQ ID NO: 13811 - DNA, 15 bp, Homo sapiens
agtggtgtcaaaacc

SEQ ID NO: 13812 - DNA, 15 bp, Homo sapiens
cagtggtgtcaaaac

SEQ ID NO: 13813 - DNA, 15 bp, Homo sapiens
acagtggtgtcaaaa

SEQ ID NO: 13814 - DNA, 15 bp, Homo sapiens
aacagtggtgtcaaa

SEQ ID NO: 13815 - DNA, 15 bp, Homo sapiens
aaacagtggtgtcaa

SEQ ID NO: 13816 - DNA, 15 bp, Homo sapiens
aaaacagtggtgtca

SEQ ID NO: 13817 - DNA, 15 bp, Homo sapiens
aaaaacagtggtgtc

SEQ ID NO: 13818 - DNA, 15 bp, Homo sapiens
caaaaacagtggtgt

SEQ ID NO: 13819 - DNA, 15 bp, Homo sapiens
ccaaaaacagtggtg

SEQ ID NO: 13820 - DNA, 15 bp, Homo sapiens
tccaaaaacagtggt

SEQ ID NO: 13821 - DNA, 15 bp, Homo sapiens
ttccaaaaacagtgg

SEQ ID NO: 13822 - DNA, 15 bp, Homo sapiens
attccaaaaacagtg

SEQ ID NO: 13823 - DNA, 15 bp, Homo sapiens
tattccaaaaacagt

SEQ ID NO: 13824 - DNA, 15 bp, Homo sapiens
ttattccaaaaacag

SEQ ID NO: 13825 - DNA, 15 bp, Homo sapiens
attattccaaaaaca

SEQ ID NO: 13826 - DNA, 15 bp, Homo sapiens
gattattccaaaaac

SEQ ID NO: 13827 - DNA, 15 bp, Homo sapiens
agattattccaaaaa

SEQ ID NO: 13828 - DNA, 15 bp, Homo sapiens
tagattattccaaaa

SEQ ID NO: 13829 - DNA, 15 bp, Homo sapiens
ttagattattccaaa

SEQ ID NO: 13830 - DNA, 15 bp, Homo sapiens
attagattattccaa

SEQ ID NO: 13831 - DNA, 15 bp, Homo sapiens
aattagattattcca

SEQ ID NO: 13832 - DNA, 15 bp, Homo sapiens
taattagattattcc

SEQ ID NO: 13833 - DNA, 15 bp, Homo sapiens
ataattagattattc

SEQ ID NO: 13834 - DNA, 15 bp, Homo sapiens
cataattagattatt

SEQ ID NO: 13835 - DNA, 15 bp, Homo sapiens
tcataattagattat

SEQ ID NO: 13836 - DNA, 15 bp, Homo sapiens
atcataattagatta

SEQ ID NO: 13837 - DNA, 15 bp, Homo sapiens
aatcataattagatt

SEQ ID NO: 13838 - DNA, 15 bp, Homo sapiens
aaatcataattagat

SEQ ID NO: 13839 - DNA, 15 bp, Homo sapiens
aaaatcataattaga

SEQ ID NO: 13840 - DNA, 15 bp, Homo sapiens
aaaaatcataattag

SEQ ID NO: 13841 - DNA, 15 bp, Homo sapiens
taaaaatcataatta

SEQ ID NO: 13842 - DNA, 15 bp, Homo sapiens
ataaaaatcataatt

SEQ ID NO: 13843 - DNA, 15 bp, Homo sapiens
tataaaaatcataat

SEQ ID NO: 13844 - DNA, 15 bp, Homo sapiens
ttataaaaatcataa

SEQ ID NO: 13845 - DNA, 15 bp, Homo sapiens
tttataaaaatcata

SEQ ID NO: 13846 - DNA, 15 bp, Homo sapiens
ctttataaaaatcat

SEQ ID NO: 13847 - DNA, 15 bp, Homo sapiens
tctttataaaaatca

SEQ ID NO: 13848 - DNA, 15 bp, Homo sapiens
gtctttataaaaatc

SEQ ID NO: 13849 - DNA, 15 bp, Homo sapiens
agtctttataaaaat

SEQ ID NO: 13850 - DNA, 15 bp, Homo sapiens
tagtctttataaaaa

SEQ ID NO: 13851 - DNA, 15 bp, Homo sapiens
ttagtctttataaaa

SEQ ID NO: 13852 - DNA, 15 bp, Homo sapiens
attagtctttataaa

SEQ ID NO: 13853 - DNA, 15 bp, Homo sapiens
tattagtctttataa

SEQ ID NO: 13854 - DNA, 15 bp, Homo sapiens
atattagtctttata

SEQ ID NO: 13855 - DNA, 15 bp, Homo sapiens
gatattagtctttat

SEQ ID NO: 13856 - DNA, 15 bp, Homo sapiens
tgatattagtcttta

SEQ ID NO: 13857 - DNA, 15 bp, Homo sapiens
ttgatattagtcttt

SEQ ID NO: 13858 - DNA, 15 bp, Homo sapiens
tttgatattagtctt

SEQ ID NO: 13859 - DNA, 15 bp, Homo sapiens
atttgatattagtct

SEQ ID NO: 13860 - DNA, 15 bp, Homo sapiens
aatttgatattagtc

SEQ ID NO: 13861 - DNA, 15 bp, Homo sapiens
aaatttgatattagt

SEQ ID NO: 13862 - DNA, 15 bp, Homo sapiens
aaaatttgatattag

SEQ ID NO: 13863 - DNA, 15 bp, Homo sapiens
taaaatttgatatta

SEQ ID NO: 13864 - DNA, 15 bp, Homo sapiens
ttaaaatttgatatt

SEQ ID NO: 13865 - DNA, 15 bp, Homo sapiens
tttaaaatttgatat

SEQ ID NO: 13866 - DNA, 15 bp, Homo sapiens
gtttaaaatttgata

SEQ ID NO: 13867 - DNA, 15 bp, Homo sapiens
cgtttaaaatttgat

SEQ ID NO: 13868 - DNA, 15 bp, Homo sapiens
acgtttaaaatttga

SEQ ID NO: 13869 - DNA, 15 bp, Homo sapiens
aacgtttaaaatttg

SEQ ID NO: 13870 - DNA, 15 bp, Homo sapiens
aaacgtttaaaattt

SEQ ID NO: 13871 - DNA, 15 bp, Homo sapiens
caaacgtttaaaatt

SEQ ID NO: 13872 - DNA, 15 bp, Homo sapiens
gcaaacgtttaaaat

SEQ ID NO: 13873 - DNA, 15 bp, Homo sapiens
tgcaaacgtttaaaa

SEQ ID NO: 13874 - DNA, 15 bp, Homo sapiens
ttgcaaacgtttaaa

SEQ ID NO: 13875 - DNA, 15 bp, Homo sapiens
tttgcaaacgtttaa

SEQ ID NO: 13876 - DNA, 15 bp, Homo sapiens
ttttgcaaacgttta

SEQ ID NO: 13877 - DNA, 15 bp, Homo sapiens
tttttgcaaacgttt

SEQ ID NO: 13878 - DNA, 15 bp, Homo sapiens
atttttgcaaacgtt

SEQ ID NO: 13879 - DNA, 15 bp, Homo sapiens
catttttgcaaacgt

SEQ ID NO: 13880 - DNA, 15 bp, Homo sapiens
tcatttttgcaaacg

SEQ ID NO: 13881 - DNA, 15 bp, Homo sapiens
ttcatttttgcaaac

SEQ ID NO: 13882 - DNA, 15 bp, Homo sapiens
tttcatttttgcaaa

SEQ ID NO: 13883 - DNA, 15 bp, Homo sapiens
gtttcatttttgcaa

SEQ ID NO: 13884 - DNA, 15 bp, Homo sapiens
ggtttcatttttgca

SEQ ID NO: 13885 - DNA, 15 bp, Homo sapiens
aggtttcatttttgc

SEQ ID NO: 13886 - DNA, 15 bp, Homo sapiens
taggtttcatttttg

SEQ ID NO: 13887 - DNA, 15 bp, Homo sapiens
ttaggtttcattttt

SEQ ID NO: 13888 - DNA, 15 bp, Homo sapiens
attaggtttcatttt

SEQ ID NO: 13889 - DNA, 15 bp, Homo sapiens
tattaggtttcattt

SEQ ID NO: 13890 - DNA, 15 bp, Homo sapiens
ctattaggtttcatt

SEQ ID NO: 13891 - DNA, 15 bp, Homo sapiens
actattaggtttcat

SEQ ID NO: 13892 - DNA, 15 bp, Homo sapiens
aactattaggtttca

SEQ ID NO: 13893 - DNA, 15 bp, Homo sapiens
taactattaggtttc

SEQ ID NO: 13894 - DNA, 15 bp, Homo sapiens
ataactattaggttt

SEQ ID NO: 13895 - DNA, 15 bp, Homo sapiens
tataactattaggtt

SEQ ID NO: 13896 - DNA, 15 bp, Homo sapiens
gtataactattaggt

SEQ ID NO: 13897 - DNA, 15 bp, Homo sapiens
agtataactattagg

SEQ ID NO: 13898 - DNA, 15 bp, Homo sapiens
cagtataactattag

SEQ ID NO: 13899 - DNA, 15 bp, Homo sapiens
acagtataactatta

SEQ ID NO: 13900 - DNA, 15 bp, Homo sapiens
aacagtataactatt

SEQ ID NO: 13901 - DNA, 15 bp, Homo sapiens
taacagtataactat

SEQ ID NO: 13902 - DNA, 15 bp, Homo sapiens
ataacagtataacta

SEQ ID NO: 13903 - DNA, 15 bp, Homo sapiens
aataacagtataact

SEQ ID NO: 13904 - DNA, 15 bp, Homo sapiens
aaataacagtataac

SEQ ID NO: 13905 - DNA, 15 bp, Homo sapiens
taaataacagtataa

SEQ ID NO: 13906 - DNA, 15 bp, Homo sapiens
ataaataacagtata

SEQ ID NO: 13907 - DNA, 15 bp, Homo sapiens
tataaataacagtat

SEQ ID NO: 13908 - DNA, 15 bp, Homo sapiens
atataaataacagta

SEQ ID NO: 13909 - DNA, 15 bp, Homo sapiens
aatataaataacagt

SEQ ID NO: 13910 - DNA, 15 bp, Homo sapiens
aaatataaataacag

SEQ ID NO: 13911 - DNA, 15 bp, Homo sapiens
aaaatataaataaca

SEQ ID NO: 13912 - DNA, 15 bp, Homo sapiens
aaaaatataaataac

SEQ ID NO: 13913 - DNA, 15 bp, Homo sapiens
gaaaaatataaataa

SEQ ID NO: 13914 - DNA, 15 bp, Homo sapiens
agaaaaatataaata

SEQ ID NO: 13915 - DNA, 15 bp, Homo sapiens
tagaaaaatataaat

SEQ ID NO: 13916 - DNA, 15 bp, Homo sapiens
atagaaaaatataaa

SEQ ID NO: 13917 - DNA, 15 bp, Homo sapiens
aatagaaaaatataa

SEQ ID NO: 13918 - DNA, 15 bp, Homo sapiens
taatagaaaaatata

SEQ ID NO: 13919 - DNA, 15 bp, Homo sapiens
gtaatagaaaaatat

SEQ ID NO: 13920 - DNA, 15 bp, Homo sapiens
tgtaatagaaaaata

SEQ ID NO: 13921 - DNA, 15 bp, Homo sapiens
ttgtaatagaaaaat

SEQ ID NO: 13922 - DNA, 15 bp, Homo sapiens
attgtaatagaaaaa

SEQ ID NO: 13923 - DNA, 15 bp, Homo sapiens
tattgtaatagaaaa

SEQ ID NO: 13924 - DNA, 15 bp, Homo sapiens
gtattgtaatagaaa

SEQ ID NO: 13925 - DNA, 15 bp, Homo sapiens
tgtattgtaatagaa

SEQ ID NO: 13926 - DNA, 15 bp, Homo sapiens
ctgtattgtaataga

SEQ ID NO: 13927 - DNA, 15 bp, Homo sapiens
tctgtattgtaatag

SEQ ID NO: 13928 - DNA, 15 bp, Homo sapiens
atctgtattgtaata

SEQ ID NO: 13929 - DNA, 15 bp, Homo sapiens
tatctgtattgtaat

SEQ ID NO: 13930 - DNA, 15 bp, Homo sapiens
gtatctgtattgtaa

SEQ ID NO: 13931 - DNA, 15 bp, Homo sapiens
agtatctgtattgta

SEQ ID NO: 13932 - DNA, 15 bp, Homo sapiens
cagtatctgtattgt

SEQ ID NO: 13933 - DNA, 15 bp, Homo sapiens
ccagtatctgtattg

SEQ ID NO: 13934 - DNA, 15 bp, Homo sapiens
gccagtatctgtatt

SEQ ID NO: 13935 - DNA, 15 bp, Homo sapiens
agccagtatctgtat

SEQ ID NO: 13936 - DNA, 15 bp, Homo sapiens
cagccagtatctgta

SEQ ID NO: 13937 - DNA, 15 bp, Homo sapiens
tcagccagtatctgt

SEQ ID NO: 13938 - DNA, 15 bp, Homo sapiens
ctcagccagtatctg

SEQ ID NO: 13939 - DNA, 15 bp, Homo sapiens
tctcagccagtatct

SEQ ID NO: 13940 - DNA, 15 bp, Homo sapiens
ttctcagccagtatc

SEQ ID NO: 13941 - DNA, 15 bp, Homo sapiens
gttctcagccagtat

SEQ ID NO: 13942 - DNA, 15 bp, Homo sapiens
agttctcagccagta

SEQ ID NO: 13943 - DNA, 15 bp, Homo sapiens
tagttctcagccagt

SEQ ID NO: 13944 - DNA, 15 bp, Homo sapiens
ttagttctcagccag

SEQ ID NO: 13945 - DNA, 15 bp, Homo sapiens
tttagttctcagcca

SEQ ID NO: 13946 - DNA, 15 bp, Homo sapiens
ctttagttctcagcc

SEQ ID NO: 13947 - DNA, 15 bp, Homo sapiens
tctttagttctcagc

SEQ ID NO: 13948 - DNA, 15 bp, Homo sapiens
atctttagttctcag

SEQ ID NO: 13949 - DNA, 15 bp, Homo sapiens
aatctttagttctca

SEQ ID NO: 13950 - DNA, 15 bp, Homo sapiens
caatctttagttctc

SEQ ID NO: 13951 - DNA, 15 bp, Homo sapiens
acaatctttagttct

SEQ ID NO: 13952 - DNA, 15 bp, Homo sapiens
cacaatctttagttc

SEQ ID NO: 13953 - DNA, 15 bp, Homo sapiens
acacaatctttagtt

SEQ ID NO: 13954 - DNA, 15 bp, Homo sapiens
tacacaatctttagt

SEQ ID NO: 13955 - DNA, 15 bp, Homo sapiens
ttacacaatctttag

SEQ ID NO: 13956 - DNA, 15 bp, Homo sapiens
attacacaatcttta

SEQ ID NO: 13957 - DNA, 15 bp, Homo sapiens
tattacacaatcttt

SEQ ID NO: 13958 - DNA, 15 bp, Homo sapiens
ttattacacaatctt

SEQ ID NO: 13959 - DNA, 15 bp, Homo sapiens
tttattacacaatct

SEQ ID NO: 13960 - DNA, 15 bp, Homo sapiens
gtttattacacaatc

SEQ ID NO: 13961 - DNA, 15 bp, Homo sapiens
cgtttattacacaat

SEQ ID NO: 13962 - DNA, 15 bp, Homo sapiens
gcgtttattacacaa

SEQ ID NO: 13963 - DNA, 15 bp, Homo sapiens
ggcgtttattacaca

SEQ ID NO: 13964 - DNA, 15 bp, Homo sapiens
aggcgtttattacac

SEQ ID NO: 13965 - DNA, 15 bp, Homo sapiens
caggcgtttattaca

SEQ ID NO: 13966 - DNA, 15 bp, Homo sapiens
ccaggcgtttattac

SEQ ID NO: 13967 - DNA, 15 bp, Homo sapiens
gccaggcgtttatta

SEQ ID NO: 13968 - DNA, 15 bp, Homo sapiens
ggccaggcgtttatt

SEQ ID NO: 13969 - DNA, 15 bp, Homo sapiens
aggccaggcgtttat

SEQ ID NO: 13970 - DNA, 15 bp, Homo sapiens
aaggccaggcgttta

SEQ ID NO: 13971 - DNA, 15 bp, Homo sapiens
gaaggccaggcgttt

SEQ ID NO: 13972 - DNA, 15 bp, Homo sapiens
tgaaggccaggcgtt

SEQ ID NO: 13973 - DNA, 15 bp, Homo sapiens
ctgaaggccaggcgt

SEQ ID NO: 13974 - DNA, 15 bp, Homo sapiens
actgaaggccaggcg

SEQ ID NO: 13975 - DNA, 15 bp, Homo sapiens
gactgaaggccaggc

SEQ ID NO: 13976 - DNA, 15 bp, Homo sapiens
tgactgaaggccagg

SEQ ID NO: 13977 - DNA, 15 bp, Homo sapiens
atgactgaaggccag

SEQ ID NO: 13978 - DNA, 15 bp, Homo sapiens
aatgactgaaggcca

SEQ ID NO: 13979 - DNA, 15 bp, Homo sapiens
aaatgactgaaggcc

SEQ ID NO: 13980 - DNA, 15 bp, Homo sapiens
caaatgactgaaggc

SEQ ID NO: 13981 - DNA, 15 bp, Homo sapiens
ccaaatgactgaagg

SEQ ID NO: 13982 - DNA, 15 bp, Homo sapiens
accaaatgactgaag

SEQ ID NO: 13983 - DNA, 15 bp, Homo sapiens
aaccaaatgactgaa

SEQ ID NO: 13984 - DNA, 15 bp, Homo sapiens
aaaccaaatgactga

SEQ ID NO: 13985 - DNA, 15 bp, Homo sapiens
aaaaccaaatgactg

SEQ ID NO: 13986 - DNA, 15 bp, Homo sapiens
aaaaaccaaatgact

SEQ ID NO: 13987 - DNA, 15 bp, Homo sapiens
aaaaaaccaaatgac

SEQ ID NO: 13988 - DNA, 15 bp, Homo sapiens
aaaaaaaccaaatga

SEQ ID NO: 13989 - DNA, 15 bp, Homo sapiens
aaaaaaaaccaaatg

SEQ ID NO: 13990 - DNA, 15 bp, Homo sapiens
aaaaaaaaaccaaat

SEQ ID NO: 13991 - DNA, 15 bp, Homo sapiens
aaaaaaaaaaccaaa

SEQ ID NO: 13992 - DNA, 15 bp, Homo sapiens
gaaaaaaaaaaccaa

SEQ ID NO: 13993 - DNA, 15 bp, Homo sapiens
ggaaaaaaaaaacca

SEQ ID NO: 13994 - DNA, 15 bp, Homo sapiens
gggaaaaaaaaaacc

SEQ ID NO: 13995 - DNA, 15 bp, Homo sapiens
agggaaaaaaaaaac

SEQ ID NO: 13996 - DNA, 15 bp, Homo sapiens
gagggaaaaaaaaaa

SEQ ID NO: 13997 - DNA, 15 bp, Homo sapiens
cgagggaaaaaaaaa

SEQ ID NO: 13998 - DNA, 15 bp, Homo sapiens
tcgagggaaaaaaaa

SEQ ID NO: 13999 - DNA, 15 bp, Homo sapiens
atcgagggaaaaaaa

SEQ ID NO: 14000 - DNA, 15 bp, Homo sapiens
aatcgagggaaaaaa

SEQ ID NO: 14001 - DNA, 15 bp, Homo sapiens
caatcgagggaaaaa

SEQ ID NO: 14002 - DNA, 15 bp, Homo sapiens
acaatcgagggaaaa

SEQ ID NO: 14003 - DNA, 15 bp, Homo sapiens
aacaatcgagggaaa

SEQ ID NO: 14004 - DNA, 15 bp, Homo sapiens
aaacaatcgagggaa

SEQ ID NO: 14005 - DNA, 15 bp, Homo sapiens
caaacaatcgaggga

SEQ ID NO: 14006 - DNA, 15 bp, Homo sapiens
ccaaacaatcgaggg

SEQ ID NO: 14007 - DNA, 15 bp, Homo sapiens
tccaaacaatcgagg

SEQ ID NO: 14008 - DNA, 15 bp, Homo sapiens
atccaaacaatcgag

SEQ ID NO: 14009 - DNA, 15 bp, Homo sapiens
tatccaaacaatcga

SEQ ID NO: 14010 - DNA, 15 bp, Homo sapiens
ctatccaaacaatcg

SEQ ID NO: 14011 - DNA, 15 bp, Homo sapiens
actatccaaacaatc

SEQ ID NO: 14012 - DNA, 15 bp, Homo sapiens
aactatccaaacaat

SEQ ID NO: 14013 - DNA, 15 bp, Homo sapiens
taactatccaaacaa

SEQ ID NO: 14014 - DNA, 15 bp, Homo sapiens
ttaactatccaaaca

SEQ ID NO: 14015 - DNA, 15 bp, Homo sapiens
gttaactatccaaac

SEQ ID NO: 14016 - DNA, 15 bp, Homo sapiens
agttaactatccaaa

SEQ ID NO: 14017 - DNA, 15 bp, Homo sapiens
cagttaactatccaa

SEQ ID NO: 14018 - DNA, 15 bp, Homo sapiens
ccagttaactatcca

SEQ ID NO: 14019 - DNA, 15 bp, Homo sapiens
tccagttaactatcc

SEQ ID NO: 14020 - DNA, 15 bp, Homo sapiens
gtccagttaactatc

SEQ ID NO: 14021 - DNA, 15 bp, Homo sapiens
tgtccagttaactat

SEQ ID NO: 14022 - DNA, 15 bp, Homo sapiens
atgtccagttaacta

SEQ ID NO: 14023 - DNA, 15 bp, Homo sapiens
gatgtccagttaact

SEQ ID NO: 14024 - DNA, 15 bp, Homo sapiens
tgatgtccagttaac

SEQ ID NO: 14025 - DNA, 15 bp, Homo sapiens
atgatgtccagttaa

SEQ ID NO: 14026 - DNA, 15 bp, Homo sapiens
catgatgtccagtta

SEQ ID NO: 14027 - DNA, 15 bp, Homo sapiens
acatgatgtccagtt

SEQ ID NO: 14028 - DNA, 15 bp, Homo sapiens
aacatgatgtccagt

SEQ ID NO: 14029 - DNA, 15 bp, Homo sapiens
aaacatgatgtccag

SEQ ID NO: 14030 - DNA, 15 bp, Homo sapiens
aaaacatgatgtcca

SEQ ID NO: 14031 - DNA, 15 bp, Homo sapiens
taaaacatgatgtcc

SEQ ID NO: 14032 - DNA, 15 bp, Homo sapiens
ttaaaacatgatgtc

SEQ ID NO: 14033 - DNA, 15 bp, Homo sapiens
gttaaaacatgatgt

SEQ ID NO: 14034 - DNA, 15 bp, Homo sapiens
agttaaaacatgatg

SEQ ID NO: 14035 - DNA, 15 bp, Homo sapiens
aagttaaaacatgat

SEQ ID NO: 14036 - DNA, 15 bp, Homo sapiens
caagttaaaacatga

SEQ ID NO: 14037 - DNA, 15 bp, Homo sapiens
tcaagttaaaacatg

SEQ ID NO: 14038 - DNA, 15 bp, Homo sapiens
ctcaagttaaaacat

SEQ ID NO: 14039 - DNA, 15 bp, Homo sapiens
tctcaagttaaaaca

SEQ ID NO: 14040 - DNA, 15 bp, Homo sapiens
ttctcaagttaaaac

SEQ ID NO: 14041 - DNA, 15 bp, Homo sapiens
tttctcaagttaaaa

SEQ ID NO: 14042 - DNA, 15 bp, Homo sapiens
atttctcaagttaaa

SEQ ID NO: 14043 - DNA, 15 bp, Homo sapiens
aatttctcaagttaa

SEQ ID NO: 14044 - DNA, 15 bp, Homo sapiens
taatttctcaagtta

SEQ ID NO: 14045 - DNA, 15 bp, Homo sapiens
ttaatttctcaagtt

SEQ ID NO: 14046 - DNA, 15 bp, Homo sapiens
cttaatttctcaagt

SEQ ID NO: 14047 - DNA, 15 bp, Homo sapiens
acttaatttctcaag

SEQ ID NO: 14048 - DNA, 15 bp, Homo sapiens
aacttaatttctcaa

SEQ ID NO: 14049 - DNA, 15 bp, Homo sapiens
taacttaatttctca

SEQ ID NO: 14050 - DNA, 15 bp, Homo sapiens
ataacttaatttctc

SEQ ID NO: 14051 - DNA, 15 bp, Homo sapiens
tataacttaatttct

SEQ ID NO: 14052 - DNA, 15 bp, Homo sapiens
gtataacttaatttc

SEQ ID NO: 14053 - DNA, 15 bp, Homo sapiens
tgtataacttaattt

SEQ ID NO: 14054 - DNA, 15 bp, Homo sapiens
ttgtataacttaatt

SEQ ID NO: 14055 - DNA, 15 bp, Homo sapiens
cttgtataacttaat

SEQ ID NO: 14056 - DNA, 15 bp, Homo sapiens
tcttgtataacttaa

SEQ ID NO: 14057 - DNA, 15 bp, Homo sapiens
atcttgtataactta

SEQ ID NO: 14058 - DNA, 15 bp, Homo sapiens
aatcttgtataactt

SEQ ID NO: 14059 - DNA, 15 bp, Homo sapiens
aaatcttgtataact

SEQ ID NO: 14060 - DNA, 15 bp, Homo sapiens
aaaatcttgtataac

SEQ ID NO: 14061 - DNA, 15 bp, Homo sapiens
caaaatcttgtataa

SEQ ID NO: 14062 - DNA, 15 bp, Homo sapiens
tcaaaatcttgtata

SEQ ID NO: 14063 - DNA, 15 bp, Homo sapiens
atcaaaatcttgtat

SEQ ID NO: 14064 - DNA, 15 bp, Homo sapiens
tatcaaaatcttgta

SEQ ID NO: 14065 - DNA, 15 bp, Homo sapiens
atatcaaaatcttgt

SEQ ID NO: 14066 - DNA, 15 bp, Homo sapiens
aatatcaaaatcttg

SEQ ID NO: 14067 - DNA, 15 bp, Homo sapiens
aaatatcaaaatctt

SEQ ID NO: 14068 - DNA, 15 bp, Homo sapiens
aaaatatcaaaatct

SEQ ID NO: 14069 - DNA, 15 bp, Homo sapiens
taaaatatcaaaatc

SEQ ID NO: 14070 - DNA, 15 bp, Homo sapiens
ttaaaatatcaaaat

SEQ ID NO: 14071 - DNA, 15 bp, Homo sapiens
tttaaaatatcaaaa

SEQ ID NO: 14072 - DNA, 15 bp, Homo sapiens
gtttaaaatatcaaa

SEQ ID NO: 14073 - DNA, 15 bp, Homo sapiens
agtttaaaatatcaa

SEQ ID NO: 14074 - DNA, 15 bp, Homo sapiens
tagtttaaaatatca

SEQ ID NO: 14075 - DNA, 15 bp, Homo sapiens
ctagtttaaaatatc

SEQ ID NO: 14076 - DNA, 15 bp, Homo sapiens
actagtttaaaatat

SEQ ID NO: 14077 - DNA, 15 bp, Homo sapiens
aactagtttaaaata

SEQ ID NO: 14078 - DNA, 15 bp, Homo sapiens
aaactagtttaaaat

SEQ ID NO: 14079 - DNA, 15 bp, Homo sapiens
aaaactagtttaaaa

SEQ ID NO: 14080 - DNA, 15 bp, Homo sapiens
gaaaactagtttaaa

SEQ ID NO: 14081 - DNA, 15 bp, Homo sapiens
ggaaaactagtttaa

SEQ ID NO: 14082 - DNA, 15 bp, Homo sapiens
aggaaaactagttta

SEQ ID NO: 14083 - DNA, 15 bp, Homo sapiens
taggaaaactagttt

SEQ ID NO: 14084 - DNA, 15 bp, Homo sapiens
ttaggaaaactagtt

SEQ ID NO: 14085 - DNA, 15 bp, Homo sapiens
gttaggaaaactagt

SEQ ID NO: 14086 - DNA, 15 bp, Homo sapiens
agttaggaaaactag

SEQ ID NO: 14087 - DNA, 15 bp, Homo sapiens
cagttaggaaaacta

SEQ ID NO: 14088 - DNA, 15 bp, Homo sapiens
ccagttaggaaaact

SEQ ID NO: 14089 - DNA, 15 bp, Homo sapiens
accagttaggaaaac

SEQ ID NO: 14090 - DNA, 15 bp, Homo sapiens
aaccagttaggaaaa

SEQ ID NO: 14091 - DNA, 15 bp, Homo sapiens
caaccagttaggaaa

SEQ ID NO: 14092 - DNA, 15 bp, Homo sapiens
tcaaccagttaggaa

SEQ ID NO: 14093 - DNA, 15 bp, Homo sapiens
ctcaaccagttagga

SEQ ID NO: 14094 - DNA, 15 bp, Homo sapiens
tctcaaccagttagg

SEQ ID NO: 14095 - DNA, 15 bp, Homo sapiens
atctcaaccagttag

SEQ ID NO: 14096 - DNA, 15 bp, Homo sapiens
tatctcaaccagtta

SEQ ID NO: 14097 - DNA, 15 bp, Homo sapiens
atatctcaaccagtt

SEQ ID NO: 14098 - DNA, 15 bp, Homo sapiens
tatatctcaaccagt

SEQ ID NO: 14099 - DNA, 15 bp, Homo sapiens
atatatctcaaccag

SEQ ID NO: 14100 - DNA, 15 bp, Homo sapiens
tatatatctcaacca

SEQ ID NO: 14101 - DNA, 15 bp, Homo sapiens
ttatatatctcaacc

SEQ ID NO: 14102 - DNA, 15 bp, Homo sapiens
cttatatatctcaac

SEQ ID NO: 14103 - DNA, 15 bp, Homo sapiens
tcttatatatctcaa

SEQ ID NO: 14104 - DNA, 15 bp, Homo sapiens
ttcttatatatctca

SEQ ID NO: 14105 - DNA, 15 bp, Homo sapiens
attcttatatatctc

SEQ ID NO: 14106 - DNA, 15 bp, Homo sapiens
aattcttatatatct

SEQ ID NO: 14107 - DNA, 15 bp, Homo sapiens
aaattcttatatatc

SEQ ID NO: 14108 - DNA, 15 bp, Homo sapiens
taaattcttatatat

SEQ ID NO: 14109 - DNA, 15 bp, Homo sapiens
ctaaattcttatata

SEQ ID NO: 14110 - DNA, 15 bp, Homo sapiens
actaaattcttatat

SEQ ID NO: 14111 - DNA, 15 bp, Homo sapiens
tactaaattcttata

SEQ ID NO: 14112 - DNA, 15 bp, Homo sapiens
atactaaattcttat

SEQ ID NO: 14113 - DNA, 15 bp, Homo sapiens
aatactaaattctta

SEQ ID NO: 14114 - DNA, 15 bp, Homo sapiens
taatactaaattctt

SEQ ID NO: 14115 - DNA, 15 bp, Homo sapiens
gtaatactaaattct

SEQ ID NO: 14116 - DNA, 15 bp, Homo sapiens
tgtaatactaaattc

SEQ ID NO: 14117 - DNA, 15 bp, Homo sapiens
ctgtaatactaaatt

SEQ ID NO: 14118 - DNA, 15 bp, Homo sapiens
cctgtaatactaaat

SEQ ID NO: 14119 - DNA, 15 bp, Homo sapiens
tcctgtaatactaaa

SEQ ID NO: 14120 - DNA, 15 bp, Homo sapiens
gtcctgtaatactaa

SEQ ID NO: 14121 - DNA, 15 bp, Homo sapiens
agtcctgtaatacta

SEQ ID NO: 14122 - DNA, 15 bp, Homo sapiens
gagtcctgtaatact

SEQ ID NO: 14123 - DNA, 15 bp, Homo sapiens
tgagtcctgtaatac

SEQ ID NO: 14124 - DNA, 15 bp, Homo sapiens
ttgagtcctgtaata

SEQ ID NO: 14125 - DNA, 15 bp, Homo sapiens
attgagtcctgtaat

SEQ ID NO: 14126 - DNA, 15 bp, Homo sapiens
gattgagtcctgtaa

SEQ ID NO: 14127 - DNA, 15 bp, Homo sapiens
tgattgagtcctgta

SEQ ID NO: 14128 - DNA, 15 bp, Homo sapiens
ctgattgagtcctgt

SEQ ID NO: 14129 - DNA, 15 bp, Homo sapiens
cctgattgagtcctg

SEQ ID NO: 14130 - DNA, 15 bp, Homo sapiens
ccctgattgagtcct

SEQ ID NO: 14131 - DNA, 15 bp, Homo sapiens
tccctgattgagtcc

SEQ ID NO: 14132 - DNA, 15 bp, Homo sapiens
ttccctgattgagtc

SEQ ID NO: 14133 - DNA, 15 bp, Homo sapiens
gttccctgattgagt

SEQ ID NO: 14134 - DNA, 15 bp, Homo sapiens
agttccctgattgag

SEQ ID NO: 14135 - DNA, 15 bp, Homo sapiens
cagttccctgattga

SEQ ID NO: 14136 - DNA, 15 bp, Homo sapiens
tcagttccctgattg

SEQ ID NO: 14137 - DNA, 15 bp, Homo sapiens
atcagttccctgatt

SEQ ID NO: 14138 - DNA, 15 bp, Homo sapiens
aatcagttccctgat

SEQ ID NO: 14139 - DNA, 15 bp, Homo sapiens
aaatcagttccctga

SEQ ID NO: 14140 - DNA, 15 bp, Homo sapiens
taaatcagttccctg

SEQ ID NO: 14141 - DNA, 15 bp, Homo sapiens
ttaaatcagttccct

SEQ ID NO: 14142 - DNA, 15 bp, Homo sapiens
attaaatcagttccc

SEQ ID NO: 14143 - DNA, 15 bp, Homo sapiens
tattaaatcagttcc

SEQ ID NO: 14144 - DNA, 15 bp, Homo sapiens
ttattaaatcagttc

SEQ ID NO: 14145 - DNA, 15 bp, Homo sapiens
cttattaaatcagtt

SEQ ID NO: 14146 - DNA, 15 bp, Homo sapiens
tcttattaaatcagt

SEQ ID NO: 14147 - DNA, 15 bp, Homo sapiens
ttcttattaaatcag

SEQ ID NO: 14148 - DNA, 15 bp, Homo sapiens
attcttattaaatca

SEQ ID NO: 14149 - DNA, 15 bp, Homo sapiens
aattcttattaaatc

SEQ ID NO: 14150 - DNA, 15 bp, Homo sapiens
aaattcttattaaat

SEQ ID NO: 14151 - DNA, 15 bp, Homo sapiens
gaaattcttattaaa

SEQ ID NO: 14152 - DNA, 15 bp, Homo sapiens
agaaattcttattaa

SEQ ID NO: 14153 - DNA, 15 bp, Homo sapiens
aagaaattcttatta

SEQ ID NO: 14154 - DNA, 15 bp, Homo sapiens
taagaaattcttatt

SEQ ID NO: 14155 - DNA, 15 bp, Homo sapiens
ttaagaaattcttat

SEQ ID NO: 14156 - DNA, 15 bp, Homo sapiens
tttaagaaattctta

SEQ ID NO: 14157 - DNA, 15 bp, Homo sapiens
ttttaagaaattctt

SEQ ID NO: 14158 - DNA, 15 bp, Homo sapiens
tttttaagaaattct

SEQ ID NO: 14159 - DNA, 15 bp, Homo sapiens
atttttaagaaattc

SEQ ID NO: 14160 - DNA, 15 bp, Homo sapiens
aatttttaagaaatt

SEQ ID NO: 14161 - DNA, 15 bp, Homo sapiens
aaatttttaagaaat

SEQ ID NO: 14162 - DNA, 15 bp, Homo sapiens
caaatttttaagaaa

SEQ ID NO: 14163 - DNA, 15 bp, Homo sapiens
acaaatttttaagaa

SEQ ID NO: 14164 - DNA, 15 bp, Homo sapiens
aacaaatttttaaga

SEQ ID NO: 14165 - DNA, 15 bp, Homo sapiens
aaacaaatttttaag

SEQ ID NO: 14166 - DNA, 15 bp, Homo sapiens
taaacaaatttttaa

SEQ ID NO: 14167 - DNA, 15 bp, Homo sapiens
ttaaacaaattttta

SEQ ID NO: 14168 - DNA, 15 bp, Homo sapiens
tttaaacaaattttt

SEQ ID NO: 14169 - DNA, 15 bp, Homo sapiens
atttaaacaaatttt

SEQ ID NO: 14170 - DNA, 15 bp, Homo sapiens
tatttaaacaaattt

SEQ ID NO: 14171 - DNA, 15 bp, Homo sapiens
atatttaaacaaatt

SEQ ID NO: 14172 - DNA, 15 bp, Homo sapiens
aatatttaaacaaat

SEQ ID NO: 14173 - DNA, 15 bp, Homo sapiens
aaatatttaaacaaa

SEQ ID NO: 14174 - DNA, 15 bp, Homo sapiens
aaaatatttaaacaa

SEQ ID NO: 14175 - DNA, 15 bp, Homo sapiens
aaaaatatttaaaca

SEQ ID NO: 14176 - DNA, 15 bp, Homo sapiens
gaaaaatatttaaac

SEQ ID NO: 14177 - DNA, 15 bp, Homo sapiens
tgaaaaatatttaaa

SEQ ID NO: 14178 - DNA, 15 bp, Homo sapiens
ttgaaaaatatttaa

SEQ ID NO: 14179 - DNA, 15 bp, Homo sapiens
cttgaaaaatattta

SEQ ID NO: 14180 - DNA, 15 bp, Homo sapiens
acttgaaaaatattt

SEQ ID NO: 14181 - DNA, 15 bp, Homo sapiens
aacttgaaaaatatt

SEQ ID NO: 14182 - DNA, 15 bp, Homo sapiens
gaacttgaaaaatat

SEQ ID NO: 14183 - DNA, 15 bp, Homo sapiens
agaacttgaaaaata

SEQ ID NO: 14184 - DNA, 15 bp, Homo sapiens
aagaacttgaaaaat

SEQ ID NO: 14185 - DNA, 15 bp, Homo sapiens
aaagaacttgaaaaa

SEQ ID NO: 14186 - DNA, 15 bp, Homo sapiens
aaaagaacttgaaaa

SEQ ID NO: 14187 - DNA, 15 bp, Homo sapiens
gaaaagaacttgaaa

SEQ ID NO: 14188 - DNA, 15 bp, Homo sapiens
agaaaagaacttgaa

SEQ ID NO: 14189 - DNA, 15 bp, Homo sapiens
aagaaaagaacttga

SEQ ID NO: 14190 - DNA, 15 bp, Homo sapiens
gaagaaaagaacttg

SEQ ID NO: 14191 - DNA, 15 bp, Homo sapiens
tgaagaaaagaactt

SEQ ID NO: 14192 - DNA, 15 bp, Homo sapiens
atgaagaaaagaact

SEQ ID NO: 14193 - DNA, 15 bp, Homo sapiens
gatgaagaaaagaac

SEQ ID NO: 14194 - DNA, 15 bp, Homo sapiens
agatgaagaaaagaa

SEQ ID NO: 14195 - DNA, 15 bp, Homo sapiens
aagatgaagaaaaga

SEQ ID NO: 14196 - DNA, 15 bp, Homo sapiens
gaagatgaagaaaag

SEQ ID NO: 14197 - DNA, 15 bp, Homo sapiens
agaagatgaagaaaa

SEQ ID NO: 14198 - DNA, 15 bp, Homo sapiens
tagaagatgaagaaa

SEQ ID NO: 14199 - DNA, 15 bp, Homo sapiens
gtagaagatgaagaa

SEQ ID NO: 14200 - DNA, 15 bp, Homo sapiens
tgtagaagatgaaga

SEQ ID NO: 14201 - DNA, 15 bp, Homo sapiens
ttgtagaagatgaag

SEQ ID NO: 14202 - DNA, 15 bp, Homo sapiens
gttgtagaagatgaa

SEQ ID NO: 14203 - DNA, 15 bp, Homo sapiens
agttgtagaagatga

SEQ ID NO: 14204 - DNA, 15 bp, Homo sapiens
aagttgtagaagatg

SEQ ID NO: 14205 - DNA, 15 bp, Homo sapiens
taagttgtagaagat

SEQ ID NO: 14206 - DNA, 15 bp, Homo sapiens
ttaagttgtagaaga

SEQ ID NO: 14207 - DNA, 15 bp, Homo sapiens
attaagttgtagaag

SEQ ID NO: 14208 - DNA, 15 bp, Homo sapiens
aattaagttgtagaa

SEQ ID NO: 14209 - DNA, 15 bp, Homo sapiens
gaattaagttgtaga

SEQ ID NO: 14210 - DNA, 15 bp, Homo sapiens
agaattaagttgtag

SEQ ID NO: 14211 - DNA, 15 bp, Homo sapiens
aagaattaagttgta

SEQ ID NO: 14212 - DNA, 15 bp, Homo sapiens
caagaattaagttgt

SEQ ID NO: 14213 - DNA, 15 bp, Homo sapiens
acaagaattaagttg

SEQ ID NO: 14214 - DNA, 15 bp, Homo sapiens
gacaagaattaagtt

SEQ ID NO: 14215 - DNA, 15 bp, Homo sapiens
agacaagaattaagt

SEQ ID NO: 14216 - DNA, 15 bp, Homo sapiens
cagacaagaattaag

SEQ ID NO: 14217 - DNA, 15 bp, Homo sapiens
acagacaagaattaa

SEQ ID NO: 14218 - DNA, 15 bp, Homo sapiens
tacagacaagaatta

SEQ ID NO: 14219 - DNA, 15 bp, Homo sapiens
atacagacaagaatt

SEQ ID NO: 14220 - DNA, 15 bp, Homo sapiens
catacagacaagaat

SEQ ID NO: 14221 - DNA, 15 bp, Homo sapiens
gcatacagacaagaa

SEQ ID NO: 14222 - DNA, 15 bp, Homo sapiens
tgcatacagacaaga

SEQ ID NO: 14223 - DNA, 15 bp, Homo sapiens
ttgcatacagacaag

SEQ ID NO: 14224 - DNA, 15 bp, Homo sapiens
tttgcatacagacaa

SEQ ID NO: 14225 - DNA, 15 bp, Homo sapiens
atttgcatacagaca

SEQ ID NO: 14226 - DNA, 15 bp, Homo sapiens
catttgcatacagac

SEQ ID NO: 14227 - DNA, 15 bp, Homo sapiens
tcatttgcatacaga

SEQ ID NO: 14228 - DNA, 15 bp, Homo sapiens
ctcatttgcatacag

SEQ ID NO: 14229 - DNA, 15 bp, Homo sapiens
gctcatttgcataca

SEQ ID NO: 14230 - DNA, 15 bp, Homo sapiens
agctcatttgcatac

SEQ ID NO: 14231 - DNA, 15 bp, Homo sapiens
aagctcatttgcata

SEQ ID NO: 14232 - DNA, 15 bp, Homo sapiens
gaagctcatttgcat

SEQ ID NO: 14233 - DNA, 15 bp, Homo sapiens
ggaagctcatttgca

SEQ ID NO: 14234 - DNA, 15 bp, Homo sapiens
gggaagctcatttgc

SEQ ID NO: 14235 - DNA, 15 bp, Homo sapiens
ggggaagctcatttg

SEQ ID NO: 14236 - DNA, 15 bp, Homo sapiens
tggggaagctcattt

SEQ ID NO: 14237 - DNA, 15 bp, Homo sapiens
atggggaagctcatt

SEQ ID NO: 14238 - DNA, 15 bp, Homo sapiens
aatggggaagctcat

SEQ ID NO: 14239 - DNA, 15 bp, Homo sapiens
aaatggggaagctca

SEQ ID NO: 14240 - DNA, 15 bp, Homo sapiens
taaatggggaagctc

SEQ ID NO: 14241 - DNA, 15 bp, Homo sapiens
ttaaatggggaagct

SEQ ID NO: 14242 - DNA, 15 bp, Homo sapiens
tttaaatggggaagc

SEQ ID NO: 14243 - DNA, 15 bp, Homo sapiens
ttttaaatggggaag

SEQ ID NO: 14244 - DNA, 15 bp, Homo sapiens
attttaaatggggaa

SEQ ID NO: 14245 - DNA, 15 bp, Homo sapiens
aattttaaatgggga

SEQ ID NO: 14246 - DNA, 15 bp, Homo sapiens
aaattttaaatgggg

SEQ ID NO: 14247 - DNA, 15 bp, Homo sapiens
aaaattttaaatggg

SEQ ID NO: 14248 - DNA, 15 bp, Homo sapiens
caaaattttaaatgg

SEQ ID NO: 14249 - DNA, 15 bp, Homo sapiens
gcaaaattttaaatg

SEQ ID NO: 14250 - DNA, 15 bp, Homo sapiens
agcaaaattttaaat

SEQ ID NO: 14251 - DNA, 15 bp, Homo sapiens
cagcaaaattttaaa

SEQ ID NO: 14252 - DNA, 15 bp, Homo sapiens
acagcaaaattttaa

SEQ ID NO: 14253 - DNA, 15 bp, Homo sapiens
aacagcaaaatttta

SEQ ID NO: 14254 - DNA, 15 bp, Homo sapiens
caacagcaaaatttt

SEQ ID NO: 14255 - DNA, 15 bp, Homo sapiens
gcaacagcaaaattt

SEQ ID NO: 14256 - DNA, 15 bp, Homo sapiens
tgcaacagcaaaatt

SEQ ID NO: 14257 - DNA, 15 bp, Homo sapiens
atgcaacagcaaaat

SEQ ID NO: 14258 - DNA, 15 bp, Homo sapiens
aatgcaacagcaaaa

SEQ ID NO: 14259 - DNA, 15 bp, Homo sapiens
aaatgcaacagcaaa

SEQ ID NO: 14260 - DNA, 15 bp, Homo sapiens
aaaatgcaacagcaa

SEQ ID NO: 14261 - DNA, 15 bp, Homo sapiens
taaaatgcaacagca

SEQ ID NO: 14262 - DNA, 15 bp, Homo sapiens
ctaaaatgcaacagc

SEQ ID NO: 14263 - DNA, 15 bp, Homo sapiens
cctaaaatgcaacag

SEQ ID NO: 14264 - DNA, 15 bp, Homo sapiens
gcctaaaatgcaaca

SEQ ID NO: 14265 - DNA, 15 bp, Homo sapiens
ggcctaaaatgcaac

SEQ ID NO: 14266 - DNA, 15 bp, Homo sapiens
tggcctaaaatgcaa

SEQ ID NO: 14267 - DNA, 15 bp, Homo sapiens
gtggcctaaaatgca

SEQ ID NO: 14268 - DNA, 15 bp, Homo sapiens
agtggcctaaaatgc

SEQ ID NO: 14269 - DNA, 15 bp, Homo sapiens
tagtggcctaaaatg

SEQ ID NO: 14270 - DNA, 15 bp, Homo sapiens
atagtggcctaaaat

SEQ ID NO: 14271 - DNA, 15 bp, Homo sapiens
tatagtggcctaaaa

SEQ ID NO: 14272 - DNA, 15 bp, Homo sapiens
ctatagtggcctaaa

SEQ ID NO: 14273 - DNA, 15 bp, Homo sapiens
tctatagtggcctaa

SEQ ID NO: 14274 - DNA, 15 bp, Homo sapiens
ttctatagtggccta

SEQ ID NO: 14275 - DNA, 15 bp, Homo sapiens
cttctatagtggcct

SEQ ID NO: 14276 - DNA, 15 bp, Homo sapiens
acttctatagtggcc

SEQ ID NO: 14277 - DNA, 15 bp, Homo sapiens
aacttctatagtggc

SEQ ID NO: 14278 - DNA, 15 bp, Homo sapiens
caacttctatagtgg

SEQ ID NO: 14279 - DNA, 15 bp, Homo sapiens
acaacttctatagtg

SEQ ID NO: 14280 - DNA, 15 bp, Homo sapiens
aacaacttctatagt

SEQ ID NO: 14281 - DNA, 15 bp, Homo sapiens
aaacaacttctatag

SEQ ID NO: 14282 - DNA, 15 bp, Homo sapiens
gaaacaacttctata

SEQ ID NO: 14283 - DNA, 15 bp, Homo sapiens
agaaacaacttctat

SEQ ID NO: 14284 - DNA, 15 bp, Homo sapiens
aagaaacaacttcta

SEQ ID NO: 14285 - DNA, 15 bp, Homo sapiens
aaagaaacaacttct

SEQ ID NO: 14286 - DNA, 15 bp, Homo sapiens
taaagaaacaacttc

SEQ ID NO: 14287 - DNA, 15 bp, Homo sapiens
ttaaagaaacaactt

SEQ ID NO: 14288 - DNA, 15 bp, Homo sapiens
attaaagaaacaact

SEQ ID NO: 14289 - DNA, 15 bp, Homo sapiens
aattaaagaaacaac

SEQ ID NO: 14290 - DNA, 15 bp, Homo sapiens
aaattaaagaaacaa

SEQ ID NO: 14291 - DNA, 15 bp, Homo sapiens
aaaattaaagaaaca

SEQ ID NO: 14292 - DNA, 15 bp, Homo sapiens
gaaaattaaagaaac

SEQ ID NO: 14293 - DNA, 15 bp, Homo sapiens
tgaaaattaaagaaa

SEQ ID NO: 14294 - DNA, 15 bp, Homo sapiens
gtgaaaattaaagaa

SEQ ID NO: 14295 - DNA, 15 bp, Homo sapiens
agtgaaaattaaaga

SEQ ID NO: 14296 - DNA, 15 bp, Homo sapiens
gagtgaaaattaaag

SEQ ID NO: 14297 - DNA, 15 bp, Homo sapiens
tgagtgaaaattaaa

SEQ ID NO: 14298 - DNA, 15 bp, Homo sapiens
gtgagtgaaaattaa

SEQ ID NO: 14299 - DNA, 15 bp, Homo sapiens
tgtgagtgaaaatta

SEQ ID NO: 14300 - DNA, 15 bp, Homo sapiens
ttgtgagtgaaaatt

SEQ ID NO: 14301 - DNA, 15 bp, Homo sapiens
cttgtgagtgaaaat

SEQ ID NO: 14302 - DNA, 15 bp, Homo sapiens
tcttgtgagtgaaaa

SEQ ID NO: 14303 - DNA, 15 bp, Homo sapiens
ttcttgtgagtgaaa

SEQ ID NO: 14304 - DNA, 15 bp, Homo sapiens
attcttgtgagtgaa

SEQ ID NO: 14305 - DNA, 15 bp, Homo sapiens
aattcttgtgagtga

SEQ ID NO: 14306 - DNA, 15 bp, Homo sapiens
aaattcttgtgagtg

SEQ ID NO: 14307 - DNA, 15 bp, Homo sapiens
caaattcttgtgagt

SEQ ID NO: 14308 - DNA, 15 bp, Homo sapiens
ccaaattcttgtgag

SEQ ID NO: 14309 - DNA, 15 bp, Homo sapiens
accaaattcttgtga

SEQ ID NO: 14310 - DNA, 15 bp, Homo sapiens
gaccaaattcttgtg

SEQ ID NO: 14311 - DNA, 15 bp, Homo sapiens
agaccaaattcttgt

SEQ ID NO: 14312 - DNA, 15 bp, Homo sapiens
aagaccaaattcttg

SEQ ID NO: 14313 - DNA, 15 bp, Homo sapiens
taagaccaaattctt

SEQ ID NO: 14314 - DNA, 15 bp, Homo sapiens
gtaagaccaaattct

SEQ ID NO: 14315 - DNA, 15 bp, Homo sapiens
ggtaagaccaaattc

SEQ ID NO: 14316 - DNA, 15 bp, Homo sapiens
tggtaagaccaaatt

SEQ ID NO: 14317 - DNA, 15 bp, Homo sapiens
ttggtaagaccaaat

SEQ ID NO: 14318 - DNA, 15 bp, Homo sapiens
tttggtaagaccaaa

SEQ ID NO: 14319 - DNA, 15 bp, Homo sapiens
atttggtaagaccaa

SEQ ID NO: 14320 - DNA, 15 bp, Homo sapiens
aatttggtaagacca

SEQ ID NO: 14321 - DNA, 15 bp, Homo sapiens
caatttggtaagacc

SEQ ID NO: 14322 - DNA, 15 bp, Homo sapiens
acaatttggtaagac

SEQ ID NO: 14323 - DNA, 15 bp, Homo sapiens
cacaatttggtaaga

SEQ ID NO: 14324 - DNA, 15 bp, Homo sapiens
acacaatttggtaag

SEQ ID NO: 14325 - DNA, 15 bp, Homo sapiens
tacacaatttggtaa

SEQ ID NO: 14326 - DNA, 15 bp, Homo sapiens
ttacacaatttggta

SEQ ID NO: 14327 - DNA, 15 bp, Homo sapiens
tttacacaatttggt

SEQ ID NO: 14328 - DNA, 15 bp, Homo sapiens
atttacacaatttgg

SEQ ID NO: 14329 - DNA, 15 bp, Homo sapiens
gatttacacaatttg

SEQ ID NO: 14330 - DNA, 15 bp, Homo sapiens
agatttacacaattt

SEQ ID NO: 14331 - DNA, 15 bp, Homo sapiens
aagatttacacaatt

SEQ ID NO: 14332 - DNA, 15 bp, Homo sapiens
aaagatttacacaat

SEQ ID NO: 14333 - DNA, 15 bp, Homo sapiens
taaagatttacacaa

SEQ ID NO: 14334 - DNA, 15 bp, Homo sapiens
ttaaagatttacaca

SEQ ID NO: 14335 - DNA, 15 bp, Homo sapiens
tttaaagatttacac

SEQ ID NO: 14336 - DNA, 15 bp, Homo sapiens
ttttaaagatttaca

SEQ ID NO: 14337 - DNA, 15 bp, Homo sapiens
attttaaagatttac

SEQ ID NO: 14338 - DNA, 15 bp, Homo sapiens
aattttaaagattta

SEQ ID NO: 14339 - DNA, 15 bp, Homo sapiens
caattttaaagattt

SEQ ID NO: 14340 - DNA, 15 bp, Homo sapiens
acaattttaaagatt

SEQ ID NO: 14341 - DNA, 15 bp, Homo sapiens
cacaattttaaagat

SEQ ID NO: 14342 - DNA, 15 bp, Homo sapiens
acacaattttaaaga

SEQ ID NO: 14343 - DNA, 15 bp, Homo sapiens
tacacaattttaaag

SEQ ID NO: 14344 - DNA, 15 bp, Homo sapiens
atacacaattttaaa

SEQ ID NO: 14345 - DNA, 15 bp, Homo sapiens
aatacacaattttaa

SEQ ID NO: 14346 - DNA, 15 bp, Homo sapiens
aaatacacaatttta

SEQ ID NO: 14347 - DNA, 15 bp, Homo sapiens
caaatacacaatttt

SEQ ID NO: 14348 - DNA, 15 bp, Homo sapiens
ccaaatacacaattt

SEQ ID NO: 14349 - DNA, 15 bp, Homo sapiens
gccaaatacacaatt

SEQ ID NO: 14350 - DNA, 15 bp, Homo sapiens
agccaaatacacaat

SEQ ID NO: 14351 - DNA, 15 bp, Homo sapiens
aagccaaatacacaa

SEQ ID NO: 14352 - DNA, 15 bp, Homo sapiens
taagccaaatacaca

SEQ ID NO: 14353 - DNA, 15 bp, Homo sapiens
ttaagccaaatacac

SEQ ID NO: 14354 - DNA, 15 bp, Homo sapiens
attaagccaaataca

SEQ ID NO: 14355 - DNA, 15 bp, Homo sapiens
tattaagccaaatac

SEQ ID NO: 14356 - DNA, 15 bp, Homo sapiens
atattaagccaaata

SEQ ID NO: 14357 - DNA, 15 bp, Homo sapiens
aatattaagccaaat

SEQ ID NO: 14358 - DNA, 15 bp, Homo sapiens
taatattaagccaaa

SEQ ID NO: 14359 - DNA, 15 bp, Homo sapiens
ataatattaagccaa

SEQ ID NO: 14360 - DNA, 15 bp, Homo sapiens
tataatattaagcca

SEQ ID NO: 14361 - DNA, 15 bp, Homo sapiens
ctataatattaagcc

SEQ ID NO: 14362 - DNA, 15 bp, Homo sapiens
tctataatattaagc

SEQ ID NO: 14363 - DNA, 15 bp, Homo sapiens
ttctataatattaag

SEQ ID NO: 14364 - DNA, 15 bp, Homo sapiens
attctataatattaa

SEQ ID NO: 14365 - DNA, 15 bp, Homo sapiens
gattctataatatta

SEQ ID NO: 14366 - DNA, 15 bp, Homo sapiens
agattctataatatt

SEQ ID NO: 14367 - DNA, 15 bp, Homo sapiens
cagattctataatat

SEQ ID NO: 14368 - DNA, 15 bp, Homo sapiens
tcagattctataata

SEQ ID NO: 14369 - DNA, 15 bp, Homo sapiens
atcagattctataat

SEQ ID NO: 14370 - DNA, 15 bp, Homo sapiens
aatcagattctataa

SEQ ID NO: 14371 - DNA, 15 bp, Homo sapiens
caatcagattctata

SEQ ID NO: 14372 - DNA, 15 bp, Homo sapiens
tcaatcagattctat

SEQ ID NO: 14373 - DNA, 15 bp, Homo sapiens
atcaatcagattcta

SEQ ID NO: 14374 - DNA, 15 bp, Homo sapiens
aatcaatcagattct

SEQ ID NO: 14375 - DNA, 15 bp, Homo sapiens
aaatcaatcagattc

SEQ ID NO: 14376 - DNA, 15 bp, Homo sapiens
taaatcaatcagatt

SEQ ID NO: 14377 - DNA, 15 bp, Homo sapiens
ttaaatcaatcagat

SEQ ID NO: 14378 - DNA, 15 bp, Homo sapiens
attaaatcaatcaga

SEQ ID NO: 14379 - DNA, 15 bp, Homo sapiens
gattaaatcaatcag

SEQ ID NO: 14380 - DNA, 15 bp, Homo sapiens
agattaaatcaatca

SEQ ID NO: 14381 - DNA, 15 bp, Homo sapiens
tagattaaatcaatc

SEQ ID NO: 14382 - DNA, 15 bp, Homo sapiens
gtagattaaatcaat

SEQ ID NO: 14383 - DNA, 15 bp, Homo sapiens
ggtagattaaatcaa

SEQ ID NO: 14384 - DNA, 15 bp, Homo sapiens
aggtagattaaatca

SEQ ID NO: 14385 - DNA, 15 bp, Homo sapiens
aaggtagattaaatc

SEQ ID NO: 14386 - DNA, 15 bp, Homo sapiens
caaggtagattaaat

SEQ ID NO: 14387 - DNA, 15 bp, Homo sapiens
acaaggtagattaaa

SEQ ID NO: 14388 - DNA, 15 bp, Homo sapiens
aacaaggtagattaa

SEQ ID NO: 14389 - DNA, 15 bp, Homo sapiens
aaacaaggtagatta

SEQ ID NO: 14390 - DNA, 15 bp, Homo sapiens
gaaacaaggtagatt

SEQ ID NO: 14391 - DNA, 15 bp, Homo sapiens
tgaaacaaggtagat

SEQ ID NO: 14392 - DNA, 15 bp, Homo sapiens
atgaaacaaggtaga

SEQ ID NO: 14393 - DNA, 15 bp, Homo sapiens
aatgaaacaaggtag

SEQ ID NO: 14394 - DNA, 15 bp, Homo sapiens
aaatgaaacaaggta

SEQ ID NO: 14395 - DNA, 15 bp, Homo sapiens
taaatgaaacaaggt

SEQ ID NO: 14396 - DNA, 15 bp, Homo sapiens
ctaaatgaaacaagg

SEQ ID NO: 14397 - DNA, 15 bp, Homo sapiens
actaaatgaaacaag

SEQ ID NO: 14398 - DNA, 15 bp, Homo sapiens
tactaaatgaaacaa

SEQ ID NO: 14399 - DNA, 15 bp, Homo sapiens
atactaaatgaaaca

SEQ ID NO: 14400 - DNA, 15 bp, Homo sapiens
catactaaatgaaac

SEQ ID NO: 14401 - DNA, 15 bp, Homo sapiens
acatactaaatgaaa

SEQ ID NO: 14402 - DNA, 15 bp, Homo sapiens
aacatactaaatgaa

SEQ ID NO: 14403 - DNA, 15 bp, Homo sapiens
caacatactaaatga

SEQ ID NO: 14404 - DNA, 15 bp, Homo sapiens
tcaacatactaaatg

SEQ ID NO: 14405 - DNA, 15 bp, Homo sapiens
gtcaacatactaaat

SEQ ID NO: 14406 - DNA, 15 bp, Homo sapiens
tgtcaacatactaaa

SEQ ID NO: 14407 - DNA, 15 bp, Homo sapiens
atgtcaacatactaa

SEQ ID NO: 14408 - DNA, 15 bp, Homo sapiens
aatgtcaacatacta

SEQ ID NO: 14409 - DNA, 15 bp, Homo sapiens
aaatgtcaacatact

SEQ ID NO: 14410 - DNA, 15 bp, Homo sapiens
aaaatgtcaacatac

SEQ ID NO: 14411 - DNA, 15 bp, Homo sapiens
gaaaatgtcaacata

SEQ ID NO: 14412 - DNA, 15 bp, Homo sapiens
agaaaatgtcaacat

SEQ ID NO: 14413 - DNA, 15 bp, Homo sapiens
aagaaaatgtcaaca

SEQ ID NO: 14414 - DNA, 15 bp, Homo sapiens
caagaaaatgtcaac

SEQ ID NO: 14415 - DNA, 15 bp, Homo sapiens
tcaagaaaatgtcaa

SEQ ID NO: 14416 - DNA, 15 bp, Homo sapiens
ctcaagaaaatgtca

SEQ ID NO: 14417 - DNA, 15 bp, Homo sapiens
tctcaagaaaatgtc

SEQ ID NO: 14418 - DNA, 15 bp, Homo sapiens
ttctcaagaaaatgt

SEQ ID NO: 14419 - DNA, 15 bp, Homo sapiens
tttctcaagaaaatg

SEQ ID NO: 14420 - DNA, 15 bp, Homo sapiens
atttctcaagaaaat

SEQ ID NO: 14421 - DNA, 15 bp, Homo sapiens
aatttctcaagaaaa

SEQ ID NO: 14422 - DNA, 15 bp, Homo sapiens
aaatttctcaagaaa

SEQ ID NO: 14423 - DNA, 15 bp, Homo sapiens
caaatttctcaagaa

SEQ ID NO: 14424 - DNA, 15 bp, Homo sapiens
acaaatttctcaaga

SEQ ID NO: 14425 - DNA, 15 bp, Homo sapiens
aacaaatttctcaag

SEQ ID NO: 14426 - DNA, 15 bp, Homo sapiens
taacaaatttctcaa

SEQ ID NO: 14427 - DNA, 15 bp, Homo sapiens
ataacaaatttctca

SEQ ID NO: 14428 - DNA, 15 bp, Homo sapiens
cataacaaatttctc

SEQ ID NO: 14429 - DNA, 15 bp, Homo sapiens
gcataacaaatttct

SEQ ID NO: 14430 - DNA, 15 bp, Homo sapiens
ggcataacaaatttc

SEQ ID NO: 14431 - DNA, 15 bp, Homo sapiens
tggcataacaaattt

SEQ ID NO: 14432 - DNA, 15 bp, Homo sapiens
ttggcataacaaatt

SEQ ID NO: 14433 - DNA, 15 bp, Homo sapiens
tttggcataacaaat

SEQ ID NO: 14434 - DNA, 15 bp, Homo sapiens
atttggcataacaaa

SEQ ID NO: 14435 - DNA, 15 bp, Homo sapiens
catttggcataacaa

SEQ ID NO: 14436 - DNA, 15 bp, Homo sapiens
tcatttggcataaca

SEQ ID NO: 14437 - DNA, 15 bp, Homo sapiens
atcatttggcataac

SEQ ID NO: 14438 - DNA, 15 bp, Homo sapiens
aatcatttggcataa

SEQ ID NO: 14439 - DNA, 15 bp, Homo sapiens
taatcatttggcata

SEQ ID NO: 14440 - DNA, 15 bp, Homo sapiens
ttaatcatttggcat

SEQ ID NO: 14441 - DNA, 15 bp, Homo sapiens
gttaatcatttggca

SEQ ID NO: 14442 - DNA, 15 bp, Homo sapiens
tgttaatcatttggc

SEQ ID NO: 14443 - DNA, 15 bp, Homo sapiens
atgttaatcatttgg

SEQ ID NO: 14444 - DNA, 15 bp, Homo sapiens
tatgttaatcatttg

SEQ ID NO: 14445 - DNA, 15 bp, Homo sapiens
ttatgttaatcattt

SEQ ID NO: 14446 - DNA, 15 bp, Homo sapiens
attatgttaatcatt

SEQ ID NO: 14447 - DNA, 15 bp, Homo sapiens
tattatgttaatcat

SEQ ID NO: 14448 - DNA, 15 bp, Homo sapiens
ttattatgttaatca

SEQ ID NO: 14449 - DNA, 15 bp, Homo sapiens
attattatgttaatc

SEQ ID NO: 14450 - DNA, 15 bp, Homo sapiens
tattattatgttaat

SEQ ID NO: 14451 - DNA, 15 bp, Homo sapiens
atattattatgttaa

SEQ ID NO: 14452 - DNA, 15 bp, Homo sapiens
aatattattatgtta

SEQ ID NO: 14453 - DNA, 15 bp, Homo sapiens
aaatattattatgtt

SEQ ID NO: 14454 - DNA, 15 bp, Homo sapiens
aaaatattattatgt

SEQ ID NO: 14455 - DNA, 15 bp, Homo sapiens
taaaatattattatg

SEQ ID NO: 14456 - DNA, 15 bp, Homo sapiens
ttaaaatattattat

SEQ ID NO: 14457 - DNA, 15 bp, Homo sapiens
cttaaaatattatta

SEQ ID NO: 14458 - DNA, 15 bp, Homo sapiens
acttaaaatattatt

SEQ ID NO: 14459 - DNA, 15 bp, Homo sapiens
aacttaaaatattat

SEQ ID NO: 14460 - DNA, 15 bp, Homo sapiens
aaacttaaaatatta

SEQ ID NO: 14461 - DNA, 15 bp, Homo sapiens
taaacttaaaatatt

SEQ ID NO: 14462 - DNA, 15 bp, Homo sapiens
ctaaacttaaaatat

SEQ ID NO: 14463 - DNA, 15 bp, Homo sapiens
tctaaacttaaaata

SEQ ID NO: 14464 - DNA, 15 bp, Homo sapiens
atctaaacttaaaat

SEQ ID NO: 14465 - DNA, 15 bp, Homo sapiens
tatctaaacttaaaa

SEQ ID NO: 14466 - DNA, 15 bp, Homo sapiens
atatctaaacttaaa

SEQ ID NO: 14467 - DNA, 15 bp, Homo sapiens
catatctaaacttaa

SEQ ID NO: 14468 - DNA, 15 bp, Homo sapiens
tcatatctaaactta

SEQ ID NO: 14469 - DNA, 15 bp, Homo sapiens
atcatatctaaactt

SEQ ID NO: 14470 - DNA, 15 bp, Homo sapiens
aatcatatctaaact

SEQ ID NO: 14471 - DNA, 15 bp, Homo sapiens
aaatcatatctaaac

SEQ ID NO: 14472 - DNA, 15 bp, Homo sapiens
aaaatcatatctaaa

SEQ ID NO: 14473 - DNA, 15 bp, Homo sapiens
caaaatcatatctaa

SEQ ID NO: 14474 - DNA, 15 bp, Homo sapiens
tcaaaatcatatcta

SEQ ID NO: 14475 - DNA, 15 bp, Homo sapiens
ttcaaaatcatatct

SEQ ID NO: 14476 - DNA, 15 bp, Homo sapiens
attcaaaatcatatc

SEQ ID NO: 14477 - DNA, 15 bp, Homo sapiens
aattcaaaatcatat

SEQ ID NO: 14478 - DNA, 15 bp, Homo sapiens
aaattcaaaatcata

SEQ ID NO: 14479 - DNA, 15 bp, Homo sapiens
taaattcaaaatcat

SEQ ID NO: 14480 - DNA, 15 bp, Homo sapiens
gtaaattcaaaatca

SEQ ID NO: 14481 - DNA, 15 bp, Homo sapiens
tgtaaattcaaaatc

SEQ ID NO: 14482 - DNA, 15 bp, Homo sapiens
atgtaaattcaaaat

SEQ ID NO: 14483 - DNA, 15 bp, Homo sapiens
aatgtaaattcaaaa

SEQ ID NO: 14484 - DNA, 15 bp, Homo sapiens
aaatgtaaattcaaa

SEQ ID NO: 14485 - DNA, 15 bp, Homo sapiens
aaaatgtaaattcaa

SEQ ID NO: 14486 - DNA, 15 bp, Homo sapiens
gaaaatgtaaattca

SEQ ID NO: 14487 - DNA, 15 bp, Homo sapiens
tgaaaatgtaaattc

SEQ ID NO: 14488 - DNA, 15 bp, Homo sapiens
ttgaaaatgtaaatt

SEQ ID NO: 14489 - DNA, 15 bp, Homo sapiens
tttgaaaatgtaaat

SEQ ID NO: 14490 - DNA, 15 bp, Homo sapiens
atttgaaaatgtaaa

SEQ ID NO: 14491 - DNA, 15 bp, Homo sapiens
catttgaaaatgtaa

SEQ ID NO: 14492 - DNA, 15 bp, Homo sapiens
gcatttgaaaatgta

SEQ ID NO: 14493 - DNA, 15 bp, Homo sapiens
tgcatttgaaaatgt

SEQ ID NO: 14494 - DNA, 15 bp, Homo sapiens
ttgcatttgaaaatg

SEQ ID NO: 14495 - DNA, 15 bp, Homo sapiens
gttgcatttgaaaat

SEQ ID NO: 14496 - DNA, 15 bp, Homo sapiens
agttgcatttgaaaa

SEQ ID NO: 14497 - DNA, 15 bp, Homo sapiens
aagttgcatttgaaa

SEQ ID NO: 14498 - DNA, 15 bp, Homo sapiens
aaagttgcatttgaa

SEQ ID NO: 14499 - DNA, 15 bp, Homo sapiens
caaagttgcatttga

SEQ ID NO: 14500 - DNA, 15 bp, Homo sapiens
acaaagttgcatttg

SEQ ID NO: 14501 - DNA, 15 bp, Homo sapiens
cacaaagttgcattt

SEQ ID NO: 14502 - DNA, 15 bp, Homo sapiens
acacaaagttgcatt

SEQ ID NO: 14503 - DNA, 15 bp, Homo sapiens
gacacaaagttgcat

SEQ ID NO: 14504 - DNA, 15 bp, Homo sapiens
agacacaaagttgca

SEQ ID NO: 14505 - DNA, 15 bp, Homo sapiens
cagacacaaagttgc

SEQ ID NO: 14506 - DNA, 15 bp, Homo sapiens
acagacacaaagttg

SEQ ID NO: 14507 - DNA, 15 bp, Homo sapiens
cacagacacaaagtt

SEQ ID NO: 14508 - DNA, 15 bp, Homo sapiens
ccacagacacaaagt

SEQ ID NO: 14509 - DNA, 15 bp, Homo sapiens
gccacagacacaaag

SEQ ID NO: 14510 - DNA, 15 bp, Homo sapiens
ggccacagacacaaa

SEQ ID NO: 14511 - DNA, 15 bp, Homo sapiens
aggccacagacacaa

SEQ ID NO: 14512 - DNA, 15 bp, Homo sapiens
aaggccacagacaca

SEQ ID NO: 14513 - DNA, 15 bp, Homo sapiens
aaaggccacagacac

SEQ ID NO: 14514 - DNA, 15 bp, Homo sapiens
aaaaggccacagaca

SEQ ID NO: 14515 - DNA, 15 bp, Homo sapiens
aaaaaggccacagac

SEQ ID NO: 14516 - DNA, 15 bp, Homo sapiens
aaaaaaggccacaga

SEQ ID NO: 14517 - DNA, 15 bp, Homo sapiens
aaaaaaaggccacag

SEQ ID NO: 14518 - DNA, 15 bp, Homo sapiens
aaaaaaaaggccaca

SEQ ID NO: 14519 - DNA, 15 bp, Homo sapiens
aaaaaaaaaggccac

SEQ ID NO: 14520 - DNA, 15 bp, Homo sapiens
aaaaaaaaaaggcca

SEQ ID NO: 14521 - DNA, 15 bp, Homo sapiens
aaaaaaaaaaaggcc

SEQ ID NO: 14522 - DNA, 15 bp, Homo sapiens
aaaaaaaaaaaaggc

SEQ ID NO: 14523 - DNA, 15 bp, Homo sapiens
aaaaaaaaaaaaagg

SEQ ID NO: 14524 - DNA, 15 bp, Homo sapiens
aaaaaaaaaaaaaag

SEQ ID NO: 14525 - DNA, 15 bp, Homo sapiens
taaaaaaaaaaaaaa

SEQ ID NO: 14526 - DNA, 15 bp, Homo sapiens
gtaaaaaaaaaaaaa

SEQ ID NO: 14527 - DNA, 15 bp, Homo sapiens
cgtaaaaaaaaaaaa

SEQ ID NO: 14528 - DNA, 15 bp, Homo sapiens
tcgtaaaaaaaaaaa

SEQ ID NO: 14529 - DNA, 15 bp, Homo sapiens
ctcgtaaaaaaaaaa

SEQ ID NO: 14530 - DNA, 15 bp, Homo sapiens
tctcgtaaaaaaaaa

SEQ ID NO: 14531 - DNA, 15 bp, Homo sapiens
ttctcgtaaaaaaaa

SEQ ID NO: 14532 - DNA, 15 bp, Homo sapiens
tttctcgtaaaaaaa

SEQ ID NO: 14533 - DNA, 15 bp, Homo sapiens
gtttctcgtaaaaaa

SEQ ID NO: 14534 - DNA, 15 bp, Homo sapiens
tgtttctcgtaaaaa

SEQ ID NO: 14535 - DNA, 15 bp, Homo sapiens
atgtttctcgtaaaa

SEQ ID NO: 14536 - DNA, 15 bp, Homo sapiens
gatgtttctcgtaaa

SEQ ID NO: 14537 - DNA, 15 bp, Homo sapiens
agatgtttctcgtaa

SEQ ID NO: 14538 - DNA, 15 bp, Homo sapiens
aagatgtttctcgta

SEQ ID NO: 14539 - DNA, 15 bp, Homo sapiens
caagatgtttctcgt

SEQ ID NO: 14540 - DNA, 15 bp, Homo sapiens
gcaagatgtttctcg

SEQ ID NO: 14541 - DNA, 15 bp, Homo sapiens
ggcaagatgtttctc

SEQ ID NO: 14542 - DNA, 15 bp, Homo sapiens
tggcaagatgtttct

SEQ ID NO: 14543 - DNA, 15 bp, Homo sapiens
ttggcaagatgtttc

SEQ ID NO: 14544 - DNA, 15 bp, Homo sapiens
attggcaagatgttt

SEQ ID NO: 14545 - DNA, 15 bp, Homo sapiens
aattggcaagatgtt

SEQ ID NO: 14546 - DNA, 15 bp, Homo sapiens
aaattggcaagatgt

SEQ ID NO: 14547 - DNA, 15 bp, Homo sapiens
aaaattggcaagatg

SEQ ID NO: 14548 - DNA, 15 bp, Homo sapiens
gaaaattggcaagat

SEQ ID NO: 14549 - DNA, 15 bp, Homo sapiens
tgaaaattggcaaga

SEQ ID NO: 14550 - DNA, 15 bp, Homo sapiens
ctgaaaattggcaag

SEQ ID NO: 14551 - DNA, 15 bp, Homo sapiens
tctgaaaattggcaa

SEQ ID NO: 14552 - DNA, 15 bp, Homo sapiens
atctgaaaattggca

SEQ ID NO: 14553 - DNA, 15 bp, Homo sapiens
aatctgaaaattggc

SEQ ID NO: 14554 - DNA, 15 bp, Homo sapiens
taatctgaaaattgg

SEQ ID NO: 14555 - DNA, 15 bp, Homo sapiens
ttaatctgaaaattg

SEQ ID NO: 14556 - DNA, 15 bp, Homo sapiens
attaatctgaaaatt

SEQ ID NO: 14557 - DNA, 15 bp, Homo sapiens
gattaatctgaaaat

SEQ ID NO: 14558 - DNA, 15 bp, Homo sapiens
agattaatctgaaaa

SEQ ID NO: 14559 - DNA, 15 bp, Homo sapiens
cagattaatctgaaa

SEQ ID NO: 14560 - DNA, 15 bp, Homo sapiens
acagattaatctgaa

SEQ ID NO: 14561 - DNA, 15 bp, Homo sapiens
cacagattaatctga

SEQ ID NO: 14562 - DNA, 15 bp, Homo sapiens
tcacagattaatctg

SEQ ID NO: 14563 - DNA, 15 bp, Homo sapiens
ctcacagattaatct

SEQ ID NO: 14564 - DNA, 15 bp, Homo sapiens
cctcacagattaatc

SEQ ID NO: 14565 - DNA, 15 bp, Homo sapiens
tcctcacagattaat

SEQ ID NO: 14566 - DNA, 15 bp, Homo sapiens
ttcctcacagattaa

SEQ ID NO: 14567 - DNA, 15 bp, Homo sapiens
tttcctcacagatta

SEQ ID NO: 14568 - DNA, 15 bp, Homo sapiens
ctttcctcacagatt

SEQ ID NO: 14569 - DNA, 15 bp, Homo sapiens
actttcctcacagat

SEQ ID NO: 14570 - DNA, 15 bp, Homo sapiens
tactttcctcacaga

SEQ ID NO: 14571 - DNA, 15 bp, Homo sapiens
ctactttcctcacag

SEQ ID NO: 14572 - DNA, 15 bp, Homo sapiens
tctactttcctcaca

SEQ ID NO: 14573 - DNA, 15 bp, Homo sapiens
atctactttcctcac

SEQ ID NO: 14574 - DNA, 15 bp, Homo sapiens
aatctactttcctca

SEQ ID NO: 14575 - DNA, 15 bp, Homo sapiens
caatctactttcctc

SEQ ID NO: 14576 - DNA, 15 bp, Homo sapiens
ccaatctactttcct

SEQ ID NO: 14577 - DNA, 15 bp, Homo sapiens
accaatctactttcc

SEQ ID NO: 14578 - DNA, 15 bp, Homo sapiens
aaccaatctactttc

SEQ ID NO: 14579 - DNA, 15 bp, Homo sapiens
aaaccaatctacttt

SEQ ID NO: 14580 - DNA, 15 bp, Homo sapiens
taaaccaatctactt

SEQ ID NO: 14581 - DNA, 15 bp, Homo sapiens
gtaaaccaatctact

SEQ ID NO: 14582 - DNA, 15 bp, Homo sapiens
agtaaaccaatctac

SEQ ID NO: 14583 - DNA, 15 bp, Homo sapiens
tagtaaaccaatcta

SEQ ID NO: 14584 - DNA, 15 bp, Homo sapiens
ctagtaaaccaatct

SEQ ID NO: 14585 - DNA, 15 bp, Homo sapiens
tctagtaaaccaatc

SEQ ID NO: 14586 - DNA, 15 bp, Homo sapiens
gtctagtaaaccaat

SEQ ID NO: 14587 - DNA, 15 bp, Homo sapiens
agtctagtaaaccaa

SEQ ID NO: 14588 - DNA, 15 bp, Homo sapiens
gagtctagtaaacca

SEQ ID NO: 14589 - DNA, 15 bp, Homo sapiens
tgagtctagtaaacc

SEQ ID NO: 14590 - DNA, 15 bp, Homo sapiens
ctgagtctagtaaac

SEQ ID NO: 14591 - DNA, 15 bp, Homo sapiens
actgagtctagtaaa

SEQ ID NO: 14592 - DNA, 15 bp, Homo sapiens
aactgagtctagtaa

SEQ ID NO: 14593 - DNA, 15 bp, Homo sapiens
aaactgagtctagta

SEQ ID NO: 14594 - DNA, 15 bp, Homo sapiens
caaactgagtctagt

SEQ ID NO: 14595 - DNA, 15 bp, Homo sapiens
acaaactgagtctag

SEQ ID NO: 14596 - DNA, 15 bp, Homo sapiens
tacaaactgagtcta

SEQ ID NO: 14597 - DNA, 15 bp, Homo sapiens
ctacaaactgagtct

SEQ ID NO: 14598 - DNA, 15 bp, Homo sapiens
tctacaaactgagtc

SEQ ID NO: 14599 - DNA, 15 bp, Homo sapiens
gtctacaaactgagt

SEQ ID NO: 14600 - DNA, 15 bp, Homo sapiens
agtctacaaactgag

SEQ ID NO: 14601 - DNA, 15 bp, Homo sapiens
aagtctacaaactga

SEQ ID NO: 14602 - DNA, 15 bp, Homo sapiens
aaagtctacaaactg

SEQ ID NO: 14603 - DNA, 15 bp, Homo sapiens
caaagtctacaaact

SEQ ID NO: 14604 - DNA, 15 bp, Homo sapiens
ccaaagtctacaaac

SEQ ID NO: 14605 - DNA, 15 bp, Homo sapiens
accaaagtctacaaa

SEQ ID NO: 14606 - DNA, 15 bp, Homo sapiens
caccaaagtctacaa

SEQ ID NO: 14607 - DNA, 15 bp, Homo sapiens
tcaccaaagtctaca

SEQ ID NO: 14608 - DNA, 15 bp, Homo sapiens
ctcaccaaagtctac

SEQ ID NO: 14609 - DNA, 15 bp, Homo sapiens
tctcaccaaagtcta

SEQ ID NO: 14610 - DNA, 15 bp, Homo sapiens
ttctcaccaaagtct

SEQ ID NO: 14611 - DNA, 15 bp, Homo sapiens
gttctcaccaaagtc

SEQ ID NO: 14612 - DNA, 15 bp, Homo sapiens
agttctcaccaaagt

SEQ ID NO: 14613 - DNA, 15 bp, Homo sapiens
cagttctcaccaaag

SEQ ID NO: 14614 - DNA, 15 bp, Homo sapiens
tcagttctcaccaaa

SEQ ID NO: 14615 - DNA, 15 bp, Homo sapiens
ttcagttctcaccaa

SEQ ID NO: 14616 - DNA, 15 bp, Homo sapiens
attcagttctcacca

SEQ ID NO: 14617 - DNA, 15 bp, Homo sapiens
aattcagttctcacc

SEQ ID NO: 14618 - DNA, 15 bp, Homo sapiens
caattcagttctcac

SEQ ID NO: 14619 - DNA, 15 bp, Homo sapiens
ccaattcagttctca

SEQ ID NO: 14620 - DNA, 15 bp, Homo sapiens
tccaattcagttctc

SEQ ID NO: 14621 - DNA, 15 bp, Homo sapiens
ctccaattcagttct

SEQ ID NO: 14622 - DNA, 15 bp, Homo sapiens
cctccaattcagttc

SEQ ID NO: 14623 - DNA, 15 bp, Homo sapiens
gcctccaattcagtt

SEQ ID NO: 14624 - DNA, 15 bp, Homo sapiens
agcctccaattcagt

SEQ ID NO: 14625 - DNA, 15 bp, Homo sapiens
tagcctccaattcag

SEQ ID NO: 14626 - DNA, 15 bp, Homo sapiens
atagcctccaattca

SEQ ID NO: 14627 - DNA, 15 bp, Homo sapiens
catagcctccaattc

SEQ ID NO: 14628 - DNA, 15 bp, Homo sapiens
tcatagcctccaatt

SEQ ID NO: 14629 - DNA, 15 bp, Homo sapiens
ttcatagcctccaat

SEQ ID NO: 14630 - DNA, 15 bp, Homo sapiens
tttcatagcctccaa

SEQ ID NO: 14631 - DNA, 15 bp, Homo sapiens
ttttcatagcctcca

SEQ ID NO: 14632 - DNA, 15 bp, Homo sapiens
tttttcatagcctcc

SEQ ID NO: 14633 - DNA, 15 bp, Homo sapiens
ttttttcatagcctc

SEQ ID NO: 14634 - DNA, 15 bp, Homo sapiens
tttttttcatagcct

SEQ ID NO: 14635 - DNA, 15 bp, Homo sapiens
atttttttcatagcc

SEQ ID NO: 14636 - DNA, 15 bp, Homo sapiens
tatttttttcatagc

SEQ ID NO: 14637 - DNA, 15 bp, Homo sapiens
gtatttttttcatag

SEQ ID NO: 14638 - DNA, 15 bp, Homo sapiens
ggtatttttttcata

SEQ ID NO: 14639 - DNA, 15 bp, Homo sapiens
aggtatttttttcat

SEQ ID NO: 14640 - DNA, 15 bp, Homo sapiens
aaggtatttttttca

SEQ ID NO: 14641 - DNA, 15 bp, Homo sapiens
aaaggtatttttttc

SEQ ID NO: 14642 - DNA, 15 bp, Homo sapiens
aaaaggtattttttt

SEQ ID NO: 14643 - DNA, 15 bp, Homo sapiens
caaaaggtatttttt

SEQ ID NO: 14644 - DNA, 15 bp, Homo sapiens
ccaaaaggtattttt

SEQ ID NO: 14645 - DNA, 15 bp, Homo sapiens
cccaaaaggtatttt

SEQ ID NO: 14646 - DNA, 15 bp, Homo sapiens
gcccaaaaggtattt

SEQ ID NO: 14647 - DNA, 15 bp, Homo sapiens
ggcccaaaaggtatt

SEQ ID NO: 14648 - DNA, 15 bp, Homo sapiens
aggcccaaaaggtat

SEQ ID NO: 14649 - DNA, 15 bp, Homo sapiens
aaggcccaaaaggta

SEQ ID NO: 14650 - DNA, 15 bp, Homo sapiens
aaaggcccaaaaggt

SEQ ID NO: 14651 - DNA, 15 bp, Homo sapiens
gaaaggcccaaaagg

SEQ ID NO: 14652 - DNA, 15 bp, Homo sapiens
agaaaggcccaaaag

SEQ ID NO: 14653 - DNA, 15 bp, Homo sapiens
cagaaaggcccaaaa

SEQ ID NO: 14654 - DNA, 15 bp, Homo sapiens
tcagaaaggcccaaa

SEQ ID NO: 14655 - DNA, 15 bp, Homo sapiens
ttcagaaaggcccaa

SEQ ID NO: 14656 - DNA, 15 bp, Homo sapiens
attcagaaaggccca

SEQ ID NO: 14657 - DNA, 15 bp, Homo sapiens
tattcagaaaggccc

SEQ ID NO: 14658 - DNA, 15 bp, Homo sapiens
ctattcagaaaggcc

SEQ ID NO: 14659 - DNA, 15 bp, Homo sapiens
tctattcagaaaggc

SEQ ID NO: 14660 - DNA, 15 bp, Homo sapiens
gtctattcagaaagg

SEQ ID NO: 14661 - DNA, 15 bp, Homo sapiens
tgtctattcagaaag

SEQ ID NO: 14662 - DNA, 15 bp, Homo sapiens
atgtctattcagaaa

SEQ ID NO: 14663 - DNA, 15 bp, Homo sapiens
tatgtctattcagaa

SEQ ID NO: 14664 - DNA, 15 bp, Homo sapiens
atatgtctattcaga

SEQ ID NO: 14665 - DNA, 15 bp, Homo sapiens
tatatgtctattcag

SEQ ID NO: 14666 - DNA, 15 bp, Homo sapiens
atatatgtctattca

SEQ ID NO: 14667 - DNA, 15 bp, Homo sapiens
tatatatgtctattc

SEQ ID NO: 14668 - DNA, 15 bp, Homo sapiens
gtatatatgtctatt

SEQ ID NO: 14669 - DNA, 15 bp, Homo sapiens
tgtatatatgtctat

SEQ ID NO: 14670 - DNA, 15 bp, Homo sapiens
atgtatatatgtcta

SEQ ID NO: 14671 - DNA, 15 bp, Homo sapiens
tatgtatatatgtct

SEQ ID NO: 14672 - DNA, 15 bp, Homo sapiens
ttatgtatatatgtc

SEQ ID NO: 14673 - DNA, 15 bp, Homo sapiens
tttatgtatatatgt

SEQ ID NO: 14674 - DNA, 15 bp, Homo sapiens
atttatgtatatatg

SEQ ID NO: 14675 - DNA, 15 bp, Homo sapiens
aatttatgtatatat

SEQ ID NO: 14676 - DNA, 15 bp, Homo sapiens
taatttatgtatata

SEQ ID NO: 14677 - DNA, 15 bp, Homo sapiens
ataatttatgtatat

SEQ ID NO: 14678 - DNA, 15 bp, Homo sapiens
tataatttatgtata

SEQ ID NO: 14679 - DNA, 15 bp, Homo sapiens
atataatttatgtat

SEQ ID NO: 14680 - DNA, 15 bp, Homo sapiens
gatataatttatgta

SEQ ID NO: 14681 - DNA, 15 bp, Homo sapiens
agatataatttatgt

SEQ ID NO: 14682 - DNA, 15 bp, Homo sapiens
gagatataatttatg

SEQ ID NO: 14683 - DNA, 15 bp, Homo sapiens
agagatataatttat

SEQ ID NO: 14684 - DNA, 15 bp, Homo sapiens
aagagatataattta

SEQ ID NO: 14685 - DNA, 15 bp, Homo sapiens
taagagatataattt

SEQ ID NO: 14686 - DNA, 15 bp, Homo sapiens
gtaagagatataatt

SEQ ID NO: 14687 - DNA, 15 bp, Homo sapiens
tgtaagagatataat

SEQ ID NO: 14688 - DNA, 15 bp, Homo sapiens
atgtaagagatataa

SEQ ID NO: 14689 - DNA, 15 bp, Homo sapiens
aatgtaagagatata

SEQ ID NO: 14690 - DNA, 15 bp, Homo sapiens
taatgtaagagatat

SEQ ID NO: 14691 - DNA, 15 bp, Homo sapiens
ttaatgtaagagata

SEQ ID NO: 14692 - DNA, 15 bp, Homo sapiens
cttaatgtaagagat

SEQ ID NO: 14693 - DNA, 15 bp, Homo sapiens
acttaatgtaagaga

SEQ ID NO: 14694 - DNA, 15 bp, Homo sapiens
cacttaatgtaagag

SEQ ID NO: 14695 - DNA, 15 bp, Homo sapiens
tcacttaatgtaaga

SEQ ID NO: 14696 - DNA, 15 bp, Homo sapiens
ctcacttaatgtaag

SEQ ID NO: 14697 - DNA, 15 bp, Homo sapiens
cctcacttaatgtaa

SEQ ID NO: 14698 - DNA, 15 bp, Homo sapiens
gcctcacttaatgta

SEQ ID NO: 14699 - DNA, 15 bp, Homo sapiens
tgcctcacttaatgt

SEQ ID NO: 14700 - DNA, 15 bp, Homo sapiens
gtgcctcacttaatg

SEQ ID NO: 14701 - DNA, 15 bp, Homo sapiens
tgtgcctcacttaat

SEQ ID NO: 14702 - DNA, 15 bp, Homo sapiens
atgtgcctcacttaa

SEQ ID NO: 14703 - DNA, 15 bp, Homo sapiens
tatgtgcctcactta

SEQ ID NO: 14704 - DNA, 15 bp, Homo sapiens
atatgtgcctcactt

SEQ ID NO: 14705 - DNA, 15 bp, Homo sapiens
catatgtgcctcact

SEQ ID NO: 14706 - DNA, 15 bp, Homo sapiens
acatatgtgcctcac

SEQ ID NO: 14707 - DNA, 15 bp, Homo sapiens
tacatatgtgcctca

SEQ ID NO: 14708 - DNA, 15 bp, Homo sapiens
ctacatatgtgcctc

SEQ ID NO: 14709 - DNA, 15 bp, Homo sapiens
cctacatatgtgcct

SEQ ID NO: 14710 - DNA, 15 bp, Homo sapiens
acctacatatgtgcc

SEQ ID NO: 14711 - DNA, 15 bp, Homo sapiens
cacctacatatgtgc

SEQ ID NO: 14712 - DNA, 15 bp, Homo sapiens
tcacctacatatgtg

SEQ ID NO: 14713 - DNA, 15 bp, Homo sapiens
ctcacctacatatgt

SEQ ID NO: 14714 - DNA, 15 bp, Homo sapiens
tctcacctacatatg

SEQ ID NO: 14715 - DNA, 15 bp, Homo sapiens
atctcacctacatat

SEQ ID NO: 14716 - DNA, 15 bp, Homo sapiens
aatctcacctacata

SEQ ID NO: 14717 - DNA, 15 bp, Homo sapiens
aaatctcacctacat

SEQ ID NO: 14718 - DNA, 15 bp, Homo sapiens
aaaatctcacctaca

SEQ ID NO: 14719 - DNA, 15 bp, Homo sapiens
aaaaatctcacctac

SEQ ID NO: 14720 - DNA, 15 bp, Homo sapiens
taaaaatctcaccta

SEQ ID NO: 14721 - DNA, 15 bp, Homo sapiens
gtaaaaatctcacct

SEQ ID NO: 14722 - DNA, 15 bp, Homo sapiens
ggtaaaaatctcacc

SEQ ID NO: 14723 - DNA, 15 bp, Homo sapiens
aggtaaaaatctcac

SEQ ID NO: 14724 - DNA, 15 bp, Homo sapiens
caggtaaaaatctca

SEQ ID NO: 14725 - DNA, 15 bp, Homo sapiens
tcaggtaaaaatctc

SEQ ID NO: 14726 - DNA, 15 bp, Homo sapiens
ttcaggtaaaaatct

SEQ ID NO: 14727 - DNA, 15 bp, Homo sapiens
attcaggtaaaaatc

SEQ ID NO: 14728 - DNA, 15 bp, Homo sapiens
tattcaggtaaaaat

SEQ ID NO: 14729 - DNA, 15 bp, Homo sapiens
atattcaggtaaaaa

SEQ ID NO: 14730 - DNA, 15 bp, Homo sapiens
aatattcaggtaaaa

SEQ ID NO: 14731 - DNA, 15 bp, Homo sapiens
taatattcaggtaaa

SEQ ID NO: 14732 - DNA, 15 bp, Homo sapiens
ttaatattcaggtaa

SEQ ID NO: 14733 - DNA, 15 bp, Homo sapiens
tttaatattcaggta

SEQ ID NO: 14734 - DNA, 15 bp, Homo sapiens
ttttaatattcaggt

SEQ ID NO: 14735 - DNA, 15 bp, Homo sapiens
cttttaatattcagg

SEQ ID NO: 14736 - DNA, 15 bp, Homo sapiens
acttttaatattcag

SEQ ID NO: 14737 - DNA, 15 bp, Homo sapiens
aacttttaatattca

SEQ ID NO: 14738 - DNA, 15 bp, Homo sapiens
aaacttttaatattc

SEQ ID NO: 14739 - DNA, 15 bp, Homo sapiens
taaacttttaatatt

SEQ ID NO: 14740 - DNA, 15 bp, Homo sapiens
ttaaacttttaatat

SEQ ID NO: 14741 - DNA, 15 bp, Homo sapiens
tttaaacttttaata

SEQ ID NO: 14742 - DNA, 15 bp, Homo sapiens
ttttaaacttttaat

SEQ ID NO: 14743 - DNA, 15 bp, Homo sapiens
cttttaaacttttaa

SEQ ID NO: 14744 - DNA, 15 bp, Homo sapiens
acttttaaactttta

SEQ ID NO: 14745 - DNA, 15 bp, Homo sapiens
gacttttaaactttt

SEQ ID NO: 14746 - DNA, 15 bp, Homo sapiens
cgacttttaaacttt

SEQ ID NO: 14747 - DNA, 15 bp, Homo sapiens
acgacttttaaactt

SEQ ID NO: 14748 - DNA, 15 bp, Homo sapiens
aacgacttttaaact

SEQ ID NO: 14749 - DNA, 15 bp, Homo sapiens
taacgacttttaaac

SEQ ID NO: 14750 - DNA, 15 bp, Homo sapiens
gtaacgacttttaaa

SEQ ID NO: 14751 - DNA, 15 bp, Homo sapiens
ggtaacgacttttaa

SEQ ID NO: 14752 - DNA, 15 bp, Homo sapiens
aggtaacgactttta

SEQ ID NO: 14753 - DNA, 15 bp, Homo sapiens
taggtaacgactttt

SEQ ID NO: 14754 - DNA, 15 bp, Homo sapiens
ataggtaacgacttt

SEQ ID NO: 14755 - DNA, 15 bp, Homo sapiens
aataggtaacgactt

SEQ ID NO: 14756 - DNA, 15 bp, Homo sapiens
gaataggtaacgact

SEQ ID NO: 14757 - DNA, 15 bp, Homo sapiens
agaataggtaacgac

SEQ ID NO: 14758 - DNA, 15 bp, Homo sapiens
cagaataggtaacga

SEQ ID NO: 14759 - DNA, 15 bp, Homo sapiens
acagaataggtaacg

SEQ ID NO: 14760 - DNA, 15 bp, Homo sapiens
aacagaataggtaac

SEQ ID NO: 14761 - DNA, 15 bp, Homo sapiens
aaacagaataggtaa

SEQ ID NO: 14762 - DNA, 15 bp, Homo sapiens
taaacagaataggta

SEQ ID NO: 14763 - DNA, 15 bp, Homo sapiens
gtaaacagaataggt

SEQ ID NO: 14764 - DNA, 15 bp, Homo sapiens
agtaaacagaatagg

SEQ ID NO: 14765 - DNA, 15 bp, Homo sapiens
aagtaaacagaatag

SEQ ID NO: 14766 - DNA, 15 bp, Homo sapiens
taagtaaacagaata

SEQ ID NO: 14767 - DNA, 15 bp, Homo sapiens
ttaagtaaacagaat

SEQ ID NO: 14768 - DNA, 15 bp, Homo sapiens
attaagtaaacagaa

SEQ ID NO: 14769 - DNA, 15 bp, Homo sapiens
tattaagtaaacaga

SEQ ID NO: 14770 - DNA, 15 bp, Homo sapiens
ctattaagtaaacag

SEQ ID NO: 14771 - DNA, 15 bp, Homo sapiens
actattaagtaaaca

SEQ ID NO: 14772 - DNA, 15 bp, Homo sapiens
tactattaagtaaac

SEQ ID NO: 14773 - DNA, 15 bp, Homo sapiens
atactattaagtaaa

SEQ ID NO: 14774 - DNA, 15 bp, Homo sapiens
aatactattaagtaa

SEQ ID NO: 14775 - DNA, 15 bp, Homo sapiens
aaatactattaagta

SEQ ID NO: 14776 - DNA, 15 bp, Homo sapiens
taaatactattaagt

SEQ ID NO: 14777 - DNA, 15 bp, Homo sapiens
ttaaatactattaag

SEQ ID NO: 14778 - DNA, 15 bp, Homo sapiens
tttaaatactattaa

SEQ ID NO: 14779 - DNA, 15 bp, Homo sapiens
ctttaaatactatta

SEQ ID NO: 14780 - DNA, 15 bp, Homo sapiens
cctttaaatactatt

SEQ ID NO: 14781 - DNA, 15 bp, Homo sapiens
ccctttaaatactat

SEQ ID NO: 14782 - DNA, 15 bp, Homo sapiens
accctttaaatacta

SEQ ID NO: 14783 - DNA, 15 bp, Homo sapiens
caccctttaaatact

SEQ ID NO: 14784 - DNA, 15 bp, Homo sapiens
acaccctttaaatac

SEQ ID NO: 14785 - DNA, 15 bp, Homo sapiens
cacaccctttaaata

SEQ ID NO: 14786 - DNA, 15 bp, Homo sapiens
tcacaccctttaaat

SEQ ID NO: 14787 - DNA, 15 bp, Homo sapiens
ctcacaccctttaaa

SEQ ID NO: 14788 - DNA, 15 bp, Homo sapiens
tctcacaccctttaa

SEQ ID NO: 14789 - DNA, 15 bp, Homo sapiens
ctctcacacccttta

SEQ ID NO: 14790 - DNA, 15 bp, Homo sapiens
cctctcacacccttt

SEQ ID NO: 14791 - DNA, 15 bp, Homo sapiens
acctctcacaccctt

SEQ ID NO: 14792 - DNA, 15 bp, Homo sapiens
cacctctcacaccct

SEQ ID NO: 14793 - DNA, 15 bp, Homo sapiens
acacctctcacaccc

SEQ ID NO: 14794 - DNA, 15 bp, Homo sapiens
aacacctctcacacc

SEQ ID NO: 14795 - DNA, 15 bp, Homo sapiens
taacacctctcacac

SEQ ID NO: 14796 - DNA, 15 bp, Homo sapiens
ataacacctctcaca

SEQ ID NO: 14797 - DNA, 15 bp, Homo sapiens
cataacacctctcac

SEQ ID NO: 14798 - DNA, 15 bp, Homo sapiens
acataacacctctca

SEQ ID NO: 14799 - DNA, 15 bp, Homo sapiens
cacataacacctctc

SEQ ID NO: 14800 - DNA, 15 bp, Homo sapiens
acacataacacctct

SEQ ID NO: 14801 - DNA, 15 bp, Homo sapiens
aacacataacacctc

SEQ ID NO: 14802 - DNA, 15 bp, Homo sapiens
aaacacataacacct

SEQ ID NO: 14803 - DNA, 15 bp, Homo sapiens
gaaacacataacacc

SEQ ID NO: 14804 - DNA, 15 bp, Homo sapiens
agaaacacataacac

SEQ ID NO: 14805 - DNA, 15 bp, Homo sapiens
cagaaacacataaca

SEQ ID NO: 14806 - DNA, 15 bp, Homo sapiens
acagaaacacataac

SEQ ID NO: 14807 - DNA, 15 bp, Homo sapiens
gacagaaacacataa

SEQ ID NO: 14808 - DNA, 15 bp, Homo sapiens
ggacagaaacacata

SEQ ID NO: 14809 - DNA, 15 bp, Homo sapiens
gggacagaaacacat

SEQ ID NO: 14810 - DNA, 15 bp, Homo sapiens
agggacagaaacaca

SEQ ID NO: 14811 - DNA, 15 bp, Homo sapiens
aagggacagaaacac

SEQ ID NO: 14812 - DNA, 15 bp, Homo sapiens
caagggacagaaaca

SEQ ID NO: 14813 - DNA, 15 bp, Homo sapiens
acaagggacagaaac

SEQ ID NO: 14814 - DNA, 15 bp, Homo sapiens
aacaagggacagaaa

SEQ ID NO: 14815 - DNA, 15 bp, Homo sapiens
aaacaagggacagaa

SEQ ID NO: 14816 - DNA, 15 bp, Homo sapiens
aaaacaagggacaga

SEQ ID NO: 14817 - DNA, 15 bp, Homo sapiens
aaaaacaagggacag

SEQ ID NO: 14818 - DNA, 15 bp, Homo sapiens
taaaaacaagggaca

SEQ ID NO: 14819 - DNA, 15 bp, Homo sapiens
ataaaaacaagggac

SEQ ID NO: 14820 - DNA, 15 bp, Homo sapiens
aataaaaacaaggga

SEQ ID NO: 14821 - DNA, 15 bp, Homo sapiens
gaataaaaacaaggg

SEQ ID NO: 14822 - DNA, 15 bp, Homo sapiens
ggaataaaaacaagg

SEQ ID NO: 14823 - DNA, 15 bp, Homo sapiens
aggaataaaaacaag

SEQ ID NO: 14824 - DNA, 15 bp, Homo sapiens
taggaataaaaacaa

SEQ ID NO: 14825 - DNA, 15 bp, Homo sapiens
ataggaataaaaaca

SEQ ID NO: 14826 - DNA, 15 bp, Homo sapiens
gataggaataaaaac

SEQ ID NO: 14827 - DNA, 15 bp, Homo sapiens
ggataggaataaaaa

SEQ ID NO: 14828 - DNA, 15 bp, Homo sapiens
gggataggaataaaa

SEQ ID NO: 14829 - DNA, 15 bp, Homo sapiens
agggataggaataaa

SEQ ID NO: 14830 - DNA, 15 bp, Homo sapiens
gagggataggaataa

SEQ ID NO: 14831 - DNA, 15 bp, Homo sapiens
ggagggataggaata

SEQ ID NO: 14832 - DNA, 15 bp, Homo sapiens
gggagggataggaat

SEQ ID NO: 14833 - DNA, 15 bp, Homo sapiens
tgggagggataggaa

SEQ ID NO: 14834 - DNA, 15 bp, Homo sapiens
atgggagggatagga

SEQ ID NO: 14835 - DNA, 15 bp, Homo sapiens
gatgggagggatagg

SEQ ID NO: 14836 - DNA, 15 bp, Homo sapiens
agatgggagggatag

SEQ ID NO: 14837 - DNA, 15 bp, Homo sapiens
tagatgggagggata

SEQ ID NO: 14838 - DNA, 15 bp, Homo sapiens
ttagatgggagggat

SEQ ID NO: 14839 - DNA, 15 bp, Homo sapiens
gttagatgggaggga

SEQ ID NO: 14840 - DNA, 15 bp, Homo sapiens
agttagatgggaggg

SEQ ID NO: 14841 - DNA, 15 bp, Homo sapiens
cagttagatgggagg

SEQ ID NO: 14842 - DNA, 15 bp, Homo sapiens
acagttagatgggag

SEQ ID NO: 14843 - DNA, 15 bp, Homo sapiens
aacagttagatggga

SEQ ID NO: 14844 - DNA, 15 bp, Homo sapiens
caacagttagatggg

SEQ ID NO: 14845 - DNA, 15 bp, Homo sapiens
ccaacagttagatgg

SEQ ID NO: 14846 - DNA, 15 bp, Homo sapiens
accaacagttagatg

SEQ ID NO: 14847 - DNA, 15 bp, Homo sapiens
taccaacagttagat

SEQ ID NO: 14848 - DNA, 15 bp, Homo sapiens
gtaccaacagttaga

SEQ ID NO: 14849 - DNA, 15 bp, Homo sapiens
agtaccaacagttag

SEQ ID NO: 14850 - DNA, 15 bp, Homo sapiens
gagtaccaacagtta

SEQ ID NO: 14851 - DNA, 15 bp, Homo sapiens
agagtaccaacagtt

SEQ ID NO: 14852 - DNA, 15 bp, Homo sapiens
aagagtaccaacagt

SEQ ID NO: 14853 - DNA, 15 bp, Homo sapiens
taagagtaccaacag

SEQ ID NO: 14854 - DNA, 15 bp, Homo sapiens
ataagagtaccaaca

SEQ ID NO: 14855 - DNA, 15 bp, Homo sapiens
gataagagtaccaac

SEQ ID NO: 14856 - DNA, 15 bp, Homo sapiens
agataagagtaccaa

SEQ ID NO: 14857 - DNA, 15 bp, Homo sapiens
aagataagagtacca

SEQ ID NO: 14858 - DNA, 15 bp, Homo sapiens
gaagataagagtacc

SEQ ID NO: 14859 - DNA, 15 bp, Homo sapiens
ggaagataagagtac

SEQ ID NO: 14860 - DNA, 15 bp, Homo sapiens
gggaagataagagta

SEQ ID NO: 14861 - DNA, 15 bp, Homo sapiens
tgggaagataagagt

SEQ ID NO: 14862 - DNA, 15 bp, Homo sapiens
ctgggaagataagag

SEQ ID NO: 14863 - DNA, 15 bp, Homo sapiens
cctgggaagataaga

SEQ ID NO: 14864 - DNA, 15 bp, Homo sapiens
acctgggaagataag

SEQ ID NO: 14865 - DNA, 15 bp, Homo sapiens
tacctgggaagataa

SEQ ID NO: 14866 - DNA, 15 bp, Homo sapiens
atacctgggaagata

SEQ ID NO: 14867 - DNA, 15 bp, Homo sapiens
aatacctgggaagat

SEQ ID NO: 14868 - DNA, 15 bp, Homo sapiens
taatacctgggaaga

SEQ ID NO: 14869 - DNA, 15 bp, Homo sapiens
ttaatacctgggaag

SEQ ID NO: 14870 - DNA, 15 bp, Homo sapiens
tttaatacctgggaa

SEQ ID NO: 14871 - DNA, 15 bp, Homo sapiens
gtttaatacctggga

SEQ ID NO: 14872 - DNA, 15 bp, Homo sapiens
agtttaatacctggg

SEQ ID NO: 14873 - DNA, 15 bp, Homo sapiens
aagtttaatacctgg

SEQ ID NO: 14874 - DNA, 15 bp, Homo sapiens
caagtttaatacctg

SEQ ID NO: 14875 - DNA, 15 bp, Homo sapiens
acaagtttaatacct

SEQ ID NO: 14876 - DNA, 15 bp, Homo sapiens
tacaagtttaatacc

SEQ ID NO: 14877 - DNA, 15 bp, Homo sapiens
atacaagtttaatac

SEQ ID NO: 14878 - DNA, 15 bp, Homo sapiens
catacaagtttaata

SEQ ID NO: 14879 - DNA, 15 bp, Homo sapiens
acatacaagtttaat

SEQ ID NO: 14880 - DNA, 15 bp, Homo sapiens
aacatacaagtttaa

SEQ ID NO: 14881 - DNA, 15 bp, Homo sapiens
aaacatacaagttta

SEQ ID NO: 14882 - DNA, 15 bp, Homo sapiens
aaaacatacaagttt

SEQ ID NO: 14883 - DNA, 15 bp, Homo sapiens
taaaacatacaagtt

SEQ ID NO: 14884 - DNA, 15 bp, Homo sapiens
ttaaaacatacaagt

SEQ ID NO: 14885 - DNA, 15 bp, Homo sapiens
tttaaaacatacaag

SEQ ID NO: 14886 - DNA, 15 bp, Homo sapiens
ttttaaaacatacaa

SEQ ID NO: 14887 - DNA, 15 bp, Homo sapiens
cttttaaaacataca

SEQ ID NO: 14888 - DNA, 15 bp, Homo sapiens
gcttttaaaacatac

SEQ ID NO: 14889 - DNA, 15 bp, Homo sapiens
agcttttaaaacata

SEQ ID NO: 14890 - DNA, 15 bp, Homo sapiens
aagcttttaaaacat

SEQ ID NO: 14891 - DNA, 15 bp, Homo sapiens
taagcttttaaaaca

SEQ ID NO: 14892 - DNA, 15 bp, Homo sapiens
ataagcttttaaaac

SEQ ID NO: 14893 - DNA, 15 bp, Homo sapiens
aataagcttttaaaa

SEQ ID NO: 14894 - DNA, 15 bp, Homo sapiens
aaataagcttttaaa

SEQ ID NO: 14895 - DNA, 15 bp, Homo sapiens
taaataagcttttaa

SEQ ID NO: 14896 - DNA, 15 bp, Homo sapiens
gtaaataagctttta

SEQ ID NO: 14897 - DNA, 15 bp, Homo sapiens
agtaaataagctttt

SEQ ID NO: 14898 - DNA, 15 bp, Homo sapiens
aagtaaataagcttt

SEQ ID NO: 14899 - DNA, 15 bp, Homo sapiens
caagtaaataagctt

SEQ ID NO: 14900 - DNA, 15 bp, Homo sapiens
acaagtaaataagct

SEQ ID NO: 14901 - DNA, 15 bp, Homo sapiens
aacaagtaaataagc

SEQ ID NO: 14902 - DNA, 15 bp, Homo sapiens
caacaagtaaataag

SEQ ID NO: 14903 - DNA, 15 bp, Homo sapiens
tcaacaagtaaataa

SEQ ID NO: 14904 - DNA, 15 bp, Homo sapiens
ttcaacaagtaaata

SEQ ID NO: 14905 - DNA, 15 bp, Homo sapiens
tttcaacaagtaaat

SEQ ID NO: 14906 - DNA, 15 bp, Homo sapiens
atttcaacaagtaaa

SEQ ID NO: 14907 - DNA, 15 bp, Homo sapiens
catttcaacaagtaa

SEQ ID NO: 14908 - DNA, 15 bp, Homo sapiens
ccatttcaacaagta

SEQ ID NO: 14909 - DNA, 15 bp, Homo sapiens
accatttcaacaagt

SEQ ID NO: 14910 - DNA, 15 bp, Homo sapiens
aaccatttcaacaag

SEQ ID NO: 14911 - DNA, 15 bp, Homo sapiens
taaccatttcaacaa

SEQ ID NO: 14912 - DNA, 15 bp, Homo sapiens
ttaaccatttcaaca

SEQ ID NO: 14913 - DNA, 15 bp, Homo sapiens
gttaaccatttcaac

SEQ ID NO: 14914 - DNA, 15 bp, Homo sapiens
agttaaccatttcaa

SEQ ID NO: 14915 - DNA, 15 bp, Homo sapiens
aagttaaccatttca

SEQ ID NO: 14916 - DNA, 15 bp, Homo sapiens
taagttaaccatttc

SEQ ID NO: 14917 - DNA, 15 bp, Homo sapiens
ttaagttaaccattt

SEQ ID NO: 14918 - DNA, 15 bp, Homo sapiens
attaagttaaccatt

SEQ ID NO: 14919 - DNA, 15 bp, Homo sapiens
aattaagttaaccat

SEQ ID NO: 14920 - DNA, 15 bp, Homo sapiens
taattaagttaacca

SEQ ID NO: 14921 - DNA, 15 bp, Homo sapiens
ctaattaagttaacc

SEQ ID NO: 14922 - DNA, 15 bp, Homo sapiens
actaattaagttaac

SEQ ID NO: 14923 - DNA, 15 bp, Homo sapiens
aactaattaagttaa

SEQ ID NO: 14924 - DNA, 15 bp, Homo sapiens
aaactaattaagtta

SEQ ID NO: 14925 - DNA, 15 bp, Homo sapiens
aaaactaattaagtt

SEQ ID NO: 14926 - DNA, 15 bp, Homo sapiens
aaaaactaattaagt

SEQ ID NO: 14927 - DNA, 15 bp, Homo sapiens
aaaaaactaattaag

SEQ ID NO: 14928 - DNA, 15 bp, Homo sapiens
gaaaaaactaattaa

SEQ ID NO: 14929 - DNA, 15 bp, Homo sapiens
agaaaaaactaatta

SEQ ID NO: 14930 - DNA, 15 bp, Homo sapiens
aagaaaaaactaatt

SEQ ID NO: 14931 - DNA, 15 bp, Homo sapiens
aaagaaaaaactaat

SEQ ID NO: 14932 - DNA, 15 bp, Homo sapiens
caaagaaaaaactaa

SEQ ID NO: 14933 - DNA, 15 bp, Homo sapiens
tcaaagaaaaaacta

SEQ ID NO: 14934 - DNA, 15 bp, Homo sapiens
ttcaaagaaaaaact

SEQ ID NO: 14935 - DNA, 15 bp, Homo sapiens
cttcaaagaaaaaac

SEQ ID NO: 14936 - DNA, 15 bp, Homo sapiens
acttcaaagaaaaaa

SEQ ID NO: 14937 - DNA, 15 bp, Homo sapiens
aacttcaaagaaaaa

SEQ ID NO: 14938 - DNA, 15 bp, Homo sapiens
aaacttcaaagaaaa

SEQ ID NO: 14939 - DNA, 15 bp, Homo sapiens
gaaacttcaaagaaa

SEQ ID NO: 14940 - DNA, 15 bp, Homo sapiens
tgaaacttcaaagaa

SEQ ID NO: 14941 - DNA, 15 bp, Homo sapiens
ctgaaacttcaaaga

SEQ ID NO: 14942 - DNA, 15 bp, Homo sapiens
gctgaaacttcaaag

SEQ ID NO: 14943 - DNA, 15 bp, Homo sapiens
ggctgaaacttcaaa

SEQ ID NO: 14944 - DNA, 15 bp, Homo sapiens
aggctgaaacttcaa

SEQ ID NO: 14945 - DNA, 15 bp, Homo sapiens
taggctgaaacttca

SEQ ID NO: 14946 - DNA, 15 bp, Homo sapiens
ttaggctgaaacttc

SEQ ID NO: 14947 - DNA, 15 bp, Homo sapiens
tttaggctgaaactt

SEQ ID NO: 14948 - DNA, 15 bp, Homo sapiens
atttaggctgaaact

SEQ ID NO: 14949 - DNA, 15 bp, Homo sapiens
tatttaggctgaaac

SEQ ID NO: 14950 - DNA, 15 bp, Homo sapiens
atatttaggctgaaa

SEQ ID NO: 14951 - DNA, 15 bp, Homo sapiens
aatatttaggctgaa

SEQ ID NO: 14952 - DNA, 15 bp, Homo sapiens
aaatatttaggctga

SEQ ID NO: 14953 - DNA, 15 bp, Homo sapiens
aaaatatttaggctg

SEQ ID NO: 14954 - DNA, 15 bp, Homo sapiens
gaaaatatttaggct

SEQ ID NO: 14955 - DNA, 15 bp, Homo sapiens
agaaaatatttaggc

SEQ ID NO: 14956 - DNA, 15 bp, Homo sapiens
cagaaaatatttagg

SEQ ID NO: 14957 - DNA, 15 bp, Homo sapiens
acagaaaatatttag

SEQ ID NO: 14958 - DNA, 15 bp, Homo sapiens
aacagaaaatattta

SEQ ID NO: 14959 - DNA, 15 bp, Homo sapiens
aaacagaaaatattt

SEQ ID NO: 14960 - DNA, 15 bp, Homo sapiens
aaaacagaaaatatt

SEQ ID NO: 14961 - DNA, 15 bp, Homo sapiens
aaaaacagaaaatat

SEQ ID NO: 14962 - DNA, 15 bp, Homo sapiens
aaaaaacagaaaata

SEQ ID NO: 14963 - DNA, 15 bp, Homo sapiens
aaaaaaacagaaaat

SEQ ID NO: 14964 - DNA, 15 bp, Homo sapiens
taaaaaaacagaaaa

SEQ ID NO: 14965 - DNA, 15 bp, Homo sapiens
ataaaaaaacagaaa

SEQ ID NO: 14966 - DNA, 15 bp, Homo sapiens
tataaaaaaacagaa

SEQ ID NO: 14967 - DNA, 15 bp, Homo sapiens
atataaaaaaacaga

SEQ ID NO: 14968 - DNA, 15 bp, Homo sapiens
catataaaaaaacag

SEQ ID NO: 14969 - DNA, 15 bp, Homo sapiens
acatataaaaaaaca

SEQ ID NO: 14970 - DNA, 15 bp, Homo sapiens
gacatataaaaaaac

SEQ ID NO: 14971 - DNA, 15 bp, Homo sapiens
ggacatataaaaaaa

SEQ ID NO: 14972 - DNA, 15 bp, Homo sapiens
aggacatataaaaaa

SEQ ID NO: 14973 - DNA, 15 bp, Homo sapiens
aaggacatataaaaa

SEQ ID NO: 14974 - DNA, 15 bp, Homo sapiens
aaaggacatataaaa

SEQ ID NO: 14975 - DNA, 15 bp, Homo sapiens
taaaggacatataaa

SEQ ID NO: 14976 - DNA, 15 bp, Homo sapiens
ttaaaggacatataa

SEQ ID NO: 14977 - DNA, 15 bp, Homo sapiens
tttaaaggacatata

SEQ ID NO: 14978 - DNA, 15 bp, Homo sapiens
atttaaaggacatat

SEQ ID NO: 14979 - DNA, 15 bp, Homo sapiens
tatttaaaggacata

SEQ ID NO: 14980 - DNA, 15 bp, Homo sapiens
atatttaaaggacat

SEQ ID NO: 14981 - DNA, 15 bp, Homo sapiens
catatttaaaggaca

SEQ ID NO: 14982 - DNA, 15 bp, Homo sapiens
tcatatttaaaggac

SEQ ID NO: 14983 - DNA, 15 bp, Homo sapiens
ttcatatttaaagga

SEQ ID NO: 14984 - DNA, 15 bp, Homo sapiens
tttcatatttaaagg

SEQ ID NO: 14985 - DNA, 15 bp, Homo sapiens
ttttcatatttaaag

SEQ ID NO: 14986 - DNA, 15 bp, Homo sapiens
attttcatatttaaa

SEQ ID NO: 14987 - DNA, 15 bp, Homo sapiens
aattttcatatttaa

SEQ ID NO: 14988 - DNA, 15 bp, Homo sapiens
gaattttcatattta

SEQ ID NO: 14989 - DNA, 15 bp, Homo sapiens
agaattttcatattt

SEQ ID NO: 14990 - DNA, 15 bp, Homo sapiens
tagaattttcatatt

SEQ ID NO: 14991 - DNA, 15 bp, Homo sapiens
gtagaattttcatat

SEQ ID NO: 14992 - DNA, 15 bp, Homo sapiens
tgtagaattttcata

SEQ ID NO: 14993 - DNA, 15 bp, Homo sapiens
ctgtagaattttcat

SEQ ID NO: 14994 - DNA, 15 bp, Homo sapiens
gctgtagaattttca

SEQ ID NO: 14995 - DNA, 15 bp, Homo sapiens
agctgtagaattttc

SEQ ID NO: 14996 - DNA, 15 bp, Homo sapiens
tagctgtagaatttt

SEQ ID NO: 14997 - DNA, 15 bp, Homo sapiens
ttagctgtagaattt

SEQ ID NO: 14998 - DNA, 15 bp, Homo sapiens
attagctgtagaatt

SEQ ID NO: 14999 - DNA, 15 bp, Homo sapiens
gattagctgtagaat

SEQ ID NO: 15000 - DNA, 15 bp, Homo sapiens
tgattagctgtagaa

SEQ ID NO: 15001 - DNA, 15 bp, Homo sapiens
atgattagctgtaga

SEQ ID NO: 15002 - DNA, 15 bp, Homo sapiens
tatgattagctgtag

SEQ ID NO: 15003 - DNA, 15 bp, Homo sapiens
ttatgattagctgta

SEQ ID NO: 15004 - DNA, 15 bp, Homo sapiens
attatgattagctgt

SEQ ID NO: 15005 - DNA, 15 bp, Homo sapiens
aattatgattagctg

SEQ ID NO: 15006 - DNA, 15 bp, Homo sapiens
taattatgattagct

SEQ ID NO: 15007 - DNA, 15 bp, Homo sapiens
ctaattatgattagc

SEQ ID NO: 15008 - DNA, 15 bp, Homo sapiens
actaattatgattag

SEQ ID NO: 15009 - DNA, 15 bp, Homo sapiens
tactaattatgatta

SEQ ID NO: 15010 - DNA, 15 bp, Homo sapiens
ttactaattatgatt

SEQ ID NO: 15011 - DNA, 15 bp, Homo sapiens
attactaattatgat

SEQ ID NO: 15012 - DNA, 15 bp, Homo sapiens
aattactaattatga

SEQ ID NO: 15013 - DNA, 15 bp, Homo sapiens
caattactaattatg

SEQ ID NO: 15014 - DNA, 15 bp, Homo sapiens
acaattactaattat

SEQ ID NO: 15015 - DNA, 15 bp, Homo sapiens
tacaattactaatta

SEQ ID NO: 15016 - DNA, 15 bp, Homo sapiens
gtacaattactaatt

SEQ ID NO: 15017 - DNA, 15 bp, Homo sapiens
agtacaattactaat

SEQ ID NO: 15018 - DNA, 15 bp, Homo sapiens
aagtacaattactaa

SEQ ID NO: 15019 - DNA, 15 bp, Homo sapiens
aaagtacaattacta

SEQ ID NO: 15020 - DNA, 15 bp, Homo sapiens
aaaagtacaattact

SEQ ID NO: 15021 - DNA, 15 bp, Homo sapiens
aaaaagtacaattac

SEQ ID NO: 15022 - DNA, 15 bp, Homo sapiens
gaaaaagtacaatta

SEQ ID NO: 15023 - DNA, 15 bp, Homo sapiens
ggaaaaagtacaatt

SEQ ID NO: 15024 - DNA, 15 bp, Homo sapiens
gggaaaaagtacaat

SEQ ID NO: 15025 - DNA, 15 bp, Homo sapiens
ggggaaaaagtacaa

SEQ ID NO: 15026 - DNA, 15 bp, Homo sapiens
aggggaaaaagtaca

SEQ ID NO: 15027 - DNA, 15 bp, Homo sapiens
taggggaaaaagtac

SEQ ID NO: 15028 - DNA, 15 bp, Homo sapiens
ataggggaaaaagta

SEQ ID NO: 15029 - DNA, 15 bp, Homo sapiens
aataggggaaaaagt

SEQ ID NO: 15030 - DNA, 15 bp, Homo sapiens
taataggggaaaaag

SEQ ID NO: 15031 - DNA, 15 bp, Homo sapiens
gtaataggggaaaaa

SEQ ID NO: 15032 - DNA, 15 bp, Homo sapiens
tgtaataggggaaaa

SEQ ID NO: 15033 - DNA, 15 bp, Homo sapiens
ttgtaataggggaaa

SEQ ID NO: 15034 - DNA, 15 bp, Homo sapiens
attgtaataggggaa

SEQ ID NO: 15035 - DNA, 15 bp, Homo sapiens
tattgtaatagggga

SEQ ID NO: 15036 - DNA, 15 bp, Homo sapiens
ttattgtaatagggg

SEQ ID NO: 15037 - DNA, 15 bp, Homo sapiens
gttattgtaataggg

SEQ ID NO: 15038 - DNA, 15 bp, Homo sapiens
agttattgtaatagg

SEQ ID NO: 15039 - DNA, 15 bp, Homo sapiens
cagttattgtaatag

SEQ ID NO: 15040 - DNA, 15 bp, Homo sapiens
ccagttattgtaata

SEQ ID NO: 15041 - DNA, 15 bp, Homo sapiens
accagttattgtaat

SEQ ID NO: 15042 - DNA, 15 bp, Homo sapiens
aaccagttattgtaa

SEQ ID NO: 15043 - DNA, 15 bp, Homo sapiens
aaaccagttattgta

SEQ ID NO: 15044 - DNA, 15 bp, Homo sapiens
gaaaccagttattgt

SEQ ID NO: 15045 - DNA, 15 bp, Homo sapiens
tgaaaccagttattg

SEQ ID NO: 15046 - DNA, 15 bp, Homo sapiens
atgaaaccagttatt

SEQ ID NO: 15047 - DNA, 15 bp, Homo sapiens
tatgaaaccagttat

SEQ ID NO: 15048 - DNA, 15 bp, Homo sapiens
ttatgaaaccagtta

SEQ ID NO: 15049 - DNA, 15 bp, Homo sapiens
attatgaaaccagtt

SEQ ID NO: 15050 - DNA, 15 bp, Homo sapiens
tattatgaaaccagt

SEQ ID NO: 15051 - DNA, 15 bp, Homo sapiens
ttattatgaaaccag

SEQ ID NO: 15052 - DNA, 15 bp, Homo sapiens
tttattatgaaacca

SEQ ID NO: 15053 - DNA, 15 bp, Homo sapiens
ttttattatgaaacc

SEQ ID NO: 15054 - DNA, 15 bp, Homo sapiens
attttattatgaaac

SEQ ID NO: 15055 - DNA, 15 bp, Homo sapiens
cattttattatgaaa

SEQ ID NO: 15056 - DNA, 15 bp, Homo sapiens
ccattttattatgaa

SEQ ID NO: 15057 - DNA, 15 bp, Homo sapiens
accattttattatga

SEQ ID NO: 15058 - DNA, 15 bp, Homo sapiens
taccattttattatg

SEQ ID NO: 15059 - DNA, 15 bp, Homo sapiens
ataccattttattat

SEQ ID NO: 15060 - DNA, 15 bp, Homo sapiens
gataccattttatta

SEQ ID NO: 15061 - DNA, 15 bp, Homo sapiens
ggataccattttatt

SEQ ID NO: 15062 - DNA, 15 bp, Homo sapiens
gggataccattttat

SEQ ID NO: 15063 - DNA, 15 bp, Homo sapiens
agggataccatttta

SEQ ID NO: 15064 - DNA, 15 bp, Homo sapiens
aagggataccatttt

SEQ ID NO: 15065 - DNA, 15 bp, Homo sapiens
gaagggataccattt

SEQ ID NO: 15066 - DNA, 15 bp, Homo sapiens
tgaagggataccatt

SEQ ID NO: 15067 - DNA, 15 bp, Homo sapiens
ttgaagggataccat

SEQ ID NO: 15068 - DNA, 15 bp, Homo sapiens
attgaagggatacca

SEQ ID NO: 15069 - DNA, 15 bp, Homo sapiens
tattgaagggatacc

SEQ ID NO: 15070 - DNA, 15 bp, Homo sapiens
ttattgaagggatac

SEQ ID NO: 15071 - DNA, 15 bp, Homo sapiens
gttattgaagggata

SEQ ID NO: 15072 - DNA, 15 bp, Homo sapiens
tgttattgaagggat

SEQ ID NO: 15073 - DNA, 15 bp, Homo sapiens
ttgttattgaaggga

SEQ ID NO: 15074 - DNA, 15 bp, Homo sapiens
cttgttattgaaggg

SEQ ID NO: 15075 - DNA, 15 bp, Homo sapiens
gcttgttattgaagg

SEQ ID NO: 15076 - DNA, 15 bp, Homo sapiens
tgcttgttattgaag

SEQ ID NO: 15077 - DNA, 15 bp, Homo sapiens
atgcttgttattgaa

SEQ ID NO: 15078 - DNA, 15 bp, Homo sapiens
aatgcttgttattga

SEQ ID NO: 15079 - DNA, 15 bp, Homo sapiens
aaatgcttgttattg

SEQ ID NO: 15080 - DNA, 15 bp, Homo sapiens
taaatgcttgttatt

SEQ ID NO: 15081 - DNA, 15 bp, Homo sapiens
ataaatgcttgttat

SEQ ID NO: 15082 - DNA, 15 bp, Homo sapiens
tataaatgcttgtta

SEQ ID NO: 15083 - DNA, 15 bp, Homo sapiens
ctataaatgcttgtt

SEQ ID NO: 15084 - DNA, 15 bp, Homo sapiens
actataaatgcttgt

SEQ ID NO: 15085 - DNA, 15 bp, Homo sapiens
tactataaatgcttg

SEQ ID NO: 15086 - DNA, 15 bp, Homo sapiens
ctactataaatgctt

SEQ ID NO: 15087 - DNA, 15 bp, Homo sapiens
actactataaatgct

SEQ ID NO: 15088 - DNA, 15 bp, Homo sapiens
aactactataaatgc

SEQ ID NO: 15089 - DNA, 15 bp, Homo sapiens
aaactactataaatg

SEQ ID NO: 15090 - DNA, 15 bp, Homo sapiens
taaactactataaat

SEQ ID NO: 15091 - DNA, 15 bp, Homo sapiens
ataaactactataaa

SEQ ID NO: 15092 - DNA, 15 bp, Homo sapiens
aataaactactataa

SEQ ID NO: 15093 - DNA, 15 bp, Homo sapiens
taataaactactata

SEQ ID NO: 15094 - DNA, 15 bp, Homo sapiens
ttaataaactactat

SEQ ID NO: 15095 - DNA, 15 bp, Homo sapiens
tttaataaactacta

SEQ ID NO: 15096 - DNA, 15 bp, Homo sapiens
ttttaataaactact

SEQ ID NO: 15097 - DNA, 15 bp, Homo sapiens
gttttaataaactac

SEQ ID NO: 15098 - DNA, 15 bp, Homo sapiens
agttttaataaacta

SEQ ID NO: 15099 - DNA, 15 bp, Homo sapiens
tagttttaataaact

SEQ ID NO: 15100 - DNA, 15 bp, Homo sapiens
ttagttttaataaac

SEQ ID NO: 15101 - DNA, 15 bp, Homo sapiens
cttagttttaataaa

SEQ ID NO: 15102 - DNA, 15 bp, Homo sapiens
ccttagttttaataa

SEQ ID NO: 15103 - DNA, 15 bp, Homo sapiens
cccttagttttaata

SEQ ID NO: 15104 - DNA, 15 bp, Homo sapiens
acccttagttttaat

SEQ ID NO: 15105 - DNA, 15 bp, Homo sapiens
cacccttagttttaa

SEQ ID NO: 15106 - DNA, 15 bp, Homo sapiens
acacccttagtttta

SEQ ID NO: 15107 - DNA, 15 bp, Homo sapiens
aacacccttagtttt

SEQ ID NO: 15108 - DNA, 15 bp, Homo sapiens
taacacccttagttt

SEQ ID NO: 15109 - DNA, 15 bp, Homo sapiens
ataacacccttagtt

SEQ ID NO: 15110 - DNA, 15 bp, Homo sapiens
gataacacccttagt

SEQ ID NO: 15111 - DNA, 15 bp, Homo sapiens
agataacacccttag

SEQ ID NO: 15112 - DNA, 15 bp, Homo sapiens
tagataacaccctta

SEQ ID NO: 15113 - DNA, 15 bp, Homo sapiens
atagataacaccctt

SEQ ID NO: 15114 - DNA, 15 bp, Homo sapiens
aatagataacaccct

SEQ ID NO: 15115 - DNA, 15 bp, Homo sapiens
gaatagataacaccc

SEQ ID NO: 15116 - DNA, 15 bp, Homo sapiens
tgaatagataacacc

SEQ ID NO: 15117 - DNA, 15 bp, Homo sapiens
ttgaatagataacac

SEQ ID NO: 15118 - DNA, 15 bp, Homo sapiens
tttgaatagataaca

SEQ ID NO: 15119 - DNA, 15 bp, Homo sapiens
gtttgaatagataac

SEQ ID NO: 15120 - DNA, 15 bp, Homo sapiens
ggtttgaatagataa

SEQ ID NO: 15121 - DNA, 15 bp, Homo sapiens
tggtttgaatagata

SEQ ID NO: 15122 - DNA, 15 bp, Homo sapiens
ttggtttgaatagat

SEQ ID NO: 15123 - DNA, 15 bp, Homo sapiens
cttggtttgaataga

SEQ ID NO: 15124 - DNA, 15 bp, Homo sapiens
gcttggtttgaatag

SEQ ID NO: 15125 - DNA, 15 bp, Homo sapiens
tgcttggtttgaata

SEQ ID NO: 15126 - DNA, 15 bp, Homo sapiens
ttgcttggtttgaat

SEQ ID NO: 15127 - DNA, 15 bp, Homo sapiens
attgcttggtttgaa

SEQ ID NO: 15128 - DNA, 15 bp, Homo sapiens
cattgcttggtttga

SEQ ID NO: 15129 - DNA, 15 bp, Homo sapiens
gcattgcttggtttg

SEQ ID NO: 15130 - DNA, 15 bp, Homo sapiens
tgcattgcttggttt

SEQ ID NO: 15131 - DNA, 15 bp, Homo sapiens
ctgcattgcttggtt

SEQ ID NO: 15132 - DNA, 15 bp, Homo sapiens
tctgcattgcttggt

SEQ ID NO: 15133 - DNA, 15 bp, Homo sapiens
gtctgcattgcttgg

SEQ ID NO: 15134 - DNA, 15 bp, Homo sapiens
agtctgcattgcttg

SEQ ID NO: 15135 - DNA, 15 bp, Homo sapiens
aagtctgcattgctt

SEQ ID NO: 15136 - DNA, 15 bp, Homo sapiens
taagtctgcattgct

SEQ ID NO: 15137 - DNA, 15 bp, Homo sapiens
gtaagtctgcattgc

SEQ ID NO: 15138 - DNA, 15 bp, Homo sapiens
agtaagtctgcattg

SEQ ID NO: 15139 - DNA, 15 bp, Homo sapiens
cagtaagtctgcatt

SEQ ID NO: 15140 - DNA, 15 bp, Homo sapiens
acagtaagtctgcat

SEQ ID NO: 15141 - DNA, 15 bp, Homo sapiens
aacagtaagtctgca

SEQ ID NO: 15142 - DNA, 15 bp, Homo sapiens
caacagtaagtctgc

SEQ ID NO: 15143 - DNA, 15 bp, Homo sapiens
tcaacagtaagtctg

SEQ ID NO: 15144 - DNA, 15 bp, Homo sapiens
gtcaacagtaagtct

SEQ ID NO: 15145 - DNA, 15 bp, Homo sapiens
agtcaacagtaagtc

SEQ ID NO: 15146 - DNA, 15 bp, Homo sapiens
gagtcaacagtaagt

SEQ ID NO: 15147 - DNA, 15 bp, Homo sapiens
agagtcaacagtaag

SEQ ID NO: 15148 - DNA, 15 bp, Homo sapiens
cagagtcaacagtaa

SEQ ID NO: 15149 - DNA, 15 bp, Homo sapiens
acagagtcaacagta

SEQ ID NO: 15150 - DNA, 15 bp, Homo sapiens
aacagagtcaacagt

SEQ ID NO: 15151 - DNA, 15 bp, Homo sapiens
taacagagtcaacag

SEQ ID NO: 15152 - DNA, 15 bp, Homo sapiens
ttaacagagtcaaca

SEQ ID NO: 15153 - DNA, 15 bp, Homo sapiens
attaacagagtcaac

SEQ ID NO: 15154 - DNA, 15 bp, Homo sapiens
tattaacagagtcaa

SEQ ID NO: 15155 - DNA, 15 bp, Homo sapiens
atattaacagagtca

SEQ ID NO: 15156 - DNA, 15 bp, Homo sapiens
tatattaacagagtc

SEQ ID NO: 15157 - DNA, 15 bp, Homo sapiens
atatattaacagagt

SEQ ID NO: 15158 - DNA, 15 bp, Homo sapiens
aatatattaacagag

SEQ ID NO: 15159 - DNA, 15 bp, Homo sapiens
aaatatattaacaga

SEQ ID NO: 15160 - DNA, 15 bp, Homo sapiens
aaaatatattaacag

SEQ ID NO: 15161 - DNA, 15 bp, Homo sapiens
taaaatatattaaca

SEQ ID NO: 15162 - DNA, 15 bp, Homo sapiens
ttaaaatatattaac

SEQ ID NO: 15163 - DNA, 15 bp, Homo sapiens
tttaaaatatattaa

SEQ ID NO: 15164 - DNA, 15 bp, Homo sapiens
ttttaaaatatatta

SEQ ID NO: 15165 - DNA, 15 bp, Homo sapiens
attttaaaatatatt

SEQ ID NO: 15166 - DNA, 15 bp, Homo sapiens
aattttaaaatatat

SEQ ID NO: 15167 - DNA, 15 bp, Homo sapiens
caattttaaaatata

SEQ ID NO: 15168 - DNA, 15 bp, Homo sapiens
gcaattttaaaatat

SEQ ID NO: 15169 - DNA, 15 bp, Homo sapiens
tgcaattttaaaata

SEQ ID NO: 15170 - DNA, 15 bp, Homo sapiens
atgcaattttaaaat

SEQ ID NO: 15171 - DNA, 15 bp, Homo sapiens
tatgcaattttaaaa

SEQ ID NO: 15172 - DNA, 15 bp, Homo sapiens
atatgcaattttaaa

SEQ ID NO: 15173 - DNA, 15 bp, Homo sapiens
aatatgcaattttaa

SEQ ID NO: 15174 - DNA, 15 bp, Homo sapiens
taatatgcaatttta

SEQ ID NO: 15175 - DNA, 15 bp, Homo sapiens
gtaatatgcaatttt

SEQ ID NO: 15176 - DNA, 15 bp, Homo sapiens
agtaatatgcaattt

SEQ ID NO: 15177 - DNA, 15 bp, Homo sapiens
tagtaatatgcaatt

SEQ ID NO: 15178 - DNA, 15 bp, Homo sapiens
ttagtaatatgcaat

SEQ ID NO: 15179 - DNA, 15 bp, Homo sapiens
tttagtaatatgcaa

SEQ ID NO: 15180 - DNA, 15 bp, Homo sapiens
ttttagtaatatgca

SEQ ID NO: 15181 - DNA, 15 bp, Homo sapiens
attttagtaatatgc

SEQ ID NO: 15182 - DNA, 15 bp, Homo sapiens
aattttagtaatatg

SEQ ID NO: 15183 - DNA, 15 bp, Homo sapiens
aaattttagtaatat

SEQ ID NO: 15184 - DNA, 15 bp, Homo sapiens
taaattttagtaata

SEQ ID NO: 15185 - DNA, 15 bp, Homo sapiens
ttaaattttagtaat

SEQ ID NO: 15186 - DNA, 15 bp, Homo sapiens
tttaaattttagtaa

SEQ ID NO: 15187 - DNA, 15 bp, Homo sapiens
ttttaaattttagta

SEQ ID NO: 15188 - DNA, 15 bp, Homo sapiens
attttaaattttagt

SEQ ID NO: 15189 - DNA, 15 bp, Homo sapiens
tattttaaattttag

SEQ ID NO: 15190 - DNA, 15 bp, Homo sapiens
atattttaaatttta

SEQ ID NO: 15191 - DNA, 15 bp, Homo sapiens
catattttaaatttt

SEQ ID NO: 15192 - DNA, 15 bp, Homo sapiens
tcatattttaaattt

SEQ ID NO: 15193 - DNA, 15 bp, Homo sapiens
atcatattttaaatt

SEQ ID NO: 15194 - DNA, 15 bp, Homo sapiens
aatcatattttaaat

SEQ ID NO: 15195 - DNA, 15 bp, Homo sapiens
aaatcatattttaaa

SEQ ID NO: 15196 - DNA, 15 bp, Homo sapiens
aaaatcatattttaa

SEQ ID NO: 15197 - DNA, 15 bp, Homo sapiens
caaaatcatatttta

SEQ ID NO: 15198 - DNA, 15 bp, Homo sapiens
tcaaaatcatatttt

SEQ ID NO: 15199 - DNA, 15 bp, Homo sapiens
gtcaaaatcatattt

SEQ ID NO: 15200 - DNA, 15 bp, Homo sapiens
agtcaaaatcatatt

SEQ ID NO: 15201 - DNA, 15 bp, Homo sapiens
tagtcaaaatcatat

SEQ ID NO: 15202 - DNA, 15 bp, Homo sapiens
ctagtcaaaatcata

SEQ ID NO: 15203 - DNA, 15 bp, Homo sapiens
actagtcaaaatcat

SEQ ID NO: 15204 - DNA, 15 bp, Homo sapiens
tactagtcaaaatca

SEQ ID NO: 15205 - DNA, 15 bp, Homo sapiens
atactagtcaaaatc

SEQ ID NO: 15206 - DNA, 15 bp, Homo sapiens
aatactagtcaaaat

SEQ ID NO: 15207 - DNA, 15 bp, Homo sapiens
aaatactagtcaaaa

SEQ ID NO: 15208 - DNA, 15 bp, Homo sapiens
aaaatactagtcaaa

SEQ ID NO: 15209 - DNA, 15 bp, Homo sapiens
caaaatactagtcaa

SEQ ID NO: 15210 - DNA, 15 bp, Homo sapiens
ccaaaatactagtca

SEQ ID NO: 15211 - DNA, 15 bp, Homo sapiens
accaaaatactagtc

SEQ ID NO: 15212 - DNA, 15 bp, Homo sapiens
caccaaaatactagt

SEQ ID NO: 15213 - DNA, 15 bp, Homo sapiens
acaccaaaatactag

SEQ ID NO: 15214 - DNA, 15 bp, Homo sapiens
tacaccaaaatacta

SEQ ID NO: 15215 - DNA, 15 bp, Homo sapiens
atacaccaaaatact

SEQ ID NO: 15216 - DNA, 15 bp, Homo sapiens
catacaccaaaatac

SEQ ID NO: 15217 - DNA, 15 bp, Homo sapiens
acatacaccaaaata

SEQ ID NO: 15218 - DNA, 15 bp, Homo sapiens
aacatacaccaaaat

SEQ ID NO: 15219 - DNA, 15 bp, Homo sapiens
taacatacaccaaaa

SEQ ID NO: 15220 - DNA, 15 bp, Homo sapiens
ataacatacaccaaa

SEQ ID NO: 15221 - DNA, 15 bp, Homo sapiens
aataacatacaccaa

SEQ ID NO: 15222 - DNA, 15 bp, Homo sapiens
aaataacatacacca

SEQ ID NO: 15223 - DNA, 15 bp, Homo sapiens
aaaataacatacacc

SEQ ID NO: 15224 - DNA, 15 bp, Homo sapiens
taaaataacatacac

SEQ ID NO: 15225 - DNA, 15 bp, Homo sapiens
ctaaaataacataca

SEQ ID NO: 15226 - DNA, 15 bp, Homo sapiens
tctaaaataacatac

SEQ ID NO: 15227 - DNA, 15 bp, Homo sapiens
atctaaaataacata

SEQ ID NO: 15228 - DNA, 15 bp, Homo sapiens
tatctaaaataacat

SEQ ID NO: 15229 - DNA, 15 bp, Homo sapiens
atatctaaaataaca

SEQ ID NO: 15230 - DNA, 15 bp, Homo sapiens
aatatctaaaataac

SEQ ID NO: 15231 - DNA, 15 bp, Homo sapiens
aaatatctaaaataa

SEQ ID NO: 15232 - DNA, 15 bp, Homo sapiens
aaaatatctaaaata

SEQ ID NO: 15233 - DNA, 15 bp, Homo sapiens
caaaatatctaaaat

SEQ ID NO: 15234 - DNA, 15 bp, Homo sapiens
tcaaaatatctaaaa

SEQ ID NO: 15235 - DNA, 15 bp, Homo sapiens
atcaaaatatctaaa

SEQ ID NO: 15236 - DNA, 15 bp, Homo sapiens
aatcaaaatatctaa

SEQ ID NO: 15237 - DNA, 15 bp, Homo sapiens
taatcaaaatatcta

SEQ ID NO: 15238 - DNA, 15 bp, Homo sapiens
ataatcaaaatatct

SEQ ID NO: 15239 - DNA, 15 bp, Homo sapiens
cataatcaaaatatc

SEQ ID NO: 15240 - DNA, 15 bp, Homo sapiens
gcataatcaaaatat

SEQ ID NO: 15241 - DNA, 15 bp, Homo sapiens
tgcataatcaaaata

SEQ ID NO: 15242 - DNA, 15 bp, Homo sapiens
gtgcataatcaaaat

SEQ ID NO: 15243 - DNA, 15 bp, Homo sapiens
agtgcataatcaaaa

SEQ ID NO: 15244 - DNA, 15 bp, Homo sapiens
tagtgcataatcaaa

SEQ ID NO: 15245 - DNA, 15 bp, Homo sapiens
gtagtgcataatcaa

SEQ ID NO: 15246 - DNA, 15 bp, Homo sapiens
agtagtgcataatca

SEQ ID NO: 15247 - DNA, 15 bp, Homo sapiens
aagtagtgcataatc

SEQ ID NO: 15248 - DNA, 15 bp, Homo sapiens
taagtagtgcataat

SEQ ID NO: 15249 - DNA, 15 bp, Homo sapiens
ttaagtagtgcataa

SEQ ID NO: 15250 - DNA, 15 bp, Homo sapiens
cttaagtagtgcata

SEQ ID NO: 15251 - DNA, 15 bp, Homo sapiens
tcttaagtagtgcat

SEQ ID NO: 15252 - DNA, 15 bp, Homo sapiens
ttcttaagtagtgca

SEQ ID NO: 15253 - DNA, 15 bp, Homo sapiens
attcttaagtagtgc

SEQ ID NO: 15254 - DNA, 15 bp, Homo sapiens
cattcttaagtagtg

SEQ ID NO: 15255 - DNA, 15 bp, Homo sapiens
tcattcttaagtagt

SEQ ID NO: 15256 - DNA, 15 bp, Homo sapiens
ttcattcttaagtag

SEQ ID NO: 15257 - DNA, 15 bp, Homo sapiens
attcattcttaagta

SEQ ID NO: 15258 - DNA, 15 bp, Homo sapiens
aattcattcttaagt

SEQ ID NO: 15259 - DNA, 15 bp, Homo sapiens
caattcattcttaag

SEQ ID NO: 15260 - DNA, 15 bp, Homo sapiens
acaattcattcttaa

SEQ ID NO: 15261 - DNA, 15 bp, Homo sapiens
gacaattcattctta

SEQ ID NO: 15262 - DNA, 15 bp, Homo sapiens
tgacaattcattctt

SEQ ID NO: 15263 - DNA, 15 bp, Homo sapiens
ttgacaattcattct

SEQ ID NO: 15264 - DNA, 15 bp, Homo sapiens
cttgacaattcattc

SEQ ID NO: 15265 - DNA, 15 bp, Homo sapiens
acttgacaattcatt

SEQ ID NO: 15266 - DNA, 15 bp, Homo sapiens
tacttgacaattcat

SEQ ID NO: 15267 - DNA, 15 bp, Homo sapiens
atacttgacaattca

SEQ ID NO: 15268 - DNA, 15 bp, Homo sapiens
catacttgacaattc

SEQ ID NO: 15269 - DNA, 15 bp, Homo sapiens
tcatacttgacaatt

SEQ ID NO: 15270 - DNA, 15 bp, Homo sapiens
atcatacttgacaat

SEQ ID NO: 15271 - DNA, 15 bp, Homo sapiens
aatcatacttgacaa

SEQ ID NO: 15272 - DNA, 15 bp, Homo sapiens
taatcatacttgaca

SEQ ID NO: 15273 - DNA, 15 bp, Homo sapiens
ataatcatacttgac

SEQ ID NO: 15274 - DNA, 15 bp, Homo sapiens
tataatcatacttga

SEQ ID NO: 15275 - DNA, 15 bp, Homo sapiens
ttataatcatacttg

SEQ ID NO: 15276 - DNA, 15 bp, Homo sapiens
tttataatcatactt

SEQ ID NO: 15277 - DNA, 15 bp, Homo sapiens
ctttataatcatact

SEQ ID NO: 15278 - DNA, 15 bp, Homo sapiens
actttataatcatac

SEQ ID NO: 15279 - DNA, 15 bp, Homo sapiens
aactttataatcata

SEQ ID NO: 15280 - DNA, 15 bp, Homo sapiens
caactttataatcat

SEQ ID NO: 15281 - DNA, 15 bp, Homo sapiens
tcaactttataatca

SEQ ID NO: 15282 - DNA, 15 bp, Homo sapiens
atcaactttataatc

SEQ ID NO: 15283 - DNA, 15 bp, Homo sapiens
tatcaactttataat

SEQ ID NO: 15284 - DNA, 15 bp, Homo sapiens
atatcaactttataa

SEQ ID NO: 15285 - DNA, 15 bp, Homo sapiens
tatatcaactttata

SEQ ID NO: 15286 - DNA, 15 bp, Homo sapiens
ttatatcaactttat

SEQ ID NO: 15287 - DNA, 15 bp, Homo sapiens
attatatcaacttta

SEQ ID NO: 15288 - DNA, 15 bp, Homo sapiens
tattatatcaacttt

SEQ ID NO: 15289 - DNA, 15 bp, Homo sapiens
ctattatatcaactt

SEQ ID NO: 15290 - DNA, 15 bp, Homo sapiens
actattatatcaact

SEQ ID NO: 15291 - DNA, 15 bp, Homo sapiens
aactattatatcaac

SEQ ID NO: 15292 - DNA, 15 bp, Homo sapiens
taactattatatcaa

SEQ ID NO: 15293 - DNA, 15 bp, Homo sapiens
ttaactattatatca

SEQ ID NO: 15294 - DNA, 15 bp, Homo sapiens
gttaactattatatc

SEQ ID NO: 15295 - DNA, 15 bp, Homo sapiens
ggttaactattatat

SEQ ID NO: 15296 - DNA, 15 bp, Homo sapiens
aggttaactattata

SEQ ID NO: 15297 - DNA, 15 bp, Homo sapiens
aaggttaactattat

SEQ ID NO: 15298 - DNA, 15 bp, Homo sapiens
gaaggttaactatta

SEQ ID NO: 15299 - DNA, 15 bp, Homo sapiens
tgaaggttaactatt

SEQ ID NO: 15300 - DNA, 15 bp, Homo sapiens
ctgaaggttaactat

SEQ ID NO: 15301 - DNA, 15 bp, Homo sapiens
actgaaggttaacta

SEQ ID NO: 15302 - DNA, 15 bp, Homo sapiens
cactgaaggttaact

SEQ ID NO: 15303 - DNA, 15 bp, Homo sapiens
ccactgaaggttaac

SEQ ID NO: 15304 - DNA, 15 bp, Homo sapiens
cccactgaaggttaa

SEQ ID NO: 15305 - DNA, 15 bp, Homo sapiens
tcccactgaaggtta

SEQ ID NO: 15306 - DNA, 15 bp, Homo sapiens
ttcccactgaaggtt

SEQ ID NO: 15307 - DNA, 15 bp, Homo sapiens
attcccactgaaggt

SEQ ID NO: 15308 - DNA, 15 bp, Homo sapiens
tattcccactgaagg

SEQ ID NO: 15309 - DNA, 15 bp, Homo sapiens
ctattcccactgaag

SEQ ID NO: 15310 - DNA, 15 bp, Homo sapiens
cctattcccactgaa

SEQ ID NO: 15311 - DNA, 15 bp, Homo sapiens
tcctattcccactga

SEQ ID NO: 15312 - DNA, 15 bp, Homo sapiens
ttcctattcccactg

SEQ ID NO: 15313 - DNA, 15 bp, Homo sapiens
attcctattcccact

SEQ ID NO: 15314 - DNA, 15 bp, Homo sapiens
gattcctattcccac

SEQ ID NO: 15315 - DNA, 15 bp, Homo sapiens
tgattcctattccca

SEQ ID NO: 15316 - DNA, 15 bp, Homo sapiens
atgattcctattccc

SEQ ID NO: 15317 - DNA, 15 bp, Homo sapiens
aatgattcctattcc

SEQ ID NO: 15318 - DNA, 15 bp, Homo sapiens
aaatgattcctattc

SEQ ID NO: 15319 - DNA, 15 bp, Homo sapiens
taaatgattcctatt

SEQ ID NO: 15320 - DNA, 15 bp, Homo sapiens
ttaaatgattcctat

SEQ ID NO: 15321 - DNA, 15 bp, Homo sapiens
attaaatgattccta

SEQ ID NO: 15322 - DNA, 15 bp, Homo sapiens
tattaaatgattcct

SEQ ID NO: 15323 - DNA, 15 bp, Homo sapiens
atattaaatgattcc

SEQ ID NO: 15324 - DNA, 15 bp, Homo sapiens
aatattaaatgattc

SEQ ID NO: 15325 - DNA, 15 bp, Homo sapiens
caatattaaatgatt

SEQ ID NO: 15326 - DNA, 15 bp, Homo sapiens
acaatattaaatgat

SEQ ID NO: 15327 - DNA, 15 bp, Homo sapiens
aacaatattaaatga

SEQ ID NO: 15328 - DNA, 15 bp, Homo sapiens
taacaatattaaatg

SEQ ID NO: 15329 - DNA, 15 bp, Homo sapiens
ctaacaatattaaat

SEQ ID NO: 15330 - DNA, 15 bp, Homo sapiens
tctaacaatattaaa

SEQ ID NO: 15331 - DNA, 15 bp, Homo sapiens
atctaacaatattaa

SEQ ID NO: 15332 - DNA, 15 bp, Homo sapiens
tatctaacaatatta

SEQ ID NO: 15333 - DNA, 15 bp, Homo sapiens
atatctaacaatatt

SEQ ID NO: 15334 - DNA, 15 bp, Homo sapiens
aatatctaacaatat

SEQ ID NO: 15335 - DNA, 15 bp, Homo sapiens
aaatatctaacaata

SEQ ID NO: 15336 - DNA, 15 bp, Homo sapiens
caaatatctaacaat

SEQ ID NO: 15337 - DNA, 15 bp, Homo sapiens
acaaatatctaacaa

SEQ ID NO: 15338 - DNA, 15 bp, Homo sapiens
tacaaatatctaaca

SEQ ID NO: 15339 - DNA, 15 bp, Homo sapiens
atacaaatatctaac

SEQ ID NO: 15340 - DNA, 15 bp, Homo sapiens
aatacaaatatctaa

SEQ ID NO: 15341 - DNA, 15 bp, Homo sapiens
taatacaaatatcta

SEQ ID NO: 15342 - DNA, 15 bp, Homo sapiens
ataatacaaatatct

SEQ ID NO: 15343 - DNA, 15 bp, Homo sapiens
aataatacaaatatc

SEQ ID NO: 15344 - DNA, 15 bp, Homo sapiens
taataatacaaatat

SEQ ID NO: 15345 - DNA, 15 bp, Homo sapiens
ctaataatacaaata

SEQ ID NO: 15346 - DNA, 15 bp, Homo sapiens
tctaataatacaaat

SEQ ID NO: 15347 - DNA, 15 bp, Homo sapiens
ttctaataatacaaa

SEQ ID NO: 15348 - DNA, 15 bp, Homo sapiens
gttctaataatacaa

SEQ ID NO: 15349 - DNA, 15 bp, Homo sapiens
tgttctaataataca

SEQ ID NO: 15350 - DNA, 15 bp, Homo sapiens
ttgttctaataatac

SEQ ID NO: 15351 - DNA, 15 bp, Homo sapiens
attgttctaataata

SEQ ID NO: 15352 - DNA, 15 bp, Homo sapiens
gattgttctaataat

SEQ ID NO: 15353 - DNA, 15 bp, Homo sapiens
agattgttctaataa

SEQ ID NO: 15354 - DNA, 15 bp, Homo sapiens
gagattgttctaata

SEQ ID NO: 15355 - DNA, 15 bp, Homo sapiens
ggagattgttctaat

SEQ ID NO: 15356 - DNA, 15 bp, Homo sapiens
aggagattgttctaa

SEQ ID NO: 15357 - DNA, 15 bp, Homo sapiens
taggagattgttcta

SEQ ID NO: 15358 - DNA, 15 bp, Homo sapiens
ataggagattgttct

SEQ ID NO: 15359 - DNA, 15 bp, Homo sapiens
cataggagattgttc

SEQ ID NO: 15360 - DNA, 15 bp, Homo sapiens
tcataggagattgtt

SEQ ID NO: 15361 - DNA, 15 bp, Homo sapiens
atcataggagattgt

SEQ ID NO: 15362 - DNA, 15 bp, Homo sapiens
aatcataggagattg

SEQ ID NO: 15363 - DNA, 15 bp, Homo sapiens
gaatcataggagatt

SEQ ID NO: 15364 - DNA, 15 bp, Homo sapiens
agaatcataggagat

SEQ ID NO: 15365 - DNA, 15 bp, Homo sapiens
aagaatcataggaga

SEQ ID NO: 15366 - DNA, 15 bp, Homo sapiens
taagaatcataggag

SEQ ID NO: 15367 - DNA, 15 bp, Homo sapiens
gtaagaatcatagga

SEQ ID NO: 15368 - DNA, 15 bp, Homo sapiens
agtaagaatcatagg

SEQ ID NO: 15369 - DNA, 15 bp, Homo sapiens
tagtaagaatcatag

SEQ ID NO: 15370 - DNA, 15 bp, Homo sapiens
ttagtaagaatcata

SEQ ID NO: 15371 - DNA, 15 bp, Homo sapiens
attagtaagaatcat

SEQ ID NO: 15372 - DNA, 15 bp, Homo sapiens
tattagtaagaatca

SEQ ID NO: 15373 - DNA, 15 bp, Homo sapiens
atattagtaagaatc

SEQ ID NO: 15374 - DNA, 15 bp, Homo sapiens
tatattagtaagaat

SEQ ID NO: 15375 - DNA, 15 bp, Homo sapiens
ctatattagtaagaa

SEQ ID NO: 15376 - DNA, 15 bp, Homo sapiens
actatattagtaaga

SEQ ID NO: 15377 - DNA, 15 bp, Homo sapiens
tactatattagtaag

SEQ ID NO: 15378 - DNA, 15 bp, Homo sapiens
ttactatattagtaa

SEQ ID NO: 15379 - DNA, 15 bp, Homo sapiens
attactatattagta

SEQ ID NO: 15380 - DNA, 15 bp, Homo sapiens
cattactatattagt

SEQ ID NO: 15381 - DNA, 15 bp, Homo sapiens
tcattactatattag

SEQ ID NO: 15382 - DNA, 15 bp, Homo sapiens
ttcattactatatta

SEQ ID NO: 15383 - DNA, 15 bp, Homo sapiens
attcattactatatt

SEQ ID NO: 15384 - DNA, 15 bp, Homo sapiens
cattcattactatat

SEQ ID NO: 15385 - DNA, 15 bp, Homo sapiens
tcattcattactata

SEQ ID NO: 15386 - DNA, 15 bp, Homo sapiens
gtcattcattactat

SEQ ID NO: 15387 - DNA, 15 bp, Homo sapiens
tgtcattcattacta

SEQ ID NO: 15388 - DNA, 15 bp, Homo sapiens
ctgtcattcattact

SEQ ID NO: 15389 - DNA, 15 bp, Homo sapiens
tctgtcattcattac

SEQ ID NO: 15390 - DNA, 15 bp, Homo sapiens
gtctgtcattcatta

SEQ ID NO: 15391 - DNA, 15 bp, Homo sapiens
tgtctgtcattcatt

SEQ ID NO: 15392 - DNA, 15 bp, Homo sapiens
ttgtctgtcattcat

SEQ ID NO: 15393 - DNA, 15 bp, Homo sapiens
attgtctgtcattca

SEQ ID NO: 15394 - DNA, 15 bp, Homo sapiens
tattgtctgtcattc

SEQ ID NO: 15395 - DNA, 15 bp, Homo sapiens
atattgtctgtcatt

SEQ ID NO: 15396 - DNA, 15 bp, Homo sapiens
catattgtctgtcat

SEQ ID NO: 15397 - DNA, 15 bp, Homo sapiens
acatattgtctgtca

SEQ ID NO: 15398 - DNA, 15 bp, Homo sapiens
aacatattgtctgtc

SEQ ID NO: 15399 - DNA, 15 bp, Homo sapiens
caacatattgtctgt

SEQ ID NO: 15400 - DNA, 15 bp, Homo sapiens
ccaacatattgtctg

SEQ ID NO: 15401 - DNA, 15 bp, Homo sapiens
gccaacatattgtct

SEQ ID NO: 15402 - DNA, 15 bp, Homo sapiens
agccaacatattgtc

SEQ ID NO: 15403 - DNA, 15 bp, Homo sapiens
aagccaacatattgt

SEQ ID NO: 15404 - DNA, 15 bp, Homo sapiens
aaagccaacatattg

SEQ ID NO: 15405 - DNA, 15 bp, Homo sapiens
gaaagccaacatatt

SEQ ID NO: 15406 - DNA, 15 bp, Homo sapiens
tgaaagccaacatat

SEQ ID NO: 15407 - DNA, 15 bp, Homo sapiens
atgaaagccaacata

SEQ ID NO: 15408 - DNA, 15 bp, Homo sapiens
tatgaaagccaacat

SEQ ID NO: 15409 - DNA, 15 bp, Homo sapiens
atatgaaagccaaca

SEQ ID NO: 15410 - DNA, 15 bp, Homo sapiens
aatatgaaagccaac

SEQ ID NO: 15411 - DNA, 15 bp, Homo sapiens
aaatatgaaagccaa

SEQ ID NO: 15412 - DNA, 15 bp, Homo sapiens
taaatatgaaagcca

SEQ ID NO: 15413 - DNA, 15 bp, Homo sapiens
ttaaatatgaaagcc

SEQ ID NO: 15414 - DNA, 15 bp, Homo sapiens
tttaaatatgaaagc

SEQ ID NO: 15415 - DNA, 15 bp, Homo sapiens
ttttaaatatgaaag

SEQ ID NO: 15416 - DNA, 15 bp, Homo sapiens
tttttaaatatgaaa

SEQ ID NO: 15417 - DNA, 15 bp, Homo sapiens
atttttaaatatgaa

SEQ ID NO: 15418 - DNA, 15 bp, Homo sapiens
aatttttaaatatga

SEQ ID NO: 15419 - DNA, 15 bp, Homo sapiens
gaatttttaaatatg

SEQ ID NO: 15420 - DNA, 15 bp, Homo sapiens
tgaatttttaaatat

SEQ ID NO: 15421 - DNA, 15 bp, Homo sapiens
gtgaatttttaaata

SEQ ID NO: 15422 - DNA, 15 bp, Homo sapiens
tgtgaatttttaaat

SEQ ID NO: 15423 - DNA, 15 bp, Homo sapiens
atgtgaatttttaaa

SEQ ID NO: 15424 - DNA, 15 bp, Homo sapiens
catgtgaatttttaa

SEQ ID NO: 15425 - DNA, 15 bp, Homo sapiens
gcatgtgaattttta

SEQ ID NO: 15426 - DNA, 15 bp, Homo sapiens
tgcatgtgaattttt

SEQ ID NO: 15427 - DNA, 15 bp, Homo sapiens
atgcatgtgaatttt

SEQ ID NO: 15428 - DNA, 15 bp, Homo sapiens
aatgcatgtgaattt

SEQ ID NO: 15429 - DNA, 15 bp, Homo sapiens
aaatgcatgtgaatt

SEQ ID NO: 15430 - DNA, 15 bp, Homo sapiens
gaaatgcatgtgaat

SEQ ID NO: 15431 - DNA, 15 bp, Homo sapiens
agaaatgcatgtgaa

SEQ ID NO: 15432 - DNA, 15 bp, Homo sapiens
tagaaatgcatgtga

SEQ ID NO: 15433 - DNA, 15 bp, Homo sapiens
ctagaaatgcatgtg

SEQ ID NO: 15434 - DNA, 15 bp, Homo sapiens
actagaaatgcatgt

SEQ ID NO: 15435 - DNA, 15 bp, Homo sapiens
aactagaaatgcatg

SEQ ID NO: 15436 - DNA, 15 bp, Homo sapiens
aaactagaaatgcat

SEQ ID NO: 15437 - DNA, 15 bp, Homo sapiens
taaactagaaatgca

SEQ ID NO: 15438 - DNA, 15 bp, Homo sapiens
ataaactagaaatgc

SEQ ID NO: 15439 - DNA, 15 bp, Homo sapiens
cataaactagaaatg

SEQ ID NO: 15440 - DNA, 15 bp, Homo sapiens
acataaactagaaat

SEQ ID NO: 15441 - DNA, 15 bp, Homo sapiens
aacataaactagaaa

SEQ ID NO: 15442 - DNA, 15 bp, Homo sapiens
aaacataaactagaa

SEQ ID NO: 15443 - DNA, 15 bp, Homo sapiens
aaaacataaactaga

SEQ ID NO: 15444 - DNA, 15 bp, Homo sapiens
aaaaacataaactag

SEQ ID NO: 15445 - DNA, 15 bp, Homo sapiens
gaaaaacataaacta

SEQ ID NO: 15446 - DNA, 15 bp, Homo sapiens
agaaaaacataaact

SEQ ID NO: 15447 - DNA, 15 bp, Homo sapiens
aagaaaaacataaac

SEQ ID NO: 15448 - DNA, 15 bp, Homo sapiens
gaagaaaaacataaa

SEQ ID NO: 15449 - DNA, 15 bp, Homo sapiens
cgaagaaaaacataa

SEQ ID NO: 15450 - DNA, 15 bp, Homo sapiens
tcgaagaaaaacata

SEQ ID NO: 15451 - DNA, 15 bp, Homo sapiens
gtcgaagaaaaacat

SEQ ID NO: 15452 - DNA, 15 bp, Homo sapiens
agtcgaagaaaaaca

SEQ ID NO: 15453 - DNA, 15 bp, Homo sapiens
tagtcgaagaaaaac

SEQ ID NO: 15454 - DNA, 15 bp, Homo sapiens
ttagtcgaagaaaaa

SEQ ID NO: 15455 - DNA, 15 bp, Homo sapiens
tttagtcgaagaaaa

SEQ ID NO: 15456 - DNA, 15 bp, Homo sapiens
ttttagtcgaagaaa

SEQ ID NO: 15457 - DNA, 15 bp, Homo sapiens
attttagtcgaagaa

SEQ ID NO: 15458 - DNA, 15 bp, Homo sapiens
aattttagtcgaaga

SEQ ID NO: 15459 - DNA, 15 bp, Homo sapiens
gaattttagtcgaag

SEQ ID NO: 15460 - DNA, 15 bp, Homo sapiens
agaattttagtcgaa

SEQ ID NO: 15461 - DNA, 15 bp, Homo sapiens
cagaattttagtcga

SEQ ID NO: 15462 - DNA, 15 bp, Homo sapiens
gcagaattttagtcg

SEQ ID NO: 15463 - DNA, 15 bp, Homo sapiens
tgcagaattttagtc

SEQ ID NO: 15464 - DNA, 15 bp, Homo sapiens
ctgcagaattttagt

SEQ ID NO: 15465 - DNA, 15 bp, Homo sapiens
gctgcagaattttag

SEQ ID NO: 15466 - DNA, 15 bp, Homo sapiens
tgctgcagaatttta

SEQ ID NO: 15467 - DNA, 15 bp, Homo sapiens
gtgctgcagaatttt

SEQ ID NO: 15468 - DNA, 15 bp, Homo sapiens
agtgctgcagaattt

SEQ ID NO: 15469 - DNA, 15 bp, Homo sapiens
aagtgctgcagaatt

SEQ ID NO: 15470 - DNA, 15 bp, Homo sapiens
taagtgctgcagaat

SEQ ID NO: 15471 - DNA, 15 bp, Homo sapiens
ctaagtgctgcagaa

SEQ ID NO: 15472 - DNA, 15 bp, Homo sapiens
cctaagtgctgcaga

SEQ ID NO: 15473 - DNA, 15 bp, Homo sapiens
gcctaagtgctgcag

SEQ ID NO: 15474 - DNA, 15 bp, Homo sapiens
tgcctaagtgctgca

SEQ ID NO: 15475 - DNA, 15 bp, Homo sapiens
ttgcctaagtgctgc

SEQ ID NO: 15476 - DNA, 15 bp, Homo sapiens
tttgcctaagtgctg

SEQ ID NO: 15477 - DNA, 15 bp, Homo sapiens
ctttgcctaagtgct

SEQ ID NO: 15478 - DNA, 15 bp, Homo sapiens
gctttgcctaagtgc

SEQ ID NO: 15479 - DNA, 15 bp, Homo sapiens
agctttgcctaagtg

SEQ ID NO: 15480 - DNA, 15 bp, Homo sapiens
tagctttgcctaagt

SEQ ID NO: 15481 - DNA, 15 bp, Homo sapiens
atagctttgcctaag

SEQ ID NO: 15482 - DNA, 15 bp, Homo sapiens
aatagctttgcctaa

SEQ ID NO: 15483 - DNA, 15 bp, Homo sapiens
aaatagctttgccta

SEQ ID NO: 15484 - DNA, 15 bp, Homo sapiens
aaaatagctttgcct

SEQ ID NO: 15485 - DNA, 15 bp, Homo sapiens
aaaaatagctttgcc

SEQ ID NO: 15486 - DNA, 15 bp, Homo sapiens
taaaaatagctttgc

SEQ ID NO: 15487 - DNA, 15 bp, Homo sapiens
gtaaaaatagctttg

SEQ ID NO: 15488 - DNA, 15 bp, Homo sapiens
ggtaaaaatagcttt

SEQ ID NO: 15489 - DNA, 15 bp, Homo sapiens
tggtaaaaatagctt

SEQ ID NO: 15490 - DNA, 15 bp, Homo sapiens
ctggtaaaaatagct

SEQ ID NO: 15491 - DNA, 15 bp, Homo sapiens
actggtaaaaatagc

SEQ ID NO: 15492 - DNA, 15 bp, Homo sapiens
aactggtaaaaatag

SEQ ID NO: 15493 - DNA, 15 bp, Homo sapiens
caactggtaaaaata

SEQ ID NO: 15494 - DNA, 15 bp, Homo sapiens
ccaactggtaaaaat

SEQ ID NO: 15495 - DNA, 15 bp, Homo sapiens
tccaactggtaaaaa

SEQ ID NO: 15496 - DNA, 15 bp, Homo sapiens
ttccaactggtaaaa

SEQ ID NO: 15497 - DNA, 15 bp, Homo sapiens
tttccaactggtaaa

SEQ ID NO: 15498 - DNA, 15 bp, Homo sapiens
ttttccaactggtaa

SEQ ID NO: 15499 - DNA, 15 bp, Homo sapiens
tttttccaactggta

SEQ ID NO: 15500 - DNA, 15 bp, Homo sapiens
ttttttccaactggt

SEQ ID NO: 15501 - DNA, 15 bp, Homo sapiens
tttttttccaactgg

SEQ ID NO: 15502 - DNA, 15 bp, Homo sapiens
ctttttttccaactg

SEQ ID NO: 15503 - DNA, 15 bp, Homo sapiens
actttttttccaact

SEQ ID NO: 15504 - DNA, 15 bp, Homo sapiens
tactttttttccaac

SEQ ID NO: 15505 - DNA, 15 bp, Homo sapiens
ttactttttttccaa

SEQ ID NO: 15506 - DNA, 15 bp, Homo sapiens
cttactttttttcca

SEQ ID NO: 15507 - DNA, 15 bp, Homo sapiens
acttactttttttcc

SEQ ID NO: 15508 - DNA, 15 bp, Homo sapiens
gacttactttttttc

SEQ ID NO: 15509 - DNA, 15 bp, Homo sapiens
tgacttacttttttt

SEQ ID NO: 15510 - DNA, 15 bp, Homo sapiens
atgacttactttttt

SEQ ID NO: 15511 - DNA, 15 bp, Homo sapiens
aatgacttacttttt

SEQ ID NO: 15512 - DNA, 15 bp, Homo sapiens
aaatgacttactttt

SEQ ID NO: 15513 - DNA, 15 bp, Homo sapiens
gaaatgacttacttt

SEQ ID NO: 15514 - DNA, 15 bp, Homo sapiens
ggaaatgacttactt

SEQ ID NO: 15515 - DNA, 15 bp, Homo sapiens
tggaaatgacttact

SEQ ID NO: 15516 - DNA, 15 bp, Homo sapiens
ttggaaatgacttac

SEQ ID NO: 15517 - DNA, 15 bp, Homo sapiens
gttggaaatgactta

SEQ ID NO: 15518 - DNA, 15 bp, Homo sapiens
ggttggaaatgactt

SEQ ID NO: 15519 - DNA, 15 bp, Homo sapiens
tggttggaaatgact

SEQ ID NO: 15520 - DNA, 15 bp, Homo sapiens
ttggttggaaatgac

SEQ ID NO: 15521 - DNA, 15 bp, Homo sapiens
attggttggaaatga

SEQ ID NO: 15522 - DNA, 15 bp, Homo sapiens
aattggttggaaatg

SEQ ID NO: 15523 - DNA, 15 bp, Homo sapiens
aaattggttggaaat

SEQ ID NO: 15524 - DNA, 15 bp, Homo sapiens
aaaattggttggaaa

SEQ ID NO: 15525 - DNA, 15 bp, Homo sapiens
gaaaattggttggaa

SEQ ID NO: 15526 - DNA, 15 bp, Homo sapiens
ggaaaattggttgga

SEQ ID NO: 15527 - DNA, 15 bp, Homo sapiens
aggaaaattggttgg

SEQ ID NO: 15528 - DNA, 15 bp, Homo sapiens
caggaaaattggttg

SEQ ID NO: 15529 - DNA, 15 bp, Homo sapiens
ccaggaaaattggtt

SEQ ID NO: 15530 - DNA, 15 bp, Homo sapiens
gccaggaaaattggt

SEQ ID NO: 15531 - DNA, 15 bp, Homo sapiens
agccaggaaaattgg

SEQ ID NO: 15532 - DNA, 15 bp, Homo sapiens
aagccaggaaaattg

SEQ ID NO: 15533 - DNA, 15 bp, Homo sapiens
caagccaggaaaatt

SEQ ID NO: 15534 - DNA, 15 bp, Homo sapiens
acaagccaggaaaat

SEQ ID NO: 15535 - DNA, 15 bp, Homo sapiens
tacaagccaggaaaa

SEQ ID NO: 15536 - DNA, 15 bp, Homo sapiens
ctacaagccaggaaa

SEQ ID NO: 15537 - DNA, 15 bp, Homo sapiens
actacaagccaggaa

SEQ ID NO: 15538 - DNA, 15 bp, Homo sapiens
tactacaagccagga

SEQ ID NO: 15539 - DNA, 15 bp, Homo sapiens
atactacaagccagg

SEQ ID NO: 15540 - DNA, 15 bp, Homo sapiens
tatactacaagccag

SEQ ID NO: 15541 - DNA, 15 bp, Homo sapiens
ctatactacaagcca

SEQ ID NO: 15542 - DNA, 15 bp, Homo sapiens
tctatactacaagcc

SEQ ID NO: 15543 - DNA, 15 bp, Homo sapiens
ttctatactacaagc

SEQ ID NO: 15544 - DNA, 15 bp, Homo sapiens
attctatactacaag

SEQ ID NO: 15545 - DNA, 15 bp, Homo sapiens
tattctatactacaa

SEQ ID NO: 15546 - DNA, 15 bp, Homo sapiens
ttattctatactaca

SEQ ID NO: 15547 - DNA, 15 bp, Homo sapiens
tttattctatactac

SEQ ID NO: 15548 - DNA, 15 bp, Homo sapiens
ctttattctatacta

SEQ ID NO: 15549 - DNA, 15 bp, Homo sapiens
tctttattctatact

SEQ ID NO: 15550 - DNA, 15 bp, Homo sapiens
ctctttattctatac

SEQ ID NO: 15551 - DNA, 15 bp, Homo sapiens
tctctttattctata

SEQ ID NO: 15552 - DNA, 15 bp, Homo sapiens
gtctctttattctat

SEQ ID NO: 15553 - DNA, 15 bp, Homo sapiens
agtctctttattcta

SEQ ID NO: 15554 - DNA, 15 bp, Homo sapiens
aagtctctttattct

SEQ ID NO: 15555 - DNA, 15 bp, Homo sapiens
caagtctctttattc

SEQ ID NO: 15556 - DNA, 15 bp, Homo sapiens
tcaagtctctttatt

SEQ ID NO: 15557 - DNA, 15 bp, Homo sapiens
atcaagtctctttat

SEQ ID NO: 15558 - DNA, 15 bp, Homo sapiens
aatcaagtctcttta

SEQ ID NO: 15559 - DNA, 15 bp, Homo sapiens
aaatcaagtctcttt

SEQ ID NO: 15560 - DNA, 15 bp, Homo sapiens
aaaatcaagtctctt

SEQ ID NO: 15561 - DNA, 15 bp, Homo sapiens
taaaatcaagtctct

SEQ ID NO: 15562 - DNA, 15 bp, Homo sapiens
ataaaatcaagtctc

SEQ ID NO: 15563 - DNA, 15 bp, Homo sapiens
aataaaatcaagtct

SEQ ID NO: 15564 - DNA, 15 bp, Homo sapiens
taataaaatcaagtc

SEQ ID NO: 15565 - DNA, 15 bp, Homo sapiens
gtaataaaatcaagt

SEQ ID NO: 15566 - DNA, 15 bp, Homo sapiens
tgtaataaaatcaag

SEQ ID NO: 15567 - DNA, 15 bp, Homo sapiens
atgtaataaaatcaa

SEQ ID NO: 15568 - DNA, 15 bp, Homo sapiens
aatgtaataaaatca

SEQ ID NO: 15569 - DNA, 15 bp, Homo sapiens
taatgtaataaaatc

SEQ ID NO: 15570 - DNA, 15 bp, Homo sapiens
ttaatgtaataaaat

SEQ ID NO: 15571 - DNA, 15 bp, Homo sapiens
tttaatgtaataaaa

SEQ ID NO: 15572 - DNA, 15 bp, Homo sapiens
ctttaatgtaataaa

SEQ ID NO: 15573 - DNA, 15 bp, Homo sapiens
gctttaatgtaataa

SEQ ID NO: 15574 - DNA, 15 bp, Homo sapiens
ggctttaatgtaata

SEQ ID NO: 15575 - DNA, 15 bp, Homo sapiens
tggctttaatgtaat

SEQ ID NO: 15576 - DNA, 15 bp, Homo sapiens
ttggctttaatgtaa

SEQ ID NO: 15577 - DNA, 15 bp, Homo sapiens
tttggctttaatgta

SEQ ID NO: 15578 - DNA, 15 bp, Homo sapiens
atttggctttaatgt

SEQ ID NO: 15579 - DNA, 15 bp, Homo sapiens
tatttggctttaatg

SEQ ID NO: 15580 - DNA, 15 bp, Homo sapiens
atatttggctttaat

SEQ ID NO: 15581 - DNA, 15 bp, Homo sapiens
tatatttggctttaa

SEQ ID NO: 15582 - DNA, 15 bp, Homo sapiens
ttatatttggcttta

SEQ ID NO: 15583 - DNA, 15 bp, Homo sapiens
tttatatttggcttt

SEQ ID NO: 15584 - DNA, 15 bp, Homo sapiens
ttttatatttggctt

SEQ ID NO: 15585 - DNA, 15 bp, Homo sapiens
attttatatttggct

SEQ ID NO: 15586 - DNA, 15 bp, Homo sapiens
cattttatatttggc

SEQ ID NO: 15587 - DNA, 15 bp, Homo sapiens
tcattttatatttgg

SEQ ID NO: 15588 - DNA, 15 bp, Homo sapiens
atcattttatatttg

SEQ ID NO: 15589 - DNA, 15 bp, Homo sapiens
catcattttatattt

SEQ ID NO: 15590 - DNA, 15 bp, Homo sapiens
gcatcattttatatt

SEQ ID NO: 15591 - DNA, 15 bp, Homo sapiens
tgcatcattttatat

SEQ ID NO: 15592 - DNA, 15 bp, Homo sapiens
ttgcatcattttata

SEQ ID NO: 15593 - DNA, 15 bp, Homo sapiens
attgcatcattttat

SEQ ID NO: 15594 - DNA, 15 bp, Homo sapiens
gattgcatcatttta

SEQ ID NO: 15595 - DNA, 15 bp, Homo sapiens
agattgcatcatttt

SEQ ID NO: 15596 - DNA, 15 bp, Homo sapiens
tagattgcatcattt

SEQ ID NO: 15597 - DNA, 15 bp, Homo sapiens
ctagattgcatcatt

SEQ ID NO: 15598 - DNA, 15 bp, Homo sapiens
gctagattgcatcat

SEQ ID NO: 15599 - DNA, 15 bp, Homo sapiens
tgctagattgcatca

SEQ ID NO: 15600 - DNA, 15 bp, Homo sapiens
gtgctagattgcatc

SEQ ID NO: 15601 - DNA, 15 bp, Homo sapiens
tgtgctagattgcat

SEQ ID NO: 15602 - DNA, 15 bp, Homo sapiens
gtgtgctagattgca

SEQ ID NO: 15603 - DNA, 15 bp, Homo sapiens
tgtgtgctagattgc

SEQ ID NO: 15604 - DNA, 15 bp, Homo sapiens
gtgtgtgctagattg

SEQ ID NO: 15605 - DNA, 15 bp, Homo sapiens
agtgtgtgctagatt

SEQ ID NO: 15606 - DNA, 15 bp, Homo sapiens
aagtgtgtgctagat

SEQ ID NO: 15607 - DNA, 15 bp, Homo sapiens
caagtgtgtgctaga

SEQ ID NO: 15608 - DNA, 15 bp, Homo sapiens
acaagtgtgtgctag

SEQ ID NO: 15609 - DNA, 15 bp, Homo sapiens
aacaagtgtgtgcta

SEQ ID NO: 15610 - DNA, 15 bp, Homo sapiens
aaacaagtgtgtgct

SEQ ID NO: 15611 - DNA, 15 bp, Homo sapiens
caaacaagtgtgtgc

SEQ ID NO: 15612 - DNA, 15 bp, Homo sapiens
ccaaacaagtgtgtg

SEQ ID NO: 15613 - DNA, 15 bp, Homo sapiens
tccaaacaagtgtgt

SEQ ID NO: 15614 - DNA, 15 bp, Homo sapiens
ttccaaacaagtgtg

SEQ ID NO: 15615 - DNA, 15 bp, Homo sapiens
gttccaaacaagtgt

SEQ ID NO: 15616 - DNA, 15 bp, Homo sapiens
agttccaaacaagtg

SEQ ID NO: 15617 - DNA, 15 bp, Homo sapiens
aagttccaaacaagt

SEQ ID NO: 15618 - DNA, 15 bp, Homo sapiens
aaagttccaaacaag

SEQ ID NO: 15619 - DNA, 15 bp, Homo sapiens
aaaagttccaaacaa

SEQ ID NO: 15620 - DNA, 15 bp, Homo sapiens
gaaaagttccaaaca

SEQ ID NO: 15621 - DNA, 15 bp, Homo sapiens
agaaaagttccaaac

SEQ ID NO: 15622 - DNA, 15 bp, Homo sapiens
gagaaaagttccaaa

SEQ ID NO: 15623 - DNA, 15 bp, Homo sapiens
agagaaaagttccaa

SEQ ID NO: 15624 - DNA, 15 bp, Homo sapiens
aagagaaaagttcca

SEQ ID NO: 15625 - DNA, 15 bp, Homo sapiens
aaagagaaaagttcc

SEQ ID NO: 15626 - DNA, 15 bp, Homo sapiens
aaaagagaaaagttc

SEQ ID NO: 15627 - DNA, 15 bp, Homo sapiens
taaaagagaaaagtt

SEQ ID NO: 15628 - DNA, 15 bp, Homo sapiens
ttaaaagagaaaagt

SEQ ID NO: 15629 - DNA, 15 bp, Homo sapiens
tttaaaagagaaaag

SEQ ID NO: 15630 - DNA, 15 bp, Homo sapiens
atttaaaagagaaaa

SEQ ID NO: 15631 - DNA, 15 bp, Homo sapiens
tatttaaaagagaaa

SEQ ID NO: 15632 - DNA, 15 bp, Homo sapiens
atatttaaaagagaa

SEQ ID NO: 15633 - DNA, 15 bp, Homo sapiens
aatatttaaaagaga

SEQ ID NO: 15634 - DNA, 15 bp, Homo sapiens
gaatatttaaaagag

SEQ ID NO: 15635 - DNA, 15 bp, Homo sapiens
tgaatatttaaaaga

SEQ ID NO: 15636 - DNA, 15 bp, Homo sapiens
ctgaatatttaaaag

SEQ ID NO: 15637 - DNA, 15 bp, Homo sapiens
tctgaatatttaaaa

SEQ ID NO: 15638 - DNA, 15 bp, Homo sapiens
atctgaatatttaaa

SEQ ID NO: 15639 - DNA, 15 bp, Homo sapiens
aatctgaatatttaa

SEQ ID NO: 15640 - DNA, 15 bp, Homo sapiens
taatctgaatattta

SEQ ID NO: 15641 - DNA, 15 bp, Homo sapiens
ttaatctgaatattt

SEQ ID NO: 15642 - DNA, 15 bp, Homo sapiens
cttaatctgaatatt

SEQ ID NO: 15643 - DNA, 15 bp, Homo sapiens
tcttaatctgaatat

SEQ ID NO: 15644 - DNA, 15 bp, Homo sapiens
ctcttaatctgaata

SEQ ID NO: 15645 - DNA, 15 bp, Homo sapiens
cctcttaatctgaat

SEQ ID NO: 15646 - DNA, 15 bp, Homo sapiens
tcctcttaatctgaa

SEQ ID NO: 15647 - DNA, 15 bp, Homo sapiens
gtcctcttaatctga

SEQ ID NO: 15648 - DNA, 15 bp, Homo sapiens
cgtcctcttaatctg

SEQ ID NO: 15649 - DNA, 15 bp, Homo sapiens
acgtcctcttaatct

SEQ ID NO: 15650 - DNA, 15 bp, Homo sapiens
aacgtcctcttaatc

SEQ ID NO: 15651 - DNA, 15 bp, Homo sapiens
caacgtcctcttaat

SEQ ID NO: 15652 - DNA, 15 bp, Homo sapiens
tcaacgtcctcttaa

SEQ ID NO: 15653 - DNA, 15 bp, Homo sapiens
ttcaacgtcctctta

SEQ ID NO: 15654 - DNA, 15 bp, Homo sapiens
tttcaacgtcctctt

SEQ ID NO: 15655 - DNA, 15 bp, Homo sapiens
ctttcaacgtcctct

SEQ ID NO: 15656 - DNA, 15 bp, Homo sapiens
cctttcaacgtcctc

SEQ ID NO: 15657 - DNA, 15 bp, Homo sapiens
acctttcaacgtcct

SEQ ID NO: 15658 - DNA, 15 bp, Homo sapiens
tacctttcaacgtcc

SEQ ID NO: 15659 - DNA, 15 bp, Homo sapiens
ttacctttcaacgtc

SEQ ID NO: 15660 - DNA, 15 bp, Homo sapiens
tttacctttcaacgt

SEQ ID NO: 15661 - DNA, 15 bp, Homo sapiens
atttacctttcaacg

SEQ ID NO: 15662 - DNA, 15 bp, Homo sapiens
aatttacctttcaac

SEQ ID NO: 15663 - DNA, 15 bp, Homo sapiens
aaatttacctttcaa

SEQ ID NO: 15664 - DNA, 15 bp, Homo sapiens
aaaatttacctttca

SEQ ID NO: 15665 - DNA, 15 bp, Homo sapiens
aaaaatttacctttc

SEQ ID NO: 15666 - DNA, 15 bp, Homo sapiens
aaaaaatttaccttt

SEQ ID NO: 15667 - DNA, 15 bp, Homo sapiens
aaaaaaatttacctt

SEQ ID NO: 15668 - DNA, 15 bp, Homo sapiens
aaaaaaaatttacct

SEQ ID NO: 15669 - DNA, 15 bp, Homo sapiens
aaaaaaaaatttacc

SEQ ID NO: 15670 - DNA, 15 bp, Homo sapiens
aaaaaaaaaatttac

SEQ ID NO: 15671 - DNA, 15 bp, Homo sapiens
aaaaaaaaaaattta

SEQ ID NO: 15672 - DNA, 15 bp, Homo sapiens
aaaaaaaaaaaattt

SEQ ID NO: 15673 - DNA, 15 bp, Homo sapiens
gtctcaaaaaaaaaa

SEQ ID NO: 15674 - DNA, 15 bp, Homo sapiens
cgtctcaaaaaaaaa

SEQ ID NO: 15675 - DNA, 15 bp, Homo sapiens
ccgtctcaaaaaaaa

SEQ ID NO: 15676 - DNA, 15 bp, Homo sapiens
tccgtctcaaaaaaa

SEQ ID NO: 15677 - DNA, 15 bp, Homo sapiens
ctccgtctcaaaaaa

SEQ ID NO: 15678 - DNA, 15 bp, Homo sapiens
actccgtctcaaaaa

SEQ ID NO: 15679 - DNA, 15 bp, Homo sapiens
gactccgtctcaaaa

SEQ ID NO: 15680 - DNA, 15 bp, Homo sapiens
agactccgtctcaaa

SEQ ID NO: 15681 - DNA, 15 bp, Homo sapiens
tagactccgtctcaa

SEQ ID NO: 15682 - DNA, 15 bp, Homo sapiens
ctagactccgtctca

SEQ ID NO: 15683 - DNA, 15 bp, Homo sapiens
gctagactccgtctc

SEQ ID NO: 15684 - DNA, 15 bp, Homo sapiens
agctagactccgtct

SEQ ID NO: 15685 - DNA, 15 bp, Homo sapiens
gagctagactccgtc

SEQ ID NO: 15686 - DNA, 15 bp, Homo sapiens
agagctagactccgt

SEQ ID NO: 15687 - DNA, 15 bp, Homo sapiens
cagagctagactccg

SEQ ID NO: 15688 - DNA, 15 bp, Homo sapiens
acagagctagactcc

SEQ ID NO: 15689 - DNA, 15 bp, Homo sapiens
gacagagctagactc

SEQ ID NO: 15690 - DNA, 15 bp, Homo sapiens
tgacagagctagact

SEQ ID NO: 15691 - DNA, 15 bp, Homo sapiens
gtgacagagctagac

SEQ ID NO: 15692 - DNA, 15 bp, Homo sapiens
ggtgacagagctaga

SEQ ID NO: 15693 - DNA, 15 bp, Homo sapiens
gggtgacagagctag

SEQ ID NO: 15694 - DNA, 15 bp, Homo sapiens
tgggtgacagagcta

SEQ ID NO: 15695 - DNA, 15 bp, Homo sapiens
ctgggtgacagagct

SEQ ID NO: 15696 - DNA, 15 bp, Homo sapiens
cctgggtgacagagc

SEQ ID NO: 15697 - DNA, 15 bp, Homo sapiens
gcctgggtgacagag

SEQ ID NO: 15698 - DNA, 15 bp, Homo sapiens
agcctgggtgacaga

SEQ ID NO: 15699 - DNA, 15 bp, Homo sapiens
cagcctgggtgacag

SEQ ID NO: 15700 - DNA, 15 bp, Homo sapiens
ccagcctgggtgaca

SEQ ID NO: 15701 - DNA, 15 bp, Homo sapiens
tccagcctgggtgac

SEQ ID NO: 15702 - DNA, 15 bp, Homo sapiens
ctccagcctgggtga

SEQ ID NO: 15703 - DNA, 15 bp, Homo sapiens
actccagcctgggtg

SEQ ID NO: 15704 - DNA, 15 bp, Homo sapiens
cactccagcctgggt

SEQ ID NO: 15705 - DNA, 15 bp, Homo sapiens
gtgcactccagcctg

SEQ ID NO: 15706 - DNA, 15 bp, Homo sapiens
agtgcactccagcct

SEQ ID NO: 15707 - DNA, 15 bp, Homo sapiens
cagtgcactccagcc

SEQ ID NO: 15708 - DNA, 15 bp, Homo sapiens
ccagtgcactccagc

SEQ ID NO: 15709 - DNA, 15 bp, Homo sapiens
gccagtgcactccag

SEQ ID NO: 15710 - DNA, 15 bp, Homo sapiens
tgccagtgcactcca

SEQ ID NO: 15711 - DNA, 15 bp, Homo sapiens
gtgccagtgcactcc

SEQ ID NO: 15712 - DNA, 15 bp, Homo sapiens
cgtgccagtgcactc

SEQ ID NO: 15713 - DNA, 15 bp, Homo sapiens
tcgtgccagtgcact

SEQ ID NO: 15714 - DNA, 15 bp, Homo sapiens
atcgtgccagtgcac

SEQ ID NO: 15715 - DNA, 15 bp, Homo sapiens
aatcgtgccagtgca

SEQ ID NO: 15716 - DNA, 15 bp, Homo sapiens
aaatcgtgccagtgc

SEQ ID NO: 15717 - DNA, 15 bp, Homo sapiens
gaaatcgtgccagtg

SEQ ID NO: 15718 - DNA, 15 bp, Homo sapiens
cgaaatcgtgccagt

SEQ ID NO: 15719 - DNA, 15 bp, Homo sapiens
ccgaaatcgtgccag

SEQ ID NO: 15720 - DNA, 15 bp, Homo sapiens
gccgaaatcgtgcca

SEQ ID NO: 15721 - DNA, 15 bp, Homo sapiens
agccgaaatcgtgcc

SEQ ID NO: 15722 - DNA, 15 bp, Homo sapiens
aagccgaaatcgtgc

SEQ ID NO: 15723 - DNA, 15 bp, Homo sapiens
taagccgaaatcgtg

SEQ ID NO: 15724 - DNA, 15 bp, Homo sapiens
gtaagccgaaatcgt

SEQ ID NO: 15725 - DNA, 15 bp, Homo sapiens
agtaagccgaaatcg

SEQ ID NO: 15726 - DNA, 15 bp, Homo sapiens
cagtaagccgaaatc

SEQ ID NO: 15727 - DNA, 15 bp, Homo sapiens
gcagtaagccgaaat

SEQ ID NO: 15728 - DNA, 15 bp, Homo sapiens
tgcagtaagccgaaa

SEQ ID NO: 15729 - DNA, 15 bp, Homo sapiens
ttgcagtaagccgaa

SEQ ID NO: 15730 - DNA, 15 bp, Homo sapiens
cttgcagtaagccga

SEQ ID NO: 15731 - DNA, 15 bp, Homo sapiens
gcttgcagtaagccg

SEQ ID NO: 15732 - DNA, 15 bp, Homo sapiens
agcttgcagtaagcc

SEQ ID NO: 15733 - DNA, 15 bp, Homo sapiens
gagcttgcagtaagc

SEQ ID NO: 15734 - DNA, 15 bp, Homo sapiens
agagcttgcagtaag

SEQ ID NO: 15735 - DNA, 15 bp, Homo sapiens
cagagcttgcagtaa

SEQ ID NO: 15736 - DNA, 15 bp, Homo sapiens
gcagagcttgcagta

SEQ ID NO: 15737 - DNA, 15 bp, Homo sapiens
ggcagagcttgcagt

SEQ ID NO: 15738 - DNA, 15 bp, Homo sapiens
aggcagagcttgcag

SEQ ID NO: 15739 - DNA, 15 bp, Homo sapiens
gaggcagagcttgca

SEQ ID NO: 15740 - DNA, 15 bp, Homo sapiens
ggaggcagagcttgc

SEQ ID NO: 15741 - DNA, 15 bp, Homo sapiens
gggaggcagagcttg

SEQ ID NO: 15742 - DNA, 15 bp, Homo sapiens
tgggaggcagagctt

SEQ ID NO: 15743 - DNA, 15 bp, Homo sapiens
ctgggaggcagagct

SEQ ID NO: 15744 - DNA, 15 bp, Homo sapiens
cctgggaggcagagc

SEQ ID NO: 15745 - DNA, 15 bp, Homo sapiens
atgaacctgggaggc

SEQ ID NO: 15746 - DNA, 15 bp, Homo sapiens
catgaacctgggagg

SEQ ID NO: 15747 - DNA, 15 bp, Homo sapiens
gcatgaacctgggag

SEQ ID NO: 15748 - DNA, 15 bp, Homo sapiens
ggcatgaacctggga

SEQ ID NO: 15749 - DNA, 15 bp, Homo sapiens
tggcatgaacctggg

SEQ ID NO: 15750 - DNA, 15 bp, Homo sapiens
atggcatgaacctgg

SEQ ID NO: 15751 - DNA, 15 bp, Homo sapiens
aatggcatgaacctg

SEQ ID NO: 15752 - DNA, 15 bp, Homo sapiens
gaatggcatgaacct

SEQ ID NO: 15753 - DNA, 15 bp, Homo sapiens
agaatggcatgaacc

SEQ ID NO: 15754 - DNA, 15 bp, Homo sapiens
gagaatggcatgaac

SEQ ID NO: 15755 - DNA, 15 bp, Homo sapiens
ggagaatggcatgaa

SEQ ID NO: 15756 - DNA, 15 bp, Homo sapiens
aggagaatggcatga

SEQ ID NO: 15757 - DNA, 15 bp, Homo sapiens
caggagaatggcatg

SEQ ID NO: 15758 - DNA, 15 bp, Homo sapiens
gcaggagaatggcat

SEQ ID NO: 15759 - DNA, 15 bp, Homo sapiens
ggcaggagaatggca

SEQ ID NO: 15760 - DNA, 15 bp, Homo sapiens
aggcaggagaatggc

SEQ ID NO: 15761 - DNA, 15 bp, Homo sapiens
gaggcaggagaatgg

SEQ ID NO: 15762 - DNA, 15 bp, Homo sapiens
tgaggcaggagaatg

SEQ ID NO: 15763 - DNA, 15 bp, Homo sapiens
ctgaggcaggagaat

SEQ ID NO: 15764 - DNA, 15 bp, Homo sapiens
ggctgaggcaggaga

SEQ ID NO: 15765 - DNA, 15 bp, Homo sapiens
aggctgaggcaggag

SEQ ID NO: 15766 - DNA, 15 bp, Homo sapiens
gaggctgaggcagga

SEQ ID NO: 15767 - DNA, 15 bp, Homo sapiens
ggaggctgaggcagg

SEQ ID NO: 15768 - DNA, 15 bp, Homo sapiens
gggaggctgaggcag

SEQ ID NO: 15769 - DNA, 15 bp, Homo sapiens
cgggaggctgaggca

SEQ ID NO: 15770 - DNA, 15 bp, Homo sapiens
tcgggaggctgaggc

SEQ ID NO: 15771 - DNA, 15 bp, Homo sapiens
ctcgggaggctgagg

SEQ ID NO: 15772 - DNA, 15 bp, Homo sapiens
actcgggaggctgag

SEQ ID NO: 15773 - DNA, 15 bp, Homo sapiens
tactcgggaggctga

SEQ ID NO: 15774 - DNA, 15 bp, Homo sapiens
ctactcgggaggctg

SEQ ID NO: 15775 - DNA, 15 bp, Homo sapiens
gctactcgggaggct

SEQ ID NO: 15776 - DNA, 15 bp, Homo sapiens
agctactcgggaggc

SEQ ID NO: 15777 - DNA, 15 bp, Homo sapiens
cagctactcgggagg

SEQ ID NO: 15778 - DNA, 15 bp, Homo sapiens
ccagctactcgggag

SEQ ID NO: 15779 - DNA, 15 bp, Homo sapiens
cccagctactcggga

SEQ ID NO: 15780 - DNA, 15 bp, Homo sapiens
tcccagctactcggg

SEQ ID NO: 15781 - DNA, 15 bp, Homo sapiens
gtcccagctactcgg

SEQ ID NO: 15782 - DNA, 15 bp, Homo sapiens
agtcccagctactcg

SEQ ID NO: 15783 - DNA, 15 bp, Homo sapiens
tagtcccagctactc

SEQ ID NO: 15784 - DNA, 15 bp, Homo sapiens
gtagtcccagctact

SEQ ID NO: 15785 - DNA, 15 bp, Homo sapiens
tgtagtcccagctac

SEQ ID NO: 15786 - DNA, 15 bp, Homo sapiens
ctgtagtcccagcta

SEQ ID NO: 15787 - DNA, 15 bp, Homo sapiens
cctgtagtcccagct

SEQ ID NO: 15788 - DNA, 15 bp, Homo sapiens
gcctgtagtcccagc

SEQ ID NO: 15789 - DNA, 15 bp, Homo sapiens
cgcctgtagtcccag

SEQ ID NO: 15790 - DNA, 15 bp, Homo sapiens
gcgcctgtagtccca

SEQ ID NO: 15791 - DNA, 15 bp, Homo sapiens
ggcgcctgtagtccc

SEQ ID NO: 15792 - DNA, 15 bp, Homo sapiens
aggcgcctgtagtcc

SEQ ID NO: 15793 - DNA, 15 bp, Homo sapiens
taggcgcctgtagtc

SEQ ID NO: 15794 - DNA, 15 bp, Homo sapiens
gtaggcgcctgtagt

SEQ ID NO: 15795 - DNA, 15 bp, Homo sapiens
ggtaggcgcctgtag

SEQ ID NO: 15796 - DNA, 15 bp, Homo sapiens
tggtaggcgcctgta

SEQ ID NO: 15797 - DNA, 15 bp, Homo sapiens
gtggtaggcgcctgt

SEQ ID NO: 15798 - DNA, 15 bp, Homo sapiens
cgtggtaggcgcctg

SEQ ID NO: 15799 - DNA, 15 bp, Homo sapiens
ccgtggtaggcgcct

SEQ ID NO: 15800 - DNA, 15 bp, Homo sapiens
accgtggtaggcgcc

SEQ ID NO: 15801 - DNA, 15 bp, Homo sapiens
caccgtggtaggcgc

SEQ ID NO: 15802 - DNA, 15 bp, Homo sapiens
ccaccgtggtaggcg

SEQ ID NO: 15803 - DNA, 15 bp, Homo sapiens
gccaccgtggtaggc

SEQ ID NO: 15804 - DNA, 15 bp, Homo sapiens
cgccaccgtggtagg

SEQ ID NO: 15805 - DNA, 15 bp, Homo sapiens
gcgccaccgtggtag

SEQ ID NO: 15806 - DNA, 15 bp, Homo sapiens
ggcgccaccgtggta

SEQ ID NO: 15807 - DNA, 15 bp, Homo sapiens
gggcgccaccgtggt

SEQ ID NO: 15808 - DNA, 15 bp, Homo sapiens
cgggcgccaccgtgg

SEQ ID NO: 15809 - DNA, 15 bp, Homo sapiens
ccgggcgccaccgtg

SEQ ID NO: 15810 - DNA, 15 bp, Homo sapiens
gccgggcgccaccgt

SEQ ID NO: 15811 - DNA, 15 bp, Homo sapiens
agccgggcgccaccg

SEQ ID NO: 15812 - DNA, 15 bp, Homo sapiens
tagccgggcgccacc

SEQ ID NO: 15813 - DNA, 15 bp, Homo sapiens
ttagccgggcgccac

SEQ ID NO: 15814 - DNA, 15 bp, Homo sapiens
attagccgggcgcca

SEQ ID NO: 15815 - DNA, 15 bp, Homo sapiens
aattagccgggcgcc

SEQ ID NO: 15816 - DNA, 15 bp, Homo sapiens
aaattagccgggcgc

SEQ ID NO: 15817 - DNA, 15 bp, Homo sapiens
aaaaattagccgggc

SEQ ID NO: 15818 - DNA, 15 bp, Homo sapiens
aaaaaattagccggg

SEQ ID NO: 15819 - DNA, 15 bp, Homo sapiens
caaaaaattagccgg

SEQ ID NO: 15820 - DNA, 15 bp, Homo sapiens
acaaaaaattagccg

SEQ ID NO: 15821 - DNA, 15 bp, Homo sapiens
tacaaaaaattagcc

SEQ ID NO: 15822 - DNA, 15 bp, Homo sapiens
atacaaaaaattagc

SEQ ID NO: 15823 - DNA, 15 bp, Homo sapiens
aatacaaaaaattag

SEQ ID NO: 15824 - DNA, 15 bp, Homo sapiens
aaatacaaaaaatta

SEQ ID NO: 15825 - DNA, 15 bp, Homo sapiens
aaaatacaaaaaatt

SEQ ID NO: 15826 - DNA, 15 bp, Homo sapiens
aaaaatacaaaaaat

SEQ ID NO: 15827 - DNA, 15 bp, Homo sapiens
taaaaatacaaaaaa

SEQ ID NO: 15828 - DNA, 15 bp, Homo sapiens
ctaaaaatacaaaaa

SEQ ID NO: 15829 - DNA, 15 bp, Homo sapiens
actaaaaatacaaaa

SEQ ID NO: 15830 - DNA, 15 bp, Homo sapiens
tactaaaaatacaaa

SEQ ID NO: 15831 - DNA, 15 bp, Homo sapiens
ctactaaaaatacaa

SEQ ID NO: 15832 - DNA, 15 bp, Homo sapiens
tctactaaaaataca

SEQ ID NO: 15833 - DNA, 15 bp, Homo sapiens
ctctactaaaaatac

SEQ ID NO: 15834 - DNA, 15 bp, Homo sapiens
tctctactaaaaata

SEQ ID NO: 15835 - DNA, 15 bp, Homo sapiens
gtctctactaaaaat

SEQ ID NO: 15836 - DNA, 15 bp, Homo sapiens
cgtctctactaaaaa

SEQ ID NO: 15837 - DNA, 15 bp, Homo sapiens
ccgtctctactaaaa

SEQ ID NO: 15838 - DNA, 15 bp, Homo sapiens
cccgtctctactaaa

SEQ ID NO: 15839 - DNA, 15 bp, Homo sapiens
ccccgtctctactaa

SEQ ID NO: 15840 - DNA, 15 bp, Homo sapiens
accccgtctctacta

SEQ ID NO: 15841 - DNA, 15 bp, Homo sapiens
aaccccgtctctact

SEQ ID NO: 15842 - DNA, 15 bp, Homo sapiens
aaaccccgtctctac

SEQ ID NO: 15843 - DNA, 15 bp, Homo sapiens
gaaaccccgtctcta

SEQ ID NO: 15844 - DNA, 15 bp, Homo sapiens
tgaaaccccgtctct

SEQ ID NO: 15845 - DNA, 15 bp, Homo sapiens
gtgaaaccccgtctc

SEQ ID NO: 15846 - DNA, 15 bp, Homo sapiens
ggtgaaaccccgtct

SEQ ID NO: 15847 - DNA, 15 bp, Homo sapiens
cggtgaaaccccgtc

SEQ ID NO: 15848 - DNA, 15 bp, Homo sapiens
acggtgaaaccccgt

SEQ ID NO: 15849 - DNA, 15 bp, Homo sapiens
cacggtgaaaccccg

SEQ ID NO: 15850 - DNA, 15 bp, Homo sapiens
acacggtgaaacccc

SEQ ID NO: 15851 - DNA, 15 bp, Homo sapiens
aacacggtgaaaccc

SEQ ID NO: 15852 - DNA, 15 bp, Homo sapiens
taacacggtgaaacc

SEQ ID NO: 15853 - DNA, 15 bp, Homo sapiens
ctaacacggtgaaac

SEQ ID NO: 15854 - DNA, 15 bp, Homo sapiens
gctaacacggtgaaa

SEQ ID NO: 15855 - DNA, 15 bp, Homo sapiens
ggctaacacggtgaa

SEQ ID NO: 15856 - DNA, 15 bp, Homo sapiens
tggctaacacggtga

SEQ ID NO: 15857 - DNA, 15 bp, Homo sapiens
ctggctaacacggtg

SEQ ID NO: 15858 - DNA, 15 bp, Homo sapiens
cctggctaacacggt

SEQ ID NO: 15859 - DNA, 15 bp, Homo sapiens
tcctggctaacacgg

SEQ ID NO: 15860 - DNA, 15 bp, Homo sapiens
atcctggctaacacg

SEQ ID NO: 15861 - DNA, 15 bp, Homo sapiens
catcctggctaacac

SEQ ID NO: 15862 - DNA, 15 bp, Homo sapiens
ccatcctggctaaca

SEQ ID NO: 15863 - DNA, 15 bp, Homo sapiens
accatcctggctaac

SEQ ID NO: 15864 - DNA, 15 bp, Homo sapiens
gaccatcctggctaa

SEQ ID NO: 15865 - DNA, 15 bp, Homo sapiens
agaccatcctggcta

SEQ ID NO: 15866 - DNA, 15 bp, Homo sapiens
gagaccatcctggct

SEQ ID NO: 15867 - DNA, 15 bp, Homo sapiens
atcgagaccatcctg

SEQ ID NO: 15868 - DNA, 15 bp, Homo sapiens
gatcgagaccatcct

SEQ ID NO: 15869 - DNA, 15 bp, Homo sapiens
agatcgagaccatcc

SEQ ID NO: 15870 - DNA, 15 bp, Homo sapiens
gagatcgagaccatc

SEQ ID NO: 15871 - DNA, 15 bp, Homo sapiens
ggagatcgagaccat

SEQ ID NO: 15872 - DNA, 15 bp, Homo sapiens
aggagatcgagacca

SEQ ID NO: 15873 - DNA, 15 bp, Homo sapiens
caggagatcgagacc

SEQ ID NO: 15874 - DNA, 15 bp, Homo sapiens
tcaggagatcgagac

SEQ ID NO: 15875 - DNA, 15 bp, Homo sapiens
gtcaggagatcgaga

SEQ ID NO: 15876 - DNA, 15 bp, Homo sapiens
ggtcaggagatcgag

SEQ ID NO: 15877 - DNA, 15 bp, Homo sapiens
aggtcaggagatcga

SEQ ID NO: 15878 - DNA, 15 bp, Homo sapiens
gaggtcaggagatcg

SEQ ID NO: 15879 - DNA, 15 bp, Homo sapiens
cgaggtcaggagatc

SEQ ID NO: 15880 - DNA, 15 bp, Homo sapiens
acgaggtcaggagat

SEQ ID NO: 15881 - DNA, 15 bp, Homo sapiens
cacgaggtcaggaga

SEQ ID NO: 15882 - DNA, 15 bp, Homo sapiens
tcacgaggtcaggag

SEQ ID NO: 15883 - DNA, 15 bp, Homo sapiens
atcacgaggtcagga

SEQ ID NO: 15884 - DNA, 15 bp, Homo sapiens
gatcacgaggtcagg

SEQ ID NO: 15885 - DNA, 15 bp, Homo sapiens
agatcacgaggtcag

SEQ ID NO: 15886 - DNA, 15 bp, Homo sapiens
cagatcacgaggtca

SEQ ID NO: 15887 - DNA, 15 bp, Homo sapiens
gcagatcacgaggtc

SEQ ID NO: 15888 - DNA, 15 bp, Homo sapiens
ggcagatcacgaggt

SEQ ID NO: 15889 - DNA, 15 bp, Homo sapiens
aggcagatcacgagg

SEQ ID NO: 15890 - DNA, 15 bp, Homo sapiens
caggcagatcacgag

SEQ ID NO: 15891 - DNA, 15 bp, Homo sapiens
gcaggcagatcacga

SEQ ID NO: 15892 - DNA, 15 bp, Homo sapiens
ggcaggcagatcacg

SEQ ID NO: 15893 - DNA, 15 bp, Homo sapiens
aggcaggcagatcac

SEQ ID NO: 15894 - DNA, 15 bp, Homo sapiens
gaggcaggcagatca

SEQ ID NO: 15895 - DNA, 15 bp, Homo sapiens
cgaggcaggcagatc

SEQ ID NO: 15896 - DNA, 15 bp, Homo sapiens
ccgaggcaggcagat

SEQ ID NO: 15897 - DNA, 15 bp, Homo sapiens
gccgaggcaggcaga

SEQ ID NO: 15898 - DNA, 15 bp, Homo sapiens
ggccgaggcaggcag

SEQ ID NO: 15899 - DNA, 15 bp, Homo sapiens
aggccgaggcaggca

SEQ ID NO: 15900 - DNA, 15 bp, Homo sapiens
ctttgggaggccgag

SEQ ID NO: 15901 - DNA, 15 bp, Homo sapiens
actttgggaggccga

SEQ ID NO: 15902 - DNA, 15 bp, Homo sapiens
cactttgggaggccg

SEQ ID NO: 15903 - DNA, 15 bp, Homo sapiens
ctgtaatcccagcac

SEQ ID NO: 15904 - DNA, 15 bp, Homo sapiens
tacctgtaatcccag

SEQ ID NO: 15905 - DNA, 15 bp, Homo sapiens
ttacctgtaatccca

SEQ ID NO: 15906 - DNA, 15 bp, Homo sapiens
tttacctgtaatccc

SEQ ID NO: 15907 - DNA, 15 bp, Homo sapiens
atttacctgtaatcc

SEQ ID NO: 15908 - DNA, 15 bp, Homo sapiens
aatttacctgtaatc

SEQ ID NO: 15909 - DNA, 15 bp, Homo sapiens
aaatttacctgtaat

SEQ ID NO: 15910 - DNA, 15 bp, Homo sapiens
aaaatttacctgtaa

SEQ ID NO: 15911 - DNA, 15 bp, Homo sapiens
caaaatttacctgta

SEQ ID NO: 15912 - DNA, 15 bp, Homo sapiens
tcaaaatttacctgt

SEQ ID NO: 15913 - DNA, 15 bp, Homo sapiens
atcaaaatttacctg

SEQ ID NO: 15914 - DNA, 15 bp, Homo sapiens
aatcaaaatttacct

SEQ ID NO: 15915 - DNA, 15 bp, Homo sapiens
caatcaaaatttacc

SEQ ID NO: 15916 - DNA, 15 bp, Homo sapiens
acaatcaaaatttac

SEQ ID NO: 15917 - DNA, 15 bp, Homo sapiens
aacaatcaaaattta

SEQ ID NO: 15918 - DNA, 15 bp, Homo sapiens
taacaatcaaaattt

SEQ ID NO: 15919 - DNA, 15 bp, Homo sapiens
ataacaatcaaaatt

SEQ ID NO: 15920 - DNA, 15 bp, Homo sapiens
aataacaatcaaaat

SEQ ID NO: 15921 - DNA, 15 bp, Homo sapiens
taataacaatcaaaa

SEQ ID NO: 15922 - DNA, 15 bp, Homo sapiens
ctaataacaatcaaa

SEQ ID NO: 15923 - DNA, 15 bp, Homo sapiens
gctaataacaatcaa

SEQ ID NO: 15924 - DNA, 15 bp, Homo sapiens
tgctaataacaatca

SEQ ID NO: 15925 - DNA, 15 bp, Homo sapiens
ttgctaataacaatc

SEQ ID NO: 15926 - DNA, 15 bp, Homo sapiens
gttgctaataacaat

SEQ ID NO: 15927 - DNA, 15 bp, Homo sapiens
agttgctaataacaa

SEQ ID NO: 15928 - DNA, 15 bp, Homo sapiens
tagttgctaataaca

SEQ ID NO: 15929 - DNA, 15 bp, Homo sapiens
atagttgctaataac

SEQ ID NO: 15930 - DNA, 15 bp, Homo sapiens
tatagttgctaataa

SEQ ID NO: 15931 - DNA, 15 bp, Homo sapiens
ttatagttgctaata

SEQ ID NO: 15932 - DNA, 15 bp, Homo sapiens
tttatagttgctaat

SEQ ID NO: 15933 - DNA, 15 bp, Homo sapiens
ttttatagttgctaa

SEQ ID NO: 15934 - DNA, 15 bp, Homo sapiens
cttttatagttgcta

SEQ ID NO: 15935 - DNA, 15 bp, Homo sapiens
acttttatagttgct

SEQ ID NO: 15936 - DNA, 15 bp, Homo sapiens
aacttttatagttgc

SEQ ID NO: 15937 - DNA, 15 bp, Homo sapiens
aaacttttatagttg

SEQ ID NO: 15938 - DNA, 15 bp, Homo sapiens
aaaacttttatagtt

SEQ ID NO: 15939 - DNA, 15 bp, Homo sapiens
caaaacttttatagt

SEQ ID NO: 15940 - DNA, 15 bp, Homo sapiens
gcaaaacttttatag

SEQ ID NO: 15941 - DNA, 15 bp, Homo sapiens
tgcaaaacttttata

SEQ ID NO: 15942 - DNA, 15 bp, Homo sapiens
ctgcaaaacttttat

SEQ ID NO: 15943 - DNA, 15 bp, Homo sapiens
actgcaaaactttta

SEQ ID NO: 15944 - DNA, 15 bp, Homo sapiens
aactgcaaaactttt

SEQ ID NO: 15945 - DNA, 15 bp, Homo sapiens
caactgcaaaacttt

SEQ ID NO: 15946 - DNA, 15 bp, Homo sapiens
ccaactgcaaaactt

SEQ ID NO: 15947 - DNA, 15 bp, Homo sapiens
gccaactgcaaaact

SEQ ID NO: 15948 - DNA, 15 bp, Homo sapiens
agccaactgcaaaac

SEQ ID NO: 15949 - DNA, 15 bp, Homo sapiens
aagccaactgcaaaa

SEQ ID NO: 15950 - DNA, 15 bp, Homo sapiens
taagccaactgcaaa

SEQ ID NO: 15951 - DNA, 15 bp, Homo sapiens
ataagccaactgcaa

SEQ ID NO: 15952 - DNA, 15 bp, Homo sapiens
aataagccaactgca

SEQ ID NO: 15953 - DNA, 15 bp, Homo sapiens
caataagccaactgc

SEQ ID NO: 15954 - DNA, 15 bp, Homo sapiens
ccaataagccaactg

SEQ ID NO: 15955 - DNA, 15 bp, Homo sapiens
tccaataagccaact

SEQ ID NO: 15956 - DNA, 15 bp, Homo sapiens
ttccaataagccaac

SEQ ID NO: 15957 - DNA, 15 bp, Homo sapiens
tttccaataagccaa

SEQ ID NO: 15958 - DNA, 15 bp, Homo sapiens
ttttccaataagcca

SEQ ID NO: 15959 - DNA, 15 bp, Homo sapiens
tttttccaataagcc

SEQ ID NO: 15960 - DNA, 15 bp, Homo sapiens
ctttttccaataagc

SEQ ID NO: 15961 - DNA, 15 bp, Homo sapiens
tctttttccaataag

SEQ ID NO: 15962 - DNA, 15 bp, Homo sapiens
ttctttttccaataa

SEQ ID NO: 15963 - DNA, 15 bp, Homo sapiens
tttctttttccaata

SEQ ID NO: 15964 - DNA, 15 bp, Homo sapiens
ttttctttttccaat

SEQ ID NO: 15965 - DNA, 15 bp, Homo sapiens
gttttctttttccaa

SEQ ID NO: 15966 - DNA, 15 bp, Homo sapiens
ggttttctttttcca

SEQ ID NO: 15967 - DNA, 15 bp, Homo sapiens
aggttttctttttcc

SEQ ID NO: 15968 - DNA, 15 bp, Homo sapiens
gaggttttctttttc

SEQ ID NO: 15969 - DNA, 15 bp, Homo sapiens
ggaggttttcttttt

SEQ ID NO: 15970 - DNA, 15 bp, Homo sapiens
aggaggttttctttt

SEQ ID NO: 15971 - DNA, 15 bp, Homo sapiens
aaggaggttttcttt

SEQ ID NO: 15972 - DNA, 15 bp, Homo sapiens
caaggaggttttctt

SEQ ID NO: 15973 - DNA, 15 bp, Homo sapiens
gcaaggaggttttct

SEQ ID NO: 15974 - DNA, 15 bp, Homo sapiens
ggcaaggaggttttc

SEQ ID NO: 15975 - DNA, 15 bp, Homo sapiens
cggcaaggaggtttt

SEQ ID NO: 15976 - DNA, 15 bp, Homo sapiens
ccggcaaggaggttt

SEQ ID NO: 15977 - DNA, 15 bp, Homo sapiens
tccggcaaggaggtt

SEQ ID NO: 15978 - DNA, 15 bp, Homo sapiens
ctccggcaaggaggt

SEQ ID NO: 15979 - DNA, 15 bp, Homo sapiens
tctccggcaaggagg

SEQ ID NO: 15980 - DNA, 15 bp, Homo sapiens
gtctccggcaaggag

SEQ ID NO: 15981 - DNA, 15 bp, Homo sapiens
cgtctccggcaagga

SEQ ID NO: 15982 - DNA, 15 bp, Homo sapiens
ccgtctccggcaagg

SEQ ID NO: 15983 - DNA, 15 bp, Homo sapiens
tccgtctccggcaag

SEQ ID NO: 15984 - DNA, 15 bp, Homo sapiens
ctccgtctccggcaa

SEQ ID NO: 15985 - DNA, 15 bp, Homo sapiens
tctccgtctccggca

SEQ ID NO: 15986 - DNA, 15 bp, Homo sapiens
gtctccgtctccggc

SEQ ID NO: 15987 - DNA, 15 bp, Homo sapiens
cgtctccgtctccgg

SEQ ID NO: 15988 - DNA, 15 bp, Homo sapiens
gcgtctccgtctccg

SEQ ID NO: 15989 - DNA, 15 bp, Homo sapiens
tgcgtctccgtctcc

SEQ ID NO: 15990 - DNA, 15 bp, Homo sapiens
atgcgtctccgtctc

SEQ ID NO: 15991 - DNA, 15 bp, Homo sapiens
aatgcgtctccgtct

SEQ ID NO: 15992 - DNA, 15 bp, Homo sapiens
aaatgcgtctccgtc

SEQ ID NO: 15993 - DNA, 15 bp, Homo sapiens
caaatgcgtctccgt

SEQ ID NO: 15994 - DNA, 15 bp, Homo sapiens
acaaatgcgtctccg

SEQ ID NO: 15995 - DNA, 15 bp, Homo sapiens
tacaaatgcgtctcc

SEQ ID NO: 15996 - DNA, 15 bp, Homo sapiens
atacaaatgcgtctc

SEQ ID NO: 15997 - DNA, 15 bp, Homo sapiens
aatacaaatgcgtct

SEQ ID NO: 15998 - DNA, 15 bp, Homo sapiens
taatacaaatgcgtc

SEQ ID NO: 15999 - DNA, 15 bp, Homo sapiens
ctaatacaaatgcgt

SEQ ID NO: 16000 - DNA, 15 bp, Homo sapiens
tctaatacaaatgcg

SEQ ID NO: 16001 - DNA, 15 bp, Homo sapiens
ttctaatacaaatgc

SEQ ID NO: 16002 - DNA, 15 bp, Homo sapiens
gttctaatacaaatg

SEQ ID NO: 16003 - DNA, 15 bp, Homo sapiens
agttctaatacaaat

SEQ ID NO: 16004 - DNA, 15 bp, Homo sapiens
aagttctaatacaaa

SEQ ID NO: 16005 - DNA, 15 bp, Homo sapiens
aaagttctaatacaa

SEQ ID NO: 16006 - DNA, 15 bp, Homo sapiens
caaagttctaataca

SEQ ID NO: 16007 - DNA, 15 bp, Homo sapiens
acaaagttctaatac

SEQ ID NO: 16008 - DNA, 15 bp, Homo sapiens
aacaaagttctaata

SEQ ID NO: 16009 - DNA, 15 bp, Homo sapiens
aaacaaagttctaat

SEQ ID NO: 16010 - DNA, 15 bp, Homo sapiens
aaaacaaagttctaa

SEQ ID NO: 16011 - DNA, 15 bp, Homo sapiens
gaaaacaaagttcta

SEQ ID NO: 16012 - DNA, 15 bp, Homo sapiens
agaaaacaaagttct

SEQ ID NO: 16013 - DNA, 15 bp, Homo sapiens
cagaaaacaaagttc

SEQ ID NO: 16014 - DNA, 15 bp, Homo sapiens
tcagaaaacaaagtt

SEQ ID NO: 16015 - DNA, 15 bp, Homo sapiens
ctcagaaaacaaagt

SEQ ID NO: 16016 - DNA, 15 bp, Homo sapiens
actcagaaaacaaag

SEQ ID NO: 16017 - DNA, 15 bp, Homo sapiens
tactcagaaaacaaa

SEQ ID NO: 16018 - DNA, 15 bp, Homo sapiens
gtactcagaaaacaa

SEQ ID NO: 16019 - DNA, 15 bp, Homo sapiens
ggtactcagaaaaca

SEQ ID NO: 16020 - DNA, 15 bp, Homo sapiens
aggtactcagaaaac

SEQ ID NO: 16021 - DNA, 15 bp, Homo sapiens
aaggtactcagaaaa

SEQ ID NO: 16022 - DNA, 15 bp, Homo sapiens
taaggtactcagaaa

SEQ ID NO: 16023 - DNA, 15 bp, Homo sapiens
gtaaggtactcagaa

SEQ ID NO: 16024 - DNA, 15 bp, Homo sapiens
ggtaaggtactcaga

SEQ ID NO: 16025 - DNA, 15 bp, Homo sapiens
aggtaaggtactcag

SEQ ID NO: 16026 - DNA, 15 bp, Homo sapiens
taggtaaggtactca

SEQ ID NO: 16027 - DNA, 15 bp, Homo sapiens
ataggtaaggtactc

SEQ ID NO: 16028 - DNA, 15 bp, Homo sapiens
tataggtaaggtact

SEQ ID NO: 16029 - DNA, 15 bp, Homo sapiens
ctataggtaaggtac

SEQ ID NO: 16030 - DNA, 15 bp, Homo sapiens
actataggtaaggta

SEQ ID NO: 16031 - DNA, 15 bp, Homo sapiens
tactataggtaaggt

SEQ ID NO: 16032 - DNA, 15 bp, Homo sapiens
ctactataggtaagg

SEQ ID NO: 16033 - DNA, 15 bp, Homo sapiens
cctactataggtaag

SEQ ID NO: 16034 - DNA, 15 bp, Homo sapiens
acctactataggtaa

SEQ ID NO: 16035 - DNA, 15 bp, Homo sapiens
aacctactataggta

SEQ ID NO: 16036 - DNA, 15 bp, Homo sapiens
aaacctactataggt

SEQ ID NO: 16037 - DNA, 15 bp, Homo sapiens
gaaacctactatagg

SEQ ID NO: 16038 - DNA, 15 bp, Homo sapiens
tgaaacctactatag

SEQ ID NO: 16039 - DNA, 15 bp, Homo sapiens
ttgaaacctactata

SEQ ID NO: 16040 - DNA, 15 bp, Homo sapiens
tttgaaacctactat

SEQ ID NO: 16041 - DNA, 15 bp, Homo sapiens
atttgaaacctacta

SEQ ID NO: 16042 - DNA, 15 bp, Homo sapiens
tatttgaaacctact

SEQ ID NO: 16043 - DNA, 15 bp, Homo sapiens
atatttgaaacctac

SEQ ID NO: 16044 - DNA, 15 bp, Homo sapiens
aatatttgaaaccta

SEQ ID NO: 16045 - DNA, 15 bp, Homo sapiens
caatatttgaaacct

SEQ ID NO: 16046 - DNA, 15 bp, Homo sapiens
ccaatatttgaaacc

SEQ ID NO: 16047 - DNA, 15 bp, Homo sapiens
accaatatttgaaac

SEQ ID NO: 16048 - DNA, 15 bp, Homo sapiens
caccaatatttgaaa

SEQ ID NO: 16049 - DNA, 15 bp, Homo sapiens
tcaccaatatttgaa

SEQ ID NO: 16050 - DNA, 15 bp, Homo sapiens
ttcaccaatatttga

SEQ ID NO: 16051 - DNA, 15 bp, Homo sapiens
attcaccaatatttg

SEQ ID NO: 16052 - DNA, 15 bp, Homo sapiens
aattcaccaatattt

SEQ ID NO: 16053 - DNA, 15 bp, Homo sapiens
taattcaccaatatt

SEQ ID NO: 16054 - DNA, 15 bp, Homo sapiens
ctaattcaccaatat

SEQ ID NO: 16055 - DNA, 15 bp, Homo sapiens
actaattcaccaata

SEQ ID NO: 16056 - DNA, 15 bp, Homo sapiens
aactaattcaccaat

SEQ ID NO: 16057 - DNA, 15 bp, Homo sapiens
caactaattcaccaa

SEQ ID NO: 16058 - DNA, 15 bp, Homo sapiens
tcaactaattcacca

SEQ ID NO: 16059 - DNA, 15 bp, Homo sapiens
atcaactaattcacc

SEQ ID NO: 16060 - DNA, 15 bp, Homo sapiens
catcaactaattcac

SEQ ID NO: 16061 - DNA, 15 bp, Homo sapiens
ccatcaactaattca

SEQ ID NO: 16062 - DNA, 15 bp, Homo sapiens
accatcaactaattc

SEQ ID NO: 16063 - DNA, 15 bp, Homo sapiens
aaccatcaactaatt

SEQ ID NO: 16064 - DNA, 15 bp, Homo sapiens
taaccatcaactaat

SEQ ID NO: 16065 - DNA, 15 bp, Homo sapiens
ctaaccatcaactaa

SEQ ID NO: 16066 - DNA, 15 bp, Homo sapiens
cctaaccatcaacta

SEQ ID NO: 16067 - DNA, 15 bp, Homo sapiens
acctaaccatcaact

SEQ ID NO: 16068 - DNA, 15 bp, Homo sapiens
gacctaaccatcaac

SEQ ID NO: 16069 - DNA, 15 bp, Homo sapiens
agacctaaccatcaa

SEQ ID NO: 16070 - DNA, 15 bp, Homo sapiens
cagacctaaccatca

SEQ ID NO: 16071 - DNA, 15 bp, Homo sapiens
gcagacctaaccatc

SEQ ID NO: 16072 - DNA, 15 bp, Homo sapiens
tgcagacctaaccat

SEQ ID NO: 16073 - DNA, 15 bp, Homo sapiens
atgcagacctaacca

SEQ ID NO: 16074 - DNA, 15 bp, Homo sapiens
tatgcagacctaacc

SEQ ID NO: 16075 - DNA, 15 bp, Homo sapiens
ttatgcagacctaac

SEQ ID NO: 16076 - DNA, 15 bp, Homo sapiens
attatgcagacctaa

SEQ ID NO: 16077 - DNA, 15 bp, Homo sapiens
aattatgcagaccta

SEQ ID NO: 16078 - DNA, 15 bp, Homo sapiens
taattatgcagacct

SEQ ID NO: 16079 - DNA, 15 bp, Homo sapiens
gtaattatgcagacc

SEQ ID NO: 16080 - DNA, 15 bp, Homo sapiens
agtaattatgcagac

SEQ ID NO: 16081 - DNA, 15 bp, Homo sapiens
cagtaattatgcaga

SEQ ID NO: 16082 - DNA, 15 bp, Homo sapiens
gcagtaattatgcag

SEQ ID NO: 16083 - DNA, 15 bp, Homo sapiens
cgcagtaattatgca

SEQ ID NO: 16084 - DNA, 15 bp, Homo sapiens
acgcagtaattatgc

SEQ ID NO: 16085 - DNA, 15 bp, Homo sapiens
tacgcagtaattatg

SEQ ID NO: 16086 - DNA, 15 bp, Homo sapiens
atacgcagtaattat

SEQ ID NO: 16087 - DNA, 15 bp, Homo sapiens
catacgcagtaatta

SEQ ID NO: 16088 - DNA, 15 bp, Homo sapiens
ccatacgcagtaatt

SEQ ID NO: 16089 - DNA, 15 bp, Homo sapiens
tccatacgcagtaat

SEQ ID NO: 16090 - DNA, 15 bp, Homo sapiens
ttccatacgcagtaa

SEQ ID NO: 16091 - DNA, 15 bp, Homo sapiens
tttccatacgcagta

SEQ ID NO: 16092 - DNA, 15 bp, Homo sapiens
atttccatacgcagt

SEQ ID NO: 16093 - DNA, 15 bp, Homo sapiens
aatttccatacgcag

SEQ ID NO: 16094 - DNA, 15 bp, Homo sapiens
gaatttccatacgca

SEQ ID NO: 16095 - DNA, 15 bp, Homo sapiens
agaatttccatacgc

SEQ ID NO: 16096 - DNA, 15 bp, Homo sapiens
cagaatttccatacg

SEQ ID NO: 16097 - DNA, 15 bp, Homo sapiens
ccagaatttccatac

SEQ ID NO: 16098 - DNA, 15 bp, Homo sapiens
tccagaatttccata

SEQ ID NO: 16099 - DNA, 15 bp, Homo sapiens
ttccagaatttccat

SEQ ID NO: 16100 - DNA, 15 bp, Homo sapiens
gttccagaatttcca

SEQ ID NO: 16101 - DNA, 15 bp, Homo sapiens
ggttccagaatttcc

SEQ ID NO: 16102 - DNA, 15 bp, Homo sapiens
gggttccagaatttc

SEQ ID NO: 16103 - DNA, 15 bp, Homo sapiens
agggttccagaattt

SEQ ID NO: 16104 - DNA, 15 bp, Homo sapiens
tagggttccagaatt

SEQ ID NO: 16105 - DNA, 15 bp, Homo sapiens
atagggttccagaat

SEQ ID NO: 16106 - DNA, 15 bp, Homo sapiens
aatagggttccagaa

SEQ ID NO: 16107 - DNA, 15 bp, Homo sapiens
aaatagggttccaga

SEQ ID NO: 16108 - DNA, 15 bp, Homo sapiens
aaaatagggttccag

SEQ ID NO: 16109 - DNA, 15 bp, Homo sapiens
aaaaatagggttcca

SEQ ID NO: 16110 - DNA, 15 bp, Homo sapiens
aaaaaatagggttcc

SEQ ID NO: 16111 - DNA, 15 bp, Homo sapiens
gaaaaaatagggttc

SEQ ID NO: 16112 - DNA, 15 bp, Homo sapiens
tgaaaaaatagggtt

SEQ ID NO: 16113 - DNA, 15 bp, Homo sapiens
ttgaaaaaatagggt

SEQ ID NO: 16114 - DNA, 15 bp, Homo sapiens
tttgaaaaaataggg

SEQ ID NO: 16115 - DNA, 15 bp, Homo sapiens
ttttgaaaaaatagg

SEQ ID NO: 16116 - DNA, 15 bp, Homo sapiens
attttgaaaaaatag

SEQ ID NO: 16117 - DNA, 15 bp, Homo sapiens
cattttgaaaaaata

SEQ ID NO: 16118 - DNA, 15 bp, Homo sapiens
gcattttgaaaaaat

SEQ ID NO: 16119 - DNA, 15 bp, Homo sapiens
tgcattttgaaaaaa

SEQ ID NO: 16120 - DNA, 15 bp, Homo sapiens
ctgcattttgaaaaa

SEQ ID NO: 16121 - DNA, 15 bp, Homo sapiens
gctgcattttgaaaa

SEQ ID NO: 16122 - DNA, 15 bp, Homo sapiens
agctgcattttgaaa

SEQ ID NO: 16123 - DNA, 15 bp, Homo sapiens
tagctgcattttgaa

SEQ ID NO: 16124 - DNA, 15 bp, Homo sapiens
ttagctgcattttga

SEQ ID NO: 16125 - DNA, 15 bp, Homo sapiens
attagctgcattttg

SEQ ID NO: 16126 - DNA, 15 bp, Homo sapiens
cattagctgcatttt

SEQ ID NO: 16127 - DNA, 15 bp, Homo sapiens
acattagctgcattt

SEQ ID NO: 16128 - DNA, 15 bp, Homo sapiens
aacattagctgcatt

SEQ ID NO: 16129 - DNA, 15 bp, Homo sapiens
caacattagctgcat

SEQ ID NO: 16130 - DNA, 15 bp, Homo sapiens
tcaacattagctgca

SEQ ID NO: 16131 - DNA, 15 bp, Homo sapiens
ctcaacattagctgc

SEQ ID NO: 16132 - DNA, 15 bp, Homo sapiens
tctcaacattagctg

SEQ ID NO: 16133 - DNA, 15 bp, Homo sapiens
ctctcaacattagct

SEQ ID NO: 16134 - DNA, 15 bp, Homo sapiens
tctctcaacattagc

SEQ ID NO: 16135 - DNA, 15 bp, Homo sapiens
ttctctcaacattag

SEQ ID NO: 16136 - DNA, 15 bp, Homo sapiens
attctctcaacatta

SEQ ID NO: 16137 - DNA, 15 bp, Homo sapiens
tattctctcaacatt

SEQ ID NO: 16138 - DNA, 15 bp, Homo sapiens
atattctctcaacat

SEQ ID NO: 16139 - DNA, 15 bp, Homo sapiens
catattctctcaaca

SEQ ID NO: 16140 - DNA, 15 bp, Homo sapiens
gcatattctctcaac

SEQ ID NO: 16141 - DNA, 15 bp, Homo sapiens
tgcatattctctcaa

SEQ ID NO: 16142 - DNA, 15 bp, Homo sapiens
gtgcatattctctca

SEQ ID NO: 16143 - DNA, 15 bp, Homo sapiens
agtgcatattctctc

SEQ ID NO: 16144 - DNA, 15 bp, Homo sapiens
tagtgcatattctct

SEQ ID NO: 16145 - DNA, 15 bp, Homo sapiens
ttagtgcatattctc

SEQ ID NO: 16146 - DNA, 15 bp, Homo sapiens
tttagtgcatattct

SEQ ID NO: 16147 - DNA, 15 bp, Homo sapiens
atttagtgcatattc

SEQ ID NO: 16148 - DNA, 15 bp, Homo sapiens
tatttagtgcatatt

SEQ ID NO: 16149 - DNA, 15 bp, Homo sapiens
atatttagtgcatat

SEQ ID NO: 16150 - DNA, 15 bp, Homo sapiens
aatatttagtgcata

SEQ ID NO: 16151 - DNA, 15 bp, Homo sapiens
taatatttagtgcat

SEQ ID NO: 16152 - DNA, 15 bp, Homo sapiens
gtaatatttagtgca

SEQ ID NO: 16153 - DNA, 15 bp, Homo sapiens
agtaatatttagtgc

SEQ ID NO: 16154 - DNA, 15 bp, Homo sapiens
tagtaatatttagtg

SEQ ID NO: 16155 - DNA, 15 bp, Homo sapiens
ctagtaatatttagt

SEQ ID NO: 16156 - DNA, 15 bp, Homo sapiens
tctagtaatatttag

SEQ ID NO: 16157 - DNA, 15 bp, Homo sapiens
atctagtaatattta

SEQ ID NO: 16158 - DNA, 15 bp, Homo sapiens
gatctagtaatattt

SEQ ID NO: 16159 - DNA, 15 bp, Homo sapiens
agatctagtaatatt

SEQ ID NO: 16160 - DNA, 15 bp, Homo sapiens
aagatctagtaatat

SEQ ID NO: 16161 - DNA, 15 bp, Homo sapiens
aaagatctagtaata

SEQ ID NO: 16162 - DNA, 15 bp, Homo sapiens
caaagatctagtaat

SEQ ID NO: 16163 - DNA, 15 bp, Homo sapiens
aaacaaagatctagt

SEQ ID NO: 16164 - DNA, 15 bp, Homo sapiens
aaaacaaagatctag

SEQ ID NO: 16165 - DNA, 15 bp, Homo sapiens
aaaaacaaagatcta

SEQ ID NO: 16166 - DNA, 15 bp, Homo sapiens
gaaaaacaaagatct

SEQ ID NO: 16167 - DNA, 15 bp, Homo sapiens
tgaaaaacaaagatc

SEQ ID NO: 16168 - DNA, 15 bp, Homo sapiens
ttgaaaaacaaagat

SEQ ID NO: 16169 - DNA, 15 bp, Homo sapiens
cttgaaaaacaaaga

SEQ ID NO: 16170 - DNA, 15 bp, Homo sapiens
tcttgaaaaacaaag

SEQ ID NO: 16171 - DNA, 15 bp, Homo sapiens
atcttgaaaaacaaa

SEQ ID NO: 16172 - DNA, 15 bp, Homo sapiens
catcttgaaaaacaa

SEQ ID NO: 16173 - DNA, 15 bp, Homo sapiens
gcatcttgaaaaaca

SEQ ID NO: 16174 - DNA, 15 bp, Homo sapiens
agcatcttgaaaaac

SEQ ID NO: 16175 - DNA, 15 bp, Homo sapiens
cagcatcttgaaaaa

SEQ ID NO: 16176 - DNA, 15 bp, Homo sapiens
tcagcatcttgaaaa

SEQ ID NO: 16177 - DNA, 15 bp, Homo sapiens
atcagcatcttgaaa

SEQ ID NO: 16178 - DNA, 15 bp, Homo sapiens
tatcagcatcttgaa

SEQ ID NO: 16179 - DNA, 15 bp, Homo sapiens
atatcagcatcttga

SEQ ID NO: 16180 - DNA, 15 bp, Homo sapiens
gatatcagcatcttg

SEQ ID NO: 16181 - DNA, 15 bp, Homo sapiens
ggatatcagcatctt

SEQ ID NO: 16182 - DNA, 15 bp, Homo sapiens
gggatatcagcatct

SEQ ID NO: 16183 - DNA, 15 bp, Homo sapiens
agggatatcagcatc

SEQ ID NO: 16184 - DNA, 15 bp, Homo sapiens
aagggatatcagcat

SEQ ID NO: 16185 - DNA, 15 bp, Homo sapiens
taagggatatcagca

SEQ ID NO: 16186 - DNA, 15 bp, Homo sapiens
ttaagggatatcagc

SEQ ID NO: 16187 - DNA, 15 bp, Homo sapiens
gttaagggatatcag

SEQ ID NO: 16188 - DNA, 15 bp, Homo sapiens
tgttaagggatatca

SEQ ID NO: 16189 - DNA, 15 bp, Homo sapiens
atgttaagggatatc

SEQ ID NO: 16190 - DNA, 15 bp, Homo sapiens
gatgttaagggatat

SEQ ID NO: 16191 - DNA, 15 bp, Homo sapiens
agatgttaagggata

SEQ ID NO: 16192 - DNA, 15 bp, Homo sapiens
aagatgttaagggat

SEQ ID NO: 16193 - DNA, 15 bp, Homo sapiens
gaagatgttaaggga

SEQ ID NO: 16194 - DNA, 15 bp, Homo sapiens
agaagatgttaaggg

SEQ ID NO: 16195 - DNA, 15 bp, Homo sapiens
cagaagatgttaagg

SEQ ID NO: 16196 - DNA, 15 bp, Homo sapiens
gcagaagatgttaag

SEQ ID NO: 16197 - DNA, 15 bp, Homo sapiens
tgcagaagatgttaa

SEQ ID NO: 16198 - DNA, 15 bp, Homo sapiens
gtgcagaagatgtta

SEQ ID NO: 16199 - DNA, 15 bp, Homo sapiens
agtgcagaagatgtt

SEQ ID NO: 16200 - DNA, 15 bp, Homo sapiens
aagtgcagaagatgt

SEQ ID NO: 16201 - DNA, 15 bp, Homo sapiens
aaagtgcagaagatg

SEQ ID NO: 16202 - DNA, 15 bp, Homo sapiens
taaagtgcagaagat

SEQ ID NO: 16203 - DNA, 15 bp, Homo sapiens
gtaaagtgcagaaga

SEQ ID NO: 16204 - DNA, 15 bp, Homo sapiens
ggtaaagtgcagaag

SEQ ID NO: 16205 - DNA, 15 bp, Homo sapiens
aggtaaagtgcagaa

SEQ ID NO: 16206 - DNA, 15 bp, Homo sapiens
caggtaaagtgcaga

SEQ ID NO: 16207 - DNA, 15 bp, Homo sapiens
acaggtaaagtgcag

SEQ ID NO: 16208 - DNA, 15 bp, Homo sapiens
aacaggtaaagtgca

SEQ ID NO: 16209 - DNA, 15 bp, Homo sapiens
aaacaggtaaagtgc

SEQ ID NO: 16210 - DNA, 15 bp, Homo sapiens
caaacaggtaaagtg

SEQ ID NO: 16211 - DNA, 15 bp, Homo sapiens
tcaaacaggtaaagt

SEQ ID NO: 16212 - DNA, 15 bp, Homo sapiens
ttcaaacaggtaaag

SEQ ID NO: 16213 - DNA, 15 bp, Homo sapiens
attcaaacaggtaaa

SEQ ID NO: 16214 - DNA, 15 bp, Homo sapiens
tattcaaacaggtaa

SEQ ID NO: 16215 - DNA, 15 bp, Homo sapiens
atattcaaacaggta

SEQ ID NO: 16216 - DNA, 15 bp, Homo sapiens
gatattcaaacaggt

SEQ ID NO: 16217 - DNA, 15 bp, Homo sapiens
agatattcaaacagg

SEQ ID NO: 16218 - DNA, 15 bp, Homo sapiens
aagatattcaaacag

SEQ ID NO: 16219 - DNA, 15 bp, Homo sapiens
aaagatattcaaaca

SEQ ID NO: 16220 - DNA, 15 bp, Homo sapiens
aaaagatattcaaac

SEQ ID NO: 16221 - DNA, 15 bp, Homo sapiens
aaaaagatattcaaa

SEQ ID NO: 16222 - DNA, 15 bp, Homo sapiens
aaaaaagatattcaa

SEQ ID NO: 16223 - DNA, 15 bp, Homo sapiens
caaaaaagatattca

SEQ ID NO: 16224 - DNA, 15 bp, Homo sapiens
gcaaaaaagatattc

SEQ ID NO: 16225 - DNA, 15 bp, Homo sapiens
agcaaaaaagatatt

SEQ ID NO: 16226 - DNA, 15 bp, Homo sapiens
cagcaaaaaagatat

SEQ ID NO: 16227 - DNA, 15 bp, Homo sapiens
acagcaaaaaagata

SEQ ID NO: 16228 - DNA, 15 bp, Homo sapiens
tacagcaaaaaagat

SEQ ID NO: 16229 - DNA, 15 bp, Homo sapiens
ttacagcaaaaaaga

SEQ ID NO: 16230 - DNA, 15 bp, Homo sapiens
tttacagcaaaaaag

SEQ ID NO: 16231 - DNA, 15 bp, Homo sapiens
ttttacagcaaaaaa

SEQ ID NO: 16232 - DNA, 15 bp, Homo sapiens
tttttacagcaaaaa

SEQ ID NO: 16233 - DNA, 15 bp, Homo sapiens
atttttacagcaaaa

SEQ ID NO: 16234 - DNA, 15 bp, Homo sapiens
aatttttacagcaaa

SEQ ID NO: 16235 - DNA, 15 bp, Homo sapiens
taatttttacagcaa

SEQ ID NO: 16236 - DNA, 15 bp, Homo sapiens
ctaatttttacagca

SEQ ID NO: 16237 - DNA, 15 bp, Homo sapiens
actaatttttacagc

SEQ ID NO: 16238 - DNA, 15 bp, Homo sapiens
cactaatttttacag

SEQ ID NO: 16239 - DNA, 15 bp, Homo sapiens
ccactaatttttaca

SEQ ID NO: 16240 - DNA, 15 bp, Homo sapiens
gccactaatttttac

SEQ ID NO: 16241 - DNA, 15 bp, Homo sapiens
ggccactaattttta

SEQ ID NO: 16242 - DNA, 15 bp, Homo sapiens
aggccactaattttt

SEQ ID NO: 16243 - DNA, 15 bp, Homo sapiens
aaggccactaatttt

SEQ ID NO: 16244 - DNA, 15 bp, Homo sapiens
taaggccactaattt

SEQ ID NO: 16245 - DNA, 15 bp, Homo sapiens
ataaggccactaatt

SEQ ID NO: 16246 - DNA, 15 bp, Homo sapiens
cataaggccactaat

SEQ ID NO: 16247 - DNA, 15 bp, Homo sapiens
acataaggccactaa

SEQ ID NO: 16248 - DNA, 15 bp, Homo sapiens
gacataaggccacta

SEQ ID NO: 16249 - DNA, 15 bp, Homo sapiens
agacataaggccact

SEQ ID NO: 16250 - DNA, 15 bp, Homo sapiens
aagacataaggccac

SEQ ID NO: 16251 - DNA, 15 bp, Homo sapiens
aaagacataaggcca

SEQ ID NO: 16252 - DNA, 15 bp, Homo sapiens
gaaagacataaggcc

SEQ ID NO: 16253 - DNA, 15 bp, Homo sapiens
agaaagacataaggc

SEQ ID NO: 16254 - DNA, 15 bp, Homo sapiens
cagaaagacataagg

SEQ ID NO: 16255 - DNA, 15 bp, Homo sapiens
gcagaaagacataag

SEQ ID NO: 16256 - DNA, 15 bp, Homo sapiens
tgcagaaagacataa

SEQ ID NO: 16257 - DNA, 15 bp, Homo sapiens
atgcagaaagacata

SEQ ID NO: 16258 - DNA, 15 bp, Homo sapiens
tatgcagaaagacat

SEQ ID NO: 16259 - DNA, 15 bp, Homo sapiens
ttatgcagaaagaca

SEQ ID NO: 16260 - DNA, 15 bp, Homo sapiens
attatgcagaaagac

SEQ ID NO: 16261 - DNA, 15 bp, Homo sapiens
aattatgcagaaaga

SEQ ID NO: 16262 - DNA, 15 bp, Homo sapiens
taattatgcagaaag

SEQ ID NO: 16263 - DNA, 15 bp, Homo sapiens
ataattatgcagaaa

SEQ ID NO: 16264 - DNA, 15 bp, Homo sapiens
tataattatgcagaa

SEQ ID NO: 16265 - DNA, 15 bp, Homo sapiens
ctataattatgcaga

SEQ ID NO: 16266 - DNA, 15 bp, Homo sapiens
tctataattatgcag

SEQ ID NO: 16267 - DNA, 15 bp, Homo sapiens
ctctataattatgca

SEQ ID NO: 16268 - DNA, 15 bp, Homo sapiens
actctataattatgc

SEQ ID NO: 16269 - DNA, 15 bp, Homo sapiens
tactctataattatg

SEQ ID NO: 16270 - DNA, 15 bp, Homo sapiens
ctactctataattat

SEQ ID NO: 16271 - DNA, 15 bp, Homo sapiens
gctactctataatta

SEQ ID NO: 16272 - DNA, 15 bp, Homo sapiens
ggctactctataatt

SEQ ID NO: 16273 - DNA, 15 bp, Homo sapiens
tggctactctataat

SEQ ID NO: 16274 - DNA, 15 bp, Homo sapiens
ttggctactctataa

SEQ ID NO: 16275 - DNA, 15 bp, Homo sapiens
tttggctactctata

SEQ ID NO: 16276 - DNA, 15 bp, Homo sapiens
ttttggctactctat

SEQ ID NO: 16277 - DNA, 15 bp, Homo sapiens
gttttggctactcta

SEQ ID NO: 16278 - DNA, 15 bp, Homo sapiens
ggttttggctactct

SEQ ID NO: 16279 - DNA, 15 bp, Homo sapiens
aggttttggctactc

SEQ ID NO: 16280 - DNA, 15 bp, Homo sapiens
caggttttggctact

SEQ ID NO: 16281 - DNA, 15 bp, Homo sapiens
acaggttttggctac

SEQ ID NO: 16282 - DNA, 15 bp, Homo sapiens
aacaggttttggcta

SEQ ID NO: 16283 - DNA, 15 bp, Homo sapiens
aaacaggttttggct

SEQ ID NO: 16284 - DNA, 15 bp, Homo sapiens
aaaacaggttttggc

SEQ ID NO: 16285 - DNA, 15 bp, Homo sapiens
taaaacaggttttgg

SEQ ID NO: 16286 - DNA, 15 bp, Homo sapiens
ctaaaacaggttttg

SEQ ID NO: 16287 - DNA, 15 bp, Homo sapiens
cctaaaacaggtttt

SEQ ID NO: 16288 - DNA, 15 bp, Homo sapiens
acctaaaacaggttt

SEQ ID NO: 16289 - DNA, 15 bp, Homo sapiens
aacctaaaacaggtt

SEQ ID NO: 16290 - DNA, 15 bp, Homo sapiens
taacctaaaacaggt

SEQ ID NO: 16291 - DNA, 15 bp, Homo sapiens
ttaacctaaaacagg

SEQ ID NO: 16292 - DNA, 15 bp, Homo sapiens
attaacctaaaacag

SEQ ID NO: 16293 - DNA, 15 bp, Homo sapiens
gattaacctaaaaca

SEQ ID NO: 16294 - DNA, 15 bp, Homo sapiens
tgattaacctaaaac

SEQ ID NO: 16295 - DNA, 15 bp, Homo sapiens
gtgattaacctaaaa

SEQ ID NO: 16296 - DNA, 15 bp, Homo sapiens
ggtgattaacctaaa

SEQ ID NO: 16297 - DNA, 15 bp, Homo sapiens
aggtgattaacctaa

SEQ ID NO: 16298 - DNA, 15 bp, Homo sapiens
gaggtgattaaccta

SEQ ID NO: 16299 - DNA, 15 bp, Homo sapiens
agaggtgattaacct

SEQ ID NO: 16300 - DNA, 15 bp, Homo sapiens
cagaggtgattaacc

SEQ ID NO: 16301 - DNA, 15 bp, Homo sapiens
ccagaggtgattaac

SEQ ID NO: 16302 - DNA, 15 bp, Homo sapiens
gccagaggtgattaa

SEQ ID NO: 16303 - DNA, 15 bp, Homo sapiens
tgccagaggtgatta

SEQ ID NO: 16304 - DNA, 15 bp, Homo sapiens
ttgccagaggtgatt

SEQ ID NO: 16305 - DNA, 15 bp, Homo sapiens
tttgccagaggtgat

SEQ ID NO: 16306 - DNA, 15 bp, Homo sapiens
ttttgccagaggtga

SEQ ID NO: 16307 - DNA, 15 bp, Homo sapiens
attttgccagaggtg

SEQ ID NO: 16308 - DNA, 15 bp, Homo sapiens
tattttgccagaggt

SEQ ID NO: 16309 - DNA, 15 bp, Homo sapiens
ttattttgccagagg

SEQ ID NO: 16310 - DNA, 15 bp, Homo sapiens
tttattttgccagag

SEQ ID NO: 16311 - DNA, 15 bp, Homo sapiens
atttattttgccaga

SEQ ID NO: 16312 - DNA, 15 bp, Homo sapiens
catttattttgccag

SEQ ID NO: 16313 - DNA, 15 bp, Homo sapiens
tcatttattttgcca

SEQ ID NO: 16314 - DNA, 15 bp, Homo sapiens
atcatttattttgcc

SEQ ID NO: 16315 - DNA, 15 bp, Homo sapiens
tatcatttattttgc

SEQ ID NO: 16316 - DNA, 15 bp, Homo sapiens
ttatcatttattttg

SEQ ID NO: 16317 - DNA, 15 bp, Homo sapiens
tttatcatttatttt

SEQ ID NO: 16318 - DNA, 15 bp, Homo sapiens
ttttatcatttattt

SEQ ID NO: 16319 - DNA, 15 bp, Homo sapiens
cttttatcatttatt

SEQ ID NO: 16320 - DNA, 15 bp, Homo sapiens
gcttttatcatttat

SEQ ID NO: 16321 - DNA, 15 bp, Homo sapiens
tgcttttatcattta

SEQ ID NO: 16322 - DNA, 15 bp, Homo sapiens
atgcttttatcattt

SEQ ID NO: 16323 - DNA, 15 bp, Homo sapiens
tatgcttttatcatt

SEQ ID NO: 16324 - DNA, 15 bp, Homo sapiens
ctatgcttttatcat

SEQ ID NO: 16325 - DNA, 15 bp, Homo sapiens
gctatgcttttatca

SEQ ID NO: 16326 - DNA, 15 bp, Homo sapiens
agctatgcttttatc

SEQ ID NO: 16327 - DNA, 15 bp, Homo sapiens
aagctatgcttttat

SEQ ID NO: 16328 - DNA, 15 bp, Homo sapiens
aaagctatgctttta

SEQ ID NO: 16329 - DNA, 15 bp, Homo sapiens
aaaagctatgctttt

SEQ ID NO: 16330 - DNA, 15 bp, Homo sapiens
caaaagctatgcttt

SEQ ID NO: 16331 - DNA, 15 bp, Homo sapiens
acaaaagctatgctt

SEQ ID NO: 16332 - DNA, 15 bp, Homo sapiens
tacaaaagctatgct

SEQ ID NO: 16333 - DNA, 15 bp, Homo sapiens
ttacaaaagctatgc

SEQ ID NO: 16334 - DNA, 15 bp, Homo sapiens
cttacaaaagctatg

SEQ ID NO: 16335 - DNA, 15 bp, Homo sapiens
gcttacaaaagctat

SEQ ID NO: 16336 - DNA, 15 bp, Homo sapiens
tgcttacaaaagcta

SEQ ID NO: 16337 - DNA, 15 bp, Homo sapiens
ctgcttacaaaagct

SEQ ID NO: 16338 - DNA, 15 bp, Homo sapiens
tctgcttacaaaagc

SEQ ID NO: 16339 - DNA, 15 bp, Homo sapiens
ttctgcttacaaaag

SEQ ID NO: 16340 - DNA, 15 bp, Homo sapiens
attctgcttacaaaa

SEQ ID NO: 16341 - DNA, 15 bp, Homo sapiens
cattctgcttacaaa

SEQ ID NO: 16342 - DNA, 15 bp, Homo sapiens
tcattctgcttacaa

SEQ ID NO: 16343 - DNA, 15 bp, Homo sapiens
atcattctgcttaca

SEQ ID NO: 16344 - DNA, 15 bp, Homo sapiens
tatcattctgcttac

SEQ ID NO: 16345 - DNA, 15 bp, Homo sapiens
atatcattctgctta

SEQ ID NO: 16346 - DNA, 15 bp, Homo sapiens
aatatcattctgctt

SEQ ID NO: 16347 - DNA, 15 bp, Homo sapiens
taatatcattctgct

SEQ ID NO: 16348 - DNA, 15 bp, Homo sapiens
gtaatatcattctgc

SEQ ID NO: 16349 - DNA, 15 bp, Homo sapiens
tgtaatatcattctg

SEQ ID NO: 16350 - DNA, 15 bp, Homo sapiens
ctgtaatatcattct

SEQ ID NO: 16351 - DNA, 15 bp, Homo sapiens
tctgtaatatcattc

SEQ ID NO: 16352 - DNA, 15 bp, Homo sapiens
ttctgtaatatcatt

SEQ ID NO: 16353 - DNA, 15 bp, Homo sapiens
cttctgtaatatcat

SEQ ID NO: 16354 - DNA, 15 bp, Homo sapiens
acttctgtaatatca

SEQ ID NO: 16355 - DNA, 15 bp, Homo sapiens
aacttctgtaatatc

SEQ ID NO: 16356 - DNA, 15 bp, Homo sapiens
taacttctgtaatat

SEQ ID NO: 16357 - DNA, 15 bp, Homo sapiens
ttaacttctgtaata

SEQ ID NO: 16358 - DNA, 15 bp, Homo sapiens
gttaacttctgtaat

SEQ ID NO: 16359 - DNA, 15 bp, Homo sapiens
agttaacttctgtaa

SEQ ID NO: 16360 - DNA, 15 bp, Homo sapiens
aagttaacttctgta

SEQ ID NO: 16361 - DNA, 15 bp, Homo sapiens
taagttaacttctgt

SEQ ID NO: 16362 - DNA, 15 bp, Homo sapiens
ataagttaacttctg

SEQ ID NO: 16363 - DNA, 15 bp, Homo sapiens
tataagttaacttct

SEQ ID NO: 16364 - DNA, 15 bp, Homo sapiens
ttataagttaacttc

SEQ ID NO: 16365 - DNA, 15 bp, Homo sapiens
tttataagttaactt

SEQ ID NO: 16366 - DNA, 15 bp, Homo sapiens
atttataagttaact

SEQ ID NO: 16367 - DNA, 15 bp, Homo sapiens
gatttataagttaac

SEQ ID NO: 16368 - DNA, 15 bp, Homo sapiens
agatttataagttaa

SEQ ID NO: 16369 - DNA, 15 bp, Homo sapiens
tagatttataagtta

SEQ ID NO: 16370 - DNA, 15 bp, Homo sapiens
ttagatttataagtt

SEQ ID NO: 16371 - DNA, 15 bp, Homo sapiens
cttagatttataagt

SEQ ID NO: 16372 - DNA, 15 bp, Homo sapiens
acttagatttataag

SEQ ID NO: 16373 - DNA, 15 bp, Homo sapiens
cacttagatttataa

SEQ ID NO: 16374 - DNA, 15 bp, Homo sapiens
acacttagatttata

SEQ ID NO: 16375 - DNA, 15 bp, Homo sapiens
tacacttagatttat

SEQ ID NO: 16376 - DNA, 15 bp, Homo sapiens
atacacttagattta

SEQ ID NO: 16377 - DNA, 15 bp, Homo sapiens
aatacacttagattt

SEQ ID NO: 16378 - DNA, 15 bp, Homo sapiens
taatacacttagatt

SEQ ID NO: 16379 - DNA, 15 bp, Homo sapiens
ttaatacacttagat

SEQ ID NO: 16380 - DNA, 15 bp, Homo sapiens
tttaatacacttaga

SEQ ID NO: 16381 - DNA, 15 bp, Homo sapiens
ctttaatacacttag

SEQ ID NO: 16382 - DNA, 15 bp, Homo sapiens
tctttaatacactta

SEQ ID NO: 16383 - DNA, 15 bp, Homo sapiens
gtctttaatacactt

SEQ ID NO: 16384 - DNA, 15 bp, Homo sapiens
tgtctttaatacact

SEQ ID NO: 16385 - DNA, 15 bp, Homo sapiens
gtgtctttaatacac

SEQ ID NO: 16386 - DNA, 15 bp, Homo sapiens
agtgtctttaataca

SEQ ID NO: 16387 - DNA, 15 bp, Homo sapiens
aagtgtctttaatac

SEQ ID NO: 16388 - DNA, 15 bp, Homo sapiens
taagtgtctttaata

SEQ ID NO: 16389 - DNA, 15 bp, Homo sapiens
ctaagtgtctttaat

SEQ ID NO: 16390 - DNA, 15 bp, Homo sapiens
cctaagtgtctttaa

SEQ ID NO: 16391 - DNA, 15 bp, Homo sapiens
tcctaagtgtcttta

SEQ ID NO: 16392 - DNA, 15 bp, Homo sapiens
ttcctaagtgtcttt

SEQ ID NO: 16393 - DNA, 15 bp, Homo sapiens
tttcctaagtgtctt

SEQ ID NO: 16394 - DNA, 15 bp, Homo sapiens
atttcctaagtgtct

SEQ ID NO: 16395 - DNA, 15 bp, Homo sapiens
aatttcctaagtgtc

SEQ ID NO: 16396 - DNA, 15 bp, Homo sapiens
aaatttcctaagtgt

SEQ ID NO: 16397 - DNA, 15 bp, Homo sapiens
taaatttcctaagtg

SEQ ID NO: 16398 - DNA, 15 bp, Homo sapiens
ataaatttcctaagt

SEQ ID NO: 16399 - DNA, 15 bp, Homo sapiens
cataaatttcctaag

SEQ ID NO: 16400 - DNA, 15 bp, Homo sapiens
tcataaatttcctaa

SEQ ID NO: 16401 - DNA, 15 bp, Homo sapiens
atcataaatttccta

SEQ ID NO: 16402 - DNA, 15 bp, Homo sapiens
tatcataaatttcct

SEQ ID NO: 16403 - DNA, 15 bp, Homo sapiens
ttatcataaatttcc

SEQ ID NO: 16404 - DNA, 15 bp, Homo sapiens
attatcataaatttc

SEQ ID NO: 16405 - DNA, 15 bp, Homo sapiens
cattatcataaattt

SEQ ID NO: 16406 - DNA, 15 bp, Homo sapiens
gcattatcataaatt

SEQ ID NO: 16407 - DNA, 15 bp, Homo sapiens
agcattatcataaat

SEQ ID NO: 16408 - DNA, 15 bp, Homo sapiens
cagcattatcataaa

SEQ ID NO: 16409 - DNA, 15 bp, Homo sapiens
ccagcattatcataa

SEQ ID NO: 16410 - DNA, 15 bp, Homo sapiens
cccagcattatcata

SEQ ID NO: 16411 - DNA, 15 bp, Homo sapiens
acccagcattatcat

SEQ ID NO: 16412 - DNA, 15 bp, Homo sapiens
gacccagcattatca

SEQ ID NO: 16413 - DNA, 15 bp, Homo sapiens
tgacccagcattatc

SEQ ID NO: 16414 - DNA, 15 bp, Homo sapiens
ctgacccagcattat

SEQ ID NO: 16415 - DNA, 15 bp, Homo sapiens
gctgacccagcatta

SEQ ID NO: 16416 - DNA, 15 bp, Homo sapiens
tgctgacccagcatt

SEQ ID NO: 16417 - DNA, 15 bp, Homo sapiens
atgctgacccagcat

SEQ ID NO: 16418 - DNA, 15 bp, Homo sapiens
aatgctgacccagca

SEQ ID NO: 16419 - DNA, 15 bp, Homo sapiens
taatgctgacccagc

SEQ ID NO: 16420 - DNA, 15 bp, Homo sapiens
gtaatgctgacccag

SEQ ID NO: 16421 - DNA, 15 bp, Homo sapiens
tgtaatgctgaccca

SEQ ID NO: 16422 - DNA, 15 bp, Homo sapiens
ctgtaatgctgaccc

SEQ ID NO: 16423 - DNA, 15 bp, Homo sapiens
actgtaatgctgacc

SEQ ID NO: 16424 - DNA, 15 bp, Homo sapiens
aactgtaatgctgac

SEQ ID NO: 16425 - DNA, 15 bp, Homo sapiens
aaactgtaatgctga

SEQ ID NO: 16426 - DNA, 15 bp, Homo sapiens
aaaactgtaatgctg

SEQ ID NO: 16427 - DNA, 15 bp, Homo sapiens
taaaactgtaatgct

SEQ ID NO: 16428 - DNA, 15 bp, Homo sapiens
ttaaaactgtaatgc

SEQ ID NO: 16429 - DNA, 15 bp, Homo sapiens
gttaaaactgtaatg

SEQ ID NO: 16430 - DNA, 15 bp, Homo sapiens
agttaaaactgtaat

SEQ ID NO: 16431 - DNA, 15 bp, Homo sapiens
aagttaaaactgtaa

SEQ ID NO: 16432 - DNA, 15 bp, Homo sapiens
aaagttaaaactgta

SEQ ID NO: 16433 - DNA, 15 bp, Homo sapiens
aaaagttaaaactgt

SEQ ID NO: 16434 - DNA, 15 bp, Homo sapiens
aaaaagttaaaactg

SEQ ID NO: 16435 - DNA, 15 bp, Homo sapiens
taaaaagttaaaact

SEQ ID NO: 16436 - DNA, 15 bp, Homo sapiens
gtaaaaagttaaaac

SEQ ID NO: 16437 - DNA, 15 bp, Homo sapiens
tgtaaaaagttaaaa

SEQ ID NO: 16438 - DNA, 15 bp, Homo sapiens
ctgtaaaaagttaaa

SEQ ID NO: 16439 - DNA, 15 bp, Homo sapiens
actgtaaaaagttaa

SEQ ID NO: 16440 - DNA, 15 bp, Homo sapiens
aactgtaaaaagtta

SEQ ID NO: 16441 - DNA, 15 bp, Homo sapiens
aaactgtaaaaagtt

SEQ ID NO: 16442 - DNA, 15 bp, Homo sapiens
aaaactgtaaaaagt

SEQ ID NO: 16443 - DNA, 15 bp, Homo sapiens
aaaaactgtaaaaag

SEQ ID NO: 16444 - DNA, 15 bp, Homo sapiens
gaaaaactgtaaaaa

SEQ ID NO: 16445 - DNA, 15 bp, Homo sapiens
tgaaaaactgtaaaa

SEQ ID NO: 16446 - DNA, 15 bp, Homo sapiens
atgaaaaactgtaaa

SEQ ID NO: 16447 - DNA, 15 bp, Homo sapiens
tatgaaaaactgtaa

SEQ ID NO: 16448 - DNA, 15 bp, Homo sapiens
atatgaaaaactgta

SEQ ID NO: 16449 - DNA, 15 bp, Homo sapiens
catatgaaaaactgt

SEQ ID NO: 16450 - DNA, 15 bp, Homo sapiens
gcatatgaaaaactg

SEQ ID NO: 16451 - DNA, 15 bp, Homo sapiens
agcatatgaaaaact

SEQ ID NO: 16452 - DNA, 15 bp, Homo sapiens
aagcatatgaaaaac

SEQ ID NO: 16453 - DNA, 15 bp, Homo sapiens
aaagcatatgaaaaa

SEQ ID NO: 16454 - DNA, 15 bp, Homo sapiens
aaaagcatatgaaaa

SEQ ID NO: 16455 - DNA, 15 bp, Homo sapiens
aaaaagcatatgaaa

SEQ ID NO: 16456 - DNA, 15 bp, Homo sapiens
aaaaaagcatatgaa

SEQ ID NO: 16457 - DNA, 15 bp, Homo sapiens
aaaaaaagcatatga

SEQ ID NO: 16458 - DNA, 15 bp, Homo sapiens
caaaaaaagcatatg

SEQ ID NO: 16459 - DNA, 15 bp, Homo sapiens
acaaaaaaagcatat

SEQ ID NO: 16460 - DNA, 15 bp, Homo sapiens
cacaaaaaaagcata

SEQ ID NO: 16461 - DNA, 15 bp, Homo sapiens
tcacaaaaaaagcat

SEQ ID NO: 16462 - DNA, 15 bp, Homo sapiens
atcacaaaaaaagca

SEQ ID NO: 16463 - DNA, 15 bp, Homo sapiens
aatcacaaaaaaagc

SEQ ID NO: 16464 - DNA, 15 bp, Homo sapiens
aaatcacaaaaaaag

SEQ ID NO: 16465 - DNA, 15 bp, Homo sapiens
aaaatcacaaaaaaa

SEQ ID NO: 16466 - DNA, 15 bp, Homo sapiens
caaaatcacaaaaaa

SEQ ID NO: 16467 - DNA, 15 bp, Homo sapiens
gcaaaatcacaaaaa

SEQ ID NO: 16468 - DNA, 15 bp, Homo sapiens
agcaaaatcacaaaa

SEQ ID NO: 16469 - DNA, 15 bp, Homo sapiens
cagcaaaatcacaaa

SEQ ID NO: 16470 - DNA, 15 bp, Homo sapiens
acagcaaaatcacaa

SEQ ID NO: 16471 - DNA, 15 bp, Homo sapiens
tacagcaaaatcaca

SEQ ID NO: 16472 - DNA, 15 bp, Homo sapiens
ctacagcaaaatcac

SEQ ID NO: 16473 - DNA, 15 bp, Homo sapiens
tctacagcaaaatca

SEQ ID NO: 16474 - DNA, 15 bp, Homo sapiens
ttctacagcaaaatc

SEQ ID NO: 16475 - DNA, 15 bp, Homo sapiens
tttctacagcaaaat

SEQ ID NO: 16476 - DNA, 15 bp, Homo sapiens
ttttctacagcaaaa

SEQ ID NO: 16477 - DNA, 15 bp, Homo sapiens
attttctacagcaaa

SEQ ID NO: 16478 - DNA, 15 bp, Homo sapiens
aattttctacagcaa

SEQ ID NO: 16479 - DNA, 15 bp, Homo sapiens
taattttctacagca

SEQ ID NO: 16480 - DNA, 15 bp, Homo sapiens
ttaattttctacagc

SEQ ID NO: 16481 - DNA, 15 bp, Homo sapiens
gttaattttctacag

SEQ ID NO: 16482 - DNA, 15 bp, Homo sapiens
tgttaattttctaca

SEQ ID NO: 16483 - DNA, 15 bp, Homo sapiens
ctgttaattttctac

SEQ ID NO: 16484 - DNA, 15 bp, Homo sapiens
actgttaattttcta

SEQ ID NO: 16485 - DNA, 15 bp, Homo sapiens
aactgttaattttct

SEQ ID NO: 16486 - DNA, 15 bp, Homo sapiens
caactgttaattttc

SEQ ID NO: 16487 - DNA, 15 bp, Homo sapiens
ccaactgttaatttt

SEQ ID NO: 16488 - DNA, 15 bp, Homo sapiens
gccaactgttaattt

SEQ ID NO: 16489 - DNA, 15 bp, Homo sapiens
tgccaactgttaatt

SEQ ID NO: 16490 - DNA, 15 bp, Homo sapiens
atgccaactgttaat

SEQ ID NO: 16491 - DNA, 15 bp, Homo sapiens
aatgccaactgttaa

SEQ ID NO: 16492 - DNA, 15 bp, Homo sapiens
aaatgccaactgtta

SEQ ID NO: 16493 - DNA, 15 bp, Homo sapiens
caaatgccaactgtt

SEQ ID NO: 16494 - DNA, 15 bp, Homo sapiens
ccaaatgccaactgt

SEQ ID NO: 16495 - DNA, 15 bp, Homo sapiens
gccaaatgccaactg

SEQ ID NO: 16496 - DNA, 15 bp, Homo sapiens
agccaaatgccaact

SEQ ID NO: 16497 - DNA, 15 bp, Homo sapiens
aagccaaatgccaac

SEQ ID NO: 16498 - DNA, 15 bp, Homo sapiens
taagccaaatgccaa

SEQ ID NO: 16499 - DNA, 15 bp, Homo sapiens
ctaagccaaatgcca

SEQ ID NO: 16500 - DNA, 15 bp, Homo sapiens
actaagccaaatgcc

SEQ ID NO: 16501 - DNA, 15 bp, Homo sapiens
aactaagccaaatgc

SEQ ID NO: 16502 - DNA, 15 bp, Homo sapiens
gaactaagccaaatg

SEQ ID NO: 16503 - DNA, 15 bp, Homo sapiens
tgaactaagccaaat

SEQ ID NO: 16504 - DNA, 15 bp, Homo sapiens
ttgaactaagccaaa

SEQ ID NO: 16505 - DNA, 15 bp, Homo sapiens
cttgaactaagccaa

SEQ ID NO: 16506 - DNA, 15 bp, Homo sapiens
acttgaactaagcca

SEQ ID NO: 16507 - DNA, 15 bp, Homo sapiens
tacttgaactaagcc

SEQ ID NO: 16508 - DNA, 15 bp, Homo sapiens
atacttgaactaagc

SEQ ID NO: 16509 - DNA, 15 bp, Homo sapiens
tatacttgaactaag

SEQ ID NO: 16510 - DNA, 15 bp, Homo sapiens
ttatacttgaactaa

SEQ ID NO: 16511 - DNA, 15 bp, Homo sapiens
attatacttgaacta

SEQ ID NO: 16512 - DNA, 15 bp, Homo sapiens
cattatacttgaact

SEQ ID NO: 16513 - DNA, 15 bp, Homo sapiens
gcattatacttgaac

SEQ ID NO: 16514 - DNA, 15 bp, Homo sapiens
agcattatacttgaa

SEQ ID NO: 16515 - DNA, 15 bp, Homo sapiens
cagcattatacttga

SEQ ID NO: 16516 - DNA, 15 bp, Homo sapiens
acagcattatacttg

SEQ ID NO: 16517 - DNA, 15 bp, Homo sapiens
aacagcattatactt

SEQ ID NO: 16518 - DNA, 15 bp, Homo sapiens
caacagcattatact

SEQ ID NO: 16519 - DNA, 15 bp, Homo sapiens
tcaacagcattatac

SEQ ID NO: 16520 - DNA, 15 bp, Homo sapiens
gtcaacagcattata

SEQ ID NO: 16521 - DNA, 15 bp, Homo sapiens
tgtcaacagcattat

SEQ ID NO: 16522 - DNA, 15 bp, Homo sapiens
ttgtcaacagcatta

SEQ ID NO: 16523 - DNA, 15 bp, Homo sapiens
cttgtcaacagcatt

SEQ ID NO: 16524 - DNA, 15 bp, Homo sapiens
acttgtcaacagcat

SEQ ID NO: 16525 - DNA, 15 bp, Homo sapiens
tacttgtcaacagca

SEQ ID NO: 16526 - DNA, 15 bp, Homo sapiens
atacttgtcaacagc

SEQ ID NO: 16527 - DNA, 15 bp, Homo sapiens
tatacttgtcaacag

SEQ ID NO: 16528 - DNA, 15 bp, Homo sapiens
atatacttgtcaaca

SEQ ID NO: 16529 - DNA, 15 bp, Homo sapiens
gatatacttgtcaac

SEQ ID NO: 16530 - DNA, 15 bp, Homo sapiens
agatatacttgtcaa

SEQ ID NO: 16531 - DNA, 15 bp, Homo sapiens
cagatatacttgtca

SEQ ID NO: 16532 - DNA, 15 bp, Homo sapiens
tcagatatacttgtc

SEQ ID NO: 16533 - DNA, 15 bp, Homo sapiens
gtcagatatacttgt

SEQ ID NO: 16534 - DNA, 15 bp, Homo sapiens
tgtcagatatacttg

SEQ ID NO: 16535 - DNA, 15 bp, Homo sapiens
gtgtcagatatactt

SEQ ID NO: 16536 - DNA, 15 bp, Homo sapiens
cgtgtcagatatact

SEQ ID NO: 16537 - DNA, 15 bp, Homo sapiens
acgtgtcagatatac

SEQ ID NO: 16538 - DNA, 15 bp, Homo sapiens
gacgtgtcagatata

SEQ ID NO: 16539 - DNA, 15 bp, Homo sapiens
tgacgtgtcagatat

SEQ ID NO: 16540 - DNA, 15 bp, Homo sapiens
atgacgtgtcagata

SEQ ID NO: 16541 - DNA, 15 bp, Homo sapiens
aatgacgtgtcagat

SEQ ID NO: 16542 - DNA, 15 bp, Homo sapiens
caatgacgtgtcaga

SEQ ID NO: 16543 - DNA, 15 bp, Homo sapiens
tcaatgacgtgtcag

SEQ ID NO: 16544 - DNA, 15 bp, Homo sapiens
ttcaatgacgtgtca

SEQ ID NO: 16545 - DNA, 15 bp, Homo sapiens
gttcaatgacgtgtc

SEQ ID NO: 16546 - DNA, 15 bp, Homo sapiens
agttcaatgacgtgt

SEQ ID NO: 16547 - DNA, 15 bp, Homo sapiens
tagttcaatgacgtg

SEQ ID NO: 16548 - DNA, 15 bp, Homo sapiens
ttagttcaatgacgt

SEQ ID NO: 16549 - DNA, 15 bp, Homo sapiens
attagttcaatgacg

SEQ ID NO: 16550 - DNA, 15 bp, Homo sapiens
tattagttcaatgac

SEQ ID NO: 16551 - DNA, 15 bp, Homo sapiens
ttattagttcaatga

SEQ ID NO: 16552 - DNA, 15 bp, Homo sapiens
attattagttcaatg

SEQ ID NO: 16553 - DNA, 15 bp, Homo sapiens
tattattagttcaat

SEQ ID NO: 16554 - DNA, 15 bp, Homo sapiens
atattattagttcaa

SEQ ID NO: 16555 - DNA, 15 bp, Homo sapiens
aatattattagttca

SEQ ID NO: 16556 - DNA, 15 bp, Homo sapiens
aaatattattagttc

SEQ ID NO: 16557 - DNA, 15 bp, Homo sapiens
aaaatattattagtt

SEQ ID NO: 16558 - DNA, 15 bp, Homo sapiens
aaaaatattattagt

SEQ ID NO: 16559 - DNA, 15 bp, Homo sapiens
caaaaatattattag

SEQ ID NO: 16560 - DNA, 15 bp, Homo sapiens
tcaaaaatattatta

SEQ ID NO: 16561 - DNA, 15 bp, Homo sapiens
ttcaaaaatattatt

SEQ ID NO: 16562 - DNA, 15 bp, Homo sapiens
tttcaaaaatattat

SEQ ID NO: 16563 - DNA, 15 bp, Homo sapiens
ctttcaaaaatatta

SEQ ID NO: 16564 - DNA, 15 bp, Homo sapiens
gctttcaaaaatatt

SEQ ID NO: 16565 - DNA, 15 bp, Homo sapiens
agctttcaaaaatat

SEQ ID NO: 16566 - DNA, 15 bp, Homo sapiens
cagctttcaaaaata

SEQ ID NO: 16567 - DNA, 15 bp, Homo sapiens
tcagctttcaaaaat

SEQ ID NO: 16568 - DNA, 15 bp, Homo sapiens
atcagctttcaaaaa

SEQ ID NO: 16569 - DNA, 15 bp, Homo sapiens
tatcagctttcaaaa

SEQ ID NO: 16570 - DNA, 15 bp, Homo sapiens
ctatcagctttcaaa

SEQ ID NO: 16571 - DNA, 15 bp, Homo sapiens
cctatcagctttcaa

SEQ ID NO: 16572 - DNA, 15 bp, Homo sapiens
acctatcagctttca

SEQ ID NO: 16573 - DNA, 15 bp, Homo sapiens
tacctatcagctttc

SEQ ID NO: 16574 - DNA, 15 bp, Homo sapiens
ttacctatcagcttt

SEQ ID NO: 16575 - DNA, 15 bp, Homo sapiens
cttacctatcagctt

SEQ ID NO: 16576 - DNA, 15 bp, Homo sapiens
acttacctatcagct

SEQ ID NO: 16577 - DNA, 15 bp, Homo sapiens
aacttacctatcagc

SEQ ID NO: 16578 - DNA, 15 bp, Homo sapiens
taacttacctatcag

SEQ ID NO: 16579 - DNA, 15 bp, Homo sapiens
ataacttacctatca

SEQ ID NO: 16580 - DNA, 15 bp, Homo sapiens
tataacttacctatc

SEQ ID NO: 16581 - DNA, 15 bp, Homo sapiens
atataacttacctat

SEQ ID NO: 16582 - DNA, 15 bp, Homo sapiens
gatataacttaccta

SEQ ID NO: 16583 - DNA, 15 bp, Homo sapiens
agatataacttacct

SEQ ID NO: 16584 - DNA, 15 bp, Homo sapiens
tagatataacttacc

SEQ ID NO: 16585 - DNA, 15 bp, Homo sapiens
atagatataacttac

SEQ ID NO: 16586 - DNA, 15 bp, Homo sapiens
aatagatataactta

SEQ ID NO: 16587 - DNA, 15 bp, Homo sapiens
aaatagatataactt

SEQ ID NO: 16588 - DNA, 15 bp, Homo sapiens
aaaatagatataact

SEQ ID NO: 16589 - DNA, 15 bp, Homo sapiens
caaaatagatataac

SEQ ID NO: 16590 - DNA, 15 bp, Homo sapiens
acaaaatagatataa

SEQ ID NO: 16591 - DNA, 15 bp, Homo sapiens
aacaaaatagatata

SEQ ID NO: 16592 - DNA, 15 bp, Homo sapiens
aaacaaaatagatat

SEQ ID NO: 16593 - DNA, 15 bp, Homo sapiens
gaaacaaaatagata

SEQ ID NO: 16594 - DNA, 15 bp, Homo sapiens
tgaaacaaaatagat

SEQ ID NO: 16595 - DNA, 15 bp, Homo sapiens
atgaaacaaaataga

SEQ ID NO: 16596 - DNA, 15 bp, Homo sapiens
aatgaaacaaaatag

SEQ ID NO: 16597 - DNA, 15 bp, Homo sapiens
gaatgaaacaaaata

SEQ ID NO: 16598 - DNA, 15 bp, Homo sapiens
cgaatgaaacaaaat

SEQ ID NO: 16599 - DNA, 15 bp, Homo sapiens
acgaatgaaacaaaa

SEQ ID NO: 16600 - DNA, 15 bp, Homo sapiens
gacgaatgaaacaaa

SEQ ID NO: 16601 - DNA, 15 bp, Homo sapiens
tgacgaatgaaacaa

SEQ ID NO: 16602 - DNA, 15 bp, Homo sapiens
atgacgaatgaaaca

SEQ ID NO: 16603 - DNA, 15 bp, Homo sapiens
aatgacgaatgaaac

SEQ ID NO: 16604 - DNA, 15 bp, Homo sapiens
taatgacgaatgaaa

SEQ ID NO: 16605 - DNA, 15 bp, Homo sapiens
ctaatgacgaatgaa

SEQ ID NO: 16606 - DNA, 15 bp, Homo sapiens
actaatgacgaatga

SEQ ID NO: 16607 - DNA, 15 bp, Homo sapiens
cactaatgacgaatg

SEQ ID NO: 16608 - DNA, 15 bp, Homo sapiens
tcactaatgacgaat

SEQ ID NO: 16609 - DNA, 15 bp, Homo sapiens
atcactaatgacgaa

SEQ ID NO: 16610 - DNA, 15 bp, Homo sapiens
gatcactaatgacga

SEQ ID NO: 16611 - DNA, 15 bp, Homo sapiens
cgatcactaatgacg

SEQ ID NO: 16612 - DNA, 15 bp, Homo sapiens
ccgatcactaatgac

SEQ ID NO: 16613 - DNA, 15 bp, Homo sapiens
accgatcactaatga

SEQ ID NO: 16614 - DNA, 15 bp, Homo sapiens
gaccgatcactaatg

SEQ ID NO: 16615 - DNA, 15 bp, Homo sapiens
agaccgatcactaat

SEQ ID NO: 16616 - DNA, 15 bp, Homo sapiens
aagaccgatcactaa

SEQ ID NO: 16617 - DNA, 15 bp, Homo sapiens
taagaccgatcacta

SEQ ID NO: 16618 - DNA, 15 bp, Homo sapiens
ctaagaccgatcact

SEQ ID NO: 16619 - DNA, 15 bp, Homo sapiens
tctaagaccgatcac

SEQ ID NO: 16620 - DNA, 15 bp, Homo sapiens
atctaagaccgatca

SEQ ID NO: 16621 - DNA, 15 bp, Homo sapiens
catctaagaccgatc

SEQ ID NO: 16622 - DNA, 15 bp, Homo sapiens
acatctaagaccgat

SEQ ID NO: 16623 - DNA, 15 bp, Homo sapiens
aacatctaagaccga

SEQ ID NO: 16624 - DNA, 15 bp, Homo sapiens
aaacatctaagaccg

SEQ ID NO: 16625 - DNA, 15 bp, Homo sapiens
aaaacatctaagacc

SEQ ID NO: 16626 - DNA, 15 bp, Homo sapiens
aaaaacatctaagac

SEQ ID NO: 16627 - DNA, 15 bp, Homo sapiens
taaaaacatctaaga

SEQ ID NO: 16628 - DNA, 15 bp, Homo sapiens
ctaaaaacatctaag

SEQ ID NO: 16629 - DNA, 15 bp, Homo sapiens
gctaaaaacatctaa

SEQ ID NO: 16630 - DNA, 15 bp, Homo sapiens
cgctaaaaacatcta

SEQ ID NO: 16631 - DNA, 15 bp, Homo sapiens
tcgctaaaaacatct

SEQ ID NO: 16632 - DNA, 15 bp, Homo sapiens
ctcgctaaaaacatc

SEQ ID NO: 16633 - DNA, 15 bp, Homo sapiens
tctcgctaaaaacat

SEQ ID NO: 16634 - DNA, 15 bp, Homo sapiens
ctctcgctaaaaaca

SEQ ID NO: 16635 - DNA, 15 bp, Homo sapiens
gctctcgctaaaaac

SEQ ID NO: 16636 - DNA, 15 bp, Homo sapiens
tgctctcgctaaaaa

SEQ ID NO: 16637 - DNA, 15 bp, Homo sapiens
ttgctctcgctaaaa

SEQ ID NO: 16638 - DNA, 15 bp, Homo sapiens
tttgctctcgctaaa

SEQ ID NO: 16639 - DNA, 15 bp, Homo sapiens
ttttgctctcgctaa

SEQ ID NO: 16640 - DNA, 15 bp, Homo sapiens
gttttgctctcgcta

SEQ ID NO: 16641 - DNA, 15 bp, Homo sapiens
agttttgctctcgct

SEQ ID NO: 16642 - DNA, 15 bp, Homo sapiens
cagttttgctctcgc

SEQ ID NO: 16643 - DNA, 15 bp, Homo sapiens
acagttttgctctcg

SEQ ID NO: 16644 - DNA, 15 bp, Homo sapiens
tacagttttgctctc

SEQ ID NO: 16645 - DNA, 15 bp, Homo sapiens
ctacagttttgctct

SEQ ID NO: 16646 - DNA, 15 bp, Homo sapiens
tctacagttttgctc

SEQ ID NO: 16647 - DNA, 15 bp, Homo sapiens
ctctacagttttgct

SEQ ID NO: 16648 - DNA, 15 bp, Homo sapiens
cctctacagttttgc

SEQ ID NO: 16649 - DNA, 15 bp, Homo sapiens
tcctctacagttttg

SEQ ID NO: 16650 - DNA, 15 bp, Homo sapiens
ttcctctacagtttt

SEQ ID NO: 16651 - DNA, 15 bp, Homo sapiens
attcctctacagttt

SEQ ID NO: 16652 - DNA, 15 bp, Homo sapiens
cattcctctacagtt

SEQ ID NO: 16653 - DNA, 15 bp, Homo sapiens
acattcctctacagt

SEQ ID NO: 16654 - DNA, 15 bp, Homo sapiens
cacattcctctacag

SEQ ID NO: 16655 - DNA, 15 bp, Homo sapiens
acacattcctctaca

SEQ ID NO: 16656 - DNA, 15 bp, Homo sapiens
cacacattcctctac

SEQ ID NO: 16657 - DNA, 15 bp, Homo sapiens
acacacattcctcta

SEQ ID NO: 16658 - DNA, 15 bp, Homo sapiens
gacacacattcctct

SEQ ID NO: 16659 - DNA, 15 bp, Homo sapiens
agacacacattcctc

SEQ ID NO: 16660 - DNA, 15 bp, Homo sapiens
cagacacacattcct

SEQ ID NO: 16661 - DNA, 15 bp, Homo sapiens
acagacacacattcc

SEQ ID NO: 16662 - DNA, 15 bp, Homo sapiens
cacagacacacattc

SEQ ID NO: 16663 - DNA, 15 bp, Homo sapiens
acacagacacacatt

SEQ ID NO: 16664 - DNA, 15 bp, Homo sapiens
cacacagacacacat

SEQ ID NO: 16665 - DNA, 15 bp, Homo sapiens
acacacagacacaca

SEQ ID NO: 16666 - DNA, 15 bp, Homo sapiens
cacacacagacacac

SEQ ID NO: 16667 - DNA, 15 bp, Homo sapiens
acacacacagacaca

SEQ ID NO: 16668 - DNA, 15 bp, Homo sapiens
tacacacacagacac

SEQ ID NO: 16669 - DNA, 15 bp, Homo sapiens
atacacacacagaca

SEQ ID NO: 16670 - DNA, 15 bp, Homo sapiens
tatacacacacagac

SEQ ID NO: 16671 - DNA, 15 bp, Homo sapiens
atatacacacacaga

SEQ ID NO: 16672 - DNA, 15 bp, Homo sapiens
catatacacacacag

SEQ ID NO: 16673 - DNA, 15 bp, Homo sapiens
acatatacacacaca

SEQ ID NO: 16674 - DNA, 15 bp, Homo sapiens
cacatatacacacac

SEQ ID NO: 16675 - DNA, 15 bp, Homo sapiens
acacatatacacaca

SEQ ID NO: 16676 - DNA, 15 bp, Homo sapiens
cacacatatacacac

SEQ ID NO: 16677 - DNA, 15 bp, Homo sapiens
acacacatatacaca

SEQ ID NO: 16678 - DNA, 15 bp, Homo sapiens
cacacacatatacac

SEQ ID NO: 16679 - DNA, 15 bp, Homo sapiens
acacacacatataca

SEQ ID NO: 16680 - DNA, 15 bp, Homo sapiens
cacacacacatatac

SEQ ID NO: 16681 - DNA, 15 bp, Homo sapiens
acacacacacatata

SEQ ID NO: 16682 - DNA, 15 bp, Homo sapiens
cacacacacacatat

SEQ ID NO: 16683 - DNA, 15 bp, Homo sapiens
acacacacacacata

SEQ ID NO: 16684 - DNA, 15 bp, Homo sapiens
cacacacacacacat

SEQ ID NO: 16685 - DNA, 15 bp, Homo sapiens
tacacacacacacac

SEQ ID NO: 16686 - DNA, 15 bp, Homo sapiens
atacacacacacaca

SEQ ID NO: 16687 - DNA, 15 bp, Homo sapiens
aatacacacacacac

SEQ ID NO: 16688 - DNA, 15 bp, Homo sapiens
aaatacacacacaca

SEQ ID NO: 16689 - DNA, 15 bp, Homo sapiens
aaaatacacacacac

SEQ ID NO: 16690 - DNA, 15 bp, Homo sapiens
taaaatacacacaca

SEQ ID NO: 16691 - DNA, 15 bp, Homo sapiens
ttaaaatacacacac

SEQ ID NO: 16692 - DNA, 15 bp, Homo sapiens
gttaaaatacacaca

SEQ ID NO: 16693 - DNA, 15 bp, Homo sapiens
tgttaaaatacacac

SEQ ID NO: 16694 - DNA, 15 bp, Homo sapiens
ctgttaaaatacaca

SEQ ID NO: 16695 - DNA, 15 bp, Homo sapiens
gctgttaaaatacac

SEQ ID NO: 16696 - DNA, 15 bp, Homo sapiens
tgctgttaaaataca

SEQ ID NO: 16697 - DNA, 15 bp, Homo sapiens
ctgctgttaaaatac

SEQ ID NO: 16698 - DNA, 15 bp, Homo sapiens
cctgctgttaaaata

SEQ ID NO: 16699 - DNA, 15 bp, Homo sapiens
tcctgctgttaaaat

SEQ ID NO: 16700 - DNA, 15 bp, Homo sapiens
ctcctgctgttaaaa

SEQ ID NO: 16701 - DNA, 15 bp, Homo sapiens
tctcctgctgttaaa

SEQ ID NO: 16702 - DNA, 15 bp, Homo sapiens
ctctcctgctgttaa

SEQ ID NO: 16703 - DNA, 15 bp, Homo sapiens
actctcctgctgtta

SEQ ID NO: 16704 - DNA, 15 bp, Homo sapiens
aactctcctgctgtt

SEQ ID NO: 16705 - DNA, 15 bp, Homo sapiens
gaactctcctgctgt

SEQ ID NO: 16706 - DNA, 15 bp, Homo sapiens
agaactctcctgctg

SEQ ID NO: 16707 - DNA, 15 bp, Homo sapiens
cagaactctcctgct

SEQ ID NO: 16708 - DNA, 15 bp, Homo sapiens
tcagaactctcctgc

SEQ ID NO: 16709 - DNA, 15 bp, Homo sapiens
ttcagaactctcctg

SEQ ID NO: 16710 - DNA, 15 bp, Homo sapiens
tttcagaactctcct

SEQ ID NO: 16711 - DNA, 15 bp, Homo sapiens
gtttcagaactctcc

SEQ ID NO: 16712 - DNA, 15 bp, Homo sapiens
tgtttcagaactctc

SEQ ID NO: 16713 - DNA, 15 bp, Homo sapiens
ctgtttcagaactct

SEQ ID NO: 16714 - DNA, 15 bp, Homo sapiens
cctgtttcagaactc

SEQ ID NO: 16715 - DNA, 15 bp, Homo sapiens
tcctgtttcagaact

SEQ ID NO: 16716 - DNA, 15 bp, Homo sapiens
ttcctgtttcagaac

SEQ ID NO: 16717 - DNA, 15 bp, Homo sapiens
tttcctgtttcagaa

SEQ ID NO: 16718 - DNA, 15 bp, Homo sapiens
gtttcctgtttcaga

SEQ ID NO: 16719 - DNA, 15 bp, Homo sapiens
ggtttcctgtttcag

SEQ ID NO: 16720 - DNA, 15 bp, Homo sapiens
tggtttcctgtttca

SEQ ID NO: 16721 - DNA, 15 bp, Homo sapiens
ctggtttcctgtttc

SEQ ID NO: 16722 - DNA, 15 bp, Homo sapiens
actggtttcctgttt

SEQ ID NO: 16723 - DNA, 15 bp, Homo sapiens
gactggtttcctgtt

SEQ ID NO: 16724 - DNA, 15 bp, Homo sapiens
agactggtttcctgt

SEQ ID NO: 16725 - DNA, 15 bp, Homo sapiens
aagactggtttcctg

SEQ ID NO: 16726 - DNA, 15 bp, Homo sapiens
taagactggtttcct

SEQ ID NO: 16727 - DNA, 15 bp, Homo sapiens
ataagactggtttcc

SEQ ID NO: 16728 - DNA, 15 bp, Homo sapiens
gataagactggtttc

SEQ ID NO: 16729 - DNA, 15 bp, Homo sapiens
tgataagactggttt

SEQ ID NO: 16730 - DNA, 15 bp, Homo sapiens
atgataagactggtt

SEQ ID NO: 16731 - DNA, 15 bp, Homo sapiens
tatgataagactggt

SEQ ID NO: 16732 - DNA, 15 bp, Homo sapiens
atatgataagactgg

SEQ ID NO: 16733 - DNA, 15 bp, Homo sapiens
aatatgataagactg

SEQ ID NO: 16734 - DNA, 15 bp, Homo sapiens
gaatatgataagact

SEQ ID NO: 16735 - DNA, 15 bp, Homo sapiens
tgaatatgataagac

SEQ ID NO: 16736 - DNA, 15 bp, Homo sapiens
atgaatatgataaga

SEQ ID NO: 16737 - DNA, 15 bp, Homo sapiens
gatgaatatgataag

SEQ ID NO: 16738 - DNA, 15 bp, Homo sapiens
ggatgaatatgataa

SEQ ID NO: 16739 - DNA, 15 bp, Homo sapiens
tggatgaatatgata

SEQ ID NO: 16740 - DNA, 15 bp, Homo sapiens
ctggatgaatatgat

SEQ ID NO: 16741 - DNA, 15 bp, Homo sapiens
tctggatgaatatga

SEQ ID NO: 16742 - DNA, 15 bp, Homo sapiens
ctctggatgaatatg

SEQ ID NO: 16743 - DNA, 15 bp, Homo sapiens
tctctggatgaatat

SEQ ID NO: 16744 - DNA, 15 bp, Homo sapiens
gtctctggatgaata

SEQ ID NO: 16745 - DNA, 15 bp, Homo sapiens
ggtctctggatgaat

SEQ ID NO: 16746 - DNA, 15 bp, Homo sapiens
aggtctctggatgaa

SEQ ID NO: 16747 - DNA, 15 bp, Homo sapiens
taggtctctggatga

SEQ ID NO: 16748 - DNA, 15 bp, Homo sapiens
ctaggtctctggatg

SEQ ID NO: 16749 - DNA, 15 bp, Homo sapiens
cctaggtctctggat

SEQ ID NO: 16750 - DNA, 15 bp, Homo sapiens
tcctaggtctctgga

SEQ ID NO: 16751 - DNA, 15 bp, Homo sapiens
ttcctaggtctctgg

SEQ ID NO: 16752 - DNA, 15 bp, Homo sapiens
cttcctaggtctctg

SEQ ID NO: 16753 - DNA, 15 bp, Homo sapiens
tcttcctaggtctct

SEQ ID NO: 16754 - DNA, 15 bp, Homo sapiens
ttcttcctaggtctc

SEQ ID NO: 16755 - DNA, 15 bp, Homo sapiens
cttcttcctaggtct

SEQ ID NO: 16756 - DNA, 15 bp, Homo sapiens
ccttcttcctaggtc

SEQ ID NO: 16757 - DNA, 15 bp, Homo sapiens
accttcttcctaggt

SEQ ID NO: 16758 - DNA, 15 bp, Homo sapiens
taccttcttcctagg

SEQ ID NO: 16759 - DNA, 15 bp, Homo sapiens
ttaccttcttcctag

SEQ ID NO: 16760 - DNA, 15 bp, Homo sapiens
attaccttcttccta

SEQ ID NO: 16761 - DNA, 15 bp, Homo sapiens
aattaccttcttcct

SEQ ID NO: 16762 - DNA, 15 bp, Homo sapiens
caattaccttcttcc

SEQ ID NO: 16763 - DNA, 15 bp, Homo sapiens
acaattaccttcttc

SEQ ID NO: 16764 - DNA, 15 bp, Homo sapiens
aacaattaccttctt

SEQ ID NO: 16765 - DNA, 15 bp, Homo sapiens
aaacaattaccttct

SEQ ID NO: 16766 - DNA, 15 bp, Homo sapiens
caaacaattaccttc

SEQ ID NO: 16767 - DNA, 15 bp, Homo sapiens
ccaaacaattacctt

SEQ ID NO: 16768 - DNA, 15 bp, Homo sapiens
accaaacaattacct

SEQ ID NO: 16769 - DNA, 15 bp, Homo sapiens
taccaaacaattacc

SEQ ID NO: 16770 - DNA, 15 bp, Homo sapiens
ataccaaacaattac

SEQ ID NO: 16771 - DNA, 15 bp, Homo sapiens
tataccaaacaatta

SEQ ID NO: 16772 - DNA, 15 bp, Homo sapiens
gtataccaaacaatt

SEQ ID NO: 16773 - DNA, 15 bp, Homo sapiens
agtataccaaacaat

SEQ ID NO: 16774 - DNA, 15 bp, Homo sapiens
gagtataccaaacaa

SEQ ID NO: 16775 - DNA, 15 bp, Homo sapiens
cgagtataccaaaca

SEQ ID NO: 16776 - DNA, 15 bp, Homo sapiens
acgagtataccaaac

SEQ ID NO: 16777 - DNA, 15 bp, Homo sapiens
aacgagtataccaaa

SEQ ID NO: 16778 - DNA, 15 bp, Homo sapiens
taacgagtataccaa

SEQ ID NO: 16779 - DNA, 15 bp, Homo sapiens
ttaacgagtatacca

SEQ ID NO: 16780 - DNA, 15 bp, Homo sapiens
tttaacgagtatacc

SEQ ID NO: 16781 - DNA, 15 bp, Homo sapiens
ttttaacgagtatac

SEQ ID NO: 16782 - DNA, 15 bp, Homo sapiens
gttttaacgagtata

SEQ ID NO: 16783 - DNA, 15 bp, Homo sapiens
ggttttaacgagtat

SEQ ID NO: 16784 - DNA, 15 bp, Homo sapiens
tggttttaacgagta

SEQ ID NO: 16785 - DNA, 15 bp, Homo sapiens
ctggttttaacgagt

SEQ ID NO: 16786 - DNA, 15 bp, Homo sapiens
actggttttaacgag

SEQ ID NO: 16787 - DNA, 15 bp, Homo sapiens
aactggttttaacga

SEQ ID NO: 16788 - DNA, 15 bp, Homo sapiens
caactggttttaacg

SEQ ID NO: 16789 - DNA, 15 bp, Homo sapiens
ccaactggttttaac

SEQ ID NO: 16790 - DNA, 15 bp, Homo sapiens
accaactggttttaa

SEQ ID NO: 16791 - DNA, 15 bp, Homo sapiens
aaccaactggtttta

SEQ ID NO: 16792 - DNA, 15 bp, Homo sapiens
caaccaactggtttt

SEQ ID NO: 16793 - DNA, 15 bp, Homo sapiens
ccaaccaactggttt

SEQ ID NO: 16794 - DNA, 15 bp, Homo sapiens
cccaaccaactggtt

SEQ ID NO: 16795 - DNA, 15 bp, Homo sapiens
gcccaaccaactggt

SEQ ID NO: 16796 - DNA, 15 bp, Homo sapiens
tgcccaaccaactgg

SEQ ID NO: 16797 - DNA, 15 bp, Homo sapiens
ttgcccaaccaactg

SEQ ID NO: 16798 - DNA, 15 bp, Homo sapiens
gttgcccaaccaact

SEQ ID NO: 16799 - DNA, 15 bp, Homo sapiens
agttgcccaaccaac

SEQ ID NO: 16800 - DNA, 15 bp, Homo sapiens
aagttgcccaaccaa

SEQ ID NO: 16801 - DNA, 15 bp, Homo sapiens
taagttgcccaacca

SEQ ID NO: 16802 - DNA, 15 bp, Homo sapiens
ttaagttgcccaacc

SEQ ID NO: 16803 - DNA, 15 bp, Homo sapiens
tttaagttgcccaac

SEQ ID NO: 16804 - DNA, 15 bp, Homo sapiens
atttaagttgcccaa

SEQ ID NO: 16805 - DNA, 15 bp, Homo sapiens
aatttaagttgccca

SEQ ID NO: 16806 - DNA, 15 bp, Homo sapiens
aaatttaagttgccc

SEQ ID NO: 16807 - DNA, 15 bp, Homo sapiens
aaaatttaagttgcc

SEQ ID NO: 16808 - DNA, 15 bp, Homo sapiens
aaaaatttaagttgc

SEQ ID NO: 16809 - DNA, 15 bp, Homo sapiens
taaaaatttaagttg

SEQ ID NO: 16810 - DNA, 15 bp, Homo sapiens
ctaaaaatttaagtt

SEQ ID NO: 16811 - DNA, 15 bp, Homo sapiens
tctaaaaatttaagt

SEQ ID NO: 16812 - DNA, 15 bp, Homo sapiens
ctctaaaaatttaag

SEQ ID NO: 16813 - DNA, 15 bp, Homo sapiens
cctctaaaaatttaa

SEQ ID NO: 16814 - DNA, 15 bp, Homo sapiens
tcctctaaaaattta

SEQ ID NO: 16815 - DNA, 15 bp, Homo sapiens
atcctctaaaaattt

SEQ ID NO: 16816 - DNA, 15 bp, Homo sapiens
gatcctctaaaaatt

SEQ ID NO: 16817 - DNA, 15 bp, Homo sapiens
tgatcctctaaaaat

SEQ ID NO: 16818 - DNA, 15 bp, Homo sapiens
gtgatcctctaaaaa

SEQ ID NO: 16819 - DNA, 15 bp, Homo sapiens
tgtgatcctctaaaa

SEQ ID NO: 16820 - DNA, 15 bp, Homo sapiens
ctgtgatcctctaaa

SEQ ID NO: 16821 - DNA, 15 bp, Homo sapiens
tctgtgatcctctaa

SEQ ID NO: 16822 - DNA, 15 bp, Homo sapiens
atctgtgatcctcta

SEQ ID NO: 16823 - DNA, 15 bp, Homo sapiens
catctgtgatcctct

SEQ ID NO: 16824 - DNA, 15 bp, Homo sapiens
acatctgtgatcctc

SEQ ID NO: 16825 - DNA, 15 bp, Homo sapiens
tacatctgtgatcct

SEQ ID NO: 16826 - DNA, 15 bp, Homo sapiens
ctacatctgtgatcc

SEQ ID NO: 16827 - DNA, 15 bp, Homo sapiens
cctacatctgtgatc

SEQ ID NO: 16828 - DNA, 15 bp, Homo sapiens
gcctacatctgtgat

SEQ ID NO: 16829 - DNA, 15 bp, Homo sapiens
agcctacatctgtga

SEQ ID NO: 16830 - DNA, 15 bp, Homo sapiens
aagcctacatctgtg

SEQ ID NO: 16831 - DNA, 15 bp, Homo sapiens
caagcctacatctgt

SEQ ID NO: 16832 - DNA, 15 bp, Homo sapiens
tcaagcctacatctg

SEQ ID NO: 16833 - DNA, 15 bp, Homo sapiens
ctcaagcctacatct

SEQ ID NO: 16834 - DNA, 15 bp, Homo sapiens
gctcaagcctacatc

SEQ ID NO: 16835 - DNA, 15 bp, Homo sapiens
tgctcaagcctacat

SEQ ID NO: 16836 - DNA, 15 bp, Homo sapiens
ctgctcaagcctaca

SEQ ID NO: 16837 - DNA, 15 bp, Homo sapiens
actgctcaagcctac

SEQ ID NO: 16838 - DNA, 15 bp, Homo sapiens
aactgctcaagccta

SEQ ID NO: 16839 - DNA, 15 bp, Homo sapiens
caactgctcaagcct

SEQ ID NO: 16840 - DNA, 15 bp, Homo sapiens
acaactgctcaagcc

SEQ ID NO: 16841 - DNA, 15 bp, Homo sapiens
tacaactgctcaagc

SEQ ID NO: 16842 - DNA, 15 bp, Homo sapiens
ctacaactgctcaag

SEQ ID NO: 16843 - DNA, 15 bp, Homo sapiens
tctacaactgctcaa

SEQ ID NO: 16844 - DNA, 15 bp, Homo sapiens
atctacaactgctca

SEQ ID NO: 16845 - DNA, 15 bp, Homo sapiens
tatctacaactgctc

SEQ ID NO: 16846 - DNA, 15 bp, Homo sapiens
ctatctacaactgct

SEQ ID NO: 16847 - DNA, 15 bp, Homo sapiens
tctatctacaactgc

SEQ ID NO: 16848 - DNA, 15 bp, Homo sapiens
atctatctacaactg

SEQ ID NO: 16849 - DNA, 15 bp, Homo sapiens
catctatctacaact

SEQ ID NO: 16850 - DNA, 15 bp, Homo sapiens
tcatctatctacaac

SEQ ID NO: 16851 - DNA, 15 bp, Homo sapiens
atcatctatctacaa

SEQ ID NO: 16852 - DNA, 15 bp, Homo sapiens
aatcatctatctaca

SEQ ID NO: 16853 - DNA, 15 bp, Homo sapiens
aaatcatctatctac

SEQ ID NO: 16854 - DNA, 15 bp, Homo sapiens
gaaatcatctatcta

SEQ ID NO: 16855 - DNA, 15 bp, Homo sapiens
agaaatcatctatct

SEQ ID NO: 16856 - DNA, 15 bp, Homo sapiens
aagaaatcatctatc

SEQ ID NO: 16857 - DNA, 15 bp, Homo sapiens
aaagaaatcatctat

SEQ ID NO: 16858 - DNA, 15 bp, Homo sapiens
aaaagaaatcatcta

SEQ ID NO: 16859 - DNA, 15 bp, Homo sapiens
aaaaagaaatcatct

SEQ ID NO: 16860 - DNA, 15 bp, Homo sapiens
aaaaaagaaatcatc

SEQ ID NO: 16861 - DNA, 15 bp, Homo sapiens
aaaaaaagaaatcat

SEQ ID NO: 16862 - DNA, 15 bp, Homo sapiens
aaaaaaaagaaatca

SEQ ID NO: 16863 - DNA, 15 bp, Homo sapiens
aaaaaaaaagaaatc

SEQ ID NO: 16864 - DNA, 15 bp, Homo sapiens
gaaaaaaaaagaaat

SEQ ID NO: 16865 - DNA, 15 bp, Homo sapiens
agaaaaaaaaagaaa

SEQ ID NO: 16866 - DNA, 15 bp, Homo sapiens
aagaaaaaaaaagaa

SEQ ID NO: 16867 - DNA, 15 bp, Homo sapiens
aaagaaaaaaaaaga

SEQ ID NO: 16868 - DNA, 15 bp, Homo sapiens
gaaagaaaaaaaaag

SEQ ID NO: 16869 - DNA, 15 bp, Homo sapiens
agaaagaaaaaaaaa

SEQ ID NO: 16870 - DNA, 15 bp, Homo sapiens
aagaaagaaaaaaaa

SEQ ID NO: 16871 - DNA, 15 bp, Homo sapiens
aaagaaagaaaaaaa

SEQ ID NO: 16872 - DNA, 15 bp, Homo sapiens
aaaagaaagaaaaaa

SEQ ID NO: 16873 - DNA, 15 bp, Homo sapiens
gaaaaaagaaagaaa

SEQ ID NO: 16874 - DNA, 15 bp, Homo sapiens
agaaaaaagaaagaa

SEQ ID NO: 16875 - DNA, 15 bp, Homo sapiens
aagaaaaaagaaaga

SEQ ID NO: 16876 - DNA, 15 bp, Homo sapiens
aaagaaaaaagaaag

SEQ ID NO: 16877 - DNA, 15 bp, Homo sapiens
aaaagaaaaaagaaa

SEQ ID NO: 16878 - DNA, 15 bp, Homo sapiens
aaaaagaaaaaagaa

SEQ ID NO: 16879 - DNA, 15 bp, Homo sapiens
aaaaaagaaaaaaga

SEQ ID NO: 16880 - DNA, 15 bp, Homo sapiens
aaaaaaagaaaaaag

SEQ ID NO: 16881 - DNA, 15 bp, Homo sapiens
aaaaaaaagaaaaaa

SEQ ID NO: 16882 - DNA, 15 bp, Homo sapiens
aaaaaaaaagaaaaa

SEQ ID NO: 16883 - DNA, 15 bp, Homo sapiens
caaaaaaaaaagaaa

SEQ ID NO: 16884 - DNA, 15 bp, Homo sapiens
tcaaaaaaaaaagaa

SEQ ID NO: 16885 - DNA, 15 bp, Homo sapiens
ctcaaaaaaaaaaga

SEQ ID NO: 16886 - DNA, 15 bp, Homo sapiens
tctcaaaaaaaaaag

SEQ ID NO: 16887 - DNA, 15 bp, Homo sapiens
tatctcaaaaaaaaa

SEQ ID NO: 16888 - DNA, 15 bp, Homo sapiens
ctatctcaaaaaaaa

SEQ ID NO: 16889 - DNA, 15 bp, Homo sapiens
tctatctcaaaaaaa

SEQ ID NO: 16890 - DNA, 15 bp, Homo sapiens
ctctatctcaaaaaa

SEQ ID NO: 16891 - DNA, 15 bp, Homo sapiens
actctatctcaaaaa

SEQ ID NO: 16892 - DNA, 15 bp, Homo sapiens
gactctatctcaaaa

SEQ ID NO: 16893 - DNA, 15 bp, Homo sapiens
agactctatctcaaa

SEQ ID NO: 16894 - DNA, 15 bp, Homo sapiens
gagactctatctcaa

SEQ ID NO: 16895 - DNA, 15 bp, Homo sapiens
agagactctatctca

SEQ ID NO: 16896 - DNA, 15 bp, Homo sapiens
gagagactctatctc

SEQ ID NO: 16897 - DNA, 15 bp, Homo sapiens
agagagactctatct

SEQ ID NO: 16898 - DNA, 15 bp, Homo sapiens
gagagagactctatc

SEQ ID NO: 16899 - DNA, 15 bp, Homo sapiens
agagagagactctat

SEQ ID NO: 16900 - DNA, 15 bp, Homo sapiens
cagagagagactcta

SEQ ID NO: 16901 - DNA, 15 bp, Homo sapiens
acagagagagactct

SEQ ID NO: 16902 - DNA, 15 bp, Homo sapiens
gacagagagagactc

SEQ ID NO: 16903 - DNA, 15 bp, Homo sapiens
tgacagagagagact

SEQ ID NO: 16904 - DNA, 15 bp, Homo sapiens
atgacagagagagac

SEQ ID NO: 16905 - DNA, 15 bp, Homo sapiens
gatgacagagagaga

SEQ ID NO: 16906 - DNA, 15 bp, Homo sapiens
ggatgacagagagag

SEQ ID NO: 16907 - DNA, 15 bp, Homo sapiens
tggatgacagagaga

SEQ ID NO: 16908 - DNA, 15 bp, Homo sapiens
ctggatgacagagag

SEQ ID NO: 16909 - DNA, 15 bp, Homo sapiens
cctggatgacagaga

SEQ ID NO: 16910 - DNA, 15 bp, Homo sapiens
gcctggatgacagag

SEQ ID NO: 16911 - DNA, 15 bp, Homo sapiens
agcctggatgacaga

SEQ ID NO: 16912 - DNA, 15 bp, Homo sapiens
cagcctggatgacag

SEQ ID NO: 16913 - DNA, 15 bp, Homo sapiens
ccagcctggatgaca

SEQ ID NO: 16914 - DNA, 15 bp, Homo sapiens
tccagcctggatgac

SEQ ID NO: 16915 - DNA, 15 bp, Homo sapiens
ctccagcctggatga

SEQ ID NO: 16916 - DNA, 15 bp, Homo sapiens
actccagcctggatg

SEQ ID NO: 16917 - DNA, 15 bp, Homo sapiens
cactccagcctggat

SEQ ID NO: 16918 - DNA, 15 bp, Homo sapiens
gcactccagcctgga

SEQ ID NO: 16919 - DNA, 15 bp, Homo sapiens
cgcactccagcctgg

SEQ ID NO: 16920 - DNA, 15 bp, Homo sapiens
ccgcactccagcctg

SEQ ID NO: 16921 - DNA, 15 bp, Homo sapiens
accgcactccagcct

SEQ ID NO: 16922 - DNA, 15 bp, Homo sapiens
caccgcactccagcc

SEQ ID NO: 16923 - DNA, 15 bp, Homo sapiens
ccaccgcactccagc

SEQ ID NO: 16924 - DNA, 15 bp, Homo sapiens
gccaccgcactccag

SEQ ID NO: 16925 - DNA, 15 bp, Homo sapiens
cgccaccgcactcca

SEQ ID NO: 16926 - DNA, 15 bp, Homo sapiens
gcgccaccgcactcc

SEQ ID NO: 16927 - DNA, 15 bp, Homo sapiens
cgcgccaccgcactc

SEQ ID NO: 16928 - DNA, 15 bp, Homo sapiens
tcgcgccaccgcact

SEQ ID NO: 16929 - DNA, 15 bp, Homo sapiens
atcgcgccaccgcac

SEQ ID NO: 16930 - DNA, 15 bp, Homo sapiens
gatcgcgccaccgca

SEQ ID NO: 16931 - DNA, 15 bp, Homo sapiens
agatcgcgccaccgc

SEQ ID NO: 16932 - DNA, 15 bp, Homo sapiens
aagatcgcgccaccg

SEQ ID NO: 16933 - DNA, 15 bp, Homo sapiens
caagatcgcgccacc

SEQ ID NO: 16934 - DNA, 15 bp, Homo sapiens
ccaagatcgcgccac

SEQ ID NO: 16935 - DNA, 15 bp, Homo sapiens
gccaagatcgcgcca

SEQ ID NO: 16936 - DNA, 15 bp, Homo sapiens
agccaagatcgcgcc

SEQ ID NO: 16937 - DNA, 15 bp, Homo sapiens
aagccaagatcgcgc

SEQ ID NO: 16938 - DNA, 15 bp, Homo sapiens
taagccaagatcgcg

SEQ ID NO: 16939 - DNA, 15 bp, Homo sapiens
gtaagccaagatcgc

SEQ ID NO: 16940 - DNA, 15 bp, Homo sapiens
agtaagccaagatcg

SEQ ID NO: 16941 - DNA, 15 bp, Homo sapiens
cagtaagccaagatc

SEQ ID NO: 16942 - DNA, 15 bp, Homo sapiens
gcagtaagccaagat

SEQ ID NO: 16943 - DNA, 15 bp, Homo sapiens
tgcagtaagccaaga

SEQ ID NO: 16944 - DNA, 15 bp, Homo sapiens
ttgcagtaagccaag

SEQ ID NO: 16945 - DNA, 15 bp, Homo sapiens
gttgcagtaagccaa

SEQ ID NO: 16946 - DNA, 15 bp, Homo sapiens
ggttgcagtaagcca

SEQ ID NO: 16947 - DNA, 15 bp, Homo sapiens
aggttgcagtaagcc

SEQ ID NO: 16948 - DNA, 15 bp, Homo sapiens
gaggttgcagtaagc

SEQ ID NO: 16949 - DNA, 15 bp, Homo sapiens
agaggttgcagtaag

SEQ ID NO: 16950 - DNA, 15 bp, Homo sapiens
cagaggttgcagtaa

SEQ ID NO: 16951 - DNA, 15 bp, Homo sapiens
gcagaggttgcagta

SEQ ID NO: 16952 - DNA, 15 bp, Homo sapiens
ggcagaggttgcagt

SEQ ID NO: 16953 - DNA, 15 bp, Homo sapiens
aggcagaggttgcag

SEQ ID NO: 16954 - DNA, 15 bp, Homo sapiens
gaggcagaggttgca

SEQ ID NO: 16955 - DNA, 15 bp, Homo sapiens
ggaggcagaggttgc

SEQ ID NO: 16956 - DNA, 15 bp, Homo sapiens
gggaggcagaggttg

SEQ ID NO: 16957 - DNA, 15 bp, Homo sapiens
acgcctgaacctggg

SEQ ID NO: 16958 - DNA, 15 bp, Homo sapiens
aacgcctgaacctgg

SEQ ID NO: 16959 - DNA, 15 bp, Homo sapiens
aaacgcctgaacctg

SEQ ID NO: 16960 - DNA, 15 bp, Homo sapiens
gaaacgcctgaacct

SEQ ID NO: 16961 - DNA, 15 bp, Homo sapiens
agaaacgcctgaacc

SEQ ID NO: 16962 - DNA, 15 bp, Homo sapiens
gagaaacgcctgaac

SEQ ID NO: 16963 - DNA, 15 bp, Homo sapiens
ggagaaacgcctgaa

SEQ ID NO: 16964 - DNA, 15 bp, Homo sapiens
aggagaaacgcctga

SEQ ID NO: 16965 - DNA, 15 bp, Homo sapiens
caggagaaacgcctg

SEQ ID NO: 16966 - DNA, 15 bp, Homo sapiens
acaggagaaacgcct

SEQ ID NO: 16967 - DNA, 15 bp, Homo sapiens
gacaggagaaacgcc

SEQ ID NO: 16968 - DNA, 15 bp, Homo sapiens
agacaggagaaacgc

SEQ ID NO: 16969 - DNA, 15 bp, Homo sapiens
gagacaggagaaacg

SEQ ID NO: 16970 - DNA, 15 bp, Homo sapiens
tgagacaggagaaac

SEQ ID NO: 16971 - DNA, 15 bp, Homo sapiens
ctgagacaggagaaa

SEQ ID NO: 16972 - DNA, 15 bp, Homo sapiens
gctgagacaggagaa

SEQ ID NO: 16973 - DNA, 15 bp, Homo sapiens
ggctgagacaggaga

SEQ ID NO: 16974 - DNA, 15 bp, Homo sapiens
aggctgagacaggag

SEQ ID NO: 16975 - DNA, 15 bp, Homo sapiens
gaggctgagacagga

SEQ ID NO: 16976 - DNA, 15 bp, Homo sapiens
ggaggctgagacagg

SEQ ID NO: 16977 - DNA, 15 bp, Homo sapiens
aggaggctgagacag

SEQ ID NO: 16978 - DNA, 15 bp, Homo sapiens
caggaggctgagaca

SEQ ID NO: 16979 - DNA, 15 bp, Homo sapiens
tcaggaggctgagac

SEQ ID NO: 16980 - DNA, 15 bp, Homo sapiens
ctcaggaggctgaga

SEQ ID NO: 16981 - DNA, 15 bp, Homo sapiens
actcaggaggctgag

SEQ ID NO: 16982 - DNA, 15 bp, Homo sapiens
tactcaggaggctga

SEQ ID NO: 16983 - DNA, 15 bp, Homo sapiens
ctactcaggaggctg

SEQ ID NO: 16984 - DNA, 15 bp, Homo sapiens
gctactcaggaggct

SEQ ID NO: 16985 - DNA, 15 bp, Homo sapiens
agctactcaggaggc

SEQ ID NO: 16986 - DNA, 15 bp, Homo sapiens
cagctactcaggagg

SEQ ID NO: 16987 - DNA, 15 bp, Homo sapiens
ccagctactcaggag

SEQ ID NO: 16988 - DNA, 15 bp, Homo sapiens
cccagctactcagga

SEQ ID NO: 16989 - DNA, 15 bp, Homo sapiens
tcccagctactcagg

SEQ ID NO: 16990 - DNA, 15 bp, Homo sapiens
gcgcctgtaatccca

SEQ ID NO: 16991 - DNA, 15 bp, Homo sapiens
tgcgcctgtaatccc

SEQ ID NO: 16992 - DNA, 15 bp, Homo sapiens
atgcgcctgtaatcc

SEQ ID NO: 16993 - DNA, 15 bp, Homo sapiens
catgcgcctgtaatc

SEQ ID NO: 16994 - DNA, 15 bp, Homo sapiens
gcatgcgcctgtaat

SEQ ID NO: 16995 - DNA, 15 bp, Homo sapiens
agcatgcgcctgtaa

SEQ ID NO: 16996 - DNA, 15 bp, Homo sapiens
cagcatgcgcctgta

SEQ ID NO: 16997 - DNA, 15 bp, Homo sapiens
gcagcatgcgcctgt

SEQ ID NO: 16998 - DNA, 15 bp, Homo sapiens
ggcagcatgcgcctg

SEQ ID NO: 16999 - DNA, 15 bp, Homo sapiens
tggcagcatgcgcct

SEQ ID NO: 17000 - DNA, 15 bp, Homo sapiens
atggcagcatgcgcc

SEQ ID NO: 17001 - DNA, 15 bp, Homo sapiens
catggcagcatgcgc

SEQ ID NO: 17002 - DNA, 15 bp, Homo sapiens
gcatggcagcatgcg

SEQ ID NO: 17003 - DNA, 15 bp, Homo sapiens
ggcatggcagcatgc

SEQ ID NO: 17004 - DNA, 15 bp, Homo sapiens
gggcatggcagcatg

SEQ ID NO: 17005 - DNA, 15 bp, Homo sapiens
cgggcatggcagcat

SEQ ID NO: 17006 - DNA, 15 bp, Homo sapiens
ccgggcatggcagca

SEQ ID NO: 17007 - DNA, 15 bp, Homo sapiens
gccgggcatggcagc

SEQ ID NO: 17008 - DNA, 15 bp, Homo sapiens
agccgggcatggcag

SEQ ID NO: 17009 - DNA, 15 bp, Homo sapiens
tagccgggcatggca

SEQ ID NO: 17010 - DNA, 15 bp, Homo sapiens
ttagccgggcatggc

SEQ ID NO: 17011 - DNA, 15 bp, Homo sapiens
attagccgggcatgg

SEQ ID NO: 17012 - DNA, 15 bp, Homo sapiens
aattagccgggcatg

SEQ ID NO: 17013 - DNA, 15 bp, Homo sapiens
aaattagccgggcat

SEQ ID NO: 17014 - DNA, 15 bp, Homo sapiens
aaaattagccgggca

SEQ ID NO: 17015 - DNA, 15 bp, Homo sapiens
taaaatacaaaaaat

SEQ ID NO: 17016 - DNA, 15 bp, Homo sapiens
ctaaaatacaaaaaa

SEQ ID NO: 17017 - DNA, 15 bp, Homo sapiens
actaaaatacaaaaa

SEQ ID NO: 17018 - DNA, 15 bp, Homo sapiens
tactaaaatacaaaa

SEQ ID NO: 17019 - DNA, 15 bp, Homo sapiens
ctactaaaatacaaa

SEQ ID NO: 17020 - DNA, 15 bp, Homo sapiens
tctactaaaatacaa

SEQ ID NO: 17021 - DNA, 15 bp, Homo sapiens
ctctactaaaataca

SEQ ID NO: 17022 - DNA, 15 bp, Homo sapiens
tctctactaaaatac

SEQ ID NO: 17023 - DNA, 15 bp, Homo sapiens
gtctctactaaaata

SEQ ID NO: 17024 - DNA, 15 bp, Homo sapiens
cgtctctactaaaat

SEQ ID NO: 17025 - DNA, 15 bp, Homo sapiens
gaacacggtgaaacc

SEQ ID NO: 17026 - DNA, 15 bp, Homo sapiens
ggaacacggtgaaac

SEQ ID NO: 17027 - DNA, 15 bp, Homo sapiens
gggaacacggtgaaa

SEQ ID NO: 17028 - DNA, 15 bp, Homo sapiens
ggggaacacggtgaa

SEQ ID NO: 17029 - DNA, 15 bp, Homo sapiens
tggggaacacggtga

SEQ ID NO: 17030 - DNA, 15 bp, Homo sapiens
ctggggaacacggtg

SEQ ID NO: 17031 - DNA, 15 bp, Homo sapiens
cctggggaacacggt

SEQ ID NO: 17032 - DNA, 15 bp, Homo sapiens
gcctggggaacacgg

SEQ ID NO: 17033 - DNA, 15 bp, Homo sapiens
agcctggggaacacg

SEQ ID NO: 17034 - DNA, 15 bp, Homo sapiens
cagcctggggaacac

SEQ ID NO: 17035 - DNA, 15 bp, Homo sapiens
ccagcctggggaaca

SEQ ID NO: 17036 - DNA, 15 bp, Homo sapiens
accagcctggggaac

SEQ ID NO: 17037 - DNA, 15 bp, Homo sapiens
gaccagcctggggaa

SEQ ID NO: 17038 - DNA, 15 bp, Homo sapiens
agaccagcctgggga

SEQ ID NO: 17039 - DNA, 15 bp, Homo sapiens
gagaccagcctgggg

SEQ ID NO: 17040 - DNA, 15 bp, Homo sapiens
cgagaccagcctggg

SEQ ID NO: 17041 - DNA, 15 bp, Homo sapiens
tcgagaccagcctgg

SEQ ID NO: 17042 - DNA, 15 bp, Homo sapiens
ttcgagaccagcctg

SEQ ID NO: 17043 - DNA, 15 bp, Homo sapiens
gttcgagaccagcct

SEQ ID NO: 17044 - DNA, 15 bp, Homo sapiens
agttcgagaccagcc

SEQ ID NO: 17045 - DNA, 15 bp, Homo sapiens
gagttcgagaccagc

SEQ ID NO: 17046 - DNA, 15 bp, Homo sapiens
ggagttcgagaccag

SEQ ID NO: 17047 - DNA, 15 bp, Homo sapiens
tcaggagttcgagac

SEQ ID NO: 17048 - DNA, 15 bp, Homo sapiens
ctcaggagttcgaga

SEQ ID NO: 17049 - DNA, 15 bp, Homo sapiens
gctcaggagttcgag

SEQ ID NO: 17050 - DNA, 15 bp, Homo sapiens
agctcaggagttcga

SEQ ID NO: 17051 - DNA, 15 bp, Homo sapiens
gagctcaggagttcg

SEQ ID NO: 17052 - DNA, 15 bp, Homo sapiens
tgagctcaggagttc

SEQ ID NO: 17053 - DNA, 15 bp, Homo sapiens
ctgagctcaggagtt

SEQ ID NO: 17054 - DNA, 15 bp, Homo sapiens
cctgagctcaggagt

SEQ ID NO: 17055 - DNA, 15 bp, Homo sapiens
gcctgagctcaggag

SEQ ID NO: 17056 - DNA, 15 bp, Homo sapiens
tgcctgagctcagga

SEQ ID NO: 17057 - DNA, 15 bp, Homo sapiens
ttgcctgagctcagg

SEQ ID NO: 17058 - DNA, 15 bp, Homo sapiens
attgcctgagctcag

SEQ ID NO: 17059 - DNA, 15 bp, Homo sapiens
gattgcctgagctca

SEQ ID NO: 17060 - DNA, 15 bp, Homo sapiens
agattgcctgagctc

SEQ ID NO: 17061 - DNA, 15 bp, Homo sapiens
tagattgcctgagct

SEQ ID NO: 17062 - DNA, 15 bp, Homo sapiens
gtagattgcctgagc

SEQ ID NO: 17063 - DNA, 15 bp, Homo sapiens
ggtagattgcctgag

SEQ ID NO: 17064 - DNA, 15 bp, Homo sapiens
gggtagattgcctga

SEQ ID NO: 17065 - DNA, 15 bp, Homo sapiens
tgggtagattgcctg

SEQ ID NO: 17066 - DNA, 15 bp, Homo sapiens
gtgggtagattgcct

SEQ ID NO: 17067 - DNA, 15 bp, Homo sapiens
ggtgggtagattgcc

SEQ ID NO: 17068 - DNA, 15 bp, Homo sapiens
gaggtgggtagattg

SEQ ID NO: 17069 - DNA, 15 bp, Homo sapiens
cgaggtgggtagatt

SEQ ID NO: 17070 - DNA, 15 bp, Homo sapiens
ccgaggtgggtagat

SEQ ID NO: 17071 - DNA, 15 bp, Homo sapiens
gccgaggtgggtaga

SEQ ID NO: 17072 - DNA, 15 bp, Homo sapiens
ggccgaggtgggtag

SEQ ID NO: 17073 - DNA, 15 bp, Homo sapiens
aggccgaggtgggta

SEQ ID NO: 17074 - DNA, 15 bp, Homo sapiens
gaggccgaggtgggt

SEQ ID NO: 17075 - DNA, 15 bp, Homo sapiens
ggaggccgaggtggg

SEQ ID NO: 17076 - DNA, 15 bp, Homo sapiens
gggaggccgaggtgg

SEQ ID NO: 17077 - DNA, 15 bp, Homo sapiens
tgggaggccgaggtg

SEQ ID NO: 17078 - DNA, 15 bp, Homo sapiens
ttgggaggccgaggt

SEQ ID NO: 17079 - DNA, 15 bp, Homo sapiens
ggtggctcacgcctg

SEQ ID NO: 17080 - DNA, 15 bp, Homo sapiens
cggtggctcacgcct

SEQ ID NO: 17081 - DNA, 15 bp, Homo sapiens
acggtggctcacgcc

SEQ ID NO: 17082 - DNA, 15 bp, Homo sapiens
cacggtggctcacgc

SEQ ID NO: 17083 - DNA, 15 bp, Homo sapiens
acacggtggctcacg

SEQ ID NO: 17084 - DNA, 15 bp, Homo sapiens
gacacggtggctcac

SEQ ID NO: 17085 - DNA, 15 bp, Homo sapiens
agacacggtggctca

SEQ ID NO: 17086 - DNA, 15 bp, Homo sapiens
cagacacggtggctc

SEQ ID NO: 17087 - DNA, 15 bp, Homo sapiens
ccagacacggtggct

SEQ ID NO: 17088 - DNA, 15 bp, Homo sapiens
gccagacacggtggc

SEQ ID NO: 17089 - DNA, 15 bp, Homo sapiens
cgccagacacggtgg

SEQ ID NO: 17090 - DNA, 15 bp, Homo sapiens
tcgccagacacggtg

SEQ ID NO: 17091 - DNA, 15 bp, Homo sapiens
atcgccagacacggt

SEQ ID NO: 17092 - DNA, 15 bp, Homo sapiens
tatcgccagacacgg

SEQ ID NO: 17093 - DNA, 15 bp, Homo sapiens
ctatcgccagacacg

SEQ ID NO: 17094 - DNA, 15 bp, Homo sapiens
tctatcgccagacac

SEQ ID NO: 17095 - DNA, 15 bp, Homo sapiens
atctatcgccagaca

SEQ ID NO: 17096 - DNA, 15 bp, Homo sapiens
aatctatcgccagac

SEQ ID NO: 17097 - DNA, 15 bp, Homo sapiens
taatctatcgccaga

SEQ ID NO: 17098 - DNA, 15 bp, Homo sapiens
ataatctatcgccag

SEQ ID NO: 17099 - DNA, 15 bp, Homo sapiens
aataatctatcgcca

SEQ ID NO: 17100 - DNA, 15 bp, Homo sapiens
aaataatctatcgcc

SEQ ID NO: 17101 - DNA, 15 bp, Homo sapiens
gaaataatctatcgc

SEQ ID NO: 17102 - DNA, 15 bp, Homo sapiens
tgaaataatctatcg

SEQ ID NO: 17103 - DNA, 15 bp, Homo sapiens
atgaaataatctatc

SEQ ID NO: 17104 - DNA, 15 bp, Homo sapiens
tatgaaataatctat

SEQ ID NO: 17105 - DNA, 15 bp, Homo sapiens
ttatgaaataatcta

SEQ ID NO: 17106 - DNA, 15 bp, Homo sapiens
attatgaaataatct

SEQ ID NO: 17107 - DNA, 15 bp, Homo sapiens
aattatgaaataatc

SEQ ID NO: 17108 - DNA, 15 bp, Homo sapiens
taattatgaaataat

SEQ ID NO: 17109 - DNA, 15 bp, Homo sapiens
ttaattatgaaataa

SEQ ID NO: 17110 - DNA, 15 bp, Homo sapiens
gttaattatgaaata

SEQ ID NO: 17111 - DNA, 15 bp, Homo sapiens
tgttaattatgaaat

SEQ ID NO: 17112 - DNA, 15 bp, Homo sapiens
gtgttaattatgaaa

SEQ ID NO: 17113 - DNA, 15 bp, Homo sapiens
ggtgttaattatgaa

SEQ ID NO: 17114 - DNA, 15 bp, Homo sapiens
aggtgttaattatga

SEQ ID NO: 17115 - DNA, 15 bp, Homo sapiens
caggtgttaattatg

SEQ ID NO: 17116 - DNA, 15 bp, Homo sapiens
gcaggtgttaattat

SEQ ID NO: 17117 - DNA, 15 bp, Homo sapiens
agcaggtgttaatta

SEQ ID NO: 17118 - DNA, 15 bp, Homo sapiens
tagcaggtgttaatt

SEQ ID NO: 17119 - DNA, 15 bp, Homo sapiens
atagcaggtgttaat

SEQ ID NO: 17120 - DNA, 15 bp, Homo sapiens
catagcaggtgttaa

SEQ ID NO: 17121 - DNA, 15 bp, Homo sapiens
tcatagcaggtgtta

SEQ ID NO: 17122 - DNA, 15 bp, Homo sapiens
ttcatagcaggtgtt

SEQ ID NO: 17123 - DNA, 15 bp, Homo sapiens
cttcatagcaggtgt

SEQ ID NO: 17124 - DNA, 15 bp, Homo sapiens
tcttcatagcaggtg

SEQ ID NO: 17125 - DNA, 15 bp, Homo sapiens
ttcttcatagcaggt

SEQ ID NO: 17126 - DNA, 15 bp, Homo sapiens
tttcttcatagcagg

SEQ ID NO: 17127 - DNA, 15 bp, Homo sapiens
ttttcttcatagcag

SEQ ID NO: 17128 - DNA, 15 bp, Homo sapiens
tttttcttcatagca

SEQ ID NO: 17129 - DNA, 15 bp, Homo sapiens
atttttcttcatagc

SEQ ID NO: 17130 - DNA, 15 bp, Homo sapiens
aatttttcttcatag

SEQ ID NO: 17131 - DNA, 15 bp, Homo sapiens
caatttttcttcata

SEQ ID NO: 17132 - DNA, 15 bp, Homo sapiens
tcaatttttcttcat

SEQ ID NO: 17133 - DNA, 15 bp, Homo sapiens
atcaatttttcttca

SEQ ID NO: 17134 - DNA, 15 bp, Homo sapiens
aatcaatttttcttc

SEQ ID NO: 17135 - DNA, 15 bp, Homo sapiens
taatcaatttttctt

SEQ ID NO: 17136 - DNA, 15 bp, Homo sapiens
ttaatcaatttttct

SEQ ID NO: 17137 - DNA, 15 bp, Homo sapiens
tttaatcaatttttc

SEQ ID NO: 17138 - DNA, 15 bp, Homo sapiens
ttttaatcaattttt

SEQ ID NO: 17139 - DNA, 15 bp, Homo sapiens
attttaatcaatttt

SEQ ID NO: 17140 - DNA, 15 bp, Homo sapiens
tattttaatcaattt

SEQ ID NO: 17141 - DNA, 15 bp, Homo sapiens
ctattttaatcaatt

SEQ ID NO: 17142 - DNA, 15 bp, Homo sapiens
actattttaatcaat

SEQ ID NO: 17143 - DNA, 15 bp, Homo sapiens
aactattttaatcaa

SEQ ID NO: 17144 - DNA, 15 bp, Homo sapiens
caactattttaatca

SEQ ID NO: 17145 - DNA, 15 bp, Homo sapiens
tcaactattttaatc

SEQ ID NO: 17146 - DNA, 15 bp, Homo sapiens
ctcaactattttaat

SEQ ID NO: 17147 - DNA, 15 bp, Homo sapiens
tctcaactattttaa

SEQ ID NO: 17148 - DNA, 15 bp, Homo sapiens
ttctcaactatttta

SEQ ID NO: 17149 - DNA, 15 bp, Homo sapiens
cttctcaactatttt

SEQ ID NO: 17150 - DNA, 15 bp, Homo sapiens
acttctcaactattt

SEQ ID NO: 17151 - DNA, 15 bp, Homo sapiens
gacttctcaactatt

SEQ ID NO: 17152 - DNA, 15 bp, Homo sapiens
agacttctcaactat

SEQ ID NO: 17153 - DNA, 15 bp, Homo sapiens
tagacttctcaacta

SEQ ID NO: 17154 - DNA, 15 bp, Homo sapiens
ctagacttctcaact

SEQ ID NO: 17155 - DNA, 15 bp, Homo sapiens
actagacttctcaac

SEQ ID NO: 17156 - DNA, 15 bp, Homo sapiens
tactagacttctcaa

SEQ ID NO: 17157 - DNA, 15 bp, Homo sapiens
gtactagacttctca

SEQ ID NO: 17158 - DNA, 15 bp, Homo sapiens
tgtactagacttctc

SEQ ID NO: 17159 - DNA, 15 bp, Homo sapiens
gtgtactagacttct

SEQ ID NO: 17160 - DNA, 15 bp, Homo sapiens
agtgtactagacttc

SEQ ID NO: 17161 - DNA, 15 bp, Homo sapiens
gagtgtactagactt

SEQ ID NO: 17162 - DNA, 15 bp, Homo sapiens
agagtgtactagact

SEQ ID NO: 17163 - DNA, 15 bp, Homo sapiens
gagagtgtactagac

SEQ ID NO: 17164 - DNA, 15 bp, Homo sapiens
tgagagtgtactaga

SEQ ID NO: 17165 - DNA, 15 bp, Homo sapiens
ctgagagtgtactag

SEQ ID NO: 17166 - DNA, 15 bp, Homo sapiens
gctgagagtgtacta

SEQ ID NO: 17167 - DNA, 15 bp, Homo sapiens
agctgagagtgtact

SEQ ID NO: 17168 - DNA, 15 bp, Homo sapiens
tagctgagagtgtac

SEQ ID NO: 17169 - DNA, 15 bp, Homo sapiens
ttagctgagagtgta

SEQ ID NO: 17170 - DNA, 15 bp, Homo sapiens
attagctgagagtgt

SEQ ID NO: 17171 - DNA, 15 bp, Homo sapiens
tattagctgagagtg

SEQ ID NO: 17172 - DNA, 15 bp, Homo sapiens
atattagctgagagt

SEQ ID NO: 17173 - DNA, 15 bp, Homo sapiens
tatattagctgagag

SEQ ID NO: 17174 - DNA, 15 bp, Homo sapiens
gtatattagctgaga

SEQ ID NO: 17175 - DNA, 15 bp, Homo sapiens
agtatattagctgag

SEQ ID NO: 17176 - DNA, 15 bp, Homo sapiens
tagtatattagctga

SEQ ID NO: 17177 - DNA, 15 bp, Homo sapiens
ttagtatattagctg

SEQ ID NO: 17178 - DNA, 15 bp, Homo sapiens
tttagtatattagct

SEQ ID NO: 17179 - DNA, 15 bp, Homo sapiens
atttagtatattagc

SEQ ID NO: 17180 - DNA, 15 bp, Homo sapiens
aatttagtatattag

SEQ ID NO: 17181 - DNA, 15 bp, Homo sapiens
taatttagtatatta

SEQ ID NO: 17182 - DNA, 15 bp, Homo sapiens
ataatttagtatatt

SEQ ID NO: 17183 - DNA, 15 bp, Homo sapiens
tataatttagtatat

SEQ ID NO: 17184 - DNA, 15 bp, Homo sapiens
gtataatttagtata

SEQ ID NO: 17185 - DNA, 15 bp, Homo sapiens
agtataatttagtat

SEQ ID NO: 17186 - DNA, 15 bp, Homo sapiens
tagtataatttagta

SEQ ID NO: 17187 - DNA, 15 bp, Homo sapiens
atagtataatttagt

SEQ ID NO: 17188 - DNA, 15 bp, Homo sapiens
catagtataatttag

SEQ ID NO: 17189 - DNA, 15 bp, Homo sapiens
ccatagtataattta

SEQ ID NO: 17190 - DNA, 15 bp, Homo sapiens
tccatagtataattt

SEQ ID NO: 17191 - DNA, 15 bp, Homo sapiens
atccatagtataatt

SEQ ID NO: 17192 - DNA, 15 bp, Homo sapiens
aatccatagtataat

SEQ ID NO: 17193 - DNA, 15 bp, Homo sapiens
aaatccatagtataa

SEQ ID NO: 17194 - DNA, 15 bp, Homo sapiens
aaaatccatagtata

SEQ ID NO: 17195 - DNA, 15 bp, Homo sapiens
taaaatccatagtat

SEQ ID NO: 17196 - DNA, 15 bp, Homo sapiens
ctaaaatccatagta

SEQ ID NO: 17197 - DNA, 15 bp, Homo sapiens
tctaaaatccatagt

SEQ ID NO: 17198 - DNA, 15 bp, Homo sapiens
ctctaaaatccatag

SEQ ID NO: 17199 - DNA, 15 bp, Homo sapiens
actctaaaatccata

SEQ ID NO: 17200 - DNA, 15 bp, Homo sapiens
tactctaaaatccat

SEQ ID NO: 17201 - DNA, 15 bp, Homo sapiens
atactctaaaatcca

SEQ ID NO: 17202 - DNA, 15 bp, Homo sapiens
aatactctaaaatcc

SEQ ID NO: 17203 - DNA, 15 bp, Homo sapiens
caatactctaaaatc

SEQ ID NO: 17204 - DNA, 15 bp, Homo sapiens
acaatactctaaaat

SEQ ID NO: 17205 - DNA, 15 bp, Homo sapiens
aacaatactctaaaa

SEQ ID NO: 17206 - DNA, 15 bp, Homo sapiens
taacaatactctaaa

SEQ ID NO: 17207 - DNA, 15 bp, Homo sapiens
ttaacaatactctaa

SEQ ID NO: 17208 - DNA, 15 bp, Homo sapiens
gttaacaatactcta

SEQ ID NO: 17209 - DNA, 15 bp, Homo sapiens
tgttaacaatactct

SEQ ID NO: 17210 - DNA, 15 bp, Homo sapiens
atgttaacaatactc

SEQ ID NO: 17211 - DNA, 15 bp, Homo sapiens
aatgttaacaatact

SEQ ID NO: 17212 - DNA, 15 bp, Homo sapiens
taatgttaacaatac

SEQ ID NO: 17213 - DNA, 15 bp, Homo sapiens
ataatgttaacaata

SEQ ID NO: 17214 - DNA, 15 bp, Homo sapiens
gataatgttaacaat

SEQ ID NO: 17215 - DNA, 15 bp, Homo sapiens
tgataatgttaacaa

SEQ ID NO: 17216 - DNA, 15 bp, Homo sapiens
ctgataatgttaaca

SEQ ID NO: 17217 - DNA, 15 bp, Homo sapiens
actgataatgttaac

SEQ ID NO: 17218 - DNA, 15 bp, Homo sapiens
cactgataatgttaa

SEQ ID NO: 17219 - DNA, 15 bp, Homo sapiens
tcactgataatgtta

SEQ ID NO: 17220 - DNA, 15 bp, Homo sapiens
gtcactgataatgtt

SEQ ID NO: 17221 - DNA, 15 bp, Homo sapiens
agtcactgataatgt

SEQ ID NO: 17222 - DNA, 15 bp, Homo sapiens
aagtcactgataatg

SEQ ID NO: 17223 - DNA, 15 bp, Homo sapiens
caagtcactgataat

SEQ ID NO: 17224 - DNA, 15 bp, Homo sapiens
tcaagtcactgataa

SEQ ID NO: 17225 - DNA, 15 bp, Homo sapiens
atcaagtcactgata

SEQ ID NO: 17226 - DNA, 15 bp, Homo sapiens
tatcaagtcactgat

SEQ ID NO: 17227 - DNA, 15 bp, Homo sapiens
atatcaagtcactga

SEQ ID NO: 17228 - DNA, 15 bp, Homo sapiens
gatatcaagtcactg

SEQ ID NO: 17229 - DNA, 15 bp, Homo sapiens
agatatcaagtcact

SEQ ID NO: 17230 - DNA, 15 bp, Homo sapiens
aagatatcaagtcac

SEQ ID NO: 17231 - DNA, 15 bp, Homo sapiens
gaagatatcaagtca

SEQ ID NO: 17232 - DNA, 15 bp, Homo sapiens
ggaagatatcaagtc

SEQ ID NO: 17233 - DNA, 15 bp, Homo sapiens
aggaagatatcaagt

SEQ ID NO: 17234 - DNA, 15 bp, Homo sapiens
caggaagatatcaag

SEQ ID NO: 17235 - DNA, 15 bp, Homo sapiens
tcaggaagatatcaa

SEQ ID NO: 17236 - DNA, 15 bp, Homo sapiens
ctcaggaagatatca

SEQ ID NO: 17237 - DNA, 15 bp, Homo sapiens
cctcaggaagatatc

SEQ ID NO: 17238 - DNA, 15 bp, Homo sapiens
acctcaggaagatat

SEQ ID NO: 17239 - DNA, 15 bp, Homo sapiens
aacctcaggaagata

SEQ ID NO: 17240 - DNA, 15 bp, Homo sapiens
gaacctcaggaagat

SEQ ID NO: 17241 - DNA, 15 bp, Homo sapiens
agaacctcaggaaga

SEQ ID NO: 17242 - DNA, 15 bp, Homo sapiens
tagaacctcaggaag

SEQ ID NO: 17243 - DNA, 15 bp, Homo sapiens
ttagaacctcaggaa

SEQ ID NO: 17244 - DNA, 15 bp, Homo sapiens
attagaacctcagga

SEQ ID NO: 17245 - DNA, 15 bp, Homo sapiens
aattagaacctcagg

SEQ ID NO: 17246 - DNA, 15 bp, Homo sapiens
aaattagaacctcag

SEQ ID NO: 17247 - DNA, 15 bp, Homo sapiens
caaattagaacctca

SEQ ID NO: 17248 - DNA, 15 bp, Homo sapiens
gcaaattagaacctc

SEQ ID NO: 17249 - DNA, 15 bp, Homo sapiens
agcaaattagaacct

SEQ ID NO: 17250 - DNA, 15 bp, Homo sapiens
aagcaaattagaacc

SEQ ID NO: 17251 - DNA, 15 bp, Homo sapiens
taagcaaattagaac

SEQ ID NO: 17252 - DNA, 15 bp, Homo sapiens
ttaagcaaattagaa

SEQ ID NO: 17253 - DNA, 15 bp, Homo sapiens
gttaagcaaattaga

SEQ ID NO: 17254 - DNA, 15 bp, Homo sapiens
agttaagcaaattag

SEQ ID NO: 17255 - DNA, 15 bp, Homo sapiens
aagttaagcaaatta

SEQ ID NO: 17256 - DNA, 15 bp, Homo sapiens
aaagttaagcaaatt

SEQ ID NO: 17257 - DNA, 15 bp, Homo sapiens
taaagttaagcaaat

SEQ ID NO: 17258 - DNA, 15 bp, Homo sapiens
ttaaagttaagcaaa

SEQ ID NO: 17259 - DNA, 15 bp, Homo sapiens
tttaaagttaagcaa

SEQ ID NO: 17260 - DNA, 15 bp, Homo sapiens
atttaaagttaagca

SEQ ID NO: 17261 - DNA, 15 bp, Homo sapiens
tatttaaagttaagc

SEQ ID NO: 17262 - DNA, 15 bp, Homo sapiens
ttatttaaagttaag

SEQ ID NO: 17263 - DNA, 15 bp, Homo sapiens
attatttaaagttaa

SEQ ID NO: 17264 - DNA, 15 bp, Homo sapiens
aattatttaaagtta

SEQ ID NO: 17265 - DNA, 15 bp, Homo sapiens
caattatttaaagtt

SEQ ID NO: 17266 - DNA, 15 bp, Homo sapiens
ccaattatttaaagt

SEQ ID NO: 17267 - DNA, 15 bp, Homo sapiens
cccaattatttaaag

SEQ ID NO: 17268 - DNA, 15 bp, Homo sapiens
ccccaattatttaaa

SEQ ID NO: 17269 - DNA, 15 bp, Homo sapiens
accccaattatttaa

SEQ ID NO: 17270 - DNA, 15 bp, Homo sapiens
aaccccaattattta

SEQ ID NO: 17271 - DNA, 15 bp, Homo sapiens
gaaccccaattattt

SEQ ID NO: 17272 - DNA, 15 bp, Homo sapiens
tgaaccccaattatt

SEQ ID NO: 17273 - DNA, 15 bp, Homo sapiens
ctgaaccccaattat

SEQ ID NO: 17274 - DNA, 15 bp, Homo sapiens
tctgaaccccaatta

SEQ ID NO: 17275 - DNA, 15 bp, Homo sapiens
atctgaaccccaatt

SEQ ID NO: 17276 - DNA, 15 bp, Homo sapiens
gatctgaaccccaat

SEQ ID NO: 17277 - DNA, 15 bp, Homo sapiens
tgatctgaaccccaa

SEQ ID NO: 17278 - DNA, 15 bp, Homo sapiens
gtgatctgaacccca

SEQ ID NO: 17279 - DNA, 15 bp, Homo sapiens
ggtgatctgaacccc

SEQ ID NO: 17280 - DNA, 15 bp, Homo sapiens
aggtgatctgaaccc

SEQ ID NO: 17281 - DNA, 15 bp, Homo sapiens
aaggtgatctgaacc

SEQ ID NO: 17282 - DNA, 15 bp, Homo sapiens
caaggtgatctgaac

SEQ ID NO: 17283 - DNA, 15 bp, Homo sapiens
tcaaggtgatctgaa

SEQ ID NO: 17284 - DNA, 15 bp, Homo sapiens
atcaaggtgatctga

SEQ ID NO: 17285 - DNA, 15 bp, Homo sapiens
aatcaaggtgatctg

SEQ ID NO: 17286 - DNA, 15 bp, Homo sapiens
caatcaaggtgatct

SEQ ID NO: 17287 - DNA, 15 bp, Homo sapiens
acaatcaaggtgatc

SEQ ID NO: 17288 - DNA, 15 bp, Homo sapiens
aacaatcaaggtgat

SEQ ID NO: 17289 - DNA, 15 bp, Homo sapiens
gaacaatcaaggtga

SEQ ID NO: 17290 - DNA, 15 bp, Homo sapiens
ggaacaatcaaggtg

SEQ ID NO: 17291 - DNA, 15 bp, Homo sapiens
gggaacaatcaaggt

SEQ ID NO: 17292 - DNA, 15 bp, Homo sapiens
agggaacaatcaagg

SEQ ID NO: 17293 - DNA, 15 bp, Homo sapiens
aagggaacaatcaag

SEQ ID NO: 17294 - DNA, 15 bp, Homo sapiens
taagggaacaatcaa

SEQ ID NO: 17295 - DNA, 15 bp, Homo sapiens
ttaagggaacaatca

SEQ ID NO: 17296 - DNA, 15 bp, Homo sapiens
tttaagggaacaatc

SEQ ID NO: 17297 - DNA, 15 bp, Homo sapiens
ctttaagggaacaat

SEQ ID NO: 17298 - DNA, 15 bp, Homo sapiens
tctttaagggaacaa

SEQ ID NO: 17299 - DNA, 15 bp, Homo sapiens
atctttaagggaaca

SEQ ID NO: 17300 - DNA, 15 bp, Homo sapiens
aatctttaagggaac

SEQ ID NO: 17301 - DNA, 15 bp, Homo sapiens
taatctttaagggaa

SEQ ID NO: 17302 - DNA, 15 bp, Homo sapiens
ttaatctttaaggga

SEQ ID NO: 17303 - DNA, 15 bp, Homo sapiens
tttaatctttaaggg

SEQ ID NO: 17304 - DNA, 15 bp, Homo sapiens
atttaatctttaagg

SEQ ID NO: 17305 - DNA, 15 bp, Homo sapiens
aatttaatctttaag

SEQ ID NO: 17306 - DNA, 15 bp, Homo sapiens
aaatttaatctttaa

SEQ ID NO: 17307 - DNA, 15 bp, Homo sapiens
aaaatttaatcttta

SEQ ID NO: 17308 - DNA, 15 bp, Homo sapiens
caaaatttaatcttt

SEQ ID NO: 17309 - DNA, 15 bp, Homo sapiens
acaaaatttaatctt

SEQ ID NO: 17310 - DNA, 15 bp, Homo sapiens
tacaaaatttaatct

SEQ ID NO: 17311 - DNA, 15 bp, Homo sapiens
ttacaaaatttaatc

SEQ ID NO: 17312 - DNA, 15 bp, Homo sapiens
tttacaaaatttaat

SEQ ID NO: 17313 - DNA, 15 bp, Homo sapiens
ttttacaaaatttaa

SEQ ID NO: 17314 - DNA, 15 bp, Homo sapiens
gttttacaaaattta

SEQ ID NO: 17315 - DNA, 15 bp, Homo sapiens
agttttacaaaattt

SEQ ID NO: 17316 - DNA, 15 bp, Homo sapiens
cagttttacaaaatt

SEQ ID NO: 17317 - DNA, 15 bp, Homo sapiens
acagttttacaaaat

SEQ ID NO: 17318 - DNA, 15 bp, Homo sapiens
cacagttttacaaaa

SEQ ID NO: 17319 - DNA, 15 bp, Homo sapiens
acacagttttacaaa

SEQ ID NO: 17320 - DNA, 15 bp, Homo sapiens
cacacagttttacaa

SEQ ID NO: 17321 - DNA, 15 bp, Homo sapiens
acacacagttttaca

SEQ ID NO: 17322 - DNA, 15 bp, Homo sapiens
tacacacagttttac

SEQ ID NO: 17323 - DNA, 15 bp, Homo sapiens
ttacacacagtttta

SEQ ID NO: 17324 - DNA, 15 bp, Homo sapiens
attacacacagtttt

SEQ ID NO: 17325 - DNA, 15 bp, Homo sapiens
aattacacacagttt

SEQ ID NO: 17326 - DNA, 15 bp, Homo sapiens
aaattacacacagtt

SEQ ID NO: 17327 - DNA, 15 bp, Homo sapiens
aaaattacacacagt

SEQ ID NO: 17328 - DNA, 15 bp, Homo sapiens
gaaaattacacacag

SEQ ID NO: 17329 - DNA, 15 bp, Homo sapiens
ggaaaattacacaca

SEQ ID NO: 17330 - DNA, 15 bp, Homo sapiens
aggaaaattacacac

SEQ ID NO: 17331 - DNA, 15 bp, Homo sapiens
caggaaaattacaca

SEQ ID NO: 17332 - DNA, 15 bp, Homo sapiens
acaggaaaattacac

SEQ ID NO: 17333 - DNA, 15 bp, Homo sapiens
tacaggaaaattaca

SEQ ID NO: 17334 - DNA, 15 bp, Homo sapiens
atacaggaaaattac

SEQ ID NO: 17335 - DNA, 15 bp, Homo sapiens
gatacaggaaaatta

SEQ ID NO: 17336 - DNA, 15 bp, Homo sapiens
agatacaggaaaatt

SEQ ID NO: 17337 - DNA, 15 bp, Homo sapiens
cagatacaggaaaat

SEQ ID NO: 17338 - DNA, 15 bp, Homo sapiens
ccagatacaggaaaa

SEQ ID NO: 17339 - DNA, 15 bp, Homo sapiens
accagatacaggaaa

SEQ ID NO: 17340 - DNA, 15 bp, Homo sapiens
aaccagatacaggaa

SEQ ID NO: 17341 - DNA, 15 bp, Homo sapiens
aaaccagatacagga

SEQ ID NO: 17342 - DNA, 15 bp, Homo sapiens
caaaccagatacagg

SEQ ID NO: 17343 - DNA, 15 bp, Homo sapiens
ccaaaccagatacag

SEQ ID NO: 17344 - DNA, 15 bp, Homo sapiens
tccaaaccagataca

SEQ ID NO: 17345 - DNA, 15 bp, Homo sapiens
atccaaaccagatac

SEQ ID NO: 17346 - DNA, 15 bp, Homo sapiens
tatccaaaccagata

SEQ ID NO: 17347 - DNA, 15 bp, Homo sapiens
ctatccaaaccagat

SEQ ID NO: 17348 - DNA, 15 bp, Homo sapiens
gctatccaaaccaga

SEQ ID NO: 17349 - DNA, 15 bp, Homo sapiens
agctatccaaaccag

SEQ ID NO: 17350 - DNA, 15 bp, Homo sapiens
aagctatccaaacca

SEQ ID NO: 17351 - DNA, 15 bp, Homo sapiens
aaagctatccaaacc

SEQ ID NO: 17352 - DNA, 15 bp, Homo sapiens
taaagctatccaaac

SEQ ID NO: 17353 - DNA, 15 bp, Homo sapiens
ttaaagctatccaaa

SEQ ID NO: 17354 - DNA, 15 bp, Homo sapiens
tttaaagctatccaa

SEQ ID NO: 17355 - DNA, 15 bp, Homo sapiens
ttttaaagctatcca

SEQ ID NO: 17356 - DNA, 15 bp, Homo sapiens
tttttaaagctatcc

SEQ ID NO: 17357 - DNA, 15 bp, Homo sapiens
atttttaaagctatc

SEQ ID NO: 17358 - DNA, 15 bp, Homo sapiens
catttttaaagctat

SEQ ID NO: 17359 - DNA, 15 bp, Homo sapiens
ccatttttaaagcta

SEQ ID NO: 17360 - DNA, 15 bp, Homo sapiens
accatttttaaagct

SEQ ID NO: 17361 - DNA, 15 bp, Homo sapiens
aaccatttttaaagc

SEQ ID NO: 17362 - DNA, 15 bp, Homo sapiens
gaaccatttttaaag

SEQ ID NO: 17363 - DNA, 15 bp, Homo sapiens
agaaccatttttaaa

SEQ ID NO: 17364 - DNA, 15 bp, Homo sapiens
aagaaccatttttaa

SEQ ID NO: 17365 - DNA, 15 bp, Homo sapiens
taagaaccattttta

SEQ ID NO: 17366 - DNA, 15 bp, Homo sapiens
ttaagaaccattttt

SEQ ID NO: 17367 - DNA, 15 bp, Homo sapiens
cttaagaaccatttt

SEQ ID NO: 17368 - DNA, 15 bp, Homo sapiens
acttaagaaccattt

SEQ ID NO: 17369 - DNA, 15 bp, Homo sapiens
aacttaagaaccatt

SEQ ID NO: 17370 - DNA, 15 bp, Homo sapiens
aaacttaagaaccat

SEQ ID NO: 17371 - DNA, 15 bp, Homo sapiens
taaacttaagaacca

SEQ ID NO: 17372 - DNA, 15 bp, Homo sapiens
ttaaacttaagaacc

SEQ ID NO: 17373 - DNA, 15 bp, Homo sapiens
attaaacttaagaac

SEQ ID NO: 17374 - DNA, 15 bp, Homo sapiens
cattaaacttaagaa

SEQ ID NO: 17375 - DNA, 15 bp, Homo sapiens
tcattaaacttaaga

SEQ ID NO: 17376 - DNA, 15 bp, Homo sapiens
ctcattaaacttaag

SEQ ID NO: 17377 - DNA, 15 bp, Homo sapiens
actcattaaacttaa

SEQ ID NO: 17378 - DNA, 15 bp, Homo sapiens
aactcattaaactta

SEQ ID NO: 17379 - DNA, 15 bp, Homo sapiens
gaactcattaaactt

SEQ ID NO: 17380 - DNA, 15 bp, Homo sapiens
tgaactcattaaact

SEQ ID NO: 17381 - DNA, 15 bp, Homo sapiens
ttgaactcattaaac

SEQ ID NO: 17382 - DNA, 15 bp, Homo sapiens
gttgaactcattaaa

SEQ ID NO: 17383 - DNA, 15 bp, Homo sapiens
agttgaactcattaa

SEQ ID NO: 17384 - DNA, 15 bp, Homo sapiens
cagttgaactcatta

SEQ ID NO: 17385 - DNA, 15 bp, Homo sapiens
ccagttgaactcatt

SEQ ID NO: 17386 - DNA, 15 bp, Homo sapiens
cccagttgaactcat

SEQ ID NO: 17387 - DNA, 15 bp, Homo sapiens
tcccagttgaactca

SEQ ID NO: 17388 - DNA, 15 bp, Homo sapiens
ttcccagttgaactc

SEQ ID NO: 17389 - DNA, 15 bp, Homo sapiens
tttcccagttgaact

SEQ ID NO: 17390 - DNA, 15 bp, Homo sapiens
ttttcccagttgaac

SEQ ID NO: 17391 - DNA, 15 bp, Homo sapiens
tttttcccagttgaa

SEQ ID NO: 17392 - DNA, 15 bp, Homo sapiens
ttttttcccagttga

SEQ ID NO: 17393 - DNA, 15 bp, Homo sapiens
cttttttcccagttg

SEQ ID NO: 17394 - DNA, 15 bp, Homo sapiens
acttttttcccagtt

SEQ ID NO: 17395 - DNA, 15 bp, Homo sapiens
aacttttttcccagt

SEQ ID NO: 17396 - DNA, 15 bp, Homo sapiens
taacttttttcccag

SEQ ID NO: 17397 - DNA, 15 bp, Homo sapiens
ctaacttttttccca

SEQ ID NO: 17398 - DNA, 15 bp, Homo sapiens
actaacttttttccc

SEQ ID NO: 17399 - DNA, 15 bp, Homo sapiens
aactaacttttttcc

SEQ ID NO: 17400 - DNA, 15 bp, Homo sapiens
gaactaacttttttc

SEQ ID NO: 17401 - DNA, 15 bp, Homo sapiens
agaactaactttttt

SEQ ID NO: 17402 - DNA, 15 bp, Homo sapiens
tagaactaacttttt

SEQ ID NO: 17403 - DNA, 15 bp, Homo sapiens
atagaactaactttt

SEQ ID NO: 17404 - DNA, 15 bp, Homo sapiens
aatagaactaacttt

SEQ ID NO: 17405 - DNA, 15 bp, Homo sapiens
aaatagaactaactt

SEQ ID NO: 17406 - DNA, 15 bp, Homo sapiens
aaaatagaactaact

SEQ ID NO: 17407 - DNA, 15 bp, Homo sapiens
taaaatagaactaac

SEQ ID NO: 17408 - DNA, 15 bp, Homo sapiens
ctaaaatagaactaa

SEQ ID NO: 17409 - DNA, 15 bp, Homo sapiens
tctaaaatagaacta

SEQ ID NO: 17410 - DNA, 15 bp, Homo sapiens
atctaaaatagaact

SEQ ID NO: 17411 - DNA, 15 bp, Homo sapiens
catctaaaatagaac

SEQ ID NO: 17412 - DNA, 15 bp, Homo sapiens
acatctaaaatagaa

SEQ ID NO: 17413 - DNA, 15 bp, Homo sapiens
aacatctaaaataga

SEQ ID NO: 17414 - DNA, 15 bp, Homo sapiens
caacatctaaaatag

SEQ ID NO: 17415 - DNA, 15 bp, Homo sapiens
acaacatctaaaata

SEQ ID NO: 17416 - DNA, 15 bp, Homo sapiens
cacaacatctaaaat

SEQ ID NO: 17417 - DNA, 15 bp, Homo sapiens
acacaacatctaaaa

SEQ ID NO: 17418 - DNA, 15 bp, Homo sapiens
gacacaacatctaaa

SEQ ID NO: 17419 - DNA, 15 bp, Homo sapiens
tgacacaacatctaa

SEQ ID NO: 17420 - DNA, 15 bp, Homo sapiens
gtgacacaacatcta

SEQ ID NO: 17421 - DNA, 15 bp, Homo sapiens
agtgacacaacatct

SEQ ID NO: 17422 - DNA, 15 bp, Homo sapiens
cagtgacacaacatc

SEQ ID NO: 17423 - DNA, 15 bp, Homo sapiens
ccagtgacacaacat

SEQ ID NO: 17424 - DNA, 15 bp, Homo sapiens
tccagtgacacaaca

SEQ ID NO: 17425 - DNA, 15 bp, Homo sapiens
ttccagtgacacaac

SEQ ID NO: 17426 - DNA, 15 bp, Homo sapiens
tttccagtgacacaa

SEQ ID NO: 17427 - DNA, 15 bp, Homo sapiens
atttccagtgacaca

SEQ ID NO: 17428 - DNA, 15 bp, Homo sapiens
aatttccagtgacac

SEQ ID NO: 17429 - DNA, 15 bp, Homo sapiens
taatttccagtgaca

SEQ ID NO: 17430 - DNA, 15 bp, Homo sapiens
ataatttccagtgac

SEQ ID NO: 17431 - DNA, 15 bp, Homo sapiens
cataatttccagtga

SEQ ID NO: 17432 - DNA, 15 bp, Homo sapiens
acataatttccagtg

SEQ ID NO: 17433 - DNA, 15 bp, Homo sapiens
aacataatttccagt

SEQ ID NO: 17434 - DNA, 15 bp, Homo sapiens
aaacataatttccag

SEQ ID NO: 17435 - DNA, 15 bp, Homo sapiens
gaaacataatttcca

SEQ ID NO: 17436 - DNA, 15 bp, Homo sapiens
ggaaacataatttcc

SEQ ID NO: 17437 - DNA, 15 bp, Homo sapiens
gggaaacataatttc

SEQ ID NO: 17438 - DNA, 15 bp, Homo sapiens
agggaaacataattt

SEQ ID NO: 17439 - DNA, 15 bp, Homo sapiens
cagggaaacataatt

SEQ ID NO: 17440 - DNA, 15 bp, Homo sapiens
acagggaaacataat

SEQ ID NO: 17441 - DNA, 15 bp, Homo sapiens
aacagggaaacataa

SEQ ID NO: 17442 - DNA, 15 bp, Homo sapiens
aaacagggaaacata

SEQ ID NO: 17443 - DNA, 15 bp, Homo sapiens
caaacagggaaacat

SEQ ID NO: 17444 - DNA, 15 bp, Homo sapiens
acaaacagggaaaca

SEQ ID NO: 17445 - DNA, 15 bp, Homo sapiens
aacaaacagggaaac

SEQ ID NO: 17446 - DNA, 15 bp, Homo sapiens
taacaaacagggaaa

SEQ ID NO: 17447 - DNA, 15 bp, Homo sapiens
ataacaaacagggaa

SEQ ID NO: 17448 - DNA, 15 bp, Homo sapiens
tataacaaacaggga

SEQ ID NO: 17449 - DNA, 15 bp, Homo sapiens
atataacaaacaggg

SEQ ID NO: 17450 - DNA, 15 bp, Homo sapiens
catataacaaacagg

SEQ ID NO: 17451 - DNA, 15 bp, Homo sapiens
gcatataacaaacag

SEQ ID NO: 17452 - DNA, 15 bp, Homo sapiens
tgcatataacaaaca

SEQ ID NO: 17453 - DNA, 15 bp, Homo sapiens
gtgcatataacaaac

SEQ ID NO: 17454 - DNA, 15 bp, Homo sapiens
tgtgcatataacaaa

SEQ ID NO: 17455 - DNA, 15 bp, Homo sapiens
atgtgcatataacaa

SEQ ID NO: 17456 - DNA, 15 bp, Homo sapiens
aatgtgcatataaca

SEQ ID NO: 17457 - DNA, 15 bp, Homo sapiens
taatgtgcatataac

SEQ ID NO: 17458 - DNA, 15 bp, Homo sapiens
ataatgtgcatataa

SEQ ID NO: 17459 - DNA, 15 bp, Homo sapiens
aataatgtgcatata

SEQ ID NO: 17460 - DNA, 15 bp, Homo sapiens
taataatgtgcatat

SEQ ID NO: 17461 - DNA, 15 bp, Homo sapiens
gtaataatgtgcata

SEQ ID NO: 17462 - DNA, 15 bp, Homo sapiens
tgtaataatgtgcat

SEQ ID NO: 17463 - DNA, 15 bp, Homo sapiens
ttgtaataatgtgca

SEQ ID NO: 17464 - DNA, 15 bp, Homo sapiens
tttgtaataatgtgc

SEQ ID NO: 17465 - DNA, 15 bp, Homo sapiens
ctttgtaataatgtg

SEQ ID NO: 17466 - DNA, 15 bp, Homo sapiens
actttgtaataatgt

SEQ ID NO: 17467 - DNA, 15 bp, Homo sapiens
aactttgtaataatg

SEQ ID NO: 17468 - DNA, 15 bp, Homo sapiens
caactttgtaataat

SEQ ID NO: 17469 - DNA, 15 bp, Homo sapiens
acaactttgtaataa

SEQ ID NO: 17470 - DNA, 15 bp, Homo sapiens
tacaactttgtaata

SEQ ID NO: 17471 - DNA, 15 bp, Homo sapiens
ttacaactttgtaat

SEQ ID NO: 17472 - DNA, 15 bp, Homo sapiens
attacaactttgtaa

SEQ ID NO: 17473 - DNA, 15 bp, Homo sapiens
gattacaactttgta

SEQ ID NO: 17474 - DNA, 15 bp, Homo sapiens
tgattacaactttgt

SEQ ID NO: 17475 - DNA, 15 bp, Homo sapiens
ttgattacaactttg

SEQ ID NO: 17476 - DNA, 15 bp, Homo sapiens
attgattacaacttt

SEQ ID NO: 17477 - DNA, 15 bp, Homo sapiens
cattgattacaactt

SEQ ID NO: 17478 - DNA, 15 bp, Homo sapiens
acattgattacaact

SEQ ID NO: 17479 - DNA, 15 bp, Homo sapiens
aacattgattacaac

SEQ ID NO: 17480 - DNA, 15 bp, Homo sapiens
aaacattgattacaa

SEQ ID NO: 17481 - DNA, 15 bp, Homo sapiens
aaaacattgattaca

SEQ ID NO: 17482 - DNA, 15 bp, Homo sapiens
gaaaacattgattac

SEQ ID NO: 17483 - DNA, 15 bp, Homo sapiens
tgaaaacattgatta

SEQ ID NO: 17484 - DNA, 15 bp, Homo sapiens
atgaaaacattgatt

SEQ ID NO: 17485 - DNA, 15 bp, Homo sapiens
tatgaaaacattgat

SEQ ID NO: 17486 - DNA, 15 bp, Homo sapiens
gtatgaaaacattga

SEQ ID NO: 17487 - DNA, 15 bp, Homo sapiens
agtatgaaaacattg

SEQ ID NO: 17488 - DNA, 15 bp, Homo sapiens
cagtatgaaaacatt

SEQ ID NO: 17489 - DNA, 15 bp, Homo sapiens
acagtatgaaaacat

SEQ ID NO: 17490 - DNA, 15 bp, Homo sapiens
aacagtatgaaaaca

SEQ ID NO: 17491 - DNA, 15 bp, Homo sapiens
gaacagtatgaaaac

SEQ ID NO: 17492 - DNA, 15 bp, Homo sapiens
agaacagtatgaaaa

SEQ ID NO: 17493 - DNA, 15 bp, Homo sapiens
gagaacagtatgaaa

SEQ ID NO: 17494 - DNA, 15 bp, Homo sapiens
agagaacagtatgaa

SEQ ID NO: 17495 - DNA, 15 bp, Homo sapiens
cagagaacagtatga

SEQ ID NO: 17496 - DNA, 15 bp, Homo sapiens
ccagagaacagtatg

SEQ ID NO: 17497 - DNA, 15 bp, Homo sapiens
accagagaacagtat

SEQ ID NO: 17498 - DNA, 15 bp, Homo sapiens
gaccagagaacagta

SEQ ID NO: 17499 - DNA, 15 bp, Homo sapiens
agaccagagaacagt

SEQ ID NO: 17500 - DNA, 15 bp, Homo sapiens
gtggcttagaaatct

SEQ ID NO: 17501 - DNA, 15 bp, Homo sapiens
tgtggcttagaaatc

SEQ ID NO: 17502 - DNA, 15 bp, Homo sapiens
ctgtggcttagaaat

SEQ ID NO: 17503 - DNA, 15 bp, Homo sapiens
tctgtggcttagaaa

SEQ ID NO: 17504 - DNA, 15 bp, Homo sapiens
ttctgtggcttagaa

SEQ ID NO: 17505 - DNA, 15 bp, Homo sapiens
tttctgtggcttaga

SEQ ID NO: 17506 - DNA, 15 bp, Homo sapiens
ttttctgtggcttag

SEQ ID NO: 17507 - DNA, 15 bp, Homo sapiens
tttttctgtggctta

SEQ ID NO: 17508 - DNA, 15 bp, Homo sapiens
ctttttctgtggctt

SEQ ID NO: 17509 - DNA, 15 bp, Homo sapiens
tctttttctgtggct

SEQ ID NO: 17510 - DNA, 15 bp, Homo sapiens
atctttttctgtggc

SEQ ID NO: 17511 - DNA, 15 bp, Homo sapiens
tatctttttctgtgg

SEQ ID NO: 17512 - DNA, 15 bp, Homo sapiens
gtatctttttctgtg

SEQ ID NO: 17513 - DNA, 15 bp, Homo sapiens
agtatctttttctgt

SEQ ID NO: 17514 - DNA, 15 bp, Homo sapiens
aagtatctttttctg

SEQ ID NO: 17515 - DNA, 15 bp, Homo sapiens
aaagtatctttttct

SEQ ID NO: 17516 - DNA, 15 bp, Homo sapiens
caaagtatctttttc

SEQ ID NO: 17517 - DNA, 15 bp, Homo sapiens
acaaagtatcttttt

SEQ ID NO: 17518 - DNA, 15 bp, Homo sapiens
cacaaagtatctttt

SEQ ID NO: 17519 - DNA, 15 bp, Homo sapiens
tcacaaagtatcttt

SEQ ID NO: 17520 - DNA, 15 bp, Homo sapiens
atcacaaagtatctt

SEQ ID NO: 17521 - DNA, 15 bp, Homo sapiens
catcacaaagtatct

SEQ ID NO: 17522 - DNA, 15 bp, Homo sapiens
acatcacaaagtatc

SEQ ID NO: 17523 - DNA, 15 bp, Homo sapiens
tacatcacaaagtat

SEQ ID NO: 17524 - DNA, 15 bp, Homo sapiens
ttacatcacaaagta

SEQ ID NO: 17525 - DNA, 15 bp, Homo sapiens
tttacatcacaaagt

SEQ ID NO: 17526 - DNA, 15 bp, Homo sapiens
gtttacatcacaaag

SEQ ID NO: 17527 - DNA, 15 bp, Homo sapiens
agtttacatcacaaa

SEQ ID NO: 17528 - DNA, 15 bp, Homo sapiens
tagtttacatcacaa

SEQ ID NO: 17529 - DNA, 15 bp, Homo sapiens
atagtttacatcaca

SEQ ID NO: 17530 - DNA, 15 bp, Homo sapiens
aatagtttacatcac

SEQ ID NO: 17531 - DNA, 15 bp, Homo sapiens
taatagtttacatca

SEQ ID NO: 17532 - DNA, 15 bp, Homo sapiens
ataatagtttacatc

SEQ ID NO: 17533 - DNA, 15 bp, Homo sapiens
aataatagtttacat

SEQ ID NO: 17534 - DNA, 15 bp, Homo sapiens
caataatagtttaca

SEQ ID NO: 17535 - DNA, 15 bp, Homo sapiens
acaataatagtttac

SEQ ID NO: 17536 - DNA, 15 bp, Homo sapiens
tacaataatagttta

SEQ ID NO: 17537 - DNA, 15 bp, Homo sapiens
ctacaataatagttt

SEQ ID NO: 17538 - DNA, 15 bp, Homo sapiens
actacaataatagtt

SEQ ID NO: 17539 - DNA, 15 bp, Homo sapiens
cactacaataatagt

SEQ ID NO: 17540 - DNA, 15 bp, Homo sapiens
gcactacaataatag

SEQ ID NO: 17541 - DNA, 15 bp, Homo sapiens
agcactacaataata

SEQ ID NO: 17542 - DNA, 15 bp, Homo sapiens
gagcactacaataat

SEQ ID NO: 17543 - DNA, 15 bp, Homo sapiens
agagcactacaataa

SEQ ID NO: 17544 - DNA, 15 bp, Homo sapiens
tagagcactacaata

SEQ ID NO: 17545 - DNA, 15 bp, Homo sapiens
atagagcactacaat

SEQ ID NO: 17546 - DNA, 15 bp, Homo sapiens
tatagagcactacaa

SEQ ID NO: 17547 - DNA, 15 bp, Homo sapiens
ttatagagcactaca

SEQ ID NO: 17548 - DNA, 15 bp, Homo sapiens
attatagagcactac

SEQ ID NO: 17549 - DNA, 15 bp, Homo sapiens
gattatagagcacta

SEQ ID NO: 17550 - DNA, 15 bp, Homo sapiens
tgattatagagcact

SEQ ID NO: 17551 - DNA, 15 bp, Homo sapiens
atgattatagagcac

SEQ ID NO: 17552 - DNA, 15 bp, Homo sapiens
aatgattatagagca

SEQ ID NO: 17553 - DNA, 15 bp, Homo sapiens
aaatgattatagagc

SEQ ID NO: 17554 - DNA, 15 bp, Homo sapiens
aaaatgattatagag

SEQ ID NO: 17555 - DNA, 15 bp, Homo sapiens
aaaaatgattataga

SEQ ID NO: 17556 - DNA, 15 bp, Homo sapiens
aaaaaatgattatag

SEQ ID NO: 17557 - DNA, 15 bp, Homo sapiens
caaaaaatgattata

SEQ ID NO: 17558 - DNA, 15 bp, Homo sapiens
ccaaaaaatgattat

SEQ ID NO: 17559 - DNA, 15 bp, Homo sapiens
gccaaaaaatgatta

SEQ ID NO: 17560 - DNA, 15 bp, Homo sapiens
agccaaaaaatgatt

SEQ ID NO: 17561 - DNA, 15 bp, Homo sapiens
aagccaaaaaatgat

SEQ ID NO: 17562 - DNA, 15 bp, Homo sapiens
taagccaaaaaatga

SEQ ID NO: 17563 - DNA, 15 bp, Homo sapiens
gtaagccaaaaaatg

SEQ ID NO: 17564 - DNA, 15 bp, Homo sapiens
ggtaagccaaaaaat

SEQ ID NO: 17565 - DNA, 15 bp, Homo sapiens
cggtaagccaaaaaa

SEQ ID NO: 17566 - DNA, 15 bp, Homo sapiens
acggtaagccaaaaa

SEQ ID NO: 17567 - DNA, 15 bp, Homo sapiens
tacggtaagccaaaa

SEQ ID NO: 17568 - DNA, 15 bp, Homo sapiens
gtacggtaagccaaa

SEQ ID NO: 17569 - DNA, 15 bp, Homo sapiens
ggtacggtaagccaa

SEQ ID NO: 17570 - DNA, 15 bp, Homo sapiens
aggtacggtaagcca

SEQ ID NO: 17571 - DNA, 15 bp, Homo sapiens
taggtacggtaagcc

SEQ ID NO: 17572 - DNA, 15 bp, Homo sapiens
ttaggtacggtaagc

SEQ ID NO: 17573 - DNA, 15 bp, Homo sapiens
attaggtacggtaag

SEQ ID NO: 17574 - DNA, 15 bp, Homo sapiens
cattaggtacggtaa

SEQ ID NO: 17575 - DNA, 15 bp, Homo sapiens
ccattaggtacggta

SEQ ID NO: 17576 - DNA, 15 bp, Homo sapiens
tccattaggtacggt

SEQ ID NO: 17577 - DNA, 15 bp, Homo sapiens
gtccattaggtacgg

SEQ ID NO: 17578 - DNA, 15 bp, Homo sapiens
agtccattaggtacg

SEQ ID NO: 17579 - DNA, 15 bp, Homo sapiens
aagtccattaggtac

SEQ ID NO: 17580 - DNA, 15 bp, Homo sapiens
gaagtccattaggta

SEQ ID NO: 17581 - DNA, 15 bp, Homo sapiens
tgaagtccattaggt

SEQ ID NO: 17582 - DNA, 15 bp, Homo sapiens
ctgaagtccattagg

SEQ ID NO: 17583 - DNA, 15 bp, Homo sapiens
cctgaagtccattag

SEQ ID NO: 17584 - DNA, 15 bp, Homo sapiens
ccctgaagtccatta

SEQ ID NO: 17585 - DNA, 15 bp, Homo sapiens
cccctgaagtccatt

SEQ ID NO: 17586 - DNA, 15 bp, Homo sapiens
ccccctgaagtccat

SEQ ID NO: 17587 - DNA, 15 bp, Homo sapiens
tccccctgaagtcca

SEQ ID NO: 17588 - DNA, 15 bp, Homo sapiens
atccccctgaagtcc

SEQ ID NO: 17589 - DNA, 15 bp, Homo sapiens
tatccccctgaagtc

SEQ ID NO: 17590 - DNA, 15 bp, Homo sapiens
gtatccccctgaagt

SEQ ID NO: 17591 - DNA, 15 bp, Homo sapiens
tgtatccccctgaag

SEQ ID NO: 17592 - DNA, 15 bp, Homo sapiens
ctgtatccccctgaa

SEQ ID NO: 17593 - DNA, 15 bp, Homo sapiens
actgtatccccctga

SEQ ID NO: 17594 - DNA, 15 bp, Homo sapiens
aactgtatccccctg

SEQ ID NO: 17595 - DNA, 15 bp, Homo sapiens
gaactgtatccccct

SEQ ID NO: 17596 - DNA, 15 bp, Homo sapiens
tgaactgtatccccc

SEQ ID NO: 17597 - DNA, 15 bp, Homo sapiens
atgaactgtatcccc

SEQ ID NO: 17598 - DNA, 15 bp, Homo sapiens
aatgaactgtatccc

SEQ ID NO: 17599 - DNA, 15 bp, Homo sapiens
aaatgaactgtatcc

SEQ ID NO: 17600 - DNA, 15 bp, Homo sapiens
caaatgaactgtatc

SEQ ID NO: 17601 - DNA, 15 bp, Homo sapiens
tcaaatgaactgtat

SEQ ID NO: 17602 - DNA, 15 bp, Homo sapiens
atcaaatgaactgta

SEQ ID NO: 17603 - DNA, 15 bp, Homo sapiens
tatcaaatgaactgt

SEQ ID NO: 17604 - DNA, 15 bp, Homo sapiens
ttatcaaatgaactg

SEQ ID NO: 17605 - DNA, 15 bp, Homo sapiens
cttatcaaatgaact

SEQ ID NO: 17606 - DNA, 15 bp, Homo sapiens
tcttatcaaatgaac

SEQ ID NO: 17607 - DNA, 15 bp, Homo sapiens
ttcttatcaaatgaa

SEQ ID NO: 17608 - DNA, 15 bp, Homo sapiens
gttcttatcaaatga

SEQ ID NO: 17609 - DNA, 15 bp, Homo sapiens
agttcttatcaaatg

SEQ ID NO: 17610 - DNA, 15 bp, Homo sapiens
cagttcttatcaaat

SEQ ID NO: 17611 - DNA, 15 bp, Homo sapiens
tcagttcttatcaaa

SEQ ID NO: 17612 - DNA, 15 bp, Homo sapiens
gtcagttcttatcaa

SEQ ID NO: 17613 - DNA, 15 bp, Homo sapiens
ggtcagttcttatca

SEQ ID NO: 17614 - DNA, 15 bp, Homo sapiens
aggtcagttcttatc

SEQ ID NO: 17615 - DNA, 15 bp, Homo sapiens
aaggtcagttcttat

SEQ ID NO: 17616 - DNA, 15 bp, Homo sapiens
taaggtcagttctta

SEQ ID NO: 17617 - DNA, 15 bp, Homo sapiens
ataaggtcagttctt

SEQ ID NO: 17618 - DNA, 15 bp, Homo sapiens
tataaggtcagttct

SEQ ID NO: 17619 - DNA, 15 bp, Homo sapiens
gtataaggtcagttc

SEQ ID NO: 17620 - DNA, 15 bp, Homo sapiens
tgtataaggtcagtt

SEQ ID NO: 17621 - DNA, 15 bp, Homo sapiens
atgtataaggtcagt

SEQ ID NO: 17622 - DNA, 15 bp, Homo sapiens
aatgtataaggtcag

SEQ ID NO: 17623 - DNA, 15 bp, Homo sapiens
taatgtataaggtca

SEQ ID NO: 17624 - DNA, 15 bp, Homo sapiens
gtaatgtataaggtc

SEQ ID NO: 17625 - DNA, 15 bp, Homo sapiens
tgtaatgtataaggt

SEQ ID NO: 17626 - DNA, 15 bp, Homo sapiens
atgtaatgtataagg

SEQ ID NO: 17627 - DNA, 15 bp, Homo sapiens
tatgtaatgtataag

SEQ ID NO: 17628 - DNA, 15 bp, Homo sapiens
ttatgtaatgtataa

SEQ ID NO: 17629 - DNA, 15 bp, Homo sapiens
attatgtaatgtata

SEQ ID NO: 17630 - DNA, 15 bp, Homo sapiens
gattatgtaatgtat

SEQ ID NO: 17631 - DNA, 15 bp, Homo sapiens
tgattatgtaatgta

SEQ ID NO: 17632 - DNA, 15 bp, Homo sapiens
ctgattatgtaatgt

SEQ ID NO: 17633 - DNA, 15 bp, Homo sapiens
cctgattatgtaatg

SEQ ID NO: 17634 - DNA, 15 bp, Homo sapiens
acctgattatgtaat

SEQ ID NO: 17635 - DNA, 15 bp, Homo sapiens
tacctgattatgtaa

SEQ ID NO: 17636 - DNA, 15 bp, Homo sapiens
gtacctgattatgta

SEQ ID NO: 17637 - DNA, 15 bp, Homo sapiens
agtacctgattatgt

SEQ ID NO: 17638 - DNA, 15 bp, Homo sapiens
aagtacctgattatg

SEQ ID NO: 17639 - DNA, 15 bp, Homo sapiens
taagtacctgattat

SEQ ID NO: 17640 - DNA, 15 bp, Homo sapiens
ataagtacctgatta

SEQ ID NO: 17641 - DNA, 15 bp, Homo sapiens
cataagtacctgatt

SEQ ID NO: 17642 - DNA, 15 bp, Homo sapiens
acataagtacctgat

SEQ ID NO: 17643 - DNA, 15 bp, Homo sapiens
cacataagtacctga

SEQ ID NO: 17644 - DNA, 15 bp, Homo sapiens
tcacataagtacctg

SEQ ID NO: 17645 - DNA, 15 bp, Homo sapiens
atcacataagtacct

SEQ ID NO: 17646 - DNA, 15 bp, Homo sapiens
tatcacataagtacc

SEQ ID NO: 17647 - DNA, 15 bp, Homo sapiens
atatcacataagtac

SEQ ID NO: 17648 - DNA, 15 bp, Homo sapiens
gatatcacataagta

SEQ ID NO: 17649 - DNA, 15 bp, Homo sapiens
tgatatcacataagt

SEQ ID NO: 17650 - DNA, 15 bp, Homo sapiens
atgatatcacataag

SEQ ID NO: 17651 - DNA, 15 bp, Homo sapiens
aatgatatcacataa

SEQ ID NO: 17652 - DNA, 15 bp, Homo sapiens
aaatgatatcacata

SEQ ID NO: 17653 - DNA, 15 bp, Homo sapiens
gaaatgatatcacat

SEQ ID NO: 17654 - DNA, 15 bp, Homo sapiens
ggaaatgatatcaca

SEQ ID NO: 17655 - DNA, 15 bp, Homo sapiens
aggaaatgatatcac

SEQ ID NO: 17656 - DNA, 15 bp, Homo sapiens
caggaaatgatatca

SEQ ID NO: 17657 - DNA, 15 bp, Homo sapiens
ccaggaaatgatatc

SEQ ID NO: 17658 - DNA, 15 bp, Homo sapiens
tccaggaaatgatat

SEQ ID NO: 17659 - DNA, 15 bp, Homo sapiens
gtccaggaaatgata

SEQ ID NO: 17660 - DNA, 15 bp, Homo sapiens
agtccaggaaatgat

SEQ ID NO: 17661 - DNA, 15 bp, Homo sapiens
gagtccaggaaatga

SEQ ID NO: 17662 - DNA, 15 bp, Homo sapiens
ggagtccaggaaatg

SEQ ID NO: 17663 - DNA, 15 bp, Homo sapiens
tggagtccaggaaat

SEQ ID NO: 17664 - DNA, 15 bp, Homo sapiens
atggagtccaggaaa

SEQ ID NO: 17665 - DNA, 15 bp, Homo sapiens
tatggagtccaggaa

SEQ ID NO: 17666 - DNA, 15 bp, Homo sapiens
ttatggagtccagga

SEQ ID NO: 17667 - DNA, 15 bp, Homo sapiens
tttatggagtccagg

SEQ ID NO: 17668 - DNA, 15 bp, Homo sapiens
ttttatggagtccag

SEQ ID NO: 17669 - DNA, 15 bp, Homo sapiens
attttatggagtcca

SEQ ID NO: 17670 - DNA, 15 bp, Homo sapiens
cattttatggagtcc

SEQ ID NO: 17671 - DNA, 15 bp, Homo sapiens
gcattttatggagtc

SEQ ID NO: 17672 - DNA, 15 bp, Homo sapiens
agcattttatggagt

SEQ ID NO: 17673 - DNA, 15 bp, Homo sapiens
cagcattttatggag

SEQ ID NO: 17674 - DNA, 15 bp, Homo sapiens
ccagcattttatgga

SEQ ID NO: 17675 - DNA, 15 bp, Homo sapiens
accagcattttatgg

SEQ ID NO: 17676 - DNA, 15 bp, Homo sapiens
gaccagcattttatg

SEQ ID NO: 17677 - DNA, 15 bp, Homo sapiens
tgaccagcattttat

SEQ ID NO: 17678 - DNA, 15 bp, Homo sapiens
gtgaccagcatttta

SEQ ID NO: 17679 - DNA, 15 bp, Homo sapiens
ggtgaccagcatttt

SEQ ID NO: 17680 - DNA, 15 bp, Homo sapiens
tggtgaccagcattt

SEQ ID NO: 17681 - DNA, 15 bp, Homo sapiens
ctggtgaccagcatt

SEQ ID NO: 17682 - DNA, 15 bp, Homo sapiens
cctggtgaccagcat

SEQ ID NO: 17683 - DNA, 15 bp, Homo sapiens
acctggtgaccagca

SEQ ID NO: 17684 - DNA, 15 bp, Homo sapiens
aacctggtgaccagc

SEQ ID NO: 17685 - DNA, 15 bp, Homo sapiens
aaacctggtgaccag

SEQ ID NO: 17686 - DNA, 15 bp, Homo sapiens
taaacctggtgacca

SEQ ID NO: 17687 - DNA, 15 bp, Homo sapiens
ttaaacctggtgacc

SEQ ID NO: 17688 - DNA, 15 bp, Homo sapiens
attaaacctggtgac

SEQ ID NO: 17689 - DNA, 15 bp, Homo sapiens
tattaaacctggtga

SEQ ID NO: 17690 - DNA, 15 bp, Homo sapiens
gtattaaacctggtg

SEQ ID NO: 17691 - DNA, 15 bp, Homo sapiens
ggtattaaacctggt

SEQ ID NO: 17692 - DNA, 15 bp, Homo sapiens
aggtattaaacctgg

SEQ ID NO: 17693 - DNA, 15 bp, Homo sapiens
caggtattaaacctg

SEQ ID NO: 17694 - DNA, 15 bp, Homo sapiens
ccaggtattaaacct

SEQ ID NO: 17695 - DNA, 15 bp, Homo sapiens
tccaggtattaaacc

SEQ ID NO: 17696 - DNA, 15 bp, Homo sapiens
atccaggtattaaac

SEQ ID NO: 17697 - DNA, 15 bp, Homo sapiens
aatccaggtattaaa

SEQ ID NO: 17698 - DNA, 15 bp, Homo sapiens
gaatccaggtattaa

SEQ ID NO: 17699 - DNA, 15 bp, Homo sapiens
ggaatccaggtatta

SEQ ID NO: 17700 - DNA, 15 bp, Homo sapiens
tggaatccaggtatt

SEQ ID NO: 17701 - DNA, 15 bp, Homo sapiens
atggaatccaggtat

SEQ ID NO: 17702 - DNA, 15 bp, Homo sapiens
aatggaatccaggta

SEQ ID NO: 17703 - DNA, 15 bp, Homo sapiens
taatggaatccaggt

SEQ ID NO: 17704 - DNA, 15 bp, Homo sapiens
gtaatggaatccagg

SEQ ID NO: 17705 - DNA, 15 bp, Homo sapiens
tgtaatggaatccag

SEQ ID NO: 17706 - DNA, 15 bp, Homo sapiens
ctgtaatggaatcca

SEQ ID NO: 17707 - DNA, 15 bp, Homo sapiens
actgtaatggaatcc

SEQ ID NO: 17708 - DNA, 15 bp, Homo sapiens
cactgtaatggaatc

SEQ ID NO: 17709 - DNA, 15 bp, Homo sapiens
acactgtaatggaat

SEQ ID NO: 17710 - DNA, 15 bp, Homo sapiens
cacactgtaatggaa

SEQ ID NO: 17711 - DNA, 15 bp, Homo sapiens
tcacactgtaatgga

SEQ ID NO: 17712 - DNA, 15 bp, Homo sapiens
atcacactgtaatgg

SEQ ID NO: 17713 - DNA, 15 bp, Homo sapiens
aatcacactgtaatg

SEQ ID NO: 17714 - DNA, 15 bp, Homo sapiens
aaatcacactgtaat

SEQ ID NO: 17715 - DNA, 15 bp, Homo sapiens
aaaatcacactgtaa

SEQ ID NO: 17716 - DNA, 15 bp, Homo sapiens
aaaaatcacactgta

SEQ ID NO: 17717 - DNA, 15 bp, Homo sapiens
caaaaatcacactgt

SEQ ID NO: 17718 - DNA, 15 bp, Homo sapiens
acaaaaatcacactg

SEQ ID NO: 17719 - DNA, 15 bp, Homo sapiens
gacaaaaatcacact

SEQ ID NO: 17720 - DNA, 15 bp, Homo sapiens
agacaaaaatcacac

SEQ ID NO: 17721 - DNA, 15 bp, Homo sapiens
aagacaaaaatcaca

SEQ ID NO: 17722 - DNA, 15 bp, Homo sapiens
taagacaaaaatcac

SEQ ID NO: 17723 - DNA, 15 bp, Homo sapiens
ataagacaaaaatca

SEQ ID NO: 17724 - DNA, 15 bp, Homo sapiens
aataagacaaaaatc

SEQ ID NO: 17725 - DNA, 15 bp, Homo sapiens
aaataagacaaaaat

SEQ ID NO: 17726 - DNA, 15 bp, Homo sapiens
gaaataagacaaaaa

SEQ ID NO: 17727 - DNA, 15 bp, Homo sapiens
tgaaataagacaaaa

SEQ ID NO: 17728 - DNA, 15 bp, Homo sapiens
atgaaataagacaaa

SEQ ID NO: 17729 - DNA, 15 bp, Homo sapiens
tatgaaataagacaa

SEQ ID NO: 17730 - DNA, 15 bp, Homo sapiens
ctatgaaataagaca

SEQ ID NO: 17731 - DNA, 15 bp, Homo sapiens
actatgaaataagac

SEQ ID NO: 17732 - DNA, 15 bp, Homo sapiens
aactatgaaataaga

SEQ ID NO: 17733 - DNA, 15 bp, Homo sapiens
caactatgaaataag

SEQ ID NO: 17734 - DNA, 15 bp, Homo sapiens
ccaactatgaaataa

SEQ ID NO: 17735 - DNA, 15 bp, Homo sapiens
cccaactatgaaata

SEQ ID NO: 17736 - DNA, 15 bp, Homo sapiens
ccccaactatgaaat

SEQ ID NO: 17737 - DNA, 15 bp, Homo sapiens
tccccaactatgaaa

SEQ ID NO: 17738 - DNA, 15 bp, Homo sapiens
atccccaactatgaa

SEQ ID NO: 17739 - DNA, 15 bp, Homo sapiens
aatccccaactatga

SEQ ID NO: 17740 - DNA, 15 bp, Homo sapiens
taatccccaactatg

SEQ ID NO: 17741 - DNA, 15 bp, Homo sapiens
ctaatccccaactat

SEQ ID NO: 17742 - DNA, 15 bp, Homo sapiens
cctaatccccaacta

SEQ ID NO: 17743 - DNA, 15 bp, Homo sapiens
gcctaatccccaact

SEQ ID NO: 17744 - DNA, 15 bp, Homo sapiens
agcctaatccccaac

SEQ ID NO: 17745 - DNA, 15 bp, Homo sapiens
aagcctaatccccaa

SEQ ID NO: 17746 - DNA, 15 bp, Homo sapiens
taagcctaatcccca

SEQ ID NO: 17747 - DNA, 15 bp, Homo sapiens
ttaagcctaatcccc

SEQ ID NO: 17748 - DNA, 15 bp, Homo sapiens
tttaagcctaatccc

SEQ ID NO: 17749 - DNA, 15 bp, Homo sapiens
ttttaagcctaatcc

SEQ ID NO: 17750 - DNA, 15 bp, Homo sapiens
attttaagcctaatc

SEQ ID NO: 17751 - DNA, 15 bp, Homo sapiens
gattttaagcctaat

SEQ ID NO: 17752 - DNA, 15 bp, Homo sapiens
ggattttaagcctaa

SEQ ID NO: 17753 - DNA, 15 bp, Homo sapiens
aggattttaagccta

SEQ ID NO: 17754 - DNA, 15 bp, Homo sapiens
taggattttaagcct

SEQ ID NO: 17755 - DNA, 15 bp, Homo sapiens
ctaggattttaagcc

SEQ ID NO: 17756 - DNA, 15 bp, Homo sapiens
tctaggattttaagc

SEQ ID NO: 17757 - DNA, 15 bp, Homo sapiens
ctctaggattttaag

SEQ ID NO: 17758 - DNA, 15 bp, Homo sapiens
actctaggattttaa

SEQ ID NO: 17759 - DNA, 15 bp, Homo sapiens
cactctaggatttta

SEQ ID NO: 17760 - DNA, 15 bp, Homo sapiens
ccactctaggatttt

SEQ ID NO: 17761 - DNA, 15 bp, Homo sapiens
tccactctaggattt

SEQ ID NO: 17762 - DNA, 15 bp, Homo sapiens
atccactctaggatt

SEQ ID NO: 17763 - DNA, 15 bp, Homo sapiens
aatccactctaggat

SEQ ID NO: 17764 - DNA, 15 bp, Homo sapiens
aaatccactctagga

SEQ ID NO: 17765 - DNA, 15 bp, Homo sapiens
taaatccactctagg

SEQ ID NO: 17766 - DNA, 15 bp, Homo sapiens
ataaatccactctag

SEQ ID NO: 17767 - DNA, 15 bp, Homo sapiens
aataaatccactcta

SEQ ID NO: 17768 - DNA, 15 bp, Homo sapiens
gaataaatccactct

SEQ ID NO: 17769 - DNA, 15 bp, Homo sapiens
tgaataaatccactc

SEQ ID NO: 17770 - DNA, 15 bp, Homo sapiens
ctgaataaatccact

SEQ ID NO: 17771 - DNA, 15 bp, Homo sapiens
actgaataaatccac

SEQ ID NO: 17772 - DNA, 15 bp, Homo sapiens
aactgaataaatcca

SEQ ID NO: 17773 - DNA, 15 bp, Homo sapiens
taactgaataaatcc

SEQ ID NO: 17774 - DNA, 15 bp, Homo sapiens
ttaactgaataaatc

SEQ ID NO: 17775 - DNA, 15 bp, Homo sapiens
tttaactgaataaat

SEQ ID NO: 17776 - DNA, 15 bp, Homo sapiens
atttaactgaataaa

SEQ ID NO: 17777 - DNA, 15 bp, Homo sapiens
aatttaactgaataa

SEQ ID NO: 17778 - DNA, 15 bp, Homo sapiens
aaatttaactgaata

SEQ ID NO: 17779 - DNA, 15 bp, Homo sapiens
taaatttaactgaat

SEQ ID NO: 17780 - DNA, 15 bp, Homo sapiens
ataaatttaactgaa

SEQ ID NO: 17781 - DNA, 15 bp, Homo sapiens
aataaatttaactga

SEQ ID NO: 17782 - DNA, 15 bp, Homo sapiens
gaataaatttaactg

SEQ ID NO: 17783 - DNA, 15 bp, Homo sapiens
tgaataaatttaact

SEQ ID NO: 17784 - DNA, 15 bp, Homo sapiens
gtgaataaatttaac

SEQ ID NO: 17785 - DNA, 15 bp, Homo sapiens
tgtgaataaatttaa

SEQ ID NO: 17786 - DNA, 15 bp, Homo sapiens
gtgtgaataaattta

SEQ ID NO: 17787 - DNA, 15 bp, Homo sapiens
agtgtgaataaattt

SEQ ID NO: 17788 - DNA, 15 bp, Homo sapiens
tagtgtgaataaatt

SEQ ID NO: 17789 - DNA, 15 bp, Homo sapiens
ttagtgtgaataaat

SEQ ID NO: 17790 - DNA, 15 bp, Homo sapiens
cttagtgtgaataaa

SEQ ID NO: 17791 - DNA, 15 bp, Homo sapiens
tcttagtgtgaataa

SEQ ID NO: 17792 - DNA, 15 bp, Homo sapiens
atcttagtgtgaata

SEQ ID NO: 17793 - DNA, 15 bp, Homo sapiens
catcttagtgtgaat

SEQ ID NO: 17794 - DNA, 15 bp, Homo sapiens
acatcttagtgtgaa

SEQ ID NO: 17795 - DNA, 15 bp, Homo sapiens
tacatcttagtgtga

SEQ ID NO: 17796 - DNA, 15 bp, Homo sapiens
ctacatcttagtgtg

SEQ ID NO: 17797 - DNA, 15 bp, Homo sapiens
tctacatcttagtgt

SEQ ID NO: 17798 - DNA, 15 bp, Homo sapiens
atctacatcttagtg

SEQ ID NO: 17799 - DNA, 15 bp, Homo sapiens
catctacatcttagt

SEQ ID NO: 17800 - DNA, 15 bp, Homo sapiens
tcatctacatcttag

SEQ ID NO: 17801 - DNA, 15 bp, Homo sapiens
gtcatctacatctta

SEQ ID NO: 17802 - DNA, 15 bp, Homo sapiens
agtcatctacatctt

SEQ ID NO: 17803 - DNA, 15 bp, Homo sapiens
tagtcatctacatct

SEQ ID NO: 17804 - DNA, 15 bp, Homo sapiens
ttagtcatctacatc

SEQ ID NO: 17805 - DNA, 15 bp, Homo sapiens
attagtcatctacat

SEQ ID NO: 17806 - DNA, 15 bp, Homo sapiens
tattagtcatctaca

SEQ ID NO: 17807 - DNA, 15 bp, Homo sapiens
gtattagtcatctac

SEQ ID NO: 17808 - DNA, 15 bp, Homo sapiens
agtattagtcatcta

SEQ ID NO: 17809 - DNA, 15 bp, Homo sapiens
cagtattagtcatct

SEQ ID NO: 17810 - DNA, 15 bp, Homo sapiens
acagtattagtcatc

SEQ ID NO: 17811 - DNA, 15 bp, Homo sapiens
tacagtattagtcat

SEQ ID NO: 17812 - DNA, 15 bp, Homo sapiens
atacagtattagtca

SEQ ID NO: 17813 - DNA, 15 bp, Homo sapiens
tatacagtattagtc

SEQ ID NO: 17814 - DNA, 15 bp, Homo sapiens
atatacagtattagt

SEQ ID NO: 17815 - DNA, 15 bp, Homo sapiens
aatatacagtattag

SEQ ID NO: 17816 - DNA, 15 bp, Homo sapiens
aaatatacagtatta

SEQ ID NO: 17817 - DNA, 15 bp, Homo sapiens
aaaatatacagtatt

SEQ ID NO: 17818 - DNA, 15 bp, Homo sapiens
aaaaatatacagtat

SEQ ID NO: 17819 - DNA, 15 bp, Homo sapiens
taaaaatatacagta

SEQ ID NO: 17820 - DNA, 15 bp, Homo sapiens
ataaaaatatacagt

SEQ ID NO: 17821 - DNA, 15 bp, Homo sapiens
cataaaaatatacag

SEQ ID NO: 17822 - DNA, 15 bp, Homo sapiens
acataaaaatataca

SEQ ID NO: 17823 - DNA, 15 bp, Homo sapiens
tacataaaaatatac

SEQ ID NO: 17824 - DNA, 15 bp, Homo sapiens
ctacataaaaatata

SEQ ID NO: 17825 - DNA, 15 bp, Homo sapiens
tctacataaaaatat

SEQ ID NO: 17826 - DNA, 15 bp, Homo sapiens
gtctacataaaaata

SEQ ID NO: 17827 - DNA, 15 bp, Homo sapiens
ggtctacataaaaat

SEQ ID NO: 17828 - DNA, 15 bp, Homo sapiens
tggtctacataaaaa

SEQ ID NO: 17829 - DNA, 15 bp, Homo sapiens
ttggtctacataaaa

SEQ ID NO: 17830 - DNA, 15 bp, Homo sapiens
tttggtctacataaa

SEQ ID NO: 17831 - DNA, 15 bp, Homo sapiens
atttggtctacataa

SEQ ID NO: 17832 - DNA, 15 bp, Homo sapiens
aatttggtctacata

SEQ ID NO: 17833 - DNA, 15 bp, Homo sapiens
aaatttggtctacat

SEQ ID NO: 17834 - DNA, 15 bp, Homo sapiens
aaaatttggtctaca

SEQ ID NO: 17835 - DNA, 15 bp, Homo sapiens
taaaatttggtctac

SEQ ID NO: 17836 - DNA, 15 bp, Homo sapiens
ttaaaatttggtcta

SEQ ID NO: 17837 - DNA, 15 bp, Homo sapiens
cttaaaatttggtct

SEQ ID NO: 17838 - DNA, 15 bp, Homo sapiens
ccttaaaatttggtc

SEQ ID NO: 17839 - DNA, 15 bp, Homo sapiens
accttaaaatttggt

SEQ ID NO: 17840 - DNA, 15 bp, Homo sapiens
taccttaaaatttgg

SEQ ID NO: 17841 - DNA, 15 bp, Homo sapiens
gtaccttaaaatttg

SEQ ID NO: 17842 - DNA, 15 bp, Homo sapiens
ggtaccttaaaattt

SEQ ID NO: 17843 - DNA, 15 bp, Homo sapiens
tggtaccttaaaatt

SEQ ID NO: 17844 - DNA, 15 bp, Homo sapiens
gtggtaccttaaaat

SEQ ID NO: 17845 - DNA, 15 bp, Homo sapiens
agtggtaccttaaaa

SEQ ID NO: 17846 - DNA, 15 bp, Homo sapiens
cagtggtaccttaaa

SEQ ID NO: 17847 - DNA, 15 bp, Homo sapiens
acagtggtaccttaa

SEQ ID NO: 17848 - DNA, 15 bp, Homo sapiens
cacagtggtacctta

SEQ ID NO: 17849 - DNA, 15 bp, Homo sapiens
gcacagtggtacctt

SEQ ID NO: 17850 - DNA, 15 bp, Homo sapiens
tgcacagtggtacct

SEQ ID NO: 17851 - DNA, 15 bp, Homo sapiens
atgcacagtggtacc

SEQ ID NO: 17852 - DNA, 15 bp, Homo sapiens
tatgcacagtggtac

SEQ ID NO: 17853 - DNA, 15 bp, Homo sapiens
atatgcacagtggta

SEQ ID NO: 17854 - DNA, 15 bp, Homo sapiens
catatgcacagtggt

SEQ ID NO: 17855 - DNA, 15 bp, Homo sapiens
acatatgcacagtgg

SEQ ID NO: 17856 - DNA, 15 bp, Homo sapiens
tacatatgcacagtg

SEQ ID NO: 17857 - DNA, 15 bp, Homo sapiens
atacatatgcacagt

SEQ ID NO: 17858 - DNA, 15 bp, Homo sapiens
tatacatatgcacag

SEQ ID NO: 17859 - DNA, 15 bp, Homo sapiens
ggtatacatatgcac

SEQ ID NO: 17860 - DNA, 15 bp, Homo sapiens
tggtatacatatgca

SEQ ID NO: 17861 - DNA, 15 bp, Homo sapiens
ttggtatacatatgc

SEQ ID NO: 17862 - DNA, 15 bp, Homo sapiens
gttggtatacatatg

SEQ ID NO: 17863 - DNA, 15 bp, Homo sapiens
agttggtatacatat

SEQ ID NO: 17864 - DNA, 15 bp, Homo sapiens
tagttggtatacata

SEQ ID NO: 17865 - DNA, 15 bp, Homo sapiens
gtagttggtatacat

SEQ ID NO: 17866 - DNA, 15 bp, Homo sapiens
ggtagttggtataca

SEQ ID NO: 17867 - DNA, 15 bp, Homo sapiens
aggtagttggtatac

SEQ ID NO: 17868 - DNA, 15 bp, Homo sapiens
caggtagttggtata

SEQ ID NO: 17869 - DNA, 15 bp, Homo sapiens
tcaggtagttggtat

SEQ ID NO: 17870 - DNA, 15 bp, Homo sapiens
ttcaggtagttggta

SEQ ID NO: 17871 - DNA, 15 bp, Homo sapiens
cttcaggtagttggt

SEQ ID NO: 17872 - DNA, 15 bp, Homo sapiens
tcttcaggtagttgg

SEQ ID NO: 17873 - DNA, 15 bp, Homo sapiens
ttcttcaggtagttg

SEQ ID NO: 17874 - DNA, 15 bp, Homo sapiens
cttcttcaggtagtt

SEQ ID NO: 17875 - DNA, 15 bp, Homo sapiens
acttcttcaggtagt

SEQ ID NO: 17876 - DNA, 15 bp, Homo sapiens
tacttcttcaggtag

SEQ ID NO: 17877 - DNA, 15 bp, Homo sapiens
atacttcttcaggta

SEQ ID NO: 17878 - DNA, 15 bp, Homo sapiens
aatacttcttcaggt

SEQ ID NO: 17879 - DNA, 15 bp, Homo sapiens
aaatacttcttcagg

SEQ ID NO: 17880 - DNA, 15 bp, Homo sapiens
caaatacttcttcag

SEQ ID NO: 17881 - DNA, 15 bp, Homo sapiens
ccaaatacttcttca

SEQ ID NO: 17882 - DNA, 15 bp, Homo sapiens
accaaatacttcttc

SEQ ID NO: 17883 - DNA, 15 bp, Homo sapiens
aaccaaatacttctt

SEQ ID NO: 17884 - DNA, 15 bp, Homo sapiens
caaccaaatacttct

SEQ ID NO: 17885 - DNA, 15 bp, Homo sapiens
ccaaccaaatacttc

SEQ ID NO: 17886 - DNA, 15 bp, Homo sapiens
accaaccaaatactt

SEQ ID NO: 17887 - DNA, 15 bp, Homo sapiens
taccaaccaaatact

SEQ ID NO: 17888 - DNA, 15 bp, Homo sapiens
gtaccaaccaaatac

SEQ ID NO: 17889 - DNA, 15 bp, Homo sapiens
tgtaccaaccaaata

SEQ ID NO: 17890 - DNA, 15 bp, Homo sapiens
ttgtaccaaccaaat

SEQ ID NO: 17891 - DNA, 15 bp, Homo sapiens
cttgtaccaaccaaa

SEQ ID NO: 17892 - DNA, 15 bp, Homo sapiens
tcttgtaccaaccaa

SEQ ID NO: 17893 - DNA, 15 bp, Homo sapiens
ctcttgtaccaacca

SEQ ID NO: 17894 - DNA, 15 bp, Homo sapiens
tctcttgtaccaacc

SEQ ID NO: 17895 - DNA, 15 bp, Homo sapiens
atctcttgtaccaac

SEQ ID NO: 17896 - DNA, 15 bp, Homo sapiens
tatctcttgtaccaa

SEQ ID NO: 17897 - DNA, 15 bp, Homo sapiens
atatctcttgtacca

SEQ ID NO: 17898 - DNA, 15 bp, Homo sapiens
tatatctcttgtacc

SEQ ID NO: 17899 - DNA, 15 bp, Homo sapiens
ctatatctcttgtac

SEQ ID NO: 17900 - DNA, 15 bp, Homo sapiens
tctatatctcttgta

SEQ ID NO: 17901 - DNA, 15 bp, Homo sapiens
ttctatatctcttgt

SEQ ID NO: 17902 - DNA, 15 bp, Homo sapiens
tttctatatctcttg

SEQ ID NO: 17903 - DNA, 15 bp, Homo sapiens
ctttctatatctctt

SEQ ID NO: 17904 - DNA, 15 bp, Homo sapiens
cctttctatatctct

SEQ ID NO: 17905 - DNA, 15 bp, Homo sapiens
tcctttctatatctc

SEQ ID NO: 17906 - DNA, 15 bp, Homo sapiens
ttcctttctatatct

SEQ ID NO: 17907 - DNA, 15 bp, Homo sapiens
attcctttctatatc

SEQ ID NO: 17908 - DNA, 15 bp, Homo sapiens
gattcctttctatat

SEQ ID NO: 17909 - DNA, 15 bp, Homo sapiens
cgattcctttctata

SEQ ID NO: 17910 - DNA, 15 bp, Homo sapiens
gcgattcctttctat

SEQ ID NO: 17911 - DNA, 15 bp, Homo sapiens
agcgattcctttcta

SEQ ID NO: 17912 - DNA, 15 bp, Homo sapiens
cagcgattcctttct

SEQ ID NO: 17913 - DNA, 15 bp, Homo sapiens
ccagcgattcctttc

SEQ ID NO: 17914 - DNA, 15 bp, Homo sapiens
cccagcgattccttt

SEQ ID NO: 17915 - DNA, 15 bp, Homo sapiens
acccagcgattcctt

SEQ ID NO: 17916 - DNA, 15 bp, Homo sapiens
cacccagcgattcct

SEQ ID NO: 17917 - DNA, 15 bp, Homo sapiens
acacccagcgattcc

SEQ ID NO: 17918 - DNA, 15 bp, Homo sapiens
tacacccagcgattc

SEQ ID NO: 17919 - DNA, 15 bp, Homo sapiens
gtacacccagcgatt

SEQ ID NO: 17920 - DNA, 15 bp, Homo sapiens
ggtacacccagcgat

SEQ ID NO: 17921 - DNA, 15 bp, Homo sapiens
tggtacacccagcga

SEQ ID NO: 17922 - DNA, 15 bp, Homo sapiens
ttggtacacccagcg

SEQ ID NO: 17923 - DNA, 15 bp, Homo sapiens
cttggtacacccagc

SEQ ID NO: 17924 - DNA, 15 bp, Homo sapiens
ccttggtacacccag

SEQ ID NO: 17925 - DNA, 15 bp, Homo sapiens
gccttggtacaccca

SEQ ID NO: 17926 - DNA, 15 bp, Homo sapiens
agccttggtacaccc

SEQ ID NO: 17927 - DNA, 15 bp, Homo sapiens
tagccttggtacacc

SEQ ID NO: 17928 - DNA, 15 bp, Homo sapiens
ttagccttggtacac

SEQ ID NO: 17929 - DNA, 15 bp, Homo sapiens
attagccttggtaca

SEQ ID NO: 17930 - DNA, 15 bp, Homo sapiens
gattagccttggtac

SEQ ID NO: 17931 - DNA, 15 bp, Homo sapiens
tgattagccttggta

SEQ ID NO: 17932 - DNA, 15 bp, Homo sapiens
ctgattagccttggt

SEQ ID NO: 17933 - DNA, 15 bp, Homo sapiens
actgattagccttgg

SEQ ID NO: 17934 - DNA, 15 bp, Homo sapiens
aactgattagccttg

SEQ ID NO: 17935 - DNA, 15 bp, Homo sapiens
aaactgattagcctt

SEQ ID NO: 17936 - DNA, 15 bp, Homo sapiens
aaaactgattagcct

SEQ ID NO: 17937 - DNA, 15 bp, Homo sapiens
taaaactgattagcc

SEQ ID NO: 17938 - DNA, 15 bp, Homo sapiens
ataaaactgattagc

SEQ ID NO: 17939 - DNA, 15 bp, Homo sapiens
tataaaactgattag

SEQ ID NO: 17940 - DNA, 15 bp, Homo sapiens
ttataaaactgatta

SEQ ID NO: 17941 - DNA, 15 bp, Homo sapiens
attataaaactgatt

SEQ ID NO: 17942 - DNA, 15 bp, Homo sapiens
aattataaaactgat

SEQ ID NO: 17943 - DNA, 15 bp, Homo sapiens
aaattataaaactga

SEQ ID NO: 17944 - DNA, 15 bp, Homo sapiens
aaaattataaaactg

SEQ ID NO: 17945 - DNA, 15 bp, Homo sapiens
caaaattataaaact

SEQ ID NO: 17946 - DNA, 15 bp, Homo sapiens
gcaaaattataaaac

SEQ ID NO: 17947 - DNA, 15 bp, Homo sapiens
tgcaaaattataaaa

SEQ ID NO: 17948 - DNA, 15 bp, Homo sapiens
atgcaaaattataaa

SEQ ID NO: 17949 - DNA, 15 bp, Homo sapiens
tatgcaaaattataa

SEQ ID NO: 17950 - DNA, 15 bp, Homo sapiens
ttatgcaaaattata

SEQ ID NO: 17951 - DNA, 15 bp, Homo sapiens
attatgcaaaattat

SEQ ID NO: 17952 - DNA, 15 bp, Homo sapiens
aattatgcaaaatta

SEQ ID NO: 17953 - DNA, 15 bp, Homo sapiens
aaattatgcaaaatt

SEQ ID NO: 17954 - DNA, 15 bp, Homo sapiens
aaaattatgcaaaat

SEQ ID NO: 17955 - DNA, 15 bp, Homo sapiens
gaaaattatgcaaaa

SEQ ID NO: 17956 - DNA, 15 bp, Homo sapiens
agaaaattatgcaaa

SEQ ID NO: 17957 - DNA, 15 bp, Homo sapiens
tagaaaattatgcaa

SEQ ID NO: 17958 - DNA, 15 bp, Homo sapiens
ttagaaaattatgca

SEQ ID NO: 17959 - DNA, 15 bp, Homo sapiens
gttagaaaattatgc

SEQ ID NO: 17960 - DNA, 15 bp, Homo sapiens
agttagaaaattatg

SEQ ID NO: 17961 - DNA, 15 bp, Homo sapiens
cagttagaaaattat

SEQ ID NO: 17962 - DNA, 15 bp, Homo sapiens
gcagttagaaaatta

SEQ ID NO: 17963 - DNA, 15 bp, Homo sapiens
cgcagttagaaaatt

SEQ ID NO: 17964 - DNA, 15 bp, Homo sapiens
tcgcagttagaaaat

SEQ ID NO: 17965 - DNA, 15 bp, Homo sapiens
atcgcagttagaaaa

SEQ ID NO: 17966 - DNA, 15 bp, Homo sapiens
aatcgcagttagaaa

SEQ ID NO: 17967 - DNA, 15 bp, Homo sapiens
taatcgcagttagaa

SEQ ID NO: 17968 - DNA, 15 bp, Homo sapiens
ataatcgcagttaga

SEQ ID NO: 17969 - DNA, 15 bp, Homo sapiens
gataatcgcagttag

SEQ ID NO: 17970 - DNA, 15 bp, Homo sapiens
tgataatcgcagtta

SEQ ID NO: 17971 - DNA, 15 bp, Homo sapiens
atgataatcgcagtt

SEQ ID NO: 17972 - DNA, 15 bp, Homo sapiens
aatgataatcgcagt

SEQ ID NO: 17973 - DNA, 15 bp, Homo sapiens
aaatgataatcgcag

SEQ ID NO: 17974 - DNA, 15 bp, Homo sapiens
taaatgataatcgca

SEQ ID NO: 17975 - DNA, 15 bp, Homo sapiens
ctaaatgataatcgc

SEQ ID NO: 17976 - DNA, 15 bp, Homo sapiens
actaaatgataatcg

SEQ ID NO: 17977 - DNA, 15 bp, Homo sapiens
aactaaatgataatc

SEQ ID NO: 17978 - DNA, 15 bp, Homo sapiens
aaactaaatgataat

SEQ ID NO: 17979 - DNA, 15 bp, Homo sapiens
taaactaaatgataa

SEQ ID NO: 17980 - DNA, 15 bp, Homo sapiens
ctaaactaaatgata

SEQ ID NO: 17981 - DNA, 15 bp, Homo sapiens
tctaaactaaatgat

SEQ ID NO: 17982 - DNA, 15 bp, Homo sapiens
ttctaaactaaatga

SEQ ID NO: 17983 - DNA, 15 bp, Homo sapiens
gttctaaactaaatg

SEQ ID NO: 17984 - DNA, 15 bp, Homo sapiens
tgttctaaactaaat

SEQ ID NO: 17985 - DNA, 15 bp, Homo sapiens
ttgttctaaactaaa

SEQ ID NO: 17986 - DNA, 15 bp, Homo sapiens
attgttctaaactaa

SEQ ID NO: 17987 - DNA, 15 bp, Homo sapiens
aattgttctaaacta

SEQ ID NO: 17988 - DNA, 15 bp, Homo sapiens
aaattgttctaaact

SEQ ID NO: 17989 - DNA, 15 bp, Homo sapiens
taaattgttctaaac

SEQ ID NO: 17990 - DNA, 15 bp, Homo sapiens
ataaattgttctaaa

SEQ ID NO: 17991 - DNA, 15 bp, Homo sapiens
aataaattgttctaa

SEQ ID NO: 17992 - DNA, 15 bp, Homo sapiens
aaataaattgttcta

SEQ ID NO: 17993 - DNA, 15 bp, Homo sapiens
gaaataaattgttct

SEQ ID NO: 17994 - DNA, 15 bp, Homo sapiens
agaaataaattgttc

SEQ ID NO: 17995 - DNA, 15 bp, Homo sapiens
gagaaataaattgtt

SEQ ID NO: 17996 - DNA, 15 bp, Homo sapiens
tgagaaataaattgt

SEQ ID NO: 17997 - DNA, 15 bp, Homo sapiens
ttgagaaataaattg

SEQ ID NO: 17998 - DNA, 15 bp, Homo sapiens
cttgagaaataaatt

SEQ ID NO: 17999 - DNA, 15 bp, Homo sapiens
ccttgagaaataaat

SEQ ID NO: 18000 - DNA, 15 bp, Homo sapiens
gccttgagaaataaa

SEQ ID NO: 18001 - DNA, 15 bp, Homo sapiens
ggccttgagaaataa

SEQ ID NO: 18002 - DNA, 15 bp, Homo sapiens
gggccttgagaaata

SEQ ID NO: 18003 - DNA, 15 bp, Homo sapiens
tgggccttgagaaat

SEQ ID NO: 18004 - DNA, 15 bp, Homo sapiens
atgggccttgagaaa

SEQ ID NO: 18005 - DNA, 15 bp, Homo sapiens
catgggccttgagaa

SEQ ID NO: 18006 - DNA, 15 bp, Homo sapiens
acatgggccttgaga

SEQ ID NO: 18007 - DNA, 15 bp, Homo sapiens
tacatgggccttgag

SEQ ID NO: 18008 - DNA, 15 bp, Homo sapiens
ttacatgggccttga

SEQ ID NO: 18009 - DNA, 15 bp, Homo sapiens
tttacatgggccttg

SEQ ID NO: 18010 - DNA, 15 bp, Homo sapiens
atttacatgggcctt

SEQ ID NO: 18011 - DNA, 15 bp, Homo sapiens
tatttacatgggcct

SEQ ID NO: 18012 - DNA, 15 bp, Homo sapiens
atatttacatgggcc

SEQ ID NO: 18013 - DNA, 15 bp, Homo sapiens
aatatttacatgggc

SEQ ID NO: 18014 - DNA, 15 bp, Homo sapiens
taatatttacatggg

SEQ ID NO: 18015 - DNA, 15 bp, Homo sapiens
ataatatttacatgg

SEQ ID NO: 18016 - DNA, 15 bp, Homo sapiens
aataatatttacatg

SEQ ID NO: 18017 - DNA, 15 bp, Homo sapiens
aaataatatttacat

SEQ ID NO: 18018 - DNA, 15 bp, Homo sapiens
aaaataatatttaca

SEQ ID NO: 18019 - DNA, 15 bp, Homo sapiens
aaaaataatatttac

SEQ ID NO: 18020 - DNA, 15 bp, Homo sapiens
taaaaataatattta

SEQ ID NO: 18021 - DNA, 15 bp, Homo sapiens
ttaaaaataatattt

SEQ ID NO: 18022 - DNA, 15 bp, Homo sapiens
tttaaaaataatatt

SEQ ID NO: 18023 - DNA, 15 bp, Homo sapiens
ttttaaaaataatat

SEQ ID NO: 18024 - DNA, 15 bp, Homo sapiens
attttaaaaataata

SEQ ID NO: 18025 - DNA, 15 bp, Homo sapiens
tattttaaaaataat

SEQ ID NO: 18026 - DNA, 15 bp, Homo sapiens
atattttaaaaataa

SEQ ID NO: 18027 - DNA, 15 bp, Homo sapiens
tatattttaaaaata

SEQ ID NO: 18028 - DNA, 15 bp, Homo sapiens
gtatattttaaaaat

SEQ ID NO: 18029 - DNA, 15 bp, Homo sapiens
tgtatattttaaaaa

SEQ ID NO: 18030 - DNA, 15 bp, Homo sapiens
ctgtatattttaaaa

SEQ ID NO: 18031 - DNA, 15 bp, Homo sapiens
actgtatattttaaa

SEQ ID NO: 18032 - DNA, 15 bp, Homo sapiens
gactgtatattttaa

SEQ ID NO: 18033 - DNA, 15 bp, Homo sapiens
agactgtatatttta

SEQ ID NO: 18034 - DNA, 15 bp, Homo sapiens
aagactgtatatttt

SEQ ID NO: 18035 - DNA, 15 bp, Homo sapiens
taagactgtatattt

SEQ ID NO: 18036 - DNA, 15 bp, Homo sapiens
ttaagactgtatatt

SEQ ID NO: 18037 - DNA, 15 bp, Homo sapiens
cttaagactgtatat

SEQ ID NO: 18038 - DNA, 15 bp, Homo sapiens
tcttaagactgtata

SEQ ID NO: 18039 - DNA, 15 bp, Homo sapiens
ttcttaagactgtat

SEQ ID NO: 18040 - DNA, 15 bp, Homo sapiens
attcttaagactgta

SEQ ID NO: 18041 - DNA, 15 bp, Homo sapiens
aattcttaagactgt

SEQ ID NO: 18042 - DNA, 15 bp, Homo sapiens
gaattcttaagactg

SEQ ID NO: 18043 - DNA, 15 bp, Homo sapiens
tgaattcttaagact

SEQ ID NO: 18044 - DNA, 15 bp, Homo sapiens
atgaattcttaagac

SEQ ID NO: 18045 - DNA, 15 bp, Homo sapiens
catgaattcttaaga

SEQ ID NO: 18046 - DNA, 15 bp, Homo sapiens
ccatgaattcttaag

SEQ ID NO: 18047 - DNA, 15 bp, Homo sapiens
gccatgaattcttaa

SEQ ID NO: 18048 - DNA, 15 bp, Homo sapiens
tgccatgaattctta

SEQ ID NO: 18049 - DNA, 15 bp, Homo sapiens
atgccatgaattctt

SEQ ID NO: 18050 - DNA, 15 bp, Homo sapiens
tatgccatgaattct

SEQ ID NO: 18051 - DNA, 15 bp, Homo sapiens
atatgccatgaattc

SEQ ID NO: 18052 - DNA, 15 bp, Homo sapiens
aatatgccatgaatt

SEQ ID NO: 18053 - DNA, 15 bp, Homo sapiens
aaatatgccatgaat

SEQ ID NO: 18054 - DNA, 15 bp, Homo sapiens
aaaatatgccatgaa

SEQ ID NO: 18055 - DNA, 15 bp, Homo sapiens
taaaatatgccatga

SEQ ID NO: 18056 - DNA, 15 bp, Homo sapiens
ataaaatatgccatg

SEQ ID NO: 18057 - DNA, 15 bp, Homo sapiens
cataaaatatgccat

SEQ ID NO: 18058 - DNA, 15 bp, Homo sapiens
tcataaaatatgcca

SEQ ID NO: 18059 - DNA, 15 bp, Homo sapiens
ttcataaaatatgcc

SEQ ID NO: 18060 - DNA, 15 bp, Homo sapiens
tttcataaaatatgc

SEQ ID NO: 18061 - DNA, 15 bp, Homo sapiens
ctttcataaaatatg

SEQ ID NO: 18062 - DNA, 15 bp, Homo sapiens
cctttcataaaatat

SEQ ID NO: 18063 - DNA, 15 bp, Homo sapiens
tcctttcataaaata

SEQ ID NO: 18064 - DNA, 15 bp, Homo sapiens
ctcctttcataaaat

SEQ ID NO: 18065 - DNA, 15 bp, Homo sapiens
cctcctttcataaaa

SEQ ID NO: 18066 - DNA, 15 bp, Homo sapiens
tcctcctttcataaa

SEQ ID NO: 18067 - DNA, 15 bp, Homo sapiens
ttcctcctttcataa

SEQ ID NO: 18068 - DNA, 15 bp, Homo sapiens
attcctcctttcata

SEQ ID NO: 18069 - DNA, 15 bp, Homo sapiens
aattcctcctttcat

SEQ ID NO: 18070 - DNA, 15 bp, Homo sapiens
gaattcctcctttca

SEQ ID NO: 18071 - DNA, 15 bp, Homo sapiens
tgaattcctcctttc

SEQ ID NO: 18072 - DNA, 15 bp, Homo sapiens
atgaattcctccttt

SEQ ID NO: 18073 - DNA, 15 bp, Homo sapiens
catgaattcctcctt

SEQ ID NO: 18074 - DNA, 15 bp, Homo sapiens
acatgaattcctcct

SEQ ID NO: 18075 - DNA, 15 bp, Homo sapiens
gacatgaattcctcc

SEQ ID NO: 18076 - DNA, 15 bp, Homo sapiens
agacatgaattcctc

SEQ ID NO: 18077 - DNA, 15 bp, Homo sapiens
cagacatgaattcct

SEQ ID NO: 18078 - DNA, 15 bp, Homo sapiens
tcagacatgaattcc

SEQ ID NO: 18079 - DNA, 15 bp, Homo sapiens
atcagacatgaattc

SEQ ID NO: 18080 - DNA, 15 bp, Homo sapiens
catcagacatgaatt

SEQ ID NO: 18081 - DNA, 15 bp, Homo sapiens
acatcagacatgaat

SEQ ID NO: 18082 - DNA, 15 bp, Homo sapiens
cacatcagacatgaa

SEQ ID NO: 18083 - DNA, 15 bp, Homo sapiens
gcacatcagacatga

SEQ ID NO: 18084 - DNA, 15 bp, Homo sapiens
tgcacatcagacatg

SEQ ID NO: 18085 - DNA, 15 bp, Homo sapiens
ttgcacatcagacat

SEQ ID NO: 18086 - DNA, 15 bp, Homo sapiens
tttgcacatcagaca

SEQ ID NO: 18087 - DNA, 15 bp, Homo sapiens
atttgcacatcagac

SEQ ID NO: 18088 - DNA, 15 bp, Homo sapiens
tatttgcacatcaga

SEQ ID NO: 18089 - DNA, 15 bp, Homo sapiens
ctatttgcacatcag

SEQ ID NO: 18090 - DNA, 15 bp, Homo sapiens
actatttgcacatca

SEQ ID NO: 18091 - DNA, 15 bp, Homo sapiens
gactatttgcacatc

SEQ ID NO: 18092 - DNA, 15 bp, Homo sapiens
agactatttgcacat

SEQ ID NO: 18093 - DNA, 15 bp, Homo sapiens
aagactatttgcaca

SEQ ID NO: 18094 - DNA, 15 bp, Homo sapiens
taagactatttgcac

SEQ ID NO: 18095 - DNA, 15 bp, Homo sapiens
ttaagactatttgca

SEQ ID NO: 18096 - DNA, 15 bp, Homo sapiens
gttaagactatttgc

SEQ ID NO: 18097 - DNA, 15 bp, Homo sapiens
tgttaagactatttg

SEQ ID NO: 18098 - DNA, 15 bp, Homo sapiens
atgttaagactattt

SEQ ID NO: 18099 - DNA, 15 bp, Homo sapiens
tatgttaagactatt

SEQ ID NO: 18100 - DNA, 15 bp, Homo sapiens
atatgttaagactat

SEQ ID NO: 18101 - DNA, 15 bp, Homo sapiens
aatatgttaagacta

SEQ ID NO: 18102 - DNA, 15 bp, Homo sapiens
aaatatgttaagact

SEQ ID NO: 18103 - DNA, 15 bp, Homo sapiens
aaaatatgttaagac

SEQ ID NO: 18104 - DNA, 15 bp, Homo sapiens
gaaaatatgttaaga

SEQ ID NO: 18105 - DNA, 15 bp, Homo sapiens
agaaaatatgttaag

SEQ ID NO: 18106 - DNA, 15 bp, Homo sapiens
tagaaaatatgttaa

SEQ ID NO: 18107 - DNA, 15 bp, Homo sapiens
ttagaaaatatgtta

SEQ ID NO: 18108 - DNA, 15 bp, Homo sapiens
attagaaaatatgtt

SEQ ID NO: 18109 - DNA, 15 bp, Homo sapiens
aattagaaaatatgt

SEQ ID NO: 18110 - DNA, 15 bp, Homo sapiens
aaattagaaaatatg

SEQ ID NO: 18111 - DNA, 15 bp, Homo sapiens
gaaattagaaaatat

SEQ ID NO: 18112 - DNA, 15 bp, Homo sapiens
tgaaattagaaaata

SEQ ID NO: 18113 - DNA, 15 bp, Homo sapiens
ctgaaattagaaaat

SEQ ID NO: 18114 - DNA, 15 bp, Homo sapiens
tctgaaattagaaaa

SEQ ID NO: 18115 - DNA, 15 bp, Homo sapiens
ctctgaaattagaaa

SEQ ID NO: 18116 - DNA, 15 bp, Homo sapiens
gctctgaaattagaa

SEQ ID NO: 18117 - DNA, 15 bp, Homo sapiens
tgctctgaaattaga

SEQ ID NO: 18118 - DNA, 15 bp, Homo sapiens
ttgctctgaaattag

SEQ ID NO: 18119 - DNA, 15 bp, Homo sapiens
tttgctctgaaatta

SEQ ID NO: 18120 - DNA, 15 bp, Homo sapiens
ttttgctctgaaatt

SEQ ID NO: 18121 - DNA, 15 bp, Homo sapiens
tttttgctctgaaat

SEQ ID NO: 18122 - DNA, 15 bp, Homo sapiens
atttttgctctgaaa

SEQ ID NO: 18123 - DNA, 15 bp, Homo sapiens
tatttttgctctgaa

SEQ ID NO: 18124 - DNA, 15 bp, Homo sapiens
atatttttgctctga

SEQ ID NO: 18125 - DNA, 15 bp, Homo sapiens
tatatttttgctctg

SEQ ID NO: 18126 - DNA, 15 bp, Homo sapiens
atatatttttgctct

SEQ ID NO: 18127 - DNA, 15 bp, Homo sapiens
tatatatttttgctc

SEQ ID NO: 18128 - DNA, 15 bp, Homo sapiens
atatatatttttgct

SEQ ID NO: 18129 - DNA, 15 bp, Homo sapiens
catatatatttttgc

SEQ ID NO: 18130 - DNA, 15 bp, Homo sapiens
acatatatatttttg

SEQ ID NO: 18131 - DNA, 15 bp, Homo sapiens
tacatatatattttt

SEQ ID NO: 18132 - DNA, 15 bp, Homo sapiens
atacatatatatttt

SEQ ID NO: 18133 - DNA, 15 bp, Homo sapiens
catacatatatattt

SEQ ID NO: 18134 - DNA, 15 bp, Homo sapiens
tcatacatatatatt

SEQ ID NO: 18135 - DNA, 15 bp, Homo sapiens
ttcatacatatatat

SEQ ID NO: 18136 - DNA, 15 bp, Homo sapiens
attcatacatatata

SEQ ID NO: 18137 - DNA, 15 bp, Homo sapiens
tattcatacatatat

SEQ ID NO: 18138 - DNA, 15 bp, Homo sapiens
ttattcatacatata

SEQ ID NO: 18139 - DNA, 15 bp, Homo sapiens
tttattcatacatat

SEQ ID NO: 18140 - DNA, 15 bp, Homo sapiens
atttattcatacata

SEQ ID NO: 18141 - DNA, 15 bp, Homo sapiens
aatttattcatacat

SEQ ID NO: 18142 - DNA, 15 bp, Homo sapiens
taatttattcataca

SEQ ID NO: 18143 - DNA, 15 bp, Homo sapiens
ttaatttattcatac

SEQ ID NO: 18144 - DNA, 15 bp, Homo sapiens
gttaatttattcata

SEQ ID NO: 18145 - DNA, 15 bp, Homo sapiens
agttaatttattcat

SEQ ID NO: 18146 - DNA, 15 bp, Homo sapiens
cagttaatttattca

SEQ ID NO: 18147 - DNA, 15 bp, Homo sapiens
acagttaatttattc

SEQ ID NO: 18148 - DNA, 15 bp, Homo sapiens
tacagttaatttatt

SEQ ID NO: 18149 - DNA, 15 bp, Homo sapiens
ttacagttaatttat

SEQ ID NO: 18150 - DNA, 15 bp, Homo sapiens
tttacagttaattta

SEQ ID NO: 18151 - DNA, 15 bp, Homo sapiens
atttacagttaattt

SEQ ID NO: 18152 - DNA, 15 bp, Homo sapiens
aatttacagttaatt

SEQ ID NO: 18153 - DNA, 15 bp, Homo sapiens
caatttacagttaat

SEQ ID NO: 18154 - DNA, 15 bp, Homo sapiens
acaatttacagttaa

SEQ ID NO: 18155 - DNA, 15 bp, Homo sapiens
gacaatttacagtta

SEQ ID NO: 18156 - DNA, 15 bp, Homo sapiens
tgacaatttacagtt

SEQ ID NO: 18157 - DNA, 15 bp, Homo sapiens
ctgacaatttacagt

SEQ ID NO: 18158 - DNA, 15 bp, Homo sapiens
actgacaatttacag

SEQ ID NO: 18159 - DNA, 15 bp, Homo sapiens
tactgacaatttaca

SEQ ID NO: 18160 - DNA, 15 bp, Homo sapiens
ctactgacaatttac

SEQ ID NO: 18161 - DNA, 15 bp, Homo sapiens
cctactgacaattta

SEQ ID NO: 18162 - DNA, 15 bp, Homo sapiens
tcctactgacaattt

SEQ ID NO: 18163 - DNA, 15 bp, Homo sapiens
ttcctactgacaatt

SEQ ID NO: 18164 - DNA, 15 bp, Homo sapiens
gttcctactgacaat

SEQ ID NO: 18165 - DNA, 15 bp, Homo sapiens
ggttcctactgacaa

SEQ ID NO: 18166 - DNA, 15 bp, Homo sapiens
aggttcctactgaca

SEQ ID NO: 18167 - DNA, 15 bp, Homo sapiens
aaggttcctactgac

SEQ ID NO: 18168 - DNA, 15 bp, Homo sapiens
taaggttcctactga

SEQ ID NO: 18169 - DNA, 15 bp, Homo sapiens
ttaaggttcctactg

SEQ ID NO: 18170 - DNA, 15 bp, Homo sapiens
cttaaggttcctact

SEQ ID NO: 18171 - DNA, 15 bp, Homo sapiens
tcttaaggttcctac

SEQ ID NO: 18172 - DNA, 15 bp, Homo sapiens
ttcttaaggttccta

SEQ ID NO: 18173 - DNA, 15 bp, Homo sapiens
attcttaaggttcct

SEQ ID NO: 18174 - DNA, 15 bp, Homo sapiens
aattcttaaggttcc

SEQ ID NO: 18175 - DNA, 15 bp, Homo sapiens
gaattcttaaggttc

SEQ ID NO: 18176 - DNA, 15 bp, Homo sapiens
cgaattcttaaggtt

SEQ ID NO: 18177 - DNA, 15 bp, Homo sapiens
acgaattcttaaggt

SEQ ID NO: 18178 - DNA, 15 bp, Homo sapiens
cacgaattcttaagg

SEQ ID NO: 18179 - DNA, 15 bp, Homo sapiens
ccacgaattcttaag

SEQ ID NO: 18180 - DNA, 15 bp, Homo sapiens
gccacgaattcttaa

SEQ ID NO: 18181 - DNA, 15 bp, Homo sapiens
cgccacgaattctta

SEQ ID NO: 18182 - DNA, 15 bp, Homo sapiens
acgccacgaattctt

SEQ ID NO: 18183 - DNA, 15 bp, Homo sapiens
tacgccacgaattct

SEQ ID NO: 18184 - DNA, 15 bp, Homo sapiens
atacgccacgaattc

SEQ ID NO: 18185 - DNA, 15 bp, Homo sapiens
aatacgccacgaatt

SEQ ID NO: 18186 - DNA, 15 bp, Homo sapiens
aaatacgccacgaat

SEQ ID NO: 18187 - DNA, 15 bp, Homo sapiens
aaaatacgccacgaa

SEQ ID NO: 18188 - DNA, 15 bp, Homo sapiens
taaaatacgccacga

SEQ ID NO: 18189 - DNA, 15 bp, Homo sapiens
ataaaatacgccacg

SEQ ID NO: 18190 - DNA, 15 bp, Homo sapiens
cataaaatacgccac

SEQ ID NO: 18191 - DNA, 15 bp, Homo sapiens
tcataaaatacgcca

SEQ ID NO: 18192 - DNA, 15 bp, Homo sapiens
ttcataaaatacgcc

SEQ ID NO: 18193 - DNA, 15 bp, Homo sapiens
tttcataaaatacgc

SEQ ID NO: 18194 - DNA, 15 bp, Homo sapiens
ctttcataaaatacg

SEQ ID NO: 18195 - DNA, 15 bp, Homo sapiens
cctttcataaaatac

SEQ ID NO: 18196 - DNA, 15 bp, Homo sapiens
ttcctttcataaaat

SEQ ID NO: 18197 - DNA, 15 bp, Homo sapiens
attcctttcataaaa

SEQ ID NO: 18198 - DNA, 15 bp, Homo sapiens
aattcctttcataaa

SEQ ID NO: 18199 - DNA, 15 bp, Homo sapiens
gaattcctttcataa

SEQ ID NO: 18200 - DNA, 15 bp, Homo sapiens
tgaattcctttcata

SEQ ID NO: 18201 - DNA, 15 bp, Homo sapiens
atgaattcctttcat

SEQ ID NO: 18202 - DNA, 15 bp, Homo sapiens
catgaattcctttca

SEQ ID NO: 18203 - DNA, 15 bp, Homo sapiens
acatgaattcctttc

SEQ ID NO: 18204 - DNA, 15 bp, Homo sapiens
gacatgaattccttt

SEQ ID NO: 18205 - DNA, 15 bp, Homo sapiens
agacatgaattcctt

SEQ ID NO: 18206 - DNA, 15 bp, Homo sapiens
caaatatgttaagac

SEQ ID NO: 18207 - DNA, 15 bp, Homo sapiens
gcaaatatgttaaga

SEQ ID NO: 18208 - DNA, 15 bp, Homo sapiens
agcaaatatgttaag

SEQ ID NO: 18209 - DNA, 15 bp, Homo sapiens
tagcaaatatgttaa

SEQ ID NO: 18210 - DNA, 15 bp, Homo sapiens
ttagcaaatatgtta

SEQ ID NO: 18211 - DNA, 15 bp, Homo sapiens
attagcaaatatgtt

SEQ ID NO: 18212 - DNA, 15 bp, Homo sapiens
aattagcaaatatgt

SEQ ID NO: 18213 - DNA, 15 bp, Homo sapiens
aaattagcaaatatg

SEQ ID NO: 18214 - DNA, 15 bp, Homo sapiens
gaaattagcaaatat

SEQ ID NO: 18215 - DNA, 15 bp, Homo sapiens
tgaaattagcaaata

SEQ ID NO: 18216 - DNA, 15 bp, Homo sapiens
ctgaaattagcaaat

SEQ ID NO: 18217 - DNA, 15 bp, Homo sapiens
tctgaaattagcaaa

SEQ ID NO: 18218 - DNA, 15 bp, Homo sapiens
ctctgaaattagcaa

SEQ ID NO: 18219 - DNA, 15 bp, Homo sapiens
gctctgaaattagca

SEQ ID NO: 18220 - DNA, 15 bp, Homo sapiens
tgctctgaaattagc

SEQ ID NO: 18221 - DNA, 15 bp, Homo sapiens
catatatttttgctc

SEQ ID NO: 18222 - DNA, 15 bp, Homo sapiens
acatatatttttgct

SEQ ID NO: 18223 - DNA, 15 bp, Homo sapiens
cacatatatttttgc

SEQ ID NO: 18224 - DNA, 15 bp, Homo sapiens
acacatatatttttg

SEQ ID NO: 18225 - DNA, 15 bp, Homo sapiens
tacacatatattttt

SEQ ID NO: 18226 - DNA, 15 bp, Homo sapiens
atacacatatatttt

SEQ ID NO: 18227 - DNA, 15 bp, Homo sapiens
aatacacatatattt

SEQ ID NO: 18228 - DNA, 15 bp, Homo sapiens
taatacacatatatt

SEQ ID NO: 18229 - DNA, 15 bp, Homo sapiens
ttaatacacatatat

SEQ ID NO: 18230 - DNA, 15 bp, Homo sapiens
attaatacacatata

SEQ ID NO: 18231 - DNA, 15 bp, Homo sapiens
tattaatacacatat

SEQ ID NO: 18232 - DNA, 15 bp, Homo sapiens
ttattaatacacata

SEQ ID NO: 18233 - DNA, 15 bp, Homo sapiens
tttattaatacacat

SEQ ID NO: 18234 - DNA, 15 bp, Homo sapiens
atttattaatacaca

SEQ ID NO: 18235 - DNA, 15 bp, Homo sapiens
gatttattaatacac

SEQ ID NO: 18236 - DNA, 15 bp, Homo sapiens
tgatttattaataca

SEQ ID NO: 18237 - DNA, 15 bp, Homo sapiens
ttgatttattaatac

SEQ ID NO: 18238 - DNA, 15 bp, Homo sapiens
gttgatttattaata

SEQ ID NO: 18239 - DNA, 15 bp, Homo sapiens
agttgatttattaat

SEQ ID NO: 18240 - DNA, 15 bp, Homo sapiens
cagttgatttattaa

SEQ ID NO: 18241 - DNA, 15 bp, Homo sapiens
acagttgatttatta

SEQ ID NO: 18242 - DNA, 15 bp, Homo sapiens
tacagttgatttatt

SEQ ID NO: 18243 - DNA, 15 bp, Homo sapiens
ttacagttgatttat

SEQ ID NO: 18244 - DNA, 15 bp, Homo sapiens
tttacagttgattta

SEQ ID NO: 18245 - DNA, 15 bp, Homo sapiens
atttacagttgattt

SEQ ID NO: 18246 - DNA, 15 bp, Homo sapiens
aatttacagttgatt

SEQ ID NO: 18247 - DNA, 15 bp, Homo sapiens
caatttacagttgat

SEQ ID NO: 18248 - DNA, 15 bp, Homo sapiens
acaatttacagttga

SEQ ID NO: 18249 - DNA, 15 bp, Homo sapiens
gacaatttacagttg

SEQ ID NO: 18250 - DNA, 15 bp, Homo sapiens
ttactgacaatttac

SEQ ID NO: 18251 - DNA, 15 bp, Homo sapiens
cttactgacaattta

SEQ ID NO: 18252 - DNA, 15 bp, Homo sapiens
tcttactgacaattt

SEQ ID NO: 18253 - DNA, 15 bp, Homo sapiens
ttcttactgacaatt

SEQ ID NO: 18254 - DNA, 15 bp, Homo sapiens
gttcttactgacaat

SEQ ID NO: 18255 - DNA, 15 bp, Homo sapiens
ggttcttactgacaa

SEQ ID NO: 18256 - DNA, 15 bp, Homo sapiens
aggttcttactgaca

SEQ ID NO: 18257 - DNA, 15 bp, Homo sapiens
aaggttcttactgac

SEQ ID NO: 18258 - DNA, 15 bp, Homo sapiens
taaggttcttactga

SEQ ID NO: 18259 - DNA, 15 bp, Homo sapiens
ttaaggttcttactg

SEQ ID NO: 18260 - DNA, 15 bp, Homo sapiens
attaaggttcttact

SEQ ID NO: 18261 - DNA, 15 bp, Homo sapiens
cattaaggttcttac

SEQ ID NO: 18262 - DNA, 15 bp, Homo sapiens
ccattaaggttctta

SEQ ID NO: 18263 - DNA, 15 bp, Homo sapiens
gccattaaggttctt

SEQ ID NO: 18264 - DNA, 15 bp, Homo sapiens
agccattaaggttct

SEQ ID NO: 18265 - DNA, 15 bp, Homo sapiens
aagccattaaggttc

SEQ ID NO: 18266 - DNA, 15 bp, Homo sapiens
aaagccattaaggtt

SEQ ID NO: 18267 - DNA, 15 bp, Homo sapiens
taaagccattaaggt

SEQ ID NO: 18268 - DNA, 15 bp, Homo sapiens
ttaaagccattaagg

SEQ ID NO: 18269 - DNA, 15 bp, Homo sapiens
tttaaagccattaag

SEQ ID NO: 18270 - DNA, 15 bp, Homo sapiens
ttttaaagccattaa

SEQ ID NO: 18271 - DNA, 15 bp, Homo sapiens
cttttaaagccatta

SEQ ID NO: 18272 - DNA, 15 bp, Homo sapiens
acttttaaagccatt

SEQ ID NO: 18273 - DNA, 15 bp, Homo sapiens
aacttttaaagccat

SEQ ID NO: 18274 - DNA, 15 bp, Homo sapiens
taacttttaaagcca

SEQ ID NO: 18275 - DNA, 15 bp, Homo sapiens
ttaacttttaaagcc

SEQ ID NO: 18276 - DNA, 15 bp, Homo sapiens
tttaacttttaaagc

SEQ ID NO: 18277 - DNA, 15 bp, Homo sapiens
ttttaacttttaaag

SEQ ID NO: 18278 - DNA, 15 bp, Homo sapiens
attttaacttttaaa

SEQ ID NO: 18279 - DNA, 15 bp, Homo sapiens
aattttaacttttaa

SEQ ID NO: 18280 - DNA, 15 bp, Homo sapiens
aaattttaactttta

SEQ ID NO: 18281 - DNA, 15 bp, Homo sapiens
gaaattttaactttt

SEQ ID NO: 18282 - DNA, 15 bp, Homo sapiens
tgaaattttaacttt

SEQ ID NO: 18283 - DNA, 15 bp, Homo sapiens
ctgaaattttaactt

SEQ ID NO: 18284 - DNA, 15 bp, Homo sapiens
cctgaaattttaact

SEQ ID NO: 18285 - DNA, 15 bp, Homo sapiens
acctgaaattttaac

SEQ ID NO: 18286 - DNA, 15 bp, Homo sapiens
gacctgaaattttaa

SEQ ID NO: 18287 - DNA, 15 bp, Homo sapiens
tgacctgaaatttta

SEQ ID NO: 18288 - DNA, 15 bp, Homo sapiens
ttgacctgaaatttt

SEQ ID NO: 18289 - DNA, 15 bp, Homo sapiens
cttgacctgaaattt

SEQ ID NO: 18290 - DNA, 15 bp, Homo sapiens
gcttgacctgaaatt

SEQ ID NO: 18291 - DNA, 15 bp, Homo sapiens
tgcttgacctgaaat

SEQ ID NO: 18292 - DNA, 15 bp, Homo sapiens
atgcttgacctgaaa

SEQ ID NO: 18293 - DNA, 15 bp, Homo sapiens
aatgcttgacctgaa

SEQ ID NO: 18294 - DNA, 15 bp, Homo sapiens
caatgcttgacctga

SEQ ID NO: 18295 - DNA, 15 bp, Homo sapiens
acaatgcttgacctg

SEQ ID NO: 18296 - DNA, 15 bp, Homo sapiens
cacaatgcttgacct

SEQ ID NO: 18297 - DNA, 15 bp, Homo sapiens
ccacaatgcttgacc

SEQ ID NO: 18298 - DNA, 15 bp, Homo sapiens
accacaatgcttgac

SEQ ID NO: 18299 - DNA, 15 bp, Homo sapiens
caccacaatgcttga

SEQ ID NO: 18300 - DNA, 15 bp, Homo sapiens
acaccacaatgcttg

SEQ ID NO: 18301 - DNA, 15 bp, Homo sapiens
cacaccacaatgctt

SEQ ID NO: 18302 - DNA, 15 bp, Homo sapiens
gcacaccacaatgct

SEQ ID NO: 18303 - DNA, 15 bp, Homo sapiens
agcacaccacaatgc

SEQ ID NO: 18304 - DNA, 15 bp, Homo sapiens
gagcacaccacaatg

SEQ ID NO: 18305 - DNA, 15 bp, Homo sapiens
ggagcacaccacaat

SEQ ID NO: 18306 - DNA, 15 bp, Homo sapiens
aggagcacaccacaa

SEQ ID NO: 18307 - DNA, 15 bp, Homo sapiens
caggagcacaccaca

SEQ ID NO: 18308 - DNA, 15 bp, Homo sapiens
acaggagcacaccac

SEQ ID NO: 18309 - DNA, 15 bp, Homo sapiens
tacaggagcacacca

SEQ ID NO: 18310 - DNA, 15 bp, Homo sapiens
ctacaggagcacacc

SEQ ID NO: 18311 - DNA, 15 bp, Homo sapiens
actacaggagcacac

SEQ ID NO: 18312 - DNA, 15 bp, Homo sapiens
gactacaggagcaca

SEQ ID NO: 18313 - DNA, 15 bp, Homo sapiens
ggactacaggagcac

SEQ ID NO: 18314 - DNA, 15 bp, Homo sapiens
gggactacaggagca

SEQ ID NO: 18315 - DNA, 15 bp, Homo sapiens
tgggactacaggagc

SEQ ID NO: 18316 - DNA, 15 bp, Homo sapiens
ctgggactacaggag

SEQ ID NO: 18317 - DNA, 15 bp, Homo sapiens
gctgggactacagga

SEQ ID NO: 18318 - DNA, 15 bp, Homo sapiens
aagtagctgggacta

SEQ ID NO: 18319 - DNA, 15 bp, Homo sapiens
caagtagctgggact

SEQ ID NO: 18320 - DNA, 15 bp, Homo sapiens
ccaagtagctgggac

SEQ ID NO: 18321 - DNA, 15 bp, Homo sapiens
agcctcccaagtagc

SEQ ID NO: 18322 - DNA, 15 bp, Homo sapiens
cagcctcccaagtag

SEQ ID NO: 18323 - DNA, 15 bp, Homo sapiens
tcagcctcccaagta

SEQ ID NO: 18324 - DNA, 15 bp, Homo sapiens
ctcagcctcccaagt

SEQ ID NO: 18325 - DNA, 15 bp, Homo sapiens
cctcagcctcccaag

SEQ ID NO: 18326 - DNA, 15 bp, Homo sapiens
acctcagcctcccaa

SEQ ID NO: 18327 - DNA, 15 bp, Homo sapiens
cacctcagcctccca

SEQ ID NO: 18328 - DNA, 15 bp, Homo sapiens
ccacctcagcctccc

SEQ ID NO: 18329 - DNA, 15 bp, Homo sapiens
ccaagtgatcctccc

SEQ ID NO: 18330 - DNA, 15 bp, Homo sapiens
gccaagtgatcctcc

SEQ ID NO: 18331 - DNA, 15 bp, Homo sapiens
agccaagtgatcctc

SEQ ID NO: 18332 - DNA, 15 bp, Homo sapiens
aagccaagtgatcct

SEQ ID NO: 18333 - DNA, 15 bp, Homo sapiens
caagccaagtgatcc

SEQ ID NO: 18334 - DNA, 15 bp, Homo sapiens
tcaagccaagtgatc

SEQ ID NO: 18335 - DNA, 15 bp, Homo sapiens
ttcaagccaagtgat

SEQ ID NO: 18336 - DNA, 15 bp, Homo sapiens
gttcaagccaagtga

SEQ ID NO: 18337 - DNA, 15 bp, Homo sapiens
ggttcaagccaagtg

SEQ ID NO: 18338 - DNA, 15 bp, Homo sapiens
gggttcaagccaagt

SEQ ID NO: 18339 - DNA, 15 bp, Homo sapiens
ggggttcaagccaag

SEQ ID NO: 18340 - DNA, 15 bp, Homo sapiens
gggggttcaagccaa

SEQ ID NO: 18341 - DNA, 15 bp, Homo sapiens
tgggggttcaagcca

SEQ ID NO: 18342 - DNA, 15 bp, Homo sapiens
ctgggggttcaagcc

SEQ ID NO: 18343 - DNA, 15 bp, Homo sapiens
cctgggggttcaagc

SEQ ID NO: 18344 - DNA, 15 bp, Homo sapiens
acctgggggttcaag

SEQ ID NO: 18345 - DNA, 15 bp, Homo sapiens
tacctgggggttcaa

SEQ ID NO: 18346 - DNA, 15 bp, Homo sapiens
ctacctgggggttca

SEQ ID NO: 18347 - DNA, 15 bp, Homo sapiens
tctacctgggggttc

SEQ ID NO: 18348 - DNA, 15 bp, Homo sapiens
ctctacctgggggtt

SEQ ID NO: 18349 - DNA, 15 bp, Homo sapiens
cctctacctgggggt

SEQ ID NO: 18350 - DNA, 15 bp, Homo sapiens
ccctctacctggggg

SEQ ID NO: 18351 - DNA, 15 bp, Homo sapiens
accctctacctgggg

SEQ ID NO: 18352 - DNA, 15 bp, Homo sapiens
taccctctacctggg

SEQ ID NO: 18353 - DNA, 15 bp, Homo sapiens
ctaccctctacctgg

SEQ ID NO: 18354 - DNA, 15 bp, Homo sapiens
tctaccctctacctg

SEQ ID NO: 18355 - DNA, 15 bp, Homo sapiens
ctctaccctctacct

SEQ ID NO: 18356 - DNA, 15 bp, Homo sapiens
cctctaccctctacc

SEQ ID NO: 18357 - DNA, 15 bp, Homo sapiens
gcctctaccctctac

SEQ ID NO: 18358 - DNA, 15 bp, Homo sapiens
ggcctctaccctcta

SEQ ID NO: 18359 - DNA, 15 bp, Homo sapiens
tggcctctaccctct

SEQ ID NO: 18360 - DNA, 15 bp, Homo sapiens
ctggcctctaccctc

SEQ ID NO: 18361 - DNA, 15 bp, Homo sapiens
actggcctctaccct

SEQ ID NO: 18362 - DNA, 15 bp, Homo sapiens
gactggcctctaccc

SEQ ID NO: 18363 - DNA, 15 bp, Homo sapiens
agactggcctctacc

SEQ ID NO: 18364 - DNA, 15 bp, Homo sapiens
cagactggcctctac

SEQ ID NO: 18365 - DNA, 15 bp, Homo sapiens
ccagactggcctcta

SEQ ID NO: 18366 - DNA, 15 bp, Homo sapiens
cccagactggcctct

SEQ ID NO: 18367 - DNA, 15 bp, Homo sapiens
acccagactggcctc

SEQ ID NO: 18368 - DNA, 15 bp, Homo sapiens
tacccagactggcct

SEQ ID NO: 18369 - DNA, 15 bp, Homo sapiens
ttacccagactggcc

SEQ ID NO: 18370 - DNA, 15 bp, Homo sapiens
gttacccagactggc

SEQ ID NO: 18371 - DNA, 15 bp, Homo sapiens
tgttacccagactgg

SEQ ID NO: 18372 - DNA, 15 bp, Homo sapiens
gtgttacccagactg

SEQ ID NO: 18373 - DNA, 15 bp, Homo sapiens
tgtgttacccagact

SEQ ID NO: 18374 - DNA, 15 bp, Homo sapiens
ctgtgttacccagac

SEQ ID NO: 18375 - DNA, 15 bp, Homo sapiens
gctgtgttacccaga

SEQ ID NO: 18376 - DNA, 15 bp, Homo sapiens
cgctgtgttacccag

SEQ ID NO: 18377 - DNA, 15 bp, Homo sapiens
tcgctgtgttaccca

SEQ ID NO: 18378 - DNA, 15 bp, Homo sapiens
ctcgctgtgttaccc

SEQ ID NO: 18379 - DNA, 15 bp, Homo sapiens
tctcgctgtgttacc

SEQ ID NO: 18380 - DNA, 15 bp, Homo sapiens
ttctcgctgtgttac

SEQ ID NO: 18381 - DNA, 15 bp, Homo sapiens
gttctcgctgtgtta

SEQ ID NO: 18382 - DNA, 15 bp, Homo sapiens
ggttctcgctgtgtt

SEQ ID NO: 18383 - DNA, 15 bp, Homo sapiens
gggttctcgctgtgt

SEQ ID NO: 18384 - DNA, 15 bp, Homo sapiens
tgggttctcgctgtg

SEQ ID NO: 18385 - DNA, 15 bp, Homo sapiens
atgggttctcgctgt

SEQ ID NO: 18386 - DNA, 15 bp, Homo sapiens
gatgggttctcgctg

SEQ ID NO: 18387 - DNA, 15 bp, Homo sapiens
agatgggttctcgct

SEQ ID NO: 18388 - DNA, 15 bp, Homo sapiens
gagatgggttctcgc

SEQ ID NO: 18389 - DNA, 15 bp, Homo sapiens
agagatgggttctcg

SEQ ID NO: 18390 - DNA, 15 bp, Homo sapiens
aagagatgggttctc

SEQ ID NO: 18391 - DNA, 15 bp, Homo sapiens
taagagatgggttct

SEQ ID NO: 18392 - DNA, 15 bp, Homo sapiens
ttaagagatgggttc

SEQ ID NO: 18393 - DNA, 15 bp, Homo sapiens
tttaagagatgggtt

SEQ ID NO: 18394 - DNA, 15 bp, Homo sapiens
ttttaagagatgggt

SEQ ID NO: 18395 - DNA, 15 bp, Homo sapiens
tttttaagagatggg

SEQ ID NO: 18396 - DNA, 15 bp, Homo sapiens
ttttttaagagatgg

SEQ ID NO: 18397 - DNA, 15 bp, Homo sapiens
tttttttaagagatg

SEQ ID NO: 18398 - DNA, 15 bp, Homo sapiens
ttttttttaagagat

SEQ ID NO: 18399 - DNA, 15 bp, Homo sapiens
tttttttttaagaga

SEQ ID NO: 18400 - DNA, 15 bp, Homo sapiens
ctttttttttaagag

SEQ ID NO: 18401 - DNA, 15 bp, Homo sapiens
actttttttttaaga

SEQ ID NO: 18402 - DNA, 15 bp, Homo sapiens
aactttttttttaag

SEQ ID NO: 18403 - DNA, 15 bp, Homo sapiens
aaactttttttttaa

SEQ ID NO: 18404 - DNA, 15 bp, Homo sapiens
taaacttttttttta

SEQ ID NO: 18405 - DNA, 15 bp, Homo sapiens
ttaaacttttttttt

SEQ ID NO: 18406 - DNA, 15 bp, Homo sapiens
cttaaactttttttt

SEQ ID NO: 18407 - DNA, 15 bp, Homo sapiens
acttaaacttttttt

SEQ ID NO: 18408 - DNA, 15 bp, Homo sapiens
aacttaaactttttt

SEQ ID NO: 18409 - DNA, 15 bp, Homo sapiens
caacttaaacttttt

SEQ ID NO: 18410 - DNA, 15 bp, Homo sapiens
acaacttaaactttt

SEQ ID NO: 18411 - DNA, 15 bp, Homo sapiens
cacaacttaaacttt

SEQ ID NO: 18412 - DNA, 15 bp, Homo sapiens
ccacaacttaaactt

SEQ ID NO: 18413 - DNA, 15 bp, Homo sapiens
tccacaacttaaact

SEQ ID NO: 18414 - DNA, 15 bp, Homo sapiens
atccacaacttaaac

SEQ ID NO: 18415 - DNA, 15 bp, Homo sapiens
aatccacaacttaaa

SEQ ID NO: 18416 - DNA, 15 bp, Homo sapiens
taatccacaacttaa

SEQ ID NO: 18417 - DNA, 15 bp, Homo sapiens
ataatccacaactta

SEQ ID NO: 18418 - DNA, 15 bp, Homo sapiens
aataatccacaactt

SEQ ID NO: 18419 - DNA, 15 bp, Homo sapiens
aaataatccacaact

SEQ ID NO: 18420 - DNA, 15 bp, Homo sapiens
gaaataatccacaac

SEQ ID NO: 18421 - DNA, 15 bp, Homo sapiens
ggaaataatccacaa

SEQ ID NO: 18422 - DNA, 15 bp, Homo sapiens
aggaaataatccaca

SEQ ID NO: 18423 - DNA, 15 bp, Homo sapiens
aaggaaataatccac

SEQ ID NO: 18424 - DNA, 15 bp, Homo sapiens
aaaggaaataatcca

SEQ ID NO: 18425 - DNA, 15 bp, Homo sapiens
taaaggaaataatcc

SEQ ID NO: 18426 - DNA, 15 bp, Homo sapiens
gtaaaggaaataatc

SEQ ID NO: 18427 - DNA, 15 bp, Homo sapiens
tgtaaaggaaataat

SEQ ID NO: 18428 - DNA, 15 bp, Homo sapiens
gtgtaaaggaaataa

SEQ ID NO: 18429 - DNA, 15 bp, Homo sapiens
agtgtaaaggaaata

SEQ ID NO: 18430 - DNA, 15 bp, Homo sapiens
gagtgtaaaggaaat

SEQ ID NO: 18431 - DNA, 15 bp, Homo sapiens
agagtgtaaaggaaa

SEQ ID NO: 18432 - DNA, 15 bp, Homo sapiens
aagagtgtaaaggaa

SEQ ID NO: 18433 - DNA, 15 bp, Homo sapiens
aaagagtgtaaagga

SEQ ID NO: 18434 - DNA, 15 bp, Homo sapiens
gaaagagtgtaaagg

SEQ ID NO: 18435 - DNA, 15 bp, Homo sapiens
tgaaagagtgtaaag

SEQ ID NO: 18436 - DNA, 15 bp, Homo sapiens
atgaaagagtgtaaa

SEQ ID NO: 18437 - DNA, 15 bp, Homo sapiens
aatgaaagagtgtaa

SEQ ID NO: 18438 - DNA, 15 bp, Homo sapiens
taatgaaagagtgta

SEQ ID NO: 18439 - DNA, 15 bp, Homo sapiens
ctaatgaaagagtgt

SEQ ID NO: 18440 - DNA, 15 bp, Homo sapiens
actaatgaaagagtg

SEQ ID NO: 18441 - DNA, 15 bp, Homo sapiens
tactaatgaaagagt

SEQ ID NO: 18442 - DNA, 15 bp, Homo sapiens
atactaatgaaagag

SEQ ID NO: 18443 - DNA, 15 bp, Homo sapiens
gatactaatgaaaga

SEQ ID NO: 18444 - DNA, 15 bp, Homo sapiens
agatactaatgaaag

SEQ ID NO: 18445 - DNA, 15 bp, Homo sapiens
aagatactaatgaaa

SEQ ID NO: 18446 - DNA, 15 bp, Homo sapiens
aaagatactaatgaa

SEQ ID NO: 18447 - DNA, 15 bp, Homo sapiens
gaaagatactaatga

SEQ ID NO: 18448 - DNA, 15 bp, Homo sapiens
ggaaagatactaatg

SEQ ID NO: 18449 - DNA, 15 bp, Homo sapiens
aggaaagatactaat

SEQ ID NO: 18450 - DNA, 15 bp, Homo sapiens
caggaaagatactaa

SEQ ID NO: 18451 - DNA, 15 bp, Homo sapiens
ccaggaaagatacta

SEQ ID NO: 18452 - DNA, 15 bp, Homo sapiens
tccaggaaagatact

SEQ ID NO: 18453 - DNA, 15 bp, Homo sapiens
ctccaggaaagatac

SEQ ID NO: 18454 - DNA, 15 bp, Homo sapiens
tctccaggaaagata

SEQ ID NO: 18455 - DNA, 15 bp, Homo sapiens
gtctccaggaaagat

SEQ ID NO: 18456 - DNA, 15 bp, Homo sapiens
agtctccaggaaaga

SEQ ID NO: 18457 - DNA, 15 bp, Homo sapiens
aagtctccaggaaag

SEQ ID NO: 18458 - DNA, 15 bp, Homo sapiens
aaagtctccaggaaa

SEQ ID NO: 18459 - DNA, 15 bp, Homo sapiens
gaaagtctccaggaa

SEQ ID NO: 18460 - DNA, 15 bp, Homo sapiens
tgaaagtctccagga

SEQ ID NO: 18461 - DNA, 15 bp, Homo sapiens
ttgaaagtctccagg

SEQ ID NO: 18462 - DNA, 15 bp, Homo sapiens
attgaaagtctccag

SEQ ID NO: 18463 - DNA, 15 bp, Homo sapiens
aattgaaagtctcca

SEQ ID NO: 18464 - DNA, 15 bp, Homo sapiens
aaattgaaagtctcc

SEQ ID NO: 18465 - DNA, 15 bp, Homo sapiens
taaattgaaagtctc

SEQ ID NO: 18466 - DNA, 15 bp, Homo sapiens
ttaaattgaaagtct

SEQ ID NO: 18467 - DNA, 15 bp, Homo sapiens
tttaaattgaaagtc

SEQ ID NO: 18468 - DNA, 15 bp, Homo sapiens
atttaaattgaaagt

SEQ ID NO: 18469 - DNA, 15 bp, Homo sapiens
tatttaaattgaaag

SEQ ID NO: 18470 - DNA, 15 bp, Homo sapiens
gtatttaaattgaaa

SEQ ID NO: 18471 - DNA, 15 bp, Homo sapiens
agtatttaaattgaa

SEQ ID NO: 18472 - DNA, 15 bp, Homo sapiens
aagtatttaaattga

SEQ ID NO: 18473 - DNA, 15 bp, Homo sapiens
caagtatttaaattg

SEQ ID NO: 18474 - DNA, 15 bp, Homo sapiens
ccaagtatttaaatt

SEQ ID NO: 18475 - DNA, 15 bp, Homo sapiens
accaagtatttaaat

SEQ ID NO: 18476 - DNA, 15 bp, Homo sapiens
caccaagtatttaaa

SEQ ID NO: 18477 - DNA, 15 bp, Homo sapiens
gcaccaagtatttaa

SEQ ID NO: 18478 - DNA, 15 bp, Homo sapiens
agcaccaagtattta

SEQ ID NO: 18479 - DNA, 15 bp, Homo sapiens
aagcaccaagtattt

SEQ ID NO: 18480 - DNA, 15 bp, Homo sapiens
taagcaccaagtatt

SEQ ID NO: 18481 - DNA, 15 bp, Homo sapiens
ataagcaccaagtat

SEQ ID NO: 18482 - DNA, 15 bp, Homo sapiens
cataagcaccaagta

SEQ ID NO: 18483 - DNA, 15 bp, Homo sapiens
tcataagcaccaagt

SEQ ID NO: 18484 - DNA, 15 bp, Homo sapiens
gtcataagcaccaag

SEQ ID NO: 18485 - DNA, 15 bp, Homo sapiens
tgtcataagcaccaa

SEQ ID NO: 18486 - DNA, 15 bp, Homo sapiens
ttgtcataagcacca

SEQ ID NO: 18487 - DNA, 15 bp, Homo sapiens
attgtcataagcacc

SEQ ID NO: 18488 - DNA, 15 bp, Homo sapiens
aattgtcataagcac

SEQ ID NO: 18489 - DNA, 15 bp, Homo sapiens
taattgtcataagca

SEQ ID NO: 18490 - DNA, 15 bp, Homo sapiens
ctaattgtcataagc

SEQ ID NO: 18491 - DNA, 15 bp, Homo sapiens
tctaattgtcataag

SEQ ID NO: 18492 - DNA, 15 bp, Homo sapiens
atctaattgtcataa

SEQ ID NO: 18493 - DNA, 15 bp, Homo sapiens
catctaattgtcata

SEQ ID NO: 18494 - DNA, 15 bp, Homo sapiens
acatctaattgtcat

SEQ ID NO: 18495 - DNA, 15 bp, Homo sapiens
aacatctaattgtca

SEQ ID NO: 18496 - DNA, 15 bp, Homo sapiens
taacatctaattgtc

SEQ ID NO: 18497 - DNA, 15 bp, Homo sapiens
ttaacatctaattgt

SEQ ID NO: 18498 - DNA, 15 bp, Homo sapiens
tttaacatctaattg

SEQ ID NO: 18499 - DNA, 15 bp, Homo sapiens
ttttaacatctaatt

SEQ ID NO: 18500 - DNA, 15 bp, Homo sapiens
attttaacatctaat

SEQ ID NO: 18501 - DNA, 15 bp, Homo sapiens
cattttaacatctaa

SEQ ID NO: 18502 - DNA, 15 bp, Homo sapiens
ccattttaacatcta

SEQ ID NO: 18503 - DNA, 15 bp, Homo sapiens
tccattttaacatct

SEQ ID NO: 18504 - DNA, 15 bp, Homo sapiens
atccattttaacatc

SEQ ID NO: 18505 - DNA, 15 bp, Homo sapiens
catccattttaacat

SEQ ID NO: 18506 - DNA, 15 bp, Homo sapiens
ccatccattttaaca

SEQ ID NO: 18507 - DNA, 15 bp, Homo sapiens
cccatccattttaac

SEQ ID NO: 18508 - DNA, 15 bp, Homo sapiens
tcccatccattttaa

SEQ ID NO: 18509 - DNA, 15 bp, Homo sapiens
ttcccatccatttta

SEQ ID NO: 18510 - DNA, 15 bp, Homo sapiens
tttcccatccatttt

SEQ ID NO: 18511 - DNA, 15 bp, Homo sapiens
ctttcccatccattt

SEQ ID NO: 18512 - DNA, 15 bp, Homo sapiens
actttcccatccatt

SEQ ID NO: 18513 - DNA, 15 bp, Homo sapiens
tactttcccatccat

SEQ ID NO: 18514 - DNA, 15 bp, Homo sapiens
gtactttcccatcca

SEQ ID NO: 18515 - DNA, 15 bp, Homo sapiens
agtactttcccatcc

SEQ ID NO: 18516 - DNA, 15 bp, Homo sapiens
aagtactttcccatc

SEQ ID NO: 18517 - DNA, 15 bp, Homo sapiens
aaagtactttcccat

SEQ ID NO: 18518 - DNA, 15 bp, Homo sapiens
caaagtactttccca

SEQ ID NO: 18519 - DNA, 15 bp, Homo sapiens
acaaagtactttccc

SEQ ID NO: 18520 - DNA, 15 bp, Homo sapiens
tacaaagtactttcc

SEQ ID NO: 18521 - DNA, 15 bp, Homo sapiens
ttacaaagtactttc

SEQ ID NO: 18522 - DNA, 15 bp, Homo sapiens
gttacaaagtacttt

SEQ ID NO: 18523 - DNA, 15 bp, Homo sapiens
agttacaaagtactt

SEQ ID NO: 18524 - DNA, 15 bp, Homo sapiens
aagttacaaagtact

SEQ ID NO: 18525 - DNA, 15 bp, Homo sapiens
taagttacaaagtac

SEQ ID NO: 18526 - DNA, 15 bp, Homo sapiens
ataagttacaaagta

SEQ ID NO: 18527 - DNA, 15 bp, Homo sapiens
tataagttacaaagt

SEQ ID NO: 18528 - DNA, 15 bp, Homo sapiens
ttataagttacaaag

SEQ ID NO: 18529 - DNA, 15 bp, Homo sapiens
tttataagttacaaa

SEQ ID NO: 18530 - DNA, 15 bp, Homo sapiens
ctttataagttacaa

SEQ ID NO: 18531 - DNA, 15 bp, Homo sapiens
gctttataagttaca

SEQ ID NO: 18532 - DNA, 15 bp, Homo sapiens
tgctttataagttac

SEQ ID NO: 18533 - DNA, 15 bp, Homo sapiens
atgctttataagtta

SEQ ID NO: 18534 - DNA, 15 bp, Homo sapiens
aatgctttataagtt

SEQ ID NO: 18535 - DNA, 15 bp, Homo sapiens
taatgctttataagt

SEQ ID NO: 18536 - DNA, 15 bp, Homo sapiens
ataatgctttataag

SEQ ID NO: 18537 - DNA, 15 bp, Homo sapiens
cataatgctttataa

SEQ ID NO: 18538 - DNA, 15 bp, Homo sapiens
gcataatgctttata

SEQ ID NO: 18539 - DNA, 15 bp, Homo sapiens
tgcataatgctttat

SEQ ID NO: 18540 - DNA, 15 bp, Homo sapiens
ctgcataatgcttta

SEQ ID NO: 18541 - DNA, 15 bp, Homo sapiens
tctgcataatgcttt

SEQ ID NO: 18542 - DNA, 15 bp, Homo sapiens
atctgcataatgctt

SEQ ID NO: 18543 - DNA, 15 bp, Homo sapiens
catctgcataatgct

SEQ ID NO: 18544 - DNA, 15 bp, Homo sapiens
acatctgcataatgc

SEQ ID NO: 18545 - DNA, 15 bp, Homo sapiens
tacatctgcataatg

SEQ ID NO: 18546 - DNA, 15 bp, Homo sapiens
ctacatctgcataat

SEQ ID NO: 18547 - DNA, 15 bp, Homo sapiens
tctacatctgcataa

SEQ ID NO: 18548 - DNA, 15 bp, Homo sapiens
gtctacatctgcata

SEQ ID NO: 18549 - DNA, 15 bp, Homo sapiens
agtctacatctgcat

SEQ ID NO: 18550 - DNA, 15 bp, Homo sapiens
gagtctacatctgca

SEQ ID NO: 18551 - DNA, 15 bp, Homo sapiens
ggagtctacatctgc

SEQ ID NO: 18552 - DNA, 15 bp, Homo sapiens
aggagtctacatctg

SEQ ID NO: 18553 - DNA, 15 bp, Homo sapiens
aaggagtctacatct

SEQ ID NO: 18554 - DNA, 15 bp, Homo sapiens
aaaggagtctacatc

SEQ ID NO: 18555 - DNA, 15 bp, Homo sapiens
aaaaggagtctacat

SEQ ID NO: 18556 - DNA, 15 bp, Homo sapiens
taaaaggagtctaca

SEQ ID NO: 18557 - DNA, 15 bp, Homo sapiens
ataaaaggagtctac

SEQ ID NO: 18558 - DNA, 15 bp, Homo sapiens
tataaaaggagtcta

SEQ ID NO: 18559 - DNA, 15 bp, Homo sapiens
ttataaaaggagtct

SEQ ID NO: 18560 - DNA, 15 bp, Homo sapiens
attataaaaggagtc

SEQ ID NO: 18561 - DNA, 15 bp, Homo sapiens
tattataaaaggagt

SEQ ID NO: 18562 - DNA, 15 bp, Homo sapiens
ctattataaaaggag

SEQ ID NO: 18563 - DNA, 15 bp, Homo sapiens
actattataaaagga

SEQ ID NO: 18564 - DNA, 15 bp, Homo sapiens
aactattataaaagg

SEQ ID NO: 18565 - DNA, 15 bp, Homo sapiens
caactattataaaag

SEQ ID NO: 18566 - DNA, 15 bp, Homo sapiens
acaactattataaaa

SEQ ID NO: 18567 - DNA, 15 bp, Homo sapiens
cacaactattataaa

SEQ ID NO: 18568 - DNA, 15 bp, Homo sapiens
acacaactattataa

SEQ ID NO: 18569 - DNA, 15 bp, Homo sapiens
tacacaactattata

SEQ ID NO: 18570 - DNA, 15 bp, Homo sapiens
ttacacaactattat

SEQ ID NO: 18571 - DNA, 15 bp, Homo sapiens
cttacacaactatta

SEQ ID NO: 18572 - DNA, 15 bp, Homo sapiens
acttacacaactatt

SEQ ID NO: 18573 - DNA, 15 bp, Homo sapiens
tacttacacaactat

SEQ ID NO: 18574 - DNA, 15 bp, Homo sapiens
atacttacacaacta

SEQ ID NO: 18575 - DNA, 15 bp, Homo sapiens
tatacttacacaact

SEQ ID NO: 18576 - DNA, 15 bp, Homo sapiens
atatacttacacaac

SEQ ID NO: 18577 - DNA, 15 bp, Homo sapiens
tatatacttacacaa

SEQ ID NO: 18578 - DNA, 15 bp, Homo sapiens
ttatatacttacaca

SEQ ID NO: 18579 - DNA, 15 bp, Homo sapiens
cttatatacttacac

SEQ ID NO: 18580 - DNA, 15 bp, Homo sapiens
tcttatatacttaca

SEQ ID NO: 18581 - DNA, 15 bp, Homo sapiens
gtcttatatacttac

SEQ ID NO: 18582 - DNA, 15 bp, Homo sapiens
tgtcttatatactta

SEQ ID NO: 18583 - DNA, 15 bp, Homo sapiens
ttgtcttatatactt

SEQ ID NO: 18584 - DNA, 15 bp, Homo sapiens
gttgtcttatatact

SEQ ID NO: 18585 - DNA, 15 bp, Homo sapiens
ggttgtcttatatac

SEQ ID NO: 18586 - DNA, 15 bp, Homo sapiens
aggttgtcttatata

SEQ ID NO: 18587 - DNA, 15 bp, Homo sapiens
taggttgtcttatat

SEQ ID NO: 18588 - DNA, 15 bp, Homo sapiens
gtaggttgtcttata

SEQ ID NO: 18589 - DNA, 15 bp, Homo sapiens
tgtaggttgtcttat

SEQ ID NO: 18590 - DNA, 15 bp, Homo sapiens
atgtaggttgtctta

SEQ ID NO: 18591 - DNA, 15 bp, Homo sapiens
aatgtaggttgtctt

SEQ ID NO: 18592 - DNA, 15 bp, Homo sapiens
gaatgtaggttgtct

SEQ ID NO: 18593 - DNA, 15 bp, Homo sapiens
agaatgtaggttgtc

SEQ ID NO: 18594 - DNA, 15 bp, Homo sapiens
aagaatgtaggttgt

SEQ ID NO: 18595 - DNA, 15 bp, Homo sapiens
gaagaatgtaggttg

SEQ ID NO: 18596 - DNA, 15 bp, Homo sapiens
tgaagaatgtaggtt

SEQ ID NO: 18597 - DNA, 15 bp, Homo sapiens
atgaagaatgtaggt

SEQ ID NO: 18598 - DNA, 15 bp, Homo sapiens
catgaagaatgtagg

SEQ ID NO: 18599 - DNA, 15 bp, Homo sapiens
tcatgaagaatgtag

SEQ ID NO: 18600 - DNA, 15 bp, Homo sapiens
ctcatgaagaatgta

SEQ ID NO: 18601 - DNA, 15 bp, Homo sapiens
gctcatgaagaatgt

SEQ ID NO: 18602 - DNA, 15 bp, Homo sapiens
agctcatgaagaatg

SEQ ID NO: 18603 - DNA, 15 bp, Homo sapiens
tagctcatgaagaat

SEQ ID NO: 18604 - DNA, 15 bp, Homo sapiens
ctagctcatgaagaa

SEQ ID NO: 18605 - DNA, 15 bp, Homo sapiens
gctagctcatgaaga

SEQ ID NO: 18606 - DNA, 15 bp, Homo sapiens
ggctagctcatgaag

SEQ ID NO: 18607 - DNA, 15 bp, Homo sapiens
tggctagctcatgaa

SEQ ID NO: 18608 - DNA, 15 bp, Homo sapiens
atggctagctcatga

SEQ ID NO: 18609 - DNA, 15 bp, Homo sapiens
tatggctagctcatg

SEQ ID NO: 18610 - DNA, 15 bp, Homo sapiens
ttatggctagctcat

SEQ ID NO: 18611 - DNA, 15 bp, Homo sapiens
cttatggctagctca

SEQ ID NO: 18612 - DNA, 15 bp, Homo sapiens
acttatggctagctc

SEQ ID NO: 18613 - DNA, 15 bp, Homo sapiens
aacttatggctagct

SEQ ID NO: 18614 - DNA, 15 bp, Homo sapiens
aaacttatggctagc

SEQ ID NO: 18615 - DNA, 15 bp, Homo sapiens
aaaacttatggctag

SEQ ID NO: 18616 - DNA, 15 bp, Homo sapiens
taaaacttatggcta

SEQ ID NO: 18617 - DNA, 15 bp, Homo sapiens
ctaaaacttatggct

SEQ ID NO: 18618 - DNA, 15 bp, Homo sapiens
gctaaaacttatggc

SEQ ID NO: 18619 - DNA, 15 bp, Homo sapiens
tgctaaaacttatgg

SEQ ID NO: 18620 - DNA, 15 bp, Homo sapiens
ttgctaaaacttatg

SEQ ID NO: 18621 - DNA, 15 bp, Homo sapiens
gttgctaaaacttat

SEQ ID NO: 18622 - DNA, 15 bp, Homo sapiens
agttgctaaaactta

SEQ ID NO: 18623 - DNA, 15 bp, Homo sapiens
aagttgctaaaactt

SEQ ID NO: 18624 - DNA, 15 bp, Homo sapiens
caagttgctaaaact

SEQ ID NO: 18625 - DNA, 15 bp, Homo sapiens
gcaagttgctaaaac

SEQ ID NO: 18626 - DNA, 15 bp, Homo sapiens
agcaagttgctaaaa

SEQ ID NO: 18627 - DNA, 15 bp, Homo sapiens
aagcaagttgctaaa

SEQ ID NO: 18628 - DNA, 15 bp, Homo sapiens
aaagcaagttgctaa

SEQ ID NO: 18629 - DNA, 15 bp, Homo sapiens
caaagcaagttgcta

SEQ ID NO: 18630 - DNA, 15 bp, Homo sapiens
tcaaagcaagttgct

SEQ ID NO: 18631 - DNA, 15 bp, Homo sapiens
ttcaaagcaagttgc

SEQ ID NO: 18632 - DNA, 15 bp, Homo sapiens
gttcaaagcaagttg

SEQ ID NO: 18633 - DNA, 15 bp, Homo sapiens
ggttcaaagcaagtt

SEQ ID NO: 18634 - DNA, 15 bp, Homo sapiens
tggttcaaagcaagt

SEQ ID NO: 18635 - DNA, 15 bp, Homo sapiens
gtggttcaaagcaag

SEQ ID NO: 18636 - DNA, 15 bp, Homo sapiens
cgtggttcaaagcaa

SEQ ID NO: 18637 - DNA, 15 bp, Homo sapiens
ccgtggttcaaagca

SEQ ID NO: 18638 - DNA, 15 bp, Homo sapiens
accgtggttcaaagc

SEQ ID NO: 18639 - DNA, 15 bp, Homo sapiens
taccgtggttcaaag

SEQ ID NO: 18640 - DNA, 15 bp, Homo sapiens
ctaccgtggttcaaa

SEQ ID NO: 18641 - DNA, 15 bp, Homo sapiens
tctaccgtggttcaa

SEQ ID NO: 18642 - DNA, 15 bp, Homo sapiens
atctaccgtggttca

SEQ ID NO: 18643 - DNA, 15 bp, Homo sapiens
aatctaccgtggttc

SEQ ID NO: 18644 - DNA, 15 bp, Homo sapiens
aaatctaccgtggtt

SEQ ID NO: 18645 - DNA, 15 bp, Homo sapiens
taaatctaccgtggt

SEQ ID NO: 18646 - DNA, 15 bp, Homo sapiens
gtaaatctaccgtgg

SEQ ID NO: 18647 - DNA, 15 bp, Homo sapiens
tgtaaatctaccgtg

SEQ ID NO: 18648 - DNA, 15 bp, Homo sapiens
ttgtaaatctaccgt

SEQ ID NO: 18649 - DNA, 15 bp, Homo sapiens
attgtaaatctaccg

SEQ ID NO: 18650 - DNA, 15 bp, Homo sapiens
aattgtaaatctacc

SEQ ID NO: 18651 - DNA, 15 bp, Homo sapiens
aaattgtaaatctac

SEQ ID NO: 18652 - DNA, 15 bp, Homo sapiens
aaaattgtaaatcta

SEQ ID NO: 18653 - DNA, 15 bp, Homo sapiens
gaaaattgtaaatct

SEQ ID NO: 18654 - DNA, 15 bp, Homo sapiens
agaaaattgtaaatc

SEQ ID NO: 18655 - DNA, 15 bp, Homo sapiens
cagaaaattgtaaat

SEQ ID NO: 18656 - DNA, 15 bp, Homo sapiens
acagaaaattgtaaa

SEQ ID NO: 18657 - DNA, 15 bp, Homo sapiens
tacagaaaattgtaa

SEQ ID NO: 18658 - DNA, 15 bp, Homo sapiens
ctacagaaaattgta

SEQ ID NO: 18659 - DNA, 15 bp, Homo sapiens
actacagaaaattgt

SEQ ID NO: 18660 - DNA, 15 bp, Homo sapiens
tactacagaaaattg

SEQ ID NO: 18661 - DNA, 15 bp, Homo sapiens
atactacagaaaatt

SEQ ID NO: 18662 - DNA, 15 bp, Homo sapiens
aatactacagaaaat

SEQ ID NO: 18663 - DNA, 15 bp, Homo sapiens
caatactacagaaaa

SEQ ID NO: 18664 - DNA, 15 bp, Homo sapiens
tcaatactacagaaa

SEQ ID NO: 18665 - DNA, 15 bp, Homo sapiens
ctcaatactacagaa

SEQ ID NO: 18666 - DNA, 15 bp, Homo sapiens
actcaatactacaga

SEQ ID NO: 18667 - DNA, 15 bp, Homo sapiens
aactcaatactacag

SEQ ID NO: 18668 - DNA, 15 bp, Homo sapiens
caactcaatactaca

SEQ ID NO: 18669 - DNA, 15 bp, Homo sapiens
acaactcaatactac

SEQ ID NO: 18670 - DNA, 15 bp, Homo sapiens
cacaactcaatacta

SEQ ID NO: 18671 - DNA, 15 bp, Homo sapiens
acacaactcaatact

SEQ ID NO: 18672 - DNA, 15 bp, Homo sapiens
aacacaactcaatac

SEQ ID NO: 18673 - DNA, 15 bp, Homo sapiens
gaacacaactcaata

SEQ ID NO: 18674 - DNA, 15 bp, Homo sapiens
tgaacacaactcaat

SEQ ID NO: 18675 - DNA, 15 bp, Homo sapiens
atgaacacaactcaa

SEQ ID NO: 18676 - DNA, 15 bp, Homo sapiens
aatgaacacaactca

SEQ ID NO: 18677 - DNA, 15 bp, Homo sapiens
aaatgaacacaactc

SEQ ID NO: 18678 - DNA, 15 bp, Homo sapiens
taaatgaacacaact

SEQ ID NO: 18679 - DNA, 15 bp, Homo sapiens
ctaaatgaacacaac

SEQ ID NO: 18680 - DNA, 15 bp, Homo sapiens
tctaaatgaacacaa

SEQ ID NO: 18681 - DNA, 15 bp, Homo sapiens
ttctaaatgaacaca

SEQ ID NO: 18682 - DNA, 15 bp, Homo sapiens
attctaaatgaacac

SEQ ID NO: 18683 - DNA, 15 bp, Homo sapiens
aattctaaatgaaca

SEQ ID NO: 18684 - DNA, 15 bp, Homo sapiens
aaattctaaatgaac

SEQ ID NO: 18685 - DNA, 15 bp, Homo sapiens
aaaattctaaatgaa

SEQ ID NO: 18686 - DNA, 15 bp, Homo sapiens
caaaattctaaatga

SEQ ID NO: 18687 - DNA, 15 bp, Homo sapiens
acaaaattctaaatg

SEQ ID NO: 18688 - DNA, 15 bp, Homo sapiens
tacaaaattctaaat

SEQ ID NO: 18689 - DNA, 15 bp, Homo sapiens
ttacaaaattctaaa

SEQ ID NO: 18690 - DNA, 15 bp, Homo sapiens
attacaaaattctaa

SEQ ID NO: 18691 - DNA, 15 bp, Homo sapiens
tattacaaaattcta

SEQ ID NO: 18692 - DNA, 15 bp, Homo sapiens
atattacaaaattct

SEQ ID NO: 18693 - DNA, 15 bp, Homo sapiens
aatattacaaaattc

SEQ ID NO: 18694 - DNA, 15 bp, Homo sapiens
aaatattacaaaatt

SEQ ID NO: 18695 - DNA, 15 bp, Homo sapiens
taaatattacaaaat

SEQ ID NO: 18696 - DNA, 15 bp, Homo sapiens
ataaatattacaaaa

SEQ ID NO: 18697 - DNA, 15 bp, Homo sapiens
tataaatattacaaa

SEQ ID NO: 18698 - DNA, 15 bp, Homo sapiens
atataaatattacaa

SEQ ID NO: 18699 - DNA, 15 bp, Homo sapiens
aatataaatattaca

SEQ ID NO: 18700 - DNA, 15 bp, Homo sapiens
caatataaatattac

SEQ ID NO: 18701 - DNA, 15 bp, Homo sapiens
tcaatataaatatta

SEQ ID NO: 18702 - DNA, 15 bp, Homo sapiens
ttcaatataaatatt

SEQ ID NO: 18703 - DNA, 15 bp, Homo sapiens
tttcaatataaatat

SEQ ID NO: 18704 - DNA, 15 bp, Homo sapiens
ttttcaatataaata

SEQ ID NO: 18705 - DNA, 15 bp, Homo sapiens
attttcaatataaat

SEQ ID NO: 18706 - DNA, 15 bp, Homo sapiens
gattttcaatataaa

SEQ ID NO: 18707 - DNA, 15 bp, Homo sapiens
tgattttcaatataa

SEQ ID NO: 18708 - DNA, 15 bp, Homo sapiens
ttgattttcaatata

SEQ ID NO: 18709 - DNA, 15 bp, Homo sapiens
tttgattttcaatat

SEQ ID NO: 18710 - DNA, 15 bp, Homo sapiens
atttgattttcaata

SEQ ID NO: 18711 - DNA, 15 bp, Homo sapiens
aatttgattttcaat

SEQ ID NO: 18712 - DNA, 15 bp, Homo sapiens
aaatttgattttcaa

SEQ ID NO: 18713 - DNA, 15 bp, Homo sapiens
aaaatttgattttca

SEQ ID NO: 18714 - DNA, 15 bp, Homo sapiens
aaaaatttgattttc

SEQ ID NO: 18715 - DNA, 15 bp, Homo sapiens
caaaaatttgatttt

SEQ ID NO: 18716 - DNA, 15 bp, Homo sapiens
acaaaaatttgattt

SEQ ID NO: 18717 - DNA, 15 bp, Homo sapiens
tacaaaaatttgatt

SEQ ID NO: 18718 - DNA, 15 bp, Homo sapiens
gtacaaaaatttgat

SEQ ID NO: 18719 - DNA, 15 bp, Homo sapiens
ggtacaaaaatttga

SEQ ID NO: 18720 - DNA, 15 bp, Homo sapiens
aggtacaaaaatttg

SEQ ID NO: 18721 - DNA, 15 bp, Homo sapiens
taggtacaaaaattt

SEQ ID NO: 18722 - DNA, 15 bp, Homo sapiens
gtaggtacaaaaatt

SEQ ID NO: 18723 - DNA, 15 bp, Homo sapiens
tgtaggtacaaaaat

SEQ ID NO: 18724 - DNA, 15 bp, Homo sapiens
ttgtaggtacaaaaa

SEQ ID NO: 18725 - DNA, 15 bp, Homo sapiens
tttgtaggtacaaaa

SEQ ID NO: 18726 - DNA, 15 bp, Homo sapiens
ttttgtaggtacaaa

SEQ ID NO: 18727 - DNA, 15 bp, Homo sapiens
tttttgtaggtacaa

SEQ ID NO: 18728 - DNA, 15 bp, Homo sapiens
gtttttgtaggtaca

SEQ ID NO: 18729 - DNA, 15 bp, Homo sapiens
agtttttgtaggtac

SEQ ID NO: 18730 - DNA, 15 bp, Homo sapiens
tagtttttgtaggta

SEQ ID NO: 18731 - DNA, 15 bp, Homo sapiens
gtagtttttgtaggt

SEQ ID NO: 18732 - DNA, 15 bp, Homo sapiens
tgtagtttttgtagg

SEQ ID NO: 18733 - DNA, 15 bp, Homo sapiens
ttgtagtttttgtag

SEQ ID NO: 18734 - DNA, 15 bp, Homo sapiens
tttgtagtttttgta

SEQ ID NO: 18735 - DNA, 15 bp, Homo sapiens
ttttgtagtttttgt

SEQ ID NO: 18736 - DNA, 15 bp, Homo sapiens
tttttgtagtttttg

SEQ ID NO: 18737 - DNA, 15 bp, Homo sapiens
ttttttgtagttttt

SEQ ID NO: 18738 - DNA, 15 bp, Homo sapiens
attttttgtagtttt

SEQ ID NO: 18739 - DNA, 15 bp, Homo sapiens
gattttttgtagttt

SEQ ID NO: 18740 - DNA, 15 bp, Homo sapiens
ggattttttgtagtt

SEQ ID NO: 18741 - DNA, 15 bp, Homo sapiens
gggattttttgtagt

SEQ ID NO: 18742 - DNA, 15 bp, Homo sapiens
ggggattttttgtag

SEQ ID NO: 18743 - DNA, 15 bp, Homo sapiens
gggggattttttgta

SEQ ID NO: 18744 - DNA, 15 bp, Homo sapiens
agggggattttttgt

SEQ ID NO: 18745 - DNA, 15 bp, Homo sapiens
tagggggattttttg

SEQ ID NO: 18746 - DNA, 15 bp, Homo sapiens
ctagggggatttttt

SEQ ID NO: 18747 - DNA, 15 bp, Homo sapiens
actagggggattttt

SEQ ID NO: 18748 - DNA, 15 bp, Homo sapiens
aactagggggatttt

SEQ ID NO: 18749 - DNA, 15 bp, Homo sapiens
aaactagggggattt

SEQ ID NO: 18750 - DNA, 15 bp, Homo sapiens
aaaactagggggatt

SEQ ID NO: 18751 - DNA, 15 bp, Homo sapiens
aaaaactagggggat

SEQ ID NO: 18752 - DNA, 15 bp, Homo sapiens
taaaaactaggggga

SEQ ID NO: 18753 - DNA, 15 bp, Homo sapiens
ataaaaactaggggg

SEQ ID NO: 18754 - DNA, 15 bp, Homo sapiens
tataaaaactagggg

SEQ ID NO: 18755 - DNA, 15 bp, Homo sapiens
ctataaaaactaggg

SEQ ID NO: 18756 - DNA, 15 bp, Homo sapiens
actataaaaactagg

SEQ ID NO: 18757 - DNA, 15 bp, Homo sapiens
aactataaaaactag

SEQ ID NO: 18758 - DNA, 15 bp, Homo sapiens
aaactataaaaacta

SEQ ID NO: 18759 - DNA, 15 bp, Homo sapiens
gaaactataaaaact

SEQ ID NO: 18760 - DNA, 15 bp, Homo sapiens
agaaactataaaaac

SEQ ID NO: 18761 - DNA, 15 bp, Homo sapiens
tagaaactataaaaa

SEQ ID NO: 18762 - DNA, 15 bp, Homo sapiens
atagaaactataaaa

SEQ ID NO: 18763 - DNA, 15 bp, Homo sapiens
aatagaaactataaa

SEQ ID NO: 18764 - DNA, 15 bp, Homo sapiens
taatagaaactataa

SEQ ID NO: 18765 - DNA, 15 bp, Homo sapiens
ttaatagaaactata

SEQ ID NO: 18766 - DNA, 15 bp, Homo sapiens
tttaatagaaactat

SEQ ID NO: 18767 - DNA, 15 bp, Homo sapiens
ttttaatagaaacta

SEQ ID NO: 18768 - DNA, 15 bp, Homo sapiens
attttaatagaaact

SEQ ID NO: 18769 - DNA, 15 bp, Homo sapiens
aattttaatagaaac

SEQ ID NO: 18770 - DNA, 15 bp, Homo sapiens
taattttaatagaaa

SEQ ID NO: 18771 - DNA, 15 bp, Homo sapiens
ataattttaatagaa

SEQ ID NO: 18772 - DNA, 15 bp, Homo sapiens
tataattttaataga

SEQ ID NO: 18773 - DNA, 15 bp, Homo sapiens
ctataattttaatag

SEQ ID NO: 18774 - DNA, 15 bp, Homo sapiens
gctataattttaata

SEQ ID NO: 18775 - DNA, 15 bp, Homo sapiens
agctataattttaat

SEQ ID NO: 18776 - DNA, 15 bp, Homo sapiens
cagctataattttaa

SEQ ID NO: 18777 - DNA, 15 bp, Homo sapiens
ccagctataatttta

SEQ ID NO: 18778 - DNA, 15 bp, Homo sapiens
accagctataatttt

SEQ ID NO: 18779 - DNA, 15 bp, Homo sapiens
taccagctataattt

SEQ ID NO: 18780 - DNA, 15 bp, Homo sapiens
gtaccagctataatt

SEQ ID NO: 18781 - DNA, 15 bp, Homo sapiens
tgtaccagctataat

SEQ ID NO: 18782 - DNA, 15 bp, Homo sapiens
atgtaccagctataa

SEQ ID NO: 18783 - DNA, 15 bp, Homo sapiens
tatgtaccagctata

SEQ ID NO: 18784 - DNA, 15 bp, Homo sapiens
ctatgtaccagctat

SEQ ID NO: 18785 - DNA, 15 bp, Homo sapiens
cctatgtaccagcta

SEQ ID NO: 18786 - DNA, 15 bp, Homo sapiens
ccctatgtaccagct

SEQ ID NO: 18787 - DNA, 15 bp, Homo sapiens
tccctatgtaccagc

SEQ ID NO: 18788 - DNA, 15 bp, Homo sapiens
atccctatgtaccag

SEQ ID NO: 18789 - DNA, 15 bp, Homo sapiens
catccctatgtacca

SEQ ID NO: 18790 - DNA, 15 bp, Homo sapiens
gcatccctatgtacc

SEQ ID NO: 18791 - DNA, 15 bp, Homo sapiens
ggcatccctatgtac

SEQ ID NO: 18792 - DNA, 15 bp, Homo sapiens
tggcatccctatgta

SEQ ID NO: 18793 - DNA, 15 bp, Homo sapiens
ctggcatccctatgt

SEQ ID NO: 18794 - DNA, 15 bp, Homo sapiens
tctggcatccctatg

SEQ ID NO: 18795 - DNA, 15 bp, Homo sapiens
ttctggcatccctat

SEQ ID NO: 18796 - DNA, 15 bp, Homo sapiens
cttctggcatcccta

SEQ ID NO: 18797 - DNA, 15 bp, Homo sapiens
ccttctggcatccct

SEQ ID NO: 18798 - DNA, 15 bp, Homo sapiens
tccttctggcatccc

SEQ ID NO: 18799 - DNA, 15 bp, Homo sapiens
gtccttctggcatcc

SEQ ID NO: 18800 - DNA, 15 bp, Homo sapiens
agtccttctggcatc

SEQ ID NO: 18801 - DNA, 15 bp, Homo sapiens
cagtccttctggcat

SEQ ID NO: 18802 - DNA, 15 bp, Homo sapiens
acagtccttctggca

SEQ ID NO: 18803 - DNA, 15 bp, Homo sapiens
aacagtccttctggc

SEQ ID NO: 18804 - DNA, 15 bp, Homo sapiens
aaacagtccttctgg

SEQ ID NO: 18805 - DNA, 15 bp, Homo sapiens
taaacagtccttctg

SEQ ID NO: 18806 - DNA, 15 bp, Homo sapiens
ttaaacagtccttct

SEQ ID NO: 18807 - DNA, 15 bp, Homo sapiens
cttaaacagtccttc

SEQ ID NO: 18808 - DNA, 15 bp, Homo sapiens
tcttaaacagtcctt

SEQ ID NO: 18809 - DNA, 15 bp, Homo sapiens
ttcttaaacagtcct

SEQ ID NO: 18810 - DNA, 15 bp, Homo sapiens
cttcttaaacagtcc

SEQ ID NO: 18811 - DNA, 15 bp, Homo sapiens
gcttcttaaacagtc

SEQ ID NO: 18812 - DNA, 15 bp, Homo sapiens
agcttcttaaacagt

SEQ ID NO: 18813 - DNA, 15 bp, Homo sapiens
cagcttcttaaacag

SEQ ID NO: 18814 - DNA, 15 bp, Homo sapiens
tcagcttcttaaaca

SEQ ID NO: 18815 - DNA, 15 bp, Homo sapiens
ttcagcttcttaaac

SEQ ID NO: 18816 - DNA, 15 bp, Homo sapiens
tttcagcttcttaaa

SEQ ID NO: 18817 - DNA, 15 bp, Homo sapiens
ttttcagcttcttaa

SEQ ID NO: 18818 - DNA, 15 bp, Homo sapiens
attttcagcttctta

SEQ ID NO: 18819 - DNA, 15 bp, Homo sapiens
tattttcagcttctt

SEQ ID NO: 18820 - DNA, 15 bp, Homo sapiens
ctattttcagcttct

SEQ ID NO: 18821 - DNA, 15 bp, Homo sapiens
tctattttcagcttc

SEQ ID NO: 18822 - DNA, 15 bp, Homo sapiens
ctctattttcagctt

SEQ ID NO: 18823 - DNA, 15 bp, Homo sapiens
tctctattttcagct

SEQ ID NO: 18824 - DNA, 15 bp, Homo sapiens
ttctctattttcagc

SEQ ID NO: 18825 - DNA, 15 bp, Homo sapiens
tttctctattttcag

SEQ ID NO: 18826 - DNA, 15 bp, Homo sapiens
atttctctattttca

SEQ ID NO: 18827 - DNA, 15 bp, Homo sapiens
catttctctattttc

SEQ ID NO: 18828 - DNA, 15 bp, Homo sapiens
tcatttctctatttt

SEQ ID NO: 18829 - DNA, 15 bp, Homo sapiens
ttcatttctctattt

SEQ ID NO: 18830 - DNA, 15 bp, Homo sapiens
attcatttctctatt

SEQ ID NO: 18831 - DNA, 15 bp, Homo sapiens
aattcatttctctat

SEQ ID NO: 18832 - DNA, 15 bp, Homo sapiens
aaattcatttctcta

SEQ ID NO: 18833 - DNA, 15 bp, Homo sapiens
taaattcatttctct

SEQ ID NO: 18834 - DNA, 15 bp, Homo sapiens
ataaattcatttctc

SEQ ID NO: 18835 - DNA, 15 bp, Homo sapiens
gataaattcatttct

SEQ ID NO: 18836 - DNA, 15 bp, Homo sapiens
agataaattcatttc

SEQ ID NO: 18837 - DNA, 15 bp, Homo sapiens
aagataaattcattt

SEQ ID NO: 18838 - DNA, 15 bp, Homo sapiens
gaagataaattcatt

SEQ ID NO: 18839 - DNA, 15 bp, Homo sapiens
agaagataaattcat

SEQ ID NO: 18840 - DNA, 15 bp, Homo sapiens
gagaagataaattca

SEQ ID NO: 18841 - DNA, 15 bp, Homo sapiens
tgagaagataaattc

SEQ ID NO: 18842 - DNA, 15 bp, Homo sapiens
atgagaagataaatt

SEQ ID NO: 18843 - DNA, 15 bp, Homo sapiens
tatgagaagataaat

SEQ ID NO: 18844 - DNA, 15 bp, Homo sapiens
ctatgagaagataaa

SEQ ID NO: 18845 - DNA, 15 bp, Homo sapiens
actatgagaagataa

SEQ ID NO: 18846 - DNA, 15 bp, Homo sapiens
aactatgagaagata

SEQ ID NO: 18847 - DNA, 15 bp, Homo sapiens
taactatgagaagat

SEQ ID NO: 18848 - DNA, 15 bp, Homo sapiens
ctaactatgagaaga

SEQ ID NO: 18849 - DNA, 15 bp, Homo sapiens
cctaactatgagaag

SEQ ID NO: 18850 - DNA, 15 bp, Homo sapiens
gcctaactatgagaa

SEQ ID NO: 18851 - DNA, 15 bp, Homo sapiens
tgcctaactatgaga

SEQ ID NO: 18852 - DNA, 15 bp, Homo sapiens
ctgcctaactatgag

SEQ ID NO: 18853 - DNA, 15 bp, Homo sapiens
cctgcctaactatga

SEQ ID NO: 18854 - DNA, 15 bp, Homo sapiens
ccctgcctaactatg

SEQ ID NO: 18855 - DNA, 15 bp, Homo sapiens
gccctgcctaactat

SEQ ID NO: 18856 - DNA, 15 bp, Homo sapiens
tgccctgcctaacta

SEQ ID NO: 18857 - DNA, 15 bp, Homo sapiens
gtgccctgcctaact

SEQ ID NO: 18858 - DNA, 15 bp, Homo sapiens
tgtgccctgcctaac

SEQ ID NO: 18859 - DNA, 15 bp, Homo sapiens
ctgtgccctgcctaa

SEQ ID NO: 18860 - DNA, 15 bp, Homo sapiens
actgtgccctgccta

SEQ ID NO: 18861 - DNA, 15 bp, Homo sapiens
tactgtgccctgcct

SEQ ID NO: 18862 - DNA, 15 bp, Homo sapiens
ctactgtgccctgcc

SEQ ID NO: 18863 - DNA, 15 bp, Homo sapiens
tctactgtgccctgc

SEQ ID NO: 18864 - DNA, 15 bp, Homo sapiens
ttctactgtgccctg

SEQ ID NO: 18865 - DNA, 15 bp, Homo sapiens
cttctactgtgccct

SEQ ID NO: 18866 - DNA, 15 bp, Homo sapiens
ccttctactgtgccc

SEQ ID NO: 18867 - DNA, 15 bp, Homo sapiens
tccttctactgtgcc

SEQ ID NO: 18868 - DNA, 15 bp, Homo sapiens
atccttctactgtgc

SEQ ID NO: 18869 - DNA, 15 bp, Homo sapiens
catccttctactgtg

SEQ ID NO: 18870 - DNA, 15 bp, Homo sapiens
gcatccttctactgt

SEQ ID NO: 18871 - DNA, 15 bp, Homo sapiens
agcatccttctactg

SEQ ID NO: 18872 - DNA, 15 bp, Homo sapiens
aagcatccttctact

SEQ ID NO: 18873 - DNA, 15 bp, Homo sapiens
taagcatccttctac

SEQ ID NO: 18874 - DNA, 15 bp, Homo sapiens
ttaagcatccttcta

SEQ ID NO: 18875 - DNA, 15 bp, Homo sapiens
gttaagcatccttct

SEQ ID NO: 18876 - DNA, 15 bp, Homo sapiens
tgttaagcatccttc

SEQ ID NO: 18877 - DNA, 15 bp, Homo sapiens
atgttaagcatcctt

SEQ ID NO: 18878 - DNA, 15 bp, Homo sapiens
aatgttaagcatcct

SEQ ID NO: 18879 - DNA, 15 bp, Homo sapiens
caatgttaagcatcc

SEQ ID NO: 18880 - DNA, 15 bp, Homo sapiens
gcaatgttaagcatc

SEQ ID NO: 18881 - DNA, 15 bp, Homo sapiens
tgcaatgttaagcat

SEQ ID NO: 18882 - DNA, 15 bp, Homo sapiens
ttgcaatgttaagca

SEQ ID NO: 18883 - DNA, 15 bp, Homo sapiens
cttgcaatgttaagc

SEQ ID NO: 18884 - DNA, 15 bp, Homo sapiens
gcttgcaatgttaag

SEQ ID NO: 18885 - DNA, 15 bp, Homo sapiens
agcttgcaatgttaa

SEQ ID NO: 18886 - DNA, 15 bp, Homo sapiens
cagcttgcaatgtta

SEQ ID NO: 18887 - DNA, 15 bp, Homo sapiens
tcagcttgcaatgtt

SEQ ID NO: 18888 - DNA, 15 bp, Homo sapiens
atcagcttgcaatgt

SEQ ID NO: 18889 - DNA, 15 bp, Homo sapiens
catcagcttgcaatg

SEQ ID NO: 18890 - DNA, 15 bp, Homo sapiens
ccatcagcttgcaat

SEQ ID NO: 18891 - DNA, 15 bp, Homo sapiens
cccatcagcttgcaa

SEQ ID NO: 18892 - DNA, 15 bp, Homo sapiens
tcccatcagcttgca

SEQ ID NO: 18893 - DNA, 15 bp, Homo sapiens
ttcccatcagcttgc

SEQ ID NO: 18894 - DNA, 15 bp, Homo sapiens
gttcccatcagcttg

SEQ ID NO: 18895 - DNA, 15 bp, Homo sapiens
tgttcccatcagctt

SEQ ID NO: 18896 - DNA, 15 bp, Homo sapiens
ctgttcccatcagct

SEQ ID NO: 18897 - DNA, 15 bp, Homo sapiens
gctgttcccatcagc

SEQ ID NO: 18898 - DNA, 15 bp, Homo sapiens
tgctgttcccatcag

SEQ ID NO: 18899 - DNA, 15 bp, Homo sapiens
ctgctgttcccatca

SEQ ID NO: 18900 - DNA, 15 bp, Homo sapiens
cctgctgttcccatc

SEQ ID NO: 18901 - DNA, 15 bp, Homo sapiens
acctgctgttcccat

SEQ ID NO: 18902 - DNA, 15 bp, Homo sapiens
aacctgctgttccca

SEQ ID NO: 18903 - DNA, 15 bp, Homo sapiens
caacctgctgttccc

SEQ ID NO: 18904 - DNA, 15 bp, Homo sapiens
tcaacctgctgttcc

SEQ ID NO: 18905 - DNA, 15 bp, Homo sapiens
atcaacctgctgttc

SEQ ID NO: 18906 - DNA, 15 bp, Homo sapiens
tatcaacctgctgtt

SEQ ID NO: 18907 - DNA, 15 bp, Homo sapiens
atatcaacctgctgt

SEQ ID NO: 18908 - DNA, 15 bp, Homo sapiens
tatatcaacctgctg

SEQ ID NO: 18909 - DNA, 15 bp, Homo sapiens
ctatatcaacctgct

SEQ ID NO: 18910 - DNA, 15 bp, Homo sapiens
gctatatcaacctgc

SEQ ID NO: 18911 - DNA, 15 bp, Homo sapiens
agctatatcaacctg

SEQ ID NO: 18912 - DNA, 15 bp, Homo sapiens
aagctatatcaacct

SEQ ID NO: 18913 - DNA, 15 bp, Homo sapiens
caagctatatcaacc

SEQ ID NO: 18914 - DNA, 15 bp, Homo sapiens
acaagctatatcaac

SEQ ID NO: 18915 - DNA, 15 bp, Homo sapiens
cacaagctatatcaa

SEQ ID NO: 18916 - DNA, 15 bp, Homo sapiens
tcacaagctatatca

SEQ ID NO: 18917 - DNA, 15 bp, Homo sapiens
atcacaagctatatc

SEQ ID NO: 18918 - DNA, 15 bp, Homo sapiens
tatcacaagctatat

SEQ ID NO: 18919 - DNA, 15 bp, Homo sapiens
ttatcacaagctata

SEQ ID NO: 18920 - DNA, 15 bp, Homo sapiens
gttatcacaagctat

SEQ ID NO: 18921 - DNA, 15 bp, Homo sapiens
tgttatcacaagcta

SEQ ID NO: 18922 - DNA, 15 bp, Homo sapiens
gtgttatcacaagct

SEQ ID NO: 18923 - DNA, 15 bp, Homo sapiens
agtgttatcacaagc

SEQ ID NO: 18924 - DNA, 15 bp, Homo sapiens
aagtgttatcacaag

SEQ ID NO: 18925 - DNA, 15 bp, Homo sapiens
gaagtgttatcacaa

SEQ ID NO: 18926 - DNA, 15 bp, Homo sapiens
agaagtgttatcaca

SEQ ID NO: 18927 - DNA, 15 bp, Homo sapiens
tagaagtgttatcac

SEQ ID NO: 18928 - DNA, 15 bp, Homo sapiens
ttagaagtgttatca

SEQ ID NO: 18929 - DNA, 15 bp, Homo sapiens
tttagaagtgttatc

SEQ ID NO: 18930 - DNA, 15 bp, Homo sapiens
ctttagaagtgttat

SEQ ID NO: 18931 - DNA, 15 bp, Homo sapiens
tctttagaagtgtta

SEQ ID NO: 18932 - DNA, 15 bp, Homo sapiens
ttctttagaagtgtt

SEQ ID NO: 18933 - DNA, 15 bp, Homo sapiens
tttctttagaagtgt

SEQ ID NO: 18934 - DNA, 15 bp, Homo sapiens
ttttctttagaagtg

SEQ ID NO: 18935 - DNA, 15 bp, Homo sapiens
tttttctttagaagt

SEQ ID NO: 18936 - DNA, 15 bp, Homo sapiens
ctttttctttagaag

SEQ ID NO: 18937 - DNA, 15 bp, Homo sapiens
gctttttctttagaa

SEQ ID NO: 18938 - DNA, 15 bp, Homo sapiens
tgctttttctttaga

SEQ ID NO: 18939 - DNA, 15 bp, Homo sapiens
ttgctttttctttag

SEQ ID NO: 18940 - DNA, 15 bp, Homo sapiens
attgctttttcttta

SEQ ID NO: 18941 - DNA, 15 bp, Homo sapiens
cattgctttttcttt

SEQ ID NO: 18942 - DNA, 15 bp, Homo sapiens
tcattgctttttctt

SEQ ID NO: 18943 - DNA, 15 bp, Homo sapiens
ctcattgctttttct

SEQ ID NO: 18944 - DNA, 15 bp, Homo sapiens
gctcattgctttttc

SEQ ID NO: 18945 - DNA, 15 bp, Homo sapiens
ggctcattgcttttt

SEQ ID NO: 18946 - DNA, 15 bp, Homo sapiens
tggctcattgctttt

SEQ ID NO: 18947 - DNA, 15 bp, Homo sapiens
atggctcattgcttt

SEQ ID NO: 18948 - DNA, 15 bp, Homo sapiens
tatggctcattgctt

SEQ ID NO: 18949 - DNA, 15 bp, Homo sapiens
ctatggctcattgct

SEQ ID NO: 18950 - DNA, 15 bp, Homo sapiens
tctatggctcattgc

SEQ ID NO: 18951 - DNA, 15 bp, Homo sapiens
ttctatggctcattg

SEQ ID NO: 18952 - DNA, 15 bp, Homo sapiens
tttctatggctcatt

SEQ ID NO: 18953 - DNA, 15 bp, Homo sapiens
ttttctatggctcat

SEQ ID NO: 18954 - DNA, 15 bp, Homo sapiens
tttttctatggctca

SEQ ID NO: 18955 - DNA, 15 bp, Homo sapiens
ttttttctatggctc

SEQ ID NO: 18956 - DNA, 15 bp, Homo sapiens
cttttttctatggct

SEQ ID NO: 18957 - DNA, 15 bp, Homo sapiens
tcttttttctatggc

SEQ ID NO: 18958 - DNA, 15 bp, Homo sapiens
ttcttttttctatgg

SEQ ID NO: 18959 - DNA, 15 bp, Homo sapiens
tttcttttttctatg

SEQ ID NO: 18960 - DNA, 15 bp, Homo sapiens
ttttcttttttctat

SEQ ID NO: 18961 - DNA, 15 bp, Homo sapiens
tttttcttttttcta

SEQ ID NO: 18962 - DNA, 15 bp, Homo sapiens
ctttttcttttttct

SEQ ID NO: 18963 - DNA, 15 bp, Homo sapiens
tctttttcttttttc

SEQ ID NO: 18964 - DNA, 15 bp, Homo sapiens
atctttttctttttt

SEQ ID NO: 18965 - DNA, 15 bp, Homo sapiens
tatctttttcttttt

SEQ ID NO: 18966 - DNA, 15 bp, Homo sapiens
gtatctttttctttt

SEQ ID NO: 18967 - DNA, 15 bp, Homo sapiens
tgtatctttttcttt

SEQ ID NO: 18968 - DNA, 15 bp, Homo sapiens
atgtatctttttctt

SEQ ID NO: 18969 - DNA, 15 bp, Homo sapiens
aatgtatctttttct

SEQ ID NO: 18970 - DNA, 15 bp, Homo sapiens
aaatgtatctttttc

SEQ ID NO: 18971 - DNA, 15 bp, Homo sapiens
aaaatgtatcttttt

SEQ ID NO: 18972 - DNA, 15 bp, Homo sapiens
caaaatgtatctttt

SEQ ID NO: 18973 - DNA, 15 bp, Homo sapiens
tcaaaatgtatcttt

SEQ ID NO: 18974 - DNA, 15 bp, Homo sapiens
ttcaaaatgtatctt

SEQ ID NO: 18975 - DNA, 15 bp, Homo sapiens
attcaaaatgtatct

SEQ ID NO: 18976 - DNA, 15 bp, Homo sapiens
aattcaaaatgtatc

SEQ ID NO: 18977 - DNA, 15 bp, Homo sapiens
taattcaaaatgtat

SEQ ID NO: 18978 - DNA, 15 bp, Homo sapiens
ttaattcaaaatgta

SEQ ID NO: 18979 - DNA, 15 bp, Homo sapiens
cttaattcaaaatgt

SEQ ID NO: 18980 - DNA, 15 bp, Homo sapiens
ccttaattcaaaatg

SEQ ID NO: 18981 - DNA, 15 bp, Homo sapiens
tccttaattcaaaat

SEQ ID NO: 18982 - DNA, 15 bp, Homo sapiens
ttccttaattcaaaa

SEQ ID NO: 18983 - DNA, 15 bp, Homo sapiens
cttccttaattcaaa

SEQ ID NO: 18984 - DNA, 15 bp, Homo sapiens
tcttccttaattcaa

SEQ ID NO: 18985 - DNA, 15 bp, Homo sapiens
atcttccttaattca

SEQ ID NO: 18986 - DNA, 15 bp, Homo sapiens
catcttccttaattc

SEQ ID NO: 18987 - DNA, 15 bp, Homo sapiens
ccatcttccttaatt

SEQ ID NO: 18988 - DNA, 15 bp, Homo sapiens
accatcttccttaat

SEQ ID NO: 18989 - DNA, 15 bp, Homo sapiens
caccatcttccttaa

SEQ ID NO: 18990 - DNA, 15 bp, Homo sapiens
tcaccatcttcctta

SEQ ID NO: 18991 - DNA, 15 bp, Homo sapiens
ttcaccatcttcctt

SEQ ID NO: 18992 - DNA, 15 bp, Homo sapiens
attcaccatcttcct

SEQ ID NO: 18993 - DNA, 15 bp, Homo sapiens
gattcaccatcttcc

SEQ ID NO: 18994 - DNA, 15 bp, Homo sapiens
agattcaccatcttc

SEQ ID NO: 18995 - DNA, 15 bp, Homo sapiens
cagattcaccatctt

SEQ ID NO: 18996 - DNA, 15 bp, Homo sapiens
ccagattcaccatct

SEQ ID NO: 18997 - DNA, 15 bp, Homo sapiens
cccagattcaccatc

SEQ ID NO: 18998 - DNA, 15 bp, Homo sapiens
tcccagattcaccat

SEQ ID NO: 18999 - DNA, 15 bp, Homo sapiens
ttcccagattcacca

SEQ ID NO: 19000 - DNA, 15 bp, Homo sapiens
cttcccagattcacc

SEQ ID NO: 19001 - DNA, 15 bp, Homo sapiens
acttcccagattcac

SEQ ID NO: 19002 - DNA, 15 bp, Homo sapiens
cacttcccagattca

SEQ ID NO: 19003 - DNA, 15 bp, Homo sapiens
tcacttcccagattc

SEQ ID NO: 19004 - DNA, 15 bp, Homo sapiens
ctcacttcccagatt

SEQ ID NO: 19005 - DNA, 15 bp, Homo sapiens
gctcacttcccagat

SEQ ID NO: 19006 - DNA, 15 bp, Homo sapiens
tgctcacttcccaga

SEQ ID NO: 19007 - DNA, 15 bp, Homo sapiens
ctgctcacttcccag

SEQ ID NO: 19008 - DNA, 15 bp, Homo sapiens
actgctcacttccca

SEQ ID NO: 19009 - DNA, 15 bp, Homo sapiens
tactgctcacttccc

SEQ ID NO: 19010 - DNA, 15 bp, Homo sapiens
gtactgctcacttcc

SEQ ID NO: 19011 - DNA, 15 bp, Homo sapiens
tgtactgctcacttc

SEQ ID NO: 19012 - DNA, 15 bp, Homo sapiens
ctgtactgctcactt

SEQ ID NO: 19013 - DNA, 15 bp, Homo sapiens
actgtactgctcact

SEQ ID NO: 19014 - DNA, 15 bp, Homo sapiens
gactgtactgctcac

SEQ ID NO: 19015 - DNA, 15 bp, Homo sapiens
tgactgtactgctca

SEQ ID NO: 19016 - DNA, 15 bp, Homo sapiens
gtgactgtactgctc

SEQ ID NO: 19017 - DNA, 15 bp, Homo sapiens
ggtgactgtactgct

SEQ ID NO: 19018 - DNA, 15 bp, Homo sapiens
tggtgactgtactgc

SEQ ID NO: 19019 - DNA, 15 bp, Homo sapiens
ctggtgactgtactg

SEQ ID NO: 19020 - DNA, 15 bp, Homo sapiens
tctggtgactgtact

SEQ ID NO: 19021 - DNA, 15 bp, Homo sapiens
gtctggtgactgtac

SEQ ID NO: 19022 - DNA, 15 bp, Homo sapiens
cgtctggtgactgta

SEQ ID NO: 19023 - DNA, 15 bp, Homo sapiens
acgtctggtgactgt

SEQ ID NO: 19024 - DNA, 15 bp, Homo sapiens
cacgtctggtgactg

SEQ ID NO: 19025 - DNA, 15 bp, Homo sapiens
acacgtctggtgact

SEQ ID NO: 19026 - DNA, 15 bp, Homo sapiens
tacacgtctggtgac

SEQ ID NO: 19027 - DNA, 15 bp, Homo sapiens
atacacgtctggtga

SEQ ID NO: 19028 - DNA, 15 bp, Homo sapiens
gatacacgtctggtg

SEQ ID NO: 19029 - DNA, 15 bp, Homo sapiens
ggatacacgtctggt

SEQ ID NO: 19030 - DNA, 15 bp, Homo sapiens
aggatacacgtctgg

SEQ ID NO: 19031 - DNA, 15 bp, Homo sapiens
gaggatacacgtctg

SEQ ID NO: 19032 - DNA, 15 bp, Homo sapiens
agaggatacacgtct

SEQ ID NO: 19033 - DNA, 15 bp, Homo sapiens
gagaggatacacgtc

SEQ ID NO: 19034 - DNA, 15 bp, Homo sapiens
ggagaggatacacgt

SEQ ID NO: 19035 - DNA, 15 bp, Homo sapiens
aggagaggatacacg

SEQ ID NO: 19036 - DNA, 15 bp, Homo sapiens
taggagaggatacac

SEQ ID NO: 19037 - DNA, 15 bp, Homo sapiens
ataggagaggataca

SEQ ID NO: 19038 - DNA, 15 bp, Homo sapiens
cataggagaggatac

SEQ ID NO: 19039 - DNA, 15 bp, Homo sapiens
ccataggagaggata

SEQ ID NO: 19040 - DNA, 15 bp, Homo sapiens
accataggagaggat

SEQ ID NO: 19041 - DNA, 15 bp, Homo sapiens
taccataggagagga

SEQ ID NO: 19042 - DNA, 15 bp, Homo sapiens
gtaccataggagagg

SEQ ID NO: 19043 - DNA, 15 bp, Homo sapiens
tgtaccataggagag

SEQ ID NO: 19044 - DNA, 15 bp, Homo sapiens
ctgtaccataggaga

SEQ ID NO: 19045 - DNA, 15 bp, Homo sapiens
tctgtaccataggag

SEQ ID NO: 19046 - DNA, 15 bp, Homo sapiens
ttctgtaccatagga

SEQ ID NO: 19047 - DNA, 15 bp, Homo sapiens
cttctgtaccatagg

SEQ ID NO: 19048 - DNA, 15 bp, Homo sapiens
acttctgtaccatag

SEQ ID NO: 19049 - DNA, 15 bp, Homo sapiens
cacttctgtaccata

SEQ ID NO: 19050 - DNA, 15 bp, Homo sapiens
acacttctgtaccat

SEQ ID NO: 19051 - DNA, 15 bp, Homo sapiens
aacacttctgtacca

SEQ ID NO: 19052 - DNA, 15 bp, Homo sapiens
aaacacttctgtacc

SEQ ID NO: 19053 - DNA, 15 bp, Homo sapiens
taaacacttctgtac

SEQ ID NO: 19054 - DNA, 15 bp, Homo sapiens
ataaacacttctgta

SEQ ID NO: 19055 - DNA, 15 bp, Homo sapiens
aataaacacttctgt

SEQ ID NO: 19056 - DNA, 15 bp, Homo sapiens
caataaacacttctg

SEQ ID NO: 19057 - DNA, 15 bp, Homo sapiens
ccaataaacacttct

SEQ ID NO: 19058 - DNA, 15 bp, Homo sapiens
cccaataaacacttc

SEQ ID NO: 19059 - DNA, 15 bp, Homo sapiens
acccaataaacactt

SEQ ID NO: 19060 - DNA, 15 bp, Homo sapiens
gacccaataaacact

SEQ ID NO: 19061 - DNA, 15 bp, Homo sapiens
agacccaataaacac

SEQ ID NO: 19062 - DNA, 15 bp, Homo sapiens
gagacccaataaaca

SEQ ID NO: 19063 - DNA, 15 bp, Homo sapiens
agagacccaataaac

SEQ ID NO: 19064 - DNA, 15 bp, Homo sapiens
aagagacccaataaa

SEQ ID NO: 19065 - DNA, 15 bp, Homo sapiens
aaagagacccaataa

SEQ ID NO: 19066 - DNA, 15 bp, Homo sapiens
taaagagacccaata

SEQ ID NO: 19067 - DNA, 15 bp, Homo sapiens
ataaagagacccaat

SEQ ID NO: 19068 - DNA, 15 bp, Homo sapiens
cataaagagacccaa

SEQ ID NO: 19069 - DNA, 15 bp, Homo sapiens
ccataaagagaccca

SEQ ID NO: 19070 - DNA, 15 bp, Homo sapiens
gccataaagagaccc

SEQ ID NO: 19071 - DNA, 15 bp, Homo sapiens
ggccataaagagacc

SEQ ID NO: 19072 - DNA, 15 bp, Homo sapiens
aggccataaagagac

SEQ ID NO: 19073 - DNA, 15 bp, Homo sapiens
caggccataaagaga

SEQ ID NO: 19074 - DNA, 15 bp, Homo sapiens
gcaggccataaagag

SEQ ID NO: 19075 - DNA, 15 bp, Homo sapiens
tgcaggccataaaga

SEQ ID NO: 19076 - DNA, 15 bp, Homo sapiens
atgcaggccataaag

SEQ ID NO: 19077 - DNA, 15 bp, Homo sapiens
catgcaggccataaa

SEQ ID NO: 19078 - DNA, 15 bp, Homo sapiens
tcatgcaggccataa

SEQ ID NO: 19079 - DNA, 15 bp, Homo sapiens
atcatgcaggccata

SEQ ID NO: 19080 - DNA, 15 bp, Homo sapiens
tatcatgcaggccat

SEQ ID NO: 19081 - DNA, 15 bp, Homo sapiens
atatcatgcaggcca

SEQ ID NO: 19082 - DNA, 15 bp, Homo sapiens
tatatcatgcaggcc

SEQ ID NO: 19083 - DNA, 15 bp, Homo sapiens
atatatcatgcaggc

SEQ ID NO: 19084 - DNA, 15 bp, Homo sapiens
gatatatcatgcagg

SEQ ID NO: 19085 - DNA, 15 bp, Homo sapiens
ggatatatcatgcag

SEQ ID NO: 19086 - DNA, 15 bp, Homo sapiens
gggatatatcatgca

SEQ ID NO: 19087 - DNA, 15 bp, Homo sapiens
tgggatatatcatgc

SEQ ID NO: 19088 - DNA, 15 bp, Homo sapiens
gtgggatatatcatg

SEQ ID NO: 19089 - DNA, 15 bp, Homo sapiens
tgtgggatatatcat

SEQ ID NO: 19090 - DNA, 15 bp, Homo sapiens
ttgtgggatatatca

SEQ ID NO: 19091 - DNA, 15 bp, Homo sapiens
cttgtgggatatatc

SEQ ID NO: 19092 - DNA, 15 bp, Homo sapiens
tcttgtgggatatat

SEQ ID NO: 19093 - DNA, 15 bp, Homo sapiens
atcttgtgggatata

SEQ ID NO: 19094 - DNA, 15 bp, Homo sapiens
catcttgtgggatat

SEQ ID NO: 19095 - DNA, 15 bp, Homo sapiens
tcatcttgtgggata

SEQ ID NO: 19096 - DNA, 15 bp, Homo sapiens
gtcatcttgtgggat

SEQ ID NO: 19097 - DNA, 15 bp, Homo sapiens
ggtcatcttgtggga

SEQ ID NO: 19098 - DNA, 15 bp, Homo sapiens
aggtcatcttgtggg

SEQ ID NO: 19099 - DNA, 15 bp, Homo sapiens
taggtcatcttgtgg

SEQ ID NO: 19100 - DNA, 15 bp, Homo sapiens
gtaggtcatcttgtg

SEQ ID NO: 19101 - DNA, 15 bp, Homo sapiens
agtaggtcatcttgt

SEQ ID NO: 19102 - DNA, 15 bp, Homo sapiens
aagtaggtcatcttg

SEQ ID NO: 19103 - DNA, 15 bp, Homo sapiens
gaagtaggtcatctt

SEQ ID NO: 19104 - DNA, 15 bp, Homo sapiens
tgaagtaggtcatct

SEQ ID NO: 19105 - DNA, 15 bp, Homo sapiens
gtgaagtaggtcatc

SEQ ID NO: 19106 - DNA, 15 bp, Homo sapiens
tgtgaagtaggtcat

SEQ ID NO: 19107 - DNA, 15 bp, Homo sapiens
atgtgaagtaggtca

SEQ ID NO: 19108 - DNA, 15 bp, Homo sapiens
aatgtgaagtaggtc

SEQ ID NO: 19109 - DNA, 15 bp, Homo sapiens
taatgtgaagtaggt

SEQ ID NO: 19110 - DNA, 15 bp, Homo sapiens
ataatgtgaagtagg

SEQ ID NO: 19111 - DNA, 15 bp, Homo sapiens
aataatgtgaagtag

SEQ ID NO: 19112 - DNA, 15 bp, Homo sapiens
aaataatgtgaagta

SEQ ID NO: 19113 - DNA, 15 bp, Homo sapiens
aaaataatgtgaagt

SEQ ID NO: 19114 - DNA, 15 bp, Homo sapiens
taaaataatgtgaag

SEQ ID NO: 19115 - DNA, 15 bp, Homo sapiens
ttaaaataatgtgaa

SEQ ID NO: 19116 - DNA, 15 bp, Homo sapiens
attaaaataatgtga

SEQ ID NO: 19117 - DNA, 15 bp, Homo sapiens
aattaaaataatgtg

SEQ ID NO: 19118 - DNA, 15 bp, Homo sapiens
gaattaaaataatgt

SEQ ID NO: 19119 - DNA, 15 bp, Homo sapiens
agaattaaaataatg

SEQ ID NO: 19120 - DNA, 15 bp, Homo sapiens
cagaattaaaataat

SEQ ID NO: 19121 - DNA, 15 bp, Homo sapiens
acagaattaaaataa

SEQ ID NO: 19122 - DNA, 15 bp, Homo sapiens
tacagaattaaaata

SEQ ID NO: 19123 - DNA, 15 bp, Homo sapiens
atacagaattaaaat

SEQ ID NO: 19124 - DNA, 15 bp, Homo sapiens
aatacagaattaaaa

SEQ ID NO: 19125 - DNA, 15 bp, Homo sapiens
gaatacagaattaaa

SEQ ID NO: 19126 - DNA, 15 bp, Homo sapiens
tgaatacagaattaa

SEQ ID NO: 19127 - DNA, 15 bp, Homo sapiens
ttgaatacagaatta

SEQ ID NO: 19128 - DNA, 15 bp, Homo sapiens
gttgaatacagaatt

SEQ ID NO: 19129 - DNA, 15 bp, Homo sapiens
agttgaatacagaat

SEQ ID NO: 19130 - DNA, 15 bp, Homo sapiens
tagttgaatacagaa

SEQ ID NO: 19131 - DNA, 15 bp, Homo sapiens
ttagttgaatacaga

SEQ ID NO: 19132 - DNA, 15 bp, Homo sapiens
cttagttgaatacag

SEQ ID NO: 19133 - DNA, 15 bp, Homo sapiens
gcttagttgaataca

SEQ ID NO: 19134 - DNA, 15 bp, Homo sapiens
tgcttagttgaatac

SEQ ID NO: 19135 - DNA, 15 bp, Homo sapiens
gtgcttagttgaata

SEQ ID NO: 19136 - DNA, 15 bp, Homo sapiens
agtgcttagttgaat

SEQ ID NO: 19137 - DNA, 15 bp, Homo sapiens
tagtgcttagttgaa

SEQ ID NO: 19138 - DNA, 15 bp, Homo sapiens
ttagtgcttagttga

SEQ ID NO: 19139 - DNA, 15 bp, Homo sapiens
attagtgcttagttg

SEQ ID NO: 19140 - DNA, 15 bp, Homo sapiens
aattagtgcttagtt

SEQ ID NO: 19141 - DNA, 15 bp, Homo sapiens
gaattagtgcttagt

SEQ ID NO: 19142 - DNA, 15 bp, Homo sapiens
tgaattagtgcttag

SEQ ID NO: 19143 - DNA, 15 bp, Homo sapiens
ttgaattagtgctta

SEQ ID NO: 19144 - DNA, 15 bp, Homo sapiens
gttgaattagtgctt

SEQ ID NO: 19145 - DNA, 15 bp, Homo sapiens
ggttgaattagtgct

SEQ ID NO: 19146 - DNA, 15 bp, Homo sapiens
gggttgaattagtgc

SEQ ID NO: 19147 - DNA, 15 bp, Homo sapiens
tgggttgaattagtg

SEQ ID NO: 19148 - DNA, 15 bp, Homo sapiens
ctgggttgaattagt

SEQ ID NO: 19149 - DNA, 15 bp, Homo sapiens
gctgggttgaattag

SEQ ID NO: 19150 - DNA, 15 bp, Homo sapiens
ggctgggttgaatta

SEQ ID NO: 19151 - DNA, 15 bp, Homo sapiens
tggctgggttgaatt

SEQ ID NO: 19152 - DNA, 15 bp, Homo sapiens
ctggctgggttgaat

SEQ ID NO: 19153 - DNA, 15 bp, Homo sapiens
tctggctgggttgaa

SEQ ID NO: 19154 - DNA, 15 bp, Homo sapiens
atctggctgggttga

SEQ ID NO: 19155 - DNA, 15 bp, Homo sapiens
aatctggctgggttg

SEQ ID NO: 19156 - DNA, 15 bp, Homo sapiens
taatctggctgggtt

SEQ ID NO: 19157 - DNA, 15 bp, Homo sapiens
ctaatctggctgggt

SEQ ID NO: 19158 - DNA, 15 bp, Homo sapiens
actaatctggctggg

SEQ ID NO: 19159 - DNA, 15 bp, Homo sapiens
tactaatctggctgg

SEQ ID NO: 19160 - DNA, 15 bp, Homo sapiens
gtactaatctggctg

SEQ ID NO: 19161 - DNA, 15 bp, Homo sapiens
agtactaatctggct

SEQ ID NO: 19162 - DNA, 15 bp, Homo sapiens
gagtactaatctggc

SEQ ID NO: 19163 - DNA, 15 bp, Homo sapiens
tgagtactaatctgg

SEQ ID NO: 19164 - DNA, 15 bp, Homo sapiens
atgagtactaatctg

SEQ ID NO: 19165 - DNA, 15 bp, Homo sapiens
tatgagtactaatct

SEQ ID NO: 19166 - DNA, 15 bp, Homo sapiens
gtatgagtactaatc

SEQ ID NO: 19167 - DNA, 15 bp, Homo sapiens
ggtatgagtactaat

SEQ ID NO: 19168 - DNA, 15 bp, Homo sapiens
tggtatgagtactaa

SEQ ID NO: 19169 - DNA, 15 bp, Homo sapiens
ttggtatgagtacta

SEQ ID NO: 19170 - DNA, 15 bp, Homo sapiens
tttggtatgagtact

SEQ ID NO: 19171 - DNA, 15 bp, Homo sapiens
ttttggtatgagtac

SEQ ID NO: 19172 - DNA, 15 bp, Homo sapiens
tttttggtatgagta

SEQ ID NO: 19173 - DNA, 15 bp, Homo sapiens
ttttttggtatgagt

SEQ ID NO: 19174 - DNA, 15 bp, Homo sapiens
cttttttggtatgag

SEQ ID NO: 19175 - DNA, 15 bp, Homo sapiens
tcttttttggtatga

SEQ ID NO: 19176 - DNA, 15 bp, Homo sapiens
ctcttttttggtatg

SEQ ID NO: 19177 - DNA, 15 bp, Homo sapiens
actcttttttggtat

SEQ ID NO: 19178 - DNA, 15 bp, Homo sapiens
cactcttttttggta

SEQ ID NO: 19179 - DNA, 15 bp, Homo sapiens
tcactcttttttggt

SEQ ID NO: 19180 - DNA, 15 bp, Homo sapiens
ttcactcttttttgg

SEQ ID NO: 19181 - DNA, 15 bp, Homo sapiens
attcactcttttttg

SEQ ID NO: 19182 - DNA, 15 bp, Homo sapiens
tattcactctttttt

SEQ ID NO: 19183 - DNA, 15 bp, Homo sapiens
gtattcactcttttt

SEQ ID NO: 19184 - DNA, 15 bp, Homo sapiens
agtattcactctttt

SEQ ID NO: 19185 - DNA, 15 bp, Homo sapiens
gagtattcactcttt

SEQ ID NO: 19186 - DNA, 15 bp, Homo sapiens
agagtattcactctt

SEQ ID NO: 19187 - DNA, 15 bp, Homo sapiens
cagagtattcactct

SEQ ID NO: 19188 - DNA, 15 bp, Homo sapiens
tcagagtattcactc

SEQ ID NO: 19189 - DNA, 15 bp, Homo sapiens
ttcagagtattcact

SEQ ID NO: 19190 - DNA, 15 bp, Homo sapiens
attcagagtattcac

SEQ ID NO: 19191 - DNA, 15 bp, Homo sapiens
tattcagagtattca

SEQ ID NO: 19192 - DNA, 15 bp, Homo sapiens
ctattcagagtattc

SEQ ID NO: 19193 - DNA, 15 bp, Homo sapiens
tctattcagagtatt

SEQ ID NO: 19194 - DNA, 15 bp, Homo sapiens
ctctattcagagtat

SEQ ID NO: 19195 - DNA, 15 bp, Homo sapiens
cctctattcagagta

SEQ ID NO: 19196 - DNA, 15 bp, Homo sapiens
ccctctattcagagt

SEQ ID NO: 19197 - DNA, 15 bp, Homo sapiens
gccctctattcagag

SEQ ID NO: 19198 - DNA, 15 bp, Homo sapiens
tgccctctattcaga

SEQ ID NO: 19199 - DNA, 15 bp, Homo sapiens
ctgccctctattcag

SEQ ID NO: 19200 - DNA, 15 bp, Homo sapiens
cctgccctctattca

SEQ ID NO: 19201 - DNA, 15 bp, Homo sapiens
acctgccctctattc

SEQ ID NO: 19202 - DNA, 15 bp, Homo sapiens
aacctgccctctatt

SEQ ID NO: 19203 - DNA, 15 bp, Homo sapiens
aaacctgccctctat

SEQ ID NO: 19204 - DNA, 15 bp, Homo sapiens
aaaacctgccctcta

SEQ ID NO: 19205 - DNA, 15 bp, Homo sapiens
gaaaacctgccctct

SEQ ID NO: 19206 - DNA, 15 bp, Homo sapiens
agaaaacctgccctc

SEQ ID NO: 19207 - DNA, 15 bp, Homo sapiens
cagaaaacctgccct

SEQ ID NO: 19208 - DNA, 15 bp, Homo sapiens
tcagaaaacctgccc

SEQ ID NO: 19209 - DNA, 15 bp, Homo sapiens
atcagaaaacctgcc

SEQ ID NO: 19210 - DNA, 15 bp, Homo sapiens
aatcagaaaacctgc

SEQ ID NO: 19211 - DNA, 15 bp, Homo sapiens
taatcagaaaacctg

SEQ ID NO: 19212 - DNA, 15 bp, Homo sapiens
ataatcagaaaacct

SEQ ID NO: 19213 - DNA, 15 bp, Homo sapiens
cataatcagaaaacc

SEQ ID NO: 19214 - DNA, 15 bp, Homo sapiens
ccataatcagaaaac

SEQ ID NO: 19215 - DNA, 15 bp, Homo sapiens
accataatcagaaaa

SEQ ID NO: 19216 - DNA, 15 bp, Homo sapiens
caccataatcagaaa

SEQ ID NO: 19217 - DNA, 15 bp, Homo sapiens
tcaccataatcagaa

SEQ ID NO: 19218 - DNA, 15 bp, Homo sapiens
ctcaccataatcaga

SEQ ID NO: 19219 - DNA, 15 bp, Homo sapiens
tctcaccataatcag

SEQ ID NO: 19220 - DNA, 15 bp, Homo sapiens
ttctcaccataatca

SEQ ID NO: 19221 - DNA, 15 bp, Homo sapiens
attctcaccataatc

SEQ ID NO: 19222 - DNA, 15 bp, Homo sapiens
tattctcaccataat

SEQ ID NO: 19223 - DNA, 15 bp, Homo sapiens
atattctcaccataa

SEQ ID NO: 19224 - DNA, 15 bp, Homo sapiens
gatattctcaccata

SEQ ID NO: 19225 - DNA, 15 bp, Homo sapiens
agatattctcaccat

SEQ ID NO: 19226 - DNA, 15 bp, Homo sapiens
aagatattctcacca

SEQ ID NO: 19227 - DNA, 15 bp, Homo sapiens
aaagatattctcacc

SEQ ID NO: 19228 - DNA, 15 bp, Homo sapiens
caaagatattctcac

SEQ ID NO: 19229 - DNA, 15 bp, Homo sapiens
acaaagatattctca

SEQ ID NO: 19230 - DNA, 15 bp, Homo sapiens
cacaaagatattctc

SEQ ID NO: 19231 - DNA, 15 bp, Homo sapiens
ccacaaagatattct

SEQ ID NO: 19232 - DNA, 15 bp, Homo sapiens
accacaaagatattc

SEQ ID NO: 19233 - DNA, 15 bp, Homo sapiens
taccacaaagatatt

SEQ ID NO: 19234 - DNA, 15 bp, Homo sapiens
ttaccacaaagatat

SEQ ID NO: 19235 - DNA, 15 bp, Homo sapiens
tttaccacaaagata

SEQ ID NO: 19236 - DNA, 15 bp, Homo sapiens
atttaccacaaagat

SEQ ID NO: 19237 - DNA, 15 bp, Homo sapiens
aatttaccacaaaga

SEQ ID NO: 19238 - DNA, 15 bp, Homo sapiens
taatttaccacaaag

SEQ ID NO: 19239 - DNA, 15 bp, Homo sapiens
ttaatttaccacaaa

SEQ ID NO: 19240 - DNA, 15 bp, Homo sapiens
attaatttaccacaa

SEQ ID NO: 19241 - DNA, 15 bp, Homo sapiens
gattaatttaccaca

SEQ ID NO: 19242 - DNA, 15 bp, Homo sapiens
agattaatttaccac

SEQ ID NO: 19243 - DNA, 15 bp, Homo sapiens
cagattaatttacca

SEQ ID NO: 19244 - DNA, 15 bp, Homo sapiens
ccagattaatttacc

SEQ ID NO: 19245 - DNA, 15 bp, Homo sapiens
accagattaatttac

SEQ ID NO: 19246 - DNA, 15 bp, Homo sapiens
caccagattaattta

SEQ ID NO: 19247 - DNA, 15 bp, Homo sapiens
acaccagattaattt

SEQ ID NO: 19248 - DNA, 15 bp, Homo sapiens
cacaccagattaatt

SEQ ID NO: 19249 - DNA, 15 bp, Homo sapiens
gcacaccagattaat

SEQ ID NO: 19250 - DNA, 15 bp, Homo sapiens
agcacaccagattaa

SEQ ID NO: 19251 - DNA, 15 bp, Homo sapiens
tagcacaccagatta

SEQ ID NO: 19252 - DNA, 15 bp, Homo sapiens
ctagcacaccagatt

SEQ ID NO: 19253 - DNA, 15 bp, Homo sapiens
actagcacaccagat

SEQ ID NO: 19254 - DNA, 15 bp, Homo sapiens
aactagcacaccaga

SEQ ID NO: 19255 - DNA, 15 bp, Homo sapiens
aaactagcacaccag

SEQ ID NO: 19256 - DNA, 15 bp, Homo sapiens
aaaactagcacacca

SEQ ID NO: 19257 - DNA, 15 bp, Homo sapiens
aaaaactagcacacc

SEQ ID NO: 19258 - DNA, 15 bp, Homo sapiens
taaaaactagcacac

SEQ ID NO: 19259 - DNA, 15 bp, Homo sapiens
gtaaaaactagcaca

SEQ ID NO: 19260 - DNA, 15 bp, Homo sapiens
cgtaaaaactagcac

SEQ ID NO: 19261 - DNA, 15 bp, Homo sapiens
acgtaaaaactagca

SEQ ID NO: 19262 - DNA, 15 bp, Homo sapiens
aacgtaaaaactagc

SEQ ID NO: 19263 - DNA, 15 bp, Homo sapiens
caacgtaaaaactag

SEQ ID NO: 19264 - DNA, 15 bp, Homo sapiens
ccaacgtaaaaacta

SEQ ID NO: 19265 - DNA, 15 bp, Homo sapiens
accaacgtaaaaact

SEQ ID NO: 19266 - DNA, 15 bp, Homo sapiens
gaccaacgtaaaaac

SEQ ID NO: 19267 - DNA, 15 bp, Homo sapiens
agaccaacgtaaaaa

SEQ ID NO: 19268 - DNA, 15 bp, Homo sapiens
gagaccaacgtaaaa

SEQ ID NO: 19269 - DNA, 15 bp, Homo sapiens
agagaccaacgtaaa

SEQ ID NO: 19270 - DNA, 15 bp, Homo sapiens
aagagaccaacgtaa

SEQ ID NO: 19271 - DNA, 15 bp, Homo sapiens
gaagagaccaacgta

SEQ ID NO: 19272 - DNA, 15 bp, Homo sapiens
agaagagaccaacgt

SEQ ID NO: 19273 - DNA, 15 bp, Homo sapiens
gagaagagaccaacg

SEQ ID NO: 19274 - DNA, 15 bp, Homo sapiens
tgagaagagaccaac

SEQ ID NO: 19275 - DNA, 15 bp, Homo sapiens
ctgagaagagaccaa

SEQ ID NO: 19276 - DNA, 15 bp, Homo sapiens
actgagaagagacca

SEQ ID NO: 19277 - DNA, 15 bp, Homo sapiens
cactgagaagagacc

SEQ ID NO: 19278 - DNA, 15 bp, Homo sapiens
acactgagaagagac

SEQ ID NO: 19279 - DNA, 15 bp, Homo sapiens
gacactgagaagaga

SEQ ID NO: 19280 - DNA, 15 bp, Homo sapiens
cgacactgagaagag

SEQ ID NO: 19281 - DNA, 15 bp, Homo sapiens
acgacactgagaaga

SEQ ID NO: 19282 - DNA, 15 bp, Homo sapiens
aacgacactgagaag

SEQ ID NO: 19283 - DNA, 15 bp, Homo sapiens
taacgacactgagaa

SEQ ID NO: 19284 - DNA, 15 bp, Homo sapiens
ctaacgacactgaga

SEQ ID NO: 19285 - DNA, 15 bp, Homo sapiens
actaacgacactgag

SEQ ID NO: 19286 - DNA, 15 bp, Homo sapiens
gactaacgacactga

SEQ ID NO: 19287 - DNA, 15 bp, Homo sapiens
tgactaacgacactg

SEQ ID NO: 19288 - DNA, 15 bp, Homo sapiens
gtgactaacgacact

SEQ ID NO: 19289 - DNA, 15 bp, Homo sapiens
agtgactaacgacac

SEQ ID NO: 19290 - DNA, 15 bp, Homo sapiens
cagtgactaacgaca

SEQ ID NO: 19291 - DNA, 15 bp, Homo sapiens
tcagtgactaacgac

SEQ ID NO: 19292 - DNA, 15 bp, Homo sapiens
ctcagtgactaacga

SEQ ID NO: 19293 - DNA, 15 bp, Homo sapiens
cctcagtgactaacg

SEQ ID NO: 19294 - DNA, 15 bp, Homo sapiens
gcctcagtgactaac

SEQ ID NO: 19295 - DNA, 15 bp, Homo sapiens
agcctcagtgactaa

SEQ ID NO: 19296 - DNA, 15 bp, Homo sapiens
cagcctcagtgacta

SEQ ID NO: 19297 - DNA, 15 bp, Homo sapiens
tcagcctcagtgact

SEQ ID NO: 19298 - DNA, 15 bp, Homo sapiens
atcagcctcagtgac

SEQ ID NO: 19299 - DNA, 15 bp, Homo sapiens
aatcagcctcagtga

SEQ ID NO: 19300 - DNA, 15 bp, Homo sapiens
caatcagcctcagtg

SEQ ID NO: 19301 - DNA, 15 bp, Homo sapiens
tcaatcagcctcagt

SEQ ID NO: 19302 - DNA, 15 bp, Homo sapiens
atcaatcagcctcag

SEQ ID NO: 19303 - DNA, 15 bp, Homo sapiens
gatcaatcagcctca

SEQ ID NO: 19304 - DNA, 15 bp, Homo sapiens
tgatcaatcagcctc

SEQ ID NO: 19305 - DNA, 15 bp, Homo sapiens
atgatcaatcagcct

SEQ ID NO: 19306 - DNA, 15 bp, Homo sapiens
gatgatcaatcagcc

SEQ ID NO: 19307 - DNA, 15 bp, Homo sapiens
agatgatcaatcagc

SEQ ID NO: 19308 - DNA, 15 bp, Homo sapiens
aagatgatcaatcag

SEQ ID NO: 19309 - DNA, 15 bp, Homo sapiens
aaagatgatcaatca

SEQ ID NO: 19310 - DNA, 15 bp, Homo sapiens
aaaagatgatcaatc

SEQ ID NO: 19311 - DNA, 15 bp, Homo sapiens
taaaagatgatcaat

SEQ ID NO: 19312 - DNA, 15 bp, Homo sapiens
ctaaaagatgatcaa

SEQ ID NO: 19313 - DNA, 15 bp, Homo sapiens
cctaaaagatgatca

SEQ ID NO: 19314 - DNA, 15 bp, Homo sapiens
acctaaaagatgatc

SEQ ID NO: 19315 - DNA, 15 bp, Homo sapiens
aacctaaaagatgat

SEQ ID NO: 19316 - DNA, 15 bp, Homo sapiens
taacctaaaagatga

SEQ ID NO: 19317 - DNA, 15 bp, Homo sapiens
gtaacctaaaagatg

SEQ ID NO: 19318 - DNA, 15 bp, Homo sapiens
agtaacctaaaagat

SEQ ID NO: 19319 - DNA, 15 bp, Homo sapiens
cagtaacctaaaaga

SEQ ID NO: 19320 - DNA, 15 bp, Homo sapiens
tcagtaacctaaaag

SEQ ID NO: 19321 - DNA, 15 bp, Homo sapiens
atcagtaacctaaaa

SEQ ID NO: 19322 - DNA, 15 bp, Homo sapiens
tatcagtaacctaaa

SEQ ID NO: 19323 - DNA, 15 bp, Homo sapiens
ttatcagtaacctaa

SEQ ID NO: 19324 - DNA, 15 bp, Homo sapiens
tttatcagtaaccta

SEQ ID NO: 19325 - DNA, 15 bp, Homo sapiens
ctttatcagtaacct

SEQ ID NO: 19326 - DNA, 15 bp, Homo sapiens
actttatcagtaacc

SEQ ID NO: 19327 - DNA, 15 bp, Homo sapiens
aactttatcagtaac

SEQ ID NO: 19328 - DNA, 15 bp, Homo sapiens
gaactttatcagtaa

SEQ ID NO: 19329 - DNA, 15 bp, Homo sapiens
ggaactttatcagta

SEQ ID NO: 19330 - DNA, 15 bp, Homo sapiens
aggaactttatcagt

SEQ ID NO: 19331 - DNA, 15 bp, Homo sapiens
caggaactttatcag

SEQ ID NO: 19332 - DNA, 15 bp, Homo sapiens
acaggaactttatca

SEQ ID NO: 19333 - DNA, 15 bp, Homo sapiens
tacaggaactttatc

SEQ ID NO: 19334 - DNA, 15 bp, Homo sapiens
gtacaggaactttat

SEQ ID NO: 19335 - DNA, 15 bp, Homo sapiens
tgtacaggaacttta

SEQ ID NO: 19336 - DNA, 15 bp, Homo sapiens
ctgtacaggaacttt

SEQ ID NO: 19337 - DNA, 15 bp, Homo sapiens
gctgtacaggaactt

SEQ ID NO: 19338 - DNA, 15 bp, Homo sapiens
agctgtacaggaact

SEQ ID NO: 19339 - DNA, 15 bp, Homo sapiens
cagctgtacaggaac

SEQ ID NO: 19340 - DNA, 15 bp, Homo sapiens
tcagctgtacaggaa

SEQ ID NO: 19341 - DNA, 15 bp, Homo sapiens
atcagctgtacagga

SEQ ID NO: 19342 - DNA, 15 bp, Homo sapiens
aatcagctgtacagg

SEQ ID NO: 19343 - DNA, 15 bp, Homo sapiens
aaatcagctgtacag

SEQ ID NO: 19344 - DNA, 15 bp, Homo sapiens
aaaatcagctgtaca

SEQ ID NO: 19345 - DNA, 15 bp, Homo sapiens
gaaaatcagctgtac

SEQ ID NO: 19346 - DNA, 15 bp, Homo sapiens
tgaaaatcagctgta

SEQ ID NO: 19347 - DNA, 15 bp, Homo sapiens
ctgaaaatcagctgt

SEQ ID NO: 19348 - DNA, 15 bp, Homo sapiens
tctgaaaatcagctg

SEQ ID NO: 19349 - DNA, 15 bp, Homo sapiens
gtctgaaaatcagct

SEQ ID NO: 19350 - DNA, 15 bp, Homo sapiens
ggtctgaaaatcagc

SEQ ID NO: 19351 - DNA, 15 bp, Homo sapiens
aggtctgaaaatcag

SEQ ID NO: 19352 - DNA, 15 bp, Homo sapiens
aaggtctgaaaatca

SEQ ID NO: 19353 - DNA, 15 bp, Homo sapiens
taaggtctgaaaatc

SEQ ID NO: 19354 - DNA, 15 bp, Homo sapiens
ctaaggtctgaaaat

SEQ ID NO: 19355 - DNA, 15 bp, Homo sapiens
tctaaggtctgaaaa

SEQ ID NO: 19356 - DNA, 15 bp, Homo sapiens
atctaaggtctgaaa

SEQ ID NO: 19357 - DNA, 15 bp, Homo sapiens
aatctaaggtctgaa

SEQ ID NO: 19358 - DNA, 15 bp, Homo sapiens
caatctaaggtctga

SEQ ID NO: 19359 - DNA, 15 bp, Homo sapiens
gcaatctaaggtctg

SEQ ID NO: 19360 - DNA, 15 bp, Homo sapiens
tgcaatctaaggtct

SEQ ID NO: 19361 - DNA, 15 bp, Homo sapiens
ttgcaatctaaggtc

SEQ ID NO: 19362 - DNA, 15 bp, Homo sapiens
attgcaatctaaggt

SEQ ID NO: 19363 - DNA, 15 bp, Homo sapiens
tattgcaatctaagg

SEQ ID NO: 19364 - DNA, 15 bp, Homo sapiens
ttattgcaatctaag

SEQ ID NO: 19365 - DNA, 15 bp, Homo sapiens
gttattgcaatctaa

SEQ ID NO: 19366 - DNA, 15 bp, Homo sapiens
agttattgcaatcta

SEQ ID NO: 19367 - DNA, 15 bp, Homo sapiens
aagttattgcaatct

SEQ ID NO: 19368 - DNA, 15 bp, Homo sapiens
gaagttattgcaatc

SEQ ID NO: 19369 - DNA, 15 bp, Homo sapiens
tgaagttattgcaat

SEQ ID NO: 19370 - DNA, 15 bp, Homo sapiens
gtgaagttattgcaa

SEQ ID NO: 19371 - DNA, 15 bp, Homo sapiens
ggtgaagttattgca

SEQ ID NO: 19372 - DNA, 15 bp, Homo sapiens
tggtgaagttattgc

SEQ ID NO: 19373 - DNA, 15 bp, Homo sapiens
ttggtgaagttattg

SEQ ID NO: 19374 - DNA, 15 bp, Homo sapiens
cttggtgaagttatt

SEQ ID NO: 19375 - DNA, 15 bp, Homo sapiens
tcttggtgaagttat

SEQ ID NO: 19376 - DNA, 15 bp, Homo sapiens
ttcttggtgaagtta

SEQ ID NO: 19377 - DNA, 15 bp, Homo sapiens
tttcttggtgaagtt

SEQ ID NO: 19378 - DNA, 15 bp, Homo sapiens
ttttcttggtgaagt

SEQ ID NO: 19379 - DNA, 15 bp, Homo sapiens
attttcttggtgaag

SEQ ID NO: 19380 - DNA, 15 bp, Homo sapiens
tattttcttggtgaa

SEQ ID NO: 19381 - DNA, 15 bp, Homo sapiens
gtattttcttggtga

SEQ ID NO: 19382 - DNA, 15 bp, Homo sapiens
agtattttcttggtg

SEQ ID NO: 19383 - DNA, 15 bp, Homo sapiens
aagtattttcttggt

SEQ ID NO: 19384 - DNA, 15 bp, Homo sapiens
gaagtattttcttgg

SEQ ID NO: 19385 - DNA, 15 bp, Homo sapiens
tgaagtattttcttg

SEQ ID NO: 19386 - DNA, 15 bp, Homo sapiens
atgaagtattttctt

SEQ ID NO: 19387 - DNA, 15 bp, Homo sapiens
aatgaagtattttct

SEQ ID NO: 19388 - DNA, 15 bp, Homo sapiens
caatgaagtattttc

SEQ ID NO: 19389 - DNA, 15 bp, Homo sapiens
ccaatgaagtatttt

SEQ ID NO: 19390 - DNA, 15 bp, Homo sapiens
cccaatgaagtattt

SEQ ID NO: 19391 - DNA, 15 bp, Homo sapiens
tcccaatgaagtatt

SEQ ID NO: 19392 - DNA, 15 bp, Homo sapiens
ttcccaatgaagtat

SEQ ID NO: 19393 - DNA, 15 bp, Homo sapiens
cttcccaatgaagta

SEQ ID NO: 19394 - DNA, 15 bp, Homo sapiens
gcttcccaatgaagt

SEQ ID NO: 19395 - DNA, 15 bp, Homo sapiens
tgcttcccaatgaag

SEQ ID NO: 19396 - DNA, 15 bp, Homo sapiens
atgcttcccaatgaa

SEQ ID NO: 19397 - DNA, 15 bp, Homo sapiens
aatgcttcccaatga

SEQ ID NO: 19398 - DNA, 15 bp, Homo sapiens
aaatgcttcccaatg

SEQ ID NO: 19399 - DNA, 15 bp, Homo sapiens
aaaatgcttcccaat

SEQ ID NO: 19400 - DNA, 15 bp, Homo sapiens
caaaatgcttcccaa

SEQ ID NO: 19401 - DNA, 15 bp, Homo sapiens
ccaaaatgcttccca

SEQ ID NO: 19402 - DNA, 15 bp, Homo sapiens
accaaaatgcttccc

SEQ ID NO: 19403 - DNA, 15 bp, Homo sapiens
gaccaaaatgcttcc

SEQ ID NO: 19404 - DNA, 15 bp, Homo sapiens
ggaccaaaatgcttc

SEQ ID NO: 19405 - DNA, 15 bp, Homo sapiens
aggaccaaaatgctt

SEQ ID NO: 19406 - DNA, 15 bp, Homo sapiens
aaggaccaaaatgct

SEQ ID NO: 19407 - DNA, 15 bp, Homo sapiens
gaaggaccaaaatgc

SEQ ID NO: 19408 - DNA, 15 bp, Homo sapiens
ggaaggaccaaaatg

SEQ ID NO: 19409 - DNA, 15 bp, Homo sapiens
tggaaggaccaaaat

SEQ ID NO: 19410 - DNA, 15 bp, Homo sapiens
atggaaggaccaaaa

SEQ ID NO: 19411 - DNA, 15 bp, Homo sapiens
aatggaaggaccaaa

SEQ ID NO: 19412 - DNA, 15 bp, Homo sapiens
aaatggaaggaccaa

SEQ ID NO: 19413 - DNA, 15 bp, Homo sapiens
caaatggaaggacca

SEQ ID NO: 19414 - DNA, 15 bp, Homo sapiens
tcaaatggaaggacc

SEQ ID NO: 19415 - DNA, 15 bp, Homo sapiens
atcaaatggaaggac

SEQ ID NO: 19416 - DNA, 15 bp, Homo sapiens
aatcaaatggaagga

SEQ ID NO: 19417 - DNA, 15 bp, Homo sapiens
gaatcaaatggaagg

SEQ ID NO: 19418 - DNA, 15 bp, Homo sapiens
tgaatcaaatggaag

SEQ ID NO: 19419 - DNA, 15 bp, Homo sapiens
atgaatcaaatggaa

SEQ ID NO: 19420 - DNA, 15 bp, Homo sapiens
tatgaatcaaatgga

SEQ ID NO: 19421 - DNA, 15 bp, Homo sapiens
ttatgaatcaaatgg

SEQ ID NO: 19422 - DNA, 15 bp, Homo sapiens
gttatgaatcaaatg

SEQ ID NO: 19423 - DNA, 15 bp, Homo sapiens
agttatgaatcaaat

SEQ ID NO: 19424 - DNA, 15 bp, Homo sapiens
gagttatgaatcaaa

SEQ ID NO: 19425 - DNA, 15 bp, Homo sapiens
agagttatgaatcaa

SEQ ID NO: 19426 - DNA, 15 bp, Homo sapiens
aagagttatgaatca

SEQ ID NO: 19427 - DNA, 15 bp, Homo sapiens
taagagttatgaatc

SEQ ID NO: 19428 - DNA, 15 bp, Homo sapiens
gtaagagttatgaat

SEQ ID NO: 19429 - DNA, 15 bp, Homo sapiens
ggtaagagttatgaa

SEQ ID NO: 19430 - DNA, 15 bp, Homo sapiens
aggtaagagttatga

SEQ ID NO: 19431 - DNA, 15 bp, Homo sapiens
aaggtaagagttatg

SEQ ID NO: 19432 - DNA, 15 bp, Homo sapiens
aaaggtaagagttat

SEQ ID NO: 19433 - DNA, 15 bp, Homo sapiens
taaaggtaagagtta

SEQ ID NO: 19434 - DNA, 15 bp, Homo sapiens
ataaaggtaagagtt

SEQ ID NO: 19435 - DNA, 15 bp, Homo sapiens
cataaaggtaagagt

SEQ ID NO: 19436 - DNA, 15 bp, Homo sapiens
gcataaaggtaagag

SEQ ID NO: 19437 - DNA, 15 bp, Homo sapiens
ggcataaaggtaaga

SEQ ID NO: 19438 - DNA, 15 bp, Homo sapiens
aggcataaaggtaag

SEQ ID NO: 19439 - DNA, 15 bp, Homo sapiens
gaggcataaaggtaa

SEQ ID NO: 19440 - DNA, 15 bp, Homo sapiens
agaggcataaaggta

SEQ ID NO: 19441 - DNA, 15 bp, Homo sapiens
cagaggcataaaggt

SEQ ID NO: 19442 - DNA, 15 bp, Homo sapiens
tcagaggcataaagg

SEQ ID NO: 19443 - DNA, 15 bp, Homo sapiens
ttcagaggcataaag

SEQ ID NO: 19444 - DNA, 15 bp, Homo sapiens
cttcagaggcataaa

SEQ ID NO: 19445 - DNA, 15 bp, Homo sapiens
ccttcagaggcataa

SEQ ID NO: 19446 - DNA, 15 bp, Homo sapiens
tccttcagaggcata

SEQ ID NO: 19447 - DNA, 15 bp, Homo sapiens
ttccttcagaggcat

SEQ ID NO: 19448 - DNA, 15 bp, Homo sapiens
tttccttcagaggca

SEQ ID NO: 19449 - DNA, 15 bp, Homo sapiens
ttttccttcagaggc

SEQ ID NO: 19450 - DNA, 15 bp, Homo sapiens
cttttccttcagagg

SEQ ID NO: 19451 - DNA, 15 bp, Homo sapiens
tcttttccttcagag

SEQ ID NO: 19452 - DNA, 15 bp, Homo sapiens
atcttttccttcaga

SEQ ID NO: 19453 - DNA, 15 bp, Homo sapiens
aatcttttccttcag

SEQ ID NO: 19454 - DNA, 15 bp, Homo sapiens
aaatcttttccttca

SEQ ID NO: 19455 - DNA, 15 bp, Homo sapiens
taaatcttttccttc

SEQ ID NO: 19456 - DNA, 15 bp, Homo sapiens
ataaatcttttcctt

SEQ ID NO: 19457 - DNA, 15 bp, Homo sapiens
tataaatcttttcct

SEQ ID NO: 19458 - DNA, 15 bp, Homo sapiens
gtataaatcttttcc

SEQ ID NO: 19459 - DNA, 15 bp, Homo sapiens
tgtataaatcttttc

SEQ ID NO: 19460 - DNA, 15 bp, Homo sapiens
atgtataaatctttt

SEQ ID NO: 19461 - DNA, 15 bp, Homo sapiens
aatgtataaatcttt

SEQ ID NO: 19462 - DNA, 15 bp, Homo sapiens
gaatgtataaatctt

SEQ ID NO: 19463 - DNA, 15 bp, Homo sapiens
tgaatgtataaatct

SEQ ID NO: 19464 - DNA, 15 bp, Homo sapiens
ctgaatgtataaatc

SEQ ID NO: 19465 - DNA, 15 bp, Homo sapiens
gctgaatgtataaat

SEQ ID NO: 19466 - DNA, 15 bp, Homo sapiens
agctgaatgtataaa

SEQ ID NO: 19467 - DNA, 15 bp, Homo sapiens
aagctgaatgtataa

SEQ ID NO: 19468 - DNA, 15 bp, Homo sapiens
caagctgaatgtata

SEQ ID NO: 19469 - DNA, 15 bp, Homo sapiens
acaagctgaatgtat

SEQ ID NO: 19470 - DNA, 15 bp, Homo sapiens
tacaagctgaatgta

SEQ ID NO: 19471 - DNA, 15 bp, Homo sapiens
ttacaagctgaatgt

SEQ ID NO: 19472 - DNA, 15 bp, Homo sapiens
attacaagctgaatg

SEQ ID NO: 19473 - DNA, 15 bp, Homo sapiens
aattacaagctgaat

SEQ ID NO: 19474 - DNA, 15 bp, Homo sapiens
taattacaagctgaa

SEQ ID NO: 19475 - DNA, 15 bp, Homo sapiens
ctaattacaagctga

SEQ ID NO: 19476 - DNA, 15 bp, Homo sapiens
actaattacaagctg

SEQ ID NO: 19477 - DNA, 15 bp, Homo sapiens
tactaattacaagct

SEQ ID NO: 19478 - DNA, 15 bp, Homo sapiens
ttactaattacaagc

SEQ ID NO: 19479 - DNA, 15 bp, Homo sapiens
attactaattacaag

SEQ ID NO: 19480 - DNA, 15 bp, Homo sapiens
gattactaattacaa

SEQ ID NO: 19481 - DNA, 15 bp, Homo sapiens
tgattactaattaca

SEQ ID NO: 19482 - DNA, 15 bp, Homo sapiens
ttgattactaattac

SEQ ID NO: 19483 - DNA, 15 bp, Homo sapiens
cttgattactaatta

SEQ ID NO: 19484 - DNA, 15 bp, Homo sapiens
tcttgattactaatt

SEQ ID NO: 19485 - DNA, 15 bp, Homo sapiens
gtcttgattactaat

SEQ ID NO: 19486 - DNA, 15 bp, Homo sapiens
agtcttgattactaa

SEQ ID NO: 19487 - DNA, 15 bp, Homo sapiens
cagtcttgattacta

SEQ ID NO: 19488 - DNA, 15 bp, Homo sapiens
tcagtcttgattact

SEQ ID NO: 19489 - DNA, 15 bp, Homo sapiens
ctcagtcttgattac

SEQ ID NO: 19490 - DNA, 15 bp, Homo sapiens
cctcagtcttgatta

SEQ ID NO: 19491 - DNA, 15 bp, Homo sapiens
acctcagtcttgatt

SEQ ID NO: 19492 - DNA, 15 bp, Homo sapiens
aacctcagtcttgat

SEQ ID NO: 19493 - DNA, 15 bp, Homo sapiens
aaacctcagtcttga

SEQ ID NO: 19494 - DNA, 15 bp, Homo sapiens
taaacctcagtcttg

SEQ ID NO: 19495 - DNA, 15 bp, Homo sapiens
ctaaacctcagtctt

SEQ ID NO: 19496 - DNA, 15 bp, Homo sapiens
actaaacctcagtct

SEQ ID NO: 19497 - DNA, 15 bp, Homo sapiens
gactaaacctcagtc

SEQ ID NO: 19498 - DNA, 15 bp, Homo sapiens
agactaaacctcagt

SEQ ID NO: 19499 - DNA, 15 bp, Homo sapiens
tagactaaacctcag

SEQ ID NO: 19500 - DNA, 15 bp, Homo sapiens
atagactaaacctca

SEQ ID NO: 19501 - DNA, 15 bp, Homo sapiens
gatagactaaacctc

SEQ ID NO: 19502 - DNA, 15 bp, Homo sapiens
agatagactaaacct

SEQ ID NO: 19503 - DNA, 15 bp, Homo sapiens
tagatagactaaacc

SEQ ID NO: 19504 - DNA, 15 bp, Homo sapiens
ctagatagactaaac

SEQ ID NO: 19505 - DNA, 15 bp, Homo sapiens
gctagatagactaaa

SEQ ID NO: 19506 - DNA, 15 bp, Homo sapiens
agctagatagactaa

SEQ ID NO: 19507 - DNA, 15 bp, Homo sapiens
aagctagatagacta

SEQ ID NO: 19508 - DNA, 15 bp, Homo sapiens
gaagctagatagact

SEQ ID NO: 19509 - DNA, 15 bp, Homo sapiens
tgaagctagatagac

SEQ ID NO: 19510 - DNA, 15 bp, Homo sapiens
gtgaagctagataga

SEQ ID NO: 19511 - DNA, 15 bp, Homo sapiens
tgtgaagctagatag

SEQ ID NO: 19512 - DNA, 15 bp, Homo sapiens
ttgtgaagctagata

SEQ ID NO: 19513 - DNA, 15 bp, Homo sapiens
attgtgaagctagat

SEQ ID NO: 19514 - DNA, 15 bp, Homo sapiens
gattgtgaagctaga

SEQ ID NO: 19515 - DNA, 15 bp, Homo sapiens
agattgtgaagctag

SEQ ID NO: 19516 - DNA, 15 bp, Homo sapiens
tagattgtgaagcta

SEQ ID NO: 19517 - DNA, 15 bp, Homo sapiens
atagattgtgaagct

SEQ ID NO: 19518 - DNA, 15 bp, Homo sapiens
gatagattgtgaagc

SEQ ID NO: 19519 - DNA, 15 bp, Homo sapiens
agatagattgtgaag

SEQ ID NO: 19520 - DNA, 15 bp, Homo sapiens
tagatagattgtgaa

SEQ ID NO: 19521 - DNA, 15 bp, Homo sapiens
ctagatagattgtga

SEQ ID NO: 19522 - DNA, 15 bp, Homo sapiens
actagatagattgtg

SEQ ID NO: 19523 - DNA, 15 bp, Homo sapiens
aactagatagattgt

SEQ ID NO: 19524 - DNA, 15 bp, Homo sapiens
aaactagatagattg

SEQ ID NO: 19525 - DNA, 15 bp, Homo sapiens
caaactagatagatt

SEQ ID NO: 19526 - DNA, 15 bp, Homo sapiens
acaaactagatagat

SEQ ID NO: 19527 - DNA, 15 bp, Homo sapiens
aacaaactagataga

SEQ ID NO: 19528 - DNA, 15 bp, Homo sapiens
aaacaaactagatag

SEQ ID NO: 19529 - DNA, 15 bp, Homo sapiens
aaaacaaactagata

SEQ ID NO: 19530 - DNA, 15 bp, Homo sapiens
caaaacaaactagat

SEQ ID NO: 19531 - DNA, 15 bp, Homo sapiens
acaaaacaaactaga

SEQ ID NO: 19532 - DNA, 15 bp, Homo sapiens
gacaaaacaaactag

SEQ ID NO: 19533 - DNA, 15 bp, Homo sapiens
agacaaaacaaacta

SEQ ID NO: 19534 - DNA, 15 bp, Homo sapiens
tagacaaaacaaact

SEQ ID NO: 19535 - DNA, 15 bp, Homo sapiens
ctagacaaaacaaac

SEQ ID NO: 19536 - DNA, 15 bp, Homo sapiens
gctagacaaaacaaa

SEQ ID NO: 19537 - DNA, 15 bp, Homo sapiens
ggctagacaaaacaa

SEQ ID NO: 19538 - DNA, 15 bp, Homo sapiens
tggctagacaaaaca

SEQ ID NO: 19539 - DNA, 15 bp, Homo sapiens
atggctagacaaaac

SEQ ID NO: 19540 - DNA, 15 bp, Homo sapiens
tatggctagacaaaa

SEQ ID NO: 19541 - DNA, 15 bp, Homo sapiens
atatggctagacaaa

SEQ ID NO: 19542 - DNA, 15 bp, Homo sapiens
catatggctagacaa

SEQ ID NO: 19543 - DNA, 15 bp, Homo sapiens
tcatatggctagaca

SEQ ID NO: 19544 - DNA, 15 bp, Homo sapiens
atcatatggctagac

SEQ ID NO: 19545 - DNA, 15 bp, Homo sapiens
aatcatatggctaga

SEQ ID NO: 19546 - DNA, 15 bp, Homo sapiens
aaatcatatggctag

SEQ ID NO: 19547 - DNA, 15 bp, Homo sapiens
gaaatcatatggcta

SEQ ID NO: 19548 - DNA, 15 bp, Homo sapiens
agaaatcatatggct

SEQ ID NO: 19549 - DNA, 15 bp, Homo sapiens
aagaaatcatatggc

SEQ ID NO: 19550 - DNA, 15 bp, Homo sapiens
gaagaaatcatatgg

SEQ ID NO: 19551 - DNA, 15 bp, Homo sapiens
tgaagaaatcatatg

SEQ ID NO: 19552 - DNA, 15 bp, Homo sapiens
ttgaagaaatcatat

SEQ ID NO: 19553 - DNA, 15 bp, Homo sapiens
tttgaagaaatcata

SEQ ID NO: 19554 - DNA, 15 bp, Homo sapiens
atttgaagaaatcat

SEQ ID NO: 19555 - DNA, 15 bp, Homo sapiens
tatttgaagaaatca

SEQ ID NO: 19556 - DNA, 15 bp, Homo sapiens
atatttgaagaaatc

SEQ ID NO: 19557 - DNA, 15 bp, Homo sapiens
catatttgaagaaat

SEQ ID NO: 19558 - DNA, 15 bp, Homo sapiens
gcatatttgaagaaa

SEQ ID NO: 19559 - DNA, 15 bp, Homo sapiens
ggcatatttgaagaa

SEQ ID NO: 19560 - DNA, 15 bp, Homo sapiens
tggcatatttgaaga

SEQ ID NO: 19561 - DNA, 15 bp, Homo sapiens
atggcatatttgaag

SEQ ID NO: 19562 - DNA, 15 bp, Homo sapiens
aatggcatatttgaa

SEQ ID NO: 19563 - DNA, 15 bp, Homo sapiens
aaatggcatatttga

SEQ ID NO: 19564 - DNA, 15 bp, Homo sapiens
gaaatggcatatttg

SEQ ID NO: 19565 - DNA, 15 bp, Homo sapiens
agaaatggcatattt

SEQ ID NO: 19566 - DNA, 15 bp, Homo sapiens
aagaaatggcatatt

SEQ ID NO: 19567 - DNA, 15 bp, Homo sapiens
taagaaatggcatat

SEQ ID NO: 19568 - DNA, 15 bp, Homo sapiens
ttaagaaatggcata

SEQ ID NO: 19569 - DNA, 15 bp, Homo sapiens
tttaagaaatggcat

SEQ ID NO: 19570 - DNA, 15 bp, Homo sapiens
ttttaagaaatggca

SEQ ID NO: 19571 - DNA, 15 bp, Homo sapiens
tttttaagaaatggc

SEQ ID NO: 19572 - DNA, 15 bp, Homo sapiens
ttttttaagaaatgg

SEQ ID NO: 19573 - DNA, 15 bp, Homo sapiens
tttttttaagaaatg

SEQ ID NO: 19574 - DNA, 15 bp, Homo sapiens
ttttttttaagaaat

SEQ ID NO: 19575 - DNA, 15 bp, Homo sapiens
tttttttttaagaaa

SEQ ID NO: 19576 - DNA, 15 bp, Homo sapiens
atttttttttaagaa

SEQ ID NO: 19577 - DNA, 15 bp, Homo sapiens
catttttttttaaga

SEQ ID NO: 19578 - DNA, 15 bp, Homo sapiens
acatttttttttaag

SEQ ID NO: 19579 - DNA, 15 bp, Homo sapiens
aacatttttttttaa

SEQ ID NO: 19580 - DNA, 15 bp, Homo sapiens
aaacattttttttta

SEQ ID NO: 19581 - DNA, 15 bp, Homo sapiens
aaaacattttttttt

SEQ ID NO: 19582 - DNA, 15 bp, Homo sapiens
taaaacatttttttt

SEQ ID NO: 19583 - DNA, 15 bp, Homo sapiens
ataaaacattttttt

SEQ ID NO: 19584 - DNA, 15 bp, Homo sapiens
cataaaacatttttt

SEQ ID NO: 19585 - DNA, 15 bp, Homo sapiens
acataaaacattttt

SEQ ID NO: 19586 - DNA, 15 bp, Homo sapiens
tacataaaacatttt

SEQ ID NO: 19587 - DNA, 15 bp, Homo sapiens
atacataaaacattt

SEQ ID NO: 19588 - DNA, 15 bp, Homo sapiens
gatacataaaacatt

SEQ ID NO: 19589 - DNA, 15 bp, Homo sapiens
ggatacataaaacat

SEQ ID NO: 19590 - DNA, 15 bp, Homo sapiens
gggatacataaaaca

SEQ ID NO: 19591 - DNA, 15 bp, Homo sapiens
cgggatacataaaac

SEQ ID NO: 19592 - DNA, 15 bp, Homo sapiens
tcgggatacataaaa

SEQ ID NO: 19593 - DNA, 15 bp, Homo sapiens
atcgggatacataaa

SEQ ID NO: 19594 - DNA, 15 bp, Homo sapiens
aatcgggatacataa

SEQ ID NO: 19595 - DNA, 15 bp, Homo sapiens
taatcgggatacata

SEQ ID NO: 19596 - DNA, 15 bp, Homo sapiens
ttaatcgggatacat

SEQ ID NO: 19597 - DNA, 15 bp, Homo sapiens
attaatcgggataca

SEQ ID NO: 19598 - DNA, 15 bp, Homo sapiens
tattaatcgggatac

SEQ ID NO: 19599 - DNA, 15 bp, Homo sapiens
atattaatcgggata

SEQ ID NO: 19600 - DNA, 15 bp, Homo sapiens
aatattaatcgggat

SEQ ID NO: 19601 - DNA, 15 bp, Homo sapiens
aaatattaatcggga

SEQ ID NO: 19602 - DNA, 15 bp, Homo sapiens
taaatattaatcggg

SEQ ID NO: 19603 - DNA, 15 bp, Homo sapiens
ctaaatattaatcgg

SEQ ID NO: 19604 - DNA, 15 bp, Homo sapiens
gctaaatattaatcg

SEQ ID NO: 19605 - DNA, 15 bp, Homo sapiens
ggctaaatattaatc

SEQ ID NO: 19606 - DNA, 15 bp, Homo sapiens
tggctaaatattaat

SEQ ID NO: 19607 - DNA, 15 bp, Homo sapiens
ctggctaaatattaa

SEQ ID NO: 19608 - DNA, 15 bp, Homo sapiens
actggctaaatatta

SEQ ID NO: 19609 - DNA, 15 bp, Homo sapiens
cactggctaaatatt

SEQ ID NO: 19610 - DNA, 15 bp, Homo sapiens
ccactggctaaatat

SEQ ID NO: 19611 - DNA, 15 bp, Homo sapiens
accactggctaaata

SEQ ID NO: 19612 - DNA, 15 bp, Homo sapiens
aaccactggctaaat

SEQ ID NO: 19613 - DNA, 15 bp, Homo sapiens
gaaccactggctaaa

SEQ ID NO: 19614 - DNA, 15 bp, Homo sapiens
agaaccactggctaa

SEQ ID NO: 19615 - DNA, 15 bp, Homo sapiens
aagaaccactggcta

SEQ ID NO: 19616 - DNA, 15 bp, Homo sapiens
aaagaaccactggct

SEQ ID NO: 19617 - DNA, 15 bp, Homo sapiens
aaaagaaccactggc

SEQ ID NO: 19618 - DNA, 15 bp, Homo sapiens
taaaagaaccactgg

SEQ ID NO: 19619 - DNA, 15 bp, Homo sapiens
ctaaaagaaccactg

SEQ ID NO: 19620 - DNA, 15 bp, Homo sapiens
gctaaaagaaccact

SEQ ID NO: 19621 - DNA, 15 bp, Homo sapiens
ggctaaaagaaccac

SEQ ID NO: 19622 - DNA, 15 bp, Homo sapiens
cggctaaaagaacca

SEQ ID NO: 19623 - DNA, 15 bp, Homo sapiens
tcggctaaaagaacc

SEQ ID NO: 19624 - DNA, 15 bp, Homo sapiens
atcggctaaaagaac

SEQ ID NO: 19625 - DNA, 15 bp, Homo sapiens
catcggctaaaagaa

SEQ ID NO: 19626 - DNA, 15 bp, Homo sapiens
ccatcggctaaaaga

SEQ ID NO: 19627 - DNA, 15 bp, Homo sapiens
tccatcggctaaaag

SEQ ID NO: 19628 - DNA, 15 bp, Homo sapiens
atccatcggctaaaa

SEQ ID NO: 19629 - DNA, 15 bp, Homo sapiens
gatccatcggctaaa

SEQ ID NO: 19630 - DNA, 15 bp, Homo sapiens
agatccatcggctaa

SEQ ID NO: 19631 - DNA, 15 bp, Homo sapiens
aagatccatcggcta

SEQ ID NO: 19632 - DNA, 15 bp, Homo sapiens
caagatccatcggct

SEQ ID NO: 19633 - DNA, 15 bp, Homo sapiens
acaagatccatcggc

SEQ ID NO: 19634 - DNA, 15 bp, Homo sapiens
gacaagatccatcgg

SEQ ID NO: 19635 - DNA, 15 bp, Homo sapiens
tgacaagatccatcg

SEQ ID NO: 19636 - DNA, 15 bp, Homo sapiens
gtgacaagatccatc

SEQ ID NO: 19637 - DNA, 15 bp, Homo sapiens
ggtgacaagatccat

SEQ ID NO: 19638 - DNA, 15 bp, Homo sapiens
aggtgacaagatcca

SEQ ID NO: 19639 - DNA, 15 bp, Homo sapiens
gaggtgacaagatcc

SEQ ID NO: 19640 - DNA, 15 bp, Homo sapiens
agaggtgacaagatc

SEQ ID NO: 19641 - DNA, 15 bp, Homo sapiens
aagaggtgacaagat

SEQ ID NO: 19642 - DNA, 15 bp, Homo sapiens
taagaggtgacaaga

SEQ ID NO: 19643 - DNA, 15 bp, Homo sapiens
ataagaggtgacaag

SEQ ID NO: 19644 - DNA, 15 bp, Homo sapiens
cataagaggtgacaa

SEQ ID NO: 19645 - DNA, 15 bp, Homo sapiens
tcataagaggtgaca

SEQ ID NO: 19646 - DNA, 15 bp, Homo sapiens
atcataagaggtgac

SEQ ID NO: 19647 - DNA, 15 bp, Homo sapiens
tatcataagaggtga

SEQ ID NO: 19648 - DNA, 15 bp, Homo sapiens
gtatcataagaggtg

SEQ ID NO: 19649 - DNA, 15 bp, Homo sapiens
agtatcataagaggt

SEQ ID NO: 19650 - DNA, 15 bp, Homo sapiens
tagtatcataagagg

SEQ ID NO: 19651 - DNA, 15 bp, Homo sapiens
atagtatcataagag

SEQ ID NO: 19652 - DNA, 15 bp, Homo sapiens
aatagtatcataaga

SEQ ID NO: 19653 - DNA, 15 bp, Homo sapiens
taatagtatcataag

SEQ ID NO: 19654 - DNA, 15 bp, Homo sapiens
ttaatagtatcataa

SEQ ID NO: 19655 - DNA, 15 bp, Homo sapiens
attaatagtatcata

SEQ ID NO: 19656 - DNA, 15 bp, Homo sapiens
tattaatagtatcat

SEQ ID NO: 19657 - DNA, 15 bp, Homo sapiens
ctattaatagtatca

SEQ ID NO: 19658 - DNA, 15 bp, Homo sapiens
gctattaatagtatc

SEQ ID NO: 19659 - DNA, 15 bp, Homo sapiens
tgctattaatagtat

SEQ ID NO: 19660 - DNA, 15 bp, Homo sapiens
atgctattaatagta

SEQ ID NO: 19661 - DNA, 15 bp, Homo sapiens
catgctattaatagt

SEQ ID NO: 19662 - DNA, 15 bp, Homo sapiens
acatgctattaatag

SEQ ID NO: 19663 - DNA, 15 bp, Homo sapiens
gacatgctattaata

SEQ ID NO: 19664 - DNA, 15 bp, Homo sapiens
tgacatgctattaat

SEQ ID NO: 19665 - DNA, 15 bp, Homo sapiens
ttgacatgctattaa

SEQ ID NO: 19666 - DNA, 15 bp, Homo sapiens
gttgacatgctatta

SEQ ID NO: 19667 - DNA, 15 bp, Homo sapiens
tgttgacatgctatt

SEQ ID NO: 19668 - DNA, 15 bp, Homo sapiens
atgttgacatgctat

SEQ ID NO: 19669 - DNA, 15 bp, Homo sapiens
catgttgacatgcta

SEQ ID NO: 19670 - DNA, 15 bp, Homo sapiens
tcatgttgacatgct

SEQ ID NO: 19671 - DNA, 15 bp, Homo sapiens
ttcatgttgacatgc

SEQ ID NO: 19672 - DNA, 15 bp, Homo sapiens
cttcatgttgacatg

SEQ ID NO: 19673 - DNA, 15 bp, Homo sapiens
tcttcatgttgacat

SEQ ID NO: 19674 - DNA, 15 bp, Homo sapiens
ttcttcatgttgaca

SEQ ID NO: 19675 - DNA, 15 bp, Homo sapiens
attcttcatgttgac

SEQ ID NO: 19676 - DNA, 15 bp, Homo sapiens
aattcttcatgttga

SEQ ID NO: 19677 - DNA, 15 bp, Homo sapiens
taattcttcatgttg

SEQ ID NO: 19678 - DNA, 15 bp, Homo sapiens
ataattcttcatgtt

SEQ ID NO: 19679 - DNA, 15 bp, Homo sapiens
gataattcttcatgt

SEQ ID NO: 19680 - DNA, 15 bp, Homo sapiens
agataattcttcatg

SEQ ID NO: 19681 - DNA, 15 bp, Homo sapiens
cagataattcttcat

SEQ ID NO: 19682 - DNA, 15 bp, Homo sapiens
gcagataattcttca

SEQ ID NO: 19683 - DNA, 15 bp, Homo sapiens
agcagataattcttc

SEQ ID NO: 19684 - DNA, 15 bp, Homo sapiens
cagcagataattctt

SEQ ID NO: 19685 - DNA, 15 bp, Homo sapiens
tcagcagataattct

SEQ ID NO: 19686 - DNA, 15 bp, Homo sapiens
ttcagcagataattc

SEQ ID NO: 19687 - DNA, 15 bp, Homo sapiens
attcagcagataatt

SEQ ID NO: 19688 - DNA, 15 bp, Homo sapiens
tattcagcagataat

SEQ ID NO: 19689 - DNA, 15 bp, Homo sapiens
atattcagcagataa

SEQ ID NO: 19690 - DNA, 15 bp, Homo sapiens
tatattcagcagata

SEQ ID NO: 19691 - DNA, 15 bp, Homo sapiens
ttatattcagcagat

SEQ ID NO: 19692 - DNA, 15 bp, Homo sapiens
attatattcagcaga

SEQ ID NO: 19693 - DNA, 15 bp, Homo sapiens
tattatattcagcag

SEQ ID NO: 19694 - DNA, 15 bp, Homo sapiens
ctattatattcagca

SEQ ID NO: 19695 - DNA, 15 bp, Homo sapiens
gctattatattcagc

SEQ ID NO: 19696 - DNA, 15 bp, Homo sapiens
agctattatattcag

SEQ ID NO: 19697 - DNA, 15 bp, Homo sapiens
tagctattatattca

SEQ ID NO: 19698 - DNA, 15 bp, Homo sapiens
atagctattatattc

SEQ ID NO: 19699 - DNA, 15 bp, Homo sapiens
catagctattatatt

SEQ ID NO: 19700 - DNA, 15 bp, Homo sapiens
gcatagctattatat

SEQ ID NO: 19701 - DNA, 15 bp, Homo sapiens
agcatagctattata

SEQ ID NO: 19702 - DNA, 15 bp, Homo sapiens
cagcatagctattat

SEQ ID NO: 19703 - DNA, 15 bp, Homo sapiens
acagcatagctatta

SEQ ID NO: 19704 - DNA, 15 bp, Homo sapiens
gacagcatagctatt

SEQ ID NO: 19705 - DNA, 15 bp, Homo sapiens
ggacagcatagctat

SEQ ID NO: 19706 - DNA, 15 bp, Homo sapiens
aggacagcatagcta

SEQ ID NO: 19707 - DNA, 15 bp, Homo sapiens
aaggacagcatagct

SEQ ID NO: 19708 - DNA, 15 bp, Homo sapiens
caaggacagcatagc

SEQ ID NO: 19709 - DNA, 15 bp, Homo sapiens
acaaggacagcatag

SEQ ID NO: 19710 - DNA, 15 bp, Homo sapiens
aacaaggacagcata

SEQ ID NO: 19711 - DNA, 15 bp, Homo sapiens
aaacaaggacagcat

SEQ ID NO: 19712 - DNA, 15 bp, Homo sapiens
gaaacaaggacagca

SEQ ID NO: 19713 - DNA, 15 bp, Homo sapiens
ggaaacaaggacagc

SEQ ID NO: 19714 - DNA, 15 bp, Homo sapiens
aggaaacaaggacag

SEQ ID NO: 19715 - DNA, 15 bp, Homo sapiens
aaggaaacaaggaca

SEQ ID NO: 19716 - DNA, 15 bp, Homo sapiens
aaaggaaacaaggac

SEQ ID NO: 19717 - DNA, 15 bp, Homo sapiens
aaaaggaaacaagga

SEQ ID NO: 19718 - DNA, 15 bp, Homo sapiens
caaaaggaaacaagg

SEQ ID NO: 19719 - DNA, 15 bp, Homo sapiens
acaaaaggaaacaag

SEQ ID NO: 19720 - DNA, 15 bp, Homo sapiens
gacaaaaggaaacaa

SEQ ID NO: 19721 - DNA, 15 bp, Homo sapiens
agacaaaaggaaaca

SEQ ID NO: 19722 - DNA, 15 bp, Homo sapiens
gagacaaaaggaaac

SEQ ID NO: 19723 - DNA, 15 bp, Homo sapiens
tgagacaaaaggaaa

SEQ ID NO: 19724 - DNA, 15 bp, Homo sapiens
atgagacaaaaggaa

SEQ ID NO: 19725 - DNA, 15 bp, Homo sapiens
aatgagacaaaagga

SEQ ID NO: 19726 - DNA, 15 bp, Homo sapiens
gaatgagacaaaagg

SEQ ID NO: 19727 - DNA, 15 bp, Homo sapiens
agaatgagacaaaag

SEQ ID NO: 19728 - DNA, 15 bp, Homo sapiens
aagaatgagacaaaa

SEQ ID NO: 19729 - DNA, 15 bp, Homo sapiens
aaagaatgagacaaa

SEQ ID NO: 19730 - DNA, 15 bp, Homo sapiens
aaaagaatgagacaa

SEQ ID NO: 19731 - DNA, 15 bp, Homo sapiens
aaaaagaatgagaca

SEQ ID NO: 19732 - DNA, 15 bp, Homo sapiens
aaaaaagaatgagac

SEQ ID NO: 19733 - DNA, 15 bp, Homo sapiens
caaaaaagaatgaga

SEQ ID NO: 19734 - DNA, 15 bp, Homo sapiens
tcaaaaaagaatgag

SEQ ID NO: 19735 - DNA, 15 bp, Homo sapiens
atcaaaaaagaatga

SEQ ID NO: 19736 - DNA, 15 bp, Homo sapiens
aatcaaaaaagaatg

SEQ ID NO: 19737 - DNA, 15 bp, Homo sapiens
caatcaaaaaagaat

SEQ ID NO: 19738 - DNA, 15 bp, Homo sapiens
ccaatcaaaaaagaa

SEQ ID NO: 19739 - DNA, 15 bp, Homo sapiens
cccaatcaaaaaaga

SEQ ID NO: 19740 - DNA, 15 bp, Homo sapiens
ccccaatcaaaaaag

SEQ ID NO: 19741 - DNA, 15 bp, Homo sapiens
cccccaatcaaaaaa

SEQ ID NO: 19742 - DNA, 15 bp, Homo sapiens
tcccccaatcaaaaa

SEQ ID NO: 19743 - DNA, 15 bp, Homo sapiens
atcccccaatcaaaa

SEQ ID NO: 19744 - DNA, 15 bp, Homo sapiens
tatcccccaatcaaa

SEQ ID NO: 19745 - DNA, 15 bp, Homo sapiens
ttatcccccaatcaa

SEQ ID NO: 19746 - DNA, 15 bp, Homo sapiens
attatcccccaatca

SEQ ID NO: 19747 - DNA, 15 bp, Homo sapiens
aattatcccccaatc

SEQ ID NO: 19748 - DNA, 15 bp, Homo sapiens
caattatcccccaat

SEQ ID NO: 19749 - DNA, 15 bp, Homo sapiens
ccaattatcccccaa

SEQ ID NO: 19750 - DNA, 15 bp, Homo sapiens
gccaattatccccca

SEQ ID NO: 19751 - DNA, 15 bp, Homo sapiens
ggccaattatccccc

SEQ ID NO: 19752 - DNA, 15 bp, Homo sapiens
tggccaattatcccc

SEQ ID NO: 19753 - DNA, 15 bp, Homo sapiens
ttggccaattatccc

SEQ ID NO: 19754 - DNA, 15 bp, Homo sapiens
attggccaattatcc

SEQ ID NO: 19755 - DNA, 15 bp, Homo sapiens
tattggccaattatc

SEQ ID NO: 19756 - DNA, 15 bp, Homo sapiens
ttattggccaattat

SEQ ID NO: 19757 - DNA, 15 bp, Homo sapiens
tttattggccaatta

SEQ ID NO: 19758 - DNA, 15 bp, Homo sapiens
ctttattggccaatt

SEQ ID NO: 19759 - DNA, 15 bp, Homo sapiens
gctttattggccaat

SEQ ID NO: 19760 - DNA, 15 bp, Homo sapiens
agctttattggccaa

SEQ ID NO: 19761 - DNA, 15 bp, Homo sapiens
aagctttattggcca

SEQ ID NO: 19762 - DNA, 15 bp, Homo sapiens
aaagctttattggcc

SEQ ID NO: 19763 - DNA, 15 bp, Homo sapiens
caaagctttattggc

SEQ ID NO: 19764 - DNA, 15 bp, Homo sapiens
tcaaagctttattgg

SEQ ID NO: 19765 - DNA, 15 bp, Homo sapiens
atcaaagctttattg

SEQ ID NO: 19766 - DNA, 15 bp, Homo sapiens
tatcaaagctttatt

SEQ ID NO: 19767 - DNA, 15 bp, Homo sapiens
ctatcaaagctttat

SEQ ID NO: 19768 - DNA, 15 bp, Homo sapiens
gctatcaaagcttta

SEQ ID NO: 19769 - DNA, 15 bp, Homo sapiens
ggctatcaaagcttt

SEQ ID NO: 19770 - DNA, 15 bp, Homo sapiens
aggctatcaaagctt

SEQ ID NO: 19771 - DNA, 15 bp, Homo sapiens
gaggctatcaaagct

SEQ ID NO: 19772 - DNA, 15 bp, Homo sapiens
agaggctatcaaagc

SEQ ID NO: 19773 - DNA, 15 bp, Homo sapiens
tagaggctatcaaag

SEQ ID NO: 19774 - DNA, 15 bp, Homo sapiens
atagaggctatcaaa

SEQ ID NO: 19775 - DNA, 15 bp, Homo sapiens
aatagaggctatcaa

SEQ ID NO: 19776 - DNA, 15 bp, Homo sapiens
caatagaggctatca

SEQ ID NO: 19777 - DNA, 15 bp, Homo sapiens
gcaatagaggctatc

SEQ ID NO: 19778 - DNA, 15 bp, Homo sapiens
ggcaatagaggctat

SEQ ID NO: 19779 - DNA, 15 bp, Homo sapiens
gggcaatagaggcta

SEQ ID NO: 19780 - DNA, 15 bp, Homo sapiens
tgggcaatagaggct

SEQ ID NO: 19781 - DNA, 15 bp, Homo sapiens
ctgggcaatagaggc

SEQ ID NO: 19782 - DNA, 15 bp, Homo sapiens
cctgggcaatagagg

SEQ ID NO: 19783 - DNA, 15 bp, Homo sapiens
gcctgggcaatagag

SEQ ID NO: 19784 - DNA, 15 bp, Homo sapiens
ggcctgggcaataga

SEQ ID NO: 19785 - DNA, 15 bp, Homo sapiens
gggcctgggcaatag

SEQ ID NO: 19786 - DNA, 15 bp, Homo sapiens
ggggcctgggcaata

SEQ ID NO: 19787 - DNA, 15 bp, Homo sapiens
aggggcctgggcaat

SEQ ID NO: 19788 - DNA, 15 bp, Homo sapiens
gaggggcctgggcaa

SEQ ID NO: 19789 - DNA, 15 bp, Homo sapiens
ggaggggcctgggca

SEQ ID NO: 19790 - DNA, 15 bp, Homo sapiens
aggaggggcctgggc

SEQ ID NO: 19791 - DNA, 15 bp, Homo sapiens
gaggaggggcctggg

SEQ ID NO: 19792 - DNA, 15 bp, Homo sapiens
agaggaggggcctgg

SEQ ID NO: 19793 - DNA, 15 bp, Homo sapiens
aagaggaggggcctg

SEQ ID NO: 19794 - DNA, 15 bp, Homo sapiens
gaagaggaggggcct

SEQ ID NO: 19795 - DNA, 15 bp, Homo sapiens
agaagaggaggggcc

SEQ ID NO: 19796 - DNA, 15 bp, Homo sapiens
aagaagaggaggggc

SEQ ID NO: 19797 - DNA, 15 bp, Homo sapiens
aaagaagaggagggg

SEQ ID NO: 19798 - DNA, 15 bp, Homo sapiens
aaaagaagaggaggg

SEQ ID NO: 19799 - DNA, 15 bp, Homo sapiens
taaaagaagaggagg

SEQ ID NO: 19800 - DNA, 15 bp, Homo sapiens
ataaaagaagaggag

SEQ ID NO: 19801 - DNA, 15 bp, Homo sapiens
cataaaagaagagga

SEQ ID NO: 19802 - DNA, 15 bp, Homo sapiens
tcataaaagaagagg

SEQ ID NO: 19803 - DNA, 15 bp, Homo sapiens
ctcataaaagaagag

SEQ ID NO: 19804 - DNA, 15 bp, Homo sapiens
tctcataaaagaaga

SEQ ID NO: 19805 - DNA, 15 bp, Homo sapiens
ctctcataaaagaag

SEQ ID NO: 19806 - DNA, 15 bp, Homo sapiens
tctctcataaaagaa

SEQ ID NO: 19807 - DNA, 15 bp, Homo sapiens
ttctctcataaaaga

SEQ ID NO: 19808 - DNA, 15 bp, Homo sapiens
tttctctcataaaag

SEQ ID NO: 19809 - DNA, 15 bp, Homo sapiens
ctttctctcataaaa

SEQ ID NO: 19810 - DNA, 15 bp, Homo sapiens
cctttctctcataaa

SEQ ID NO: 19811 - DNA, 15 bp, Homo sapiens
tcctttctctcataa

SEQ ID NO: 19812 - DNA, 15 bp, Homo sapiens
atcctttctctcata

SEQ ID NO: 19813 - DNA, 15 bp, Homo sapiens
catcctttctctcat

SEQ ID NO: 19814 - DNA, 15 bp, Homo sapiens
tcatcctttctctca

SEQ ID NO: 19815 - DNA, 15 bp, Homo sapiens
ttcatcctttctctc

SEQ ID NO: 19816 - DNA, 15 bp, Homo sapiens
gttcatcctttctct

SEQ ID NO: 19817 - DNA, 15 bp, Homo sapiens
tgttcatcctttctc

SEQ ID NO: 19818 - DNA, 15 bp, Homo sapiens
ctgttcatcctttct

SEQ ID NO: 19819 - DNA, 15 bp, Homo sapiens
actgttcatcctttc

SEQ ID NO: 19820 - DNA, 15 bp, Homo sapiens
cactgttcatccttt

SEQ ID NO: 19821 - DNA, 15 bp, Homo sapiens
tcactgttcatcctt

SEQ ID NO: 19822 - DNA, 15 bp, Homo sapiens
gtcactgttcatcct

SEQ ID NO: 19823 - DNA, 15 bp, Homo sapiens
ggtcactgttcatcc

SEQ ID NO: 19824 - DNA, 15 bp, Homo sapiens
tggtcactgttcatc

SEQ ID NO: 19825 - DNA, 15 bp, Homo sapiens
ctggtcactgttcat

SEQ ID NO: 19826 - DNA, 15 bp, Homo sapiens
tctggtcactgttca

SEQ ID NO: 19827 - DNA, 15 bp, Homo sapiens
ttctggtcactgttc

SEQ ID NO: 19828 - DNA, 15 bp, Homo sapiens
tttctggtcactgtt

SEQ ID NO: 19829 - DNA, 15 bp, Homo sapiens
atttctggtcactgt

SEQ ID NO: 19830 - DNA, 15 bp, Homo sapiens
tatttctggtcactg

SEQ ID NO: 19831 - DNA, 15 bp, Homo sapiens
ttatttctggtcact

SEQ ID NO: 19832 - DNA, 15 bp, Homo sapiens
tttatttctggtcac

SEQ ID NO: 19833 - DNA, 15 bp, Homo sapiens
ctttatttctggtca

SEQ ID NO: 19834 - DNA, 15 bp, Homo sapiens
cctttatttctggtc

SEQ ID NO: 19835 - DNA, 15 bp, Homo sapiens
acctttatttctggt

SEQ ID NO: 19836 - DNA, 15 bp, Homo sapiens
tacctttatttctgg

SEQ ID NO: 19837 - DNA, 15 bp, Homo sapiens
atacctttatttctg

SEQ ID NO: 19838 - DNA, 15 bp, Homo sapiens
aatacctttatttct

SEQ ID NO: 19839 - DNA, 15 bp, Homo sapiens
caatacctttatttc

SEQ ID NO: 19840 - DNA, 15 bp, Homo sapiens
acaatacctttattt

SEQ ID NO: 19841 - DNA, 15 bp, Homo sapiens
aacaatacctttatt

SEQ ID NO: 19842 - DNA, 15 bp, Homo sapiens
aaacaatacctttat

SEQ ID NO: 19843 - DNA, 15 bp, Homo sapiens
aaaacaataccttta

SEQ ID NO: 19844 - DNA, 15 bp, Homo sapiens
aaaaacaataccttt

SEQ ID NO: 19845 - DNA, 15 bp, Homo sapiens
aaaaaacaatacctt

SEQ ID NO: 19846 - DNA, 15 bp, Homo sapiens
aaaaaaacaatacct

SEQ ID NO: 19847 - DNA, 15 bp, Homo sapiens
gaaaaaaacaatacc

SEQ ID NO: 19848 - DNA, 15 bp, Homo sapiens
agaaaaaaacaatac

SEQ ID NO: 19849 - DNA, 15 bp, Homo sapiens
tagaaaaaaacaata

SEQ ID NO: 19850 - DNA, 15 bp, Homo sapiens
atagaaaaaaacaat

SEQ ID NO: 19851 - DNA, 15 bp, Homo sapiens
gatagaaaaaaacaa

SEQ ID NO: 19852 - DNA, 15 bp, Homo sapiens
tgatagaaaaaaaca

SEQ ID NO: 19853 - DNA, 15 bp, Homo sapiens
ttgatagaaaaaaac

SEQ ID NO: 19854 - DNA, 15 bp, Homo sapiens
gttgatagaaaaaaa

SEQ ID NO: 19855 - DNA, 15 bp, Homo sapiens
agttgatagaaaaaa

SEQ ID NO: 19856 - DNA, 15 bp, Homo sapiens
tagttgatagaaaaa

SEQ ID NO: 19857 - DNA, 15 bp, Homo sapiens
ttagttgatagaaaa

SEQ ID NO: 19858 - DNA, 15 bp, Homo sapiens
tttagttgatagaaa

SEQ ID NO: 19859 - DNA, 15 bp, Homo sapiens
ttttagttgatagaa

SEQ ID NO: 19860 - DNA, 15 bp, Homo sapiens
attttagttgataga

SEQ ID NO: 19861 - DNA, 15 bp, Homo sapiens
cattttagttgatag

SEQ ID NO: 19862 - DNA, 15 bp, Homo sapiens
ccattttagttgata

SEQ ID NO: 19863 - DNA, 15 bp, Homo sapiens
tccattttagttgat

SEQ ID NO: 19864 - DNA, 15 bp, Homo sapiens
ttccattttagttga

SEQ ID NO: 19865 - DNA, 15 bp, Homo sapiens
tttccattttagttg

SEQ ID NO: 19866 - DNA, 15 bp, Homo sapiens
atttccattttagtt

SEQ ID NO: 19867 - DNA, 15 bp, Homo sapiens
tatttccattttagt

SEQ ID NO: 19868 - DNA, 15 bp, Homo sapiens
ttatttccattttag

SEQ ID NO: 19869 - DNA, 15 bp, Homo sapiens
tttatttccatttta

SEQ ID NO: 19870 - DNA, 15 bp, Homo sapiens
atttatttccatttt

SEQ ID NO: 19871 - DNA, 15 bp, Homo sapiens
tatttatttccattt

SEQ ID NO: 19872 - DNA, 15 bp, Homo sapiens
ttatttatttccatt

SEQ ID NO: 19873 - DNA, 15 bp, Homo sapiens
attatttatttccat

SEQ ID NO: 19874 - DNA, 15 bp, Homo sapiens
aattatttatttcca

SEQ ID NO: 19875 - DNA, 15 bp, Homo sapiens
gaattatttatttcc

SEQ ID NO: 19876 - DNA, 15 bp, Homo sapiens
ggaattatttatttc

SEQ ID NO: 19877 - DNA, 15 bp, Homo sapiens
aggaattatttattt

SEQ ID NO: 19878 - DNA, 15 bp, Homo sapiens
taggaattatttatt

SEQ ID NO: 19879 - DNA, 15 bp, Homo sapiens
ttaggaattatttat

SEQ ID NO: 19880 - DNA, 15 bp, Homo sapiens
cttaggaattattta

SEQ ID NO: 19881 - DNA, 15 bp, Homo sapiens
acttaggaattattt

SEQ ID NO: 19882 - DNA, 15 bp, Homo sapiens
tacttaggaattatt

SEQ ID NO: 19883 - DNA, 15 bp, Homo sapiens
ttacttaggaattat

SEQ ID NO: 19884 - DNA, 15 bp, Homo sapiens
attacttaggaatta

SEQ ID NO: 19885 - DNA, 15 bp, Homo sapiens
aattacttaggaatt

SEQ ID NO: 19886 - DNA, 15 bp, Homo sapiens
aaattacttaggaat

SEQ ID NO: 19887 - DNA, 15 bp, Homo sapiens
caaattacttaggaa

SEQ ID NO: 19888 - DNA, 15 bp, Homo sapiens
gcaaattacttagga

SEQ ID NO: 19889 - DNA, 15 bp, Homo sapiens
ggcaaattacttagg

SEQ ID NO: 19890 - DNA, 15 bp, Homo sapiens
aggcaaattacttag

SEQ ID NO: 19891 - DNA, 15 bp, Homo sapiens
caggcaaattactta

SEQ ID NO: 19892 - DNA, 15 bp, Homo sapiens
acaggcaaattactt

SEQ ID NO: 19893 - DNA, 15 bp, Homo sapiens
aacaggcaaattact

SEQ ID NO: 19894 - DNA, 15 bp, Homo sapiens
taacaggcaaattac

SEQ ID NO: 19895 - DNA, 15 bp, Homo sapiens
ctaacaggcaaatta

SEQ ID NO: 19896 - DNA, 15 bp, Homo sapiens
cctaacaggcaaatt

SEQ ID NO: 19897 - DNA, 15 bp, Homo sapiens
tcctaacaggcaaat

SEQ ID NO: 19898 - DNA, 15 bp, Homo sapiens
atcctaacaggcaaa

SEQ ID NO: 19899 - DNA, 15 bp, Homo sapiens
aatcctaacaggcaa

SEQ ID NO: 19900 - DNA, 15 bp, Homo sapiens
taatcctaacaggca

SEQ ID NO: 19901 - DNA, 15 bp, Homo sapiens
ttaatcctaacaggc

SEQ ID NO: 19902 - DNA, 15 bp, Homo sapiens
tttaatcctaacagg

SEQ ID NO: 19903 - DNA, 15 bp, Homo sapiens
ctttaatcctaacag

SEQ ID NO: 19904 - DNA, 15 bp, Homo sapiens
actttaatcctaaca

SEQ ID NO: 19905 - DNA, 15 bp, Homo sapiens
gactttaatcctaac

SEQ ID NO: 19906 - DNA, 15 bp, Homo sapiens
agactttaatcctaa

SEQ ID NO: 19907 - DNA, 15 bp, Homo sapiens
gagactttaatccta

SEQ ID NO: 19908 - DNA, 15 bp, Homo sapiens
ggagactttaatcct

SEQ ID NO: 19909 - DNA, 15 bp, Homo sapiens
tggagactttaatcc

SEQ ID NO: 19910 - DNA, 15 bp, Homo sapiens
ttggagactttaatc

SEQ ID NO: 19911 - DNA, 15 bp, Homo sapiens
cttggagactttaat

SEQ ID NO: 19912 - DNA, 15 bp, Homo sapiens
tcttggagactttaa

SEQ ID NO: 19913 - DNA, 15 bp, Homo sapiens
ctcttggagacttta

SEQ ID NO: 19914 - DNA, 15 bp, Homo sapiens
tctcttggagacttt

SEQ ID NO: 19915 - DNA, 15 bp, Homo sapiens
ttctcttggagactt

SEQ ID NO: 19916 - DNA, 15 bp, Homo sapiens
attctcttggagact

SEQ ID NO: 19917 - DNA, 15 bp, Homo sapiens
cattctcttggagac

SEQ ID NO: 19918 - DNA, 15 bp, Homo sapiens
ccattctcttggaga

SEQ ID NO: 19919 - DNA, 15 bp, Homo sapiens
gccattctcttggag

SEQ ID NO: 19920 - DNA, 15 bp, Homo sapiens
agccattctcttgga

SEQ ID NO: 19921 - DNA, 15 bp, Homo sapiens
cagccattctcttgg

SEQ ID NO: 19922 - DNA, 15 bp, Homo sapiens
acagccattctcttg

SEQ ID NO: 19923 - DNA, 15 bp, Homo sapiens
cacagccattctctt

SEQ ID NO: 19924 - DNA, 15 bp, Homo sapiens
gcacagccattctct

SEQ ID NO: 19925 - DNA, 15 bp, Homo sapiens
ggcacagccattctc

SEQ ID NO: 19926 - DNA, 15 bp, Homo sapiens
aggcacagccattct

SEQ ID NO: 19927 - DNA, 15 bp, Homo sapiens
taggcacagccattc

SEQ ID NO: 19928 - DNA, 15 bp, Homo sapiens
ctaggcacagccatt

SEQ ID NO: 19929 - DNA, 15 bp, Homo sapiens
actaggcacagccat

SEQ ID NO: 19930 - DNA, 15 bp, Homo sapiens
tactaggcacagcca

SEQ ID NO: 19931 - DNA, 15 bp, Homo sapiens
gtactaggcacagcc

SEQ ID NO: 19932 - DNA, 15 bp, Homo sapiens
ggtactaggcacagc

SEQ ID NO: 19933 - DNA, 15 bp, Homo sapiens
aggtactaggcacag

SEQ ID NO: 19934 - DNA, 15 bp, Homo sapiens
taggtactaggcaca

SEQ ID NO: 19935 - DNA, 15 bp, Homo sapiens
ttaggtactaggcac

SEQ ID NO: 19936 - DNA, 15 bp, Homo sapiens
cttaggtactaggca

SEQ ID NO: 19937 - DNA, 15 bp, Homo sapiens
acttaggtactaggc

SEQ ID NO: 19938 - DNA, 15 bp, Homo sapiens
cacttaggtactagg

SEQ ID NO: 19939 - DNA, 15 bp, Homo sapiens
tcacttaggtactag

SEQ ID NO: 19940 - DNA, 15 bp, Homo sapiens
atcacttaggtacta

SEQ ID NO: 19941 - DNA, 15 bp, Homo sapiens
aatcacttaggtact

SEQ ID NO: 19942 - DNA, 15 bp, Homo sapiens
taatcacttaggtac

SEQ ID NO: 19943 - DNA, 15 bp, Homo sapiens
ttaatcacttaggta

SEQ ID NO: 19944 - DNA, 15 bp, Homo sapiens
attaatcacttaggt

SEQ ID NO: 19945 - DNA, 15 bp, Homo sapiens
aattaatcacttagg

SEQ ID NO: 19946 - DNA, 15 bp, Homo sapiens
aaattaatcacttag

SEQ ID NO: 19947 - DNA, 15 bp, Homo sapiens
gaaattaatcactta

SEQ ID NO: 19948 - DNA, 15 bp, Homo sapiens
ggaaattaatcactt

SEQ ID NO: 19949 - DNA, 15 bp, Homo sapiens
aggaaattaatcact

SEQ ID NO: 19950 - DNA, 15 bp, Homo sapiens
aaggaaattaatcac

SEQ ID NO: 19951 - DNA, 15 bp, Homo sapiens
caaggaaattaatca

SEQ ID NO: 19952 - DNA, 15 bp, Homo sapiens
tcaaggaaattaatc

SEQ ID NO: 19953 - DNA, 15 bp, Homo sapiens
atcaaggaaattaat

SEQ ID NO: 19954 - DNA, 15 bp, Homo sapiens
aatcaaggaaattaa

SEQ ID NO: 19955 - DNA, 15 bp, Homo sapiens
caatcaaggaaatta

SEQ ID NO: 19956 - DNA, 15 bp, Homo sapiens
ccaatcaaggaaatt

SEQ ID NO: 19957 - DNA, 15 bp, Homo sapiens
accaatcaaggaaat

SEQ ID NO: 19958 - DNA, 15 bp, Homo sapiens
aaccaatcaaggaaa

SEQ ID NO: 19959 - DNA, 15 bp, Homo sapiens
gaaccaatcaaggaa

SEQ ID NO: 19960 - DNA, 15 bp, Homo sapiens
tgaaccaatcaagga

SEQ ID NO: 19961 - DNA, 15 bp, Homo sapiens
gtgaaccaatcaagg

SEQ ID NO: 19962 - DNA, 15 bp, Homo sapiens
tgtgaaccaatcaag

SEQ ID NO: 19963 - DNA, 15 bp, Homo sapiens
atgtgaaccaatcaa

SEQ ID NO: 19964 - DNA, 15 bp, Homo sapiens
aatgtgaaccaatca

SEQ ID NO: 19965 - DNA, 15 bp, Homo sapiens
taatgtgaaccaatc

SEQ ID NO: 19966 - DNA, 15 bp, Homo sapiens
ataatgtgaaccaat

SEQ ID NO: 19967 - DNA, 15 bp, Homo sapiens
tataatgtgaaccaa

SEQ ID NO: 19968 - DNA, 15 bp, Homo sapiens
atataatgtgaacca

SEQ ID NO: 19969 - DNA, 15 bp, Homo sapiens
aatataatgtgaacc

SEQ ID NO: 19970 - DNA, 15 bp, Homo sapiens
caatataatgtgaac

SEQ ID NO: 19971 - DNA, 15 bp, Homo sapiens
tcaatataatgtgaa

SEQ ID NO: 19972 - DNA, 15 bp, Homo sapiens
ctcaatataatgtga

SEQ ID NO: 19973 - DNA, 15 bp, Homo sapiens
cctcaatataatgtg

SEQ ID NO: 19974 - DNA, 15 bp, Homo sapiens
tcctcaatataatgt

SEQ ID NO: 19975 - DNA, 15 bp, Homo sapiens
atcctcaatataatg

SEQ ID NO: 19976 - DNA, 15 bp, Homo sapiens
tatcctcaatataat

SEQ ID NO: 19977 - DNA, 15 bp, Homo sapiens
atatcctcaatataa

SEQ ID NO: 19978 - DNA, 15 bp, Homo sapiens
aatatcctcaatata

SEQ ID NO: 19979 - DNA, 15 bp, Homo sapiens
taatatcctcaatat

SEQ ID NO: 19980 - DNA, 15 bp, Homo sapiens
ctaatatcctcaata

SEQ ID NO: 19981 - DNA, 15 bp, Homo sapiens
actaatatcctcaat

SEQ ID NO: 19982 - DNA, 15 bp, Homo sapiens
tactaatatcctcaa

SEQ ID NO: 19983 - DNA, 15 bp, Homo sapiens
ttactaatatcctca

SEQ ID NO: 19984 - DNA, 15 bp, Homo sapiens
attactaatatcctc

SEQ ID NO: 19985 - DNA, 15 bp, Homo sapiens
gattactaatatcct

SEQ ID NO: 19986 - DNA, 15 bp, Homo sapiens
tgattactaatatcc

SEQ ID NO: 19987 - DNA, 15 bp, Homo sapiens
ctgattactaatatc

SEQ ID NO: 19988 - DNA, 15 bp, Homo sapiens
actgattactaatat

SEQ ID NO: 19989 - DNA, 15 bp, Homo sapiens
tactgattactaata

SEQ ID NO: 19990 - DNA, 15 bp, Homo sapiens
ctactgattactaat

SEQ ID NO: 19991 - DNA, 15 bp, Homo sapiens
actactgattactaa

SEQ ID NO: 19992 - DNA, 15 bp, Homo sapiens
cactactgattacta

SEQ ID NO: 19993 - DNA, 15 bp, Homo sapiens
tcactactgattact

SEQ ID NO: 19994 - DNA, 15 bp, Homo sapiens
atcactactgattac

SEQ ID NO: 19995 - DNA, 15 bp, Homo sapiens
aatcactactgatta

SEQ ID NO: 19996 - DNA, 15 bp, Homo sapiens
gaatcactactgatt

SEQ ID NO: 19997 - DNA, 15 bp, Homo sapiens
ggaatcactactgat

SEQ ID NO: 19998 - DNA, 15 bp, Homo sapiens
aggaatcactactga

SEQ ID NO: 19999 - DNA, 15 bp, Homo sapiens
aaggaatcactactg

SEQ ID NO: 20000 - DNA, 15 bp, Homo sapiens
aaaggaatcactact

SEQ ID NO: 20001 - DNA, 15 bp, Homo sapiens
aaaaggaatcactac

SEQ ID NO: 20002 - DNA, 15 bp, Homo sapiens
aaaaaggaatcacta

SEQ ID NO: 20003 - DNA, 15 bp, Homo sapiens
aaaaaaggaatcact

SEQ ID NO: 20004 - DNA, 15 bp, Homo sapiens
caaaaaaggaatcac

SEQ ID NO: 20005 - DNA, 15 bp, Homo sapiens
ccaaaaaaggaatca

SEQ ID NO: 20006 - DNA, 15 bp, Homo sapiens
accaaaaaaggaatc

SEQ ID NO: 20007 - DNA, 15 bp, Homo sapiens
aaccaaaaaaggaat

SEQ ID NO: 20008 - DNA, 15 bp, Homo sapiens
gaaccaaaaaaggaa

SEQ ID NO: 20009 - DNA, 15 bp, Homo sapiens
tgaaccaaaaaagga

SEQ ID NO: 20010 - DNA, 15 bp, Homo sapiens
ttgaaccaaaaaagg

SEQ ID NO: 20011 - DNA, 15 bp, Homo sapiens
tttgaaccaaaaaag

SEQ ID NO: 20012 - DNA, 15 bp, Homo sapiens
ctttgaaccaaaaaa

SEQ ID NO: 20013 - DNA, 15 bp, Homo sapiens
tctttgaaccaaaaa

SEQ ID NO: 20014 - DNA, 15 bp, Homo sapiens
atctttgaaccaaaa

SEQ ID NO: 20015 - DNA, 15 bp, Homo sapiens
catctttgaaccaaa

SEQ ID NO: 20016 - DNA, 15 bp, Homo sapiens
tcatctttgaaccaa

SEQ ID NO: 20017 - DNA, 15 bp, Homo sapiens
atcatctttgaacca

SEQ ID NO: 20018 - DNA, 15 bp, Homo sapiens
tatcatctttgaacc

SEQ ID NO: 20019 - DNA, 15 bp, Homo sapiens
ctatcatctttgaac

SEQ ID NO: 20020 - DNA, 15 bp, Homo sapiens
actatcatctttgaa

SEQ ID NO: 20021 - DNA, 15 bp, Homo sapiens
cactatcatctttga

SEQ ID NO: 20022 - DNA, 15 bp, Homo sapiens
acactatcatctttg

SEQ ID NO: 20023 - DNA, 15 bp, Homo sapiens
gacactatcatcttt

SEQ ID NO: 20024 - DNA, 15 bp, Homo sapiens
tgacactatcatctt

SEQ ID NO: 20025 - DNA, 15 bp, Homo sapiens
gtgacactatcatct

SEQ ID NO: 20026 - DNA, 15 bp, Homo sapiens
tgtgacactatcatc

SEQ ID NO: 20027 - DNA, 15 bp, Homo sapiens
ctgtgacactatcat

SEQ ID NO: 20028 - DNA, 15 bp, Homo sapiens
actgtgacactatca

SEQ ID NO: 20029 - DNA, 15 bp, Homo sapiens
cactgtgacactatc

SEQ ID NO: 20030 - DNA, 15 bp, Homo sapiens
tcactgtgacactat

SEQ ID NO: 20031 - DNA, 15 bp, Homo sapiens
ttcactgtgacacta

SEQ ID NO: 20032 - DNA, 15 bp, Homo sapiens
tttcactgtgacact

SEQ ID NO: 20033 - DNA, 15 bp, Homo sapiens
ttttcactgtgacac

SEQ ID NO: 20034 - DNA, 15 bp, Homo sapiens
tttttcactgtgaca

SEQ ID NO: 20035 - DNA, 15 bp, Homo sapiens
atttttcactgtgac

SEQ ID NO: 20036 - DNA, 15 bp, Homo sapiens
catttttcactgtga

SEQ ID NO: 20037 - DNA, 15 bp, Homo sapiens
acatttttcactgtg

SEQ ID NO: 20038 - DNA, 15 bp, Homo sapiens
aacatttttcactgt

SEQ ID NO: 20039 - DNA, 15 bp, Homo sapiens
aaacatttttcactg

SEQ ID NO: 20040 - DNA, 15 bp, Homo sapiens
aaaacatttttcact

SEQ ID NO: 20041 - DNA, 15 bp, Homo sapiens
aaaaacatttttcac

SEQ ID NO: 20042 - DNA, 15 bp, Homo sapiens
taaaaacatttttca

SEQ ID NO: 20043 - DNA, 15 bp, Homo sapiens
ttaaaaacatttttc

SEQ ID NO: 20044 - DNA, 15 bp, Homo sapiens
tttaaaaacattttt

SEQ ID NO: 20045 - DNA, 15 bp, Homo sapiens
ttttaaaaacatttt

SEQ ID NO: 20046 - DNA, 15 bp, Homo sapiens
attttaaaaacattt

SEQ ID NO: 20047 - DNA, 15 bp, Homo sapiens
aattttaaaaacatt

SEQ ID NO: 20048 - DNA, 15 bp, Homo sapiens
aaattttaaaaacat

SEQ ID NO: 20049 - DNA, 15 bp, Homo sapiens
aaaattttaaaaaca

SEQ ID NO: 20050 - DNA, 15 bp, Homo sapiens
aaaaattttaaaaac

SEQ ID NO: 20051 - DNA, 15 bp, Homo sapiens
caaaaattttaaaaa

SEQ ID NO: 20052 - DNA, 15 bp, Homo sapiens
acaaaaattttaaaa

SEQ ID NO: 20053 - DNA, 15 bp, Homo sapiens
tacaaaaattttaaa

SEQ ID NO: 20054 - DNA, 15 bp, Homo sapiens
atacaaaaattttaa

SEQ ID NO: 20055 - DNA, 15 bp, Homo sapiens
tatacaaaaatttta

SEQ ID NO: 20056 - DNA, 15 bp, Homo sapiens
gtatacaaaaatttt

SEQ ID NO: 20057 - DNA, 15 bp, Homo sapiens
agtatacaaaaattt

SEQ ID NO: 20058 - DNA, 15 bp, Homo sapiens
aagtatacaaaaatt

SEQ ID NO: 20059 - DNA, 15 bp, Homo sapiens
taagtatacaaaaat

SEQ ID NO: 20060 - DNA, 15 bp, Homo sapiens
ttaagtatacaaaaa

SEQ ID NO: 20061 - DNA, 15 bp, Homo sapiens
attaagtatacaaaa

SEQ ID NO: 20062 - DNA, 15 bp, Homo sapiens
aattaagtatacaaa

SEQ ID NO: 20063 - DNA, 15 bp, Homo sapiens
aaattaagtatacaa

SEQ ID NO: 20064 - DNA, 15 bp, Homo sapiens
aaaattaagtataca

SEQ ID NO: 20065 - DNA, 15 bp, Homo sapiens
aaaaattaagtatac

SEQ ID NO: 20066 - DNA, 15 bp, Homo sapiens
gaaaaattaagtata

SEQ ID NO: 20067 - DNA, 15 bp, Homo sapiens
agaaaaattaagtat

SEQ ID NO: 20068 - DNA, 15 bp, Homo sapiens
cagaaaaattaagta

SEQ ID NO: 20069 - DNA, 15 bp, Homo sapiens
acagaaaaattaagt

SEQ ID NO: 20070 - DNA, 15 bp, Homo sapiens
aacagaaaaattaag

SEQ ID NO: 20071 - DNA, 15 bp, Homo sapiens
taacagaaaaattaa

SEQ ID NO: 20072 - DNA, 15 bp, Homo sapiens
ttaacagaaaaatta

SEQ ID NO: 20073 - DNA, 15 bp, Homo sapiens
gttaacagaaaaatt

SEQ ID NO: 20074 - DNA, 15 bp, Homo sapiens
cgttaacagaaaaat

SEQ ID NO: 20075 - DNA, 15 bp, Homo sapiens
tcgttaacagaaaaa

SEQ ID NO: 20076 - DNA, 15 bp, Homo sapiens
ttcgttaacagaaaa

SEQ ID NO: 20077 - DNA, 15 bp, Homo sapiens
tttcgttaacagaaa

SEQ ID NO: 20078 - DNA, 15 bp, Homo sapiens
ctttcgttaacagaa

SEQ ID NO: 20079 - DNA, 15 bp, Homo sapiens
actttcgttaacaga

SEQ ID NO: 20080 - DNA, 15 bp, Homo sapiens
tactttcgttaacag

SEQ ID NO: 20081 - DNA, 15 bp, Homo sapiens
atactttcgttaaca

SEQ ID NO: 20082 - DNA, 15 bp, Homo sapiens
aatactttcgttaac

SEQ ID NO: 20083 - DNA, 15 bp, Homo sapiens
aaatactttcgttaa

SEQ ID NO: 20084 - DNA, 15 bp, Homo sapiens
aaaatactttcgtta

SEQ ID NO: 20085 - DNA, 15 bp, Homo sapiens
gaaaatactttcgtt

SEQ ID NO: 20086 - DNA, 15 bp, Homo sapiens
tgaaaatactttcgt

SEQ ID NO: 20087 - DNA, 15 bp, Homo sapiens
ctgaaaatactttcg

SEQ ID NO: 20088 - DNA, 15 bp, Homo sapiens
actgaaaatactttc

SEQ ID NO: 20089 - DNA, 15 bp, Homo sapiens
aactgaaaatacttt

SEQ ID NO: 20090 - DNA, 15 bp, Homo sapiens
caactgaaaatactt

SEQ ID NO: 20091 - DNA, 15 bp, Homo sapiens
ccaactgaaaatact

SEQ ID NO: 20092 - DNA, 15 bp, Homo sapiens
tccaactgaaaatac

SEQ ID NO: 20093 - DNA, 15 bp, Homo sapiens
atccaactgaaaata

SEQ ID NO: 20094 - DNA, 15 bp, Homo sapiens
aatccaactgaaaat

SEQ ID NO: 20095 - DNA, 15 bp, Homo sapiens
aaatccaactgaaaa

SEQ ID NO: 20096 - DNA, 15 bp, Homo sapiens
aaaatccaactgaaa

SEQ ID NO: 20097 - DNA, 15 bp, Homo sapiens
aaaaatccaactgaa

SEQ ID NO: 20098 - DNA, 15 bp, Homo sapiens
caaaaatccaactga

SEQ ID NO: 20099 - DNA, 15 bp, Homo sapiens
acaaaaatccaactg

SEQ ID NO: 20100 - DNA, 15 bp, Homo sapiens
aacaaaaatccaact

SEQ ID NO: 20101 - DNA, 15 bp, Homo sapiens
aaacaaaaatccaac

SEQ ID NO: 20102 - DNA, 15 bp, Homo sapiens
caaacaaaaatccaa

SEQ ID NO: 20103 - DNA, 15 bp, Homo sapiens
gcaaacaaaaatcca

SEQ ID NO: 20104 - DNA, 15 bp, Homo sapiens
ggcaaacaaaaatcc

SEQ ID NO: 20105 - DNA, 15 bp, Homo sapiens
gggcaaacaaaaatc

SEQ ID NO: 20106 - DNA, 15 bp, Homo sapiens
agggcaaacaaaaat

SEQ ID NO: 20107 - DNA, 15 bp, Homo sapiens
gagggcaaacaaaaa

SEQ ID NO: 20108 - DNA, 15 bp, Homo sapiens
agagggcaaacaaaa

SEQ ID NO: 20109 - DNA, 15 bp, Homo sapiens
gagagggcaaacaaa

SEQ ID NO: 20110 - DNA, 15 bp, Homo sapiens
agagagggcaaacaa

SEQ ID NO: 20111 - DNA, 15 bp, Homo sapiens
tagagagggcaaaca

SEQ ID NO: 20112 - DNA, 15 bp, Homo sapiens
atagagagggcaaac

SEQ ID NO: 20113 - DNA, 15 bp, Homo sapiens
aatagagagggcaaa

SEQ ID NO: 20114 - DNA, 15 bp, Homo sapiens
taatagagagggcaa

SEQ ID NO: 20115 - DNA, 15 bp, Homo sapiens
ctaatagagagggca

SEQ ID NO: 20116 - DNA, 15 bp, Homo sapiens
tctaatagagagggc

SEQ ID NO: 20117 - DNA, 15 bp, Homo sapiens
ttctaatagagaggg

SEQ ID NO: 20118 - DNA, 15 bp, Homo sapiens
attctaatagagagg

SEQ ID NO: 20119 - DNA, 15 bp, Homo sapiens
cattctaatagagag

SEQ ID NO: 20120 - DNA, 15 bp, Homo sapiens
gcattctaatagaga

SEQ ID NO: 20121 - DNA, 15 bp, Homo sapiens
ggcattctaatagag

SEQ ID NO: 20122 - DNA, 15 bp, Homo sapiens
gggcattctaataga

SEQ ID NO: 20123 - DNA, 15 bp, Homo sapiens
tgggcattctaatag

SEQ ID NO: 20124 - DNA, 15 bp, Homo sapiens
ttgggcattctaata

SEQ ID NO: 20125 - DNA, 15 bp, Homo sapiens
tttgggcattctaat

SEQ ID NO: 20126 - DNA, 15 bp, Homo sapiens
ctttgggcattctaa

SEQ ID NO: 20127 - DNA, 15 bp, Homo sapiens
tctttgggcattcta

SEQ ID NO: 20128 - DNA, 15 bp, Homo sapiens
ttctttgggcattct

SEQ ID NO: 20129 - DNA, 15 bp, Homo sapiens
attctttgggcattc

SEQ ID NO: 20130 - DNA, 15 bp, Homo sapiens
tattctttgggcatt

SEQ ID NO: 20131 - DNA, 15 bp, Homo sapiens
atattctttgggcat

SEQ ID NO: 20132 - DNA, 15 bp, Homo sapiens
aatattctttgggca

SEQ ID NO: 20133 - DNA, 15 bp, Homo sapiens
aaatattctttgggc

SEQ ID NO: 20134 - DNA, 15 bp, Homo sapiens
taaatattctttggg

SEQ ID NO: 20135 - DNA, 15 bp, Homo sapiens
ttaaatattctttgg

SEQ ID NO: 20136 - DNA, 15 bp, Homo sapiens
tttaaatattctttg

SEQ ID NO: 20137 - DNA, 15 bp, Homo sapiens
ttttaaatattcttt

SEQ ID NO: 20138 - DNA, 15 bp, Homo sapiens
attttaaatattctt

SEQ ID NO: 20139 - DNA, 15 bp, Homo sapiens
aattttaaatattct

SEQ ID NO: 20140 - DNA, 15 bp, Homo sapiens
aaattttaaatattc

SEQ ID NO: 20141 - DNA, 15 bp, Homo sapiens
aaaattttaaatatt

SEQ ID NO: 20142 - DNA, 15 bp, Homo sapiens
gaaaattttaaatat

SEQ ID NO: 20143 - DNA, 15 bp, Homo sapiens
ggaaaattttaaata

SEQ ID NO: 20144 - DNA, 15 bp, Homo sapiens
aggaaaattttaaat

SEQ ID NO: 20145 - DNA, 15 bp, Homo sapiens
aaggaaaattttaaa

SEQ ID NO: 20146 - DNA, 15 bp, Homo sapiens
aaaggaaaattttaa

SEQ ID NO: 20147 - DNA, 15 bp, Homo sapiens
aaaaggaaaatttta

SEQ ID NO: 20148 - DNA, 15 bp, Homo sapiens
gaaaaggaaaatttt

SEQ ID NO: 20149 - DNA, 15 bp, Homo sapiens
agaaaaggaaaattt

SEQ ID NO: 20150 - DNA, 15 bp, Homo sapiens
gagaaaaggaaaatt

SEQ ID NO: 20151 - DNA, 15 bp, Homo sapiens
agagaaaaggaaaat

SEQ ID NO: 20152 - DNA, 15 bp, Homo sapiens
aagagaaaaggaaaa

SEQ ID NO: 20153 - DNA, 15 bp, Homo sapiens
taagagaaaaggaaa

SEQ ID NO: 20154 - DNA, 15 bp, Homo sapiens
ataagagaaaaggaa

SEQ ID NO: 20155 - DNA, 15 bp, Homo sapiens
tataagagaaaagga

SEQ ID NO: 20156 - DNA, 15 bp, Homo sapiens
gtataagagaaaagg

SEQ ID NO: 20157 - DNA, 15 bp, Homo sapiens
agtataagagaaaag

SEQ ID NO: 20158 - DNA, 15 bp, Homo sapiens
cagtataagagaaaa

SEQ ID NO: 20159 - DNA, 15 bp, Homo sapiens
gcagtataagagaaa

SEQ ID NO: 20160 - DNA, 15 bp, Homo sapiens
tgcagtataagagaa

SEQ ID NO: 20161 - DNA, 15 bp, Homo sapiens
atgcagtataagaga

SEQ ID NO: 20162 - DNA, 15 bp, Homo sapiens
tatgcagtataagag

SEQ ID NO: 20163 - DNA, 15 bp, Homo sapiens
atatgcagtataaga

SEQ ID NO: 20164 - DNA, 15 bp, Homo sapiens
aatatgcagtataag

SEQ ID NO: 20165 - DNA, 15 bp, Homo sapiens
aaatatgcagtataa

SEQ ID NO: 20166 - DNA, 15 bp, Homo sapiens
aaaatatgcagtata

SEQ ID NO: 20167 - DNA, 15 bp, Homo sapiens
aaaaatatgcagtat

SEQ ID NO: 20168 - DNA, 15 bp, Homo sapiens
gaaaaatatgcagta

SEQ ID NO: 20169 - DNA, 15 bp, Homo sapiens
ggaaaaatatgcagt

SEQ ID NO: 20170 - DNA, 15 bp, Homo sapiens
aggaaaaatatgcag

SEQ ID NO: 20171 - DNA, 15 bp, Homo sapiens
caggaaaaatatgca

SEQ ID NO: 20172 - DNA, 15 bp, Homo sapiens
acaggaaaaatatgc

SEQ ID NO: 20173 - DNA, 15 bp, Homo sapiens
cacaggaaaaatatg

SEQ ID NO: 20174 - DNA, 15 bp, Homo sapiens
tcacaggaaaaatat

SEQ ID NO: 20175 - DNA, 15 bp, Homo sapiens
atcacaggaaaaata

SEQ ID NO: 20176 - DNA, 15 bp, Homo sapiens
aatcacaggaaaaat

SEQ ID NO: 20177 - DNA, 15 bp, Homo sapiens
aaatcacaggaaaaa

SEQ ID NO: 20178 - DNA, 15 bp, Homo sapiens
aaaatcacaggaaaa

SEQ ID NO: 20179 - DNA, 15 bp, Homo sapiens
aaaaatcacaggaaa

SEQ ID NO: 20180 - DNA, 15 bp, Homo sapiens
gaaaaatcacaggaa

SEQ ID NO: 20181 - DNA, 15 bp, Homo sapiens
ggaaaaatcacagga

SEQ ID NO: 20182 - DNA, 15 bp, Homo sapiens
gggaaaaatcacagg

SEQ ID NO: 20183 - DNA, 15 bp, Homo sapiens
ggggaaaaatcacag

SEQ ID NO: 20184 - DNA, 15 bp, Homo sapiens
tggggaaaaatcaca

SEQ ID NO: 20185 - DNA, 15 bp, Homo sapiens
ttggggaaaaatcac

SEQ ID NO: 20186 - DNA, 15 bp, Homo sapiens
tttggggaaaaatca

SEQ ID NO: 20187 - DNA, 15 bp, Homo sapiens
gtttggggaaaaatc

SEQ ID NO: 20188 - DNA, 15 bp, Homo sapiens
cgtttggggaaaaat

SEQ ID NO: 20189 - DNA, 15 bp, Homo sapiens
ccgtttggggaaaaa

SEQ ID NO: 20190 - DNA, 15 bp, Homo sapiens
tccgtttggggaaaa

SEQ ID NO: 20191 - DNA, 15 bp, Homo sapiens
ttccgtttggggaaa

SEQ ID NO: 20192 - DNA, 15 bp, Homo sapiens
tttccgtttggggaa

SEQ ID NO: 20193 - DNA, 15 bp, Homo sapiens
ttttccgtttgggga

SEQ ID NO: 20194 - DNA, 15 bp, Homo sapiens
attttccgtttgggg

SEQ ID NO: 20195 - DNA, 15 bp, Homo sapiens
tattttccgtttggg

SEQ ID NO: 20196 - DNA, 15 bp, Homo sapiens
gtattttccgtttgg

SEQ ID NO: 20197 - DNA, 15 bp, Homo sapiens
agtattttccgtttg

SEQ ID NO: 20198 - DNA, 15 bp, Homo sapiens
gagtattttccgttt

SEQ ID NO: 20199 - DNA, 15 bp, Homo sapiens
agagtattttccgtt

SEQ ID NO: 20200 - DNA, 15 bp, Homo sapiens
cagagtattttccgt

SEQ ID NO: 20201 - DNA, 15 bp, Homo sapiens
gcagagtattttccg

SEQ ID NO: 20202 - DNA, 15 bp, Homo sapiens
tgcagagtattttcc

SEQ ID NO: 20203 - DNA, 15 bp, Homo sapiens
ctgcagagtattttc

SEQ ID NO: 20204 - DNA, 15 bp, Homo sapiens
tctgcagagtatttt

SEQ ID NO: 20205 - DNA, 15 bp, Homo sapiens
ctctgcagagtattt

SEQ ID NO: 20206 - DNA, 15 bp, Homo sapiens
tctctgcagagtatt

SEQ ID NO: 20207 - DNA, 15 bp, Homo sapiens
atctctgcagagtat

SEQ ID NO: 20208 - DNA, 15 bp, Homo sapiens
aatctctgcagagta

SEQ ID NO: 20209 - DNA, 15 bp, Homo sapiens
taatctctgcagagt

SEQ ID NO: 20210 - DNA, 15 bp, Homo sapiens
ctaatctctgcagag

SEQ ID NO: 20211 - DNA, 15 bp, Homo sapiens
tctaatctctgcaga

SEQ ID NO: 20212 - DNA, 15 bp, Homo sapiens
gtctaatctctgcag

SEQ ID NO: 20213 - DNA, 15 bp, Homo sapiens
agtctaatctctgca

SEQ ID NO: 20214 - DNA, 15 bp, Homo sapiens
aagtctaatctctgc

SEQ ID NO: 20215 - DNA, 15 bp, Homo sapiens
aaagtctaatctctg

SEQ ID NO: 20216 - DNA, 15 bp, Homo sapiens
caaagtctaatctct

SEQ ID NO: 20217 - DNA, 15 bp, Homo sapiens
acaaagtctaatctc

SEQ ID NO: 20218 - DNA, 15 bp, Homo sapiens
aacaaagtctaatct

SEQ ID NO: 20219 - DNA, 15 bp, Homo sapiens
taacaaagtctaatc

SEQ ID NO: 20220 - DNA, 15 bp, Homo sapiens
ataacaaagtctaat

SEQ ID NO: 20221 - DNA, 15 bp, Homo sapiens
aataacaaagtctaa

SEQ ID NO: 20222 - DNA, 15 bp, Homo sapiens
caataacaaagtcta

SEQ ID NO: 20223 - DNA, 15 bp, Homo sapiens
acaataacaaagtct

SEQ ID NO: 20224 - DNA, 15 bp, Homo sapiens
aacaataacaaagtc

SEQ ID NO: 20225 - DNA, 15 bp, Homo sapiens
caacaataacaaagt

SEQ ID NO: 20226 - DNA, 15 bp, Homo sapiens
acaacaataacaaag

SEQ ID NO: 20227 - DNA, 15 bp, Homo sapiens
tacaacaataacaaa

SEQ ID NO: 20228 - DNA, 15 bp, Homo sapiens
gtacaacaataacaa

SEQ ID NO: 20229 - DNA, 15 bp, Homo sapiens
agtacaacaataaca

SEQ ID NO: 20230 - DNA, 15 bp, Homo sapiens
tagtacaacaataac

SEQ ID NO: 20231 - DNA, 15 bp, Homo sapiens
gtagtacaacaataa

SEQ ID NO: 20232 - DNA, 15 bp, Homo sapiens
tgtagtacaacaata

SEQ ID NO: 20233 - DNA, 15 bp, Homo sapiens
atgtagtacaacaat

SEQ ID NO: 20234 - DNA, 15 bp, Homo sapiens
gatgtagtacaacaa

SEQ ID NO: 20235 - DNA, 15 bp, Homo sapiens
tgatgtagtacaaca

SEQ ID NO: 20236 - DNA, 15 bp, Homo sapiens
atgatgtagtacaac

SEQ ID NO: 20237 - DNA, 15 bp, Homo sapiens
aatgatgtagtacaa

SEQ ID NO: 20238 - DNA, 15 bp, Homo sapiens
caatgatgtagtaca

SEQ ID NO: 20239 - DNA, 15 bp, Homo sapiens
gcaatgatgtagtac

SEQ ID NO: 20240 - DNA, 15 bp, Homo sapiens
agcaatgatgtagta

SEQ ID NO: 20241 - DNA, 15 bp, Homo sapiens
aagcaatgatgtagt

SEQ ID NO: 20242 - DNA, 15 bp, Homo sapiens
aaagcaatgatgtag

SEQ ID NO: 20243 - DNA, 15 bp, Homo sapiens
caaagcaatgatgta

SEQ ID NO: 20244 - DNA, 15 bp, Homo sapiens
tcaaagcaatgatgt

SEQ ID NO: 20245 - DNA, 15 bp, Homo sapiens
gtcaaagcaatgatg

SEQ ID NO: 20246 - DNA, 15 bp, Homo sapiens
agtcaaagcaatgat

SEQ ID NO: 20247 - DNA, 15 bp, Homo sapiens
tagtcaaagcaatga

SEQ ID NO: 20248 - DNA, 15 bp, Homo sapiens
ttagtcaaagcaatg

SEQ ID NO: 20249 - DNA, 15 bp, Homo sapiens
tttagtcaaagcaat

SEQ ID NO: 20250 - DNA, 15 bp, Homo sapiens
ttttagtcaaagcaa

SEQ ID NO: 20251 - DNA, 15 bp, Homo sapiens
attttagtcaaagca

SEQ ID NO: 20252 - DNA, 15 bp, Homo sapiens
tattttagtcaaagc

SEQ ID NO: 20253 - DNA, 15 bp, Homo sapiens
ttattttagtcaaag

SEQ ID NO: 20254 - DNA, 15 bp, Homo sapiens
tttattttagtcaaa

SEQ ID NO: 20255 - DNA, 15 bp, Homo sapiens
gtttattttagtcaa

SEQ ID NO: 20256 - DNA, 15 bp, Homo sapiens
agtttattttagtca

SEQ ID NO: 20257 - DNA, 15 bp, Homo sapiens
gagtttattttagtc

SEQ ID NO: 20258 - DNA, 15 bp, Homo sapiens
tgagtttattttagt

SEQ ID NO: 20259 - DNA, 15 bp, Homo sapiens
ctgagtttattttag

SEQ ID NO: 20260 - DNA, 15 bp, Homo sapiens
tctgagtttatttta

SEQ ID NO: 20261 - DNA, 15 bp, Homo sapiens
atctgagtttatttt

SEQ ID NO: 20262 - DNA, 15 bp, Homo sapiens
aatctgagtttattt

SEQ ID NO: 20263 - DNA, 15 bp, Homo sapiens
caatctgagtttatt

SEQ ID NO: 20264 - DNA, 15 bp, Homo sapiens
gcaatctgagtttat

SEQ ID NO: 20265 - DNA, 15 bp, Homo sapiens
tgcaatctgagttta

SEQ ID NO: 20266 - DNA, 15 bp, Homo sapiens
ttgcaatctgagttt

SEQ ID NO: 20267 - DNA, 15 bp, Homo sapiens
tttgcaatctgagtt

SEQ ID NO: 20268 - DNA, 15 bp, Homo sapiens
atttgcaatctgagt

SEQ ID NO: 20269 - DNA, 15 bp, Homo sapiens
tatttgcaatctgag

SEQ ID NO: 20270 - DNA, 15 bp, Homo sapiens
gtatttgcaatctga

SEQ ID NO: 20271 - DNA, 15 bp, Homo sapiens
ggtatttgcaatctg

SEQ ID NO: 20272 - DNA, 15 bp, Homo sapiens
aggtatttgcaatct

SEQ ID NO: 20273 - DNA, 15 bp, Homo sapiens
aaggtatttgcaatc

SEQ ID NO: 20274 - DNA, 15 bp, Homo sapiens
gaaggtatttgcaat

SEQ ID NO: 20275 - DNA, 15 bp, Homo sapiens
tgaaggtatttgcaa

SEQ ID NO: 20276 - DNA, 15 bp, Homo sapiens
ttgaaggtatttgca

SEQ ID NO: 20277 - DNA, 15 bp, Homo sapiens
cttgaaggtatttgc

SEQ ID NO: 20278 - DNA, 15 bp, Homo sapiens
gcttgaaggtatttg

SEQ ID NO: 20279 - DNA, 15 bp, Homo sapiens
agcttgaaggtattt

SEQ ID NO: 20280 - DNA, 15 bp, Homo sapiens
aagcttgaaggtatt

SEQ ID NO: 20281 - DNA, 15 bp, Homo sapiens
taagcttgaaggtat

SEQ ID NO: 20282 - DNA, 15 bp, Homo sapiens
gtaagcttgaaggta

SEQ ID NO: 20283 - DNA, 15 bp, Homo sapiens
tgtaagcttgaaggt

SEQ ID NO: 20284 - DNA, 15 bp, Homo sapiens
atgtaagcttgaagg

SEQ ID NO: 20285 - DNA, 15 bp, Homo sapiens
aatgtaagcttgaag

SEQ ID NO: 20286 - DNA, 15 bp, Homo sapiens
caatgtaagcttgaa

SEQ ID NO: 20287 - DNA, 15 bp, Homo sapiens
gcaatgtaagcttga

SEQ ID NO: 20288 - DNA, 15 bp, Homo sapiens
agcaatgtaagcttg

SEQ ID NO: 20289 - DNA, 15 bp, Homo sapiens
gagcaatgtaagctt

SEQ ID NO: 20290 - DNA, 15 bp, Homo sapiens
tgagcaatgtaagct

SEQ ID NO: 20291 - DNA, 15 bp, Homo sapiens
ctgagcaatgtaagc

SEQ ID NO: 20292 - DNA, 15 bp, Homo sapiens
actgagcaatgtaag

SEQ ID NO: 20293 - DNA, 15 bp, Homo sapiens
tactgagcaatgtaa

SEQ ID NO: 20294 - DNA, 15 bp, Homo sapiens
atactgagcaatgta

SEQ ID NO: 20295 - DNA, 15 bp, Homo sapiens
aatactgagcaatgt

SEQ ID NO: 20296 - DNA, 15 bp, Homo sapiens
aaatactgagcaatg

SEQ ID NO: 20297 - DNA, 15 bp, Homo sapiens
aaaatactgagcaat

SEQ ID NO: 20298 - DNA, 15 bp, Homo sapiens
aaaaatactgagcaa

SEQ ID NO: 20299 - DNA, 15 bp, Homo sapiens
aaaaaatactgagca

SEQ ID NO: 20300 - DNA, 15 bp, Homo sapiens
aaaaaaatactgagc

SEQ ID NO: 20301 - DNA, 15 bp, Homo sapiens
aaaaaaaatactgag

SEQ ID NO: 20302 - DNA, 15 bp, Homo sapiens
aaaaaaaaatactga

SEQ ID NO: 20303 - DNA, 15 bp, Homo sapiens
aaaaaaaaaatactg

SEQ ID NO: 20304 - DNA, 15 bp, Homo sapiens
aaaaaaaaaaatact

SEQ ID NO: 20305 - DNA, 15 bp, Homo sapiens
aaaaaaaaaaaatac

SEQ ID NO: 20306 - DNA, 15 bp, Homo sapiens
gagactccgtctcaa

SEQ ID NO: 20307 - DNA, 15 bp, Homo sapiens
tgagactccgtctca

SEQ ID NO: 20308 - DNA, 15 bp, Homo sapiens
gtgagactccgtctc

SEQ ID NO: 20309 - DNA, 15 bp, Homo sapiens
agtgagactccgtct

SEQ ID NO: 20310 - DNA, 15 bp, Homo sapiens
gagtgagactccgtc

SEQ ID NO: 20311 - DNA, 15 bp, Homo sapiens
agagtgagactccgt

SEQ ID NO: 20312 - DNA, 15 bp, Homo sapiens
aagagtgagactccg

SEQ ID NO: 20313 - DNA, 15 bp, Homo sapiens
caagagtgagactcc

SEQ ID NO: 20314 - DNA, 15 bp, Homo sapiens
acaagagtgagactc

SEQ ID NO: 20315 - DNA, 15 bp, Homo sapiens
gacaagagtgagact

SEQ ID NO: 20316 - DNA, 15 bp, Homo sapiens
cgacaagagtgagac

SEQ ID NO: 20317 - DNA, 15 bp, Homo sapiens
gcgacaagagtgaga

SEQ ID NO: 20318 - DNA, 15 bp, Homo sapiens
ggcgacaagagtgag

SEQ ID NO: 20319 - DNA, 15 bp, Homo sapiens
gggcgacaagagtga

SEQ ID NO: 20320 - DNA, 15 bp, Homo sapiens
tgggcgacaagagtg

SEQ ID NO: 20321 - DNA, 15 bp, Homo sapiens
ctgggcgacaagagt

SEQ ID NO: 20322 - DNA, 15 bp, Homo sapiens
cctgggcgacaagag

SEQ ID NO: 20323 - DNA, 15 bp, Homo sapiens
gcctgggcgacaaga

SEQ ID NO: 20324 - DNA, 15 bp, Homo sapiens
agcctgggcgacaag

SEQ ID NO: 20325 - DNA, 15 bp, Homo sapiens
cagcctgggcgacaa

SEQ ID NO: 20326 - DNA, 15 bp, Homo sapiens
ccagcctgggcgaca

SEQ ID NO: 20327 - DNA, 15 bp, Homo sapiens
tccagcctgggcgac

SEQ ID NO: 20328 - DNA, 15 bp, Homo sapiens
ctccagcctgggcga

SEQ ID NO: 20329 - DNA, 15 bp, Homo sapiens
actccagcctgggcg

SEQ ID NO: 20330 - DNA, 15 bp, Homo sapiens
ctgcactccagcctg

SEQ ID NO: 20331 - DNA, 15 bp, Homo sapiens
actgcactccagcct

SEQ ID NO: 20332 - DNA, 15 bp, Homo sapiens
cactgcactccagcc

SEQ ID NO: 20333 - DNA, 15 bp, Homo sapiens
ccactgcactccagc

SEQ ID NO: 20334 - DNA, 15 bp, Homo sapiens
accactgcactccag

SEQ ID NO: 20335 - DNA, 15 bp, Homo sapiens
caccactgcactcca

SEQ ID NO: 20336 - DNA, 15 bp, Homo sapiens
gcaccactgcactcc

SEQ ID NO: 20337 - DNA, 15 bp, Homo sapiens
ggcaccactgcactc

SEQ ID NO: 20338 - DNA, 15 bp, Homo sapiens
tggcaccactgcact

SEQ ID NO: 20339 - DNA, 15 bp, Homo sapiens
atggcaccactgcac

SEQ ID NO: 20340 - DNA, 15 bp, Homo sapiens
gatggcaccactgca

SEQ ID NO: 20341 - DNA, 15 bp, Homo sapiens
agatggcaccactgc

SEQ ID NO: 20342 - DNA, 15 bp, Homo sapiens
gagatggcaccactg

SEQ ID NO: 20343 - DNA, 15 bp, Homo sapiens
tgagatggcaccact

SEQ ID NO: 20344 - DNA, 15 bp, Homo sapiens
ctgagatggcaccac

SEQ ID NO: 20345 - DNA, 15 bp, Homo sapiens
gctgagatggcacca

SEQ ID NO: 20346 - DNA, 15 bp, Homo sapiens
agctgagatggcacc

SEQ ID NO: 20347 - DNA, 15 bp, Homo sapiens
gagctgagatggcac

SEQ ID NO: 20348 - DNA, 15 bp, Homo sapiens
tgagctgagatggca

SEQ ID NO: 20349 - DNA, 15 bp, Homo sapiens
gtgagctgagatggc

SEQ ID NO: 20350 - DNA, 15 bp, Homo sapiens
agtgagctgagatgg

SEQ ID NO: 20351 - DNA, 15 bp, Homo sapiens
cagtgagctgagatg

SEQ ID NO: 20352 - DNA, 15 bp, Homo sapiens
gcagtgagctgagat

SEQ ID NO: 20353 - DNA, 15 bp, Homo sapiens
tgcagtgagctgaga

SEQ ID NO: 20354 - DNA, 15 bp, Homo sapiens
ttgcagtgagctgag

SEQ ID NO: 20355 - DNA, 15 bp, Homo sapiens
gttgcagtgagctga

SEQ ID NO: 20356 - DNA, 15 bp, Homo sapiens
ggttgcagtgagctg

SEQ ID NO: 20357 - DNA, 15 bp, Homo sapiens
aggttgcagtgagct

SEQ ID NO: 20358 - DNA, 15 bp, Homo sapiens
cagaggttgcagtga

SEQ ID NO: 20359 - DNA, 15 bp, Homo sapiens
gcagaggttgcagtg

SEQ ID NO: 20360 - DNA, 15 bp, Homo sapiens
aggaggcagaggttg

SEQ ID NO: 20361 - DNA, 15 bp, Homo sapiens
caggaggcagaggtt

SEQ ID NO: 20362 - DNA, 15 bp, Homo sapiens
ccaggaggcagaggt

SEQ ID NO: 20363 - DNA, 15 bp, Homo sapiens
cccaggaggcagagg

SEQ ID NO: 20364 - DNA, 15 bp, Homo sapiens
acccaggaggcagag

SEQ ID NO: 20365 - DNA, 15 bp, Homo sapiens
aacccaggaggcaga

SEQ ID NO: 20366 - DNA, 15 bp, Homo sapiens
gaacccaggaggcag

SEQ ID NO: 20367 - DNA, 15 bp, Homo sapiens
tgaacccaggaggca

SEQ ID NO: 20368 - DNA, 15 bp, Homo sapiens
cgcttgaacccagga

SEQ ID NO: 20369 - DNA, 15 bp, Homo sapiens
tcgcttgaacccagg

SEQ ID NO: 20370 - DNA, 15 bp, Homo sapiens
atcgcttgaacccag

SEQ ID NO: 20371 - DNA, 15 bp, Homo sapiens
aatcgcttgaaccca

SEQ ID NO: 20372 - DNA, 15 bp, Homo sapiens
agaatcgcttgaacc

SEQ ID NO: 20373 - DNA, 15 bp, Homo sapiens
caggctgaggcagga

SEQ ID NO: 20374 - DNA, 15 bp, Homo sapiens
gcaggctgaggcagg

SEQ ID NO: 20375 - DNA, 15 bp, Homo sapiens
cgcaggctgaggcag

SEQ ID NO: 20376 - DNA, 15 bp, Homo sapiens
ccgcaggctgaggca

SEQ ID NO: 20377 - DNA, 15 bp, Homo sapiens
tccgcaggctgaggc

SEQ ID NO: 20378 - DNA, 15 bp, Homo sapiens
ctccgcaggctgagg

SEQ ID NO: 20379 - DNA, 15 bp, Homo sapiens
gctccgcaggctgag

SEQ ID NO: 20380 - DNA, 15 bp, Homo sapiens
tgctccgcaggctga

SEQ ID NO: 20381 - DNA, 15 bp, Homo sapiens
ctgctccgcaggctg

SEQ ID NO: 20382 - DNA, 15 bp, Homo sapiens
gctgctccgcaggct

SEQ ID NO: 20383 - DNA, 15 bp, Homo sapiens
agctgctccgcaggc

SEQ ID NO: 20384 - DNA, 15 bp, Homo sapiens
cagctgctccgcagg

SEQ ID NO: 20385 - DNA, 15 bp, Homo sapiens
ccagctgctccgcag

SEQ ID NO: 20386 - DNA, 15 bp, Homo sapiens
cccagctgctccgca

SEQ ID NO: 20387 - DNA, 15 bp, Homo sapiens
tcccagctgctccgc

SEQ ID NO: 20388 - DNA, 15 bp, Homo sapiens
atcccagctgctccg

SEQ ID NO: 20389 - DNA, 15 bp, Homo sapiens
aatcccagctgctcc

SEQ ID NO: 20390 - DNA, 15 bp, Homo sapiens
taatcccagctgctc

SEQ ID NO: 20391 - DNA, 15 bp, Homo sapiens
tctataatcccagct

SEQ ID NO: 20392 - DNA, 15 bp, Homo sapiens
atctataatcccagc

SEQ ID NO: 20393 - DNA, 15 bp, Homo sapiens
catctataatcccag

SEQ ID NO: 20394 - DNA, 15 bp, Homo sapiens
gcatctataatccca

SEQ ID NO: 20395 - DNA, 15 bp, Homo sapiens
ggcatctataatccc

SEQ ID NO: 20396 - DNA, 15 bp, Homo sapiens
gggcatctataatcc

SEQ ID NO: 20397 - DNA, 15 bp, Homo sapiens
cgggcatctataatc

SEQ ID NO: 20398 - DNA, 15 bp, Homo sapiens
gcgggcatctataat

SEQ ID NO: 20399 - DNA, 15 bp, Homo sapiens
ggcgggcatctataa

SEQ ID NO: 20400 - DNA, 15 bp, Homo sapiens
gggcgggcatctata

SEQ ID NO: 20401 - DNA, 15 bp, Homo sapiens
ggggcgggcatctat

SEQ ID NO: 20402 - DNA, 15 bp, Homo sapiens
gggggcgggcatcta

SEQ ID NO: 20403 - DNA, 15 bp, Homo sapiens
tgggggcgggcatct

SEQ ID NO: 20404 - DNA, 15 bp, Homo sapiens
gtgggggcgggcatc

SEQ ID NO: 20405 - DNA, 15 bp, Homo sapiens
cgtgggggcgggcat

SEQ ID NO: 20406 - DNA, 15 bp, Homo sapiens
gcgtgggggcgggca

SEQ ID NO: 20407 - DNA, 15 bp, Homo sapiens
ggcgtgggggcgggc

SEQ ID NO: 20408 - DNA, 15 bp, Homo sapiens
gggcgtgggggcggg

SEQ ID NO: 20409 - DNA, 15 bp, Homo sapiens
tgggcgtgggggcgg

SEQ ID NO: 20410 - DNA, 15 bp, Homo sapiens
ctgggcgtgggggcg

SEQ ID NO: 20411 - DNA, 15 bp, Homo sapiens
gctgggcgtgggggc

SEQ ID NO: 20412 - DNA, 15 bp, Homo sapiens
agctgggcgtggggg

SEQ ID NO: 20413 - DNA, 15 bp, Homo sapiens
cagctgggcgtgggg

SEQ ID NO: 20414 - DNA, 15 bp, Homo sapiens
tcagctgggcgtggg

SEQ ID NO: 20415 - DNA, 15 bp, Homo sapiens
atcagctgggcgtgg

SEQ ID NO: 20416 - DNA, 15 bp, Homo sapiens
aatcagctgggcgtg

SEQ ID NO: 20417 - DNA, 15 bp, Homo sapiens
aaatcagctgggcgt

SEQ ID NO: 20418 - DNA, 15 bp, Homo sapiens
aaaatcagctgggcg

SEQ ID NO: 20419 - DNA, 15 bp, Homo sapiens
aaaaatcagctgggc

SEQ ID NO: 20420 - DNA, 15 bp, Homo sapiens
caaaaatcagctggg

SEQ ID NO: 20421 - DNA, 15 bp, Homo sapiens
tacaaaaatcagctg

SEQ ID NO: 20422 - DNA, 15 bp, Homo sapiens
atacaaaaatcagct

SEQ ID NO: 20423 - DNA, 15 bp, Homo sapiens
aatacaaaaatcagc

SEQ ID NO: 20424 - DNA, 15 bp, Homo sapiens
aaatacaaaaatcag

SEQ ID NO: 20425 - DNA, 15 bp, Homo sapiens
caaatacaaaaatca

SEQ ID NO: 20426 - DNA, 15 bp, Homo sapiens
acaaatacaaaaatc

SEQ ID NO: 20427 - DNA, 15 bp, Homo sapiens
tactacaaatacaaa

SEQ ID NO: 20428 - DNA, 15 bp, Homo sapiens
ctactacaaatacaa

SEQ ID NO: 20429 - DNA, 15 bp, Homo sapiens
tctactacaaataca

SEQ ID NO: 20430 - DNA, 15 bp, Homo sapiens
ctctactacaaatac

SEQ ID NO: 20431 - DNA, 15 bp, Homo sapiens
tctctactacaaata

SEQ ID NO: 20432 - DNA, 15 bp, Homo sapiens
atctctactacaaat

SEQ ID NO: 20433 - DNA, 15 bp, Homo sapiens
catctctactacaaa

SEQ ID NO: 20434 - DNA, 15 bp, Homo sapiens
ccatctctactacaa

SEQ ID NO: 20435 - DNA, 15 bp, Homo sapiens
cccatctctactaca

SEQ ID NO: 20436 - DNA, 15 bp, Homo sapiens
ccccatctctactac

SEQ ID NO: 20437 - DNA, 15 bp, Homo sapiens
aggtaaaaccccatc

SEQ ID NO: 20438 - DNA, 15 bp, Homo sapiens
aaggtaaaaccccat

SEQ ID NO: 20439 - DNA, 15 bp, Homo sapiens
caaggtaaaacccca

SEQ ID NO: 20440 - DNA, 15 bp, Homo sapiens
acaaggtaaaacccc

SEQ ID NO: 20441 - DNA, 15 bp, Homo sapiens
aacaaggtaaaaccc

SEQ ID NO: 20442 - DNA, 15 bp, Homo sapiens
caacaaggtaaaacc

SEQ ID NO: 20443 - DNA, 15 bp, Homo sapiens
ccaacaaggtaaaac

SEQ ID NO: 20444 - DNA, 15 bp, Homo sapiens
gccaacaaggtaaaa

SEQ ID NO: 20445 - DNA, 15 bp, Homo sapiens
ggccaacaaggtaaa

SEQ ID NO: 20446 - DNA, 15 bp, Homo sapiens
tggccaacaaggtaa

SEQ ID NO: 20447 - DNA, 15 bp, Homo sapiens
ctggccaacaaggta

SEQ ID NO: 20448 - DNA, 15 bp, Homo sapiens
actggccaacaaggt

SEQ ID NO: 20449 - DNA, 15 bp, Homo sapiens
gactggccaacaagg

SEQ ID NO: 20450 - DNA, 15 bp, Homo sapiens
agactggccaacaag

SEQ ID NO: 20451 - DNA, 15 bp, Homo sapiens
cagactggccaacaa

SEQ ID NO: 20452 - DNA, 15 bp, Homo sapiens
ccagactggccaaca

SEQ ID NO: 20453 - DNA, 15 bp, Homo sapiens
accagactggccaac

SEQ ID NO: 20454 - DNA, 15 bp, Homo sapiens
agtttgagaccagac

SEQ ID NO: 20455 - DNA, 15 bp, Homo sapiens
gagtttgagaccaga

SEQ ID NO: 20456 - DNA, 15 bp, Homo sapiens
aggagtttgagacca

SEQ ID NO: 20457 - DNA, 15 bp, Homo sapiens
caggagtttgagacc

SEQ ID NO: 20458 - DNA, 15 bp, Homo sapiens
tcaggagtttgagac

SEQ ID NO: 20459 - DNA, 15 bp, Homo sapiens
gtcaggagtttgaga

SEQ ID NO: 20460 - DNA, 15 bp, Homo sapiens
ggtcaggagtttgag

SEQ ID NO: 20461 - DNA, 15 bp, Homo sapiens
aggtcaggagtttga

SEQ ID NO: 20462 - DNA, 15 bp, Homo sapiens
gaggtcaggagtttg

SEQ ID NO: 20463 - DNA, 15 bp, Homo sapiens
cgaggtcaggagttt

SEQ ID NO: 20464 - DNA, 15 bp, Homo sapiens
ccgaggtcaggagtt

SEQ ID NO: 20465 - DNA, 15 bp, Homo sapiens
cccgaggtcaggagt

SEQ ID NO: 20466 - DNA, 15 bp, Homo sapiens
acccgaggtcaggag

SEQ ID NO: 20467 - DNA, 15 bp, Homo sapiens
cacccgaggtcagga

SEQ ID NO: 20468 - DNA, 15 bp, Homo sapiens
tcacccgaggtcagg

SEQ ID NO: 20469 - DNA, 15 bp, Homo sapiens
atcacccgaggtcag

SEQ ID NO: 20470 - DNA, 15 bp, Homo sapiens
gatcacccgaggtca

SEQ ID NO: 20471 - DNA, 15 bp, Homo sapiens
ggatcacccgaggtc

SEQ ID NO: 20472 - DNA, 15 bp, Homo sapiens
tggatcacccgaggt

SEQ ID NO: 20473 - DNA, 15 bp, Homo sapiens
atggatcacccgagg

SEQ ID NO: 20474 - DNA, 15 bp, Homo sapiens
gatggatcacccgag

SEQ ID NO: 20475 - DNA, 15 bp, Homo sapiens
agatggatcacccga

SEQ ID NO: 20476 - DNA, 15 bp, Homo sapiens
cagatggatcacccg

SEQ ID NO: 20477 - DNA, 15 bp, Homo sapiens
acagatggatcaccc

SEQ ID NO: 20478 - DNA, 15 bp, Homo sapiens
gacagatggatcacc

SEQ ID NO: 20479 - DNA, 15 bp, Homo sapiens
agacagatggatcac

SEQ ID NO: 20480 - DNA, 15 bp, Homo sapiens
gagacagatggatca

SEQ ID NO: 20481 - DNA, 15 bp, Homo sapiens
cgagacagatggatc

SEQ ID NO: 20482 - DNA, 15 bp, Homo sapiens
ccgagacagatggat

SEQ ID NO: 20483 - DNA, 15 bp, Homo sapiens
gccgagacagatgga

SEQ ID NO: 20484 - DNA, 15 bp, Homo sapiens
ggccgagacagatgg

SEQ ID NO: 20485 - DNA, 15 bp, Homo sapiens
aggccgagacagatg

SEQ ID NO: 20486 - DNA, 15 bp, Homo sapiens
gaggccgagacagat

SEQ ID NO: 20487 - DNA, 15 bp, Homo sapiens
agaggccgagacaga

SEQ ID NO: 20488 - DNA, 15 bp, Homo sapiens
cagaggccgagacag

SEQ ID NO: 20489 - DNA, 15 bp, Homo sapiens
ccagaggccgagaca

SEQ ID NO: 20490 - DNA, 15 bp, Homo sapiens
tccagaggccgagac

SEQ ID NO: 20491 - DNA, 15 bp, Homo sapiens
ttccagaggccgaga

SEQ ID NO: 20492 - DNA, 15 bp, Homo sapiens
attccagaggccgag

SEQ ID NO: 20493 - DNA, 15 bp, Homo sapiens
aattccagaggccga

SEQ ID NO: 20494 - DNA, 15 bp, Homo sapiens
taattccagaggccg

SEQ ID NO: 20495 - DNA, 15 bp, Homo sapiens
gtaattccagaggcc

SEQ ID NO: 20496 - DNA, 15 bp, Homo sapiens
tgtaattccagaggc

SEQ ID NO: 20497 - DNA, 15 bp, Homo sapiens
ctgtaattccagagg

SEQ ID NO: 20498 - DNA, 15 bp, Homo sapiens
cctgtaattccagag

SEQ ID NO: 20499 - DNA, 15 bp, Homo sapiens
acctgtaattccaga

SEQ ID NO: 20500 - DNA, 15 bp, Homo sapiens
cacctgtaattccag

SEQ ID NO: 20501 - DNA, 15 bp, Homo sapiens
acacctgtaattcca

SEQ ID NO: 20502 - DNA, 15 bp, Homo sapiens
cacacctgtaattcc

SEQ ID NO: 20503 - DNA, 15 bp, Homo sapiens
tcacacctgtaattc

SEQ ID NO: 20504 - DNA, 15 bp, Homo sapiens
ctcacacctgtaatt

SEQ ID NO: 20505 - DNA, 15 bp, Homo sapiens
gctcacacctgtaat

SEQ ID NO: 20506 - DNA, 15 bp, Homo sapiens
ggctcacacctgtaa

SEQ ID NO: 20507 - DNA, 15 bp, Homo sapiens
cggctcacacctgta

SEQ ID NO: 20508 - DNA, 15 bp, Homo sapiens
gcggctcacacctgt

SEQ ID NO: 20509 - DNA, 15 bp, Homo sapiens
ggcggctcacacctg

SEQ ID NO: 20510 - DNA, 15 bp, Homo sapiens
tggcggctcacacct

SEQ ID NO: 20511 - DNA, 15 bp, Homo sapiens
gtggcggctcacacc

SEQ ID NO: 20512 - DNA, 15 bp, Homo sapiens
cgtggcggctcacac

SEQ ID NO: 20513 - DNA, 15 bp, Homo sapiens
gcgtggcggctcaca

SEQ ID NO: 20514 - DNA, 15 bp, Homo sapiens
ggcgtggcggctcac

SEQ ID NO: 20515 - DNA, 15 bp, Homo sapiens
aggcgtggcggctca

SEQ ID NO: 20516 - DNA, 15 bp, Homo sapiens
caggcgtggcggctc

SEQ ID NO: 20517 - DNA, 15 bp, Homo sapiens
ccaggcgtggcggct

SEQ ID NO: 20518 - DNA, 15 bp, Homo sapiens
gccaggcgtggcggc

SEQ ID NO: 20519 - DNA, 15 bp, Homo sapiens
agccaggcgtggcgg

SEQ ID NO: 20520 - DNA, 15 bp, Homo sapiens
tagccaggcgtggcg

SEQ ID NO: 20521 - DNA, 15 bp, Homo sapiens
ttagccaggcgtggc

SEQ ID NO: 20522 - DNA, 15 bp, Homo sapiens
tttagccaggcgtgg

SEQ ID NO: 20523 - DNA, 15 bp, Homo sapiens
atttagccaggcgtg

SEQ ID NO: 20524 - DNA, 15 bp, Homo sapiens
aatttagccaggcgt

SEQ ID NO: 20525 - DNA, 15 bp, Homo sapiens
caatttagccaggcg

SEQ ID NO: 20526 - DNA, 15 bp, Homo sapiens
tcaatttagccaggc

SEQ ID NO: 20527 - DNA, 15 bp, Homo sapiens
atcaatttagccagg

SEQ ID NO: 20528 - DNA, 15 bp, Homo sapiens
gatcaatttagccag

SEQ ID NO: 20529 - DNA, 15 bp, Homo sapiens
tgatcaatttagcca

SEQ ID NO: 20530 - DNA, 15 bp, Homo sapiens
ctgatcaatttagcc

SEQ ID NO: 20531 - DNA, 15 bp, Homo sapiens
actgatcaatttagc

SEQ ID NO: 20532 - DNA, 15 bp, Homo sapiens
tactgatcaatttag

SEQ ID NO: 20533 - DNA, 15 bp, Homo sapiens
atactgatcaattta

SEQ ID NO: 20534 - DNA, 15 bp, Homo sapiens
aatactgatcaattt

SEQ ID NO: 20535 - DNA, 15 bp, Homo sapiens
taatactgatcaatt

SEQ ID NO: 20536 - DNA, 15 bp, Homo sapiens
ataatactgatcaat

SEQ ID NO: 20537 - DNA, 15 bp, Homo sapiens
aataatactgatcaa

SEQ ID NO: 20538 - DNA, 15 bp, Homo sapiens
aaataatactgatca

SEQ ID NO: 20539 - DNA, 15 bp, Homo sapiens
taaataatactgatc

SEQ ID NO: 20540 - DNA, 15 bp, Homo sapiens
ttaaataatactgat

SEQ ID NO: 20541 - DNA, 15 bp, Homo sapiens
gttaaataatactga

SEQ ID NO: 20542 - DNA, 15 bp, Homo sapiens
agttaaataatactg

SEQ ID NO: 20543 - DNA, 15 bp, Homo sapiens
aagttaaataatact

SEQ ID NO: 20544 - DNA, 15 bp, Homo sapiens
aaagttaaataatac

SEQ ID NO: 20545 - DNA, 15 bp, Homo sapiens
caaagttaaataata

SEQ ID NO: 20546 - DNA, 15 bp, Homo sapiens
tcaaagttaaataat

SEQ ID NO: 20547 - DNA, 15 bp, Homo sapiens
ctcaaagttaaataa

SEQ ID NO: 20548 - DNA, 15 bp, Homo sapiens
cctcaaagttaaata

SEQ ID NO: 20549 - DNA, 15 bp, Homo sapiens
ccctcaaagttaaat

SEQ ID NO: 20550 - DNA, 15 bp, Homo sapiens
tccctcaaagttaaa

SEQ ID NO: 20551 - DNA, 15 bp, Homo sapiens
atccctcaaagttaa

SEQ ID NO: 20552 - DNA, 15 bp, Homo sapiens
tatccctcaaagtta

SEQ ID NO: 20553 - DNA, 15 bp, Homo sapiens
atatccctcaaagtt

SEQ ID NO: 20554 - DNA, 15 bp, Homo sapiens
catatccctcaaagt

SEQ ID NO: 20555 - DNA, 15 bp, Homo sapiens
tcatatccctcaaag

SEQ ID NO: 20556 - DNA, 15 bp, Homo sapiens
atcatatccctcaaa

SEQ ID NO: 20557 - DNA, 15 bp, Homo sapiens
aatcatatccctcaa

SEQ ID NO: 20558 - DNA, 15 bp, Homo sapiens
aaatcatatccctca

SEQ ID NO: 20559 - DNA, 15 bp, Homo sapiens
caaatcatatccctc

SEQ ID NO: 20560 - DNA, 15 bp, Homo sapiens
acaaatcatatccct

SEQ ID NO: 20561 - DNA, 15 bp, Homo sapiens
aacaaatcatatccc

SEQ ID NO: 20562 - DNA, 15 bp, Homo sapiens
taacaaatcatatcc

SEQ ID NO: 20563 - DNA, 15 bp, Homo sapiens
ataacaaatcatatc

SEQ ID NO: 20564 - DNA, 15 bp, Homo sapiens
cataacaaatcatat

SEQ ID NO: 20565 - DNA, 15 bp, Homo sapiens
ccataacaaatcata

SEQ ID NO: 20566 - DNA, 15 bp, Homo sapiens
tccataacaaatcat

SEQ ID NO: 20567 - DNA, 15 bp, Homo sapiens
ttccataacaaatca

SEQ ID NO: 20568 - DNA, 15 bp, Homo sapiens
attccataacaaatc

SEQ ID NO: 20569 - DNA, 15 bp, Homo sapiens
cattccataacaaat

SEQ ID NO: 20570 - DNA, 15 bp, Homo sapiens
gcattccataacaaa

SEQ ID NO: 20571 - DNA, 15 bp, Homo sapiens
cgcattccataacaa

SEQ ID NO: 20572 - DNA, 15 bp, Homo sapiens
tcgcattccataaca

SEQ ID NO: 20573 - DNA, 15 bp, Homo sapiens
ttcgcattccataac

SEQ ID NO: 20574 - DNA, 15 bp, Homo sapiens
cttcgcattccataa

SEQ ID NO: 20575 - DNA, 15 bp, Homo sapiens
acttcgcattccata

SEQ ID NO: 20576 - DNA, 15 bp, Homo sapiens
aacttcgcattccat

SEQ ID NO: 20577 - DNA, 15 bp, Homo sapiens
aaacttcgcattcca

SEQ ID NO: 20578 - DNA, 15 bp, Homo sapiens
aaaacttcgcattcc

SEQ ID NO: 20579 - DNA, 15 bp, Homo sapiens
taaaacttcgcattc

SEQ ID NO: 20580 - DNA, 15 bp, Homo sapiens
ataaaacttcgcatt

SEQ ID NO: 20581 - DNA, 15 bp, Homo sapiens
tataaaacttcgcat

SEQ ID NO: 20582 - DNA, 15 bp, Homo sapiens
gtataaaacttcgca

SEQ ID NO: 20583 - DNA, 15 bp, Homo sapiens
agtataaaacttcgc

SEQ ID NO: 20584 - DNA, 15 bp, Homo sapiens
aagtataaaacttcg

SEQ ID NO: 20585 - DNA, 15 bp, Homo sapiens
caagtataaaacttc

SEQ ID NO: 20586 - DNA, 15 bp, Homo sapiens
tcaagtataaaactt

SEQ ID NO: 20587 - DNA, 15 bp, Homo sapiens
ctcaagtataaaact

SEQ ID NO: 20588 - DNA, 15 bp, Homo sapiens
cctcaagtataaaac

SEQ ID NO: 20589 - DNA, 15 bp, Homo sapiens
acctcaagtataaaa

SEQ ID NO: 20590 - DNA, 15 bp, Homo sapiens
tacctcaagtataaa

SEQ ID NO: 20591 - DNA, 15 bp, Homo sapiens
gtacctcaagtataa

SEQ ID NO: 20592 - DNA, 15 bp, Homo sapiens
agtacctcaagtata

SEQ ID NO: 20593 - DNA, 15 bp, Homo sapiens
gagtacctcaagtat

SEQ ID NO: 20594 - DNA, 15 bp, Homo sapiens
tgagtacctcaagta

SEQ ID NO: 20595 - DNA, 15 bp, Homo sapiens
ctgagtacctcaagt

SEQ ID NO: 20596 - DNA, 15 bp, Homo sapiens
tctgagtacctcaag

SEQ ID NO: 20597 - DNA, 15 bp, Homo sapiens
ctctgagtacctcaa

SEQ ID NO: 20598 - DNA, 15 bp, Homo sapiens
actctgagtacctca

SEQ ID NO: 20599 - DNA, 15 bp, Homo sapiens
gactctgagtacctc

SEQ ID NO: 20600 - DNA, 15 bp, Homo sapiens
ggactctgagtacct

SEQ ID NO: 20601 - DNA, 15 bp, Homo sapiens
aggactctgagtacc

SEQ ID NO: 20602 - DNA, 15 bp, Homo sapiens
aaggactctgagtac

SEQ ID NO: 20603 - DNA, 15 bp, Homo sapiens
aaaggactctgagta

SEQ ID NO: 20604 - DNA, 15 bp, Homo sapiens
aaaaggactctgagt

SEQ ID NO: 20605 - DNA, 15 bp, Homo sapiens
caaaaggactctgag

SEQ ID NO: 20606 - DNA, 15 bp, Homo sapiens
tcaaaaggactctga

SEQ ID NO: 20607 - DNA, 15 bp, Homo sapiens
ctcaaaaggactctg

SEQ ID NO: 20608 - DNA, 15 bp, Homo sapiens
tctcaaaaggactct

SEQ ID NO: 20609 - DNA, 15 bp, Homo sapiens
gtctcaaaaggactc

SEQ ID NO: 20610 - DNA, 15 bp, Homo sapiens
tgtctcaaaaggact

SEQ ID NO: 20611 - DNA, 15 bp, Homo sapiens
ttgtctcaaaaggac

SEQ ID NO: 20612 - DNA, 15 bp, Homo sapiens
tttgtctcaaaagga

SEQ ID NO: 20613 - DNA, 15 bp, Homo sapiens
atttgtctcaaaagg

SEQ ID NO: 20614 - DNA, 15 bp, Homo sapiens
tatttgtctcaaaag

SEQ ID NO: 20615 - DNA, 15 bp, Homo sapiens
atatttgtctcaaaa

SEQ ID NO: 20616 - DNA, 15 bp, Homo sapiens
aatatttgtctcaaa

SEQ ID NO: 20617 - DNA, 15 bp, Homo sapiens
aaatatttgtctcaa

SEQ ID NO: 20618 - DNA, 15 bp, Homo sapiens
taaatatttgtctca

SEQ ID NO: 20619 - DNA, 15 bp, Homo sapiens
ttaaatatttgtctc

SEQ ID NO: 20620 - DNA, 15 bp, Homo sapiens
gttaaatatttgtct

SEQ ID NO: 20621 - DNA, 15 bp, Homo sapiens
agttaaatatttgtc

SEQ ID NO: 20622 - DNA, 15 bp, Homo sapiens
aagttaaatatttgt

SEQ ID NO: 20623 - DNA, 15 bp, Homo sapiens
gaagttaaatatttg

SEQ ID NO: 20624 - DNA, 15 bp, Homo sapiens
agaagttaaatattt

SEQ ID NO: 20625 - DNA, 15 bp, Homo sapiens
gagaagttaaatatt

SEQ ID NO: 20626 - DNA, 15 bp, Homo sapiens
ggagaagttaaatat

SEQ ID NO: 20627 - DNA, 15 bp, Homo sapiens
aggagaagttaaata

SEQ ID NO: 20628 - DNA, 15 bp, Homo sapiens
aaggagaagttaaat

SEQ ID NO: 20629 - DNA, 15 bp, Homo sapiens
aaaggagaagttaaa

SEQ ID NO: 20630 - DNA, 15 bp, Homo sapiens
aaaaggagaagttaa

SEQ ID NO: 20631 - DNA, 15 bp, Homo sapiens
caaaaggagaagtta

SEQ ID NO: 20632 - DNA, 15 bp, Homo sapiens
tcaaaaggagaagtt

SEQ ID NO: 20633 - DNA, 15 bp, Homo sapiens
ctcaaaaggagaagt

SEQ ID NO: 20634 - DNA, 15 bp, Homo sapiens
cctcaaaaggagaag

SEQ ID NO: 20635 - DNA, 15 bp, Homo sapiens
acctcaaaaggagaa

SEQ ID NO: 20636 - DNA, 15 bp, Homo sapiens
aacctcaaaaggaga

SEQ ID NO: 20637 - DNA, 15 bp, Homo sapiens
taacctcaaaaggag

SEQ ID NO: 20638 - DNA, 15 bp, Homo sapiens
gtaacctcaaaagga

SEQ ID NO: 20639 - DNA, 15 bp, Homo sapiens
ggtaacctcaaaagg

SEQ ID NO: 20640 - DNA, 15 bp, Homo sapiens
cggtaacctcaaaag

SEQ ID NO: 20641 - DNA, 15 bp, Homo sapiens
gcggtaacctcaaaa

SEQ ID NO: 20642 - DNA, 15 bp, Homo sapiens
ggcggtaacctcaaa

SEQ ID NO: 20643 - DNA, 15 bp, Homo sapiens
aggcggtaacctcaa

SEQ ID NO: 20644 - DNA, 15 bp, Homo sapiens
taggcggtaacctca

SEQ ID NO: 20645 - DNA, 15 bp, Homo sapiens
gtaggcggtaacctc

SEQ ID NO: 20646 - DNA, 15 bp, Homo sapiens
cgtaggcggtaacct

SEQ ID NO: 20647 - DNA, 15 bp, Homo sapiens
tcgtaggcggtaacc

SEQ ID NO: 20648 - DNA, 15 bp, Homo sapiens
atcgtaggcggtaac

SEQ ID NO: 20649 - DNA, 15 bp, Homo sapiens
aatcgtaggcggtaa

SEQ ID NO: 20650 - DNA, 15 bp, Homo sapiens
caatcgtaggcggta

SEQ ID NO: 20651 - DNA, 15 bp, Homo sapiens
ccaatcgtaggcggt

SEQ ID NO: 20652 - DNA, 15 bp, Homo sapiens
cccaatcgtaggcgg

SEQ ID NO: 20653 - DNA, 15 bp, Homo sapiens
tcccaatcgtaggcg

SEQ ID NO: 20654 - DNA, 15 bp, Homo sapiens
ttcccaatcgtaggc

SEQ ID NO: 20655 - DNA, 15 bp, Homo sapiens
attcccaatcgtagg

SEQ ID NO: 20656 - DNA, 15 bp, Homo sapiens
aattcccaatcgtag

SEQ ID NO: 20657 - DNA, 15 bp, Homo sapiens
taattcccaatcgta

SEQ ID NO: 20658 - DNA, 15 bp, Homo sapiens
ttaattcccaatcgt

SEQ ID NO: 20659 - DNA, 15 bp, Homo sapiens
attaattcccaatcg

SEQ ID NO: 20660 - DNA, 15 bp, Homo sapiens
cattaattcccaatc

SEQ ID NO: 20661 - DNA, 15 bp, Homo sapiens
acattaattcccaat

SEQ ID NO: 20662 - DNA, 15 bp, Homo sapiens
tacattaattcccaa

SEQ ID NO: 20663 - DNA, 15 bp, Homo sapiens
ttacattaattccca

SEQ ID NO: 20664 - DNA, 15 bp, Homo sapiens
tttacattaattccc

SEQ ID NO: 20665 - DNA, 15 bp, Homo sapiens
ttttacattaattcc

SEQ ID NO: 20666 - DNA, 15 bp, Homo sapiens
tttttacattaattc

SEQ ID NO: 20667 - DNA, 15 bp, Homo sapiens
ttttttacattaatt

SEQ ID NO: 20668 - DNA, 15 bp, Homo sapiens
attttttacattaat

SEQ ID NO: 20669 - DNA, 15 bp, Homo sapiens
tattttttacattaa

SEQ ID NO: 20670 - DNA, 15 bp, Homo sapiens
ttattttttacatta

SEQ ID NO: 20671 - DNA, 15 bp, Homo sapiens
cttattttttacatt

SEQ ID NO: 20672 - DNA, 15 bp, Homo sapiens
gcttattttttacat

SEQ ID NO: 20673 - DNA, 15 bp, Homo sapiens
ggcttattttttaca

SEQ ID NO: 20674 - DNA, 15 bp, Homo sapiens
tggcttattttttac

SEQ ID NO: 20675 - DNA, 15 bp, Homo sapiens
ttggcttatttttta

SEQ ID NO: 20676 - DNA, 15 bp, Homo sapiens
tttggcttatttttt

SEQ ID NO: 20677 - DNA, 15 bp, Homo sapiens
ttttggcttattttt

SEQ ID NO: 20678 - DNA, 15 bp, Homo sapiens
cttttggcttatttt

SEQ ID NO: 20679 - DNA, 15 bp, Homo sapiens
tcttttggcttattt

SEQ ID NO: 20680 - DNA, 15 bp, Homo sapiens
ttcttttggcttatt

SEQ ID NO: 20681 - DNA, 15 bp, Homo sapiens
tttcttttggcttat

SEQ ID NO: 20682 - DNA, 15 bp, Homo sapiens
ctttcttttggctta

SEQ ID NO: 20683 - DNA, 15 bp, Homo sapiens
actttcttttggctt

SEQ ID NO: 20684 - DNA, 15 bp, Homo sapiens
cactttcttttggct

SEQ ID NO: 20685 - DNA, 15 bp, Homo sapiens
tcactttcttttggc

SEQ ID NO: 20686 - DNA, 15 bp, Homo sapiens
ctcactttcttttgg

SEQ ID NO: 20687 - DNA, 15 bp, Homo sapiens
cctcactttcttttg

SEQ ID NO: 20688 - DNA, 15 bp, Homo sapiens
ccctcactttctttt

SEQ ID NO: 20689 - DNA, 15 bp, Homo sapiens
tccctcactttcttt

SEQ ID NO: 20690 - DNA, 15 bp, Homo sapiens
ttccctcactttctt

SEQ ID NO: 20691 - DNA, 15 bp, Homo sapiens
tttccctcactttct

SEQ ID NO: 20692 - DNA, 15 bp, Homo sapiens
ttttccctcactttc

SEQ ID NO: 20693 - DNA, 15 bp, Homo sapiens
cttttccctcacttt

SEQ ID NO: 20694 - DNA, 15 bp, Homo sapiens
acttttccctcactt

SEQ ID NO: 20695 - DNA, 15 bp, Homo sapiens
cacttttccctcact

SEQ ID NO: 20696 - DNA, 15 bp, Homo sapiens
tcacttttccctcac

SEQ ID NO: 20697 - DNA, 15 bp, Homo sapiens
ttcacttttccctca

SEQ ID NO: 20698 - DNA, 15 bp, Homo sapiens
gttcacttttccctc

SEQ ID NO: 20699 - DNA, 15 bp, Homo sapiens
ggttcacttttccct

SEQ ID NO: 20700 - DNA, 15 bp, Homo sapiens
tggttcacttttccc

SEQ ID NO: 20701 - DNA, 15 bp, Homo sapiens
ttggttcacttttcc

SEQ ID NO: 20702 - DNA, 15 bp, Homo sapiens
cttggttcacttttc

SEQ ID NO: 20703 - DNA, 15 bp, Homo sapiens
gcttggttcactttt

SEQ ID NO: 20704 - DNA, 15 bp, Homo sapiens
agcttggttcacttt

SEQ ID NO: 20705 - DNA, 15 bp, Homo sapiens
cagcttggttcactt

SEQ ID NO: 20706 - DNA, 15 bp, Homo sapiens
acagcttggttcact

SEQ ID NO: 20707 - DNA, 15 bp, Homo sapiens
tacagcttggttcac

SEQ ID NO: 20708 - DNA, 15 bp, Homo sapiens
ttacagcttggttca

SEQ ID NO: 20709 - DNA, 15 bp, Homo sapiens
attacagcttggttc

SEQ ID NO: 20710 - DNA, 15 bp, Homo sapiens
aattacagcttggtt

SEQ ID NO: 20711 - DNA, 15 bp, Homo sapiens
aaattacagcttggt

SEQ ID NO: 20712 - DNA, 15 bp, Homo sapiens
aaaattacagcttgg

SEQ ID NO: 20713 - DNA, 15 bp, Homo sapiens
aaaaattacagcttg

SEQ ID NO: 20714 - DNA, 15 bp, Homo sapiens
aaaaaattacagctt

SEQ ID NO: 20715 - DNA, 15 bp, Homo sapiens
aaaaaaattacagct

SEQ ID NO: 20716 - DNA, 15 bp, Homo sapiens
taaaaaaattacagc

SEQ ID NO: 20717 - DNA, 15 bp, Homo sapiens
gtaaaaaaattacag

SEQ ID NO: 20718 - DNA, 15 bp, Homo sapiens
agtaaaaaaattaca

SEQ ID NO: 20719 - DNA, 15 bp, Homo sapiens
gagtaaaaaaattac

SEQ ID NO: 20720 - DNA, 15 bp, Homo sapiens
agagtaaaaaaatta

SEQ ID NO: 20721 - DNA, 15 bp, Homo sapiens
aagagtaaaaaaatt

SEQ ID NO: 20722 - DNA, 15 bp, Homo sapiens
aaagagtaaaaaaat

SEQ ID NO: 20723 - DNA, 15 bp, Homo sapiens
aaaagagtaaaaaaa

SEQ ID NO: 20724 - DNA, 15 bp, Homo sapiens
aaaaagagtaaaaaa

SEQ ID NO: 20725 - DNA, 15 bp, Homo sapiens
aaaaaagagtaaaaa

SEQ ID NO: 20726 - DNA, 15 bp, Homo sapiens
taaaaaagagtaaaa

SEQ ID NO: 20727 - DNA, 15 bp, Homo sapiens
ataaaaaagagtaaa

SEQ ID NO: 20728 - DNA, 15 bp, Homo sapiens
aataaaaaagagtaa

SEQ ID NO: 20729 - DNA, 15 bp, Homo sapiens
caataaaaaagagta

SEQ ID NO: 20730 - DNA, 15 bp, Homo sapiens
acaataaaaaagagt

SEQ ID NO: 20731 - DNA, 15 bp, Homo sapiens
aacaataaaaaagag

SEQ ID NO: 20732 - DNA, 15 bp, Homo sapiens
caacaataaaaaaga

SEQ ID NO: 20733 - DNA, 15 bp, Homo sapiens
acaacaataaaaaag

SEQ ID NO: 20734 - DNA, 15 bp, Homo sapiens
aacaacaataaaaaa

SEQ ID NO: 20735 - DNA, 15 bp, Homo sapiens
caacaacaataaaaa

SEQ ID NO: 20736 - DNA, 15 bp, Homo sapiens
acaacaacaataaaa

SEQ ID NO: 20737 - DNA, 15 bp, Homo sapiens
aacaacaacaataaa

SEQ ID NO: 20738 - DNA, 15 bp, Homo sapiens
taacaacaacaataa

SEQ ID NO: 20739 - DNA, 15 bp, Homo sapiens
ataacaacaacaata

SEQ ID NO: 20740 - DNA, 15 bp, Homo sapiens
aataacaacaacaat

SEQ ID NO: 20741 - DNA, 15 bp, Homo sapiens
caataacaacaacaa

SEQ ID NO: 20742 - DNA, 15 bp, Homo sapiens
acaataacaacaaca

SEQ ID NO: 20743 - DNA, 15 bp, Homo sapiens
aacaataacaacaac

SEQ ID NO: 20744 - DNA, 15 bp, Homo sapiens
caacaataacaacaa

SEQ ID NO: 20745 - DNA, 15 bp, Homo sapiens
gcaacaataacaaca

SEQ ID NO: 20746 - DNA, 15 bp, Homo sapiens
agcaacaataacaac

SEQ ID NO: 20747 - DNA, 15 bp, Homo sapiens
cagcaacaataacaa

SEQ ID NO: 20748 - DNA, 15 bp, Homo sapiens
acagcaacaataaca

SEQ ID NO: 20749 - DNA, 15 bp, Homo sapiens
aacagcaacaataac

SEQ ID NO: 20750 - DNA, 15 bp, Homo sapiens
aaacagcaacaataa

SEQ ID NO: 20751 - DNA, 15 bp, Homo sapiens
aaaacagcaacaata

SEQ ID NO: 20752 - DNA, 15 bp, Homo sapiens
aaaaacagcaacaat

SEQ ID NO: 20753 - DNA, 15 bp, Homo sapiens
aaaaaacagcaacaa

SEQ ID NO: 20754 - DNA, 15 bp, Homo sapiens
taaaaaacagcaaca

SEQ ID NO: 20755 - DNA, 15 bp, Homo sapiens
gtaaaaaacagcaac

SEQ ID NO: 20756 - DNA, 15 bp, Homo sapiens
agtaaaaaacagcaa

SEQ ID NO: 20757 - DNA, 15 bp, Homo sapiens
tagtaaaaaacagca

SEQ ID NO: 20758 - DNA, 15 bp, Homo sapiens
atagtaaaaaacagc

SEQ ID NO: 20759 - DNA, 15 bp, Homo sapiens
gatagtaaaaaacag

SEQ ID NO: 20760 - DNA, 15 bp, Homo sapiens
agatagtaaaaaaca

SEQ ID NO: 20761 - DNA, 15 bp, Homo sapiens
aagatagtaaaaaac

SEQ ID NO: 20762 - DNA, 15 bp, Homo sapiens
caagatagtaaaaaa

SEQ ID NO: 20763 - DNA, 15 bp, Homo sapiens
tcaagatagtaaaaa

SEQ ID NO: 20764 - DNA, 15 bp, Homo sapiens
atcaagatagtaaaa

SEQ ID NO: 20765 - DNA, 15 bp, Homo sapiens
aatcaagatagtaaa

SEQ ID NO: 20766 - DNA, 15 bp, Homo sapiens
caatcaagatagtaa

SEQ ID NO: 20767 - DNA, 15 bp, Homo sapiens
gcaatcaagatagta

SEQ ID NO: 20768 - DNA, 15 bp, Homo sapiens
tgcaatcaagatagt

SEQ ID NO: 20769 - DNA, 15 bp, Homo sapiens
ttgcaatcaagatag

SEQ ID NO: 20770 - DNA, 15 bp, Homo sapiens
gttgcaatcaagata

SEQ ID NO: 20771 - DNA, 15 bp, Homo sapiens
tgttgcaatcaagat

SEQ ID NO: 20772 - DNA, 15 bp, Homo sapiens
ctgttgcaatcaaga

SEQ ID NO: 20773 - DNA, 15 bp, Homo sapiens
actgttgcaatcaag

SEQ ID NO: 20774 - DNA, 15 bp, Homo sapiens
aactgttgcaatcaa

SEQ ID NO: 20775 - DNA, 15 bp, Homo sapiens
aaactgttgcaatca

SEQ ID NO: 20776 - DNA, 15 bp, Homo sapiens
caaactgttgcaatc

SEQ ID NO: 20777 - DNA, 15 bp, Homo sapiens
ccaaactgttgcaat

SEQ ID NO: 20778 - DNA, 15 bp, Homo sapiens
gccaaactgttgcaa

SEQ ID NO: 20779 - DNA, 15 bp, Homo sapiens
agccaaactgttgca

SEQ ID NO: 20780 - DNA, 15 bp, Homo sapiens
aagccaaactgttgc

SEQ ID NO: 20781 - DNA, 15 bp, Homo sapiens
taagccaaactgttg

SEQ ID NO: 20782 - DNA, 15 bp, Homo sapiens
ataagccaaactgtt

SEQ ID NO: 20783 - DNA, 15 bp, Homo sapiens
tataagccaaactgt

SEQ ID NO: 20784 - DNA, 15 bp, Homo sapiens
atataagccaaactg

SEQ ID NO: 20785 - DNA, 15 bp, Homo sapiens
tatataagccaaact

SEQ ID NO: 20786 - DNA, 15 bp, Homo sapiens
atatataagccaaac

SEQ ID NO: 20787 - DNA, 15 bp, Homo sapiens
tatatataagccaaa

SEQ ID NO: 20788 - DNA, 15 bp, Homo sapiens
atatatataagccaa

SEQ ID NO: 20789 - DNA, 15 bp, Homo sapiens
tatatatataagcca

SEQ ID NO: 20790 - DNA, 15 bp, Homo sapiens
ctatatatataagcc

SEQ ID NO: 20791 - DNA, 15 bp, Homo sapiens
gctatatatataagc

SEQ ID NO: 20792 - DNA, 15 bp, Homo sapiens
tgctatatatataag

SEQ ID NO: 20793 - DNA, 15 bp, Homo sapiens
atgctatatatataa

SEQ ID NO: 20794 - DNA, 15 bp, Homo sapiens
aatgctatatatata

SEQ ID NO: 20795 - DNA, 15 bp, Homo sapiens
aaatgctatatatat

SEQ ID NO: 20796 - DNA, 15 bp, Homo sapiens
caaatgctatatata

SEQ ID NO: 20797 - DNA, 15 bp, Homo sapiens
ccaaatgctatatat

SEQ ID NO: 20798 - DNA, 15 bp, Homo sapiens
tccaaatgctatata

SEQ ID NO: 20799 - DNA, 15 bp, Homo sapiens
ttccaaatgctatat

SEQ ID NO: 20800 - DNA, 15 bp, Homo sapiens
attccaaatgctata

SEQ ID NO: 20801 - DNA, 15 bp, Homo sapiens
aattccaaatgctat

SEQ ID NO: 20802 - DNA, 15 bp, Homo sapiens
caattccaaatgcta

SEQ ID NO: 20803 - DNA, 15 bp, Homo sapiens
tcaattccaaatgct

SEQ ID NO: 20804 - DNA, 15 bp, Homo sapiens
gtcaattccaaatgc

SEQ ID NO: 20805 - DNA, 15 bp, Homo sapiens
tgtcaattccaaatg

SEQ ID NO: 20806 - DNA, 15 bp, Homo sapiens
ctgtcaattccaaat

SEQ ID NO: 20807 - DNA, 15 bp, Homo sapiens
actgtcaattccaaa

SEQ ID NO: 20808 - DNA, 15 bp, Homo sapiens
tactgtcaattccaa

SEQ ID NO: 20809 - DNA, 15 bp, Homo sapiens
ttactgtcaattcca

SEQ ID NO: 20810 - DNA, 15 bp, Homo sapiens
cttactgtcaattcc

SEQ ID NO: 20811 - DNA, 15 bp, Homo sapiens
tcttactgtcaattc

SEQ ID NO: 20812 - DNA, 15 bp, Homo sapiens
ttcttactgtcaatt

SEQ ID NO: 20813 - DNA, 15 bp, Homo sapiens
tttcttactgtcaat

SEQ ID NO: 20814 - DNA, 15 bp, Homo sapiens
ctttcttactgtcaa

SEQ ID NO: 20815 - DNA, 15 bp, Homo sapiens
gctttcttactgtca

SEQ ID NO: 20816 - DNA, 15 bp, Homo sapiens
ggctttcttactgtc

SEQ ID NO: 20817 - DNA, 15 bp, Homo sapiens
tggctttcttactgt

SEQ ID NO: 20818 - DNA, 15 bp, Homo sapiens
gtggctttcttactg

SEQ ID NO: 20819 - DNA, 15 bp, Homo sapiens
tgtggctttcttact

SEQ ID NO: 20820 - DNA, 15 bp, Homo sapiens
atgtggctttcttac

SEQ ID NO: 20821 - DNA, 15 bp, Homo sapiens
gatgtggctttctta

SEQ ID NO: 20822 - DNA, 15 bp, Homo sapiens
agatgtggctttctt

SEQ ID NO: 20823 - DNA, 15 bp, Homo sapiens
gagatgtggctttct

SEQ ID NO: 20824 - DNA, 15 bp, Homo sapiens
tgagatgtggctttc

SEQ ID NO: 20825 - DNA, 15 bp, Homo sapiens
atgagatgtggcttt

SEQ ID NO: 20826 - DNA, 15 bp, Homo sapiens
tatgagatgtggctt

SEQ ID NO: 20827 - DNA, 15 bp, Homo sapiens
ctatgagatgtggct

SEQ ID NO: 20828 - DNA, 15 bp, Homo sapiens
tctatgagatgtggc

SEQ ID NO: 20829 - DNA, 15 bp, Homo sapiens
ttctatgagatgtgg

SEQ ID NO: 20830 - DNA, 15 bp, Homo sapiens
cttctatgagatgtg

SEQ ID NO: 20831 - DNA, 15 bp, Homo sapiens
gcttctatgagatgt

SEQ ID NO: 20832 - DNA, 15 bp, Homo sapiens
agcttctatgagatg

SEQ ID NO: 20833 - DNA, 15 bp, Homo sapiens
tagcttctatgagat

SEQ ID NO: 20834 - DNA, 15 bp, Homo sapiens
ttagcttctatgaga

SEQ ID NO: 20835 - DNA, 15 bp, Homo sapiens
gttagcttctatgag

SEQ ID NO: 20836 - DNA, 15 bp, Homo sapiens
agttagcttctatga

SEQ ID NO: 20837 - DNA, 15 bp, Homo sapiens
tagttagcttctatg

SEQ ID NO: 20838 - DNA, 15 bp, Homo sapiens
atagttagcttctat

SEQ ID NO: 20839 - DNA, 15 bp, Homo sapiens
aatagttagcttcta

SEQ ID NO: 20840 - DNA, 15 bp, Homo sapiens
gaatagttagcttct

SEQ ID NO: 20841 - DNA, 15 bp, Homo sapiens
ggaatagttagcttc

SEQ ID NO: 20842 - DNA, 15 bp, Homo sapiens
gggaatagttagctt

SEQ ID NO: 20843 - DNA, 15 bp, Homo sapiens
tgggaatagttagct

SEQ ID NO: 20844 - DNA, 15 bp, Homo sapiens
ttgggaatagttagc

SEQ ID NO: 20845 - DNA, 15 bp, Homo sapiens
tttgggaatagttag

SEQ ID NO: 20846 - DNA, 15 bp, Homo sapiens
atttgggaatagtta

SEQ ID NO: 20847 - DNA, 15 bp, Homo sapiens
aatttgggaatagtt

SEQ ID NO: 20848 - DNA, 15 bp, Homo sapiens
caatttgggaatagt

SEQ ID NO: 20849 - DNA, 15 bp, Homo sapiens
acaatttgggaatag

SEQ ID NO: 20850 - DNA, 15 bp, Homo sapiens
aacaatttgggaata

SEQ ID NO: 20851 - DNA, 15 bp, Homo sapiens
aaacaatttgggaat

SEQ ID NO: 20852 - DNA, 15 bp, Homo sapiens
aaaacaatttgggaa

SEQ ID NO: 20853 - DNA, 15 bp, Homo sapiens
aaaaacaatttggga

SEQ ID NO: 20854 - DNA, 15 bp, Homo sapiens
aaaaaacaatttggg

SEQ ID NO: 20855 - DNA, 15 bp, Homo sapiens
aaaaaaacaatttgg

SEQ ID NO: 20856 - DNA, 15 bp, Homo sapiens
gaaaaaaacaatttg

SEQ ID NO: 20857 - DNA, 15 bp, Homo sapiens
agaaaaaaacaattt

SEQ ID NO: 20858 - DNA, 15 bp, Homo sapiens
aagaaaaaaacaatt

SEQ ID NO: 20859 - DNA, 15 bp, Homo sapiens
gaagaaaaaaacaat

SEQ ID NO: 20860 - DNA, 15 bp, Homo sapiens
agaagaaaaaaacaa

SEQ ID NO: 20861 - DNA, 15 bp, Homo sapiens
aagaagaaaaaaaca

SEQ ID NO: 20862 - DNA, 15 bp, Homo sapiens
aaagaagaaaaaaac

SEQ ID NO: 20863 - DNA, 15 bp, Homo sapiens
aaaagaagaaaaaaa

SEQ ID NO: 20864 - DNA, 15 bp, Homo sapiens
gaaaagaagaaaaaa

SEQ ID NO: 20865 - DNA, 15 bp, Homo sapiens
ggaaaagaagaaaaa

SEQ ID NO: 20866 - DNA, 15 bp, Homo sapiens
aggaaaagaagaaaa

SEQ ID NO: 20867 - DNA, 15 bp, Homo sapiens
gaggaaaagaagaaa

SEQ ID NO: 20868 - DNA, 15 bp, Homo sapiens
agaggaaaagaagaa

SEQ ID NO: 20869 - DNA, 15 bp, Homo sapiens
aagaggaaaagaaga

SEQ ID NO: 20870 - DNA, 15 bp, Homo sapiens
taagaggaaaagaag

SEQ ID NO: 20871 - DNA, 15 bp, Homo sapiens
gtaagaggaaaagaa

SEQ ID NO: 20872 - DNA, 15 bp, Homo sapiens
agtaagaggaaaaga

SEQ ID NO: 20873 - DNA, 15 bp, Homo sapiens
tagtaagaggaaaag

SEQ ID NO: 20874 - DNA, 15 bp, Homo sapiens
gtagtaagaggaaaa

SEQ ID NO: 20875 - DNA, 15 bp, Homo sapiens
agtagtaagaggaaa

SEQ ID NO: 20876 - DNA, 15 bp, Homo sapiens
cagtagtaagaggaa

SEQ ID NO: 20877 - DNA, 15 bp, Homo sapiens
gcagtagtaagagga

SEQ ID NO: 20878 - DNA, 15 bp, Homo sapiens
agcagtagtaagagg

SEQ ID NO: 20879 - DNA, 15 bp, Homo sapiens
cagcagtagtaagag

SEQ ID NO: 20880 - DNA, 15 bp, Homo sapiens
acagcagtagtaaga

SEQ ID NO: 20881 - DNA, 15 bp, Homo sapiens
aacagcagtagtaag

SEQ ID NO: 20882 - DNA, 15 bp, Homo sapiens
aaacagcagtagtaa

SEQ ID NO: 20883 - DNA, 15 bp, Homo sapiens
aaaacagcagtagta

SEQ ID NO: 20884 - DNA, 15 bp, Homo sapiens
gaaaacagcagtagt

SEQ ID NO: 20885 - DNA, 15 bp, Homo sapiens
ggaaaacagcagtag

SEQ ID NO: 20886 - DNA, 15 bp, Homo sapiens
aggaaaacagcagta

SEQ ID NO: 20887 - DNA, 15 bp, Homo sapiens
gaggaaaacagcagt

SEQ ID NO: 20888 - DNA, 15 bp, Homo sapiens
ggaggaaaacagcag

SEQ ID NO: 20889 - DNA, 15 bp, Homo sapiens
aggaggaaaacagca

SEQ ID NO: 20890 - DNA, 15 bp, Homo sapiens
aaggaggaaaacagc

SEQ ID NO: 20891 - DNA, 15 bp, Homo sapiens
aaaggaggaaaacag

SEQ ID NO: 20892 - DNA, 15 bp, Homo sapiens
gaaaggaggaaaaca

SEQ ID NO: 20893 - DNA, 15 bp, Homo sapiens
agaaaggaggaaaac

SEQ ID NO: 20894 - DNA, 15 bp, Homo sapiens
aagaaaggaggaaaa

SEQ ID NO: 20895 - DNA, 15 bp, Homo sapiens
caagaaaggaggaaa

SEQ ID NO: 20896 - DNA, 15 bp, Homo sapiens
gcaagaaaggaggaa

SEQ ID NO: 20897 - DNA, 15 bp, Homo sapiens
agcaagaaaggagga

SEQ ID NO: 20898 - DNA, 15 bp, Homo sapiens
cagcaagaaaggagg

SEQ ID NO: 20899 - DNA, 15 bp, Homo sapiens
gcagcaagaaaggag

SEQ ID NO: 20900 - DNA, 15 bp, Homo sapiens
agcagcaagaaagga

SEQ ID NO: 20901 - DNA, 15 bp, Homo sapiens
tagcagcaagaaagg

SEQ ID NO: 20902 - DNA, 15 bp, Homo sapiens
ttagcagcaagaaag

SEQ ID NO: 20903 - DNA, 15 bp, Homo sapiens
cttagcagcaagaaa

SEQ ID NO: 20904 - DNA, 15 bp, Homo sapiens
gcttagcagcaagaa

SEQ ID NO: 20905 - DNA, 15 bp, Homo sapiens
agcttagcagcaaga

SEQ ID NO: 20906 - DNA, 15 bp, Homo sapiens
gagcttagcagcaag

SEQ ID NO: 20907 - DNA, 15 bp, Homo sapiens
agagcttagcagcaa

SEQ ID NO: 20908 - DNA, 15 bp, Homo sapiens
aagagcttagcagca

SEQ ID NO: 20909 - DNA, 15 bp, Homo sapiens
caagagcttagcagc

SEQ ID NO: 20910 - DNA, 15 bp, Homo sapiens
acaagagcttagcag

SEQ ID NO: 20911 - DNA, 15 bp, Homo sapiens
gacaagagcttagca

SEQ ID NO: 20912 - DNA, 15 bp, Homo sapiens
ggacaagagcttagc

SEQ ID NO: 20913 - DNA, 15 bp, Homo sapiens
aggacaagagcttag

SEQ ID NO: 20914 - DNA, 15 bp, Homo sapiens
caggacaagagctta

SEQ ID NO: 20915 - DNA, 15 bp, Homo sapiens
tcaggacaagagctt

SEQ ID NO: 20916 - DNA, 15 bp, Homo sapiens
gtcaggacaagagct

SEQ ID NO: 20917 - DNA, 15 bp, Homo sapiens
tgtcaggacaagagc

SEQ ID NO: 20918 - DNA, 15 bp, Homo sapiens
atgtcaggacaagag

SEQ ID NO: 20919 - DNA, 15 bp, Homo sapiens
catgtcaggacaaga

SEQ ID NO: 20920 - DNA, 15 bp, Homo sapiens
gcatgtcaggacaag

SEQ ID NO: 20921 - DNA, 15 bp, Homo sapiens
agcatgtcaggacaa

SEQ ID NO: 20922 - DNA, 15 bp, Homo sapiens
cagcatgtcaggaca

SEQ ID NO: 20923 - DNA, 15 bp, Homo sapiens
ccagcatgtcaggac

SEQ ID NO: 20924 - DNA, 15 bp, Homo sapiens
accagcatgtcagga

SEQ ID NO: 20925 - DNA, 15 bp, Homo sapiens
taccagcatgtcagg

SEQ ID NO: 20926 - DNA, 15 bp, Homo sapiens
ttaccagcatgtcag

SEQ ID NO: 20927 - DNA, 15 bp, Homo sapiens
attaccagcatgtca

SEQ ID NO: 20928 - DNA, 15 bp, Homo sapiens
tattaccagcatgtc

SEQ ID NO: 20929 - DNA, 15 bp, Homo sapiens
atattaccagcatgt

SEQ ID NO: 20930 - DNA, 15 bp, Homo sapiens
catattaccagcatg

SEQ ID NO: 20931 - DNA, 15 bp, Homo sapiens
tcatattaccagcat

SEQ ID NO: 20932 - DNA, 15 bp, Homo sapiens
ttcatattaccagca

SEQ ID NO: 20933 - DNA, 15 bp, Homo sapiens
tttcatattaccagc

SEQ ID NO: 20934 - DNA, 15 bp, Homo sapiens
gtttcatattaccag

SEQ ID NO: 20935 - DNA, 15 bp, Homo sapiens
tgtttcatattacca

SEQ ID NO: 20936 - DNA, 15 bp, Homo sapiens
ctgtttcatattacc

SEQ ID NO: 20937 - DNA, 15 bp, Homo sapiens
actgtttcatattac

SEQ ID NO: 20938 - DNA, 15 bp, Homo sapiens
cactgtttcatatta

SEQ ID NO: 20939 - DNA, 15 bp, Homo sapiens
acactgtttcatatt

SEQ ID NO: 20940 - DNA, 15 bp, Homo sapiens
aacactgtttcatat

SEQ ID NO: 20941 - DNA, 15 bp, Homo sapiens
aaacactgtttcata

SEQ ID NO: 20942 - DNA, 15 bp, Homo sapiens
aaaacactgtttcat

SEQ ID NO: 20943 - DNA, 15 bp, Homo sapiens
taaaacactgtttca

SEQ ID NO: 20944 - DNA, 15 bp, Homo sapiens
ataaaacactgtttc

SEQ ID NO: 20945 - DNA, 15 bp, Homo sapiens
aataaaacactgttt

SEQ ID NO: 20946 - DNA, 15 bp, Homo sapiens
gaataaaacactgtt

SEQ ID NO: 20947 - DNA, 15 bp, Homo sapiens
tgaataaaacactgt

SEQ ID NO: 20948 - DNA, 15 bp, Homo sapiens
ctgaataaaacactg

SEQ ID NO: 20949 - DNA, 15 bp, Homo sapiens
tctgaataaaacact

SEQ ID NO: 20950 - DNA, 15 bp, Homo sapiens
atctgaataaaacac

SEQ ID NO: 20951 - DNA, 15 bp, Homo sapiens
tatctgaataaaaca

SEQ ID NO: 20952 - DNA, 15 bp, Homo sapiens
ttatctgaataaaac

SEQ ID NO: 20953 - DNA, 15 bp, Homo sapiens
attatctgaataaaa

SEQ ID NO: 20954 - DNA, 15 bp, Homo sapiens
aattatctgaataaa

SEQ ID NO: 20955 - DNA, 15 bp, Homo sapiens
caattatctgaataa

SEQ ID NO: 20956 - DNA, 15 bp, Homo sapiens
tcaattatctgaata

SEQ ID NO: 20957 - DNA, 15 bp, Homo sapiens
atcaattatctgaat

SEQ ID NO: 20958 - DNA, 15 bp, Homo sapiens
aatcaattatctgaa

SEQ ID NO: 20959 - DNA, 15 bp, Homo sapiens
taatcaattatctga

SEQ ID NO: 20960 - DNA, 15 bp, Homo sapiens
ataatcaattatctg

SEQ ID NO: 20961 - DNA, 15 bp, Homo sapiens
aataatcaattatct

SEQ ID NO: 20962 - DNA, 15 bp, Homo sapiens
gaataatcaattatc

SEQ ID NO: 20963 - DNA, 15 bp, Homo sapiens
agaataatcaattat

SEQ ID NO: 20964 - DNA, 15 bp, Homo sapiens
cagaataatcaatta

SEQ ID NO: 20965 - DNA, 15 bp, Homo sapiens
acagaataatcaatt

SEQ ID NO: 20966 - DNA, 15 bp, Homo sapiens
tacagaataatcaat

SEQ ID NO: 20967 - DNA, 15 bp, Homo sapiens
ttacagaataatcaa

SEQ ID NO: 20968 - DNA, 15 bp, Homo sapiens
attacagaataatca

SEQ ID NO: 20969 - DNA, 15 bp, Homo sapiens
tattacagaataatc

SEQ ID NO: 20970 - DNA, 15 bp, Homo sapiens
atattacagaataat

SEQ ID NO: 20971 - DNA, 15 bp, Homo sapiens
catattacagaataa

SEQ ID NO: 20972 - DNA, 15 bp, Homo sapiens
acatattacagaata

SEQ ID NO: 20973 - DNA, 15 bp, Homo sapiens
tacatattacagaat

SEQ ID NO: 20974 - DNA, 15 bp, Homo sapiens
atacatattacagaa

SEQ ID NO: 20975 - DNA, 15 bp, Homo sapiens
catacatattacaga

SEQ ID NO: 20976 - DNA, 15 bp, Homo sapiens
acatacatattacag

SEQ ID NO: 20977 - DNA, 15 bp, Homo sapiens
aacatacatattaca

SEQ ID NO: 20978 - DNA, 15 bp, Homo sapiens
taacatacatattac

SEQ ID NO: 20979 - DNA, 15 bp, Homo sapiens
ttaacatacatatta

SEQ ID NO: 20980 - DNA, 15 bp, Homo sapiens
attaacatacatatt

SEQ ID NO: 20981 - DNA, 15 bp, Homo sapiens
gattaacatacatat

SEQ ID NO: 20982 - DNA, 15 bp, Homo sapiens
agattaacatacata

SEQ ID NO: 20983 - DNA, 15 bp, Homo sapiens
aagattaacatacat

SEQ ID NO: 20984 - DNA, 15 bp, Homo sapiens
aaagattaacataca

SEQ ID NO: 20985 - DNA, 15 bp, Homo sapiens
aaaagattaacatac

SEQ ID NO: 20986 - DNA, 15 bp, Homo sapiens
aaaaagattaacata

SEQ ID NO: 20987 - DNA, 15 bp, Homo sapiens
aaaaaagattaacat

SEQ ID NO: 20988 - DNA, 15 bp, Homo sapiens
taaaaaagattaaca

SEQ ID NO: 20989 - DNA, 15 bp, Homo sapiens
ataaaaaagattaac

SEQ ID NO: 20990 - DNA, 15 bp, Homo sapiens
aataaaaaagattaa

SEQ ID NO: 20991 - DNA, 15 bp, Homo sapiens
taataaaaaagatta

SEQ ID NO: 20992 - DNA, 15 bp, Homo sapiens
gtaataaaaaagatt

SEQ ID NO: 20993 - DNA, 15 bp, Homo sapiens
tgtaataaaaaagat

SEQ ID NO: 20994 - DNA, 15 bp, Homo sapiens
gtgtaataaaaaaga

SEQ ID NO: 20995 - DNA, 15 bp, Homo sapiens
agtgtaataaaaaag

SEQ ID NO: 20996 - DNA, 15 bp, Homo sapiens
aagtgtaataaaaaa

SEQ ID NO: 20997 - DNA, 15 bp, Homo sapiens
aaagtgtaataaaaa

SEQ ID NO: 20998 - DNA, 15 bp, Homo sapiens
taaagtgtaataaaa

SEQ ID NO: 20999 - DNA, 15 bp, Homo sapiens
ttaaagtgtaataaa

SEQ ID NO: 21000 - DNA, 15 bp, Homo sapiens
cttaaagtgtaataa

SEQ ID NO: 21001 - DNA, 15 bp, Homo sapiens
acttaaagtgtaata

SEQ ID NO: 21002 - DNA, 15 bp, Homo sapiens
tacttaaagtgtaat

SEQ ID NO: 21003 - DNA, 15 bp, Homo sapiens
ttacttaaagtgtaa

SEQ ID NO: 21004 - DNA, 15 bp, Homo sapiens
attacttaaagtgta

SEQ ID NO: 21005 - DNA, 15 bp, Homo sapiens
tattacttaaagtgt

SEQ ID NO: 21006 - DNA, 15 bp, Homo sapiens
ctattacttaaagtg

SEQ ID NO: 21007 - DNA, 15 bp, Homo sapiens
cctattacttaaagt

SEQ ID NO: 21008 - DNA, 15 bp, Homo sapiens
ccctattacttaaag

SEQ ID NO: 21009 - DNA, 15 bp, Homo sapiens
accctattacttaaa

SEQ ID NO: 21010 - DNA, 15 bp, Homo sapiens
taccctattacttaa

SEQ ID NO: 21011 - DNA, 15 bp, Homo sapiens
gtaccctattactta

SEQ ID NO: 21012 - DNA, 15 bp, Homo sapiens
tgtaccctattactt

SEQ ID NO: 21013 - DNA, 15 bp, Homo sapiens
atgtaccctattact

SEQ ID NO: 21014 - DNA, 15 bp, Homo sapiens
tatgtaccctattac

SEQ ID NO: 21015 - DNA, 15 bp, Homo sapiens
atatgtaccctatta

SEQ ID NO: 21016 - DNA, 15 bp, Homo sapiens
catatgtaccctatt

SEQ ID NO: 21017 - DNA, 15 bp, Homo sapiens
gcatatgtaccctat

SEQ ID NO: 21018 - DNA, 15 bp, Homo sapiens
tgcatatgtacccta

SEQ ID NO: 21019 - DNA, 15 bp, Homo sapiens
gtgcatatgtaccct

SEQ ID NO: 21020 - DNA, 15 bp, Homo sapiens
tgtgcatatgtaccc

SEQ ID NO: 21021 - DNA, 15 bp, Homo sapiens
ttgtgcatatgtacc

SEQ ID NO: 21022 - DNA, 15 bp, Homo sapiens
gttgtgcatatgtac

SEQ ID NO: 21023 - DNA, 15 bp, Homo sapiens
agttgtgcatatgta

SEQ ID NO: 21024 - DNA, 15 bp, Homo sapiens
aagttgtgcatatgt

SEQ ID NO: 21025 - DNA, 15 bp, Homo sapiens
taagttgtgcatatg

SEQ ID NO: 21026 - DNA, 15 bp, Homo sapiens
gtaagttgtgcatat

SEQ ID NO: 21027 - DNA, 15 bp, Homo sapiens
tgtaagttgtgcata

SEQ ID NO: 21028 - DNA, 15 bp, Homo sapiens
ctgtaagttgtgcat

SEQ ID NO: 21029 - DNA, 15 bp, Homo sapiens
tctgtaagttgtgca

SEQ ID NO: 21030 - DNA, 15 bp, Homo sapiens
atctgtaagttgtgc

SEQ ID NO: 21031 - DNA, 15 bp, Homo sapiens
aatctgtaagttgtg

SEQ ID NO: 21032 - DNA, 15 bp, Homo sapiens
gaatctgtaagttgt

SEQ ID NO: 21033 - DNA, 15 bp, Homo sapiens
cgaatctgtaagttg

SEQ ID NO: 21034 - DNA, 15 bp, Homo sapiens
acgaatctgtaagtt

SEQ ID NO: 21035 - DNA, 15 bp, Homo sapiens
aacgaatctgtaagt

SEQ ID NO: 21036 - DNA, 15 bp, Homo sapiens
taacgaatctgtaag

SEQ ID NO: 21037 - DNA, 15 bp, Homo sapiens
gtaacgaatctgtaa

SEQ ID NO: 21038 - DNA, 15 bp, Homo sapiens
tgtaacgaatctgta

SEQ ID NO: 21039 - DNA, 15 bp, Homo sapiens
atgtaacgaatctgt

SEQ ID NO: 21040 - DNA, 15 bp, Homo sapiens
tatgtaacgaatctg

SEQ ID NO: 21041 - DNA, 15 bp, Homo sapiens
atatgtaacgaatct

SEQ ID NO: 21042 - DNA, 15 bp, Homo sapiens
catatgtaacgaatc

SEQ ID NO: 21043 - DNA, 15 bp, Homo sapiens
acatatgtaacgaat

SEQ ID NO: 21044 - DNA, 15 bp, Homo sapiens
tacatatgtaacgaa

SEQ ID NO: 21045 - DNA, 15 bp, Homo sapiens
atacatatgtaacga

SEQ ID NO: 21046 - DNA, 15 bp, Homo sapiens
tatacatatgtaacg

SEQ ID NO: 21047 - DNA, 15 bp, Homo sapiens
cggcacatgtataca

SEQ ID NO: 21048 - DNA, 15 bp, Homo sapiens
acggcacatgtatac

SEQ ID NO: 21049 - DNA, 15 bp, Homo sapiens
cacggcacatgtata

SEQ ID NO: 21050 - DNA, 15 bp, Homo sapiens
acacggcacatgtat

SEQ ID NO: 21051 - DNA, 15 bp, Homo sapiens
aacacggcacatgta

SEQ ID NO: 21052 - DNA, 15 bp, Homo sapiens
caacacggcacatgt

SEQ ID NO: 21053 - DNA, 15 bp, Homo sapiens
ccaacacggcacatg

SEQ ID NO: 21054 - DNA, 15 bp, Homo sapiens
accaacacggcacat

SEQ ID NO: 21055 - DNA, 15 bp, Homo sapiens
aaccaacacggcaca

SEQ ID NO: 21056 - DNA, 15 bp, Homo sapiens
aaaccaacacggcac

SEQ ID NO: 21057 - DNA, 15 bp, Homo sapiens
caaaccaacacggca

SEQ ID NO: 21058 - DNA, 15 bp, Homo sapiens
gcaaaccaacacggc

SEQ ID NO: 21059 - DNA, 15 bp, Homo sapiens
agcaaaccaacacgg

SEQ ID NO: 21060 - DNA, 15 bp, Homo sapiens
cagcaaaccaacacg

SEQ ID NO: 21061 - DNA, 15 bp, Homo sapiens
gcagcaaaccaacac

SEQ ID NO: 21062 - DNA, 15 bp, Homo sapiens
tgcagcaaaccaaca

SEQ ID NO: 21063 - DNA, 15 bp, Homo sapiens
gtgcagcaaaccaac

SEQ ID NO: 21064 - DNA, 15 bp, Homo sapiens
ggtgcagcaaaccaa

SEQ ID NO: 21065 - DNA, 15 bp, Homo sapiens
gggtgcagcaaacca

SEQ ID NO: 21066 - DNA, 15 bp, Homo sapiens
tgggtgcagcaaacc

SEQ ID NO: 21067 - DNA, 15 bp, Homo sapiens
atgggtgcagcaaac

SEQ ID NO: 21068 - DNA, 15 bp, Homo sapiens
aatgggtgcagcaaa

SEQ ID NO: 21069 - DNA, 15 bp, Homo sapiens
taatgggtgcagcaa

SEQ ID NO: 21070 - DNA, 15 bp, Homo sapiens
cgagttaatgggtgc

SEQ ID NO: 21071 - DNA, 15 bp, Homo sapiens
acgagttaatgggtg

SEQ ID NO: 21072 - DNA, 15 bp, Homo sapiens
gacgagttaatgggt

SEQ ID NO: 21073 - DNA, 15 bp, Homo sapiens
tgacgagttaatggg

SEQ ID NO: 21074 - DNA, 15 bp, Homo sapiens
atgacgagttaatgg

SEQ ID NO: 21075 - DNA, 15 bp, Homo sapiens
aatgacgagttaatg

SEQ ID NO: 21076 - DNA, 15 bp, Homo sapiens
aaatgacgagttaat

SEQ ID NO: 21077 - DNA, 15 bp, Homo sapiens
taaatgacgagttaa

SEQ ID NO: 21078 - DNA, 15 bp, Homo sapiens
gtaaatgacgagtta

SEQ ID NO: 21079 - DNA, 15 bp, Homo sapiens
tgtaaatgacgagtt

SEQ ID NO: 21080 - DNA, 15 bp, Homo sapiens
atgtaaatgacgagt

SEQ ID NO: 21081 - DNA, 15 bp, Homo sapiens
aatgtaaatgacgag

SEQ ID NO: 21082 - DNA, 15 bp, Homo sapiens
taatgtaaatgacga

SEQ ID NO: 21083 - DNA, 15 bp, Homo sapiens
ctaatgtaaatgacg

SEQ ID NO: 21084 - DNA, 15 bp, Homo sapiens
cctaatgtaaatgac

SEQ ID NO: 21085 - DNA, 15 bp, Homo sapiens
acctaatgtaaatga

SEQ ID NO: 21086 - DNA, 15 bp, Homo sapiens
tacctaatgtaaatg

SEQ ID NO: 21087 - DNA, 15 bp, Homo sapiens
atacctaatgtaaat

SEQ ID NO: 21088 - DNA, 15 bp, Homo sapiens
aatacctaatgtaaa

SEQ ID NO: 21089 - DNA, 15 bp, Homo sapiens
aaatacctaatgtaa

SEQ ID NO: 21090 - DNA, 15 bp, Homo sapiens
gaaatacctaatgta

SEQ ID NO: 21091 - DNA, 15 bp, Homo sapiens
agaaatacctaatgt

SEQ ID NO: 21092 - DNA, 15 bp, Homo sapiens
gagaaatacctaatg

SEQ ID NO: 21093 - DNA, 15 bp, Homo sapiens
acattaggagaaata

SEQ ID NO: 21094 - DNA, 15 bp, Homo sapiens
aacattaggagaaat

SEQ ID NO: 21095 - DNA, 15 bp, Homo sapiens
taacattaggagaaa

SEQ ID NO: 21096 - DNA, 15 bp, Homo sapiens
ataacattaggagaa

SEQ ID NO: 21097 - DNA, 15 bp, Homo sapiens
gataacattaggaga

SEQ ID NO: 21098 - DNA, 15 bp, Homo sapiens
ggataacattaggag

SEQ ID NO: 21099 - DNA, 15 bp, Homo sapiens
gggataacattagga

SEQ ID NO: 21100 - DNA, 15 bp, Homo sapiens
agggataacattagg

SEQ ID NO: 21101 - DNA, 15 bp, Homo sapiens
gagggataacattag

SEQ ID NO: 21102 - DNA, 15 bp, Homo sapiens
agagggataacatta

SEQ ID NO: 21103 - DNA, 15 bp, Homo sapiens
gagagggataacatt

SEQ ID NO: 21104 - DNA, 15 bp, Homo sapiens
ggagagggataacat

SEQ ID NO: 21105 - DNA, 15 bp, Homo sapiens
gggagagggataaca

SEQ ID NO: 21106 - DNA, 15 bp, Homo sapiens
tgggagagggataac

SEQ ID NO: 21107 - DNA, 15 bp, Homo sapiens
ttgggagagggataa

SEQ ID NO: 21108 - DNA, 15 bp, Homo sapiens
gttgggagagggata

SEQ ID NO: 21109 - DNA, 15 bp, Homo sapiens
ggttgggagagggat

SEQ ID NO: 21110 - DNA, 15 bp, Homo sapiens
gggttgggagaggga

SEQ ID NO: 21111 - DNA, 15 bp, Homo sapiens
ggggttgggagaggg

SEQ ID NO: 21112 - DNA, 15 bp, Homo sapiens
gggggttgggagagg

SEQ ID NO: 21113 - DNA, 15 bp, Homo sapiens
ggggggttgggagag

SEQ ID NO: 21114 - DNA, 15 bp, Homo sapiens
tggggggttgggaga

SEQ ID NO: 21115 - DNA, 15 bp, Homo sapiens
gtggggggttgggag

SEQ ID NO: 21116 - DNA, 15 bp, Homo sapiens
ggtggggggttggga

SEQ ID NO: 21117 - DNA, 15 bp, Homo sapiens
gggtggggggttggg

SEQ ID NO: 21118 - DNA, 15 bp, Homo sapiens
ggggtggggggttgg

SEQ ID NO: 21119 - DNA, 15 bp, Homo sapiens
tggggtggggggttg

SEQ ID NO: 21120 - DNA, 15 bp, Homo sapiens
ctggggtggggggtt

SEQ ID NO: 21121 - DNA, 15 bp, Homo sapiens
cctggggtggggggt

SEQ ID NO: 21122 - DNA, 15 bp, Homo sapiens
tcctggggtgggggg

SEQ ID NO: 21123 - DNA, 15 bp, Homo sapiens
gtcctggggtggggg

SEQ ID NO: 21124 - DNA, 15 bp, Homo sapiens
tgtcctggggtgggg

SEQ ID NO: 21125 - DNA, 15 bp, Homo sapiens
ctgtcctggggtggg

SEQ ID NO: 21126 - DNA, 15 bp, Homo sapiens
cctgtcctggggtgg

SEQ ID NO: 21127 - DNA, 15 bp, Homo sapiens
gcctgtcctggggtg

SEQ ID NO: 21128 - DNA, 15 bp, Homo sapiens
ggcctgtcctggggt

SEQ ID NO: 21129 - DNA, 15 bp, Homo sapiens
gggcctgtcctgggg

SEQ ID NO: 21130 - DNA, 15 bp, Homo sapiens
ggggcctgtcctggg

SEQ ID NO: 21131 - DNA, 15 bp, Homo sapiens
cggggcctgtcctgg

SEQ ID NO: 21132 - DNA, 15 bp, Homo sapiens
ccggggcctgtcctg

SEQ ID NO: 21133 - DNA, 15 bp, Homo sapiens
accggggcctgtcct

SEQ ID NO: 21134 - DNA, 15 bp, Homo sapiens
caccggggcctgtcc

SEQ ID NO: 21135 - DNA, 15 bp, Homo sapiens
acaccggggcctgtc

SEQ ID NO: 21136 - DNA, 15 bp, Homo sapiens
cacaccggggcctgt

SEQ ID NO: 21137 - DNA, 15 bp, Homo sapiens
acacaccggggcctg

SEQ ID NO: 21138 - DNA, 15 bp, Homo sapiens
cacacaccggggcct

SEQ ID NO: 21139 - DNA, 15 bp, Homo sapiens
tcacacaccggggcc

SEQ ID NO: 21140 - DNA, 15 bp, Homo sapiens
atcacacaccggggc

SEQ ID NO: 21141 - DNA, 15 bp, Homo sapiens
catcacacaccgggg

SEQ ID NO: 21142 - DNA, 15 bp, Homo sapiens
acatcacacaccggg

SEQ ID NO: 21143 - DNA, 15 bp, Homo sapiens
aacatcacacaccgg

SEQ ID NO: 21144 - DNA, 15 bp, Homo sapiens
gaacatcacacaccg

SEQ ID NO: 21145 - DNA, 15 bp, Homo sapiens
cggggaacatcacac

SEQ ID NO: 21146 - DNA, 15 bp, Homo sapiens
gcggggaacatcaca

SEQ ID NO: 21147 - DNA, 15 bp, Homo sapiens
ggcggggaacatcac

SEQ ID NO: 21148 - DNA, 15 bp, Homo sapiens
gggcggggaacatca

SEQ ID NO: 21149 - DNA, 15 bp, Homo sapiens
agggcggggaacatc

SEQ ID NO: 21150 - DNA, 15 bp, Homo sapiens
cagggcggggaacat

SEQ ID NO: 21151 - DNA, 15 bp, Homo sapiens
acagggcggggaaca

SEQ ID NO: 21152 - DNA, 15 bp, Homo sapiens
cacagggcggggaac

SEQ ID NO: 21153 - DNA, 15 bp, Homo sapiens
acacagggcggggaa

SEQ ID NO: 21154 - DNA, 15 bp, Homo sapiens
gacacagggcgggga

SEQ ID NO: 21155 - DNA, 15 bp, Homo sapiens
ggacacagggcgggg

SEQ ID NO: 21156 - DNA, 15 bp, Homo sapiens
tggacacagggcggg

SEQ ID NO: 21157 - DNA, 15 bp, Homo sapiens
ttggacacagggcgg

SEQ ID NO: 21158 - DNA, 15 bp, Homo sapiens
cttggacacagggcg

SEQ ID NO: 21159 - DNA, 15 bp, Homo sapiens
acttggacacagggc

SEQ ID NO: 21160 - DNA, 15 bp, Homo sapiens
cgagaacacttggac

SEQ ID NO: 21161 - DNA, 15 bp, Homo sapiens
acgagaacacttgga

SEQ ID NO: 21162 - DNA, 15 bp, Homo sapiens
aacgagaacacttgg

SEQ ID NO: 21163 - DNA, 15 bp, Homo sapiens
caacgagaacacttg

SEQ ID NO: 21164 - DNA, 15 bp, Homo sapiens
acaacgagaacactt

SEQ ID NO: 21165 - DNA, 15 bp, Homo sapiens
aacaacgagaacact

SEQ ID NO: 21166 - DNA, 15 bp, Homo sapiens
gaacaacgagaacac

SEQ ID NO: 21167 - DNA, 15 bp, Homo sapiens
tgaacaacgagaaca

SEQ ID NO: 21168 - DNA, 15 bp, Homo sapiens
ctgaacaacgagaac

SEQ ID NO: 21169 - DNA, 15 bp, Homo sapiens
actgaacaacgagaa

SEQ ID NO: 21170 - DNA, 15 bp, Homo sapiens
aactgaacaacgaga

SEQ ID NO: 21171 - DNA, 15 bp, Homo sapiens
caactgaacaacgag

SEQ ID NO: 21172 - DNA, 15 bp, Homo sapiens
gcaactgaacaacga

SEQ ID NO: 21173 - DNA, 15 bp, Homo sapiens
ggcaactgaacaacg

SEQ ID NO: 21174 - DNA, 15 bp, Homo sapiens
tggcaactgaacaac

SEQ ID NO: 21175 - DNA, 15 bp, Homo sapiens
gtggcaactgaacaa

SEQ ID NO: 21176 - DNA, 15 bp, Homo sapiens
ggtggcaactgaaca

SEQ ID NO: 21177 - DNA, 15 bp, Homo sapiens
aggtggcaactgaac

SEQ ID NO: 21178 - DNA, 15 bp, Homo sapiens
caggtggcaactgaa

SEQ ID NO: 21179 - DNA, 15 bp, Homo sapiens
acaggtggcaactga

SEQ ID NO: 21180 - DNA, 15 bp, Homo sapiens
cacaggtggcaactg

SEQ ID NO: 21181 - DNA, 15 bp, Homo sapiens
tcacaggtggcaact

SEQ ID NO: 21182 - DNA, 15 bp, Homo sapiens
ctcacaggtggcaac

SEQ ID NO: 21183 - DNA, 15 bp, Homo sapiens
actcacaggtggcaa

SEQ ID NO: 21184 - DNA, 15 bp, Homo sapiens
cactcacaggtggca

SEQ ID NO: 21185 - DNA, 15 bp, Homo sapiens
tcactcacaggtggc

SEQ ID NO: 21186 - DNA, 15 bp, Homo sapiens
ctcactcacaggtgg

SEQ ID NO: 21187 - DNA, 15 bp, Homo sapiens
tctcactcacaggtg

SEQ ID NO: 21188 - DNA, 15 bp, Homo sapiens
ttctcactcacaggt

SEQ ID NO: 21189 - DNA, 15 bp, Homo sapiens
gttctcactcacagg

SEQ ID NO: 21190 - DNA, 15 bp, Homo sapiens
tgttctcactcacag

SEQ ID NO: 21191 - DNA, 15 bp, Homo sapiens
atgttctcactcaca

SEQ ID NO: 21192 - DNA, 15 bp, Homo sapiens
catgttctcactcac

SEQ ID NO: 21193 - DNA, 15 bp, Homo sapiens
gcatgttctcactca

SEQ ID NO: 21194 - DNA, 15 bp, Homo sapiens
cgcatgttctcactc

SEQ ID NO: 21195 - DNA, 15 bp, Homo sapiens
ccgcatgttctcact

SEQ ID NO: 21196 - DNA, 15 bp, Homo sapiens
accgcatgttctcac

SEQ ID NO: 21197 - DNA, 15 bp, Homo sapiens
caccgcatgttctca

SEQ ID NO: 21198 - DNA, 15 bp, Homo sapiens
acaccgcatgttctc

SEQ ID NO: 21199 - DNA, 15 bp, Homo sapiens
aacaccgcatgttct

SEQ ID NO: 21200 - DNA, 15 bp, Homo sapiens
aaacaccgcatgttc

SEQ ID NO: 21201 - DNA, 15 bp, Homo sapiens
caaacaccgcatgtt

SEQ ID NO: 21202 - DNA, 15 bp, Homo sapiens
ccaaacaccgcatgt

SEQ ID NO: 21203 - DNA, 15 bp, Homo sapiens
accaaacaccgcatg

SEQ ID NO: 21204 - DNA, 15 bp, Homo sapiens
aaccaaacaccgcat

SEQ ID NO: 21205 - DNA, 15 bp, Homo sapiens
aaaccaaacaccgca

SEQ ID NO: 21206 - DNA, 15 bp, Homo sapiens
ggaaaccatcattct

SEQ ID NO: 21207 - DNA, 15 bp, Homo sapiens
tggaaaccatcattc

SEQ ID NO: 21208 - DNA, 15 bp, Homo sapiens
ctggaaaccatcatt

SEQ ID NO: 21209 - DNA, 15 bp, Homo sapiens
gctggaaaccatcat

SEQ ID NO: 21210 - DNA, 15 bp, Homo sapiens
agctggaaaccatca

SEQ ID NO: 21211 - DNA, 15 bp, Homo sapiens
aagctggaaaccatc

SEQ ID NO: 21212 - DNA, 15 bp, Homo sapiens
gaagctggaaaccat

SEQ ID NO: 21213 - DNA, 15 bp, Homo sapiens
tgaagctggaaacca

SEQ ID NO: 21214 - DNA, 15 bp, Homo sapiens
atgaagctggaaacc

SEQ ID NO: 21215 - DNA, 15 bp, Homo sapiens
gatgaagctggaaac

SEQ ID NO: 21216 - DNA, 15 bp, Homo sapiens
agatgaagctggaaa

SEQ ID NO: 21217 - DNA, 15 bp, Homo sapiens
tagatgaagctggaa

SEQ ID NO: 21218 - DNA, 15 bp, Homo sapiens
atagatgaagctgga

SEQ ID NO: 21219 - DNA, 15 bp, Homo sapiens
catagatgaagctgg

SEQ ID NO: 21220 - DNA, 15 bp, Homo sapiens
acatagatgaagctg

SEQ ID NO: 21221 - DNA, 15 bp, Homo sapiens
gacatagatgaagct

SEQ ID NO: 21222 - DNA, 15 bp, Homo sapiens
ggacatagatgaagc

SEQ ID NO: 21223 - DNA, 15 bp, Homo sapiens
gggacatagatgaag

SEQ ID NO: 21224 - DNA, 15 bp, Homo sapiens
agggacatagatgaa

SEQ ID NO: 21225 - DNA, 15 bp, Homo sapiens
tagggacatagatga

SEQ ID NO: 21226 - DNA, 15 bp, Homo sapiens
gtagggacatagatg

SEQ ID NO: 21227 - DNA, 15 bp, Homo sapiens
tgtagggacatagat

SEQ ID NO: 21228 - DNA, 15 bp, Homo sapiens
ttgtagggacataga

SEQ ID NO: 21229 - DNA, 15 bp, Homo sapiens
tttgtagggacatag

SEQ ID NO: 21230 - DNA, 15 bp, Homo sapiens
ctttgtagggacata

SEQ ID NO: 21231 - DNA, 15 bp, Homo sapiens
cgtcctttgtaggga

SEQ ID NO: 21232 - DNA, 15 bp, Homo sapiens
acgtcctttgtaggg

SEQ ID NO: 21233 - DNA, 15 bp, Homo sapiens
cacgtcctttgtagg

SEQ ID NO: 21234 - DNA, 15 bp, Homo sapiens
tcacgtcctttgtag

SEQ ID NO: 21235 - DNA, 15 bp, Homo sapiens
ttcacgtcctttgta

SEQ ID NO: 21236 - DNA, 15 bp, Homo sapiens
cttcacgtcctttgt

SEQ ID NO: 21237 - DNA, 15 bp, Homo sapiens
gcttcacgtcctttg

SEQ ID NO: 21238 - DNA, 15 bp, Homo sapiens
agcttcacgtccttt

SEQ ID NO: 21239 - DNA, 15 bp, Homo sapiens
gagcttcacgtcctt

SEQ ID NO: 21240 - DNA, 15 bp, Homo sapiens
tgagcttcacgtcct

SEQ ID NO: 21241 - DNA, 15 bp, Homo sapiens
atgagcttcacgtcc

SEQ ID NO: 21242 - DNA, 15 bp, Homo sapiens
gatgagcttcacgtc

SEQ ID NO: 21243 - DNA, 15 bp, Homo sapiens
ggatgagcttcacgt

SEQ ID NO: 21244 - DNA, 15 bp, Homo sapiens
aggatgagcttcacg

SEQ ID NO: 21245 - DNA, 15 bp, Homo sapiens
aaggatgagcttcac

SEQ ID NO: 21246 - DNA, 15 bp, Homo sapiens
gtatgcagccataaa

SEQ ID NO: 21247 - DNA, 15 bp, Homo sapiens
agtatgcagccataa

SEQ ID NO: 21248 - DNA, 15 bp, Homo sapiens
tagtatgcagccata

SEQ ID NO: 21249 - DNA, 15 bp, Homo sapiens
gtagtatgcagccat

SEQ ID NO: 21250 - DNA, 15 bp, Homo sapiens
agtagtatgcagcca

SEQ ID NO: 21251 - DNA, 15 bp, Homo sapiens
gagtagtatgcagcc

SEQ ID NO: 21252 - DNA, 15 bp, Homo sapiens
ggagtagtatgcagc

SEQ ID NO: 21253 - DNA, 15 bp, Homo sapiens
cggagtagtatgcag

SEQ ID NO: 21254 - DNA, 15 bp, Homo sapiens
acggagtagtatgca

SEQ ID NO: 21255 - DNA, 15 bp, Homo sapiens
cacggagtagtatgc

SEQ ID NO: 21256 - DNA, 15 bp, Homo sapiens
ccacggagtagtatg

SEQ ID NO: 21257 - DNA, 15 bp, Homo sapiens
accacggagtagtat

SEQ ID NO: 21258 - DNA, 15 bp, Homo sapiens
caccacggagtagta

SEQ ID NO: 21259 - DNA, 15 bp, Homo sapiens
acaccacggagtagt

SEQ ID NO: 21260 - DNA, 15 bp, Homo sapiens
tacaccacggagtag

SEQ ID NO: 21261 - DNA, 15 bp, Homo sapiens
atacaccacggagta

SEQ ID NO: 21262 - DNA, 15 bp, Homo sapiens
tatacaccacggagt

SEQ ID NO: 21263 - DNA, 15 bp, Homo sapiens
atatacaccacggag

SEQ ID NO: 21264 - DNA, 15 bp, Homo sapiens
catatacaccacgga

SEQ ID NO: 21265 - DNA, 15 bp, Homo sapiens
acatatacaccacgg

SEQ ID NO: 21266 - DNA, 15 bp, Homo sapiens
cacatatacaccacg

SEQ ID NO: 21267 - DNA, 15 bp, Homo sapiens
gcacatatacaccac

SEQ ID NO: 21268 - DNA, 15 bp, Homo sapiens
ggcacatatacacca

SEQ ID NO: 21269 - DNA, 15 bp, Homo sapiens
tggcacatatacacc

SEQ ID NO: 21270 - DNA, 15 bp, Homo sapiens
gtggcacatatacac

SEQ ID NO: 21271 - DNA, 15 bp, Homo sapiens
tgtggcacatataca

SEQ ID NO: 21272 - DNA, 15 bp, Homo sapiens
atgtggcacatatac

SEQ ID NO: 21273 - DNA, 15 bp, Homo sapiens
aatgtggcacatata

SEQ ID NO: 21274 - DNA, 15 bp, Homo sapiens
aaatgtggcacatat

SEQ ID NO: 21275 - DNA, 15 bp, Homo sapiens
aaaatgtggcacata

SEQ ID NO: 21276 - DNA, 15 bp, Homo sapiens
gaaaatgtggcacat

SEQ ID NO: 21277 - DNA, 15 bp, Homo sapiens
agaaaatgtggcaca

SEQ ID NO: 21278 - DNA, 15 bp, Homo sapiens
aagaaaatgtggcac

SEQ ID NO: 21279 - DNA, 15 bp, Homo sapiens
taagaaaatgtggca

SEQ ID NO: 21280 - DNA, 15 bp, Homo sapiens
ttaagaaaatgtggc

SEQ ID NO: 21281 - DNA, 15 bp, Homo sapiens
attaagaaaatgtgg

SEQ ID NO: 21282 - DNA, 15 bp, Homo sapiens
tgactggattaagaa

SEQ ID NO: 21283 - DNA, 15 bp, Homo sapiens
ctgactggattaaga

SEQ ID NO: 21284 - DNA, 15 bp, Homo sapiens
actgactggattaag

SEQ ID NO: 21285 - DNA, 15 bp, Homo sapiens
gactgactggattaa

SEQ ID NO: 21286 - DNA, 15 bp, Homo sapiens
tgactgactggatta

SEQ ID NO: 21287 - DNA, 15 bp, Homo sapiens
atgactgactggatt

SEQ ID NO: 21288 - DNA, 15 bp, Homo sapiens
aatgactgactggat

SEQ ID NO: 21289 - DNA, 15 bp, Homo sapiens
caatgactgactgga

SEQ ID NO: 21290 - DNA, 15 bp, Homo sapiens
tcaatgactgactgg

SEQ ID NO: 21291 - DNA, 15 bp, Homo sapiens
atcaatgactgactg

SEQ ID NO: 21292 - DNA, 15 bp, Homo sapiens
catcaatgactgact

SEQ ID NO: 21293 - DNA, 15 bp, Homo sapiens
ccatcaatgactgac

SEQ ID NO: 21294 - DNA, 15 bp, Homo sapiens
tccatcaatgactga

SEQ ID NO: 21295 - DNA, 15 bp, Homo sapiens
gtccatcaatgactg

SEQ ID NO: 21296 - DNA, 15 bp, Homo sapiens
tgtccatcaatgact

SEQ ID NO: 21297 - DNA, 15 bp, Homo sapiens
atgtccatcaatgac

SEQ ID NO: 21298 - DNA, 15 bp, Homo sapiens
agaaccaacccaaat

SEQ ID NO: 21299 - DNA, 15 bp, Homo sapiens
tagaaccaacccaaa

SEQ ID NO: 21300 - DNA, 15 bp, Homo sapiens
ttagaaccaacccaa

SEQ ID NO: 21301 - DNA, 15 bp, Homo sapiens
attagaaccaaccca

SEQ ID NO: 21302 - DNA, 15 bp, Homo sapiens
aattagaaccaaccc

SEQ ID NO: 21303 - DNA, 15 bp, Homo sapiens
gaattagaaccaacc

SEQ ID NO: 21304 - DNA, 15 bp, Homo sapiens
agaattagaaccaac

SEQ ID NO: 21305 - DNA, 15 bp, Homo sapiens
aagaattagaaccaa

SEQ ID NO: 21306 - DNA, 15 bp, Homo sapiens
aaagaattagaacca

SEQ ID NO: 21307 - DNA, 15 bp, Homo sapiens
caaagaattagaacc

SEQ ID NO: 21308 - DNA, 15 bp, Homo sapiens
gcaaagaattagaac

SEQ ID NO: 21309 - DNA, 15 bp, Homo sapiens
agcaaagaattagaa

SEQ ID NO: 21310 - DNA, 15 bp, Homo sapiens
tagcaaagaattaga

SEQ ID NO: 21311 - DNA, 15 bp, Homo sapiens
atagcaaagaattag

SEQ ID NO: 21312 - DNA, 15 bp, Homo sapiens
aatagcaaagaatta

SEQ ID NO: 21313 - DNA, 15 bp, Homo sapiens
caatagcaaagaatt

SEQ ID NO: 21314 - DNA, 15 bp, Homo sapiens
acaatagcaaagaat

SEQ ID NO: 21315 - DNA, 15 bp, Homo sapiens
cacaatagcaaagaa

SEQ ID NO: 21316 - DNA, 15 bp, Homo sapiens
tgtgtggtgatgtgg

SEQ ID NO: 21317 - DNA, 15 bp, Homo sapiens
gtgtgtggtgatgtg

SEQ ID NO: 21318 - DNA, 15 bp, Homo sapiens
tgtgtgtggtgatgt

SEQ ID NO: 21319 - DNA, 15 bp, Homo sapiens
atgtgtgtggtgatg

SEQ ID NO: 21320 - DNA, 15 bp, Homo sapiens
tatgtgtgtggtgat

SEQ ID NO: 21321 - DNA, 15 bp, Homo sapiens
atatgtgtgtggtga

SEQ ID NO: 21322 - DNA, 15 bp, Homo sapiens
aatatgtgtgtggtg

SEQ ID NO: 21323 - DNA, 15 bp, Homo sapiens
aaatatgtgtgtggt

SEQ ID NO: 21324 - DNA, 15 bp, Homo sapiens
aaaatatgtgtgtgg

SEQ ID NO: 21325 - DNA, 15 bp, Homo sapiens
gaaaatatgtgtgtg

SEQ ID NO: 21326 - DNA, 15 bp, Homo sapiens
tgaaaatatgtgtgt

SEQ ID NO: 21327 - DNA, 15 bp, Homo sapiens
ctgaaaatatgtgtg

SEQ ID NO: 21328 - DNA, 15 bp, Homo sapiens
tctgaaaatatgtgt

SEQ ID NO: 21329 - DNA, 15 bp, Homo sapiens
gtctgaaaatatgtg

SEQ ID NO: 21330 - DNA, 15 bp, Homo sapiens
agtctgaaaatatgt

SEQ ID NO: 21331 - DNA, 15 bp, Homo sapiens
aagtctgaaaatatg

SEQ ID NO: 21332 - DNA, 15 bp, Homo sapiens
gaagtctgaaaatat

SEQ ID NO: 21333 - DNA, 15 bp, Homo sapiens
ggaagtctgaaaata

SEQ ID NO: 21334 - DNA, 15 bp, Homo sapiens
aggaagtctgaaaat

SEQ ID NO: 21335 - DNA, 15 bp, Homo sapiens
gaggaagtctgaaaa

SEQ ID NO: 21336 - DNA, 15 bp, Homo sapiens
ggaggaagtctgaaa

SEQ ID NO: 21337 - DNA, 15 bp, Homo sapiens
aggaggaagtctgaa

SEQ ID NO: 21338 - DNA, 15 bp, Homo sapiens
gaggaggaagtctga

SEQ ID NO: 21339 - DNA, 15 bp, Homo sapiens
tgaggaggaagtctg

SEQ ID NO: 21340 - DNA, 15 bp, Homo sapiens
atgaggaggaagtct

SEQ ID NO: 21341 - DNA, 15 bp, Homo sapiens
gatgaggaggaagtc

SEQ ID NO: 21342 - DNA, 15 bp, Homo sapiens
ggatgaggaggaagt

SEQ ID NO: 21343 - DNA, 15 bp, Homo sapiens
aggatgaggaggaag

SEQ ID NO: 21344 - DNA, 15 bp, Homo sapiens
aaggatgaggaggaa

SEQ ID NO: 21345 - DNA, 15 bp, Homo sapiens
gaaggatgaggagga

SEQ ID NO: 21346 - DNA, 15 bp, Homo sapiens
agaaggatgaggagg

SEQ ID NO: 21347 - DNA, 15 bp, Homo sapiens
aagaaggatgaggag

SEQ ID NO: 21348 - DNA, 15 bp, Homo sapiens
gaagaaggatgagga

SEQ ID NO: 21349 - DNA, 15 bp, Homo sapiens
agaagaaggatgagg

SEQ ID NO: 21350 - DNA, 15 bp, Homo sapiens
aagaagaaggatgag

SEQ ID NO: 21351 - DNA, 15 bp, Homo sapiens
caagaagaaggatga

SEQ ID NO: 21352 - DNA, 15 bp, Homo sapiens
gcaagaagaaggatg

SEQ ID NO: 21353 - DNA, 15 bp, Homo sapiens
ggcaagaagaaggat

SEQ ID NO: 21354 - DNA, 15 bp, Homo sapiens
tggcaagaagaagga

SEQ ID NO: 21355 - DNA, 15 bp, Homo sapiens
ctggcaagaagaagg

SEQ ID NO: 21356 - DNA, 15 bp, Homo sapiens
actggcaagaagaag

SEQ ID NO: 21357 - DNA, 15 bp, Homo sapiens
tactggcaagaagaa

SEQ ID NO: 21358 - DNA, 15 bp, Homo sapiens
ctactggcaagaaga

SEQ ID NO: 21359 - DNA, 15 bp, Homo sapiens
actactggcaagaag

SEQ ID NO: 21360 - DNA, 15 bp, Homo sapiens
aactactggcaagaa

SEQ ID NO: 21361 - DNA, 15 bp, Homo sapiens
caactactggcaaga

SEQ ID NO: 21362 - DNA, 15 bp, Homo sapiens
acaactactggcaag

SEQ ID NO: 21363 - DNA, 15 bp, Homo sapiens
tacaactactggcaa

SEQ ID NO: 21364 - DNA, 15 bp, Homo sapiens
atacaactactggca

SEQ ID NO: 21365 - DNA, 15 bp, Homo sapiens
aatacaactactggc

SEQ ID NO: 21366 - DNA, 15 bp, Homo sapiens
taatacaactactgg

SEQ ID NO: 21367 - DNA, 15 bp, Homo sapiens
ataatacaactactg

SEQ ID NO: 21368 - DNA, 15 bp, Homo sapiens
tataatacaactact

SEQ ID NO: 21369 - DNA, 15 bp, Homo sapiens
ttataatacaactac

SEQ ID NO: 21370 - DNA, 15 bp, Homo sapiens
attataatacaacta

SEQ ID NO: 21371 - DNA, 15 bp, Homo sapiens
aattataatacaact

SEQ ID NO: 21372 - DNA, 15 bp, Homo sapiens
gaattataatacaac

SEQ ID NO: 21373 - DNA, 15 bp, Homo sapiens
ggaattataatacaa

SEQ ID NO: 21374 - DNA, 15 bp, Homo sapiens
aggaattataataca

SEQ ID NO: 21375 - DNA, 15 bp, Homo sapiens
caggaattataatac

SEQ ID NO: 21376 - DNA, 15 bp, Homo sapiens
gcaggaattataata

SEQ ID NO: 21377 - DNA, 15 bp, Homo sapiens
ggcaggaattataat

SEQ ID NO: 21378 - DNA, 15 bp, Homo sapiens
tggcaggaattataa

SEQ ID NO: 21379 - DNA, 15 bp, Homo sapiens
ctggcaggaattata

SEQ ID NO: 21380 - DNA, 15 bp, Homo sapiens
actggcaggaattat

SEQ ID NO: 21381 - DNA, 15 bp, Homo sapiens
tactggcaggaatta

SEQ ID NO: 21382 - DNA, 15 bp, Homo sapiens
ctactggcaggaatt

SEQ ID NO: 21383 - DNA, 15 bp, Homo sapiens
actactggcaggaat

SEQ ID NO: 21384 - DNA, 15 bp, Homo sapiens
aactactggcaggaa

SEQ ID NO: 21385 - DNA, 15 bp, Homo sapiens
taactactggcagga

SEQ ID NO: 21386 - DNA, 15 bp, Homo sapiens
gtaactactggcagg

SEQ ID NO: 21387 - DNA, 15 bp, Homo sapiens
tgtaactactggcag

SEQ ID NO: 21388 - DNA, 15 bp, Homo sapiens
atgtaactactggca

SEQ ID NO: 21389 - DNA, 15 bp, Homo sapiens
aatgtaactactggc

SEQ ID NO: 21390 - DNA, 15 bp, Homo sapiens
taatgtaactactgg

SEQ ID NO: 21391 - DNA, 15 bp, Homo sapiens
ataatgtaactactg

SEQ ID NO: 21392 - DNA, 15 bp, Homo sapiens
tataatgtaactact

SEQ ID NO: 21393 - DNA, 15 bp, Homo sapiens
ttataatgtaactac

SEQ ID NO: 21394 - DNA, 15 bp, Homo sapiens
attataatgtaacta

SEQ ID NO: 21395 - DNA, 15 bp, Homo sapiens
aattataatgtaact

SEQ ID NO: 21396 - DNA, 15 bp, Homo sapiens
aaattataatgtaac

SEQ ID NO: 21397 - DNA, 15 bp, Homo sapiens
aaaattataatgtaa

SEQ ID NO: 21398 - DNA, 15 bp, Homo sapiens
caaaattataatgta

SEQ ID NO: 21399 - DNA, 15 bp, Homo sapiens
ccaaaattataatgt

SEQ ID NO: 21400 - DNA, 15 bp, Homo sapiens
accaaaattataatg

SEQ ID NO: 21401 - DNA, 15 bp, Homo sapiens
aaccaaaattataat

SEQ ID NO: 21402 - DNA, 15 bp, Homo sapiens
taaccaaaattataa

SEQ ID NO: 21403 - DNA, 15 bp, Homo sapiens
ataaccaaaattata

SEQ ID NO: 21404 - DNA, 15 bp, Homo sapiens
tataaccaaaattat

SEQ ID NO: 21405 - DNA, 15 bp, Homo sapiens
atataaccaaaatta

SEQ ID NO: 21406 - DNA, 15 bp, Homo sapiens
gatataaccaaaatt

SEQ ID NO: 21407 - DNA, 15 bp, Homo sapiens
tgatataaccaaaat

SEQ ID NO: 21408 - DNA, 15 bp, Homo sapiens
ttgatataaccaaaa

SEQ ID NO: 21409 - DNA, 15 bp, Homo sapiens
attgatataaccaaa

SEQ ID NO: 21410 - DNA, 15 bp, Homo sapiens
tattgatataaccaa

SEQ ID NO: 21411 - DNA, 15 bp, Homo sapiens
atattgatataacca

SEQ ID NO: 21412 - DNA, 15 bp, Homo sapiens
aatattgatataacc

SEQ ID NO: 21413 - DNA, 15 bp, Homo sapiens
caatattgatataac

SEQ ID NO: 21414 - DNA, 15 bp, Homo sapiens
tcaatattgatataa

SEQ ID NO: 21415 - DNA, 15 bp, Homo sapiens
ctcaatattgatata

SEQ ID NO: 21416 - DNA, 15 bp, Homo sapiens
actcaatattgatat

SEQ ID NO: 21417 - DNA, 15 bp, Homo sapiens
aactcaatattgata

SEQ ID NO: 21418 - DNA, 15 bp, Homo sapiens
aaactcaatattgat

SEQ ID NO: 21419 - DNA, 15 bp, Homo sapiens
aaaactcaatattga

SEQ ID NO: 21420 - DNA, 15 bp, Homo sapiens
aaaaactcaatattg

SEQ ID NO: 21421 - DNA, 15 bp, Homo sapiens
taaaaactcaatatt

SEQ ID NO: 21422 - DNA, 15 bp, Homo sapiens
ataaaaactcaatat

SEQ ID NO: 21423 - DNA, 15 bp, Homo sapiens
cataaaaactcaata

SEQ ID NO: 21424 - DNA, 15 bp, Homo sapiens
ccataaaaactcaat

SEQ ID NO: 21425 - DNA, 15 bp, Homo sapiens
cccataaaaactcaa

SEQ ID NO: 21426 - DNA, 15 bp, Homo sapiens
tcccataaaaactca

SEQ ID NO: 21427 - DNA, 15 bp, Homo sapiens
atcccataaaaactc

SEQ ID NO: 21428 - DNA, 15 bp, Homo sapiens
aatcccataaaaact

SEQ ID NO: 21429 - DNA, 15 bp, Homo sapiens
taatcccataaaaac

SEQ ID NO: 21430 - DNA, 15 bp, Homo sapiens
ataatcccataaaaa

SEQ ID NO: 21431 - DNA, 15 bp, Homo sapiens
tataatcccataaaa

SEQ ID NO: 21432 - DNA, 15 bp, Homo sapiens
ttataatcccataaa

SEQ ID NO: 21433 - DNA, 15 bp, Homo sapiens
gttataatcccataa

SEQ ID NO: 21434 - DNA, 15 bp, Homo sapiens
agttataatcccata

SEQ ID NO: 21435 - DNA, 15 bp, Homo sapiens
tagttataatcccat

SEQ ID NO: 21436 - DNA, 15 bp, Homo sapiens
ctagttataatccca

SEQ ID NO: 21437 - DNA, 15 bp, Homo sapiens
tctagttataatccc

SEQ ID NO: 21438 - DNA, 15 bp, Homo sapiens
atctagttataatcc

SEQ ID NO: 21439 - DNA, 15 bp, Homo sapiens
tatctagttataatc

SEQ ID NO: 21440 - DNA, 15 bp, Homo sapiens
ttatctagttataat

SEQ ID NO: 21441 - DNA, 15 bp, Homo sapiens
tttatctagttataa

SEQ ID NO: 21442 - DNA, 15 bp, Homo sapiens
atttatctagttata

SEQ ID NO: 21443 - DNA, 15 bp, Homo sapiens
catttatctagttat

SEQ ID NO: 21444 - DNA, 15 bp, Homo sapiens
gcatttatctagtta

SEQ ID NO: 21445 - DNA, 15 bp, Homo sapiens
ggcatttatctagtt

SEQ ID NO: 21446 - DNA, 15 bp, Homo sapiens
tggcatttatctagt

SEQ ID NO: 21447 - DNA, 15 bp, Homo sapiens
atggcatttatctag

SEQ ID NO: 21448 - DNA, 15 bp, Homo sapiens
aatggcatttatcta

SEQ ID NO: 21449 - DNA, 15 bp, Homo sapiens
gaatggcatttatct

SEQ ID NO: 21450 - DNA, 15 bp, Homo sapiens
tgaatggcatttatc

SEQ ID NO: 21451 - DNA, 15 bp, Homo sapiens
atgaatggcatttat

SEQ ID NO: 21452 - DNA, 15 bp, Homo sapiens
tatgaatggcattta

SEQ ID NO: 21453 - DNA, 15 bp, Homo sapiens
ctatgaatggcattt

SEQ ID NO: 21454 - DNA, 15 bp, Homo sapiens
actatgaatggcatt

SEQ ID NO: 21455 - DNA, 15 bp, Homo sapiens
aactatgaatggcat

SEQ ID NO: 21456 - DNA, 15 bp, Homo sapiens
taactatgaatggca

SEQ ID NO: 21457 - DNA, 15 bp, Homo sapiens
ttaactatgaatggc

SEQ ID NO: 21458 - DNA, 15 bp, Homo sapiens
cttaactatgaatgg

SEQ ID NO: 21459 - DNA, 15 bp, Homo sapiens
acttaactatgaatg

SEQ ID NO: 21460 - DNA, 15 bp, Homo sapiens
cacttaactatgaat

SEQ ID NO: 21461 - DNA, 15 bp, Homo sapiens
tcacttaactatgaa

SEQ ID NO: 21462 - DNA, 15 bp, Homo sapiens
atcacttaactatga

SEQ ID NO: 21463 - DNA, 15 bp, Homo sapiens
tatcacttaactatg

SEQ ID NO: 21464 - DNA, 15 bp, Homo sapiens
ctatcacttaactat

SEQ ID NO: 21465 - DNA, 15 bp, Homo sapiens
tctatcacttaacta

SEQ ID NO: 21466 - DNA, 15 bp, Homo sapiens
ctctatcacttaact

SEQ ID NO: 21467 - DNA, 15 bp, Homo sapiens
actctatcacttaac

SEQ ID NO: 21468 - DNA, 15 bp, Homo sapiens
tactctatcacttaa

SEQ ID NO: 21469 - DNA, 15 bp, Homo sapiens
atactctatcactta

SEQ ID NO: 21470 - DNA, 15 bp, Homo sapiens
tatactctatcactt

SEQ ID NO: 21471 - DNA, 15 bp, Homo sapiens
atatactctatcact

SEQ ID NO: 21472 - DNA, 15 bp, Homo sapiens
aatatactctatcac

SEQ ID NO: 21473 - DNA, 15 bp, Homo sapiens
caatatactctatca

SEQ ID NO: 21474 - DNA, 15 bp, Homo sapiens
acaatatactctatc

SEQ ID NO: 21475 - DNA, 15 bp, Homo sapiens
cacaatatactctat

SEQ ID NO: 21476 - DNA, 15 bp, Homo sapiens
tcacaatatactcta

SEQ ID NO: 21477 - DNA, 15 bp, Homo sapiens
gtcacaatatactct

SEQ ID NO: 21478 - DNA, 15 bp, Homo sapiens
agtcacaatatactc

SEQ ID NO: 21479 - DNA, 15 bp, Homo sapiens
aagtcacaatatact

SEQ ID NO: 21480 - DNA, 15 bp, Homo sapiens
aaagtcacaatatac

SEQ ID NO: 21481 - DNA, 15 bp, Homo sapiens
aaaagtcacaatata

SEQ ID NO: 21482 - DNA, 15 bp, Homo sapiens
aaaaagtcacaatat

SEQ ID NO: 21483 - DNA, 15 bp, Homo sapiens
aaaaaagtcacaata

SEQ ID NO: 21484 - DNA, 15 bp, Homo sapiens
gaaaaaagtcacaat

SEQ ID NO: 21485 - DNA, 15 bp, Homo sapiens
ggaaaaaagtcacaa

SEQ ID NO: 21486 - DNA, 15 bp, Homo sapiens
aggaaaaaagtcaca

SEQ ID NO: 21487 - DNA, 15 bp, Homo sapiens
caggaaaaaagtcac

SEQ ID NO: 21488 - DNA, 15 bp, Homo sapiens
gcaggaaaaaagtca

SEQ ID NO: 21489 - DNA, 15 bp, Homo sapiens
tgcaggaaaaaagtc

SEQ ID NO: 21490 - DNA, 15 bp, Homo sapiens
atgcaggaaaaaagt

SEQ ID NO: 21491 - DNA, 15 bp, Homo sapiens
catgcaggaaaaaag

SEQ ID NO: 21492 - DNA, 15 bp, Homo sapiens
acatgcaggaaaaaa

SEQ ID NO: 21493 - DNA, 15 bp, Homo sapiens
aacatgcaggaaaaa

SEQ ID NO: 21494 - DNA, 15 bp, Homo sapiens
aaacatgcaggaaaa

SEQ ID NO: 21495 - DNA, 15 bp, Homo sapiens
aaaacatgcaggaaa

SEQ ID NO: 21496 - DNA, 15 bp, Homo sapiens
taaaacatgcaggaa

SEQ ID NO: 21497 - DNA, 15 bp, Homo sapiens
ataaaacatgcagga

SEQ ID NO: 21498 - DNA, 15 bp, Homo sapiens
aataaaacatgcagg

SEQ ID NO: 21499 - DNA, 15 bp, Homo sapiens
aaataaaacatgcag

SEQ ID NO: 21500 - DNA, 15 bp, Homo sapiens
aaaataaaacatgca

SEQ ID NO: 21501 - DNA, 15 bp, Homo sapiens
aaaaataaaacatgc

SEQ ID NO: 21502 - DNA, 15 bp, Homo sapiens
aaaaaataaaacatg

SEQ ID NO: 21503 - DNA, 15 bp, Homo sapiens
gaaaaaataaaacat

SEQ ID NO: 21504 - DNA, 15 bp, Homo sapiens
agaaaaaataaaaca

SEQ ID NO: 21505 - DNA, 15 bp, Homo sapiens
cagaaaaaataaaac

SEQ ID NO: 21506 - DNA, 15 bp, Homo sapiens
ccagaaaaaataaaa

SEQ ID NO: 21507 - DNA, 15 bp, Homo sapiens
tccagaaaaaataaa

SEQ ID NO: 21508 - DNA, 15 bp, Homo sapiens
gtccagaaaaaataa

SEQ ID NO: 21509 - DNA, 15 bp, Homo sapiens
agtccagaaaaaata

SEQ ID NO: 21510 - DNA, 15 bp, Homo sapiens
aagtccagaaaaaat

SEQ ID NO: 21511 - DNA, 15 bp, Homo sapiens
gaagtccagaaaaaa

SEQ ID NO: 21512 - DNA, 15 bp, Homo sapiens
tgaagtccagaaaaa

SEQ ID NO: 21513 - DNA, 15 bp, Homo sapiens
gtgaagtccagaaaa

SEQ ID NO: 21514 - DNA, 15 bp, Homo sapiens
tgtgaagtccagaaa

SEQ ID NO: 21515 - DNA, 15 bp, Homo sapiens
ctgtgaagtccagaa

SEQ ID NO: 21516 - DNA, 15 bp, Homo sapiens
actgtgaagtccaga

SEQ ID NO: 21517 - DNA, 15 bp, Homo sapiens
aactgtgaagtccag

SEQ ID NO: 21518 - DNA, 15 bp, Homo sapiens
caactgtgaagtcca

SEQ ID NO: 21519 - DNA, 15 bp, Homo sapiens
acaactgtgaagtcc

SEQ ID NO: 21520 - DNA, 15 bp, Homo sapiens
gacaactgtgaagtc

SEQ ID NO: 21521 - DNA, 15 bp, Homo sapiens
agacaactgtgaagt

SEQ ID NO: 21522 - DNA, 15 bp, Homo sapiens
gagacaactgtgaag

SEQ ID NO: 21523 - DNA, 15 bp, Homo sapiens
agagacaactgtgaa

SEQ ID NO: 21524 - DNA, 15 bp, Homo sapiens
gagagacaactgtga

SEQ ID NO: 21525 - DNA, 15 bp, Homo sapiens
agagagacaactgtg

SEQ ID NO: 21526 - DNA, 15 bp, Homo sapiens
aagagagacaactgt

SEQ ID NO: 21527 - DNA, 15 bp, Homo sapiens
aaagagagacaactg

SEQ ID NO: 21528 - DNA, 15 bp, Homo sapiens
aaaagagagacaact

SEQ ID NO: 21529 - DNA, 15 bp, Homo sapiens
aaaaagagagacaac

SEQ ID NO: 21530 - DNA, 15 bp, Homo sapiens
aaaaaagagagacaa

SEQ ID NO: 21531 - DNA, 15 bp, Homo sapiens
aaaaaaagagagaca

SEQ ID NO: 21532 - DNA, 15 bp, Homo sapiens
aaaaaaaagagagac

SEQ ID NO: 21533 - DNA, 15 bp, Homo sapiens
taaaaaaaagagaga

SEQ ID NO: 21534 - DNA, 15 bp, Homo sapiens
ttaaaaaaaagagag

SEQ ID NO: 21535 - DNA, 15 bp, Homo sapiens
ttttaaaaaaaagag

SEQ ID NO: 21536 - DNA, 15 bp, Homo sapiens
tttttaaaaaaaaga

SEQ ID NO: 21537 - DNA, 15 bp, Homo sapiens
ttttttaaaaaaaag

SEQ ID NO: 21538 - DNA, 15 bp, Homo sapiens
tttttttaaaaaaaa

SEQ ID NO: 21539 - DNA, 15 bp, Homo sapiens
atttttttaaaaaaa

SEQ ID NO: 21540 - DNA, 15 bp, Homo sapiens
aatttttttaaaaaa

SEQ ID NO: 21541 - DNA, 15 bp, Homo sapiens
taatttttttaaaaa

SEQ ID NO: 21542 - DNA, 15 bp, Homo sapiens
ctaatttttttaaaa

SEQ ID NO: 21543 - DNA, 15 bp, Homo sapiens
actaatttttttaaa

SEQ ID NO: 21544 - DNA, 15 bp, Homo sapiens
aactaatttttttaa

SEQ ID NO: 21545 - DNA, 15 bp, Homo sapiens
aaactaattttttta

SEQ ID NO: 21546 - DNA, 15 bp, Homo sapiens
aaaactaattttttt

SEQ ID NO: 21547 - DNA, 15 bp, Homo sapiens
gaaaactaatttttt

SEQ ID NO: 21548 - DNA, 15 bp, Homo sapiens
tgaaaactaattttt

SEQ ID NO: 21549 - DNA, 15 bp, Homo sapiens
ttgaaaactaatttt

SEQ ID NO: 21550 - DNA, 15 bp, Homo sapiens
attgaaaactaattt

SEQ ID NO: 21551 - DNA, 15 bp, Homo sapiens
cattgaaaactaatt

SEQ ID NO: 21552 - DNA, 15 bp, Homo sapiens
acattgaaaactaat

SEQ ID NO: 21553 - DNA, 15 bp, Homo sapiens
aacattgaaaactaa

SEQ ID NO: 21554 - DNA, 15 bp, Homo sapiens
gaacattgaaaacta

SEQ ID NO: 21555 - DNA, 15 bp, Homo sapiens
agaacattgaaaact

SEQ ID NO: 21556 - DNA, 15 bp, Homo sapiens
aagaacattgaaaac

SEQ ID NO: 21557 - DNA, 15 bp, Homo sapiens
taagaacattgaaaa

SEQ ID NO: 21558 - DNA, 15 bp, Homo sapiens
ctaagaacattgaaa

SEQ ID NO: 21559 - DNA, 15 bp, Homo sapiens
gctaagaacattgaa

SEQ ID NO: 21560 - DNA, 15 bp, Homo sapiens
agctaagaacattga

SEQ ID NO: 21561 - DNA, 15 bp, Homo sapiens
aagctaagaacattg

SEQ ID NO: 21562 - DNA, 15 bp, Homo sapiens
aaagctaagaacatt

SEQ ID NO: 21563 - DNA, 15 bp, Homo sapiens
taaagctaagaacat

SEQ ID NO: 21564 - DNA, 15 bp, Homo sapiens
ttaaagctaagaaca

SEQ ID NO: 21565 - DNA, 15 bp, Homo sapiens
attaaagctaagaac

SEQ ID NO: 21566 - DNA, 15 bp, Homo sapiens
aattaaagctaagaa

SEQ ID NO: 21567 - DNA, 15 bp, Homo sapiens
gaattaaagctaaga

SEQ ID NO: 21568 - DNA, 15 bp, Homo sapiens
tgaattaaagctaag

SEQ ID NO: 21569 - DNA, 15 bp, Homo sapiens
atgaattaaagctaa

SEQ ID NO: 21570 - DNA, 15 bp, Homo sapiens
tatgaattaaagcta

SEQ ID NO: 21571 - DNA, 15 bp, Homo sapiens
ttatgaattaaagct

SEQ ID NO: 21572 - DNA, 15 bp, Homo sapiens
tttatgaattaaagc

SEQ ID NO: 21573 - DNA, 15 bp, Homo sapiens
gtttatgaattaaag

SEQ ID NO: 21574 - DNA, 15 bp, Homo sapiens
agtttatgaattaaa

SEQ ID NO: 21575 - DNA, 15 bp, Homo sapiens
gagtttatgaattaa

SEQ ID NO: 21576 - DNA, 15 bp, Homo sapiens
tgagtttatgaatta

SEQ ID NO: 21577 - DNA, 15 bp, Homo sapiens
gtgagtttatgaatt

SEQ ID NO: 21578 - DNA, 15 bp, Homo sapiens
ggtgagtttatgaat

SEQ ID NO: 21579 - DNA, 15 bp, Homo sapiens
gggtgagtttatgaa

SEQ ID NO: 21580 - DNA, 15 bp, Homo sapiens
ggggtgagtttatga

SEQ ID NO: 21581 - DNA, 15 bp, Homo sapiens
aggggtgagtttatg

SEQ ID NO: 21582 - DNA, 15 bp, Homo sapiens
taggggtgagtttat

SEQ ID NO: 21583 - DNA, 15 bp, Homo sapiens
ttaggggtgagttta

SEQ ID NO: 21584 - DNA, 15 bp, Homo sapiens
attaggggtgagttt

SEQ ID NO: 21585 - DNA, 15 bp, Homo sapiens
aattaggggtgagtt

SEQ ID NO: 21586 - DNA, 15 bp, Homo sapiens
caattaggggtgagt

SEQ ID NO: 21587 - DNA, 15 bp, Homo sapiens
acaattaggggtgag

SEQ ID NO: 21588 - DNA, 15 bp, Homo sapiens
tacaattaggggtga

SEQ ID NO: 21589 - DNA, 15 bp, Homo sapiens
atacaattaggggtg

SEQ ID NO: 21590 - DNA, 15 bp, Homo sapiens
tatacaattaggggt

SEQ ID NO: 21591 - DNA, 15 bp, Homo sapiens
ttatacaattagggg

SEQ ID NO: 21592 - DNA, 15 bp, Homo sapiens
tttatacaattaggg

SEQ ID NO: 21593 - DNA, 15 bp, Homo sapiens
atttatacaattagg

SEQ ID NO: 21594 - DNA, 15 bp, Homo sapiens
gatttatacaattag

SEQ ID NO: 21595 - DNA, 15 bp, Homo sapiens
agatttatacaatta

SEQ ID NO: 21596 - DNA, 15 bp, Homo sapiens
gagatttatacaatt

SEQ ID NO: 21597 - DNA, 15 bp, Homo sapiens
agagatttatacaat

SEQ ID NO: 21598 - DNA, 15 bp, Homo sapiens
gagagatttatacaa

SEQ ID NO: 21599 - DNA, 15 bp, Homo sapiens
tgagagatttataca

SEQ ID NO: 21600 - DNA, 15 bp, Homo sapiens
ttgagagatttatac

SEQ ID NO: 21601 - DNA, 15 bp, Homo sapiens
gttgagagatttata

SEQ ID NO: 21602 - DNA, 15 bp, Homo sapiens
tgttgagagatttat

SEQ ID NO: 21603 - DNA, 15 bp, Homo sapiens
atgttgagagattta

SEQ ID NO: 21604 - DNA, 15 bp, Homo sapiens
catgttgagagattt

SEQ ID NO: 21605 - DNA, 15 bp, Homo sapiens
acatgttgagagatt

SEQ ID NO: 21606 - DNA, 15 bp, Homo sapiens
aacatgttgagagat

SEQ ID NO: 21607 - DNA, 15 bp, Homo sapiens
aaacatgttgagaga

SEQ ID NO: 21608 - DNA, 15 bp, Homo sapiens
taaacatgttgagag

SEQ ID NO: 21609 - DNA, 15 bp, Homo sapiens
ttaaacatgttgaga

SEQ ID NO: 21610 - DNA, 15 bp, Homo sapiens
cttaaacatgttgag

SEQ ID NO: 21611 - DNA, 15 bp, Homo sapiens
gcttaaacatgttga

SEQ ID NO: 21612 - DNA, 15 bp, Homo sapiens
tgcttaaacatgttg

SEQ ID NO: 21613 - DNA, 15 bp, Homo sapiens
gtgcttaaacatgtt

SEQ ID NO: 21614 - DNA, 15 bp, Homo sapiens
tgtgcttaaacatgt

SEQ ID NO: 21615 - DNA, 15 bp, Homo sapiens
atgtgcttaaacatg

SEQ ID NO: 21616 - DNA, 15 bp, Homo sapiens
aatgtgcttaaacat

SEQ ID NO: 21617 - DNA, 15 bp, Homo sapiens
aaatgtgcttaaaca

SEQ ID NO: 21618 - DNA, 15 bp, Homo sapiens
caaatgtgcttaaac

SEQ ID NO: 21619 - DNA, 15 bp, Homo sapiens
ccaaatgtgcttaaa

SEQ ID NO: 21620 - DNA, 15 bp, Homo sapiens
gccaaatgtgcttaa

SEQ ID NO: 21621 - DNA, 15 bp, Homo sapiens
tgccaaatgtgctta

SEQ ID NO: 21622 - DNA, 15 bp, Homo sapiens
atgccaaatgtgctt

SEQ ID NO: 21623 - DNA, 15 bp, Homo sapiens
aatgccaaatgtgct

SEQ ID NO: 21624 - DNA, 15 bp, Homo sapiens
taatgccaaatgtgc

SEQ ID NO: 21625 - DNA, 15 bp, Homo sapiens
ataatgccaaatgtg

SEQ ID NO: 21626 - DNA, 15 bp, Homo sapiens
tataatgccaaatgt

SEQ ID NO: 21627 - DNA, 15 bp, Homo sapiens
atataatgccaaatg

SEQ ID NO: 21628 - DNA, 15 bp, Homo sapiens
gatataatgccaaat

SEQ ID NO: 21629 - DNA, 15 bp, Homo sapiens
tgatataatgccaaa

SEQ ID NO: 21630 - DNA, 15 bp, Homo sapiens
ttgatataatgccaa

SEQ ID NO: 21631 - DNA, 15 bp, Homo sapiens
attgatataatgcca

SEQ ID NO: 21632 - DNA, 15 bp, Homo sapiens
aattgatataatgcc

SEQ ID NO: 21633 - DNA, 15 bp, Homo sapiens
aaattgatataatgc

SEQ ID NO: 21634 - DNA, 15 bp, Homo sapiens
aaaattgatataatg

SEQ ID NO: 21635 - DNA, 15 bp, Homo sapiens
taaaattgatataat

SEQ ID NO: 21636 - DNA, 15 bp, Homo sapiens
ataaaattgatataa

SEQ ID NO: 21637 - DNA, 15 bp, Homo sapiens
gataaaattgatata

SEQ ID NO: 21638 - DNA, 15 bp, Homo sapiens
agataaaattgatat

SEQ ID NO: 21639 - DNA, 15 bp, Homo sapiens
aagataaaattgata

SEQ ID NO: 21640 - DNA, 15 bp, Homo sapiens
aaagataaaattgat

SEQ ID NO: 21641 - DNA, 15 bp, Homo sapiens
aaaagataaaattga

SEQ ID NO: 21642 - DNA, 15 bp, Homo sapiens
gaaaagataaaattg

SEQ ID NO: 21643 - DNA, 15 bp, Homo sapiens
ggaaaagataaaatt

SEQ ID NO: 21644 - DNA, 15 bp, Homo sapiens
tggaaaagataaaat

SEQ ID NO: 21645 - DNA, 15 bp, Homo sapiens
ctggaaaagataaaa

SEQ ID NO: 21646 - DNA, 15 bp, Homo sapiens
cctggaaaagataaa

SEQ ID NO: 21647 - DNA, 15 bp, Homo sapiens
acctggaaaagataa

SEQ ID NO: 21648 - DNA, 15 bp, Homo sapiens
cacctggaaaagata

SEQ ID NO: 21649 - DNA, 15 bp, Homo sapiens
gcacctggaaaagat

SEQ ID NO: 21650 - DNA, 15 bp, Homo sapiens
ggcacctggaaaaga

SEQ ID NO: 21651 - DNA, 15 bp, Homo sapiens
aggcacctggaaaag

SEQ ID NO: 21652 - DNA, 15 bp, Homo sapiens
aaggcacctggaaaa

SEQ ID NO: 21653 - DNA, 15 bp, Homo sapiens
gaaggcacctggaaa

SEQ ID NO: 21654 - DNA, 15 bp, Homo sapiens
agaaggcacctggaa

SEQ ID NO: 21655 - DNA, 15 bp, Homo sapiens
tagaaggcacctgga

SEQ ID NO: 21656 - DNA, 15 bp, Homo sapiens
ttagaaggcacctgg

SEQ ID NO: 21657 - DNA, 15 bp, Homo sapiens
attagaaggcacctg

SEQ ID NO: 21658 - DNA, 15 bp, Homo sapiens
gattagaaggcacct

SEQ ID NO: 21659 - DNA, 15 bp, Homo sapiens
agattagaaggcacc

SEQ ID NO: 21660 - DNA, 15 bp, Homo sapiens
cagattagaaggcac

SEQ ID NO: 21661 - DNA, 15 bp, Homo sapiens
acagattagaaggca

SEQ ID NO: 21662 - DNA, 15 bp, Homo sapiens
gacagattagaaggc

SEQ ID NO: 21663 - DNA, 15 bp, Homo sapiens
ggacagattagaagg

SEQ ID NO: 21664 - DNA, 15 bp, Homo sapiens
gggacagattagaag

SEQ ID NO: 21665 - DNA, 15 bp, Homo sapiens
tgggacagattagaa

SEQ ID NO: 21666 - DNA, 15 bp, Homo sapiens
ctgggacagattaga

SEQ ID NO: 21667 - DNA, 15 bp, Homo sapiens
actgggacagattag

SEQ ID NO: 21668 - DNA, 15 bp, Homo sapiens
gactgggacagatta

SEQ ID NO: 21669 - DNA, 15 bp, Homo sapiens
agactgggacagatt

SEQ ID NO: 21670 - DNA, 15 bp, Homo sapiens
cagactgggacagat

SEQ ID NO: 21671 - DNA, 15 bp, Homo sapiens
ccagactgggacaga

SEQ ID NO: 21672 - DNA, 15 bp, Homo sapiens
tccagactgggacag

SEQ ID NO: 21673 - DNA, 15 bp, Homo sapiens
gtccagactgggaca

SEQ ID NO: 21674 - DNA, 15 bp, Homo sapiens
agtccagactgggac

SEQ ID NO: 21675 - DNA, 15 bp, Homo sapiens
tagtccagactggga

SEQ ID NO: 21676 - DNA, 15 bp, Homo sapiens
ttagtccagactggg

SEQ ID NO: 21677 - DNA, 15 bp, Homo sapiens
attagtccagactgg

SEQ ID NO: 21678 - DNA, 15 bp, Homo sapiens
aattagtccagactg

SEQ ID NO: 21679 - DNA, 15 bp, Homo sapiens
caattagtccagact

SEQ ID NO: 21680 - DNA, 15 bp, Homo sapiens
acaattagtccagac

SEQ ID NO: 21681 - DNA, 15 bp, Homo sapiens
aacaattagtccaga

SEQ ID NO: 21682 - DNA, 15 bp, Homo sapiens
gaacaattagtccag

SEQ ID NO: 21683 - DNA, 15 bp, Homo sapiens
agaacaattagtcca

SEQ ID NO: 21684 - DNA, 15 bp, Homo sapiens
aagaacaattagtcc

SEQ ID NO: 21685 - DNA, 15 bp, Homo sapiens
gaagaacaattagtc

SEQ ID NO: 21686 - DNA, 15 bp, Homo sapiens
ggaagaacaattagt

SEQ ID NO: 21687 - DNA, 15 bp, Homo sapiens
aggaagaacaattag

SEQ ID NO: 21688 - DNA, 15 bp, Homo sapiens
caggaagaacaatta

SEQ ID NO: 21689 - DNA, 15 bp, Homo sapiens
ccaggaagaacaatt

SEQ ID NO: 21690 - DNA, 15 bp, Homo sapiens
gccaggaagaacaat

SEQ ID NO: 21691 - DNA, 15 bp, Homo sapiens
agccaggaagaacaa

SEQ ID NO: 21692 - DNA, 15 bp, Homo sapiens
aagccaggaagaaca

SEQ ID NO: 21693 - DNA, 15 bp, Homo sapiens
caagccaggaagaac

SEQ ID NO: 21694 - DNA, 15 bp, Homo sapiens
gcaagccaggaagaa

SEQ ID NO: 21695 - DNA, 15 bp, Homo sapiens
agcaagccaggaaga

SEQ ID NO: 21696 - DNA, 15 bp, Homo sapiens
cagcaagccaggaag

SEQ ID NO: 21697 - DNA, 15 bp, Homo sapiens
acagcaagccaggaa

SEQ ID NO: 21698 - DNA, 15 bp, Homo sapiens
tacagcaagccagga

SEQ ID NO: 21699 - DNA, 15 bp, Homo sapiens
atacagcaagccagg

SEQ ID NO: 21700 - DNA, 15 bp, Homo sapiens
catacagcaagccag

SEQ ID NO: 21701 - DNA, 15 bp, Homo sapiens
ccatacagcaagcca

SEQ ID NO: 21702 - DNA, 15 bp, Homo sapiens
gccatacagcaagcc

SEQ ID NO: 21703 - DNA, 15 bp, Homo sapiens
agccatacagcaagc

SEQ ID NO: 21704 - DNA, 15 bp, Homo sapiens
cagccatacagcaag

SEQ ID NO: 21705 - DNA, 15 bp, Homo sapiens
acagccatacagcaa

SEQ ID NO: 21706 - DNA, 15 bp, Homo sapiens
gacagccatacagca

SEQ ID NO: 21707 - DNA, 15 bp, Homo sapiens
agacagccatacagc

SEQ ID NO: 21708 - DNA, 15 bp, Homo sapiens
tagacagccatacag

SEQ ID NO: 21709 - DNA, 15 bp, Homo sapiens
gtagacagccataca

SEQ ID NO: 21710 - DNA, 15 bp, Homo sapiens
agtagacagccatac

SEQ ID NO: 21711 - DNA, 15 bp, Homo sapiens
gagtagacagccata

SEQ ID NO: 21712 - DNA, 15 bp, Homo sapiens
tgagtagacagccat

SEQ ID NO: 21713 - DNA, 15 bp, Homo sapiens
ttgagtagacagcca

SEQ ID NO: 21714 - DNA, 15 bp, Homo sapiens
cttgagtagacagcc

SEQ ID NO: 21715 - DNA, 15 bp, Homo sapiens
tcttgagtagacagc

SEQ ID NO: 21716 - DNA, 15 bp, Homo sapiens
atcttgagtagacag

SEQ ID NO: 21717 - DNA, 15 bp, Homo sapiens
catcttgagtagaca

SEQ ID NO: 21718 - DNA, 15 bp, Homo sapiens
acatcttgagtagac

SEQ ID NO: 21719 - DNA, 15 bp, Homo sapiens
gacatcttgagtaga

SEQ ID NO: 21720 - DNA, 15 bp, Homo sapiens
ggacatcttgagtag

SEQ ID NO: 21721 - DNA, 15 bp, Homo sapiens
gggacatcttgagta

SEQ ID NO: 21722 - DNA, 15 bp, Homo sapiens
agggacatcttgagt

SEQ ID NO: 21723 - DNA, 15 bp, Homo sapiens
aagggacatcttgag

SEQ ID NO: 21724 - DNA, 15 bp, Homo sapiens
gaagggacatcttga

SEQ ID NO: 21725 - DNA, 15 bp, Homo sapiens
tgaagggacatcttg

SEQ ID NO: 21726 - DNA, 15 bp, Homo sapiens
gtgaagggacatctt

SEQ ID NO: 21727 - DNA, 15 bp, Homo sapiens
ggtgaagggacatct

SEQ ID NO: 21728 - DNA, 15 bp, Homo sapiens
tggtgaagggacatc

SEQ ID NO: 21729 - DNA, 15 bp, Homo sapiens
atggtgaagggacat

SEQ ID NO: 21730 - DNA, 15 bp, Homo sapiens
gatggtgaagggaca

SEQ ID NO: 21731 - DNA, 15 bp, Homo sapiens
tgatggtgaagggac

SEQ ID NO: 21732 - DNA, 15 bp, Homo sapiens
atgatggtgaaggga

SEQ ID NO: 21733 - DNA, 15 bp, Homo sapiens
aatgatggtgaaggg

SEQ ID NO: 21734 - DNA, 15 bp, Homo sapiens
gaatgatggtgaagg

SEQ ID NO: 21735 - DNA, 15 bp, Homo sapiens
agaatgatggtgaag

SEQ ID NO: 21736 - DNA, 15 bp, Homo sapiens
tagaatgatggtgaa

SEQ ID NO: 21737 - DNA, 15 bp, Homo sapiens
ctagaatgatggtga

SEQ ID NO: 21738 - DNA, 15 bp, Homo sapiens
cctagaatgatggtg

SEQ ID NO: 21739 - DNA, 15 bp, Homo sapiens
ccctagaatgatggt

SEQ ID NO: 21740 - DNA, 15 bp, Homo sapiens
tccctagaatgatgg

SEQ ID NO: 21741 - DNA, 15 bp, Homo sapiens
atccctagaatgatg

SEQ ID NO: 21742 - DNA, 15 bp, Homo sapiens
aatccctagaatgat

SEQ ID NO: 21743 - DNA, 15 bp, Homo sapiens
gaatccctagaatga

SEQ ID NO: 21744 - DNA, 15 bp, Homo sapiens
ggaatccctagaatg

SEQ ID NO: 21745 - DNA, 15 bp, Homo sapiens
gggaatccctagaat

SEQ ID NO: 21746 - DNA, 15 bp, Homo sapiens
agggaatccctagaa

SEQ ID NO: 21747 - DNA, 15 bp, Homo sapiens
aagggaatccctaga

SEQ ID NO: 21748 - DNA, 15 bp, Homo sapiens
aaagggaatccctag

SEQ ID NO: 21749 - DNA, 15 bp, Homo sapiens
aaaagggaatcccta

SEQ ID NO: 21750 - DNA, 15 bp, Homo sapiens
gaaaagggaatccct

SEQ ID NO: 21751 - DNA, 15 bp, Homo sapiens
ggaaaagggaatccc

SEQ ID NO: 21752 - DNA, 15 bp, Homo sapiens
aggaaaagggaatcc

SEQ ID NO: 21753 - DNA, 15 bp, Homo sapiens
gaggaaaagggaatc

SEQ ID NO: 21754 - DNA, 15 bp, Homo sapiens
agaggaaaagggaat

SEQ ID NO: 21755 - DNA, 15 bp, Homo sapiens
gagaggaaaagggaa

SEQ ID NO: 21756 - DNA, 15 bp, Homo sapiens
agagaggaaaaggga

SEQ ID NO: 21757 - DNA, 15 bp, Homo sapiens
aagagaggaaaaggg

SEQ ID NO: 21758 - DNA, 15 bp, Homo sapiens
caagagaggaaaagg

SEQ ID NO: 21759 - DNA, 15 bp, Homo sapiens
acaagagaggaaaag

SEQ ID NO: 21760 - DNA, 15 bp, Homo sapiens
cacaagagaggaaaa

SEQ ID NO: 21761 - DNA, 15 bp, Homo sapiens
ccacaagagaggaaa

SEQ ID NO: 21762 - DNA, 15 bp, Homo sapiens
cccacaagagaggaa

SEQ ID NO: 21763 - DNA, 15 bp, Homo sapiens
acccacaagagagga

SEQ ID NO: 21764 - DNA, 15 bp, Homo sapiens
aacccacaagagagg

SEQ ID NO: 21765 - DNA, 15 bp, Homo sapiens
taacccacaagagag

SEQ ID NO: 21766 - DNA, 15 bp, Homo sapiens
ctaacccacaagaga

SEQ ID NO: 21767 - DNA, 15 bp, Homo sapiens
tctaacccacaagag

SEQ ID NO: 21768 - DNA, 15 bp, Homo sapiens
atctaacccacaaga

SEQ ID NO: 21769 - DNA, 15 bp, Homo sapiens
aatctaacccacaag

SEQ ID NO: 21770 - DNA, 15 bp, Homo sapiens
gaatctaacccacaa

SEQ ID NO: 21771 - DNA, 15 bp, Homo sapiens
agaatctaacccaca

SEQ ID NO: 21772 - DNA, 15 bp, Homo sapiens
aagaatctaacccac

SEQ ID NO: 21773 - DNA, 15 bp, Homo sapiens
gaagaatctaaccca

SEQ ID NO: 21774 - DNA, 15 bp, Homo sapiens
tgaagaatctaaccc

SEQ ID NO: 21775 - DNA, 15 bp, Homo sapiens
ctgaagaatctaacc

SEQ ID NO: 21776 - DNA, 15 bp, Homo sapiens
actgaagaatctaac

SEQ ID NO: 21777 - DNA, 15 bp, Homo sapiens
aactgaagaatctaa

SEQ ID NO: 21778 - DNA, 15 bp, Homo sapiens
gaactgaagaatcta

SEQ ID NO: 21779 - DNA, 15 bp, Homo sapiens
agaactgaagaatct

SEQ ID NO: 21780 - DNA, 15 bp, Homo sapiens
aagaactgaagaatc

SEQ ID NO: 21781 - DNA, 15 bp, Homo sapiens
caagaactgaagaat

SEQ ID NO: 21782 - DNA, 15 bp, Homo sapiens
ccaagaactgaagaa

SEQ ID NO: 21783 - DNA, 15 bp, Homo sapiens
tccaagaactgaaga

SEQ ID NO: 21784 - DNA, 15 bp, Homo sapiens
ctccaagaactgaag

SEQ ID NO: 21785 - DNA, 15 bp, Homo sapiens
tctccaagaactgaa

SEQ ID NO: 21786 - DNA, 15 bp, Homo sapiens
gtctccaagaactga

SEQ ID NO: 21787 - DNA, 15 bp, Homo sapiens
agtctccaagaactg

SEQ ID NO: 21788 - DNA, 15 bp, Homo sapiens
cagtctccaagaact

SEQ ID NO: 21789 - DNA, 15 bp, Homo sapiens
acagtctccaagaac

SEQ ID NO: 21790 - DNA, 15 bp, Homo sapiens
gacagtctccaagaa

SEQ ID NO: 21791 - DNA, 15 bp, Homo sapiens
tgacagtctccaaga

SEQ ID NO: 21792 - DNA, 15 bp, Homo sapiens
atgacagtctccaag

SEQ ID NO: 21793 - DNA, 15 bp, Homo sapiens
gatgacagtctccaa

SEQ ID NO: 21794 - DNA, 15 bp, Homo sapiens
agatgacagtctcca

SEQ ID NO: 21795 - DNA, 15 bp, Homo sapiens
aagatgacagtctcc

SEQ ID NO: 21796 - DNA, 15 bp, Homo sapiens
gaagatgacagtctc

SEQ ID NO: 21797 - DNA, 15 bp, Homo sapiens
agaagatgacagtct

SEQ ID NO: 21798 - DNA, 15 bp, Homo sapiens
aagaagatgacagtc

SEQ ID NO: 21799 - DNA, 15 bp, Homo sapiens
aaagaagatgacagt

SEQ ID NO: 21800 - DNA, 15 bp, Homo sapiens
gaaagaagatgacag

SEQ ID NO: 21801 - DNA, 15 bp, Homo sapiens
tgaaagaagatgaca

SEQ ID NO: 21802 - DNA, 15 bp, Homo sapiens
atgaaagaagatgac

SEQ ID NO: 21803 - DNA, 15 bp, Homo sapiens
catgaaagaagatga

SEQ ID NO: 21804 - DNA, 15 bp, Homo sapiens
ccatgaaagaagatg

SEQ ID NO: 21805 - DNA, 15 bp, Homo sapiens
accatgaaagaagat

SEQ ID NO: 21806 - DNA, 15 bp, Homo sapiens
aaccatgaaagaaga

SEQ ID NO: 21807 - DNA, 15 bp, Homo sapiens
aaaccatgaaagaag

SEQ ID NO: 21808 - DNA, 15 bp, Homo sapiens
gaaaccatgaaagaa

SEQ ID NO: 21809 - DNA, 15 bp, Homo sapiens
ggaaaccatgaaaga

SEQ ID NO: 21810 - DNA, 15 bp, Homo sapiens
gggaaaccatgaaag

SEQ ID NO: 21811 - DNA, 15 bp, Homo sapiens
tgggaaaccatgaaa

SEQ ID NO: 21812 - DNA, 15 bp, Homo sapiens
gtgggaaaccatgaa

SEQ ID NO: 21813 - DNA, 15 bp, Homo sapiens
agtgggaaaccatga

SEQ ID NO: 21814 - DNA, 15 bp, Homo sapiens
gagtgggaaaccatg

SEQ ID NO: 21815 - DNA, 15 bp, Homo sapiens
agagtgggaaaccat

SEQ ID NO: 21816 - DNA, 15 bp, Homo sapiens
aagagtgggaaacca

SEQ ID NO: 21817 - DNA, 15 bp, Homo sapiens
caagagtgggaaacc

SEQ ID NO: 21818 - DNA, 15 bp, Homo sapiens
acaagagtgggaaac

SEQ ID NO: 21819 - DNA, 15 bp, Homo sapiens
aacaagagtgggaaa

SEQ ID NO: 21820 - DNA, 15 bp, Homo sapiens
aaacaagagtgggaa

SEQ ID NO: 21821 - DNA, 15 bp, Homo sapiens
aaaacaagagtggga

SEQ ID NO: 21822 - DNA, 15 bp, Homo sapiens
caaaacaagagtggg

SEQ ID NO: 21823 - DNA, 15 bp, Homo sapiens
ccaaaacaagagtgg

SEQ ID NO: 21824 - DNA, 15 bp, Homo sapiens
gccaaaacaagagtg

SEQ ID NO: 21825 - DNA, 15 bp, Homo sapiens
cgccaaaacaagagt

SEQ ID NO: 21826 - DNA, 15 bp, Homo sapiens
ccgccaaaacaagag

SEQ ID NO: 21827 - DNA, 15 bp, Homo sapiens
tccgccaaaacaaga

SEQ ID NO: 21828 - DNA, 15 bp, Homo sapiens
ctccgccaaaacaag

SEQ ID NO: 21829 - DNA, 15 bp, Homo sapiens
gctccgccaaaacaa

SEQ ID NO: 21830 - DNA, 15 bp, Homo sapiens
tgctccgccaaaaca

SEQ ID NO: 21831 - DNA, 15 bp, Homo sapiens
gtgctccgccaaaac

SEQ ID NO: 21832 - DNA, 15 bp, Homo sapiens
tgtgctccgccaaaa

SEQ ID NO: 21833 - DNA, 15 bp, Homo sapiens
atgtgctccgccaaa

SEQ ID NO: 21834 - DNA, 15 bp, Homo sapiens
gatgtgctccgccaa

SEQ ID NO: 21835 - DNA, 15 bp, Homo sapiens
agatgtgctccgcca

SEQ ID NO: 21836 - DNA, 15 bp, Homo sapiens
aagatgtgctccgcc

SEQ ID NO: 21837 - DNA, 15 bp, Homo sapiens
aaagatgtgctccgc

SEQ ID NO: 21838 - DNA, 15 bp, Homo sapiens
taaagatgtgctccg

SEQ ID NO: 21839 - DNA, 15 bp, Homo sapiens
ctaaagatgtgctcc

SEQ ID NO: 21840 - DNA, 15 bp, Homo sapiens
actaaagatgtgctc

SEQ ID NO: 21841 - DNA, 15 bp, Homo sapiens
tactaaagatgtgct

SEQ ID NO: 21842 - DNA, 15 bp, Homo sapiens
ttactaaagatgtgc

SEQ ID NO: 21843 - DNA, 15 bp, Homo sapiens
gttactaaagatgtg

SEQ ID NO: 21844 - DNA, 15 bp, Homo sapiens
agttactaaagatgt

SEQ ID NO: 21845 - DNA, 15 bp, Homo sapiens
aagttactaaagatg

SEQ ID NO: 21846 - DNA, 15 bp, Homo sapiens
gaagttactaaagat

SEQ ID NO: 21847 - DNA, 15 bp, Homo sapiens
ggaagttactaaaga

SEQ ID NO: 21848 - DNA, 15 bp, Homo sapiens
aggaagttactaaag

SEQ ID NO: 21849 - DNA, 15 bp, Homo sapiens
caggaagttactaaa

SEQ ID NO: 21850 - DNA, 15 bp, Homo sapiens
tcaggaagttactaa

SEQ ID NO: 21851 - DNA, 15 bp, Homo sapiens
gtcaggaagttacta

SEQ ID NO: 21852 - DNA, 15 bp, Homo sapiens
tgtcaggaagttact

SEQ ID NO: 21853 - DNA, 15 bp, Homo sapiens
ttgtcaggaagttac

SEQ ID NO: 21854 - DNA, 15 bp, Homo sapiens
tttgtcaggaagtta

SEQ ID NO: 21855 - DNA, 15 bp, Homo sapiens
ctttgtcaggaagtt

SEQ ID NO: 21856 - DNA, 15 bp, Homo sapiens
actttgtcaggaagt

SEQ ID NO: 21857 - DNA, 15 bp, Homo sapiens
cactttgtcaggaag

SEQ ID NO: 21858 - DNA, 15 bp, Homo sapiens
acactttgtcaggaa

SEQ ID NO: 21859 - DNA, 15 bp, Homo sapiens
tacactttgtcagga

SEQ ID NO: 21860 - DNA, 15 bp, Homo sapiens
atacactttgtcagg

SEQ ID NO: 21861 - DNA, 15 bp, Homo sapiens
catacactttgtcag

SEQ ID NO: 21862 - DNA, 15 bp, Homo sapiens
ccatacactttgtca

SEQ ID NO: 21863 - DNA, 15 bp, Homo sapiens
accatacactttgtc

SEQ ID NO: 21864 - DNA, 15 bp, Homo sapiens
aaccatacactttgt

SEQ ID NO: 21865 - DNA, 15 bp, Homo sapiens
aaaccatacactttg

SEQ ID NO: 21866 - DNA, 15 bp, Homo sapiens
caaaccatacacttt

SEQ ID NO: 21867 - DNA, 15 bp, Homo sapiens
tcaaaccatacactt

SEQ ID NO: 21868 - DNA, 15 bp, Homo sapiens
ctcaaaccatacact

SEQ ID NO: 21869 - DNA, 15 bp, Homo sapiens
tctcaaaccatacac

SEQ ID NO: 21870 - DNA, 15 bp, Homo sapiens
atctcaaaccataca

SEQ ID NO: 21871 - DNA, 15 bp, Homo sapiens
aatctcaaaccatac

SEQ ID NO: 21872 - DNA, 15 bp, Homo sapiens
aaatctcaaaccata

SEQ ID NO: 21873 - DNA, 15 bp, Homo sapiens
gaaatctcaaaccat

SEQ ID NO: 21874 - DNA, 15 bp, Homo sapiens
cgaaatctcaaacca

SEQ ID NO: 21875 - DNA, 15 bp, Homo sapiens
gcgaaatctcaaacc

SEQ ID NO: 21876 - DNA, 15 bp, Homo sapiens
agcgaaatctcaaac

SEQ ID NO: 21877 - DNA, 15 bp, Homo sapiens
cagcgaaatctcaaa

SEQ ID NO: 21878 - DNA, 15 bp, Homo sapiens
tcagcgaaatctcaa

SEQ ID NO: 21879 - DNA, 15 bp, Homo sapiens
atcagcgaaatctca

SEQ ID NO: 21880 - DNA, 15 bp, Homo sapiens
aatcagcgaaatctc

SEQ ID NO: 21881 - DNA, 15 bp, Homo sapiens
aaatcagcgaaatct

SEQ ID NO: 21882 - DNA, 15 bp, Homo sapiens
aaaatcagcgaaatc

SEQ ID NO: 21883 - DNA, 15 bp, Homo sapiens
taaaatcagcgaaat

SEQ ID NO: 21884 - DNA, 15 bp, Homo sapiens
ttaaaatcagcgaaa

SEQ ID NO: 21885 - DNA, 15 bp, Homo sapiens
tttaaaatcagcgaa

SEQ ID NO: 21886 - DNA, 15 bp, Homo sapiens
ttttaaaatcagcga

SEQ ID NO: 21887 - DNA, 15 bp, Homo sapiens
attttaaaatcagcg

SEQ ID NO: 21888 - DNA, 15 bp, Homo sapiens
cattttaaaatcagc

SEQ ID NO: 21889 - DNA, 15 bp, Homo sapiens
gcattttaaaatcag

SEQ ID NO: 21890 - DNA, 15 bp, Homo sapiens
ggcattttaaaatca

SEQ ID NO: 21891 - DNA, 15 bp, Homo sapiens
gggcattttaaaatc

SEQ ID NO: 21892 - DNA, 15 bp, Homo sapiens
agggcattttaaaat

SEQ ID NO: 21893 - DNA, 15 bp, Homo sapiens
aagggcattttaaaa

SEQ ID NO: 21894 - DNA, 15 bp, Homo sapiens
taagggcattttaaa

SEQ ID NO: 21895 - DNA, 15 bp, Homo sapiens
ataagggcattttaa

SEQ ID NO: 21896 - DNA, 15 bp, Homo sapiens
aataagggcatttta

SEQ ID NO: 21897 - DNA, 15 bp, Homo sapiens
taataagggcatttt

SEQ ID NO: 21898 - DNA, 15 bp, Homo sapiens
ataataagggcattt

SEQ ID NO: 21899 - DNA, 15 bp, Homo sapiens
tataataagggcatt

SEQ ID NO: 21900 - DNA, 15 bp, Homo sapiens
atataataagggcat

SEQ ID NO: 21901 - DNA, 15 bp, Homo sapiens
tatataataagggca

SEQ ID NO: 21902 - DNA, 15 bp, Homo sapiens
ctatataataagggc

SEQ ID NO: 21903 - DNA, 15 bp, Homo sapiens
actatataataaggg

SEQ ID NO: 21904 - DNA, 15 bp, Homo sapiens
gactatataataagg

SEQ ID NO: 21905 - DNA, 15 bp, Homo sapiens
tgactatataataag

SEQ ID NO: 21906 - DNA, 15 bp, Homo sapiens
gtgactatataataa

SEQ ID NO: 21907 - DNA, 15 bp, Homo sapiens
tgtgactatataata

SEQ ID NO: 21908 - DNA, 15 bp, Homo sapiens
gtgtgactatataat

SEQ ID NO: 21909 - DNA, 15 bp, Homo sapiens
agtgtgactatataa

SEQ ID NO: 21910 - DNA, 15 bp, Homo sapiens
aagtgtgactatata

SEQ ID NO: 21911 - DNA, 15 bp, Homo sapiens
caagtgtgactatat

SEQ ID NO: 21912 - DNA, 15 bp, Homo sapiens
tcaagtgtgactata

SEQ ID NO: 21913 - DNA, 15 bp, Homo sapiens
atcaagtgtgactat

SEQ ID NO: 21914 - DNA, 15 bp, Homo sapiens
aatcaagtgtgacta

SEQ ID NO: 21915 - DNA, 15 bp, Homo sapiens
aaatcaagtgtgact

SEQ ID NO: 21916 - DNA, 15 bp, Homo sapiens
taaatcaagtgtgac

SEQ ID NO: 21917 - DNA, 15 bp, Homo sapiens
ataaatcaagtgtga

SEQ ID NO: 21918 - DNA, 15 bp, Homo sapiens
tataaatcaagtgtg

SEQ ID NO: 21919 - DNA, 15 bp, Homo sapiens
ctataaatcaagtgt

SEQ ID NO: 21920 - DNA, 15 bp, Homo sapiens
actataaatcaagtg

SEQ ID NO: 21921 - DNA, 15 bp, Homo sapiens
gactataaatcaagt

SEQ ID NO: 21922 - DNA, 15 bp, Homo sapiens
agactataaatcaag

SEQ ID NO: 21923 - DNA, 15 bp, Homo sapiens
cagactataaatcaa

SEQ ID NO: 21924 - DNA, 15 bp, Homo sapiens
acagactataaatca

SEQ ID NO: 21925 - DNA, 15 bp, Homo sapiens
gacagactataaatc

SEQ ID NO: 21926 - DNA, 15 bp, Homo sapiens
agacagactataaat

SEQ ID NO: 21927 - DNA, 15 bp, Homo sapiens
aagacagactataaa

SEQ ID NO: 21928 - DNA, 15 bp, Homo sapiens
caagacagactataa

SEQ ID NO: 21929 - DNA, 15 bp, Homo sapiens
ccaagacagactata

SEQ ID NO: 21930 - DNA, 15 bp, Homo sapiens
accaagacagactat

SEQ ID NO: 21931 - DNA, 15 bp, Homo sapiens
taccaagacagacta

SEQ ID NO: 21932 - DNA, 15 bp, Homo sapiens
ataccaagacagact

SEQ ID NO: 21933 - DNA, 15 bp, Homo sapiens
tataccaagacagac

SEQ ID NO: 21934 - DNA, 15 bp, Homo sapiens
ctataccaagacaga

SEQ ID NO: 21935 - DNA, 15 bp, Homo sapiens
tctataccaagacag

SEQ ID NO: 21936 - DNA, 15 bp, Homo sapiens
ttctataccaagaca

SEQ ID NO: 21937 - DNA, 15 bp, Homo sapiens
attctataccaagac

SEQ ID NO: 21938 - DNA, 15 bp, Homo sapiens
aattctataccaaga

SEQ ID NO: 21939 - DNA, 15 bp, Homo sapiens
gaattctataccaag

SEQ ID NO: 21940 - DNA, 15 bp, Homo sapiens
agaattctataccaa

SEQ ID NO: 21941 - DNA, 15 bp, Homo sapiens
tagaattctatacca

SEQ ID NO: 21942 - DNA, 15 bp, Homo sapiens
ctagaattctatacc

SEQ ID NO: 21943 - DNA, 15 bp, Homo sapiens
cctagaattctatac

SEQ ID NO: 21944 - DNA, 15 bp, Homo sapiens
gcctagaattctata

SEQ ID NO: 21945 - DNA, 15 bp, Homo sapiens
agcctagaattctat

SEQ ID NO: 21946 - DNA, 15 bp, Homo sapiens
cagcctagaattcta

SEQ ID NO: 21947 - DNA, 15 bp, Homo sapiens
ctcagcctagaattc

SEQ ID NO: 21948 - DNA, 15 bp, Homo sapiens
tctcagcctagaatt

SEQ ID NO: 21949 - DNA, 15 bp, Homo sapiens
ttctcagcctagaat

SEQ ID NO: 21950 - DNA, 15 bp, Homo sapiens
cttctcagcctagaa

SEQ ID NO: 21951 - DNA, 15 bp, Homo sapiens
tcttctcagcctaga

SEQ ID NO: 21952 - DNA, 15 bp, Homo sapiens
ctcttctcagcctag

SEQ ID NO: 21953 - DNA, 15 bp, Homo sapiens
actcttctcagccta

SEQ ID NO: 21954 - DNA, 15 bp, Homo sapiens
aactcttctcagcct

SEQ ID NO: 21955 - DNA, 15 bp, Homo sapiens
aaactcttctcagcc

SEQ ID NO: 21956 - DNA, 15 bp, Homo sapiens
aaaactcttctcagc

SEQ ID NO: 21957 - DNA, 15 bp, Homo sapiens
gaaaactcttctcag

SEQ ID NO: 21958 - DNA, 15 bp, Homo sapiens
ggaaaactcttctca

SEQ ID NO: 21959 - DNA, 15 bp, Homo sapiens
gggaaaactcttctc

SEQ ID NO: 21960 - DNA, 15 bp, Homo sapiens
agggaaaactcttct

SEQ ID NO: 21961 - DNA, 15 bp, Homo sapiens
gagggaaaactcttc

SEQ ID NO: 21962 - DNA, 15 bp, Homo sapiens
tgagggaaaactctt

SEQ ID NO: 21963 - DNA, 15 bp, Homo sapiens
ttgagggaaaactct

SEQ ID NO: 21964 - DNA, 15 bp, Homo sapiens
tttgagggaaaactc

SEQ ID NO: 21965 - DNA, 15 bp, Homo sapiens
ttttgagggaaaact

SEQ ID NO: 21966 - DNA, 15 bp, Homo sapiens
attttgagggaaaac

SEQ ID NO: 21967 - DNA, 15 bp, Homo sapiens
gattttgagggaaaa

SEQ ID NO: 21968 - DNA, 15 bp, Homo sapiens
tgattttgagggaaa

SEQ ID NO: 21969 - DNA, 15 bp, Homo sapiens
ctgattttgagggaa

SEQ ID NO: 21970 - DNA, 15 bp, Homo sapiens
tctgattttgaggga

SEQ ID NO: 21971 - DNA, 15 bp, Homo sapiens
ttctgattttgaggg

SEQ ID NO: 21972 - DNA, 15 bp, Homo sapiens
cttctgattttgagg

SEQ ID NO: 21973 - DNA, 15 bp, Homo sapiens
ccttctgattttgag

SEQ ID NO: 21974 - DNA, 15 bp, Homo sapiens
accttctgattttga

SEQ ID NO: 21975 - DNA, 15 bp, Homo sapiens
aaccttctgattttg

SEQ ID NO: 21976 - DNA, 15 bp, Homo sapiens
aaaccttctgatttt

SEQ ID NO: 21977 - DNA, 15 bp, Homo sapiens
aaaaccttctgattt

SEQ ID NO: 21978 - DNA, 15 bp, Homo sapiens
caaaaccttctgatt

SEQ ID NO: 21979 - DNA, 15 bp, Homo sapiens
gcaaaaccttctgat

SEQ ID NO: 21980 - DNA, 15 bp, Homo sapiens
ggcaaaaccttctga

SEQ ID NO: 21981 - DNA, 15 bp, Homo sapiens
gggcaaaaccttctg

SEQ ID NO: 21982 - DNA, 15 bp, Homo sapiens
tgggcaaaaccttct

SEQ ID NO: 21983 - DNA, 15 bp, Homo sapiens
ttgggcaaaaccttc

SEQ ID NO: 21984 - DNA, 15 bp, Homo sapiens
attgggcaaaacctt

SEQ ID NO: 21985 - DNA, 15 bp, Homo sapiens
aattgggcaaaacct

SEQ ID NO: 21986 - DNA, 15 bp, Homo sapiens
caattgggcaaaacc

SEQ ID NO: 21987 - DNA, 15 bp, Homo sapiens
acaattgggcaaaac

SEQ ID NO: 21988 - DNA, 15 bp, Homo sapiens
aacaattgggcaaaa

SEQ ID NO: 21989 - DNA, 15 bp, Homo sapiens
aaacaattgggcaaa

SEQ ID NO: 21990 - DNA, 15 bp, Homo sapiens
aaaacaattgggcaa

SEQ ID NO: 21991 - DNA, 15 bp, Homo sapiens
aaaaacaattgggca

SEQ ID NO: 21992 - DNA, 15 bp, Homo sapiens
aaaaaacaattgggc

SEQ ID NO: 21993 - DNA, 15 bp, Homo sapiens
taaaaaacaattggg

SEQ ID NO: 21994 - DNA, 15 bp, Homo sapiens
ctaaaaaacaattgg

SEQ ID NO: 21995 - DNA, 15 bp, Homo sapiens
gctaaaaaacaattg

SEQ ID NO: 21996 - DNA, 15 bp, Homo sapiens
agctaaaaaacaatt

SEQ ID NO: 21997 - DNA, 15 bp, Homo sapiens
cagctaaaaaacaat

SEQ ID NO: 21998 - DNA, 15 bp, Homo sapiens
gcagctaaaaaacaa

SEQ ID NO: 21999 - DNA, 15 bp, Homo sapiens
agcagctaaaaaaca

SEQ ID NO: 22000 - DNA, 15 bp, Homo sapiens
tagcagctaaaaaac

SEQ ID NO: 22001 - DNA, 15 bp, Homo sapiens
ctagcagctaaaaaa

SEQ ID NO: 22002 - DNA, 15 bp, Homo sapiens
actagcagctaaaaa

SEQ ID NO: 22003 - DNA, 15 bp, Homo sapiens
tactagcagctaaaa

SEQ ID NO: 22004 - DNA, 15 bp, Homo sapiens
atactagcagctaaa

SEQ ID NO: 22005 - DNA, 15 bp, Homo sapiens
aatactagcagctaa

SEQ ID NO: 22006 - DNA, 15 bp, Homo sapiens
caatactagcagcta

SEQ ID NO: 22007 - DNA, 15 bp, Homo sapiens
gcaatactagcagct

SEQ ID NO: 22008 - DNA, 15 bp, Homo sapiens
agcaatactagcagc

SEQ ID NO: 22009 - DNA, 15 bp, Homo sapiens
cagcaatactagcag

SEQ ID NO: 22010 - DNA, 15 bp, Homo sapiens
acagcaatactagca

SEQ ID NO: 22011 - DNA, 15 bp, Homo sapiens
aacagcaatactagc

SEQ ID NO: 22012 - DNA, 15 bp, Homo sapiens
taacagcaatactag

SEQ ID NO: 22013 - DNA, 15 bp, Homo sapiens
ttaacagcaatacta

SEQ ID NO: 22014 - DNA, 15 bp, Homo sapiens
tttaacagcaatact

SEQ ID NO: 22015 - DNA, 15 bp, Homo sapiens
ttttaacagcaatac

SEQ ID NO: 22016 - DNA, 15 bp, Homo sapiens
tttttaacagcaata

SEQ ID NO: 22017 - DNA, 15 bp, Homo sapiens
ctttttaacagcaat

SEQ ID NO: 22018 - DNA, 15 bp, Homo sapiens
cctttttaacagcaa

SEQ ID NO: 22019 - DNA, 15 bp, Homo sapiens
tcctttttaacagca

SEQ ID NO: 22020 - DNA, 15 bp, Homo sapiens
atcctttttaacagc

SEQ ID NO: 22021 - DNA, 15 bp, Homo sapiens
tatcctttttaacag

SEQ ID NO: 22022 - DNA, 15 bp, Homo sapiens
ttatcctttttaaca

SEQ ID NO: 22023 - DNA, 15 bp, Homo sapiens
attatcctttttaac

SEQ ID NO: 22024 - DNA, 15 bp, Homo sapiens
cattatcctttttaa

SEQ ID NO: 22025 - DNA, 15 bp, Homo sapiens
acattatccttttta

SEQ ID NO: 22026 - DNA, 15 bp, Homo sapiens
gacattatccttttt

SEQ ID NO: 22027 - DNA, 15 bp, Homo sapiens
tgacattatcctttt

SEQ ID NO: 22028 - DNA, 15 bp, Homo sapiens
atgacattatccttt

SEQ ID NO: 22029 - DNA, 15 bp, Homo sapiens
aatgacattatcctt

SEQ ID NO: 22030 - DNA, 15 bp, Homo sapiens
aaatgacattatcct

SEQ ID NO: 22031 - DNA, 15 bp, Homo sapiens
aaaatgacattatcc

SEQ ID NO: 22032 - DNA, 15 bp, Homo sapiens
caaaatgacattatc

SEQ ID NO: 22033 - DNA, 15 bp, Homo sapiens
tcaaaatgacattat

SEQ ID NO: 22034 - DNA, 15 bp, Homo sapiens
atcaaaatgacatta

SEQ ID NO: 22035 - DNA, 15 bp, Homo sapiens
aatcaaaatgacatt

SEQ ID NO: 22036 - DNA, 15 bp, Homo sapiens
gaatcaaaatgacat

SEQ ID NO: 22037 - DNA, 15 bp, Homo sapiens
agaatcaaaatgaca

SEQ ID NO: 22038 - DNA, 15 bp, Homo sapiens
tagaatcaaaatgac

SEQ ID NO: 22039 - DNA, 15 bp, Homo sapiens
ctagaatcaaaatga

SEQ ID NO: 22040 - DNA, 15 bp, Homo sapiens
tctagaatcaaaatg

SEQ ID NO: 22041 - DNA, 15 bp, Homo sapiens
atctagaatcaaaat

SEQ ID NO: 22042 - DNA, 15 bp, Homo sapiens
aatctagaatcaaaa

SEQ ID NO: 22043 - DNA, 15 bp, Homo sapiens
gaatctagaatcaaa

SEQ ID NO: 22044 - DNA, 15 bp, Homo sapiens
agaatctagaatcaa

SEQ ID NO: 22045 - DNA, 15 bp, Homo sapiens
aagaatctagaatca

SEQ ID NO: 22046 - DNA, 15 bp, Homo sapiens
aaagaatctagaatc

SEQ ID NO: 22047 - DNA, 15 bp, Homo sapiens
aaaagaatctagaat

SEQ ID NO: 22048 - DNA, 15 bp, Homo sapiens
taaaagaatctagaa

SEQ ID NO: 22049 - DNA, 15 bp, Homo sapiens
ataaaagaatctaga

SEQ ID NO: 22050 - DNA, 15 bp, Homo sapiens
cataaaagaatctag

SEQ ID NO: 22051 - DNA, 15 bp, Homo sapiens
tcataaaagaatcta

SEQ ID NO: 22052 - DNA, 15 bp, Homo sapiens
ttcataaaagaatct

SEQ ID NO: 22053 - DNA, 15 bp, Homo sapiens
tttcataaaagaatc

SEQ ID NO: 22054 - DNA, 15 bp, Homo sapiens
gtttcataaaagaat

SEQ ID NO: 22055 - DNA, 15 bp, Homo sapiens
ggtttcataaaagaa

SEQ ID NO: 22056 - DNA, 15 bp, Homo sapiens
aggtttcataaaaga

SEQ ID NO: 22057 - DNA, 15 bp, Homo sapiens
caggtttcataaaag

SEQ ID NO: 22058 - DNA, 15 bp, Homo sapiens
acaggtttcataaaa

SEQ ID NO: 22059 - DNA, 15 bp, Homo sapiens
aacaggtttcataaa

SEQ ID NO: 22060 - DNA, 15 bp, Homo sapiens
aaacaggtttcataa

SEQ ID NO: 22061 - DNA, 15 bp, Homo sapiens
gaaacaggtttcata

SEQ ID NO: 22062 - DNA, 15 bp, Homo sapiens
agaaacaggtttcat

SEQ ID NO: 22063 - DNA, 15 bp, Homo sapiens
aagaaacaggtttca

SEQ ID NO: 22064 - DNA, 15 bp, Homo sapiens
gaagaaacaggtttc

SEQ ID NO: 22065 - DNA, 15 bp, Homo sapiens
agaagaaacaggttt

SEQ ID NO: 22066 - DNA, 15 bp, Homo sapiens
gagaagaaacaggtt

SEQ ID NO: 22067 - DNA, 15 bp, Homo sapiens
agagaagaaacaggt

SEQ ID NO: 22068 - DNA, 15 bp, Homo sapiens
cagagaagaaacagg

SEQ ID NO: 22069 - DNA, 15 bp, Homo sapiens
ccagagaagaaacag

SEQ ID NO: 22070 - DNA, 15 bp, Homo sapiens
gccagagaagaaaca

SEQ ID NO: 22071 - DNA, 15 bp, Homo sapiens
tgccagagaagaaac

SEQ ID NO: 22072 - DNA, 15 bp, Homo sapiens
ctgccagagaagaaa

SEQ ID NO: 22073 - DNA, 15 bp, Homo sapiens
gctgccagagaagaa

SEQ ID NO: 22074 - DNA, 15 bp, Homo sapiens
agctgccagagaaga

SEQ ID NO: 22075 - DNA, 15 bp, Homo sapiens
aagctgccagagaag

SEQ ID NO: 22076 - DNA, 15 bp, Homo sapiens
aaagctgccagagaa

SEQ ID NO: 22077 - DNA, 15 bp, Homo sapiens
aaaagctgccagaga

SEQ ID NO: 22078 - DNA, 15 bp, Homo sapiens
taaaagctgccagag

SEQ ID NO: 22079 - DNA, 15 bp, Homo sapiens
ctaaaagctgccaga

SEQ ID NO: 22080 - DNA, 15 bp, Homo sapiens
cctaaaagctgccag

SEQ ID NO: 22081 - DNA, 15 bp, Homo sapiens
tcctaaaagctgcca

SEQ ID NO: 22082 - DNA, 15 bp, Homo sapiens
atcctaaaagctgcc

SEQ ID NO: 22083 - DNA, 15 bp, Homo sapiens
gatcctaaaagctgc

SEQ ID NO: 22084 - DNA, 15 bp, Homo sapiens
agatcctaaaagctg

SEQ ID NO: 22085 - DNA, 15 bp, Homo sapiens
aagatcctaaaagct

SEQ ID NO: 22086 - DNA, 15 bp, Homo sapiens
gaagatcctaaaagc

SEQ ID NO: 22087 - DNA, 15 bp, Homo sapiens
agaagatcctaaaag

SEQ ID NO: 22088 - DNA, 15 bp, Homo sapiens
cagaagatcctaaaa

SEQ ID NO: 22089 - DNA, 15 bp, Homo sapiens
acagaagatcctaaa

SEQ ID NO: 22090 - DNA, 15 bp, Homo sapiens
aacagaagatcctaa

SEQ ID NO: 22091 - DNA, 15 bp, Homo sapiens
aaacagaagatccta

SEQ ID NO: 22092 - DNA, 15 bp, Homo sapiens
gaaacagaagatcct

SEQ ID NO: 22093 - DNA, 15 bp, Homo sapiens
agaaacagaagatcc

SEQ ID NO: 22094 - DNA, 15 bp, Homo sapiens
aagaaacagaagatc

SEQ ID NO: 22095 - DNA, 15 bp, Homo sapiens
aaagaaacagaagat

SEQ ID NO: 22096 - DNA, 15 bp, Homo sapiens
caaagaaacagaaga

SEQ ID NO: 22097 - DNA, 15 bp, Homo sapiens
ccaaagaaacagaag

SEQ ID NO: 22098 - DNA, 15 bp, Homo sapiens
accaaagaaacagaa

SEQ ID NO: 22099 - DNA, 15 bp, Homo sapiens
taccaaagaaacaga

SEQ ID NO: 22100 - DNA, 15 bp, Homo sapiens
ataccaaagaaacag

SEQ ID NO: 22101 - DNA, 15 bp, Homo sapiens
aataccaaagaaaca

SEQ ID NO: 22102 - DNA, 15 bp, Homo sapiens
gaataccaaagaaac

SEQ ID NO: 22103 - DNA, 15 bp, Homo sapiens
tgaataccaaagaaa

SEQ ID NO: 22104 - DNA, 15 bp, Homo sapiens
ctgaataccaaagaa

SEQ ID NO: 22105 - DNA, 15 bp, Homo sapiens
tctgaataccaaaga

SEQ ID NO: 22106 - DNA, 15 bp, Homo sapiens
ttctgaataccaaag

SEQ ID NO: 22107 - DNA, 15 bp, Homo sapiens
tttctgaataccaaa

SEQ ID NO: 22108 - DNA, 15 bp, Homo sapiens
atttctgaataccaa

SEQ ID NO: 22109 - DNA, 15 bp, Homo sapiens
aatttctgaatacca

SEQ ID NO: 22110 - DNA, 15 bp, Homo sapiens
aaatttctgaatacc

SEQ ID NO: 22111 - DNA, 15 bp, Homo sapiens
gaaatttctgaatac

SEQ ID NO: 22112 - DNA, 15 bp, Homo sapiens
tgaaatttctgaata

SEQ ID NO: 22113 - DNA, 15 bp, Homo sapiens
atgaaatttctgaat

SEQ ID NO: 22114 - DNA, 15 bp, Homo sapiens
catgaaatttctgaa

SEQ ID NO: 22115 - DNA, 15 bp, Homo sapiens
tcatgaaatttctga

SEQ ID NO: 22116 - DNA, 15 bp, Homo sapiens
ctcatgaaatttctg

SEQ ID NO: 22117 - DNA, 15 bp, Homo sapiens
tctcatgaaatttct

SEQ ID NO: 22118 - DNA, 15 bp, Homo sapiens
atctcatgaaatttc

SEQ ID NO: 22119 - DNA, 15 bp, Homo sapiens
tatctcatgaaattt

SEQ ID NO: 22120 - DNA, 15 bp, Homo sapiens
atatctcatgaaatt

SEQ ID NO: 22121 - DNA, 15 bp, Homo sapiens
catatctcatgaaat

SEQ ID NO: 22122 - DNA, 15 bp, Homo sapiens
acatatctcatgaaa

SEQ ID NO: 22123 - DNA, 15 bp, Homo sapiens
cacatatctcatgaa

SEQ ID NO: 22124 - DNA, 15 bp, Homo sapiens
acacatatctcatga

SEQ ID NO: 22125 - DNA, 15 bp, Homo sapiens
cacacatatctcatg

SEQ ID NO: 22126 - DNA, 15 bp, Homo sapiens
gcacacatatctcat

SEQ ID NO: 22127 - DNA, 15 bp, Homo sapiens
agcacacatatctca

SEQ ID NO: 22128 - DNA, 15 bp, Homo sapiens
aagcacacatatctc

SEQ ID NO: 22129 - DNA, 15 bp, Homo sapiens
gaagcacacatatct

SEQ ID NO: 22130 - DNA, 15 bp, Homo sapiens
agaagcacacatatc

SEQ ID NO: 22131 - DNA, 15 bp, Homo sapiens
tagaagcacacatat

SEQ ID NO: 22132 - DNA, 15 bp, Homo sapiens
atagaagcacacata

SEQ ID NO: 22133 - DNA, 15 bp, Homo sapiens
aatagaagcacacat

SEQ ID NO: 22134 - DNA, 15 bp, Homo sapiens
aaatagaagcacaca

SEQ ID NO: 22135 - DNA, 15 bp, Homo sapiens
aaaatagaagcacac

SEQ ID NO: 22136 - DNA, 15 bp, Homo sapiens
caaaatagaagcaca

SEQ ID NO: 22137 - DNA, 15 bp, Homo sapiens
ccaaaatagaagcac

SEQ ID NO: 22138 - DNA, 15 bp, Homo sapiens
accaaaatagaagca

SEQ ID NO: 22139 - DNA, 15 bp, Homo sapiens
gaccaaaatagaagc

SEQ ID NO: 22140 - DNA, 15 bp, Homo sapiens
agaccaaaatagaag

SEQ ID NO: 22141 - DNA, 15 bp, Homo sapiens
aagaccaaaatagaa

SEQ ID NO: 22142 - DNA, 15 bp, Homo sapiens
taagaccaaaataga

SEQ ID NO: 22143 - DNA, 15 bp, Homo sapiens
ataagaccaaaatag

SEQ ID NO: 22144 - DNA, 15 bp, Homo sapiens
aataagaccaaaata

SEQ ID NO: 22145 - DNA, 15 bp, Homo sapiens
aaataagaccaaaat

SEQ ID NO: 22146 - DNA, 15 bp, Homo sapiens
aaaataagaccaaaa

SEQ ID NO: 22147 - DNA, 15 bp, Homo sapiens
gaaaataagaccaaa

SEQ ID NO: 22148 - DNA, 15 bp, Homo sapiens
tgaaaataagaccaa

SEQ ID NO: 22149 - DNA, 15 bp, Homo sapiens
atgaaaataagacca

SEQ ID NO: 22150 - DNA, 15 bp, Homo sapiens
gatgaaaataagacc

SEQ ID NO: 22151 - DNA, 15 bp, Homo sapiens
agatgaaaataagac

SEQ ID NO: 22152 - DNA, 15 bp, Homo sapiens
cagatgaaaataaga

SEQ ID NO: 22153 - DNA, 15 bp, Homo sapiens
acagatgaaaataag

SEQ ID NO: 22154 - DNA, 15 bp, Homo sapiens
aacagatgaaaataa

SEQ ID NO: 22155 - DNA, 15 bp, Homo sapiens
aaacagatgaaaata

SEQ ID NO: 22156 - DNA, 15 bp, Homo sapiens
aaaacagatgaaaat

SEQ ID NO: 22157 - DNA, 15 bp, Homo sapiens
caaaacagatgaaaa

SEQ ID NO: 22158 - DNA, 15 bp, Homo sapiens
gcaaaacagatgaaa

SEQ ID NO: 22159 - DNA, 15 bp, Homo sapiens
ggcaaaacagatgaa

SEQ ID NO: 22160 - DNA, 15 bp, Homo sapiens
tggcaaaacagatga

SEQ ID NO: 22161 - DNA, 15 bp, Homo sapiens
ctggcaaaacagatg

SEQ ID NO: 22162 - DNA, 15 bp, Homo sapiens
cctggcaaaacagat

SEQ ID NO: 22163 - DNA, 15 bp, Homo sapiens
acctggcaaaacaga

SEQ ID NO: 22164 - DNA, 15 bp, Homo sapiens
tacctggcaaaacag

SEQ ID NO: 22165 - DNA, 15 bp, Homo sapiens
gtacctggcaaaaca

SEQ ID NO: 22166 - DNA, 15 bp, Homo sapiens
agtacctggcaaaac

SEQ ID NO: 22167 - DNA, 15 bp, Homo sapiens
gagtacctggcaaaa

SEQ ID NO: 22168 - DNA, 15 bp, Homo sapiens
tgagtacctggcaaa

SEQ ID NO: 22169 - DNA, 15 bp, Homo sapiens
atgagtacctggcaa

SEQ ID NO: 22170 - DNA, 15 bp, Homo sapiens
catgagtacctggca

SEQ ID NO: 22171 - DNA, 15 bp, Homo sapiens
gcatgagtacctggc

SEQ ID NO: 22172 - DNA, 15 bp, Homo sapiens
tgcatgagtacctgg

SEQ ID NO: 22173 - DNA, 15 bp, Homo sapiens
ttgcatgagtacctg

SEQ ID NO: 22174 - DNA, 15 bp, Homo sapiens
gttgcatgagtacct

SEQ ID NO: 22175 - DNA, 15 bp, Homo sapiens
agttgcatgagtacc

SEQ ID NO: 22176 - DNA, 15 bp, Homo sapiens
aagttgcatgagtac

SEQ ID NO: 22177 - DNA, 15 bp, Homo sapiens
aaagttgcatgagta

SEQ ID NO: 22178 - DNA, 15 bp, Homo sapiens
gaaagttgcatgagt

SEQ ID NO: 22179 - DNA, 15 bp, Homo sapiens
ggaaagttgcatgag

SEQ ID NO: 22180 - DNA, 15 bp, Homo sapiens
tggaaagttgcatga

SEQ ID NO: 22181 - DNA, 15 bp, Homo sapiens
ctggaaagttgcatg

SEQ ID NO: 22182 - DNA, 15 bp, Homo sapiens
actggaaagttgcat

SEQ ID NO: 22183 - DNA, 15 bp, Homo sapiens
aactggaaagttgca

SEQ ID NO: 22184 - DNA, 15 bp, Homo sapiens
aaactggaaagttgc

SEQ ID NO: 22185 - DNA, 15 bp, Homo sapiens
caaactggaaagttg

SEQ ID NO: 22186 - DNA, 15 bp, Homo sapiens
tcaaactggaaagtt

SEQ ID NO: 22187 - DNA, 15 bp, Homo sapiens
ttcaaactggaaagt

SEQ ID NO: 22188 - DNA, 15 bp, Homo sapiens
tttcaaactggaaag

SEQ ID NO: 22189 - DNA, 15 bp, Homo sapiens
ttttcaaactggaaa

SEQ ID NO: 22190 - DNA, 15 bp, Homo sapiens
gttttcaaactggaa

SEQ ID NO: 22191 - DNA, 15 bp, Homo sapiens
agttttcaaactgga

SEQ ID NO: 22192 - DNA, 15 bp, Homo sapiens
gagttttcaaactgg

SEQ ID NO: 22193 - DNA, 15 bp, Homo sapiens
tgagttttcaaactg

SEQ ID NO: 22194 - DNA, 15 bp, Homo sapiens
gtgagttttcaaact

SEQ ID NO: 22195 - DNA, 15 bp, Homo sapiens
tgtgagttttcaaac

SEQ ID NO: 22196 - DNA, 15 bp, Homo sapiens
atgtgagttttcaaa

SEQ ID NO: 22197 - DNA, 15 bp, Homo sapiens
gatgtgagttttcaa

SEQ ID NO: 22198 - DNA, 15 bp, Homo sapiens
ggatgtgagttttca

SEQ ID NO: 22199 - DNA, 15 bp, Homo sapiens
aggatgtgagttttc

SEQ ID NO: 22200 - DNA, 15 bp, Homo sapiens
aaggatgtgagtttt

SEQ ID NO: 22201 - DNA, 15 bp, Homo sapiens
gaaggatgtgagttt

SEQ ID NO: 22202 - DNA, 15 bp, Homo sapiens
tgaaggatgtgagtt

SEQ ID NO: 22203 - DNA, 15 bp, Homo sapiens
gtgaaggatgtgagt

SEQ ID NO: 22204 - DNA, 15 bp, Homo sapiens
agtgaaggatgtgag

SEQ ID NO: 22205 - DNA, 15 bp, Homo sapiens
aagtgaaggatgtga

SEQ ID NO: 22206 - DNA, 15 bp, Homo sapiens
aaagtgaaggatgtg

SEQ ID NO: 22207 - DNA, 15 bp, Homo sapiens
aaaagtgaaggatgt

SEQ ID NO: 22208 - DNA, 15 bp, Homo sapiens
caaaagtgaaggatg

SEQ ID NO: 22209 - DNA, 15 bp, Homo sapiens
tcaaaagtgaaggat

SEQ ID NO: 22210 - DNA, 15 bp, Homo sapiens
ctcaaaagtgaagga

SEQ ID NO: 22211 - DNA, 15 bp, Homo sapiens
actcaaaagtgaagg

SEQ ID NO: 22212 - DNA, 15 bp, Homo sapiens
tactcaaaagtgaag

SEQ ID NO: 22213 - DNA, 15 bp, Homo sapiens
atactcaaaagtgaa

SEQ ID NO: 22214 - DNA, 15 bp, Homo sapiens
aatactcaaaagtga

SEQ ID NO: 22215 - DNA, 15 bp, Homo sapiens
aaatactcaaaagtg

SEQ ID NO: 22216 - DNA, 15 bp, Homo sapiens
aaaatactcaaaagt

SEQ ID NO: 22217 - DNA, 15 bp, Homo sapiens
aaaaatactcaaaag

SEQ ID NO: 22218 - DNA, 15 bp, Homo sapiens
gaaaaatactcaaaa

SEQ ID NO: 22219 - DNA, 15 bp, Homo sapiens
agaaaaatactcaaa

SEQ ID NO: 22220 - DNA, 15 bp, Homo sapiens
aagaaaaatactcaa

SEQ ID NO: 22221 - DNA, 15 bp, Homo sapiens
caagaaaaatactca

SEQ ID NO: 22222 - DNA, 15 bp, Homo sapiens
tcaagaaaaatactc

SEQ ID NO: 22223 - DNA, 15 bp, Homo sapiens
ctcaagaaaaatact

SEQ ID NO: 22224 - DNA, 15 bp, Homo sapiens
actcaagaaaaatac

SEQ ID NO: 22225 - DNA, 15 bp, Homo sapiens
aactcaagaaaaata

SEQ ID NO: 22226 - DNA, 15 bp, Homo sapiens
taactcaagaaaaat

SEQ ID NO: 22227 - DNA, 15 bp, Homo sapiens
ataactcaagaaaaa

SEQ ID NO: 22228 - DNA, 15 bp, Homo sapiens
cataactcaagaaaa

SEQ ID NO: 22229 - DNA, 15 bp, Homo sapiens
acataactcaagaaa

SEQ ID NO: 22230 - DNA, 15 bp, Homo sapiens
gacataactcaagaa

SEQ ID NO: 22231 - DNA, 15 bp, Homo sapiens
agacataactcaaga

SEQ ID NO: 22232 - DNA, 15 bp, Homo sapiens
aagacataactcaag

SEQ ID NO: 22233 - DNA, 15 bp, Homo sapiens
gaagacataactcaa

SEQ ID NO: 22234 - DNA, 15 bp, Homo sapiens
cgaagacataactca

SEQ ID NO: 22235 - DNA, 15 bp, Homo sapiens
ccgaagacataactc

SEQ ID NO: 22236 - DNA, 15 bp, Homo sapiens
accgaagacataact

SEQ ID NO: 22237 - DNA, 15 bp, Homo sapiens
aaccgaagacataac

SEQ ID NO: 22238 - DNA, 15 bp, Homo sapiens
aaaccgaagacataa

SEQ ID NO: 22239 - DNA, 15 bp, Homo sapiens
gaaaccgaagacata

SEQ ID NO: 22240 - DNA, 15 bp, Homo sapiens
agaaaccgaagacat

SEQ ID NO: 22241 - DNA, 15 bp, Homo sapiens
aagaaaccgaagaca

SEQ ID NO: 22242 - DNA, 15 bp, Homo sapiens
gaagaaaccgaagac

SEQ ID NO: 22243 - DNA, 15 bp, Homo sapiens
agaagaaaccgaaga

SEQ ID NO: 22244 - DNA, 15 bp, Homo sapiens
gagaagaaaccgaag

SEQ ID NO: 22245 - DNA, 15 bp, Homo sapiens
tgagaagaaaccgaa

SEQ ID NO: 22246 - DNA, 15 bp, Homo sapiens
ctgagaagaaaccga

SEQ ID NO: 22247 - DNA, 15 bp, Homo sapiens
actgagaagaaaccg

SEQ ID NO: 22248 - DNA, 15 bp, Homo sapiens
cactgagaagaaacc

SEQ ID NO: 22249 - DNA, 15 bp, Homo sapiens
acactgagaagaaac

SEQ ID NO: 22250 - DNA, 15 bp, Homo sapiens
aacactgagaagaaa

SEQ ID NO: 22251 - DNA, 15 bp, Homo sapiens
gaacactgagaagaa

SEQ ID NO: 22252 - DNA, 15 bp, Homo sapiens
agaacactgagaaga

SEQ ID NO: 22253 - DNA, 15 bp, Homo sapiens
gagaacactgagaag

SEQ ID NO: 22254 - DNA, 15 bp, Homo sapiens
agagaacactgagaa

SEQ ID NO: 22255 - DNA, 15 bp, Homo sapiens
cagagaacactgaga

SEQ ID NO: 22256 - DNA, 15 bp, Homo sapiens
acagagaacactgag

SEQ ID NO: 22257 - DNA, 15 bp, Homo sapiens
aacagagaacactga

SEQ ID NO: 22258 - DNA, 15 bp, Homo sapiens
aaacagagaacactg

SEQ ID NO: 22259 - DNA, 15 bp, Homo sapiens
gaaacagagaacact

SEQ ID NO: 22260 - DNA, 15 bp, Homo sapiens
agaaacagagaacac

SEQ ID NO: 22261 - DNA, 15 bp, Homo sapiens
cagaaacagagaaca

SEQ ID NO: 22262 - DNA, 15 bp, Homo sapiens
ccagaaacagagaac

SEQ ID NO: 22263 - DNA, 15 bp, Homo sapiens
tccagaaacagagaa

SEQ ID NO: 22264 - DNA, 15 bp, Homo sapiens
ttccagaaacagaga

SEQ ID NO: 22265 - DNA, 15 bp, Homo sapiens
gttccagaaacagag

SEQ ID NO: 22266 - DNA, 15 bp, Homo sapiens
agttccagaaacaga

SEQ ID NO: 22267 - DNA, 15 bp, Homo sapiens
gagttccagaaacag

SEQ ID NO: 22268 - DNA, 15 bp, Homo sapiens
ggagttccagaaaca

SEQ ID NO: 22269 - DNA, 15 bp, Homo sapiens
aggagttccagaaac

SEQ ID NO: 22270 - DNA, 15 bp, Homo sapiens
taggagttccagaaa

SEQ ID NO: 22271 - DNA, 15 bp, Homo sapiens
ttaggagttccagaa

SEQ ID NO: 22272 - DNA, 15 bp, Homo sapiens
tttaggagttccaga

SEQ ID NO: 22273 - DNA, 15 bp, Homo sapiens
ttttaggagttccag

SEQ ID NO: 22274 - DNA, 15 bp, Homo sapiens
attttaggagttcca

SEQ ID NO: 22275 - DNA, 15 bp, Homo sapiens
tattttaggagttcc

SEQ ID NO: 22276 - DNA, 15 bp, Homo sapiens
atattttaggagttc

SEQ ID NO: 22277 - DNA, 15 bp, Homo sapiens
tatattttaggagtt

SEQ ID NO: 22278 - DNA, 15 bp, Homo sapiens
atatattttaggagt

SEQ ID NO: 22279 - DNA, 15 bp, Homo sapiens
aatatattttaggag

SEQ ID NO: 22280 - DNA, 15 bp, Homo sapiens
aaatatattttagga

SEQ ID NO: 22281 - DNA, 15 bp, Homo sapiens
taaatatattttagg

SEQ ID NO: 22282 - DNA, 15 bp, Homo sapiens
ttaaatatattttag

SEQ ID NO: 22283 - DNA, 15 bp, Homo sapiens
gttaaatatatttta

SEQ ID NO: 22284 - DNA, 15 bp, Homo sapiens
tgttaaatatatttt

SEQ ID NO: 22285 - DNA, 15 bp, Homo sapiens
atgttaaatatattt

SEQ ID NO: 22286 - DNA, 15 bp, Homo sapiens
gatgttaaatatatt

SEQ ID NO: 22287 - DNA, 15 bp, Homo sapiens
ggatgttaaatatat

SEQ ID NO: 22288 - DNA, 15 bp, Homo sapiens
aggatgttaaatata

SEQ ID NO: 22289 - DNA, 15 bp, Homo sapiens
caggatgttaaatat

SEQ ID NO: 22290 - DNA, 15 bp, Homo sapiens
tcaggatgttaaata

SEQ ID NO: 22291 - DNA, 15 bp, Homo sapiens
ttcaggatgttaaat

SEQ ID NO: 22292 - DNA, 15 bp, Homo sapiens
gttcaggatgttaaa

SEQ ID NO: 22293 - DNA, 15 bp, Homo sapiens
agttcaggatgttaa

SEQ ID NO: 22294 - DNA, 15 bp, Homo sapiens
gagttcaggatgtta

SEQ ID NO: 22295 - DNA, 15 bp, Homo sapiens
agagttcaggatgtt

SEQ ID NO: 22296 - DNA, 15 bp, Homo sapiens
aagagttcaggatgt

SEQ ID NO: 22297 - DNA, 15 bp, Homo sapiens
taagagttcaggatg

SEQ ID NO: 22298 - DNA, 15 bp, Homo sapiens
ctaagagttcaggat

SEQ ID NO: 22299 - DNA, 15 bp, Homo sapiens
actaagagttcagga

SEQ ID NO: 22300 - DNA, 15 bp, Homo sapiens
aactaagagttcagg

SEQ ID NO: 22301 - DNA, 15 bp, Homo sapiens
aaactaagagttcag

SEQ ID NO: 22302 - DNA, 15 bp, Homo sapiens
aaaactaagagttca

SEQ ID NO: 22303 - DNA, 15 bp, Homo sapiens
aaaaactaagagttc

SEQ ID NO: 22304 - DNA, 15 bp, Homo sapiens
caaaaactaagagtt

SEQ ID NO: 22305 - DNA, 15 bp, Homo sapiens
acaaaaactaagagt

SEQ ID NO: 22306 - DNA, 15 bp, Homo sapiens
aacaaaaactaagag

SEQ ID NO: 22307 - DNA, 15 bp, Homo sapiens
aaacaaaaactaaga

SEQ ID NO: 22308 - DNA, 15 bp, Homo sapiens
taaacaaaaactaag

SEQ ID NO: 22309 - DNA, 15 bp, Homo sapiens
ctaaacaaaaactaa

SEQ ID NO: 22310 - DNA, 15 bp, Homo sapiens
actaaacaaaaacta

SEQ ID NO: 22311 - DNA, 15 bp, Homo sapiens
gactaaacaaaaact

SEQ ID NO: 22312 - DNA, 15 bp, Homo sapiens
agactaaacaaaaac

SEQ ID NO: 22313 - DNA, 15 bp, Homo sapiens
aagactaaacaaaaa

SEQ ID NO: 22314 - DNA, 15 bp, Homo sapiens
gaagactaaacaaaa

SEQ ID NO: 22315 - DNA, 15 bp, Homo sapiens
agaagactaaacaaa

SEQ ID NO: 22316 - DNA, 15 bp, Homo sapiens
cagaagactaaacaa

SEQ ID NO: 22317 - DNA, 15 bp, Homo sapiens
tcagaagactaaaca

SEQ ID NO: 22318 - DNA, 15 bp, Homo sapiens
atcagaagactaaac

SEQ ID NO: 22319 - DNA, 15 bp, Homo sapiens
aatcagaagactaaa

SEQ ID NO: 22320 - DNA, 15 bp, Homo sapiens
aaatcagaagactaa

SEQ ID NO: 22321 - DNA, 15 bp, Homo sapiens
aaaatcagaagacta

SEQ ID NO: 22322 - DNA, 15 bp, Homo sapiens
gaaaatcagaagact

SEQ ID NO: 22323 - DNA, 15 bp, Homo sapiens
tgaaaatcagaagac

SEQ ID NO: 22324 - DNA, 15 bp, Homo sapiens
atgaaaatcagaaga

SEQ ID NO: 22325 - DNA, 15 bp, Homo sapiens
aatgaaaatcagaag

SEQ ID NO: 22326 - DNA, 15 bp, Homo sapiens
aaatgaaaatcagaa

SEQ ID NO: 22327 - DNA, 15 bp, Homo sapiens
caaatgaaaatcaga

SEQ ID NO: 22328 - DNA, 15 bp, Homo sapiens
acaaatgaaaatcag

SEQ ID NO: 22329 - DNA, 15 bp, Homo sapiens
gacaaatgaaaatca

SEQ ID NO: 22330 - DNA, 15 bp, Homo sapiens
agacaaatgaaaatc

SEQ ID NO: 22331 - DNA, 15 bp, Homo sapiens
aagacaaatgaaaat

SEQ ID NO: 22332 - DNA, 15 bp, Homo sapiens
aaagacaaatgaaaa

SEQ ID NO: 22333 - DNA, 15 bp, Homo sapiens
aaaagacaaatgaaa

SEQ ID NO: 22334 - DNA, 15 bp, Homo sapiens
aaaaagacaaatgaa

SEQ ID NO: 22335 - DNA, 15 bp, Homo sapiens
taaaaagacaaatga

SEQ ID NO: 22336 - DNA, 15 bp, Homo sapiens
ataaaaagacaaatg

SEQ ID NO: 22337 - DNA, 15 bp, Homo sapiens
aataaaaagacaaat

SEQ ID NO: 22338 - DNA, 15 bp, Homo sapiens
gaataaaaagacaaa

SEQ ID NO: 22339 - DNA, 15 bp, Homo sapiens
agaataaaaagacaa

SEQ ID NO: 22340 - DNA, 15 bp, Homo sapiens
cagaataaaaagaca

SEQ ID NO: 22341 - DNA, 15 bp, Homo sapiens
acagaataaaaagac

SEQ ID NO: 22342 - DNA, 15 bp, Homo sapiens
tacagaataaaaaga

SEQ ID NO: 22343 - DNA, 15 bp, Homo sapiens
atacagaataaaaag

SEQ ID NO: 22344 - DNA, 15 bp, Homo sapiens
tatacagaataaaaa

SEQ ID NO: 22345 - DNA, 15 bp, Homo sapiens
atatacagaataaaa

SEQ ID NO: 22346 - DNA, 15 bp, Homo sapiens
aatatacagaataaa

SEQ ID NO: 22347 - DNA, 15 bp, Homo sapiens
gaatatacagaataa

SEQ ID NO: 22348 - DNA, 15 bp, Homo sapiens
agaatatacagaata

SEQ ID NO: 22349 - DNA, 15 bp, Homo sapiens
cagaatatacagaat

SEQ ID NO: 22350 - DNA, 15 bp, Homo sapiens
acagaatatacagaa

SEQ ID NO: 22351 - DNA, 15 bp, Homo sapiens
aacagaatatacaga

SEQ ID NO: 22352 - DNA, 15 bp, Homo sapiens
taacagaatatacag

SEQ ID NO: 22353 - DNA, 15 bp, Homo sapiens
ttaacagaatataca

SEQ ID NO: 22354 - DNA, 15 bp, Homo sapiens
attaacagaatatac

SEQ ID NO: 22355 - DNA, 15 bp, Homo sapiens
aattaacagaatata

SEQ ID NO: 22356 - DNA, 15 bp, Homo sapiens
gaattaacagaatat

SEQ ID NO: 22357 - DNA, 15 bp, Homo sapiens
ggaattaacagaata

SEQ ID NO: 22358 - DNA, 15 bp, Homo sapiens
aggaattaacagaat

SEQ ID NO: 22359 - DNA, 15 bp, Homo sapiens
gaggaattaacagaa

SEQ ID NO: 22360 - DNA, 15 bp, Homo sapiens
cgaggaattaacaga

SEQ ID NO: 22361 - DNA, 15 bp, Homo sapiens
ccgaggaattaacag

SEQ ID NO: 22362 - DNA, 15 bp, Homo sapiens
gccgaggaattaaca

SEQ ID NO: 22363 - DNA, 15 bp, Homo sapiens
agccgaggaattaac

SEQ ID NO: 22364 - DNA, 15 bp, Homo sapiens
aagccgaggaattaa

SEQ ID NO: 22365 - DNA, 15 bp, Homo sapiens
gaagccgaggaatta

SEQ ID NO: 22366 - DNA, 15 bp, Homo sapiens
tgaagccgaggaatt

SEQ ID NO: 22367 - DNA, 15 bp, Homo sapiens
atgaagccgaggaat

SEQ ID NO: 22368 - DNA, 15 bp, Homo sapiens
catgaagccgaggaa

SEQ ID NO: 22369 - DNA, 15 bp, Homo sapiens
ccatgaagccgagga

SEQ ID NO: 22370 - DNA, 15 bp, Homo sapiens
accatgaagccgagg

SEQ ID NO: 22371 - DNA, 15 bp, Homo sapiens
gaccatgaagccgag

SEQ ID NO: 22372 - DNA, 15 bp, Homo sapiens
agaccatgaagccga

SEQ ID NO: 22373 - DNA, 15 bp, Homo sapiens
aagaccatgaagccg

SEQ ID NO: 22374 - DNA, 15 bp, Homo sapiens
gaagaccatgaagcc

SEQ ID NO: 22375 - DNA, 15 bp, Homo sapiens
agaagaccatgaagc

SEQ ID NO: 22376 - DNA, 15 bp, Homo sapiens
tagaagaccatgaag

SEQ ID NO: 22377 - DNA, 15 bp, Homo sapiens
ctagaagaccatgaa

SEQ ID NO: 22378 - DNA, 15 bp, Homo sapiens
gctagaagaccatga

SEQ ID NO: 22379 - DNA, 15 bp, Homo sapiens
ggctagaagaccatg

SEQ ID NO: 22380 - DNA, 15 bp, Homo sapiens
gggctagaagaccat

SEQ ID NO: 22381 - DNA, 15 bp, Homo sapiens
agggctagaagacca

SEQ ID NO: 22382 - DNA, 15 bp, Homo sapiens
aagggctagaagacc

SEQ ID NO: 22383 - DNA, 15 bp, Homo sapiens
gaagggctagaagac

SEQ ID NO: 22384 - DNA, 15 bp, Homo sapiens
agaagggctagaaga

SEQ ID NO: 22385 - DNA, 15 bp, Homo sapiens
aagaagggctagaag

SEQ ID NO: 22386 - DNA, 15 bp, Homo sapiens
aaagaagggctagaa

SEQ ID NO: 22387 - DNA, 15 bp, Homo sapiens
aaaagaagggctaga

SEQ ID NO: 22388 - DNA, 15 bp, Homo sapiens
caaaagaagggctag

SEQ ID NO: 22389 - DNA, 15 bp, Homo sapiens
gcaaaagaagggcta

SEQ ID NO: 22390 - DNA, 15 bp, Homo sapiens
ggcaaaagaagggct

SEQ ID NO: 22391 - DNA, 15 bp, Homo sapiens
aggcaaaagaagggc

SEQ ID NO: 22392 - DNA, 15 bp, Homo sapiens
taggcaaaagaaggg

SEQ ID NO: 22393 - DNA, 15 bp, Homo sapiens
ataggcaaaagaagg

SEQ ID NO: 22394 - DNA, 15 bp, Homo sapiens
gataggcaaaagaag

SEQ ID NO: 22395 - DNA, 15 bp, Homo sapiens
agataggcaaaagaa

SEQ ID NO: 22396 - DNA, 15 bp, Homo sapiens
aagataggcaaaaga

SEQ ID NO: 22397 - DNA, 15 bp, Homo sapiens
taagataggcaaaag

SEQ ID NO: 22398 - DNA, 15 bp, Homo sapiens
ataagataggcaaaa

SEQ ID NO: 22399 - DNA, 15 bp, Homo sapiens
cataagataggcaaa

SEQ ID NO: 22400 - DNA, 15 bp, Homo sapiens
ccataagataggcaa

SEQ ID NO: 22401 - DNA, 15 bp, Homo sapiens
cccataagataggca

SEQ ID NO: 22402 - DNA, 15 bp, Homo sapiens
ccccataagataggc

SEQ ID NO: 22403 - DNA, 15 bp, Homo sapiens
accccataagatagg

SEQ ID NO: 22404 - DNA, 15 bp, Homo sapiens
aaccccataagatag

SEQ ID NO: 22405 - DNA, 15 bp, Homo sapiens
caaccccataagata

SEQ ID NO: 22406 - DNA, 15 bp, Homo sapiens
tcaaccccataagat

SEQ ID NO: 22407 - DNA, 15 bp, Homo sapiens
ctcaaccccataaga

SEQ ID NO: 22408 - DNA, 15 bp, Homo sapiens
cctcaaccccataag

SEQ ID NO: 22409 - DNA, 15 bp, Homo sapiens
tcctcaaccccataa

SEQ ID NO: 22410 - DNA, 15 bp, Homo sapiens
atcctcaaccccata

SEQ ID NO: 22411 - DNA, 15 bp, Homo sapiens
aatcctcaaccccat

SEQ ID NO: 22412 - DNA, 15 bp, Homo sapiens
taatcctcaacccca

SEQ ID NO: 22413 - DNA, 15 bp, Homo sapiens
ttaatcctcaacccc

SEQ ID NO: 22414 - DNA, 15 bp, Homo sapiens
tttaatcctcaaccc

SEQ ID NO: 22415 - DNA, 15 bp, Homo sapiens
gtttaatcctcaacc

SEQ ID NO: 22416 - DNA, 15 bp, Homo sapiens
tgtttaatcctcaac

SEQ ID NO: 22417 - DNA, 15 bp, Homo sapiens
ctgtttaatcctcaa

SEQ ID NO: 22418 - DNA, 15 bp, Homo sapiens
actgtttaatcctca

SEQ ID NO: 22419 - DNA, 15 bp, Homo sapiens
aactgtttaatcctc

SEQ ID NO: 22420 - DNA, 15 bp, Homo sapiens
aaactgtttaatcct

SEQ ID NO: 22421 - DNA, 15 bp, Homo sapiens
taaactgtttaatcc

SEQ ID NO: 22422 - DNA, 15 bp, Homo sapiens
ataaactgtttaatc

SEQ ID NO: 22423 - DNA, 15 bp, Homo sapiens
tataaactgtttaat

SEQ ID NO: 22424 - DNA, 15 bp, Homo sapiens
atataaactgtttaa

SEQ ID NO: 22425 - DNA, 15 bp, Homo sapiens
tatataaactgttta

SEQ ID NO: 22426 - DNA, 15 bp, Homo sapiens
gtatataaactgttt

SEQ ID NO: 22427 - DNA, 15 bp, Homo sapiens
ggtatataaactgtt

SEQ ID NO: 22428 - DNA, 15 bp, Homo sapiens
aggtatataaactgt

SEQ ID NO: 22429 - DNA, 15 bp, Homo sapiens
caggtatataaactg

SEQ ID NO: 22430 - DNA, 15 bp, Homo sapiens
tcaggtatataaact

SEQ ID NO: 22431 - DNA, 15 bp, Homo sapiens
ctcaggtatataaac

SEQ ID NO: 22432 - DNA, 15 bp, Homo sapiens
cctcaggtatataaa

SEQ ID NO: 22433 - DNA, 15 bp, Homo sapiens
acctcaggtatataa

SEQ ID NO: 22434 - DNA, 15 bp, Homo sapiens
cacctcaggtatata

SEQ ID NO: 22435 - DNA, 15 bp, Homo sapiens
gcacctcaggtatat

SEQ ID NO: 22436 - DNA, 15 bp, Homo sapiens
agcacctcaggtata

SEQ ID NO: 22437 - DNA, 15 bp, Homo sapiens
aagcacctcaggtat

SEQ ID NO: 22438 - DNA, 15 bp, Homo sapiens
taagcacctcaggta

SEQ ID NO: 22439 - DNA, 15 bp, Homo sapiens
ctaagcacctcaggt

SEQ ID NO: 22440 - DNA, 15 bp, Homo sapiens
cctaagcacctcagg

SEQ ID NO: 22441 - DNA, 15 bp, Homo sapiens
tcctaagcacctcag

SEQ ID NO: 22442 - DNA, 15 bp, Homo sapiens
atcctaagcacctca

SEQ ID NO: 22443 - DNA, 15 bp, Homo sapiens
tatcctaagcacctc

SEQ ID NO: 22444 - DNA, 15 bp, Homo sapiens
atatcctaagcacct

SEQ ID NO: 22445 - DNA, 15 bp, Homo sapiens
catatcctaagcacc

SEQ ID NO: 22446 - DNA, 15 bp, Homo sapiens
acatatcctaagcac

SEQ ID NO: 22447 - DNA, 15 bp, Homo sapiens
gacatatcctaagca

SEQ ID NO: 22448 - DNA, 15 bp, Homo sapiens
agacatatcctaagc

SEQ ID NO: 22449 - DNA, 15 bp, Homo sapiens
cagacatatcctaag

SEQ ID NO: 22450 - DNA, 15 bp, Homo sapiens
acagacatatcctaa

SEQ ID NO: 22451 - DNA, 15 bp, Homo sapiens
gacagacatatccta

SEQ ID NO: 22452 - DNA, 15 bp, Homo sapiens
tgacagacatatcct

SEQ ID NO: 22453 - DNA, 15 bp, Homo sapiens
atgacagacatatcc

SEQ ID NO: 22454 - DNA, 15 bp, Homo sapiens
tatgacagacatatc

SEQ ID NO: 22455 - DNA, 15 bp, Homo sapiens
atatgacagacatat

SEQ ID NO: 22456 - DNA, 15 bp, Homo sapiens
tatatgacagacata

SEQ ID NO: 22457 - DNA, 15 bp, Homo sapiens
ctatatgacagacat

SEQ ID NO: 22458 - DNA, 15 bp, Homo sapiens
actatatgacagaca

SEQ ID NO: 22459 - DNA, 15 bp, Homo sapiens
tactatatgacagac

SEQ ID NO: 22460 - DNA, 15 bp, Homo sapiens
ttactatatgacaga

SEQ ID NO: 22461 - DNA, 15 bp, Homo sapiens
cttactatatgacag

SEQ ID NO: 22462 - DNA, 15 bp, Homo sapiens
acttactatatgaca

SEQ ID NO: 22463 - DNA, 15 bp, Homo sapiens
cacttactatatgac

SEQ ID NO: 22464 - DNA, 15 bp, Homo sapiens
gcacttactatatga

SEQ ID NO: 22465 - DNA, 15 bp, Homo sapiens
agcacttactatatg

SEQ ID NO: 22466 - DNA, 15 bp, Homo sapiens
aagcacttactatat

SEQ ID NO: 22467 - DNA, 15 bp, Homo sapiens
caagcacttactata

SEQ ID NO: 22468 - DNA, 15 bp, Homo sapiens
acaagcacttactat

SEQ ID NO: 22469 - DNA, 15 bp, Homo sapiens
cacaagcacttacta

SEQ ID NO: 22470 - DNA, 15 bp, Homo sapiens
acacaagcacttact

SEQ ID NO: 22471 - DNA, 15 bp, Homo sapiens
aacacaagcacttac

SEQ ID NO: 22472 - DNA, 15 bp, Homo sapiens
taacacaagcactta

SEQ ID NO: 22473 - DNA, 15 bp, Homo sapiens
ctaacacaagcactt

SEQ ID NO: 22474 - DNA, 15 bp, Homo sapiens
gctaacacaagcact

SEQ ID NO: 22475 - DNA, 15 bp, Homo sapiens
agctaacacaagcac

SEQ ID NO: 22476 - DNA, 15 bp, Homo sapiens
cagctaacacaagca

SEQ ID NO: 22477 - DNA, 15 bp, Homo sapiens
acagctaacacaagc

SEQ ID NO: 22478 - DNA, 15 bp, Homo sapiens
tacagctaacacaag

SEQ ID NO: 22479 - DNA, 15 bp, Homo sapiens
ttacagctaacacaa

SEQ ID NO: 22480 - DNA, 15 bp, Homo sapiens
attacagctaacaca

SEQ ID NO: 22481 - DNA, 15 bp, Homo sapiens
aattacagctaacac

SEQ ID NO: 22482 - DNA, 15 bp, Homo sapiens
caattacagctaaca

SEQ ID NO: 22483 - DNA, 15 bp, Homo sapiens
acaattacagctaac

SEQ ID NO: 22484 - DNA, 15 bp, Homo sapiens
aacaattacagctaa

SEQ ID NO: 22485 - DNA, 15 bp, Homo sapiens
caacaattacagcta

SEQ ID NO: 22486 - DNA, 15 bp, Homo sapiens
acaacaattacagct

SEQ ID NO: 22487 - DNA, 15 bp, Homo sapiens
aacaacaattacagc

SEQ ID NO: 22488 - DNA, 15 bp, Homo sapiens
aaacaacaattacag

SEQ ID NO: 22489 - DNA, 15 bp, Homo sapiens
taaacaacaattaca

SEQ ID NO: 22490 - DNA, 15 bp, Homo sapiens
gtaaacaacaattac

SEQ ID NO: 22491 - DNA, 15 bp, Homo sapiens
agtaaacaacaatta

SEQ ID NO: 22492 - DNA, 15 bp, Homo sapiens
aagtaaacaacaatt

SEQ ID NO: 22493 - DNA, 15 bp, Homo sapiens
aaagtaaacaacaat

SEQ ID NO: 22494 - DNA, 15 bp, Homo sapiens
gaaagtaaacaacaa

SEQ ID NO: 22495 - DNA, 15 bp, Homo sapiens
tgaaagtaaacaaca

SEQ ID NO: 22496 - DNA, 15 bp, Homo sapiens
atgaaagtaaacaac

SEQ ID NO: 22497 - DNA, 15 bp, Homo sapiens
tatgaaagtaaacaa

SEQ ID NO: 22498 - DNA, 15 bp, Homo sapiens
ttatgaaagtaaaca

SEQ ID NO: 22499 - DNA, 15 bp, Homo sapiens
gttatgaaagtaaac

SEQ ID NO: 22500 - DNA, 15 bp, Homo sapiens
agttatgaaagtaaa

SEQ ID NO: 22501 - DNA, 15 bp, Homo sapiens
cagttatgaaagtaa

SEQ ID NO: 22502 - DNA, 15 bp, Homo sapiens
acagttatgaaagta

SEQ ID NO: 22503 - DNA, 15 bp, Homo sapiens
gacagttatgaaagt

SEQ ID NO: 22504 - DNA, 15 bp, Homo sapiens
agacagttatgaaag

SEQ ID NO: 22505 - DNA, 15 bp, Homo sapiens
aagacagttatgaaa

SEQ ID NO: 22506 - DNA, 15 bp, Homo sapiens
caagacagttatgaa

SEQ ID NO: 22507 - DNA, 15 bp, Homo sapiens
tcaagacagttatga

SEQ ID NO: 22508 - DNA, 15 bp, Homo sapiens
ctcaagacagttatg

SEQ ID NO: 22509 - DNA, 15 bp, Homo sapiens
cctcaagacagttat

SEQ ID NO: 22510 - DNA, 15 bp, Homo sapiens
ccctcaagacagtta

SEQ ID NO: 22511 - DNA, 15 bp, Homo sapiens
tccctcaagacagtt

SEQ ID NO: 22512 - DNA, 15 bp, Homo sapiens
ttccctcaagacagt

SEQ ID NO: 22513 - DNA, 15 bp, Homo sapiens
tttccctcaagacag

SEQ ID NO: 22514 - DNA, 15 bp, Homo sapiens
ctttccctcaagaca

SEQ ID NO: 22515 - DNA, 15 bp, Homo sapiens
cctttccctcaagac

SEQ ID NO: 22516 - DNA, 15 bp, Homo sapiens
acctttccctcaaga

SEQ ID NO: 22517 - DNA, 15 bp, Homo sapiens
gacctttccctcaag

SEQ ID NO: 22518 - DNA, 15 bp, Homo sapiens
agacctttccctcaa

SEQ ID NO: 22519 - DNA, 15 bp, Homo sapiens
aagacctttccctca

SEQ ID NO: 22520 - DNA, 15 bp, Homo sapiens
aaagacctttccctc

SEQ ID NO: 22521 - DNA, 15 bp, Homo sapiens
caaagacctttccct

SEQ ID NO: 22522 - DNA, 15 bp, Homo sapiens
ccaaagacctttccc

SEQ ID NO: 22523 - DNA, 15 bp, Homo sapiens
accaaagacctttcc

SEQ ID NO: 22524 - DNA, 15 bp, Homo sapiens
gaccaaagacctttc

SEQ ID NO: 22525 - DNA, 15 bp, Homo sapiens
agaccaaagaccttt

SEQ ID NO: 22526 - DNA, 15 bp, Homo sapiens
aagaccaaagacctt

SEQ ID NO: 22527 - DNA, 15 bp, Homo sapiens
caagaccaaagacct

SEQ ID NO: 22528 - DNA, 15 bp, Homo sapiens
tcaagaccaaagacc

SEQ ID NO: 22529 - DNA, 15 bp, Homo sapiens
atcaagaccaaagac

SEQ ID NO: 22530 - DNA, 15 bp, Homo sapiens
aatcaagaccaaaga

SEQ ID NO: 22531 - DNA, 15 bp, Homo sapiens
gaatcaagaccaaag

SEQ ID NO: 22532 - DNA, 15 bp, Homo sapiens
agaatcaagaccaaa

SEQ ID NO: 22533 - DNA, 15 bp, Homo sapiens
aagaatcaagaccaa

SEQ ID NO: 22534 - DNA, 15 bp, Homo sapiens
aaagaatcaagacca

SEQ ID NO: 22535 - DNA, 15 bp, Homo sapiens
caaagaatcaagacc

SEQ ID NO: 22536 - DNA, 15 bp, Homo sapiens
tcaaagaatcaagac

SEQ ID NO: 22537 - DNA, 15 bp, Homo sapiens
gtcaaagaatcaaga

SEQ ID NO: 22538 - DNA, 15 bp, Homo sapiens
agtcaaagaatcaag

SEQ ID NO: 22539 - DNA, 15 bp, Homo sapiens
aagtcaaagaatcaa

SEQ ID NO: 22540 - DNA, 15 bp, Homo sapiens
gaagtcaaagaatca

SEQ ID NO: 22541 - DNA, 15 bp, Homo sapiens
agaagtcaaagaatc

SEQ ID NO: 22542 - DNA, 15 bp, Homo sapiens
aagaagtcaaagaat

SEQ ID NO: 22543 - DNA, 15 bp, Homo sapiens
caagaagtcaaagaa

SEQ ID NO: 22544 - DNA, 15 bp, Homo sapiens
ccaagaagtcaaaga

SEQ ID NO: 22545 - DNA, 15 bp, Homo sapiens
gccaagaagtcaaag

SEQ ID NO: 22546 - DNA, 15 bp, Homo sapiens
agccaagaagtcaaa

SEQ ID NO: 22547 - DNA, 15 bp, Homo sapiens
cagccaagaagtcaa

SEQ ID NO: 22548 - DNA, 15 bp, Homo sapiens
acagccaagaagtca

SEQ ID NO: 22549 - DNA, 15 bp, Homo sapiens
tacagccaagaagtc

SEQ ID NO: 22550 - DNA, 15 bp, Homo sapiens
gtacagccaagaagt

SEQ ID NO: 22551 - DNA, 15 bp, Homo sapiens
tgtacagccaagaag

SEQ ID NO: 22552 - DNA, 15 bp, Homo sapiens
atgtacagccaagaa

SEQ ID NO: 22553 - DNA, 15 bp, Homo sapiens
catgtacagccaaga

SEQ ID NO: 22554 - DNA, 15 bp, Homo sapiens
tcatgtacagccaag

SEQ ID NO: 22555 - DNA, 15 bp, Homo sapiens
gtcatgtacagccaa

SEQ ID NO: 22556 - DNA, 15 bp, Homo sapiens
ggtcatgtacagcca

SEQ ID NO: 22557 - DNA, 15 bp, Homo sapiens
aggtcatgtacagcc

SEQ ID NO: 22558 - DNA, 15 bp, Homo sapiens
aaggtcatgtacagc

SEQ ID NO: 22559 - DNA, 15 bp, Homo sapiens
caaggtcatgtacag

SEQ ID NO: 22560 - DNA, 15 bp, Homo sapiens
ccaaggtcatgtaca

SEQ ID NO: 22561 - DNA, 15 bp, Homo sapiens
tccaaggtcatgtac

SEQ ID NO: 22562 - DNA, 15 bp, Homo sapiens
gtccaaggtcatgta

SEQ ID NO: 22563 - DNA, 15 bp, Homo sapiens
cgtccaaggtcatgt

SEQ ID NO: 22564 - DNA, 15 bp, Homo sapiens
tcgtccaaggtcatg

SEQ ID NO: 22565 - DNA, 15 bp, Homo sapiens
ctcgtccaaggtcat

SEQ ID NO: 22566 - DNA, 15 bp, Homo sapiens
actcgtccaaggtca

SEQ ID NO: 22567 - DNA, 15 bp, Homo sapiens
aactcgtccaaggtc

SEQ ID NO: 22568 - DNA, 15 bp, Homo sapiens
taactcgtccaaggt

SEQ ID NO: 22569 - DNA, 15 bp, Homo sapiens
ataactcgtccaagg

SEQ ID NO: 22570 - DNA, 15 bp, Homo sapiens
cataactcgtccaag

SEQ ID NO: 22571 - DNA, 15 bp, Homo sapiens
acataactcgtccaa

SEQ ID NO: 22572 - DNA, 15 bp, Homo sapiens
tacataactcgtcca

SEQ ID NO: 22573 - DNA, 15 bp, Homo sapiens
ttacataactcgtcc

SEQ ID NO: 22574 - DNA, 15 bp, Homo sapiens
attacataactcgtc

SEQ ID NO: 22575 - DNA, 15 bp, Homo sapiens
gattacataactcgt

SEQ ID NO: 22576 - DNA, 15 bp, Homo sapiens
agattacataactcg

SEQ ID NO: 22577 - DNA, 15 bp, Homo sapiens
gagattacataactc

SEQ ID NO: 22578 - DNA, 15 bp, Homo sapiens
agagattacataact

SEQ ID NO: 22579 - DNA, 15 bp, Homo sapiens
aagagattacataac

SEQ ID NO: 22580 - DNA, 15 bp, Homo sapiens
aaagagattacataa

SEQ ID NO: 22581 - DNA, 15 bp, Homo sapiens
caaagagattacata

SEQ ID NO: 22582 - DNA, 15 bp, Homo sapiens
tcaaagagattacat

SEQ ID NO: 22583 - DNA, 15 bp, Homo sapiens
ctcaaagagattaca

SEQ ID NO: 22584 - DNA, 15 bp, Homo sapiens
tctcaaagagattac

SEQ ID NO: 22585 - DNA, 15 bp, Homo sapiens
gtctcaaagagatta

SEQ ID NO: 22586 - DNA, 15 bp, Homo sapiens
ggtctcaaagagatt

SEQ ID NO: 22587 - DNA, 15 bp, Homo sapiens
aggtctcaaagagat

SEQ ID NO: 22588 - DNA, 15 bp, Homo sapiens
taggtctcaaagaga

SEQ ID NO: 22589 - DNA, 15 bp, Homo sapiens
gtaggtctcaaagag

SEQ ID NO: 22590 - DNA, 15 bp, Homo sapiens
ggtaggtctcaaaga

SEQ ID NO: 22591 - DNA, 15 bp, Homo sapiens
aggtaggtctcaaag

SEQ ID NO: 22592 - DNA, 15 bp, Homo sapiens
gaggtaggtctcaaa

SEQ ID NO: 22593 - DNA, 15 bp, Homo sapiens
ggaggtaggtctcaa

SEQ ID NO: 22594 - DNA, 15 bp, Homo sapiens
gggaggtaggtctca

SEQ ID NO: 22595 - DNA, 15 bp, Homo sapiens
agggaggtaggtctc

SEQ ID NO: 22596 - DNA, 15 bp, Homo sapiens
gagggaggtaggtct

SEQ ID NO: 22597 - DNA, 15 bp, Homo sapiens
agagggaggtaggtc

SEQ ID NO: 22598 - DNA, 15 bp, Homo sapiens
aagagggaggtaggt

SEQ ID NO: 22599 - DNA, 15 bp, Homo sapiens
gaagagggaggtagg

SEQ ID NO: 22600 - DNA, 15 bp, Homo sapiens
agaagagggaggtag

SEQ ID NO: 22601 - DNA, 15 bp, Homo sapiens
cagaagagggaggta

SEQ ID NO: 22602 - DNA, 15 bp, Homo sapiens
acagaagagggaggt

SEQ ID NO: 22603 - DNA, 15 bp, Homo sapiens
tacagaagagggagg

SEQ ID NO: 22604 - DNA, 15 bp, Homo sapiens
atacagaagagggag

SEQ ID NO: 22605 - DNA, 15 bp, Homo sapiens
tatacagaagaggga

SEQ ID NO: 22606 - DNA, 15 bp, Homo sapiens
ctatacagaagaggg

SEQ ID NO: 22607 - DNA, 15 bp, Homo sapiens
actatacagaagagg

SEQ ID NO: 22608 - DNA, 15 bp, Homo sapiens
cactatacagaagag

SEQ ID NO: 22609 - DNA, 15 bp, Homo sapiens
acactatacagaaga

SEQ ID NO: 22610 - DNA, 15 bp, Homo sapiens
aacactatacagaag

SEQ ID NO: 22611 - DNA, 15 bp, Homo sapiens
taacactatacagaa

SEQ ID NO: 22612 - DNA, 15 bp, Homo sapiens
ttaacactatacaga

SEQ ID NO: 22613 - DNA, 15 bp, Homo sapiens
attaacactatacag

SEQ ID NO: 22614 - DNA, 15 bp, Homo sapiens
tattaacactataca

SEQ ID NO: 22615 - DNA, 15 bp, Homo sapiens
ttattaacactatac

SEQ ID NO: 22616 - DNA, 15 bp, Homo sapiens
cttattaacactata

SEQ ID NO: 22617 - DNA, 15 bp, Homo sapiens
gcttattaacactat

SEQ ID NO: 22618 - DNA, 15 bp, Homo sapiens
agcttattaacacta

SEQ ID NO: 22619 - DNA, 15 bp, Homo sapiens
gagcttattaacact

SEQ ID NO: 22620 - DNA, 15 bp, Homo sapiens
agagcttattaacac

SEQ ID NO: 22621 - DNA, 15 bp, Homo sapiens
tagagcttattaaca

SEQ ID NO: 22622 - DNA, 15 bp, Homo sapiens
ctagagcttattaac

SEQ ID NO: 22623 - DNA, 15 bp, Homo sapiens
gctagagcttattaa

SEQ ID NO: 22624 - DNA, 15 bp, Homo sapiens
agctagagcttatta

SEQ ID NO: 22625 - DNA, 15 bp, Homo sapiens
gagctagagcttatt

SEQ ID NO: 22626 - DNA, 15 bp, Homo sapiens
agagctagagcttat

SEQ ID NO: 22627 - DNA, 15 bp, Homo sapiens
gagagctagagctta

SEQ ID NO: 22628 - DNA, 15 bp, Homo sapiens
tgagagctagagctt

SEQ ID NO: 22629 - DNA, 15 bp, Homo sapiens
ctgagagctagagct

SEQ ID NO: 22630 - DNA, 15 bp, Homo sapiens
tctgagagctagagc

SEQ ID NO: 22631 - DNA, 15 bp, Homo sapiens
atctgagagctagag

SEQ ID NO: 22632 - DNA, 15 bp, Homo sapiens
catctgagagctaga

SEQ ID NO: 22633 - DNA, 15 bp, Homo sapiens
acatctgagagctag

SEQ ID NO: 22634 - DNA, 15 bp, Homo sapiens
aacatctgagagcta

SEQ ID NO: 22635 - DNA, 15 bp, Homo sapiens
aaacatctgagagct

SEQ ID NO: 22636 - DNA, 15 bp, Homo sapiens
caaacatctgagagc

SEQ ID NO: 22637 - DNA, 15 bp, Homo sapiens
acaaacatctgagag

SEQ ID NO: 22638 - DNA, 15 bp, Homo sapiens
cacaaacatctgaga

SEQ ID NO: 22639 - DNA, 15 bp, Homo sapiens
tcacaaacatctgag

SEQ ID NO: 22640 - DNA, 15 bp, Homo sapiens
ctcacaaacatctga

SEQ ID NO: 22641 - DNA, 15 bp, Homo sapiens
cctcacaaacatctg

SEQ ID NO: 22642 - DNA, 15 bp, Homo sapiens
ccctcacaaacatct

SEQ ID NO: 22643 - DNA, 15 bp, Homo sapiens
accctcacaaacatc

SEQ ID NO: 22644 - DNA, 15 bp, Homo sapiens
gaccctcacaaacat

SEQ ID NO: 22645 - DNA, 15 bp, Homo sapiens
cgaccctcacaaaca

SEQ ID NO: 22646 - DNA, 15 bp, Homo sapiens
tcgaccctcacaaac

SEQ ID NO: 22647 - DNA, 15 bp, Homo sapiens
ttcgaccctcacaaa

SEQ ID NO: 22648 - DNA, 15 bp, Homo sapiens
attcgaccctcacaa

SEQ ID NO: 22649 - DNA, 15 bp, Homo sapiens
cattcgaccctcaca

SEQ ID NO: 22650 - DNA, 15 bp, Homo sapiens
ccattcgaccctcac

SEQ ID NO: 22651 - DNA, 15 bp, Homo sapiens
tccattcgaccctca

SEQ ID NO: 22652 - DNA, 15 bp, Homo sapiens
ctccattcgaccctc

SEQ ID NO: 22653 - DNA, 15 bp, Homo sapiens
actccattcgaccct

SEQ ID NO: 22654 - DNA, 15 bp, Homo sapiens
tactccattcgaccc

SEQ ID NO: 22655 - DNA, 15 bp, Homo sapiens
atactccattcgacc

SEQ ID NO: 22656 - DNA, 15 bp, Homo sapiens
tatactccattcgac

SEQ ID NO: 22657 - DNA, 15 bp, Homo sapiens
atatactccattcga

SEQ ID NO: 22658 - DNA, 15 bp, Homo sapiens
tatatactccattcg

SEQ ID NO: 22659 - DNA, 15 bp, Homo sapiens
atatatactccattc

SEQ ID NO: 22660 - DNA, 15 bp, Homo sapiens
catatatactccatt

SEQ ID NO: 22661 - DNA, 15 bp, Homo sapiens
acatatatactccat

SEQ ID NO: 22662 - DNA, 15 bp, Homo sapiens
cacatatatactcca

SEQ ID NO: 22663 - DNA, 15 bp, Homo sapiens
tcacatatatactcc

SEQ ID NO: 22664 - DNA, 15 bp, Homo sapiens
ttcacatatatactc

SEQ ID NO: 22665 - DNA, 15 bp, Homo sapiens
tttcacatatatact

SEQ ID NO: 22666 - DNA, 15 bp, Homo sapiens
ttttcacatatatac

SEQ ID NO: 22667 - DNA, 15 bp, Homo sapiens
attttcacatatata

SEQ ID NO: 22668 - DNA, 15 bp, Homo sapiens
cattttcacatatat

SEQ ID NO: 22669 - DNA, 15 bp, Homo sapiens
acattttcacatata

SEQ ID NO: 22670 - DNA, 15 bp, Homo sapiens
aacattttcacatat

SEQ ID NO: 22671 - DNA, 15 bp, Homo sapiens
aaacattttcacata

SEQ ID NO: 22672 - DNA, 15 bp, Homo sapiens
taaacattttcacat

SEQ ID NO: 22673 - DNA, 15 bp, Homo sapiens
ttaaacattttcaca

SEQ ID NO: 22674 - DNA, 15 bp, Homo sapiens
attaaacattttcac

SEQ ID NO: 22675 - DNA, 15 bp, Homo sapiens
tattaaacattttca

SEQ ID NO: 22676 - DNA, 15 bp, Homo sapiens
gtattaaacattttc

SEQ ID NO: 22677 - DNA, 15 bp, Homo sapiens
ggtattaaacatttt

SEQ ID NO: 22678 - DNA, 15 bp, Homo sapiens
aggtattaaacattt

SEQ ID NO: 22679 - DNA, 15 bp, Homo sapiens
aaggtattaaacatt

SEQ ID NO: 22680 - DNA, 15 bp, Homo sapiens
aaaggtattaaacat

SEQ ID NO: 22681 - DNA, 15 bp, Homo sapiens
caaaggtattaaaca

SEQ ID NO: 22682 - DNA, 15 bp, Homo sapiens
acaaaggtattaaac

SEQ ID NO: 22683 - DNA, 15 bp, Homo sapiens
tacaaaggtattaaa

SEQ ID NO: 22684 - DNA, 15 bp, Homo sapiens
gtacaaaggtattaa

SEQ ID NO: 22685 - DNA, 15 bp, Homo sapiens
tgtacaaaggtatta

SEQ ID NO: 22686 - DNA, 15 bp, Homo sapiens
ctgtacaaaggtatt

SEQ ID NO: 22687 - DNA, 15 bp, Homo sapiens
tctgtacaaaggtat

SEQ ID NO: 22688 - DNA, 15 bp, Homo sapiens
ttctgtacaaaggta

SEQ ID NO: 22689 - DNA, 15 bp, Homo sapiens
attctgtacaaaggt

SEQ ID NO: 22690 - DNA, 15 bp, Homo sapiens
aattctgtacaaagg

SEQ ID NO: 22691 - DNA, 15 bp, Homo sapiens
taattctgtacaaag

SEQ ID NO: 22692 - DNA, 15 bp, Homo sapiens
ttaattctgtacaaa

SEQ ID NO: 22693 - DNA, 15 bp, Homo sapiens
attaattctgtacaa

SEQ ID NO: 22694 - DNA, 15 bp, Homo sapiens
tattaattctgtaca

SEQ ID NO: 22695 - DNA, 15 bp, Homo sapiens
ctattaattctgtac

SEQ ID NO: 22696 - DNA, 15 bp, Homo sapiens
actattaattctgta

SEQ ID NO: 22697 - DNA, 15 bp, Homo sapiens
aactattaattctgt

SEQ ID NO: 22698 - DNA, 15 bp, Homo sapiens
taactattaattctg

SEQ ID NO: 22699 - DNA, 15 bp, Homo sapiens
ctaactattaattct

SEQ ID NO: 22700 - DNA, 15 bp, Homo sapiens
actaactattaattc

SEQ ID NO: 22701 - DNA, 15 bp, Homo sapiens
tactaactattaatt

SEQ ID NO: 22702 - DNA, 15 bp, Homo sapiens
gtactaactattaat

SEQ ID NO: 22703 - DNA, 15 bp, Homo sapiens
cgtactaactattaa

SEQ ID NO: 22704 - DNA, 15 bp, Homo sapiens
acgtactaactatta

SEQ ID NO: 22705 - DNA, 15 bp, Homo sapiens
cacgtactaactatt

SEQ ID NO: 22706 - DNA, 15 bp, Homo sapiens
ccacgtactaactat

SEQ ID NO: 22707 - DNA, 15 bp, Homo sapiens
tccacgtactaacta

SEQ ID NO: 22708 - DNA, 15 bp, Homo sapiens
atccacgtactaact

SEQ ID NO: 22709 - DNA, 15 bp, Homo sapiens
gatccacgtactaac

SEQ ID NO: 22710 - DNA, 15 bp, Homo sapiens
agatccacgtactaa

SEQ ID NO: 22711 - DNA, 15 bp, Homo sapiens
aagatccacgtacta

SEQ ID NO: 22712 - DNA, 15 bp, Homo sapiens
aaagatccacgtact

SEQ ID NO: 22713 - DNA, 15 bp, Homo sapiens
gaaagatccacgtac

SEQ ID NO: 22714 - DNA, 15 bp, Homo sapiens
tgaaagatccacgta

SEQ ID NO: 22715 - DNA, 15 bp, Homo sapiens
ttgaaagatccacgt

SEQ ID NO: 22716 - DNA, 15 bp, Homo sapiens
tttgaaagatccacg

SEQ ID NO: 22717 - DNA, 15 bp, Homo sapiens
atttgaaagatccac

SEQ ID NO: 22718 - DNA, 15 bp, Homo sapiens
tatttgaaagatcca

SEQ ID NO: 22719 - DNA, 15 bp, Homo sapiens
atatttgaaagatcc

SEQ ID NO: 22720 - DNA, 15 bp, Homo sapiens
gatatttgaaagatc

SEQ ID NO: 22721 - DNA, 15 bp, Homo sapiens
tgatatttgaaagat

SEQ ID NO: 22722 - DNA, 15 bp, Homo sapiens
ttgatatttgaaaga

SEQ ID NO: 22723 - DNA, 15 bp, Homo sapiens
tttgatatttgaaag

SEQ ID NO: 22724 - DNA, 15 bp, Homo sapiens
ttttgatatttgaaa

SEQ ID NO: 22725 - DNA, 15 bp, Homo sapiens
cttttgatatttgaa

SEQ ID NO: 22726 - DNA, 15 bp, Homo sapiens
acttttgatatttga

SEQ ID NO: 22727 - DNA, 15 bp, Homo sapiens
aacttttgatatttg

SEQ ID NO: 22728 - DNA, 15 bp, Homo sapiens
aaacttttgatattt

SEQ ID NO: 22729 - DNA, 15 bp, Homo sapiens
aaaacttttgatatt

SEQ ID NO: 22730 - DNA, 15 bp, Homo sapiens
gaaaacttttgatat

SEQ ID NO: 22731 - DNA, 15 bp, Homo sapiens
tgaaaacttttgata

SEQ ID NO: 22732 - DNA, 15 bp, Homo sapiens
ctgaaaacttttgat

SEQ ID NO: 22733 - DNA, 15 bp, Homo sapiens
actgaaaacttttga

SEQ ID NO: 22734 - DNA, 15 bp, Homo sapiens
aactgaaaacttttg

SEQ ID NO: 22735 - DNA, 15 bp, Homo sapiens
aaactgaaaactttt

SEQ ID NO: 22736 - DNA, 15 bp, Homo sapiens
caaactgaaaacttt

SEQ ID NO: 22737 - DNA, 15 bp, Homo sapiens
tcaaactgaaaactt

SEQ ID NO: 22738 - DNA, 15 bp, Homo sapiens
atcaaactgaaaact

SEQ ID NO: 22739 - DNA, 15 bp, Homo sapiens
catcaaactgaaaac

SEQ ID NO: 22740 - DNA, 15 bp, Homo sapiens
ccatcaaactgaaaa

SEQ ID NO: 22741 - DNA, 15 bp, Homo sapiens
cccatcaaactgaaa

SEQ ID NO: 22742 - DNA, 15 bp, Homo sapiens
tcccatcaaactgaa

SEQ ID NO: 22743 - DNA, 15 bp, Homo sapiens
ttcccatcaaactga

SEQ ID NO: 22744 - DNA, 15 bp, Homo sapiens
tttcccatcaaactg

SEQ ID NO: 22745 - DNA, 15 bp, Homo sapiens
ttttcccatcaaact

SEQ ID NO: 22746 - DNA, 15 bp, Homo sapiens
attttcccatcaaac

SEQ ID NO: 22747 - DNA, 15 bp, Homo sapiens
cattttcccatcaaa

SEQ ID NO: 22748 - DNA, 15 bp, Homo sapiens
tcattttcccatcaa

SEQ ID NO: 22749 - DNA, 15 bp, Homo sapiens
atcattttcccatca

SEQ ID NO: 22750 - DNA, 15 bp, Homo sapiens
catcattttcccatc

SEQ ID NO: 22751 - DNA, 15 bp, Homo sapiens
acatcattttcccat

SEQ ID NO: 22752 - DNA, 15 bp, Homo sapiens
gacatcattttccca

SEQ ID NO: 22753 - DNA, 15 bp, Homo sapiens
agacatcattttccc

SEQ ID NO: 22754 - DNA, 15 bp, Homo sapiens
cagacatcattttcc

SEQ ID NO: 22755 - DNA, 15 bp, Homo sapiens
tcagacatcattttc

SEQ ID NO: 22756 - DNA, 15 bp, Homo sapiens
ttcagacatcatttt

SEQ ID NO: 22757 - DNA, 15 bp, Homo sapiens
attcagacatcattt

SEQ ID NO: 22758 - DNA, 15 bp, Homo sapiens
aattcagacatcatt

SEQ ID NO: 22759 - DNA, 15 bp, Homo sapiens
aaattcagacatcat

SEQ ID NO: 22760 - DNA, 15 bp, Homo sapiens
aaaattcagacatca

SEQ ID NO: 22761 - DNA, 15 bp, Homo sapiens
gaaaattcagacatc

SEQ ID NO: 22762 - DNA, 15 bp, Homo sapiens
tgaaaattcagacat

SEQ ID NO: 22763 - DNA, 15 bp, Homo sapiens
ctgaaaattcagaca

SEQ ID NO: 22764 - DNA, 15 bp, Homo sapiens
cctgaaaattcagac

SEQ ID NO: 22765 - DNA, 15 bp, Homo sapiens
ccctgaaaattcaga

SEQ ID NO: 22766 - DNA, 15 bp, Homo sapiens
accctgaaaattcag

SEQ ID NO: 22767 - DNA, 15 bp, Homo sapiens
aaccctgaaaattca

SEQ ID NO: 22768 - DNA, 15 bp, Homo sapiens
taaccctgaaaattc

SEQ ID NO: 22769 - DNA, 15 bp, Homo sapiens
ataaccctgaaaatt

SEQ ID NO: 22770 - DNA, 15 bp, Homo sapiens
aataaccctgaaaat

SEQ ID NO: 22771 - DNA, 15 bp, Homo sapiens
aaataaccctgaaaa

SEQ ID NO: 22772 - DNA, 15 bp, Homo sapiens
aaaataaccctgaaa

SEQ ID NO: 22773 - DNA, 15 bp, Homo sapiens
aaaaataaccctgaa

SEQ ID NO: 22774 - DNA, 15 bp, Homo sapiens
taaaaataaccctga

SEQ ID NO: 22775 - DNA, 15 bp, Homo sapiens
ttaaaaataaccctg

SEQ ID NO: 22776 - DNA, 15 bp, Homo sapiens
cttaaaaataaccct

SEQ ID NO: 22777 - DNA, 15 bp, Homo sapiens
tcttaaaaataaccc

SEQ ID NO: 22778 - DNA, 15 bp, Homo sapiens
ctcttaaaaataacc

SEQ ID NO: 22779 - DNA, 15 bp, Homo sapiens
actcttaaaaataac

SEQ ID NO: 22780 - DNA, 15 bp, Homo sapiens
tactcttaaaaataa

SEQ ID NO: 22781 - DNA, 15 bp, Homo sapiens
gtactcttaaaaata

SEQ ID NO: 22782 - DNA, 15 bp, Homo sapiens
agtactcttaaaaat

SEQ ID NO: 22783 - DNA, 15 bp, Homo sapiens
aagtactcttaaaaa

SEQ ID NO: 22784 - DNA, 15 bp, Homo sapiens
caagtactcttaaaa

SEQ ID NO: 22785 - DNA, 15 bp, Homo sapiens
tcaagtactcttaaa

SEQ ID NO: 22786 - DNA, 15 bp, Homo sapiens
atcaagtactcttaa

SEQ ID NO: 22787 - DNA, 15 bp, Homo sapiens
aatcaagtactctta

SEQ ID NO: 22788 - DNA, 15 bp, Homo sapiens
taatcaagtactctt

SEQ ID NO: 22789 - DNA, 15 bp, Homo sapiens
ataatcaagtactct

SEQ ID NO: 22790 - DNA, 15 bp, Homo sapiens
cataatcaagtactc

SEQ ID NO: 22791 - DNA, 15 bp, Homo sapiens
tcataatcaagtact

SEQ ID NO: 22792 - DNA, 15 bp, Homo sapiens
gtcataatcaagtac

SEQ ID NO: 22793 - DNA, 15 bp, Homo sapiens
agtcataatcaagta

SEQ ID NO: 22794 - DNA, 15 bp, Homo sapiens
cagtcataatcaagt

SEQ ID NO: 22795 - DNA, 15 bp, Homo sapiens
acagtcataatcaag

SEQ ID NO: 22796 - DNA, 15 bp, Homo sapiens
gacagtcataatcaa

SEQ ID NO: 22797 - DNA, 15 bp, Homo sapiens
agacagtcataatca

SEQ ID NO: 22798 - DNA, 15 bp, Homo sapiens
aagacagtcataatc

SEQ ID NO: 22799 - DNA, 15 bp, Homo sapiens
caagacagtcataat

SEQ ID NO: 22800 - DNA, 15 bp, Homo sapiens
acaagacagtcataa

SEQ ID NO: 22801 - DNA, 15 bp, Homo sapiens
tacaagacagtcata

SEQ ID NO: 22802 - DNA, 15 bp, Homo sapiens
ttacaagacagtcat

SEQ ID NO: 22803 - DNA, 15 bp, Homo sapiens
tttacaagacagtca

SEQ ID NO: 22804 - DNA, 15 bp, Homo sapiens
atttacaagacagtc

SEQ ID NO: 22805 - DNA, 15 bp, Homo sapiens
gatttacaagacagt

SEQ ID NO: 22806 - DNA, 15 bp, Homo sapiens
agatttacaagacag

SEQ ID NO: 22807 - DNA, 15 bp, Homo sapiens
gagatttacaagaca

SEQ ID NO: 22808 - DNA, 15 bp, Homo sapiens
agagatttacaagac

SEQ ID NO: 22809 - DNA, 15 bp, Homo sapiens
tagagatttacaaga

SEQ ID NO: 22810 - DNA, 15 bp, Homo sapiens
atagagatttacaag

SEQ ID NO: 22811 - DNA, 15 bp, Homo sapiens
catagagatttacaa

SEQ ID NO: 22812 - DNA, 15 bp, Homo sapiens
tcatagagatttaca

SEQ ID NO: 22813 - DNA, 15 bp, Homo sapiens
ctcatagagatttac

SEQ ID NO: 22814 - DNA, 15 bp, Homo sapiens
gctcatagagattta

SEQ ID NO: 22815 - DNA, 15 bp, Homo sapiens
agctcatagagattt

SEQ ID NO: 22816 - DNA, 15 bp, Homo sapiens
tagctcatagagatt

SEQ ID NO: 22817 - DNA, 15 bp, Homo sapiens
ctagctcatagagat

SEQ ID NO: 22818 - DNA, 15 bp, Homo sapiens
cctagctcatagaga

SEQ ID NO: 22819 - DNA, 15 bp, Homo sapiens
acctagctcatagag

SEQ ID NO: 22820 - DNA, 15 bp, Homo sapiens
tacctagctcataga

SEQ ID NO: 22821 - DNA, 15 bp, Homo sapiens
atacctagctcatag

SEQ ID NO: 22822 - DNA, 15 bp, Homo sapiens
tatacctagctcata

SEQ ID NO: 22823 - DNA, 15 bp, Homo sapiens
gtatacctagctcat

SEQ ID NO: 22824 - DNA, 15 bp, Homo sapiens
agtatacctagctca

SEQ ID NO: 22825 - DNA, 15 bp, Homo sapiens
aagtatacctagctc

SEQ ID NO: 22826 - DNA, 15 bp, Homo sapiens
caagtatacctagct

SEQ ID NO: 22827 - DNA, 15 bp, Homo sapiens
gcaagtatacctagc

SEQ ID NO: 22828 - DNA, 15 bp, Homo sapiens
tgcaagtatacctag

SEQ ID NO: 22829 - DNA, 15 bp, Homo sapiens
gtgcaagtataccta

SEQ ID NO: 22830 - DNA, 15 bp, Homo sapiens
agtgcaagtatacct

SEQ ID NO: 22831 - DNA, 15 bp, Homo sapiens
tagtgcaagtatacc

SEQ ID NO: 22832 - DNA, 15 bp, Homo sapiens
ttagtgcaagtatac

SEQ ID NO: 22833 - DNA, 15 bp, Homo sapiens
tttagtgcaagtata

SEQ ID NO: 22834 - DNA, 15 bp, Homo sapiens
atttagtgcaagtat

SEQ ID NO: 22835 - DNA, 15 bp, Homo sapiens
catttagtgcaagta

SEQ ID NO: 22836 - DNA, 15 bp, Homo sapiens
gcatttagtgcaagt

SEQ ID NO: 22837 - DNA, 15 bp, Homo sapiens
agcatttagtgcaag

SEQ ID NO: 22838 - DNA, 15 bp, Homo sapiens
tagcatttagtgcaa

SEQ ID NO: 22839 - DNA, 15 bp, Homo sapiens
ttagcatttagtgca

SEQ ID NO: 22840 - DNA, 15 bp, Homo sapiens
attagcatttagtgc

SEQ ID NO: 22841 - DNA, 15 bp, Homo sapiens
cattagcatttagtg

SEQ ID NO: 22842 - DNA, 15 bp, Homo sapiens
gcattagcatttagt

SEQ ID NO: 22843 - DNA, 15 bp, Homo sapiens
agcattagcatttag

SEQ ID NO: 22844 - DNA, 15 bp, Homo sapiens
aagcattagcattta

SEQ ID NO: 22845 - DNA, 15 bp, Homo sapiens
aaagcattagcattt

SEQ ID NO: 22846 - DNA, 15 bp, Homo sapiens
aaaagcattagcatt

SEQ ID NO: 22847 - DNA, 15 bp, Homo sapiens
aaaaagcattagcat

SEQ ID NO: 22848 - DNA, 15 bp, Homo sapiens
taaaaagcattagca

SEQ ID NO: 22849 - DNA, 15 bp, Homo sapiens
ttaaaaagcattagc

SEQ ID NO: 22850 - DNA, 15 bp, Homo sapiens
tttaaaaagcattag

SEQ ID NO: 22851 - DNA, 15 bp, Homo sapiens
ctttaaaaagcatta

SEQ ID NO: 22852 - DNA, 15 bp, Homo sapiens
tctttaaaaagcatt

SEQ ID NO: 22853 - DNA, 15 bp, Homo sapiens
ttctttaaaaagcat

SEQ ID NO: 22854 - DNA, 15 bp, Homo sapiens
cttctttaaaaagca

SEQ ID NO: 22855 - DNA, 15 bp, Homo sapiens
acttctttaaaaagc

SEQ ID NO: 22856 - DNA, 15 bp, Homo sapiens
aacttctttaaaaag

SEQ ID NO: 22857 - DNA, 15 bp, Homo sapiens
taacttctttaaaaa

SEQ ID NO: 22858 - DNA, 15 bp, Homo sapiens
ataacttctttaaaa

SEQ ID NO: 22859 - DNA, 15 bp, Homo sapiens
cataacttctttaaa

SEQ ID NO: 22860 - DNA, 15 bp, Homo sapiens
acataacttctttaa

SEQ ID NO: 22861 - DNA, 15 bp, Homo sapiens
gacataacttcttta

SEQ ID NO: 22862 - DNA, 15 bp, Homo sapiens
agacataacttcttt

SEQ ID NO: 22863 - DNA, 15 bp, Homo sapiens
aagacataacttctt

SEQ ID NO: 22864 - DNA, 15 bp, Homo sapiens
taagacataacttct

SEQ ID NO: 22865 - DNA, 15 bp, Homo sapiens
ttaagacataacttc

SEQ ID NO: 22866 - DNA, 15 bp, Homo sapiens
attaagacataactt

SEQ ID NO: 22867 - DNA, 15 bp, Homo sapiens
tattaagacataact

SEQ ID NO: 22868 - DNA, 15 bp, Homo sapiens
atattaagacataac

SEQ ID NO: 22869 - DNA, 15 bp, Homo sapiens
aatattaagacataa

SEQ ID NO: 22870 - DNA, 15 bp, Homo sapiens
gaatattaagacata

SEQ ID NO: 22871 - DNA, 15 bp, Homo sapiens
tgaatattaagacat

SEQ ID NO: 22872 - DNA, 15 bp, Homo sapiens
ctgaatattaagaca

SEQ ID NO: 22873 - DNA, 15 bp, Homo sapiens
actgaatattaagac

SEQ ID NO: 22874 - DNA, 15 bp, Homo sapiens
gactgaatattaaga

SEQ ID NO: 22875 - DNA, 15 bp, Homo sapiens
agactgaatattaag

SEQ ID NO: 22876 - DNA, 15 bp, Homo sapiens
gagactgaatattaa

SEQ ID NO: 22877 - DNA, 15 bp, Homo sapiens
tgagactgaatatta

SEQ ID NO: 22878 - DNA, 15 bp, Homo sapiens
atgagactgaatatt

SEQ ID NO: 22879 - DNA, 15 bp, Homo sapiens
aatgagactgaatat

SEQ ID NO: 22880 - DNA, 15 bp, Homo sapiens
taatgagactgaata

SEQ ID NO: 22881 - DNA, 15 bp, Homo sapiens
ataatgagactgaat

SEQ ID NO: 22882 - DNA, 15 bp, Homo sapiens
cataatgagactgaa

SEQ ID NO: 22883 - DNA, 15 bp, Homo sapiens
acataatgagactga

SEQ ID NO: 22884 - DNA, 15 bp, Homo sapiens
aacataatgagactg

SEQ ID NO: 22885 - DNA, 15 bp, Homo sapiens
taacataatgagact

SEQ ID NO: 22886 - DNA, 15 bp, Homo sapiens
ctaacataatgagac

SEQ ID NO: 22887 - DNA, 15 bp, Homo sapiens
cctaacataatgaga

SEQ ID NO: 22888 - DNA, 15 bp, Homo sapiens
acctaacataatgag

SEQ ID NO: 22889 - DNA, 15 bp, Homo sapiens
aacctaacataatga

SEQ ID NO: 22890 - DNA, 15 bp, Homo sapiens
caacctaacataatg

SEQ ID NO: 22891 - DNA, 15 bp, Homo sapiens
tcaacctaacataat

SEQ ID NO: 22892 - DNA, 15 bp, Homo sapiens
ttcaacctaacataa

SEQ ID NO: 22893 - DNA, 15 bp, Homo sapiens
cttcaacctaacata

SEQ ID NO: 22894 - DNA, 15 bp, Homo sapiens
tcttcaacctaacat

SEQ ID NO: 22895 - DNA, 15 bp, Homo sapiens
atcttcaacctaaca

SEQ ID NO: 22896 - DNA, 15 bp, Homo sapiens
tatcttcaacctaac

SEQ ID NO: 22897 - DNA, 15 bp, Homo sapiens
ctatcttcaacctaa

SEQ ID NO: 22898 - DNA, 15 bp, Homo sapiens
tctatcttcaaccta

SEQ ID NO: 22899 - DNA, 15 bp, Homo sapiens
ttctatcttcaacct

SEQ ID NO: 22900 - DNA, 15 bp, Homo sapiens
cttctatcttcaacc

SEQ ID NO: 22901 - DNA, 15 bp, Homo sapiens
tcttctatcttcaac

SEQ ID NO: 22902 - DNA, 15 bp, Homo sapiens
atcttctatcttcaa

SEQ ID NO: 22903 - DNA, 15 bp, Homo sapiens
aatcttctatcttca

SEQ ID NO: 22904 - DNA, 15 bp, Homo sapiens
taatcttctatcttc

SEQ ID NO: 22905 - DNA, 15 bp, Homo sapiens
ataatcttctatctt

SEQ ID NO: 22906 - DNA, 15 bp, Homo sapiens
cataatcttctatct

SEQ ID NO: 22907 - DNA, 15 bp, Homo sapiens
tcataatcttctatc

SEQ ID NO: 22908 - DNA, 15 bp, Homo sapiens
ttcataatcttctat

SEQ ID NO: 22909 - DNA, 15 bp, Homo sapiens
tttcataatcttcta

SEQ ID NO: 22910 - DNA, 15 bp, Homo sapiens
ttttcataatcttct

SEQ ID NO: 22911 - DNA, 15 bp, Homo sapiens
attttcataatcttc

SEQ ID NO: 22912 - DNA, 15 bp, Homo sapiens
tattttcataatctt

SEQ ID NO: 22913 - DNA, 15 bp, Homo sapiens
atattttcataatct

SEQ ID NO: 22914 - DNA, 15 bp, Homo sapiens
aatattttcataatc

SEQ ID NO: 22915 - DNA, 15 bp, Homo sapiens
gaatattttcataat

SEQ ID NO: 22916 - DNA, 15 bp, Homo sapiens
agaatattttcataa

SEQ ID NO: 22917 - DNA, 15 bp, Homo sapiens
gagaatattttcata

SEQ ID NO: 22918 - DNA, 15 bp, Homo sapiens
agagaatattttcat

SEQ ID NO: 22919 - DNA, 15 bp, Homo sapiens
cagagaatattttca

SEQ ID NO: 22920 - DNA, 15 bp, Homo sapiens
tcagagaatattttc

SEQ ID NO: 22921 - DNA, 15 bp, Homo sapiens
ttcagagaatatttt

SEQ ID NO: 22922 - DNA, 15 bp, Homo sapiens
tttcagagaatattt

SEQ ID NO: 22923 - DNA, 15 bp, Homo sapiens
ttttcagagaatatt

SEQ ID NO: 22924 - DNA, 15 bp, Homo sapiens
cttttcagagaatat

SEQ ID NO: 22925 - DNA, 15 bp, Homo sapiens
gcttttcagagaata

SEQ ID NO: 22926 - DNA, 15 bp, Homo sapiens
agcttttcagagaat

SEQ ID NO: 22927 - DNA, 15 bp, Homo sapiens
gagcttttcagagaa

SEQ ID NO: 22928 - DNA, 15 bp, Homo sapiens
agagcttttcagaga

SEQ ID NO: 22929 - DNA, 15 bp, Homo sapiens
cagagcttttcagag

SEQ ID NO: 22930 - DNA, 15 bp, Homo sapiens
ccagagcttttcaga

SEQ ID NO: 22931 - DNA, 15 bp, Homo sapiens
accagagcttttcag

SEQ ID NO: 22932 - DNA, 15 bp, Homo sapiens
aaccagagcttttca

SEQ ID NO: 22933 - DNA, 15 bp, Homo sapiens
aaaccagagcttttc

SEQ ID NO: 22934 - DNA, 15 bp, Homo sapiens
aaaaccagagctttt

SEQ ID NO: 22935 - DNA, 15 bp, Homo sapiens
taaaaccagagcttt

SEQ ID NO: 22936 - DNA, 15 bp, Homo sapiens
gtaaaaccagagctt

SEQ ID NO: 22937 - DNA, 15 bp, Homo sapiens
agtaaaaccagagct

SEQ ID NO: 22938 - DNA, 15 bp, Homo sapiens
aagtaaaaccagagc

SEQ ID NO: 22939 - DNA, 15 bp, Homo sapiens
gaagtaaaaccagag

SEQ ID NO: 22940 - DNA, 15 bp, Homo sapiens
tgaagtaaaaccaga

SEQ ID NO: 22941 - DNA, 15 bp, Homo sapiens
ctgaagtaaaaccag

SEQ ID NO: 22942 - DNA, 15 bp, Homo sapiens
tctgaagtaaaacca

SEQ ID NO: 22943 - DNA, 15 bp, Homo sapiens
atctgaagtaaaacc

SEQ ID NO: 22944 - DNA, 15 bp, Homo sapiens
aatctgaagtaaaac

SEQ ID NO: 22945 - DNA, 15 bp, Homo sapiens
caatctgaagtaaaa

SEQ ID NO: 22946 - DNA, 15 bp, Homo sapiens
acaatctgaagtaaa

SEQ ID NO: 22947 - DNA, 15 bp, Homo sapiens
tacaatctgaagtaa

SEQ ID NO: 22948 - DNA, 15 bp, Homo sapiens
atacaatctgaagta

SEQ ID NO: 22949 - DNA, 15 bp, Homo sapiens
tatacaatctgaagt

SEQ ID NO: 22950 - DNA, 15 bp, Homo sapiens
ttatacaatctgaag

SEQ ID NO: 22951 - DNA, 15 bp, Homo sapiens
tttatacaatctgaa

SEQ ID NO: 22952 - DNA, 15 bp, Homo sapiens
atttatacaatctga

SEQ ID NO: 22953 - DNA, 15 bp, Homo sapiens
gatttatacaatctg

SEQ ID NO: 22954 - DNA, 15 bp, Homo sapiens
agatttatacaatct

SEQ ID NO: 22955 - DNA, 15 bp, Homo sapiens
cagatttatacaatc

SEQ ID NO: 22956 - DNA, 15 bp, Homo sapiens
acagatttatacaat

SEQ ID NO: 22957 - DNA, 15 bp, Homo sapiens
cacagatttatacaa

SEQ ID NO: 22958 - DNA, 15 bp, Homo sapiens
acacagatttataca

SEQ ID NO: 22959 - DNA, 15 bp, Homo sapiens
tacacagatttatac

SEQ ID NO: 22960 - DNA, 15 bp, Homo sapiens
ttacacagatttata

SEQ ID NO: 22961 - DNA, 15 bp, Homo sapiens
attacacagatttat

SEQ ID NO: 22962 - DNA, 15 bp, Homo sapiens
cattacacagattta

SEQ ID NO: 22963 - DNA, 15 bp, Homo sapiens
acattacacagattt

SEQ ID NO: 22964 - DNA, 15 bp, Homo sapiens
tacattacacagatt

SEQ ID NO: 22965 - DNA, 15 bp, Homo sapiens
ttacattacacagat

SEQ ID NO: 22966 - DNA, 15 bp, Homo sapiens
attacattacacaga

SEQ ID NO: 22967 - DNA, 15 bp, Homo sapiens
tattacattacacag

SEQ ID NO: 22968 - DNA, 15 bp, Homo sapiens
ttattacattacaca

SEQ ID NO: 22969 - DNA, 15 bp, Homo sapiens
attattacattacac

SEQ ID NO: 22970 - DNA, 15 bp, Homo sapiens
aattattacattaca

SEQ ID NO: 22971 - DNA, 15 bp, Homo sapiens
taattattacattac

SEQ ID NO: 22972 - DNA, 15 bp, Homo sapiens
ataattattacatta

SEQ ID NO: 22973 - DNA, 15 bp, Homo sapiens
aataattattacatt

SEQ ID NO: 22974 - DNA, 15 bp, Homo sapiens
aaataattattacat

SEQ ID NO: 22975 - DNA, 15 bp, Homo sapiens
taaataattattaca

SEQ ID NO: 22976 - DNA, 15 bp, Homo sapiens
ttaaataattattac

SEQ ID NO: 22977 - DNA, 15 bp, Homo sapiens
cttaaataattatta

SEQ ID NO: 22978 - DNA, 15 bp, Homo sapiens
tcttaaataattatt

SEQ ID NO: 22979 - DNA, 15 bp, Homo sapiens
ttcttaaataattat

SEQ ID NO: 22980 - DNA, 15 bp, Homo sapiens
attcttaaataatta

SEQ ID NO: 22981 - DNA, 15 bp, Homo sapiens
cattcttaaataatt

SEQ ID NO: 22982 - DNA, 15 bp, Homo sapiens
tcattcttaaataat

SEQ ID NO: 22983 - DNA, 15 bp, Homo sapiens
gtcattcttaaataa

SEQ ID NO: 22984 - DNA, 15 bp, Homo sapiens
tgtcattcttaaata

SEQ ID NO: 22985 - DNA, 15 bp, Homo sapiens
atgtcattcttaaat

SEQ ID NO: 22986 - DNA, 15 bp, Homo sapiens
catgtcattcttaaa

SEQ ID NO: 22987 - DNA, 15 bp, Homo sapiens
tcatgtcattcttaa

SEQ ID NO: 22988 - DNA, 15 bp, Homo sapiens
atcatgtcattctta

SEQ ID NO: 22989 - DNA, 15 bp, Homo sapiens
aatcatgtcattctt

SEQ ID NO: 22990 - DNA, 15 bp, Homo sapiens
taatcatgtcattct

SEQ ID NO: 22991 - DNA, 15 bp, Homo sapiens
gtaatcatgtcattc

SEQ ID NO: 22992 - DNA, 15 bp, Homo sapiens
agtaatcatgtcatt

SEQ ID NO: 22993 - DNA, 15 bp, Homo sapiens
tagtaatcatgtcat

SEQ ID NO: 22994 - DNA, 15 bp, Homo sapiens
gtagtaatcatgtca

SEQ ID NO: 22995 - DNA, 15 bp, Homo sapiens
agtagtaatcatgtc

SEQ ID NO: 22996 - DNA, 15 bp, Homo sapiens
gagtagtaatcatgt

SEQ ID NO: 22997 - DNA, 15 bp, Homo sapiens
agagtagtaatcatg

SEQ ID NO: 22998 - DNA, 15 bp, Homo sapiens
tagagtagtaatcat

SEQ ID NO: 22999 - DNA, 15 bp, Homo sapiens
ttagagtagtaatca

SEQ ID NO: 23000 - DNA, 15 bp, Homo sapiens
tttagagtagtaatc

SEQ ID NO: 23001 - DNA, 15 bp, Homo sapiens
gtttagagtagtaat

SEQ ID NO: 23002 - DNA, 15 bp, Homo sapiens
ggtttagagtagtaa

SEQ ID NO: 23003 - DNA, 15 bp, Homo sapiens
gggtttagagtagta

SEQ ID NO: 23004 - DNA, 15 bp, Homo sapiens
tgggtttagagtagt

SEQ ID NO: 23005 - DNA, 15 bp, Homo sapiens
atgggtttagagtag

SEQ ID NO: 23006 - DNA, 15 bp, Homo sapiens
tatgggtttagagta

SEQ ID NO: 23007 - DNA, 15 bp, Homo sapiens
ctatgggtttagagt

SEQ ID NO: 23008 - DNA, 15 bp, Homo sapiens
tctatgggtttagag

SEQ ID NO: 23009 - DNA, 15 bp, Homo sapiens
ttctatgggtttaga

SEQ ID NO: 23010 - DNA, 15 bp, Homo sapiens
cttctatgggtttag

SEQ ID NO: 23011 - DNA, 15 bp, Homo sapiens
ccttctatgggttta

SEQ ID NO: 23012 - DNA, 15 bp, Homo sapiens
cccttctatgggttt

SEQ ID NO: 23013 - DNA, 15 bp, Homo sapiens
ccccttctatgggtt

SEQ ID NO: 23014 - DNA, 15 bp, Homo sapiens
accccttctatgggt

SEQ ID NO: 23015 - DNA, 15 bp, Homo sapiens
taccccttctatggg

SEQ ID NO: 23016 - DNA, 15 bp, Homo sapiens
ataccccttctatgg

SEQ ID NO: 23017 - DNA, 15 bp, Homo sapiens
aataccccttctatg

SEQ ID NO: 23018 - DNA, 15 bp, Homo sapiens
aaataccccttctat

SEQ ID NO: 23019 - DNA, 15 bp, Homo sapiens
caaataccccttcta

SEQ ID NO: 23020 - DNA, 15 bp, Homo sapiens
acaaataccccttct

SEQ ID NO: 23021 - DNA, 15 bp, Homo sapiens
aacaaataccccttc

SEQ ID NO: 23022 - DNA, 15 bp, Homo sapiens
caacaaatacccctt

SEQ ID NO: 23023 - DNA, 15 bp, Homo sapiens
ccaacaaatacccct

SEQ ID NO: 23024 - DNA, 15 bp, Homo sapiens
tccaacaaatacccc

SEQ ID NO: 23025 - DNA, 15 bp, Homo sapiens
atccaacaaataccc

SEQ ID NO: 23026 - DNA, 15 bp, Homo sapiens
aatccaacaaatacc

SEQ ID NO: 23027 - DNA, 15 bp, Homo sapiens
taatccaacaaatac

SEQ ID NO: 23028 - DNA, 15 bp, Homo sapiens
ataatccaacaaata

SEQ ID NO: 23029 - DNA, 15 bp, Homo sapiens
aataatccaacaaat

SEQ ID NO: 23030 - DNA, 15 bp, Homo sapiens
aaataatccaacaaa

SEQ ID NO: 23031 - DNA, 15 bp, Homo sapiens
taaataatccaacaa

SEQ ID NO: 23032 - DNA, 15 bp, Homo sapiens
ataaataatccaaca

SEQ ID NO: 23033 - DNA, 15 bp, Homo sapiens
aataaataatccaac

SEQ ID NO: 23034 - DNA, 15 bp, Homo sapiens
aaataaataatccaa

SEQ ID NO: 23035 - DNA, 15 bp, Homo sapiens
aaaataaataatcca

SEQ ID NO: 23036 - DNA, 15 bp, Homo sapiens
gaaaataaataatcc

SEQ ID NO: 23037 - DNA, 15 bp, Homo sapiens
tgaaaataaataatc

SEQ ID NO: 23038 - DNA, 15 bp, Homo sapiens
gtgaaaataaataat

SEQ ID NO: 23039 - DNA, 15 bp, Homo sapiens
agtgaaaataaataa

SEQ ID NO: 23040 - DNA, 15 bp, Homo sapiens
aagtgaaaataaata

SEQ ID NO: 23041 - DNA, 15 bp, Homo sapiens
taagtgaaaataaat

SEQ ID NO: 23042 - DNA, 15 bp, Homo sapiens
ttaagtgaaaataaa

SEQ ID NO: 23043 - DNA, 15 bp, Homo sapiens
tttaagtgaaaataa

SEQ ID NO: 23044 - DNA, 15 bp, Homo sapiens
atttaagtgaaaata

SEQ ID NO: 23045 - DNA, 15 bp, Homo sapiens
catttaagtgaaaat

SEQ ID NO: 23046 - DNA, 15 bp, Homo sapiens
ccatttaagtgaaaa

SEQ ID NO: 23047 - DNA, 15 bp, Homo sapiens
accatttaagtgaaa

SEQ ID NO: 23048 - DNA, 15 bp, Homo sapiens
taccatttaagtgaa

SEQ ID NO: 23049 - DNA, 15 bp, Homo sapiens
ataccatttaagtga

SEQ ID NO: 23050 - DNA, 15 bp, Homo sapiens
aataccatttaagtg

SEQ ID NO: 23051 - DNA, 15 bp, Homo sapiens
aaataccatttaagt

SEQ ID NO: 23052 - DNA, 15 bp, Homo sapiens
caaataccatttaag

SEQ ID NO: 23053 - DNA, 15 bp, Homo sapiens
tcaaataccatttaa

SEQ ID NO: 23054 - DNA, 15 bp, Homo sapiens
ctcaaataccattta

SEQ ID NO: 23055 - DNA, 15 bp, Homo sapiens
tctcaaataccattt

SEQ ID NO: 23056 - DNA, 15 bp, Homo sapiens
atctcaaataccatt

SEQ ID NO: 23057 - DNA, 15 bp, Homo sapiens
aatctcaaataccat

SEQ ID NO: 23058 - DNA, 15 bp, Homo sapiens
taatctcaaatacca

SEQ ID NO: 23059 - DNA, 15 bp, Homo sapiens
ctaatctcaaatacc

SEQ ID NO: 23060 - DNA, 15 bp, Homo sapiens
cctaatctcaaatac

SEQ ID NO: 23061 - DNA, 15 bp, Homo sapiens
tcctaatctcaaata

SEQ ID NO: 23062 - DNA, 15 bp, Homo sapiens
ttcctaatctcaaat

SEQ ID NO: 23063 - DNA, 15 bp, Homo sapiens
tttcctaatctcaaa

SEQ ID NO: 23064 - DNA, 15 bp, Homo sapiens
ttttcctaatctcaa

SEQ ID NO: 23065 - DNA, 15 bp, Homo sapiens
tttttcctaatctca

SEQ ID NO: 23066 - DNA, 15 bp, Homo sapiens
ctttttcctaatctc

SEQ ID NO: 23067 - DNA, 15 bp, Homo sapiens
tctttttcctaatct

SEQ ID NO: 23068 - DNA, 15 bp, Homo sapiens
ttctttttcctaatc

SEQ ID NO: 23069 - DNA, 15 bp, Homo sapiens
tttctttttcctaat

SEQ ID NO: 23070 - DNA, 15 bp, Homo sapiens
ttttctttttcctaa

SEQ ID NO: 23071 - DNA, 15 bp, Homo sapiens
attttctttttccta

SEQ ID NO: 23072 - DNA, 15 bp, Homo sapiens
gattttctttttcct

SEQ ID NO: 23073 - DNA, 15 bp, Homo sapiens
agattttctttttcc

SEQ ID NO: 23074 - DNA, 15 bp, Homo sapiens
cagattttctttttc

SEQ ID NO: 23075 - DNA, 15 bp, Homo sapiens
agacagattttcttt

SEQ ID NO: 23076 - DNA, 15 bp, Homo sapiens
aagacagattttctt

SEQ ID NO: 23077 - DNA, 15 bp, Homo sapiens
aaagacagattttct

SEQ ID NO: 23078 - DNA, 15 bp, Homo sapiens
aaaagacagattttc

SEQ ID NO: 23079 - DNA, 15 bp, Homo sapiens
caaaagacagatttt

SEQ ID NO: 23080 - DNA, 15 bp, Homo sapiens
ccaaaagacagattt

SEQ ID NO: 23081 - DNA, 15 bp, Homo sapiens
accaaaagacagatt

SEQ ID NO: 23082 - DNA, 15 bp, Homo sapiens
aaccaaaagacagat

SEQ ID NO: 23083 - DNA, 15 bp, Homo sapiens
aaaccaaaagacaga

SEQ ID NO: 23084 - DNA, 15 bp, Homo sapiens
aaaaccaaaagacag

SEQ ID NO: 23085 - DNA, 15 bp, Homo sapiens
aaaaaccaaaagaca

SEQ ID NO: 23086 - DNA, 15 bp, Homo sapiens
gaaaaaccaaaagac

SEQ ID NO: 23087 - DNA, 15 bp, Homo sapiens
agaaaaaccaaaaga

SEQ ID NO: 23088 - DNA, 15 bp, Homo sapiens
aagaaaaaccaaaag

SEQ ID NO: 23089 - DNA, 15 bp, Homo sapiens
caagaaaaaccaaaa

SEQ ID NO: 23090 - DNA, 15 bp, Homo sapiens
tcaagaaaaaccaaa

SEQ ID NO: 23091 - DNA, 15 bp, Homo sapiens
atcaagaaaaaccaa

SEQ ID NO: 23092 - DNA, 15 bp, Homo sapiens
tatcaagaaaaacca

SEQ ID NO: 23093 - DNA, 15 bp, Homo sapiens
ctatcaagaaaaacc

SEQ ID NO: 23094 - DNA, 15 bp, Homo sapiens
actatcaagaaaaac

SEQ ID NO: 23095 - DNA, 15 bp, Homo sapiens
tactatcaagaaaaa

SEQ ID NO: 23096 - DNA, 15 bp, Homo sapiens
atactatcaagaaaa

SEQ ID NO: 23097 - DNA, 15 bp, Homo sapiens
aatactatcaagaaa

SEQ ID NO: 23098 - DNA, 15 bp, Homo sapiens
taatactatcaagaa

SEQ ID NO: 23099 - DNA, 15 bp, Homo sapiens
ttaatactatcaaga

SEQ ID NO: 23100 - DNA, 15 bp, Homo sapiens
attaatactatcaag

SEQ ID NO: 23101 - DNA, 15 bp, Homo sapiens
cattaatactatcaa

SEQ ID NO: 23102 - DNA, 15 bp, Homo sapiens
acattaatactatca

SEQ ID NO: 23103 - DNA, 15 bp, Homo sapiens
tacattaatactatc

SEQ ID NO: 23104 - DNA, 15 bp, Homo sapiens
ttacattaatactat

SEQ ID NO: 23105 - DNA, 15 bp, Homo sapiens
attacattaatacta

SEQ ID NO: 23106 - DNA, 15 bp, Homo sapiens
aattacattaatact

SEQ ID NO: 23107 - DNA, 15 bp, Homo sapiens
aaattacattaatac

SEQ ID NO: 23108 - DNA, 15 bp, Homo sapiens
gaaattacattaata

SEQ ID NO: 23109 - DNA, 15 bp, Homo sapiens
tgaaattacattaat

SEQ ID NO: 23110 - DNA, 15 bp, Homo sapiens
ttgaaattacattaa

SEQ ID NO: 23111 - DNA, 15 bp, Homo sapiens
tttgaaattacatta

SEQ ID NO: 23112 - DNA, 15 bp, Homo sapiens
atttgaaattacatt

SEQ ID NO: 23113 - DNA, 15 bp, Homo sapiens
catttgaaattacat

SEQ ID NO: 23114 - DNA, 15 bp, Homo sapiens
acatttgaaattaca

SEQ ID NO: 23115 - DNA, 15 bp, Homo sapiens
aacatttgaaattac

SEQ ID NO: 23116 - DNA, 15 bp, Homo sapiens
taacatttgaaatta

SEQ ID NO: 23117 - DNA, 15 bp, Homo sapiens
ctaacatttgaaatt

SEQ ID NO: 23118 - DNA, 15 bp, Homo sapiens
gctaacatttgaaat

SEQ ID NO: 23119 - DNA, 15 bp, Homo sapiens
agctaacatttgaaa

SEQ ID NO: 23120 - DNA, 15 bp, Homo sapiens
gagctaacatttgaa

SEQ ID NO: 23121 - DNA, 15 bp, Homo sapiens
tgagctaacatttga

SEQ ID NO: 23122 - DNA, 15 bp, Homo sapiens
atgagctaacatttg

SEQ ID NO: 23123 - DNA, 15 bp, Homo sapiens
aatgagctaacattt

SEQ ID NO: 23124 - DNA, 15 bp, Homo sapiens
aaatgagctaacatt

SEQ ID NO: 23125 - DNA, 15 bp, Homo sapiens
aaaatgagctaacat

SEQ ID NO: 23126 - DNA, 15 bp, Homo sapiens
aaaaatgagctaaca

SEQ ID NO: 23127 - DNA, 15 bp, Homo sapiens
caaaaatgagctaac

SEQ ID NO: 23128 - DNA, 15 bp, Homo sapiens
acaaaaatgagctaa

SEQ ID NO: 23129 - DNA, 15 bp, Homo sapiens
aacaaaaatgagcta

SEQ ID NO: 23130 - DNA, 15 bp, Homo sapiens
taacaaaaatgagct

SEQ ID NO: 23131 - DNA, 15 bp, Homo sapiens
ttaacaaaaatgagc

SEQ ID NO: 23132 - DNA, 15 bp, Homo sapiens
attaacaaaaatgag

SEQ ID NO: 23133 - DNA, 15 bp, Homo sapiens
cattaacaaaaatga

SEQ ID NO: 23134 - DNA, 15 bp, Homo sapiens
ccattaacaaaaatg

SEQ ID NO: 23135 - DNA, 15 bp, Homo sapiens
accattaacaaaaat

SEQ ID NO: 23136 - DNA, 15 bp, Homo sapiens
caccattaacaaaaa

SEQ ID NO: 23137 - DNA, 15 bp, Homo sapiens
ccaccattaacaaaa

SEQ ID NO: 23138 - DNA, 15 bp, Homo sapiens
gccaccattaacaaa

SEQ ID NO: 23139 - DNA, 15 bp, Homo sapiens
agccaccattaacaa

SEQ ID NO: 23140 - DNA, 15 bp, Homo sapiens
aagccaccattaaca

SEQ ID NO: 23141 - DNA, 15 bp, Homo sapiens
aaagccaccattaac

SEQ ID NO: 23142 - DNA, 15 bp, Homo sapiens
aaaagccaccattaa

SEQ ID NO: 23143 - DNA, 15 bp, Homo sapiens
aaaaagccaccatta

SEQ ID NO: 23144 - DNA, 15 bp, Homo sapiens
caaaaagccaccatt

SEQ ID NO: 23145 - DNA, 15 bp, Homo sapiens
acaaaaagccaccat

SEQ ID NO: 23146 - DNA, 15 bp, Homo sapiens
aacaaaaagccacca

SEQ ID NO: 23147 - DNA, 15 bp, Homo sapiens
aaacaaaaagccacc

SEQ ID NO: 23148 - DNA, 15 bp, Homo sapiens
caaacaaaaagccac

SEQ ID NO: 23149 - DNA, 15 bp, Homo sapiens
acaaacaaaaagcca

SEQ ID NO: 23150 - DNA, 15 bp, Homo sapiens
aacaaacaaaaagcc

SEQ ID NO: 23151 - DNA, 15 bp, Homo sapiens
aaacaaacaaaaagc

SEQ ID NO: 23152 - DNA, 15 bp, Homo sapiens
caaacaaacaaaaag

SEQ ID NO: 23153 - DNA, 15 bp, Homo sapiens
acaaacaaacaaaaa

SEQ ID NO: 23154 - DNA, 15 bp, Homo sapiens
aacaaacaaacaaaa

SEQ ID NO: 23155 - DNA, 15 bp, Homo sapiens
aaacaaacaaacaaa

SEQ ID NO: 23156 - DNA, 15 bp, Homo sapiens
aaaacaaacaaacaa

SEQ ID NO: 23157 - DNA, 15 bp, Homo sapiens
caaaacaaacaaaca

SEQ ID NO: 23158 - DNA, 15 bp, Homo sapiens
acaaaacaaacaaac

SEQ ID NO: 23159 - DNA, 15 bp, Homo sapiens
aacaaaacaaacaaa

SEQ ID NO: 23160 - DNA, 15 bp, Homo sapiens
aaacaaaacaaacaa

SEQ ID NO: 23161 - DNA, 15 bp, Homo sapiens
aaaacaaaacaaaca

SEQ ID NO: 23162 - DNA, 15 bp, Homo sapiens
taaaacaaaacaaac

SEQ ID NO: 23163 - DNA, 15 bp, Homo sapiens
ttaaaacaaaacaaa

SEQ ID NO: 23164 - DNA, 15 bp, Homo sapiens
cttaaaacaaaacaa

SEQ ID NO: 23165 - DNA, 15 bp, Homo sapiens
ccttaaaacaaaaca

SEQ ID NO: 23166 - DNA, 15 bp, Homo sapiens
accttaaaacaaaac

SEQ ID NO: 23167 - DNA, 15 bp, Homo sapiens
aaccttaaaacaaaa

SEQ ID NO: 23168 - DNA, 15 bp, Homo sapiens
aaaccttaaaacaaa

SEQ ID NO: 23169 - DNA, 15 bp, Homo sapiens
aaaaccttaaaacaa

SEQ ID NO: 23170 - DNA, 15 bp, Homo sapiens
aaaaaccttaaaaca

SEQ ID NO: 23171 - DNA, 15 bp, Homo sapiens
caaaaaccttaaaac

SEQ ID NO: 23172 - DNA, 15 bp, Homo sapiens
ccaaaaaccttaaaa

SEQ ID NO: 23173 - DNA, 15 bp, Homo sapiens
tccaaaaaccttaaa

SEQ ID NO: 23174 - DNA, 15 bp, Homo sapiens
atccaaaaaccttaa

SEQ ID NO: 23175 - DNA, 15 bp, Homo sapiens
aatccaaaaacctta

SEQ ID NO: 23176 - DNA, 15 bp, Homo sapiens
gaatccaaaaacctt

SEQ ID NO: 23177 - DNA, 15 bp, Homo sapiens
tgaatccaaaaacct

SEQ ID NO: 23178 - DNA, 15 bp, Homo sapiens
ttgaatccaaaaacc

SEQ ID NO: 23179 - DNA, 15 bp, Homo sapiens
tttgaatccaaaaac

SEQ ID NO: 23180 - DNA, 15 bp, Homo sapiens
ctttgaatccaaaaa

SEQ ID NO: 23181 - DNA, 15 bp, Homo sapiens
gctttgaatccaaaa

SEQ ID NO: 23182 - DNA, 15 bp, Homo sapiens
tgctttgaatccaaa

SEQ ID NO: 23183 - DNA, 15 bp, Homo sapiens
atgctttgaatccaa

SEQ ID NO: 23184 - DNA, 15 bp, Homo sapiens
tatgctttgaatcca

SEQ ID NO: 23185 - DNA, 15 bp, Homo sapiens
ttatgctttgaatcc

SEQ ID NO: 23186 - DNA, 15 bp, Homo sapiens
tttatgctttgaatc

SEQ ID NO: 23187 - DNA, 15 bp, Homo sapiens
ttttatgctttgaat

SEQ ID NO: 23188 - DNA, 15 bp, Homo sapiens
tttttatgctttgaa

SEQ ID NO: 23189 - DNA, 15 bp, Homo sapiens
gtttttatgctttga

SEQ ID NO: 23190 - DNA, 15 bp, Homo sapiens
ggtttttatgctttg

SEQ ID NO: 23191 - DNA, 15 bp, Homo sapiens
tggtttttatgcttt

SEQ ID NO: 23192 - DNA, 15 bp, Homo sapiens
atggtttttatgctt

SEQ ID NO: 23193 - DNA, 15 bp, Homo sapiens
aatggtttttatgct

SEQ ID NO: 23194 - DNA, 15 bp, Homo sapiens
taatggtttttatgc

SEQ ID NO: 23195 - DNA, 15 bp, Homo sapiens
gtaatggtttttatg

SEQ ID NO: 23196 - DNA, 15 bp, Homo sapiens
tgtaatggtttttat

SEQ ID NO: 23197 - DNA, 15 bp, Homo sapiens
ttgtaatggttttta

SEQ ID NO: 23198 - DNA, 15 bp, Homo sapiens
cttgtaatggttttt

SEQ ID NO: 23199 - DNA, 15 bp, Homo sapiens
tcttgtaatggtttt

SEQ ID NO: 23200 - DNA, 15 bp, Homo sapiens
atcttgtaatggttt

SEQ ID NO: 23201 - DNA, 15 bp, Homo sapiens
tatcttgtaatggtt

SEQ ID NO: 23202 - DNA, 15 bp, Homo sapiens
atatcttgtaatggt

SEQ ID NO: 23203 - DNA, 15 bp, Homo sapiens
tatatcttgtaatgg

SEQ ID NO: 23204 - DNA, 15 bp, Homo sapiens
gtatatcttgtaatg

SEQ ID NO: 23205 - DNA, 15 bp, Homo sapiens
tgtatatcttgtaat

SEQ ID NO: 23206 - DNA, 15 bp, Homo sapiens
ttgtatatcttgtaa

SEQ ID NO: 23207 - DNA, 15 bp, Homo sapiens
attgtatatcttgta

SEQ ID NO: 23208 - DNA, 15 bp, Homo sapiens
gattgtatatcttgt

SEQ ID NO: 23209 - DNA, 15 bp, Homo sapiens
agattgtatatcttg

SEQ ID NO: 23210 - DNA, 15 bp, Homo sapiens
cagattgtatatctt

SEQ ID NO: 23211 - DNA, 15 bp, Homo sapiens
acagattgtatatct

SEQ ID NO: 23212 - DNA, 15 bp, Homo sapiens
tacagattgtatatc

SEQ ID NO: 23213 - DNA, 15 bp, Homo sapiens
ttacagattgtatat

SEQ ID NO: 23214 - DNA, 15 bp, Homo sapiens
cttacagattgtata

SEQ ID NO: 23215 - DNA, 15 bp, Homo sapiens
acttacagattgtat

SEQ ID NO: 23216 - DNA, 15 bp, Homo sapiens
tacttacagattgta

SEQ ID NO: 23217 - DNA, 15 bp, Homo sapiens
atacttacagattgt

SEQ ID NO: 23218 - DNA, 15 bp, Homo sapiens
catacttacagattg

SEQ ID NO: 23219 - DNA, 15 bp, Homo sapiens
acatacttacagatt

SEQ ID NO: 23220 - DNA, 15 bp, Homo sapiens
aacatacttacagat

SEQ ID NO: 23221 - DNA, 15 bp, Homo sapiens
aaacatacttacaga

SEQ ID NO: 23222 - DNA, 15 bp, Homo sapiens
aaaacatacttacag

SEQ ID NO: 23223 - DNA, 15 bp, Homo sapiens
gaaaacatacttaca

SEQ ID NO: 23224 - DNA, 15 bp, Homo sapiens
agaaaacatacttac

SEQ ID NO: 23225 - DNA, 15 bp, Homo sapiens
aagaaaacatactta

SEQ ID NO: 23226 - DNA, 15 bp, Homo sapiens
taagaaaacatactt

SEQ ID NO: 23227 - DNA, 15 bp, Homo sapiens
ataagaaaacatact

SEQ ID NO: 23228 - DNA, 15 bp, Homo sapiens
aataagaaaacatac

SEQ ID NO: 23229 - DNA, 15 bp, Homo sapiens
aaataagaaaacata

SEQ ID NO: 23230 - DNA, 15 bp, Homo sapiens
caaataagaaaacat

SEQ ID NO: 23231 - DNA, 15 bp, Homo sapiens
acaaataagaaaaca

SEQ ID NO: 23232 - DNA, 15 bp, Homo sapiens
tacaaataagaaaac

SEQ ID NO: 23233 - DNA, 15 bp, Homo sapiens
atacaaataagaaaa

SEQ ID NO: 23234 - DNA, 15 bp, Homo sapiens
catacaaataagaaa

SEQ ID NO: 23235 - DNA, 15 bp, Homo sapiens
gcatacaaataagaa

SEQ ID NO: 23236 - DNA, 15 bp, Homo sapiens
agcatacaaataaga

SEQ ID NO: 23237 - DNA, 15 bp, Homo sapiens
aagcatacaaataag

SEQ ID NO: 23238 - DNA, 15 bp, Homo sapiens
caagcatacaaataa

SEQ ID NO: 23239 - DNA, 15 bp, Homo sapiens
gcaagcatacaaata

SEQ ID NO: 23240 - DNA, 15 bp, Homo sapiens
tgcaagcatacaaat

SEQ ID NO: 23241 - DNA, 15 bp, Homo sapiens
ttgcaagcatacaaa

SEQ ID NO: 23242 - DNA, 15 bp, Homo sapiens
tttgcaagcatacaa

SEQ ID NO: 23243 - DNA, 15 bp, Homo sapiens
atttgcaagcataca

SEQ ID NO: 23244 - DNA, 15 bp, Homo sapiens
tatttgcaagcatac

SEQ ID NO: 23245 - DNA, 15 bp, Homo sapiens
atatttgcaagcata

SEQ ID NO: 23246 - DNA, 15 bp, Homo sapiens
gatatttgcaagcat

SEQ ID NO: 23247 - DNA, 15 bp, Homo sapiens
agatatttgcaagca

SEQ ID NO: 23248 - DNA, 15 bp, Homo sapiens
aagatatttgcaagc

SEQ ID NO: 23249 - DNA, 15 bp, Homo sapiens
gaagatatttgcaag

SEQ ID NO: 23250 - DNA, 15 bp, Homo sapiens
agaagatatttgcaa

SEQ ID NO: 23251 - DNA, 15 bp, Homo sapiens
tagaagatatttgca

SEQ ID NO: 23252 - DNA, 15 bp, Homo sapiens
ttagaagatatttgc

SEQ ID NO: 23253 - DNA, 15 bp, Homo sapiens
tttagaagatatttg

SEQ ID NO: 23254 - DNA, 15 bp, Homo sapiens
ttttagaagatattt

SEQ ID NO: 23255 - DNA, 15 bp, Homo sapiens
gttttagaagatatt

SEQ ID NO: 23256 - DNA, 15 bp, Homo sapiens
tgttttagaagatat

SEQ ID NO: 23257 - DNA, 15 bp, Homo sapiens
ttgttttagaagata

SEQ ID NO: 23258 - DNA, 15 bp, Homo sapiens
gttgttttagaagat

SEQ ID NO: 23259 - DNA, 15 bp, Homo sapiens
agttgttttagaaga

SEQ ID NO: 23260 - DNA, 15 bp, Homo sapiens
tagttgttttagaag

SEQ ID NO: 23261 - DNA, 15 bp, Homo sapiens
atagttgttttagaa

SEQ ID NO: 23262 - DNA, 15 bp, Homo sapiens
aatagttgttttaga

SEQ ID NO: 23263 - DNA, 15 bp, Homo sapiens
taatagttgttttag

SEQ ID NO: 23264 - DNA, 15 bp, Homo sapiens
ttaatagttgtttta

SEQ ID NO: 23265 - DNA, 15 bp, Homo sapiens
cttaatagttgtttt

SEQ ID NO: 23266 - DNA, 15 bp, Homo sapiens
acttaatagttgttt

SEQ ID NO: 23267 - DNA, 15 bp, Homo sapiens
cacttaatagttgtt

SEQ ID NO: 23268 - DNA, 15 bp, Homo sapiens
tcacttaatagttgt

SEQ ID NO: 23269 - DNA, 15 bp, Homo sapiens
ttcacttaatagttg

SEQ ID NO: 23270 - DNA, 15 bp, Homo sapiens
tttcacttaatagtt

SEQ ID NO: 23271 - DNA, 15 bp, Homo sapiens
ctttcacttaatagt

SEQ ID NO: 23272 - DNA, 15 bp, Homo sapiens
actttcacttaatag

SEQ ID NO: 23273 - DNA, 15 bp, Homo sapiens
aactttcacttaata

SEQ ID NO: 23274 - DNA, 15 bp, Homo sapiens
taactttcacttaat

SEQ ID NO: 23275 - DNA, 15 bp, Homo sapiens
ataactttcacttaa

SEQ ID NO: 23276 - DNA, 15 bp, Homo sapiens
gataactttcactta

SEQ ID NO: 23277 - DNA, 15 bp, Homo sapiens
agataactttcactt

SEQ ID NO: 23278 - DNA, 15 bp, Homo sapiens
cagataactttcact

SEQ ID NO: 23279 - DNA, 15 bp, Homo sapiens
gcagataactttcac

SEQ ID NO: 23280 - DNA, 15 bp, Homo sapiens
agcagataactttca

SEQ ID NO: 23281 - DNA, 15 bp, Homo sapiens
aagcagataactttc

SEQ ID NO: 23282 - DNA, 15 bp, Homo sapiens
caagcagataacttt

SEQ ID NO: 23283 - DNA, 15 bp, Homo sapiens
acaagcagataactt

SEQ ID NO: 23284 - DNA, 15 bp, Homo sapiens
aacaagcagataact

SEQ ID NO: 23285 - DNA, 15 bp, Homo sapiens
taacaagcagataac

SEQ ID NO: 23286 - DNA, 15 bp, Homo sapiens
ctaacaagcagataa

SEQ ID NO: 23287 - DNA, 15 bp, Homo sapiens
tctaacaagcagata

SEQ ID NO: 23288 - DNA, 15 bp, Homo sapiens
ctctaacaagcagat

SEQ ID NO: 23289 - DNA, 15 bp, Homo sapiens
actctaacaagcaga

SEQ ID NO: 23290 - DNA, 15 bp, Homo sapiens
cactctaacaagcag

SEQ ID NO: 23291 - DNA, 15 bp, Homo sapiens
tcactctaacaagca

SEQ ID NO: 23292 - DNA, 15 bp, Homo sapiens
ctcactctaacaagc

SEQ ID NO: 23293 - DNA, 15 bp, Homo sapiens
cctcactctaacaag

SEQ ID NO: 23294 - DNA, 15 bp, Homo sapiens
acctcactctaacaa

SEQ ID NO: 23295 - DNA, 15 bp, Homo sapiens
tacctcactctaaca

SEQ ID NO: 23296 - DNA, 15 bp, Homo sapiens
ctacctcactctaac

SEQ ID NO: 23297 - DNA, 15 bp, Homo sapiens
tctacctcactctaa

SEQ ID NO: 23298 - DNA, 15 bp, Homo sapiens
ctctacctcactcta

SEQ ID NO: 23299 - DNA, 15 bp, Homo sapiens
actctacctcactct

SEQ ID NO: 23300 - DNA, 15 bp, Homo sapiens
aactctacctcactc

SEQ ID NO: 23301 - DNA, 15 bp, Homo sapiens
taactctacctcact

SEQ ID NO: 23302 - DNA, 15 bp, Homo sapiens
ttaactctacctcac

SEQ ID NO: 23303 - DNA, 15 bp, Homo sapiens
tttaactctacctca

SEQ ID NO: 23304 - DNA, 15 bp, Homo sapiens
ctttaactctacctc

SEQ ID NO: 23305 - DNA, 15 bp, Homo sapiens
tctttaactctacct

SEQ ID NO: 23306 - DNA, 15 bp, Homo sapiens
atctttaactctacc

SEQ ID NO: 23307 - DNA, 15 bp, Homo sapiens
tatctttaactctac

SEQ ID NO: 23308 - DNA, 15 bp, Homo sapiens
gtatctttaactcta

SEQ ID NO: 23309 - DNA, 15 bp, Homo sapiens
tgtatctttaactct

SEQ ID NO: 23310 - DNA, 15 bp, Homo sapiens
atgtatctttaactc

SEQ ID NO: 23311 - DNA, 15 bp, Homo sapiens
aatgtatctttaact

SEQ ID NO: 23312 - DNA, 15 bp, Homo sapiens
aaatgtatctttaac

SEQ ID NO: 23313 - DNA, 15 bp, Homo sapiens
aaaatgtatctttaa

SEQ ID NO: 23314 - DNA, 15 bp, Homo sapiens
taaaatgtatcttta

SEQ ID NO: 23315 - DNA, 15 bp, Homo sapiens
ttaaaatgtatcttt

SEQ ID NO: 23316 - DNA, 15 bp, Homo sapiens
gttaaaatgtatctt

SEQ ID NO: 23317 - DNA, 15 bp, Homo sapiens
tgttaaaatgtatct

SEQ ID NO: 23318 - DNA, 15 bp, Homo sapiens
ctgttaaaatgtatc

SEQ ID NO: 23319 - DNA, 15 bp, Homo sapiens
tctgttaaaatgtat

SEQ ID NO: 23320 - DNA, 15 bp, Homo sapiens
ttctgttaaaatgta

SEQ ID NO: 23321 - DNA, 15 bp, Homo sapiens
attctgttaaaatgt

SEQ ID NO: 23322 - DNA, 15 bp, Homo sapiens
aattctgttaaaatg

SEQ ID NO: 23323 - DNA, 15 bp, Homo sapiens
caattctgttaaaat

SEQ ID NO: 23324 - DNA, 15 bp, Homo sapiens
acaattctgttaaaa

SEQ ID NO: 23325 - DNA, 15 bp, Homo sapiens
tacaattctgttaaa

SEQ ID NO: 23326 - DNA, 15 bp, Homo sapiens
atacaattctgttaa

SEQ ID NO: 23327 - DNA, 15 bp, Homo sapiens
aatacaattctgtta

SEQ ID NO: 23328 - DNA, 15 bp, Homo sapiens
gaatacaattctgtt

SEQ ID NO: 23329 - DNA, 15 bp, Homo sapiens
ggaatacaattctgt

SEQ ID NO: 23330 - DNA, 15 bp, Homo sapiens
aggaatacaattctg

SEQ ID NO: 23331 - DNA, 15 bp, Homo sapiens
taggaatacaattct

SEQ ID NO: 23332 - DNA, 15 bp, Homo sapiens
ttaggaatacaattc

SEQ ID NO: 23333 - DNA, 15 bp, Homo sapiens
tttaggaatacaatt

SEQ ID NO: 23334 - DNA, 15 bp, Homo sapiens
gtttaggaatacaat

SEQ ID NO: 23335 - DNA, 15 bp, Homo sapiens
ggtttaggaatacaa

SEQ ID NO: 23336 - DNA, 15 bp, Homo sapiens
cggtttaggaataca

SEQ ID NO: 23337 - DNA, 15 bp, Homo sapiens
tcggtttaggaatac

SEQ ID NO: 23338 - DNA, 15 bp, Homo sapiens
atcggtttaggaata

SEQ ID NO: 23339 - DNA, 15 bp, Homo sapiens
aatcggtttaggaat

SEQ ID NO: 23340 - DNA, 15 bp, Homo sapiens
taatcggtttaggaa

SEQ ID NO: 23341 - DNA, 15 bp, Homo sapiens
ttaatcggtttagga

SEQ ID NO: 23342 - DNA, 15 bp, Homo sapiens
cttaatcggtttagg

SEQ ID NO: 23343 - DNA, 15 bp, Homo sapiens
acttaatcggtttag

SEQ ID NO: 23344 - DNA, 15 bp, Homo sapiens
gacttaatcggttta

SEQ ID NO: 23345 - DNA, 15 bp, Homo sapiens
tgacttaatcggttt

SEQ ID NO: 23346 - DNA, 15 bp, Homo sapiens
ttgacttaatcggtt

SEQ ID NO: 23347 - DNA, 15 bp, Homo sapiens
cttgacttaatcggt

SEQ ID NO: 23348 - DNA, 15 bp, Homo sapiens
tcttgacttaatcgg

SEQ ID NO: 23349 - DNA, 15 bp, Homo sapiens
ttcttgacttaatcg

SEQ ID NO: 23350 - DNA, 15 bp, Homo sapiens
cttcttgacttaatc

SEQ ID NO: 23351 - DNA, 15 bp, Homo sapiens
acttcttgacttaat

SEQ ID NO: 23352 - DNA, 15 bp, Homo sapiens
gacttcttgacttaa

SEQ ID NO: 23353 - DNA, 15 bp, Homo sapiens
ggacttcttgactta

SEQ ID NO: 23354 - DNA, 15 bp, Homo sapiens
tggacttcttgactt

SEQ ID NO: 23355 - DNA, 15 bp, Homo sapiens
ttggacttcttgact

SEQ ID NO: 23356 - DNA, 15 bp, Homo sapiens
cttggacttcttgac

SEQ ID NO: 23357 - DNA, 15 bp, Homo sapiens
tcttggacttcttga

SEQ ID NO: 23358 - DNA, 15 bp, Homo sapiens
ctcttggacttcttg

SEQ ID NO: 23359 - DNA, 15 bp, Homo sapiens
gctcttggacttctt

SEQ ID NO: 23360 - DNA, 15 bp, Homo sapiens
tgctcttggacttct

SEQ ID NO: 23361 - DNA, 15 bp, Homo sapiens
atgctcttggacttc

SEQ ID NO: 23362 - DNA, 15 bp, Homo sapiens
aatgctcttggactt

SEQ ID NO: 23363 - DNA, 15 bp, Homo sapiens
caatgctcttggact

SEQ ID NO: 23364 - DNA, 15 bp, Homo sapiens
acaatgctcttggac

SEQ ID NO: 23365 - DNA, 15 bp, Homo sapiens
aacaatgctcttgga

SEQ ID NO: 23366 - DNA, 15 bp, Homo sapiens
taacaatgctcttgg

SEQ ID NO: 23367 - DNA, 15 bp, Homo sapiens
ctaacaatgctcttg

SEQ ID NO: 23368 - DNA, 15 bp, Homo sapiens
tctaacaatgctctt

SEQ ID NO: 23369 - DNA, 15 bp, Homo sapiens
atctaacaatgctct

SEQ ID NO: 23370 - DNA, 15 bp, Homo sapiens
gatctaacaatgctc

SEQ ID NO: 23371 - DNA, 15 bp, Homo sapiens
tgatctaacaatgct

SEQ ID NO: 23372 - DNA, 15 bp, Homo sapiens
atgatctaacaatgc

SEQ ID NO: 23373 - DNA, 15 bp, Homo sapiens
aatgatctaacaatg

SEQ ID NO: 23374 - DNA, 15 bp, Homo sapiens
aaatgatctaacaat

SEQ ID NO: 23375 - DNA, 15 bp, Homo sapiens
taaatgatctaacaa

SEQ ID NO: 23376 - DNA, 15 bp, Homo sapiens
ctaaatgatctaaca

SEQ ID NO: 23377 - DNA, 15 bp, Homo sapiens
tctaaatgatctaac

SEQ ID NO: 23378 - DNA, 15 bp, Homo sapiens
ttctaaatgatctaa

SEQ ID NO: 23379 - DNA, 15 bp, Homo sapiens
tttctaaatgatcta

SEQ ID NO: 23380 - DNA, 15 bp, Homo sapiens
ctttctaaatgatct

SEQ ID NO: 23381 - DNA, 15 bp, Homo sapiens
actttctaaatgatc

SEQ ID NO: 23382 - DNA, 15 bp, Homo sapiens
cactttctaaatgat

SEQ ID NO: 23383 - DNA, 15 bp, Homo sapiens
acactttctaaatga

SEQ ID NO: 23384 - DNA, 15 bp, Homo sapiens
tacactttctaaatg

SEQ ID NO: 23385 - DNA, 15 bp, Homo sapiens
ctacactttctaaat

SEQ ID NO: 23386 - DNA, 15 bp, Homo sapiens
actacactttctaaa

SEQ ID NO: 23387 - DNA, 15 bp, Homo sapiens
cactacactttctaa

SEQ ID NO: 23388 - DNA, 15 bp, Homo sapiens
tcactacactttcta

SEQ ID NO: 23389 - DNA, 15 bp, Homo sapiens
atcactacactttct

SEQ ID NO: 23390 - DNA, 15 bp, Homo sapiens
catcactacactttc

SEQ ID NO: 23391 - DNA, 15 bp, Homo sapiens
tcatcactacacttt

SEQ ID NO: 23392 - DNA, 15 bp, Homo sapiens
ctcatcactacactt

SEQ ID NO: 23393 - DNA, 15 bp, Homo sapiens
cctcatcactacact

SEQ ID NO: 23394 - DNA, 15 bp, Homo sapiens
acctcatcactacac

SEQ ID NO: 23395 - DNA, 15 bp, Homo sapiens
tacctcatcactaca

SEQ ID NO: 23396 - DNA, 15 bp, Homo sapiens
ttacctcatcactac

SEQ ID NO: 23397 - DNA, 15 bp, Homo sapiens
tttacctcatcacta

SEQ ID NO: 23398 - DNA, 15 bp, Homo sapiens
ttttacctcatcact

SEQ ID NO: 23399 - DNA, 15 bp, Homo sapiens
gttttacctcatcac

SEQ ID NO: 23400 - DNA, 15 bp, Homo sapiens
tgttttacctcatca

SEQ ID NO: 23401 - DNA, 15 bp, Homo sapiens
atgttttacctcatc

SEQ ID NO: 23402 - DNA, 15 bp, Homo sapiens
aatgttttacctcat

SEQ ID NO: 23403 - DNA, 15 bp, Homo sapiens
caatgttttacctca

SEQ ID NO: 23404 - DNA, 15 bp, Homo sapiens
acaatgttttacctc

SEQ ID NO: 23405 - DNA, 15 bp, Homo sapiens
aacaatgttttacct

SEQ ID NO: 23406 - DNA, 15 bp, Homo sapiens
caacaatgttttacc

SEQ ID NO: 23407 - DNA, 15 bp, Homo sapiens
ccaacaatgttttac

SEQ ID NO: 23408 - DNA, 15 bp, Homo sapiens
gccaacaatgtttta

SEQ ID NO: 23409 - DNA, 15 bp, Homo sapiens
tgccaacaatgtttt

SEQ ID NO: 23410 - DNA, 15 bp, Homo sapiens
gtgccaacaatgttt

SEQ ID NO: 23411 - DNA, 15 bp, Homo sapiens
tgtgccaacaatgtt

SEQ ID NO: 23412 - DNA, 15 bp, Homo sapiens
ctgtgccaacaatgt

SEQ ID NO: 23413 - DNA, 15 bp, Homo sapiens
tctgtgccaacaatg

SEQ ID NO: 23414 - DNA, 15 bp, Homo sapiens
atctgtgccaacaat

SEQ ID NO: 23415 - DNA, 15 bp, Homo sapiens
aatctgtgccaacaa

SEQ ID NO: 23416 - DNA, 15 bp, Homo sapiens
gaatctgtgccaaca

SEQ ID NO: 23417 - DNA, 15 bp, Homo sapiens
tgaatctgtgccaac

SEQ ID NO: 23418 - DNA, 15 bp, Homo sapiens
atgaatctgtgccaa

SEQ ID NO: 23419 - DNA, 15 bp, Homo sapiens
catgaatctgtgcca

SEQ ID NO: 23420 - DNA, 15 bp, Homo sapiens
acatgaatctgtgcc

SEQ ID NO: 23421 - DNA, 15 bp, Homo sapiens
aacatgaatctgtgc

SEQ ID NO: 23422 - DNA, 15 bp, Homo sapiens
taacatgaatctgtg

SEQ ID NO: 23423 - DNA, 15 bp, Homo sapiens
gtaacatgaatctgt

SEQ ID NO: 23424 - DNA, 15 bp, Homo sapiens
agtaacatgaatctg

SEQ ID NO: 23425 - DNA, 15 bp, Homo sapiens
aagtaacatgaatct

SEQ ID NO: 23426 - DNA, 15 bp, Homo sapiens
caagtaacatgaatc

SEQ ID NO: 23427 - DNA, 15 bp, Homo sapiens
tcaagtaacatgaat

SEQ ID NO: 23428 - DNA, 15 bp, Homo sapiens
atcaagtaacatgaa

SEQ ID NO: 23429 - DNA, 15 bp, Homo sapiens
gatcaagtaacatga

SEQ ID NO: 23430 - DNA, 15 bp, Homo sapiens
agatcaagtaacatg

SEQ ID NO: 23431 - DNA, 15 bp, Homo sapiens
cagatcaagtaacat

SEQ ID NO: 23432 - DNA, 15 bp, Homo sapiens
gcagatcaagtaaca

SEQ ID NO: 23433 - DNA, 15 bp, Homo sapiens
agcagatcaagtaac

SEQ ID NO: 23434 - DNA, 15 bp, Homo sapiens
aagcagatcaagtaa

SEQ ID NO: 23435 - DNA, 15 bp, Homo sapiens
aaagcagatcaagta

SEQ ID NO: 23436 - DNA, 15 bp, Homo sapiens
taaagcagatcaagt

SEQ ID NO: 23437 - DNA, 15 bp, Homo sapiens
ttaaagcagatcaag

SEQ ID NO: 23438 - DNA, 15 bp, Homo sapiens
tttaaagcagatcaa

SEQ ID NO: 23439 - DNA, 15 bp, Homo sapiens
atttaaagcagatca

SEQ ID NO: 23440 - DNA, 15 bp, Homo sapiens
catttaaagcagatc

SEQ ID NO: 23441 - DNA, 15 bp, Homo sapiens
tcatttaaagcagat

SEQ ID NO: 23442 - DNA, 15 bp, Homo sapiens
gtcatttaaagcaga

SEQ ID NO: 23443 - DNA, 15 bp, Homo sapiens
agtcatttaaagcag

SEQ ID NO: 23444 - DNA, 15 bp, Homo sapiens
aagtcatttaaagca

SEQ ID NO: 23445 - DNA, 15 bp, Homo sapiens
caagtcatttaaagc

SEQ ID NO: 23446 - DNA, 15 bp, Homo sapiens
ccaagtcatttaaag

SEQ ID NO: 23447 - DNA, 15 bp, Homo sapiens
gccaagtcatttaaa

SEQ ID NO: 23448 - DNA, 15 bp, Homo sapiens
tgccaagtcatttaa

SEQ ID NO: 23449 - DNA, 15 bp, Homo sapiens
atgccaagtcattta

SEQ ID NO: 23450 - DNA, 15 bp, Homo sapiens
gatgccaagtcattt

SEQ ID NO: 23451 - DNA, 15 bp, Homo sapiens
agatgccaagtcatt

SEQ ID NO: 23452 - DNA, 15 bp, Homo sapiens
tagatgccaagtcat

SEQ ID NO: 23453 - DNA, 15 bp, Homo sapiens
ctagatgccaagtca

SEQ ID NO: 23454 - DNA, 15 bp, Homo sapiens
gctagatgccaagtc

SEQ ID NO: 23455 - DNA, 15 bp, Homo sapiens
ggctagatgccaagt

SEQ ID NO: 23456 - DNA, 15 bp, Homo sapiens
gggctagatgccaag

SEQ ID NO: 23457 - DNA, 15 bp, Homo sapiens
tgggctagatgccaa

SEQ ID NO: 23458 - DNA, 15 bp, Homo sapiens
atgggctagatgcca

SEQ ID NO: 23459 - DNA, 15 bp, Homo sapiens
tatgggctagatgcc

SEQ ID NO: 23460 - DNA, 15 bp, Homo sapiens
atatgggctagatgc

SEQ ID NO: 23461 - DNA, 15 bp, Homo sapiens
aatatgggctagatg

SEQ ID NO: 23462 - DNA, 15 bp, Homo sapiens
aaatatgggctagat

SEQ ID NO: 23463 - DNA, 15 bp, Homo sapiens
caaatatgggctaga

SEQ ID NO: 23464 - DNA, 15 bp, Homo sapiens
tcaaatatgggctag

SEQ ID NO: 23465 - DNA, 15 bp, Homo sapiens
ctcaaatatgggcta

SEQ ID NO: 23466 - DNA, 15 bp, Homo sapiens
gctcaaatatgggct

SEQ ID NO: 23467 - DNA, 15 bp, Homo sapiens
ggctcaaatatgggc

SEQ ID NO: 23468 - DNA, 15 bp, Homo sapiens
gggctcaaatatggg

SEQ ID NO: 23469 - DNA, 15 bp, Homo sapiens
tgggctcaaatatgg

SEQ ID NO: 23470 - DNA, 15 bp, Homo sapiens
atgggctcaaatatg

SEQ ID NO: 23471 - DNA, 15 bp, Homo sapiens
tatgggctcaaatat

SEQ ID NO: 23472 - DNA, 15 bp, Homo sapiens
ttatgggctcaaata

SEQ ID NO: 23473 - DNA, 15 bp, Homo sapiens
gttatgggctcaaat

SEQ ID NO: 23474 - DNA, 15 bp, Homo sapiens
ggttatgggctcaaa

SEQ ID NO: 23475 - DNA, 15 bp, Homo sapiens
cggttatgggctcaa

SEQ ID NO: 23476 - DNA, 15 bp, Homo sapiens
acggttatgggctca

SEQ ID NO: 23477 - DNA, 15 bp, Homo sapiens
cacggttatgggctc

SEQ ID NO: 23478 - DNA, 15 bp, Homo sapiens
acacggttatgggct

SEQ ID NO: 23479 - DNA, 15 bp, Homo sapiens
cacacggttatgggc

SEQ ID NO: 23480 - DNA, 15 bp, Homo sapiens
ccacacggttatggg

SEQ ID NO: 23481 - DNA, 15 bp, Homo sapiens
accacacggttatgg

SEQ ID NO: 23482 - DNA, 15 bp, Homo sapiens
taccacacggttatg

SEQ ID NO: 23483 - DNA, 15 bp, Homo sapiens
ttaccacacggttat

SEQ ID NO: 23484 - DNA, 15 bp, Homo sapiens
attaccacacggtta

SEQ ID NO: 23485 - DNA, 15 bp, Homo sapiens
aattaccacacggtt

SEQ ID NO: 23486 - DNA, 15 bp, Homo sapiens
aaattaccacacggt

SEQ ID NO: 23487 - DNA, 15 bp, Homo sapiens
caaattaccacacgg

SEQ ID NO: 23488 - DNA, 15 bp, Homo sapiens
tcaaattaccacacg

SEQ ID NO: 23489 - DNA, 15 bp, Homo sapiens
ttcaaattaccacac

SEQ ID NO: 23490 - DNA, 15 bp, Homo sapiens
cttcaaattaccaca

SEQ ID NO: 23491 - DNA, 15 bp, Homo sapiens
acttcaaattaccac

SEQ ID NO: 23492 - DNA, 15 bp, Homo sapiens
cacttcaaattacca

SEQ ID NO: 23493 - DNA, 15 bp, Homo sapiens
acacttcaaattacc

SEQ ID NO: 23494 - DNA, 15 bp, Homo sapiens
tacacttcaaattac

SEQ ID NO: 23495 - DNA, 15 bp, Homo sapiens
ttacacttcaaatta

SEQ ID NO: 23496 - DNA, 15 bp, Homo sapiens
attacacttcaaatt

SEQ ID NO: 23497 - DNA, 15 bp, Homo sapiens
aattacacttcaaat

SEQ ID NO: 23498 - DNA, 15 bp, Homo sapiens
gaattacacttcaaa

SEQ ID NO: 23499 - DNA, 15 bp, Homo sapiens
tgaattacacttcaa

SEQ ID NO: 23500 - DNA, 15 bp, Homo sapiens
gtgaattacacttca

SEQ ID NO: 23501 - DNA, 15 bp, Homo sapiens
tgtgaattacacttc

SEQ ID NO: 23502 - DNA, 15 bp, Homo sapiens
ctgtgaattacactt

SEQ ID NO: 23503 - DNA, 15 bp, Homo sapiens
actgtgaattacact

SEQ ID NO: 23504 - DNA, 15 bp, Homo sapiens
tactgtgaattacac

SEQ ID NO: 23505 - DNA, 15 bp, Homo sapiens
ctactgtgaattaca

SEQ ID NO: 23506 - DNA, 15 bp, Homo sapiens
tctactgtgaattac

SEQ ID NO: 23507 - DNA, 15 bp, Homo sapiens
ctctactgtgaatta

SEQ ID NO: 23508 - DNA, 15 bp, Homo sapiens
gctctactgtgaatt

SEQ ID NO: 23509 - DNA, 15 bp, Homo sapiens
agctctactgtgaat

SEQ ID NO: 23510 - DNA, 15 bp, Homo sapiens
aagctctactgtgaa

SEQ ID NO: 23511 - DNA, 15 bp, Homo sapiens
gaagctctactgtga

SEQ ID NO: 23512 - DNA, 15 bp, Homo sapiens
agaagctctactgtg

SEQ ID NO: 23513 - DNA, 15 bp, Homo sapiens
cagaagctctactgt

SEQ ID NO: 23514 - DNA, 15 bp, Homo sapiens
acagaagctctactg

SEQ ID NO: 23515 - DNA, 15 bp, Homo sapiens
aacagaagctctact

SEQ ID NO: 23516 - DNA, 15 bp, Homo sapiens
taacagaagctctac

SEQ ID NO: 23517 - DNA, 15 bp, Homo sapiens
ttaacagaagctcta

SEQ ID NO: 23518 - DNA, 15 bp, Homo sapiens
tttaacagaagctct

SEQ ID NO: 23519 - DNA, 15 bp, Homo sapiens
ctttaacagaagctc

SEQ ID NO: 23520 - DNA, 15 bp, Homo sapiens
gctttaacagaagct

SEQ ID NO: 23521 - DNA, 15 bp, Homo sapiens
tgctttaacagaagc

SEQ ID NO: 23522 - DNA, 15 bp, Homo sapiens
gtgctttaacagaag

SEQ ID NO: 23523 - DNA, 15 bp, Homo sapiens
agtgctttaacagaa

SEQ ID NO: 23524 - DNA, 15 bp, Homo sapiens
tagtgctttaacaga

SEQ ID NO: 23525 - DNA, 15 bp, Homo sapiens
ttagtgctttaacag

SEQ ID NO: 23526 - DNA, 15 bp, Homo sapiens
attagtgctttaaca

SEQ ID NO: 23527 - DNA, 15 bp, Homo sapiens
tattagtgctttaac

SEQ ID NO: 23528 - DNA, 15 bp, Homo sapiens
ctattagtgctttaa

SEQ ID NO: 23529 - DNA, 15 bp, Homo sapiens
gctattagtgcttta

SEQ ID NO: 23530 - DNA, 15 bp, Homo sapiens
tgctattagtgcttt

SEQ ID NO: 23531 - DNA, 15 bp, Homo sapiens
atgctattagtgctt

SEQ ID NO: 23532 - DNA, 15 bp, Homo sapiens
gatgctattagtgct

SEQ ID NO: 23533 - DNA, 15 bp, Homo sapiens
agatgctattagtgc

SEQ ID NO: 23534 - DNA, 15 bp, Homo sapiens
aagatgctattagtg

SEQ ID NO: 23535 - DNA, 15 bp, Homo sapiens
gaagatgctattagt

SEQ ID NO: 23536 - DNA, 15 bp, Homo sapiens
ggaagatgctattag

SEQ ID NO: 23537 - DNA, 15 bp, Homo sapiens
tggaagatgctatta

SEQ ID NO: 23538 - DNA, 15 bp, Homo sapiens
atggaagatgctatt

SEQ ID NO: 23539 - DNA, 15 bp, Homo sapiens
catggaagatgctat

SEQ ID NO: 23540 - DNA, 15 bp, Homo sapiens
ccatggaagatgcta

SEQ ID NO: 23541 - DNA, 15 bp, Homo sapiens
tccatggaagatgct

SEQ ID NO: 23542 - DNA, 15 bp, Homo sapiens
ctccatggaagatgc

SEQ ID NO: 23543 - DNA, 15 bp, Homo sapiens
cctccatggaagatg

SEQ ID NO: 23544 - DNA, 15 bp, Homo sapiens
acctccatggaagat

SEQ ID NO: 23545 - DNA, 15 bp, Homo sapiens
tacctccatggaaga

SEQ ID NO: 23546 - DNA, 15 bp, Homo sapiens
atacctccatggaag

SEQ ID NO: 23547 - DNA, 15 bp, Homo sapiens
tatacctccatggaa

SEQ ID NO: 23548 - DNA, 15 bp, Homo sapiens
gtatacctccatgga

SEQ ID NO: 23549 - DNA, 15 bp, Homo sapiens
agtatacctccatgg

SEQ ID NO: 23550 - DNA, 15 bp, Homo sapiens
aagtatacctccatg

SEQ ID NO: 23551 - DNA, 15 bp, Homo sapiens
gaagtatacctccat

SEQ ID NO: 23552 - DNA, 15 bp, Homo sapiens
tgaagtatacctcca

SEQ ID NO: 23553 - DNA, 15 bp, Homo sapiens
ctgaagtatacctcc

SEQ ID NO: 23554 - DNA, 15 bp, Homo sapiens
tctgaagtatacctc

SEQ ID NO: 23555 - DNA, 15 bp, Homo sapiens
ctctgaagtatacct

SEQ ID NO: 23556 - DNA, 15 bp, Homo sapiens
actctgaagtatacc

SEQ ID NO: 23557 - DNA, 15 bp, Homo sapiens
cactctgaagtatac

SEQ ID NO: 23558 - DNA, 15 bp, Homo sapiens
tcactctgaagtata

SEQ ID NO: 23559 - DNA, 15 bp, Homo sapiens
ttcactctgaagtat

SEQ ID NO: 23560 - DNA, 15 bp, Homo sapiens
attcactctgaagta

SEQ ID NO: 23561 - DNA, 15 bp, Homo sapiens
tattcactctgaagt

SEQ ID NO: 23562 - DNA, 15 bp, Homo sapiens
atattcactctgaag

SEQ ID NO: 23563 - DNA, 15 bp, Homo sapiens
tatattcactctgaa

SEQ ID NO: 23564 - DNA, 15 bp, Homo sapiens
ttatattcactctga

SEQ ID NO: 23565 - DNA, 15 bp, Homo sapiens
attatattcactctg

SEQ ID NO: 23566 - DNA, 15 bp, Homo sapiens
aattatattcactct

SEQ ID NO: 23567 - DNA, 15 bp, Homo sapiens
aaattatattcactc

SEQ ID NO: 23568 - DNA, 15 bp, Homo sapiens
aaaattatattcact

SEQ ID NO: 23569 - DNA, 15 bp, Homo sapiens
caaaattatattcac

SEQ ID NO: 23570 - DNA, 15 bp, Homo sapiens
acaaaattatattca

SEQ ID NO: 23571 - DNA, 15 bp, Homo sapiens
aacaaaattatattc

SEQ ID NO: 23572 - DNA, 15 bp, Homo sapiens
aaacaaaattatatt

SEQ ID NO: 23573 - DNA, 15 bp, Homo sapiens
taaacaaaattatat

SEQ ID NO: 23574 - DNA, 15 bp, Homo sapiens
ataaacaaaattata

SEQ ID NO: 23575 - DNA, 15 bp, Homo sapiens
gataaacaaaattat

SEQ ID NO: 23576 - DNA, 15 bp, Homo sapiens
ggataaacaaaatta

SEQ ID NO: 23577 - DNA, 15 bp, Homo sapiens
aggataaacaaaatt

SEQ ID NO: 23578 - DNA, 15 bp, Homo sapiens
caggataaacaaaat

SEQ ID NO: 23579 - DNA, 15 bp, Homo sapiens
acaggataaacaaaa

SEQ ID NO: 23580 - DNA, 15 bp, Homo sapiens
cacaggataaacaaa

SEQ ID NO: 23581 - DNA, 15 bp, Homo sapiens
acacaggataaacaa

SEQ ID NO: 23582 - DNA, 15 bp, Homo sapiens
gacacaggataaaca

SEQ ID NO: 23583 - DNA, 15 bp, Homo sapiens
agacacaggataaac

SEQ ID NO: 23584 - DNA, 15 bp, Homo sapiens
gagacacaggataaa

SEQ ID NO: 23585 - DNA, 15 bp, Homo sapiens
agagacacaggataa

SEQ ID NO: 23586 - DNA, 15 bp, Homo sapiens
tagagacacaggata

SEQ ID NO: 23587 - DNA, 15 bp, Homo sapiens
ctagagacacaggat

SEQ ID NO: 23588 - DNA, 15 bp, Homo sapiens
tctagagacacagga

SEQ ID NO: 23589 - DNA, 15 bp, Homo sapiens
ctctagagacacagg

SEQ ID NO: 23590 - DNA, 15 bp, Homo sapiens
gctctagagacacag

SEQ ID NO: 23591 - DNA, 15 bp, Homo sapiens
agctctagagacaca

SEQ ID NO: 23592 - DNA, 15 bp, Homo sapiens
tagctctagagacac

SEQ ID NO: 23593 - DNA, 15 bp, Homo sapiens
atagctctagagaca

SEQ ID NO: 23594 - DNA, 15 bp, Homo sapiens
aatagctctagagac

SEQ ID NO: 23595 - DNA, 15 bp, Homo sapiens
caatagctctagaga

SEQ ID NO: 23596 - DNA, 15 bp, Homo sapiens
tcaatagctctagag

SEQ ID NO: 23597 - DNA, 15 bp, Homo sapiens
gtcaatagctctaga

SEQ ID NO: 23598 - DNA, 15 bp, Homo sapiens
agtcaatagctctag

SEQ ID NO: 23599 - DNA, 15 bp, Homo sapiens
cagtcaatagctcta

SEQ ID NO: 23600 - DNA, 15 bp, Homo sapiens
tcagtcaatagctct

SEQ ID NO: 23601 - DNA, 15 bp, Homo sapiens
ttcagtcaatagctc

SEQ ID NO: 23602 - DNA, 15 bp, Homo sapiens
tttcagtcaatagct

SEQ ID NO: 23603 - DNA, 15 bp, Homo sapiens
ttttcagtcaatagc

SEQ ID NO: 23604 - DNA, 15 bp, Homo sapiens
tttttcagtcaatag

SEQ ID NO: 23605 - DNA, 15 bp, Homo sapiens
ctttttcagtcaata

SEQ ID NO: 23606 - DNA, 15 bp, Homo sapiens
gctttttcagtcaat

SEQ ID NO: 23607 - DNA, 15 bp, Homo sapiens
agctttttcagtcaa

SEQ ID NO: 23608 - DNA, 15 bp, Homo sapiens
cagctttttcagtca

SEQ ID NO: 23609 - DNA, 15 bp, Homo sapiens
acagctttttcagtc

SEQ ID NO: 23610 - DNA, 15 bp, Homo sapiens
aacagctttttcagt

SEQ ID NO: 23611 - DNA, 15 bp, Homo sapiens
taacagctttttcag

SEQ ID NO: 23612 - DNA, 15 bp, Homo sapiens
ctaacagctttttca

SEQ ID NO: 23613 - DNA, 15 bp, Homo sapiens
cctaacagctttttc

SEQ ID NO: 23614 - DNA, 15 bp, Homo sapiens
ccctaacagcttttt

SEQ ID NO: 23615 - DNA, 15 bp, Homo sapiens
gccctaacagctttt

SEQ ID NO: 23616 - DNA, 15 bp, Homo sapiens
tgccctaacagcttt

SEQ ID NO: 23617 - DNA, 15 bp, Homo sapiens
atgccctaacagctt

SEQ ID NO: 23618 - DNA, 15 bp, Homo sapiens
aatgccctaacagct

SEQ ID NO: 23619 - DNA, 15 bp, Homo sapiens
gaatgccctaacagc

SEQ ID NO: 23620 - DNA, 15 bp, Homo sapiens
agaatgccctaacag

SEQ ID NO: 23621 - DNA, 15 bp, Homo sapiens
gagaatgccctaaca

SEQ ID NO: 23622 - DNA, 15 bp, Homo sapiens
agagaatgccctaac

SEQ ID NO: 23623 - DNA, 15 bp, Homo sapiens
tagagaatgccctaa

SEQ ID NO: 23624 - DNA, 15 bp, Homo sapiens
ttagagaatgcccta

SEQ ID NO: 23625 - DNA, 15 bp, Homo sapiens
gttagagaatgccct

SEQ ID NO: 23626 - DNA, 15 bp, Homo sapiens
agttagagaatgccc

SEQ ID NO: 23627 - DNA, 15 bp, Homo sapiens
cagttagagaatgcc

SEQ ID NO: 23628 - DNA, 15 bp, Homo sapiens
acagttagagaatgc

SEQ ID NO: 23629 - DNA, 15 bp, Homo sapiens
tacagttagagaatg

SEQ ID NO: 23630 - DNA, 15 bp, Homo sapiens
gtacagttagagaat

SEQ ID NO: 23631 - DNA, 15 bp, Homo sapiens
tgtacagttagagaa

SEQ ID NO: 23632 - DNA, 15 bp, Homo sapiens
atgtacagttagaga

SEQ ID NO: 23633 - DNA, 15 bp, Homo sapiens
gatgtacagttagag

SEQ ID NO: 23634 - DNA, 15 bp, Homo sapiens
tgatgtacagttaga

SEQ ID NO: 23635 - DNA, 15 bp, Homo sapiens
gtgatgtacagttag

SEQ ID NO: 23636 - DNA, 15 bp, Homo sapiens
ggtgatgtacagtta

SEQ ID NO: 23637 - DNA, 15 bp, Homo sapiens
aggtgatgtacagtt

SEQ ID NO: 23638 - DNA, 15 bp, Homo sapiens
taggtgatgtacagt

SEQ ID NO: 23639 - DNA, 15 bp, Homo sapiens
ttaggtgatgtacag

SEQ ID NO: 23640 - DNA, 15 bp, Homo sapiens
cttaggtgatgtaca

SEQ ID NO: 23641 - DNA, 15 bp, Homo sapiens
acttaggtgatgtac

SEQ ID NO: 23642 - DNA, 15 bp, Homo sapiens
aacttaggtgatgta

SEQ ID NO: 23643 - DNA, 15 bp, Homo sapiens
taacttaggtgatgt

SEQ ID NO: 23644 - DNA, 15 bp, Homo sapiens
ataacttaggtgatg

SEQ ID NO: 23645 - DNA, 15 bp, Homo sapiens
aataacttaggtgat

SEQ ID NO: 23646 - DNA, 15 bp, Homo sapiens
aaataacttaggtga

SEQ ID NO: 23647 - DNA, 15 bp, Homo sapiens
taaataacttaggtg

SEQ ID NO: 23648 - DNA, 15 bp, Homo sapiens
ttaaataacttaggt

SEQ ID NO: 23649 - DNA, 15 bp, Homo sapiens
tttaaataacttagg

SEQ ID NO: 23650 - DNA, 15 bp, Homo sapiens
ttttaaataacttag

SEQ ID NO: 23651 - DNA, 15 bp, Homo sapiens
attttaaataactta

SEQ ID NO: 23652 - DNA, 15 bp, Homo sapiens
aattttaaataactt

SEQ ID NO: 23653 - DNA, 15 bp, Homo sapiens
caattttaaataact

SEQ ID NO: 23654 - DNA, 15 bp, Homo sapiens
gcaattttaaataac

SEQ ID NO: 23655 - DNA, 15 bp, Homo sapiens
agcaattttaaataa

SEQ ID NO: 23656 - DNA, 15 bp, Homo sapiens
cagcaattttaaata

SEQ ID NO: 23657 - DNA, 15 bp, Homo sapiens
tcagcaattttaaat

SEQ ID NO: 23658 - DNA, 15 bp, Homo sapiens
ttcagcaattttaaa

SEQ ID NO: 23659 - DNA, 15 bp, Homo sapiens
attcagcaattttaa

SEQ ID NO: 23660 - DNA, 15 bp, Homo sapiens
aattcagcaatttta

SEQ ID NO: 23661 - DNA, 15 bp, Homo sapiens
taattcagcaatttt

SEQ ID NO: 23662 - DNA, 15 bp, Homo sapiens
ctaattcagcaattt

SEQ ID NO: 23663 - DNA, 15 bp, Homo sapiens
cctaattcagcaatt

SEQ ID NO: 23664 - DNA, 15 bp, Homo sapiens
acctaattcagcaat

SEQ ID NO: 23665 - DNA, 15 bp, Homo sapiens
cacctaattcagcaa

SEQ ID NO: 23666 - DNA, 15 bp, Homo sapiens
ccacctaattcagca

SEQ ID NO: 23667 - DNA, 15 bp, Homo sapiens
gccacctaattcagc

SEQ ID NO: 23668 - DNA, 15 bp, Homo sapiens
agccacctaattcag

SEQ ID NO: 23669 - DNA, 15 bp, Homo sapiens
aagccacctaattca

SEQ ID NO: 23670 - DNA, 15 bp, Homo sapiens
caagccacctaattc

SEQ ID NO: 23671 - DNA, 15 bp, Homo sapiens
acaagccacctaatt

SEQ ID NO: 23672 - DNA, 15 bp, Homo sapiens
gacaagccacctaat

SEQ ID NO: 23673 - DNA, 15 bp, Homo sapiens
agacaagccacctaa

SEQ ID NO: 23674 - DNA, 15 bp, Homo sapiens
aagacaagccaccta

SEQ ID NO: 23675 - DNA, 15 bp, Homo sapiens
caagacaagccacct

SEQ ID NO: 23676 - DNA, 15 bp, Homo sapiens
acaagacaagccacc

SEQ ID NO: 23677 - DNA, 15 bp, Homo sapiens
gacaagacaagccac

SEQ ID NO: 23678 - DNA, 15 bp, Homo sapiens
agacaagacaagcca

SEQ ID NO: 23679 - DNA, 15 bp, Homo sapiens
tagacaagacaagcc

SEQ ID NO: 23680 - DNA, 15 bp, Homo sapiens
ctagacaagacaagc

SEQ ID NO: 23681 - DNA, 15 bp, Homo sapiens
cctagacaagacaag

SEQ ID NO: 23682 - DNA, 15 bp, Homo sapiens
tcctagacaagacaa

SEQ ID NO: 23683 - DNA, 15 bp, Homo sapiens
gtcctagacaagaca

SEQ ID NO: 23684 - DNA, 15 bp, Homo sapiens
tgtcctagacaagac

SEQ ID NO: 23685 - DNA, 15 bp, Homo sapiens
ctgtcctagacaaga

SEQ ID NO: 23686 - DNA, 15 bp, Homo sapiens
tctgtcctagacaag

SEQ ID NO: 23687 - DNA, 15 bp, Homo sapiens
ctctgtcctagacaa

SEQ ID NO: 23688 - DNA, 15 bp, Homo sapiens
actctgtcctagaca

SEQ ID NO: 23689 - DNA, 15 bp, Homo sapiens
aactctgtcctagac

SEQ ID NO: 23690 - DNA, 15 bp, Homo sapiens
aaactctgtcctaga

SEQ ID NO: 23691 - DNA, 15 bp, Homo sapiens
aaaactctgtcctag

SEQ ID NO: 23692 - DNA, 15 bp, Homo sapiens
taaaactctgtccta

SEQ ID NO: 23693 - DNA, 15 bp, Homo sapiens
ttaaaactctgtcct

SEQ ID NO: 23694 - DNA, 15 bp, Homo sapiens
cttaaaactctgtcc

SEQ ID NO: 23695 - DNA, 15 bp, Homo sapiens
ccttaaaactctgtc

SEQ ID NO: 23696 - DNA, 15 bp, Homo sapiens
tccttaaaactctgt

SEQ ID NO: 23697 - DNA, 15 bp, Homo sapiens
gtccttaaaactctg

SEQ ID NO: 23698 - DNA, 15 bp, Homo sapiens
agtccttaaaactct

SEQ ID NO: 23699 - DNA, 15 bp, Homo sapiens
cagtccttaaaactc

SEQ ID NO: 23700 - DNA, 15 bp, Homo sapiens
gcagtccttaaaact

SEQ ID NO: 23701 - DNA, 15 bp, Homo sapiens
ggcagtccttaaaac

SEQ ID NO: 23702 - DNA, 15 bp, Homo sapiens
gggcagtccttaaaa

SEQ ID NO: 23703 - DNA, 15 bp, Homo sapiens
tgggcagtccttaaa

SEQ ID NO: 23704 - DNA, 15 bp, Homo sapiens
gtgggcagtccttaa

SEQ ID NO: 23705 - DNA, 15 bp, Homo sapiens
ggtgggcagtcctta

SEQ ID NO: 23706 - DNA, 15 bp, Homo sapiens
aggtgggcagtcctt

SEQ ID NO: 23707 - DNA, 15 bp, Homo sapiens
caggtgggcagtcct

SEQ ID NO: 23708 - DNA, 15 bp, Homo sapiens
tcaggtgggcagtcc

SEQ ID NO: 23709 - DNA, 15 bp, Homo sapiens
atcaggtgggcagtc

SEQ ID NO: 23710 - DNA, 15 bp, Homo sapiens
aatcaggtgggcagt

SEQ ID NO: 23711 - DNA, 15 bp, Homo sapiens
caatcaggtgggcag

SEQ ID NO: 23712 - DNA, 15 bp, Homo sapiens
tcaatcaggtgggca

SEQ ID NO: 23713 - DNA, 15 bp, Homo sapiens
atcaatcaggtgggc

SEQ ID NO: 23714 - DNA, 15 bp, Homo sapiens
tatcaatcaggtggg

SEQ ID NO: 23715 - DNA, 15 bp, Homo sapiens
ctatcaatcaggtgg

SEQ ID NO: 23716 - DNA, 15 bp, Homo sapiens
tctatcaatcaggtg

SEQ ID NO: 23717 - DNA, 15 bp, Homo sapiens
ctctatcaatcaggt

SEQ ID NO: 23718 - DNA, 15 bp, Homo sapiens
gctctatcaatcagg

SEQ ID NO: 23719 - DNA, 15 bp, Homo sapiens
agctctatcaatcag

SEQ ID NO: 23720 - DNA, 15 bp, Homo sapiens
tagctctatcaatca

SEQ ID NO: 23721 - DNA, 15 bp, Homo sapiens
ctagctctatcaatc

SEQ ID NO: 23722 - DNA, 15 bp, Homo sapiens
actagctctatcaat

SEQ ID NO: 23723 - DNA, 15 bp, Homo sapiens
aactagctctatcaa

SEQ ID NO: 23724 - DNA, 15 bp, Homo sapiens
caactagctctatca

SEQ ID NO: 23725 - DNA, 15 bp, Homo sapiens
tcaactagctctatc

SEQ ID NO: 23726 - DNA, 15 bp, Homo sapiens
gtcaactagctctat

SEQ ID NO: 23727 - DNA, 15 bp, Homo sapiens
ggtcaactagctcta

SEQ ID NO: 23728 - DNA, 15 bp, Homo sapiens
aggtcaactagctct

SEQ ID NO: 23729 - DNA, 15 bp, Homo sapiens
aaggtcaactagctc

SEQ ID NO: 23730 - DNA, 15 bp, Homo sapiens
taaggtcaactagct

SEQ ID NO: 23731 - DNA, 15 bp, Homo sapiens
ataaggtcaactagc

SEQ ID NO: 23732 - DNA, 15 bp, Homo sapiens
gataaggtcaactag

SEQ ID NO: 23733 - DNA, 15 bp, Homo sapiens
agataaggtcaacta

SEQ ID NO: 23734 - DNA, 15 bp, Homo sapiens
aagataaggtcaact

SEQ ID NO: 23735 - DNA, 15 bp, Homo sapiens
aaagataaggtcaac

SEQ ID NO: 23736 - DNA, 15 bp, Homo sapiens
taaagataaggtcaa

SEQ ID NO: 23737 - DNA, 15 bp, Homo sapiens
ttaaagataaggtca

SEQ ID NO: 23738 - DNA, 15 bp, Homo sapiens
gttaaagataaggtc

SEQ ID NO: 23739 - DNA, 15 bp, Homo sapiens
agttaaagataaggt

SEQ ID NO: 23740 - DNA, 15 bp, Homo sapiens
aagttaaagataagg

SEQ ID NO: 23741 - DNA, 15 bp, Homo sapiens
aaagttaaagataag

SEQ ID NO: 23742 - DNA, 15 bp, Homo sapiens
aaaagttaaagataa

SEQ ID NO: 23743 - DNA, 15 bp, Homo sapiens
aaaaagttaaagata

SEQ ID NO: 23744 - DNA, 15 bp, Homo sapiens
caaaaagttaaagat

SEQ ID NO: 23745 - DNA, 15 bp, Homo sapiens
acaaaaagttaaaga

SEQ ID NO: 23746 - DNA, 15 bp, Homo sapiens
aacaaaaagttaaag

SEQ ID NO: 23747 - DNA, 15 bp, Homo sapiens
aaacaaaaagttaaa

SEQ ID NO: 23748 - DNA, 15 bp, Homo sapiens
aaaacaaaaagttaa

SEQ ID NO: 23749 - DNA, 15 bp, Homo sapiens
aaaaacaaaaagtta

SEQ ID NO: 23750 - DNA, 15 bp, Homo sapiens
gaaaaacaaaaagtt

SEQ ID NO: 23751 - DNA, 15 bp, Homo sapiens
agaaaaacaaaaagt

SEQ ID NO: 23752 - DNA, 15 bp, Homo sapiens
aagaaaaacaaaaag

SEQ ID NO: 23753 - DNA, 15 bp, Homo sapiens
aaagaaaaacaaaaa

SEQ ID NO: 23754 - DNA, 15 bp, Homo sapiens
aaaagaaaaacaaaa

SEQ ID NO: 23755 - DNA, 15 bp, Homo sapiens
caaaagaaaaacaaa

SEQ ID NO: 23756 - DNA, 15 bp, Homo sapiens
tcaaaagaaaaacaa

SEQ ID NO: 23757 - DNA, 15 bp, Homo sapiens
gtcaaaagaaaaaca

SEQ ID NO: 23758 - DNA, 15 bp, Homo sapiens
agtcaaaagaaaaac

SEQ ID NO: 23759 - DNA, 15 bp, Homo sapiens
aagtcaaaagaaaaa

SEQ ID NO: 23760 - DNA, 15 bp, Homo sapiens
aaagtcaaaagaaaa

SEQ ID NO: 23761 - DNA, 15 bp, Homo sapiens
caaagtcaaaagaaa

SEQ ID NO: 23762 - DNA, 15 bp, Homo sapiens
ccaaagtcaaaagaa

SEQ ID NO: 23763 - DNA, 15 bp, Homo sapiens
cccaaagtcaaaaga

SEQ ID NO: 23764 - DNA, 15 bp, Homo sapiens
tcccaaagtcaaaag

SEQ ID NO: 23765 - DNA, 15 bp, Homo sapiens
ctcccaaagtcaaaa

SEQ ID NO: 23766 - DNA, 15 bp, Homo sapiens
actcccaaagtcaaa

SEQ ID NO: 23767 - DNA, 15 bp, Homo sapiens
tactcccaaagtcaa

SEQ ID NO: 23768 - DNA, 15 bp, Homo sapiens
ctactcccaaagtca

SEQ ID NO: 23769 - DNA, 15 bp, Homo sapiens
tctactcccaaagtc

SEQ ID NO: 23770 - DNA, 15 bp, Homo sapiens
ctctactcccaaagt

SEQ ID NO: 23771 - DNA, 15 bp, Homo sapiens
tctctactcccaaag

SEQ ID NO: 23772 - DNA, 15 bp, Homo sapiens
atctctactcccaaa

SEQ ID NO: 23773 - DNA, 15 bp, Homo sapiens
catctctactcccaa

SEQ ID NO: 23774 - DNA, 15 bp, Homo sapiens
acatctctactccca

SEQ ID NO: 23775 - DNA, 15 bp, Homo sapiens
cacatctctactccc

SEQ ID NO: 23776 - DNA, 15 bp, Homo sapiens
tcacatctctactcc

SEQ ID NO: 23777 - DNA, 15 bp, Homo sapiens
ttcacatctctactc

SEQ ID NO: 23778 - DNA, 15 bp, Homo sapiens
tttcacatctctact

SEQ ID NO: 23779 - DNA, 15 bp, Homo sapiens
ttttcacatctctac

SEQ ID NO: 23780 - DNA, 15 bp, Homo sapiens
cttttcacatctcta

SEQ ID NO: 23781 - DNA, 15 bp, Homo sapiens
ccttttcacatctct

SEQ ID NO: 23782 - DNA, 15 bp, Homo sapiens
accttttcacatctc

SEQ ID NO: 23783 - DNA, 15 bp, Homo sapiens
taccttttcacatct

SEQ ID NO: 23784 - DNA, 15 bp, Homo sapiens
ttaccttttcacatc

SEQ ID NO: 23785 - DNA, 15 bp, Homo sapiens
tttaccttttcacat

SEQ ID NO: 23786 - DNA, 15 bp, Homo sapiens
ttttaccttttcaca

SEQ ID NO: 23787 - DNA, 15 bp, Homo sapiens
tttttaccttttcac

SEQ ID NO: 23788 - DNA, 15 bp, Homo sapiens
ctttttaccttttca

SEQ ID NO: 23789 - DNA, 15 bp, Homo sapiens
cctttttaccttttc

SEQ ID NO: 23790 - DNA, 15 bp, Homo sapiens
tcctttttacctttt

SEQ ID NO: 23791 - DNA, 15 bp, Homo sapiens
ttcctttttaccttt

SEQ ID NO: 23792 - DNA, 15 bp, Homo sapiens
cttcctttttacctt

SEQ ID NO: 23793 - DNA, 15 bp, Homo sapiens
ccttcctttttacct

SEQ ID NO: 23794 - DNA, 15 bp, Homo sapiens
tccttcctttttacc

SEQ ID NO: 23795 - DNA, 15 bp, Homo sapiens
ttccttcctttttac

SEQ ID NO: 23796 - DNA, 15 bp, Homo sapiens
cttccttccttttta

SEQ ID NO: 23797 - DNA, 15 bp, Homo sapiens
ccttccttccttttt

SEQ ID NO: 23798 - DNA, 15 bp, Homo sapiens
tccttccttcctttt

SEQ ID NO: 23799 - DNA, 15 bp, Homo sapiens
ttccttccttccttt

SEQ ID NO: 23800 - DNA, 15 bp, Homo sapiens
cttccttccttcctt

SEQ ID NO: 23801 - DNA, 15 bp, Homo sapiens
tcttccttccttcct

SEQ ID NO: 23802 - DNA, 15 bp, Homo sapiens
ctcttccttccttcc

SEQ ID NO: 23803 - DNA, 15 bp, Homo sapiens
tctcttccttccttc

SEQ ID NO: 23804 - DNA, 15 bp, Homo sapiens
ttctcttccttcctt

SEQ ID NO: 23805 - DNA, 15 bp, Homo sapiens
tttctcttccttcct

SEQ ID NO: 23806 - DNA, 15 bp, Homo sapiens
ttttctcttccttcc

SEQ ID NO: 23807 - DNA, 15 bp, Homo sapiens
gttttctcttccttc

SEQ ID NO: 23808 - DNA, 15 bp, Homo sapiens
agttttctcttcctt

SEQ ID NO: 23809 - DNA, 15 bp, Homo sapiens
aagttttctcttcct

SEQ ID NO: 23810 - DNA, 15 bp, Homo sapiens
taagttttctcttcc

SEQ ID NO: 23811 - DNA, 15 bp, Homo sapiens
ttaagttttctcttc

SEQ ID NO: 23812 - DNA, 15 bp, Homo sapiens
gttaagttttctctt

SEQ ID NO: 23813 - DNA, 15 bp, Homo sapiens
agttaagttttctct

SEQ ID NO: 23814 - DNA, 15 bp, Homo sapiens
gagttaagttttctc

SEQ ID NO: 23815 - DNA, 15 bp, Homo sapiens
agagttaagttttct

SEQ ID NO: 23816 - DNA, 15 bp, Homo sapiens
aagagttaagttttc

SEQ ID NO: 23817 - DNA, 15 bp, Homo sapiens
aaagagttaagtttt

SEQ ID NO: 23818 - DNA, 15 bp, Homo sapiens
aaaagagttaagttt

SEQ ID NO: 23819 - DNA, 15 bp, Homo sapiens
aaaaagagttaagtt

SEQ ID NO: 23820 - DNA, 15 bp, Homo sapiens
caaaaagagttaagt

SEQ ID NO: 23821 - DNA, 15 bp, Homo sapiens
gcaaaaagagttaag

SEQ ID NO: 23822 - DNA, 15 bp, Homo sapiens
ggcaaaaagagttaa

SEQ ID NO: 23823 - DNA, 15 bp, Homo sapiens
gggcaaaaagagtta

SEQ ID NO: 23824 - DNA, 15 bp, Homo sapiens
tgggcaaaaagagtt

SEQ ID NO: 23825 - DNA, 15 bp, Homo sapiens
atgggcaaaaagagt

SEQ ID NO: 23826 - DNA, 15 bp, Homo sapiens
catgggcaaaaagag

SEQ ID NO: 23827 - DNA, 15 bp, Homo sapiens
tcatgggcaaaaaga

SEQ ID NO: 23828 - DNA, 15 bp, Homo sapiens
ttcatgggcaaaaag

SEQ ID NO: 23829 - DNA, 15 bp, Homo sapiens
cttcatgggcaaaaa

SEQ ID NO: 23830 - DNA, 15 bp, Homo sapiens
tcttcatgggcaaaa

SEQ ID NO: 23831 - DNA, 15 bp, Homo sapiens
gtcttcatgggcaaa

SEQ ID NO: 23832 - DNA, 15 bp, Homo sapiens
agtcttcatgggcaa

SEQ ID NO: 23833 - DNA, 15 bp, Homo sapiens
cagtcttcatgggca

SEQ ID NO: 23834 - DNA, 15 bp, Homo sapiens
acagtcttcatgggc

SEQ ID NO: 23835 - DNA, 15 bp, Homo sapiens
aacagtcttcatggg

SEQ ID NO: 23836 - DNA, 15 bp, Homo sapiens
aaacagtcttcatgg

SEQ ID NO: 23837 - DNA, 15 bp, Homo sapiens
aaaacagtcttcatg

SEQ ID NO: 23838 - DNA, 15 bp, Homo sapiens
aaaaacagtcttcat

SEQ ID NO: 23839 - DNA, 15 bp, Homo sapiens
gaaaaacagtcttca

SEQ ID NO: 23840 - DNA, 15 bp, Homo sapiens
ggaaaaacagtcttc

SEQ ID NO: 23841 - DNA, 15 bp, Homo sapiens
aggaaaaacagtctt

SEQ ID NO: 23842 - DNA, 15 bp, Homo sapiens
aaggaaaaacagtct

SEQ ID NO: 23843 - DNA, 15 bp, Homo sapiens
gaaggaaaaacagtc

SEQ ID NO: 23844 - DNA, 15 bp, Homo sapiens
agaaggaaaaacagt

SEQ ID NO: 23845 - DNA, 15 bp, Homo sapiens
gagaaggaaaaacag

SEQ ID NO: 23846 - DNA, 15 bp, Homo sapiens
tgagaaggaaaaaca

SEQ ID NO: 23847 - DNA, 15 bp, Homo sapiens
ttgagaaggaaaaac

SEQ ID NO: 23848 - DNA, 15 bp, Homo sapiens
tttgagaaggaaaaa

SEQ ID NO: 23849 - DNA, 15 bp, Homo sapiens
ttttgagaaggaaaa

SEQ ID NO: 23850 - DNA, 15 bp, Homo sapiens
attttgagaaggaaa

SEQ ID NO: 23851 - DNA, 15 bp, Homo sapiens
tattttgagaaggaa

SEQ ID NO: 23852 - DNA, 15 bp, Homo sapiens
atattttgagaagga

SEQ ID NO: 23853 - DNA, 15 bp, Homo sapiens
aatattttgagaagg

SEQ ID NO: 23854 - DNA, 15 bp, Homo sapiens
caatattttgagaag

SEQ ID NO: 23855 - DNA, 15 bp, Homo sapiens
tcaatattttgagaa

SEQ ID NO: 23856 - DNA, 15 bp, Homo sapiens
gtcaatattttgaga

SEQ ID NO: 23857 - DNA, 15 bp, Homo sapiens
agtcaatattttgag

SEQ ID NO: 23858 - DNA, 15 bp, Homo sapiens
tagtcaatattttga

SEQ ID NO: 23859 - DNA, 15 bp, Homo sapiens
atagtcaatattttg

SEQ ID NO: 23860 - DNA, 15 bp, Homo sapiens
aatagtcaatatttt

SEQ ID NO: 23861 - DNA, 15 bp, Homo sapiens
aaatagtcaatattt

SEQ ID NO: 23862 - DNA, 15 bp, Homo sapiens
aaaatagtcaatatt

SEQ ID NO: 23863 - DNA, 15 bp, Homo sapiens
gaaaatagtcaatat

SEQ ID NO: 23864 - DNA, 15 bp, Homo sapiens
agaaaatagtcaata

SEQ ID NO: 23865 - DNA, 15 bp, Homo sapiens
cagaaaatagtcaat

SEQ ID NO: 23866 - DNA, 15 bp, Homo sapiens
tcagaaaatagtcaa

SEQ ID NO: 23867 - DNA, 15 bp, Homo sapiens
atcagaaaatagtca

SEQ ID NO: 23868 - DNA, 15 bp, Homo sapiens
aatcagaaaatagtc

SEQ ID NO: 23869 - DNA, 15 bp, Homo sapiens
aaatcagaaaatagt

SEQ ID NO: 23870 - DNA, 15 bp, Homo sapiens
caaatcagaaaatag

SEQ ID NO: 23871 - DNA, 15 bp, Homo sapiens
acaaatcagaaaata

SEQ ID NO: 23872 - DNA, 15 bp, Homo sapiens
tacaaatcagaaaat

SEQ ID NO: 23873 - DNA, 15 bp, Homo sapiens
ttacaaatcagaaaa

SEQ ID NO: 23874 - DNA, 15 bp, Homo sapiens
tttacaaatcagaaa

SEQ ID NO: 23875 - DNA, 15 bp, Homo sapiens
ttttacaaatcagaa

SEQ ID NO: 23876 - DNA, 15 bp, Homo sapiens
tttttacaaatcaga

SEQ ID NO: 23877 - DNA, 15 bp, Homo sapiens
atttttacaaatcag

SEQ ID NO: 23878 - DNA, 15 bp, Homo sapiens
gatttttacaaatca

SEQ ID NO: 23879 - DNA, 15 bp, Homo sapiens
cgatttttacaaatc

SEQ ID NO: 23880 - DNA, 15 bp, Homo sapiens
ccgatttttacaaat

SEQ ID NO: 23881 - DNA, 15 bp, Homo sapiens
gccgatttttacaaa

SEQ ID NO: 23882 - DNA, 15 bp, Homo sapiens
tgccgatttttacaa

SEQ ID NO: 23883 - DNA, 15 bp, Homo sapiens
gtgccgatttttaca

SEQ ID NO: 23884 - DNA, 15 bp, Homo sapiens
tgtgccgatttttac

SEQ ID NO: 23885 - DNA, 15 bp, Homo sapiens
atgtgccgattttta

SEQ ID NO: 23886 - DNA, 15 bp, Homo sapiens
tatgtgccgattttt

SEQ ID NO: 23887 - DNA, 15 bp, Homo sapiens
ttatgtgccgatttt

SEQ ID NO: 23888 - DNA, 15 bp, Homo sapiens
tttatgtgccgattt

SEQ ID NO: 23889 - DNA, 15 bp, Homo sapiens
ttttatgtgccgatt

SEQ ID NO: 23890 - DNA, 15 bp, Homo sapiens
gttttatgtgccgat

SEQ ID NO: 23891 - DNA, 15 bp, Homo sapiens
cgttttatgtgccga

SEQ ID NO: 23892 - DNA, 15 bp, Homo sapiens
acgttttatgtgccg

SEQ ID NO: 23893 - DNA, 15 bp, Homo sapiens
cacgttttatgtgcc

SEQ ID NO: 23894 - DNA, 15 bp, Homo sapiens
acacgttttatgtgc

SEQ ID NO: 23895 - DNA, 15 bp, Homo sapiens
aacacgttttatgtg

SEQ ID NO: 23896 - DNA, 15 bp, Homo sapiens
taacacgttttatgt

SEQ ID NO: 23897 - DNA, 15 bp, Homo sapiens
ataacacgttttatg

SEQ ID NO: 23898 - DNA, 15 bp, Homo sapiens
aataacacgttttat

SEQ ID NO: 23899 - DNA, 15 bp, Homo sapiens
aaataacacgtttta

SEQ ID NO: 23900 - DNA, 15 bp, Homo sapiens
aaaataacacgtttt

SEQ ID NO: 23901 - DNA, 15 bp, Homo sapiens
aaaaataacacgttt

SEQ ID NO: 23902 - DNA, 15 bp, Homo sapiens
aaaaaataacacgtt

SEQ ID NO: 23903 - DNA, 15 bp, Homo sapiens
taaaaaataacacgt

SEQ ID NO: 23904 - DNA, 15 bp, Homo sapiens
gtaaaaaataacacg

SEQ ID NO: 23905 - DNA, 15 bp, Homo sapiens
agtaaaaaataacac

SEQ ID NO: 23906 - DNA, 15 bp, Homo sapiens
aagtaaaaaataaca

SEQ ID NO: 23907 - DNA, 15 bp, Homo sapiens
caagtaaaaaataac

SEQ ID NO: 23908 - DNA, 15 bp, Homo sapiens
tcaagtaaaaaataa

SEQ ID NO: 23909 - DNA, 15 bp, Homo sapiens
gtcaagtaaaaaata

SEQ ID NO: 23910 - DNA, 15 bp, Homo sapiens
agtcaagtaaaaaat

SEQ ID NO: 23911 - DNA, 15 bp, Homo sapiens
aagtcaagtaaaaaa

SEQ ID NO: 23912 - DNA, 15 bp, Homo sapiens
aaagtcaagtaaaaa

SEQ ID NO: 23913 - DNA, 15 bp, Homo sapiens
aaaagtcaagtaaaa

SEQ ID NO: 23914 - DNA, 15 bp, Homo sapiens
taaaagtcaagtaaa

SEQ ID NO: 23915 - DNA, 15 bp, Homo sapiens
ataaaagtcaagtaa

SEQ ID NO: 23916 - DNA, 15 bp, Homo sapiens
gataaaagtcaagta

SEQ ID NO: 23917 - DNA, 15 bp, Homo sapiens
agataaaagtcaagt

SEQ ID NO: 23918 - DNA, 15 bp, Homo sapiens
aagataaaagtcaag

SEQ ID NO: 23919 - DNA, 15 bp, Homo sapiens
aaagataaaagtcaa

SEQ ID NO: 23920 - DNA, 15 bp, Homo sapiens
gaaagataaaagtca

SEQ ID NO: 23921 - DNA, 15 bp, Homo sapiens
ggaaagataaaagtc

SEQ ID NO: 23922 - DNA, 15 bp, Homo sapiens
gggaaagataaaagt

SEQ ID NO: 23923 - DNA, 15 bp, Homo sapiens
tgggaaagataaaag

SEQ ID NO: 23924 - DNA, 15 bp, Homo sapiens
atgggaaagataaaa

SEQ ID NO: 23925 - DNA, 15 bp, Homo sapiens
catgggaaagataaa

SEQ ID NO: 23926 - DNA, 15 bp, Homo sapiens
acatgggaaagataa

SEQ ID NO: 23927 - DNA, 15 bp, Homo sapiens
cacatgggaaagata

SEQ ID NO: 23928 - DNA, 15 bp, Homo sapiens
tcacatgggaaagat

SEQ ID NO: 23929 - DNA, 15 bp, Homo sapiens
atcacatgggaaaga

SEQ ID NO: 23930 - DNA, 15 bp, Homo sapiens
tatcacatgggaaag

SEQ ID NO: 23931 - DNA, 15 bp, Homo sapiens
atatcacatgggaaa

SEQ ID NO: 23932 - DNA, 15 bp, Homo sapiens
gatatcacatgggaa

SEQ ID NO: 23933 - DNA, 15 bp, Homo sapiens
agatatcacatggga

SEQ ID NO: 23934 - DNA, 15 bp, Homo sapiens
tagatatcacatggg

SEQ ID NO: 23935 - DNA, 15 bp, Homo sapiens
atagatatcacatgg

SEQ ID NO: 23936 - DNA, 15 bp, Homo sapiens
tatagatatcacatg

SEQ ID NO: 23937 - DNA, 15 bp, Homo sapiens
ttatagatatcacat

SEQ ID NO: 23938 - DNA, 15 bp, Homo sapiens
tttatagatatcaca

SEQ ID NO: 23939 - DNA, 15 bp, Homo sapiens
atttatagatatcac

SEQ ID NO: 23940 - DNA, 15 bp, Homo sapiens
aatttatagatatca

SEQ ID NO: 23941 - DNA, 15 bp, Homo sapiens
taatttatagatatc

SEQ ID NO: 23942 - DNA, 15 bp, Homo sapiens
ataatttatagatat

SEQ ID NO: 23943 - DNA, 15 bp, Homo sapiens
tataatttatagata

SEQ ID NO: 23944 - DNA, 15 bp, Homo sapiens
ctataatttatagat

SEQ ID NO: 23945 - DNA, 15 bp, Homo sapiens
tctataatttataga

SEQ ID NO: 23946 - DNA, 15 bp, Homo sapiens
atctataatttatag

SEQ ID NO: 23947 - DNA, 15 bp, Homo sapiens
tatctataatttata

SEQ ID NO: 23948 - DNA, 15 bp, Homo sapiens
ctatctataatttat

SEQ ID NO: 23949 - DNA, 15 bp, Homo sapiens
cctatctataattta

SEQ ID NO: 23950 - DNA, 15 bp, Homo sapiens
tcctatctataattt

SEQ ID NO: 23951 - DNA, 15 bp, Homo sapiens
ttcctatctataatt

SEQ ID NO: 23952 - DNA, 15 bp, Homo sapiens
tttcctatctataat

SEQ ID NO: 23953 - DNA, 15 bp, Homo sapiens
ttttcctatctataa

SEQ ID NO: 23954 - DNA, 15 bp, Homo sapiens
tttttcctatctata

SEQ ID NO: 23955 - DNA, 15 bp, Homo sapiens
atttttcctatctat

SEQ ID NO: 23956 - DNA, 15 bp, Homo sapiens
aatttttcctatcta

SEQ ID NO: 23957 - DNA, 15 bp, Homo sapiens
aaatttttcctatct

SEQ ID NO: 23958 - DNA, 15 bp, Homo sapiens
taaatttttcctatc

SEQ ID NO: 23959 - DNA, 15 bp, Homo sapiens
ataaatttttcctat

SEQ ID NO: 23960 - DNA, 15 bp, Homo sapiens
gataaatttttccta

SEQ ID NO: 23961 - DNA, 15 bp, Homo sapiens
agataaatttttcct

SEQ ID NO: 23962 - DNA, 15 bp, Homo sapiens
cagataaatttttcc

SEQ ID NO: 23963 - DNA, 15 bp, Homo sapiens
acagataaatttttc

SEQ ID NO: 23964 - DNA, 15 bp, Homo sapiens
tacagataaattttt

SEQ ID NO: 23965 - DNA, 15 bp, Homo sapiens
ttacagataaatttt

SEQ ID NO: 23966 - DNA, 15 bp, Homo sapiens
attacagataaattt

SEQ ID NO: 23967 - DNA, 15 bp, Homo sapiens
aattacagataaatt

SEQ ID NO: 23968 - DNA, 15 bp, Homo sapiens
aaattacagataaat

SEQ ID NO: 23969 - DNA, 15 bp, Homo sapiens
taaattacagataaa

SEQ ID NO: 23970 - DNA, 15 bp, Homo sapiens
ctaaattacagataa

SEQ ID NO: 23971 - DNA, 15 bp, Homo sapiens
actaaattacagata

SEQ ID NO: 23972 - DNA, 15 bp, Homo sapiens
cactaaattacagat

SEQ ID NO: 23973 - DNA, 15 bp, Homo sapiens
tcactaaattacaga

SEQ ID NO: 23974 - DNA, 15 bp, Homo sapiens
atcactaaattacag

SEQ ID NO: 23975 - DNA, 15 bp, Homo sapiens
gatcactaaattaca

SEQ ID NO: 23976 - DNA, 15 bp, Homo sapiens
agatcactaaattac

SEQ ID NO: 23977 - DNA, 15 bp, Homo sapiens
aagatcactaaatta

SEQ ID NO: 23978 - DNA, 15 bp, Homo sapiens
aaagatcactaaatt

SEQ ID NO: 23979 - DNA, 15 bp, Homo sapiens
gaaagatcactaaat

SEQ ID NO: 23980 - DNA, 15 bp, Homo sapiens
agaaagatcactaaa

SEQ ID NO: 23981 - DNA, 15 bp, Homo sapiens
tagaaagatcactaa

SEQ ID NO: 23982 - DNA, 15 bp, Homo sapiens
ctagaaagatcacta

SEQ ID NO: 23983 - DNA, 15 bp, Homo sapiens
actagaaagatcact

SEQ ID NO: 23984 - DNA, 15 bp, Homo sapiens
cactagaaagatcac

SEQ ID NO: 23985 - DNA, 15 bp, Homo sapiens
acactagaaagatca

SEQ ID NO: 23986 - DNA, 15 bp, Homo sapiens
cacactagaaagatc

SEQ ID NO: 23987 - DNA, 15 bp, Homo sapiens
tcacactagaaagat

SEQ ID NO: 23988 - DNA, 15 bp, Homo sapiens
atcacactagaaaga

SEQ ID NO: 23989 - DNA, 15 bp, Homo sapiens
tatcacactagaaag

SEQ ID NO: 23990 - DNA, 15 bp, Homo sapiens
ttatcacactagaaa

SEQ ID NO: 23991 - DNA, 15 bp, Homo sapiens
tttatcacactagaa

SEQ ID NO: 23992 - DNA, 15 bp, Homo sapiens
ttttatcacactaga

SEQ ID NO: 23993 - DNA, 15 bp, Homo sapiens
gttttatcacactag

SEQ ID NO: 23994 - DNA, 15 bp, Homo sapiens
cgttttatcacacta

SEQ ID NO: 23995 - DNA, 15 bp, Homo sapiens
acgttttatcacact

SEQ ID NO: 23996 - DNA, 15 bp, Homo sapiens
gacgttttatcacac

SEQ ID NO: 23997 - DNA, 15 bp, Homo sapiens
tgacgttttatcaca

SEQ ID NO: 23998 - DNA, 15 bp, Homo sapiens
ctgacgttttatcac

SEQ ID NO: 23999 - DNA, 15 bp, Homo sapiens
tctgacgttttatca

SEQ ID NO: 24000 - DNA, 15 bp, Homo sapiens
ttctgacgttttatc

SEQ ID NO: 24001 - DNA, 15 bp, Homo sapiens
cttctgacgttttat

SEQ ID NO: 24002 - DNA, 15 bp, Homo sapiens
acttctgacgtttta

SEQ ID NO: 24003 - DNA, 15 bp, Homo sapiens
tacttctgacgtttt

SEQ ID NO: 24004 - DNA, 15 bp, Homo sapiens
gtacttctgacgttt

SEQ ID NO: 24005 - DNA, 15 bp, Homo sapiens
agtacttctgacgtt

SEQ ID NO: 24006 - DNA, 15 bp, Homo sapiens
cagtacttctgacgt

SEQ ID NO: 24007 - DNA, 15 bp, Homo sapiens
tcagtacttctgacg

SEQ ID NO: 24008 - DNA, 15 bp, Homo sapiens
ctcagtacttctgac

SEQ ID NO: 24009 - DNA, 15 bp, Homo sapiens
tctcagtacttctga

SEQ ID NO: 24010 - DNA, 15 bp, Homo sapiens
ctctcagtacttctg

SEQ ID NO: 24011 - DNA, 15 bp, Homo sapiens
actctcagtacttct

SEQ ID NO: 24012 - DNA, 15 bp, Homo sapiens
cactctcagtacttc

SEQ ID NO: 24013 - DNA, 15 bp, Homo sapiens
ccactctcagtactt

SEQ ID NO: 24014 - DNA, 15 bp, Homo sapiens
tccactctcagtact

SEQ ID NO: 24015 - DNA, 15 bp, Homo sapiens
ctccactctcagtac

SEQ ID NO: 24016 - DNA, 15 bp, Homo sapiens
actccactctcagta

SEQ ID NO: 24017 - DNA, 15 bp, Homo sapiens
cactccactctcagt

SEQ ID NO: 24018 - DNA, 15 bp, Homo sapiens
ccactccactctcag

SEQ ID NO: 24019 - DNA, 15 bp, Homo sapiens
tccactccactctca

SEQ ID NO: 24020 - DNA, 15 bp, Homo sapiens
gtccactccactctc

SEQ ID NO: 24021 - DNA, 15 bp, Homo sapiens
tgtccactccactct

SEQ ID NO: 24022 - DNA, 15 bp, Homo sapiens
atgtccactccactc

SEQ ID NO: 24023 - DNA, 15 bp, Homo sapiens
aatgtccactccact

SEQ ID NO: 24024 - DNA, 15 bp, Homo sapiens
caatgtccactccac

SEQ ID NO: 24025 - DNA, 15 bp, Homo sapiens
tcaatgtccactcca

SEQ ID NO: 24026 - DNA, 15 bp, Homo sapiens
atcaatgtccactcc

SEQ ID NO: 24027 - DNA, 15 bp, Homo sapiens
tatcaatgtccactc

SEQ ID NO: 24028 - DNA, 15 bp, Homo sapiens
atatcaatgtccact

SEQ ID NO: 24029 - DNA, 15 bp, Homo sapiens
aatatcaatgtccac

SEQ ID NO: 24030 - DNA, 15 bp, Homo sapiens
caatatcaatgtcca

SEQ ID NO: 24031 - DNA, 15 bp, Homo sapiens
acaatatcaatgtcc

SEQ ID NO: 24032 - DNA, 15 bp, Homo sapiens
aacaatatcaatgtc

SEQ ID NO: 24033 - DNA, 15 bp, Homo sapiens
taacaatatcaatgt

SEQ ID NO: 24034 - DNA, 15 bp, Homo sapiens
gtaacaatatcaatg

SEQ ID NO: 24035 - DNA, 15 bp, Homo sapiens
agtaacaatatcaat

SEQ ID NO: 24036 - DNA, 15 bp, Homo sapiens
gagtaacaatatcaa

SEQ ID NO: 24037 - DNA, 15 bp, Homo sapiens
agagtaacaatatca

SEQ ID NO: 24038 - DNA, 15 bp, Homo sapiens
gagagtaacaatatc

SEQ ID NO: 24039 - DNA, 15 bp, Homo sapiens
tgagagtaacaatat

SEQ ID NO: 24040 - DNA, 15 bp, Homo sapiens
ctgagagtaacaata

SEQ ID NO: 24041 - DNA, 15 bp, Homo sapiens
actgagagtaacaat

SEQ ID NO: 24042 - DNA, 15 bp, Homo sapiens
tactgagagtaacaa

SEQ ID NO: 24043 - DNA, 15 bp, Homo sapiens
ttactgagagtaaca

SEQ ID NO: 24044 - DNA, 15 bp, Homo sapiens
cttactgagagtaac

SEQ ID NO: 24045 - DNA, 15 bp, Homo sapiens
acttactgagagtaa

SEQ ID NO: 24046 - DNA, 15 bp, Homo sapiens
aacttactgagagta

SEQ ID NO: 24047 - DNA, 15 bp, Homo sapiens
aaacttactgagagt

SEQ ID NO: 24048 - DNA, 15 bp, Homo sapiens
aaaacttactgagag

SEQ ID NO: 24049 - DNA, 15 bp, Homo sapiens
gaaaacttactgaga

SEQ ID NO: 24050 - DNA, 15 bp, Homo sapiens
tgaaaacttactgag

SEQ ID NO: 24051 - DNA, 15 bp, Homo sapiens
gtgaaaacttactga

SEQ ID NO: 24052 - DNA, 15 bp, Homo sapiens
agtgaaaacttactg

SEQ ID NO: 24053 - DNA, 15 bp, Homo sapiens
cagtgaaaacttact

SEQ ID NO: 24054 - DNA, 15 bp, Homo sapiens
tcagtgaaaacttac

SEQ ID NO: 24055 - DNA, 15 bp, Homo sapiens
atcagtgaaaactta

SEQ ID NO: 24056 - DNA, 15 bp, Homo sapiens
aatcagtgaaaactt

SEQ ID NO: 24057 - DNA, 15 bp, Homo sapiens
aaatcagtgaaaact

SEQ ID NO: 24058 - DNA, 15 bp, Homo sapiens
aaaatcagtgaaaac

SEQ ID NO: 24059 - DNA, 15 bp, Homo sapiens
aaaaatcagtgaaaa

SEQ ID NO: 24060 - DNA, 15 bp, Homo sapiens
gaaaaatcagtgaaa

SEQ ID NO: 24061 - DNA, 15 bp, Homo sapiens
agaaaaatcagtgaa

SEQ ID NO: 24062 - DNA, 15 bp, Homo sapiens
gagaaaaatcagtga

SEQ ID NO: 24063 - DNA, 15 bp, Homo sapiens
tgagaaaaatcagtg

SEQ ID NO: 24064 - DNA, 15 bp, Homo sapiens
ctgagaaaaatcagt

SEQ ID NO: 24065 - DNA, 15 bp, Homo sapiens
tctgagaaaaatcag

SEQ ID NO: 24066 - DNA, 15 bp, Homo sapiens
ctctgagaaaaatca

SEQ ID NO: 24067 - DNA, 15 bp, Homo sapiens
actctgagaaaaatc

SEQ ID NO: 24068 - DNA, 15 bp, Homo sapiens
gactctgagaaaaat

SEQ ID NO: 24069 - DNA, 15 bp, Homo sapiens
tgactctgagaaaaa

SEQ ID NO: 24070 - DNA, 15 bp, Homo sapiens
atgactctgagaaaa

SEQ ID NO: 24071 - DNA, 15 bp, Homo sapiens
catgactctgagaaa

SEQ ID NO: 24072 - DNA, 15 bp, Homo sapiens
tcatgactctgagaa

SEQ ID NO: 24073 - DNA, 15 bp, Homo sapiens
ttcatgactctgaga

SEQ ID NO: 24074 - DNA, 15 bp, Homo sapiens
cttcatgactctgag

SEQ ID NO: 24075 - DNA, 15 bp, Homo sapiens
ccttcatgactctga

SEQ ID NO: 24076 - DNA, 15 bp, Homo sapiens
tccttcatgactctg

SEQ ID NO: 24077 - DNA, 15 bp, Homo sapiens
ttccttcatgactct

SEQ ID NO: 24078 - DNA, 15 bp, Homo sapiens
gttccttcatgactc

SEQ ID NO: 24079 - DNA, 15 bp, Homo sapiens
tgttccttcatgact

SEQ ID NO: 24080 - DNA, 15 bp, Homo sapiens
ttgttccttcatgac

SEQ ID NO: 24081 - DNA, 15 bp, Homo sapiens
tttgttccttcatga

SEQ ID NO: 24082 - DNA, 15 bp, Homo sapiens
gtttgttccttcatg

SEQ ID NO: 24083 - DNA, 15 bp, Homo sapiens
cgtttgttccttcat

SEQ ID NO: 24084 - DNA, 15 bp, Homo sapiens
acgtttgttccttca

SEQ ID NO: 24085 - DNA, 15 bp, Homo sapiens
aacgtttgttccttc

SEQ ID NO: 24086 - DNA, 15 bp, Homo sapiens
aaacgtttgttcctt

SEQ ID NO: 24087 - DNA, 15 bp, Homo sapiens
caaacgtttgttcct

SEQ ID NO: 24088 - DNA, 15 bp, Homo sapiens
acaaacgtttgttcc

SEQ ID NO: 24089 - DNA, 15 bp, Homo sapiens
aacaaacgtttgttc

SEQ ID NO: 24090 - DNA, 15 bp, Homo sapiens
taacaaacgtttgtt

SEQ ID NO: 24091 - DNA, 15 bp, Homo sapiens
ttaacaaacgtttgt

SEQ ID NO: 24092 - DNA, 15 bp, Homo sapiens
cttaacaaacgtttg

SEQ ID NO: 24093 - DNA, 15 bp, Homo sapiens
acttaacaaacgttt

SEQ ID NO: 24094 - DNA, 15 bp, Homo sapiens
gacttaacaaacgtt

SEQ ID NO: 24095 - DNA, 15 bp, Homo sapiens
ggacttaacaaacgt

SEQ ID NO: 24096 - DNA, 15 bp, Homo sapiens
aggacttaacaaacg

SEQ ID NO: 24097 - DNA, 15 bp, Homo sapiens
aaggacttaacaaac

SEQ ID NO: 24098 - DNA, 15 bp, Homo sapiens
taaggacttaacaaa

SEQ ID NO: 24099 - DNA, 15 bp, Homo sapiens
ataaggacttaacaa

SEQ ID NO: 24100 - DNA, 15 bp, Homo sapiens
gataaggacttaaca

SEQ ID NO: 24101 - DNA, 15 bp, Homo sapiens
tgataaggacttaac

SEQ ID NO: 24102 - DNA, 15 bp, Homo sapiens
gtgataaggacttaa

SEQ ID NO: 24103 - DNA, 15 bp, Homo sapiens
agtgataaggactta

SEQ ID NO: 24104 - DNA, 15 bp, Homo sapiens
aagtgataaggactt

SEQ ID NO: 24105 - DNA, 15 bp, Homo sapiens
taagtgataaggact

SEQ ID NO: 24106 - DNA, 15 bp, Homo sapiens
ataagtgataaggac

SEQ ID NO: 24107 - DNA, 15 bp, Homo sapiens
aataagtgataagga

SEQ ID NO: 24108 - DNA, 15 bp, Homo sapiens
taataagtgataagg

SEQ ID NO: 24109 - DNA, 15 bp, Homo sapiens
ctaataagtgataag

SEQ ID NO: 24110 - DNA, 15 bp, Homo sapiens
tctaataagtgataa

SEQ ID NO: 24111 - DNA, 15 bp, Homo sapiens
atctaataagtgata

SEQ ID NO: 24112 - DNA, 15 bp, Homo sapiens
tatctaataagtgat

SEQ ID NO: 24113 - DNA, 15 bp, Homo sapiens
ttatctaataagtga

SEQ ID NO: 24114 - DNA, 15 bp, Homo sapiens
gttatctaataagtg

SEQ ID NO: 24115 - DNA, 15 bp, Homo sapiens
tgttatctaataagt

SEQ ID NO: 24116 - DNA, 15 bp, Homo sapiens
gtgttatctaataag

SEQ ID NO: 24117 - DNA, 15 bp, Homo sapiens
tgtgttatctaataa

SEQ ID NO: 24118 - DNA, 15 bp, Homo sapiens
ttgtgttatctaata

SEQ ID NO: 24119 - DNA, 15 bp, Homo sapiens
tttgtgttatctaat

SEQ ID NO: 24120 - DNA, 15 bp, Homo sapiens
ttttgtgttatctaa

SEQ ID NO: 24121 - DNA, 15 bp, Homo sapiens
gttttgtgttatcta

SEQ ID NO: 24122 - DNA, 15 bp, Homo sapiens
tgttttgtgttatct

SEQ ID NO: 24123 - DNA, 15 bp, Homo sapiens
atgttttgtgttatc

SEQ ID NO: 24124 - DNA, 15 bp, Homo sapiens
catgttttgtgttat

SEQ ID NO: 24125 - DNA, 15 bp, Homo sapiens
acatgttttgtgtta

SEQ ID NO: 24126 - DNA, 15 bp, Homo sapiens
aacatgttttgtgtt

SEQ ID NO: 24127 - DNA, 15 bp, Homo sapiens
caacatgttttgtgt

SEQ ID NO: 24128 - DNA, 15 bp, Homo sapiens
ccaacatgttttgtg

SEQ ID NO: 24129 - DNA, 15 bp, Homo sapiens
cccaacatgttttgt

SEQ ID NO: 24130 - DNA, 15 bp, Homo sapiens
ccccaacatgttttg

SEQ ID NO: 24131 - DNA, 15 bp, Homo sapiens
cccccaacatgtttt

SEQ ID NO: 24132 - DNA, 15 bp, Homo sapiens
ccccccaacatgttt

SEQ ID NO: 24133 - DNA, 15 bp, Homo sapiens
cccccccaacatgtt

SEQ ID NO: 24134 - DNA, 15 bp, Homo sapiens
acccccccaacatgt

SEQ ID NO: 24135 - DNA, 15 bp, Homo sapiens
cacccccccaacatg

SEQ ID NO: 24136 - DNA, 15 bp, Homo sapiens
acacccccccaacat

SEQ ID NO: 24137 - DNA, 15 bp, Homo sapiens
cacacccccccaaca

SEQ ID NO: 24138 - DNA, 15 bp, Homo sapiens
acacacccccccaac

SEQ ID NO: 24139 - DNA, 15 bp, Homo sapiens
tacacacccccccaa

SEQ ID NO: 24140 - DNA, 15 bp, Homo sapiens
gtacacaccccccca

SEQ ID NO: 24141 - DNA, 15 bp, Homo sapiens
tgtacacaccccccc

SEQ ID NO: 24142 - DNA, 15 bp, Homo sapiens
ctgtacacacccccc

SEQ ID NO: 24143 - DNA, 15 bp, Homo sapiens
tctgtacacaccccc

SEQ ID NO: 24144 - DNA, 15 bp, Homo sapiens
ctctgtacacacccc

SEQ ID NO: 24145 - DNA, 15 bp, Homo sapiens
cctctgtacacaccc

SEQ ID NO: 24146 - DNA, 15 bp, Homo sapiens
acctctgtacacacc

SEQ ID NO: 24147 - DNA, 15 bp, Homo sapiens
cacctctgtacacac

SEQ ID NO: 24148 - DNA, 15 bp, Homo sapiens
tcacctctgtacaca

SEQ ID NO: 24149 - DNA, 15 bp, Homo sapiens
ctcacctctgtacac

SEQ ID NO: 24150 - DNA, 15 bp, Homo sapiens
actcacctctgtaca

SEQ ID NO: 24151 - DNA, 15 bp, Homo sapiens
tactcacctctgtac

SEQ ID NO: 24152 - DNA, 15 bp, Homo sapiens
ttactcacctctgta

SEQ ID NO: 24153 - DNA, 15 bp, Homo sapiens
cttactcacctctgt

SEQ ID NO: 24154 - DNA, 15 bp, Homo sapiens
tcttactcacctctg

SEQ ID NO: 24155 - DNA, 15 bp, Homo sapiens
atcttactcacctct

SEQ ID NO: 24156 - DNA, 15 bp, Homo sapiens
catcttactcacctc

SEQ ID NO: 24157 - DNA, 15 bp, Homo sapiens
acatcttactcacct

SEQ ID NO: 24158 - DNA, 15 bp, Homo sapiens
tacatcttactcacc

SEQ ID NO: 24159 - DNA, 15 bp, Homo sapiens
ctacatcttactcac

SEQ ID NO: 24160 - DNA, 15 bp, Homo sapiens
gctacatcttactca

SEQ ID NO: 24161 - DNA, 15 bp, Homo sapiens
agctacatcttactc

SEQ ID NO: 24162 - DNA, 15 bp, Homo sapiens
gagctacatcttact

SEQ ID NO: 24163 - DNA, 15 bp, Homo sapiens
ggagctacatcttac

SEQ ID NO: 24164 - DNA, 15 bp, Homo sapiens
gggagctacatctta

SEQ ID NO: 24165 - DNA, 15 bp, Homo sapiens
tgggagctacatctt

SEQ ID NO: 24166 - DNA, 15 bp, Homo sapiens
atgggagctacatct

SEQ ID NO: 24167 - DNA, 15 bp, Homo sapiens
aatgggagctacatc

SEQ ID NO: 24168 - DNA, 15 bp, Homo sapiens
gaatgggagctacat

SEQ ID NO: 24169 - DNA, 15 bp, Homo sapiens
agaatgggagctaca

SEQ ID NO: 24170 - DNA, 15 bp, Homo sapiens
gagaatgggagctac

SEQ ID NO: 24171 - DNA, 15 bp, Homo sapiens
tgagaatgggagcta

SEQ ID NO: 24172 - DNA, 15 bp, Homo sapiens
ttgagaatgggagct

SEQ ID NO: 24173 - DNA, 15 bp, Homo sapiens
cttgagaatgggagc

SEQ ID NO: 24174 - DNA, 15 bp, Homo sapiens
acttgagaatgggag

SEQ ID NO: 24175 - DNA, 15 bp, Homo sapiens
gacttgagaatggga

SEQ ID NO: 24176 - DNA, 15 bp, Homo sapiens
cgacttgagaatggg

SEQ ID NO: 24177 - DNA, 15 bp, Homo sapiens
gcgacttgagaatgg

SEQ ID NO: 24178 - DNA, 15 bp, Homo sapiens
agcgacttgagaatg

SEQ ID NO: 24179 - DNA, 15 bp, Homo sapiens
aagcgacttgagaat

SEQ ID NO: 24180 - DNA, 15 bp, Homo sapiens
taagcgacttgagaa

SEQ ID NO: 24181 - DNA, 15 bp, Homo sapiens
gtaagcgacttgaga

SEQ ID NO: 24182 - DNA, 15 bp, Homo sapiens
tgtaagcgacttgag

SEQ ID NO: 24183 - DNA, 15 bp, Homo sapiens
atgtaagcgacttga

SEQ ID NO: 24184 - DNA, 15 bp, Homo sapiens
aatgtaagcgacttg

SEQ ID NO: 24185 - DNA, 15 bp, Homo sapiens
gaatgtaagcgactt

SEQ ID NO: 24186 - DNA, 15 bp, Homo sapiens
agaatgtaagcgact

SEQ ID NO: 24187 - DNA, 15 bp, Homo sapiens
tagaatgtaagcgac

SEQ ID NO: 24188 - DNA, 15 bp, Homo sapiens
ttagaatgtaagcga

SEQ ID NO: 24189 - DNA, 15 bp, Homo sapiens
attagaatgtaagcg

SEQ ID NO: 24190 - DNA, 15 bp, Homo sapiens
cattagaatgtaagc

SEQ ID NO: 24191 - DNA, 15 bp, Homo sapiens
acattagaatgtaag

SEQ ID NO: 24192 - DNA, 15 bp, Homo sapiens
tacattagaatgtaa

SEQ ID NO: 24193 - DNA, 15 bp, Homo sapiens
ttacattagaatgta

SEQ ID NO: 24194 - DNA, 15 bp, Homo sapiens
tttacattagaatgt

SEQ ID NO: 24195 - DNA, 15 bp, Homo sapiens
ttttacattagaatg

SEQ ID NO: 24196 - DNA, 15 bp, Homo sapiens
cttttacattagaat

SEQ ID NO: 24197 - DNA, 15 bp, Homo sapiens
ccttttacattagaa

SEQ ID NO: 24198 - DNA, 15 bp, Homo sapiens
accttttacattaga

SEQ ID NO: 24199 - DNA, 15 bp, Homo sapiens
taccttttacattag

SEQ ID NO: 24200 - DNA, 15 bp, Homo sapiens
ctaccttttacatta

SEQ ID NO: 24201 - DNA, 15 bp, Homo sapiens
tctaccttttacatt

SEQ ID NO: 24202 - DNA, 15 bp, Homo sapiens
gtctaccttttacat

SEQ ID NO: 24203 - DNA, 15 bp, Homo sapiens
tgtctaccttttaca

SEQ ID NO: 24204 - DNA, 15 bp, Homo sapiens
ttgtctaccttttac

SEQ ID NO: 24205 - DNA, 15 bp, Homo sapiens
tttgtctacctttta

SEQ ID NO: 24206 - DNA, 15 bp, Homo sapiens
ctttgtctacctttt

SEQ ID NO: 24207 - DNA, 15 bp, Homo sapiens
gctttgtctaccttt

SEQ ID NO: 24208 - DNA, 15 bp, Homo sapiens
tgctttgtctacctt

SEQ ID NO: 24209 - DNA, 15 bp, Homo sapiens
atgctttgtctacct

SEQ ID NO: 24210 - DNA, 15 bp, Homo sapiens
aatgctttgtctacc

SEQ ID NO: 24211 - DNA, 15 bp, Homo sapiens
taatgctttgtctac

SEQ ID NO: 24212 - DNA, 15 bp, Homo sapiens
gtaatgctttgtcta

SEQ ID NO: 24213 - DNA, 15 bp, Homo sapiens
tgtaatgctttgtct

SEQ ID NO: 24214 - DNA, 15 bp, Homo sapiens
ctgtaatgctttgtc

SEQ ID NO: 24215 - DNA, 15 bp, Homo sapiens
tctgtaatgctttgt

SEQ ID NO: 24216 - DNA, 15 bp, Homo sapiens
ttctgtaatgctttg

SEQ ID NO: 24217 - DNA, 15 bp, Homo sapiens
cttctgtaatgcttt

SEQ ID NO: 24218 - DNA, 15 bp, Homo sapiens
tcttctgtaatgctt

SEQ ID NO: 24219 - DNA, 15 bp, Homo sapiens
ttcttctgtaatgct

SEQ ID NO: 24220 - DNA, 15 bp, Homo sapiens
cttcttctgtaatgc

SEQ ID NO: 24221 - DNA, 15 bp, Homo sapiens
acttcttctgtaatg

SEQ ID NO: 24222 - DNA, 15 bp, Homo sapiens
tacttcttctgtaat

SEQ ID NO: 24223 - DNA, 15 bp, Homo sapiens
ttacttcttctgtaa

SEQ ID NO: 24224 - DNA, 15 bp, Homo sapiens
gttacttcttctgta

SEQ ID NO: 24225 - DNA, 15 bp, Homo sapiens
agttacttcttctgt

SEQ ID NO: 24226 - DNA, 15 bp, Homo sapiens
gagttacttcttctg

SEQ ID NO: 24227 - DNA, 15 bp, Homo sapiens
agagttacttcttct

SEQ ID NO: 24228 - DNA, 15 bp, Homo sapiens
cagagttacttcttc

SEQ ID NO: 24229 - DNA, 15 bp, Homo sapiens
gcagagttacttctt

SEQ ID NO: 24230 - DNA, 15 bp, Homo sapiens
agcagagttacttct

SEQ ID NO: 24231 - DNA, 15 bp, Homo sapiens
tagcagagttacttc

SEQ ID NO: 24232 - DNA, 15 bp, Homo sapiens
atagcagagttactt

SEQ ID NO: 24233 - DNA, 15 bp, Homo sapiens
tatagcagagttact

SEQ ID NO: 24234 - DNA, 15 bp, Homo sapiens
ctatagcagagttac

SEQ ID NO: 24235 - DNA, 15 bp, Homo sapiens
tctatagcagagtta

SEQ ID NO: 24236 - DNA, 15 bp, Homo sapiens
ttctatagcagagtt

SEQ ID NO: 24237 - DNA, 15 bp, Homo sapiens
cttctatagcagagt

SEQ ID NO: 24238 - DNA, 15 bp, Homo sapiens
ccttctatagcagag

SEQ ID NO: 24239 - DNA, 15 bp, Homo sapiens
accttctatagcaga

SEQ ID NO: 24240 - DNA, 15 bp, Homo sapiens
aaccttctatagcag

SEQ ID NO: 24241 - DNA, 15 bp, Homo sapiens
caaccttctatagca

SEQ ID NO: 24242 - DNA, 15 bp, Homo sapiens
gcaaccttctatagc

SEQ ID NO: 24243 - DNA, 15 bp, Homo sapiens
tgcaaccttctatag

SEQ ID NO: 24244 - DNA, 15 bp, Homo sapiens
ttgcaaccttctata

SEQ ID NO: 24245 - DNA, 15 bp, Homo sapiens
attgcaaccttctat

SEQ ID NO: 24246 - DNA, 15 bp, Homo sapiens
cattgcaaccttcta

SEQ ID NO: 24247 - DNA, 15 bp, Homo sapiens
tcattgcaaccttct

SEQ ID NO: 24248 - DNA, 15 bp, Homo sapiens
ttcattgcaaccttc

SEQ ID NO: 24249 - DNA, 15 bp, Homo sapiens
cttcattgcaacctt

SEQ ID NO: 24250 - DNA, 15 bp, Homo sapiens
tcttcattgcaacct

SEQ ID NO: 24251 - DNA, 15 bp, Homo sapiens
ctcttcattgcaacc

SEQ ID NO: 24252 - DNA, 15 bp, Homo sapiens
tctcttcattgcaac

SEQ ID NO: 24253 - DNA, 15 bp, Homo sapiens
ttctcttcattgcaa

SEQ ID NO: 24254 - DNA, 15 bp, Homo sapiens
gttctcttcattgca

SEQ ID NO: 24255 - DNA, 15 bp, Homo sapiens
tgttctcttcattgc

SEQ ID NO: 24256 - DNA, 15 bp, Homo sapiens
atgttctcttcattg

SEQ ID NO: 24257 - DNA, 15 bp, Homo sapiens
aatgttctcttcatt

SEQ ID NO: 24258 - DNA, 15 bp, Homo sapiens
caatgttctcttcat

SEQ ID NO: 24259 - DNA, 15 bp, Homo sapiens
ccaatgttctcttca

SEQ ID NO: 24260 - DNA, 15 bp, Homo sapiens
tccaatgttctcttc

SEQ ID NO: 24261 - DNA, 15 bp, Homo sapiens
ttccaatgttctctt

SEQ ID NO: 24262 - DNA, 15 bp, Homo sapiens
tttccaatgttctct

SEQ ID NO: 24263 - DNA, 15 bp, Homo sapiens
gtttccaatgttctc

SEQ ID NO: 24264 - DNA, 15 bp, Homo sapiens
tgtttccaatgttct

SEQ ID NO: 24265 - DNA, 15 bp, Homo sapiens
gtgtttccaatgttc

SEQ ID NO: 24266 - DNA, 15 bp, Homo sapiens
agtgtttccaatgtt

SEQ ID NO: 24267 - DNA, 15 bp, Homo sapiens
tagtgtttccaatgt

SEQ ID NO: 24268 - DNA, 15 bp, Homo sapiens
ttagtgtttccaatg

SEQ ID NO: 24269 - DNA, 15 bp, Homo sapiens
attagtgtttccaat

SEQ ID NO: 24270 - DNA, 15 bp, Homo sapiens
aattagtgtttccaa

SEQ ID NO: 24271 - DNA, 15 bp, Homo sapiens
aaattagtgtttcca

SEQ ID NO: 24272 - DNA, 15 bp, Homo sapiens
aaaattagtgtttcc

SEQ ID NO: 24273 - DNA, 15 bp, Homo sapiens
taaaattagtgtttc

SEQ ID NO: 24274 - DNA, 15 bp, Homo sapiens
gtaaaattagtgttt

SEQ ID NO: 24275 - DNA, 15 bp, Homo sapiens
ggtaaaattagtgtt

SEQ ID NO: 24276 - DNA, 15 bp, Homo sapiens
aggtaaaattagtgt

SEQ ID NO: 24277 - DNA, 15 bp, Homo sapiens
aaggtaaaattagtg

SEQ ID NO: 24278 - DNA, 15 bp, Homo sapiens
taaggtaaaattagt

SEQ ID NO: 24279 - DNA, 15 bp, Homo sapiens
ataaggtaaaattag

SEQ ID NO: 24280 - DNA, 15 bp, Homo sapiens
tataaggtaaaatta

SEQ ID NO: 24281 - DNA, 15 bp, Homo sapiens
ttataaggtaaaatt

SEQ ID NO: 24282 - DNA, 15 bp, Homo sapiens
tttataaggtaaaat

SEQ ID NO: 24283 - DNA, 15 bp, Homo sapiens
ctttataaggtaaaa

SEQ ID NO: 24284 - DNA, 15 bp, Homo sapiens
tctttataaggtaaa

SEQ ID NO: 24285 - DNA, 15 bp, Homo sapiens
ttctttataaggtaa

SEQ ID NO: 24286 - DNA, 15 bp, Homo sapiens
cttctttataaggta

SEQ ID NO: 24287 - DNA, 15 bp, Homo sapiens
ccttctttataaggt

SEQ ID NO: 24288 - DNA, 15 bp, Homo sapiens
accttctttataagg

SEQ ID NO: 24289 - DNA, 15 bp, Homo sapiens
aaccttctttataag

SEQ ID NO: 24290 - DNA, 15 bp, Homo sapiens
aaaccttctttataa

SEQ ID NO: 24291 - DNA, 15 bp, Homo sapiens
gaaaccttctttata

SEQ ID NO: 24292 - DNA, 15 bp, Homo sapiens
tgaaaccttctttat

SEQ ID NO: 24293 - DNA, 15 bp, Homo sapiens
atgaaaccttcttta

SEQ ID NO: 24294 - DNA, 15 bp, Homo sapiens
tatgaaaccttcttt

SEQ ID NO: 24295 - DNA, 15 bp, Homo sapiens
ttatgaaaccttctt

SEQ ID NO: 24296 - DNA, 15 bp, Homo sapiens
tttatgaaaccttct

SEQ ID NO: 24297 - DNA, 15 bp, Homo sapiens
ctttatgaaaccttc

SEQ ID NO: 24298 - DNA, 15 bp, Homo sapiens
cctttatgaaacctt

SEQ ID NO: 24299 - DNA, 15 bp, Homo sapiens
tcctttatgaaacct

SEQ ID NO: 24300 - DNA, 15 bp, Homo sapiens
ttcctttatgaaacc

SEQ ID NO: 24301 - DNA, 15 bp, Homo sapiens
cttcctttatgaaac

SEQ ID NO: 24302 - DNA, 15 bp, Homo sapiens
ccttcctttatgaaa

SEQ ID NO: 24303 - DNA, 15 bp, Homo sapiens
gccttcctttatgaa

SEQ ID NO: 24304 - DNA, 15 bp, Homo sapiens
tgccttcctttatga

SEQ ID NO: 24305 - DNA, 15 bp, Homo sapiens
ttgccttcctttatg

SEQ ID NO: 24306 - DNA, 15 bp, Homo sapiens
cttgccttcctttat

SEQ ID NO: 24307 - DNA, 15 bp, Homo sapiens
acttgccttccttta

SEQ ID NO: 24308 - DNA, 15 bp, Homo sapiens
aacttgccttccttt

SEQ ID NO: 24309 - DNA, 15 bp, Homo sapiens
aaacttgccttcctt

SEQ ID NO: 24310 - DNA, 15 bp, Homo sapiens
caaacttgccttcct

SEQ ID NO: 24311 - DNA, 15 bp, Homo sapiens
tcaaacttgccttcc

SEQ ID NO: 24312 - DNA, 15 bp, Homo sapiens
ctcaaacttgccttc

SEQ ID NO: 24313 - DNA, 15 bp, Homo sapiens
gctcaaacttgcctt

SEQ ID NO: 24314 - DNA, 15 bp, Homo sapiens
agctcaaacttgcct

SEQ ID NO: 24315 - DNA, 15 bp, Homo sapiens
cagctcaaacttgcc

SEQ ID NO: 24316 - DNA, 15 bp, Homo sapiens
ccagctcaaacttgc

SEQ ID NO: 24317 - DNA, 15 bp, Homo sapiens
cccagctcaaacttg

SEQ ID NO: 24318 - DNA, 15 bp, Homo sapiens
ccccagctcaaactt

SEQ ID NO: 24319 - DNA, 15 bp, Homo sapiens
accccagctcaaact

SEQ ID NO: 24320 - DNA, 15 bp, Homo sapiens
caccccagctcaaac

SEQ ID NO: 24321 - DNA, 15 bp, Homo sapiens
tcaccccagctcaaa

SEQ ID NO: 24322 - DNA, 15 bp, Homo sapiens
ttcaccccagctcaa

SEQ ID NO: 24323 - DNA, 15 bp, Homo sapiens
tttcaccccagctca

SEQ ID NO: 24324 - DNA, 15 bp, Homo sapiens
ttttcaccccagctc

SEQ ID NO: 24325 - DNA, 15 bp, Homo sapiens
cttttcaccccagct

SEQ ID NO: 24326 - DNA, 15 bp, Homo sapiens
ccttttcaccccagc

SEQ ID NO: 24327 - DNA, 15 bp, Homo sapiens
tccttttcaccccag

SEQ ID NO: 24328 - DNA, 15 bp, Homo sapiens
gtccttttcacccca

SEQ ID NO: 24329 - DNA, 15 bp, Homo sapiens
ggtccttttcacccc

SEQ ID NO: 24330 - DNA, 15 bp, Homo sapiens
tggtccttttcaccc

SEQ ID NO: 24331 - DNA, 15 bp, Homo sapiens
actggtccttttcac

SEQ ID NO: 24332 - DNA, 15 bp, Homo sapiens
tactggtccttttca

SEQ ID NO: 24333 - DNA, 15 bp, Homo sapiens
ttactggtccttttc

SEQ ID NO: 24334 - DNA, 15 bp, Homo sapiens
cttactggtcctttt

SEQ ID NO: 24335 - DNA, 15 bp, Homo sapiens
ccttactggtccttt

SEQ ID NO: 24336 - DNA, 15 bp, Homo sapiens
cccttactggtcctt

SEQ ID NO: 24337 - DNA, 15 bp, Homo sapiens
acccttactggtcct

SEQ ID NO: 24338 - DNA, 15 bp, Homo sapiens
aacccttactggtcc

SEQ ID NO: 24339 - DNA, 15 bp, Homo sapiens
caacccttactggtc

SEQ ID NO: 24340 - DNA, 15 bp, Homo sapiens
tcaacccttactggt

SEQ ID NO: 24341 - DNA, 15 bp, Homo sapiens
gtcaacccttactgg

SEQ ID NO: 24342 - DNA, 15 bp, Homo sapiens
agtcaacccttactg

SEQ ID NO: 24343 - DNA, 15 bp, Homo sapiens
aagtcaacccttact

SEQ ID NO: 24344 - DNA, 15 bp, Homo sapiens
aaagtcaacccttac

SEQ ID NO: 24345 - DNA, 15 bp, Homo sapiens
gaaagtcaaccctta

SEQ ID NO: 24346 - DNA, 15 bp, Homo sapiens
tgaaagtcaaccctt

SEQ ID NO: 24347 - DNA, 15 bp, Homo sapiens
ttgaaagtcaaccct

SEQ ID NO: 24348 - DNA, 15 bp, Homo sapiens
cttgaaagtcaaccc

SEQ ID NO: 24349 - DNA, 15 bp, Homo sapiens
gcttgaaagtcaacc

SEQ ID NO: 24350 - DNA, 15 bp, Homo sapiens
ggcttgaaagtcaac

SEQ ID NO: 24351 - DNA, 15 bp, Homo sapiens
tggcttgaaagtcaa

SEQ ID NO: 24352 - DNA, 15 bp, Homo sapiens
ttggcttgaaagtca

SEQ ID NO: 24353 - DNA, 15 bp, Homo sapiens
cttggcttgaaagtc

SEQ ID NO: 24354 - DNA, 15 bp, Homo sapiens
ccttggcttgaaagt

SEQ ID NO: 24355 - DNA, 15 bp, Homo sapiens
tccttggcttgaaag

SEQ ID NO: 24356 - DNA, 15 bp, Homo sapiens
ctccttggcttgaaa

SEQ ID NO: 24357 - DNA, 15 bp, Homo sapiens
tctccttggcttgaa

SEQ ID NO: 24358 - DNA, 15 bp, Homo sapiens
ctctccttggcttga

SEQ ID NO: 24359 - DNA, 15 bp, Homo sapiens
cctctccttggcttg

SEQ ID NO: 24360 - DNA, 15 bp, Homo sapiens
tcctctccttggctt

SEQ ID NO: 24361 - DNA, 15 bp, Homo sapiens
ctcctctccttggct

SEQ ID NO: 24362 - DNA, 15 bp, Homo sapiens
cctcctctccttggc

SEQ ID NO: 24363 - DNA, 15 bp, Homo sapiens
ccctcctctccttgg

SEQ ID NO: 24364 - DNA, 15 bp, Homo sapiens
cccctcctctccttg

SEQ ID NO: 24365 - DNA, 15 bp, Homo sapiens
tcccctcctctcctt

SEQ ID NO: 24366 - DNA, 15 bp, Homo sapiens
ttcccctcctctcct

SEQ ID NO: 24367 - DNA, 15 bp, Homo sapiens
cttcccctcctctcc

SEQ ID NO: 24368 - DNA, 15 bp, Homo sapiens
acttcccctcctctc

SEQ ID NO: 24369 - DNA, 15 bp, Homo sapiens
cacttcccctcctct

SEQ ID NO: 24370 - DNA, 15 bp, Homo sapiens
tcacttcccctcctc

SEQ ID NO: 24371 - DNA, 15 bp, Homo sapiens
atcacttcccctcct

SEQ ID NO: 24372 - DNA, 15 bp, Homo sapiens
catcacttcccctcc

SEQ ID NO: 24373 - DNA, 15 bp, Homo sapiens
acatcacttcccctc

SEQ ID NO: 24374 - DNA, 15 bp, Homo sapiens
aacatcacttcccct

SEQ ID NO: 24375 - DNA, 15 bp, Homo sapiens
taacatcacttcccc

SEQ ID NO: 24376 - DNA, 15 bp, Homo sapiens
gtaacatcacttccc

SEQ ID NO: 24377 - DNA, 15 bp, Homo sapiens
tgtaacatcacttcc

SEQ ID NO: 24378 - DNA, 15 bp, Homo sapiens
ctgtaacatcacttc

SEQ ID NO: 24379 - DNA, 15 bp, Homo sapiens
cctgtaacatcactt

SEQ ID NO: 24380 - DNA, 15 bp, Homo sapiens
gcctgtaacatcact

SEQ ID NO: 24381 - DNA, 15 bp, Homo sapiens
ggcctgtaacatcac

SEQ ID NO: 24382 - DNA, 15 bp, Homo sapiens
tggcctgtaacatca

SEQ ID NO: 24383 - DNA, 15 bp, Homo sapiens
ttggcctgtaacatc

SEQ ID NO: 24384 - DNA, 15 bp, Homo sapiens
tttggcctgtaacat

SEQ ID NO: 24385 - DNA, 15 bp, Homo sapiens
ctttggcctgtaaca

SEQ ID NO: 24386 - DNA, 15 bp, Homo sapiens
cctttggcctgtaac

SEQ ID NO: 24387 - DNA, 15 bp, Homo sapiens
tcctttggcctgtaa

SEQ ID NO: 24388 - DNA, 15 bp, Homo sapiens
ttcctttggcctgta

SEQ ID NO: 24389 - DNA, 15 bp, Homo sapiens
attcctttggcctgt

SEQ ID NO: 24390 - DNA, 15 bp, Homo sapiens
cattcctttggcctg

SEQ ID NO: 24391 - DNA, 15 bp, Homo sapiens
ccattcctttggcct

SEQ ID NO: 24392 - DNA, 15 bp, Homo sapiens
gccattcctttggcc

SEQ ID NO: 24393 - DNA, 15 bp, Homo sapiens
tgccattcctttggc

SEQ ID NO: 24394 - DNA, 15 bp, Homo sapiens
atgccattcctttgg

SEQ ID NO: 24395 - DNA, 15 bp, Homo sapiens
aatgccattcctttg

SEQ ID NO: 24396 - DNA, 15 bp, Homo sapiens
caatgccattccttt

SEQ ID NO: 24397 - DNA, 15 bp, Homo sapiens
acaatgccattcctt

SEQ ID NO: 24398 - DNA, 15 bp, Homo sapiens
tacaatgccattcct

SEQ ID NO: 24399 - DNA, 15 bp, Homo sapiens
ttacaatgccattcc

SEQ ID NO: 24400 - DNA, 15 bp, Homo sapiens
cttacaatgccattc

SEQ ID NO: 24401 - DNA, 15 bp, Homo sapiens
tcttacaatgccatt

SEQ ID NO: 24402 - DNA, 15 bp, Homo sapiens
ttcttacaatgccat

SEQ ID NO: 24403 - DNA, 15 bp, Homo sapiens
cttcttacaatgcca

SEQ ID NO: 24404 - DNA, 15 bp, Homo sapiens
gcttcttacaatgcc

SEQ ID NO: 24405 - DNA, 15 bp, Homo sapiens
agcttcttacaatgc

SEQ ID NO: 24406 - DNA, 15 bp, Homo sapiens
aagcttcttacaatg

SEQ ID NO: 24407 - DNA, 15 bp, Homo sapiens
caagcttcttacaat

SEQ ID NO: 24408 - DNA, 15 bp, Homo sapiens
acaagcttcttacaa

SEQ ID NO: 24409 - DNA, 15 bp, Homo sapiens
aacaagcttcttaca

SEQ ID NO: 24410 - DNA, 15 bp, Homo sapiens
caacaagcttcttac

SEQ ID NO: 24411 - DNA, 15 bp, Homo sapiens
ccaacaagcttctta

SEQ ID NO: 24412 - DNA, 15 bp, Homo sapiens
gccaacaagcttctt

SEQ ID NO: 24413 - DNA, 15 bp, Homo sapiens
tgccaacaagcttct

SEQ ID NO: 24414 - DNA, 15 bp, Homo sapiens
atgccaacaagcttc

SEQ ID NO: 24415 - DNA, 15 bp, Homo sapiens
tatgccaacaagctt

SEQ ID NO: 24416 - DNA, 15 bp, Homo sapiens
ttatgccaacaagct

SEQ ID NO: 24417 - DNA, 15 bp, Homo sapiens
tttatgccaacaagc

SEQ ID NO: 24418 - DNA, 15 bp, Homo sapiens
ttttatgccaacaag

SEQ ID NO: 24419 - DNA, 15 bp, Homo sapiens
cttttatgccaacaa

SEQ ID NO: 24420 - DNA, 15 bp, Homo sapiens
acttttatgccaaca

SEQ ID NO: 24421 - DNA, 15 bp, Homo sapiens
cacttttatgccaac

SEQ ID NO: 24422 - DNA, 15 bp, Homo sapiens
acacttttatgccaa

SEQ ID NO: 24423 - DNA, 15 bp, Homo sapiens
aacacttttatgcca

SEQ ID NO: 24424 - DNA, 15 bp, Homo sapiens
aaacacttttatgcc

SEQ ID NO: 24425 - DNA, 15 bp, Homo sapiens
taaacacttttatgc

SEQ ID NO: 24426 - DNA, 15 bp, Homo sapiens
ctaaacacttttatg

SEQ ID NO: 24427 - DNA, 15 bp, Homo sapiens
tctaaacacttttat

SEQ ID NO: 24428 - DNA, 15 bp, Homo sapiens
ttctaaacactttta

SEQ ID NO: 24429 - DNA, 15 bp, Homo sapiens
attctaaacactttt

SEQ ID NO: 24430 - DNA, 15 bp, Homo sapiens
tattctaaacacttt

SEQ ID NO: 24431 - DNA, 15 bp, Homo sapiens
atattctaaacactt

SEQ ID NO: 24432 - DNA, 15 bp, Homo sapiens
catattctaaacact

SEQ ID NO: 24433 - DNA, 15 bp, Homo sapiens
ccatattctaaacac

SEQ ID NO: 24434 - DNA, 15 bp, Homo sapiens
gccatattctaaaca

SEQ ID NO: 24435 - DNA, 15 bp, Homo sapiens
tgccatattctaaac

SEQ ID NO: 24436 - DNA, 15 bp, Homo sapiens
ctgccatattctaaa

SEQ ID NO: 24437 - DNA, 15 bp, Homo sapiens
gctgccatattctaa

SEQ ID NO: 24438 - DNA, 15 bp, Homo sapiens
cgctgccatattcta

SEQ ID NO: 24439 - DNA, 15 bp, Homo sapiens
tcgctgccatattct

SEQ ID NO: 24440 - DNA, 15 bp, Homo sapiens
ttcgctgccatattc

SEQ ID NO: 24441 - DNA, 15 bp, Homo sapiens
attcgctgccatatt

SEQ ID NO: 24442 - DNA, 15 bp, Homo sapiens
aattcgctgccatat

SEQ ID NO: 24443 - DNA, 15 bp, Homo sapiens
gaattcgctgccata

SEQ ID NO: 24444 - DNA, 15 bp, Homo sapiens
tgaattcgctgccat

SEQ ID NO: 24445 - DNA, 15 bp, Homo sapiens
atgaattcgctgcca

SEQ ID NO: 24446 - DNA, 15 bp, Homo sapiens
aatgaattcgctgcc

SEQ ID NO: 24447 - DNA, 15 bp, Homo sapiens
taatgaattcgctgc

SEQ ID NO: 24448 - DNA, 15 bp, Homo sapiens
ataatgaattcgctg

SEQ ID NO: 24449 - DNA, 15 bp, Homo sapiens
gataatgaattcgct

SEQ ID NO: 24450 - DNA, 15 bp, Homo sapiens
tgataatgaattcgc

SEQ ID NO: 24451 - DNA, 15 bp, Homo sapiens
atgataatgaattcg

SEQ ID NO: 24452 - DNA, 15 bp, Homo sapiens
gatgataatgaattc

SEQ ID NO: 24453 - DNA, 15 bp, Homo sapiens
tgatgataatgaatt

SEQ ID NO: 24454 - DNA, 15 bp, Homo sapiens
ctgatgataatgaat

SEQ ID NO: 24455 - DNA, 15 bp, Homo sapiens
tctgatgataatgaa

SEQ ID NO: 24456 - DNA, 15 bp, Homo sapiens
atctgatgataatga

SEQ ID NO: 24457 - DNA, 15 bp, Homo sapiens
aatctgatgataatg

SEQ ID NO: 24458 - DNA, 15 bp, Homo sapiens
caatctgatgataat

SEQ ID NO: 24459 - DNA, 15 bp, Homo sapiens
acaatctgatgataa

SEQ ID NO: 24460 - DNA, 15 bp, Homo sapiens
cacaatctgatgata

SEQ ID NO: 24461 - DNA, 15 bp, Homo sapiens
ccacaatctgatgat

SEQ ID NO: 24462 - DNA, 15 bp, Homo sapiens
accacaatctgatga

SEQ ID NO: 24463 - DNA, 15 bp, Homo sapiens
caccacaatctgatg

SEQ ID NO: 24464 - DNA, 15 bp, Homo sapiens
acaccacaatctgat

SEQ ID NO: 24465 - DNA, 15 bp, Homo sapiens
gacaccacaatctga

SEQ ID NO: 24466 - DNA, 15 bp, Homo sapiens
agacaccacaatctg

SEQ ID NO: 24467 - DNA, 15 bp, Homo sapiens
cagacaccacaatct

SEQ ID NO: 24468 - DNA, 15 bp, Homo sapiens
acagacaccacaatc

SEQ ID NO: 24469 - DNA, 15 bp, Homo sapiens
tacagacaccacaat

SEQ ID NO: 24470 - DNA, 15 bp, Homo sapiens
atacagacaccacaa

SEQ ID NO: 24471 - DNA, 15 bp, Homo sapiens
catacagacaccaca

SEQ ID NO: 24472 - DNA, 15 bp, Homo sapiens
acatacagacaccac

SEQ ID NO: 24473 - DNA, 15 bp, Homo sapiens
aacatacagacacca

SEQ ID NO: 24474 - DNA, 15 bp, Homo sapiens
caacatacagacacc

SEQ ID NO: 24475 - DNA, 15 bp, Homo sapiens
ccaacatacagacac

SEQ ID NO: 24476 - DNA, 15 bp, Homo sapiens
cccaacatacagaca

SEQ ID NO: 24477 - DNA, 15 bp, Homo sapiens
ccccaacatacagac

SEQ ID NO: 24478 - DNA, 15 bp, Homo sapiens
cccccaacatacaga

SEQ ID NO: 24479 - DNA, 15 bp, Homo sapiens
acccccaacatacag

SEQ ID NO: 24480 - DNA, 15 bp, Homo sapiens
cacccccaacataca

SEQ ID NO: 24481 - DNA, 15 bp, Homo sapiens
ccacccccaacatac

SEQ ID NO: 24482 - DNA, 15 bp, Homo sapiens
cccacccccaacata

SEQ ID NO: 24483 - DNA, 15 bp, Homo sapiens
tcccacccccaacat

SEQ ID NO: 24484 - DNA, 15 bp, Homo sapiens
ctcccacccccaaca

SEQ ID NO: 24485 - DNA, 15 bp, Homo sapiens
tctcccacccccaac

SEQ ID NO: 24486 - DNA, 15 bp, Homo sapiens
ctctcccacccccaa

SEQ ID NO: 24487 - DNA, 15 bp, Homo sapiens
tctctcccaccccca

SEQ ID NO: 24488 - DNA, 15 bp, Homo sapiens
ttctctcccaccccc

SEQ ID NO: 24489 - DNA, 15 bp, Homo sapiens
attctctcccacccc

SEQ ID NO: 24490 - DNA, 15 bp, Homo sapiens
aattctctcccaccc

SEQ ID NO: 24491 - DNA, 15 bp, Homo sapiens
caattctctcccacc

SEQ ID NO: 24492 - DNA, 15 bp, Homo sapiens
acaattctctcccac

SEQ ID NO: 24493 - DNA, 15 bp, Homo sapiens
cacaattctctccca

SEQ ID NO: 24494 - DNA, 15 bp, Homo sapiens
ccacaattctctccc

SEQ ID NO: 24495 - DNA, 15 bp, Homo sapiens
accacaattctctcc

SEQ ID NO: 24496 - DNA, 15 bp, Homo sapiens
caccacaattctctc

SEQ ID NO: 24497 - DNA, 15 bp, Homo sapiens
ccaccacaattctct

SEQ ID NO: 24498 - DNA, 15 bp, Homo sapiens
gccaccacaattctc

SEQ ID NO: 24499 - DNA, 15 bp, Homo sapiens
tgccaccacaattct

SEQ ID NO: 24500 - DNA, 15 bp, Homo sapiens
ttgccaccacaattc

SEQ ID NO: 24501 - DNA, 15 bp, Homo sapiens
attgccaccacaatt

SEQ ID NO: 24502 - DNA, 15 bp, Homo sapiens
tattgccaccacaat

SEQ ID NO: 24503 - DNA, 15 bp, Homo sapiens
ctattgccaccacaa

SEQ ID NO: 24504 - DNA, 15 bp, Homo sapiens
cctattgccaccaca

SEQ ID NO: 24505 - DNA, 15 bp, Homo sapiens
gcctattgccaccac

SEQ ID NO: 24506 - DNA, 15 bp, Homo sapiens
tgcctattgccacca

SEQ ID NO: 24507 - DNA, 15 bp, Homo sapiens
ttgcctattgccacc

SEQ ID NO: 24508 - DNA, 15 bp, Homo sapiens
gttgcctattgccac

SEQ ID NO: 24509 - DNA, 15 bp, Homo sapiens
tgttgcctattgcca

SEQ ID NO: 24510 - DNA, 15 bp, Homo sapiens
ttgttgcctattgcc

SEQ ID NO: 24511 - DNA, 15 bp, Homo sapiens
cttgttgcctattgc

SEQ ID NO: 24512 - DNA, 15 bp, Homo sapiens
tcttgttgcctattg

SEQ ID NO: 24513 - DNA, 15 bp, Homo sapiens
atcttgttgcctatt

SEQ ID NO: 24514 - DNA, 15 bp, Homo sapiens
tatcttgttgcctat

SEQ ID NO: 24515 - DNA, 15 bp, Homo sapiens
ttatcttgttgccta

SEQ ID NO: 24516 - DNA, 15 bp, Homo sapiens
tttatcttgttgcct

SEQ ID NO: 24517 - DNA, 15 bp, Homo sapiens
ttttatcttgttgcc

SEQ ID NO: 24518 - DNA, 15 bp, Homo sapiens
cttttatcttgttgc

SEQ ID NO: 24519 - DNA, 15 bp, Homo sapiens
tcttttatcttgttg

SEQ ID NO: 24520 - DNA, 15 bp, Homo sapiens
ttcttttatcttgtt

SEQ ID NO: 24521 - DNA, 15 bp, Homo sapiens
tttcttttatcttgt

SEQ ID NO: 24522 - DNA, 15 bp, Homo sapiens
ctttcttttatcttg

SEQ ID NO: 24523 - DNA, 15 bp, Homo sapiens
actttcttttatctt

SEQ ID NO: 24524 - DNA, 15 bp, Homo sapiens
tactttcttttatct

SEQ ID NO: 24525 - DNA, 15 bp, Homo sapiens
ttactttcttttatc

SEQ ID NO: 24526 - DNA, 15 bp, Homo sapiens
tttactttcttttat

SEQ ID NO: 24527 - DNA, 15 bp, Homo sapiens
ttttactttctttta

SEQ ID NO: 24528 - DNA, 15 bp, Homo sapiens
cttttactttctttt

SEQ ID NO: 24529 - DNA, 15 bp, Homo sapiens
ccttttactttcttt

SEQ ID NO: 24530 - DNA, 15 bp, Homo sapiens
accttttactttctt

SEQ ID NO: 24531 - DNA, 15 bp, Homo sapiens
caccttttactttct

SEQ ID NO: 24532 - DNA, 15 bp, Homo sapiens
acaccttttactttc

SEQ ID NO: 24533 - DNA, 15 bp, Homo sapiens
aacaccttttacttt

SEQ ID NO: 24534 - DNA, 15 bp, Homo sapiens
taacaccttttactt

SEQ ID NO: 24535 - DNA, 15 bp, Homo sapiens
ataacaccttttact

SEQ ID NO: 24536 - DNA, 15 bp, Homo sapiens
cataacaccttttac

SEQ ID NO: 24537 - DNA, 15 bp, Homo sapiens
ccataacacctttta

SEQ ID NO: 24538 - DNA, 15 bp, Homo sapiens
tccataacacctttt

SEQ ID NO: 24539 - DNA, 15 bp, Homo sapiens
ttccataacaccttt

SEQ ID NO: 24540 - DNA, 15 bp, Homo sapiens
tttccataacacctt

SEQ ID NO: 24541 - DNA, 15 bp, Homo sapiens
gtttccataacacct

SEQ ID NO: 24542 - DNA, 15 bp, Homo sapiens
agtttccataacacc

SEQ ID NO: 24543 - DNA, 15 bp, Homo sapiens
aagtttccataacac

SEQ ID NO: 24544 - DNA, 15 bp, Homo sapiens
taagtttccataaca

SEQ ID NO: 24545 - DNA, 15 bp, Homo sapiens
ttaagtttccataac

SEQ ID NO: 24546 - DNA, 15 bp, Homo sapiens
attaagtttccataa

SEQ ID NO: 24547 - DNA, 15 bp, Homo sapiens
cattaagtttccata

SEQ ID NO: 24548 - DNA, 15 bp, Homo sapiens
ccattaagtttccat

SEQ ID NO: 24549 - DNA, 15 bp, Homo sapiens
cccattaagtttcca

SEQ ID NO: 24550 - DNA, 15 bp, Homo sapiens
acccattaagtttcc

SEQ ID NO: 24551 - DNA, 15 bp, Homo sapiens
gacccattaagtttc

SEQ ID NO: 24552 - DNA, 15 bp, Homo sapiens
ggacccattaagttt

SEQ ID NO: 24553 - DNA, 15 bp, Homo sapiens
tggacccattaagtt

SEQ ID NO: 24554 - DNA, 15 bp, Homo sapiens
ctggacccattaagt

SEQ ID NO: 24555 - DNA, 15 bp, Homo sapiens
gctggacccattaag

SEQ ID NO: 24556 - DNA, 15 bp, Homo sapiens
agctggacccattaa

SEQ ID NO: 24557 - DNA, 15 bp, Homo sapiens
aagctggacccatta

SEQ ID NO: 24558 - DNA, 15 bp, Homo sapiens
taagctggacccatt

SEQ ID NO: 24559 - DNA, 15 bp, Homo sapiens
gtaagctggacccat

SEQ ID NO: 24560 - DNA, 15 bp, Homo sapiens
tgtaagctggaccca

SEQ ID NO: 24561 - DNA, 15 bp, Homo sapiens
ttgtaagctggaccc

SEQ ID NO: 24562 - DNA, 15 bp, Homo sapiens
tttgtaagctggacc

SEQ ID NO: 24563 - DNA, 15 bp, Homo sapiens
atttgtaagctggac

SEQ ID NO: 24564 - DNA, 15 bp, Homo sapiens
catttgtaagctgga

SEQ ID NO: 24565 - DNA, 15 bp, Homo sapiens
tcatttgtaagctgg

SEQ ID NO: 24566 - DNA, 15 bp, Homo sapiens
atcatttgtaagctg

SEQ ID NO: 24567 - DNA, 15 bp, Homo sapiens
gatcatttgtaagct

SEQ ID NO: 24568 - DNA, 15 bp, Homo sapiens
agatcatttgtaagc

SEQ ID NO: 24569 - DNA, 15 bp, Homo sapiens
tagatcatttgtaag

SEQ ID NO: 24570 - DNA, 15 bp, Homo sapiens
atagatcatttgtaa

SEQ ID NO: 24571 - DNA, 15 bp, Homo sapiens
catagatcatttgta

SEQ ID NO: 24572 - DNA, 15 bp, Homo sapiens
gcatagatcatttgt

SEQ ID NO: 24573 - DNA, 15 bp, Homo sapiens
tgcatagatcatttg

SEQ ID NO: 24574 - DNA, 15 bp, Homo sapiens
atgcatagatcattt

SEQ ID NO: 24575 - DNA, 15 bp, Homo sapiens
aatgcatagatcatt

SEQ ID NO: 24576 - DNA, 15 bp, Homo sapiens
aaatgcatagatcat

SEQ ID NO: 24577 - DNA, 15 bp, Homo sapiens
taaatgcatagatca

SEQ ID NO: 24578 - DNA, 15 bp, Homo sapiens
ctaaatgcatagatc

SEQ ID NO: 24579 - DNA, 15 bp, Homo sapiens
cctaaatgcatagat

SEQ ID NO: 24580 - DNA, 15 bp, Homo sapiens
ccctaaatgcataga

SEQ ID NO: 24581 - DNA, 15 bp, Homo sapiens
cccctaaatgcatag

SEQ ID NO: 24582 - DNA, 15 bp, Homo sapiens
acccctaaatgcata

SEQ ID NO: 24583 - DNA, 15 bp, Homo sapiens
gacccctaaatgcat

SEQ ID NO: 24584 - DNA, 15 bp, Homo sapiens
agacccctaaatgca

SEQ ID NO: 24585 - DNA, 15 bp, Homo sapiens
aagacccctaaatgc

SEQ ID NO: 24586 - DNA, 15 bp, Homo sapiens
aaagacccctaaatg

SEQ ID NO: 24587 - DNA, 15 bp, Homo sapiens
gaaagacccctaaat

SEQ ID NO: 24588 - DNA, 15 bp, Homo sapiens
agaaagacccctaaa

SEQ ID NO: 24589 - DNA, 15 bp, Homo sapiens
gagaaagacccctaa

SEQ ID NO: 24590 - DNA, 15 bp, Homo sapiens
agagaaagaccccta

SEQ ID NO: 24591 - DNA, 15 bp, Homo sapiens
aagagaaagacccct

SEQ ID NO: 24592 - DNA, 15 bp, Homo sapiens
aaagagaaagacccc

SEQ ID NO: 24593 - DNA, 15 bp, Homo sapiens
aaaagagaaagaccc

SEQ ID NO: 24594 - DNA, 15 bp, Homo sapiens
gaaaagagaaagacc

SEQ ID NO: 24595 - DNA, 15 bp, Homo sapiens
ggaaaagagaaagac

SEQ ID NO: 24596 - DNA, 15 bp, Homo sapiens
aggaaaagagaaaga

SEQ ID NO: 24597 - DNA, 15 bp, Homo sapiens
caggaaaagagaaag

SEQ ID NO: 24598 - DNA, 15 bp, Homo sapiens
tcaggaaaagagaaa

SEQ ID NO: 24599 - DNA, 15 bp, Homo sapiens
atcaggaaaagagaa

SEQ ID NO: 24600 - DNA, 15 bp, Homo sapiens
tatcaggaaaagaga

SEQ ID NO: 24601 - DNA, 15 bp, Homo sapiens
ttatcaggaaaagag

SEQ ID NO: 24602 - DNA, 15 bp, Homo sapiens
tttatcaggaaaaga

SEQ ID NO: 24603 - DNA, 15 bp, Homo sapiens
gtttatcaggaaaag

SEQ ID NO: 24604 - DNA, 15 bp, Homo sapiens
ggtttatcaggaaaa

SEQ ID NO: 24605 - DNA, 15 bp, Homo sapiens
aggtttatcaggaaa

SEQ ID NO: 24606 - DNA, 15 bp, Homo sapiens
gaggtttatcaggaa

SEQ ID NO: 24607 - DNA, 15 bp, Homo sapiens
agaggtttatcagga

SEQ ID NO: 24608 - DNA, 15 bp, Homo sapiens
gagaggtttatcagg

SEQ ID NO: 24609 - DNA, 15 bp, Homo sapiens
ggagaggtttatcag

SEQ ID NO: 24610 - DNA, 15 bp, Homo sapiens
aggagaggtttatca

SEQ ID NO: 24611 - DNA, 15 bp, Homo sapiens
taggagaggtttatc

SEQ ID NO: 24612 - DNA, 15 bp, Homo sapiens
gtaggagaggtttat

SEQ ID NO: 24613 - DNA, 15 bp, Homo sapiens
tgtaggagaggttta

SEQ ID NO: 24614 - DNA, 15 bp, Homo sapiens
ttgtaggagaggttt

SEQ ID NO: 24615 - DNA, 15 bp, Homo sapiens
tttgtaggagaggtt

SEQ ID NO: 24616 - DNA, 15 bp, Homo sapiens
ctttgtaggagaggt

SEQ ID NO: 24617 - DNA, 15 bp, Homo sapiens
tctttgtaggagagg

SEQ ID NO: 24618 - DNA, 15 bp, Homo sapiens
ctctttgtaggagag

SEQ ID NO: 24619 - DNA, 15 bp, Homo sapiens
gctctttgtaggaga

SEQ ID NO: 24620 - DNA, 15 bp, Homo sapiens
ggctctttgtaggag

SEQ ID NO: 24621 - DNA, 15 bp, Homo sapiens
aggctctttgtagga

SEQ ID NO: 24622 - DNA, 15 bp, Homo sapiens
aaggctctttgtagg

SEQ ID NO: 24623 - DNA, 15 bp, Homo sapiens
caaggctctttgtag

SEQ ID NO: 24624 - DNA, 15 bp, Homo sapiens
acaaggctctttgta

SEQ ID NO: 24625 - DNA, 15 bp, Homo sapiens
aacaaggctctttgt

SEQ ID NO: 24626 - DNA, 15 bp, Homo sapiens
caacaaggctctttg

SEQ ID NO: 24627 - DNA, 15 bp, Homo sapiens
gcaacaaggctcttt

SEQ ID NO: 24628 - DNA, 15 bp, Homo sapiens
cgcaacaaggctctt

SEQ ID NO: 24629 - DNA, 15 bp, Homo sapiens
ccgcaacaaggctct

SEQ ID NO: 24630 - DNA, 15 bp, Homo sapiens
tccgcaacaaggctc

SEQ ID NO: 24631 - DNA, 15 bp, Homo sapiens
atccgcaacaaggct

SEQ ID NO: 24632 - DNA, 15 bp, Homo sapiens
tatccgcaacaaggc

SEQ ID NO: 24633 - DNA, 15 bp, Homo sapiens
gtatccgcaacaagg

SEQ ID NO: 24634 - DNA, 15 bp, Homo sapiens
ggtatccgcaacaag

SEQ ID NO: 24635 - DNA, 15 bp, Homo sapiens
tggtatccgcaacaa

SEQ ID NO: 24636 - DNA, 15 bp, Homo sapiens
atggtatccgcaaca

SEQ ID NO: 24637 - DNA, 15 bp, Homo sapiens
tatggtatccgcaac

SEQ ID NO: 24638 - DNA, 15 bp, Homo sapiens
ctatggtatccgcaa

SEQ ID NO: 24639 - DNA, 15 bp, Homo sapiens
actatggtatccgca

SEQ ID NO: 24640 - DNA, 15 bp, Homo sapiens
cactatggtatccgc

SEQ ID NO: 24641 - DNA, 15 bp, Homo sapiens
acactatggtatccg

SEQ ID NO: 24642 - DNA, 15 bp, Homo sapiens
aacactatggtatcc

SEQ ID NO: 24643 - DNA, 15 bp, Homo sapiens
aaacactatggtatc

SEQ ID NO: 24644 - DNA, 15 bp, Homo sapiens
gaaacactatggtat

SEQ ID NO: 24645 - DNA, 15 bp, Homo sapiens
agaaacactatggta

SEQ ID NO: 24646 - DNA, 15 bp, Homo sapiens
aagaaacactatggt

SEQ ID NO: 24647 - DNA, 15 bp, Homo sapiens
aaagaaacactatgg

SEQ ID NO: 24648 - DNA, 15 bp, Homo sapiens
caaagaaacactatg

SEQ ID NO: 24649 - DNA, 15 bp, Homo sapiens
ccaaagaaacactat

SEQ ID NO: 24650 - DNA, 15 bp, Homo sapiens
tccaaagaaacacta

SEQ ID NO: 24651 - DNA, 15 bp, Homo sapiens
ctccaaagaaacact

SEQ ID NO: 24652 - DNA, 15 bp, Homo sapiens
cctccaaagaaacac

SEQ ID NO: 24653 - DNA, 15 bp, Homo sapiens
tcctccaaagaaaca

SEQ ID NO: 24654 - DNA, 15 bp, Homo sapiens
ttcctccaaagaaac

SEQ ID NO: 24655 - DNA, 15 bp, Homo sapiens
tttcctccaaagaaa

SEQ ID NO: 24656 - DNA, 15 bp, Homo sapiens
ttttcctccaaagaa

SEQ ID NO: 24657 - DNA, 15 bp, Homo sapiens
attttcctccaaaga

SEQ ID NO: 24658 - DNA, 15 bp, Homo sapiens
tattttcctccaaag

SEQ ID NO: 24659 - DNA, 15 bp, Homo sapiens
ttattttcctccaaa

SEQ ID NO: 24660 - DNA, 15 bp, Homo sapiens
tttattttcctccaa

SEQ ID NO: 24661 - DNA, 15 bp, Homo sapiens
ttttattttcctcca

SEQ ID NO: 24662 - DNA, 15 bp, Homo sapiens
tttttattttcctcc

SEQ ID NO: 24663 - DNA, 15 bp, Homo sapiens
gtttttattttcctc

SEQ ID NO: 24664 - DNA, 15 bp, Homo sapiens
agtttttattttcct

SEQ ID NO: 24665 - DNA, 15 bp, Homo sapiens
tagtttttattttcc

SEQ ID NO: 24666 - DNA, 15 bp, Homo sapiens
gtagtttttattttc

SEQ ID NO: 24667 - DNA, 15 bp, Homo sapiens
tgtagtttttatttt

SEQ ID NO: 24668 - DNA, 15 bp, Homo sapiens
ttgtagtttttattt

SEQ ID NO: 24669 - DNA, 15 bp, Homo sapiens
tttgtagtttttatt

SEQ ID NO: 24670 - DNA, 15 bp, Homo sapiens
ctttgtagtttttat

SEQ ID NO: 24671 - DNA, 15 bp, Homo sapiens
gctttgtagttttta

SEQ ID NO: 24672 - DNA, 15 bp, Homo sapiens
agctttgtagttttt

SEQ ID NO: 24673 - DNA, 15 bp, Homo sapiens
aagctttgtagtttt

SEQ ID NO: 24674 - DNA, 15 bp, Homo sapiens
aaagctttgtagttt

SEQ ID NO: 24675 - DNA, 15 bp, Homo sapiens
caaagctttgtagtt

SEQ ID NO: 24676 - DNA, 15 bp, Homo sapiens
acaaagctttgtagt

SEQ ID NO: 24677 - DNA, 15 bp, Homo sapiens
tacaaagctttgtag

SEQ ID NO: 24678 - DNA, 15 bp, Homo sapiens
atacaaagctttgta

SEQ ID NO: 24679 - DNA, 15 bp, Homo sapiens
aatacaaagctttgt

SEQ ID NO: 24680 - DNA, 15 bp, Homo sapiens
aaatacaaagctttg

SEQ ID NO: 24681 - DNA, 15 bp, Homo sapiens
aaaatacaaagcttt

SEQ ID NO: 24682 - DNA, 15 bp, Homo sapiens
aaaaatacaaagctt

SEQ ID NO: 24683 - DNA, 15 bp, Homo sapiens
aaaaaatacaaagct

SEQ ID NO: 24684 - DNA, 15 bp, Homo sapiens
caaaaaatacaaagc

SEQ ID NO: 24685 - DNA, 15 bp, Homo sapiens
gcaaaaaatacaaag

SEQ ID NO: 24686 - DNA, 15 bp, Homo sapiens
tgcaaaaaatacaaa

SEQ ID NO: 24687 - DNA, 15 bp, Homo sapiens
gtgcaaaaaatacaa

SEQ ID NO: 24688 - DNA, 15 bp, Homo sapiens
tgtgcaaaaaataca

SEQ ID NO: 24689 - DNA, 15 bp, Homo sapiens
ttgtgcaaaaaatac

SEQ ID NO: 24690 - DNA, 15 bp, Homo sapiens
gttgtgcaaaaaata

SEQ ID NO: 24691 - DNA, 15 bp, Homo sapiens
agttgtgcaaaaaat

SEQ ID NO: 24692 - DNA, 15 bp, Homo sapiens
cagttgtgcaaaaaa

SEQ ID NO: 24693 - DNA, 15 bp, Homo sapiens
ccagttgtgcaaaaa

SEQ ID NO: 24694 - DNA, 15 bp, Homo sapiens
tccagttgtgcaaaa

SEQ ID NO: 24695 - DNA, 15 bp, Homo sapiens
atccagttgtgcaaa

SEQ ID NO: 24696 - DNA, 15 bp, Homo sapiens
aatccagttgtgcaa

SEQ ID NO: 24697 - DNA, 15 bp, Homo sapiens
gaatccagttgtgca

SEQ ID NO: 24698 - DNA, 15 bp, Homo sapiens
tgaatccagttgtgc

SEQ ID NO: 24699 - DNA, 15 bp, Homo sapiens
ctgaatccagttgtg

SEQ ID NO: 24700 - DNA, 15 bp, Homo sapiens
tctgaatccagttgt

SEQ ID NO: 24701 - DNA, 15 bp, Homo sapiens
ttctgaatccagttg

SEQ ID NO: 24702 - DNA, 15 bp, Homo sapiens
attctgaatccagtt

SEQ ID NO: 24703 - DNA, 15 bp, Homo sapiens
tattctgaatccagt

SEQ ID NO: 24704 - DNA, 15 bp, Homo sapiens
atattctgaatccag

SEQ ID NO: 24705 - DNA, 15 bp, Homo sapiens
tatattctgaatcca

SEQ ID NO: 24706 - DNA, 15 bp, Homo sapiens
ttatattctgaatcc

SEQ ID NO: 24707 - DNA, 15 bp, Homo sapiens
cttatattctgaatc

SEQ ID NO: 24708 - DNA, 15 bp, Homo sapiens
acttatattctgaat

SEQ ID NO: 24709 - DNA, 15 bp, Homo sapiens
tacttatattctgaa

SEQ ID NO: 24710 - DNA, 15 bp, Homo sapiens
ttacttatattctga

SEQ ID NO: 24711 - DNA, 15 bp, Homo sapiens
attacttatattctg

SEQ ID NO: 24712 - DNA, 15 bp, Homo sapiens
tattacttatattct

SEQ ID NO: 24713 - DNA, 15 bp, Homo sapiens
ttattacttatattc

SEQ ID NO: 24714 - DNA, 15 bp, Homo sapiens
tttattacttatatt

SEQ ID NO: 24715 - DNA, 15 bp, Homo sapiens
ttttattacttatat

SEQ ID NO: 24716 - DNA, 15 bp, Homo sapiens
tttttattacttata

SEQ ID NO: 24717 - DNA, 15 bp, Homo sapiens
ttttttattacttat

SEQ ID NO: 24718 - DNA, 15 bp, Homo sapiens
cttttttattactta

SEQ ID NO: 24719 - DNA, 15 bp, Homo sapiens
ccttttttattactt

SEQ ID NO: 24720 - DNA, 15 bp, Homo sapiens
tccttttttattact

SEQ ID NO: 24721 - DNA, 15 bp, Homo sapiens
gtccttttttattac

SEQ ID NO: 24722 - DNA, 15 bp, Homo sapiens
tgtccttttttatta

SEQ ID NO: 24723 - DNA, 15 bp, Homo sapiens
ttgtccttttttatt

SEQ ID NO: 24724 - DNA, 15 bp, Homo sapiens
cttgtccttttttat

SEQ ID NO: 24725 - DNA, 15 bp, Homo sapiens
tcttgtcctttttta

SEQ ID NO: 24726 - DNA, 15 bp, Homo sapiens
ttcttgtcctttttt

SEQ ID NO: 24727 - DNA, 15 bp, Homo sapiens
gttcttgtccttttt

SEQ ID NO: 24728 - DNA, 15 bp, Homo sapiens
agttcttgtcctttt

SEQ ID NO: 24729 - DNA, 15 bp, Homo sapiens
aagttcttgtccttt

SEQ ID NO: 24730 - DNA, 15 bp, Homo sapiens
aaagttcttgtcctt

SEQ ID NO: 24731 - DNA, 15 bp, Homo sapiens
gaaagttcttgtcct

SEQ ID NO: 24732 - DNA, 15 bp, Homo sapiens
tgaaagttcttgtcc

SEQ ID NO: 24733 - DNA, 15 bp, Homo sapiens
ttgaaagttcttgtc

SEQ ID NO: 24734 - DNA, 15 bp, Homo sapiens
tttgaaagttcttgt

SEQ ID NO: 24735 - DNA, 15 bp, Homo sapiens
ttttgaaagttcttg

SEQ ID NO: 24736 - DNA, 15 bp, Homo sapiens
cttttgaaagttctt

SEQ ID NO: 24737 - DNA, 15 bp, Homo sapiens
gcttttgaaagttct

SEQ ID NO: 24738 - DNA, 15 bp, Homo sapiens
agcttttgaaagttc

SEQ ID NO: 24739 - DNA, 15 bp, Homo sapiens
tagcttttgaaagtt

SEQ ID NO: 24740 - DNA, 15 bp, Homo sapiens
ctagcttttgaaagt

SEQ ID NO: 24741 - DNA, 15 bp, Homo sapiens
tctagcttttgaaag

SEQ ID NO: 24742 - DNA, 15 bp, Homo sapiens
ttctagcttttgaaa

SEQ ID NO: 24743 - DNA, 15 bp, Homo sapiens
cttctagcttttgaa

SEQ ID NO: 24744 - DNA, 15 bp, Homo sapiens
gcttctagcttttga

SEQ ID NO: 24745 - DNA, 15 bp, Homo sapiens
ggcttctagcttttg

SEQ ID NO: 24746 - DNA, 15 bp, Homo sapiens
tggcttctagctttt

SEQ ID NO: 24747 - DNA, 15 bp, Homo sapiens
atggcttctagcttt

SEQ ID NO: 24748 - DNA, 15 bp, Homo sapiens
aatggcttctagctt

SEQ ID NO: 24749 - DNA, 15 bp, Homo sapiens
taatggcttctagct

SEQ ID NO: 24750 - DNA, 15 bp, Homo sapiens
ttaatggcttctagc

SEQ ID NO: 24751 - DNA, 15 bp, Homo sapiens
tttaatggcttctag

SEQ ID NO: 24752 - DNA, 15 bp, Homo sapiens
gtttaatggcttcta

SEQ ID NO: 24753 - DNA, 15 bp, Homo sapiens
agtttaatggcttct

SEQ ID NO: 24754 - DNA, 15 bp, Homo sapiens
cagtttaatggcttc

SEQ ID NO: 24755 - DNA, 15 bp, Homo sapiens
tcagtttaatggctt

SEQ ID NO: 24756 - DNA, 15 bp, Homo sapiens
ctcagtttaatggct

SEQ ID NO: 24757 - DNA, 15 bp, Homo sapiens
actcagtttaatggc

SEQ ID NO: 24758 - DNA, 15 bp, Homo sapiens
gactcagtttaatgg

SEQ ID NO: 24759 - DNA, 15 bp, Homo sapiens
tgactcagtttaatg

SEQ ID NO: 24760 - DNA, 15 bp, Homo sapiens
gtgactcagtttaat

SEQ ID NO: 24761 - DNA, 15 bp, Homo sapiens
agtgactcagtttaa

SEQ ID NO: 24762 - DNA, 15 bp, Homo sapiens
aagtgactcagttta

SEQ ID NO: 24763 - DNA, 15 bp, Homo sapiens
gaagtgactcagttt

SEQ ID NO: 24764 - DNA, 15 bp, Homo sapiens
tgaagtgactcagtt

SEQ ID NO: 24765 - DNA, 15 bp, Homo sapiens
ctgaagtgactcagt

SEQ ID NO: 24766 - DNA, 15 bp, Homo sapiens
cctgaagtgactcag

SEQ ID NO: 24767 - DNA, 15 bp, Homo sapiens
ccctgaagtgactca

SEQ ID NO: 24768 - DNA, 15 bp, Homo sapiens
accctgaagtgactc

SEQ ID NO: 24769 - DNA, 15 bp, Homo sapiens
aaccctgaagtgact

SEQ ID NO: 24770 - DNA, 15 bp, Homo sapiens
taaccctgaagtgac

SEQ ID NO: 24771 - DNA, 15 bp, Homo sapiens
ctaaccctgaagtga

SEQ ID NO: 24772 - DNA, 15 bp, Homo sapiens
tctaaccctgaagtg

SEQ ID NO: 24773 - DNA, 15 bp, Homo sapiens
gtctaaccctgaagt

SEQ ID NO: 24774 - DNA, 15 bp, Homo sapiens
agtctaaccctgaag

SEQ ID NO: 24775 - DNA, 15 bp, Homo sapiens
tagtctaaccctgaa

SEQ ID NO: 24776 - DNA, 15 bp, Homo sapiens
atagtctaaccctga

SEQ ID NO: 24777 - DNA, 15 bp, Homo sapiens
gatagtctaaccctg

SEQ ID NO: 24778 - DNA, 15 bp, Homo sapiens
tgatagtctaaccct

SEQ ID NO: 24779 - DNA, 15 bp, Homo sapiens
ctgatagtctaaccc

SEQ ID NO: 24780 - DNA, 15 bp, Homo sapiens
tctgatagtctaacc

SEQ ID NO: 24781 - DNA, 15 bp, Homo sapiens
ttctgatagtctaac

SEQ ID NO: 24782 - DNA, 15 bp, Homo sapiens
gttctgatagtctaa

SEQ ID NO: 24783 - DNA, 15 bp, Homo sapiens
agttctgatagtcta

SEQ ID NO: 24784 - DNA, 15 bp, Homo sapiens
cagttctgatagtct

SEQ ID NO: 24785 - DNA, 15 bp, Homo sapiens
ccagttctgatagtc

SEQ ID NO: 24786 - DNA, 15 bp, Homo sapiens
cccagttctgatagt

SEQ ID NO: 24787 - DNA, 15 bp, Homo sapiens
ccccagttctgatag

SEQ ID NO: 24788 - DNA, 15 bp, Homo sapiens
tccccagttctgata

SEQ ID NO: 24789 - DNA, 15 bp, Homo sapiens
atccccagttctgat

SEQ ID NO: 24790 - DNA, 15 bp, Homo sapiens
aatccccagttctga

SEQ ID NO: 24791 - DNA, 15 bp, Homo sapiens
aaatccccagttctg

SEQ ID NO: 24792 - DNA, 15 bp, Homo sapiens
taaatccccagttct

SEQ ID NO: 24793 - DNA, 15 bp, Homo sapiens
ctaaatccccagttc

SEQ ID NO: 24794 - DNA, 15 bp, Homo sapiens
tctaaatccccagtt

SEQ ID NO: 24795 - DNA, 15 bp, Homo sapiens
ttctaaatccccagt

SEQ ID NO: 24796 - DNA, 15 bp, Homo sapiens
tttctaaatccccag

SEQ ID NO: 24797 - DNA, 15 bp, Homo sapiens
ctttctaaatcccca

SEQ ID NO: 24798 - DNA, 15 bp, Homo sapiens
actttctaaatcccc

SEQ ID NO: 24799 - DNA, 15 bp, Homo sapiens
gactttctaaatccc

SEQ ID NO: 24800 - DNA, 15 bp, Homo sapiens
agactttctaaatcc

SEQ ID NO: 24801 - DNA, 15 bp, Homo sapiens
gagactttctaaatc

SEQ ID NO: 24802 - DNA, 15 bp, Homo sapiens
tgagactttctaaat

SEQ ID NO: 24803 - DNA, 15 bp, Homo sapiens
ctgagactttctaaa

SEQ ID NO: 24804 - DNA, 15 bp, Homo sapiens
tctgagactttctaa

SEQ ID NO: 24805 - DNA, 15 bp, Homo sapiens
ttctgagactttcta

SEQ ID NO: 24806 - DNA, 15 bp, Homo sapiens
attctgagactttct

SEQ ID NO: 24807 - DNA, 15 bp, Homo sapiens
cattctgagactttc

SEQ ID NO: 24808 - DNA, 15 bp, Homo sapiens
ccattctgagacttt

SEQ ID NO: 24809 - DNA, 15 bp, Homo sapiens
tccattctgagactt

SEQ ID NO: 24810 - DNA, 15 bp, Homo sapiens
ttccattctgagact

SEQ ID NO: 24811 - DNA, 15 bp, Homo sapiens
tttccattctgagac

SEQ ID NO: 24812 - DNA, 15 bp, Homo sapiens
atttccattctgaga

SEQ ID NO: 24813 - DNA, 15 bp, Homo sapiens
gatttccattctgag

SEQ ID NO: 24814 - DNA, 15 bp, Homo sapiens
cgatttccattctga

SEQ ID NO: 24815 - DNA, 15 bp, Homo sapiens
tcgatttccattctg

SEQ ID NO: 24816 - DNA, 15 bp, Homo sapiens
ttcgatttccattct

SEQ ID NO: 24817 - DNA, 15 bp, Homo sapiens
cttcgatttccattc

SEQ ID NO: 24818 - DNA, 15 bp, Homo sapiens
ccttcgatttccatt

SEQ ID NO: 24819 - DNA, 15 bp, Homo sapiens
tccttcgatttccat

SEQ ID NO: 24820 - DNA, 15 bp, Homo sapiens
gtccttcgatttcca

SEQ ID NO: 24821 - DNA, 15 bp, Homo sapiens
tgtccttcgatttcc

SEQ ID NO: 24822 - DNA, 15 bp, Homo sapiens
gtgtccttcgatttc

SEQ ID NO: 24823 - DNA, 15 bp, Homo sapiens
ggtgtccttcgattt

SEQ ID NO: 24824 - DNA, 15 bp, Homo sapiens
tggtgtccttcgatt

SEQ ID NO: 24825 - DNA, 15 bp, Homo sapiens
ttggtgtccttcgat

SEQ ID NO: 24826 - DNA, 15 bp, Homo sapiens
tttggtgtccttcga

SEQ ID NO: 24827 - DNA, 15 bp, Homo sapiens
ctttggtgtccttcg

SEQ ID NO: 24828 - DNA, 15 bp, Homo sapiens
tctttggtgtccttc

SEQ ID NO: 24829 - DNA, 15 bp, Homo sapiens
gtctttggtgtcctt

SEQ ID NO: 24830 - DNA, 15 bp, Homo sapiens
tgtctttggtgtcct

SEQ ID NO: 24831 - DNA, 15 bp, Homo sapiens
ttgtctttggtgtcc

SEQ ID NO: 24832 - DNA, 15 bp, Homo sapiens
tttgtctttggtgtc

SEQ ID NO: 24833 - DNA, 15 bp, Homo sapiens
atttgtctttggtgt

SEQ ID NO: 24834 - DNA, 15 bp, Homo sapiens
aatttgtctttggtg

SEQ ID NO: 24835 - DNA, 15 bp, Homo sapiens
gaatttgtctttggt

SEQ ID NO: 24836 - DNA, 15 bp, Homo sapiens
cgaatttgtctttgg

SEQ ID NO: 24837 - DNA, 15 bp, Homo sapiens
ccgaatttgtctttg

SEQ ID NO: 24838 - DNA, 15 bp, Homo sapiens
gccgaatttgtcttt

SEQ ID NO: 24839 - DNA, 15 bp, Homo sapiens
ggccgaatttgtctt

SEQ ID NO: 24840 - DNA, 15 bp, Homo sapiens
aggccgaatttgtct

SEQ ID NO: 24841 - DNA, 15 bp, Homo sapiens
aaggccgaatttgtc

SEQ ID NO: 24842 - DNA, 15 bp, Homo sapiens
aaaggccgaatttgt

SEQ ID NO: 24843 - DNA, 15 bp, Homo sapiens
aaaaggccgaatttg

SEQ ID NO: 24844 - DNA, 15 bp, Homo sapiens
aaaaaggccgaattt

SEQ ID NO: 24845 - DNA, 15 bp, Homo sapiens
gaaaaaggccgaatt

SEQ ID NO: 24846 - DNA, 15 bp, Homo sapiens
tgaaaaaggccgaat

SEQ ID NO: 24847 - DNA, 15 bp, Homo sapiens
ttgaaaaaggccgaa

SEQ ID NO: 24848 - DNA, 15 bp, Homo sapiens
tttgaaaaaggccga

SEQ ID NO: 24849 - DNA, 15 bp, Homo sapiens
ttttgaaaaaggccg

SEQ ID NO: 24850 - DNA, 15 bp, Homo sapiens
attttgaaaaaggcc

SEQ ID NO: 24851 - DNA, 15 bp, Homo sapiens
aattttgaaaaaggc

SEQ ID NO: 24852 - DNA, 15 bp, Homo sapiens
aaattttgaaaaagg

SEQ ID NO: 24853 - DNA, 15 bp, Homo sapiens
aaaattttgaaaaag

SEQ ID NO: 24854 - DNA, 15 bp, Homo sapiens
taaaattttgaaaaa

SEQ ID NO: 24855 - DNA, 15 bp, Homo sapiens
ataaaattttgaaaa

SEQ ID NO: 24856 - DNA, 15 bp, Homo sapiens
aataaaattttgaaa

SEQ ID NO: 24857 - DNA, 15 bp, Homo sapiens
gaataaaattttgaa

SEQ ID NO: 24858 - DNA, 15 bp, Homo sapiens
agaataaaattttga

SEQ ID NO: 24859 - DNA, 15 bp, Homo sapiens
tagaataaaattttg

SEQ ID NO: 24860 - DNA, 15 bp, Homo sapiens
ctagaataaaatttt

SEQ ID NO: 24861 - DNA, 15 bp, Homo sapiens
actagaataaaattt

SEQ ID NO: 24862 - DNA, 15 bp, Homo sapiens
aactagaataaaatt

SEQ ID NO: 24863 - DNA, 15 bp, Homo sapiens
aaactagaataaaat

SEQ ID NO: 24864 - DNA, 15 bp, Homo sapiens
taaactagaataaaa

SEQ ID NO: 24865 - DNA, 15 bp, Homo sapiens
ttaaactagaataaa

SEQ ID NO: 24866 - DNA, 15 bp, Homo sapiens
gttaaactagaataa

SEQ ID NO: 24867 - DNA, 15 bp, Homo sapiens
tgttaaactagaata

SEQ ID NO: 24868 - DNA, 15 bp, Homo sapiens
atgttaaactagaat

SEQ ID NO: 24869 - DNA, 15 bp, Homo sapiens
tatgttaaactagaa

SEQ ID NO: 24870 - DNA, 15 bp, Homo sapiens
atatgttaaactaga

SEQ ID NO: 24871 - DNA, 15 bp, Homo sapiens
aatatgttaaactag

SEQ ID NO: 24872 - DNA, 15 bp, Homo sapiens
gaatatgttaaacta

SEQ ID NO: 24873 - DNA, 15 bp, Homo sapiens
tgaatatgttaaact

SEQ ID NO: 24874 - DNA, 15 bp, Homo sapiens
ttgaatatgttaaac

SEQ ID NO: 24875 - DNA, 15 bp, Homo sapiens
tttgaatatgttaaa

SEQ ID NO: 24876 - DNA, 15 bp, Homo sapiens
ctttgaatatgttaa

SEQ ID NO: 24877 - DNA, 15 bp, Homo sapiens
tctttgaatatgtta

SEQ ID NO: 24878 - DNA, 15 bp, Homo sapiens
ttctttgaatatgtt

SEQ ID NO: 24879 - DNA, 15 bp, Homo sapiens
tttctttgaatatgt

SEQ ID NO: 24880 - DNA, 15 bp, Homo sapiens
ctttctttgaatatg

SEQ ID NO: 24881 - DNA, 15 bp, Homo sapiens
cctttctttgaatat

SEQ ID NO: 24882 - DNA, 15 bp, Homo sapiens
ccctttctttgaata

SEQ ID NO: 24883 - DNA, 15 bp, Homo sapiens
tccctttctttgaat

SEQ ID NO: 24884 - DNA, 15 bp, Homo sapiens
ttccctttctttgaa

SEQ ID NO: 24885 - DNA, 15 bp, Homo sapiens
cttccctttctttga

SEQ ID NO: 24886 - DNA, 15 bp, Homo sapiens
ccttccctttctttg

SEQ ID NO: 24887 - DNA, 15 bp, Homo sapiens
tccttccctttcttt

SEQ ID NO: 24888 - DNA, 15 bp, Homo sapiens
ttccttccctttctt

SEQ ID NO: 24889 - DNA, 15 bp, Homo sapiens
tttccttccctttct

SEQ ID NO: 24890 - DNA, 15 bp, Homo sapiens
atttccttccctttc

SEQ ID NO: 24891 - DNA, 15 bp, Homo sapiens
aatttccttcccttt

SEQ ID NO: 24892 - DNA, 15 bp, Homo sapiens
gaatttccttccctt

SEQ ID NO: 24893 - DNA, 15 bp, Homo sapiens
agaatttccttccct

SEQ ID NO: 24894 - DNA, 15 bp, Homo sapiens
aagaatttccttccc

SEQ ID NO: 24895 - DNA, 15 bp, Homo sapiens
aaagaatttccttcc

SEQ ID NO: 24896 - DNA, 15 bp, Homo sapiens
aaaagaatttccttc

SEQ ID NO: 24897 - DNA, 15 bp, Homo sapiens
gaaaagaatttcctt

SEQ ID NO: 24898 - DNA, 15 bp, Homo sapiens
tgaaaagaatttcct

SEQ ID NO: 24899 - DNA, 15 bp, Homo sapiens
atgaaaagaatttcc

SEQ ID NO: 24900 - DNA, 15 bp, Homo sapiens
aatgaaaagaatttc

SEQ ID NO: 24901 - DNA, 15 bp, Homo sapiens
gaatgaaaagaattt

SEQ ID NO: 24902 - DNA, 15 bp, Homo sapiens
ggaatgaaaagaatt

SEQ ID NO: 24903 - DNA, 15 bp, Homo sapiens
aggaatgaaaagaat

SEQ ID NO: 24904 - DNA, 15 bp, Homo sapiens
caggaatgaaaagaa

SEQ ID NO: 24905 - DNA, 15 bp, Homo sapiens
acaggaatgaaaaga

SEQ ID NO: 24906 - DNA, 15 bp, Homo sapiens
cacaggaatgaaaag

SEQ ID NO: 24907 - DNA, 15 bp, Homo sapiens
acacaggaatgaaaa

SEQ ID NO: 24908 - DNA, 15 bp, Homo sapiens
cacacaggaatgaaa

SEQ ID NO: 24909 - DNA, 15 bp, Homo sapiens
acacacaggaatgaa

SEQ ID NO: 24910 - DNA, 15 bp, Homo sapiens
tacacacaggaatga

SEQ ID NO: 24911 - DNA, 15 bp, Homo sapiens
ctacacacaggaatg

SEQ ID NO: 24912 - DNA, 15 bp, Homo sapiens
actacacacaggaat

SEQ ID NO: 24913 - DNA, 15 bp, Homo sapiens
cactacacacaggaa

SEQ ID NO: 24914 - DNA, 15 bp, Homo sapiens
tcactacacacagga

SEQ ID NO: 24915 - DNA, 15 bp, Homo sapiens
gtcactacacacagg

SEQ ID NO: 24916 - DNA, 15 bp, Homo sapiens
agtcactacacacag

SEQ ID NO: 24917 - DNA, 15 bp, Homo sapiens
aagtcactacacaca

SEQ ID NO: 24918 - DNA, 15 bp, Homo sapiens
gaagtcactacacac

SEQ ID NO: 24919 - DNA, 15 bp, Homo sapiens
ggaagtcactacaca

SEQ ID NO: 24920 - DNA, 15 bp, Homo sapiens
aggaagtcactacac

SEQ ID NO: 24921 - DNA, 15 bp, Homo sapiens
caggaagtcactaca

SEQ ID NO: 24922 - DNA, 15 bp, Homo sapiens
gcaggaagtcactac

SEQ ID NO: 24923 - DNA, 15 bp, Homo sapiens
agcaggaagtcacta

SEQ ID NO: 24924 - DNA, 15 bp, Homo sapiens
aagcaggaagtcact

SEQ ID NO: 24925 - DNA, 15 bp, Homo sapiens
aaagcaggaagtcac

SEQ ID NO: 24926 - DNA, 15 bp, Homo sapiens
taaagcaggaagtca

SEQ ID NO: 24927 - DNA, 15 bp, Homo sapiens
ttaaagcaggaagtc

SEQ ID NO: 24928 - DNA, 15 bp, Homo sapiens
cttaaagcaggaagt

SEQ ID NO: 24929 - DNA, 15 bp, Homo sapiens
tcttaaagcaggaag

SEQ ID NO: 24930 - DNA, 15 bp, Homo sapiens
ttcttaaagcaggaa

SEQ ID NO: 24931 - DNA, 15 bp, Homo sapiens
gttcttaaagcagga

SEQ ID NO: 24932 - DNA, 15 bp, Homo sapiens
agttcttaaagcagg

SEQ ID NO: 24933 - DNA, 15 bp, Homo sapiens
aagttcttaaagcag

SEQ ID NO: 24934 - DNA, 15 bp, Homo sapiens
taagttcttaaagca

SEQ ID NO: 24935 - DNA, 15 bp, Homo sapiens
ctaagttcttaaagc

SEQ ID NO: 24936 - DNA, 15 bp, Homo sapiens
cctaagttcttaaag

SEQ ID NO: 24937 - DNA, 15 bp, Homo sapiens
tcctaagttcttaaa

SEQ ID NO: 24938 - DNA, 15 bp, Homo sapiens
gtcctaagttcttaa

SEQ ID NO: 24939 - DNA, 15 bp, Homo sapiens
agtcctaagttctta

SEQ ID NO: 24940 - DNA, 15 bp, Homo sapiens
aagtcctaagttctt

SEQ ID NO: 24941 - DNA, 15 bp, Homo sapiens
gaagtcctaagttct

SEQ ID NO: 24942 - DNA, 15 bp, Homo sapiens
tgaagtcctaagttc

SEQ ID NO: 24943 - DNA, 15 bp, Homo sapiens
ctgaagtcctaagtt

SEQ ID NO: 24944 - DNA, 15 bp, Homo sapiens
gctgaagtcctaagt

SEQ ID NO: 24945 - DNA, 15 bp, Homo sapiens
agctgaagtcctaag

SEQ ID NO: 24946 - DNA, 15 bp, Homo sapiens
cagctgaagtcctaa

SEQ ID NO: 24947 - DNA, 15 bp, Homo sapiens
acagctgaagtccta

SEQ ID NO: 24948 - DNA, 15 bp, Homo sapiens
tacagctgaagtcct

SEQ ID NO: 24949 - DNA, 15 bp, Homo sapiens
gtacagctgaagtcc

SEQ ID NO: 24950 - DNA, 15 bp, Homo sapiens
agtacagctgaagtc

SEQ ID NO: 24951 - DNA, 15 bp, Homo sapiens
tagtacagctgaagt

SEQ ID NO: 24952 - DNA, 15 bp, Homo sapiens
atagtacagctgaag

SEQ ID NO: 24953 - DNA, 15 bp, Homo sapiens
gatagtacagctgaa

SEQ ID NO: 24954 - DNA, 15 bp, Homo sapiens
tgatagtacagctga

SEQ ID NO: 24955 - DNA, 15 bp, Homo sapiens
ctgatagtacagctg

SEQ ID NO: 24956 - DNA, 15 bp, Homo sapiens
actgatagtacagct

SEQ ID NO: 24957 - DNA, 15 bp, Homo sapiens
tactgatagtacagc

SEQ ID NO: 24958 - DNA, 15 bp, Homo sapiens
atactgatagtacag

SEQ ID NO: 24959 - DNA, 15 bp, Homo sapiens
aatactgatagtaca

SEQ ID NO: 24960 - DNA, 15 bp, Homo sapiens
caatactgatagtac

SEQ ID NO: 24961 - DNA, 15 bp, Homo sapiens
acaatactgatagta

SEQ ID NO: 24962 - DNA, 15 bp, Homo sapiens
tacaatactgatagt

SEQ ID NO: 24963 - DNA, 15 bp, Homo sapiens
ctacaatactgatag

SEQ ID NO: 24964 - DNA, 15 bp, Homo sapiens
cctacaatactgata

SEQ ID NO: 24965 - DNA, 15 bp, Homo sapiens
gcctacaatactgat

SEQ ID NO: 24966 - DNA, 15 bp, Homo sapiens
ggcctacaatactga

SEQ ID NO: 24967 - DNA, 15 bp, Homo sapiens
tggcctacaatactg

SEQ ID NO: 24968 - DNA, 15 bp, Homo sapiens
gtggcctacaatact

SEQ ID NO: 24969 - DNA, 15 bp, Homo sapiens
agtggcctacaatac

SEQ ID NO: 24970 - DNA, 15 bp, Homo sapiens
aagtggcctacaata

SEQ ID NO: 24971 - DNA, 15 bp, Homo sapiens
taagtggcctacaat

SEQ ID NO: 24972 - DNA, 15 bp, Homo sapiens
ttaagtggcctacaa

SEQ ID NO: 24973 - DNA, 15 bp, Homo sapiens
gttaagtggcctaca

SEQ ID NO: 24974 - DNA, 15 bp, Homo sapiens
tgttaagtggcctac

SEQ ID NO: 24975 - DNA, 15 bp, Homo sapiens
atgttaagtggccta

SEQ ID NO: 24976 - DNA, 15 bp, Homo sapiens
aatgttaagtggcct

SEQ ID NO: 24977 - DNA, 15 bp, Homo sapiens
taatgttaagtggcc

SEQ ID NO: 24978 - DNA, 15 bp, Homo sapiens
ataatgttaagtggc

SEQ ID NO: 24979 - DNA, 15 bp, Homo sapiens
aataatgttaagtgg

SEQ ID NO: 24980 - DNA, 15 bp, Homo sapiens
taataatgttaagtg

SEQ ID NO: 24981 - DNA, 15 bp, Homo sapiens
ataataatgttaagt

SEQ ID NO: 24982 - DNA, 15 bp, Homo sapiens
cataataatgttaag

SEQ ID NO: 24983 - DNA, 15 bp, Homo sapiens
ccataataatgttaa

SEQ ID NO: 24984 - DNA, 15 bp, Homo sapiens
accataataatgtta

SEQ ID NO: 24985 - DNA, 15 bp, Homo sapiens
aaccataataatgtt

SEQ ID NO: 24986 - DNA, 15 bp, Homo sapiens
taaccataataatgt

SEQ ID NO: 24987 - DNA, 15 bp, Homo sapiens
ttaaccataataatg

SEQ ID NO: 24988 - DNA, 15 bp, Homo sapiens
tttaaccataataat

SEQ ID NO: 24989 - DNA, 15 bp, Homo sapiens
ctttaaccataataa

SEQ ID NO: 24990 - DNA, 15 bp, Homo sapiens
actttaaccataata

SEQ ID NO: 24991 - DNA, 15 bp, Homo sapiens
aactttaaccataat

SEQ ID NO: 24992 - DNA, 15 bp, Homo sapiens
caactttaaccataa

SEQ ID NO: 24993 - DNA, 15 bp, Homo sapiens
ccaactttaaccata

SEQ ID NO: 24994 - DNA, 15 bp, Homo sapiens
gccaactttaaccat

SEQ ID NO: 24995 - DNA, 15 bp, Homo sapiens
tgccaactttaacca

SEQ ID NO: 24996 - DNA, 15 bp, Homo sapiens
atgccaactttaacc

SEQ ID NO: 24997 - DNA, 15 bp, Homo sapiens
aatgccaactttaac

SEQ ID NO: 24998 - DNA, 15 bp, Homo sapiens
caatgccaactttaa

SEQ ID NO: 24999 - DNA, 15 bp, Homo sapiens
ccaatgccaacttta

SEQ ID NO: 25000 - DNA, 15 bp, Homo sapiens
tccaatgccaacttt

SEQ ID NO: 25001 - DNA, 15 bp, Homo sapiens
ctccaatgccaactt

SEQ ID NO: 25002 - DNA, 15 bp, Homo sapiens
tctccaatgccaact

SEQ ID NO: 25003 - DNA, 15 bp, Homo sapiens
ctctccaatgccaac

SEQ ID NO: 25004 - DNA, 15 bp, Homo sapiens
tctctccaatgccaa

SEQ ID NO: 25005 - DNA, 15 bp, Homo sapiens
ctctctccaatgcca

SEQ ID NO: 25006 - DNA, 15 bp, Homo sapiens
gctctctccaatgcc

SEQ ID NO: 25007 - DNA, 15 bp, Homo sapiens
ggctctctccaatgc

SEQ ID NO: 25008 - DNA, 15 bp, Homo sapiens
aggctctctccaatg

SEQ ID NO: 25009 - DNA, 15 bp, Homo sapiens
taggctctctccaat

SEQ ID NO: 25010 - DNA, 15 bp, Homo sapiens
ctaggctctctccaa

SEQ ID NO: 25011 - DNA, 15 bp, Homo sapiens
cctaggctctctcca

SEQ ID NO: 25012 - DNA, 15 bp, Homo sapiens
tcctaggctctctcc

SEQ ID NO: 25013 - DNA, 15 bp, Homo sapiens
ttcctaggctctctc

SEQ ID NO: 25014 - DNA, 15 bp, Homo sapiens
gttcctaggctctct

SEQ ID NO: 25015 - DNA, 15 bp, Homo sapiens
ggttcctaggctctc

SEQ ID NO: 25016 - DNA, 15 bp, Homo sapiens
aggttcctaggctct

SEQ ID NO: 25017 - DNA, 15 bp, Homo sapiens
taggttcctaggctc

SEQ ID NO: 25018 - DNA, 15 bp, Homo sapiens
ttaggttcctaggct

SEQ ID NO: 25019 - DNA, 15 bp, Homo sapiens
gttaggttcctaggc

SEQ ID NO: 25020 - DNA, 15 bp, Homo sapiens
agttaggttcctagg

SEQ ID NO: 25021 - DNA, 15 bp, Homo sapiens
cagttaggttcctag

SEQ ID NO: 25022 - DNA, 15 bp, Homo sapiens
gcagttaggttccta

SEQ ID NO: 25023 - DNA, 15 bp, Homo sapiens
ggcagttaggttcct

SEQ ID NO: 25024 - DNA, 15 bp, Homo sapiens
aggcagttaggttcc

SEQ ID NO: 25025 - DNA, 15 bp, Homo sapiens
caggcagttaggttc

SEQ ID NO: 25026 - DNA, 15 bp, Homo sapiens
acaggcagttaggtt

SEQ ID NO: 25027 - DNA, 15 bp, Homo sapiens
aacaggcagttaggt

SEQ ID NO: 25028 - DNA, 15 bp, Homo sapiens
aaacaggcagttagg

SEQ ID NO: 25029 - DNA, 15 bp, Homo sapiens
caaacaggcagttag

SEQ ID NO: 25030 - DNA, 15 bp, Homo sapiens
acaaacaggcagtta

SEQ ID NO: 25031 - DNA, 15 bp, Homo sapiens
aacaaacaggcagtt

SEQ ID NO: 25032 - DNA, 15 bp, Homo sapiens
aaacaaacaggcagt

SEQ ID NO: 25033 - DNA, 15 bp, Homo sapiens
aaaacaaacaggcag

SEQ ID NO: 25034 - DNA, 15 bp, Homo sapiens
aaaaacaaacaggca

SEQ ID NO: 25035 - DNA, 15 bp, Homo sapiens
taaaaacaaacaggc

SEQ ID NO: 25036 - DNA, 15 bp, Homo sapiens
ataaaaacaaacagg

SEQ ID NO: 25037 - DNA, 15 bp, Homo sapiens
tataaaaacaaacag

SEQ ID NO: 25038 - DNA, 15 bp, Homo sapiens
atataaaaacaaaca

SEQ ID NO: 25039 - DNA, 15 bp, Homo sapiens
aatataaaaacaaac

SEQ ID NO: 25040 - DNA, 15 bp, Homo sapiens
aaatataaaaacaaa

SEQ ID NO: 25041 - DNA, 15 bp, Homo sapiens
gaaatataaaaacaa

SEQ ID NO: 25042 - DNA, 15 bp, Homo sapiens
ggaaatataaaaaca

SEQ ID NO: 25043 - DNA, 15 bp, Homo sapiens
tggaaatataaaaac

SEQ ID NO: 25044 - DNA, 15 bp, Homo sapiens
ttggaaatataaaaa

SEQ ID NO: 25045 - DNA, 15 bp, Homo sapiens
gttggaaatataaaa

SEQ ID NO: 25046 - DNA, 15 bp, Homo sapiens
ggttggaaatataaa

SEQ ID NO: 25047 - DNA, 15 bp, Homo sapiens
tggttggaaatataa

SEQ ID NO: 25048 - DNA, 15 bp, Homo sapiens
atggttggaaatata

SEQ ID NO: 25049 - DNA, 15 bp, Homo sapiens
aatggttggaaatat

SEQ ID NO: 25050 - DNA, 15 bp, Homo sapiens
caatggttggaaata

SEQ ID NO: 25051 - DNA, 15 bp, Homo sapiens
ccaatggttggaaat

SEQ ID NO: 25052 - DNA, 15 bp, Homo sapiens
tccaatggttggaaa

SEQ ID NO: 25053 - DNA, 15 bp, Homo sapiens
atccaatggttggaa

SEQ ID NO: 25054 - DNA, 15 bp, Homo sapiens
aatccaatggttgga

SEQ ID NO: 25055 - DNA, 15 bp, Homo sapiens
gaatccaatggttgg

SEQ ID NO: 25056 - DNA, 15 bp, Homo sapiens
ggaatccaatggttg

SEQ ID NO: 25057 - DNA, 15 bp, Homo sapiens
gggaatccaatggtt

SEQ ID NO: 25058 - DNA, 15 bp, Homo sapiens
tgggaatccaatggt

SEQ ID NO: 25059 - DNA, 15 bp, Homo sapiens
ttgggaatccaatgg

SEQ ID NO: 25060 - DNA, 15 bp, Homo sapiens
cttgggaatccaatg

SEQ ID NO: 25061 - DNA, 15 bp, Homo sapiens
acttgggaatccaat

SEQ ID NO: 25062 - DNA, 15 bp, Homo sapiens
aacttgggaatccaa

SEQ ID NO: 25063 - DNA, 15 bp, Homo sapiens
taacttgggaatcca

SEQ ID NO: 25064 - DNA, 15 bp, Homo sapiens
ttaacttgggaatcc

SEQ ID NO: 25065 - DNA, 15 bp, Homo sapiens
attaacttgggaatc

SEQ ID NO: 25066 - DNA, 15 bp, Homo sapiens
cattaacttgggaat

SEQ ID NO: 25067 - DNA, 15 bp, Homo sapiens
tcattaacttgggaa

SEQ ID NO: 25068 - DNA, 15 bp, Homo sapiens
ttcattaacttggga

SEQ ID NO: 25069 - DNA, 15 bp, Homo sapiens
cttcattaacttggg

SEQ ID NO: 25070 - DNA, 15 bp, Homo sapiens
acttcattaacttgg

SEQ ID NO: 25071 - DNA, 15 bp, Homo sapiens
gacttcattaacttg

SEQ ID NO: 25072 - DNA, 15 bp, Homo sapiens
agacttcattaactt

SEQ ID NO: 25073 - DNA, 15 bp, Homo sapiens
cagacttcattaact

SEQ ID NO: 25074 - DNA, 15 bp, Homo sapiens
acagacttcattaac

SEQ ID NO: 25075 - DNA, 15 bp, Homo sapiens
aacagacttcattaa

SEQ ID NO: 25076 - DNA, 15 bp, Homo sapiens
aaacagacttcatta

SEQ ID NO: 25077 - DNA, 15 bp, Homo sapiens
taaacagacttcatt

SEQ ID NO: 25078 - DNA, 15 bp, Homo sapiens
ataaacagacttcat

SEQ ID NO: 25079 - DNA, 15 bp, Homo sapiens
aataaacagacttca

SEQ ID NO: 25080 - DNA, 15 bp, Homo sapiens
taataaacagacttc

SEQ ID NO: 25081 - DNA, 15 bp, Homo sapiens
ctaataaacagactt

SEQ ID NO: 25082 - DNA, 15 bp, Homo sapiens
actaataaacagact

SEQ ID NO: 25083 - DNA, 15 bp, Homo sapiens
aactaataaacagac

SEQ ID NO: 25084 - DNA, 15 bp, Homo sapiens
caactaataaacaga

SEQ ID NO: 25085 - DNA, 15 bp, Homo sapiens
tcaactaataaacag

SEQ ID NO: 25086 - DNA, 15 bp, Homo sapiens
ctcaactaataaaca

SEQ ID NO: 25087 - DNA, 15 bp, Homo sapiens
cctcaactaataaac

SEQ ID NO: 25088 - DNA, 15 bp, Homo sapiens
ccctcaactaataaa

SEQ ID NO: 25089 - DNA, 15 bp, Homo sapiens
accctcaactaataa

SEQ ID NO: 25090 - DNA, 15 bp, Homo sapiens
taccctcaactaata

SEQ ID NO: 25091 - DNA, 15 bp, Homo sapiens
ctaccctcaactaat

SEQ ID NO: 25092 - DNA, 15 bp, Homo sapiens
gctaccctcaactaa

SEQ ID NO: 25093 - DNA, 15 bp, Homo sapiens
agctaccctcaacta

SEQ ID NO: 25094 - DNA, 15 bp, Homo sapiens
gagctaccctcaact

SEQ ID NO: 25095 - DNA, 15 bp, Homo sapiens
agagctaccctcaac

SEQ ID NO: 25096 - DNA, 15 bp, Homo sapiens
aagagctaccctcaa

SEQ ID NO: 25097 - DNA, 15 bp, Homo sapiens
taagagctaccctca

SEQ ID NO: 25098 - DNA, 15 bp, Homo sapiens
ttaagagctaccctc

SEQ ID NO: 25099 - DNA, 15 bp, Homo sapiens
attaagagctaccct

SEQ ID NO: 25100 - DNA, 15 bp, Homo sapiens
cattaagagctaccc

SEQ ID NO: 25101 - DNA, 15 bp, Homo sapiens
gcattaagagctacc

SEQ ID NO: 25102 - DNA, 15 bp, Homo sapiens
tgcattaagagctac

SEQ ID NO: 25103 - DNA, 15 bp, Homo sapiens
atgcattaagagcta

SEQ ID NO: 25104 - DNA, 15 bp, Homo sapiens
tatgcattaagagct

SEQ ID NO: 25105 - DNA, 15 bp, Homo sapiens
atatgcattaagagc

SEQ ID NO: 25106 - DNA, 15 bp, Homo sapiens
tatatgcattaagag

SEQ ID NO: 25107 - DNA, 15 bp, Homo sapiens
atatatgcattaaga

SEQ ID NO: 25108 - DNA, 15 bp, Homo sapiens
aatatatgcattaag

SEQ ID NO: 25109 - DNA, 15 bp, Homo sapiens
aaatatatgcattaa

SEQ ID NO: 25110 - DNA, 15 bp, Homo sapiens
aaaatatatgcatta

SEQ ID NO: 25111 - DNA, 15 bp, Homo sapiens
taaaatatatgcatt

SEQ ID NO: 25112 - DNA, 15 bp, Homo sapiens
ttaaaatatatgcat

SEQ ID NO: 25113 - DNA, 15 bp, Homo sapiens
attaaaatatatgca

SEQ ID NO: 25114 - DNA, 15 bp, Homo sapiens
cattaaaatatatgc

SEQ ID NO: 25115 - DNA, 15 bp, Homo sapiens
gcattaaaatatatg

SEQ ID NO: 25116 - DNA, 15 bp, Homo sapiens
ggcattaaaatatat

SEQ ID NO: 25117 - DNA, 15 bp, Homo sapiens
gggcattaaaatata

SEQ ID NO: 25118 - DNA, 15 bp, Homo sapiens
ggggcattaaaatat

SEQ ID NO: 25119 - DNA, 15 bp, Homo sapiens
aggggcattaaaata

SEQ ID NO: 25120 - DNA, 15 bp, Homo sapiens
aaggggcattaaaat

SEQ ID NO: 25121 - DNA, 15 bp, Homo sapiens
gaaggggcattaaaa

SEQ ID NO: 25122 - DNA, 15 bp, Homo sapiens
ggaaggggcattaaa

SEQ ID NO: 25123 - DNA, 15 bp, Homo sapiens
gggaaggggcattaa

SEQ ID NO: 25124 - DNA, 15 bp, Homo sapiens
ggggaaggggcatta

SEQ ID NO: 25125 - DNA, 15 bp, Homo sapiens
tggggaaggggcatt

SEQ ID NO: 25126 - DNA, 15 bp, Homo sapiens
gtggggaaggggcat

SEQ ID NO: 25127 - DNA, 15 bp, Homo sapiens
tgtggggaaggggca

SEQ ID NO: 25128 - DNA, 15 bp, Homo sapiens
atgtggggaaggggc

SEQ ID NO: 25129 - DNA, 15 bp, Homo sapiens
catgtggggaagggg

SEQ ID NO: 25130 - DNA, 15 bp, Homo sapiens
ccatgtggggaaggg

SEQ ID NO: 25131 - DNA, 15 bp, Homo sapiens
tccatgtggggaagg

SEQ ID NO: 25132 - DNA, 15 bp, Homo sapiens
ttccatgtggggaag

SEQ ID NO: 25133 - DNA, 15 bp, Homo sapiens
attccatgtggggaa

SEQ ID NO: 25134 - DNA, 15 bp, Homo sapiens
gattccatgtgggga

SEQ ID NO: 25135 - DNA, 15 bp, Homo sapiens
tgattccatgtgggg

SEQ ID NO: 25136 - DNA, 15 bp, Homo sapiens
atgattccatgtggg

SEQ ID NO: 25137 - DNA, 15 bp, Homo sapiens
tatgattccatgtgg

SEQ ID NO: 25138 - DNA, 15 bp, Homo sapiens
ttatgattccatgtg

SEQ ID NO: 25139 - DNA, 15 bp, Homo sapiens
cttatgattccatgt

SEQ ID NO: 25140 - DNA, 15 bp, Homo sapiens
gcttatgattccatg

SEQ ID NO: 25141 - DNA, 15 bp, Homo sapiens
agcttatgattccat

SEQ ID NO: 25142 - DNA, 15 bp, Homo sapiens
aagcttatgattcca

SEQ ID NO: 25143 - DNA, 15 bp, Homo sapiens
aaagcttatgattcc

SEQ ID NO: 25144 - DNA, 15 bp, Homo sapiens
gaaagcttatgattc

SEQ ID NO: 25145 - DNA, 15 bp, Homo sapiens
tgaaagcttatgatt

SEQ ID NO: 25146 - DNA, 15 bp, Homo sapiens
ctgaaagcttatgat

SEQ ID NO: 25147 - DNA, 15 bp, Homo sapiens
tctgaaagcttatga

SEQ ID NO: 25148 - DNA, 15 bp, Homo sapiens
ttctgaaagcttatg

SEQ ID NO: 25149 - DNA, 15 bp, Homo sapiens
gttctgaaagcttat

SEQ ID NO: 25150 - DNA, 15 bp, Homo sapiens
agttctgaaagctta

SEQ ID NO: 25151 - DNA, 15 bp, Homo sapiens
cagttctgaaagctt

SEQ ID NO: 25152 - DNA, 15 bp, Homo sapiens
ccagttctgaaagct

SEQ ID NO: 25153 - DNA, 15 bp, Homo sapiens
tccagttctgaaagc

SEQ ID NO: 25154 - DNA, 15 bp, Homo sapiens
ctccagttctgaaag

SEQ ID NO: 25155 - DNA, 15 bp, Homo sapiens
tctccagttctgaaa

SEQ ID NO: 25156 - DNA, 15 bp, Homo sapiens
ctctccagttctgaa

SEQ ID NO: 25157 - DNA, 15 bp, Homo sapiens
actctccagttctga

SEQ ID NO: 25158 - DNA, 15 bp, Homo sapiens
tactctccagttctg

SEQ ID NO: 25159 - DNA, 15 bp, Homo sapiens
gtactctccagttct

SEQ ID NO: 25160 - DNA, 15 bp, Homo sapiens
ggtactctccagttc

SEQ ID NO: 25161 - DNA, 15 bp, Homo sapiens
aggtactctccagtt

SEQ ID NO: 25162 - DNA, 15 bp, Homo sapiens
caggtactctccagt

SEQ ID NO: 25163 - DNA, 15 bp, Homo sapiens
tcaggtactctccag

SEQ ID NO: 25164 - DNA, 15 bp, Homo sapiens
ttcaggtactctcca

SEQ ID NO: 25165 - DNA, 15 bp, Homo sapiens
tttcaggtactctcc

SEQ ID NO: 25166 - DNA, 15 bp, Homo sapiens
ctttcaggtactctc

SEQ ID NO: 25167 - DNA, 15 bp, Homo sapiens
tctttcaggtactct

SEQ ID NO: 25168 - DNA, 15 bp, Homo sapiens
ctctttcaggtactc

SEQ ID NO: 25169 - DNA, 15 bp, Homo sapiens
tctctttcaggtact

SEQ ID NO: 25170 - DNA, 15 bp, Homo sapiens
atctctttcaggtac

SEQ ID NO: 25171 - DNA, 15 bp, Homo sapiens
gatctctttcaggta

SEQ ID NO: 25172 - DNA, 15 bp, Homo sapiens
tgatctctttcaggt

SEQ ID NO: 25173 - DNA, 15 bp, Homo sapiens
atgatctctttcagg

SEQ ID NO: 25174 - DNA, 15 bp, Homo sapiens
aatgatctctttcag

SEQ ID NO: 25175 - DNA, 15 bp, Homo sapiens
aaatgatctctttca

SEQ ID NO: 25176 - DNA, 15 bp, Homo sapiens
taaatgatctctttc

SEQ ID NO: 25177 - DNA, 15 bp, Homo sapiens
ctaaatgatctcttt

SEQ ID NO: 25178 - DNA, 15 bp, Homo sapiens
actaaatgatctctt

SEQ ID NO: 25179 - DNA, 15 bp, Homo sapiens
gactaaatgatctct

SEQ ID NO: 25180 - DNA, 15 bp, Homo sapiens
ggactaaatgatctc

SEQ ID NO: 25181 - DNA, 15 bp, Homo sapiens
tggactaaatgatct

SEQ ID NO: 25182 - DNA, 15 bp, Homo sapiens
ttggactaaatgatc

SEQ ID NO: 25183 - DNA, 15 bp, Homo sapiens
gttggactaaatgat

SEQ ID NO: 25184 - DNA, 15 bp, Homo sapiens
ggttggactaaatga

SEQ ID NO: 25185 - DNA, 15 bp, Homo sapiens
aggttggactaaatg

SEQ ID NO: 25186 - DNA, 15 bp, Homo sapiens
aaggttggactaaat

SEQ ID NO: 25187 - DNA, 15 bp, Homo sapiens
gaaggttggactaaa

SEQ ID NO: 25188 - DNA, 15 bp, Homo sapiens
agaaggttggactaa

SEQ ID NO: 25189 - DNA, 15 bp, Homo sapiens
gagaaggttggacta

SEQ ID NO: 25190 - DNA, 15 bp, Homo sapiens
tgagaaggttggact

SEQ ID NO: 25191 - DNA, 15 bp, Homo sapiens
atgagaaggttggac

SEQ ID NO: 25192 - DNA, 15 bp, Homo sapiens
aatgagaaggttgga

SEQ ID NO: 25193 - DNA, 15 bp, Homo sapiens
aaatgagaaggttgg

SEQ ID NO: 25194 - DNA, 15 bp, Homo sapiens
aaaatgagaaggttg

SEQ ID NO: 25195 - DNA, 15 bp, Homo sapiens
taaaatgagaaggtt

SEQ ID NO: 25196 - DNA, 15 bp, Homo sapiens
gtaaaatgagaaggt

SEQ ID NO: 25197 - DNA, 15 bp, Homo sapiens
tgtaaaatgagaagg

SEQ ID NO: 25198 - DNA, 15 bp, Homo sapiens
ctgtaaaatgagaag

SEQ ID NO: 25199 - DNA, 15 bp, Homo sapiens
tctgtaaaatgagaa

SEQ ID NO: 25200 - DNA, 15 bp, Homo sapiens
atctgtaaaatgaga

SEQ ID NO: 25201 - DNA, 15 bp, Homo sapiens
catctgtaaaatgag

SEQ ID NO: 25202 - DNA, 15 bp, Homo sapiens
ccatctgtaaaatga

SEQ ID NO: 25203 - DNA, 15 bp, Homo sapiens
cccatctgtaaaatg

SEQ ID NO: 25204 - DNA, 15 bp, Homo sapiens
ccccatctgtaaaat

SEQ ID NO: 25205 - DNA, 15 bp, Homo sapiens
tccccatctgtaaaa

SEQ ID NO: 25206 - DNA, 15 bp, Homo sapiens
ttccccatctgtaaa

SEQ ID NO: 25207 - DNA, 15 bp, Homo sapiens
attccccatctgtaa

SEQ ID NO: 25208 - DNA, 15 bp, Homo sapiens
gattccccatctgta

SEQ ID NO: 25209 - DNA, 15 bp, Homo sapiens
agattccccatctgt

SEQ ID NO: 25210 - DNA, 15 bp, Homo sapiens
cagattccccatctg

SEQ ID NO: 25211 - DNA, 15 bp, Homo sapiens
tcagattccccatct

SEQ ID NO: 25212 - DNA, 15 bp, Homo sapiens
ctcagattccccatc

SEQ ID NO: 25213 - DNA, 15 bp, Homo sapiens
cctcagattccccat

SEQ ID NO: 25214 - DNA, 15 bp, Homo sapiens
gcctcagattcccca

SEQ ID NO: 25215 - DNA, 15 bp, Homo sapiens
ggcctcagattcccc

SEQ ID NO: 25216 - DNA, 15 bp, Homo sapiens
aggcctcagattccc

SEQ ID NO: 25217 - DNA, 15 bp, Homo sapiens
taggcctcagattcc

SEQ ID NO: 25218 - DNA, 15 bp, Homo sapiens
ctaggcctcagattc

SEQ ID NO: 25219 - DNA, 15 bp, Homo sapiens
tctaggcctcagatt

SEQ ID NO: 25220 - DNA, 15 bp, Homo sapiens
ctctaggcctcagat

SEQ ID NO: 25221 - DNA, 15 bp, Homo sapiens
tctctaggcctcaga

SEQ ID NO: 25222 - DNA, 15 bp, Homo sapiens
ttctctaggcctcag

SEQ ID NO: 25223 - DNA, 15 bp, Homo sapiens
cttctctaggcctca

SEQ ID NO: 25224 - DNA, 15 bp, Homo sapiens
acttctctaggcctc

SEQ ID NO: 25225 - DNA, 15 bp, Homo sapiens
aacttctctaggcct

SEQ ID NO: 25226 - DNA, 15 bp, Homo sapiens
taacttctctaggcc

SEQ ID NO: 25227 - DNA, 15 bp, Homo sapiens
ttaacttctctaggc

SEQ ID NO: 25228 - DNA, 15 bp, Homo sapiens
cttaacttctctagg

SEQ ID NO: 25229 - DNA, 15 bp, Homo sapiens
acttaacttctctag

SEQ ID NO: 25230 - DNA, 15 bp, Homo sapiens
cacttaacttctcta

SEQ ID NO: 25231 - DNA, 15 bp, Homo sapiens
tcacttaacttctct

SEQ ID NO: 25232 - DNA, 15 bp, Homo sapiens
ctcacttaacttctc

SEQ ID NO: 25233 - DNA, 15 bp, Homo sapiens
actcacttaacttct

SEQ ID NO: 25234 - DNA, 15 bp, Homo sapiens
aactcacttaacttc

SEQ ID NO: 25235 - DNA, 15 bp, Homo sapiens
caactcacttaactt

SEQ ID NO: 25236 - DNA, 15 bp, Homo sapiens
tcaactcacttaact

SEQ ID NO: 25237 - DNA, 15 bp, Homo sapiens
ttcaactcacttaac

SEQ ID NO: 25238 - DNA, 15 bp, Homo sapiens
gttcaactcacttaa

SEQ ID NO: 25239 - DNA, 15 bp, Homo sapiens
tgttcaactcactta

SEQ ID NO: 25240 - DNA, 15 bp, Homo sapiens
ttgttcaactcactt

SEQ ID NO: 25241 - DNA, 15 bp, Homo sapiens
cttgttcaactcact

SEQ ID NO: 25242 - DNA, 15 bp, Homo sapiens
ccttgttcaactcac

SEQ ID NO: 25243 - DNA, 15 bp, Homo sapiens
accttgttcaactca

SEQ ID NO: 25244 - DNA, 15 bp, Homo sapiens
gaccttgttcaactc

SEQ ID NO: 25245 - DNA, 15 bp, Homo sapiens
tgaccttgttcaact

SEQ ID NO: 25246 - DNA, 15 bp, Homo sapiens
gtgaccttgttcaac

SEQ ID NO: 25247 - DNA, 15 bp, Homo sapiens
tgtgaccttgttcaa

SEQ ID NO: 25248 - DNA, 15 bp, Homo sapiens
gtgtgaccttgttca

SEQ ID NO: 25249 - DNA, 15 bp, Homo sapiens
tgtgtgaccttgttc

SEQ ID NO: 25250 - DNA, 15 bp, Homo sapiens
ctgtgtgaccttgtt

SEQ ID NO: 25251 - DNA, 15 bp, Homo sapiens
cctgtgtgaccttgt

SEQ ID NO: 25252 - DNA, 15 bp, Homo sapiens
acctgtgtgaccttg

SEQ ID NO: 25253 - DNA, 15 bp, Homo sapiens
tacctgtgtgacctt

SEQ ID NO: 25254 - DNA, 15 bp, Homo sapiens
gtacctgtgtgacct

SEQ ID NO: 25255 - DNA, 15 bp, Homo sapiens
tgtacctgtgtgacc

SEQ ID NO: 25256 - DNA, 15 bp, Homo sapiens
atgtacctgtgtgac

SEQ ID NO: 25257 - DNA, 15 bp, Homo sapiens
tatgtacctgtgtga

SEQ ID NO: 25258 - DNA, 15 bp, Homo sapiens
atatgtacctgtgtg

SEQ ID NO: 25259 - DNA, 15 bp, Homo sapiens
catatgtacctgtgt

SEQ ID NO: 25260 - DNA, 15 bp, Homo sapiens
ccatatgtacctgtg

SEQ ID NO: 25261 - DNA, 15 bp, Homo sapiens
accatatgtacctgt

SEQ ID NO: 25262 - DNA, 15 bp, Homo sapiens
taccatatgtacctg

SEQ ID NO: 25263 - DNA, 15 bp, Homo sapiens
ctaccatatgtacct

SEQ ID NO: 25264 - DNA, 15 bp, Homo sapiens
gctaccatatgtacc

SEQ ID NO: 25265 - DNA, 15 bp, Homo sapiens
ggctaccatatgtac

SEQ ID NO: 25266 - DNA, 15 bp, Homo sapiens
cggctaccatatgta

SEQ ID NO: 25267 - DNA, 15 bp, Homo sapiens
tcggctaccatatgt

SEQ ID NO: 25268 - DNA, 15 bp, Homo sapiens
gtcggctaccatatg

SEQ ID NO: 25269 - DNA, 15 bp, Homo sapiens
ggtcggctaccatat

SEQ ID NO: 25270 - DNA, 15 bp, Homo sapiens
tggtcggctaccata

SEQ ID NO: 25271 - DNA, 15 bp, Homo sapiens
atggtcggctaccat

SEQ ID NO: 25272 - DNA, 15 bp, Homo sapiens
gatggtcggctacca

SEQ ID NO: 25273 - DNA, 15 bp, Homo sapiens
ggatggtcggctacc

SEQ ID NO: 25274 - DNA, 15 bp, Homo sapiens
tggatggtcggctac

SEQ ID NO: 25275 - DNA, 15 bp, Homo sapiens
gtggatggtcggcta

SEQ ID NO: 25276 - DNA, 15 bp, Homo sapiens
agtggatggtcggct

SEQ ID NO: 25277 - DNA, 15 bp, Homo sapiens
cagtggatggtcggc

SEQ ID NO: 25278 - DNA, 15 bp, Homo sapiens
acagtggatggtcgg

SEQ ID NO: 25279 - DNA, 15 bp, Homo sapiens
aacagtggatggtcg

SEQ ID NO: 25280 - DNA, 15 bp, Homo sapiens
aaacagtggatggtc

SEQ ID NO: 25281 - DNA, 15 bp, Homo sapiens
taaacagtggatggt

SEQ ID NO: 25282 - DNA, 15 bp, Homo sapiens
ataaacagtggatgg

SEQ ID NO: 25283 - DNA, 15 bp, Homo sapiens
cataaacagtggatg

SEQ ID NO: 25284 - DNA, 15 bp, Homo sapiens
gcataaacagtggat

SEQ ID NO: 25285 - DNA, 15 bp, Homo sapiens
ggcataaacagtgga

SEQ ID NO: 25286 - DNA, 15 bp, Homo sapiens
tggcataaacagtgg

SEQ ID NO: 25287 - DNA, 15 bp, Homo sapiens
ttggcataaacagtg

SEQ ID NO: 25288 - DNA, 15 bp, Homo sapiens
attggcataaacagt

SEQ ID NO: 25289 - DNA, 15 bp, Homo sapiens
tattggcataaacag

SEQ ID NO: 25290 - DNA, 15 bp, Homo sapiens
atattggcataaaca

SEQ ID NO: 25291 - DNA, 15 bp, Homo sapiens
aatattggcataaac

SEQ ID NO: 25292 - DNA, 15 bp, Homo sapiens
gaatattggcataaa

SEQ ID NO: 25293 - DNA, 15 bp, Homo sapiens
ggaatattggcataa

SEQ ID NO: 25294 - DNA, 15 bp, Homo sapiens
gggaatattggcata

SEQ ID NO: 25295 - DNA, 15 bp, Homo sapiens
agggaatattggcat

SEQ ID NO: 25296 - DNA, 15 bp, Homo sapiens
aagggaatattggca

SEQ ID NO: 25297 - DNA, 15 bp, Homo sapiens
aaagggaatattggc

SEQ ID NO: 25298 - DNA, 15 bp, Homo sapiens
taaagggaatattgg

SEQ ID NO: 25299 - DNA, 15 bp, Homo sapiens
gtaaagggaatattg

SEQ ID NO: 25300 - DNA, 15 bp, Homo sapiens
cgtaaagggaatatt

SEQ ID NO: 25301 - DNA, 15 bp, Homo sapiens
acgtaaagggaatat

SEQ ID NO: 25302 - DNA, 15 bp, Homo sapiens
aacgtaaagggaata

SEQ ID NO: 25303 - DNA, 15 bp, Homo sapiens
aaacgtaaagggaat

SEQ ID NO: 25304 - DNA, 15 bp, Homo sapiens
aaaacgtaaagggaa

SEQ ID NO: 25305 - DNA, 15 bp, Homo sapiens
caaaacgtaaaggga

SEQ ID NO: 25306 - DNA, 15 bp, Homo sapiens
gcaaaacgtaaaggg

SEQ ID NO: 25307 - DNA, 15 bp, Homo sapiens
agcaaaacgtaaagg

SEQ ID NO: 25308 - DNA, 15 bp, Homo sapiens
aagcaaaacgtaaag

SEQ ID NO: 25309 - DNA, 15 bp, Homo sapiens
aaagcaaaacgtaaa

SEQ ID NO: 25310 - DNA, 15 bp, Homo sapiens
aaaagcaaaacgtaa

SEQ ID NO: 25311 - DNA, 15 bp, Homo sapiens
aaaaagcaaaacgta

SEQ ID NO: 25312 - DNA, 15 bp, Homo sapiens
aaaaaagcaaaacgt

SEQ ID NO: 25313 - DNA, 15 bp, Homo sapiens
caaaaaagcaaaacg

SEQ ID NO: 25314 - DNA, 15 bp, Homo sapiens
gcaaaaaagcaaaac

SEQ ID NO: 25315 - DNA, 15 bp, Homo sapiens
agcaaaaaagcaaaa

SEQ ID NO: 25316 - DNA, 15 bp, Homo sapiens
aagcaaaaaagcaaa

SEQ ID NO: 25317 - DNA, 15 bp, Homo sapiens
caagcaaaaaagcaa

SEQ ID NO: 25318 - DNA, 15 bp, Homo sapiens
acaagcaaaaaagca

SEQ ID NO: 25319 - DNA, 15 bp, Homo sapiens
aacaagcaaaaaagc

SEQ ID NO: 25320 - DNA, 15 bp, Homo sapiens
gaacaagcaaaaaag

SEQ ID NO: 25321 - DNA, 15 bp, Homo sapiens
cgaacaagcaaaaaa

SEQ ID NO: 25322 - DNA, 15 bp, Homo sapiens
acgaacaagcaaaaa

SEQ ID NO: 25323 - DNA, 15 bp, Homo sapiens
aacgaacaagcaaaa

SEQ ID NO: 25324 - DNA, 15 bp, Homo sapiens
aaacgaacaagcaaa

SEQ ID NO: 25325 - DNA, 15 bp, Homo sapiens
aaaacgaacaagcaa

SEQ ID NO: 25326 - DNA, 15 bp, Homo sapiens
taaaacgaacaagca

SEQ ID NO: 25327 - DNA, 15 bp, Homo sapiens
ttaaaacgaacaagc

SEQ ID NO: 25328 - DNA, 15 bp, Homo sapiens
gttaaaacgaacaag

SEQ ID NO: 25329 - DNA, 15 bp, Homo sapiens
ggttaaaacgaacaa

SEQ ID NO: 25330 - DNA, 15 bp, Homo sapiens
aggttaaaacgaaca

SEQ ID NO: 25331 - DNA, 15 bp, Homo sapiens
gaggttaaaacgaac

SEQ ID NO: 25332 - DNA, 15 bp, Homo sapiens
agaggttaaaacgaa

SEQ ID NO: 25333 - DNA, 15 bp, Homo sapiens
gagaggttaaaacga

SEQ ID NO: 25334 - DNA, 15 bp, Homo sapiens
ggagaggttaaaacg

SEQ ID NO: 25335 - DNA, 15 bp, Homo sapiens
tggagaggttaaaac

SEQ ID NO: 25336 - DNA, 15 bp, Homo sapiens
ttggagaggttaaaa

SEQ ID NO: 25337 - DNA, 15 bp, Homo sapiens
tttggagaggttaaa

SEQ ID NO: 25338 - DNA, 15 bp, Homo sapiens
atttggagaggttaa

SEQ ID NO: 25339 - DNA, 15 bp, Homo sapiens
aatttggagaggtta

SEQ ID NO: 25340 - DNA, 15 bp, Homo sapiens
aaatttggagaggtt

SEQ ID NO: 25341 - DNA, 15 bp, Homo sapiens
aaaatttggagaggt

SEQ ID NO: 25342 - DNA, 15 bp, Homo sapiens
taaaatttggagagg

SEQ ID NO: 25343 - DNA, 15 bp, Homo sapiens
gtaaaatttggagag

SEQ ID NO: 25344 - DNA, 15 bp, Homo sapiens
agtaaaatttggaga

SEQ ID NO: 25345 - DNA, 15 bp, Homo sapiens
cagtaaaatttggag

SEQ ID NO: 25346 - DNA, 15 bp, Homo sapiens
tcagtaaaatttgga

SEQ ID NO: 25347 - DNA, 15 bp, Homo sapiens
gtcagtaaaatttgg

SEQ ID NO: 25348 - DNA, 15 bp, Homo sapiens
agtcagtaaaatttg

SEQ ID NO: 25349 - DNA, 15 bp, Homo sapiens
aagtcagtaaaattt

SEQ ID NO: 25350 - DNA, 15 bp, Homo sapiens
gaagtcagtaaaatt

SEQ ID NO: 25351 - DNA, 15 bp, Homo sapiens
tgaagtcagtaaaat

SEQ ID NO: 25352 - DNA, 15 bp, Homo sapiens
ctgaagtcagtaaaa

SEQ ID NO: 25353 - DNA, 15 bp, Homo sapiens
tctgaagtcagtaaa

SEQ ID NO: 25354 - DNA, 15 bp, Homo sapiens
ttctgaagtcagtaa

SEQ ID NO: 25355 - DNA, 15 bp, Homo sapiens
cttctgaagtcagta

SEQ ID NO: 25356 - DNA, 15 bp, Homo sapiens
acttctgaagtcagt

SEQ ID NO: 25357 - DNA, 15 bp, Homo sapiens
aacttctgaagtcag

SEQ ID NO: 25358 - DNA, 15 bp, Homo sapiens
aaacttctgaagtca

SEQ ID NO: 25359 - DNA, 15 bp, Homo sapiens
gaaacttctgaagtc

SEQ ID NO: 25360 - DNA, 15 bp, Homo sapiens
agaaacttctgaagt

SEQ ID NO: 25361 - DNA, 15 bp, Homo sapiens
tagaaacttctgaag

SEQ ID NO: 25362 - DNA, 15 bp, Homo sapiens
ctagaaacttctgaa

SEQ ID NO: 25363 - DNA, 15 bp, Homo sapiens
tctagaaacttctga

SEQ ID NO: 25364 - DNA, 15 bp, Homo sapiens
ttctagaaacttctg

SEQ ID NO: 25365 - DNA, 15 bp, Homo sapiens
gttctagaaacttct

SEQ ID NO: 25366 - DNA, 15 bp, Homo sapiens
agttctagaaacttc

SEQ ID NO: 25367 - DNA, 15 bp, Homo sapiens
tagttctagaaactt

SEQ ID NO: 25368 - DNA, 15 bp, Homo sapiens
ttagttctagaaact

SEQ ID NO: 25369 - DNA, 15 bp, Homo sapiens
cttagttctagaaac

SEQ ID NO: 25370 - DNA, 15 bp, Homo sapiens
acttagttctagaaa

SEQ ID NO: 25371 - DNA, 15 bp, Homo sapiens
aacttagttctagaa

SEQ ID NO: 25372 - DNA, 15 bp, Homo sapiens
taacttagttctaga

SEQ ID NO: 25373 - DNA, 15 bp, Homo sapiens
ataacttagttctag

SEQ ID NO: 25374 - DNA, 15 bp, Homo sapiens
tataacttagttcta

SEQ ID NO: 25375 - DNA, 15 bp, Homo sapiens
ctataacttagttct

SEQ ID NO: 25376 - DNA, 15 bp, Homo sapiens
gctataacttagttc

SEQ ID NO: 25377 - DNA, 15 bp, Homo sapiens
tgctataacttagtt

SEQ ID NO: 25378 - DNA, 15 bp, Homo sapiens
atgctataacttagt

SEQ ID NO: 25379 - DNA, 15 bp, Homo sapiens
catgctataacttag

SEQ ID NO: 25380 - DNA, 15 bp, Homo sapiens
acatgctataactta

SEQ ID NO: 25381 - DNA, 15 bp, Homo sapiens
aacatgctataactt

SEQ ID NO: 25382 - DNA, 15 bp, Homo sapiens
aaacatgctataact

SEQ ID NO: 25383 - DNA, 15 bp, Homo sapiens
aaaacatgctataac

SEQ ID NO: 25384 - DNA, 15 bp, Homo sapiens
caaaacatgctataa

SEQ ID NO: 25385 - DNA, 15 bp, Homo sapiens
tcaaaacatgctata

SEQ ID NO: 25386 - DNA, 15 bp, Homo sapiens
ctcaaaacatgctat

SEQ ID NO: 25387 - DNA, 15 bp, Homo sapiens
actcaaaacatgcta

SEQ ID NO: 25388 - DNA, 15 bp, Homo sapiens
aactcaaaacatgct

SEQ ID NO: 25389 - DNA, 15 bp, Homo sapiens
gaactcaaaacatgc

SEQ ID NO: 25390 - DNA, 15 bp, Homo sapiens
agaactcaaaacatg

SEQ ID NO: 25391 - DNA, 15 bp, Homo sapiens
tagaactcaaaacat

SEQ ID NO: 25392 - DNA, 15 bp, Homo sapiens
ttagaactcaaaaca

SEQ ID NO: 25393 - DNA, 15 bp, Homo sapiens
attagaactcaaaac

SEQ ID NO: 25394 - DNA, 15 bp, Homo sapiens
cattagaactcaaaa

SEQ ID NO: 25395 - DNA, 15 bp, Homo sapiens
acattagaactcaaa

SEQ ID NO: 25396 - DNA, 15 bp, Homo sapiens
gacattagaactcaa

SEQ ID NO: 25397 - DNA, 15 bp, Homo sapiens
tgacattagaactca

SEQ ID NO: 25398 - DNA, 15 bp, Homo sapiens
gtgacattagaactc

SEQ ID NO: 25399 - DNA, 15 bp, Homo sapiens
agtgacattagaact

SEQ ID NO: 25400 - DNA, 15 bp, Homo sapiens
aagtgacattagaac

SEQ ID NO: 25401 - DNA, 15 bp, Homo sapiens
aaagtgacattagaa

SEQ ID NO: 25402 - DNA, 15 bp, Homo sapiens
gaaagtgacattaga

SEQ ID NO: 25403 - DNA, 15 bp, Homo sapiens
ggaaagtgacattag

SEQ ID NO: 25404 - DNA, 15 bp, Homo sapiens
cggaaagtgacatta

SEQ ID NO: 25405 - DNA, 15 bp, Homo sapiens
tcggaaagtgacatt

SEQ ID NO: 25406 - DNA, 15 bp, Homo sapiens
atcggaaagtgacat

SEQ ID NO: 25407 - DNA, 15 bp, Homo sapiens
gatcggaaagtgaca

SEQ ID NO: 25408 - DNA, 15 bp, Homo sapiens
agatcggaaagtgac

SEQ ID NO: 25409 - DNA, 15 bp, Homo sapiens
aagatcggaaagtga

SEQ ID NO: 25410 - DNA, 15 bp, Homo sapiens
gaagatcggaaagtg

SEQ ID NO: 25411 - DNA, 15 bp, Homo sapiens
agaagatcggaaagt

SEQ ID NO: 25412 - DNA, 15 bp, Homo sapiens
aagaagatcggaaag

SEQ ID NO: 25413 - DNA, 15 bp, Homo sapiens
aaagaagatcggaaa

SEQ ID NO: 25414 - DNA, 15 bp, Homo sapiens
taaagaagatcggaa

SEQ ID NO: 25415 - DNA, 15 bp, Homo sapiens
gtaaagaagatcgga

SEQ ID NO: 25416 - DNA, 15 bp, Homo sapiens
ggtaaagaagatcgg

SEQ ID NO: 25417 - DNA, 15 bp, Homo sapiens
aggtaaagaagatcg

SEQ ID NO: 25418 - DNA, 15 bp, Homo sapiens
aaggtaaagaagatc

SEQ ID NO: 25419 - DNA, 15 bp, Homo sapiens
aaaggtaaagaagat

SEQ ID NO: 25420 - DNA, 15 bp, Homo sapiens
aaaaggtaaagaaga

SEQ ID NO: 25421 - DNA, 15 bp, Homo sapiens
aaaaaggtaaagaag

SEQ ID NO: 25422 - DNA, 15 bp, Homo sapiens
aaaaaaggtaaagaa

SEQ ID NO: 25423 - DNA, 15 bp, Homo sapiens
gaaaaaaggtaaaga

SEQ ID NO: 25424 - DNA, 15 bp, Homo sapiens
agaaaaaaggtaaag

SEQ ID NO: 25425 - DNA, 15 bp, Homo sapiens
tagaaaaaaggtaaa

SEQ ID NO: 25426 - DNA, 15 bp, Homo sapiens
gtagaaaaaaggtaa

SEQ ID NO: 25427 - DNA, 15 bp, Homo sapiens
ggtagaaaaaaggta

SEQ ID NO: 25428 - DNA, 15 bp, Homo sapiens
aggtagaaaaaaggt

SEQ ID NO: 25429 - DNA, 15 bp, Homo sapiens
gaggtagaaaaaagg

SEQ ID NO: 25430 - DNA, 15 bp, Homo sapiens
agaggtagaaaaaag

SEQ ID NO: 25431 - DNA, 15 bp, Homo sapiens
cagaggtagaaaaaa

SEQ ID NO: 25432 - DNA, 15 bp, Homo sapiens
acagaggtagaaaaa

SEQ ID NO: 25433 - DNA, 15 bp, Homo sapiens
aacagaggtagaaaa

SEQ ID NO: 25434 - DNA, 15 bp, Homo sapiens
aaacagaggtagaaa

SEQ ID NO: 25435 - DNA, 15 bp, Homo sapiens
caaacagaggtagaa

SEQ ID NO: 25436 - DNA, 15 bp, Homo sapiens
acaaacagaggtaga

SEQ ID NO: 25437 - DNA, 15 bp, Homo sapiens
tacaaacagaggtag

SEQ ID NO: 25438 - DNA, 15 bp, Homo sapiens
atacaaacagaggta

SEQ ID NO: 25439 - DNA, 15 bp, Homo sapiens
aatacaaacagaggt

SEQ ID NO: 25440 - DNA, 15 bp, Homo sapiens
aaatacaaacagagg

SEQ ID NO: 25441 - DNA, 15 bp, Homo sapiens
gaaatacaaacagag

SEQ ID NO: 25442 - DNA, 15 bp, Homo sapiens
agaaatacaaacaga

SEQ ID NO: 25443 - DNA, 15 bp, Homo sapiens
cagaaatacaaacag

SEQ ID NO: 25444 - DNA, 15 bp, Homo sapiens
ccagaaatacaaaca

SEQ ID NO: 25445 - DNA, 15 bp, Homo sapiens
accagaaatacaaac

SEQ ID NO: 25446 - DNA, 15 bp, Homo sapiens
aaccagaaatacaaa

SEQ ID NO: 25447 - DNA, 15 bp, Homo sapiens
gaaccagaaatacaa

SEQ ID NO: 25448 - DNA, 15 bp, Homo sapiens
agaaccagaaataca

SEQ ID NO: 25449 - DNA, 15 bp, Homo sapiens
cagaaccagaaatac

SEQ ID NO: 25450 - DNA, 15 bp, Homo sapiens
ccagaaccagaaata

SEQ ID NO: 25451 - DNA, 15 bp, Homo sapiens
accagaaccagaaat

SEQ ID NO: 25452 - DNA, 15 bp, Homo sapiens
aaccagaaccagaaa

SEQ ID NO: 25453 - DNA, 15 bp, Homo sapiens
taaccagaaccagaa

SEQ ID NO: 25454 - DNA, 15 bp, Homo sapiens
ttaaccagaaccaga

SEQ ID NO: 25455 - DNA, 15 bp, Homo sapiens
cttaaccagaaccag

SEQ ID NO: 25456 - DNA, 15 bp, Homo sapiens
acttaaccagaacca

SEQ ID NO: 25457 - DNA, 15 bp, Homo sapiens
cacttaaccagaacc

SEQ ID NO: 25458 - DNA, 15 bp, Homo sapiens
tcacttaaccagaac

SEQ ID NO: 25459 - DNA, 15 bp, Homo sapiens
ctcacttaaccagaa

SEQ ID NO: 25460 - DNA, 15 bp, Homo sapiens
actcacttaaccaga

SEQ ID NO: 25461 - DNA, 15 bp, Homo sapiens
gactcacttaaccag

SEQ ID NO: 25462 - DNA, 15 bp, Homo sapiens
agactcacttaacca

SEQ ID NO: 25463 - DNA, 15 bp, Homo sapiens
cagactcacttaacc

SEQ ID NO: 25464 - DNA, 15 bp, Homo sapiens
ccagactcacttaac

SEQ ID NO: 25465 - DNA, 15 bp, Homo sapiens
accagactcacttaa

SEQ ID NO: 25466 - DNA, 15 bp, Homo sapiens
taccagactcactta

SEQ ID NO: 25467 - DNA, 15 bp, Homo sapiens
ttaccagactcactt

SEQ ID NO: 25468 - DNA, 15 bp, Homo sapiens
cttaccagactcact

SEQ ID NO: 25469 - DNA, 15 bp, Homo sapiens
gcttaccagactcac

SEQ ID NO: 25470 - DNA, 15 bp, Homo sapiens
tgcttaccagactca

SEQ ID NO: 25471 - DNA, 15 bp, Homo sapiens
ctgcttaccagactc

SEQ ID NO: 25472 - DNA, 15 bp, Homo sapiens
gctgcttaccagact

SEQ ID NO: 25473 - DNA, 15 bp, Homo sapiens
tgctgcttaccagac

SEQ ID NO: 25474 - DNA, 15 bp, Homo sapiens
ctgctgcttaccaga

SEQ ID NO: 25475 - DNA, 15 bp, Homo sapiens
cctgctgcttaccag

SEQ ID NO: 25476 - DNA, 15 bp, Homo sapiens
acctgctgcttacca

SEQ ID NO: 25477 - DNA, 15 bp, Homo sapiens
cacctgctgcttacc

SEQ ID NO: 25478 - DNA, 15 bp, Homo sapiens
acacctgctgcttac

SEQ ID NO: 25479 - DNA, 15 bp, Homo sapiens
aacacctgctgctta

SEQ ID NO: 25480 - DNA, 15 bp, Homo sapiens
gaacacctgctgctt

SEQ ID NO: 25481 - DNA, 15 bp, Homo sapiens
agaacacctgctgct

SEQ ID NO: 25482 - DNA, 15 bp, Homo sapiens
tagaacacctgctgc

SEQ ID NO: 25483 - DNA, 15 bp, Homo sapiens
atagaacacctgctg

SEQ ID NO: 25484 - DNA, 15 bp, Homo sapiens
aatagaacacctgct

SEQ ID NO: 25485 - DNA, 15 bp, Homo sapiens
aaatagaacacctgc

SEQ ID NO: 25486 - DNA, 15 bp, Homo sapiens
aaaatagaacacctg

SEQ ID NO: 25487 - DNA, 15 bp, Homo sapiens
taaaatagaacacct

SEQ ID NO: 25488 - DNA, 15 bp, Homo sapiens
ataaaatagaacacc

SEQ ID NO: 25489 - DNA, 15 bp, Homo sapiens
aataaaatagaacac

SEQ ID NO: 25490 - DNA, 15 bp, Homo sapiens
aaataaaatagaaca

SEQ ID NO: 25491 - DNA, 15 bp, Homo sapiens
gaaataaaatagaac

SEQ ID NO: 25492 - DNA, 15 bp, Homo sapiens
agaaataaaatagaa

SEQ ID NO: 25493 - DNA, 15 bp, Homo sapiens
aagaaataaaataga

SEQ ID NO: 25494 - DNA, 15 bp, Homo sapiens
aaagaaataaaatag

SEQ ID NO: 25495 - DNA, 15 bp, Homo sapiens
aaaagaaataaaata

SEQ ID NO: 25496 - DNA, 15 bp, Homo sapiens
taaaagaaataaaat

SEQ ID NO: 25497 - DNA, 15 bp, Homo sapiens
ataaaagaaataaaa

SEQ ID NO: 25498 - DNA, 15 bp, Homo sapiens
aataaaagaaataaa

SEQ ID NO: 25499 - DNA, 15 bp, Homo sapiens
aaataaaagaaataa

SEQ ID NO: 25500 - DNA, 15 bp, Homo sapiens
aaaataaaagaaata

SEQ ID NO: 25501 - DNA, 15 bp, Homo sapiens
aaaaataaaagaaat

SEQ ID NO: 25502 - DNA, 15 bp, Homo sapiens
taaaaataaaagaaa

SEQ ID NO: 25503 - DNA, 15 bp, Homo sapiens
ctaaaaataaaagaa

SEQ ID NO: 25504 - DNA, 15 bp, Homo sapiens
cctaaaaataaaaga

SEQ ID NO: 25505 - DNA, 15 bp, Homo sapiens
tcctaaaaataaaag

SEQ ID NO: 25506 - DNA, 15 bp, Homo sapiens
atcctaaaaataaaa

SEQ ID NO: 25507 - DNA, 15 bp, Homo sapiens
tatcctaaaaataaa

SEQ ID NO: 25508 - DNA, 15 bp, Homo sapiens
ctatcctaaaaataa

SEQ ID NO: 25509 - DNA, 15 bp, Homo sapiens
actatcctaaaaata

SEQ ID NO: 25510 - DNA, 15 bp, Homo sapiens
tactatcctaaaaat

SEQ ID NO: 25511 - DNA, 15 bp, Homo sapiens
atactatcctaaaaa

SEQ ID NO: 25512 - DNA, 15 bp, Homo sapiens
aatactatcctaaaa

SEQ ID NO: 25513 - DNA, 15 bp, Homo sapiens
taatactatcctaaa

SEQ ID NO: 25514 - DNA, 15 bp, Homo sapiens
gtaatactatcctaa

SEQ ID NO: 25515 - DNA, 15 bp, Homo sapiens
tgtaatactatccta

SEQ ID NO: 25516 - DNA, 15 bp, Homo sapiens
atgtaatactatcct

SEQ ID NO: 25517 - DNA, 15 bp, Homo sapiens
catgtaatactatcc

SEQ ID NO: 25518 - DNA, 15 bp, Homo sapiens
acatgtaatactatc

SEQ ID NO: 25519 - DNA, 15 bp, Homo sapiens
cacatgtaatactat

SEQ ID NO: 25520 - DNA, 15 bp, Homo sapiens
tcacatgtaatacta

SEQ ID NO: 25521 - DNA, 15 bp, Homo sapiens
atcacatgtaatact

SEQ ID NO: 25522 - DNA, 15 bp, Homo sapiens
tatcacatgtaatac

SEQ ID NO: 25523 - DNA, 15 bp, Homo sapiens
atatcacatgtaata

SEQ ID NO: 25524 - DNA, 15 bp, Homo sapiens
tatatcacatgtaat

SEQ ID NO: 25525 - DNA, 15 bp, Homo sapiens
atatatcacatgtaa

SEQ ID NO: 25526 - DNA, 15 bp, Homo sapiens
tatatatcacatgta

SEQ ID NO: 25527 - DNA, 15 bp, Homo sapiens
atatatatcacatgt

SEQ ID NO: 25528 - DNA, 15 bp, Homo sapiens
catatatatcacatg

SEQ ID NO: 25529 - DNA, 15 bp, Homo sapiens
acatatatatcacat

SEQ ID NO: 25530 - DNA, 15 bp, Homo sapiens
gacatatatatcaca

SEQ ID NO: 25531 - DNA, 15 bp, Homo sapiens
agacatatatatcac

SEQ ID NO: 25532 - DNA, 15 bp, Homo sapiens
aagacatatatatca

SEQ ID NO: 25533 - DNA, 15 bp, Homo sapiens
aaagacatatatatc

SEQ ID NO: 25534 - DNA, 15 bp, Homo sapiens
caaagacatatatat

SEQ ID NO: 25535 - DNA, 15 bp, Homo sapiens
gcaaagacatatata

SEQ ID NO: 25536 - DNA, 15 bp, Homo sapiens
tgcaaagacatatat

SEQ ID NO: 25537 - DNA, 15 bp, Homo sapiens
ttgcaaagacatata

SEQ ID NO: 25538 - DNA, 15 bp, Homo sapiens
tttgcaaagacatat

SEQ ID NO: 25539 - DNA, 15 bp, Homo sapiens
gtttgcaaagacata

SEQ ID NO: 25540 - DNA, 15 bp, Homo sapiens
tgtttgcaaagacat

SEQ ID NO: 25541 - DNA, 15 bp, Homo sapiens
atgtttgcaaagaca

SEQ ID NO: 25542 - DNA, 15 bp, Homo sapiens
tatgtttgcaaagac

SEQ ID NO: 25543 - DNA, 15 bp, Homo sapiens
gtatgtttgcaaaga

SEQ ID NO: 25544 - DNA, 15 bp, Homo sapiens
tgtatgtttgcaaag

SEQ ID NO: 25545 - DNA, 15 bp, Homo sapiens
atgtatgtttgcaaa

SEQ ID NO: 25546 - DNA, 15 bp, Homo sapiens
tatgtatgtttgcaa

SEQ ID NO: 25547 - DNA, 15 bp, Homo sapiens
ttatgtatgtttgca

SEQ ID NO: 25548 - DNA, 15 bp, Homo sapiens
attatgtatgtttgc

SEQ ID NO: 25549 - DNA, 15 bp, Homo sapiens
aattatgtatgtttg

SEQ ID NO: 25550 - DNA, 15 bp, Homo sapiens
aaattatgtatgttt

SEQ ID NO: 25551 - DNA, 15 bp, Homo sapiens
caaattatgtatgtt

SEQ ID NO: 25552 - DNA, 15 bp, Homo sapiens
tcaaattatgtatgt

SEQ ID NO: 25553 - DNA, 15 bp, Homo sapiens
ttcaaattatgtatg

SEQ ID NO: 25554 - DNA, 15 bp, Homo sapiens
cttcaaattatgtat

SEQ ID NO: 25555 - DNA, 15 bp, Homo sapiens
tcttcaaattatgta

SEQ ID NO: 25556 - DNA, 15 bp, Homo sapiens
atcttcaaattatgt

SEQ ID NO: 25557 - DNA, 15 bp, Homo sapiens
gatcttcaaattatg

SEQ ID NO: 25558 - DNA, 15 bp, Homo sapiens
agatcttcaaattat

SEQ ID NO: 25559 - DNA, 15 bp, Homo sapiens
aagatcttcaaatta

SEQ ID NO: 25560 - DNA, 15 bp, Homo sapiens
taagatcttcaaatt

SEQ ID NO: 25561 - DNA, 15 bp, Homo sapiens
ttaagatcttcaaat

SEQ ID NO: 25562 - DNA, 15 bp, Homo sapiens
tttaagatcttcaaa

SEQ ID NO: 25563 - DNA, 15 bp, Homo sapiens
ttttaagatcttcaa

SEQ ID NO: 25564 - DNA, 15 bp, Homo sapiens
attttaagatcttca

SEQ ID NO: 25565 - DNA, 15 bp, Homo sapiens
tattttaagatcttc

SEQ ID NO: 25566 - DNA, 15 bp, Homo sapiens
atattttaagatctt

SEQ ID NO: 25567 - DNA, 15 bp, Homo sapiens
aatattttaagatct

SEQ ID NO: 25568 - DNA, 15 bp, Homo sapiens
aaatattttaagatc

SEQ ID NO: 25569 - DNA, 15 bp, Homo sapiens
caaatattttaagat

SEQ ID NO: 25570 - DNA, 15 bp, Homo sapiens
gcaaatattttaaga

SEQ ID NO: 25571 - DNA, 15 bp, Homo sapiens
tgcaaatattttaag

SEQ ID NO: 25572 - DNA, 15 bp, Homo sapiens
gtgcaaatattttaa

SEQ ID NO: 25573 - DNA, 15 bp, Homo sapiens
agtgcaaatatttta

SEQ ID NO: 25574 - DNA, 15 bp, Homo sapiens
tagtgcaaatatttt

SEQ ID NO: 25575 - DNA, 15 bp, Homo sapiens
ctagtgcaaatattt

SEQ ID NO: 25576 - DNA, 15 bp, Homo sapiens
cctagtgcaaatatt

SEQ ID NO: 25577 - DNA, 15 bp, Homo sapiens
gcctagtgcaaatat

SEQ ID NO: 25578 - DNA, 15 bp, Homo sapiens
tgcctagtgcaaata

SEQ ID NO: 25579 - DNA, 15 bp, Homo sapiens
atgcctagtgcaaat

SEQ ID NO: 25580 - DNA, 15 bp, Homo sapiens
tatgcctagtgcaaa

SEQ ID NO: 25581 - DNA, 15 bp, Homo sapiens
gtatgcctagtgcaa

SEQ ID NO: 25582 - DNA, 15 bp, Homo sapiens
ggtatgcctagtgca

SEQ ID NO: 25583 - DNA, 15 bp, Homo sapiens
gggtatgcctagtgc

SEQ ID NO: 25584 - DNA, 15 bp, Homo sapiens
tgggtatgcctagtg

SEQ ID NO: 25585 - DNA, 15 bp, Homo sapiens
gtgggtatgcctagt

SEQ ID NO: 25586 - DNA, 15 bp, Homo sapiens
tgtgggtatgcctag

SEQ ID NO: 25587 - DNA, 15 bp, Homo sapiens
atgtgggtatgccta

SEQ ID NO: 25588 - DNA, 15 bp, Homo sapiens
aatgtgggtatgcct

SEQ ID NO: 25589 - DNA, 15 bp, Homo sapiens
aaatgtgggtatgcc

SEQ ID NO: 25590 - DNA, 15 bp, Homo sapiens
taaatgtgggtatgc

SEQ ID NO: 25591 - DNA, 15 bp, Homo sapiens
ttaaatgtgggtatg

SEQ ID NO: 25592 - DNA, 15 bp, Homo sapiens
attaaatgtgggtat

SEQ ID NO: 25593 - DNA, 15 bp, Homo sapiens
tattaaatgtgggta

SEQ ID NO: 25594 - DNA, 15 bp, Homo sapiens
ctattaaatgtgggt

SEQ ID NO: 25595 - DNA, 15 bp, Homo sapiens
actattaaatgtggg

SEQ ID NO: 25596 - DNA, 15 bp, Homo sapiens
tactattaaatgtgg

SEQ ID NO: 25597 - DNA, 15 bp, Homo sapiens
atactattaaatgtg

SEQ ID NO: 25598 - DNA, 15 bp, Homo sapiens
catactattaaatgt

SEQ ID NO: 25599 - DNA, 15 bp, Homo sapiens
acatactattaaatg

SEQ ID NO: 25600 - DNA, 15 bp, Homo sapiens
aacatactattaaat

SEQ ID NO: 25601 - DNA, 15 bp, Homo sapiens
taacatactattaaa

SEQ ID NO: 25602 - DNA, 15 bp, Homo sapiens
ttaacatactattaa

SEQ ID NO: 25603 - DNA, 15 bp, Homo sapiens
tttaacatactatta

SEQ ID NO: 25604 - DNA, 15 bp, Homo sapiens
atttaacatactatt

SEQ ID NO: 25605 - DNA, 15 bp, Homo sapiens
gatttaacatactat

SEQ ID NO: 25606 - DNA, 15 bp, Homo sapiens
agatttaacatacta

SEQ ID NO: 25607 - DNA, 15 bp, Homo sapiens
aagatttaacatact

SEQ ID NO: 25608 - DNA, 15 bp, Homo sapiens
aaagatttaacatac

SEQ ID NO: 25609 - DNA, 15 bp, Homo sapiens
aaaagatttaacata

SEQ ID NO: 25610 - DNA, 15 bp, Homo sapiens
taaaagatttaacat

SEQ ID NO: 25611 - DNA, 15 bp, Homo sapiens
ataaaagatttaaca

SEQ ID NO: 25612 - DNA, 15 bp, Homo sapiens
tataaaagatttaac

SEQ ID NO: 25613 - DNA, 15 bp, Homo sapiens
ctataaaagatttaa

SEQ ID NO: 25614 - DNA, 15 bp, Homo sapiens
gctataaaagattta

SEQ ID NO: 25615 - DNA, 15 bp, Homo sapiens
tgctataaaagattt

SEQ ID NO: 25616 - DNA, 15 bp, Homo sapiens
ttgctataaaagatt

SEQ ID NO: 25617 - DNA, 15 bp, Homo sapiens
attgctataaaagat

SEQ ID NO: 25618 - DNA, 15 bp, Homo sapiens
aattgctataaaaga

SEQ ID NO: 25619 - DNA, 15 bp, Homo sapiens
taattgctataaaag

SEQ ID NO: 25620 - DNA, 15 bp, Homo sapiens
ataattgctataaaa

SEQ ID NO: 25621 - DNA, 15 bp, Homo sapiens
cataattgctataaa

SEQ ID NO: 25622 - DNA, 15 bp, Homo sapiens
tcataattgctataa

SEQ ID NO: 25623 - DNA, 15 bp, Homo sapiens
atcataattgctata

SEQ ID NO: 25624 - DNA, 15 bp, Homo sapiens
tatcataattgctat

SEQ ID NO: 25625 - DNA, 15 bp, Homo sapiens
atatcataattgcta

SEQ ID NO: 25626 - DNA, 15 bp, Homo sapiens
tatatcataattgct

SEQ ID NO: 25627 - DNA, 15 bp, Homo sapiens
gtatatcataattgc

SEQ ID NO: 25628 - DNA, 15 bp, Homo sapiens
tgtatatcataattg

SEQ ID NO: 25629 - DNA, 15 bp, Homo sapiens
atgtatatcataatt

SEQ ID NO: 25630 - DNA, 15 bp, Homo sapiens
catgtatatcataat

SEQ ID NO: 25631 - DNA, 15 bp, Homo sapiens
ccatgtatatcataa

SEQ ID NO: 25632 - DNA, 15 bp, Homo sapiens
cccatgtatatcata

SEQ ID NO: 25633 - DNA, 15 bp, Homo sapiens
acccatgtatatcat

SEQ ID NO: 25634 - DNA, 15 bp, Homo sapiens
cacccatgtatatca

SEQ ID NO: 25635 - DNA, 15 bp, Homo sapiens
tcacccatgtatatc

SEQ ID NO: 25636 - DNA, 15 bp, Homo sapiens
ttcacccatgtatat

SEQ ID NO: 25637 - DNA, 15 bp, Homo sapiens
cttcacccatgtata

SEQ ID NO: 25638 - DNA, 15 bp, Homo sapiens
tcttcacccatgtat

SEQ ID NO: 25639 - DNA, 15 bp, Homo sapiens
ttcttcacccatgta

SEQ ID NO: 25640 - DNA, 15 bp, Homo sapiens
cttcttcacccatgt

SEQ ID NO: 25641 - DNA, 15 bp, Homo sapiens
tcttcttcacccatg

SEQ ID NO: 25642 - DNA, 15 bp, Homo sapiens
ctcttcttcacccat

SEQ ID NO: 25643 - DNA, 15 bp, Homo sapiens
actcttcttcaccca

SEQ ID NO: 25644 - DNA, 15 bp, Homo sapiens
aactcttcttcaccc

SEQ ID NO: 25645 - DNA, 15 bp, Homo sapiens
gaactcttcttcacc

SEQ ID NO: 25646 - DNA, 15 bp, Homo sapiens
ggaactcttcttcac

SEQ ID NO: 25647 - DNA, 15 bp, Homo sapiens
aggaactcttcttca

SEQ ID NO: 25648 - DNA, 15 bp, Homo sapiens
taggaactcttcttc

SEQ ID NO: 25649 - DNA, 15 bp, Homo sapiens
ttaggaactcttctt

SEQ ID NO: 25650 - DNA, 15 bp, Homo sapiens
attaggaactcttct

SEQ ID NO: 25651 - DNA, 15 bp, Homo sapiens
tattaggaactcttc

SEQ ID NO: 25652 - DNA, 15 bp, Homo sapiens
atattaggaactctt

SEQ ID NO: 25653 - DNA, 15 bp, Homo sapiens
catattaggaactct

SEQ ID NO: 25654 - DNA, 15 bp, Homo sapiens
ccatattaggaactc

SEQ ID NO: 25655 - DNA, 15 bp, Homo sapiens
gccatattaggaact

SEQ ID NO: 25656 - DNA, 15 bp, Homo sapiens
ggccatattaggaac

SEQ ID NO: 25657 - DNA, 15 bp, Homo sapiens
aggccatattaggaa

SEQ ID NO: 25658 - DNA, 15 bp, Homo sapiens
aaggccatattagga

SEQ ID NO: 25659 - DNA, 15 bp, Homo sapiens
aaaggccatattagg

SEQ ID NO: 25660 - DNA, 15 bp, Homo sapiens
gaaaggccatattag

SEQ ID NO: 25661 - DNA, 15 bp, Homo sapiens
agaaaggccatatta

SEQ ID NO: 25662 - DNA, 15 bp, Homo sapiens
cagaaaggccatatt

SEQ ID NO: 25663 - DNA, 15 bp, Homo sapiens
tcagaaaggccatat

SEQ ID NO: 25664 - DNA, 15 bp, Homo sapiens
atcagaaaggccata

SEQ ID NO: 25665 - DNA, 15 bp, Homo sapiens
aatcagaaaggccat

SEQ ID NO: 25666 - DNA, 15 bp, Homo sapiens
taatcagaaaggcca

SEQ ID NO: 25667 - DNA, 15 bp, Homo sapiens
ttaatcagaaaggcc

SEQ ID NO: 25668 - DNA, 15 bp, Homo sapiens
gttaatcagaaaggc

SEQ ID NO: 25669 - DNA, 15 bp, Homo sapiens
agttaatcagaaagg

SEQ ID NO: 25670 - DNA, 15 bp, Homo sapiens
cagttaatcagaaag

SEQ ID NO: 25671 - DNA, 15 bp, Homo sapiens
acagttaatcagaaa

SEQ ID NO: 25672 - DNA, 15 bp, Homo sapiens
tacagttaatcagaa

SEQ ID NO: 25673 - DNA, 15 bp, Homo sapiens
atacagttaatcaga

SEQ ID NO: 25674 - DNA, 15 bp, Homo sapiens
gatacagttaatcag

SEQ ID NO: 25675 - DNA, 15 bp, Homo sapiens
agatacagttaatca

SEQ ID NO: 25676 - DNA, 15 bp, Homo sapiens
cagatacagttaatc

SEQ ID NO: 25677 - DNA, 15 bp, Homo sapiens
acagatacagttaat

SEQ ID NO: 25678 - DNA, 15 bp, Homo sapiens
aacagatacagttaa

SEQ ID NO: 25679 - DNA, 15 bp, Homo sapiens
aaacagatacagtta

SEQ ID NO: 25680 - DNA, 15 bp, Homo sapiens
taaacagatacagtt

SEQ ID NO: 25681 - DNA, 15 bp, Homo sapiens
ataaacagatacagt

SEQ ID NO: 25682 - DNA, 15 bp, Homo sapiens
tataaacagatacag

SEQ ID NO: 25683 - DNA, 15 bp, Homo sapiens
atataaacagataca

SEQ ID NO: 25684 - DNA, 15 bp, Homo sapiens
gatataaacagatac

SEQ ID NO: 25685 - DNA, 15 bp, Homo sapiens
agatataaacagata

SEQ ID NO: 25686 - DNA, 15 bp, Homo sapiens
cagatataaacagat

SEQ ID NO: 25687 - DNA, 15 bp, Homo sapiens
acagatataaacaga

SEQ ID NO: 25688 - DNA, 15 bp, Homo sapiens
cacagatataaacag

SEQ ID NO: 25689 - DNA, 15 bp, Homo sapiens
acacagatataaaca

SEQ ID NO: 25690 - DNA, 15 bp, Homo sapiens
aacacagatataaac

SEQ ID NO: 25691 - DNA, 15 bp, Homo sapiens
aaacacagatataaa

SEQ ID NO: 25692 - DNA, 15 bp, Homo sapiens
aaaacacagatataa

SEQ ID NO: 25693 - DNA, 15 bp, Homo sapiens
gaaaacacagatata

SEQ ID NO: 25694 - DNA, 15 bp, Homo sapiens
agaaaacacagatat

SEQ ID NO: 25695 - DNA, 15 bp, Homo sapiens
aagaaaacacagata

SEQ ID NO: 25696 - DNA, 15 bp, Homo sapiens
gaagaaaacacagat

SEQ ID NO: 25697 - DNA, 15 bp, Homo sapiens
tgaagaaaacacaga

SEQ ID NO: 25698 - DNA, 15 bp, Homo sapiens
ctgaagaaaacacag

SEQ ID NO: 25699 - DNA, 15 bp, Homo sapiens
cctgaagaaaacaca

SEQ ID NO: 25700 - DNA, 15 bp, Homo sapiens
gcctgaagaaaacac

SEQ ID NO: 25701 - DNA, 15 bp, Homo sapiens
tgcctgaagaaaaca

SEQ ID NO: 25702 - DNA, 15 bp, Homo sapiens
atgcctgaagaaaac

SEQ ID NO: 25703 - DNA, 15 bp, Homo sapiens
aatgcctgaagaaaa

SEQ ID NO: 25704 - DNA, 15 bp, Homo sapiens
gaatgcctgaagaaa

SEQ ID NO: 25705 - DNA, 15 bp, Homo sapiens
tgaatgcctgaagaa

SEQ ID NO: 25706 - DNA, 15 bp, Homo sapiens
atgaatgcctgaaga

SEQ ID NO: 25707 - DNA, 15 bp, Homo sapiens
tatgaatgcctgaag

SEQ ID NO: 25708 - DNA, 15 bp, Homo sapiens
ttatgaatgcctgaa

SEQ ID NO: 25709 - DNA, 15 bp, Homo sapiens
gttatgaatgcctga

SEQ ID NO: 25710 - DNA, 15 bp, Homo sapiens
tgttatgaatgcctg

SEQ ID NO: 25711 - DNA, 15 bp, Homo sapiens
atgttatgaatgcct

SEQ ID NO: 25712 - DNA, 15 bp, Homo sapiens
aatgttatgaatgcc

SEQ ID NO: 25713 - DNA, 15 bp, Homo sapiens
taatgttatgaatgc

SEQ ID NO: 25714 - DNA, 15 bp, Homo sapiens
ttaatgttatgaatg

SEQ ID NO: 25715 - DNA, 15 bp, Homo sapiens
cttaatgttatgaat

SEQ ID NO: 25716 - DNA, 15 bp, Homo sapiens
gcttaatgttatgaa

SEQ ID NO: 25717 - DNA, 15 bp, Homo sapiens
tgcttaatgttatga

SEQ ID NO: 25718 - DNA, 15 bp, Homo sapiens
ttgcttaatgttatg

SEQ ID NO: 25719 - DNA, 15 bp, Homo sapiens
tttgcttaatgttat

SEQ ID NO: 25720 - DNA, 15 bp, Homo sapiens
atttgcttaatgtta

SEQ ID NO: 25721 - DNA, 15 bp, Homo sapiens
aatttgcttaatgtt

SEQ ID NO: 25722 - DNA, 15 bp, Homo sapiens
gaatttgcttaatgt

SEQ ID NO: 25723 - DNA, 15 bp, Homo sapiens
tgaatttgcttaatg

SEQ ID NO: 25724 - DNA, 15 bp, Homo sapiens
ctgaatttgcttaat

SEQ ID NO: 25725 - DNA, 15 bp, Homo sapiens
cctgaatttgcttaa

SEQ ID NO: 25726 - DNA, 15 bp, Homo sapiens
acctgaatttgctta

SEQ ID NO: 25727 - DNA, 15 bp, Homo sapiens
cacctgaatttgctt

SEQ ID NO: 25728 - DNA, 15 bp, Homo sapiens
acacctgaatttgct

SEQ ID NO: 25729 - DNA, 15 bp, Homo sapiens
tacacctgaatttgc

SEQ ID NO: 25730 - DNA, 15 bp, Homo sapiens
gtacacctgaatttg

SEQ ID NO: 25731 - DNA, 15 bp, Homo sapiens
agtacacctgaattt

SEQ ID NO: 25732 - DNA, 15 bp, Homo sapiens
cagtacacctgaatt

SEQ ID NO: 25733 - DNA, 15 bp, Homo sapiens
acagtacacctgaat

SEQ ID NO: 25734 - DNA, 15 bp, Homo sapiens
aacagtacacctgaa

SEQ ID NO: 25735 - DNA, 15 bp, Homo sapiens
taacagtacacctga

SEQ ID NO: 25736 - DNA, 15 bp, Homo sapiens
gtaacagtacacctg

SEQ ID NO: 25737 - DNA, 15 bp, Homo sapiens
agtaacagtacacct

SEQ ID NO: 25738 - DNA, 15 bp, Homo sapiens
aagtaacagtacacc

SEQ ID NO: 25739 - DNA, 15 bp, Homo sapiens
taagtaacagtacac

SEQ ID NO: 25740 - DNA, 15 bp, Homo sapiens
ttaagtaacagtaca

SEQ ID NO: 25741 - DNA, 15 bp, Homo sapiens
attaagtaacagtac

SEQ ID NO: 25742 - DNA, 15 bp, Homo sapiens
aattaagtaacagta

SEQ ID NO: 25743 - DNA, 15 bp, Homo sapiens
caattaagtaacagt

SEQ ID NO: 25744 - DNA, 15 bp, Homo sapiens
tcaattaagtaacag

SEQ ID NO: 25745 - DNA, 15 bp, Homo sapiens
ttcaattaagtaaca

SEQ ID NO: 25746 - DNA, 15 bp, Homo sapiens
attcaattaagtaac

SEQ ID NO: 25747 - DNA, 15 bp, Homo sapiens
aattcaattaagtaa

SEQ ID NO: 25748 - DNA, 15 bp, Homo sapiens
taattcaattaagta

SEQ ID NO: 25749 - DNA, 15 bp, Homo sapiens
ttaattcaattaagt

SEQ ID NO: 25750 - DNA, 15 bp, Homo sapiens
attaattcaattaag

SEQ ID NO: 25751 - DNA, 15 bp, Homo sapiens
gattaattcaattaa

SEQ ID NO: 25752 - DNA, 15 bp, Homo sapiens
tgattaattcaatta

SEQ ID NO: 25753 - DNA, 15 bp, Homo sapiens
ctgattaattcaatt

SEQ ID NO: 25754 - DNA, 15 bp, Homo sapiens
actgattaattcaat

SEQ ID NO: 25755 - DNA, 15 bp, Homo sapiens
aactgattaattcaa

SEQ ID NO: 25756 - DNA, 15 bp, Homo sapiens
aaactgattaattca

SEQ ID NO: 25757 - DNA, 15 bp, Homo sapiens
caaactgattaattc

SEQ ID NO: 25758 - DNA, 15 bp, Homo sapiens
acaaactgattaatt

SEQ ID NO: 25759 - DNA, 15 bp, Homo sapiens
aacaaactgattaat

SEQ ID NO: 25760 - DNA, 15 bp, Homo sapiens
aaacaaactgattaa

SEQ ID NO: 25761 - DNA, 15 bp, Homo sapiens
aaaacaaactgatta

SEQ ID NO: 25762 - DNA, 15 bp, Homo sapiens
caaaacaaactgatt

SEQ ID NO: 25763 - DNA, 15 bp, Homo sapiens
acaaaacaaactgat

SEQ ID NO: 25764 - DNA, 15 bp, Homo sapiens
tacaaaacaaactga

SEQ ID NO: 25765 - DNA, 15 bp, Homo sapiens
gtacaaaacaaactg

SEQ ID NO: 25766 - DNA, 15 bp, Homo sapiens
tgtacaaaacaaact

SEQ ID NO: 25767 - DNA, 15 bp, Homo sapiens
ttgtacaaaacaaac

SEQ ID NO: 25768 - DNA, 15 bp, Homo sapiens
cttgtacaaaacaaa

SEQ ID NO: 25769 - DNA, 15 bp, Homo sapiens
acttgtacaaaacaa

SEQ ID NO: 25770 - DNA, 15 bp, Homo sapiens
tacttgtacaaaaca

SEQ ID NO: 25771 - DNA, 15 bp, Homo sapiens
atacttgtacaaaac

SEQ ID NO: 25772 - DNA, 15 bp, Homo sapiens
tatacttgtacaaaa

SEQ ID NO: 25773 - DNA, 15 bp, Homo sapiens
atatacttgtacaaa

SEQ ID NO: 25774 - DNA, 15 bp, Homo sapiens
aatatacttgtacaa

SEQ ID NO: 25775 - DNA, 15 bp, Homo sapiens
aaatatacttgtaca

SEQ ID NO: 25776 - DNA, 15 bp, Homo sapiens
aaaatatacttgtac

SEQ ID NO: 25777 - DNA, 15 bp, Homo sapiens
taaaatatacttgta

SEQ ID NO: 25778 - DNA, 15 bp, Homo sapiens
ataaaatatacttgt

SEQ ID NO: 25779 - DNA, 15 bp, Homo sapiens
aataaaatatacttg

SEQ ID NO: 25780 - DNA, 15 bp, Homo sapiens
aaataaaatatactt

SEQ ID NO: 25781 - DNA, 15 bp, Homo sapiens
aaaataaaatatact

SEQ ID NO: 25782 - DNA, 15 bp, Homo sapiens
aaaaataaaatatac

SEQ ID NO: 25783 - DNA, 15 bp, Homo sapiens
caaaaataaaatata

SEQ ID NO: 25784 - DNA, 15 bp, Homo sapiens
acaaaaataaaatat

SEQ ID NO: 25785 - DNA, 15 bp, Homo sapiens
aacaaaaataaaata

SEQ ID NO: 25786 - DNA, 15 bp, Homo sapiens
gaacaaaaataaaat

SEQ ID NO: 25787 - DNA, 15 bp, Homo sapiens
ggaacaaaaataaaa

SEQ ID NO: 25788 - DNA, 15 bp, Homo sapiens
aggaacaaaaataaa

SEQ ID NO: 25789 - DNA, 15 bp, Homo sapiens
aaggaacaaaaataa

SEQ ID NO: 25790 - DNA, 15 bp, Homo sapiens
caaggaacaaaaata

SEQ ID NO: 25791 - DNA, 15 bp, Homo sapiens
acaaggaacaaaaat

SEQ ID NO: 25792 - DNA, 15 bp, Homo sapiens
aacaaggaacaaaaa

SEQ ID NO: 25793 - DNA, 15 bp, Homo sapiens
caacaaggaacaaaa

SEQ ID NO: 25794 - DNA, 15 bp, Homo sapiens
acaacaaggaacaaa

SEQ ID NO: 25795 - DNA, 15 bp, Homo sapiens
tacaacaaggaacaa

SEQ ID NO: 25796 - DNA, 15 bp, Homo sapiens
atacaacaaggaaca

SEQ ID NO: 25797 - DNA, 15 bp, Homo sapiens
tatacaacaaggaac

SEQ ID NO: 25798 - DNA, 15 bp, Homo sapiens
ttatacaacaaggaa

SEQ ID NO: 25799 - DNA, 15 bp, Homo sapiens
attatacaacaagga

SEQ ID NO: 25800 - DNA, 15 bp, Homo sapiens
gattatacaacaagg

SEQ ID NO: 25801 - DNA, 15 bp, Homo sapiens
agattatacaacaag

SEQ ID NO: 25802 - DNA, 15 bp, Homo sapiens
cagattatacaacaa

SEQ ID NO: 25803 - DNA, 15 bp, Homo sapiens
ccagattatacaaca

SEQ ID NO: 25804 - DNA, 15 bp, Homo sapiens
accagattatacaac

SEQ ID NO: 25805 - DNA, 15 bp, Homo sapiens
taccagattatacaa

SEQ ID NO: 25806 - DNA, 15 bp, Homo sapiens
ctaccagattataca

SEQ ID NO: 25807 - DNA, 15 bp, Homo sapiens
cctaccagattatac

SEQ ID NO: 25808 - DNA, 15 bp, Homo sapiens
tcctaccagattata

SEQ ID NO: 25809 - DNA, 15 bp, Homo sapiens
ttcctaccagattat

SEQ ID NO: 25810 - DNA, 15 bp, Homo sapiens
attcctaccagatta

SEQ ID NO: 25811 - DNA, 15 bp, Homo sapiens
cattcctaccagatt

SEQ ID NO: 25812 - DNA, 15 bp, Homo sapiens
ccattcctaccagat

SEQ ID NO: 25813 - DNA, 15 bp, Homo sapiens
cccattcctaccaga

SEQ ID NO: 25814 - DNA, 15 bp, Homo sapiens
ccccattcctaccag

SEQ ID NO: 25815 - DNA, 15 bp, Homo sapiens
tccccattcctacca

SEQ ID NO: 25816 - DNA, 15 bp, Homo sapiens
ttccccattcctacc

SEQ ID NO: 25817 - DNA, 15 bp, Homo sapiens
cttccccattcctac

SEQ ID NO: 25818 - DNA, 15 bp, Homo sapiens
ccttccccattccta

SEQ ID NO: 25819 - DNA, 15 bp, Homo sapiens
cccttccccattcct

SEQ ID NO: 25820 - DNA, 15 bp, Homo sapiens
ccccttccccattcc

SEQ ID NO: 25821 - DNA, 15 bp, Homo sapiens
tccccttccccattc

SEQ ID NO: 25822 - DNA, 15 bp, Homo sapiens
ctccccttccccatt

SEQ ID NO: 25823 - DNA, 15 bp, Homo sapiens
tctccccttccccat

SEQ ID NO: 25824 - DNA, 15 bp, Homo sapiens
atctccccttcccca

SEQ ID NO: 25825 - DNA, 15 bp, Homo sapiens
tatctccccttcccc

SEQ ID NO: 25826 - DNA, 15 bp, Homo sapiens
ctatctccccttccc

SEQ ID NO: 25827 - DNA, 15 bp, Homo sapiens
actatctccccttcc

SEQ ID NO: 25828 - DNA, 15 bp, Homo sapiens
cactatctccccttc

SEQ ID NO: 25829 - DNA, 15 bp, Homo sapiens
tcactatctcccctt

SEQ ID NO: 25830 - DNA, 15 bp, Homo sapiens
ttcactatctcccct

SEQ ID NO: 25831 - DNA, 15 bp, Homo sapiens
attcactatctcccc

SEQ ID NO: 25832 - DNA, 15 bp, Homo sapiens
tattcactatctccc

SEQ ID NO: 25833 - DNA, 15 bp, Homo sapiens
ttattcactatctcc

SEQ ID NO: 25834 - DNA, 15 bp, Homo sapiens
tttattcactatctc

SEQ ID NO: 25835 - DNA, 15 bp, Homo sapiens
ctttattcactatct

SEQ ID NO: 25836 - DNA, 15 bp, Homo sapiens
tctttattcactatc

SEQ ID NO: 25837 - DNA, 15 bp, Homo sapiens
ctctttattcactat

SEQ ID NO: 25838 - DNA, 15 bp, Homo sapiens
tctctttattcacta

SEQ ID NO: 25839 - DNA, 15 bp, Homo sapiens
atctctttattcact

SEQ ID NO: 25840 - DNA, 15 bp, Homo sapiens
catctctttattcac

SEQ ID NO: 25841 - DNA, 15 bp, Homo sapiens
acatctctttattca

SEQ ID NO: 25842 - DNA, 15 bp, Homo sapiens
tacatctctttattc

SEQ ID NO: 25843 - DNA, 15 bp, Homo sapiens
atacatctctttatt

SEQ ID NO: 25844 - DNA, 15 bp, Homo sapiens
tatacatctctttat

SEQ ID NO: 25845 - DNA, 15 bp, Homo sapiens
gtatacatctcttta

SEQ ID NO: 25846 - DNA, 15 bp, Homo sapiens
agtatacatctcttt

SEQ ID NO: 25847 - DNA, 15 bp, Homo sapiens
aagtatacatctctt

SEQ ID NO: 25848 - DNA, 15 bp, Homo sapiens
gaagtatacatctct

SEQ ID NO: 25849 - DNA, 15 bp, Homo sapiens
agaagtatacatctc

SEQ ID NO: 25850 - DNA, 15 bp, Homo sapiens
aagaagtatacatct

SEQ ID NO: 25851 - DNA, 15 bp, Homo sapiens
caagaagtatacatc

SEQ ID NO: 25852 - DNA, 15 bp, Homo sapiens
gcaagaagtatacat

SEQ ID NO: 25853 - DNA, 15 bp, Homo sapiens
ggcaagaagtataca

SEQ ID NO: 25854 - DNA, 15 bp, Homo sapiens
aggcaagaagtatac

SEQ ID NO: 25855 - DNA, 15 bp, Homo sapiens
aaggcaagaagtata

SEQ ID NO: 25856 - DNA, 15 bp, Homo sapiens
aaaggcaagaagtat

SEQ ID NO: 25857 - DNA, 15 bp, Homo sapiens
caaaggcaagaagta

SEQ ID NO: 25858 - DNA, 15 bp, Homo sapiens
tcaaaggcaagaagt

SEQ ID NO: 25859 - DNA, 15 bp, Homo sapiens
ctcaaaggcaagaag

SEQ ID NO: 25860 - DNA, 15 bp, Homo sapiens
cctcaaaggcaagaa

SEQ ID NO: 25861 - DNA, 15 bp, Homo sapiens
tcctcaaaggcaaga

SEQ ID NO: 25862 - DNA, 15 bp, Homo sapiens
ttcctcaaaggcaag

SEQ ID NO: 25863 - DNA, 15 bp, Homo sapiens
attcctcaaaggcaa

SEQ ID NO: 25864 - DNA, 15 bp, Homo sapiens
aattcctcaaaggca

SEQ ID NO: 25865 - DNA, 15 bp, Homo sapiens
aaattcctcaaaggc

SEQ ID NO: 25866 - DNA, 15 bp, Homo sapiens
taaattcctcaaagg

SEQ ID NO: 25867 - DNA, 15 bp, Homo sapiens
ttaaattcctcaaag

SEQ ID NO: 25868 - DNA, 15 bp, Homo sapiens
cttaaattcctcaaa

SEQ ID NO: 25869 - DNA, 15 bp, Homo sapiens
acttaaattcctcaa

SEQ ID NO: 25870 - DNA, 15 bp, Homo sapiens
aacttaaattcctca

SEQ ID NO: 25871 - DNA, 15 bp, Homo sapiens
aaacttaaattcctc

SEQ ID NO: 25872 - DNA, 15 bp, Homo sapiens
aaaacttaaattcct

SEQ ID NO: 25873 - DNA, 15 bp, Homo sapiens
gaaaacttaaattcc

SEQ ID NO: 25874 - DNA, 15 bp, Homo sapiens
tgaaaacttaaattc

SEQ ID NO: 25875 - DNA, 15 bp, Homo sapiens
gtgaaaacttaaatt

SEQ ID NO: 25876 - DNA, 15 bp, Homo sapiens
agtgaaaacttaaat

SEQ ID NO: 25877 - DNA, 15 bp, Homo sapiens
cagtgaaaacttaaa

SEQ ID NO: 25878 - DNA, 15 bp, Homo sapiens
acagtgaaaacttaa

SEQ ID NO: 25879 - DNA, 15 bp, Homo sapiens
tacagtgaaaactta

SEQ ID NO: 25880 - DNA, 15 bp, Homo sapiens
atacagtgaaaactt

SEQ ID NO: 25881 - DNA, 15 bp, Homo sapiens
tatacagtgaaaact

SEQ ID NO: 25882 - DNA, 15 bp, Homo sapiens
gtatacagtgaaaac

SEQ ID NO: 25883 - DNA, 15 bp, Homo sapiens
ggtatacagtgaaaa

SEQ ID NO: 25884 - DNA, 15 bp, Homo sapiens
tggtatacagtgaaa

SEQ ID NO: 25885 - DNA, 15 bp, Homo sapiens
ttggtatacagtgaa

SEQ ID NO: 25886 - DNA, 15 bp, Homo sapiens
attggtatacagtga

SEQ ID NO: 25887 - DNA, 15 bp, Homo sapiens
aattggtatacagtg

SEQ ID NO: 25888 - DNA, 15 bp, Homo sapiens
aaattggtatacagt

SEQ ID NO: 25889 - DNA, 15 bp, Homo sapiens
aaaattggtatacag

SEQ ID NO: 25890 - DNA, 15 bp, Homo sapiens
aaaaattggtataca

SEQ ID NO: 25891 - DNA, 15 bp, Homo sapiens
aaaaaattggtatac

SEQ ID NO: 25892 - DNA, 15 bp, Homo sapiens
taaaaaattggtata

SEQ ID NO: 25893 - DNA, 15 bp, Homo sapiens
ttaaaaaattggtat

SEQ ID NO: 25894 - DNA, 15 bp, Homo sapiens
tttaaaaaattggta

SEQ ID NO: 25895 - DNA, 15 bp, Homo sapiens
ctttaaaaaattggt

SEQ ID NO: 25896 - DNA, 15 bp, Homo sapiens
cctttaaaaaattgg

SEQ ID NO: 25897 - DNA, 15 bp, Homo sapiens
acctttaaaaaattg

SEQ ID NO: 25898 - DNA, 15 bp, Homo sapiens
tacctttaaaaaatt

SEQ ID NO: 25899 - DNA, 15 bp, Homo sapiens
atacctttaaaaaat

SEQ ID NO: 25900 - DNA, 15 bp, Homo sapiens
aatacctttaaaaaa

SEQ ID NO: 25901 - DNA, 15 bp, Homo sapiens
aaatacctttaaaaa

SEQ ID NO: 25902 - DNA, 15 bp, Homo sapiens
taaatacctttaaaa

SEQ ID NO: 25903 - DNA, 15 bp, Homo sapiens
gtaaatacctttaaa

SEQ ID NO: 25904 - DNA, 15 bp, Homo sapiens
agtaaatacctttaa

SEQ ID NO: 25905 - DNA, 15 bp, Homo sapiens
tagtaaataccttta

SEQ ID NO: 25906 - DNA, 15 bp, Homo sapiens
atagtaaataccttt

SEQ ID NO: 25907 - DNA, 15 bp, Homo sapiens
tatagtaaatacctt

SEQ ID NO: 25908 - DNA, 15 bp, Homo sapiens
atatagtaaatacct

SEQ ID NO: 25909 - DNA, 15 bp, Homo sapiens
aatatagtaaatacc

SEQ ID NO: 25910 - DNA, 15 bp, Homo sapiens
aaatatagtaaatac

SEQ ID NO: 25911 - DNA, 15 bp, Homo sapiens
gaaatatagtaaata

SEQ ID NO: 25912 - DNA, 15 bp, Homo sapiens
tgaaatatagtaaat

SEQ ID NO: 25913 - DNA, 15 bp, Homo sapiens
ctgaaatatagtaaa

SEQ ID NO: 25914 - DNA, 15 bp, Homo sapiens
actgaaatatagtaa

SEQ ID NO: 25915 - DNA, 15 bp, Homo sapiens
cactgaaatatagta

SEQ ID NO: 25916 - DNA, 15 bp, Homo sapiens
gcactgaaatatagt

SEQ ID NO: 25917 - DNA, 15 bp, Homo sapiens
tgcactgaaatatag

SEQ ID NO: 25918 - DNA, 15 bp, Homo sapiens
atgcactgaaatata

SEQ ID NO: 25919 - DNA, 15 bp, Homo sapiens
tatgcactgaaatat

SEQ ID NO: 25920 - DNA, 15 bp, Homo sapiens
atatgcactgaaata

SEQ ID NO: 25921 - DNA, 15 bp, Homo sapiens
aatatgcactgaaat

SEQ ID NO: 25922 - DNA, 15 bp, Homo sapiens
aaatatgcactgaaa

SEQ ID NO: 25923 - DNA, 15 bp, Homo sapiens
aaaatatgcactgaa

SEQ ID NO: 25924 - DNA, 15 bp, Homo sapiens
taaaatatgcactga

SEQ ID NO: 25925 - DNA, 15 bp, Homo sapiens
ataaaatatgcactg

SEQ ID NO: 25926 - DNA, 15 bp, Homo sapiens
aataaaatatgcact

SEQ ID NO: 25927 - DNA, 15 bp, Homo sapiens
aaataaaatatgcac

SEQ ID NO: 25928 - DNA, 15 bp, Homo sapiens
caaataaaatatgca

SEQ ID NO: 25929 - DNA, 15 bp, Homo sapiens
tcaaataaaatatgc

SEQ ID NO: 25930 - DNA, 15 bp, Homo sapiens
gtcaaataaaatatg

SEQ ID NO: 25931 - DNA, 15 bp, Homo sapiens
tgtcaaataaaatat

SEQ ID NO: 25932 - DNA, 15 bp, Homo sapiens
atgtcaaataaaata

SEQ ID NO: 25933 - DNA, 15 bp, Homo sapiens
tatgtcaaataaaat

SEQ ID NO: 25934 - DNA, 15 bp, Homo sapiens
gtatgtcaaataaaa

SEQ ID NO: 25935 - DNA, 15 bp, Homo sapiens
agtatgtcaaataaa

SEQ ID NO: 25936 - DNA, 15 bp, Homo sapiens
aagtatgtcaaataa

SEQ ID NO: 25937 - DNA, 15 bp, Homo sapiens
aaagtatgtcaaata

SEQ ID NO: 25938 - DNA, 15 bp, Homo sapiens
taaagtatgtcaaat

SEQ ID NO: 25939 - DNA, 15 bp, Homo sapiens
ataaagtatgtcaaa

SEQ ID NO: 25940 - DNA, 15 bp, Homo sapiens
gataaagtatgtcaa

SEQ ID NO: 25941 - DNA, 15 bp, Homo sapiens
tgataaagtatgtca

SEQ ID NO: 25942 - DNA, 15 bp, Homo sapiens
atgataaagtatgtc

SEQ ID NO: 25943 - DNA, 15 bp, Homo sapiens
aatgataaagtatgt

SEQ ID NO: 25944 - DNA, 15 bp, Homo sapiens
aaatgataaagtatg

SEQ ID NO: 25945 - DNA, 15 bp, Homo sapiens
aaaatgataaagtat

SEQ ID NO: 25946 - DNA, 15 bp, Homo sapiens
caaaatgataaagta

SEQ ID NO: 25947 - DNA, 15 bp, Homo sapiens
acaaaatgataaagt

SEQ ID NO: 25948 - DNA, 15 bp, Homo sapiens
cacaaaatgataaag

SEQ ID NO: 25949 - DNA, 15 bp, Homo sapiens
ccacaaaatgataaa

SEQ ID NO: 25950 - DNA, 15 bp, Homo sapiens
accacaaaatgataa

SEQ ID NO: 25951 - DNA, 15 bp, Homo sapiens
taccacaaaatgata

SEQ ID NO: 25952 - DNA, 15 bp, Homo sapiens
ttaccacaaaatgat

SEQ ID NO: 25953 - DNA, 15 bp, Homo sapiens
tttaccacaaaatga

SEQ ID NO: 25954 - DNA, 15 bp, Homo sapiens
gtttaccacaaaatg

SEQ ID NO: 25955 - DNA, 15 bp, Homo sapiens
ggtttaccacaaaat

SEQ ID NO: 25956 - DNA, 15 bp, Homo sapiens
aggtttaccacaaaa

SEQ ID NO: 25957 - DNA, 15 bp, Homo sapiens
aaggtttaccacaaa

SEQ ID NO: 25958 - DNA, 15 bp, Homo sapiens
aaaggtttaccacaa

SEQ ID NO: 25959 - DNA, 15 bp, Homo sapiens
taaaggtttaccaca

SEQ ID NO: 25960 - DNA, 15 bp, Homo sapiens
ctaaaggtttaccac

SEQ ID NO: 25961 - DNA, 15 bp, Homo sapiens
gctaaaggtttacca

SEQ ID NO: 25962 - DNA, 15 bp, Homo sapiens
agctaaaggtttacc

SEQ ID NO: 25963 - DNA, 15 bp, Homo sapiens
aagctaaaggtttac

SEQ ID NO: 25964 - DNA, 15 bp, Homo sapiens
aaagctaaaggttta

SEQ ID NO: 25965 - DNA, 15 bp, Homo sapiens
taaagctaaaggttt

SEQ ID NO: 25966 - DNA, 15 bp, Homo sapiens
gtaaagctaaaggtt

SEQ ID NO: 25967 - DNA, 15 bp, Homo sapiens
agtaaagctaaaggt

SEQ ID NO: 25968 - DNA, 15 bp, Homo sapiens
tagtaaagctaaagg

SEQ ID NO: 25969 - DNA, 15 bp, Homo sapiens
ttagtaaagctaaag

SEQ ID NO: 25970 - DNA, 15 bp, Homo sapiens
attagtaaagctaaa

SEQ ID NO: 25971 - DNA, 15 bp, Homo sapiens
aattagtaaagctaa

SEQ ID NO: 25972 - DNA, 15 bp, Homo sapiens
aaattagtaaagcta

SEQ ID NO: 25973 - DNA, 15 bp, Homo sapiens
aaaattagtaaagct

SEQ ID NO: 25974 - DNA, 15 bp, Homo sapiens
gaaaattagtaaagc

SEQ ID NO: 25975 - DNA, 15 bp, Homo sapiens
tgaaaattagtaaag

SEQ ID NO: 25976 - DNA, 15 bp, Homo sapiens
atgaaaattagtaaa

SEQ ID NO: 25977 - DNA, 15 bp, Homo sapiens
gatgaaaattagtaa

SEQ ID NO: 25978 - DNA, 15 bp, Homo sapiens
agatgaaaattagta

SEQ ID NO: 25979 - DNA, 15 bp, Homo sapiens
tagatgaaaattagt

SEQ ID NO: 25980 - DNA, 15 bp, Homo sapiens
atagatgaaaattag

SEQ ID NO: 25981 - DNA, 15 bp, Homo sapiens
aatagatgaaaatta

SEQ ID NO: 25982 - DNA, 15 bp, Homo sapiens
taatagatgaaaatt

SEQ ID NO: 25983 - DNA, 15 bp, Homo sapiens
ttaatagatgaaaat

SEQ ID NO: 25984 - DNA, 15 bp, Homo sapiens
cttaatagatgaaaa

SEQ ID NO: 25985 - DNA, 15 bp, Homo sapiens
acttaatagatgaaa

SEQ ID NO: 25986 - DNA, 15 bp, Homo sapiens
aacttaatagatgaa

SEQ ID NO: 25987 - DNA, 15 bp, Homo sapiens
aaacttaatagatga

SEQ ID NO: 25988 - DNA, 15 bp, Homo sapiens
aaaacttaatagatg

SEQ ID NO: 25989 - DNA, 15 bp, Homo sapiens
gaaaacttaatagat

SEQ ID NO: 25990 - DNA, 15 bp, Homo sapiens
agaaaacttaataga

SEQ ID NO: 25991 - DNA, 15 bp, Homo sapiens
aagaaaacttaatag

SEQ ID NO: 25992 - DNA, 15 bp, Homo sapiens
aaagaaaacttaata

SEQ ID NO: 25993 - DNA, 15 bp, Homo sapiens
aaaagaaaacttaat

SEQ ID NO: 25994 - DNA, 15 bp, Homo sapiens
caaaagaaaacttaa

SEQ ID NO: 25995 - DNA, 15 bp, Homo sapiens
acaaaagaaaactta

SEQ ID NO: 25996 - DNA, 15 bp, Homo sapiens
tacaaaagaaaactt

SEQ ID NO: 25997 - DNA, 15 bp, Homo sapiens
ttacaaaagaaaact

SEQ ID NO: 25998 - DNA, 15 bp, Homo sapiens
cttacaaaagaaaac

SEQ ID NO: 25999 - DNA, 15 bp, Homo sapiens
tcttacaaaagaaaa

SEQ ID NO: 26000 - DNA, 15 bp, Homo sapiens
atcttacaaaagaaa

SEQ ID NO: 26001 - DNA, 15 bp, Homo sapiens
catcttacaaaagaa

SEQ ID NO: 26002 - DNA, 15 bp, Homo sapiens
ccatcttacaaaaga

SEQ ID NO: 26003 - DNA, 15 bp, Homo sapiens
accatcttacaaaag

SEQ ID NO: 26004 - DNA, 15 bp, Homo sapiens
caccatcttacaaaa

SEQ ID NO: 26005 - DNA, 15 bp, Homo sapiens
tcaccatcttacaaa

SEQ ID NO: 26006 - DNA, 15 bp, Homo sapiens
atcaccatcttacaa

SEQ ID NO: 26007 - DNA, 15 bp, Homo sapiens
tatcaccatcttaca

SEQ ID NO: 26008 - DNA, 15 bp, Homo sapiens
ctatcaccatcttac

SEQ ID NO: 26009 - DNA, 15 bp, Homo sapiens
gctatcaccatctta

SEQ ID NO: 26010 - DNA, 15 bp, Homo sapiens
agctatcaccatctt

SEQ ID NO: 26011 - DNA, 15 bp, Homo sapiens
aagctatcaccatct

SEQ ID NO: 26012 - DNA, 15 bp, Homo sapiens
gaagctatcaccatc

SEQ ID NO: 26013 - DNA, 15 bp, Homo sapiens
tgaagctatcaccat

SEQ ID NO: 26014 - DNA, 15 bp, Homo sapiens
atgaagctatcacca

SEQ ID NO: 26015 - DNA, 15 bp, Homo sapiens
gatgaagctatcacc

SEQ ID NO: 26016 - DNA, 15 bp, Homo sapiens
tgatgaagctatcac

SEQ ID NO: 26017 - DNA, 15 bp, Homo sapiens
ttgatgaagctatca

SEQ ID NO: 26018 - DNA, 15 bp, Homo sapiens
tttgatgaagctatc

SEQ ID NO: 26019 - DNA, 15 bp, Homo sapiens
ctttgatgaagctat

SEQ ID NO: 26020 - DNA, 15 bp, Homo sapiens
tctttgatgaagcta

SEQ ID NO: 26021 - DNA, 15 bp, Homo sapiens
ctctttgatgaagct

SEQ ID NO: 26022 - DNA, 15 bp, Homo sapiens
tctctttgatgaagc

SEQ ID NO: 26023 - DNA, 15 bp, Homo sapiens
ctctctttgatgaag

SEQ ID NO: 26024 - DNA, 15 bp, Homo sapiens
actctctttgatgaa

SEQ ID NO: 26025 - DNA, 15 bp, Homo sapiens
tactctctttgatga

SEQ ID NO: 26026 - DNA, 15 bp, Homo sapiens
ttactctctttgatg

SEQ ID NO: 26027 - DNA, 15 bp, Homo sapiens
tttactctctttgat

SEQ ID NO: 26028 - DNA, 15 bp, Homo sapiens
ctttactctctttga

SEQ ID NO: 26029 - DNA, 15 bp, Homo sapiens
tctttactctctttg

SEQ ID NO: 26030 - DNA, 15 bp, Homo sapiens
ttctttactctcttt

SEQ ID NO: 26031 - DNA, 15 bp, Homo sapiens
cttctttactctctt

SEQ ID NO: 26032 - DNA, 15 bp, Homo sapiens
tcttctttactctct

SEQ ID NO: 26033 - DNA, 15 bp, Homo sapiens
ctcttctttactctc

SEQ ID NO: 26034 - DNA, 15 bp, Homo sapiens
tctcttctttactct

SEQ ID NO: 26035 - DNA, 15 bp, Homo sapiens
gtctcttctttactc

SEQ ID NO: 26036 - DNA, 15 bp, Homo sapiens
ggtctcttctttact

SEQ ID NO: 26037 - DNA, 15 bp, Homo sapiens
aggtctcttctttac

SEQ ID NO: 26038 - DNA, 15 bp, Homo sapiens
caggtctcttcttta

SEQ ID NO: 26039 - DNA, 15 bp, Homo sapiens
gcaggtctcttcttt

SEQ ID NO: 26040 - DNA, 15 bp, Homo sapiens
ggcaggtctcttctt

SEQ ID NO: 26041 - DNA, 15 bp, Homo sapiens
aggcaggtctcttct

SEQ ID NO: 26042 - DNA, 15 bp, Homo sapiens
taggcaggtctcttc

SEQ ID NO: 26043 - DNA, 15 bp, Homo sapiens
gtaggcaggtctctt

SEQ ID NO: 26044 - DNA, 15 bp, Homo sapiens
ggtaggcaggtctct

SEQ ID NO: 26045 - DNA, 15 bp, Homo sapiens
aggtaggcaggtctc

SEQ ID NO: 26046 - DNA, 15 bp, Homo sapiens
taggtaggcaggtct

SEQ ID NO: 26047 - DNA, 15 bp, Homo sapiens
ctaggtaggcaggtc

SEQ ID NO: 26048 - DNA, 15 bp, Homo sapiens
gctaggtaggcaggt

SEQ ID NO: 26049 - DNA, 15 bp, Homo sapiens
agctaggtaggcagg

SEQ ID NO: 26050 - DNA, 15 bp, Homo sapiens
cagctaggtaggcag

SEQ ID NO: 26051 - DNA, 15 bp, Homo sapiens
tcagctaggtaggca

SEQ ID NO: 26052 - DNA, 15 bp, Homo sapiens
atcagctaggtaggc

SEQ ID NO: 26053 - DNA, 15 bp, Homo sapiens
aatcagctaggtagg

SEQ ID NO: 26054 - DNA, 15 bp, Homo sapiens
gaatcagctaggtag

SEQ ID NO: 26055 - DNA, 15 bp, Homo sapiens
agaatcagctaggta

SEQ ID NO: 26056 - DNA, 15 bp, Homo sapiens
tagaatcagctaggt

SEQ ID NO: 26057 - DNA, 15 bp, Homo sapiens
atagaatcagctagg

SEQ ID NO: 26058 - DNA, 15 bp, Homo sapiens
catagaatcagctag

SEQ ID NO: 26059 - DNA, 15 bp, Homo sapiens
ccatagaatcagcta

SEQ ID NO: 26060 - DNA, 15 bp, Homo sapiens
gccatagaatcagct

SEQ ID NO: 26061 - DNA, 15 bp, Homo sapiens
tgccatagaatcagc

SEQ ID NO: 26062 - DNA, 15 bp, Homo sapiens
ttgccatagaatcag

SEQ ID NO: 26063 - DNA, 15 bp, Homo sapiens
tttgccatagaatca

SEQ ID NO: 26064 - DNA, 15 bp, Homo sapiens
atttgccatagaatc

SEQ ID NO: 26065 - DNA, 15 bp, Homo sapiens
gatttgccatagaat

SEQ ID NO: 26066 - DNA, 15 bp, Homo sapiens
agatttgccatagaa

SEQ ID NO: 26067 - DNA, 15 bp, Homo sapiens
gagatttgccataga

SEQ ID NO: 26068 - DNA, 15 bp, Homo sapiens
tgagatttgccatag

SEQ ID NO: 26069 - DNA, 15 bp, Homo sapiens
gtgagatttgccata

SEQ ID NO: 26070 - DNA, 15 bp, Homo sapiens
agtgagatttgccat

SEQ ID NO: 26071 - DNA, 15 bp, Homo sapiens
aagtgagatttgcca

SEQ ID NO: 26072 - DNA, 15 bp, Homo sapiens
gaagtgagatttgcc

SEQ ID NO: 26073 - DNA, 15 bp, Homo sapiens
agaagtgagatttgc

SEQ ID NO: 26074 - DNA, 15 bp, Homo sapiens
gagaagtgagatttg

SEQ ID NO: 26075 - DNA, 15 bp, Homo sapiens
agagaagtgagattt

SEQ ID NO: 26076 - DNA, 15 bp, Homo sapiens
cagagaagtgagatt

SEQ ID NO: 26077 - DNA, 15 bp, Homo sapiens
ccagagaagtgagat

SEQ ID NO: 26078 - DNA, 15 bp, Homo sapiens
tccagagaagtgaga

SEQ ID NO: 26079 - DNA, 15 bp, Homo sapiens
ttccagagaagtgag

SEQ ID NO: 26080 - DNA, 15 bp, Homo sapiens
cttccagagaagtga

SEQ ID NO: 26081 - DNA, 15 bp, Homo sapiens
gcttccagagaagtg

SEQ ID NO: 26082 - DNA, 15 bp, Homo sapiens
agcttccagagaagt

SEQ ID NO: 26083 - DNA, 15 bp, Homo sapiens
aagcttccagagaag

SEQ ID NO: 26084 - DNA, 15 bp, Homo sapiens
aaagcttccagagaa

SEQ ID NO: 26085 - DNA, 15 bp, Homo sapiens
aaaagcttccagaga

SEQ ID NO: 26086 - DNA, 15 bp, Homo sapiens
gaaaagcttccagag

SEQ ID NO: 26087 - DNA, 15 bp, Homo sapiens
ggaaaagcttccaga

SEQ ID NO: 26088 - DNA, 15 bp, Homo sapiens
aggaaaagcttccag

SEQ ID NO: 26089 - DNA, 15 bp, Homo sapiens
caggaaaagcttcca

SEQ ID NO: 26090 - DNA, 15 bp, Homo sapiens
acaggaaaagcttcc

SEQ ID NO: 26091 - DNA, 15 bp, Homo sapiens
aacaggaaaagcttc

SEQ ID NO: 26092 - DNA, 15 bp, Homo sapiens
taacaggaaaagctt

SEQ ID NO: 26093 - DNA, 15 bp, Homo sapiens
ttaacaggaaaagct

SEQ ID NO: 26094 - DNA, 15 bp, Homo sapiens
attaacaggaaaagc

SEQ ID NO: 26095 - DNA, 15 bp, Homo sapiens
gattaacaggaaaag

SEQ ID NO: 26096 - DNA, 15 bp, Homo sapiens
agattaacaggaaaa

SEQ ID NO: 26097 - DNA, 15 bp, Homo sapiens
aagattaacaggaaa

SEQ ID NO: 26098 - DNA, 15 bp, Homo sapiens
taagattaacaggaa

SEQ ID NO: 26099 - DNA, 15 bp, Homo sapiens
ataagattaacagga

SEQ ID NO: 26100 - DNA, 15 bp, Homo sapiens
aataagattaacagg

SEQ ID NO: 26101 - DNA, 15 bp, Homo sapiens
gaataagattaacag

SEQ ID NO: 26102 - DNA, 15 bp, Homo sapiens
ggaataagattaaca

SEQ ID NO: 26103 - DNA, 15 bp, Homo sapiens
aggaataagattaac

SEQ ID NO: 26104 - DNA, 15 bp, Homo sapiens
aaggaataagattaa

SEQ ID NO: 26105 - DNA, 15 bp, Homo sapiens
gaaggaataagatta

SEQ ID NO: 26106 - DNA, 15 bp, Homo sapiens
tgaaggaataagatt

SEQ ID NO: 26107 - DNA, 15 bp, Homo sapiens
ctgaaggaataagat

SEQ ID NO: 26108 - DNA, 15 bp, Homo sapiens
actgaaggaataaga

SEQ ID NO: 26109 - DNA, 15 bp, Homo sapiens
aactgaaggaataag

SEQ ID NO: 26110 - DNA, 15 bp, Homo sapiens
aaactgaaggaataa

SEQ ID NO: 26111 - DNA, 15 bp, Homo sapiens
gaaactgaaggaata

SEQ ID NO: 26112 - DNA, 15 bp, Homo sapiens
agaaactgaaggaat

SEQ ID NO: 26113 - DNA, 15 bp, Homo sapiens
cagaaactgaaggaa

SEQ ID NO: 26114 - DNA, 15 bp, Homo sapiens
gcagaaactgaagga

SEQ ID NO: 26115 - DNA, 15 bp, Homo sapiens
ggcagaaactgaagg

SEQ ID NO: 26116 - DNA, 15 bp, Homo sapiens
aggcagaaactgaag

SEQ ID NO: 26117 - DNA, 15 bp, Homo sapiens
gaggcagaaactgaa

SEQ ID NO: 26118 - DNA, 15 bp, Homo sapiens
agaggcagaaactga

SEQ ID NO: 26119 - DNA, 15 bp, Homo sapiens
aagaggcagaaactg

SEQ ID NO: 26120 - DNA, 15 bp, Homo sapiens
caagaggcagaaact

SEQ ID NO: 26121 - DNA, 15 bp, Homo sapiens
acaagaggcagaaac

SEQ ID NO: 26122 - DNA, 15 bp, Homo sapiens
aacaagaggcagaaa

SEQ ID NO: 26123 - DNA, 15 bp, Homo sapiens
aaacaagaggcagaa

SEQ ID NO: 26124 - DNA, 15 bp, Homo sapiens
gaaacaagaggcaga

SEQ ID NO: 26125 - DNA, 15 bp, Homo sapiens
tgaaacaagaggcag

SEQ ID NO: 26126 - DNA, 15 bp, Homo sapiens
atgaaacaagaggca

SEQ ID NO: 26127 - DNA, 15 bp, Homo sapiens
tatgaaacaagaggc

SEQ ID NO: 26128 - DNA, 15 bp, Homo sapiens
ttatgaaacaagagg

SEQ ID NO: 26129 - DNA, 15 bp, Homo sapiens
tttatgaaacaagag

SEQ ID NO: 26130 - DNA, 15 bp, Homo sapiens
ttttatgaaacaaga

SEQ ID NO: 26131 - DNA, 15 bp, Homo sapiens
tttttatgaaacaag

SEQ ID NO: 26132 - DNA, 15 bp, Homo sapiens
gtttttatgaaacaa

SEQ ID NO: 26133 - DNA, 15 bp, Homo sapiens
agtttttatgaaaca

SEQ ID NO: 26134 - DNA, 15 bp, Homo sapiens
gagtttttatgaaac

SEQ ID NO: 26135 - DNA, 15 bp, Homo sapiens
tgagtttttatgaaa

SEQ ID NO: 26136 - DNA, 15 bp, Homo sapiens
atgagtttttatgaa

SEQ ID NO: 26137 - DNA, 15 bp, Homo sapiens
aatgagtttttatga

SEQ ID NO: 26138 - DNA, 15 bp, Homo sapiens
gaatgagtttttatg

SEQ ID NO: 26139 - DNA, 15 bp, Homo sapiens
agaatgagtttttat

SEQ ID NO: 26140 - DNA, 15 bp, Homo sapiens
aagaatgagttttta

SEQ ID NO: 26141 - DNA, 15 bp, Homo sapiens
aaagaatgagttttt

SEQ ID NO: 26142 - DNA, 15 bp, Homo sapiens
taaagaatgagtttt

SEQ ID NO: 26143 - DNA, 15 bp, Homo sapiens
ttaaagaatgagttt

SEQ ID NO: 26144 - DNA, 15 bp, Homo sapiens
tttaaagaatgagtt

SEQ ID NO: 26145 - DNA, 15 bp, Homo sapiens
atttaaagaatgagt

SEQ ID NO: 26146 - DNA, 15 bp, Homo sapiens
catttaaagaatgag

SEQ ID NO: 26147 - DNA, 15 bp, Homo sapiens
gcatttaaagaatga

SEQ ID NO: 26148 - DNA, 15 bp, Homo sapiens
agcatttaaagaatg

SEQ ID NO: 26149 - DNA, 15 bp, Homo sapiens
aagcatttaaagaat

SEQ ID NO: 26150 - DNA, 15 bp, Homo sapiens
taagcatttaaagaa

SEQ ID NO: 26151 - DNA, 15 bp, Homo sapiens
ataagcatttaaaga

SEQ ID NO: 26152 - DNA, 15 bp, Homo sapiens
aataagcatttaaag

SEQ ID NO: 26153 - DNA, 15 bp, Homo sapiens
gaataagcatttaaa

SEQ ID NO: 26154 - DNA, 15 bp, Homo sapiens
tgaataagcatttaa

SEQ ID NO: 26155 - DNA, 15 bp, Homo sapiens
atgaataagcattta

SEQ ID NO: 26156 - DNA, 15 bp, Homo sapiens
aatgaataagcattt

SEQ ID NO: 26157 - DNA, 15 bp, Homo sapiens
aaatgaataagcatt

SEQ ID NO: 26158 - DNA, 15 bp, Homo sapiens
gaaatgaataagcat

SEQ ID NO: 26159 - DNA, 15 bp, Homo sapiens
agaaatgaataagca

SEQ ID NO: 26160 - DNA, 15 bp, Homo sapiens
gagaaatgaataagc

SEQ ID NO: 26161 - DNA, 15 bp, Homo sapiens
agagaaatgaataag

SEQ ID NO: 26162 - DNA, 15 bp, Homo sapiens
aagagaaatgaataa

SEQ ID NO: 26163 - DNA, 15 bp, Homo sapiens
caagagaaatgaata

SEQ ID NO: 26164 - DNA, 15 bp, Homo sapiens
acaagagaaatgaat

SEQ ID NO: 26165 - DNA, 15 bp, Homo sapiens
gacaagagaaatgaa

SEQ ID NO: 26166 - DNA, 15 bp, Homo sapiens
agacaagagaaatga

SEQ ID NO: 26167 - DNA, 15 bp, Homo sapiens
gagacaagagaaatg

SEQ ID NO: 26168 - DNA, 15 bp, Homo sapiens
tgagacaagagaaat

SEQ ID NO: 26169 - DNA, 15 bp, Homo sapiens
atgagacaagagaaa

SEQ ID NO: 26170 - DNA, 15 bp, Homo sapiens
tatgagacaagagaa

SEQ ID NO: 26171 - DNA, 15 bp, Homo sapiens
atatgagacaagaga

SEQ ID NO: 26172 - DNA, 15 bp, Homo sapiens
tatatgagacaagag

SEQ ID NO: 26173 - DNA, 15 bp, Homo sapiens
ttatatgagacaaga

SEQ ID NO: 26174 - DNA, 15 bp, Homo sapiens
tttatatgagacaag

SEQ ID NO: 26175 - DNA, 15 bp, Homo sapiens
gtttatatgagacaa

SEQ ID NO: 26176 - DNA, 15 bp, Homo sapiens
ggtttatatgagaca

SEQ ID NO: 26177 - DNA, 15 bp, Homo sapiens
tggtttatatgagac

SEQ ID NO: 26178 - DNA, 15 bp, Homo sapiens
ttggtttatatgaga

SEQ ID NO: 26179 - DNA, 15 bp, Homo sapiens
attggtttatatgag

SEQ ID NO: 26180 - DNA, 15 bp, Homo sapiens
tattggtttatatga

SEQ ID NO: 26181 - DNA, 15 bp, Homo sapiens
atattggtttatatg

SEQ ID NO: 26182 - DNA, 15 bp, Homo sapiens
catattggtttatat

SEQ ID NO: 26183 - DNA, 15 bp, Homo sapiens
tcatattggtttata

SEQ ID NO: 26184 - DNA, 15 bp, Homo sapiens
ctcatattggtttat

SEQ ID NO: 26185 - DNA, 15 bp, Homo sapiens
cctcatattggttta

SEQ ID NO: 26186 - DNA, 15 bp, Homo sapiens
acctcatattggttt

SEQ ID NO: 26187 - DNA, 15 bp, Homo sapiens
tacctcatattggtt

SEQ ID NO: 26188 - DNA, 15 bp, Homo sapiens
gtacctcatattggt

SEQ ID NO: 26189 - DNA, 15 bp, Homo sapiens
agtacctcatattgg

SEQ ID NO: 26190 - DNA, 15 bp, Homo sapiens
cagtacctcatattg

SEQ ID NO: 26191 - DNA, 15 bp, Homo sapiens
ccagtacctcatatt

SEQ ID NO: 26192 - DNA, 15 bp, Homo sapiens
accagtacctcatat

SEQ ID NO: 26193 - DNA, 15 bp, Homo sapiens
taccagtacctcata

SEQ ID NO: 26194 - DNA, 15 bp, Homo sapiens
ataccagtacctcat

SEQ ID NO: 26195 - DNA, 15 bp, Homo sapiens
gataccagtacctca

SEQ ID NO: 26196 - DNA, 15 bp, Homo sapiens
agataccagtacctc

SEQ ID NO: 26197 - DNA, 15 bp, Homo sapiens
aagataccagtacct

SEQ ID NO: 26198 - DNA, 15 bp, Homo sapiens
aaagataccagtacc

SEQ ID NO: 26199 - DNA, 15 bp, Homo sapiens
aaaagataccagtac

SEQ ID NO: 26200 - DNA, 15 bp, Homo sapiens
caaaagataccagta

SEQ ID NO: 26201 - DNA, 15 bp, Homo sapiens
tcaaaagataccagt

SEQ ID NO: 26202 - DNA, 15 bp, Homo sapiens
ctcaaaagataccag

SEQ ID NO: 26203 - DNA, 15 bp, Homo sapiens
actcaaaagatacca

SEQ ID NO: 26204 - DNA, 15 bp, Homo sapiens
aactcaaaagatacc

SEQ ID NO: 26205 - DNA, 15 bp, Homo sapiens
aaactcaaaagatac

SEQ ID NO: 26206 - DNA, 15 bp, Homo sapiens
aaaactcaaaagata

SEQ ID NO: 26207 - DNA, 15 bp, Homo sapiens
taaaactcaaaagat

SEQ ID NO: 26208 - DNA, 15 bp, Homo sapiens
ctaaaactcaaaaga

SEQ ID NO: 26209 - DNA, 15 bp, Homo sapiens
actaaaactcaaaag

SEQ ID NO: 26210 - DNA, 15 bp, Homo sapiens
aactaaaactcaaaa

SEQ ID NO: 26211 - DNA, 15 bp, Homo sapiens
taactaaaactcaaa

SEQ ID NO: 26212 - DNA, 15 bp, Homo sapiens
ataactaaaactcaa

SEQ ID NO: 26213 - DNA, 15 bp, Homo sapiens
tataactaaaactca

SEQ ID NO: 26214 - DNA, 15 bp, Homo sapiens
ttataactaaaactc

SEQ ID NO: 26215 - DNA, 15 bp, Homo sapiens
cttataactaaaact

SEQ ID NO: 26216 - DNA, 15 bp, Homo sapiens
ccttataactaaaac

SEQ ID NO: 26217 - DNA, 15 bp, Homo sapiens
tccttataactaaaa

SEQ ID NO: 26218 - DNA, 15 bp, Homo sapiens
ttccttataactaaa

SEQ ID NO: 26219 - DNA, 15 bp, Homo sapiens
cttccttataactaa

SEQ ID NO: 26220 - DNA, 15 bp, Homo sapiens
gcttccttataacta

SEQ ID NO: 26221 - DNA, 15 bp, Homo sapiens
tgcttccttataact

SEQ ID NO: 26222 - DNA, 15 bp, Homo sapiens
atgcttccttataac

SEQ ID NO: 26223 - DNA, 15 bp, Homo sapiens
tatgcttccttataa

SEQ ID NO: 26224 - DNA, 15 bp, Homo sapiens
ttatgcttccttata

SEQ ID NO: 26225 - DNA, 15 bp, Homo sapiens
tttatgcttccttat

SEQ ID NO: 26226 - DNA, 15 bp, Homo sapiens
atttatgcttcctta

SEQ ID NO: 26227 - DNA, 15 bp, Homo sapiens
catttatgcttcctt

SEQ ID NO: 26228 - DNA, 15 bp, Homo sapiens
ccatttatgcttcct

SEQ ID NO: 26229 - DNA, 15 bp, Homo sapiens
accatttatgcttcc

SEQ ID NO: 26230 - DNA, 15 bp, Homo sapiens
aaccatttatgcttc

SEQ ID NO: 26231 - DNA, 15 bp, Homo sapiens
taaccatttatgctt

SEQ ID NO: 26232 - DNA, 15 bp, Homo sapiens
ttaaccatttatgct

SEQ ID NO: 26233 - DNA, 15 bp, Homo sapiens
tttaaccatttatgc

SEQ ID NO: 26234 - DNA, 15 bp, Homo sapiens
atttaaccatttatg

SEQ ID NO: 26235 - DNA, 15 bp, Homo sapiens
aatttaaccatttat

SEQ ID NO: 26236 - DNA, 15 bp, Homo sapiens
aaatttaaccattta

SEQ ID NO: 26237 - DNA, 15 bp, Homo sapiens
taaatttaaccattt

SEQ ID NO: 26238 - DNA, 15 bp, Homo sapiens
ttaaatttaaccatt

SEQ ID NO: 26239 - DNA, 15 bp, Homo sapiens
tttaaatttaaccat

SEQ ID NO: 26240 - DNA, 15 bp, Homo sapiens
atttaaatttaacca

SEQ ID NO: 26241 - DNA, 15 bp, Homo sapiens
catttaaatttaacc

SEQ ID NO: 26242 - DNA, 15 bp, Homo sapiens
ccatttaaatttaac

SEQ ID NO: 26243 - DNA, 15 bp, Homo sapiens
gccatttaaatttaa

SEQ ID NO: 26244 - DNA, 15 bp, Homo sapiens
agccatttaaattta

SEQ ID NO: 26245 - DNA, 15 bp, Homo sapiens
tagccatttaaattt

SEQ ID NO: 26246 - DNA, 15 bp, Homo sapiens
ttagccatttaaatt

SEQ ID NO: 26247 - DNA, 15 bp, Homo sapiens
tttagccatttaaat

SEQ ID NO: 26248 - DNA, 15 bp, Homo sapiens
gtttagccatttaaa

SEQ ID NO: 26249 - DNA, 15 bp, Homo sapiens
ggtttagccatttaa

SEQ ID NO: 26250 - DNA, 15 bp, Homo sapiens
gggtttagccattta

SEQ ID NO: 26251 - DNA, 15 bp, Homo sapiens
ggggtttagccattt

SEQ ID NO: 26252 - DNA, 15 bp, Homo sapiens
tggggtttagccatt

SEQ ID NO: 26253 - DNA, 15 bp, Homo sapiens
atggggtttagccat

SEQ ID NO: 26254 - DNA, 15 bp, Homo sapiens
aatggggtttagcca

SEQ ID NO: 26255 - DNA, 15 bp, Homo sapiens
aaatggggtttagcc

SEQ ID NO: 26256 - DNA, 15 bp, Homo sapiens
caaatggggtttagc

SEQ ID NO: 26257 - DNA, 15 bp, Homo sapiens
gcaaatggggtttag

SEQ ID NO: 26258 - DNA, 15 bp, Homo sapiens
ggcaaatggggttta

SEQ ID NO: 26259 - DNA, 15 bp, Homo sapiens
tggcaaatggggttt

SEQ ID NO: 26260 - DNA, 15 bp, Homo sapiens
atggcaaatggggtt

SEQ ID NO: 26261 - DNA, 15 bp, Homo sapiens
aatggcaaatggggt

SEQ ID NO: 26262 - DNA, 15 bp, Homo sapiens
aaatggcaaatgggg

SEQ ID NO: 26263 - DNA, 15 bp, Homo sapiens
caaatggcaaatggg

SEQ ID NO: 26264 - DNA, 15 bp, Homo sapiens
acaaatggcaaatgg

SEQ ID NO: 26265 - DNA, 15 bp, Homo sapiens
cacaaatggcaaatg

SEQ ID NO: 26266 - DNA, 15 bp, Homo sapiens
acacaaatggcaaat

SEQ ID NO: 26267 - DNA, 15 bp, Homo sapiens
tacacaaatggcaaa

SEQ ID NO: 26268 - DNA, 15 bp, Homo sapiens
atacacaaatggcaa

SEQ ID NO: 26269 - DNA, 15 bp, Homo sapiens
gatacacaaatggca

SEQ ID NO: 26270 - DNA, 15 bp, Homo sapiens
agatacacaaatggc

SEQ ID NO: 26271 - DNA, 15 bp, Homo sapiens
aagatacacaaatgg

SEQ ID NO: 26272 - DNA, 15 bp, Homo sapiens
aaagatacacaaatg

SEQ ID NO: 26273 - DNA, 15 bp, Homo sapiens
taaagatacacaaat

SEQ ID NO: 26274 - DNA, 15 bp, Homo sapiens
ttaaagatacacaaa

SEQ ID NO: 26275 - DNA, 15 bp, Homo sapiens
attaaagatacacaa

SEQ ID NO: 26276 - DNA, 15 bp, Homo sapiens
aattaaagatacaca

SEQ ID NO: 26277 - DNA, 15 bp, Homo sapiens
aaattaaagatacac

SEQ ID NO: 26278 - DNA, 15 bp, Homo sapiens
aaaattaaagataca

SEQ ID NO: 26279 - DNA, 15 bp, Homo sapiens
taaaattaaagatac

SEQ ID NO: 26280 - DNA, 15 bp, Homo sapiens
ctaaaattaaagata

SEQ ID NO: 26281 - DNA, 15 bp, Homo sapiens
actaaaattaaagat

SEQ ID NO: 26282 - DNA, 15 bp, Homo sapiens
aactaaaattaaaga

SEQ ID NO: 26283 - DNA, 15 bp, Homo sapiens
aaactaaaattaaag

SEQ ID NO: 26284 - DNA, 15 bp, Homo sapiens
caaactaaaattaaa

SEQ ID NO: 26285 - DNA, 15 bp, Homo sapiens
acaaactaaaattaa

SEQ ID NO: 26286 - DNA, 15 bp, Homo sapiens
aacaaactaaaatta

SEQ ID NO: 26287 - DNA, 15 bp, Homo sapiens
caacaaactaaaatt

SEQ ID NO: 26288 - DNA, 15 bp, Homo sapiens
tcaacaaactaaaat

SEQ ID NO: 26289 - DNA, 15 bp, Homo sapiens
ctcaacaaactaaaa

SEQ ID NO: 26290 - DNA, 15 bp, Homo sapiens
tctcaacaaactaaa

SEQ ID NO: 26291 - DNA, 15 bp, Homo sapiens
ctctcaacaaactaa

SEQ ID NO: 26292 - DNA, 15 bp, Homo sapiens
tctctcaacaaacta

SEQ ID NO: 26293 - DNA, 15 bp, Homo sapiens
gtctctcaacaaact

SEQ ID NO: 26294 - DNA, 15 bp, Homo sapiens
agtctctcaacaaac

SEQ ID NO: 26295 - DNA, 15 bp, Homo sapiens
aagtctctcaacaaa

SEQ ID NO: 26296 - DNA, 15 bp, Homo sapiens
taagtctctcaacaa

SEQ ID NO: 26297 - DNA, 15 bp, Homo sapiens
ataagtctctcaaca

SEQ ID NO: 26298 - DNA, 15 bp, Homo sapiens
gataagtctctcaac

SEQ ID NO: 26299 - DNA, 15 bp, Homo sapiens
tgataagtctctcaa

SEQ ID NO: 26300 - DNA, 15 bp, Homo sapiens
gtgataagtctctca

SEQ ID NO: 26301 - DNA, 15 bp, Homo sapiens
agtgataagtctctc

SEQ ID NO: 26302 - DNA, 15 bp, Homo sapiens
tagtgataagtctct

SEQ ID NO: 26303 - DNA, 15 bp, Homo sapiens
gtagtgataagtctc

SEQ ID NO: 26304 - DNA, 15 bp, Homo sapiens
ggtagtgataagtct

SEQ ID NO: 26305 - DNA, 15 bp, Homo sapiens
tggtagtgataagtc

SEQ ID NO: 26306 - DNA, 15 bp, Homo sapiens
ttggtagtgataagt

SEQ ID NO: 26307 - DNA, 15 bp, Homo sapiens
tttggtagtgataag

SEQ ID NO: 26308 - DNA, 15 bp, Homo sapiens
gtttggtagtgataa

SEQ ID NO: 26309 - DNA, 15 bp, Homo sapiens
ggtttggtagtgata

SEQ ID NO: 26310 - DNA, 15 bp, Homo sapiens
tggtttggtagtgat

SEQ ID NO: 26311 - DNA, 15 bp, Homo sapiens
gtggtttggtagtga

SEQ ID NO: 26312 - DNA, 15 bp, Homo sapiens
tgtggtttggtagtg

SEQ ID NO: 26313 - DNA, 15 bp, Homo sapiens
ttgtggtttggtagt

SEQ ID NO: 26314 - DNA, 15 bp, Homo sapiens
tttgtggtttggtag

SEQ ID NO: 26315 - DNA, 15 bp, Homo sapiens
ctttgtggtttggta

SEQ ID NO: 26316 - DNA, 15 bp, Homo sapiens
tctttgtggtttggt

SEQ ID NO: 26317 - DNA, 15 bp, Homo sapiens
ttctttgtggtttgg

SEQ ID NO: 26318 - DNA, 15 bp, Homo sapiens
attctttgtggtttg

SEQ ID NO: 26319 - DNA, 15 bp, Homo sapiens
aattctttgtggttt

SEQ ID NO: 26320 - DNA, 15 bp, Homo sapiens
aaattctttgtggtt

SEQ ID NO: 26321 - DNA, 15 bp, Homo sapiens
taaattctttgtggt

SEQ ID NO: 26322 - DNA, 15 bp, Homo sapiens
ttaaattctttgtgg

SEQ ID NO: 26323 - DNA, 15 bp, Homo sapiens
tttaaattctttgtg

SEQ ID NO: 26324 - DNA, 15 bp, Homo sapiens
ttttaaattctttgt

SEQ ID NO: 26325 - DNA, 15 bp, Homo sapiens
cttttaaattctttg

SEQ ID NO: 26326 - DNA, 15 bp, Homo sapiens
tcttttaaattcttt

SEQ ID NO: 26327 - DNA, 15 bp, Homo sapiens
ttcttttaaattctt

SEQ ID NO: 26328 - DNA, 15 bp, Homo sapiens
tttcttttaaattct

SEQ ID NO: 26329 - DNA, 15 bp, Homo sapiens
gtttcttttaaattc

SEQ ID NO: 26330 - DNA, 15 bp, Homo sapiens
agtttcttttaaatt

SEQ ID NO: 26331 - DNA, 15 bp, Homo sapiens
cagtttcttttaaat

SEQ ID NO: 26332 - DNA, 15 bp, Homo sapiens
acagtttcttttaaa

SEQ ID NO: 26333 - DNA, 15 bp, Homo sapiens
gacagtttcttttaa

SEQ ID NO: 26334 - DNA, 15 bp, Homo sapiens
tgacagtttctttta

SEQ ID NO: 26335 - DNA, 15 bp, Homo sapiens
ctgacagtttctttt

SEQ ID NO: 26336 - DNA, 15 bp, Homo sapiens
actgacagtttcttt

SEQ ID NO: 26337 - DNA, 15 bp, Homo sapiens
tactgacagtttctt

SEQ ID NO: 26338 - DNA, 15 bp, Homo sapiens
ctactgacagtttct

SEQ ID NO: 26339 - DNA, 15 bp, Homo sapiens
cctactgacagtttc

SEQ ID NO: 26340 - DNA, 15 bp, Homo sapiens
acctactgacagttt

SEQ ID NO: 26341 - DNA, 15 bp, Homo sapiens
tacctactgacagtt

SEQ ID NO: 26342 - DNA, 15 bp, Homo sapiens
atacctactgacagt

SEQ ID NO: 26343 - DNA, 15 bp, Homo sapiens
tatacctactgacag

SEQ ID NO: 26344 - DNA, 15 bp, Homo sapiens
ctatacctactgaca

SEQ ID NO: 26345 - DNA, 15 bp, Homo sapiens
cctatacctactgac

SEQ ID NO: 26346 - DNA, 15 bp, Homo sapiens
acctatacctactga

SEQ ID NO: 26347 - DNA, 15 bp, Homo sapiens
cacctatacctactg

SEQ ID NO: 26348 - DNA, 15 bp, Homo sapiens
ccacctatacctact

SEQ ID NO: 26349 - DNA, 15 bp, Homo sapiens
tccacctatacctac

SEQ ID NO: 26350 - DNA, 15 bp, Homo sapiens
ttccacctataccta

SEQ ID NO: 26351 - DNA, 15 bp, Homo sapiens
cttccacctatacct

SEQ ID NO: 26352 - DNA, 15 bp, Homo sapiens
ccttccacctatacc

SEQ ID NO: 26353 - DNA, 15 bp, Homo sapiens
tccttccacctatac

SEQ ID NO: 26354 - DNA, 15 bp, Homo sapiens
ctccttccacctata

SEQ ID NO: 26355 - DNA, 15 bp, Homo sapiens
cctccttccacctat

SEQ ID NO: 26356 - DNA, 15 bp, Homo sapiens
ccctccttccaccta

SEQ ID NO: 26357 - DNA, 15 bp, Homo sapiens
gccctccttccacct

SEQ ID NO: 26358 - DNA, 15 bp, Homo sapiens
tgccctccttccacc

SEQ ID NO: 26359 - DNA, 15 bp, Homo sapiens
atgccctccttccac

SEQ ID NO: 26360 - DNA, 15 bp, Homo sapiens
aatgccctccttcca

SEQ ID NO: 26361 - DNA, 15 bp, Homo sapiens
aaatgccctccttcc

SEQ ID NO: 26362 - DNA, 15 bp, Homo sapiens
taaatgccctccttc

SEQ ID NO: 26363 - DNA, 15 bp, Homo sapiens
ataaatgccctcctt

SEQ ID NO: 26364 - DNA, 15 bp, Homo sapiens
gataaatgccctcct

SEQ ID NO: 26365 - DNA, 15 bp, Homo sapiens
tgataaatgccctcc

SEQ ID NO: 26366 - DNA, 15 bp, Homo sapiens
ctgataaatgccctc

SEQ ID NO: 26367 - DNA, 15 bp, Homo sapiens
tctgataaatgccct

SEQ ID NO: 26368 - DNA, 15 bp, Homo sapiens
ctctgataaatgccc

SEQ ID NO: 26369 - DNA, 15 bp, Homo sapiens
tctctgataaatgcc

SEQ ID NO: 26370 - DNA, 15 bp, Homo sapiens
atctctgataaatgc

SEQ ID NO: 26371 - DNA, 15 bp, Homo sapiens
aatctctgataaatg

SEQ ID NO: 26372 - DNA, 15 bp, Homo sapiens
aaatctctgataaat

SEQ ID NO: 26373 - DNA, 15 bp, Homo sapiens
aaaatctctgataaa

SEQ ID NO: 26374 - DNA, 15 bp, Homo sapiens
taaaatctctgataa

SEQ ID NO: 26375 - DNA, 15 bp, Homo sapiens
ttaaaatctctgata

SEQ ID NO: 26376 - DNA, 15 bp, Homo sapiens
attaaaatctctgat

SEQ ID NO: 26377 - DNA, 15 bp, Homo sapiens
aattaaaatctctga

SEQ ID NO: 26378 - DNA, 15 bp, Homo sapiens
aaattaaaatctctg

SEQ ID NO: 26379 - DNA, 15 bp, Homo sapiens
taaattaaaatctct

SEQ ID NO: 26380 - DNA, 15 bp, Homo sapiens
ttaaattaaaatctc

SEQ ID NO: 26381 - DNA, 15 bp, Homo sapiens
cttaaattaaaatct

SEQ ID NO: 26382 - DNA, 15 bp, Homo sapiens
tcttaaattaaaatc

SEQ ID NO: 26383 - DNA, 15 bp, Homo sapiens
ttcttaaattaaaat

SEQ ID NO: 26384 - DNA, 15 bp, Homo sapiens
cttcttaaattaaaa

SEQ ID NO: 26385 - DNA, 15 bp, Homo sapiens
tcttcttaaattaaa

SEQ ID NO: 26386 - DNA, 15 bp, Homo sapiens
ttcttcttaaattaa

SEQ ID NO: 26387 - DNA, 15 bp, Homo sapiens
tttcttcttaaatta

SEQ ID NO: 26388 - DNA, 15 bp, Homo sapiens
ctttcttcttaaatt

SEQ ID NO: 26389 - DNA, 15 bp, Homo sapiens
actttcttcttaaat

SEQ ID NO: 26390 - DNA, 15 bp, Homo sapiens
gactttcttcttaaa

SEQ ID NO: 26391 - DNA, 15 bp, Homo sapiens
agactttcttcttaa

SEQ ID NO: 26392 - DNA, 15 bp, Homo sapiens
aagactttcttctta

SEQ ID NO: 26393 - DNA, 15 bp, Homo sapiens
gaagactttcttctt

SEQ ID NO: 26394 - DNA, 15 bp, Homo sapiens
tgaagactttcttct

SEQ ID NO: 26395 - DNA, 15 bp, Homo sapiens
atgaagactttcttc

SEQ ID NO: 26396 - DNA, 15 bp, Homo sapiens
gatgaagactttctt

SEQ ID NO: 26397 - DNA, 15 bp, Homo sapiens
ggatgaagactttct

SEQ ID NO: 26398 - DNA, 15 bp, Homo sapiens
aggatgaagactttc

SEQ ID NO: 26399 - DNA, 15 bp, Homo sapiens
aaggatgaagacttt

SEQ ID NO: 26400 - DNA, 15 bp, Homo sapiens
taaggatgaagactt

SEQ ID NO: 26401 - DNA, 15 bp, Homo sapiens
ataaggatgaagact

SEQ ID NO: 26402 - DNA, 15 bp, Homo sapiens
gataaggatgaagac

SEQ ID NO: 26403 - DNA, 15 bp, Homo sapiens
ggataaggatgaaga

SEQ ID NO: 26404 - DNA, 15 bp, Homo sapiens
aggataaggatgaag

SEQ ID NO: 26405 - DNA, 15 bp, Homo sapiens
taggataaggatgaa

SEQ ID NO: 26406 - DNA, 15 bp, Homo sapiens
gtaggataaggatga

SEQ ID NO: 26407 - DNA, 15 bp, Homo sapiens
ggtaggataaggatg

SEQ ID NO: 26408 - DNA, 15 bp, Homo sapiens
tggtaggataaggat

SEQ ID NO: 26409 - DNA, 15 bp, Homo sapiens
ttggtaggataagga

SEQ ID NO: 26410 - DNA, 15 bp, Homo sapiens
gttggtaggataagg

SEQ ID NO: 26411 - DNA, 15 bp, Homo sapiens
ggttggtaggataag

SEQ ID NO: 26412 - DNA, 15 bp, Homo sapiens
gggttggtaggataa

SEQ ID NO: 26413 - DNA, 15 bp, Homo sapiens
ggggttggtaggata

SEQ ID NO: 26414 - DNA, 15 bp, Homo sapiens
gggggttggtaggat

SEQ ID NO: 26415 - DNA, 15 bp, Homo sapiens
tgggggttggtagga

SEQ ID NO: 26416 - DNA, 15 bp, Homo sapiens
atgggggttggtagg

SEQ ID NO: 26417 - DNA, 15 bp, Homo sapiens
aatgggggttggtag

SEQ ID NO: 26418 - DNA, 15 bp, Homo sapiens
gaatgggggttggta

SEQ ID NO: 26419 - DNA, 15 bp, Homo sapiens
ggaatgggggttggt

SEQ ID NO: 26420 - DNA, 15 bp, Homo sapiens
gggaatgggggttgg

SEQ ID NO: 26421 - DNA, 15 bp, Homo sapiens
agggaatgggggttg

SEQ ID NO: 26422 - DNA, 15 bp, Homo sapiens
cagggaatgggggtt

SEQ ID NO: 26423 - DNA, 15 bp, Homo sapiens
tcagggaatgggggt

SEQ ID NO: 26424 - DNA, 15 bp, Homo sapiens
ctcagggaatggggg

SEQ ID NO: 26425 - DNA, 15 bp, Homo sapiens
gctcagggaatgggg

SEQ ID NO: 26426 - DNA, 15 bp, Homo sapiens
tgctcagggaatggg

SEQ ID NO: 26427 - DNA, 15 bp, Homo sapiens
atgctcagggaatgg

SEQ ID NO: 26428 - DNA, 15 bp, Homo sapiens
tatgctcagggaatg

SEQ ID NO: 26429 - DNA, 15 bp, Homo sapiens
atatgctcagggaat

SEQ ID NO: 26430 - DNA, 15 bp, Homo sapiens
aatatgctcagggaa

SEQ ID NO: 26431 - DNA, 15 bp, Homo sapiens
aaatatgctcaggga

SEQ ID NO: 26432 - DNA, 15 bp, Homo sapiens
taaatatgctcaggg

SEQ ID NO: 26433 - DNA, 15 bp, Homo sapiens
ataaatatgctcagg

SEQ ID NO: 26434 - DNA, 15 bp, Homo sapiens
gataaatatgctcag

SEQ ID NO: 26435 - DNA, 15 bp, Homo sapiens
tgataaatatgctca

SEQ ID NO: 26436 - DNA, 15 bp, Homo sapiens
atgataaatatgctc

SEQ ID NO: 26437 - DNA, 15 bp, Homo sapiens
aatgataaatatgct

SEQ ID NO: 26438 - DNA, 15 bp, Homo sapiens
taatgataaatatgc

SEQ ID NO: 26439 - DNA, 15 bp, Homo sapiens
gtaatgataaatatg

SEQ ID NO: 26440 - DNA, 15 bp, Homo sapiens
agtaatgataaatat

SEQ ID NO: 26441 - DNA, 15 bp, Homo sapiens
tagtaatgataaata

SEQ ID NO: 26442 - DNA, 15 bp, Homo sapiens
ctagtaatgataaat

SEQ ID NO: 26443 - DNA, 15 bp, Homo sapiens
actagtaatgataaa

SEQ ID NO: 26444 - DNA, 15 bp, Homo sapiens
gactagtaatgataa

SEQ ID NO: 26445 - DNA, 15 bp, Homo sapiens
ggactagtaatgata

SEQ ID NO: 26446 - DNA, 15 bp, Homo sapiens
gggactagtaatgat

SEQ ID NO: 26447 - DNA, 15 bp, Homo sapiens
tgggactagtaatga

SEQ ID NO: 26448 - DNA, 15 bp, Homo sapiens
ctgggactagtaatg

SEQ ID NO: 26449 - DNA, 15 bp, Homo sapiens
gctgggactagtaat

SEQ ID NO: 26450 - DNA, 15 bp, Homo sapiens
tgctgggactagtaa

SEQ ID NO: 26451 - DNA, 15 bp, Homo sapiens
atgctgggactagta

SEQ ID NO: 26452 - DNA, 15 bp, Homo sapiens
tatgctgggactagt

SEQ ID NO: 26453 - DNA, 15 bp, Homo sapiens
atatgctgggactag

SEQ ID NO: 26454 - DNA, 15 bp, Homo sapiens
aatatgctgggacta

SEQ ID NO: 26455 - DNA, 15 bp, Homo sapiens
aaatatgctgggact

SEQ ID NO: 26456 - DNA, 15 bp, Homo sapiens
caaatatgctgggac

SEQ ID NO: 26457 - DNA, 15 bp, Homo sapiens
gcaaatatgctggga

SEQ ID NO: 26458 - DNA, 15 bp, Homo sapiens
agcaaatatgctggg

SEQ ID NO: 26459 - DNA, 15 bp, Homo sapiens
gagcaaatatgctgg

SEQ ID NO: 26460 - DNA, 15 bp, Homo sapiens
ggagcaaatatgctg

SEQ ID NO: 26461 - DNA, 15 bp, Homo sapiens
gggagcaaatatgct

SEQ ID NO: 26462 - DNA, 15 bp, Homo sapiens
tgggagcaaatatgc

SEQ ID NO: 26463 - DNA, 15 bp, Homo sapiens
atgggagcaaatatg

SEQ ID NO: 26464 - DNA, 15 bp, Homo sapiens
tatgggagcaaatat

SEQ ID NO: 26465 - DNA, 15 bp, Homo sapiens
atatgggagcaaata

SEQ ID NO: 26466 - DNA, 15 bp, Homo sapiens
aatatgggagcaaat

SEQ ID NO: 26467 - DNA, 15 bp, Homo sapiens
aaatatgggagcaaa

SEQ ID NO: 26468 - DNA, 15 bp, Homo sapiens
gaaatatgggagcaa

SEQ ID NO: 26469 - DNA, 15 bp, Homo sapiens
ggaaatatgggagca

SEQ ID NO: 26470 - DNA, 15 bp, Homo sapiens
aggaaatatgggagc

SEQ ID NO: 26471 - DNA, 15 bp, Homo sapiens
taggaaatatgggag

SEQ ID NO: 26472 - DNA, 15 bp, Homo sapiens
ataggaaatatggga

SEQ ID NO: 26473 - DNA, 15 bp, Homo sapiens
cataggaaatatggg

SEQ ID NO: 26474 - DNA, 15 bp, Homo sapiens
gcataggaaatatgg

SEQ ID NO: 26475 - DNA, 15 bp, Homo sapiens
agcataggaaatatg

SEQ ID NO: 26476 - DNA, 15 bp, Homo sapiens
aagcataggaaatat

SEQ ID NO: 26477 - DNA, 15 bp, Homo sapiens
taagcataggaaata

SEQ ID NO: 26478 - DNA, 15 bp, Homo sapiens
gtaagcataggaaat

SEQ ID NO: 26479 - DNA, 15 bp, Homo sapiens
ggtaagcataggaaa

SEQ ID NO: 26480 - DNA, 15 bp, Homo sapiens
aggtaagcataggaa

SEQ ID NO: 26481 - DNA, 15 bp, Homo sapiens
caggtaagcatagga

SEQ ID NO: 26482 - DNA, 15 bp, Homo sapiens
acaggtaagcatagg

SEQ ID NO: 26483 - DNA, 15 bp, Homo sapiens
cacaggtaagcatag

SEQ ID NO: 26484 - DNA, 15 bp, Homo sapiens
tcacaggtaagcata

SEQ ID NO: 26485 - DNA, 15 bp, Homo sapiens
ttcacaggtaagcat

SEQ ID NO: 26486 - DNA, 15 bp, Homo sapiens
cttcacaggtaagca

SEQ ID NO: 26487 - DNA, 15 bp, Homo sapiens
tcttcacaggtaagc

SEQ ID NO: 26488 - DNA, 15 bp, Homo sapiens
atcttcacaggtaag

SEQ ID NO: 26489 - DNA, 15 bp, Homo sapiens
aatcttcacaggtaa

SEQ ID NO: 26490 - DNA, 15 bp, Homo sapiens
aaatcttcacaggta

SEQ ID NO: 26491 - DNA, 15 bp, Homo sapiens
aaaatcttcacaggt

SEQ ID NO: 26492 - DNA, 15 bp, Homo sapiens
gaaaatcttcacagg

SEQ ID NO: 26493 - DNA, 15 bp, Homo sapiens
tgaaaatcttcacag

SEQ ID NO: 26494 - DNA, 15 bp, Homo sapiens
atgaaaatcttcaca

SEQ ID NO: 26495 - DNA, 15 bp, Homo sapiens
tatgaaaatcttcac

SEQ ID NO: 26496 - DNA, 15 bp, Homo sapiens
ttatgaaaatcttca

SEQ ID NO: 26497 - DNA, 15 bp, Homo sapiens
gttatgaaaatcttc

SEQ ID NO: 26498 - DNA, 15 bp, Homo sapiens
agttatgaaaatctt

SEQ ID NO: 26499 - DNA, 15 bp, Homo sapiens
aagttatgaaaatct

SEQ ID NO: 26500 - DNA, 15 bp, Homo sapiens
aaagttatgaaaatc

SEQ ID NO: 26501 - DNA, 15 bp, Homo sapiens
aaaagttatgaaaat

SEQ ID NO: 26502 - DNA, 15 bp, Homo sapiens
aaaaagttatgaaaa

SEQ ID NO: 26503 - DNA, 15 bp, Homo sapiens
gaaaaagttatgaaa

SEQ ID NO: 26504 - DNA, 15 bp, Homo sapiens
ggaaaaagttatgaa

SEQ ID NO: 26505 - DNA, 15 bp, Homo sapiens
aggaaaaagttatga

SEQ ID NO: 26506 - DNA, 15 bp, Homo sapiens
aaggaaaaagttatg

SEQ ID NO: 26507 - DNA, 15 bp, Homo sapiens
caaggaaaaagttat

SEQ ID NO: 26508 - DNA, 15 bp, Homo sapiens
gcaaggaaaaagtta

SEQ ID NO: 26509 - DNA, 15 bp, Homo sapiens
agcaaggaaaaagtt

SEQ ID NO: 26510 - DNA, 15 bp, Homo sapiens
aagcaaggaaaaagt

SEQ ID NO: 26511 - DNA, 15 bp, Homo sapiens
aaagcaaggaaaaag

SEQ ID NO: 26512 - DNA, 15 bp, Homo sapiens
aaaagcaaggaaaaa

SEQ ID NO: 26513 - DNA, 15 bp, Homo sapiens
aaaaagcaaggaaaa

SEQ ID NO: 26514 - DNA, 15 bp, Homo sapiens
taaaaagcaaggaaa

SEQ ID NO: 26515 - DNA, 15 bp, Homo sapiens
gtaaaaagcaaggaa

SEQ ID NO: 26516 - DNA, 15 bp, Homo sapiens
agtaaaaagcaagga

SEQ ID NO: 26517 - DNA, 15 bp, Homo sapiens
cagtaaaaagcaagg

SEQ ID NO: 26518 - DNA, 15 bp, Homo sapiens
acagtaaaaagcaag

SEQ ID NO: 26519 - DNA, 15 bp, Homo sapiens
gacagtaaaaagcaa

SEQ ID NO: 26520 - DNA, 15 bp, Homo sapiens
tgacagtaaaaagca

SEQ ID NO: 26521 - DNA, 15 bp, Homo sapiens
gtgacagtaaaaagc

SEQ ID NO: 26522 - DNA, 15 bp, Homo sapiens
agtgacagtaaaaag

SEQ ID NO: 26523 - DNA, 15 bp, Homo sapiens
cagtgacagtaaaaa

SEQ ID NO: 26524 - DNA, 15 bp, Homo sapiens
acagtgacagtaaaa

SEQ ID NO: 26525 - DNA, 15 bp, Homo sapiens
aacagtgacagtaaa

SEQ ID NO: 26526 - DNA, 15 bp, Homo sapiens
caacagtgacagtaa

SEQ ID NO: 26527 - DNA, 15 bp, Homo sapiens
ccaacagtgacagta

SEQ ID NO: 26528 - DNA, 15 bp, Homo sapiens
accaacagtgacagt

SEQ ID NO: 26529 - DNA, 15 bp, Homo sapiens
aaccaacagtgacag

SEQ ID NO: 26530 - DNA, 15 bp, Homo sapiens
gaaccaacagtgaca

SEQ ID NO: 26531 - DNA, 15 bp, Homo sapiens
agaaccaacagtgac

SEQ ID NO: 26532 - DNA, 15 bp, Homo sapiens
cagaaccaacagtga

SEQ ID NO: 26533 - DNA, 15 bp, Homo sapiens
acagaaccaacagtg

SEQ ID NO: 26534 - DNA, 15 bp, Homo sapiens
cacagaaccaacagt

SEQ ID NO: 26535 - DNA, 15 bp, Homo sapiens
tcacagaaccaacag

SEQ ID NO: 26536 - DNA, 15 bp, Homo sapiens
atcacagaaccaaca

SEQ ID NO: 26537 - DNA, 15 bp, Homo sapiens
aatcacagaaccaac

SEQ ID NO: 26538 - DNA, 15 bp, Homo sapiens
aaatcacagaaccaa

SEQ ID NO: 26539 - DNA, 15 bp, Homo sapiens
taaatcacagaacca

SEQ ID NO: 26540 - DNA, 15 bp, Homo sapiens
ataaatcacagaacc

SEQ ID NO: 26541 - DNA, 15 bp, Homo sapiens
cataaatcacagaac

SEQ ID NO: 26542 - DNA, 15 bp, Homo sapiens
tcataaatcacagaa

SEQ ID NO: 26543 - DNA, 15 bp, Homo sapiens
gtcataaatcacaga

SEQ ID NO: 26544 - DNA, 15 bp, Homo sapiens
tgtcataaatcacag

SEQ ID NO: 26545 - DNA, 15 bp, Homo sapiens
ctgtcataaatcaca

SEQ ID NO: 26546 - DNA, 15 bp, Homo sapiens
tctgtcataaatcac

SEQ ID NO: 26547 - DNA, 15 bp, Homo sapiens
atctgtcataaatca

SEQ ID NO: 26548 - DNA, 15 bp, Homo sapiens
tatctgtcataaatc

SEQ ID NO: 26549 - DNA, 15 bp, Homo sapiens
gtatctgtcataaat

SEQ ID NO: 26550 - DNA, 15 bp, Homo sapiens
agtatctgtcataaa

SEQ ID NO: 26551 - DNA, 15 bp, Homo sapiens
cagtatctgtcataa

SEQ ID NO: 26552 - DNA, 15 bp, Homo sapiens
gcagtatctgtcata

SEQ ID NO: 26553 - DNA, 15 bp, Homo sapiens
agcagtatctgtcat

SEQ ID NO: 26554 - DNA, 15 bp, Homo sapiens
gagcagtatctgtca

SEQ ID NO: 26555 - DNA, 15 bp, Homo sapiens
agagcagtatctgtc

SEQ ID NO: 26556 - DNA, 15 bp, Homo sapiens
aagagcagtatctgt

SEQ ID NO: 26557 - DNA, 15 bp, Homo sapiens
caagagcagtatctg

SEQ ID NO: 26558 - DNA, 15 bp, Homo sapiens
acaagagcagtatct

SEQ ID NO: 26559 - DNA, 15 bp, Homo sapiens
tacaagagcagtatc

SEQ ID NO: 26560 - DNA, 15 bp, Homo sapiens
ctacaagagcagtat

SEQ ID NO: 26561 - DNA, 15 bp, Homo sapiens
cctacaagagcagta

SEQ ID NO: 26562 - DNA, 15 bp, Homo sapiens
tcctacaagagcagt

SEQ ID NO: 26563 - DNA, 15 bp, Homo sapiens
ttcctacaagagcag

SEQ ID NO: 26564 - DNA, 15 bp, Homo sapiens
attcctacaagagca

SEQ ID NO: 26565 - DNA, 15 bp, Homo sapiens
cattcctacaagagc

SEQ ID NO: 26566 - DNA, 15 bp, Homo sapiens
gcattcctacaagag

SEQ ID NO: 26567 - DNA, 15 bp, Homo sapiens
agcattcctacaaga

SEQ ID NO: 26568 - DNA, 15 bp, Homo sapiens
cagcattcctacaag

SEQ ID NO: 26569 - DNA, 15 bp, Homo sapiens
ccagcattcctacaa

SEQ ID NO: 26570 - DNA, 15 bp, Homo sapiens
gccagcattcctaca

SEQ ID NO: 26571 - DNA, 15 bp, Homo sapiens
agccagcattcctac

SEQ ID NO: 26572 - DNA, 15 bp, Homo sapiens
aagccagcattccta

SEQ ID NO: 26573 - DNA, 15 bp, Homo sapiens
aaagccagcattcct

SEQ ID NO: 26574 - DNA, 15 bp, Homo sapiens
caaagccagcattcc

SEQ ID NO: 26575 - DNA, 15 bp, Homo sapiens
tcaaagccagcattc

SEQ ID NO: 26576 - DNA, 15 bp, Homo sapiens
gtcaaagccagcatt

SEQ ID NO: 26577 - DNA, 15 bp, Homo sapiens
agtcaaagccagcat

SEQ ID NO: 26578 - DNA, 15 bp, Homo sapiens
cagtcaaagccagca

SEQ ID NO: 26579 - DNA, 15 bp, Homo sapiens
tcagtcaaagccagc

SEQ ID NO: 26580 - DNA, 15 bp, Homo sapiens
ttcagtcaaagccag

SEQ ID NO: 26581 - DNA, 15 bp, Homo sapiens
tttcagtcaaagcca

SEQ ID NO: 26582 - DNA, 15 bp, Homo sapiens
atttcagtcaaagcc

SEQ ID NO: 26583 - DNA, 15 bp, Homo sapiens
aatttcagtcaaagc

SEQ ID NO: 26584 - DNA, 15 bp, Homo sapiens
aaatttcagtcaaag

SEQ ID NO: 26585 - DNA, 15 bp, Homo sapiens
caaatttcagtcaaa

SEQ ID NO: 26586 - DNA, 15 bp, Homo sapiens
acaaatttcagtcaa

SEQ ID NO: 26587 - DNA, 15 bp, Homo sapiens
aacaaatttcagtca

SEQ ID NO: 26588 - DNA, 15 bp, Homo sapiens
taacaaatttcagtc

SEQ ID NO: 26589 - DNA, 15 bp, Homo sapiens
gtaacaaatttcagt

SEQ ID NO: 26590 - DNA, 15 bp, Homo sapiens
agtaacaaatttcag

SEQ ID NO: 26591 - DNA, 15 bp, Homo sapiens
cagtaacaaatttca

SEQ ID NO: 26592 - DNA, 15 bp, Homo sapiens
gcagtaacaaatttc

SEQ ID NO: 26593 - DNA, 15 bp, Homo sapiens
agcagtaacaaattt

SEQ ID NO: 26594 - DNA, 15 bp, Homo sapiens
aagcagtaacaaatt

SEQ ID NO: 26595 - DNA, 15 bp, Homo sapiens
aaagcagtaacaaat

SEQ ID NO: 26596 - DNA, 15 bp, Homo sapiens
aaaagcagtaacaaa

SEQ ID NO: 26597 - DNA, 15 bp, Homo sapiens
caaaagcagtaacaa

SEQ ID NO: 26598 - DNA, 15 bp, Homo sapiens
acaaaagcagtaaca

SEQ ID NO: 26599 - DNA, 15 bp, Homo sapiens
tacaaaagcagtaac

SEQ ID NO: 26600 - DNA, 15 bp, Homo sapiens
atacaaaagcagtaa

SEQ ID NO: 26601 - DNA, 15 bp, Homo sapiens
aatacaaaagcagta

SEQ ID NO: 26602 - DNA, 15 bp, Homo sapiens
aaatacaaaagcagt

SEQ ID NO: 26603 - DNA, 15 bp, Homo sapiens
taaatacaaaagcag

SEQ ID NO: 26604 - DNA, 15 bp, Homo sapiens
ttaaatacaaaagca

SEQ ID NO: 26605 - DNA, 15 bp, Homo sapiens
tttaaatacaaaagc

SEQ ID NO: 26606 - DNA, 15 bp, Homo sapiens
ttttaaatacaaaag

SEQ ID NO: 26607 - DNA, 15 bp, Homo sapiens
gttttaaatacaaaa

SEQ ID NO: 26608 - DNA, 15 bp, Homo sapiens
agttttaaatacaaa

SEQ ID NO: 26609 - DNA, 15 bp, Homo sapiens
aagttttaaatacaa

SEQ ID NO: 26610 - DNA, 15 bp, Homo sapiens
aaagttttaaataca

SEQ ID NO: 26611 - DNA, 15 bp, Homo sapiens
aaaagttttaaatac

SEQ ID NO: 26612 - DNA, 15 bp, Homo sapiens
aaaaagttttaaata

SEQ ID NO: 26613 - DNA, 15 bp, Homo sapiens
aaaaaagttttaaat

SEQ ID NO: 26614 - DNA, 15 bp, Homo sapiens
aaaaaaagttttaaa

SEQ ID NO: 26615 - DNA, 15 bp, Homo sapiens
aaaaaaaagttttaa

SEQ ID NO: 26616 - DNA, 15 bp, Homo sapiens
aaaaaaaaagtttta

SEQ ID NO: 26617 - DNA, 15 bp, Homo sapiens
taaaaaaaaagtttt

SEQ ID NO: 26618 - DNA, 15 bp, Homo sapiens
ataaaaaaaaagttt

SEQ ID NO: 26619 - DNA, 15 bp, Homo sapiens
aataaaaaaaaagtt

SEQ ID NO: 26620 - DNA, 15 bp, Homo sapiens
taataaaaaaaaagt

SEQ ID NO: 26621 - DNA, 15 bp, Homo sapiens
ataataaaaaaaaag

SEQ ID NO: 26622 - DNA, 15 bp, Homo sapiens
tataataaaaaaaaa

SEQ ID NO: 26623 - DNA, 15 bp, Homo sapiens
ttataataaaaaaaa

SEQ ID NO: 26624 - DNA, 15 bp, Homo sapiens
cttataataaaaaaa

SEQ ID NO: 26625 - DNA, 15 bp, Homo sapiens
acttataataaaaaa

SEQ ID NO: 26626 - DNA, 15 bp, Homo sapiens
tacttataataaaaa

SEQ ID NO: 26627 - DNA, 15 bp, Homo sapiens
ctacttataataaaa

SEQ ID NO: 26628 - DNA, 15 bp, Homo sapiens
tctacttataataaa

SEQ ID NO: 26629 - DNA, 15 bp, Homo sapiens
ttctacttataataa

SEQ ID NO: 26630 - DNA, 15 bp, Homo sapiens
attctacttataata

SEQ ID NO: 26631 - DNA, 15 bp, Homo sapiens
aattctacttataat

SEQ ID NO: 26632 - DNA, 15 bp, Homo sapiens
taattctacttataa

SEQ ID NO: 26633 - DNA, 15 bp, Homo sapiens
ataattctacttata

SEQ ID NO: 26634 - DNA, 15 bp, Homo sapiens
cataattctacttat

SEQ ID NO: 26635 - DNA, 15 bp, Homo sapiens
ccataattctactta

SEQ ID NO: 26636 - DNA, 15 bp, Homo sapiens
tccataattctactt

SEQ ID NO: 26637 - DNA, 15 bp, Homo sapiens
ttccataattctact

SEQ ID NO: 26638 - DNA, 15 bp, Homo sapiens
gttccataattctac

SEQ ID NO: 26639 - DNA, 15 bp, Homo sapiens
tgttccataattcta

SEQ ID NO: 26640 - DNA, 15 bp, Homo sapiens
ctgttccataattct

SEQ ID NO: 26641 - DNA, 15 bp, Homo sapiens
actgttccataattc

SEQ ID NO: 26642 - DNA, 15 bp, Homo sapiens
tactgttccataatt

SEQ ID NO: 26643 - DNA, 15 bp, Homo sapiens
ctactgttccataat

SEQ ID NO: 26644 - DNA, 15 bp, Homo sapiens
actactgttccataa

SEQ ID NO: 26645 - DNA, 15 bp, Homo sapiens
tactactgttccata

SEQ ID NO: 26646 - DNA, 15 bp, Homo sapiens
ctactactgttccat

SEQ ID NO: 26647 - DNA, 15 bp, Homo sapiens
tctactactgttcca

SEQ ID NO: 26648 - DNA, 15 bp, Homo sapiens
ttctactactgttcc

SEQ ID NO: 26649 - DNA, 15 bp, Homo sapiens
tttctactactgttc

SEQ ID NO: 26650 - DNA, 15 bp, Homo sapiens
ttttctactactgtt

SEQ ID NO: 26651 - DNA, 15 bp, Homo sapiens
tttttctactactgt

SEQ ID NO: 26652 - DNA, 15 bp, Homo sapiens
ctttttctactactg

SEQ ID NO: 26653 - DNA, 15 bp, Homo sapiens
actttttctactact

SEQ ID NO: 26654 - DNA, 15 bp, Homo sapiens
aactttttctactac

SEQ ID NO: 26655 - DNA, 15 bp, Homo sapiens
aaactttttctacta

SEQ ID NO: 26656 - DNA, 15 bp, Homo sapiens
caaactttttctact

SEQ ID NO: 26657 - DNA, 15 bp, Homo sapiens
tcaaactttttctac

SEQ ID NO: 26658 - DNA, 15 bp, Homo sapiens
gtcaaactttttcta

SEQ ID NO: 26659 - DNA, 15 bp, Homo sapiens
agtcaaactttttct

SEQ ID NO: 26660 - DNA, 15 bp, Homo sapiens
aagtcaaactttttc

SEQ ID NO: 26661 - DNA, 15 bp, Homo sapiens
aaagtcaaacttttt

SEQ ID NO: 26662 - DNA, 15 bp, Homo sapiens
aaaagtcaaactttt

SEQ ID NO: 26663 - DNA, 15 bp, Homo sapiens
caaaagtcaaacttt

SEQ ID NO: 26664 - DNA, 15 bp, Homo sapiens
acaaaagtcaaactt

SEQ ID NO: 26665 - DNA, 15 bp, Homo sapiens
tacaaaagtcaaact

SEQ ID NO: 26666 - DNA, 15 bp, Homo sapiens
ttacaaaagtcaaac

SEQ ID NO: 26667 - DNA, 15 bp, Homo sapiens
attacaaaagtcaaa

SEQ ID NO: 26668 - DNA, 15 bp, Homo sapiens
gattacaaaagtcaa

SEQ ID NO: 26669 - DNA, 15 bp, Homo sapiens
tgattacaaaagtca

SEQ ID NO: 26670 - DNA, 15 bp, Homo sapiens
ctgattacaaaagtc

SEQ ID NO: 26671 - DNA, 15 bp, Homo sapiens
tctgattacaaaagt

SEQ ID NO: 26672 - DNA, 15 bp, Homo sapiens
ctctgattacaaaag

SEQ ID NO: 26673 - DNA, 15 bp, Homo sapiens
tctctgattacaaaa

SEQ ID NO: 26674 - DNA, 15 bp, Homo sapiens
atctctgattacaaa

SEQ ID NO: 26675 - DNA, 15 bp, Homo sapiens
tatctctgattacaa

SEQ ID NO: 26676 - DNA, 15 bp, Homo sapiens
gtatctctgattaca

SEQ ID NO: 26677 - DNA, 15 bp, Homo sapiens
agtatctctgattac

SEQ ID NO: 26678 - DNA, 15 bp, Homo sapiens
cagtatctctgatta

SEQ ID NO: 26679 - DNA, 15 bp, Homo sapiens
tcagtatctctgatt

SEQ ID NO: 26680 - DNA, 15 bp, Homo sapiens
ctcagtatctctgat

SEQ ID NO: 26681 - DNA, 15 bp, Homo sapiens
gctcagtatctctga

SEQ ID NO: 26682 - DNA, 15 bp, Homo sapiens
agctcagtatctctg

SEQ ID NO: 26683 - DNA, 15 bp, Homo sapiens
aagctcagtatctct

SEQ ID NO: 26684 - DNA, 15 bp, Homo sapiens
caagctcagtatctc

SEQ ID NO: 26685 - DNA, 15 bp, Homo sapiens
tcaagctcagtatct

SEQ ID NO: 26686 - DNA, 15 bp, Homo sapiens
ctcaagctcagtatc

SEQ ID NO: 26687 - DNA, 15 bp, Homo sapiens
actcaagctcagtat

SEQ ID NO: 26688 - DNA, 15 bp, Homo sapiens
aactcaagctcagta

SEQ ID NO: 26689 - DNA, 15 bp, Homo sapiens
gaactcaagctcagt

SEQ ID NO: 26690 - DNA, 15 bp, Homo sapiens
agaactcaagctcag

SEQ ID NO: 26691 - DNA, 15 bp, Homo sapiens
cagaactcaagctca

SEQ ID NO: 26692 - DNA, 15 bp, Homo sapiens
ccagaactcaagctc

SEQ ID NO: 26693 - DNA, 15 bp, Homo sapiens
gccagaactcaagct

SEQ ID NO: 26694 - DNA, 15 bp, Homo sapiens
agccagaactcaagc

SEQ ID NO: 26695 - DNA, 15 bp, Homo sapiens
gagccagaactcaag

SEQ ID NO: 26696 - DNA, 15 bp, Homo sapiens
agagccagaactcaa

SEQ ID NO: 26697 - DNA, 15 bp, Homo sapiens
aagagccagaactca

SEQ ID NO: 26698 - DNA, 15 bp, Homo sapiens
aaagagccagaactc

SEQ ID NO: 26699 - DNA, 15 bp, Homo sapiens
gaaagagccagaact

SEQ ID NO: 26700 - DNA, 15 bp, Homo sapiens
tgaaagagccagaac

SEQ ID NO: 26701 - DNA, 15 bp, Homo sapiens
atgaaagagccagaa

SEQ ID NO: 26702 - DNA, 15 bp, Homo sapiens
aatgaaagagccaga

SEQ ID NO: 26703 - DNA, 15 bp, Homo sapiens
aaatgaaagagccag

SEQ ID NO: 26704 - DNA, 15 bp, Homo sapiens
caaatgaaagagcca

SEQ ID NO: 26705 - DNA, 15 bp, Homo sapiens
acaaatgaaagagcc

SEQ ID NO: 26706 - DNA, 15 bp, Homo sapiens
tacaaatgaaagagc

SEQ ID NO: 26707 - DNA, 15 bp, Homo sapiens
atacaaatgaaagag

SEQ ID NO: 26708 - DNA, 15 bp, Homo sapiens
tatacaaatgaaaga

SEQ ID NO: 26709 - DNA, 15 bp, Homo sapiens
gtatacaaatgaaag

SEQ ID NO: 26710 - DNA, 15 bp, Homo sapiens
agtatacaaatgaaa

SEQ ID NO: 26711 - DNA, 15 bp, Homo sapiens
cagtatacaaatgaa

SEQ ID NO: 26712 - DNA, 15 bp, Homo sapiens
acagtatacaaatga

SEQ ID NO: 26713 - DNA, 15 bp, Homo sapiens
aacagtatacaaatg

SEQ ID NO: 26714 - DNA, 15 bp, Homo sapiens
taacagtatacaaat

SEQ ID NO: 26715 - DNA, 15 bp, Homo sapiens
ataacagtatacaaa

SEQ ID NO: 26716 - DNA, 15 bp, Homo sapiens
aataacagtatacaa

SEQ ID NO: 26717 - DNA, 15 bp, Homo sapiens
aaataacagtataca

SEQ ID NO: 26718 - DNA, 15 bp, Homo sapiens
caaataacagtatac

SEQ ID NO: 26719 - DNA, 15 bp, Homo sapiens
ccaaataacagtata

SEQ ID NO: 26720 - DNA, 15 bp, Homo sapiens
cccaaataacagtat

SEQ ID NO: 26721 - DNA, 15 bp, Homo sapiens
ccccaaataacagta

SEQ ID NO: 26722 - DNA, 15 bp, Homo sapiens
gccccaaataacagt

SEQ ID NO: 26723 - DNA, 15 bp, Homo sapiens
tgccccaaataacag

SEQ ID NO: 26724 - DNA, 15 bp, Homo sapiens
ttgccccaaataaca

SEQ ID NO: 26725 - DNA, 15 bp, Homo sapiens
cttgccccaaataac

SEQ ID NO: 26726 - DNA, 15 bp, Homo sapiens
acttgccccaaataa

SEQ ID NO: 26727 - DNA, 15 bp, Homo sapiens
aacttgccccaaata

SEQ ID NO: 26728 - DNA, 15 bp, Homo sapiens
aaacttgccccaaat

SEQ ID NO: 26729 - DNA, 15 bp, Homo sapiens
aaaacttgccccaaa

SEQ ID NO: 26730 - DNA, 15 bp, Homo sapiens
aaaaacttgccccaa

SEQ ID NO: 26731 - DNA, 15 bp, Homo sapiens
aaaaaacttgcccca

SEQ ID NO: 26732 - DNA, 15 bp, Homo sapiens
taaaaaacttgcccc

SEQ ID NO: 26733 - DNA, 15 bp, Homo sapiens
ttaaaaaacttgccc

SEQ ID NO: 26734 - DNA, 15 bp, Homo sapiens
attaaaaaacttgcc

SEQ ID NO: 26735 - DNA, 15 bp, Homo sapiens
cattaaaaaacttgc

SEQ ID NO: 26736 - DNA, 15 bp, Homo sapiens
gcattaaaaaacttg

SEQ ID NO: 26737 - DNA, 15 bp, Homo sapiens
agcattaaaaaactt

SEQ ID NO: 26738 - DNA, 15 bp, Homo sapiens
gagcattaaaaaact

SEQ ID NO: 26739 - DNA, 15 bp, Homo sapiens
agagcattaaaaaac

SEQ ID NO: 26740 - DNA, 15 bp, Homo sapiens
aagagcattaaaaaa

SEQ ID NO: 26741 - DNA, 15 bp, Homo sapiens
taagagcattaaaaa

SEQ ID NO: 26742 - DNA, 15 bp, Homo sapiens
ttaagagcattaaaa

SEQ ID NO: 26743 - DNA, 15 bp, Homo sapiens
cttaagagcattaaa

SEQ ID NO: 26744 - DNA, 15 bp, Homo sapiens
acttaagagcattaa

SEQ ID NO: 26745 - DNA, 15 bp, Homo sapiens
gacttaagagcatta

SEQ ID NO: 26746 - DNA, 15 bp, Homo sapiens
agacttaagagcatt

SEQ ID NO: 26747 - DNA, 15 bp, Homo sapiens
aagacttaagagcat

SEQ ID NO: 26748 - DNA, 15 bp, Homo sapiens
taagacttaagagca

SEQ ID NO: 26749 - DNA, 15 bp, Homo sapiens
ctaagacttaagagc

SEQ ID NO: 26750 - DNA, 15 bp, Homo sapiens
gctaagacttaagag

SEQ ID NO: 26751 - DNA, 15 bp, Homo sapiens
agctaagacttaaga

SEQ ID NO: 26752 - DNA, 15 bp, Homo sapiens
aagctaagacttaag

SEQ ID NO: 26753 - DNA, 15 bp, Homo sapiens
aaagctaagacttaa

SEQ ID NO: 26754 - DNA, 15 bp, Homo sapiens
gaaagctaagactta

SEQ ID NO: 26755 - DNA, 15 bp, Homo sapiens
agaaagctaagactt

SEQ ID NO: 26756 - DNA, 15 bp, Homo sapiens
gagaaagctaagact

SEQ ID NO: 26757 - DNA, 15 bp, Homo sapiens
tgagaaagctaagac

SEQ ID NO: 26758 - DNA, 15 bp, Homo sapiens
atgagaaagctaaga

SEQ ID NO: 26759 - DNA, 15 bp, Homo sapiens
tatgagaaagctaag

SEQ ID NO: 26760 - DNA, 15 bp, Homo sapiens
atatgagaaagctaa

SEQ ID NO: 26761 - DNA, 15 bp, Homo sapiens
tatatgagaaagcta

SEQ ID NO: 26762 - DNA, 15 bp, Homo sapiens
atatatgagaaagct

SEQ ID NO: 26763 - DNA, 15 bp, Homo sapiens
tatatatgagaaagc

SEQ ID NO: 26764 - DNA, 15 bp, Homo sapiens
ttatatatgagaaag

SEQ ID NO: 26765 - DNA, 15 bp, Homo sapiens
tttatatatgagaaa

SEQ ID NO: 26766 - DNA, 15 bp, Homo sapiens
ttttatatatgagaa

SEQ ID NO: 26767 - DNA, 15 bp, Homo sapiens
attttatatatgaga

SEQ ID NO: 26768 - DNA, 15 bp, Homo sapiens
cattttatatatgag

SEQ ID NO: 26769 - DNA, 15 bp, Homo sapiens
ccattttatatatga

SEQ ID NO: 26770 - DNA, 15 bp, Homo sapiens
tccattttatatatg

SEQ ID NO: 26771 - DNA, 15 bp, Homo sapiens
ctccattttatatat

SEQ ID NO: 26772 - DNA, 15 bp, Homo sapiens
tctccattttatata

SEQ ID NO: 26773 - DNA, 15 bp, Homo sapiens
atctccattttatat

SEQ ID NO: 26774 - DNA, 15 bp, Homo sapiens
tatctccattttata

SEQ ID NO: 26775 - DNA, 15 bp, Homo sapiens
ttatctccattttat

SEQ ID NO: 26776 - DNA, 15 bp, Homo sapiens
attatctccatttta

SEQ ID NO: 26777 - DNA, 15 bp, Homo sapiens
tattatctccatttt

SEQ ID NO: 26778 - DNA, 15 bp, Homo sapiens
ttattatctccattt

SEQ ID NO: 26779 - DNA, 15 bp, Homo sapiens
gttattatctccatt

SEQ ID NO: 26780 - DNA, 15 bp, Homo sapiens
tgttattatctccat

SEQ ID NO: 26781 - DNA, 15 bp, Homo sapiens
ctgttattatctcca

SEQ ID NO: 26782 - DNA, 15 bp, Homo sapiens
actgttattatctcc

SEQ ID NO: 26783 - DNA, 15 bp, Homo sapiens
aactgttattatctc

SEQ ID NO: 26784 - DNA, 15 bp, Homo sapiens
taactgttattatct

SEQ ID NO: 26785 - DNA, 15 bp, Homo sapiens
ataactgttattatc

SEQ ID NO: 26786 - DNA, 15 bp, Homo sapiens
gataactgttattat

SEQ ID NO: 26787 - DNA, 15 bp, Homo sapiens
tgataactgttatta

SEQ ID NO: 26788 - DNA, 15 bp, Homo sapiens
gtgataactgttatt

SEQ ID NO: 26789 - DNA, 15 bp, Homo sapiens
cgtgataactgttat

SEQ ID NO: 26790 - DNA, 15 bp, Homo sapiens
acgtgataactgtta

SEQ ID NO: 26791 - DNA, 15 bp, Homo sapiens
cacgtgataactgtt

SEQ ID NO: 26792 - DNA, 15 bp, Homo sapiens
tcacgtgataactgt

SEQ ID NO: 26793 - DNA, 15 bp, Homo sapiens
atcacgtgataactg

SEQ ID NO: 26794 - DNA, 15 bp, Homo sapiens
aatcacgtgataact

SEQ ID NO: 26795 - DNA, 15 bp, Homo sapiens
caatcacgtgataac

SEQ ID NO: 26796 - DNA, 15 bp, Homo sapiens
acaatcacgtgataa

SEQ ID NO: 26797 - DNA, 15 bp, Homo sapiens
cacaatcacgtgata

SEQ ID NO: 26798 - DNA, 15 bp, Homo sapiens
tcacaatcacgtgat

SEQ ID NO: 26799 - DNA, 15 bp, Homo sapiens
ctcacaatcacgtga

SEQ ID NO: 26800 - DNA, 15 bp, Homo sapiens
cctcacaatcacgtg

SEQ ID NO: 26801 - DNA, 15 bp, Homo sapiens
tcctcacaatcacgt

SEQ ID NO: 26802 - DNA, 15 bp, Homo sapiens
atcctcacaatcacg

SEQ ID NO: 26803 - DNA, 15 bp, Homo sapiens
catcctcacaatcac

SEQ ID NO: 26804 - DNA, 15 bp, Homo sapiens
tcatcctcacaatca

SEQ ID NO: 26805 - DNA, 15 bp, Homo sapiens
ttcatcctcacaatc

SEQ ID NO: 26806 - DNA, 15 bp, Homo sapiens
tttcatcctcacaat

SEQ ID NO: 26807 - DNA, 15 bp, Homo sapiens
gtttcatcctcacaa

SEQ ID NO: 26808 - DNA, 15 bp, Homo sapiens
tgtttcatcctcaca

SEQ ID NO: 26809 - DNA, 15 bp, Homo sapiens
ttgtttcatcctcac

SEQ ID NO: 26810 - DNA, 15 bp, Homo sapiens
tttgtttcatcctca

SEQ ID NO: 26811 - DNA, 15 bp, Homo sapiens
ttttgtttcatcctc

SEQ ID NO: 26812 - DNA, 15 bp, Homo sapiens
tttttgtttcatcct

SEQ ID NO: 26813 - DNA, 15 bp, Homo sapiens
ttttttgtttcatcc

SEQ ID NO: 26814 - DNA, 15 bp, Homo sapiens
tttttttgtttcatc

SEQ ID NO: 26815 - DNA, 15 bp, Homo sapiens
ttttttttgtttcat

SEQ ID NO: 26816 - DNA, 15 bp, Homo sapiens
cttttttttgtttca

SEQ ID NO: 26817 - DNA, 15 bp, Homo sapiens
acttttttttgtttc

SEQ ID NO: 26818 - DNA, 15 bp, Homo sapiens
cacttttttttgttt

SEQ ID NO: 26819 - DNA, 15 bp, Homo sapiens
ccacttttttttgtt

SEQ ID NO: 26820 - DNA, 15 bp, Homo sapiens
tccacttttttttgt

SEQ ID NO: 26821 - DNA, 15 bp, Homo sapiens
ttccacttttttttg

SEQ ID NO: 26822 - DNA, 15 bp, Homo sapiens
tttccactttttttt

SEQ ID NO: 26823 - DNA, 15 bp, Homo sapiens
gtttccacttttttt

SEQ ID NO: 26824 - DNA, 15 bp, Homo sapiens
agtttccactttttt

SEQ ID NO: 26825 - DNA, 15 bp, Homo sapiens
gagtttccacttttt

SEQ ID NO: 26826 - DNA, 15 bp, Homo sapiens
agagtttccactttt

SEQ ID NO: 26827 - DNA, 15 bp, Homo sapiens
aagagtttccacttt

SEQ ID NO: 26828 - DNA, 15 bp, Homo sapiens
aaagagtttccactt

SEQ ID NO: 26829 - DNA, 15 bp, Homo sapiens
caaagagtttccact

SEQ ID NO: 26830 - DNA, 15 bp, Homo sapiens
acaaagagtttccac

SEQ ID NO: 26831 - DNA, 15 bp, Homo sapiens
tacaaagagtttcca

SEQ ID NO: 26832 - DNA, 15 bp, Homo sapiens
ttacaaagagtttcc

SEQ ID NO: 26833 - DNA, 15 bp, Homo sapiens
cttacaaagagtttc

SEQ ID NO: 26834 - DNA, 15 bp, Homo sapiens
ccttacaaagagttt

SEQ ID NO: 26835 - DNA, 15 bp, Homo sapiens
accttacaaagagtt

SEQ ID NO: 26836 - DNA, 15 bp, Homo sapiens
caccttacaaagagt

SEQ ID NO: 26837 - DNA, 15 bp, Homo sapiens
acaccttacaaagag

SEQ ID NO: 26838 - DNA, 15 bp, Homo sapiens
cacaccttacaaaga

SEQ ID NO: 26839 - DNA, 15 bp, Homo sapiens
acacaccttacaaag

SEQ ID NO: 26840 - DNA, 15 bp, Homo sapiens
aacacaccttacaaa

SEQ ID NO: 26841 - DNA, 15 bp, Homo sapiens
gaacacaccttacaa

SEQ ID NO: 26842 - DNA, 15 bp, Homo sapiens
tgaacacaccttaca

SEQ ID NO: 26843 - DNA, 15 bp, Homo sapiens
atgaacacaccttac

SEQ ID NO: 26844 - DNA, 15 bp, Homo sapiens
gatgaacacacctta

SEQ ID NO: 26845 - DNA, 15 bp, Homo sapiens
agatgaacacacctt

SEQ ID NO: 26846 - DNA, 15 bp, Homo sapiens
cagatgaacacacct

SEQ ID NO: 26847 - DNA, 15 bp, Homo sapiens
ccagatgaacacacc

SEQ ID NO: 26848 - DNA, 15 bp, Homo sapiens
accagatgaacacac

SEQ ID NO: 26849 - DNA, 15 bp, Homo sapiens
aaccagatgaacaca

SEQ ID NO: 26850 - DNA, 15 bp, Homo sapiens
caaccagatgaacac

SEQ ID NO: 26851 - DNA, 15 bp, Homo sapiens
tcaaccagatgaaca

SEQ ID NO: 26852 - DNA, 15 bp, Homo sapiens
gtcaaccagatgaac

SEQ ID NO: 26853 - DNA, 15 bp, Homo sapiens
tgtcaaccagatgaa

SEQ ID NO: 26854 - DNA, 15 bp, Homo sapiens
gtgtcaaccagatga

SEQ ID NO: 26855 - DNA, 15 bp, Homo sapiens
agtgtcaaccagatg

SEQ ID NO: 26856 - DNA, 15 bp, Homo sapiens
aagtgtcaaccagat

SEQ ID NO: 26857 - DNA, 15 bp, Homo sapiens
taagtgtcaaccaga

SEQ ID NO: 26858 - DNA, 15 bp, Homo sapiens
ctaagtgtcaaccag

SEQ ID NO: 26859 - DNA, 15 bp, Homo sapiens
actaagtgtcaacca

SEQ ID NO: 26860 - DNA, 15 bp, Homo sapiens
tactaagtgtcaacc

SEQ ID NO: 26861 - DNA, 15 bp, Homo sapiens
ctactaagtgtcaac

SEQ ID NO: 26862 - DNA, 15 bp, Homo sapiens
actactaagtgtcaa

SEQ ID NO: 26863 - DNA, 15 bp, Homo sapiens
gactactaagtgtca

SEQ ID NO: 26864 - DNA, 15 bp, Homo sapiens
tgactactaagtgtc

SEQ ID NO: 26865 - DNA, 15 bp, Homo sapiens
atgactactaagtgt

SEQ ID NO: 26866 - DNA, 15 bp, Homo sapiens
aatgactactaagtg

SEQ ID NO: 26867 - DNA, 15 bp, Homo sapiens
taatgactactaagt

SEQ ID NO: 26868 - DNA, 15 bp, Homo sapiens
gtaatgactactaag

SEQ ID NO: 26869 - DNA, 15 bp, Homo sapiens
agtaatgactactaa

SEQ ID NO: 26870 - DNA, 15 bp, Homo sapiens
aagtaatgactacta

SEQ ID NO: 26871 - DNA, 15 bp, Homo sapiens
gaagtaatgactact

SEQ ID NO: 26872 - DNA, 15 bp, Homo sapiens
ggaagtaatgactac

SEQ ID NO: 26873 - DNA, 15 bp, Homo sapiens
tggaagtaatgacta

SEQ ID NO: 26874 - DNA, 15 bp, Homo sapiens
gtggaagtaatgact

SEQ ID NO: 26875 - DNA, 15 bp, Homo sapiens
agtggaagtaatgac

SEQ ID NO: 26876 - DNA, 15 bp, Homo sapiens
aagtggaagtaatga

SEQ ID NO: 26877 - DNA, 15 bp, Homo sapiens
aaagtggaagtaatg

SEQ ID NO: 26878 - DNA, 15 bp, Homo sapiens
gaaagtggaagtaat

SEQ ID NO: 26879 - DNA, 15 bp, Homo sapiens
ggaaagtggaagtaa

SEQ ID NO: 26880 - DNA, 15 bp, Homo sapiens
cggaaagtggaagta

SEQ ID NO: 26881 - DNA, 15 bp, Homo sapiens
acggaaagtggaagt

SEQ ID NO: 26882 - DNA, 15 bp, Homo sapiens
gacggaaagtggaag

SEQ ID NO: 26883 - DNA, 15 bp, Homo sapiens
ggacggaaagtggaa

SEQ ID NO: 26884 - DNA, 15 bp, Homo sapiens
tggacggaaagtgga

SEQ ID NO: 26885 - DNA, 15 bp, Homo sapiens
atggacggaaagtgg

SEQ ID NO: 26886 - DNA, 15 bp, Homo sapiens
tatggacggaaagtg

SEQ ID NO: 26887 - DNA, 15 bp, Homo sapiens
atatggacggaaagt

SEQ ID NO: 26888 - DNA, 15 bp, Homo sapiens
tatatggacggaaag

SEQ ID NO: 26889 - DNA, 15 bp, Homo sapiens
ctatatggacggaaa

SEQ ID NO: 26890 - DNA, 15 bp, Homo sapiens
actatatggacggaa

SEQ ID NO: 26891 - DNA, 15 bp, Homo sapiens
gactatatggacgga

SEQ ID NO: 26892 - DNA, 15 bp, Homo sapiens
ggactatatggacgg

SEQ ID NO: 26893 - DNA, 15 bp, Homo sapiens
aggactatatggacg

SEQ ID NO: 26894 - DNA, 15 bp, Homo sapiens
gaggactatatggac

SEQ ID NO: 26895 - DNA, 15 bp, Homo sapiens
agaggactatatgga

SEQ ID NO: 26896 - DNA, 15 bp, Homo sapiens
aagaggactatatgg

SEQ ID NO: 26897 - DNA, 15 bp, Homo sapiens
taagaggactatatg

SEQ ID NO: 26898 - DNA, 15 bp, Homo sapiens
ttaagaggactatat

SEQ ID NO: 26899 - DNA, 15 bp, Homo sapiens
gttaagaggactata

SEQ ID NO: 26900 - DNA, 15 bp, Homo sapiens
tgttaagaggactat

SEQ ID NO: 26901 - DNA, 15 bp, Homo sapiens
ctgttaagaggacta

SEQ ID NO: 26902 - DNA, 15 bp, Homo sapiens
actgttaagaggact

SEQ ID NO: 26903 - DNA, 15 bp, Homo sapiens
tactgttaagaggac

SEQ ID NO: 26904 - DNA, 15 bp, Homo sapiens
ttactgttaagagga

SEQ ID NO: 26905 - DNA, 15 bp, Homo sapiens
attactgttaagagg

SEQ ID NO: 26906 - DNA, 15 bp, Homo sapiens
tattactgttaagag

SEQ ID NO: 26907 - DNA, 15 bp, Homo sapiens
atattactgttaaga

SEQ ID NO: 26908 - DNA, 15 bp, Homo sapiens
aatattactgttaag

SEQ ID NO: 26909 - DNA, 15 bp, Homo sapiens
aaatattactgttaa

SEQ ID NO: 26910 - DNA, 15 bp, Homo sapiens
caaatattactgtta

SEQ ID NO: 26911 - DNA, 15 bp, Homo sapiens
tcaaatattactgtt

SEQ ID NO: 26912 - DNA, 15 bp, Homo sapiens
ctcaaatattactgt

SEQ ID NO: 26913 - DNA, 15 bp, Homo sapiens
tctcaaatattactg

SEQ ID NO: 26914 - DNA, 15 bp, Homo sapiens
ctctcaaatattact

SEQ ID NO: 26915 - DNA, 15 bp, Homo sapiens
cctctcaaatattac

SEQ ID NO: 26916 - DNA, 15 bp, Homo sapiens
gcctctcaaatatta

SEQ ID NO: 26917 - DNA, 15 bp, Homo sapiens
tgcctctcaaatatt

SEQ ID NO: 26918 - DNA, 15 bp, Homo sapiens
atgcctctcaaatat

SEQ ID NO: 26919 - DNA, 15 bp, Homo sapiens
aatgcctctcaaata

SEQ ID NO: 26920 - DNA, 15 bp, Homo sapiens
aaatgcctctcaaat

SEQ ID NO: 26921 - DNA, 15 bp, Homo sapiens
aaaatgcctctcaaa

SEQ ID NO: 26922 - DNA, 15 bp, Homo sapiens
aaaaatgcctctcaa

SEQ ID NO: 26923 - DNA, 15 bp, Homo sapiens
taaaaatgcctctca

SEQ ID NO: 26924 - DNA, 15 bp, Homo sapiens
ataaaaatgcctctc

SEQ ID NO: 26925 - DNA, 15 bp, Homo sapiens
aataaaaatgcctct

SEQ ID NO: 26926 - DNA, 15 bp, Homo sapiens
taataaaaatgcctc

SEQ ID NO: 26927 - DNA, 15 bp, Homo sapiens
ttaataaaaatgcct

SEQ ID NO: 26928 - DNA, 15 bp, Homo sapiens
tttaataaaaatgcc

SEQ ID NO: 26929 - DNA, 15 bp, Homo sapiens
ctttaataaaaatgc

SEQ ID NO: 26930 - DNA, 15 bp, Homo sapiens
gctttaataaaaatg

SEQ ID NO: 26931 - DNA, 15 bp, Homo sapiens
tgctttaataaaaat

SEQ ID NO: 26932 - DNA, 15 bp, Homo sapiens
ctgctttaataaaaa

SEQ ID NO: 26933 - DNA, 15 bp, Homo sapiens
actgctttaataaaa

SEQ ID NO: 26934 - DNA, 15 bp, Homo sapiens
gactgctttaataaa

SEQ ID NO: 26935 - DNA, 15 bp, Homo sapiens
agactgctttaataa

SEQ ID NO: 26936 - DNA, 15 bp, Homo sapiens
aagactgctttaata

SEQ ID NO: 26937 - DNA, 15 bp, Homo sapiens
taagactgctttaat

SEQ ID NO: 26938 - DNA, 15 bp, Homo sapiens
ttaagactgctttaa

SEQ ID NO: 26939 - DNA, 15 bp, Homo sapiens
cttaagactgcttta

SEQ ID NO: 26940 - DNA, 15 bp, Homo sapiens
ccttaagactgcttt

SEQ ID NO: 26941 - DNA, 15 bp, Homo sapiens
tccttaagactgctt

SEQ ID NO: 26942 - DNA, 15 bp, Homo sapiens
ctccttaagactgct

SEQ ID NO: 26943 - DNA, 15 bp, Homo sapiens
actccttaagactgc

SEQ ID NO: 26944 - DNA, 15 bp, Homo sapiens
cactccttaagactg

SEQ ID NO: 26945 - DNA, 15 bp, Homo sapiens
acactccttaagact

SEQ ID NO: 26946 - DNA, 15 bp, Homo sapiens
aacactccttaagac

SEQ ID NO: 26947 - DNA, 15 bp, Homo sapiens
gaacactccttaaga

SEQ ID NO: 26948 - DNA, 15 bp, Homo sapiens
cgaacactccttaag

SEQ ID NO: 26949 - DNA, 15 bp, Homo sapiens
acgaacactccttaa

SEQ ID NO: 26950 - DNA, 15 bp, Homo sapiens
gacgaacactcctta

SEQ ID NO: 26951 - DNA, 15 bp, Homo sapiens
tgacgaacactcctt

SEQ ID NO: 26952 - DNA, 15 bp, Homo sapiens
ttgacgaacactcct

SEQ ID NO: 26953 - DNA, 15 bp, Homo sapiens
tttgacgaacactcc

SEQ ID NO: 26954 - DNA, 15 bp, Homo sapiens
gtttgacgaacactc

SEQ ID NO: 26955 - DNA, 15 bp, Homo sapiens
ggtttgacgaacact

SEQ ID NO: 26956 - DNA, 15 bp, Homo sapiens
tggtttgacgaacac

SEQ ID NO: 26957 - DNA, 15 bp, Homo sapiens
gtggtttgacgaaca

SEQ ID NO: 26958 - DNA, 15 bp, Homo sapiens
tgtggtttgacgaac

SEQ ID NO: 26959 - DNA, 15 bp, Homo sapiens
atgtggtttgacgaa

SEQ ID NO: 26960 - DNA, 15 bp, Homo sapiens
catgtggtttgacga

SEQ ID NO: 26961 - DNA, 15 bp, Homo sapiens
acatgtggtttgacg

SEQ ID NO: 26962 - DNA, 15 bp, Homo sapiens
aacatgtggtttgac

SEQ ID NO: 26963 - DNA, 15 bp, Homo sapiens
gaacatgtggtttga

SEQ ID NO: 26964 - DNA, 15 bp, Homo sapiens
agaacatgtggtttg

SEQ ID NO: 26965 - DNA, 15 bp, Homo sapiens
cagaacatgtggttt

SEQ ID NO: 26966 - DNA, 15 bp, Homo sapiens
ccagaacatgtggtt

SEQ ID NO: 26967 - DNA, 15 bp, Homo sapiens
cccagaacatgtggt

SEQ ID NO: 26968 - DNA, 15 bp, Homo sapiens
tcccagaacatgtgg

SEQ ID NO: 26969 - DNA, 15 bp, Homo sapiens
atcccagaacatgtg

SEQ ID NO: 26970 - DNA, 15 bp, Homo sapiens
gatcccagaacatgt

SEQ ID NO: 26971 - DNA, 15 bp, Homo sapiens
ggatcccagaacatg

SEQ ID NO: 26972 - DNA, 15 bp, Homo sapiens
aggatcccagaacat

SEQ ID NO: 26973 - DNA, 15 bp, Homo sapiens
caggatcccagaaca

SEQ ID NO: 26974 - DNA, 15 bp, Homo sapiens
tcaggatcccagaac

SEQ ID NO: 26975 - DNA, 15 bp, Homo sapiens
ctcaggatcccagaa

SEQ ID NO: 26976 - DNA, 15 bp, Homo sapiens
tctcaggatcccaga

SEQ ID NO: 26977 - DNA, 15 bp, Homo sapiens
ttctcaggatcccag

SEQ ID NO: 26978 - DNA, 15 bp, Homo sapiens
tttctcaggatccca

SEQ ID NO: 26979 - DNA, 15 bp, Homo sapiens
ctttctcaggatccc

SEQ ID NO: 26980 - DNA, 15 bp, Homo sapiens
actttctcaggatcc

SEQ ID NO: 26981 - DNA, 15 bp, Homo sapiens
tactttctcaggatc

SEQ ID NO: 26982 - DNA, 15 bp, Homo sapiens
ctactttctcaggat

SEQ ID NO: 26983 - DNA, 15 bp, Homo sapiens
cctactttctcagga

SEQ ID NO: 26984 - DNA, 15 bp, Homo sapiens
ccctactttctcagg

SEQ ID NO: 26985 - DNA, 15 bp, Homo sapiens
cccctactttctcag

SEQ ID NO: 26986 - DNA, 15 bp, Homo sapiens
tcccctactttctca

SEQ ID NO: 26987 - DNA, 15 bp, Homo sapiens
ttcccctactttctc

SEQ ID NO: 26988 - DNA, 15 bp, Homo sapiens
cttcccctactttct

SEQ ID NO: 26989 - DNA, 15 bp, Homo sapiens
acttcccctactttc

SEQ ID NO: 26990 - DNA, 15 bp, Homo sapiens
aacttcccctacttt

SEQ ID NO: 26991 - DNA, 15 bp, Homo sapiens
aaacttcccctactt

SEQ ID NO: 26992 - DNA, 15 bp, Homo sapiens
taaacttcccctact

SEQ ID NO: 26993 - DNA, 15 bp, Homo sapiens
ctaaacttcccctac

SEQ ID NO: 26994 - DNA, 15 bp, Homo sapiens
tctaaacttccccta

SEQ ID NO: 26995 - DNA, 15 bp, Homo sapiens
ctctaaacttcccct

SEQ ID NO: 26996 - DNA, 15 bp, Homo sapiens
tctctaaacttcccc

SEQ ID NO: 26997 - DNA, 15 bp, Homo sapiens
ttctctaaacttccc

SEQ ID NO: 26998 - DNA, 15 bp, Homo sapiens
gttctctaaacttcc

SEQ ID NO: 26999 - DNA, 15 bp, Homo sapiens
agttctctaaacttc

SEQ ID NO: 27000 - DNA, 15 bp, Homo sapiens
cagttctctaaactt

SEQ ID NO: 27001 - DNA, 15 bp, Homo sapiens
tcagttctctaaact

SEQ ID NO: 27002 - DNA, 15 bp, Homo sapiens
ttcagttctctaaac

SEQ ID NO: 27003 - DNA, 15 bp, Homo sapiens
cttcagttctctaaa

SEQ ID NO: 27004 - DNA, 15 bp, Homo sapiens
gcttcagttctctaa

SEQ ID NO: 27005 - DNA, 15 bp, Homo sapiens
agcttcagttctcta

SEQ ID NO: 27006 - DNA, 15 bp, Homo sapiens
cagcttcagttctct

SEQ ID NO: 27007 - DNA, 15 bp, Homo sapiens
gcagcttcagttctc

SEQ ID NO: 27008 - DNA, 15 bp, Homo sapiens
tgcagcttcagttct

SEQ ID NO: 27009 - DNA, 15 bp, Homo sapiens
gtgcagcttcagttc

SEQ ID NO: 27010 - DNA, 15 bp, Homo sapiens
tgtgcagcttcagtt

SEQ ID NO: 27011 - DNA, 15 bp, Homo sapiens
ttgtgcagcttcagt

SEQ ID NO: 27012 - DNA, 15 bp, Homo sapiens
tttgtgcagcttcag

SEQ ID NO: 27013 - DNA, 15 bp, Homo sapiens
ttttgtgcagcttca

SEQ ID NO: 27014 - DNA, 15 bp, Homo sapiens
gttttgtgcagcttc

SEQ ID NO: 27015 - DNA, 15 bp, Homo sapiens
agttttgtgcagctt

SEQ ID NO: 27016 - DNA, 15 bp, Homo sapiens
tagttttgtgcagct

SEQ ID NO: 27017 - DNA, 15 bp, Homo sapiens
ttagttttgtgcagc

SEQ ID NO: 27018 - DNA, 15 bp, Homo sapiens
attagttttgtgcag

SEQ ID NO: 27019 - DNA, 15 bp, Homo sapiens
cattagttttgtgca

SEQ ID NO: 27020 - DNA, 15 bp, Homo sapiens
acattagttttgtgc

SEQ ID NO: 27021 - DNA, 15 bp, Homo sapiens
aacattagttttgtg

SEQ ID NO: 27022 - DNA, 15 bp, Homo sapiens
aaacattagttttgt

SEQ ID NO: 27023 - DNA, 15 bp, Homo sapiens
taaacattagttttg

SEQ ID NO: 27024 - DNA, 15 bp, Homo sapiens
ataaacattagtttt

SEQ ID NO: 27025 - DNA, 15 bp, Homo sapiens
aataaacattagttt

SEQ ID NO: 27026 - DNA, 15 bp, Homo sapiens
aaataaacattagtt

SEQ ID NO: 27027 - DNA, 15 bp, Homo sapiens
aaaataaacattagt

SEQ ID NO: 27028 - DNA, 15 bp, Homo sapiens
gaaaataaacattag

SEQ ID NO: 27029 - DNA, 15 bp, Homo sapiens
agaaaataaacatta

SEQ ID NO: 27030 - DNA, 15 bp, Homo sapiens
cagaaaataaacatt

SEQ ID NO: 27031 - DNA, 15 bp, Homo sapiens
acagaaaataaacat

SEQ ID NO: 27032 - DNA, 15 bp, Homo sapiens
aacagaaaataaaca

SEQ ID NO: 27033 - DNA, 15 bp, Homo sapiens
caacagaaaataaac

SEQ ID NO: 27034 - DNA, 15 bp, Homo sapiens
acaacagaaaataaa

SEQ ID NO: 27035 - DNA, 15 bp, Homo sapiens
cacaacagaaaataa

SEQ ID NO: 27036 - DNA, 15 bp, Homo sapiens
acacaacagaaaata

SEQ ID NO: 27037 - DNA, 15 bp, Homo sapiens
aacacaacagaaaat

SEQ ID NO: 27038 - DNA, 15 bp, Homo sapiens
caacacaacagaaaa

SEQ ID NO: 27039 - DNA, 15 bp, Homo sapiens
acaacacaacagaaa

SEQ ID NO: 27040 - DNA, 15 bp, Homo sapiens
gacaacacaacagaa

SEQ ID NO: 27041 - DNA, 15 bp, Homo sapiens
ggacaacacaacaga

SEQ ID NO: 27042 - DNA, 15 bp, Homo sapiens
aggacaacacaacag

SEQ ID NO: 27043 - DNA, 15 bp, Homo sapiens
caggacaacacaaca

SEQ ID NO: 27044 - DNA, 15 bp, Homo sapiens
tcaggacaacacaac

SEQ ID NO: 27045 - DNA, 15 bp, Homo sapiens
ctcaggacaacacaa

SEQ ID NO: 27046 - DNA, 15 bp, Homo sapiens
tctcaggacaacaca

SEQ ID NO: 27047 - DNA, 15 bp, Homo sapiens
gtctcaggacaacac

SEQ ID NO: 27048 - DNA, 15 bp, Homo sapiens
ggtctcaggacaaca

SEQ ID NO: 27049 - DNA, 15 bp, Homo sapiens
tggtctcaggacaac

SEQ ID NO: 27050 - DNA, 15 bp, Homo sapiens
ctggtctcaggacaa

SEQ ID NO: 27051 - DNA, 15 bp, Homo sapiens
gctggtctcaggaca

SEQ ID NO: 27052 - DNA, 15 bp, Homo sapiens
agctggtctcaggac

SEQ ID NO: 27053 - DNA, 15 bp, Homo sapiens
aagctggtctcagga

SEQ ID NO: 27054 - DNA, 15 bp, Homo sapiens
gaagctggtctcagg

SEQ ID NO: 27055 - DNA, 15 bp, Homo sapiens
agaagctggtctcag

SEQ ID NO: 27056 - DNA, 15 bp, Homo sapiens
aagaagctggtctca

SEQ ID NO: 27057 - DNA, 15 bp, Homo sapiens
taagaagctggtctc

SEQ ID NO: 27058 - DNA, 15 bp, Homo sapiens
ctaagaagctggtct

SEQ ID NO: 27059 - DNA, 15 bp, Homo sapiens
tctaagaagctggtc

SEQ ID NO: 27060 - DNA, 15 bp, Homo sapiens
atctaagaagctggt

SEQ ID NO: 27061 - DNA, 15 bp, Homo sapiens
aatctaagaagctgg

SEQ ID NO: 27062 - DNA, 15 bp, Homo sapiens
caatctaagaagctg

SEQ ID NO: 27063 - DNA, 15 bp, Homo sapiens
acaatctaagaagct

SEQ ID NO: 27064 - DNA, 15 bp, Homo sapiens
cacaatctaagaagc

SEQ ID NO: 27065 - DNA, 15 bp, Homo sapiens
acacaatctaagaag

SEQ ID NO: 27066 - DNA, 15 bp, Homo sapiens
aacacaatctaagaa

SEQ ID NO: 27067 - DNA, 15 bp, Homo sapiens
aaacacaatctaaga

SEQ ID NO: 27068 - DNA, 15 bp, Homo sapiens
gaaacacaatctaag

SEQ ID NO: 27069 - DNA, 15 bp, Homo sapiens
ggaaacacaatctaa

SEQ ID NO: 27070 - DNA, 15 bp, Homo sapiens
aggaaacacaatcta

SEQ ID NO: 27071 - DNA, 15 bp, Homo sapiens
taggaaacacaatct

SEQ ID NO: 27072 - DNA, 15 bp, Homo sapiens
ctaggaaacacaatc

SEQ ID NO: 27073 - DNA, 15 bp, Homo sapiens
actaggaaacacaat

SEQ ID NO: 27074 - DNA, 15 bp, Homo sapiens
gactaggaaacacaa

SEQ ID NO: 27075 - DNA, 15 bp, Homo sapiens
ggactaggaaacaca

SEQ ID NO: 27076 - DNA, 15 bp, Homo sapiens
aggactaggaaacac

SEQ ID NO: 27077 - DNA, 15 bp, Homo sapiens
taggactaggaaaca

SEQ ID NO: 27078 - DNA, 15 bp, Homo sapiens
gtaggactaggaaac

SEQ ID NO: 27079 - DNA, 15 bp, Homo sapiens
tgtaggactaggaaa

SEQ ID NO: 27080 - DNA, 15 bp, Homo sapiens
atgtaggactaggaa

SEQ ID NO: 27081 - DNA, 15 bp, Homo sapiens
gatgtaggactagga

SEQ ID NO: 27082 - DNA, 15 bp, Homo sapiens
agatgtaggactagg

SEQ ID NO: 27083 - DNA, 15 bp, Homo sapiens
gagatgtaggactag

SEQ ID NO: 27084 - DNA, 15 bp, Homo sapiens
agagatgtaggacta

SEQ ID NO: 27085 - DNA, 15 bp, Homo sapiens
cagagatgtaggact

SEQ ID NO: 27086 - DNA, 15 bp, Homo sapiens
tcagagatgtaggac

SEQ ID NO: 27087 - DNA, 15 bp, Homo sapiens
atcagagatgtagga

SEQ ID NO: 27088 - DNA, 15 bp, Homo sapiens
aatcagagatgtagg

SEQ ID NO: 27089 - DNA, 15 bp, Homo sapiens
gaatcagagatgtag

SEQ ID NO: 27090 - DNA, 15 bp, Homo sapiens
ggaatcagagatgta

SEQ ID NO: 27091 - DNA, 15 bp, Homo sapiens
aggaatcagagatgt

SEQ ID NO: 27092 - DNA, 15 bp, Homo sapiens
aaggaatcagagatg

SEQ ID NO: 27093 - DNA, 15 bp, Homo sapiens
taaggaatcagagat

SEQ ID NO: 27094 - DNA, 15 bp, Homo sapiens
ataaggaatcagaga

SEQ ID NO: 27095 - DNA, 15 bp, Homo sapiens
tataaggaatcagag

SEQ ID NO: 27096 - DNA, 15 bp, Homo sapiens
ttataaggaatcaga

SEQ ID NO: 27097 - DNA, 15 bp, Homo sapiens
tttataaggaatcag

SEQ ID NO: 27098 - DNA, 15 bp, Homo sapiens
ttttataaggaatca

SEQ ID NO: 27099 - DNA, 15 bp, Homo sapiens
attttataaggaatc

SEQ ID NO: 27100 - DNA, 15 bp, Homo sapiens
tattttataaggaat

SEQ ID NO: 27101 - DNA, 15 bp, Homo sapiens
atattttataaggaa

SEQ ID NO: 27102 - DNA, 15 bp, Homo sapiens
aatattttataagga

SEQ ID NO: 27103 - DNA, 15 bp, Homo sapiens
gaatattttataagg

SEQ ID NO: 27104 - DNA, 15 bp, Homo sapiens
ggaatattttataag

SEQ ID NO: 27105 - DNA, 15 bp, Homo sapiens
tggaatattttataa

SEQ ID NO: 27106 - DNA, 15 bp, Homo sapiens
atggaatattttata

SEQ ID NO: 27107 - DNA, 15 bp, Homo sapiens
aatggaatattttat

SEQ ID NO: 27108 - DNA, 15 bp, Homo sapiens
taatggaatatttta

SEQ ID NO: 27109 - DNA, 15 bp, Homo sapiens
ataatggaatatttt

SEQ ID NO: 27110 - DNA, 15 bp, Homo sapiens
cataatggaatattt

SEQ ID NO: 27111 - DNA, 15 bp, Homo sapiens
tcataatggaatatt

SEQ ID NO: 27112 - DNA, 15 bp, Homo sapiens
ttcataatggaatat

SEQ ID NO: 27113 - DNA, 15 bp, Homo sapiens
attcataatggaata

SEQ ID NO: 27114 - DNA, 15 bp, Homo sapiens
aattcataatggaat

SEQ ID NO: 27115 - DNA, 15 bp, Homo sapiens
gaattcataatggaa

SEQ ID NO: 27116 - DNA, 15 bp, Homo sapiens
agaattcataatgga

SEQ ID NO: 27117 - DNA, 15 bp, Homo sapiens
aagaattcataatgg

SEQ ID NO: 27118 - DNA, 15 bp, Homo sapiens
gaagaattcataatg

SEQ ID NO: 27119 - DNA, 15 bp, Homo sapiens
tgaagaattcataat

SEQ ID NO: 27120 - DNA, 15 bp, Homo sapiens
gtgaagaattcataa

SEQ ID NO: 27121 - DNA, 15 bp, Homo sapiens
agtgaagaattcata

SEQ ID NO: 27122 - DNA, 15 bp, Homo sapiens
tagtgaagaattcat

SEQ ID NO: 27123 - DNA, 15 bp, Homo sapiens
atagtgaagaattca

SEQ ID NO: 27124 - DNA, 15 bp, Homo sapiens
aatagtgaagaattc

SEQ ID NO: 27125 - DNA, 15 bp, Homo sapiens
caatagtgaagaatt

SEQ ID NO: 27126 - DNA, 15 bp, Homo sapiens
tcaatagtgaagaat

SEQ ID NO: 27127 - DNA, 15 bp, Homo sapiens
gtcaatagtgaagaa

SEQ ID NO: 27128 - DNA, 15 bp, Homo sapiens
tgtcaatagtgaaga

SEQ ID NO: 27129 - DNA, 15 bp, Homo sapiens
ttgtcaatagtgaag

SEQ ID NO: 27130 - DNA, 15 bp, Homo sapiens
attgtcaatagtgaa

SEQ ID NO: 27131 - DNA, 15 bp, Homo sapiens
aattgtcaatagtga

SEQ ID NO: 27132 - DNA, 15 bp, Homo sapiens
aaattgtcaatagtg

SEQ ID NO: 27133 - DNA, 15 bp, Homo sapiens
gaaattgtcaatagt

SEQ ID NO: 27134 - DNA, 15 bp, Homo sapiens
agaaattgtcaatag

SEQ ID NO: 27135 - DNA, 15 bp, Homo sapiens
gagaaattgtcaata

SEQ ID NO: 27136 - DNA, 15 bp, Homo sapiens
ggagaaattgtcaat

SEQ ID NO: 27137 - DNA, 15 bp, Homo sapiens
gggagaaattgtcaa

SEQ ID NO: 27138 - DNA, 15 bp, Homo sapiens
ggggagaaattgtca

SEQ ID NO: 27139 - DNA, 15 bp, Homo sapiens
aggggagaaattgtc

SEQ ID NO: 27140 - DNA, 15 bp, Homo sapiens
aaggggagaaattgt

SEQ ID NO: 27141 - DNA, 15 bp, Homo sapiens
aaaggggagaaattg

SEQ ID NO: 27142 - DNA, 15 bp, Homo sapiens
aaaaggggagaaatt

SEQ ID NO: 27143 - DNA, 15 bp, Homo sapiens
taaaaggggagaaat

SEQ ID NO: 27144 - DNA, 15 bp, Homo sapiens
ataaaaggggagaaa

SEQ ID NO: 27145 - DNA, 15 bp, Homo sapiens
gataaaaggggagaa

SEQ ID NO: 27146 - DNA, 15 bp, Homo sapiens
agataaaaggggaga

SEQ ID NO: 27147 - DNA, 15 bp, Homo sapiens
aagataaaaggggag

SEQ ID NO: 27148 - DNA, 15 bp, Homo sapiens
taagataaaagggga

SEQ ID NO: 27149 - DNA, 15 bp, Homo sapiens
ttaagataaaagggg

SEQ ID NO: 27150 - DNA, 15 bp, Homo sapiens
tttaagataaaaggg

SEQ ID NO: 27151 - DNA, 15 bp, Homo sapiens
ttttaagataaaagg

SEQ ID NO: 27152 - DNA, 15 bp, Homo sapiens
cttttaagataaaag

SEQ ID NO: 27153 - DNA, 15 bp, Homo sapiens
acttttaagataaaa

SEQ ID NO: 27154 - DNA, 15 bp, Homo sapiens
tacttttaagataaa

SEQ ID NO: 27155 - DNA, 15 bp, Homo sapiens
gtacttttaagataa

SEQ ID NO: 27156 - DNA, 15 bp, Homo sapiens
ggtacttttaagata

SEQ ID NO: 27157 - DNA, 15 bp, Homo sapiens
tggtacttttaagat

SEQ ID NO: 27158 - DNA, 15 bp, Homo sapiens
ttggtacttttaaga

SEQ ID NO: 27159 - DNA, 15 bp, Homo sapiens
tttggtacttttaag

SEQ ID NO: 27160 - DNA, 15 bp, Homo sapiens
ctttggtacttttaa

SEQ ID NO: 27161 - DNA, 15 bp, Homo sapiens
tctttggtactttta

SEQ ID NO: 27162 - DNA, 15 bp, Homo sapiens
ttctttggtactttt

SEQ ID NO: 27163 - DNA, 15 bp, Homo sapiens
tttctttggtacttt

SEQ ID NO: 27164 - DNA, 15 bp, Homo sapiens
ctttctttggtactt

SEQ ID NO: 27165 - DNA, 15 bp, Homo sapiens
actttctttggtact

SEQ ID NO: 27166 - DNA, 15 bp, Homo sapiens
cactttctttggtac

SEQ ID NO: 27167 - DNA, 15 bp, Homo sapiens
acactttctttggta

SEQ ID NO: 27168 - DNA, 15 bp, Homo sapiens
tacactttctttggt

SEQ ID NO: 27169 - DNA, 15 bp, Homo sapiens
ttacactttctttgg

SEQ ID NO: 27170 - DNA, 15 bp, Homo sapiens
tttacactttctttg

SEQ ID NO: 27171 - DNA, 15 bp, Homo sapiens
ttttacactttcttt

SEQ ID NO: 27172 - DNA, 15 bp, Homo sapiens
attttacactttctt

SEQ ID NO: 27173 - DNA, 15 bp, Homo sapiens
cattttacactttct

SEQ ID NO: 27174 - DNA, 15 bp, Homo sapiens
acattttacactttc

SEQ ID NO: 27175 - DNA, 15 bp, Homo sapiens
cacattttacacttt

SEQ ID NO: 27176 - DNA, 15 bp, Homo sapiens
tcacattttacactt

SEQ ID NO: 27177 - DNA, 15 bp, Homo sapiens
gtcacattttacact

SEQ ID NO: 27178 - DNA, 15 bp, Homo sapiens
agtcacattttacac

SEQ ID NO: 27179 - DNA, 15 bp, Homo sapiens
cagtcacattttaca

SEQ ID NO: 27180 - DNA, 15 bp, Homo sapiens
acagtcacattttac

SEQ ID NO: 27181 - DNA, 15 bp, Homo sapiens
gacagtcacatttta

SEQ ID NO: 27182 - DNA, 15 bp, Homo sapiens
agacagtcacatttt

SEQ ID NO: 27183 - DNA, 15 bp, Homo sapiens
aagacagtcacattt

SEQ ID NO: 27184 - DNA, 15 bp, Homo sapiens
caagacagtcacatt

SEQ ID NO: 27185 - DNA, 15 bp, Homo sapiens
acaagacagtcacat

SEQ ID NO: 27186 - DNA, 15 bp, Homo sapiens
gacaagacagtcaca

SEQ ID NO: 27187 - DNA, 15 bp, Homo sapiens
tgacaagacagtcac

SEQ ID NO: 27188 - DNA, 15 bp, Homo sapiens
ctgacaagacagtca

SEQ ID NO: 27189 - DNA, 15 bp, Homo sapiens
actgacaagacagtc

SEQ ID NO: 27190 - DNA, 15 bp, Homo sapiens
gactgacaagacagt

SEQ ID NO: 27191 - DNA, 15 bp, Homo sapiens
ggactgacaagacag

SEQ ID NO: 27192 - DNA, 15 bp, Homo sapiens
aggactgacaagaca

SEQ ID NO: 27193 - DNA, 15 bp, Homo sapiens
gaggactgacaagac

SEQ ID NO: 27194 - DNA, 15 bp, Homo sapiens
agaggactgacaaga

SEQ ID NO: 27195 - DNA, 15 bp, Homo sapiens
aagaggactgacaag

SEQ ID NO: 27196 - DNA, 15 bp, Homo sapiens
aaagaggactgacaa

SEQ ID NO: 27197 - DNA, 15 bp, Homo sapiens
aaaagaggactgaca

SEQ ID NO: 27198 - DNA, 15 bp, Homo sapiens
aaaaagaggactgac

SEQ ID NO: 27199 - DNA, 15 bp, Homo sapiens
gaaaaagaggactga

SEQ ID NO: 27200 - DNA, 15 bp, Homo sapiens
ggaaaaagaggactg

SEQ ID NO: 27201 - DNA, 15 bp, Homo sapiens
aggaaaaagaggact

SEQ ID NO: 27202 - DNA, 15 bp, Homo sapiens
caggaaaaagaggac

SEQ ID NO: 27203 - DNA, 15 bp, Homo sapiens
acaggaaaaagagga

SEQ ID NO: 27204 - DNA, 15 bp, Homo sapiens
aacaggaaaaagagg

SEQ ID NO: 27205 - DNA, 15 bp, Homo sapiens
aaacaggaaaaagag

SEQ ID NO: 27206 - DNA, 15 bp, Homo sapiens
aaaacaggaaaaaga

SEQ ID NO: 27207 - DNA, 15 bp, Homo sapiens
aaaaacaggaaaaag

SEQ ID NO: 27208 - DNA, 15 bp, Homo sapiens
gaaaaacaggaaaaa

SEQ ID NO: 27209 - DNA, 15 bp, Homo sapiens
tgaaaaacaggaaaa

SEQ ID NO: 27210 - DNA, 15 bp, Homo sapiens
atgaaaaacaggaaa

SEQ ID NO: 27211 - DNA, 15 bp, Homo sapiens
catgaaaaacaggaa

SEQ ID NO: 27212 - DNA, 15 bp, Homo sapiens
acatgaaaaacagga

SEQ ID NO: 27213 - DNA, 15 bp, Homo sapiens
gacatgaaaaacagg

SEQ ID NO: 27214 - DNA, 15 bp, Homo sapiens
tgacatgaaaaacag

SEQ ID NO: 27215 - DNA, 15 bp, Homo sapiens
ctgacatgaaaaaca

SEQ ID NO: 27216 - DNA, 15 bp, Homo sapiens
actgacatgaaaaac

SEQ ID NO: 27217 - DNA, 15 bp, Homo sapiens
cactgacatgaaaaa

SEQ ID NO: 27218 - DNA, 15 bp, Homo sapiens
ccactgacatgaaaa

SEQ ID NO: 27219 - DNA, 15 bp, Homo sapiens
cccactgacatgaaa

SEQ ID NO: 27220 - DNA, 15 bp, Homo sapiens
acccactgacatgaa

SEQ ID NO: 27221 - DNA, 15 bp, Homo sapiens
tacccactgacatga

SEQ ID NO: 27222 - DNA, 15 bp, Homo sapiens
atacccactgacatg

SEQ ID NO: 27223 - DNA, 15 bp, Homo sapiens
catacccactgacat

SEQ ID NO: 27224 - DNA, 15 bp, Homo sapiens
tcatacccactgaca

SEQ ID NO: 27225 - DNA, 15 bp, Homo sapiens
ttcatacccactgac

SEQ ID NO: 27226 - DNA, 15 bp, Homo sapiens
tttcatacccactga

SEQ ID NO: 27227 - DNA, 15 bp, Homo sapiens
atttcatacccactg

SEQ ID NO: 27228 - DNA, 15 bp, Homo sapiens
aatttcatacccact

SEQ ID NO: 27229 - DNA, 15 bp, Homo sapiens
taatttcatacccac

SEQ ID NO: 27230 - DNA, 15 bp, Homo sapiens
gtaatttcataccca

SEQ ID NO: 27231 - DNA, 15 bp, Homo sapiens
agtaatttcataccc

SEQ ID NO: 27232 - DNA, 15 bp, Homo sapiens
tagtaatttcatacc

SEQ ID NO: 27233 - DNA, 15 bp, Homo sapiens
ctagtaatttcatac

SEQ ID NO: 27234 - DNA, 15 bp, Homo sapiens
gctagtaatttcata

SEQ ID NO: 27235 - DNA, 15 bp, Homo sapiens
tgctagtaatttcat

SEQ ID NO: 27236 - DNA, 15 bp, Homo sapiens
ttgctagtaatttca

SEQ ID NO: 27237 - DNA, 15 bp, Homo sapiens
cttgctagtaatttc

SEQ ID NO: 27238 - DNA, 15 bp, Homo sapiens
ccttgctagtaattt

SEQ ID NO: 27239 - DNA, 15 bp, Homo sapiens
tccttgctagtaatt

SEQ ID NO: 27240 - DNA, 15 bp, Homo sapiens
atccttgctagtaat

SEQ ID NO: 27241 - DNA, 15 bp, Homo sapiens
catccttgctagtaa

SEQ ID NO: 27242 - DNA, 15 bp, Homo sapiens
gcatccttgctagta

SEQ ID NO: 27243 - DNA, 15 bp, Homo sapiens
tgcatccttgctagt

SEQ ID NO: 27244 - DNA, 15 bp, Homo sapiens
atgcatccttgctag

SEQ ID NO: 27245 - DNA, 15 bp, Homo sapiens
tatgcatccttgcta

SEQ ID NO: 27246 - DNA, 15 bp, Homo sapiens
atatgcatccttgct

SEQ ID NO: 27247 - DNA, 15 bp, Homo sapiens
tatatgcatccttgc

SEQ ID NO: 27248 - DNA, 15 bp, Homo sapiens
atatatgcatccttg

SEQ ID NO: 27249 - DNA, 15 bp, Homo sapiens
catatatgcatcctt

SEQ ID NO: 27250 - DNA, 15 bp, Homo sapiens
acatatatgcatcct

SEQ ID NO: 27251 - DNA, 15 bp, Homo sapiens
cacatatatgcatcc

SEQ ID NO: 27252 - DNA, 15 bp, Homo sapiens
gcacatatatgcatc

SEQ ID NO: 27253 - DNA, 15 bp, Homo sapiens
tgcacatatatgcat

SEQ ID NO: 27254 - DNA, 15 bp, Homo sapiens
atgcacatatatgca

SEQ ID NO: 27255 - DNA, 15 bp, Homo sapiens
tatgcacatatatgc

SEQ ID NO: 27256 - DNA, 15 bp, Homo sapiens
atatgcacatatatg

SEQ ID NO: 27257 - DNA, 15 bp, Homo sapiens
catatgcacatatat

SEQ ID NO: 27258 - DNA, 15 bp, Homo sapiens
acatatgcacatata

SEQ ID NO: 27259 - DNA, 15 bp, Homo sapiens
gacatatgcacatat

SEQ ID NO: 27260 - DNA, 15 bp, Homo sapiens
tgacatatgcacata

SEQ ID NO: 27261 - DNA, 15 bp, Homo sapiens
atgacatatgcacat

SEQ ID NO: 27262 - DNA, 15 bp, Homo sapiens
aatgacatatgcaca

SEQ ID NO: 27263 - DNA, 15 bp, Homo sapiens
taatgacatatgcac

SEQ ID NO: 27264 - DNA, 15 bp, Homo sapiens
gtaatgacatatgca

SEQ ID NO: 27265 - DNA, 15 bp, Homo sapiens
agtaatgacatatgc

SEQ ID NO: 27266 - DNA, 15 bp, Homo sapiens
tagtaatgacatatg

SEQ ID NO: 27267 - DNA, 15 bp, Homo sapiens
ttagtaatgacatat

SEQ ID NO: 27268 - DNA, 15 bp, Homo sapiens
tttagtaatgacata

SEQ ID NO: 27269 - DNA, 15 bp, Homo sapiens
atttagtaatgacat

SEQ ID NO: 27270 - DNA, 15 bp, Homo sapiens
catttagtaatgaca

SEQ ID NO: 27271 - DNA, 15 bp, Homo sapiens
gcatttagtaatgac

SEQ ID NO: 27272 - DNA, 15 bp, Homo sapiens
tgcatttagtaatga

SEQ ID NO: 27273 - DNA, 15 bp, Homo sapiens
atgcatttagtaatg

SEQ ID NO: 27274 - DNA, 15 bp, Homo sapiens
aatgcatttagtaat

SEQ ID NO: 27275 - DNA, 15 bp, Homo sapiens
aaatgcatttagtaa

SEQ ID NO: 27276 - DNA, 15 bp, Homo sapiens
aaaatgcatttagta

SEQ ID NO: 27277 - DNA, 15 bp, Homo sapiens
gaaaatgcatttagt

SEQ ID NO: 27278 - DNA, 15 bp, Homo sapiens
agaaaatgcatttag

SEQ ID NO: 27279 - DNA, 15 bp, Homo sapiens
aagaaaatgcattta

SEQ ID NO: 27280 - DNA, 15 bp, Homo sapiens
aaagaaaatgcattt

SEQ ID NO: 27281 - DNA, 15 bp, Homo sapiens
gaaagaaaatgcatt

SEQ ID NO: 27282 - DNA, 15 bp, Homo sapiens
agaaagaaaatgcat

SEQ ID NO: 27283 - DNA, 15 bp, Homo sapiens
tagaaagaaaatgca

SEQ ID NO: 27284 - DNA, 15 bp, Homo sapiens
ctagaaagaaaatgc

SEQ ID NO: 27285 - DNA, 15 bp, Homo sapiens
tctagaaagaaaatg

SEQ ID NO: 27286 - DNA, 15 bp, Homo sapiens
ttctagaaagaaaat

SEQ ID NO: 27287 - DNA, 15 bp, Homo sapiens
tttctagaaagaaaa

SEQ ID NO: 27288 - DNA, 15 bp, Homo sapiens
ttttctagaaagaaa

SEQ ID NO: 27289 - DNA, 15 bp, Homo sapiens
tttttctagaaagaa

SEQ ID NO: 27290 - DNA, 15 bp, Homo sapiens
gtttttctagaaaga

SEQ ID NO: 27291 - DNA, 15 bp, Homo sapiens
agtttttctagaaag

SEQ ID NO: 27292 - DNA, 15 bp, Homo sapiens
gagtttttctagaaa

SEQ ID NO: 27293 - DNA, 15 bp, Homo sapiens
tgagtttttctagaa

SEQ ID NO: 27294 - DNA, 15 bp, Homo sapiens
ttgagtttttctaga

SEQ ID NO: 27295 - DNA, 15 bp, Homo sapiens
attgagtttttctag

SEQ ID NO: 27296 - DNA, 15 bp, Homo sapiens
tattgagtttttcta

SEQ ID NO: 27297 - DNA, 15 bp, Homo sapiens
atattgagtttttct

SEQ ID NO: 27298 - DNA, 15 bp, Homo sapiens
tatattgagtttttc

SEQ ID NO: 27299 - DNA, 15 bp, Homo sapiens
gtatattgagttttt

SEQ ID NO: 27300 - DNA, 15 bp, Homo sapiens
agtatattgagtttt

SEQ ID NO: 27301 - DNA, 15 bp, Homo sapiens
tagtatattgagttt

SEQ ID NO: 27302 - DNA, 15 bp, Homo sapiens
ttagtatattgagtt

SEQ ID NO: 27303 - DNA, 15 bp, Homo sapiens
tttagtatattgagt

SEQ ID NO: 27304 - DNA, 15 bp, Homo sapiens
atttagtatattgag

SEQ ID NO: 27305 - DNA, 15 bp, Homo sapiens
aatttagtatattga

SEQ ID NO: 27306 - DNA, 15 bp, Homo sapiens
caatttagtatattg

SEQ ID NO: 27307 - DNA, 15 bp, Homo sapiens
acaatttagtatatt

SEQ ID NO: 27308 - DNA, 15 bp, Homo sapiens
tacaatttagtatat

SEQ ID NO: 27309 - DNA, 15 bp, Homo sapiens
gtacaatttagtata

SEQ ID NO: 27310 - DNA, 15 bp, Homo sapiens
agtacaatttagtat

SEQ ID NO: 27311 - DNA, 15 bp, Homo sapiens
tagtacaatttagta

SEQ ID NO: 27312 - DNA, 15 bp, Homo sapiens
ttagtacaatttagt

SEQ ID NO: 27313 - DNA, 15 bp, Homo sapiens
tttagtacaatttag

SEQ ID NO: 27314 - DNA, 15 bp, Homo sapiens
ttttagtacaattta

SEQ ID NO: 27315 - DNA, 15 bp, Homo sapiens
tttttagtacaattt

SEQ ID NO: 27316 - DNA, 15 bp, Homo sapiens
ctttttagtacaatt

SEQ ID NO: 27317 - DNA, 15 bp, Homo sapiens
cctttttagtacaat

SEQ ID NO: 27318 - DNA, 15 bp, Homo sapiens
tcctttttagtacaa

SEQ ID NO: 27319 - DNA, 15 bp, Homo sapiens
ttcctttttagtaca

SEQ ID NO: 27320 - DNA, 15 bp, Homo sapiens
tttcctttttagtac

SEQ ID NO: 27321 - DNA, 15 bp, Homo sapiens
ttttcctttttagta

SEQ ID NO: 27322 - DNA, 15 bp, Homo sapiens
cttttcctttttagt

SEQ ID NO: 27323 - DNA, 15 bp, Homo sapiens
gcttttcctttttag

SEQ ID NO: 27324 - DNA, 15 bp, Homo sapiens
agcttttccttttta

SEQ ID NO: 27325 - DNA, 15 bp, Homo sapiens
aagcttttccttttt

SEQ ID NO: 27326 - DNA, 15 bp, Homo sapiens
caagcttttcctttt

SEQ ID NO: 27327 - DNA, 15 bp, Homo sapiens
acaagcttttccttt

SEQ ID NO: 27328 - DNA, 15 bp, Homo sapiens
aacaagcttttcctt

SEQ ID NO: 27329 - DNA, 15 bp, Homo sapiens
aaacaagcttttcct

SEQ ID NO: 27330 - DNA, 15 bp, Homo sapiens
aaaacaagcttttcc

SEQ ID NO: 27331 - DNA, 15 bp, Homo sapiens
caaaacaagcttttc

SEQ ID NO: 27332 - DNA, 15 bp, Homo sapiens
acaaaacaagctttt

SEQ ID NO: 27333 - DNA, 15 bp, Homo sapiens
aacaaaacaagcttt

SEQ ID NO: 27334 - DNA, 15 bp, Homo sapiens
aaacaaaacaagctt

SEQ ID NO: 27335 - DNA, 15 bp, Homo sapiens
aaaacaaaacaagct

SEQ ID NO: 27336 - DNA, 15 bp, Homo sapiens
caaaacaaaacaagc

SEQ ID NO: 27337 - DNA, 15 bp, Homo sapiens
tcaaaacaaaacaag

SEQ ID NO: 27338 - DNA, 15 bp, Homo sapiens
ctcaaaacaaaacaa

SEQ ID NO: 27339 - DNA, 15 bp, Homo sapiens
actcaaaacaaaaca

SEQ ID NO: 27340 - DNA, 15 bp, Homo sapiens
cactcaaaacaaaac

SEQ ID NO: 27341 - DNA, 15 bp, Homo sapiens
ccactcaaaacaaaa

SEQ ID NO: 27342 - DNA, 15 bp, Homo sapiens
accactcaaaacaaa

SEQ ID NO: 27343 - DNA, 15 bp, Homo sapiens
taccactcaaaacaa

SEQ ID NO: 27344 - DNA, 15 bp, Homo sapiens
ctaccactcaaaaca

SEQ ID NO: 27345 - DNA, 15 bp, Homo sapiens
actaccactcaaaac

SEQ ID NO: 27346 - DNA, 15 bp, Homo sapiens
tactaccactcaaaa

SEQ ID NO: 27347 - DNA, 15 bp, Homo sapiens
atactaccactcaaa

SEQ ID NO: 27348 - DNA, 15 bp, Homo sapiens
catactaccactcaa

SEQ ID NO: 27349 - DNA, 15 bp, Homo sapiens
tcatactaccactca

SEQ ID NO: 27350 - DNA, 15 bp, Homo sapiens
ttcatactaccactc

SEQ ID NO: 27351 - DNA, 15 bp, Homo sapiens
tttcatactaccact

SEQ ID NO: 27352 - DNA, 15 bp, Homo sapiens
ctttcatactaccac

SEQ ID NO: 27353 - DNA, 15 bp, Homo sapiens
actttcatactacca

SEQ ID NO: 27354 - DNA, 15 bp, Homo sapiens
aactttcatactacc

SEQ ID NO: 27355 - DNA, 15 bp, Homo sapiens
caactttcatactac

SEQ ID NO: 27356 - DNA, 15 bp, Homo sapiens
acaactttcatacta

SEQ ID NO: 27357 - DNA, 15 bp, Homo sapiens
aacaactttcatact

SEQ ID NO: 27358 - DNA, 15 bp, Homo sapiens
aaacaactttcatac

SEQ ID NO: 27359 - DNA, 15 bp, Homo sapiens
aaaacaactttcata

SEQ ID NO: 27360 - DNA, 15 bp, Homo sapiens
taaaacaactttcat

SEQ ID NO: 27361 - DNA, 15 bp, Homo sapiens
ataaaacaactttca

SEQ ID NO: 27362 - DNA, 15 bp, Homo sapiens
aataaaacaactttc

SEQ ID NO: 27363 - DNA, 15 bp, Homo sapiens
aaataaaacaacttt

SEQ ID NO: 27364 - DNA, 15 bp, Homo sapiens
aaaataaaacaactt

SEQ ID NO: 27365 - DNA, 15 bp, Homo sapiens
taaaataaaacaact

SEQ ID NO: 27366 - DNA, 15 bp, Homo sapiens
ctaaaataaaacaac

SEQ ID NO: 27367 - DNA, 15 bp, Homo sapiens
cctaaaataaaacaa

SEQ ID NO: 27368 - DNA, 15 bp, Homo sapiens
acctaaaataaaaca

SEQ ID NO: 27369 - DNA, 15 bp, Homo sapiens
gacctaaaataaaac

SEQ ID NO: 27370 - DNA, 15 bp, Homo sapiens
agacctaaaataaaa

SEQ ID NO: 27371 - DNA, 15 bp, Homo sapiens
cagacctaaaataaa

SEQ ID NO: 27372 - DNA, 15 bp, Homo sapiens
tcagacctaaaataa

SEQ ID NO: 27373 - DNA, 15 bp, Homo sapiens
gtcagacctaaaata

SEQ ID NO: 27374 - DNA, 15 bp, Homo sapiens
ggtcagacctaaaat

SEQ ID NO: 27375 - DNA, 15 bp, Homo sapiens
tggtcagacctaaaa

SEQ ID NO: 27376 - DNA, 15 bp, Homo sapiens
ctggtcagacctaaa

SEQ ID NO: 27377 - DNA, 15 bp, Homo sapiens
actggtcagacctaa

SEQ ID NO: 27378 - DNA, 15 bp, Homo sapiens
aactggtcagaccta

SEQ ID NO: 27379 - DNA, 15 bp, Homo sapiens
taactggtcagacct

SEQ ID NO: 27380 - DNA, 15 bp, Homo sapiens
ctaactggtcagacc

SEQ ID NO: 27381 - DNA, 15 bp, Homo sapiens
tctaactggtcagac

SEQ ID NO: 27382 - DNA, 15 bp, Homo sapiens
ttctaactggtcaga

SEQ ID NO: 27383 - DNA, 15 bp, Homo sapiens
tttctaactggtcag

SEQ ID NO: 27384 - DNA, 15 bp, Homo sapiens
gtttctaactggtca

SEQ ID NO: 27385 - DNA, 15 bp, Homo sapiens
ggtttctaactggtc

SEQ ID NO: 27386 - DNA, 15 bp, Homo sapiens
tggtttctaactggt

SEQ ID NO: 27387 - DNA, 15 bp, Homo sapiens
ttggtttctaactgg

SEQ ID NO: 27388 - DNA, 15 bp, Homo sapiens
attggtttctaactg

SEQ ID NO: 27389 - DNA, 15 bp, Homo sapiens
cattggtttctaact

SEQ ID NO: 27390 - DNA, 15 bp, Homo sapiens
ccattggtttctaac

SEQ ID NO: 27391 - DNA, 15 bp, Homo sapiens
tccattggtttctaa

SEQ ID NO: 27392 - DNA, 15 bp, Homo sapiens
atccattggtttcta

SEQ ID NO: 27393 - DNA, 15 bp, Homo sapiens
aatccattggtttct

SEQ ID NO: 27394 - DNA, 15 bp, Homo sapiens
caatccattggtttc

SEQ ID NO: 27395 - DNA, 15 bp, Homo sapiens
acaatccattggttt

SEQ ID NO: 27396 - DNA, 15 bp, Homo sapiens
tacaatccattggtt

SEQ ID NO: 27397 - DNA, 15 bp, Homo sapiens
ctacaatccattggt

SEQ ID NO: 27398 - DNA, 15 bp, Homo sapiens
actacaatccattgg

SEQ ID NO: 27399 - DNA, 15 bp, Homo sapiens
aactacaatccattg

SEQ ID NO: 27400 - DNA, 15 bp, Homo sapiens
aaactacaatccatt

SEQ ID NO: 27401 - DNA, 15 bp, Homo sapiens
taaactacaatccat

SEQ ID NO: 27402 - DNA, 15 bp, Homo sapiens
ataaactacaatcca

SEQ ID NO: 27403 - DNA, 15 bp, Homo sapiens
aataaactacaatcc

SEQ ID NO: 27404 - DNA, 15 bp, Homo sapiens
aaataaactacaatc

SEQ ID NO: 27405 - DNA, 15 bp, Homo sapiens
taaataaactacaat

SEQ ID NO: 27406 - DNA, 15 bp, Homo sapiens
ataaataaactacaa

SEQ ID NO: 27407 - DNA, 15 bp, Homo sapiens
tataaataaactaca

SEQ ID NO: 27408 - DNA, 15 bp, Homo sapiens
ttataaataaactac

SEQ ID NO: 27409 - DNA, 15 bp, Homo sapiens
attataaataaacta

SEQ ID NO: 27410 - DNA, 15 bp, Homo sapiens
aattataaataaact

SEQ ID NO: 27411 - DNA, 15 bp, Homo sapiens
taattataaataaac

SEQ ID NO: 27412 - DNA, 15 bp, Homo sapiens
ctaattataaataaa

SEQ ID NO: 27413 - DNA, 15 bp, Homo sapiens
actaattataaataa

SEQ ID NO: 27414 - DNA, 15 bp, Homo sapiens
aactaattataaata

SEQ ID NO: 27415 - DNA, 15 bp, Homo sapiens
taactaattataaat

SEQ ID NO: 27416 - DNA, 15 bp, Homo sapiens
ttaactaattataaa

SEQ ID NO: 27417 - DNA, 15 bp, Homo sapiens
tttaactaattataa

SEQ ID NO: 27418 - DNA, 15 bp, Homo sapiens
gtttaactaattata

SEQ ID NO: 27419 - DNA, 15 bp, Homo sapiens
ggtttaactaattat

SEQ ID NO: 27420 - DNA, 15 bp, Homo sapiens
aggtttaactaatta

SEQ ID NO: 27421 - DNA, 15 bp, Homo sapiens
aaggtttaactaatt

SEQ ID NO: 27422 - DNA, 15 bp, Homo sapiens
gaaggtttaactaat

SEQ ID NO: 27423 - DNA, 15 bp, Homo sapiens
tgaaggtttaactaa

SEQ ID NO: 27424 - DNA, 15 bp, Homo sapiens
atgaaggtttaacta

SEQ ID NO: 27425 - DNA, 15 bp, Homo sapiens
catgaaggtttaact

SEQ ID NO: 27426 - DNA, 15 bp, Homo sapiens
acatgaaggtttaac

SEQ ID NO: 27427 - DNA, 15 bp, Homo sapiens
cacatgaaggtttaa

SEQ ID NO: 27428 - DNA, 15 bp, Homo sapiens
tcacatgaaggttta

SEQ ID NO: 27429 - DNA, 15 bp, Homo sapiens
ttcacatgaaggttt

SEQ ID NO: 27430 - DNA, 15 bp, Homo sapiens
attcacatgaaggtt

SEQ ID NO: 27431 - DNA, 15 bp, Homo sapiens
aattcacatgaaggt

SEQ ID NO: 27432 - DNA, 15 bp, Homo sapiens
aaattcacatgaagg

SEQ ID NO: 27433 - DNA, 15 bp, Homo sapiens
caaattcacatgaag

SEQ ID NO: 27434 - DNA, 15 bp, Homo sapiens
ccaaattcacatgaa

SEQ ID NO: 27435 - DNA, 15 bp, Homo sapiens
accaaattcacatga

SEQ ID NO: 27436 - DNA, 15 bp, Homo sapiens
aaccaaattcacatg

SEQ ID NO: 27437 - DNA, 15 bp, Homo sapiens
aaaccaaattcacat

SEQ ID NO: 27438 - DNA, 15 bp, Homo sapiens
aaaaccaaattcaca

SEQ ID NO: 27439 - DNA, 15 bp, Homo sapiens
caaaaccaaattcac

SEQ ID NO: 27440 - DNA, 15 bp, Homo sapiens
tcaaaaccaaattca

SEQ ID NO: 27441 - DNA, 15 bp, Homo sapiens
ttcaaaaccaaattc

SEQ ID NO: 27442 - DNA, 15 bp, Homo sapiens
attcaaaaccaaatt

SEQ ID NO: 27443 - DNA, 15 bp, Homo sapiens
aattcaaaaccaaat

SEQ ID NO: 27444 - DNA, 15 bp, Homo sapiens
taattcaaaaccaaa

SEQ ID NO: 27445 - DNA, 15 bp, Homo sapiens
gtaattcaaaaccaa

SEQ ID NO: 27446 - DNA, 15 bp, Homo sapiens
ggtaattcaaaacca

SEQ ID NO: 27447 - DNA, 15 bp, Homo sapiens
aggtaattcaaaacc

SEQ ID NO: 27448 - DNA, 15 bp, Homo sapiens
aaggtaattcaaaac

SEQ ID NO: 27449 - DNA, 15 bp, Homo sapiens
aaaggtaattcaaaa

SEQ ID NO: 27450 - DNA, 15 bp, Homo sapiens
taaaggtaattcaaa

SEQ ID NO: 27451 - DNA, 15 bp, Homo sapiens
ttaaaggtaattcaa

SEQ ID NO: 27452 - DNA, 15 bp, Homo sapiens
cttaaaggtaattca

SEQ ID NO: 27453 - DNA, 15 bp, Homo sapiens
ccttaaaggtaattc

SEQ ID NO: 27454 - DNA, 15 bp, Homo sapiens
accttaaaggtaatt

SEQ ID NO: 27455 - DNA, 15 bp, Homo sapiens
taccttaaaggtaat

SEQ ID NO: 27456 - DNA, 15 bp, Homo sapiens
ctaccttaaaggtaa

SEQ ID NO: 27457 - DNA, 15 bp, Homo sapiens
tctaccttaaaggta

SEQ ID NO: 27458 - DNA, 15 bp, Homo sapiens
ctctaccttaaaggt

SEQ ID NO: 27459 - DNA, 15 bp, Homo sapiens
tctctaccttaaagg

SEQ ID NO: 27460 - DNA, 15 bp, Homo sapiens
ttctctaccttaaag

SEQ ID NO: 27461 - DNA, 15 bp, Homo sapiens
cttctctaccttaaa

SEQ ID NO: 27462 - DNA, 15 bp, Homo sapiens
tcttctctaccttaa

SEQ ID NO: 27463 - DNA, 15 bp, Homo sapiens
ttcttctctacctta

SEQ ID NO: 27464 - DNA, 15 bp, Homo sapiens
tttcttctctacctt

SEQ ID NO: 27465 - DNA, 15 bp, Homo sapiens
gtttcttctctacct

SEQ ID NO: 27466 - DNA, 15 bp, Homo sapiens
agtttcttctctacc

SEQ ID NO: 27467 - DNA, 15 bp, Homo sapiens
tagtttcttctctac

SEQ ID NO: 27468 - DNA, 15 bp, Homo sapiens
atagtttcttctcta

SEQ ID NO: 27469 - DNA, 15 bp, Homo sapiens
tatagtttcttctct

SEQ ID NO: 27470 - DNA, 15 bp, Homo sapiens
atatagtttcttctc

SEQ ID NO: 27471 - DNA, 15 bp, Homo sapiens
tatatagtttcttct

SEQ ID NO: 27472 - DNA, 15 bp, Homo sapiens
ctatatagtttcttc

SEQ ID NO: 27473 - DNA, 15 bp, Homo sapiens
tctatatagtttctt

SEQ ID NO: 27474 - DNA, 15 bp, Homo sapiens
atctatatagtttct

SEQ ID NO: 27475 - DNA, 15 bp, Homo sapiens
catctatatagtttc

SEQ ID NO: 27476 - DNA, 15 bp, Homo sapiens
acatctatatagttt

SEQ ID NO: 27477 - DNA, 15 bp, Homo sapiens
aacatctatatagtt

SEQ ID NO: 27478 - DNA, 15 bp, Homo sapiens
aaacatctatatagt

SEQ ID NO: 27479 - DNA, 15 bp, Homo sapiens
aaaacatctatatag

SEQ ID NO: 27480 - DNA, 15 bp, Homo sapiens
aaaaacatctatata

SEQ ID NO: 27481 - DNA, 15 bp, Homo sapiens
gaaaaacatctatat

SEQ ID NO: 27482 - DNA, 15 bp, Homo sapiens
tgaaaaacatctata

SEQ ID NO: 27483 - DNA, 15 bp, Homo sapiens
ctgaaaaacatctat

SEQ ID NO: 27484 - DNA, 15 bp, Homo sapiens
cctgaaaaacatcta

SEQ ID NO: 27485 - DNA, 15 bp, Homo sapiens
ccctgaaaaacatct

SEQ ID NO: 27486 - DNA, 15 bp, Homo sapiens
accctgaaaaacatc

SEQ ID NO: 27487 - DNA, 15 bp, Homo sapiens
aaccctgaaaaacat

SEQ ID NO: 27488 - DNA, 15 bp, Homo sapiens
aaaccctgaaaaaca

SEQ ID NO: 27489 - DNA, 15 bp, Homo sapiens
gaaaccctgaaaaac

SEQ ID NO: 27490 - DNA, 15 bp, Homo sapiens
agaaaccctgaaaaa

SEQ ID NO: 27491 - DNA, 15 bp, Homo sapiens
tagaaaccctgaaaa

SEQ ID NO: 27492 - DNA, 15 bp, Homo sapiens
ttagaaaccctgaaa

SEQ ID NO: 27493 - DNA, 15 bp, Homo sapiens
tttagaaaccctgaa

SEQ ID NO: 27494 - DNA, 15 bp, Homo sapiens
atttagaaaccctga

SEQ ID NO: 27495 - DNA, 15 bp, Homo sapiens
catttagaaaccctg

SEQ ID NO: 27496 - DNA, 15 bp, Homo sapiens
acatttagaaaccct

SEQ ID NO: 27497 - DNA, 15 bp, Homo sapiens
tacatttagaaaccc

SEQ ID NO: 27498 - DNA, 15 bp, Homo sapiens
gtacatttagaaacc

SEQ ID NO: 27499 - DNA, 15 bp, Homo sapiens
tgtacatttagaaac

SEQ ID NO: 27500 - DNA, 15 bp, Homo sapiens
ttgtacatttagaaa

SEQ ID NO: 27501 - DNA, 15 bp, Homo sapiens
attgtacatttagaa

SEQ ID NO: 27502 - DNA, 15 bp, Homo sapiens
tattgtacatttaga

SEQ ID NO: 27503 - DNA, 15 bp, Homo sapiens
gtattgtacatttag

SEQ ID NO: 27504 - DNA, 15 bp, Homo sapiens
tgtattgtacattta

SEQ ID NO: 27505 - DNA, 15 bp, Homo sapiens
ctgtattgtacattt

SEQ ID NO: 27506 - DNA, 15 bp, Homo sapiens
cctgtattgtacatt

SEQ ID NO: 27507 - DNA, 15 bp, Homo sapiens
acctgtattgtacat

SEQ ID NO: 27508 - DNA, 15 bp, Homo sapiens
aacctgtattgtaca

SEQ ID NO: 27509 - DNA, 15 bp, Homo sapiens
gaacctgtattgtac

SEQ ID NO: 27510 - DNA, 15 bp, Homo sapiens
tgaacctgtattgta

SEQ ID NO: 27511 - DNA, 15 bp, Homo sapiens
gtgaacctgtattgt

SEQ ID NO: 27512 - DNA, 15 bp, Homo sapiens
tgtgaacctgtattg

SEQ ID NO: 27513 - DNA, 15 bp, Homo sapiens
ttgtgaacctgtatt

SEQ ID NO: 27514 - DNA, 15 bp, Homo sapiens
attgtgaacctgtat

SEQ ID NO: 27515 - DNA, 15 bp, Homo sapiens
gattgtgaacctgta

SEQ ID NO: 27516 - DNA, 15 bp, Homo sapiens
tgattgtgaacctgt

SEQ ID NO: 27517 - DNA, 15 bp, Homo sapiens
gtgattgtgaacctg

SEQ ID NO: 27518 - DNA, 15 bp, Homo sapiens
agtgattgtgaacct

SEQ ID NO: 27519 - DNA, 15 bp, Homo sapiens
aagtgattgtgaacc

SEQ ID NO: 27520 - DNA, 15 bp, Homo sapiens
taagtgattgtgaac

SEQ ID NO: 27521 - DNA, 15 bp, Homo sapiens
ataagtgattgtgaa

SEQ ID NO: 27522 - DNA, 15 bp, Homo sapiens
aataagtgattgtga

SEQ ID NO: 27523 - DNA, 15 bp, Homo sapiens
aaataagtgattgtg

SEQ ID NO: 27524 - DNA, 15 bp, Homo sapiens
caaataagtgattgt

SEQ ID NO: 27525 - DNA, 15 bp, Homo sapiens
tcaaataagtgattg

SEQ ID NO: 27526 - DNA, 15 bp, Homo sapiens
tttcaaataagtgat

SEQ ID NO: 27527 - DNA, 15 bp, Homo sapiens
gtttcaaataagtga

SEQ ID NO: 27528 - DNA, 15 bp, Homo sapiens
agtttcaaataagtg

SEQ ID NO: 27529 - DNA, 15 bp, Homo sapiens
gagtttcaaataagt

SEQ ID NO: 27530 - DNA, 15 bp, Homo sapiens
agagtttcaaataag

SEQ ID NO: 27531 - DNA, 15 bp, Homo sapiens
aagagtttcaaataa

SEQ ID NO: 27532 - DNA, 15 bp, Homo sapiens
caagagtttcaaata

SEQ ID NO: 27533 - DNA, 15 bp, Homo sapiens
ccaagagtttcaaat

SEQ ID NO: 27534 - DNA, 15 bp, Homo sapiens
cccaagagtttcaaa

SEQ ID NO: 27535 - DNA, 15 bp, Homo sapiens
ccccaagagtttcaa

SEQ ID NO: 27536 - DNA, 15 bp, Homo sapiens
gccccaagagtttca

SEQ ID NO: 27537 - DNA, 15 bp, Homo sapiens
ggccccaagagtttc

SEQ ID NO: 27538 - DNA, 15 bp, Homo sapiens
tggccccaagagttt

SEQ ID NO: 27539 - DNA, 15 bp, Homo sapiens
ttggccccaagagtt

SEQ ID NO: 27540 - DNA, 15 bp, Homo sapiens
cttggccccaagagt

SEQ ID NO: 27541 - DNA, 15 bp, Homo sapiens
acttggccccaagag

SEQ ID NO: 27542 - DNA, 15 bp, Homo sapiens
tacttggccccaaga

SEQ ID NO: 27543 - DNA, 15 bp, Homo sapiens
atacttggccccaag

SEQ ID NO: 27544 - DNA, 15 bp, Homo sapiens
catacttggccccaa

SEQ ID NO: 27545 - DNA, 15 bp, Homo sapiens
acatacttggcccca

SEQ ID NO: 27546 - DNA, 15 bp, Homo sapiens
aacatacttggcccc

SEQ ID NO: 27547 - DNA, 15 bp, Homo sapiens
aaacatacttggccc

SEQ ID NO: 27548 - DNA, 15 bp, Homo sapiens
gaaacatacttggcc

SEQ ID NO: 27549 - DNA, 15 bp, Homo sapiens
ggaaacatacttggc

SEQ ID NO: 27550 - DNA, 15 bp, Homo sapiens
tggaaacatacttgg

SEQ ID NO: 27551 - DNA, 15 bp, Homo sapiens
atggaaacatacttg

SEQ ID NO: 27552 - DNA, 15 bp, Homo sapiens
aatggaaacatactt

SEQ ID NO: 27553 - DNA, 15 bp, Homo sapiens
aaatggaaacatact

SEQ ID NO: 27554 - DNA, 15 bp, Homo sapiens
aaaatggaaacatac

SEQ ID NO: 27555 - DNA, 15 bp, Homo sapiens
gaaaatggaaacata

SEQ ID NO: 27556 - DNA, 15 bp, Homo sapiens
tgaaaatggaaacat

SEQ ID NO: 27557 - DNA, 15 bp, Homo sapiens
ctgaaaatggaaaca

SEQ ID NO: 27558 - DNA, 15 bp, Homo sapiens
tctgaaaatggaaac

SEQ ID NO: 27559 - DNA, 15 bp, Homo sapiens
ttctgaaaatggaaa

SEQ ID NO: 27560 - DNA, 15 bp, Homo sapiens
tttctgaaaatggaa

SEQ ID NO: 27561 - DNA, 15 bp, Homo sapiens
atttctgaaaatgga

SEQ ID NO: 27562 - DNA, 15 bp, Homo sapiens
aatttctgaaaatgg

SEQ ID NO: 27563 - DNA, 15 bp, Homo sapiens
aaatttctgaaaatg

SEQ ID NO: 27564 - DNA, 15 bp, Homo sapiens
aaaatttctgaaaat

SEQ ID NO: 27565 - DNA, 15 bp, Homo sapiens
taaaatttctgaaaa

SEQ ID NO: 27566 - DNA, 15 bp, Homo sapiens
ctaaaatttctgaaa

SEQ ID NO: 27567 - DNA, 15 bp, Homo sapiens
actaaaatttctgaa

SEQ ID NO: 27568 - DNA, 15 bp, Homo sapiens
aactaaaatttctga

SEQ ID NO: 27569 - DNA, 15 bp, Homo sapiens
aaactaaaatttctg

SEQ ID NO: 27570 - DNA, 15 bp, Homo sapiens
aaaactaaaatttct

SEQ ID NO: 27571 - DNA, 15 bp, Homo sapiens
gaaaactaaaatttc

SEQ ID NO: 27572 - DNA, 15 bp, Homo sapiens
tgaaaactaaaattt

SEQ ID NO: 27573 - DNA, 15 bp, Homo sapiens
ttgaaaactaaaatt

SEQ ID NO: 27574 - DNA, 15 bp, Homo sapiens
tttgaaaactaaaat

SEQ ID NO: 27575 - DNA, 15 bp, Homo sapiens
ttttgaaaactaaaa

SEQ ID NO: 27576 - DNA, 15 bp, Homo sapiens
cttttgaaaactaaa

SEQ ID NO: 27577 - DNA, 15 bp, Homo sapiens
ccttttgaaaactaa

SEQ ID NO: 27578 - DNA, 15 bp, Homo sapiens
accttttgaaaacta

SEQ ID NO: 27579 - DNA, 15 bp, Homo sapiens
taccttttgaaaact

SEQ ID NO: 27580 - DNA, 15 bp, Homo sapiens
ctaccttttgaaaac

SEQ ID NO: 27581 - DNA, 15 bp, Homo sapiens
gctaccttttgaaaa

SEQ ID NO: 27582 - DNA, 15 bp, Homo sapiens
tgctaccttttgaaa

SEQ ID NO: 27583 - DNA, 15 bp, Homo sapiens
gtgctaccttttgaa

SEQ ID NO: 27584 - DNA, 15 bp, Homo sapiens
tgtgctaccttttga

SEQ ID NO: 27585 - DNA, 15 bp, Homo sapiens
ctgtgctaccttttg

SEQ ID NO: 27586 - DNA, 15 bp, Homo sapiens
tctgtgctacctttt

SEQ ID NO: 27587 - DNA, 15 bp, Homo sapiens
atctgtgctaccttt

SEQ ID NO: 27588 - DNA, 15 bp, Homo sapiens
tatctgtgctacctt

SEQ ID NO: 27589 - DNA, 15 bp, Homo sapiens
ttatctgtgctacct

SEQ ID NO: 27590 - DNA, 15 bp, Homo sapiens
tttatctgtgctacc

SEQ ID NO: 27591 - DNA, 15 bp, Homo sapiens
atttatctgtgctac

SEQ ID NO: 27592 - DNA, 15 bp, Homo sapiens
tatttatctgtgcta

SEQ ID NO: 27593 - DNA, 15 bp, Homo sapiens
atatttatctgtgct

SEQ ID NO: 27594 - DNA, 15 bp, Homo sapiens
tatatttatctgtgc

SEQ ID NO: 27595 - DNA, 15 bp, Homo sapiens
gtatatttatctgtg

SEQ ID NO: 27596 - DNA, 15 bp, Homo sapiens
agtatatttatctgt

SEQ ID NO: 27597 - DNA, 15 bp, Homo sapiens
aagtatatttatctg

SEQ ID NO: 27598 - DNA, 15 bp, Homo sapiens
aaagtatatttatct

SEQ ID NO: 27599 - DNA, 15 bp, Homo sapiens
aaaagtatatttatc

SEQ ID NO: 27600 - DNA, 15 bp, Homo sapiens
taaaagtatatttat

SEQ ID NO: 27601 - DNA, 15 bp, Homo sapiens
gtaaaagtatattta

SEQ ID NO: 27602 - DNA, 15 bp, Homo sapiens
tgtaaaagtatattt

SEQ ID NO: 27603 - DNA, 15 bp, Homo sapiens
atgtaaaagtatatt

SEQ ID NO: 27604 - DNA, 15 bp, Homo sapiens
tatgtaaaagtatat

SEQ ID NO: 27605 - DNA, 15 bp, Homo sapiens
ttatgtaaaagtata

SEQ ID NO: 27606 - DNA, 15 bp, Homo sapiens
tttatgtaaaagtat

SEQ ID NO: 27607 - DNA, 15 bp, Homo sapiens
gtttatgtaaaagta

SEQ ID NO: 27608 - DNA, 15 bp, Homo sapiens
tgtttatgtaaaagt

SEQ ID NO: 27609 - DNA, 15 bp, Homo sapiens
gtgtttatgtaaaag

SEQ ID NO: 27610 - DNA, 15 bp, Homo sapiens
ggtgtttatgtaaaa

SEQ ID NO: 27611 - DNA, 15 bp, Homo sapiens
gggtgtttatgtaaa

SEQ ID NO: 27612 - DNA, 15 bp, Homo sapiens
ggggtgtttatgtaa

SEQ ID NO: 27613 - DNA, 15 bp, Homo sapiens
tggggtgtttatgta

SEQ ID NO: 27614 - DNA, 15 bp, Homo sapiens
ctggggtgtttatgt

SEQ ID NO: 27615 - DNA, 15 bp, Homo sapiens
actggggtgtttatg

SEQ ID NO: 27616 - DNA, 15 bp, Homo sapiens
cactggggtgtttat

SEQ ID NO: 27617 - DNA, 15 bp, Homo sapiens
ccactggggtgttta

SEQ ID NO: 27618 - DNA, 15 bp, Homo sapiens
cccactggggtgttt

SEQ ID NO: 27619 - DNA, 15 bp, Homo sapiens
ccccactggggtgtt

SEQ ID NO: 27620 - DNA, 15 bp, Homo sapiens
accccactggggtgt

SEQ ID NO: 27621 - DNA, 15 bp, Homo sapiens
caccccactggggtg

SEQ ID NO: 27622 - DNA, 15 bp, Homo sapiens
acaccccactggggt

SEQ ID NO: 27623 - DNA, 15 bp, Homo sapiens
cacaccccactgggg

SEQ ID NO: 27624 - DNA, 15 bp, Homo sapiens
ccacaccccactggg

SEQ ID NO: 27625 - DNA, 15 bp, Homo sapiens
cccacaccccactgg

SEQ ID NO: 27626 - DNA, 15 bp, Homo sapiens
acccacaccccactg

SEQ ID NO: 27627 - DNA, 15 bp, Homo sapiens
gacccacaccccact

SEQ ID NO: 27628 - DNA, 15 bp, Homo sapiens
tgacccacaccccac

SEQ ID NO: 27629 - DNA, 15 bp, Homo sapiens
ctgacccacacccca

SEQ ID NO: 27630 - DNA, 15 bp, Homo sapiens
actgacccacacccc

SEQ ID NO: 27631 - DNA, 15 bp, Homo sapiens
tactgacccacaccc

SEQ ID NO: 27632 - DNA, 15 bp, Homo sapiens
gtactgacccacacc

SEQ ID NO: 27633 - DNA, 15 bp, Homo sapiens
ggtactgacccacac

SEQ ID NO: 27634 - DNA, 15 bp, Homo sapiens
aggtactgacccaca

SEQ ID NO: 27635 - DNA, 15 bp, Homo sapiens
caggtactgacccac

SEQ ID NO: 27636 - DNA, 15 bp, Homo sapiens
tcaggtactgaccca

SEQ ID NO: 27637 - DNA, 15 bp, Homo sapiens
ttcaggtactgaccc

SEQ ID NO: 27638 - DNA, 15 bp, Homo sapiens
tttcaggtactgacc

SEQ ID NO: 27639 - DNA, 15 bp, Homo sapiens
atttcaggtactgac

SEQ ID NO: 27640 - DNA, 15 bp, Homo sapiens
catttcaggtactga

SEQ ID NO: 27641 - DNA, 15 bp, Homo sapiens
tcatttcaggtactg

SEQ ID NO: 27642 - DNA, 15 bp, Homo sapiens
ttcatttcaggtact

SEQ ID NO: 27643 - DNA, 15 bp, Homo sapiens
tttcatttcaggtac

SEQ ID NO: 27644 - DNA, 15 bp, Homo sapiens
atttcatttcaggta

SEQ ID NO: 27645 - DNA, 15 bp, Homo sapiens
catttcatttcaggt

SEQ ID NO: 27646 - DNA, 15 bp, Homo sapiens
acatttcatttcagg

SEQ ID NO: 27647 - DNA, 15 bp, Homo sapiens
aacatttcatttcag

SEQ ID NO: 27648 - DNA, 15 bp, Homo sapiens
aaacatttcatttca

SEQ ID NO: 27649 - DNA, 15 bp, Homo sapiens
aaaacatttcatttc

SEQ ID NO: 27650 - DNA, 15 bp, Homo sapiens
taaaacatttcattt

SEQ ID NO: 27651 - DNA, 15 bp, Homo sapiens
gtaaaacatttcatt

SEQ ID NO: 27652 - DNA, 15 bp, Homo sapiens
agtaaaacatttcat

SEQ ID NO: 27653 - DNA, 15 bp, Homo sapiens
gagtaaaacatttca

SEQ ID NO: 27654 - DNA, 15 bp, Homo sapiens
agagtaaaacatttc

SEQ ID NO: 27655 - DNA, 15 bp, Homo sapiens
aagagtaaaacattt

SEQ ID NO: 27656 - DNA, 15 bp, Homo sapiens
gaagagtaaaacatt

SEQ ID NO: 27657 - DNA, 15 bp, Homo sapiens
cgaagagtaaaacat

SEQ ID NO: 27658 - DNA, 15 bp, Homo sapiens
gcgaagagtaaaaca

SEQ ID NO: 27659 - DNA, 15 bp, Homo sapiens
agcgaagagtaaaac

SEQ ID NO: 27660 - DNA, 15 bp, Homo sapiens
gagcgaagagtaaaa

SEQ ID NO: 27661 - DNA, 15 bp, Homo sapiens
agagcgaagagtaaa

SEQ ID NO: 27662 - DNA, 15 bp, Homo sapiens
tagagcgaagagtaa

SEQ ID NO: 27663 - DNA, 15 bp, Homo sapiens
ttagagcgaagagta

SEQ ID NO: 27664 - DNA, 15 bp, Homo sapiens
cttagagcgaagagt

SEQ ID NO: 27665 - DNA, 15 bp, Homo sapiens
acttagagcgaagag

SEQ ID NO: 27666 - DNA, 15 bp, Homo sapiens
cacttagagcgaaga

SEQ ID NO: 27667 - DNA, 15 bp, Homo sapiens
acacttagagcgaag

SEQ ID NO: 27668 - DNA, 15 bp, Homo sapiens
tacacttagagcgaa

SEQ ID NO: 27669 - DNA, 15 bp, Homo sapiens
atacacttagagcga

SEQ ID NO: 27670 - DNA, 15 bp, Homo sapiens
aatacacttagagcg

SEQ ID NO: 27671 - DNA, 15 bp, Homo sapiens
taatacacttagagc

SEQ ID NO: 27672 - DNA, 15 bp, Homo sapiens
ttaatacacttagag

SEQ ID NO: 27673 - DNA, 15 bp, Homo sapiens
atttaatacacttag

SEQ ID NO: 27674 - DNA, 15 bp, Homo sapiens
tatttaatacactta

SEQ ID NO: 27675 - DNA, 15 bp, Homo sapiens
atatttaatacactt

SEQ ID NO: 27676 - DNA, 15 bp, Homo sapiens
aatatttaatacact

SEQ ID NO: 27677 - DNA, 15 bp, Homo sapiens
taatatttaatacac

SEQ ID NO: 27678 - DNA, 15 bp, Homo sapiens
ataatatttaataca

SEQ ID NO: 27679 - DNA, 15 bp, Homo sapiens
cataatatttaatac

SEQ ID NO: 27680 - DNA, 15 bp, Homo sapiens
acataatatttaata

SEQ ID NO: 27681 - DNA, 15 bp, Homo sapiens
tacataatatttaat

SEQ ID NO: 27682 - DNA, 15 bp, Homo sapiens
gtacataatatttaa

SEQ ID NO: 27683 - DNA, 15 bp, Homo sapiens
tgtacataatattta

SEQ ID NO: 27684 - DNA, 15 bp, Homo sapiens
ttgtacataatattt

SEQ ID NO: 27685 - DNA, 15 bp, Homo sapiens
attgtacataatatt

SEQ ID NO: 27686 - DNA, 15 bp, Homo sapiens
gattgtacataatat

SEQ ID NO: 27687 - DNA, 15 bp, Homo sapiens
agattgtacataata

SEQ ID NO: 27688 - DNA, 15 bp, Homo sapiens
aagattgtacataat

SEQ ID NO: 27689 - DNA, 15 bp, Homo sapiens
taagattgtacataa

SEQ ID NO: 27690 - DNA, 15 bp, Homo sapiens
ataagattgtacata

SEQ ID NO: 27691 - DNA, 15 bp, Homo sapiens
aataagattgtacat

SEQ ID NO: 27692 - DNA, 15 bp, Homo sapiens
taataagattgtaca

SEQ ID NO: 27693 - DNA, 15 bp, Homo sapiens
gtaataagattgtac

SEQ ID NO: 27694 - DNA, 15 bp, Homo sapiens
agtaataagattgta

SEQ ID NO: 27695 - DNA, 15 bp, Homo sapiens
aagtaataagattgt

SEQ ID NO: 27696 - DNA, 15 bp, Homo sapiens
gaagtaataagattg

SEQ ID NO: 27697 - DNA, 15 bp, Homo sapiens
tgaagtaataagatt

SEQ ID NO: 27698 - DNA, 15 bp, Homo sapiens
ctgaagtaataagat

SEQ ID NO: 27699 - DNA, 15 bp, Homo sapiens
tctgaagtaataaga

SEQ ID NO: 27700 - DNA, 15 bp, Homo sapiens
atctgaagtaataag

SEQ ID NO: 27701 - DNA, 15 bp, Homo sapiens
gatctgaagtaataa

SEQ ID NO: 27702 - DNA, 15 bp, Homo sapiens
tgatctgaagtaata

SEQ ID NO: 27703 - DNA, 15 bp, Homo sapiens
ctgatctgaagtaat

SEQ ID NO: 27704 - DNA, 15 bp, Homo sapiens
cctgatctgaagtaa

SEQ ID NO: 27705 - DNA, 15 bp, Homo sapiens
tcctgatctgaagta

SEQ ID NO: 27706 - DNA, 15 bp, Homo sapiens
atcctgatctgaagt

SEQ ID NO: 27707 - DNA, 15 bp, Homo sapiens
aatcctgatctgaag

SEQ ID NO: 27708 - DNA, 15 bp, Homo sapiens
aaatcctgatctgaa

SEQ ID NO: 27709 - DNA, 15 bp, Homo sapiens
caaatcctgatctga

SEQ ID NO: 27710 - DNA, 15 bp, Homo sapiens
gcaaatcctgatctg

SEQ ID NO: 27711 - DNA, 15 bp, Homo sapiens
agcaaatcctgatct

SEQ ID NO: 27712 - DNA, 15 bp, Homo sapiens
cagcaaatcctgatc

SEQ ID NO: 27713 - DNA, 15 bp, Homo sapiens
acagcaaatcctgat

SEQ ID NO: 27714 - DNA, 15 bp, Homo sapiens
tacagcaaatcctga

SEQ ID NO: 27715 - DNA, 15 bp, Homo sapiens
ctacagcaaatcctg

SEQ ID NO: 27716 - DNA, 15 bp, Homo sapiens
actacagcaaatcct

SEQ ID NO: 27717 - DNA, 15 bp, Homo sapiens
aactacagcaaatcc

SEQ ID NO: 27718 - DNA, 15 bp, Homo sapiens
caactacagcaaatc

SEQ ID NO: 27719 - DNA, 15 bp, Homo sapiens
tcaactacagcaaat

SEQ ID NO: 27720 - DNA, 15 bp, Homo sapiens
ctcaactacagcaaa

SEQ ID NO: 27721 - DNA, 15 bp, Homo sapiens
actcaactacagcaa

SEQ ID NO: 27722 - DNA, 15 bp, Homo sapiens
aactcaactacagca

SEQ ID NO: 27723 - DNA, 15 bp, Homo sapiens
aaactcaactacagc

SEQ ID NO: 27724 - DNA, 15 bp, Homo sapiens
caaactcaactacag

SEQ ID NO: 27725 - DNA, 15 bp, Homo sapiens
gcaaactcaactaca

SEQ ID NO: 27726 - DNA, 15 bp, Homo sapiens
ggcaaactcaactac

SEQ ID NO: 27727 - DNA, 15 bp, Homo sapiens
tggcaaactcaacta

SEQ ID NO: 27728 - DNA, 15 bp, Homo sapiens
atggcaaactcaact

SEQ ID NO: 27729 - DNA, 15 bp, Homo sapiens
tatggcaaactcaac

SEQ ID NO: 27730 - DNA, 15 bp, Homo sapiens
ttatggcaaactcaa

SEQ ID NO: 27731 - DNA, 15 bp, Homo sapiens
tttatggcaaactca

SEQ ID NO: 27732 - DNA, 15 bp, Homo sapiens
ttttatggcaaactc

SEQ ID NO: 27733 - DNA, 15 bp, Homo sapiens
gttttatggcaaact

SEQ ID NO: 27734 - DNA, 15 bp, Homo sapiens
agttttatggcaaac

SEQ ID NO: 27735 - DNA, 15 bp, Homo sapiens
aagttttatggcaaa

SEQ ID NO: 27736 - DNA, 15 bp, Homo sapiens
taagttttatggcaa

SEQ ID NO: 27737 - DNA, 15 bp, Homo sapiens
ttaagttttatggca

SEQ ID NO: 27738 - DNA, 15 bp, Homo sapiens
cttaagttttatggc

SEQ ID NO: 27739 - DNA, 15 bp, Homo sapiens
tcttaagttttatgg

SEQ ID NO: 27740 - DNA, 15 bp, Homo sapiens
ctcttaagttttatg

SEQ ID NO: 27741 - DNA, 15 bp, Homo sapiens
tctcttaagttttat

SEQ ID NO: 27742 - DNA, 15 bp, Homo sapiens
ttctcttaagtttta

SEQ ID NO: 27743 - DNA, 15 bp, Homo sapiens
tttctcttaagtttt

SEQ ID NO: 27744 - DNA, 15 bp, Homo sapiens
ttttctcttaagttt

SEQ ID NO: 27745 - DNA, 15 bp, Homo sapiens
attttctcttaagtt

SEQ ID NO: 27746 - DNA, 15 bp, Homo sapiens
aattttctcttaagt

SEQ ID NO: 27747 - DNA, 15 bp, Homo sapiens
aaattttctcttaag

SEQ ID NO: 27748 - DNA, 15 bp, Homo sapiens
aaaattttctcttaa

SEQ ID NO: 27749 - DNA, 15 bp, Homo sapiens
taaaattttctctta

SEQ ID NO: 27750 - DNA, 15 bp, Homo sapiens
ctaaaattttctctt

SEQ ID NO: 27751 - DNA, 15 bp, Homo sapiens
tctaaaattttctct

SEQ ID NO: 27752 - DNA, 15 bp, Homo sapiens
atctaaaattttctc

SEQ ID NO: 27753 - DNA, 15 bp, Homo sapiens
catctaaaattttct

SEQ ID NO: 27754 - DNA, 15 bp, Homo sapiens
acatctaaaattttc

SEQ ID NO: 27755 - DNA, 15 bp, Homo sapiens
aacatctaaaatttt

SEQ ID NO: 27756 - DNA, 15 bp, Homo sapiens
aaacatctaaaattt

SEQ ID NO: 27757 - DNA, 15 bp, Homo sapiens
aaaacatctaaaatt

SEQ ID NO: 27758 - DNA, 15 bp, Homo sapiens
caaaacatctaaaat

SEQ ID NO: 27759 - DNA, 15 bp, Homo sapiens
tcaaaacatctaaaa

SEQ ID NO: 27760 - DNA, 15 bp, Homo sapiens
ttcaaaacatctaaa

SEQ ID NO: 27761 - DNA, 15 bp, Homo sapiens
gttcaaaacatctaa

SEQ ID NO: 27762 - DNA, 15 bp, Homo sapiens
agttcaaaacatcta

SEQ ID NO: 27763 - DNA, 15 bp, Homo sapiens
aagttcaaaacatct

SEQ ID NO: 27764 - DNA, 15 bp, Homo sapiens
aaagttcaaaacatc

SEQ ID NO: 27765 - DNA, 15 bp, Homo sapiens
aaaagttcaaaacat

SEQ ID NO: 27766 - DNA, 15 bp, Homo sapiens
caaaagttcaaaaca

SEQ ID NO: 27767 - DNA, 15 bp, Homo sapiens
ccaaaagttcaaaac

SEQ ID NO: 27768 - DNA, 15 bp, Homo sapiens
cccaaaagttcaaaa

SEQ ID NO: 27769 - DNA, 15 bp, Homo sapiens
tcccaaaagttcaaa

SEQ ID NO: 27770 - DNA, 15 bp, Homo sapiens
atcccaaaagttcaa

SEQ ID NO: 27771 - DNA, 15 bp, Homo sapiens
tatcccaaaagttca

SEQ ID NO: 27772 - DNA, 15 bp, Homo sapiens
atatcccaaaagttc

SEQ ID NO: 27773 - DNA, 15 bp, Homo sapiens
aatatcccaaaagtt

SEQ ID NO: 27774 - DNA, 15 bp, Homo sapiens
caatatcccaaaagt

SEQ ID NO: 27775 - DNA, 15 bp, Homo sapiens
tcaatatcccaaaag

SEQ ID NO: 27776 - DNA, 15 bp, Homo sapiens
ttcaatatcccaaaa

SEQ ID NO: 27777 - DNA, 15 bp, Homo sapiens
tttcaatatcccaaa

SEQ ID NO: 27778 - DNA, 15 bp, Homo sapiens
atttcaatatcccaa

SEQ ID NO: 27779 - DNA, 15 bp, Homo sapiens
aatttcaatatccca

SEQ ID NO: 27780 - DNA, 15 bp, Homo sapiens
caatttcaatatccc

SEQ ID NO: 27781 - DNA, 15 bp, Homo sapiens
gcaatttcaatatcc

SEQ ID NO: 27782 - DNA, 15 bp, Homo sapiens
tgcaatttcaatatc

SEQ ID NO: 27783 - DNA, 15 bp, Homo sapiens
ctgcaatttcaatat

SEQ ID NO: 27784 - DNA, 15 bp, Homo sapiens
cctgcaatttcaata

SEQ ID NO: 27785 - DNA, 15 bp, Homo sapiens
acctgcaatttcaat

SEQ ID NO: 27786 - DNA, 15 bp, Homo sapiens
aacctgcaatttcaa

SEQ ID NO: 27787 - DNA, 15 bp, Homo sapiens
taacctgcaatttca

SEQ ID NO: 27788 - DNA, 15 bp, Homo sapiens
ttaacctgcaatttc

SEQ ID NO: 27789 - DNA, 15 bp, Homo sapiens
cttaacctgcaattt

SEQ ID NO: 27790 - DNA, 15 bp, Homo sapiens
ccttaacctgcaatt

SEQ ID NO: 27791 - DNA, 15 bp, Homo sapiens
tccttaacctgcaat

SEQ ID NO: 27792 - DNA, 15 bp, Homo sapiens
ctccttaacctgcaa

SEQ ID NO: 27793 - DNA, 15 bp, Homo sapiens
gctccttaacctgca

SEQ ID NO: 27794 - DNA, 15 bp, Homo sapiens
agctccttaacctgc

SEQ ID NO: 27795 - DNA, 15 bp, Homo sapiens
tagctccttaacctg

SEQ ID NO: 27796 - DNA, 15 bp, Homo sapiens
atagctccttaacct

SEQ ID NO: 27797 - DNA, 15 bp, Homo sapiens
catagctccttaacc

SEQ ID NO: 27798 - DNA, 15 bp, Homo sapiens
ccatagctccttaac

SEQ ID NO: 27799 - DNA, 15 bp, Homo sapiens
tccatagctccttaa

SEQ ID NO: 27800 - DNA, 15 bp, Homo sapiens
gtccatagctcctta

SEQ ID NO: 27801 - DNA, 15 bp, Homo sapiens
ggtccatagctcctt

SEQ ID NO: 27802 - DNA, 15 bp, Homo sapiens
aggtccatagctcct

SEQ ID NO: 27803 - DNA, 15 bp, Homo sapiens
aaggtccatagctcc

SEQ ID NO: 27804 - DNA, 15 bp, Homo sapiens
aaaggtccatagctc

SEQ ID NO: 27805 - DNA, 15 bp, Homo sapiens
taaaggtccatagct

SEQ ID NO: 27806 - DNA, 15 bp, Homo sapiens
ataaaggtccatagc

SEQ ID NO: 27807 - DNA, 15 bp, Homo sapiens
aataaaggtccatag

SEQ ID NO: 27808 - DNA, 15 bp, Homo sapiens
aaataaaggtccata

SEQ ID NO: 27809 - DNA, 15 bp, Homo sapiens
caaataaaggtccat

SEQ ID NO: 27810 - DNA, 15 bp, Homo sapiens
acaaataaaggtcca

SEQ ID NO: 27811 - DNA, 15 bp, Homo sapiens
aacaaataaaggtcc

SEQ ID NO: 27812 - DNA, 15 bp, Homo sapiens
aaacaaataaaggtc

SEQ ID NO: 27813 - DNA, 15 bp, Homo sapiens
aaaacaaataaaggt

SEQ ID NO: 27814 - DNA, 15 bp, Homo sapiens
taaaacaaataaagg

SEQ ID NO: 27815 - DNA, 15 bp, Homo sapiens
ttaaaacaaataaag

SEQ ID NO: 27816 - DNA, 15 bp, Homo sapiens
tttaaaacaaataaa

SEQ ID NO: 27817 - DNA, 15 bp, Homo sapiens
ttttaaaacaaataa

SEQ ID NO: 27818 - DNA, 15 bp, Homo sapiens
attttaaaacaaata

SEQ ID NO: 27819 - DNA, 15 bp, Homo sapiens
cattttaaaacaaat

SEQ ID NO: 27820 - DNA, 15 bp, Homo sapiens
gcattttaaaacaaa

SEQ ID NO: 27821 - DNA, 15 bp, Homo sapiens
agcattttaaaacaa

SEQ ID NO: 27822 - DNA, 15 bp, Homo sapiens
tagcattttaaaaca

SEQ ID NO: 27823 - DNA, 15 bp, Homo sapiens
ttagcattttaaaac

SEQ ID NO: 27824 - DNA, 15 bp, Homo sapiens
cttagcattttaaaa

SEQ ID NO: 27825 - DNA, 15 bp, Homo sapiens
tcttagcattttaaa

SEQ ID NO: 27826 - DNA, 15 bp, Homo sapiens
ctcttagcattttaa

SEQ ID NO: 27827 - DNA, 15 bp, Homo sapiens
actcttagcatttta

SEQ ID NO: 27828 - DNA, 15 bp, Homo sapiens
aactcttagcatttt

SEQ ID NO: 27829 - DNA, 15 bp, Homo sapiens
aaactcttagcattt

SEQ ID NO: 27830 - DNA, 15 bp, Homo sapiens
taaactcttagcatt

SEQ ID NO: 27831 - DNA, 15 bp, Homo sapiens
ataaactcttagcat

SEQ ID NO: 27832 - DNA, 15 bp, Homo sapiens
aataaactcttagca

SEQ ID NO: 27833 - DNA, 15 bp, Homo sapiens
aaataaactcttagc

SEQ ID NO: 27834 - DNA, 15 bp, Homo sapiens
aaaataaactcttag

SEQ ID NO: 27835 - DNA, 15 bp, Homo sapiens
taaaataaactctta

SEQ ID NO: 27836 - DNA, 15 bp, Homo sapiens
ttaaaataaactctt

SEQ ID NO: 27837 - DNA, 15 bp, Homo sapiens
cttaaaataaactct

SEQ ID NO: 27838 - DNA, 15 bp, Homo sapiens
acttaaaataaactc

SEQ ID NO: 27839 - DNA, 15 bp, Homo sapiens
tacttaaaataaact

SEQ ID NO: 27840 - DNA, 15 bp, Homo sapiens
ttacttaaaataaac

SEQ ID NO: 27841 - DNA, 15 bp, Homo sapiens
attacttaaaataaa

SEQ ID NO: 27842 - DNA, 15 bp, Homo sapiens
aattacttaaaataa

SEQ ID NO: 27843 - DNA, 15 bp, Homo sapiens
aaattacttaaaata

SEQ ID NO: 27844 - DNA, 15 bp, Homo sapiens
aaaattacttaaaat

SEQ ID NO: 27845 - DNA, 15 bp, Homo sapiens
aaaaattacttaaaa

SEQ ID NO: 27846 - DNA, 15 bp, Homo sapiens
taaaaattacttaaa

SEQ ID NO: 27847 - DNA, 15 bp, Homo sapiens
ttaaaaattacttaa

SEQ ID NO: 27848 - DNA, 15 bp, Homo sapiens
tttaaaaattactta

SEQ ID NO: 27849 - DNA, 15 bp, Homo sapiens
ttttaaaaattactt

SEQ ID NO: 27850 - DNA, 15 bp, Homo sapiens
tttttaaaaattact

SEQ ID NO: 27851 - DNA, 15 bp, Homo sapiens
ttttttaaaaattac

SEQ ID NO: 27852 - DNA, 15 bp, Homo sapiens
attttttaaaaatta

SEQ ID NO: 27853 - DNA, 15 bp, Homo sapiens
aattttttaaaaatt

SEQ ID NO: 27854 - DNA, 15 bp, Homo sapiens
aaattttttaaaaat

SEQ ID NO: 27855 - DNA, 15 bp, Homo sapiens
caaattttttaaaaa

SEQ ID NO: 27856 - DNA, 15 bp, Homo sapiens
acaaattttttaaaa

SEQ ID NO: 27857 - DNA, 15 bp, Homo sapiens
aacaaattttttaaa

SEQ ID NO: 27858 - DNA, 15 bp, Homo sapiens
aaacaaattttttaa

SEQ ID NO: 27859 - DNA, 15 bp, Homo sapiens
aaaacaaatttttta

SEQ ID NO: 27860 - DNA, 15 bp, Homo sapiens
caaaacaaatttttt

SEQ ID NO: 27861 - DNA, 15 bp, Homo sapiens
gcaaaacaaattttt

SEQ ID NO: 27862 - DNA, 15 bp, Homo sapiens
tgcaaaacaaatttt

SEQ ID NO: 27863 - DNA, 15 bp, Homo sapiens
atgcaaaacaaattt

SEQ ID NO: 27864 - DNA, 15 bp, Homo sapiens
tatgcaaaacaaatt

SEQ ID NO: 27865 - DNA, 15 bp, Homo sapiens
ctatgcaaaacaaat

SEQ ID NO: 27866 - DNA, 15 bp, Homo sapiens
actatgcaaaacaaa

SEQ ID NO: 27867 - DNA, 15 bp, Homo sapiens
tactatgcaaaacaa

SEQ ID NO: 27868 - DNA, 15 bp, Homo sapiens
ctactatgcaaaaca

SEQ ID NO: 27869 - DNA, 15 bp, Homo sapiens
actactatgcaaaac

SEQ ID NO: 27870 - DNA, 15 bp, Homo sapiens
aactactatgcaaaa

SEQ ID NO: 27871 - DNA, 15 bp, Homo sapiens
caactactatgcaaa

SEQ ID NO: 27872 - DNA, 15 bp, Homo sapiens
ccaactactatgcaa

SEQ ID NO: 27873 - DNA, 15 bp, Homo sapiens
tccaactactatgca

SEQ ID NO: 27874 - DNA, 15 bp, Homo sapiens
ctccaactactatgc

SEQ ID NO: 27875 - DNA, 15 bp, Homo sapiens
actccaactactatg

SEQ ID NO: 27876 - DNA, 15 bp, Homo sapiens
aactccaactactat

SEQ ID NO: 27877 - DNA, 15 bp, Homo sapiens
taactccaactacta

SEQ ID NO: 27878 - DNA, 15 bp, Homo sapiens
gtaactccaactact

SEQ ID NO: 27879 - DNA, 15 bp, Homo sapiens
ggtaactccaactac

SEQ ID NO: 27880 - DNA, 15 bp, Homo sapiens
tggtaactccaacta

SEQ ID NO: 27881 - DNA, 15 bp, Homo sapiens
ctggtaactccaact

SEQ ID NO: 27882 - DNA, 15 bp, Homo sapiens
cctggtaactccaac

SEQ ID NO: 27883 - DNA, 15 bp, Homo sapiens
ccctggtaactccaa

SEQ ID NO: 27884 - DNA, 15 bp, Homo sapiens
accctggtaactcca

SEQ ID NO: 27885 - DNA, 15 bp, Homo sapiens
taccctggtaactcc

SEQ ID NO: 27886 - DNA, 15 bp, Homo sapiens
gtaccctggtaactc

SEQ ID NO: 27887 - DNA, 15 bp, Homo sapiens
agtaccctggtaact

SEQ ID NO: 27888 - DNA, 15 bp, Homo sapiens
cagtaccctggtaac

SEQ ID NO: 27889 - DNA, 15 bp, Homo sapiens
gcagtaccctggtaa

SEQ ID NO: 27890 - DNA, 15 bp, Homo sapiens
agcagtaccctggta

SEQ ID NO: 27891 - DNA, 15 bp, Homo sapiens
tagcagtaccctggt

SEQ ID NO: 27892 - DNA, 15 bp, Homo sapiens
ttagcagtaccctgg

SEQ ID NO: 27893 - DNA, 15 bp, Homo sapiens
gttagcagtaccctg

SEQ ID NO: 27894 - DNA, 15 bp, Homo sapiens
ggttagcagtaccct

SEQ ID NO: 27895 - DNA, 15 bp, Homo sapiens
tggttagcagtaccc

SEQ ID NO: 27896 - DNA, 15 bp, Homo sapiens
gtggttagcagtacc

SEQ ID NO: 27897 - DNA, 15 bp, Homo sapiens
tgtggttagcagtac

SEQ ID NO: 27898 - DNA, 15 bp, Homo sapiens
gtgtggttagcagta

SEQ ID NO: 27899 - DNA, 15 bp, Homo sapiens
agtgtggttagcagt

SEQ ID NO: 27900 - DNA, 15 bp, Homo sapiens
cagtgtggttagcag

SEQ ID NO: 27901 - DNA, 15 bp, Homo sapiens
tcagtgtggttagca

SEQ ID NO: 27902 - DNA, 15 bp, Homo sapiens
atcagtgtggttagc

SEQ ID NO: 27903 - DNA, 15 bp, Homo sapiens
tatcagtgtggttag

SEQ ID NO: 27904 - DNA, 15 bp, Homo sapiens
atatcagtgtggtta

SEQ ID NO: 27905 - DNA, 15 bp, Homo sapiens
catatcagtgtggtt

SEQ ID NO: 27906 - DNA, 15 bp, Homo sapiens
acatatcagtgtggt

SEQ ID NO: 27907 - DNA, 15 bp, Homo sapiens
tacatatcagtgtgg

SEQ ID NO: 27908 - DNA, 15 bp, Homo sapiens
ttacatatcagtgtg

SEQ ID NO: 27909 - DNA, 15 bp, Homo sapiens
cttacatatcagtgt

SEQ ID NO: 27910 - DNA, 15 bp, Homo sapiens
tcttacatatcagtg

SEQ ID NO: 27911 - DNA, 15 bp, Homo sapiens
atcttacatatcagt

SEQ ID NO: 27912 - DNA, 15 bp, Homo sapiens
gatcttacatatcag

SEQ ID NO: 27913 - DNA, 15 bp, Homo sapiens
agatcttacatatca

SEQ ID NO: 27914 - DNA, 15 bp, Homo sapiens
gagatcttacatatc

SEQ ID NO: 27915 - DNA, 15 bp, Homo sapiens
agagatcttacatat

SEQ ID NO: 27916 - DNA, 15 bp, Homo sapiens
aagagatcttacata

SEQ ID NO: 27917 - DNA, 15 bp, Homo sapiens
aaagagatcttacat

SEQ ID NO: 27918 - DNA, 15 bp, Homo sapiens
gaaagagatcttaca

SEQ ID NO: 27919 - DNA, 15 bp, Homo sapiens
agaaagagatcttac

SEQ ID NO: 27920 - DNA, 15 bp, Homo sapiens
cagaaagagatctta

SEQ ID NO: 27921 - DNA, 15 bp, Homo sapiens
tcagaaagagatctt

SEQ ID NO: 27922 - DNA, 15 bp, Homo sapiens
ctcagaaagagatct

SEQ ID NO: 27923 - DNA, 15 bp, Homo sapiens
gctcagaaagagatc

SEQ ID NO: 27924 - DNA, 15 bp, Homo sapiens
ggctcagaaagagat

SEQ ID NO: 27925 - DNA, 15 bp, Homo sapiens
aggctcagaaagaga

SEQ ID NO: 27926 - DNA, 15 bp, Homo sapiens
aaggctcagaaagag

SEQ ID NO: 27927 - DNA, 15 bp, Homo sapiens
aaaggctcagaaaga

SEQ ID NO: 27928 - DNA, 15 bp, Homo sapiens
aaaaggctcagaaag

SEQ ID NO: 27929 - DNA, 15 bp, Homo sapiens
taaaaggctcagaaa

SEQ ID NO: 27930 - DNA, 15 bp, Homo sapiens
ataaaaggctcagaa

SEQ ID NO: 27931 - DNA, 15 bp, Homo sapiens
aataaaaggctcaga

SEQ ID NO: 27932 - DNA, 15 bp, Homo sapiens
caataaaaggctcag

SEQ ID NO: 27933 - DNA, 15 bp, Homo sapiens
acaataaaaggctca

SEQ ID NO: 27934 - DNA, 15 bp, Homo sapiens
aacaataaaaggctc

SEQ ID NO: 27935 - DNA, 15 bp, Homo sapiens
aaacaataaaaggct

SEQ ID NO: 27936 - DNA, 15 bp, Homo sapiens
caaacaataaaaggc

SEQ ID NO: 27937 - DNA, 15 bp, Homo sapiens
acaaacaataaaagg

SEQ ID NO: 27938 - DNA, 15 bp, Homo sapiens
tacaaacaataaaag

SEQ ID NO: 27939 - DNA, 15 bp, Homo sapiens
ttacaaacaataaaa

SEQ ID NO: 27940 - DNA, 15 bp, Homo sapiens
tttacaaacaataaa

SEQ ID NO: 27941 - DNA, 15 bp, Homo sapiens
gtttacaaacaataa

SEQ ID NO: 27942 - DNA, 15 bp, Homo sapiens
tgtttacaaacaata

SEQ ID NO: 27943 - DNA, 15 bp, Homo sapiens
atgtttacaaacaat

SEQ ID NO: 27944 - DNA, 15 bp, Homo sapiens
catgtttacaaacaa

SEQ ID NO: 27945 - DNA, 15 bp, Homo sapiens
ccatgtttacaaaca

SEQ ID NO: 27946 - DNA, 15 bp, Homo sapiens
gccatgtttacaaac

SEQ ID NO: 27947 - DNA, 15 bp, Homo sapiens
ggccatgtttacaaa

SEQ ID NO: 27948 - DNA, 15 bp, Homo sapiens
aggccatgtttacaa

SEQ ID NO: 27949 - DNA, 15 bp, Homo sapiens
caggccatgtttaca

SEQ ID NO: 27950 - DNA, 15 bp, Homo sapiens
acaggccatgtttac

SEQ ID NO: 27951 - DNA, 15 bp, Homo sapiens
aacaggccatgttta

SEQ ID NO: 27952 - DNA, 15 bp, Homo sapiens
taacaggccatgttt

SEQ ID NO: 27953 - DNA, 15 bp, Homo sapiens
ttaacaggccatgtt

SEQ ID NO: 27954 - DNA, 15 bp, Homo sapiens
attaacaggccatgt

SEQ ID NO: 27955 - DNA, 15 bp, Homo sapiens
gattaacaggccatg

SEQ ID NO: 27956 - DNA, 15 bp, Homo sapiens
tgattaacaggccat

SEQ ID NO: 27957 - DNA, 15 bp, Homo sapiens
atgattaacaggcca

SEQ ID NO: 27958 - DNA, 15 bp, Homo sapiens
aatgattaacaggcc

SEQ ID NO: 27959 - DNA, 15 bp, Homo sapiens
taatgattaacaggc

SEQ ID NO: 27960 - DNA, 15 bp, Homo sapiens
ctaatgattaacagg

SEQ ID NO: 27961 - DNA, 15 bp, Homo sapiens
tctaatgattaacag

SEQ ID NO: 27962 - DNA, 15 bp, Homo sapiens
ttctaatgattaaca

SEQ ID NO: 27963 - DNA, 15 bp, Homo sapiens
tttctaatgattaac

SEQ ID NO: 27964 - DNA, 15 bp, Homo sapiens
ctttctaatgattaa

SEQ ID NO: 27965 - DNA, 15 bp, Homo sapiens
gctttctaatgatta

SEQ ID NO: 27966 - DNA, 15 bp, Homo sapiens
ggctttctaatgatt

SEQ ID NO: 27967 - DNA, 15 bp, Homo sapiens
tggctttctaatgat

SEQ ID NO: 27968 - DNA, 15 bp, Homo sapiens
ctggctttctaatga

SEQ ID NO: 27969 - DNA, 15 bp, Homo sapiens
actggctttctaatg

SEQ ID NO: 27970 - DNA, 15 bp, Homo sapiens
tactggctttctaat

SEQ ID NO: 27971 - DNA, 15 bp, Homo sapiens
gtactggctttctaa

SEQ ID NO: 27972 - DNA, 15 bp, Homo sapiens
tgtactggctttcta

SEQ ID NO: 27973 - DNA, 15 bp, Homo sapiens
atgtactggctttct

SEQ ID NO: 27974 - DNA, 15 bp, Homo sapiens
tatgtactggctttc

SEQ ID NO: 27975 - DNA, 15 bp, Homo sapiens
gtatgtactggcttt

SEQ ID NO: 27976 - DNA, 15 bp, Homo sapiens
agtatgtactggctt

SEQ ID NO: 27977 - DNA, 15 bp, Homo sapiens
tagtatgtactggct

SEQ ID NO: 27978 - DNA, 15 bp, Homo sapiens
ttagtatgtactggc

SEQ ID NO: 27979 - DNA, 15 bp, Homo sapiens
gttagtatgtactgg

SEQ ID NO: 27980 - DNA, 15 bp, Homo sapiens
tgttagtatgtactg

SEQ ID NO: 27981 - DNA, 15 bp, Homo sapiens
atgttagtatgtact

SEQ ID NO: 27982 - DNA, 15 bp, Homo sapiens
tatgttagtatgtac

SEQ ID NO: 27983 - DNA, 15 bp, Homo sapiens
atatgttagtatgta

SEQ ID NO: 27984 - DNA, 15 bp, Homo sapiens
gatatgttagtatgt

SEQ ID NO: 27985 - DNA, 15 bp, Homo sapiens
tgatatgttagtatg

SEQ ID NO: 27986 - DNA, 15 bp, Homo sapiens
gtgatatgttagtat

SEQ ID NO: 27987 - DNA, 15 bp, Homo sapiens
agtgatatgttagta

SEQ ID NO: 27988 - DNA, 15 bp, Homo sapiens
cagtgatatgttagt

SEQ ID NO: 27989 - DNA, 15 bp, Homo sapiens
gcagtgatatgttag

SEQ ID NO: 27990 - DNA, 15 bp, Homo sapiens
agcagtgatatgtta

SEQ ID NO: 27991 - DNA, 15 bp, Homo sapiens
tagcagtgatatgtt

SEQ ID NO: 27992 - DNA, 15 bp, Homo sapiens
atagcagtgatatgt

SEQ ID NO: 27993 - DNA, 15 bp, Homo sapiens
aatagcagtgatatg

SEQ ID NO: 27994 - DNA, 15 bp, Homo sapiens
taatagcagtgatat

SEQ ID NO: 27995 - DNA, 15 bp, Homo sapiens
ttaatagcagtgata

SEQ ID NO: 27996 - DNA, 15 bp, Homo sapiens
cttaatagcagtgat

SEQ ID NO: 27997 - DNA, 15 bp, Homo sapiens
tcttaatagcagtga

SEQ ID NO: 27998 - DNA, 15 bp, Homo sapiens
gtcttaatagcagtg

SEQ ID NO: 27999 - DNA, 15 bp, Homo sapiens
tgtcttaatagcagt

SEQ ID NO: 28000 - DNA, 15 bp, Homo sapiens
ttgtcttaatagcag

SEQ ID NO: 28001 - DNA, 15 bp, Homo sapiens
tttgtcttaatagca

SEQ ID NO: 28002 - DNA, 15 bp, Homo sapiens
atttgtcttaatagc

SEQ ID NO: 28003 - DNA, 15 bp, Homo sapiens
tatttgtcttaatag

SEQ ID NO: 28004 - DNA, 15 bp, Homo sapiens
atatttgtcttaata

SEQ ID NO: 28005 - DNA, 15 bp, Homo sapiens
aatatttgtcttaat

SEQ ID NO: 28006 - DNA, 15 bp, Homo sapiens
taatatttgtcttaa

SEQ ID NO: 28007 - DNA, 15 bp, Homo sapiens
ctaatatttgtctta

SEQ ID NO: 28008 - DNA, 15 bp, Homo sapiens
gctaatatttgtctt

SEQ ID NO: 28009 - DNA, 15 bp, Homo sapiens
tgctaatatttgtct

SEQ ID NO: 28010 - DNA, 15 bp, Homo sapiens
atgctaatatttgtc

SEQ ID NO: 28011 - DNA, 15 bp, Homo sapiens
tatgctaatatttgt

SEQ ID NO: 28012 - DNA, 15 bp, Homo sapiens
gtatgctaatatttg

SEQ ID NO: 28013 - DNA, 15 bp, Homo sapiens
agtatgctaatattt

SEQ ID NO: 28014 - DNA, 15 bp, Homo sapiens
gagtatgctaatatt

SEQ ID NO: 28015 - DNA, 15 bp, Homo sapiens
agagtatgctaatat

SEQ ID NO: 28016 - DNA, 15 bp, Homo sapiens
tagagtatgctaata

SEQ ID NO: 28017 - DNA, 15 bp, Homo sapiens
ctagagtatgctaat

SEQ ID NO: 28018 - DNA, 15 bp, Homo sapiens
actagagtatgctaa

SEQ ID NO: 28019 - DNA, 15 bp, Homo sapiens
tactagagtatgcta

SEQ ID NO: 28020 - DNA, 15 bp, Homo sapiens
ttactagagtatgct

SEQ ID NO: 28021 - DNA, 15 bp, Homo sapiens
attactagagtatgc

SEQ ID NO: 28022 - DNA, 15 bp, Homo sapiens
cattactagagtatg

SEQ ID NO: 28023 - DNA, 15 bp, Homo sapiens
tcattactagagtat

SEQ ID NO: 28024 - DNA, 15 bp, Homo sapiens
gtcattactagagta

SEQ ID NO: 28025 - DNA, 15 bp, Homo sapiens
tgtcattactagagt

SEQ ID NO: 28026 - DNA, 15 bp, Homo sapiens
ttgtcattactagag

SEQ ID NO: 28027 - DNA, 15 bp, Homo sapiens
cttgtcattactaga

SEQ ID NO: 28028 - DNA, 15 bp, Homo sapiens
acttgtcattactag

SEQ ID NO: 28029 - DNA, 15 bp, Homo sapiens
gacttgtcattacta

SEQ ID NO: 28030 - DNA, 15 bp, Homo sapiens
tgacttgtcattact

SEQ ID NO: 28031 - DNA, 15 bp, Homo sapiens
ctgacttgtcattac

SEQ ID NO: 28032 - DNA, 15 bp, Homo sapiens
gctgacttgtcatta

SEQ ID NO: 28033 - DNA, 15 bp, Homo sapiens
tgctgacttgtcatt

SEQ ID NO: 28034 - DNA, 15 bp, Homo sapiens
atgctgacttgtcat

SEQ ID NO: 28035 - DNA, 15 bp, Homo sapiens
aatgctgacttgtca

SEQ ID NO: 28036 - DNA, 15 bp, Homo sapiens
aaatgctgacttgtc

SEQ ID NO: 28037 - DNA, 15 bp, Homo sapiens
aaaatgctgacttgt

SEQ ID NO: 28038 - DNA, 15 bp, Homo sapiens
taaaatgctgacttg

SEQ ID NO: 28039 - DNA, 15 bp, Homo sapiens
gtaaaatgctgactt

SEQ ID NO: 28040 - DNA, 15 bp, Homo sapiens
agtaaaatgctgact

SEQ ID NO: 28041 - DNA, 15 bp, Homo sapiens
tagtaaaatgctgac

SEQ ID NO: 28042 - DNA, 15 bp, Homo sapiens
atagtaaaatgctga

SEQ ID NO: 28043 - DNA, 15 bp, Homo sapiens
aatagtaaaatgctg

SEQ ID NO: 28044 - DNA, 15 bp, Homo sapiens
gaatagtaaaatgct

SEQ ID NO: 28045 - DNA, 15 bp, Homo sapiens
agaatagtaaaatgc

SEQ ID NO: 28046 - DNA, 15 bp, Homo sapiens
cagaatagtaaaatg

SEQ ID NO: 28047 - DNA, 15 bp, Homo sapiens
acagaatagtaaaat

SEQ ID NO: 28048 - DNA, 15 bp, Homo sapiens
tacagaatagtaaaa

SEQ ID NO: 28049 - DNA, 15 bp, Homo sapiens
atacagaatagtaaa

SEQ ID NO: 28050 - DNA, 15 bp, Homo sapiens
aatacagaatagtaa

SEQ ID NO: 28051 - DNA, 15 bp, Homo sapiens
caatacagaatagta

SEQ ID NO: 28052 - DNA, 15 bp, Homo sapiens
tcaatacagaatagt

SEQ ID NO: 28053 - DNA, 15 bp, Homo sapiens
atcaatacagaatag

SEQ ID NO: 28054 - DNA, 15 bp, Homo sapiens
aatcaatacagaata

SEQ ID NO: 28055 - DNA, 15 bp, Homo sapiens
aaatcaatacagaat

SEQ ID NO: 28056 - DNA, 15 bp, Homo sapiens
aaaatcaatacagaa

SEQ ID NO: 28057 - DNA, 15 bp, Homo sapiens
taaaatcaatacaga

SEQ ID NO: 28058 - DNA, 15 bp, Homo sapiens
gtaaaatcaatacag

SEQ ID NO: 28059 - DNA, 15 bp, Homo sapiens
agtaaaatcaataca

SEQ ID NO: 28060 - DNA, 15 bp, Homo sapiens
aagtaaaatcaatac

SEQ ID NO: 28061 - DNA, 15 bp, Homo sapiens
taagtaaaatcaata

SEQ ID NO: 28062 - DNA, 15 bp, Homo sapiens
ataagtaaaatcaat

SEQ ID NO: 28063 - DNA, 15 bp, Homo sapiens
aataagtaaaatcaa

SEQ ID NO: 28064 - DNA, 15 bp, Homo sapiens
gaataagtaaaatca

SEQ ID NO: 28065 - DNA, 15 bp, Homo sapiens
agaataagtaaaatc

SEQ ID NO: 28066 - DNA, 15 bp, Homo sapiens
aagaataagtaaaat

SEQ ID NO: 28067 - DNA, 15 bp, Homo sapiens
aaagaataagtaaaa

SEQ ID NO: 28068 - DNA, 15 bp, Homo sapiens
gaaagaataagtaaa

SEQ ID NO: 28069 - DNA, 15 bp, Homo sapiens
tgaaagaataagtaa

SEQ ID NO: 28070 - DNA, 15 bp, Homo sapiens
atgaaagaataagta

SEQ ID NO: 28071 - DNA, 15 bp, Homo sapiens
aatgaaagaataagt

SEQ ID NO: 28072 - DNA, 15 bp, Homo sapiens
taatgaaagaataag

SEQ ID NO: 28073 - DNA, 15 bp, Homo sapiens
gtaatgaaagaataa

SEQ ID NO: 28074 - DNA, 15 bp, Homo sapiens
agtaatgaaagaata

SEQ ID NO: 28075 - DNA, 15 bp, Homo sapiens
gagtaatgaaagaat

SEQ ID NO: 28076 - DNA, 15 bp, Homo sapiens
agagtaatgaaagaa

SEQ ID NO: 28077 - DNA, 15 bp, Homo sapiens
gagagtaatgaaaga

SEQ ID NO: 28078 - DNA, 15 bp, Homo sapiens
tgagagtaatgaaag

SEQ ID NO: 28079 - DNA, 15 bp, Homo sapiens
atgagagtaatgaaa

SEQ ID NO: 28080 - DNA, 15 bp, Homo sapiens
tatgagagtaatgaa

SEQ ID NO: 28081 - DNA, 15 bp, Homo sapiens
gtatgagagtaatga

SEQ ID NO: 28082 - DNA, 15 bp, Homo sapiens
agtatgagagtaatg

SEQ ID NO: 28083 - DNA, 15 bp, Homo sapiens
cagtatgagagtaat

SEQ ID NO: 28084 - DNA, 15 bp, Homo sapiens
acagtatgagagtaa

SEQ ID NO: 28085 - DNA, 15 bp, Homo sapiens
tacagtatgagagta

SEQ ID NO: 28086 - DNA, 15 bp, Homo sapiens
ttacagtatgagagt

SEQ ID NO: 28087 - DNA, 15 bp, Homo sapiens
attacagtatgagag

SEQ ID NO: 28088 - DNA, 15 bp, Homo sapiens
aattacagtatgaga

SEQ ID NO: 28089 - DNA, 15 bp, Homo sapiens
taattacagtatgag

SEQ ID NO: 28090 - DNA, 15 bp, Homo sapiens
ttaattacagtatga

SEQ ID NO: 28091 - DNA, 15 bp, Homo sapiens
tttaattacagtatg

SEQ ID NO: 28092 - DNA, 15 bp, Homo sapiens
ttttaattacagtat

SEQ ID NO: 28093 - DNA, 15 bp, Homo sapiens
gttttaattacagta

SEQ ID NO: 28094 - DNA, 15 bp, Homo sapiens
agttttaattacagt

SEQ ID NO: 28095 - DNA, 15 bp, Homo sapiens
aagttttaattacag

SEQ ID NO: 28096 - DNA, 15 bp, Homo sapiens
caagttttaattaca

SEQ ID NO: 28097 - DNA, 15 bp, Homo sapiens
gcaagttttaattac

SEQ ID NO: 28098 - DNA, 15 bp, Homo sapiens
tgcaagttttaatta

SEQ ID NO: 28099 - DNA, 15 bp, Homo sapiens
ttgcaagttttaatt

SEQ ID NO: 28100 - DNA, 15 bp, Homo sapiens
attgcaagttttaat

SEQ ID NO: 28101 - DNA, 15 bp, Homo sapiens
gattgcaagttttaa

SEQ ID NO: 28102 - DNA, 15 bp, Homo sapiens
agattgcaagtttta

SEQ ID NO: 28103 - DNA, 15 bp, Homo sapiens
cagattgcaagtttt

SEQ ID NO: 28104 - DNA, 15 bp, Homo sapiens
tcagattgcaagttt

SEQ ID NO: 28105 - DNA, 15 bp, Homo sapiens
ctcagattgcaagtt

SEQ ID NO: 28106 - DNA, 15 bp, Homo sapiens
tctcagattgcaagt

SEQ ID NO: 28107 - DNA, 15 bp, Homo sapiens
ctctcagattgcaag

SEQ ID NO: 28108 - DNA, 15 bp, Homo sapiens
tctctcagattgcaa

SEQ ID NO: 28109 - DNA, 15 bp, Homo sapiens
gtctctcagattgca

SEQ ID NO: 28110 - DNA, 15 bp, Homo sapiens
agtctctcagattgc

SEQ ID NO: 28111 - DNA, 15 bp, Homo sapiens
cagtctctcagattg

SEQ ID NO: 28112 - DNA, 15 bp, Homo sapiens
acagtctctcagatt

SEQ ID NO: 28113 - DNA, 15 bp, Homo sapiens
aacagtctctcagat

SEQ ID NO: 28114 - DNA, 15 bp, Homo sapiens
caacagtctctcaga

SEQ ID NO: 28115 - DNA, 15 bp, Homo sapiens
tcaacagtctctcag

SEQ ID NO: 28116 - DNA, 15 bp, Homo sapiens
ttcaacagtctctca

SEQ ID NO: 28117 - DNA, 15 bp, Homo sapiens
tttcaacagtctctc

SEQ ID NO: 28118 - DNA, 15 bp, Homo sapiens
ttttcaacagtctct

SEQ ID NO: 28119 - DNA, 15 bp, Homo sapiens
tttttcaacagtctc

SEQ ID NO: 28120 - DNA, 15 bp, Homo sapiens
ctttttcaacagtct

SEQ ID NO: 28121 - DNA, 15 bp, Homo sapiens
cctttttcaacagtc

SEQ ID NO: 28122 - DNA, 15 bp, Homo sapiens
acctttttcaacagt

SEQ ID NO: 28123 - DNA, 15 bp, Homo sapiens
cacctttttcaacag

SEQ ID NO: 28124 - DNA, 15 bp, Homo sapiens
tcacctttttcaaca

SEQ ID NO: 28125 - DNA, 15 bp, Homo sapiens
atcacctttttcaac

SEQ ID NO: 28126 - DNA, 15 bp, Homo sapiens
gatcacctttttcaa

SEQ ID NO: 28127 - DNA, 15 bp, Homo sapiens
cgatcacctttttca

SEQ ID NO: 28128 - DNA, 15 bp, Homo sapiens
acgatcacctttttc

SEQ ID NO: 28129 - DNA, 15 bp, Homo sapiens
aacgatcaccttttt

SEQ ID NO: 28130 - DNA, 15 bp, Homo sapiens
caacgatcacctttt

SEQ ID NO: 28131 - DNA, 15 bp, Homo sapiens
ccaacgatcaccttt

SEQ ID NO: 28132 - DNA, 15 bp, Homo sapiens
gccaacgatcacctt

SEQ ID NO: 28133 - DNA, 15 bp, Homo sapiens
agccaacgatcacct

SEQ ID NO: 28134 - DNA, 15 bp, Homo sapiens
aagccaacgatcacc

SEQ ID NO: 28135 - DNA, 15 bp, Homo sapiens
aaagccaacgatcac

SEQ ID NO: 28136 - DNA, 15 bp, Homo sapiens
aaaagccaacgatca

SEQ ID NO: 28137 - DNA, 15 bp, Homo sapiens
gaaaagccaacgatc

SEQ ID NO: 28138 - DNA, 15 bp, Homo sapiens
tgaaaagccaacgat

SEQ ID NO: 28139 - DNA, 15 bp, Homo sapiens
ttgaaaagccaacga

SEQ ID NO: 28140 - DNA, 15 bp, Homo sapiens
gttgaaaagccaacg

SEQ ID NO: 28141 - DNA, 15 bp, Homo sapiens
tgttgaaaagccaac

SEQ ID NO: 28142 - DNA, 15 bp, Homo sapiens
ctgttgaaaagccaa

SEQ ID NO: 28143 - DNA, 15 bp, Homo sapiens
cctgttgaaaagcca

SEQ ID NO: 28144 - DNA, 15 bp, Homo sapiens
ccctgttgaaaagcc

SEQ ID NO: 28145 - DNA, 15 bp, Homo sapiens
tccctgttgaaaagc

SEQ ID NO: 28146 - DNA, 15 bp, Homo sapiens
ctccctgttgaaaag

SEQ ID NO: 28147 - DNA, 15 bp, Homo sapiens
actccctgttgaaaa

SEQ ID NO: 28148 - DNA, 15 bp, Homo sapiens
tactccctgttgaaa

SEQ ID NO: 28149 - DNA, 15 bp, Homo sapiens
ttactccctgttgaa

SEQ ID NO: 28150 - DNA, 15 bp, Homo sapiens
cttactccctgttga

SEQ ID NO: 28151 - DNA, 15 bp, Homo sapiens
ccttactccctgttg

SEQ ID NO: 28152 - DNA, 15 bp, Homo sapiens
accttactccctgtt

SEQ ID NO: 28153 - DNA, 15 bp, Homo sapiens
gaccttactccctgt

SEQ ID NO: 28154 - DNA, 15 bp, Homo sapiens
agaccttactccctg

SEQ ID NO: 28155 - DNA, 15 bp, Homo sapiens
cagaccttactccct

SEQ ID NO: 28156 - DNA, 15 bp, Homo sapiens
ccagaccttactccc

SEQ ID NO: 28157 - DNA, 15 bp, Homo sapiens
accagaccttactcc

SEQ ID NO: 28158 - DNA, 15 bp, Homo sapiens
aaccagaccttactc

SEQ ID NO: 28159 - DNA, 15 bp, Homo sapiens
aaaccagaccttact

SEQ ID NO: 28160 - DNA, 15 bp, Homo sapiens
taaaccagaccttac

SEQ ID NO: 28161 - DNA, 15 bp, Homo sapiens
ttaaaccagacctta

SEQ ID NO: 28162 - DNA, 15 bp, Homo sapiens
tttaaaccagacctt

SEQ ID NO: 28163 - DNA, 15 bp, Homo sapiens
ttttaaaccagacct

SEQ ID NO: 28164 - DNA, 15 bp, Homo sapiens
tttttaaaccagacc

SEQ ID NO: 28165 - DNA, 15 bp, Homo sapiens
ttttttaaaccagac

SEQ ID NO: 28166 - DNA, 15 bp, Homo sapiens
tttttttaaaccaga

SEQ ID NO: 28167 - DNA, 15 bp, Homo sapiens
ttttttttaaaccag

SEQ ID NO: 28168 - DNA, 15 bp, Homo sapiens
tttttttttaaacca

SEQ ID NO: 28169 - DNA, 15 bp, Homo sapiens
atttttttttaaacc

SEQ ID NO: 28170 - DNA, 15 bp, Homo sapiens
aatttttttttaaac

SEQ ID NO: 28171 - DNA, 15 bp, Homo sapiens
taatttttttttaaa

SEQ ID NO: 28172 - DNA, 15 bp, Homo sapiens
ctaatttttttttaa

SEQ ID NO: 28173 - DNA, 15 bp, Homo sapiens
actaattttttttta

SEQ ID NO: 28174 - DNA, 15 bp, Homo sapiens
tactaattttttttt

SEQ ID NO: 28175 - DNA, 15 bp, Homo sapiens
ttactaatttttttt

SEQ ID NO: 28176 - DNA, 15 bp, Homo sapiens
cttactaattttttt

SEQ ID NO: 28177 - DNA, 15 bp, Homo sapiens
gcttactaatttttt

SEQ ID NO: 28178 - DNA, 15 bp, Homo sapiens
tgcttactaattttt

SEQ ID NO: 28179 - DNA, 15 bp, Homo sapiens
atgcttactaatttt

SEQ ID NO: 28180 - DNA, 15 bp, Homo sapiens
aatgcttactaattt

SEQ ID NO: 28181 - DNA, 15 bp, Homo sapiens
aaatgcttactaatt

SEQ ID NO: 28182 - DNA, 15 bp, Homo sapiens
caaatgcttactaat

SEQ ID NO: 28183 - DNA, 15 bp, Homo sapiens
ccaaatgcttactaa

SEQ ID NO: 28184 - DNA, 15 bp, Homo sapiens
gccaaatgcttacta

SEQ ID NO: 28185 - DNA, 15 bp, Homo sapiens
ggccaaatgcttact

SEQ ID NO: 28186 - DNA, 15 bp, Homo sapiens
tggccaaatgcttac

SEQ ID NO: 28187 - DNA, 15 bp, Homo sapiens
ttggccaaatgctta

SEQ ID NO: 28188 - DNA, 15 bp, Homo sapiens
cttggccaaatgctt

SEQ ID NO: 28189 - DNA, 15 bp, Homo sapiens
acttggccaaatgct

SEQ ID NO: 28190 - DNA, 15 bp, Homo sapiens
tacttggccaaatgc

SEQ ID NO: 28191 - DNA, 15 bp, Homo sapiens
ctacttggccaaatg

SEQ ID NO: 28192 - DNA, 15 bp, Homo sapiens
tctacttggccaaat

SEQ ID NO: 28193 - DNA, 15 bp, Homo sapiens
atctacttggccaaa

SEQ ID NO: 28194 - DNA, 15 bp, Homo sapiens
aatctacttggccaa

SEQ ID NO: 28195 - DNA, 15 bp, Homo sapiens
taatctacttggcca

SEQ ID NO: 28196 - DNA, 15 bp, Homo sapiens
ttaatctacttggcc

SEQ ID NO: 28197 - DNA, 15 bp, Homo sapiens
gttaatctacttggc

SEQ ID NO: 28198 - DNA, 15 bp, Homo sapiens
tgttaatctacttgg

SEQ ID NO: 28199 - DNA, 15 bp, Homo sapiens
ttgttaatctacttg

SEQ ID NO: 28200 - DNA, 15 bp, Homo sapiens
gttgttaatctactt

SEQ ID NO: 28201 - DNA, 15 bp, Homo sapiens
tgttgttaatctact

SEQ ID NO: 28202 - DNA, 15 bp, Homo sapiens
atgttgttaatctac

SEQ ID NO: 28203 - DNA, 15 bp, Homo sapiens
aatgttgttaatcta

SEQ ID NO: 28204 - DNA, 15 bp, Homo sapiens
gaatgttgttaatct

SEQ ID NO: 28205 - DNA, 15 bp, Homo sapiens
tgaatgttgttaatc

SEQ ID NO: 28206 - DNA, 15 bp, Homo sapiens
ctgaatgttgttaat

SEQ ID NO: 28207 - DNA, 15 bp, Homo sapiens
actgaatgttgttaa

SEQ ID NO: 28208 - DNA, 15 bp, Homo sapiens
aactgaatgttgtta

SEQ ID NO: 28209 - DNA, 15 bp, Homo sapiens
aaactgaatgttgtt

SEQ ID NO: 28210 - DNA, 15 bp, Homo sapiens
aaaactgaatgttgt

SEQ ID NO: 28211 - DNA, 15 bp, Homo sapiens
aaaaactgaatgttg

SEQ ID NO: 28212 - DNA, 15 bp, Homo sapiens
gaaaaactgaatgtt

SEQ ID NO: 28213 - DNA, 15 bp, Homo sapiens
agaaaaactgaatgt

SEQ ID NO: 28214 - DNA, 15 bp, Homo sapiens
aagaaaaactgaatg

SEQ ID NO: 28215 - DNA, 15 bp, Homo sapiens
aaagaaaaactgaat

SEQ ID NO: 28216 - DNA, 15 bp, Homo sapiens
taaagaaaaactgaa

SEQ ID NO: 28217 - DNA, 15 bp, Homo sapiens
gtaaagaaaaactga

SEQ ID NO: 28218 - DNA, 15 bp, Homo sapiens
agtaaagaaaaactg

SEQ ID NO: 28219 - DNA, 15 bp, Homo sapiens
cagtaaagaaaaact

SEQ ID NO: 28220 - DNA, 15 bp, Homo sapiens
acagtaaagaaaaac

SEQ ID NO: 28221 - DNA, 15 bp, Homo sapiens
gacagtaaagaaaaa

SEQ ID NO: 28222 - DNA, 15 bp, Homo sapiens
ggacagtaaagaaaa

SEQ ID NO: 28223 - DNA, 15 bp, Homo sapiens
aggacagtaaagaaa

SEQ ID NO: 28224 - DNA, 15 bp, Homo sapiens
aaggacagtaaagaa

SEQ ID NO: 28225 - DNA, 15 bp, Homo sapiens
taaggacagtaaaga

SEQ ID NO: 28226 - DNA, 15 bp, Homo sapiens
ataaggacagtaaag

SEQ ID NO: 28227 - DNA, 15 bp, Homo sapiens
cataaggacagtaaa

SEQ ID NO: 28228 - DNA, 15 bp, Homo sapiens
gcataaggacagtaa

SEQ ID NO: 28229 - DNA, 15 bp, Homo sapiens
agcataaggacagta

SEQ ID NO: 28230 - DNA, 15 bp, Homo sapiens
aagcataaggacagt

SEQ ID NO: 28231 - DNA, 15 bp, Homo sapiens
aaagcataaggacag

SEQ ID NO: 28232 - DNA, 15 bp, Homo sapiens
aaaagcataaggaca

SEQ ID NO: 28233 - DNA, 15 bp, Homo sapiens
taaaagcataaggac

SEQ ID NO: 28234 - DNA, 15 bp, Homo sapiens
gtaaaagcataagga

SEQ ID NO: 28235 - DNA, 15 bp, Homo sapiens
agtaaaagcataagg

SEQ ID NO: 28236 - DNA, 15 bp, Homo sapiens
tagtaaaagcataag

SEQ ID NO: 28237 - DNA, 15 bp, Homo sapiens
atagtaaaagcataa

SEQ ID NO: 28238 - DNA, 15 bp, Homo sapiens
aatagtaaaagcata

SEQ ID NO: 28239 - DNA, 15 bp, Homo sapiens
aaatagtaaaagcat

SEQ ID NO: 28240 - DNA, 15 bp, Homo sapiens
aaaatagtaaaagca

SEQ ID NO: 28241 - DNA, 15 bp, Homo sapiens
aaaaatagtaaaagc

SEQ ID NO: 28242 - DNA, 15 bp, Homo sapiens
taaaaatagtaaaag

SEQ ID NO: 28243 - DNA, 15 bp, Homo sapiens
ttaaaaatagtaaaa

SEQ ID NO: 28244 - DNA, 15 bp, Homo sapiens
gttaaaaatagtaaa

SEQ ID NO: 28245 - DNA, 15 bp, Homo sapiens
tgttaaaaatagtaa

SEQ ID NO: 28246 - DNA, 15 bp, Homo sapiens
atgttaaaaatagta

SEQ ID NO: 28247 - DNA, 15 bp, Homo sapiens
tatgttaaaaatagt

SEQ ID NO: 28248 - DNA, 15 bp, Homo sapiens
atatgttaaaaatag

SEQ ID NO: 28249 - DNA, 15 bp, Homo sapiens
tatatgttaaaaata

SEQ ID NO: 28250 - DNA, 15 bp, Homo sapiens
atatatgttaaaaat

SEQ ID NO: 28251 - DNA, 15 bp, Homo sapiens
gatatatgttaaaaa

SEQ ID NO: 28252 - DNA, 15 bp, Homo sapiens
agatatatgttaaaa

SEQ ID NO: 28253 - DNA, 15 bp, Homo sapiens
aagatatatgttaaa

SEQ ID NO: 28254 - DNA, 15 bp, Homo sapiens
aaagatatatgttaa

SEQ ID NO: 28255 - DNA, 15 bp, Homo sapiens
aaaagatatatgtta

SEQ ID NO: 28256 - DNA, 15 bp, Homo sapiens
aaaaagatatatgtt

SEQ ID NO: 28257 - DNA, 15 bp, Homo sapiens
caaaaagatatatgt

SEQ ID NO: 28258 - DNA, 15 bp, Homo sapiens
tcaaaaagatatatg

SEQ ID NO: 28259 - DNA, 15 bp, Homo sapiens
ttcaaaaagatatat

SEQ ID NO: 28260 - DNA, 15 bp, Homo sapiens
cttcaaaaagatata

SEQ ID NO: 28261 - DNA, 15 bp, Homo sapiens
tcttcaaaaagatat

SEQ ID NO: 28262 - DNA, 15 bp, Homo sapiens
ttcttcaaaaagata

SEQ ID NO: 28263 - DNA, 15 bp, Homo sapiens
attcttcaaaaagat

SEQ ID NO: 28264 - DNA, 15 bp, Homo sapiens
tattcttcaaaaaga

SEQ ID NO: 28265 - DNA, 15 bp, Homo sapiens
ctattcttcaaaaag

SEQ ID NO: 28266 - DNA, 15 bp, Homo sapiens
actattcttcaaaaa

SEQ ID NO: 28267 - DNA, 15 bp, Homo sapiens
aactattcttcaaaa

SEQ ID NO: 28268 - DNA, 15 bp, Homo sapiens
aaactattcttcaaa

SEQ ID NO: 28269 - DNA, 15 bp, Homo sapiens
caaactattcttcaa

SEQ ID NO: 28270 - DNA, 15 bp, Homo sapiens
tcaaactattcttca

SEQ ID NO: 28271 - DNA, 15 bp, Homo sapiens
ctcaaactattcttc

SEQ ID NO: 28272 - DNA, 15 bp, Homo sapiens
tctcaaactattctt

SEQ ID NO: 28273 - DNA, 15 bp, Homo sapiens
ttctcaaactattct

SEQ ID NO: 28274 - DNA, 15 bp, Homo sapiens
attctcaaactattc

SEQ ID NO: 28275 - DNA, 15 bp, Homo sapiens
aattctcaaactatt

SEQ ID NO: 28276 - DNA, 15 bp, Homo sapiens
taattctcaaactat

SEQ ID NO: 28277 - DNA, 15 bp, Homo sapiens
ataattctcaaacta

SEQ ID NO: 28278 - DNA, 15 bp, Homo sapiens
cataattctcaaact

SEQ ID NO: 28279 - DNA, 15 bp, Homo sapiens
acataattctcaaac

SEQ ID NO: 28280 - DNA, 15 bp, Homo sapiens
tacataattctcaaa

SEQ ID NO: 28281 - DNA, 15 bp, Homo sapiens
atacataattctcaa

SEQ ID NO: 28282 - DNA, 15 bp, Homo sapiens
catacataattctca

SEQ ID NO: 28283 - DNA, 15 bp, Homo sapiens
gcatacataattctc

SEQ ID NO: 28284 - DNA, 15 bp, Homo sapiens
agcatacataattct

SEQ ID NO: 28285 - DNA, 15 bp, Homo sapiens
aagcatacataattc

SEQ ID NO: 28286 - DNA, 15 bp, Homo sapiens
taagcatacataatt

SEQ ID NO: 28287 - DNA, 15 bp, Homo sapiens
ttaagcatacataat

SEQ ID NO: 28288 - DNA, 15 bp, Homo sapiens
gttaagcatacataa

SEQ ID NO: 28289 - DNA, 15 bp, Homo sapiens
agttaagcatacata

SEQ ID NO: 28290 - DNA, 15 bp, Homo sapiens
tagttaagcatacat

SEQ ID NO: 28291 - DNA, 15 bp, Homo sapiens
atagttaagcataca

SEQ ID NO: 28292 - DNA, 15 bp, Homo sapiens
catagttaagcatac

SEQ ID NO: 28293 - DNA, 15 bp, Homo sapiens
tcatagttaagcata

SEQ ID NO: 28294 - DNA, 15 bp, Homo sapiens
ctcatagttaagcat

SEQ ID NO: 28295 - DNA, 15 bp, Homo sapiens
tctcatagttaagca

SEQ ID NO: 28296 - DNA, 15 bp, Homo sapiens
atctcatagttaagc

SEQ ID NO: 28297 - DNA, 15 bp, Homo sapiens
tatctcatagttaag

SEQ ID NO: 28298 - DNA, 15 bp, Homo sapiens
gtatctcatagttaa

SEQ ID NO: 28299 - DNA, 15 bp, Homo sapiens
tgtatctcatagtta

SEQ ID NO: 28300 - DNA, 15 bp, Homo sapiens
ctgtatctcatagtt

SEQ ID NO: 28301 - DNA, 15 bp, Homo sapiens
tctgtatctcatagt

SEQ ID NO: 28302 - DNA, 15 bp, Homo sapiens
atctgtatctcatag

SEQ ID NO: 28303 - DNA, 15 bp, Homo sapiens
tatctgtatctcata

SEQ ID NO: 28304 - DNA, 15 bp, Homo sapiens
gtatctgtatctcat

SEQ ID NO: 28305 - DNA, 15 bp, Homo sapiens
agtatctgtatctca

SEQ ID NO: 28306 - DNA, 15 bp, Homo sapiens
tagtatctgtatctc

SEQ ID NO: 28307 - DNA, 15 bp, Homo sapiens
atagtatctgtatct

SEQ ID NO: 28308 - DNA, 15 bp, Homo sapiens
aatagtatctgtatc

SEQ ID NO: 28309 - DNA, 15 bp, Homo sapiens
caatagtatctgtat

SEQ ID NO: 28310 - DNA, 15 bp, Homo sapiens
tcaatagtatctgta

SEQ ID NO: 28311 - DNA, 15 bp, Homo sapiens
ttcaatagtatctgt

SEQ ID NO: 28312 - DNA, 15 bp, Homo sapiens
tttcaatagtatctg

SEQ ID NO: 28313 - DNA, 15 bp, Homo sapiens
gtttcaatagtatct

SEQ ID NO: 28314 - DNA, 15 bp, Homo sapiens
agtttcaatagtatc

SEQ ID NO: 28315 - DNA, 15 bp, Homo sapiens
tagtttcaatagtat

SEQ ID NO: 28316 - DNA, 15 bp, Homo sapiens
ctagtttcaatagta

SEQ ID NO: 28317 - DNA, 15 bp, Homo sapiens
actagtttcaatagt

SEQ ID NO: 28318 - DNA, 15 bp, Homo sapiens
gactagtttcaatag

SEQ ID NO: 28319 - DNA, 15 bp, Homo sapiens
tgactagtttcaata

SEQ ID NO: 28320 - DNA, 15 bp, Homo sapiens
ctgactagtttcaat

SEQ ID NO: 28321 - DNA, 15 bp, Homo sapiens
actgactagtttcaa

SEQ ID NO: 28322 - DNA, 15 bp, Homo sapiens
aactgactagtttca

SEQ ID NO: 28323 - DNA, 15 bp, Homo sapiens
caactgactagtttc

SEQ ID NO: 28324 - DNA, 15 bp, Homo sapiens
acaactgactagttt

SEQ ID NO: 28325 - DNA, 15 bp, Homo sapiens
aacaactgactagtt

SEQ ID NO: 28326 - DNA, 15 bp, Homo sapiens
aaacaactgactagt

SEQ ID NO: 28327 - DNA, 15 bp, Homo sapiens
taaacaactgactag

SEQ ID NO: 28328 - DNA, 15 bp, Homo sapiens
ataaacaactgacta

SEQ ID NO: 28329 - DNA, 15 bp, Homo sapiens
tataaacaactgact

SEQ ID NO: 28330 - DNA, 15 bp, Homo sapiens
ctataaacaactgac

SEQ ID NO: 28331 - DNA, 15 bp, Homo sapiens
cctataaacaactga

SEQ ID NO: 28332 - DNA, 15 bp, Homo sapiens
acctataaacaactg

SEQ ID NO: 28333 - DNA, 15 bp, Homo sapiens
tacctataaacaact

SEQ ID NO: 28334 - DNA, 15 bp, Homo sapiens
gtacctataaacaac

SEQ ID NO: 28335 - DNA, 15 bp, Homo sapiens
agtacctataaacaa

SEQ ID NO: 28336 - DNA, 15 bp, Homo sapiens
aagtacctataaaca

SEQ ID NO: 28337 - DNA, 15 bp, Homo sapiens
caagtacctataaac

SEQ ID NO: 28338 - DNA, 15 bp, Homo sapiens
acaagtacctataaa

SEQ ID NO: 28339 - DNA, 15 bp, Homo sapiens
tacaagtacctataa

SEQ ID NO: 28340 - DNA, 15 bp, Homo sapiens
ttacaagtacctata

SEQ ID NO: 28341 - DNA, 15 bp, Homo sapiens
tttacaagtacctat

SEQ ID NO: 28342 - DNA, 15 bp, Homo sapiens
ttttacaagtaccta

SEQ ID NO: 28343 - DNA, 15 bp, Homo sapiens
attttacaagtacct

SEQ ID NO: 28344 - DNA, 15 bp, Homo sapiens
aattttacaagtacc

SEQ ID NO: 28345 - DNA, 15 bp, Homo sapiens
taattttacaagtac

SEQ ID NO: 28346 - DNA, 15 bp, Homo sapiens
ttaattttacaagta

SEQ ID NO: 28347 - DNA, 15 bp, Homo sapiens
tttaattttacaagt

SEQ ID NO: 28348 - DNA, 15 bp, Homo sapiens
ttttaattttacaag

SEQ ID NO: 28349 - DNA, 15 bp, Homo sapiens
tttttaattttacaa

SEQ ID NO: 28350 - DNA, 15 bp, Homo sapiens
atttttaattttaca

SEQ ID NO: 28351 - DNA, 15 bp, Homo sapiens
tatttttaattttac

SEQ ID NO: 28352 - DNA, 15 bp, Homo sapiens
atatttttaatttta

SEQ ID NO: 28353 - DNA, 15 bp, Homo sapiens
tatatttttaatttt

SEQ ID NO: 28354 - DNA, 15 bp, Homo sapiens
atatatttttaattt

SEQ ID NO: 28355 - DNA, 15 bp, Homo sapiens
aatatatttttaatt

SEQ ID NO: 28356 - DNA, 15 bp, Homo sapiens
gaatatatttttaat

SEQ ID NO: 28357 - DNA, 15 bp, Homo sapiens
ggaatatatttttaa

SEQ ID NO: 28358 - DNA, 15 bp, Homo sapiens
tggaatatattttta

SEQ ID NO: 28359 - DNA, 15 bp, Homo sapiens
ttggaatatattttt

SEQ ID NO: 28360 - DNA, 15 bp, Homo sapiens
attggaatatatttt

SEQ ID NO: 28361 - DNA, 15 bp, Homo sapiens
tattggaatatattt

SEQ ID NO: 28362 - DNA, 15 bp, Homo sapiens
ctattggaatatatt

SEQ ID NO: 28363 - DNA, 15 bp, Homo sapiens
gctattggaatatat

SEQ ID NO: 28364 - DNA, 15 bp, Homo sapiens
tgctattggaatata

SEQ ID NO: 28365 - DNA, 15 bp, Homo sapiens
atgctattggaatat

SEQ ID NO: 28366 - DNA, 15 bp, Homo sapiens
catgctattggaata

SEQ ID NO: 28367 - DNA, 15 bp, Homo sapiens
gcatgctattggaat

SEQ ID NO: 28368 - DNA, 15 bp, Homo sapiens
tgcatgctattggaa

SEQ ID NO: 28369 - DNA, 15 bp, Homo sapiens
ctgcatgctattgga

SEQ ID NO: 28370 - DNA, 15 bp, Homo sapiens
tctgcatgctattgg

SEQ ID NO: 28371 - DNA, 15 bp, Homo sapiens
atctgcatgctattg

SEQ ID NO: 28372 - DNA, 15 bp, Homo sapiens
aatctgcatgctatt

SEQ ID NO: 28373 - DNA, 15 bp, Homo sapiens
aaatctgcatgctat

SEQ ID NO: 28374 - DNA, 15 bp, Homo sapiens
aaaatctgcatgcta

SEQ ID NO: 28375 - DNA, 15 bp, Homo sapiens
aaaaatctgcatgct

SEQ ID NO: 28376 - DNA, 15 bp, Homo sapiens
gaaaaatctgcatgc

SEQ ID NO: 28377 - DNA, 15 bp, Homo sapiens
tgaaaaatctgcatg

SEQ ID NO: 28378 - DNA, 15 bp, Homo sapiens
atgaaaaatctgcat

SEQ ID NO: 28379 - DNA, 15 bp, Homo sapiens
tatgaaaaatctgca

SEQ ID NO: 28380 - DNA, 15 bp, Homo sapiens
ctatgaaaaatctgc

SEQ ID NO: 28381 - DNA, 15 bp, Homo sapiens
tctatgaaaaatctg

SEQ ID NO: 28382 - DNA, 15 bp, Homo sapiens
ctctatgaaaaatct

SEQ ID NO: 28383 - DNA, 15 bp, Homo sapiens
cctctatgaaaaatc

SEQ ID NO: 28384 - DNA, 15 bp, Homo sapiens
tcctctatgaaaaat

SEQ ID NO: 28385 - DNA, 15 bp, Homo sapiens
ttcctctatgaaaaa

SEQ ID NO: 28386 - DNA, 15 bp, Homo sapiens
tttcctctatgaaaa

SEQ ID NO: 28387 - DNA, 15 bp, Homo sapiens
atttcctctatgaaa

SEQ ID NO: 28388 - DNA, 15 bp, Homo sapiens
aatttcctctatgaa

SEQ ID NO: 28389 - DNA, 15 bp, Homo sapiens
aaatttcctctatga

SEQ ID NO: 28390 - DNA, 15 bp, Homo sapiens
caaatttcctctatg

SEQ ID NO: 28391 - DNA, 15 bp, Homo sapiens
tcaaatttcctctat

SEQ ID NO: 28392 - DNA, 15 bp, Homo sapiens
ttcaaatttcctcta

SEQ ID NO: 28393 - DNA, 15 bp, Homo sapiens
tttcaaatttcctct

SEQ ID NO: 28394 - DNA, 15 bp, Homo sapiens
ctttcaaatttcctc

SEQ ID NO: 28395 - DNA, 15 bp, Homo sapiens
gctttcaaatttcct

SEQ ID NO: 28396 - DNA, 15 bp, Homo sapiens
tgctttcaaatttcc

SEQ ID NO: 28397 - DNA, 15 bp, Homo sapiens
atgctttcaaatttc

SEQ ID NO: 28398 - DNA, 15 bp, Homo sapiens
catgctttcaaattt

SEQ ID NO: 28399 - DNA, 15 bp, Homo sapiens
ccatgctttcaaatt

SEQ ID NO: 28400 - DNA, 15 bp, Homo sapiens
tccatgctttcaaat

SEQ ID NO: 28401 - DNA, 15 bp, Homo sapiens
ttccatgctttcaaa

SEQ ID NO: 28402 - DNA, 15 bp, Homo sapiens
cttccatgctttcaa

SEQ ID NO: 28403 - DNA, 15 bp, Homo sapiens
gcttccatgctttca

SEQ ID NO: 28404 - DNA, 15 bp, Homo sapiens
tgcttccatgctttc

SEQ ID NO: 28405 - DNA, 15 bp, Homo sapiens
gtgcttccatgcttt

SEQ ID NO: 28406 - DNA, 15 bp, Homo sapiens
ggtgcttccatgctt

SEQ ID NO: 28407 - DNA, 15 bp, Homo sapiens
aggtgcttccatgct

SEQ ID NO: 28408 - DNA, 15 bp, Homo sapiens
caggtgcttccatgc

SEQ ID NO: 28409 - DNA, 15 bp, Homo sapiens
tcaggtgcttccatg

SEQ ID NO: 28410 - DNA, 15 bp, Homo sapiens
ttcaggtgcttccat

SEQ ID NO: 28411 - DNA, 15 bp, Homo sapiens
attcaggtgcttcca

SEQ ID NO: 28412 - DNA, 15 bp, Homo sapiens
aattcaggtgcttcc

SEQ ID NO: 28413 - DNA, 15 bp, Homo sapiens
aaattcaggtgcttc

SEQ ID NO: 28414 - DNA, 15 bp, Homo sapiens
taaattcaggtgctt

SEQ ID NO: 28415 - DNA, 15 bp, Homo sapiens
gtaaattcaggtgct

SEQ ID NO: 28416 - DNA, 15 bp, Homo sapiens
tgtaaattcaggtgc

SEQ ID NO: 28417 - DNA, 15 bp, Homo sapiens
ctgtaaattcaggtg

SEQ ID NO: 28418 - DNA, 15 bp, Homo sapiens
actgtaaattcaggt

SEQ ID NO: 28419 - DNA, 15 bp, Homo sapiens
tactgtaaattcagg

SEQ ID NO: 28420 - DNA, 15 bp, Homo sapiens
gtactgtaaattcag

SEQ ID NO: 28421 - DNA, 15 bp, Homo sapiens
agtactgtaaattca

SEQ ID NO: 28422 - DNA, 15 bp, Homo sapiens
gagtactgtaaattc

SEQ ID NO: 28423 - DNA, 15 bp, Homo sapiens
agagtactgtaaatt

SEQ ID NO: 28424 - DNA, 15 bp, Homo sapiens
cagagtactgtaaat

SEQ ID NO: 28425 - DNA, 15 bp, Homo sapiens
acagagtactgtaaa

SEQ ID NO: 28426 - DNA, 15 bp, Homo sapiens
tacagagtactgtaa

SEQ ID NO: 28427 - DNA, 15 bp, Homo sapiens
atacagagtactgta

SEQ ID NO: 28428 - DNA, 15 bp, Homo sapiens
aatacagagtactgt

SEQ ID NO: 28429 - DNA, 15 bp, Homo sapiens
taatacagagtactg

SEQ ID NO: 28430 - DNA, 15 bp, Homo sapiens
ctaatacagagtact

SEQ ID NO: 28431 - DNA, 15 bp, Homo sapiens
actaatacagagtac

SEQ ID NO: 28432 - DNA, 15 bp, Homo sapiens
cactaatacagagta

SEQ ID NO: 28433 - DNA, 15 bp, Homo sapiens
ccactaatacagagt

SEQ ID NO: 28434 - DNA, 15 bp, Homo sapiens
gccactaatacagag

SEQ ID NO: 28435 - DNA, 15 bp, Homo sapiens
tgccactaatacaga

SEQ ID NO: 28436 - DNA, 15 bp, Homo sapiens
atgccactaatacag

SEQ ID NO: 28437 - DNA, 15 bp, Homo sapiens
gatgccactaataca

SEQ ID NO: 28438 - DNA, 15 bp, Homo sapiens
tgatgccactaatac

SEQ ID NO: 28439 - DNA, 15 bp, Homo sapiens
gtgatgccactaata

SEQ ID NO: 28440 - DNA, 15 bp, Homo sapiens
tgtgatgccactaat

SEQ ID NO: 28441 - DNA, 15 bp, Homo sapiens
ttgtgatgccactaa

SEQ ID NO: 28442 - DNA, 15 bp, Homo sapiens
cttgtgatgccacta

SEQ ID NO: 28443 - DNA, 15 bp, Homo sapiens
acttgtgatgccact

SEQ ID NO: 28444 - DNA, 15 bp, Homo sapiens
aacttgtgatgccac

SEQ ID NO: 28445 - DNA, 15 bp, Homo sapiens
aaacttgtgatgcca

SEQ ID NO: 28446 - DNA, 15 bp, Homo sapiens
aaaacttgtgatgcc

SEQ ID NO: 28447 - DNA, 15 bp, Homo sapiens
aaaaacttgtgatgc

SEQ ID NO: 28448 - DNA, 15 bp, Homo sapiens
taaaaacttgtgatg

SEQ ID NO: 28449 - DNA, 15 bp, Homo sapiens
ttaaaaacttgtgat

SEQ ID NO: 28450 - DNA, 15 bp, Homo sapiens
cttaaaaacttgtga

SEQ ID NO: 28451 - DNA, 15 bp, Homo sapiens
gcttaaaaacttgtg

SEQ ID NO: 28452 - DNA, 15 bp, Homo sapiens
tgcttaaaaacttgt

SEQ ID NO: 28453 - DNA, 15 bp, Homo sapiens
ttgcttaaaaacttg

SEQ ID NO: 28454 - DNA, 15 bp, Homo sapiens
tttgcttaaaaactt

SEQ ID NO: 28455 - DNA, 15 bp, Homo sapiens
atttgcttaaaaact

SEQ ID NO: 28456 - DNA, 15 bp, Homo sapiens
catttgcttaaaaac

SEQ ID NO: 28457 - DNA, 15 bp, Homo sapiens
acatttgcttaaaaa

SEQ ID NO: 28458 - DNA, 15 bp, Homo sapiens
tacatttgcttaaaa

SEQ ID NO: 28459 - DNA, 15 bp, Homo sapiens
atacatttgcttaaa

SEQ ID NO: 28460 - DNA, 15 bp, Homo sapiens
aatacatttgcttaa

SEQ ID NO: 28461 - DNA, 15 bp, Homo sapiens
taatacatttgctta

SEQ ID NO: 28462 - DNA, 15 bp, Homo sapiens
ctaatacatttgctt

SEQ ID NO: 28463 - DNA, 15 bp, Homo sapiens
gctaatacatttgct

SEQ ID NO: 28464 - DNA, 15 bp, Homo sapiens
agctaatacatttgc

(The sequence listing continues in the following parts.)
